United States Patent Application Publication US 2025/0333448 A1 - sequence listing, part 4

SEQ ID NO: 66095 - protein, 19 aa, Artificial Sequence
  Description of Artificial Sequence: Synthetic peptide
  Seed: DPRMCSLMQGSTLPRRSGA
DPRMFSLVQVSTIPRRSGA

SEQ ID NO: 66096 - protein, 19 aa, Artificial Sequence
  Description of Artificial Sequence: Synthetic peptide
  Seed: DPRMCSLMQGSTLPRRSGA
DPRMFSLVQVSTNPRRSGA

SEQ ID NO: 66097 - protein, 19 aa, Artificial Sequence
  Description of Artificial Sequence: Synthetic peptide
  Seed: DPRMCSLMQGSTLPRRSGA
DPRMFSLVQVSTSPRRSGA

SEQ ID NO: 66098 - protein, 19 aa, Artificial Sequence
  Description of Artificial Sequence: Synthetic peptide
  Seed: DPRMCSLMQGSTLPRRSGA
DPRMFSLVQVSTTPRRSGA

SEQ ID NO: 66099 - protein, 19 aa, Artificial Sequence
  Description of Artificial Sequence: Synthetic peptide
  Seed: DPRMCSLMQGSTLPRRSGA
DPRMFSLVQVSTVPRRSGA

SEQ ID NO: 66100 - protein, 19 aa, Artificial Sequence
  Description of Artificial Sequence: Synthetic peptide
  Seed: DPRMCSLMQGSTLPRRSGA
DPRMISLAQASTAPRRSGA

SEQ ID NO: 66101 - protein, 19 aa, Artificial Sequence
  Description of Artificial Sequence: Synthetic peptide
  Seed: DPRMCSLMQGSTLPRRSGA
DPRMISLAQASTIPRRSGA

SEQ ID NO: 66102 - protein, 19 aa, Artificial Sequence
  Description of Artificial Sequence: Synthetic peptide
  Seed: DPRMCSLMQGSTLPRRSGA
DPRMISLAQASTLPRRSGA

SEQ ID NO: 66103 - protein, 19 aa, Artificial Sequence
  Description of Artificial Sequence: Synthetic peptide
  Seed: DPRMCSLMQGSTLPRRSGA
DPRMISLAQASTVPRRSGA

SEQ ID NO: 66104 - protein, 19 aa, Artificial Sequence
  Description of Artificial Sequence: Synthetic peptide
  Seed: DPRMCSLMQGSTLPRRSGA
DPRMISLAQGSTLPRRSGA

SEQ ID NO: 66105 - protein, 19 aa, Artificial Sequence
  Description of Artificial Sequence: Synthetic peptide
  Seed: DPRMCSLMQGSTLPRRSGA
DPRMISLAQGSTVPRRSGA

SEQ ID NO: 66106 - protein, 19 aa, Artificial Sequence
  Description of Artificial Sequence: Synthetic peptide
  Seed: DPRMCSLMQGSTLPRRSGA
DPRMISLIQASTAPRRSGA

SEQ ID NO: 66107 - protein, 19 aa, Artificial Sequence
  Description of Artificial Sequence: Synthetic peptide
  Seed: DPRMCSLMQGSTLPRRSGA
DPRMISLIQASTIPRRSGA

SEQ ID NO: 66108 - protein, 19 aa, Artificial Sequence
  Description of Artificial Sequence: Synthetic peptide
  Seed: DPRMCSLMQGSTLPRRSGA
DPRMISLIQASTLPRRSGA

SEQ ID NO: 66109 - protein, 19 aa, Artificial Sequence
  Description of Artificial Sequence: Synthetic peptide
  Seed: DPRMCSLMQGSTLPRRSGA
DPRMISLIQASTVPRRSGA

SEQ ID NO: 66110 - protein, 19 aa, Artificial Sequence
  Description of Artificial Sequence: Synthetic peptide
  Seed: DPRMCSLMQGSTLPRRSGA
DPRMISLIQGSTAPRRSGA

SEQ ID NO: 66111 - protein, 19 aa, Artificial Sequence
  Description of Artificial Sequence: Synthetic peptide
  Seed: DPRMCSLMQGSTLPRRSGA
DPRMISLIQGSTIPRRSGA

SEQ ID NO: 66112 - protein, 19 aa, Artificial Sequence
  Description of Artificial Sequence: Synthetic peptide
  Seed: DPRMCSLMQGSTLPRRSGA
DPRMISLIQGSTLPRRSGA

SEQ ID NO: 66113 - protein, 19 aa, Artificial Sequence
  Description of Artificial Sequence: Synthetic peptide
  Seed: DPRMCSLMQGSTLPRRSGA
DPRMISLIQGSTVPRRSGA

SEQ ID NO: 66114 - protein, 19 aa, Artificial Sequence
  Description of Artificial Sequence: Synthetic peptide
  Seed: DPRMCSLMQGSTLPRRSGA
DPRMISLIQSSTAPRRSGA

SEQ ID NO: 66115 - protein, 19 aa, Artificial Sequence
  Description of Artificial Sequence: Synthetic peptide
  Seed: DPRMCSLMQGSTLPRRSGA
DPRMISLIQSSTIPRRSGA

SEQ ID NO: 66116 - protein, 19 aa, Artificial Sequence
  Description of Artificial Sequence: Synthetic peptide
  Seed: DPRMCSLMQGSTLPRRSGA
DPRMISLIQSSTLPRRSGA

SEQ ID NO: 66117 - protein, 19 aa, Artificial Sequence
  Description of Artificial Sequence: Synthetic peptide
  Seed: DPRMCSLMQGSTLPRRSGA
DPRMISLIQSSTVPRRSGA

SEQ ID NO: 66118 - protein, 19 aa, Artificial Sequence
  Description of Artificial Sequence: Synthetic peptide
  Seed: DPRMCSLMQGSTLPRRSGA
DPRMISLLQASTAPRRSGA

SEQ ID NO: 66119 - protein, 19 aa, Artificial Sequence
  Description of Artificial Sequence: Synthetic peptide
  Seed: DPRMCSLMQGSTLPRRSGA
DPRMISLLQASTIPRRSGA

SEQ ID NO: 66120 - protein, 19 aa, Artificial Sequence
  Description of Artificial Sequence: Synthetic peptide
  Seed: DPRMCSLMQGSTLPRRSGA
DPRMISLLQASTLPRRSGA

SEQ ID NO: 66121 - protein, 19 aa, Artificial Sequence
  Description of Artificial Sequence: Synthetic peptide
  Seed: DPRMCSLMQGSTLPRRSGA
DPRMISLLQASTMPRRSGA

SEQ ID NO: 66122 - protein, 19 aa, Artificial Sequence
  Description of Artificial Sequence: Synthetic peptide
  Seed: DPRMCSLMQGSTLPRRSGA
DPRMISLLQASTNPRRSGA

SEQ ID NO: 66123 - protein, 19 aa, Artificial Sequence
  Description of Artificial Sequence: Synthetic peptide
  Seed: DPRMCSLMQGSTLPRRSGA
DPRMISLLQASTSPRRSGA

SEQ ID NO: 66124 - protein, 19 aa, Artificial Sequence
  Description of Artificial Sequence: Synthetic peptide
  Seed: DPRMCSLMQGSTLPRRSGA
DPRMISLLQASTTPRRSGA

SEQ ID NO: 66125 - protein, 19 aa, Artificial Sequence
  Description of Artificial Sequence: Synthetic peptide
  Seed: DPRMCSLMQGSTLPRRSGA
DPRMISLLQASTVPRRSGA

SEQ ID NO: 66126 - protein, 19 aa, Artificial Sequence
  Description of Artificial Sequence: Synthetic peptide
  Seed: DPRMCSLMQGSTLPRRSGA
DPRMISLLQGSTAPRRSGA

SEQ ID NO: 66127 - protein, 19 aa, Artificial Sequence
  Description of Artificial Sequence: Synthetic peptide
  Seed: DPRMCSLMQGSTLPRRSGA
DPRMISLLQGSTIPRRSGA

SEQ ID NO: 66128 - protein, 19 aa, Artificial Sequence
  Description of Artificial Sequence: Synthetic peptide
  Seed: DPRMCSLMQGSTLPRRSGA
DPRMISLLQGSTLPRRSGA

SEQ ID NO: 66129 - protein, 19 aa, Artificial Sequence
  Description of Artificial Sequence: Synthetic peptide
  Seed: DPRMCSLMQGSTLPRRSGA
DPRMISLLQGSTMPRRSGA

SEQ ID NO: 66130 - protein, 19 aa, Artificial Sequence
  Description of Artificial Sequence: Synthetic peptide
  Seed: DPRMCSLMQGSTLPRRSGA
DPRMISLLQGSTSPRRSGA

SEQ ID NO: 66131 - protein, 19 aa, Artificial Sequence
  Description of Artificial Sequence: Synthetic peptide
  Seed: DPRMCSLMQGSTLPRRSGA
DPRMISLLQGSTTPRRSGA

SEQ ID NO: 66132 - protein, 19 aa, Artificial Sequence
  Description of Artificial Sequence: Synthetic peptide
  Seed: DPRMCSLMQGSTLPRRSGA
DPRMISLLQGSTVPRRSGA

SEQ ID NO: 66133 - protein, 19 aa, Artificial Sequence
  Description of Artificial Sequence: Synthetic peptide
  Seed: DPRMCSLMQGSTLPRRSGA
DPRMISLLQNSTIPRRSGA

SEQ ID NO: 66134 - protein, 19 aa, Artificial Sequence
  Description of Artificial Sequence: Synthetic peptide
  Seed: DPRMCSLMQGSTLPRRSGA
DPRMISLLQNSTLPRRSGA

SEQ ID NO: 66135 - protein, 19 aa, Artificial Sequence
  Description of Artificial Sequence: Synthetic peptide
  Seed: DPRMCSLMQGSTLPRRSGA
DPRMISLLQNSTVPRRSGA

SEQ ID NO: 66136 - protein, 19 aa, Artificial Sequence
  Description of Artificial Sequence: Synthetic peptide
  Seed: DPRMCSLMQGSTLPRRSGA
DPRMISLLQPSTAPRRSGA

SEQ ID NO: 66137 - protein, 19 aa, Artificial Sequence
  Description of Artificial Sequence: Synthetic peptide
  Seed: DPRMCSLMQGSTLPRRSGA
DPRMISLLQPSTIPRRSGA

SEQ ID NO: 66138 - protein, 19 aa, Artificial Sequence
  Description of Artificial Sequence: Synthetic peptide
  Seed: DPRMCSLMQGSTLPRRSGA
DPRMISLLQPSTLPRRSGA

SEQ ID NO: 66139 - protein, 19 aa, Artificial Sequence
  Description of Artificial Sequence: Synthetic peptide
  Seed: DPRMCSLMQGSTLPRRSGA
DPRMISLLQPSTMPRRSGA

SEQ ID NO: 66140 - protein, 19 aa, Artificial Sequence
  Description of Artificial Sequence: Synthetic peptide
  Seed: DPRMCSLMQGSTLPRRSGA
DPRMISLLQPSTNPRRSGA

SEQ ID NO: 66141 - protein, 19 aa, Artificial Sequence
  Description of Artificial Sequence: Synthetic peptide
  Seed: DPRMCSLMQGSTLPRRSGA
DPRMISLLQPSTSPRRSGA

SEQ ID NO: 66142 - protein, 19 aa, Artificial Sequence
  Description of Artificial Sequence: Synthetic peptide
  Seed: DPRMCSLMQGSTLPRRSGA
DPRMISLLQPSTVPRRSGA

SEQ ID NO: 66143 - protein, 19 aa, Artificial Sequence
  Description of Artificial Sequence: Synthetic peptide
  Seed: DPRMCSLMQGSTLPRRSGA
DPRMISLLQSSTAPRRSGA

SEQ ID NO: 66144 - protein, 19 aa, Artificial Sequence
  Description of Artificial Sequence: Synthetic peptide
  Seed: DPRMCSLMQGSTLPRRSGA
DPRMISLLQSSTIPRRSGA

SEQ ID NO: 66145 - protein, 19 aa, Artificial Sequence
  Description of Artificial Sequence: Synthetic peptide
  Seed: DPRMCSLMQGSTLPRRSGA
DPRMISLLQSSTLPRRSGA

SEQ ID NO: 66146 - protein, 19 aa, Artificial Sequence
  Description of Artificial Sequence: Synthetic peptide
  Seed: DPRMCSLMQGSTLPRRSGA
DPRMISLLQSSTMPRRSGA

SEQ ID NO: 66147 - protein, 19 aa, Artificial Sequence
  Description of Artificial Sequence: Synthetic peptide
  Seed: DPRMCSLMQGSTLPRRSGA
DPRMISLLQSSTSPRRSGA

SEQ ID NO: 66148 - protein, 19 aa, Artificial Sequence
  Description of Artificial Sequence: Synthetic peptide
  Seed: DPRMCSLMQGSTLPRRSGA
DPRMISLLQSSTTPRRSGA

SEQ ID NO: 66149 - protein, 19 aa, Artificial Sequence
  Description of Artificial Sequence: Synthetic peptide
  Seed: DPRMCSLMQGSTLPRRSGA
DPRMISLLQSSTVPRRSGA

SEQ ID NO: 66150 - protein, 19 aa, Artificial Sequence
  Description of Artificial Sequence: Synthetic peptide
  Seed: DPRMCSLMQGSTLPRRSGA
DPRMISLLQTSTAPRRSGA

SEQ ID NO: 66151 - protein, 19 aa, Artificial Sequence
  Description of Artificial Sequence: Synthetic peptide
  Seed: DPRMCSLMQGSTLPRRSGA
DPRMISLLQTSTIPRRSGA

SEQ ID NO: 66152 - protein, 19 aa, Artificial Sequence
  Description of Artificial Sequence: Synthetic peptide
  Seed: DPRMCSLMQGSTLPRRSGA
DPRMISLLQTSTLPRRSGA

SEQ ID NO: 66153 - protein, 19 aa, Artificial Sequence
  Description of Artificial Sequence: Synthetic peptide
  Seed: DPRMCSLMQGSTLPRRSGA
DPRMISLLQTSTVPRRSGA

SEQ ID NO: 66154 - protein, 19 aa, Artificial Sequence
  Description of Artificial Sequence: Synthetic peptide
  Seed: DPRMCSLMQGSTLPRRSGA
DPRMISLLQVSTAPRRSGA

SEQ ID NO: 66155 - protein, 19 aa, Artificial Sequence
  Description of Artificial Sequence: Synthetic peptide
  Seed: DPRMCSLMQGSTLPRRSGA
DPRMISLLQVSTNPRRSGA

SEQ ID NO: 66156 - protein, 19 aa, Artificial Sequence
  Description of Artificial Sequence: Synthetic peptide
  Seed: DPRMCSLMQGSTLPRRSGA
DPRMISLLQVSTSPRRSGA

SEQ ID NO: 66157 - protein, 19 aa, Artificial Sequence
  Description of Artificial Sequence: Synthetic peptide
  Seed: DPRMCSLMQGSTLPRRSGA
DPRMISLMQASTAPRRSGA

SEQ ID NO: 66158 - protein, 19 aa, Artificial Sequence
  Description of Artificial Sequence: Synthetic peptide
  Seed: DPRMCSLMQGSTLPRRSGA
DPRMISLMQASTIPRRSGA

SEQ ID NO: 66159 - protein, 19 aa, Artificial Sequence
  Description of Artificial Sequence: Synthetic peptide
  Seed: DPRMCSLMQGSTLPRRSGA
DPRMISLMQASTLPRRSGA

SEQ ID NO: 66160 - protein, 19 aa, Artificial Sequence
  Description of Artificial Sequence: Synthetic peptide
  Seed: DPRMCSLMQGSTLPRRSGA
DPRMISLMQASTMPRRSGA

SEQ ID NO: 66161 - protein, 19 aa, Artificial Sequence
  Description of Artificial Sequence: Synthetic peptide
  Seed: DPRMCSLMQGSTLPRRSGA
DPRMISLMQASTNPRRSGA

SEQ ID NO: 66162 - protein, 19 aa, Artificial Sequence
  Description of Artificial Sequence: Synthetic peptide
  Seed: DPRMCSLMQGSTLPRRSGA
DPRMISLMQASTSPRRSGA

SEQ ID NO: 66163 - protein, 19 aa, Artificial Sequence
  Description of Artificial Sequence: Synthetic peptide
  Seed: DPRMCSLMQGSTLPRRSGA
DPRMISLMQASTTPRRSGA

SEQ ID NO: 66164 - protein, 19 aa, Artificial Sequence
  Description of Artificial Sequence: Synthetic peptide
  Seed: DPRMCSLMQGSTLPRRSGA
DPRMISLMQASTVPRRSGA

SEQ ID NO: 66165 - protein, 19 aa, Artificial Sequence
  Description of Artificial Sequence: Synthetic peptide
  Seed: DPRMCSLMQGSTLPRRSGA
DPRMISLMQGSTAPRRSGA

SEQ ID NO: 66166 - protein, 19 aa, Artificial Sequence
  Description of Artificial Sequence: Synthetic peptide
  Seed: DPRMCSLMQGSTLPRRSGA
DPRMISLMQGSTIPRRSGA

SEQ ID NO: 66167 - protein, 19 aa, Artificial Sequence
  Description of Artificial Sequence: Synthetic peptide
  Seed: DPRMCSLMQGSTLPRRSGA
DPRMISLMQGSTLPRRSGA

SEQ ID NO: 66168 - protein, 19 aa, Artificial Sequence
  Description of Artificial Sequence: Synthetic peptide
  Seed: DPRMCSLMQGSTLPRRSGA
DPRMISLMQGSTMPRRSGA

SEQ ID NO: 66169 - protein, 19 aa, Artificial Sequence
  Description of Artificial Sequence: Synthetic peptide
  Seed: DPRMCSLMQGSTLPRRSGA
DPRMISLMQGSTSPRRSGA

SEQ ID NO: 66170 - protein, 19 aa, Artificial Sequence
  Description of Artificial Sequence: Synthetic peptide
  Seed: DPRMCSLMQGSTLPRRSGA
DPRMISLMQGSTTPRRSGA

SEQ ID NO: 66171 - protein, 19 aa, Artificial Sequence
  Description of Artificial Sequence: Synthetic peptide
  Seed: DPRMCSLMQGSTLPRRSGA
DPRMISLMQGSTVPRRSGA

SEQ ID NO: 66172 - protein, 19 aa, Artificial Sequence
  Description of Artificial Sequence: Synthetic peptide
  Seed: DPRMCSLMQGSTLPRRSGA
DPRMISLMQISTAPRRSGA

SEQ ID NO: 66173 - protein, 19 aa, Artificial Sequence
  Description of Artificial Sequence: Synthetic peptide
  Seed: DPRMCSLMQGSTLPRRSGA
DPRMISLMQNSTIPRRSGA

SEQ ID NO: 66174 - protein, 19 aa, Artificial Sequence
  Description of Artificial Sequence: Synthetic peptide
  Seed: DPRMCSLMQGSTLPRRSGA
DPRMISLMQNSTLPRRSGA

SEQ ID NO: 66175 - protein, 19 aa, Artificial Sequence
  Description of Artificial Sequence: Synthetic peptide
  Seed: DPRMCSLMQGSTLPRRSGA
DPRMISLMQNSTVPRRSGA

SEQ ID NO: 66176 - protein, 19 aa, Artificial Sequence
  Description of Artificial Sequence: Synthetic peptide
  Seed: DPRMCSLMQGSTLPRRSGA
DPRMISLMQPSTAPRRSGA

SEQ ID NO: 66177 - protein, 19 aa, Artificial Sequence
  Description of Artificial Sequence: Synthetic peptide
  Seed: DPRMCSLMQGSTLPRRSGA
DPRMISLMQPSTIPRRSGA

SEQ ID NO: 66178 - protein, 19 aa, Artificial Sequence
  Description of Artificial Sequence: Synthetic peptide
  Seed: DPRMCSLMQGSTLPRRSGA
DPRMISLMQPSTLPRRSGA

SEQ ID NO: 66179 - protein, 19 aa, Artificial Sequence
  Description of Artificial Sequence: Synthetic peptide
  Seed: DPRMCSLMQGSTLPRRSGA
DPRMISLMQPSTMPRRSGA

SEQ ID NO: 66180 - protein, 19 aa, Artificial Sequence
  Description of Artificial Sequence: Synthetic peptide
  Seed: DPRMCSLMQGSTLPRRSGA
DPRMISLMQPSTNPRRSGA

SEQ ID NO: 66181 - protein, 19 aa, Artificial Sequence
  Description of Artificial Sequence: Synthetic peptide
  Seed: DPRMCSLMQGSTLPRRSGA
DPRMISLMQPSTSPRRSGA

SEQ ID NO: 66182 - protein, 19 aa, Artificial Sequence
  Description of Artificial Sequence: Synthetic peptide
  Seed: DPRMCSLMQGSTLPRRSGA
DPRMISLMQPSTVPRRSGA

SEQ ID NO: 66183 - protein, 19 aa, Artificial Sequence
  Description of Artificial Sequence: Synthetic peptide
  Seed: DPRMCSLMQGSTLPRRSGA
DPRMISLMQSSTAPRRSGA

SEQ ID NO: 66184 - protein, 19 aa, Artificial Sequence
  Description of Artificial Sequence: Synthetic peptide
  Seed: DPRMCSLMQGSTLPRRSGA
DPRMISLMQSSTIPRRSGA

SEQ ID NO: 66185 - protein, 19 aa, Artificial Sequence
  Description of Artificial Sequence: Synthetic peptide
  Seed: DPRMCSLMQGSTLPRRSGA
DPRMISLMQSSTLPRRSGA

SEQ ID NO: 66186 - protein, 19 aa, Artificial Sequence
  Description of Artificial Sequence: Synthetic peptide
  Seed: DPRMCSLMQGSTLPRRSGA
DPRMISLMQSSTMPRRSGA

SEQ ID NO: 66187 - protein, 19 aa, Artificial Sequence
  Description of Artificial Sequence: Synthetic peptide
  Seed: DPRMCSLMQGSTLPRRSGA
DPRMISLMQSSTSPRRSGA

SEQ ID NO: 66188 - protein, 19 aa, Artificial Sequence
  Description of Artificial Sequence: Synthetic peptide
  Seed: DPRMCSLMQGSTLPRRSGA
DPRMISLMQSSTTPRRSGA

SEQ ID NO: 66189 - protein, 19 aa, Artificial Sequence
  Description of Artificial Sequence: Synthetic peptide
  Seed: DPRMCSLMQGSTLPRRSGA
DPRMISLMQSSTVPRRSGA

SEQ ID NO: 66190 - protein, 19 aa, Artificial Sequence
  Description of Artificial Sequence: Synthetic peptide
  Seed: DPRMCSLMQGSTLPRRSGA
DPRMISLMQTSTAPRRSGA

SEQ ID NO: 66191 - protein, 19 aa, Artificial Sequence
  Description of Artificial Sequence: Synthetic peptide
  Seed: DPRMCSLMQGSTLPRRSGA
DPRMISLMQTSTIPRRSGA

SEQ ID NO: 66192 - protein, 19 aa, Artificial Sequence
  Description of Artificial Sequence: Synthetic peptide
  Seed: DPRMCSLMQGSTLPRRSGA
DPRMISLMQTSTLPRRSGA

SEQ ID NO: 66193 - protein, 19 aa, Artificial Sequence
  Description of Artificial Sequence: Synthetic peptide
  Seed: DPRMCSLMQGSTLPRRSGA
DPRMISLMQTSTVPRRSGA

SEQ ID NO: 66194 - protein, 19 aa, Artificial Sequence
  Description of Artificial Sequence: Synthetic peptide
  Seed: DPRMCSLMQGSTLPRRSGA
DPRMISLMQVSTAPRRSGA

SEQ ID NO: 66195 - protein, 19 aa, Artificial Sequence
  Description of Artificial Sequence: Synthetic peptide
  Seed: DPRMCSLMQGSTLPRRSGA
DPRMISLMQVSTNPRRSGA

SEQ ID NO: 66196 - protein, 19 aa, Artificial Sequence
  Description of Artificial Sequence: Synthetic peptide
  Seed: DPRMCSLMQGSTLPRRSGA
DPRMISLMQVSTSPRRSGA

SEQ ID NO: 66197 - protein, 19 aa, Artificial Sequence
  Description of Artificial Sequence: Synthetic peptide
  Seed: DPRMCSLMQGSTLPRRSGA
DPRMISLQQASTIPRRSGA

SEQ ID NO: 66198 - protein, 19 aa, Artificial Sequence
  Description of Artificial Sequence: Synthetic peptide
  Seed: DPRMCSLMQGSTLPRRSGA
DPRMISLQQASTLPRRSGA

SEQ ID NO: 66199 - protein, 19 aa, Artificial Sequence
  Description of Artificial Sequence: Synthetic peptide
  Seed: DPRMCSLMQGSTLPRRSGA
DPRMISLQQASTVPRRSGA

SEQ ID NO: 66200 - protein, 19 aa, Artificial Sequence
  Description of Artificial Sequence: Synthetic peptide
  Seed: DPRMCSLMQGSTLPRRSGA
DPRMISLQQGSTLPRRSGA

SEQ ID NO: 66201 - protein, 19 aa, Artificial Sequence
  Description of Artificial Sequence: Synthetic peptide
  Seed: DPRMCSLMQGSTLPRRSGA
DPRMISLVQASTLPRRSGA

SEQ ID NO: 66202 - protein, 19 aa, Artificial Sequence
  Description of Artificial Sequence: Synthetic peptide
  Seed: DPRMCSLMQGSTLPRRSGA
DPRMISLVQASTVPRRSGA

SEQ ID NO: 66203 - protein, 19 aa, Artificial Sequence
  Description of Artificial Sequence: Synthetic peptide
  Seed: DPRMCSLMQGSTLPRRSGA
DPRMLSLAQASTIPRRSGA

SEQ ID NO: 66204 - protein, 19 aa, Artificial Sequence
  Description of Artificial Sequence: Synthetic peptide
  Seed: DPRMCSLMQGSTLPRRSGA
DPRMLSLAQASTLPRRSGA

SEQ ID NO: 66205 - protein, 19 aa, Artificial Sequence
  Description of Artificial Sequence: Synthetic peptide
  Seed: DPRMCSLMQGSTLPRRSGA
DPRMLSLAQASTVPRRSGA

SEQ ID NO: 66206 - protein, 19 aa, Artificial Sequence
  Description of Artificial Sequence: Synthetic peptide
  Seed: DPRMCSLMQGSTLPRRSGA
DPRMLSLIQASTAPRRSGA

SEQ ID NO: 66207 - protein, 19 aa, Artificial Sequence
  Description of Artificial Sequence: Synthetic peptide
  Seed: DPRMCSLMQGSTLPRRSGA
DPRMLSLIQASTIPRRSGA

SEQ ID NO: 66208 - protein, 19 aa, Artificial Sequence
  Description of Artificial Sequence: Synthetic peptide
  Seed: DPRMCSLMQGSTLPRRSGA
DPRMLSLIQASTLPRRSGA

SEQ ID NO: 66209 - protein, 19 aa, Artificial Sequence
  Description of Artificial Sequence: Synthetic peptide
  Seed: DPRMCSLMQGSTLPRRSGA
DPRMLSLIQASTSPRRSGA

SEQ ID NO: 66210 - protein, 19 aa, Artificial Sequence
  Description of Artificial Sequence: Synthetic peptide
  Seed: DPRMCSLMQGSTLPRRSGA
DPRMLSLIQASTVPRRSGA

SEQ ID NO: 66211 - protein, 19 aa, Artificial Sequence
  Description of Artificial Sequence: Synthetic peptide
  Seed: DPRMCSLMQGSTLPRRSGA
DPRMLSLIQGSTAPRRSGA

SEQ ID NO: 66212 - protein, 19 aa, Artificial Sequence
  Description of Artificial Sequence: Synthetic peptide
  Seed: DPRMCSLMQGSTLPRRSGA
DPRMLSLIQGSTIPRRSGA

SEQ ID NO: 66213 - protein, 19 aa, Artificial Sequence
  Description of Artificial Sequence: Synthetic peptide
  Seed: DPRMCSLMQGSTLPRRSGA
DPRMLSLIQGSTLPRRSGA

SEQ ID NO: 66214 - protein, 19 aa, Artificial Sequence
  Description of Artificial Sequence: Synthetic peptide
  Seed: DPRMCSLMQGSTLPRRSGA
DPRMLSLIQGSTVPRRSGA

SEQ ID NO: 66215 - protein, 19 aa, Artificial Sequence
  Description of Artificial Sequence: Synthetic peptide
  Seed: DPRMCSLMQGSTLPRRSGA
DPRMLSLLQASTAPRRSGA

SEQ ID NO: 66216 - protein, 19 aa, Artificial Sequence
  Description of Artificial Sequence: Synthetic peptide
  Seed: DPRMCSLMQGSTLPRRSGA
DPRMLSLLQASTIPRRSGA

SEQ ID NO: 66217 - protein, 19 aa, Artificial Sequence
  Description of Artificial Sequence: Synthetic peptide
  Seed: DPRMCSLMQGSTLPRRSGA
DPRMLSLLQASTLPRRSGA

SEQ ID NO: 66218 - protein, 19 aa, Artificial Sequence
  Description of Artificial Sequence: Synthetic peptide
  Seed: DPRMCSLMQGSTLPRRSGA
DPRMLSLLQASTMPRRSGA

SEQ ID NO: 66219 - protein, 19 aa, Artificial Sequence
  Description of Artificial Sequence: Synthetic peptide
  Seed: DPRMCSLMQGSTLPRRSGA
DPRMLSLLQASTNPRRSGA

SEQ ID NO: 66220 - protein, 19 aa, Artificial Sequence
  Description of Artificial Sequence: Synthetic peptide
  Seed: DPRMCSLMQGSTLPRRSGA
DPRMLSLLQASTSPRRSGA

SEQ ID NO: 66221 - protein, 19 aa, Artificial Sequence
  Description of Artificial Sequence: Synthetic peptide
  Seed: DPRMCSLMQGSTLPRRSGA
DPRMLSLLQASTTPRRSGA

SEQ ID NO: 66222 - protein, 19 aa, Artificial Sequence
  Description of Artificial Sequence: Synthetic peptide
  Seed: DPRMCSLMQGSTLPRRSGA
DPRMLSLLQASTVPRRSGA

SEQ ID NO: 66223 - protein, 19 aa, Artificial Sequence
  Description of Artificial Sequence: Synthetic peptide
  Seed: DPRMCSLMQGSTLPRRSGA
DPRMLSLLQGSTAPRRSGA

SEQ ID NO: 66224 - protein, 19 aa, Artificial Sequence
  Description of Artificial Sequence: Synthetic peptide
  Seed: DPRMCSLMQGSTLPRRSGA
DPRMLSLLQGSTIPRRSGA

SEQ ID NO: 66225 - protein, 19 aa, Artificial Sequence
  Description of Artificial Sequence: Synthetic peptide
  Seed: DPRMCSLMQGSTLPRRSGA
DPRMLSLLQGSTLPRRSGA

SEQ ID NO: 66226 - protein, 19 aa, Artificial Sequence
  Description of Artificial Sequence: Synthetic peptide
  Seed: DPRMCSLMQGSTLPRRSGA
DPRMLSLLQGSTMPRRSGA

SEQ ID NO: 66227 - protein, 19 aa, Artificial Sequence
  Description of Artificial Sequence: Synthetic peptide
  Seed: DPRMCSLMQGSTLPRRSGA
DPRMLSLLQGSTSPRRSGA

SEQ ID NO: 66228 - protein, 19 aa, Artificial Sequence
  Description of Artificial Sequence: Synthetic peptide
  Seed: DPRMCSLMQGSTLPRRSGA
DPRMLSLLQGSTTPRRSGA

SEQ ID NO: 66229 - protein, 19 aa, Artificial Sequence
  Description of Artificial Sequence: Synthetic peptide
  Seed: DPRMCSLMQGSTLPRRSGA
DPRMLSLLQGSTVPRRSGA

SEQ ID NO: 66230 - protein, 19 aa, Artificial Sequence
  Description of Artificial Sequence: Synthetic peptide
  Seed: DPRMCSLMQGSTLPRRSGA
DPRMLSLLQNSTVPRRSGA

SEQ ID NO: 66231 - protein, 19 aa, Artificial Sequence
  Description of Artificial Sequence: Synthetic peptide
  Seed: DPRMCSLMQGSTLPRRSGA
DPRMLSLLQPSTAPRRSGA

SEQ ID NO: 66232 - protein, 19 aa, Artificial Sequence
  Description of Artificial Sequence: Synthetic peptide
  Seed: DPRMCSLMQGSTLPRRSGA
DPRMLSLLQPSTIPRRSGA

SEQ ID NO: 66233 - protein, 19 aa, Artificial Sequence
  Description of Artificial Sequence: Synthetic peptide
  Seed: DPRMCSLMQGSTLPRRSGA
DPRMLSLLQPSTLPRRSGA

SEQ ID NO: 66234 - protein, 19 aa, Artificial Sequence
  Description of Artificial Sequence: Synthetic peptide
  Seed: DPRMCSLMQGSTLPRRSGA
DPRMLSLLQPSTNPRRSGA

SEQ ID NO: 66235 - protein, 19 aa, Artificial Sequence
  Description of Artificial Sequence: Synthetic peptide
  Seed: DPRMCSLMQGSTLPRRSGA
DPRMLSLLQPSTSPRRSGA

SEQ ID NO: 66236 - protein, 19 aa, Artificial Sequence
  Description of Artificial Sequence: Synthetic peptide
  Seed: DPRMCSLMQGSTLPRRSGA
DPRMLSLLQPSTVPRRSGA

SEQ ID NO: 66237 - protein, 19 aa, Artificial Sequence
  Description of Artificial Sequence: Synthetic peptide
  Seed: DPRMCSLMQGSTLPRRSGA
DPRMLSLLQSSTAPRRSGA

SEQ ID NO: 66238 - protein, 19 aa, Artificial Sequence
  Description of Artificial Sequence: Synthetic peptide
  Seed: DPRMCSLMQGSTLPRRSGA
DPRMLSLLQSSTIPRRSGA

SEQ ID NO: 66239 - protein, 19 aa, Artificial Sequence
  Description of Artificial Sequence: Synthetic peptide
  Seed: DPRMCSLMQGSTLPRRSGA
DPRMLSLLQSSTLPRRSGA

SEQ ID NO: 66240 - protein, 19 aa, Artificial Sequence
  Description of Artificial Sequence: Synthetic peptide
  Seed: DPRMCSLMQGSTLPRRSGA
DPRMLSLLQSSTSPRRSGA

SEQ ID NO: 66241 - protein, 19 aa, Artificial Sequence
  Description of Artificial Sequence: Synthetic peptide
  Seed: DPRMCSLMQGSTLPRRSGA
DPRMLSLLQSSTTPRRSGA

SEQ ID NO: 66242 - protein, 19 aa, Artificial Sequence
  Description of Artificial Sequence: Synthetic peptide
  Seed: DPRMCSLMQGSTLPRRSGA
DPRMLSLLQSSTVPRRSGA

SEQ ID NO: 66243 - protein, 19 aa, Artificial Sequence
  Description of Artificial Sequence: Synthetic peptide
  Seed: DPRMCSLMQGSTLPRRSGA
DPRMLSLLQTSTAPRRSGA

SEQ ID NO: 66244 - protein, 19 aa, Artificial Sequence
  Description of Artificial Sequence: Synthetic peptide
  Seed: DPRMCSLMQGSTLPRRSGA
DPRMLSLLQTSTVPRRSGA

SEQ ID NO: 66245 - protein, 19 aa, Artificial Sequence
  Description of Artificial Sequence: Synthetic peptide
  Seed: DPRMCSLMQGSTLPRRSGA
DPRMLSLLQVSTAPRRSGA

SEQ ID NO: 66246 - protein, 19 aa, Artificial Sequence
  Description of Artificial Sequence: Synthetic peptide
  Seed: DPRMCSLMQGSTLPRRSGA
DPRMLSLLQVSTNPRRSGA

SEQ ID NO: 66247 - protein, 19 aa, Artificial Sequence
  Description of Artificial Sequence: Synthetic peptide
  Seed: DPRMCSLMQGSTLPRRSGA
DPRMLSLLQVSTSPRRSGA

SEQ ID NO: 66248 - protein, 19 aa, Artificial Sequence
  Description of Artificial Sequence: Synthetic peptide
  Seed: DPRMCSLMQGSTLPRRSGA
DPRMLSLMQASTAPRRSGA

SEQ ID NO: 66249 - protein, 19 aa, Artificial Sequence
  Description of Artificial Sequence: Synthetic peptide
  Seed: DPRMCSLMQGSTLPRRSGA
DPRMLSLMQASTIPRRSGA

SEQ ID NO: 66250 - protein, 19 aa, Artificial Sequence
  Description of Artificial Sequence: Synthetic peptide
  Seed: DPRMCSLMQGSTLPRRSGA
DPRMLSLMQASTLPRRSGA

SEQ ID NO: 66251 - protein, 19 aa, Artificial Sequence
  Description of Artificial Sequence: Synthetic peptide
  Seed: DPRMCSLMQGSTLPRRSGA
DPRMLSLMQASTMPRRSGA

SEQ ID NO: 66252 - protein, 19 aa, Artificial Sequence
  Description of Artificial Sequence: Synthetic peptide
  Seed: DPRMCSLMQGSTLPRRSGA
DPRMLSLMQASTNPRRSGA

SEQ ID NO: 66253 - protein, 19 aa, Artificial Sequence
  Description of Artificial Sequence: Synthetic peptide
  Seed: DPRMCSLMQGSTLPRRSGA
DPRMLSLMQASTSPRRSGA

SEQ ID NO: 66254 - protein, 19 aa, Artificial Sequence
  Description of Artificial Sequence: Synthetic peptide
  Seed: DPRMCSLMQGSTLPRRSGA
DPRMLSLMQASTTPRRSGA

SEQ ID NO: 66255 - protein, 19 aa, Artificial Sequence
  Description of Artificial Sequence: Synthetic peptide
  Seed: DPRMCSLMQGSTLPRRSGA
DPRMLSLMQASTVPRRSGA

SEQ ID NO: 66256 - protein, 19 aa, Artificial Sequence
  Description of Artificial Sequence: Synthetic peptide
  Seed: DPRMCSLMQGSTLPRRSGA
DPRMLSLMQGSTAPRRSGA

SEQ ID NO: 66257 - protein, 19 aa, Artificial Sequence
  Description of Artificial Sequence: Synthetic peptide
  Seed: DPRMCSLMQGSTLPRRSGA
DPRMLSLMQGSTIPRRSGA

SEQ ID NO: 66258 - protein, 19 aa, Artificial Sequence
  Description of Artificial Sequence: Synthetic peptide
  Seed: DPRMCSLMQGSTLPRRSGA
DPRMLSLMQGSTLPRRSGA

SEQ ID NO: 66259 - protein, 19 aa, Artificial Sequence
  Description of Artificial Sequence: Synthetic peptide
  Seed: DPRMCSLMQGSTLPRRSGA
DPRMLSLMQGSTMPRRSGA

SEQ ID NO: 66260 - protein, 19 aa, Artificial Sequence
  Description of Artificial Sequence: Synthetic peptide
  Seed: DPRMCSLMQGSTLPRRSGA
DPRMLSLMQGSTSPRRSGA

SEQ ID NO: 66261 - protein, 19 aa, Artificial Sequence
  Description of Artificial Sequence: Synthetic peptide
  Seed: DPRMCSLMQGSTLPRRSGA
DPRMLSLMQGSTTPRRSGA

SEQ ID NO: 66262 - protein, 19 aa, Artificial Sequence
  Description of Artificial Sequence: Synthetic peptide
  Seed: DPRMCSLMQGSTLPRRSGA
DPRMLSLMQGSTVPRRSGA

SEQ ID NO: 66263 - protein, 19 aa, Artificial Sequence
  Description of Artificial Sequence: Synthetic peptide
  Seed: DPRMCSLMQGSTLPRRSGA
DPRMLSLMQISTAPRRSGA

SEQ ID NO: 66264 - protein, 19 aa, Artificial Sequence
  Description of Artificial Sequence: Synthetic peptide
  Seed: DPRMCSLMQGSTLPRRSGA
DPRMLSLMQNSTVPRRSGA

SEQ ID NO: 66265 - protein, 19 aa, Artificial Sequence
  Description of Artificial Sequence: Synthetic peptide
  Seed: DPRMCSLMQGSTLPRRSGA
DPRMLSLMQPSTAPRRSGA

SEQ ID NO: 66266 - protein, 19 aa, Artificial Sequence
  Description of Artificial Sequence: Synthetic peptide
  Seed: DPRMCSLMQGSTLPRRSGA
DPRMLSLMQPSTIPRRSGA

SEQ ID NO: 66267 - protein, 19 aa, Artificial Sequence
  Description of Artificial Sequence: Synthetic peptide
  Seed: DPRMCSLMQGSTLPRRSGA
DPRMLSLMQPSTLPRRSGA

SEQ ID NO: 66268 - protein, 19 aa, Artificial Sequence
  Description of Artificial Sequence: Synthetic peptide
  Seed: DPRMCSLMQGSTLPRRSGA
DPRMLSLMQPSTNPRRSGA

SEQ ID NO: 66269 - protein, 19 aa, Artificial Sequence
  Description of Artificial Sequence: Synthetic peptide
  Seed: DPRMCSLMQGSTLPRRSGA
DPRMLSLMQPSTSPRRSGA

SEQ ID NO: 66270 - protein, 19 aa, Artificial Sequence
  Description of Artificial Sequence: Synthetic peptide
  Seed: DPRMCSLMQGSTLPRRSGA
DPRMLSLMQPSTVPRRSGA

SEQ ID NO: 66271 - protein, 19 aa, Artificial Sequence
  Description of Artificial Sequence: Synthetic peptide
  Seed: DPRMCSLMQGSTLPRRSGA
DPRMLSLMQSSTAPRRSGA

SEQ ID NO: 66272 - protein, 19 aa, Artificial Sequence
  Description of Artificial Sequence: Synthetic peptide
  Seed: DPRMCSLMQGSTLPRRSGA
DPRMLSLMQSSTIPRRSGA

SEQ ID NO: 66273 - protein, 19 aa, Artificial Sequence
  Description of Artificial Sequence: Synthetic peptide
  Seed: DPRMCSLMQGSTLPRRSGA
DPRMLSLMQSSTLPRRSGA

SEQ ID NO: 66274 - protein, 19 aa, Artificial Sequence
  Description of Artificial Sequence: Synthetic peptide
  Seed: DPRMCSLMQGSTLPRRSGA
DPRMLSLMQSSTSPRRSGA

SEQ ID NO: 66275 - protein, 19 aa, Artificial Sequence
  Description of Artificial Sequence: Synthetic peptide
  Seed: DPRMCSLMQGSTLPRRSGA
DPRMLSLMQSSTTPRRSGA

SEQ ID NO: 66276 - protein, 19 aa, Artificial Sequence
  Description of Artificial Sequence: Synthetic peptide
  Seed: DPRMCSLMQGSTLPRRSGA
DPRMLSLMQSSTVPRRSGA

SEQ ID NO: 66277 - protein, 19 aa, Artificial Sequence
  Description of Artificial Sequence: Synthetic peptide
  Seed: DPRMCSLMQGSTLPRRSGA
DPRMLSLMQTSTAPRRSGA

SEQ ID NO: 66278 - protein, 19 aa, Artificial Sequence
  Description of Artificial Sequence: Synthetic peptide
  Seed: DPRMCSLMQGSTLPRRSGA
DPRMLSLMQTSTVPRRSGA

SEQ ID NO: 66279 - protein, 19 aa, Artificial Sequence
  Description of Artificial Sequence: Synthetic peptide
  Seed: DPRMCSLMQGSTLPRRSGA
DPRMLSLMQVSTAPRRSGA

SEQ ID NO: 66280 - protein, 19 aa, Artificial Sequence
  Description of Artificial Sequence: Synthetic peptide
  Seed: DPRMCSLMQGSTLPRRSGA
DPRMLSLMQVSTNPRRSGA

SEQ ID NO: 66281 - protein, 19 aa, Artificial Sequence
  Description of Artificial Sequence: Synthetic peptide
  Seed: DPRMCSLMQGSTLPRRSGA
DPRMLSLMQVSTSPRRSGA

SEQ ID NO: 66282 - protein, 19 aa, Artificial Sequence
  Description of Artificial Sequence: Synthetic peptide
  Seed: DPRMCSLMQGSTLPRRSGA
DPRMLSLQQASTLPRRSGA

SEQ ID NO: 66283 - protein, 19 aa, Artificial Sequence
  Description of Artificial Sequence: Synthetic peptide
  Seed: DPRMCSLMQGSTLPRRSGA
DPRMMSLLQASTAPRRSGA

SEQ ID NO: 66284 - protein, 19 aa, Artificial Sequence
  Description of Artificial Sequence: Synthetic peptide
  Seed: DPRMCSLMQGSTLPRRSGA
DPRMMSLLQASTIPRRSGA

SEQ ID NO: 66285 - protein, 19 aa, Artificial Sequence
  Description of Artificial Sequence: Synthetic peptide
  Seed: DPRMCSLMQGSTLPRRSGA
DPRMMSLLQASTLPRRSGA

SEQ ID NO: 66286 - protein, 19 aa, Artificial Sequence
  Description of Artificial Sequence: Synthetic peptide
  Seed: DPRMCSLMQGSTLPRRSGA
DPRMMSLLQASTSPRRSGA

SEQ ID NO: 66287 - protein, 19 aa, Artificial Sequence
  Description of Artificial Sequence: Synthetic peptide
  Seed: DPRMCSLMQGSTLPRRSGA
DPRMMSLLQASTVPRRSGA

SEQ ID NO: 66288 - protein, 19 aa, Artificial Sequence
  Description of Artificial Sequence: Synthetic peptide
  Seed: DPRMCSLMQGSTLPRRSGA
DPRMMSLLQGSTAPRRSGA

SEQ ID NO: 66289 - protein, 19 aa, Artificial Sequence
  Description of Artificial Sequence: Synthetic peptide
  Seed: DPRMCSLMQGSTLPRRSGA
DPRMMSLLQGSTIPRRSGA

SEQ ID NO: 66290 - protein, 19 aa, Artificial Sequence
  Description of Artificial Sequence: Synthetic peptide
  Seed: DPRMCSLMQGSTLPRRSGA
DPRMMSLLQGSTLPRRSGA

SEQ ID NO: 66291 - protein, 19 aa, Artificial Sequence
  Description of Artificial Sequence: Synthetic peptide
  Seed: DPRMCSLMQGSTLPRRSGA
DPRMMSLLQGSTVPRRSGA

SEQ ID NO: 66292 - protein, 19 aa, Artificial Sequence
  Description of Artificial Sequence: Synthetic peptide
  Seed: DPRMCSLMQGSTLPRRSGA
DPRMMSLLQPSTVPRRSGA

SEQ ID NO: 66293 - protein, 19 aa, Artificial Sequence
  Description of Artificial Sequence: Synthetic peptide
  Seed: DPRMCSLMQGSTLPRRSGA
DPRMMSLLQSSTAPRRSGA

SEQ ID NO: 66294 - protein, 19 aa, Artificial Sequence
  Description of Artificial Sequence: Synthetic peptide
  Seed: DPRMCSLMQGSTLPRRSGA
DPRMMSLLQSSTIPRRSGA

SEQ ID NO: 66295 - protein, 19 aa, Artificial Sequence
  Description of Artificial Sequence: Synthetic peptide
  Seed: DPRMCSLMQGSTLPRRSGA
DPRMMSLLQSSTLPRRSGA

SEQ ID NO: 66296 - protein, 19 aa, Artificial Sequence
  Description of Artificial Sequence: Synthetic peptide
  Seed: DPRMCSLMQGSTLPRRSGA
DPRMMSLLQSSTVPRRSGA

SEQ ID NO: 66297 - protein, 19 aa, Artificial Sequence
  Description of Artificial Sequence: Synthetic peptide
  Seed: DPRMCSLMQGSTLPRRSGA
DPRMMSLMQASTAPRRSGA

SEQ ID NO: 66298 - protein, 19 aa, Artificial Sequence
  Description of Artificial Sequence: Synthetic peptide
  Seed: DPRMCSLMQGSTLPRRSGA
DPRMMSLMQASTIPRRSGA

SEQ ID NO: 66299 - protein, 19 aa, Artificial Sequence
  Description of Artificial Sequence: Synthetic peptide
  Seed: DPRMCSLMQGSTLPRRSGA
DPRMMSLMQASTLPRRSGA

SEQ ID NO: 66300 - protein, 19 aa, Artificial Sequence
  Description of Artificial Sequence: Synthetic peptide
  Seed: DPRMCSLMQGSTLPRRSGA
DPRMMSLMQASTSPRRSGA

SEQ ID NO: 66301 - protein, 19 aa, Artificial Sequence
  Description of Artificial Sequence: Synthetic peptide
  Seed: DPRMCSLMQGSTLPRRSGA
DPRMMSLMQASTVPRRSGA

SEQ ID NO: 66302 - protein, 19 aa, Artificial Sequence
  Description of Artificial Sequence: Synthetic peptide
  Seed: DPRMCSLMQGSTLPRRSGA
DPRMMSLMQGSTAPRRSGA

SEQ ID NO: 66303 - protein, 19 aa, Artificial Sequence
  Description of Artificial Sequence: Synthetic peptide
  Seed: DPRMCSLMQGSTLPRRSGA
DPRMMSLMQGSTIPRRSGA

SEQ ID NO: 66304 - protein, 19 aa, Artificial Sequence
  Description of Artificial Sequence: Synthetic peptide
  Seed: DPRMCSLMQGSTLPRRSGA
DPRMMSLMQGSTLPRRSGA

SEQ ID NO: 66305 - protein, 19 aa, Artificial Sequence
  Description of Artificial Sequence: Synthetic peptide
  Seed: DPRMCSLMQGSTLPRRSGA
DPRMMSLMQGSTVPRRSGA

SEQ ID NO: 66306 - protein, 19 aa, Artificial Sequence
  Description of Artificial Sequence: Synthetic peptide
  Seed: DPRMCSLMQGSTLPRRSGA
DPRMMSLMQSSTIPRRSGA

SEQ ID NO: 66307 - protein, 19 aa, Artificial Sequence
  Description of Artificial Sequence: Synthetic peptide
  Seed: DPRMCSLMQGSTLPRRSGA
DPRMMSLMQSSTLPRRSGA

SEQ ID NO: 66308 - protein, 19 aa, Artificial Sequence
  Description of Artificial Sequence: Synthetic peptide
  Seed: DPRMCSLMQGSTLPRRSGA
DPRMMSLMQSSTVPRRSGA

SEQ ID NO: 66309 - protein, 19 aa, Artificial Sequence
  Description of Artificial Sequence: Synthetic peptide
  Seed: DPRMCSLMQGSTLPRRSGA
DPRMMSLMQVSTAPRRSGA

SEQ ID NO: 66310 - protein, 19 aa, Artificial Sequence
  Description of Artificial Sequence: Synthetic peptide
  Seed: DPRMCSLMQGSTLPRRSGA
DPRMVSLLQASTAPRRSGA

SEQ ID NO: 66311 - protein, 19 aa, Artificial Sequence
  Description of Artificial Sequence: Synthetic peptide
  Seed: DPRMCSLMQGSTLPRRSGA
DPRMVSLLQASTIPRRSGA

SEQ ID NO: 66312 - protein, 19 aa, Artificial Sequence
  Description of Artificial Sequence: Synthetic peptide
  Seed: DPRMCSLMQGSTLPRRSGA
DPRMVSLLQASTLPRRSGA

SEQ ID NO: 66313 - protein, 19 aa, Artificial Sequence
  Description of Artificial Sequence: Synthetic peptide
  Seed: DPRMCSLMQGSTLPRRSGA
DPRMVSLLQASTVPRRSGA

SEQ ID NO: 66314 - protein, 19 aa, Artificial Sequence
  Description of Artificial Sequence: Synthetic peptide
  Seed: DPRMCSLMQGSTLPRRSGA
DPRMVSLLQGSTAPRRSGA

SEQ ID NO: 66315 - protein, 19 aa, Artificial Sequence
  Description of Artificial Sequence: Synthetic peptide
  Seed: DPRMCSLMQGSTLPRRSGA
DPRMVSLLQGSTIPRRSGA

SEQ ID NO: 66316 - protein, 19 aa, Artificial Sequence
  Description of Artificial Sequence: Synthetic peptide
  Seed: DPRMCSLMQGSTLPRRSGA
DPRMVSLLQGSTLPRRSGA

SEQ ID NO: 66317 - protein, 19 aa, Artificial Sequence
  Description of Artificial Sequence: Synthetic peptide
  Seed: DPRMCSLMQGSTLPRRSGA
DPRMVSLLQGSTVPRRSGA

SEQ ID NO: 66318 - protein, 19 aa, Artificial Sequence
  Description of Artificial Sequence: Synthetic peptide
  Seed: DPRMCSLMQGSTLPRRSGA
DPRMVSLLQPSTLPRRSGA

SEQ ID NO: 66319 - protein, 19 aa, Artificial Sequence
  Description of Artificial Sequence: Synthetic peptide
  Seed: DPRMCSLMQGSTLPRRSGA
DPRMVSLLQPSTVPRRSGA

SEQ ID NO: 66320 - protein, 19 aa, Artificial Sequence
  Description of Artificial Sequence: Synthetic peptide
  Seed: DPRMCSLMQGSTLPRRSGA
DPRMVSLLQSSTAPRRSGA

SEQ ID NO: 66321 - protein, 19 aa, Artificial Sequence
  Description of Artificial Sequence: Synthetic peptide
  Seed: DPRMCSLMQGSTLPRRSGA
DPRMVSLLQSSTIPRRSGA

SEQ ID NO: 66322 - protein, 19 aa, Artificial Sequence
  Description of Artificial Sequence: Synthetic peptide
  Seed: DPRMCSLMQGSTLPRRSGA
DPRMVSLLQSSTLPRRSGA

SEQ ID NO: 66323 - protein, 19 aa, Artificial Sequence
  Description of Artificial Sequence: Synthetic peptide
  Seed: DPRMCSLMQGSTLPRRSGA
DPRMVSLLQSSTVPRRSGA

SEQ ID NO: 66324 - protein, 19 aa, Artificial Sequence
  Description of Artificial Sequence: Synthetic peptide
  Seed: DPRMCSLMQGSTLPRRSGA
DPRMVSLMQASTAPRRSGA

SEQ ID NO: 66325 - protein, 19 aa, Artificial Sequence
  Description of Artificial Sequence: Synthetic peptide
  Seed: DPRMCSLMQGSTLPRRSGA
DPRMVSLMQASTIPRRSGA

SEQ ID NO: 66326 - protein, 19 aa, Artificial Sequence
  Description of Artificial Sequence: Synthetic peptide
  Seed: DPRMCSLMQGSTLPRRSGA
DPRMVSLMQASTLPRRSGA

SEQ ID NO: 66327 - protein, 19 aa, Artificial Sequence
  Description of Artificial Sequence: Synthetic peptide
  Seed: DPRMCSLMQGSTLPRRSGA
DPRMVSLMQASTVPRRSGA

SEQ ID NO: 66328 - protein, 19 aa, Artificial Sequence
  Description of Artificial Sequence: Synthetic peptide
  Seed: DPRMCSLMQGSTLPRRSGA
DPRMVSLMQGSTAPRRSGA

SEQ ID NO: 66329 - protein, 19 aa, Artificial Sequence
  Description of Artificial Sequence: Synthetic peptide
  Seed: DPRMCSLMQGSTLPRRSGA
DPRMVSLMQGSTIPRRSGA

SEQ ID NO: 66330 - protein, 19 aa, Artificial Sequence
  Description of Artificial Sequence: Synthetic peptide
  Seed: DPRMCSLMQGSTLPRRSGA
DPRMVSLMQGSTLPRRSGA

SEQ ID NO: 66331 - protein, 19 aa, Artificial Sequence
  Description of Artificial Sequence: Synthetic peptide
  Seed: DPRMCSLMQGSTLPRRSGA
DPRMVSLMQGSTVPRRSGA

SEQ ID NO: 66332 - protein, 19 aa, Artificial Sequence
  Description of Artificial Sequence: Synthetic peptide
  Seed: DPRMCSLMQGSTLPRRSGA
DPRMVSLMQSSTIPRRSGA

SEQ ID NO: 66333 - protein, 19 aa, Artificial Sequence
  Description of Artificial Sequence: Synthetic peptide
  Seed: DPRMCSLMQGSTLPRRSGA
DPRMVSLMQSSTLPRRSGA

SEQ ID NO: 66334 - protein, 19 aa, Artificial Sequence
  Description of Artificial Sequence: Synthetic peptide
  Seed: DPRMCSLMQGSTLPRRSGA
DPRMVSLMQSSTVPRRSGA

SEQ ID NO: 66335 - protein, 19 aa, Artificial Sequence
  Description of Artificial Sequence: Synthetic peptide
  Seed: DPRMCSLMQGSTLPRRSGA
DPRMWSLAQASTAPRRSGA

SEQ ID NO: 66336 - protein, 19 aa, Artificial Sequence
  Description of Artificial Sequence: Synthetic peptide
  Seed: DPRMCSLMQGSTLPRRSGA
DPRMWSLAQASTIPRRSGA

SEQ ID NO: 66337 - protein, 19 aa, Artificial Sequence
  Description of Artificial Sequence: Synthetic peptide
  Seed: DPRMCSLMQGSTLPRRSGA
DPRMWSLAQASTLPRRSGA

SEQ ID NO: 66338 - protein, 19 aa, Artificial Sequence
  Description of Artificial Sequence: Synthetic peptide
  Seed: DPRMCSLMQGSTLPRRSGA
DPRMWSLAQASTMPRRSGA

SEQ ID NO: 66339 - protein, 19 aa, Artificial Sequence
  Description of Artificial Sequence: Synthetic peptide
  Seed: DPRMCSLMQGSTLPRRSGA
DPRMWSLAQASTSPRRSGA

SEQ ID NO: 66340 - protein, 19 aa, Artificial Sequence
  Description of Artificial Sequence: Synthetic peptide
  Seed: DPRMCSLMQGSTLPRRSGA
DPRMWSLAQASTVPRRSGA

SEQ ID NO: 66341 - protein, 19 aa, Artificial Sequence
  Description of Artificial Sequence: Synthetic peptide
  Seed: DPRMCSLMQGSTLPRRSGA
DPRMWSLAQGSTAPRRSGA

SEQ ID NO: 66342 - protein, 19 aa, Artificial Sequence
  Description of Artificial Sequence: Synthetic peptide
  Seed: DPRMCSLMQGSTLPRRSGA
DPRMWSLAQGSTIPRRSGA

SEQ ID NO: 66343 - protein, 19 aa, Artificial Sequence
  Description of Artificial Sequence: Synthetic peptide
  Seed: DPRMCSLMQGSTLPRRSGA
DPRMWSLAQGSTLPRRSGA

SEQ ID NO: 66344 - protein, 19 aa, Artificial Sequence
  Description of Artificial Sequence: Synthetic peptide
  Seed: DPRMCSLMQGSTLPRRSGA
DPRMWSLAQGSTVPRRSGA

SEQ ID NO: 66345 - protein, 19 aa, Artificial Sequence
  Description of Artificial Sequence: Synthetic peptide
  Seed: DPRMCSLMQGSTLPRRSGA
DPRMWSLAQSSTIPRRSGA

SEQ ID NO: 66346 - protein, 19 aa, Artificial Sequence
  Description of Artificial Sequence: Synthetic peptide
  Seed: DPRMCSLMQGSTLPRRSGA
DPRMWSLAQSSTLPRRSGA

SEQ ID NO: 66347 - protein, 19 aa, Artificial Sequence
  Description of Artificial Sequence: Synthetic peptide
  Seed: DPRMCSLMQGSTLPRRSGA
DPRMWSLAQSSTVPRRSGA

SEQ ID NO: 66348 - protein, 19 aa, Artificial Sequence
  Description of Artificial Sequence: Synthetic peptide
  Seed: DPRMCSLMQGSTLPRRSGA
DPRMWSLIQASTAPRRSGA

SEQ ID NO: 66349 - protein, 19 aa, Artificial Sequence
  Description of Artificial Sequence: Synthetic peptide
  Seed: DPRMCSLMQGSTLPRRSGA
DPRMWSLIQASTIPRRSGA

SEQ ID NO: 66350 - protein, 19 aa, Artificial Sequence
  Description of Artificial Sequence: Synthetic peptide
  Seed: DPRMCSLMQGSTLPRRSGA
DPRMWSLIQASTLPRRSGA

SEQ ID NO: 66351 - protein, 19 aa, Artificial Sequence
  Description of Artificial Sequence: Synthetic peptide
  Seed: DPRMCSLMQGSTLPRRSGA
DPRMWSLIQASTMPRRSGA

SEQ ID NO: 66352 - protein, 19 aa, Artificial Sequence
  Description of Artificial Sequence: Synthetic peptide
  Seed: DPRMCSLMQGSTLPRRSGA
DPRMWSLIQASTNPRRSGA

SEQ ID NO: 66353 - protein, 19 aa, Artificial Sequence
  Description of Artificial Sequence: Synthetic peptide
  Seed: DPRMCSLMQGSTLPRRSGA
DPRMWSLIQASTSPRRSGA

SEQ ID NO: 66354 - protein, 19 aa, Artificial Sequence
  Description of Artificial Sequence: Synthetic peptide
  Seed: DPRMCSLMQGSTLPRRSGA
DPRMWSLIQASTTPRRSGA

SEQ ID NO: 66355 - protein, 19 aa, Artificial Sequence
  Description of Artificial Sequence: Synthetic peptide
  Seed: DPRMCSLMQGSTLPRRSGA
DPRMWSLIQASTVPRRSGA

SEQ ID NO: 66356 - protein, 19 aa, Artificial Sequence
  Description of Artificial Sequence: Synthetic peptide
  Seed: DPRMCSLMQGSTLPRRSGA
DPRMWSLIQGSTAPRRSGA

SEQ ID NO: 66357 - protein, 19 aa, Artificial Sequence
  Description of Artificial Sequence: Synthetic peptide
  Seed: DPRMCSLMQGSTLPRRSGA
DPRMWSLIQGSTIPRRSGA

SEQ ID NO: 66358 - protein, 19 aa, Artificial Sequence
  Description of Artificial Sequence: Synthetic peptide
  Seed: DPRMCSLMQGSTLPRRSGA
DPRMWSLIQGSTLPRRSGA

SEQ ID NO: 66359 - protein, 19 aa, Artificial Sequence
  Description of Artificial Sequence: Synthetic peptide
  Seed: DPRMCSLMQGSTLPRRSGA
DPRMWSLIQGSTVPRRSGA

SEQ ID NO: 66360 - protein, 19 aa, Artificial Sequence
  Description of Artificial Sequence: Synthetic peptide
  Seed: DPRMCSLMQGSTLPRRSGA
DPRMWSLIQISTAPRRSGA

SEQ ID NO: 66361 - protein, 19 aa, Artificial Sequence
  Description of Artificial Sequence: Synthetic peptide
  Seed: DPRMCSLMQGSTLPRRSGA
DPRMWSLIQPSTAPRRSGA

SEQ ID NO: 66362 - protein, 19 aa, Artificial Sequence
  Description of Artificial Sequence: Synthetic peptide
  Seed: DPRMCSLMQGSTLPRRSGA
DPRMWSLIQPSTIPRRSGA

SEQ ID NO: 66363 - protein, 19 aa, Artificial Sequence
  Description of Artificial Sequence: Synthetic peptide
  Seed: DPRMCSLMQGSTLPRRSGA
DPRMWSLIQPSTLPRRSGA

SEQ ID NO: 66364 - protein, 19 aa, Artificial Sequence
  Description of Artificial Sequence: Synthetic peptide
  Seed: DPRMCSLMQGSTLPRRSGA
DPRMWSLIQPSTNPRRSGA

SEQ ID NO: 66365 - protein, 19 aa, Artificial Sequence
  Description of Artificial Sequence: Synthetic peptide
  Seed: DPRMCSLMQGSTLPRRSGA
DPRMWSLIQPSTSPRRSGA

SEQ ID NO: 66366 - protein, 19 aa, Artificial Sequence
  Description of Artificial Sequence: Synthetic peptide
  Seed: DPRMCSLMQGSTLPRRSGA
DPRMWSLIQPSTVPRRSGA

SEQ ID NO: 66367 - protein, 19 aa, Artificial Sequence
  Description of Artificial Sequence: Synthetic peptide
  Seed: DPRMCSLMQGSTLPRRSGA
DPRMWSLIQSSTAPRRSGA

SEQ ID NO: 66368 - protein, 19 aa, Artificial Sequence
  Description of Artificial Sequence: Synthetic peptide
  Seed: DPRMCSLMQGSTLPRRSGA
DPRMWSLIQSSTIPRRSGA

SEQ ID NO: 66369 - protein, 19 aa, Artificial Sequence
  Description of Artificial Sequence: Synthetic peptide
  Seed: DPRMCSLMQGSTLPRRSGA
DPRMWSLIQSSTLPRRSGA

SEQ ID NO: 66370 - protein, 19 aa, Artificial Sequence
  Description of Artificial Sequence: Synthetic peptide
  Seed: DPRMCSLMQGSTLPRRSGA
DPRMWSLIQSSTNPRRSGA

SEQ ID NO: 66371 - protein, 19 aa, Artificial Sequence
  Description of Artificial Sequence: Synthetic peptide
  Seed: DPRMCSLMQGSTLPRRSGA
DPRMWSLIQSSTSPRRSGA

SEQ ID NO: 66372 - protein, 19 aa, Artificial Sequence
  Description of Artificial Sequence: Synthetic peptide
  Seed: DPRMCSLMQGSTLPRRSGA
DPRMWSLIQSSTVPRRSGA

SEQ ID NO: 66373 - protein, 19 aa, Artificial Sequence
  Description of Artificial Sequence: Synthetic peptide
  Seed: DPRMCSLMQGSTLPRRSGA
DPRMWSLIQTSTAPRRSGA

SEQ ID NO: 66374 - protein, 19 aa, Artificial Sequence
  Description of Artificial Sequence: Synthetic peptide
  Seed: DPRMCSLMQGSTLPRRSGA
DPRMWSLIQTSTNPRRSGA

SEQ ID NO: 66375 - protein, 19 aa, Artificial Sequence
  Description of Artificial Sequence: Synthetic peptide
  Seed: DPRMCSLMQGSTLPRRSGA
DPRMWSLIQTSTSPRRSGA

SEQ ID NO: 66376 - protein, 19 aa, Artificial Sequence
  Description of Artificial Sequence: Synthetic peptide
  Seed: DPRMCSLMQGSTLPRRSGA
DPRMWSLIQTSTTPRRSGA

SEQ ID NO: 66377 - protein, 19 aa, Artificial Sequence
  Description of Artificial Sequence: Synthetic peptide
  Seed: DPRMCSLMQGSTLPRRSGA
DPRMWSLIQVSTAPRRSGA

SEQ ID NO: 66378 - protein, 19 aa, Artificial Sequence
  Description of Artificial Sequence: Synthetic peptide
  Seed: DPRMCSLMQGSTLPRRSGA
DPRMWSLIQVSTNPRRSGA

SEQ ID NO: 66379 - protein, 19 aa, Artificial Sequence
  Description of Artificial Sequence: Synthetic peptide
  Seed: DPRMCSLMQGSTLPRRSGA
DPRMWSLIQVSTSPRRSGA

SEQ ID NO: 66380 - protein, 19 aa, Artificial Sequence
  Description of Artificial Sequence: Synthetic peptide
  Seed: DPRMCSLMQGSTLPRRSGA
DPRMWSLLQASTAPRRSGA

SEQ ID NO: 66381 - protein, 19 aa, Artificial Sequence
  Description of Artificial Sequence: Synthetic peptide
  Seed: DPRMCSLMQGSTLPRRSGA
DPRMWSLLQASTGPRRSGA

SEQ ID NO: 66382 - protein, 19 aa, Artificial Sequence
  Description of Artificial Sequence: Synthetic peptide
  Seed: DPRMCSLMQGSTLPRRSGA
DPRMWSLLQASTIPRRSGA

SEQ ID NO: 66383 - protein, 19 aa, Artificial Sequence
  Description of Artificial Sequence: Synthetic peptide
  Seed: DPRMCSLMQGSTLPRRSGA
DPRMWSLLQASTLPRRSGA

SEQ ID NO: 66384 - protein, 19 aa, Artificial Sequence
  Description of Artificial Sequence: Synthetic peptide
  Seed: DPRMCSLMQGSTLPRRSGA
DPRMWSLLQASTMPRRSGA

SEQ ID NO: 66385 - protein, 19 aa, Artificial Sequence
  Description of Artificial Sequence: Synthetic peptide
  Seed: DPRMCSLMQGSTLPRRSGA
DPRMWSLLQASTNPRRSGA

SEQ ID NO: 66386 - protein, 19 aa, Artificial Sequence
  Description of Artificial Sequence: Synthetic peptide
  Seed: DPRMCSLMQGSTLPRRSGA
DPRMWSLLQASTSPRRSGA

SEQ ID NO: 66387 - protein, 19 aa, Artificial Sequence
  Description of Artificial Sequence: Synthetic peptide
  Seed: DPRMCSLMQGSTLPRRSGA
DPRMWSLLQASTTPRRSGA

SEQ ID NO: 66388 - protein, 19 aa, Artificial Sequence
  Description of Artificial Sequence: Synthetic peptide
  Seed: DPRMCSLMQGSTLPRRSGA
DPRMWSLLQASTVPRRSGA

SEQ ID NO: 66389 - protein, 19 aa, Artificial Sequence
  Description of Artificial Sequence: Synthetic peptide
  Seed: DPRMCSLMQGSTLPRRSGA
DPRMWSLLQGSTAPRRSGA

SEQ ID NO: 66390 - protein, 19 aa, Artificial Sequence
  Description of Artificial Sequence: Synthetic peptide
  Seed: DPRMCSLMQGSTLPRRSGA
DPRMWSLLQGSTIPRRSGA

SEQ ID NO: 66391 - protein, 19 aa, Artificial Sequence
  Description of Artificial Sequence: Synthetic peptide
  Seed: DPRMCSLMQGSTLPRRSGA
DPRMWSLLQGSTLPRRSGA

SEQ ID NO: 66392 - protein, 19 aa, Artificial Sequence
  Description of Artificial Sequence: Synthetic peptide
  Seed: DPRMCSLMQGSTLPRRSGA
DPRMWSLLQGSTMPRRSGA

SEQ ID NO: 66393 - protein, 19 aa, Artificial Sequence
  Description of Artificial Sequence: Synthetic peptide
  Seed: DPRMCSLMQGSTLPRRSGA
DPRMWSLLQGSTSPRRSGA

SEQ ID NO: 66394 - protein, 19 aa, Artificial Sequence
  Description of Artificial Sequence: Synthetic peptide
  Seed: DPRMCSLMQGSTLPRRSGA
DPRMWSLLQGSTTPRRSGA

SEQ ID NO: 66395 - protein, 19 aa, Artificial Sequence
  Description of Artificial Sequence: Synthetic peptide
  Seed: DPRMCSLMQGSTLPRRSGA
DPRMWSLLQGSTVPRRSGA

SEQ ID NO: 66396 - protein, 19 aa, Artificial Sequence
  Description of Artificial Sequence: Synthetic peptide
  Seed: DPRMCSLMQGSTLPRRSGA
DPRMWSLLQISTAPRRSGA

SEQ ID NO: 66397 - protein, 19 aa, Artificial Sequence
  Description of Artificial Sequence: Synthetic peptide
  Seed: DPRMCSLMQGSTLPRRSGA
DPRMWSLLQISTNPRRSGA

SEQ ID NO: 66398 - protein, 19 aa, Artificial Sequence
  Description of Artificial Sequence: Synthetic peptide
  Seed: DPRMCSLMQGSTLPRRSGA
DPRMWSLLQISTSPRRSGA

SEQ ID NO: 66399 - protein, 19 aa, Artificial Sequence
  Description of Artificial Sequence: Synthetic peptide
  Seed: DPRMCSLMQGSTLPRRSGA
DPRMWSLLQNSTAPRRSGA

SEQ ID NO: 66400 - protein, 19 aa, Artificial Sequence
  Description of Artificial Sequence: Synthetic peptide
  Seed: DPRMCSLMQGSTLPRRSGA
DPRMWSLLQNSTIPRRSGA

SEQ ID NO: 66401 - protein, 19 aa, Artificial Sequence
  Description of Artificial Sequence: Synthetic peptide
  Seed: DPRMCSLMQGSTLPRRSGA
DPRMWSLLQNSTLPRRSGA

SEQ ID NO: 66402 - protein, 19 aa, Artificial Sequence
  Description of Artificial Sequence: Synthetic peptide
  Seed: DPRMCSLMQGSTLPRRSGA
DPRMWSLLQNSTVPRRSGA

SEQ ID NO: 66403 - protein, 19 aa, Artificial Sequence
  Description of Artificial Sequence: Synthetic peptide
  Seed: DPRMCSLMQGSTLPRRSGA
DPRMWSLLQPSTAPRRSGA

SEQ ID NO: 66404 - protein, 19 aa, Artificial Sequence
  Description of Artificial Sequence: Synthetic peptide
  Seed: DPRMCSLMQGSTLPRRSGA
DPRMWSLLQPSTIPRRSGA

SEQ ID NO: 66405 - protein, 19 aa, Artificial Sequence
  Description of Artificial Sequence: Synthetic peptide
  Seed: DPRMCSLMQGSTLPRRSGA
DPRMWSLLQPSTLPRRSGA

SEQ ID NO: 66406 - protein, 19 aa, Artificial Sequence
  Description of Artificial Sequence: Synthetic peptide
  Seed: DPRMCSLMQGSTLPRRSGA
DPRMWSLLQPSTMPRRSGA

SEQ ID NO: 66407 - protein, 19 aa, Artificial Sequence
  Description of Artificial Sequence: Synthetic peptide
  Seed: DPRMCSLMQGSTLPRRSGA
DPRMWSLLQPSTNPRRSGA

SEQ ID NO: 66408 - protein, 19 aa, Artificial Sequence
  Description of Artificial Sequence: Synthetic peptide
  Seed: DPRMCSLMQGSTLPRRSGA
DPRMWSLLQPSTSPRRSGA

SEQ ID NO: 66409 - protein, 19 aa, Artificial Sequence
  Description of Artificial Sequence: Synthetic peptide
  Seed: DPRMCSLMQGSTLPRRSGA
DPRMWSLLQPSTTPRRSGA

SEQ ID NO: 66410 - protein, 19 aa, Artificial Sequence
  Description of Artificial Sequence: Synthetic peptide
  Seed: DPRMCSLMQGSTLPRRSGA
DPRMWSLLQPSTVPRRSGA

SEQ ID NO: 66411 - protein, 19 aa, Artificial Sequence
  Description of Artificial Sequence: Synthetic peptide
  Seed: DPRMCSLMQGSTLPRRSGA
DPRMWSLLQSSTAPRRSGA

SEQ ID NO: 66412 - protein, 19 aa, Artificial Sequence
  Description of Artificial Sequence: Synthetic peptide
  Seed: DPRMCSLMQGSTLPRRSGA
DPRMWSLLQSSTIPRRSGA

SEQ ID NO: 66413 - protein, 19 aa, Artificial Sequence
  Description of Artificial Sequence: Synthetic peptide
  Seed: DPRMCSLMQGSTLPRRSGA
DPRMWSLLQSSTLPRRSGA

SEQ ID NO: 66414 - protein, 19 aa, Artificial Sequence
  Description of Artificial Sequence: Synthetic peptide
  Seed: DPRMCSLMQGSTLPRRSGA
DPRMWSLLQSSTMPRRSGA

SEQ ID NO: 66415 - protein, 19 aa, Artificial Sequence
  Description of Artificial Sequence: Synthetic peptide
  Seed: DPRMCSLMQGSTLPRRSGA
DPRMWSLLQSSTNPRRSGA

SEQ ID NO: 66416 - protein, 19 aa, Artificial Sequence
  Description of Artificial Sequence: Synthetic peptide
  Seed: DPRMCSLMQGSTLPRRSGA
DPRMWSLLQSSTSPRRSGA

SEQ ID NO: 66417 - protein, 19 aa, Artificial Sequence
  Description of Artificial Sequence: Synthetic peptide
  Seed: DPRMCSLMQGSTLPRRSGA
DPRMWSLLQSSTTPRRSGA

SEQ ID NO: 66418 - protein, 19 aa, Artificial Sequence
  Description of Artificial Sequence: Synthetic peptide
  Seed: DPRMCSLMQGSTLPRRSGA
DPRMWSLLQSSTVPRRSGA

SEQ ID NO: 66419 - protein, 19 aa, Artificial Sequence
  Description of Artificial Sequence: Synthetic peptide
  Seed: DPRMCSLMQGSTLPRRSGA
DPRMWSLLQTSTAPRRSGA

SEQ ID NO: 66420 - protein, 19 aa, Artificial Sequence
  Description of Artificial Sequence: Synthetic peptide
  Seed: DPRMCSLMQGSTLPRRSGA
DPRMWSLLQTSTIPRRSGA

SEQ ID NO: 66421 - protein, 19 aa, Artificial Sequence
  Description of Artificial Sequence: Synthetic peptide
  Seed: DPRMCSLMQGSTLPRRSGA
DPRMWSLLQTSTLPRRSGA

SEQ ID NO: 66422 - protein, 19 aa, Artificial Sequence
  Description of Artificial Sequence: Synthetic peptide
  Seed: DPRMCSLMQGSTLPRRSGA
DPRMWSLLQTSTNPRRSGA

SEQ ID NO: 66423 - protein, 19 aa, Artificial Sequence
  Description of Artificial Sequence: Synthetic peptide
  Seed: DPRMCSLMQGSTLPRRSGA
DPRMWSLLQTSTSPRRSGA

SEQ ID NO: 66424 - protein, 19 aa, Artificial Sequence
  Description of Artificial Sequence: Synthetic peptide
  Seed: DPRMCSLMQGSTLPRRSGA
DPRMWSLLQTSTTPRRSGA

SEQ ID NO: 66425 - protein, 19 aa, Artificial Sequence
  Description of Artificial Sequence: Synthetic peptide
  Seed: DPRMCSLMQGSTLPRRSGA
DPRMWSLLQTSTVPRRSGA

SEQ ID NO: 66426 - protein, 19 aa, Artificial Sequence
  Description of Artificial Sequence: Synthetic peptide
  Seed: DPRMCSLMQGSTLPRRSGA
DPRMWSLLQVSTAPRRSGA

SEQ ID NO: 66427 - protein, 19 aa, Artificial Sequence
  Description of Artificial Sequence: Synthetic peptide
  Seed: DPRMCSLMQGSTLPRRSGA
DPRMWSLLQVSTNPRRSGA

SEQ ID NO: 66428 - protein, 19 aa, Artificial Sequence
  Description of Artificial Sequence: Synthetic peptide
  Seed: DPRMCSLMQGSTLPRRSGA
DPRMWSLLQVSTSPRRSGA

SEQ ID NO: 66429 - protein, 19 aa, Artificial Sequence
  Description of Artificial Sequence: Synthetic peptide
  Seed: DPRMCSLMQGSTLPRRSGA
DPRMWSLLQVSTTPRRSGA

SEQ ID NO: 66430 - protein, 19 aa, Artificial Sequence
  Description of Artificial Sequence: Synthetic peptide
  Seed: DPRMCSLMQGSTLPRRSGA
DPRMWSLMQASTAPRRSGA

SEQ ID NO: 66431 - protein, 19 aa, Artificial Sequence
  Description of Artificial Sequence: Synthetic peptide
  Seed: DPRMCSLMQGSTLPRRSGA
DPRMWSLMQASTGPRRSGA

SEQ ID NO: 66432 - protein, 19 aa, Artificial Sequence
  Description of Artificial Sequence: Synthetic peptide
  Seed: DPRMCSLMQGSTLPRRSGA
DPRMWSLMQASTIPRRSGA

SEQ ID NO: 66433 - protein, 19 aa, Artificial Sequence
  Description of Artificial Sequence: Synthetic peptide
  Seed: DPRMCSLMQGSTLPRRSGA
DPRMWSLMQASTLPRRSGA

SEQ ID NO: 66434 - protein, 19 aa, Artificial Sequence
  Description of Artificial Sequence: Synthetic peptide
  Seed: DPRMCSLMQGSTLPRRSGA
DPRMWSLMQASTMPRRSGA

SEQ ID NO: 66435 - protein, 19 aa, Artificial Sequence
  Description of Artificial Sequence: Synthetic peptide
  Seed: DPRMCSLMQGSTLPRRSGA
DPRMWSLMQASTNPRRSGA

SEQ ID NO: 66436 - protein, 19 aa, Artificial Sequence
  Description of Artificial Sequence: Synthetic peptide
  Seed: DPRMCSLMQGSTLPRRSGA
DPRMWSLMQASTSPRRSGA

SEQ ID NO: 66437 - protein, 19 aa, Artificial Sequence
  Description of Artificial Sequence: Synthetic peptide
  Seed: DPRMCSLMQGSTLPRRSGA
DPRMWSLMQASTTPRRSGA

SEQ ID NO: 66438 - protein, 19 aa, Artificial Sequence
  Description of Artificial Sequence: Synthetic peptide
  Seed: DPRMCSLMQGSTLPRRSGA
DPRMWSLMQASTVPRRSGA

SEQ ID NO: 66439 - protein, 19 aa, Artificial Sequence
  Description of Artificial Sequence: Synthetic peptide
  Seed: DPRMCSLMQGSTLPRRSGA
DPRMWSLMQGSTAPRRSGA

SEQ ID NO: 66440 - protein, 19 aa, Artificial Sequence
  Description of Artificial Sequence: Synthetic peptide
  Seed: DPRMCSLMQGSTLPRRSGA
DPRMWSLMQGSTIPRRSGA

SEQ ID NO: 66441 - protein, 19 aa, Artificial Sequence
  Description of Artificial Sequence: Synthetic peptide
  Seed: DPRMCSLMQGSTLPRRSGA
DPRMWSLMQGSTLPRRSGA

SEQ ID NO: 66442 - protein, 19 aa, Artificial Sequence
  Description of Artificial Sequence: Synthetic peptide
  Seed: DPRMCSLMQGSTLPRRSGA
DPRMWSLMQGSTMPRRSGA

SEQ ID NO: 66443 - protein, 19 aa, Artificial Sequence
  Description of Artificial Sequence: Synthetic peptide
  Seed: DPRMCSLMQGSTLPRRSGA
DPRMWSLMQGSTSPRRSGA

SEQ ID NO: 66444 - protein, 19 aa, Artificial Sequence
  Description of Artificial Sequence: Synthetic peptide
  Seed: DPRMCSLMQGSTLPRRSGA
DPRMWSLMQGSTTPRRSGA

SEQ ID NO: 66445 - protein, 19 aa, Artificial Sequence
  Description of Artificial Sequence: Synthetic peptide
  Seed: DPRMCSLMQGSTLPRRSGA
DPRMWSLMQGSTVPRRSGA

SEQ ID NO: 66446 - protein, 19 aa, Artificial Sequence
  Description of Artificial Sequence: Synthetic peptide
  Seed: DPRMCSLMQGSTLPRRSGA
DPRMWSLMQISTAPRRSGA

SEQ ID NO: 66447 - protein, 19 aa, Artificial Sequence
  Description of Artificial Sequence: Synthetic peptide
  Seed: DPRMCSLMQGSTLPRRSGA
DPRMWSLMQISTNPRRSGA

SEQ ID NO: 66448 - protein, 19 aa, Artificial Sequence
  Description of Artificial Sequence: Synthetic peptide
  Seed: DPRMCSLMQGSTLPRRSGA
DPRMWSLMQISTSPRRSGA

SEQ ID NO: 66449 - protein, 19 aa, Artificial Sequence
  Description of Artificial Sequence: Synthetic peptide
  Seed: DPRMCSLMQGSTLPRRSGA
DPRMWSLMQNSTAPRRSGA

SEQ ID NO: 66450 - protein, 19 aa, Artificial Sequence
  Description of Artificial Sequence: Synthetic peptide
  Seed: DPRMCSLMQGSTLPRRSGA
DPRMWSLMQNSTIPRRSGA

SEQ ID NO: 66451 - protein, 19 aa, Artificial Sequence
  Description of Artificial Sequence: Synthetic peptide
  Seed: DPRMCSLMQGSTLPRRSGA
DPRMWSLMQNSTLPRRSGA

SEQ ID NO: 66452 - protein, 19 aa, Artificial Sequence
  Description of Artificial Sequence: Synthetic peptide
  Seed: DPRMCSLMQGSTLPRRSGA
DPRMWSLMQNSTVPRRSGA

SEQ ID NO: 66453 - protein, 19 aa, Artificial Sequence
  Description of Artificial Sequence: Synthetic peptide
  Seed: DPRMCSLMQGSTLPRRSGA
DPRMWSLMQPSTAPRRSGA

SEQ ID NO: 66454 - protein, 19 aa, Artificial Sequence
  Description of Artificial Sequence: Synthetic peptide
  Seed: DPRMCSLMQGSTLPRRSGA
DPRMWSLMQPSTIPRRSGA

SEQ ID NO: 66455 - protein, 19 aa, Artificial Sequence
  Description of Artificial Sequence: Synthetic peptide
  Seed: DPRMCSLMQGSTLPRRSGA
DPRMWSLMQPSTLPRRSGA

SEQ ID NO: 66456 - protein, 19 aa, Artificial Sequence
  Description of Artificial Sequence: Synthetic peptide
  Seed: DPRMCSLMQGSTLPRRSGA
DPRMWSLMQPSTMPRRSGA

SEQ ID NO: 66457 - protein, 19 aa, Artificial Sequence
  Description of Artificial Sequence: Synthetic peptide
  Seed: DPRMCSLMQGSTLPRRSGA
DPRMWSLMQPSTNPRRSGA

SEQ ID NO: 66458 - protein, 19 aa, Artificial Sequence
  Description of Artificial Sequence: Synthetic peptide
  Seed: DPRMCSLMQGSTLPRRSGA
DPRMWSLMQPSTSPRRSGA

SEQ ID NO: 66459 - protein, 19 aa, Artificial Sequence
  Description of Artificial Sequence: Synthetic peptide
  Seed: DPRMCSLMQGSTLPRRSGA
DPRMWSLMQPSTTPRRSGA

SEQ ID NO: 66460 - protein, 19 aa, Artificial Sequence
  Description of Artificial Sequence: Synthetic peptide
  Seed: DPRMCSLMQGSTLPRRSGA
DPRMWSLMQPSTVPRRSGA

SEQ ID NO: 66461 - protein, 19 aa, Artificial Sequence
  Description of Artificial Sequence: Synthetic peptide
  Seed: DPRMCSLMQGSTLPRRSGA
DPRMWSLMQSSTAPRRSGA

SEQ ID NO: 66462 - protein, 19 aa, Artificial Sequence
  Description of Artificial Sequence: Synthetic peptide
  Seed: DPRMCSLMQGSTLPRRSGA
DPRMWSLMQSSTIPRRSGA

SEQ ID NO: 66463 - protein, 19 aa, Artificial Sequence
  Description of Artificial Sequence: Synthetic peptide
  Seed: DPRMCSLMQGSTLPRRSGA
DPRMWSLMQSSTLPRRSGA

SEQ ID NO: 66464 - protein, 19 aa, Artificial Sequence
  Description of Artificial Sequence: Synthetic peptide
  Seed: DPRMCSLMQGSTLPRRSGA
DPRMWSLMQSSTMPRRSGA

SEQ ID NO: 66465 - protein, 19 aa, Artificial Sequence
  Description of Artificial Sequence: Synthetic peptide
  Seed: DPRMCSLMQGSTLPRRSGA
DPRMWSLMQSSTNPRRSGA

SEQ ID NO: 66466 - protein, 19 aa, Artificial Sequence
  Description of Artificial Sequence: Synthetic peptide
  Seed: DPRMCSLMQGSTLPRRSGA
DPRMWSLMQSSTSPRRSGA

SEQ ID NO: 66467 - protein, 19 aa, Artificial Sequence
  Description of Artificial Sequence: Synthetic peptide
  Seed: DPRMCSLMQGSTLPRRSGA
DPRMWSLMQSSTTPRRSGA

SEQ ID NO: 66468 - protein, 19 aa, Artificial Sequence
  Description of Artificial Sequence: Synthetic peptide
  Seed: DPRMCSLMQGSTLPRRSGA
DPRMWSLMQSSTVPRRSGA

SEQ ID NO: 66469 - protein, 19 aa, Artificial Sequence
  Description of Artificial Sequence: Synthetic peptide
  Seed: DPRMCSLMQGSTLPRRSGA
DPRMWSLMQTSTAPRRSGA

SEQ ID NO: 66470 - protein, 19 aa, Artificial Sequence
  Description of Artificial Sequence: Synthetic peptide
  Seed: DPRMCSLMQGSTLPRRSGA
DPRMWSLMQTSTIPRRSGA

SEQ ID NO: 66471 - protein, 19 aa, Artificial Sequence
  Description of Artificial Sequence: Synthetic peptide
  Seed: DPRMCSLMQGSTLPRRSGA
DPRMWSLMQTSTLPRRSGA

SEQ ID NO: 66472 - protein, 19 aa, Artificial Sequence
  Description of Artificial Sequence: Synthetic peptide
  Seed: DPRMCSLMQGSTLPRRSGA
DPRMWSLMQTSTNPRRSGA

SEQ ID NO: 66473 - protein, 19 aa, Artificial Sequence
  Description of Artificial Sequence: Synthetic peptide
  Seed: DPRMCSLMQGSTLPRRSGA
DPRMWSLMQTSTSPRRSGA

SEQ ID NO: 66474 - protein, 19 aa, Artificial Sequence
  Description of Artificial Sequence: Synthetic peptide
  Seed: DPRMCSLMQGSTLPRRSGA
DPRMWSLMQTSTTPRRSGA

SEQ ID NO: 66475 - protein, 19 aa, Artificial Sequence
  Description of Artificial Sequence: Synthetic peptide
  Seed: DPRMCSLMQGSTLPRRSGA
DPRMWSLMQTSTVPRRSGA

SEQ ID NO: 66476 - protein, 19 aa, Artificial Sequence
  Description of Artificial Sequence: Synthetic peptide
  Seed: DPRMCSLMQGSTLPRRSGA
DPRMWSLMQVSTAPRRSGA

SEQ ID NO: 66477 - protein, 19 aa, Artificial Sequence
  Description of Artificial Sequence: Synthetic peptide
  Seed: DPRMCSLMQGSTLPRRSGA
DPRMWSLMQVSTNPRRSGA

SEQ ID NO: 66478 - protein, 19 aa, Artificial Sequence
  Description of Artificial Sequence: Synthetic peptide
  Seed: DPRMCSLMQGSTLPRRSGA
DPRMWSLMQVSTSPRRSGA

SEQ ID NO: 66479 - protein, 19 aa, Artificial Sequence
  Description of Artificial Sequence: Synthetic peptide
  Seed: DPRMCSLMQGSTLPRRSGA
DPRMWSLMQVSTTPRRSGA

SEQ ID NO: 66480 - protein, 19 aa, Artificial Sequence
  Description of Artificial Sequence: Synthetic peptide
  Seed: DPRMCSLMQGSTLPRRSGA
DPRMWSLMQVSTVPRRSGA

SEQ ID NO: 66481 - protein, 19 aa, Artificial Sequence
  Description of Artificial Sequence: Synthetic peptide
  Seed: DPRMCSLMQGSTLPRRSGA
DPRMWSLQQASTAPRRSGA

SEQ ID NO: 66482 - protein, 19 aa, Artificial Sequence
  Description of Artificial Sequence: Synthetic peptide
  Seed: DPRMCSLMQGSTLPRRSGA
DPRMWSLQQASTIPRRSGA

SEQ ID NO: 66483 - protein, 19 aa, Artificial Sequence
  Description of Artificial Sequence: Synthetic peptide
  Seed: DPRMCSLMQGSTLPRRSGA
DPRMWSLQQASTLPRRSGA

SEQ ID NO: 66484 - protein, 19 aa, Artificial Sequence
  Description of Artificial Sequence: Synthetic peptide
  Seed: DPRMCSLMQGSTLPRRSGA
DPRMWSLQQASTVPRRSGA

SEQ ID NO: 66485 - protein, 19 aa, Artificial Sequence
  Description of Artificial Sequence: Synthetic peptide
  Seed: DPRMCSLMQGSTLPRRSGA
DPRMWSLQQGSTLPRRSGA

SEQ ID NO: 66486 - protein, 19 aa, Artificial Sequence
  Description of Artificial Sequence: Synthetic peptide
  Seed: DPRMCSLMQGSTLPRRSGA
DPRMWSLQQGSTVPRRSGA

SEQ ID NO: 66487 - protein, 19 aa, Artificial Sequence
  Description of Artificial Sequence: Synthetic peptide
  Seed: DPRMCSLMQGSTLPRRSGA
DPRMWSLVQASTAPRRSGA

SEQ ID NO: 66488 - protein, 19 aa, Artificial Sequence
  Description of Artificial Sequence: Synthetic peptide
  Seed: DPRMCSLMQGSTLPRRSGA
DPRMWSLVQASTIPRRSGA

SEQ ID NO: 66489 - protein, 19 aa, Artificial Sequence
  Description of Artificial Sequence: Synthetic peptide
  Seed: DPRMCSLMQGSTLPRRSGA
DPRMWSLVQASTLPRRSGA

SEQ ID NO: 66490 - protein, 19 aa, Artificial Sequence
  Description of Artificial Sequence: Synthetic peptide
  Seed: DPRMCSLMQGSTLPRRSGA
DPRMWSLVQASTVPRRSGA

SEQ ID NO: 66491 - protein, 19 aa, Artificial Sequence
  Description of Artificial Sequence: Synthetic peptide
  Seed: DPRMCSLMQGSTLPRRSGA
DPRMWSLVQGSTAPRRSGA

SEQ ID NO: 66492 - protein, 19 aa, Artificial Sequence
  Description of Artificial Sequence: Synthetic peptide
  Seed: DPRMCSLMQGSTLPRRSGA
DPRMWSLVQGSTIPRRSGA

SEQ ID NO: 66493 - protein, 19 aa, Artificial Sequence
  Description of Artificial Sequence: Synthetic peptide
  Seed: DPRMCSLMQGSTLPRRSGA
DPRMWSLVQGSTLPRRSGA

SEQ ID NO: 66494 - protein, 19 aa, Artificial Sequence
  Description of Artificial Sequence: Synthetic peptide
  Seed: DPRMCSLMQGSTLPRRSGA
DPRMWSLVQGSTVPRRSGA

SEQ ID NO: 66495 - protein, 19 aa, Artificial Sequence
  Description of Artificial Sequence: Synthetic peptide
  Seed: DPRMCSLMQGSTLPRRSGA
DPRMWSLVQSSTVPRRSGA

SEQ ID NO: 66496 - protein, 19 aa, Artificial Sequence
  Description of Artificial Sequence: Synthetic peptide
  Seed: DPRMCSLMQGSTLPRRSGA
DPRMYSLAQASTAPRRSGA

SEQ ID NO: 66497 - protein, 19 aa, Artificial Sequence
  Description of Artificial Sequence: Synthetic peptide
  Seed: DPRMCSLMQGSTLPRRSGA
DPRMYSLAQASTIPRRSGA

SEQ ID NO: 66498 - protein, 19 aa, Artificial Sequence
  Description of Artificial Sequence: Synthetic peptide
  Seed: DPRMCSLMQGSTLPRRSGA
DPRMYSLAQASTLPRRSGA

SEQ ID NO: 66499 - protein, 19 aa, Artificial Sequence
  Description of Artificial Sequence: Synthetic peptide
  Seed: DPRMCSLMQGSTLPRRSGA
DPRMYSLAQASTMPRRSGA

SEQ ID NO: 66500 - protein, 19 aa, Artificial Sequence
  Description of Artificial Sequence: Synthetic peptide
  Seed: DPRMCSLMQGSTLPRRSGA
DPRMYSLAQASTNPRRSGA

SEQ ID NO: 66501 - protein, 19 aa, Artificial Sequence
  Description of Artificial Sequence: Synthetic peptide
  Seed: DPRMCSLMQGSTLPRRSGA
DPRMYSLAQASTSPRRSGA

SEQ ID NO: 66502 - protein, 19 aa, Artificial Sequence
  Description of Artificial Sequence: Synthetic peptide
  Seed: DPRMCSLMQGSTLPRRSGA
DPRMYSLAQASTTPRRSGA

SEQ ID NO: 66503 - protein, 19 aa, Artificial Sequence
  Description of Artificial Sequence: Synthetic peptide
  Seed: DPRMCSLMQGSTLPRRSGA
DPRMYSLAQASTVPRRSGA

SEQ ID NO: 66504 - protein, 19 aa, Artificial Sequence
  Description of Artificial Sequence: Synthetic peptide
  Seed: DPRMCSLMQGSTLPRRSGA
DPRMYSLAQGSTAPRRSGA

SEQ ID NO: 66505 - protein, 19 aa, Artificial Sequence
  Description of Artificial Sequence: Synthetic peptide
  Seed: DPRMCSLMQGSTLPRRSGA
DPRMYSLAQGSTIPRRSGA

SEQ ID NO: 66506 - protein, 19 aa, Artificial Sequence
  Description of Artificial Sequence: Synthetic peptide
  Seed: DPRMCSLMQGSTLPRRSGA
DPRMYSLAQGSTLPRRSGA

SEQ ID NO: 66507 - protein, 19 aa, Artificial Sequence
  Description of Artificial Sequence: Synthetic peptide
  Seed: DPRMCSLMQGSTLPRRSGA
DPRMYSLAQGSTMPRRSGA

SEQ ID NO: 66508 - protein, 19 aa, Artificial Sequence
  Description of Artificial Sequence: Synthetic peptide
  Seed: DPRMCSLMQGSTLPRRSGA
DPRMYSLAQGSTVPRRSGA

SEQ ID NO: 66509 - protein, 19 aa, Artificial Sequence
  Description of Artificial Sequence: Synthetic peptide
  Seed: DPRMCSLMQGSTLPRRSGA
DPRMYSLAQISTAPRRSGA

SEQ ID NO: 66510 - protein, 19 aa, Artificial Sequence
  Description of Artificial Sequence: Synthetic peptide
  Seed: DPRMCSLMQGSTLPRRSGA
DPRMYSLAQISTNPRRSGA

SEQ ID NO: 66511 - protein, 19 aa, Artificial Sequence
  Description of Artificial Sequence: Synthetic peptide
  Seed: DPRMCSLMQGSTLPRRSGA
DPRMYSLAQISTSPRRSGA

SEQ ID NO: 66512 - protein, 19 aa, Artificial Sequence
  Description of Artificial Sequence: Synthetic peptide
  Seed: DPRMCSLMQGSTLPRRSGA
DPRMYSLAQISTVPRRSGA

SEQ ID NO: 66513 - protein, 19 aa, Artificial Sequence
  Description of Artificial Sequence: Synthetic peptide
  Seed: DPRMCSLMQGSTLPRRSGA
DPRMYSLAQNSTIPRRSGA

SEQ ID NO: 66514 - protein, 19 aa, Artificial Sequence
  Description of Artificial Sequence: Synthetic peptide
  Seed: DPRMCSLMQGSTLPRRSGA
DPRMYSLAQNSTLPRRSGA

SEQ ID NO: 66515 - protein, 19 aa, Artificial Sequence
  Description of Artificial Sequence: Synthetic peptide
  Seed: DPRMCSLMQGSTLPRRSGA
DPRMYSLAQNSTVPRRSGA

SEQ ID NO: 66516 - protein, 19 aa, Artificial Sequence
  Description of Artificial Sequence: Synthetic peptide
  Seed: DPRMCSLMQGSTLPRRSGA
DPRMYSLAQPSTAPRRSGA

SEQ ID NO: 66517 - protein, 19 aa, Artificial Sequence
  Description of Artificial Sequence: Synthetic peptide
  Seed: DPRMCSLMQGSTLPRRSGA
DPRMYSLAQPSTIPRRSGA

SEQ ID NO: 66518 - protein, 19 aa, Artificial Sequence
  Description of Artificial Sequence: Synthetic peptide
  Seed: DPRMCSLMQGSTLPRRSGA
DPRMYSLAQPSTLPRRSGA

SEQ ID NO: 66519 - protein, 19 aa, Artificial Sequence
  Description of Artificial Sequence: Synthetic peptide
  Seed: DPRMCSLMQGSTLPRRSGA
DPRMYSLAQPSTNPRRSGA

SEQ ID NO: 66520 - protein, 19 aa, Artificial Sequence
  Description of Artificial Sequence: Synthetic peptide
  Seed: DPRMCSLMQGSTLPRRSGA
DPRMYSLAQPSTSPRRSGA

SEQ ID NO: 66521 - protein, 19 aa, Artificial Sequence
  Description of Artificial Sequence: Synthetic peptide
  Seed: DPRMCSLMQGSTLPRRSGA
DPRMYSLAQPSTVPRRSGA

SEQ ID NO: 66522 - protein, 19 aa, Artificial Sequence
  Description of Artificial Sequence: Synthetic peptide
  Seed: DPRMCSLMQGSTLPRRSGA
DPRMYSLAQSSTAPRRSGA

SEQ ID NO: 66523 - protein, 19 aa, Artificial Sequence
  Description of Artificial Sequence: Synthetic peptide
  Seed: DPRMCSLMQGSTLPRRSGA
DPRMYSLAQSSTIPRRSGA

SEQ ID NO: 66524 - protein, 19 aa, Artificial Sequence
  Description of Artificial Sequence: Synthetic peptide
  Seed: DPRMCSLMQGSTLPRRSGA
DPRMYSLAQSSTLPRRSGA

SEQ ID NO: 66525 - protein, 19 aa, Artificial Sequence
  Description of Artificial Sequence: Synthetic peptide
  Seed: DPRMCSLMQGSTLPRRSGA
DPRMYSLAQSSTMPRRSGA

SEQ ID NO: 66526 - protein, 19 aa, Artificial Sequence
  Description of Artificial Sequence: Synthetic peptide
  Seed: DPRMCSLMQGSTLPRRSGA
DPRMYSLAQSSTNPRRSGA

SEQ ID NO: 66527 - protein, 19 aa, Artificial Sequence
  Description of Artificial Sequence: Synthetic peptide
  Seed: DPRMCSLMQGSTLPRRSGA
DPRMYSLAQSSTSPRRSGA

SEQ ID NO: 66528 - protein, 19 aa, Artificial Sequence
  Description of Artificial Sequence: Synthetic peptide
  Seed: DPRMCSLMQGSTLPRRSGA
DPRMYSLAQSSTVPRRSGA

SEQ ID NO: 66529 - protein, 19 aa, Artificial Sequence
  Description of Artificial Sequence: Synthetic peptide
  Seed: DPRMCSLMQGSTLPRRSGA
DPRMYSLAQTSTAPRRSGA

SEQ ID NO: 66530 - protein, 19 aa, Artificial Sequence
  Description of Artificial Sequence: Synthetic peptide
  Seed: DPRMCSLMQGSTLPRRSGA
DPRMYSLAQTSTIPRRSGA

SEQ ID NO: 66531 - protein, 19 aa, Artificial Sequence
  Description of Artificial Sequence: Synthetic peptide
  Seed: DPRMCSLMQGSTLPRRSGA
DPRMYSLAQTSTLPRRSGA

SEQ ID NO: 66532 - protein, 19 aa, Artificial Sequence
  Description of Artificial Sequence: Synthetic peptide
  Seed: DPRMCSLMQGSTLPRRSGA
DPRMYSLAQTSTNPRRSGA

SEQ ID NO: 66533 - protein, 19 aa, Artificial Sequence
  Description of Artificial Sequence: Synthetic peptide
  Seed: DPRMCSLMQGSTLPRRSGA
DPRMYSLAQTSTSPRRSGA

SEQ ID NO: 66534 - protein, 19 aa, Artificial Sequence
  Description of Artificial Sequence: Synthetic peptide
  Seed: DPRMCSLMQGSTLPRRSGA
DPRMYSLAQTSTVPRRSGA

SEQ ID NO: 66535 - protein, 19 aa, Artificial Sequence
  Description of Artificial Sequence: Synthetic peptide
  Seed: DPRMCSLMQGSTLPRRSGA
DPRMYSLAQVSTAPRRSGA

SEQ ID NO: 66536 - protein, 19 aa, Artificial Sequence
  Description of Artificial Sequence: Synthetic peptide
  Seed: DPRMCSLMQGSTLPRRSGA
DPRMYSLAQVSTIPRRSGA

SEQ ID NO: 66537 - protein, 19 aa, Artificial Sequence
  Description of Artificial Sequence: Synthetic peptide
  Seed: DPRMCSLMQGSTLPRRSGA
DPRMYSLAQVSTLPRRSGA

SEQ ID NO: 66538 - protein, 19 aa, Artificial Sequence
  Description of Artificial Sequence: Synthetic peptide
  Seed: DPRMCSLMQGSTLPRRSGA
DPRMYSLAQVSTMPRRSGA

SEQ ID NO: 66539 - protein, 19 aa, Artificial Sequence
  Description of Artificial Sequence: Synthetic peptide
  Seed: DPRMCSLMQGSTLPRRSGA
DPRMYSLAQVSTNPRRSGA

SEQ ID NO: 66540 - protein, 19 aa, Artificial Sequence
  Description of Artificial Sequence: Synthetic peptide
  Seed: DPRMCSLMQGSTLPRRSGA
DPRMYSLAQVSTSPRRSGA

SEQ ID NO: 66541 - protein, 19 aa, Artificial Sequence
  Description of Artificial Sequence: Synthetic peptide
  Seed: DPRMCSLMQGSTLPRRSGA
DPRMYSLAQVSTTPRRSGA

SEQ ID NO: 66542 - protein, 19 aa, Artificial Sequence
  Description of Artificial Sequence: Synthetic peptide
  Seed: DPRMCSLMQGSTLPRRSGA
DPRMYSLAQVSTVPRRSGA

SEQ ID NO: 66543 - protein, 19 aa, Artificial Sequence
  Description of Artificial Sequence: Synthetic peptide
  Seed: DPRMCSLMQGSTLPRRSGA
DPRMYSLEQASTIPRRSGA

SEQ ID NO: 66544 - protein, 19 aa, Artificial Sequence
  Description of Artificial Sequence: Synthetic peptide
  Seed: DPRMCSLMQGSTLPRRSGA
DPRMYSLEQASTLPRRSGA

SEQ ID NO: 66545 - protein, 19 aa, Artificial Sequence
  Description of Artificial Sequence: Synthetic peptide
  Seed: DPRMCSLMQGSTLPRRSGA
DPRMYSLEQASTVPRRSGA

SEQ ID NO: 66546 - protein, 19 aa, Artificial Sequence
  Description of Artificial Sequence: Synthetic peptide
  Seed: DPRMCSLMQGSTLPRRSGA
DPRMYSLFQASTAPRRSGA

SEQ ID NO: 66547 - protein, 19 aa, Artificial Sequence
  Description of Artificial Sequence: Synthetic peptide
  Seed: DPRMCSLMQGSTLPRRSGA
DPRMYSLFQASTIPRRSGA

SEQ ID NO: 66548 - protein, 19 aa, Artificial Sequence
  Description of Artificial Sequence: Synthetic peptide
  Seed: DPRMCSLMQGSTLPRRSGA
DPRMYSLFQASTLPRRSGA

SEQ ID NO: 66549 - protein, 19 aa, Artificial Sequence
  Description of Artificial Sequence: Synthetic peptide
  Seed: DPRMCSLMQGSTLPRRSGA
DPRMYSLFQASTSPRRSGA

SEQ ID NO: 66550 - protein, 19 aa, Artificial Sequence
  Description of Artificial Sequence: Synthetic peptide
  Seed: DPRMCSLMQGSTLPRRSGA
DPRMYSLFQASTVPRRSGA

SEQ ID NO: 66551 - protein, 19 aa, Artificial Sequence
  Description of Artificial Sequence: Synthetic peptide
  Seed: DPRMCSLMQGSTLPRRSGA
DPRMYSLFQPSTAPRRSGA

SEQ ID NO: 66552 - protein, 19 aa, Artificial Sequence
  Description of Artificial Sequence: Synthetic peptide
  Seed: DPRMCSLMQGSTLPRRSGA
DPRMYSLFQVSTAPRRSGA

SEQ ID NO: 66553 - protein, 19 aa, Artificial Sequence
  Description of Artificial Sequence: Synthetic peptide
  Seed: DPRMCSLMQGSTLPRRSGA
DPRMYSLGQASTIPRRSGA

SEQ ID NO: 66554 - protein, 19 aa, Artificial Sequence
  Description of Artificial Sequence: Synthetic peptide
  Seed: DPRMCSLMQGSTLPRRSGA
DPRMYSLGQASTLPRRSGA

SEQ ID NO: 66555 - protein, 19 aa, Artificial Sequence
  Description of Artificial Sequence: Synthetic peptide
  Seed: DPRMCSLMQGSTLPRRSGA
DPRMYSLGQASTVPRRSGA

SEQ ID NO: 66556 - protein, 19 aa, Artificial Sequence
  Description of Artificial Sequence: Synthetic peptide
  Seed: DPRMCSLMQGSTLPRRSGA
DPRMYSLIQASTAPRRSGA

SEQ ID NO: 66557 - protein, 19 aa, Artificial Sequence
  Description of Artificial Sequence: Synthetic peptide
  Seed: DPRMCSLMQGSTLPRRSGA
DPRMYSLIQASTGPRRSGA

SEQ ID NO: 66558 - protein, 19 aa, Artificial Sequence
  Description of Artificial Sequence: Synthetic peptide
  Seed: DPRMCSLMQGSTLPRRSGA
DPRMYSLIQASTHPRRSGA

SEQ ID NO: 66559 - protein, 19 aa, Artificial Sequence
  Description of Artificial Sequence: Synthetic peptide
  Seed: DPRMCSLMQGSTLPRRSGA
DPRMYSLIQASTIPRRSGA

SEQ ID NO: 66560 - protein, 19 aa, Artificial Sequence
  Description of Artificial Sequence: Synthetic peptide
  Seed: DPRMCSLMQGSTLPRRSGA
DPRMYSLIQASTLPRRSGA

SEQ ID NO: 66561 - protein, 19 aa, Artificial Sequence
  Description of Artificial Sequence: Synthetic peptide
  Seed: DPRMCSLMQGSTLPRRSGA
DPRMYSLIQASTMPRRSGA

SEQ ID NO: 66562 - protein, 19 aa, Artificial Sequence
  Description of Artificial Sequence: Synthetic peptide
  Seed: DPRMCSLMQGSTLPRRSGA
DPRMYSLIQASTNPRRSGA

SEQ ID NO: 66563 - protein, 19 aa, Artificial Sequence
  Description of Artificial Sequence: Synthetic peptide
  Seed: DPRMCSLMQGSTLPRRSGA
DPRMYSLIQASTQPRRSGA

SEQ ID NO: 66564 - protein, 19 aa, Artificial Sequence
  Description of Artificial Sequence: Synthetic peptide
  Seed: DPRMCSLMQGSTLPRRSGA
DPRMYSLIQASTSPRRSGA

SEQ ID NO: 66565 - protein, 19 aa, Artificial Sequence
  Description of Artificial Sequence: Synthetic peptide
  Seed: DPRMCSLMQGSTLPRRSGA
DPRMYSLIQASTTPRRSGA

SEQ ID NO: 66566 - protein, 19 aa, Artificial Sequence
  Description of Artificial Sequence: Synthetic peptide
  Seed: DPRMCSLMQGSTLPRRSGA
DPRMYSLIQASTVPRRSGA

SEQ ID NO: 66567 - protein, 19 aa, Artificial Sequence
  Description of Artificial Sequence: Synthetic peptide
  Seed: DPRMCSLMQGSTLPRRSGA
DPRMYSLIQGSTAPRRSGA

SEQ ID NO: 66568 - protein, 19 aa, Artificial Sequence
  Description of Artificial Sequence: Synthetic peptide
  Seed: DPRMCSLMQGSTLPRRSGA
DPRMYSLIQGSTIPRRSGA

SEQ ID NO: 66569 - protein, 19 aa, Artificial Sequence
  Description of Artificial Sequence: Synthetic peptide
  Seed: DPRMCSLMQGSTLPRRSGA
DPRMYSLIQGSTLPRRSGA

SEQ ID NO: 66570 - protein, 19 aa, Artificial Sequence
  Description of Artificial Sequence: Synthetic peptide
  Seed: DPRMCSLMQGSTLPRRSGA
DPRMYSLIQGSTMPRRSGA

SEQ ID NO: 66571 - protein, 19 aa, Artificial Sequence
  Description of Artificial Sequence: Synthetic peptide
  Seed: DPRMCSLMQGSTLPRRSGA
DPRMYSLIQGSTNPRRSGA

SEQ ID NO: 66572 - protein, 19 aa, Artificial Sequence
  Description of Artificial Sequence: Synthetic peptide
  Seed: DPRMCSLMQGSTLPRRSGA
DPRMYSLIQGSTSPRRSGA

SEQ ID NO: 66573 - protein, 19 aa, Artificial Sequence
  Description of Artificial Sequence: Synthetic peptide
  Seed: DPRMCSLMQGSTLPRRSGA
DPRMYSLIQGSTTPRRSGA

SEQ ID NO: 66574 - protein, 19 aa, Artificial Sequence
  Description of Artificial Sequence: Synthetic peptide
  Seed: DPRMCSLMQGSTLPRRSGA
DPRMYSLIQGSTVPRRSGA

SEQ ID NO: 66575 - protein, 19 aa, Artificial Sequence
  Description of Artificial Sequence: Synthetic peptide
  Seed: DPRMCSLMQGSTLPRRSGA
DPRMYSLIQISTAPRRSGA

SEQ ID NO: 66576 - protein, 19 aa, Artificial Sequence
  Description of Artificial Sequence: Synthetic peptide
  Seed: DPRMCSLMQGSTLPRRSGA
DPRMYSLIQISTIPRRSGA

SEQ ID NO: 66577 - protein, 19 aa, Artificial Sequence
  Description of Artificial Sequence: Synthetic peptide
  Seed: DPRMCSLMQGSTLPRRSGA
DPRMYSLIQISTLPRRSGA

SEQ ID NO: 66578 - protein, 19 aa, Artificial Sequence
  Description of Artificial Sequence: Synthetic peptide
  Seed: DPRMCSLMQGSTLPRRSGA
DPRMYSLIQISTMPRRSGA

SEQ ID NO: 66579 - protein, 19 aa, Artificial Sequence
  Description of Artificial Sequence: Synthetic peptide
  Seed: DPRMCSLMQGSTLPRRSGA
DPRMYSLIQISTNPRRSGA

SEQ ID NO: 66580 - protein, 19 aa, Artificial Sequence
  Description of Artificial Sequence: Synthetic peptide
  Seed: DPRMCSLMQGSTLPRRSGA
DPRMYSLIQISTSPRRSGA

SEQ ID NO: 66581 - protein, 19 aa, Artificial Sequence
  Description of Artificial Sequence: Synthetic peptide
  Seed: DPRMCSLMQGSTLPRRSGA
DPRMYSLIQISTTPRRSGA

SEQ ID NO: 66582 - protein, 19 aa, Artificial Sequence
  Description of Artificial Sequence: Synthetic peptide
  Seed: DPRMCSLMQGSTLPRRSGA
DPRMYSLIQISTVPRRSGA

SEQ ID NO: 66583 - protein, 19 aa, Artificial Sequence
  Description of Artificial Sequence: Synthetic peptide
  Seed: DPRMCSLMQGSTLPRRSGA
DPRMYSLIQLSTAPRRSGA

SEQ ID NO: 66584 - protein, 19 aa, Artificial Sequence
  Description of Artificial Sequence: Synthetic peptide
  Seed: DPRMCSLMQGSTLPRRSGA
DPRMYSLIQMSTAPRRSGA

SEQ ID NO: 66585 - protein, 19 aa, Artificial Sequence
  Description of Artificial Sequence: Synthetic peptide
  Seed: DPRMCSLMQGSTLPRRSGA
DPRMYSLIQNSTAPRRSGA

SEQ ID NO: 66586 - protein, 19 aa, Artificial Sequence
  Description of Artificial Sequence: Synthetic peptide
  Seed: DPRMCSLMQGSTLPRRSGA
DPRMYSLIQNSTIPRRSGA

SEQ ID NO: 66587 - protein, 19 aa, Artificial Sequence
  Description of Artificial Sequence: Synthetic peptide
  Seed: DPRMCSLMQGSTLPRRSGA
DPRMYSLIQNSTLPRRSGA

SEQ ID NO: 66588 - protein, 19 aa, Artificial Sequence
  Description of Artificial Sequence: Synthetic peptide
  Seed: DPRMCSLMQGSTLPRRSGA
DPRMYSLIQNSTNPRRSGA

SEQ ID NO: 66589 - protein, 19 aa, Artificial Sequence
  Description of Artificial Sequence: Synthetic peptide
  Seed: DPRMCSLMQGSTLPRRSGA
DPRMYSLIQNSTSPRRSGA

SEQ ID NO: 66590 - protein, 19 aa, Artificial Sequence
  Description of Artificial Sequence: Synthetic peptide
  Seed: DPRMCSLMQGSTLPRRSGA
DPRMYSLIQNSTTPRRSGA

SEQ ID NO: 66591 - protein, 19 aa, Artificial Sequence
  Description of Artificial Sequence: Synthetic peptide
  Seed: DPRMCSLMQGSTLPRRSGA
DPRMYSLIQNSTVPRRSGA

SEQ ID NO: 66592 - protein, 19 aa, Artificial Sequence
  Description of Artificial Sequence: Synthetic peptide
  Seed: DPRMCSLMQGSTLPRRSGA
DPRMYSLIQPSTAPRRSGA

SEQ ID NO: 66593 - protein, 19 aa, Artificial Sequence
  Description of Artificial Sequence: Synthetic peptide
  Seed: DPRMCSLMQGSTLPRRSGA
DPRMYSLIQPSTGPRRSGA

SEQ ID NO: 66594 - protein, 19 aa, Artificial Sequence
  Description of Artificial Sequence: Synthetic peptide
  Seed: DPRMCSLMQGSTLPRRSGA
DPRMYSLIQPSTIPRRSGA

SEQ ID NO: 66595 - protein, 19 aa, Artificial Sequence
  Description of Artificial Sequence: Synthetic peptide
  Seed: DPRMCSLMQGSTLPRRSGA
DPRMYSLIQPSTLPRRSGA

SEQ ID NO: 66596 - protein, 19 aa, Artificial Sequence
  Description of Artificial Sequence: Synthetic peptide
  Seed: DPRMCSLMQGSTLPRRSGA
DPRMYSLIQPSTMPRRSGA

SEQ ID NO: 66597 - protein, 19 aa, Artificial Sequence
  Description of Artificial Sequence: Synthetic peptide
  Seed: DPRMCSLMQGSTLPRRSGA
DPRMYSLIQPSTNPRRSGA

SEQ ID NO: 66598 - protein, 19 aa, Artificial Sequence
  Description of Artificial Sequence: Synthetic peptide
  Seed: DPRMCSLMQGSTLPRRSGA
DPRMYSLIQPSTSPRRSGA

SEQ ID NO: 66599 - protein, 19 aa, Artificial Sequence
  Description of Artificial Sequence: Synthetic peptide
  Seed: DPRMCSLMQGSTLPRRSGA
DPRMYSLIQPSTTPRRSGA

SEQ ID NO: 66600 - protein, 19 aa, Artificial Sequence
  Description of Artificial Sequence: Synthetic peptide
  Seed: DPRMCSLMQGSTLPRRSGA
DPRMYSLIQPSTVPRRSGA

SEQ ID NO: 66601 - protein, 19 aa, Artificial Sequence
  Description of Artificial Sequence: Synthetic peptide
  Seed: DPRMCSLMQGSTLPRRSGA
DPRMYSLIQSSTAPRRSGA

SEQ ID NO: 66602 - protein, 19 aa, Artificial Sequence
  Description of Artificial Sequence: Synthetic peptide
  Seed: DPRMCSLMQGSTLPRRSGA
DPRMYSLIQSSTGPRRSGA

SEQ ID NO: 66603 - protein, 19 aa, Artificial Sequence
  Description of Artificial Sequence: Synthetic peptide
  Seed: DPRMCSLMQGSTLPRRSGA
DPRMYSLIQSSTIPRRSGA

SEQ ID NO: 66604 - protein, 19 aa, Artificial Sequence
  Description of Artificial Sequence: Synthetic peptide
  Seed: DPRMCSLMQGSTLPRRSGA
DPRMYSLIQSSTLPRRSGA

SEQ ID NO: 66605 - protein, 19 aa, Artificial Sequence
  Description of Artificial Sequence: Synthetic peptide
  Seed: DPRMCSLMQGSTLPRRSGA
DPRMYSLIQSSTMPRRSGA

SEQ ID NO: 66606 - protein, 19 aa, Artificial Sequence
  Description of Artificial Sequence: Synthetic peptide
  Seed: DPRMCSLMQGSTLPRRSGA
DPRMYSLIQSSTNPRRSGA

SEQ ID NO: 66607 - protein, 19 aa, Artificial Sequence
  Description of Artificial Sequence: Synthetic peptide
  Seed: DPRMCSLMQGSTLPRRSGA
DPRMYSLIQSSTSPRRSGA

SEQ ID NO: 66608 - protein, 19 aa, Artificial Sequence
  Description of Artificial Sequence: Synthetic peptide
  Seed: DPRMCSLMQGSTLPRRSGA
DPRMYSLIQSSTTPRRSGA

SEQ ID NO: 66609 - protein, 19 aa, Artificial Sequence
  Description of Artificial Sequence: Synthetic peptide
  Seed: DPRMCSLMQGSTLPRRSGA
DPRMYSLIQSSTVPRRSGA

SEQ ID NO: 66610 - protein, 19 aa, Artificial Sequence
  Description of Artificial Sequence: Synthetic peptide
  Seed: DPRMCSLMQGSTLPRRSGA
DPRMYSLIQTSTAPRRSGA

SEQ ID NO: 66611 - protein, 19 aa, Artificial Sequence
  Description of Artificial Sequence: Synthetic peptide
  Seed: DPRMCSLMQGSTLPRRSGA
DPRMYSLIQTSTIPRRSGA

SEQ ID NO: 66612 - protein, 19 aa, Artificial Sequence
  Description of Artificial Sequence: Synthetic peptide
  Seed: DPRMCSLMQGSTLPRRSGA
DPRMYSLIQTSTLPRRSGA

SEQ ID NO: 66613 - protein, 19 aa, Artificial Sequence
  Description of Artificial Sequence: Synthetic peptide
  Seed: DPRMCSLMQGSTLPRRSGA
DPRMYSLIQTSTMPRRSGA

SEQ ID NO: 66614 - protein, 19 aa, Artificial Sequence
  Description of Artificial Sequence: Synthetic peptide
  Seed: DPRMCSLMQGSTLPRRSGA
DPRMYSLIQTSTNPRRSGA

SEQ ID NO: 66615 - protein, 19 aa, Artificial Sequence
  Description of Artificial Sequence: Synthetic peptide
  Seed: DPRMCSLMQGSTLPRRSGA
DPRMYSLIQTSTSPRRSGA

SEQ ID NO: 66616 - protein, 19 aa, Artificial Sequence
  Description of Artificial Sequence: Synthetic peptide
  Seed: DPRMCSLMQGSTLPRRSGA
DPRMYSLIQTSTTPRRSGA

SEQ ID NO: 66617 - protein, 19 aa, Artificial Sequence
  Description of Artificial Sequence: Synthetic peptide
  Seed: DPRMCSLMQGSTLPRRSGA
DPRMYSLIQTSTVPRRSGA

SEQ ID NO: 66618 - protein, 19 aa, Artificial Sequence
  Description of Artificial Sequence: Synthetic peptide
  Seed: DPRMCSLMQGSTLPRRSGA
DPRMYSLIQVSTAPRRSGA

SEQ ID NO: 66619 - protein, 19 aa, Artificial Sequence
  Description of Artificial Sequence: Synthetic peptide
  Seed: DPRMCSLMQGSTLPRRSGA
DPRMYSLIQVSTGPRRSGA

SEQ ID NO: 66620 - protein, 19 aa, Artificial Sequence
  Description of Artificial Sequence: Synthetic peptide
  Seed: DPRMCSLMQGSTLPRRSGA
DPRMYSLIQVSTHPRRSGA

SEQ ID NO: 66621 - protein, 19 aa, Artificial Sequence
  Description of Artificial Sequence: Synthetic peptide
  Seed: DPRMCSLMQGSTLPRRSGA
DPRMYSLIQVSTIPRRSGA

SEQ ID NO: 66622 - protein, 19 aa, Artificial Sequence
  Description of Artificial Sequence: Synthetic peptide
  Seed: DPRMCSLMQGSTLPRRSGA
DPRMYSLIQVSTLPRRSGA

SEQ ID NO: 66623 - protein, 19 aa, Artificial Sequence
  Description of Artificial Sequence: Synthetic peptide
  Seed: DPRMCSLMQGSTLPRRSGA
DPRMYSLIQVSTMPRRSGA

SEQ ID NO: 66624 - protein, 19 aa, Artificial Sequence
  Description of Artificial Sequence: Synthetic peptide
  Seed: DPRMCSLMQGSTLPRRSGA
DPRMYSLIQVSTNPRRSGA

SEQ ID NO: 66625 - protein, 19 aa, Artificial Sequence
  Description of Artificial Sequence: Synthetic peptide
  Seed: DPRMCSLMQGSTLPRRSGA
DPRMYSLIQVSTSPRRSGA

SEQ ID NO: 66626 - protein, 19 aa, Artificial Sequence
  Description of Artificial Sequence: Synthetic peptide
  Seed: DPRMCSLMQGSTLPRRSGA
DPRMYSLIQVSTTPRRSGA

SEQ ID NO: 66627 - protein, 19 aa, Artificial Sequence
  Description of Artificial Sequence: Synthetic peptide
  Seed: DPRMCSLMQGSTLPRRSGA
DPRMYSLIQVSTVPRRSGA

SEQ ID NO: 66628 - protein, 19 aa, Artificial Sequence
  Description of Artificial Sequence: Synthetic peptide
  Seed: DPRMCSLMQGSTLPRRSGA
DPRMYSLLQASTAPRRSGA

SEQ ID NO: 66629 - protein, 19 aa, Artificial Sequence
  Description of Artificial Sequence: Synthetic peptide
  Seed: DPRMCSLMQGSTLPRRSGA
DPRMYSLLQASTCPRRSGA

SEQ ID NO: 66630 - protein, 19 aa, Artificial Sequence
  Description of Artificial Sequence: Synthetic peptide
  Seed: DPRMCSLMQGSTLPRRSGA
DPRMYSLLQASTFPRRSGA

SEQ ID NO: 66631 - protein, 19 aa, Artificial Sequence
  Description of Artificial Sequence: Synthetic peptide
  Seed: DPRMCSLMQGSTLPRRSGA
DPRMYSLLQASTGPRRSGA

SEQ ID NO: 66632 - protein, 19 aa, Artificial Sequence
  Description of Artificial Sequence: Synthetic peptide
  Seed: DPRMCSLMQGSTLPRRSGA
DPRMYSLLQASTHPRRSGA

SEQ ID NO: 66633 - protein, 19 aa, Artificial Sequence
  Description of Artificial Sequence: Synthetic peptide
  Seed: DPRMCSLMQGSTLPRRSGA
DPRMYSLLQASTIPRRSGA

SEQ ID NO: 66634 - protein, 19 aa, Artificial Sequence
  Description of Artificial Sequence: Synthetic peptide
  Seed: DPRMCSLMQGSTLPRRSGA
DPRMYSLLQASTLPRRSGA

SEQ ID NO: 66635 - protein, 19 aa, Artificial Sequence
  Description of Artificial Sequence: Synthetic peptide
  Seed: DPRMCSLMQGSTLPRRSGA
DPRMYSLLQASTMPRRSGA

SEQ ID NO: 66636 - protein, 19 aa, Artificial Sequence
  Description of Artificial Sequence: Synthetic peptide
  Seed: DPRMCSLMQGSTLPRRSGA
DPRMYSLLQASTNPRRSGA

SEQ ID NO: 66637 - protein, 19 aa, Artificial Sequence
  Description of Artificial Sequence: Synthetic peptide
  Seed: DPRMCSLMQGSTLPRRSGA
DPRMYSLLQASTPPRRSGA

SEQ ID NO: 66638 - protein, 19 aa, Artificial Sequence
  Description of Artificial Sequence: Synthetic peptide
  Seed: DPRMCSLMQGSTLPRRSGA
DPRMYSLLQASTQPRRSGA

SEQ ID NO: 66639 - protein, 19 aa, Artificial Sequence
  Description of Artificial Sequence: Synthetic peptide
  Seed: DPRMCSLMQGSTLPRRSGA
DPRMYSLLQASTSPRRSGA

SEQ ID NO: 66640 - protein, 19 aa, Artificial Sequence
  Description of Artificial Sequence: Synthetic peptide
  Seed: DPRMCSLMQGSTLPRRSGA
DPRMYSLLQASTTPRRSGA

SEQ ID NO: 66641 - protein, 19 aa, Artificial Sequence
  Description of Artificial Sequence: Synthetic peptide
  Seed: DPRMCSLMQGSTLPRRSGA
DPRMYSLLQASTVPRRSGA

SEQ ID NO: 66642 - protein, 19 aa, Artificial Sequence
  Description of Artificial Sequence: Synthetic peptide
  Seed: DPRMCSLMQGSTLPRRSGA
DPRMYSLLQGSTAPRRSGA

SEQ ID NO: 66643 - protein, 19 aa, Artificial Sequence
  Description of Artificial Sequence: Synthetic peptide
  Seed: DPRMCSLMQGSTLPRRSGA
DPRMYSLLQGSTCPRRSGA

SEQ ID NO: 66644 - protein, 19 aa, Artificial Sequence
  Description of Artificial Sequence: Synthetic peptide
  Seed: DPRMCSLMQGSTLPRRSGA
DPRMYSLLQGSTFPRRSGA

SEQ ID NO: 66645 - protein, 19 aa, Artificial Sequence
  Description of Artificial Sequence: Synthetic peptide
  Seed: DPRMCSLMQGSTLPRRSGA
DPRMYSLLQGSTGPRRSGA

SEQ ID NO: 66646 - protein, 19 aa, Artificial Sequence
  Description of Artificial Sequence: Synthetic peptide
  Seed: DPRMCSLMQGSTLPRRSGA
DPRMYSLLQGSTIPRRSGA

SEQ ID NO: 66647 - protein, 19 aa, Artificial Sequence
  Description of Artificial Sequence: Synthetic peptide
  Seed: DPRMCSLMQGSTLPRRSGA
DPRMYSLLQGSTLPRRSGA

SEQ ID NO: 66648 - protein, 19 aa, Artificial Sequence
  Description of Artificial Sequence: Synthetic peptide
  Seed: DPRMCSLMQGSTLPRRSGA
DPRMYSLLQGSTMPRRSGA

SEQ ID NO: 66649 - protein, 19 aa, Artificial Sequence
  Description of Artificial Sequence: Synthetic peptide
  Seed: DPRMCSLMQGSTLPRRSGA
DPRMYSLLQGSTNPRRSGA

SEQ ID NO: 66650 - protein, 19 aa, Artificial Sequence
  Description of Artificial Sequence: Synthetic peptide
  Seed: DPRMCSLMQGSTLPRRSGA
DPRMYSLLQGSTSPRRSGA

SEQ ID NO: 66651 - protein, 19 aa, Artificial Sequence
  Description of Artificial Sequence: Synthetic peptide
  Seed: DPRMCSLMQGSTLPRRSGA
DPRMYSLLQGSTTPRRSGA

SEQ ID NO: 66652 - protein, 19 aa, Artificial Sequence
  Description of Artificial Sequence: Synthetic peptide
  Seed: DPRMCSLMQGSTLPRRSGA
DPRMYSLLQGSTVPRRSGA

SEQ ID NO: 66653 - protein, 19 aa, Artificial Sequence
  Description of Artificial Sequence: Synthetic peptide
  Seed: DPRMCSLMQGSTLPRRSGA
DPRMYSLLQISTAPRRSGA

SEQ ID NO: 66654 - protein, 19 aa, Artificial Sequence
  Description of Artificial Sequence: Synthetic peptide
  Seed: DPRMCSLMQGSTLPRRSGA
DPRMYSLLQISTGPRRSGA

SEQ ID NO: 66655 - protein, 19 aa, Artificial Sequence
  Description of Artificial Sequence: Synthetic peptide
  Seed: DPRMCSLMQGSTLPRRSGA
DPRMYSLLQISTIPRRSGA

SEQ ID NO: 66656 - protein, 19 aa, Artificial Sequence
  Description of Artificial Sequence: Synthetic peptide
  Seed: DPRMCSLMQGSTLPRRSGA
DPRMYSLLQISTLPRRSGA

SEQ ID NO: 66657 - protein, 19 aa, Artificial Sequence
  Description of Artificial Sequence: Synthetic peptide
  Seed: DPRMCSLMQGSTLPRRSGA
DPRMYSLLQISTMPRRSGA

SEQ ID NO: 66658 - protein, 19 aa, Artificial Sequence
  Description of Artificial Sequence: Synthetic peptide
  Seed: DPRMCSLMQGSTLPRRSGA
DPRMYSLLQISTNPRRSGA

SEQ ID NO: 66659 - protein, 19 aa, Artificial Sequence
  Description of Artificial Sequence: Synthetic peptide
  Seed: DPRMCSLMQGSTLPRRSGA
DPRMYSLLQISTSPRRSGA

SEQ ID NO: 66660 - protein, 19 aa, Artificial Sequence
  Description of Artificial Sequence: Synthetic peptide
  Seed: DPRMCSLMQGSTLPRRSGA
DPRMYSLLQISTTPRRSGA

SEQ ID NO: 66661 - protein, 19 aa, Artificial Sequence
  Description of Artificial Sequence: Synthetic peptide
  Seed: DPRMCSLMQGSTLPRRSGA
DPRMYSLLQISTVPRRSGA

SEQ ID NO: 66662 - protein, 19 aa, Artificial Sequence
  Description of Artificial Sequence: Synthetic peptide
  Seed: DPRMCSLMQGSTLPRRSGA
DPRMYSLLQLSTAPRRSGA

SEQ ID NO: 66663 - protein, 19 aa, Artificial Sequence
  Description of Artificial Sequence: Synthetic peptide
  Seed: DPRMCSLMQGSTLPRRSGA
DPRMYSLLQLSTNPRRSGA

SEQ ID NO: 66664 - protein, 19 aa, Artificial Sequence
  Description of Artificial Sequence: Synthetic peptide
  Seed: DPRMCSLMQGSTLPRRSGA
DPRMYSLLQLSTSPRRSGA

SEQ ID NO: 66665 - protein, 19 aa, Artificial Sequence
  Description of Artificial Sequence: Synthetic peptide
  Seed: DPRMCSLMQGSTLPRRSGA
DPRMYSLLQMSTAPRRSGA

SEQ ID NO: 66666 - protein, 19 aa, Artificial Sequence
  Description of Artificial Sequence: Synthetic peptide
  Seed: DPRMCSLMQGSTLPRRSGA
DPRMYSLLQMSTSPRRSGA

SEQ ID NO: 66667 - protein, 19 aa, Artificial Sequence
  Description of Artificial Sequence: Synthetic peptide
  Seed: DPRMCSLMQGSTLPRRSGA
DPRMYSLLQNSTAPRRSGA

SEQ ID NO: 66668 - protein, 19 aa, Artificial Sequence
  Description of Artificial Sequence: Synthetic peptide
  Seed: DPRMCSLMQGSTLPRRSGA
DPRMYSLLQNSTIPRRSGA

SEQ ID NO: 66669 - protein, 19 aa, Artificial Sequence
  Description of Artificial Sequence: Synthetic peptide
  Seed: DPRMCSLMQGSTLPRRSGA
DPRMYSLLQNSTLPRRSGA

SEQ ID NO: 66670 - protein, 19 aa, Artificial Sequence
  Description of Artificial Sequence: Synthetic peptide
  Seed: DPRMCSLMQGSTLPRRSGA
DPRMYSLLQNSTMPRRSGA

SEQ ID NO: 66671 - protein, 19 aa, Artificial Sequence
  Description of Artificial Sequence: Synthetic peptide
  Seed: DPRMCSLMQGSTLPRRSGA
DPRMYSLLQNSTNPRRSGA

SEQ ID NO: 66672 - protein, 19 aa, Artificial Sequence
  Description of Artificial Sequence: Synthetic peptide
  Seed: DPRMCSLMQGSTLPRRSGA
DPRMYSLLQNSTSPRRSGA

SEQ ID NO: 66673 - protein, 19 aa, Artificial Sequence
  Description of Artificial Sequence: Synthetic peptide
  Seed: DPRMCSLMQGSTLPRRSGA
DPRMYSLLQNSTTPRRSGA

SEQ ID NO: 66674 - protein, 19 aa, Artificial Sequence
  Description of Artificial Sequence: Synthetic peptide
  Seed: DPRMCSLMQGSTLPRRSGA
DPRMYSLLQNSTVPRRSGA

SEQ ID NO: 66675 - protein, 19 aa, Artificial Sequence
  Description of Artificial Sequence: Synthetic peptide
  Seed: DPRMCSLMQGSTLPRRSGA
DPRMYSLLQPSTAPRRSGA

SEQ ID NO: 66676 - protein, 19 aa, Artificial Sequence
  Description of Artificial Sequence: Synthetic peptide
  Seed: DPRMCSLMQGSTLPRRSGA
DPRMYSLLQPSTGPRRSGA

SEQ ID NO: 66677 - protein, 19 aa, Artificial Sequence
  Description of Artificial Sequence: Synthetic peptide
  Seed: DPRMCSLMQGSTLPRRSGA
DPRMYSLLQPSTHPRRSGA

SEQ ID NO: 66678 - protein, 19 aa, Artificial Sequence
  Description of Artificial Sequence: Synthetic peptide
  Seed: DPRMCSLMQGSTLPRRSGA
DPRMYSLLQPSTIPRRSGA

SEQ ID NO: 66679 - protein, 19 aa, Artificial Sequence
  Description of Artificial Sequence: Synthetic peptide
  Seed: DPRMCSLMQGSTLPRRSGA
DPRMYSLLQPSTLPRRSGA

SEQ ID NO: 66680 - protein, 19 aa, Artificial Sequence
  Description of Artificial Sequence: Synthetic peptide
  Seed: DPRMCSLMQGSTLPRRSGA
DPRMYSLLQPSTMPRRSGA

SEQ ID NO: 66681 - protein, 19 aa, Artificial Sequence
  Description of Artificial Sequence: Synthetic peptide
  Seed: DPRMCSLMQGSTLPRRSGA
DPRMYSLLQPSTNPRRSGA

SEQ ID NO: 66682 - protein, 19 aa, Artificial Sequence
  Description of Artificial Sequence: Synthetic peptide
  Seed: DPRMCSLMQGSTLPRRSGA
DPRMYSLLQPSTPPRRSGA

SEQ ID NO: 66683 - protein, 19 aa, Artificial Sequence
  Description of Artificial Sequence: Synthetic peptide
  Seed: DPRMCSLMQGSTLPRRSGA
DPRMYSLLQPSTQPRRSGA

SEQ ID NO: 66684 - protein, 19 aa, Artificial Sequence
  Description of Artificial Sequence: Synthetic peptide
  Seed: DPRMCSLMQGSTLPRRSGA
DPRMYSLLQPSTSPRRSGA

SEQ ID NO: 66685 - protein, 19 aa, Artificial Sequence
  Description of Artificial Sequence: Synthetic peptide
  Seed: DPRMCSLMQGSTLPRRSGA
DPRMYSLLQPSTTPRRSGA

SEQ ID NO: 66686 - protein, 19 aa, Artificial Sequence
  Description of Artificial Sequence: Synthetic peptide
  Seed: DPRMCSLMQGSTLPRRSGA
DPRMYSLLQPSTVPRRSGA

SEQ ID NO: 66687 - protein, 19 aa, Artificial Sequence
  Description of Artificial Sequence: Synthetic peptide
  Seed: DPRMCSLMQGSTLPRRSGA
DPRMYSLLQSSTAPRRSGA

SEQ ID NO: 66688 - protein, 19 aa, Artificial Sequence
  Description of Artificial Sequence: Synthetic peptide
  Seed: DPRMCSLMQGSTLPRRSGA
DPRMYSLLQSSTGPRRSGA

SEQ ID NO: 66689 - protein, 19 aa, Artificial Sequence
  Description of Artificial Sequence: Synthetic peptide
  Seed: DPRMCSLMQGSTLPRRSGA
DPRMYSLLQSSTIPRRSGA

SEQ ID NO: 66690 - protein, 19 aa, Artificial Sequence
  Description of Artificial Sequence: Synthetic peptide
  Seed: DPRMCSLMQGSTLPRRSGA
DPRMYSLLQSSTLPRRSGA

SEQ ID NO: 66691 - protein, 19 aa, Artificial Sequence
  Description of Artificial Sequence: Synthetic peptide
  Seed: DPRMCSLMQGSTLPRRSGA
DPRMYSLLQSSTMPRRSGA

SEQ ID NO: 66692 - protein, 19 aa, Artificial Sequence
  Description of Artificial Sequence: Synthetic peptide
  Seed: DPRMCSLMQGSTLPRRSGA
DPRMYSLLQSSTNPRRSGA

SEQ ID NO: 66693 - protein, 19 aa, Artificial Sequence
  Description of Artificial Sequence: Synthetic peptide
  Seed: DPRMCSLMQGSTLPRRSGA
DPRMYSLLQSSTSPRRSGA

SEQ ID NO: 66694 - protein, 19 aa, Artificial Sequence
  Description of Artificial Sequence: Synthetic peptide
  Seed: DPRMCSLMQGSTLPRRSGA
DPRMYSLLQSSTTPRRSGA

SEQ ID NO: 66695 - protein, 19 aa, Artificial Sequence
  Description of Artificial Sequence: Synthetic peptide
  Seed: DPRMCSLMQGSTLPRRSGA
DPRMYSLLQSSTVPRRSGA

SEQ ID NO: 66696 - protein, 19 aa, Artificial Sequence
  Description of Artificial Sequence: Synthetic peptide
  Seed: DPRMCSLMQGSTLPRRSGA
DPRMYSLLQTSTAPRRSGA

SEQ ID NO: 66697 - protein, 19 aa, Artificial Sequence
  Description of Artificial Sequence: Synthetic peptide
  Seed: DPRMCSLMQGSTLPRRSGA
DPRMYSLLQTSTGPRRSGA

SEQ ID NO: 66698 - protein, 19 aa, Artificial Sequence
  Description of Artificial Sequence: Synthetic peptide
  Seed: DPRMCSLMQGSTLPRRSGA
DPRMYSLLQTSTIPRRSGA

SEQ ID NO: 66699 - protein, 19 aa, Artificial Sequence
  Description of Artificial Sequence: Synthetic peptide
  Seed: DPRMCSLMQGSTLPRRSGA
DPRMYSLLQTSTLPRRSGA

SEQ ID NO: 66700 - protein, 19 aa, Artificial Sequence
  Description of Artificial Sequence: Synthetic peptide
  Seed: DPRMCSLMQGSTLPRRSGA
DPRMYSLLQTSTMPRRSGA

SEQ ID NO: 66701 - protein, 19 aa, Artificial Sequence
  Description of Artificial Sequence: Synthetic peptide
  Seed: DPRMCSLMQGSTLPRRSGA
DPRMYSLLQTSTNPRRSGA

SEQ ID NO: 66702 - protein, 19 aa, Artificial Sequence
  Description of Artificial Sequence: Synthetic peptide
  Seed: DPRMCSLMQGSTLPRRSGA
DPRMYSLLQTSTSPRRSGA

SEQ ID NO: 66703 - protein, 19 aa, Artificial Sequence
  Description of Artificial Sequence: Synthetic peptide
  Seed: DPRMCSLMQGSTLPRRSGA
DPRMYSLLQTSTTPRRSGA

SEQ ID NO: 66704 - protein, 19 aa, Artificial Sequence
  Description of Artificial Sequence: Synthetic peptide
  Seed: DPRMCSLMQGSTLPRRSGA
DPRMYSLLQTSTVPRRSGA

SEQ ID NO: 66705 - protein, 19 aa, Artificial Sequence
  Description of Artificial Sequence: Synthetic peptide
  Seed: DPRMCSLMQGSTLPRRSGA
DPRMYSLLQVSTAPRRSGA

SEQ ID NO: 66706 - protein, 19 aa, Artificial Sequence
  Description of Artificial Sequence: Synthetic peptide
  Seed: DPRMCSLMQGSTLPRRSGA
DPRMYSLLQVSTGPRRSGA

SEQ ID NO: 66707 - protein, 19 aa, Artificial Sequence
  Description of Artificial Sequence: Synthetic peptide
  Seed: DPRMCSLMQGSTLPRRSGA
DPRMYSLLQVSTHPRRSGA

SEQ ID NO: 66708 - protein, 19 aa, Artificial Sequence
  Description of Artificial Sequence: Synthetic peptide
  Seed: DPRMCSLMQGSTLPRRSGA
DPRMYSLLQVSTIPRRSGA

SEQ ID NO: 66709 - protein, 19 aa, Artificial Sequence
  Description of Artificial Sequence: Synthetic peptide
  Seed: DPRMCSLMQGSTLPRRSGA
DPRMYSLLQVSTLPRRSGA

SEQ ID NO: 66710 - protein, 19 aa, Artificial Sequence
  Description of Artificial Sequence: Synthetic peptide
  Seed: DPRMCSLMQGSTLPRRSGA
DPRMYSLLQVSTMPRRSGA

SEQ ID NO: 66711 - protein, 19 aa, Artificial Sequence
  Description of Artificial Sequence: Synthetic peptide
  Seed: DPRMCSLMQGSTLPRRSGA
DPRMYSLLQVSTNPRRSGA

SEQ ID NO: 66712 - protein, 19 aa, Artificial Sequence
  Description of Artificial Sequence: Synthetic peptide
  Seed: DPRMCSLMQGSTLPRRSGA
DPRMYSLLQVSTQPRRSGA

SEQ ID NO: 66713 - protein, 19 aa, Artificial Sequence
  Description of Artificial Sequence: Synthetic peptide
  Seed: DPRMCSLMQGSTLPRRSGA
DPRMYSLLQVSTSPRRSGA

SEQ ID NO: 66714 - protein, 19 aa, Artificial Sequence
  Description of Artificial Sequence: Synthetic peptide
  Seed: DPRMCSLMQGSTLPRRSGA
DPRMYSLLQVSTTPRRSGA

SEQ ID NO: 66715 - protein, 19 aa, Artificial Sequence
  Description of Artificial Sequence: Synthetic peptide
  Seed: DPRMCSLMQGSTLPRRSGA
DPRMYSLLQVSTVPRRSGA

SEQ ID NO: 66716 - protein, 19 aa, Artificial Sequence
  Description of Artificial Sequence: Synthetic peptide
  Seed: DPRMCSLMQGSTLPRRSGA
DPRMYSLMQASTAPRRSGA

SEQ ID NO: 66717 - protein, 19 aa, Artificial Sequence
  Description of Artificial Sequence: Synthetic peptide
  Seed: DPRMCSLMQGSTLPRRSGA
DPRMYSLMQASTCPRRSGA

SEQ ID NO: 66718 - protein, 19 aa, Artificial Sequence
  Description of Artificial Sequence: Synthetic peptide
  Seed: DPRMCSLMQGSTLPRRSGA
DPRMYSLMQASTFPRRSGA

SEQ ID NO: 66719 - protein, 19 aa, Artificial Sequence
  Description of Artificial Sequence: Synthetic peptide
  Seed: DPRMCSLMQGSTLPRRSGA
DPRMYSLMQASTGPRRSGA

SEQ ID NO: 66720 - protein, 19 aa, Artificial Sequence
  Description of Artificial Sequence: Synthetic peptide
  Seed: DPRMCSLMQGSTLPRRSGA
DPRMYSLMQASTHPRRSGA

SEQ ID NO: 66721 - protein, 19 aa, Artificial Sequence
  Description of Artificial Sequence: Synthetic peptide
  Seed: DPRMCSLMQGSTLPRRSGA
DPRMYSLMQASTIPRRSGA

SEQ ID NO: 66722 - protein, 19 aa, Artificial Sequence
  Description of Artificial Sequence: Synthetic peptide
  Seed: DPRMCSLMQGSTLPRRSGA
DPRMYSLMQASTLPRRSGA

SEQ ID NO: 66723 - protein, 19 aa, Artificial Sequence
  Description of Artificial Sequence: Synthetic peptide
  Seed: DPRMCSLMQGSTLPRRSGA
DPRMYSLMQASTMPRRSGA

SEQ ID NO: 66724 - protein, 19 aa, Artificial Sequence
  Description of Artificial Sequence: Synthetic peptide
  Seed: DPRMCSLMQGSTLPRRSGA
DPRMYSLMQASTNPRRSGA

SEQ ID NO: 66725 - protein, 19 aa, Artificial Sequence
  Description of Artificial Sequence: Synthetic peptide
  Seed: DPRMCSLMQGSTLPRRSGA
DPRMYSLMQASTPPRRSGA

SEQ ID NO: 66726 - protein, 19 aa, Artificial Sequence
  Description of Artificial Sequence: Synthetic peptide
  Seed: DPRMCSLMQGSTLPRRSGA
DPRMYSLMQASTQPRRSGA

SEQ ID NO: 66727 - protein, 19 aa, Artificial Sequence
  Description of Artificial Sequence: Synthetic peptide
  Seed: DPRMCSLMQGSTLPRRSGA
DPRMYSLMQASTSPRRSGA

SEQ ID NO: 66728 - protein, 19 aa, Artificial Sequence
  Description of Artificial Sequence: Synthetic peptide
  Seed: DPRMCSLMQGSTLPRRSGA
DPRMYSLMQASTTPRRSGA

SEQ ID NO: 66729 - protein, 19 aa, Artificial Sequence
  Description of Artificial Sequence: Synthetic peptide
  Seed: DPRMCSLMQGSTLPRRSGA
DPRMYSLMQASTVPRRSGA

SEQ ID NO: 66730 - protein, 19 aa, Artificial Sequence
  Description of Artificial Sequence: Synthetic peptide
  Seed: DPRMCSLMQGSTLPRRSGA
DPRMYSLMQGSTAPRRSGA

SEQ ID NO: 66731 - protein, 19 aa, Artificial Sequence
  Description of Artificial Sequence: Synthetic peptide
  Seed: DPRMCSLMQGSTLPRRSGA
DPRMYSLMQGSTFPRRSGA

SEQ ID NO: 66732 - protein, 19 aa, Artificial Sequence
  Description of Artificial Sequence: Synthetic peptide
  Seed: DPRMCSLMQGSTLPRRSGA
DPRMYSLMQGSTGPRRSGA

SEQ ID NO: 66733 - protein, 19 aa, Artificial Sequence
  Description of Artificial Sequence: Synthetic peptide
  Seed: DPRMCSLMQGSTLPRRSGA
DPRMYSLMQGSTIPRRSGA

SEQ ID NO: 66734 - protein, 19 aa, Artificial Sequence
  Description of Artificial Sequence: Synthetic peptide
  Seed: DPRMCSLMQGSTLPRRSGA
DPRMYSLMQGSTLPRRSGA

SEQ ID NO: 66735 - protein, 19 aa, Artificial Sequence
  Description of Artificial Sequence: Synthetic peptide
  Seed: DPRMCSLMQGSTLPRRSGA
DPRMYSLMQGSTMPRRSGA

SEQ ID NO: 66736 - protein, 19 aa, Artificial Sequence
  Description of Artificial Sequence: Synthetic peptide
  Seed: DPRMCSLMQGSTLPRRSGA
DPRMYSLMQGSTNPRRSGA

SEQ ID NO: 66737 - protein, 19 aa, Artificial Sequence
  Description of Artificial Sequence: Synthetic peptide
  Seed: DPRMCSLMQGSTLPRRSGA
DPRMYSLMQGSTSPRRSGA

SEQ ID NO: 66738 - protein, 19 aa, Artificial Sequence
  Description of Artificial Sequence: Synthetic peptide
  Seed: DPRMCSLMQGSTLPRRSGA
DPRMYSLMQGSTTPRRSGA

SEQ ID NO: 66739 - protein, 19 aa, Artificial Sequence
  Description of Artificial Sequence: Synthetic peptide
  Seed: DPRMCSLMQGSTLPRRSGA
DPRMYSLMQGSTVPRRSGA

SEQ ID NO: 66740 - protein, 19 aa, Artificial Sequence
  Description of Artificial Sequence: Synthetic peptide
  Seed: DPRMCSLMQGSTLPRRSGA
DPRMYSLMQISTAPRRSGA

SEQ ID NO: 66741 - protein, 19 aa, Artificial Sequence
  Description of Artificial Sequence: Synthetic peptide
  Seed: DPRMCSLMQGSTLPRRSGA
DPRMYSLMQISTGPRRSGA

SEQ ID NO: 66742 - protein, 19 aa, Artificial Sequence
  Description of Artificial Sequence: Synthetic peptide
  Seed: DPRMCSLMQGSTLPRRSGA
DPRMYSLMQISTHPRRSGA

SEQ ID NO: 66743 - protein, 19 aa, Artificial Sequence
  Description of Artificial Sequence: Synthetic peptide
  Seed: DPRMCSLMQGSTLPRRSGA
DPRMYSLMQISTIPRRSGA

SEQ ID NO: 66744 - protein, 19 aa, Artificial Sequence
  Description of Artificial Sequence: Synthetic peptide
  Seed: DPRMCSLMQGSTLPRRSGA
DPRMYSLMQISTLPRRSGA

SEQ ID NO: 66745 - protein, 19 aa, Artificial Sequence
  Description of Artificial Sequence: Synthetic peptide
  Seed: DPRMCSLMQGSTLPRRSGA
DPRMYSLMQISTMPRRSGA

SEQ ID NO: 66746 - protein, 19 aa, Artificial Sequence
  Description of Artificial Sequence: Synthetic peptide
  Seed: DPRMCSLMQGSTLPRRSGA
DPRMYSLMQISTNPRRSGA

SEQ ID NO: 66747 - protein, 19 aa, Artificial Sequence
  Description of Artificial Sequence: Synthetic peptide
  Seed: DPRMCSLMQGSTLPRRSGA
DPRMYSLMQISTSPRRSGA

SEQ ID NO: 66748 - protein, 19 aa, Artificial Sequence
  Description of Artificial Sequence: Synthetic peptide
  Seed: DPRMCSLMQGSTLPRRSGA
DPRMYSLMQISTTPRRSGA

SEQ ID NO: 66749 - protein, 19 aa, Artificial Sequence
  Description of Artificial Sequence: Synthetic peptide
  Seed: DPRMCSLMQGSTLPRRSGA
DPRMYSLMQISTVPRRSGA

SEQ ID NO: 66750 - protein, 19 aa, Artificial Sequence
  Description of Artificial Sequence: Synthetic peptide
  Seed: DPRMCSLMQGSTLPRRSGA
DPRMYSLMQLSTAPRRSGA

SEQ ID NO: 66751 - protein, 19 aa, Artificial Sequence
  Description of Artificial Sequence: Synthetic peptide
  Seed: DPRMCSLMQGSTLPRRSGA
DPRMYSLMQLSTNPRRSGA

SEQ ID NO: 66752 - protein, 19 aa, Artificial Sequence
  Description of Artificial Sequence: Synthetic peptide
  Seed: DPRMCSLMQGSTLPRRSGA
DPRMYSLMQLSTSPRRSGA

SEQ ID NO: 66753 - protein, 19 aa, Artificial Sequence
  Description of Artificial Sequence: Synthetic peptide
  Seed: DPRMCSLMQGSTLPRRSGA
DPRMYSLMQLSTTPRRSGA

SEQ ID NO: 66754 - protein, 19 aa, Artificial Sequence
  Description of Artificial Sequence: Synthetic peptide
  Seed: DPRMCSLMQGSTLPRRSGA
DPRMYSLMQLSTVPRRSGA

SEQ ID NO: 66755 - protein, 19 aa, Artificial Sequence
  Description of Artificial Sequence: Synthetic peptide
  Seed: DPRMCSLMQGSTLPRRSGA
DPRMYSLMQMSTAPRRSGA

SEQ ID NO: 66756 - protein, 19 aa, Artificial Sequence
  Description of Artificial Sequence: Synthetic peptide
  Seed: DPRMCSLMQGSTLPRRSGA
DPRMYSLMQMSTNPRRSGA

SEQ ID NO: 66757 - protein, 19 aa, Artificial Sequence
  Description of Artificial Sequence: Synthetic peptide
  Seed: DPRMCSLMQGSTLPRRSGA
DPRMYSLMQMSTSPRRSGA

SEQ ID NO: 66758 - protein, 19 aa, Artificial Sequence
  Description of Artificial Sequence: Synthetic peptide
  Seed: DPRMCSLMQGSTLPRRSGA
DPRMYSLMQNSTAPRRSGA

SEQ ID NO: 66759 - protein, 19 aa, Artificial Sequence
  Description of Artificial Sequence: Synthetic peptide
  Seed: DPRMCSLMQGSTLPRRSGA
DPRMYSLMQNSTIPRRSGA

SEQ ID NO: 66760 - protein, 19 aa, Artificial Sequence
  Description of Artificial Sequence: Synthetic peptide
  Seed: DPRMCSLMQGSTLPRRSGA
DPRMYSLMQNSTLPRRSGA

SEQ ID NO: 66761 - protein, 19 aa, Artificial Sequence
  Description of Artificial Sequence: Synthetic peptide
  Seed: DPRMCSLMQGSTLPRRSGA
DPRMYSLMQNSTMPRRSGA

SEQ ID NO: 66762 - protein, 19 aa, Artificial Sequence
  Description of Artificial Sequence: Synthetic peptide
  Seed: DPRMCSLMQGSTLPRRSGA
DPRMYSLMQNSTNPRRSGA

SEQ ID NO: 66763 - protein, 19 aa, Artificial Sequence
  Description of Artificial Sequence: Synthetic peptide
  Seed: DPRMCSLMQGSTLPRRSGA
DPRMYSLMQNSTSPRRSGA

SEQ ID NO: 66764 - protein, 19 aa, Artificial Sequence
  Description of Artificial Sequence: Synthetic peptide
  Seed: DPRMCSLMQGSTLPRRSGA
DPRMYSLMQNSTTPRRSGA

SEQ ID NO: 66765 - protein, 19 aa, Artificial Sequence
  Description of Artificial Sequence: Synthetic peptide
  Seed: DPRMCSLMQGSTLPRRSGA
DPRMYSLMQNSTVPRRSGA

SEQ ID NO: 66766 - protein, 19 aa, Artificial Sequence
  Description of Artificial Sequence: Synthetic peptide
  Seed: DPRMCSLMQGSTLPRRSGA
DPRMYSLMQPSTAPRRSGA

SEQ ID NO: 66767 - protein, 19 aa, Artificial Sequence
  Description of Artificial Sequence: Synthetic peptide
  Seed: DPRMCSLMQGSTLPRRSGA
DPRMYSLMQPSTGPRRSGA

SEQ ID NO: 66768 - protein, 19 aa, Artificial Sequence
  Description of Artificial Sequence: Synthetic peptide
  Seed: DPRMCSLMQGSTLPRRSGA
DPRMYSLMQPSTHPRRSGA

SEQ ID NO: 66769 - protein, 19 aa, Artificial Sequence
  Description of Artificial Sequence: Synthetic peptide
  Seed: DPRMCSLMQGSTLPRRSGA
DPRMYSLMQPSTIPRRSGA

SEQ ID NO: 66770 - protein, 19 aa, Artificial Sequence
  Description of Artificial Sequence: Synthetic peptide
  Seed: DPRMCSLMQGSTLPRRSGA
DPRMYSLMQPSTLPRRSGA

SEQ ID NO: 66771 - protein, 19 aa, Artificial Sequence
  Description of Artificial Sequence: Synthetic peptide
  Seed: DPRMCSLMQGSTLPRRSGA
DPRMYSLMQPSTMPRRSGA

SEQ ID NO: 66772 - protein, 19 aa, Artificial Sequence
  Description of Artificial Sequence: Synthetic peptide
  Seed: DPRMCSLMQGSTLPRRSGA
DPRMYSLMQPSTNPRRSGA

SEQ ID NO: 66773 - protein, 19 aa, Artificial Sequence
  Description of Artificial Sequence: Synthetic peptide
  Seed: DPRMCSLMQGSTLPRRSGA
DPRMYSLMQPSTPPRRSGA

SEQ ID NO: 66774 - protein, 19 aa, Artificial Sequence
  Description of Artificial Sequence: Synthetic peptide
  Seed: DPRMCSLMQGSTLPRRSGA
DPRMYSLMQPSTQPRRSGA

SEQ ID NO: 66775 - protein, 19 aa, Artificial Sequence
  Description of Artificial Sequence: Synthetic peptide
  Seed: DPRMCSLMQGSTLPRRSGA
DPRMYSLMQPSTSPRRSGA

SEQ ID NO: 66776 - protein, 19 aa, Artificial Sequence
  Description of Artificial Sequence: Synthetic peptide
  Seed: DPRMCSLMQGSTLPRRSGA
DPRMYSLMQPSTTPRRSGA

SEQ ID NO: 66777 - protein, 19 aa, Artificial Sequence
  Description of Artificial Sequence: Synthetic peptide
  Seed: DPRMCSLMQGSTLPRRSGA
DPRMYSLMQPSTVPRRSGA

SEQ ID NO: 66778 - protein, 19 aa, Artificial Sequence
  Description of Artificial Sequence: Synthetic peptide
  Seed: DPRMCSLMQGSTLPRRSGA
DPRMYSLMQSSTAPRRSGA

SEQ ID NO: 66779 - protein, 19 aa, Artificial Sequence
  Description of Artificial Sequence: Synthetic peptide
  Seed: DPRMCSLMQGSTLPRRSGA
DPRMYSLMQSSTGPRRSGA

SEQ ID NO: 66780 - protein, 19 aa, Artificial Sequence
  Description of Artificial Sequence: Synthetic peptide
  Seed: DPRMCSLMQGSTLPRRSGA
DPRMYSLMQSSTHPRRSGA

SEQ ID NO: 66781 - protein, 19 aa, Artificial Sequence
  Description of Artificial Sequence: Synthetic peptide
  Seed: DPRMCSLMQGSTLPRRSGA
DPRMYSLMQSSTIPRRSGA

SEQ ID NO: 66782 - protein, 19 aa, Artificial Sequence
  Description of Artificial Sequence: Synthetic peptide
  Seed: DPRMCSLMQGSTLPRRSGA
DPRMYSLMQSSTLPRRSGA

SEQ ID NO: 66783 - protein, 19 aa, Artificial Sequence
  Description of Artificial Sequence: Synthetic peptide
  Seed: DPRMCSLMQGSTLPRRSGA
DPRMYSLMQSSTMPRRSGA

SEQ ID NO: 66784 - protein, 19 aa, Artificial Sequence
  Description of Artificial Sequence: Synthetic peptide
  Seed: DPRMCSLMQGSTLPRRSGA
DPRMYSLMQSSTNPRRSGA

SEQ ID NO: 66785 - protein, 19 aa, Artificial Sequence
  Description of Artificial Sequence: Synthetic peptide
  Seed: DPRMCSLMQGSTLPRRSGA
DPRMYSLMQSSTSPRRSGA

SEQ ID NO: 66786 - protein, 19 aa, Artificial Sequence
  Description of Artificial Sequence: Synthetic peptide
  Seed: DPRMCSLMQGSTLPRRSGA
DPRMYSLMQSSTTPRRSGA

SEQ ID NO: 66787 - protein, 19 aa, Artificial Sequence
  Description of Artificial Sequence: Synthetic peptide
  Seed: DPRMCSLMQGSTLPRRSGA
DPRMYSLMQSSTVPRRSGA

SEQ ID NO: 66788 - protein, 19 aa, Artificial Sequence
  Description of Artificial Sequence: Synthetic peptide
  Seed: DPRMCSLMQGSTLPRRSGA
DPRMYSLMQTSTAPRRSGA

SEQ ID NO: 66789 - protein, 19 aa, Artificial Sequence
  Description of Artificial Sequence: Synthetic peptide
  Seed: DPRMCSLMQGSTLPRRSGA
DPRMYSLMQTSTIPRRSGA

SEQ ID NO: 66790 - protein, 19 aa, Artificial Sequence
  Description of Artificial Sequence: Synthetic peptide
  Seed: DPRMCSLMQGSTLPRRSGA
DPRMYSLMQTSTLPRRSGA

SEQ ID NO: 66791 - protein, 19 aa, Artificial Sequence
  Description of Artificial Sequence: Synthetic peptide
  Seed: DPRMCSLMQGSTLPRRSGA
DPRMYSLMQTSTMPRRSGA

SEQ ID NO: 66792 - protein, 19 aa, Artificial Sequence
  Description of Artificial Sequence: Synthetic peptide
  Seed: DPRMCSLMQGSTLPRRSGA
DPRMYSLMQTSTNPRRSGA

SEQ ID NO: 66793 - protein, 19 aa, Artificial Sequence
  Description of Artificial Sequence: Synthetic peptide
  Seed: DPRMCSLMQGSTLPRRSGA
DPRMYSLMQTSTSPRRSGA

SEQ ID NO: 66794 - protein, 19 aa, Artificial Sequence
  Description of Artificial Sequence: Synthetic peptide
  Seed: DPRMCSLMQGSTLPRRSGA
DPRMYSLMQTSTTPRRSGA

SEQ ID NO: 66795 - protein, 19 aa, Artificial Sequence
  Description of Artificial Sequence: Synthetic peptide
  Seed: DPRMCSLMQGSTLPRRSGA
DPRMYSLMQTSTVPRRSGA

SEQ ID NO: 66796 - protein, 19 aa, Artificial Sequence
  Description of Artificial Sequence: Synthetic peptide
  Seed: DPRMCSLMQGSTLPRRSGA
DPRMYSLMQVSTAPRRSGA

SEQ ID NO: 66797 - protein, 19 aa, Artificial Sequence
  Description of Artificial Sequence: Synthetic peptide
  Seed: DPRMCSLMQGSTLPRRSGA
DPRMYSLMQVSTGPRRSGA

SEQ ID NO: 66798 - protein, 19 aa, Artificial Sequence
  Description of Artificial Sequence: Synthetic peptide
  Seed: DPRMCSLMQGSTLPRRSGA
DPRMYSLMQVSTHPRRSGA

SEQ ID NO: 66799 - protein, 19 aa, Artificial Sequence
  Description of Artificial Sequence: Synthetic peptide
  Seed: DPRMCSLMQGSTLPRRSGA
DPRMYSLMQVSTIPRRSGA

SEQ ID NO: 66800 - protein, 19 aa, Artificial Sequence
  Description of Artificial Sequence: Synthetic peptide
  Seed: DPRMCSLMQGSTLPRRSGA
DPRMYSLMQVSTLPRRSGA

SEQ ID NO: 66801 - protein, 19 aa, Artificial Sequence
  Description of Artificial Sequence: Synthetic peptide
  Seed: DPRMCSLMQGSTLPRRSGA
DPRMYSLMQVSTMPRRSGA

SEQ ID NO: 66802 - protein, 19 aa, Artificial Sequence
  Description of Artificial Sequence: Synthetic peptide
  Seed: DPRMCSLMQGSTLPRRSGA
DPRMYSLMQVSTNPRRSGA

SEQ ID NO: 66803 - protein, 19 aa, Artificial Sequence
  Description of Artificial Sequence: Synthetic peptide
  Seed: DPRMCSLMQGSTLPRRSGA
DPRMYSLMQVSTQPRRSGA

SEQ ID NO: 66804 - protein, 19 aa, Artificial Sequence
  Description of Artificial Sequence: Synthetic peptide
  Seed: DPRMCSLMQGSTLPRRSGA
DPRMYSLMQVSTSPRRSGA

SEQ ID NO: 66805 - protein, 19 aa, Artificial Sequence
  Description of Artificial Sequence: Synthetic peptide
  Seed: DPRMCSLMQGSTLPRRSGA
DPRMYSLMQVSTTPRRSGA

SEQ ID NO: 66806 - protein, 19 aa, Artificial Sequence
  Description of Artificial Sequence: Synthetic peptide
  Seed: DPRMCSLMQGSTLPRRSGA
DPRMYSLMQVSTVPRRSGA

SEQ ID NO: 66807 - protein, 19 aa, Artificial Sequence
  Description of Artificial Sequence: Synthetic peptide
  Seed: DPRMCSLMQGSTLPRRSGA
DPRMYSLNQASTLPRRSGA

SEQ ID NO: 66808 - protein, 19 aa, Artificial Sequence
  Description of Artificial Sequence: Synthetic peptide
  Seed: DPRMCSLMQGSTLPRRSGA
DPRMYSLQQASTAPRRSGA

SEQ ID NO: 66809 - protein, 19 aa, Artificial Sequence
  Description of Artificial Sequence: Synthetic peptide
  Seed: DPRMCSLMQGSTLPRRSGA
DPRMYSLQQASTIPRRSGA

SEQ ID NO: 66810 - protein, 19 aa, Artificial Sequence
  Description of Artificial Sequence: Synthetic peptide
  Seed: DPRMCSLMQGSTLPRRSGA
DPRMYSLQQASTLPRRSGA

SEQ ID NO: 66811 - protein, 19 aa, Artificial Sequence
  Description of Artificial Sequence: Synthetic peptide
  Seed: DPRMCSLMQGSTLPRRSGA
DPRMYSLQQASTMPRRSGA

SEQ ID NO: 66812 - protein, 19 aa, Artificial Sequence
  Description of Artificial Sequence: Synthetic peptide
  Seed: DPRMCSLMQGSTLPRRSGA
DPRMYSLQQASTSPRRSGA

SEQ ID NO: 66813 - protein, 19 aa, Artificial Sequence
  Description of Artificial Sequence: Synthetic peptide
  Seed: DPRMCSLMQGSTLPRRSGA
DPRMYSLQQASTTPRRSGA

SEQ ID NO: 66814 - protein, 19 aa, Artificial Sequence
  Description of Artificial Sequence: Synthetic peptide
  Seed: DPRMCSLMQGSTLPRRSGA
DPRMYSLQQASTVPRRSGA

SEQ ID NO: 66815 - protein, 19 aa, Artificial Sequence
  Description of Artificial Sequence: Synthetic peptide
  Seed: DPRMCSLMQGSTLPRRSGA
DPRMYSLQQGSTAPRRSGA

SEQ ID NO: 66816 - protein, 19 aa, Artificial Sequence
  Description of Artificial Sequence: Synthetic peptide
  Seed: DPRMCSLMQGSTLPRRSGA
DPRMYSLQQGSTIPRRSGA

SEQ ID NO: 66817 - protein, 19 aa, Artificial Sequence
  Description of Artificial Sequence: Synthetic peptide
  Seed: DPRMCSLMQGSTLPRRSGA
DPRMYSLQQGSTLPRRSGA

SEQ ID NO: 66818 - protein, 19 aa, Artificial Sequence
  Description of Artificial Sequence: Synthetic peptide
  Seed: DPRMCSLMQGSTLPRRSGA
DPRMYSLQQGSTVPRRSGA

SEQ ID NO: 66819 - protein, 19 aa, Artificial Sequence
  Description of Artificial Sequence: Synthetic peptide
  Seed: DPRMCSLMQGSTLPRRSGA
DPRMYSLQQPSTIPRRSGA

SEQ ID NO: 66820 - protein, 19 aa, Artificial Sequence
  Description of Artificial Sequence: Synthetic peptide
  Seed: DPRMCSLMQGSTLPRRSGA
DPRMYSLQQPSTLPRRSGA

SEQ ID NO: 66821 - protein, 19 aa, Artificial Sequence
  Description of Artificial Sequence: Synthetic peptide
  Seed: DPRMCSLMQGSTLPRRSGA
DPRMYSLQQPSTVPRRSGA

SEQ ID NO: 66822 - protein, 19 aa, Artificial Sequence
  Description of Artificial Sequence: Synthetic peptide
  Seed: DPRMCSLMQGSTLPRRSGA
DPRMYSLQQSSTAPRRSGA

SEQ ID NO: 66823 - protein, 19 aa, Artificial Sequence
  Description of Artificial Sequence: Synthetic peptide
  Seed: DPRMCSLMQGSTLPRRSGA
DPRMYSLQQSSTIPRRSGA

SEQ ID NO: 66824 - protein, 19 aa, Artificial Sequence
  Description of Artificial Sequence: Synthetic peptide
  Seed: DPRMCSLMQGSTLPRRSGA
DPRMYSLQQSSTLPRRSGA

SEQ ID NO: 66825 - protein, 19 aa, Artificial Sequence
  Description of Artificial Sequence: Synthetic peptide
  Seed: DPRMCSLMQGSTLPRRSGA
DPRMYSLQQSSTVPRRSGA

SEQ ID NO: 66826 - protein, 19 aa, Artificial Sequence
  Description of Artificial Sequence: Synthetic peptide
  Seed: DPRMCSLMQGSTLPRRSGA
DPRMYSLQQVSTAPRRSGA

SEQ ID NO: 66827 - protein, 19 aa, Artificial Sequence
  Description of Artificial Sequence: Synthetic peptide
  Seed: DPRMCSLMQGSTLPRRSGA
DPRMYSLSQASTAPRRSGA

SEQ ID NO: 66828 - protein, 19 aa, Artificial Sequence
  Description of Artificial Sequence: Synthetic peptide
  Seed: DPRMCSLMQGSTLPRRSGA
DPRMYSLSQASTIPRRSGA

SEQ ID NO: 66829 - protein, 19 aa, Artificial Sequence
  Description of Artificial Sequence: Synthetic peptide
  Seed: DPRMCSLMQGSTLPRRSGA
DPRMYSLSQASTLPRRSGA

SEQ ID NO: 66830 - protein, 19 aa, Artificial Sequence
  Description of Artificial Sequence: Synthetic peptide
  Seed: DPRMCSLMQGSTLPRRSGA
DPRMYSLSQASTVPRRSGA

SEQ ID NO: 66831 - protein, 19 aa, Artificial Sequence
  Description of Artificial Sequence: Synthetic peptide
  Seed: DPRMCSLMQGSTLPRRSGA
DPRMYSLSQGSTIPRRSGA

SEQ ID NO: 66832 - protein, 19 aa, Artificial Sequence
  Description of Artificial Sequence: Synthetic peptide
  Seed: DPRMCSLMQGSTLPRRSGA
DPRMYSLSQGSTLPRRSGA

SEQ ID NO: 66833 - protein, 19 aa, Artificial Sequence
  Description of Artificial Sequence: Synthetic peptide
  Seed: DPRMCSLMQGSTLPRRSGA
DPRMYSLSQGSTVPRRSGA

SEQ ID NO: 66834 - protein, 19 aa, Artificial Sequence
  Description of Artificial Sequence: Synthetic peptide
  Seed: DPRMCSLMQGSTLPRRSGA
DPRMYSLSQSSTLPRRSGA

SEQ ID NO: 66835 - protein, 19 aa, Artificial Sequence
  Description of Artificial Sequence: Synthetic peptide
  Seed: DPRMCSLMQGSTLPRRSGA
DPRMYSLSQSSTVPRRSGA

SEQ ID NO: 66836 - protein, 19 aa, Artificial Sequence
  Description of Artificial Sequence: Synthetic peptide
  Seed: DPRMCSLMQGSTLPRRSGA
DPRMYSLTQASTLPRRSGA

SEQ ID NO: 66837 - protein, 19 aa, Artificial Sequence
  Description of Artificial Sequence: Synthetic peptide
  Seed: DPRMCSLMQGSTLPRRSGA
DPRMYSLTQASTVPRRSGA

SEQ ID NO: 66838 - protein, 19 aa, Artificial Sequence
  Description of Artificial Sequence: Synthetic peptide
  Seed: DPRMCSLMQGSTLPRRSGA
DPRMYSLVQASTAPRRSGA

SEQ ID NO: 66839 - protein, 19 aa, Artificial Sequence
  Description of Artificial Sequence: Synthetic peptide
  Seed: DPRMCSLMQGSTLPRRSGA
DPRMYSLVQASTIPRRSGA

SEQ ID NO: 66840 - protein, 19 aa, Artificial Sequence
  Description of Artificial Sequence: Synthetic peptide
  Seed: DPRMCSLMQGSTLPRRSGA
DPRMYSLVQASTLPRRSGA

SEQ ID NO: 66841 - protein, 19 aa, Artificial Sequence
  Description of Artificial Sequence: Synthetic peptide
  Seed: DPRMCSLMQGSTLPRRSGA
DPRMYSLVQASTMPRRSGA

SEQ ID NO: 66842 - protein, 19 aa, Artificial Sequence
  Description of Artificial Sequence: Synthetic peptide
  Seed: DPRMCSLMQGSTLPRRSGA
DPRMYSLVQASTNPRRSGA

SEQ ID NO: 66843 - protein, 19 aa, Artificial Sequence
  Description of Artificial Sequence: Synthetic peptide
  Seed: DPRMCSLMQGSTLPRRSGA
DPRMYSLVQASTSPRRSGA

SEQ ID NO: 66844 - protein, 19 aa, Artificial Sequence
  Description of Artificial Sequence: Synthetic peptide
  Seed: DPRMCSLMQGSTLPRRSGA
DPRMYSLVQASTTPRRSGA

SEQ ID NO: 66845 - protein, 19 aa, Artificial Sequence
  Description of Artificial Sequence: Synthetic peptide
  Seed: DPRMCSLMQGSTLPRRSGA
DPRMYSLVQASTVPRRSGA

SEQ ID NO: 66846 - protein, 19 aa, Artificial Sequence
  Description of Artificial Sequence: Synthetic peptide
  Seed: DPRMCSLMQGSTLPRRSGA
DPRMYSLVQGSTAPRRSGA

SEQ ID NO: 66847 - protein, 19 aa, Artificial Sequence
  Description of Artificial Sequence: Synthetic peptide
  Seed: DPRMCSLMQGSTLPRRSGA
DPRMYSLVQGSTIPRRSGA

SEQ ID NO: 66848 - protein, 19 aa, Artificial Sequence
  Description of Artificial Sequence: Synthetic peptide
  Seed: DPRMCSLMQGSTLPRRSGA
DPRMYSLVQGSTLPRRSGA

SEQ ID NO: 66849 - protein, 19 aa, Artificial Sequence
  Description of Artificial Sequence: Synthetic peptide
  Seed: DPRMCSLMQGSTLPRRSGA
DPRMYSLVQGSTMPRRSGA

SEQ ID NO: 66850 - protein, 19 aa, Artificial Sequence
  Description of Artificial Sequence: Synthetic peptide
  Seed: DPRMCSLMQGSTLPRRSGA
DPRMYSLVQGSTVPRRSGA

SEQ ID NO: 66851 - protein, 19 aa, Artificial Sequence
  Description of Artificial Sequence: Synthetic peptide
  Seed: DPRMCSLMQGSTLPRRSGA
DPRMYSLVQISTAPRRSGA

SEQ ID NO: 66852 - protein, 19 aa, Artificial Sequence
  Description of Artificial Sequence: Synthetic peptide
  Seed: DPRMCSLMQGSTLPRRSGA
DPRMYSLVQISTNPRRSGA

SEQ ID NO: 66853 - protein, 19 aa, Artificial Sequence
  Description of Artificial Sequence: Synthetic peptide
  Seed: DPRMCSLMQGSTLPRRSGA
DPRMYSLVQISTSPRRSGA

SEQ ID NO: 66854 - protein, 19 aa, Artificial Sequence
  Description of Artificial Sequence: Synthetic peptide
  Seed: DPRMCSLMQGSTLPRRSGA
DPRMYSLVQPSTAPRRSGA

SEQ ID NO: 66855 - protein, 19 aa, Artificial Sequence
  Description of Artificial Sequence: Synthetic peptide
  Seed: DPRMCSLMQGSTLPRRSGA
DPRMYSLVQPSTIPRRSGA

SEQ ID NO: 66856 - protein, 19 aa, Artificial Sequence
  Description of Artificial Sequence: Synthetic peptide
  Seed: DPRMCSLMQGSTLPRRSGA
DPRMYSLVQPSTLPRRSGA

SEQ ID NO: 66857 - protein, 19 aa, Artificial Sequence
  Description of Artificial Sequence: Synthetic peptide
  Seed: DPRMCSLMQGSTLPRRSGA
DPRMYSLVQPSTNPRRSGA

SEQ ID NO: 66858 - protein, 19 aa, Artificial Sequence
  Description of Artificial Sequence: Synthetic peptide
  Seed: DPRMCSLMQGSTLPRRSGA
DPRMYSLVQPSTSPRRSGA

SEQ ID NO: 66859 - protein, 19 aa, Artificial Sequence
  Description of Artificial Sequence: Synthetic peptide
  Seed: DPRMCSLMQGSTLPRRSGA
DPRMYSLVQPSTTPRRSGA

SEQ ID NO: 66860 - protein, 19 aa, Artificial Sequence
  Description of Artificial Sequence: Synthetic peptide
  Seed: DPRMCSLMQGSTLPRRSGA
DPRMYSLVQPSTVPRRSGA

SEQ ID NO: 66861 - protein, 19 aa, Artificial Sequence
  Description of Artificial Sequence: Synthetic peptide
  Seed: DPRMCSLMQGSTLPRRSGA
DPRMYSLVQSSTAPRRSGA

SEQ ID NO: 66862 - protein, 19 aa, Artificial Sequence
  Description of Artificial Sequence: Synthetic peptide
  Seed: DPRMCSLMQGSTLPRRSGA
DPRMYSLVQSSTIPRRSGA

SEQ ID NO: 66863 - protein, 19 aa, Artificial Sequence
  Description of Artificial Sequence: Synthetic peptide
  Seed: DPRMCSLMQGSTLPRRSGA
DPRMYSLVQSSTLPRRSGA

SEQ ID NO: 66864 - protein, 19 aa, Artificial Sequence
  Description of Artificial Sequence: Synthetic peptide
  Seed: DPRMCSLMQGSTLPRRSGA
DPRMYSLVQSSTNPRRSGA

SEQ ID NO: 66865 - protein, 19 aa, Artificial Sequence
  Description of Artificial Sequence: Synthetic peptide
  Seed: DPRMCSLMQGSTLPRRSGA
DPRMYSLVQSSTSPRRSGA

SEQ ID NO: 66866 - protein, 19 aa, Artificial Sequence
  Description of Artificial Sequence: Synthetic peptide
  Seed: DPRMCSLMQGSTLPRRSGA
DPRMYSLVQSSTTPRRSGA

SEQ ID NO: 66867 - protein, 19 aa, Artificial Sequence
  Description of Artificial Sequence: Synthetic peptide
  Seed: DPRMCSLMQGSTLPRRSGA
DPRMYSLVQSSTVPRRSGA

SEQ ID NO: 66868 - protein, 19 aa, Artificial Sequence
  Description of Artificial Sequence: Synthetic peptide
  Seed: DPRMCSLMQGSTLPRRSGA
DPRMYSLVQTSTAPRRSGA

SEQ ID NO: 66869 - protein, 19 aa, Artificial Sequence
  Description of Artificial Sequence: Synthetic peptide
  Seed: DPRMCSLMQGSTLPRRSGA
DPRMYSLVQTSTNPRRSGA

SEQ ID NO: 66870 - protein, 19 aa, Artificial Sequence
  Description of Artificial Sequence: Synthetic peptide
  Seed: DPRMCSLMQGSTLPRRSGA
DPRMYSLVQTSTSPRRSGA

SEQ ID NO: 66871 - protein, 19 aa, Artificial Sequence
  Description of Artificial Sequence: Synthetic peptide
  Seed: DPRMCSLMQGSTLPRRSGA
DPRMYSLVQTSTTPRRSGA

SEQ ID NO: 66872 - protein, 19 aa, Artificial Sequence
  Description of Artificial Sequence: Synthetic peptide
  Seed: DPRMCSLMQGSTLPRRSGA
DPRMYSLVQTSTVPRRSGA

SEQ ID NO: 66873 - protein, 19 aa, Artificial Sequence
  Description of Artificial Sequence: Synthetic peptide
  Seed: DPRMCSLMQGSTLPRRSGA
DPRMYSLVQVSTAPRRSGA

SEQ ID NO: 66874 - protein, 19 aa, Artificial Sequence
  Description of Artificial Sequence: Synthetic peptide
  Seed: DPRMCSLMQGSTLPRRSGA
DPRMYSLVQVSTNPRRSGA

SEQ ID NO: 66875 - protein, 19 aa, Artificial Sequence
  Description of Artificial Sequence: Synthetic peptide
  Seed: DPRMCSLMQGSTLPRRSGA
DPRMYSLVQVSTSPRRSGA

SEQ ID NO: 66876 - protein, 19 aa, Artificial Sequence
  Description of Artificial Sequence: Synthetic peptide
  Seed: DPRMCSLMQGSTLPRRSGA
DPRMYSLVQVSTTPRRSGA

SEQ ID NO: 66877 - protein, 19 aa, Artificial Sequence
  Description of Artificial Sequence: Synthetic peptide
  Seed: DPRMCSLMQGSTLPRRSGA
DPRMYSLVQVSTVPRRSGA

SEQ ID NO: 66878 - protein, 20 aa, Artificial Sequence
  Description of Artificial Sequence: Synthetic peptide
  Seed: DPRMCSLMQGSTLPRRSGAA
DPRMCSLLQASTVPRRSGAA

SEQ ID NO: 66879 - protein, 20 aa, Artificial Sequence
  Description of Artificial Sequence: Synthetic peptide
  Seed: DPRMCSLMQGSTLPRRSGAA
DPRMCSLMQASTIPRRSGAA

SEQ ID NO: 66880 - protein, 20 aa, Artificial Sequence
  Description of Artificial Sequence: Synthetic peptide
  Seed: DPRMCSLMQGSTLPRRSGAA
DPRMCSLMQASTVPRRSGAA

SEQ ID NO: 66881 - protein, 20 aa, Artificial Sequence
  Description of Artificial Sequence: Synthetic peptide
  Seed: DPRMCSLMQGSTLPRRSGAA
DPRMFSLAQASTAPRRSGAA

SEQ ID NO: 66882 - protein, 20 aa, Artificial Sequence
  Description of Artificial Sequence: Synthetic peptide
  Seed: DPRMCSLMQGSTLPRRSGAA
DPRMFSLAQASTCPRRSGAA

SEQ ID NO: 66883 - protein, 20 aa, Artificial Sequence
  Description of Artificial Sequence: Synthetic peptide
  Seed: DPRMCSLMQGSTLPRRSGAA
DPRMFSLAQASTFPRRSGAA

SEQ ID NO: 66884 - protein, 20 aa, Artificial Sequence
  Description of Artificial Sequence: Synthetic peptide
  Seed: DPRMCSLMQGSTLPRRSGAA
DPRMFSLAQASTGPRRSGAA

SEQ ID NO: 66885 - protein, 20 aa, Artificial Sequence
  Description of Artificial Sequence: Synthetic peptide
  Seed: DPRMCSLMQGSTLPRRSGAA
DPRMFSLAQASTIPRRSGAA

SEQ ID NO: 66886 - protein, 20 aa, Artificial Sequence
  Description of Artificial Sequence: Synthetic peptide
  Seed: DPRMCSLMQGSTLPRRSGAA
DPRMFSLAQASTLPRRSGAA

SEQ ID NO: 66887 - protein, 20 aa, Artificial Sequence
  Description of Artificial Sequence: Synthetic peptide
  Seed: DPRMCSLMQGSTLPRRSGAA
DPRMFSLAQASTMPRRSGAA

SEQ ID NO: 66888 - protein, 20 aa, Artificial Sequence
  Description of Artificial Sequence: Synthetic peptide
  Seed: DPRMCSLMQGSTLPRRSGAA
DPRMFSLAQASTNPRRSGAA

SEQ ID NO: 66889 - protein, 20 aa, Artificial Sequence
  Description of Artificial Sequence: Synthetic peptide
  Seed: DPRMCSLMQGSTLPRRSGAA
DPRMFSLAQASTSPRRSGAA

SEQ ID NO: 66890 - protein, 20 aa, Artificial Sequence
  Description of Artificial Sequence: Synthetic peptide
  Seed: DPRMCSLMQGSTLPRRSGAA
DPRMFSLAQASTTPRRSGAA

SEQ ID NO: 66891 - protein, 20 aa, Artificial Sequence
  Description of Artificial Sequence: Synthetic peptide
  Seed: DPRMCSLMQGSTLPRRSGAA
DPRMFSLAQASTVPRRSGAA

SEQ ID NO: 66892 - protein, 20 aa, Artificial Sequence
  Description of Artificial Sequence: Synthetic peptide
  Seed: DPRMCSLMQGSTLPRRSGAA
DPRMFSLAQASTYPRRSGAA

SEQ ID NO: 66893 - protein, 20 aa, Artificial Sequence
  Description of Artificial Sequence: Synthetic peptide
  Seed: DPRMCSLMQGSTLPRRSGAA
DPRMFSLAQGSTAPRRSGAA

SEQ ID NO: 66894 - protein, 20 aa, Artificial Sequence
  Description of Artificial Sequence: Synthetic peptide
  Seed: DPRMCSLMQGSTLPRRSGAA
DPRMFSLAQGSTFPRRSGAA

SEQ ID NO: 66895 - protein, 20 aa, Artificial Sequence
  Description of Artificial Sequence: Synthetic peptide
  Seed: DPRMCSLMQGSTLPRRSGAA
DPRMFSLAQGSTGPRRSGAA

SEQ ID NO: 66896 - protein, 20 aa, Artificial Sequence
  Description of Artificial Sequence: Synthetic peptide
  Seed: DPRMCSLMQGSTLPRRSGAA
DPRMFSLAQGSTIPRRSGAA

SEQ ID NO: 66897 - protein, 20 aa, Artificial Sequence
  Description of Artificial Sequence: Synthetic peptide
  Seed: DPRMCSLMQGSTLPRRSGAA
DPRMFSLAQGSTLPRRSGAA

SEQ ID NO: 66898 - protein, 20 aa, Artificial Sequence
  Description of Artificial Sequence: Synthetic peptide
  Seed: DPRMCSLMQGSTLPRRSGAA
DPRMFSLAQGSTMPRRSGAA

SEQ ID NO: 66899 - protein, 20 aa, Artificial Sequence
  Description of Artificial Sequence: Synthetic peptide
  Seed: DPRMCSLMQGSTLPRRSGAA
DPRMFSLAQGSTSPRRSGAA

SEQ ID NO: 66900 - protein, 20 aa, Artificial Sequence
  Description of Artificial Sequence: Synthetic peptide
  Seed: DPRMCSLMQGSTLPRRSGAA
DPRMFSLAQGSTTPRRSGAA

SEQ ID NO: 66901 - protein, 20 aa, Artificial Sequence
  Description of Artificial Sequence: Synthetic peptide
  Seed: DPRMCSLMQGSTLPRRSGAA
DPRMFSLAQGSTVPRRSGAA

SEQ ID NO: 66902 - protein, 20 aa, Artificial Sequence
  Description of Artificial Sequence: Synthetic peptide
  Seed: DPRMCSLMQGSTLPRRSGAA
DPRMFSLAQISTAPRRSGAA

SEQ ID NO: 66903 - protein, 20 aa, Artificial Sequence
  Description of Artificial Sequence: Synthetic peptide
  Seed: DPRMCSLMQGSTLPRRSGAA
DPRMFSLAQISTIPRRSGAA

SEQ ID NO: 66904 - protein, 20 aa, Artificial Sequence
  Description of Artificial Sequence: Synthetic peptide
  Seed: DPRMCSLMQGSTLPRRSGAA
DPRMFSLAQISTLPRRSGAA

SEQ ID NO: 66905 - protein, 20 aa, Artificial Sequence
  Description of Artificial Sequence: Synthetic peptide
  Seed: DPRMCSLMQGSTLPRRSGAA
DPRMFSLAQISTVPRRSGAA

SEQ ID NO: 66906 - protein, 20 aa, Artificial Sequence
  Description of Artificial Sequence: Synthetic peptide
  Seed: DPRMCSLMQGSTLPRRSGAA
DPRMFSLAQNSTAPRRSGAA

SEQ ID NO: 66907 - protein, 20 aa, Artificial Sequence
  Description of Artificial Sequence: Synthetic peptide
  Seed: DPRMCSLMQGSTLPRRSGAA
DPRMFSLAQNSTIPRRSGAA

SEQ ID NO: 66908 - protein, 20 aa, Artificial Sequence
  Description of Artificial Sequence: Synthetic peptide
  Seed: DPRMCSLMQGSTLPRRSGAA
DPRMFSLAQNSTLPRRSGAA

SEQ ID NO: 66909 - protein, 20 aa, Artificial Sequence
  Description of Artificial Sequence: Synthetic peptide
  Seed: DPRMCSLMQGSTLPRRSGAA
DPRMFSLAQNSTMPRRSGAA

SEQ ID NO: 66910 - protein, 20 aa, Artificial Sequence
  Description of Artificial Sequence: Synthetic peptide
  Seed: DPRMCSLMQGSTLPRRSGAA
DPRMFSLAQNSTTPRRSGAA

SEQ ID NO: 66911 - protein, 20 aa, Artificial Sequence
  Description of Artificial Sequence: Synthetic peptide
  Seed: DPRMCSLMQGSTLPRRSGAA
DPRMFSLAQNSTVPRRSGAA

SEQ ID NO: 66912 - protein, 20 aa, Artificial Sequence
  Description of Artificial Sequence: Synthetic peptide
  Seed: DPRMCSLMQGSTLPRRSGAA
DPRMFSLAQPSTAPRRSGAA

SEQ ID NO: 66913 - protein, 20 aa, Artificial Sequence
  Description of Artificial Sequence: Synthetic peptide
  Seed: DPRMCSLMQGSTLPRRSGAA
DPRMFSLAQPSTGPRRSGAA

SEQ ID NO: 66914 - protein, 20 aa, Artificial Sequence
  Description of Artificial Sequence: Synthetic peptide
  Seed: DPRMCSLMQGSTLPRRSGAA
DPRMFSLAQPSTIPRRSGAA

SEQ ID NO: 66915 - protein, 20 aa, Artificial Sequence
  Description of Artificial Sequence: Synthetic peptide
  Seed: DPRMCSLMQGSTLPRRSGAA
DPRMFSLAQPSTLPRRSGAA

SEQ ID NO: 66916 - protein, 20 aa, Artificial Sequence
  Description of Artificial Sequence: Synthetic peptide
  Seed: DPRMCSLMQGSTLPRRSGAA
DPRMFSLAQPSTMPRRSGAA

SEQ ID NO: 66917 - protein, 20 aa, Artificial Sequence
  Description of Artificial Sequence: Synthetic peptide
  Seed: DPRMCSLMQGSTLPRRSGAA
DPRMFSLAQPSTSPRRSGAA

SEQ ID NO: 66918 - protein, 20 aa, Artificial Sequence
  Description of Artificial Sequence: Synthetic peptide
  Seed: DPRMCSLMQGSTLPRRSGAA
DPRMFSLAQPSTTPRRSGAA

SEQ ID NO: 66919 - protein, 20 aa, Artificial Sequence
  Description of Artificial Sequence: Synthetic peptide
  Seed: DPRMCSLMQGSTLPRRSGAA
DPRMFSLAQPSTVPRRSGAA

SEQ ID NO: 66920 - protein, 20 aa, Artificial Sequence
  Description of Artificial Sequence: Synthetic peptide
  Seed: DPRMCSLMQGSTLPRRSGAA
DPRMFSLAQSSTAPRRSGAA

SEQ ID NO: 66921 - protein, 20 aa, Artificial Sequence
  Description of Artificial Sequence: Synthetic peptide
  Seed: DPRMCSLMQGSTLPRRSGAA
DPRMFSLAQSSTFPRRSGAA

SEQ ID NO: 66922 - protein, 20 aa, Artificial Sequence
  Description of Artificial Sequence: Synthetic peptide
  Seed: DPRMCSLMQGSTLPRRSGAA
DPRMFSLAQSSTGPRRSGAA

SEQ ID NO: 66923 - protein, 20 aa, Artificial Sequence
  Description of Artificial Sequence: Synthetic peptide
  Seed: DPRMCSLMQGSTLPRRSGAA
DPRMFSLAQSSTIPRRSGAA

SEQ ID NO: 66924 - protein, 20 aa, Artificial Sequence
  Description of Artificial Sequence: Synthetic peptide
  Seed: DPRMCSLMQGSTLPRRSGAA
DPRMFSLAQSSTLPRRSGAA

SEQ ID NO: 66925 - protein, 20 aa, Artificial Sequence
  Description of Artificial Sequence: Synthetic peptide
  Seed: DPRMCSLMQGSTLPRRSGAA
DPRMFSLAQSSTMPRRSGAA

SEQ ID NO: 66926 - protein, 20 aa, Artificial Sequence
  Description of Artificial Sequence: Synthetic peptide
  Seed: DPRMCSLMQGSTLPRRSGAA
DPRMFSLAQSSTSPRRSGAA

SEQ ID NO: 66927 - protein, 20 aa, Artificial Sequence
  Description of Artificial Sequence: Synthetic peptide
  Seed: DPRMCSLMQGSTLPRRSGAA
DPRMFSLAQSSTTPRRSGAA

SEQ ID NO: 66928 - protein, 20 aa, Artificial Sequence
  Description of Artificial Sequence: Synthetic peptide
  Seed: DPRMCSLMQGSTLPRRSGAA
DPRMFSLAQSSTVPRRSGAA

SEQ ID NO: 66929 - protein, 20 aa, Artificial Sequence
  Description of Artificial Sequence: Synthetic peptide
  Seed: DPRMCSLMQGSTLPRRSGAA
DPRMFSLAQTSTAPRRSGAA

SEQ ID NO: 66930 - protein, 20 aa, Artificial Sequence
  Description of Artificial Sequence: Synthetic peptide
  Seed: DPRMCSLMQGSTLPRRSGAA
DPRMFSLAQTSTIPRRSGAA

SEQ ID NO: 66931 - protein, 20 aa, Artificial Sequence
  Description of Artificial Sequence: Synthetic peptide
  Seed: DPRMCSLMQGSTLPRRSGAA
DPRMFSLAQTSTLPRRSGAA

SEQ ID NO: 66932 - protein, 20 aa, Artificial Sequence
  Description of Artificial Sequence: Synthetic peptide
  Seed: DPRMCSLMQGSTLPRRSGAA
DPRMFSLAQTSTMPRRSGAA

SEQ ID NO: 66933 - protein, 20 aa, Artificial Sequence
  Description of Artificial Sequence: Synthetic peptide
  Seed: DPRMCSLMQGSTLPRRSGAA
DPRMFSLAQTSTSPRRSGAA

SEQ ID NO: 66934 - protein, 20 aa, Artificial Sequence
  Description of Artificial Sequence: Synthetic peptide
  Seed: DPRMCSLMQGSTLPRRSGAA
DPRMFSLAQTSTTPRRSGAA

SEQ ID NO: 66935 - protein, 20 aa, Artificial Sequence
  Description of Artificial Sequence: Synthetic peptide
  Seed: DPRMCSLMQGSTLPRRSGAA
DPRMFSLAQTSTVPRRSGAA

SEQ ID NO: 66936 - protein, 20 aa, Artificial Sequence
  Description of Artificial Sequence: Synthetic peptide
  Seed: DPRMCSLMQGSTLPRRSGAA
DPRMFSLAQVSTAPRRSGAA

SEQ ID NO: 66937 - protein, 20 aa, Artificial Sequence
  Description of Artificial Sequence: Synthetic peptide
  Seed: DPRMCSLMQGSTLPRRSGAA
DPRMFSLAQVSTIPRRSGAA

SEQ ID NO: 66938 - protein, 20 aa, Artificial Sequence
  Description of Artificial Sequence: Synthetic peptide
  Seed: DPRMCSLMQGSTLPRRSGAA
DPRMFSLAQVSTLPRRSGAA

SEQ ID NO: 66939 - protein, 20 aa, Artificial Sequence
  Description of Artificial Sequence: Synthetic peptide
  Seed: DPRMCSLMQGSTLPRRSGAA
DPRMFSLAQVSTMPRRSGAA

SEQ ID NO: 66940 - protein, 20 aa, Artificial Sequence
  Description of Artificial Sequence: Synthetic peptide
  Seed: DPRMCSLMQGSTLPRRSGAA
DPRMFSLAQVSTVPRRSGAA

SEQ ID NO: 66941 - protein, 20 aa, Artificial Sequence
  Description of Artificial Sequence: Synthetic peptide
  Seed: DPRMCSLMQGSTLPRRSGAA
DPRMFSLCQASTAPRRSGAA

SEQ ID NO: 66942 - protein, 20 aa, Artificial Sequence
  Description of Artificial Sequence: Synthetic peptide
  Seed: DPRMCSLMQGSTLPRRSGAA
DPRMFSLCQASTIPRRSGAA

SEQ ID NO: 66943 - protein, 20 aa, Artificial Sequence
  Description of Artificial Sequence: Synthetic peptide
  Seed: DPRMCSLMQGSTLPRRSGAA
DPRMFSLCQASTLPRRSGAA

SEQ ID NO: 66944 - protein, 20 aa, Artificial Sequence
  Description of Artificial Sequence: Synthetic peptide
  Seed: DPRMCSLMQGSTLPRRSGAA
DPRMFSLCQASTVPRRSGAA

SEQ ID NO: 66945 - protein, 20 aa, Artificial Sequence
  Description of Artificial Sequence: Synthetic peptide
  Seed: DPRMCSLMQGSTLPRRSGAA
DPRMFSLEQASTAPRRSGAA

SEQ ID NO: 66946 - protein, 20 aa, Artificial Sequence
  Description of Artificial Sequence: Synthetic peptide
  Seed: DPRMCSLMQGSTLPRRSGAA
DPRMFSLEQASTIPRRSGAA

SEQ ID NO: 66947 - protein, 20 aa, Artificial Sequence
  Description of Artificial Sequence: Synthetic peptide
  Seed: DPRMCSLMQGSTLPRRSGAA
DPRMFSLEQASTLPRRSGAA

SEQ ID NO: 66948 - protein, 20 aa, Artificial Sequence
  Description of Artificial Sequence: Synthetic peptide
  Seed: DPRMCSLMQGSTLPRRSGAA
DPRMFSLEQASTMPRRSGAA

SEQ ID NO: 66949 - protein, 20 aa, Artificial Sequence
  Description of Artificial Sequence: Synthetic peptide
  Seed: DPRMCSLMQGSTLPRRSGAA
DPRMFSLEQASTSPRRSGAA

SEQ ID NO: 66950 - protein, 20 aa, Artificial Sequence
  Description of Artificial Sequence: Synthetic peptide
  Seed: DPRMCSLMQGSTLPRRSGAA
DPRMFSLEQASTTPRRSGAA

SEQ ID NO: 66951 - protein, 20 aa, Artificial Sequence
  Description of Artificial Sequence: Synthetic peptide
  Seed: DPRMCSLMQGSTLPRRSGAA
DPRMFSLEQASTVPRRSGAA

SEQ ID NO: 66952 - protein, 20 aa, Artificial Sequence
  Description of Artificial Sequence: Synthetic peptide
  Seed: DPRMCSLMQGSTLPRRSGAA
DPRMFSLEQGSTAPRRSGAA

SEQ ID NO: 66953 - protein, 20 aa, Artificial Sequence
  Description of Artificial Sequence: Synthetic peptide
  Seed: DPRMCSLMQGSTLPRRSGAA
DPRMFSLEQGSTIPRRSGAA

SEQ ID NO: 66954 - protein, 20 aa, Artificial Sequence
  Description of Artificial Sequence: Synthetic peptide
  Seed: DPRMCSLMQGSTLPRRSGAA
DPRMFSLEQGSTLPRRSGAA

SEQ ID NO: 66955 - protein, 20 aa, Artificial Sequence
  Description of Artificial Sequence: Synthetic peptide
  Seed: DPRMCSLMQGSTLPRRSGAA
DPRMFSLEQGSTVPRRSGAA

SEQ ID NO: 66956 - protein, 20 aa, Artificial Sequence
  Description of Artificial Sequence: Synthetic peptide
  Seed: DPRMCSLMQGSTLPRRSGAA
DPRMFSLEQPSTIPRRSGAA

SEQ ID NO: 66957 - protein, 20 aa, Artificial Sequence
  Description of Artificial Sequence: Synthetic peptide
  Seed: DPRMCSLMQGSTLPRRSGAA
DPRMFSLEQPSTLPRRSGAA

SEQ ID NO: 66958 - protein, 20 aa, Artificial Sequence
  Description of Artificial Sequence: Synthetic peptide
  Seed: DPRMCSLMQGSTLPRRSGAA
DPRMFSLEQPSTVPRRSGAA

SEQ ID NO: 66959 - protein, 20 aa, Artificial Sequence
  Description of Artificial Sequence: Synthetic peptide
  Seed: DPRMCSLMQGSTLPRRSGAA
DPRMFSLEQSSTAPRRSGAA

SEQ ID NO: 66960 - protein, 20 aa, Artificial Sequence
  Description of Artificial Sequence: Synthetic peptide
  Seed: DPRMCSLMQGSTLPRRSGAA
DPRMFSLEQSSTIPRRSGAA

SEQ ID NO: 66961 - protein, 20 aa, Artificial Sequence
  Description of Artificial Sequence: Synthetic peptide
  Seed: DPRMCSLMQGSTLPRRSGAA
DPRMFSLEQSSTLPRRSGAA

SEQ ID NO: 66962 - protein, 20 aa, Artificial Sequence
  Description of Artificial Sequence: Synthetic peptide
  Seed: DPRMCSLMQGSTLPRRSGAA
DPRMFSLEQSSTVPRRSGAA

SEQ ID NO: 66963 - protein, 20 aa, Artificial Sequence
  Description of Artificial Sequence: Synthetic peptide
  Seed: DPRMCSLMQGSTLPRRSGAA
DPRMFSLFQASTAPRRSGAA

SEQ ID NO: 66964 - protein, 20 aa, Artificial Sequence
  Description of Artificial Sequence: Synthetic peptide
  Seed: DPRMCSLMQGSTLPRRSGAA
DPRMFSLFQASTGPRRSGAA

SEQ ID NO: 66965 - protein, 20 aa, Artificial Sequence
  Description of Artificial Sequence: Synthetic peptide
  Seed: DPRMCSLMQGSTLPRRSGAA
DPRMFSLFQASTIPRRSGAA

SEQ ID NO: 66966 - protein, 20 aa, Artificial Sequence
  Description of Artificial Sequence: Synthetic peptide
  Seed: DPRMCSLMQGSTLPRRSGAA
DPRMFSLFQASTLPRRSGAA

SEQ ID NO: 66967 - protein, 20 aa, Artificial Sequence
  Description of Artificial Sequence: Synthetic peptide
  Seed: DPRMCSLMQGSTLPRRSGAA
DPRMFSLFQASTMPRRSGAA

SEQ ID NO: 66968 - protein, 20 aa, Artificial Sequence
  Description of Artificial Sequence: Synthetic peptide
  Seed: DPRMCSLMQGSTLPRRSGAA
DPRMFSLFQASTSPRRSGAA

SEQ ID NO: 66969 - protein, 20 aa, Artificial Sequence
  Description of Artificial Sequence: Synthetic peptide
  Seed: DPRMCSLMQGSTLPRRSGAA
DPRMFSLFQASTTPRRSGAA

SEQ ID NO: 66970 - protein, 20 aa, Artificial Sequence
  Description of Artificial Sequence: Synthetic peptide
  Seed: DPRMCSLMQGSTLPRRSGAA
DPRMFSLFQASTVPRRSGAA

SEQ ID NO: 66971 - protein, 20 aa, Artificial Sequence
  Description of Artificial Sequence: Synthetic peptide
  Seed: DPRMCSLMQGSTLPRRSGAA
DPRMFSLFQGSTAPRRSGAA

SEQ ID NO: 66972 - protein, 20 aa, Artificial Sequence
  Description of Artificial Sequence: Synthetic peptide
  Seed: DPRMCSLMQGSTLPRRSGAA
DPRMFSLFQGSTIPRRSGAA

SEQ ID NO: 66973 - protein, 20 aa, Artificial Sequence
  Description of Artificial Sequence: Synthetic peptide
  Seed: DPRMCSLMQGSTLPRRSGAA
DPRMFSLFQGSTLPRRSGAA

SEQ ID NO: 66974 - protein, 20 aa, Artificial Sequence
  Description of Artificial Sequence: Synthetic peptide
  Seed: DPRMCSLMQGSTLPRRSGAA
DPRMFSLFQGSTVPRRSGAA

SEQ ID NO: 66975 - protein, 20 aa, Artificial Sequence
  Description of Artificial Sequence: Synthetic peptide
  Seed: DPRMCSLMQGSTLPRRSGAA
DPRMFSLFQNSTIPRRSGAA

SEQ ID NO: 66976 - protein, 20 aa, Artificial Sequence
  Description of Artificial Sequence: Synthetic peptide
  Seed: DPRMCSLMQGSTLPRRSGAA
DPRMFSLFQNSTLPRRSGAA

SEQ ID NO: 66977 - protein, 20 aa, Artificial Sequence
  Description of Artificial Sequence: Synthetic peptide
  Seed: DPRMCSLMQGSTLPRRSGAA
DPRMFSLFQNSTVPRRSGAA

SEQ ID NO: 66978 - protein, 20 aa, Artificial Sequence
  Description of Artificial Sequence: Synthetic peptide
  Seed: DPRMCSLMQGSTLPRRSGAA
DPRMFSLFQPSTAPRRSGAA

SEQ ID NO: 66979 - protein, 20 aa, Artificial Sequence
  Description of Artificial Sequence: Synthetic peptide
  Seed: DPRMCSLMQGSTLPRRSGAA
DPRMFSLFQPSTIPRRSGAA

SEQ ID NO: 66980 - protein, 20 aa, Artificial Sequence
  Description of Artificial Sequence: Synthetic peptide
  Seed: DPRMCSLMQGSTLPRRSGAA
DPRMFSLFQPSTLPRRSGAA

SEQ ID NO: 66981 - protein, 20 aa, Artificial Sequence
  Description of Artificial Sequence: Synthetic peptide
  Seed: DPRMCSLMQGSTLPRRSGAA
DPRMFSLFQPSTVPRRSGAA

SEQ ID NO: 66982 - protein, 20 aa, Artificial Sequence
  Description of Artificial Sequence: Synthetic peptide
  Seed: DPRMCSLMQGSTLPRRSGAA
DPRMFSLFQSSTAPRRSGAA

SEQ ID NO: 66983 - protein, 20 aa, Artificial Sequence
  Description of Artificial Sequence: Synthetic peptide
  Seed: DPRMCSLMQGSTLPRRSGAA
DPRMFSLFQSSTIPRRSGAA

SEQ ID NO: 66984 - protein, 20 aa, Artificial Sequence
  Description of Artificial Sequence: Synthetic peptide
  Seed: DPRMCSLMQGSTLPRRSGAA
DPRMFSLFQSSTLPRRSGAA

SEQ ID NO: 66985 - protein, 20 aa, Artificial Sequence
  Description of Artificial Sequence: Synthetic peptide
  Seed: DPRMCSLMQGSTLPRRSGAA
DPRMFSLFQSSTVPRRSGAA

SEQ ID NO: 66986 - protein, 20 aa, Artificial Sequence
  Description of Artificial Sequence: Synthetic peptide
  Seed: DPRMCSLMQGSTLPRRSGAA
DPRMFSLFQTSTAPRRSGAA

SEQ ID NO: 66987 - protein, 20 aa, Artificial Sequence
  Description of Artificial Sequence: Synthetic peptide
  Seed: DPRMCSLMQGSTLPRRSGAA
DPRMFSLFQTSTVPRRSGAA

SEQ ID NO: 66988 - protein, 20 aa, Artificial Sequence
  Description of Artificial Sequence: Synthetic peptide
  Seed: DPRMCSLMQGSTLPRRSGAA
DPRMFSLGQASTAPRRSGAA

SEQ ID NO: 66989 - protein, 20 aa, Artificial Sequence
  Description of Artificial Sequence: Synthetic peptide
  Seed: DPRMCSLMQGSTLPRRSGAA
DPRMFSLGQASTIPRRSGAA

SEQ ID NO: 66990 - protein, 20 aa, Artificial Sequence
  Description of Artificial Sequence: Synthetic peptide
  Seed: DPRMCSLMQGSTLPRRSGAA
DPRMFSLGQASTLPRRSGAA

SEQ ID NO: 66991 - protein, 20 aa, Artificial Sequence
  Description of Artificial Sequence: Synthetic peptide
  Seed: DPRMCSLMQGSTLPRRSGAA
DPRMFSLGQASTMPRRSGAA

SEQ ID NO: 66992 - protein, 20 aa, Artificial Sequence
  Description of Artificial Sequence: Synthetic peptide
  Seed: DPRMCSLMQGSTLPRRSGAA
DPRMFSLGQASTVPRRSGAA

SEQ ID NO: 66993 - protein, 20 aa, Artificial Sequence
  Description of Artificial Sequence: Synthetic peptide
  Seed: DPRMCSLMQGSTLPRRSGAA
DPRMFSLGQGSTIPRRSGAA

SEQ ID NO: 66994 - protein, 20 aa, Artificial Sequence
  Description of Artificial Sequence: Synthetic peptide
  Seed: DPRMCSLMQGSTLPRRSGAA
DPRMFSLGQGSTLPRRSGAA

SEQ ID NO: 66995 - protein, 20 aa, Artificial Sequence
  Description of Artificial Sequence: Synthetic peptide
  Seed: DPRMCSLMQGSTLPRRSGAA
DPRMFSLGQGSTVPRRSGAA

SEQ ID NO: 66996 - protein, 20 aa, Artificial Sequence
  Description of Artificial Sequence: Synthetic peptide
  Seed: DPRMCSLMQGSTLPRRSGAA
DPRMFSLGQPSTIPRRSGAA

SEQ ID NO: 66997 - protein, 20 aa, Artificial Sequence
  Description of Artificial Sequence: Synthetic peptide
  Seed: DPRMCSLMQGSTLPRRSGAA
DPRMFSLGQPSTLPRRSGAA

SEQ ID NO: 66998 - protein, 20 aa, Artificial Sequence
  Description of Artificial Sequence: Synthetic peptide
  Seed: DPRMCSLMQGSTLPRRSGAA
DPRMFSLGQPSTVPRRSGAA

SEQ ID NO: 66999 - protein, 20 aa, Artificial Sequence
  Description of Artificial Sequence: Synthetic peptide
  Seed: DPRMCSLMQGSTLPRRSGAA
DPRMFSLGQSSTIPRRSGAA

SEQ ID NO: 67000 - protein, 20 aa, Artificial Sequence
  Description of Artificial Sequence: Synthetic peptide
  Seed: DPRMCSLMQGSTLPRRSGAA
DPRMFSLGQSSTLPRRSGAA

SEQ ID NO: 67001 - protein, 20 aa, Artificial Sequence
  Description of Artificial Sequence: Synthetic peptide
  Seed: DPRMCSLMQGSTLPRRSGAA
DPRMFSLGQSSTVPRRSGAA

SEQ ID NO: 67002 - protein, 20 aa, Artificial Sequence
  Description of Artificial Sequence: Synthetic peptide
  Seed: DPRMCSLMQGSTLPRRSGAA
DPRMFSLHQASTAPRRSGAA

SEQ ID NO: 67003 - protein, 20 aa, Artificial Sequence
  Description of Artificial Sequence: Synthetic peptide
  Seed: DPRMCSLMQGSTLPRRSGAA
DPRMFSLHQASTIPRRSGAA

SEQ ID NO: 67004 - protein, 20 aa, Artificial Sequence
  Description of Artificial Sequence: Synthetic peptide
  Seed: DPRMCSLMQGSTLPRRSGAA
DPRMFSLHQASTLPRRSGAA

SEQ ID NO: 67005 - protein, 20 aa, Artificial Sequence
  Description of Artificial Sequence: Synthetic peptide
  Seed: DPRMCSLMQGSTLPRRSGAA
DPRMFSLHQASTVPRRSGAA

SEQ ID NO: 67006 - protein, 20 aa, Artificial Sequence
  Description of Artificial Sequence: Synthetic peptide
  Seed: DPRMCSLMQGSTLPRRSGAA
DPRMFSLHQGSTLPRRSGAA

SEQ ID NO: 67007 - protein, 20 aa, Artificial Sequence
  Description of Artificial Sequence: Synthetic peptide
  Seed: DPRMCSLMQGSTLPRRSGAA
DPRMFSLHQGSTVPRRSGAA

SEQ ID NO: 67008 - protein, 20 aa, Artificial Sequence
  Description of Artificial Sequence: Synthetic peptide
  Seed: DPRMCSLMQGSTLPRRSGAA
DPRMFSLHQSSTLPRRSGAA

SEQ ID NO: 67009 - protein, 20 aa, Artificial Sequence
  Description of Artificial Sequence: Synthetic peptide
  Seed: DPRMCSLMQGSTLPRRSGAA
DPRMFSLHQSSTVPRRSGAA

SEQ ID NO: 67010 - protein, 20 aa, Artificial Sequence
  Description of Artificial Sequence: Synthetic peptide
  Seed: DPRMCSLMQGSTLPRRSGAA
DPRMFSLIQASTAPRRSGAA

SEQ ID NO: 67011 - protein, 20 aa, Artificial Sequence
  Description of Artificial Sequence: Synthetic peptide
  Seed: DPRMCSLMQGSTLPRRSGAA
DPRMFSLIQASTCPRRSGAA

SEQ ID NO: 67012 - protein, 20 aa, Artificial Sequence
  Description of Artificial Sequence: Synthetic peptide
  Seed: DPRMCSLMQGSTLPRRSGAA
DPRMFSLIQASTFPRRSGAA

SEQ ID NO: 67013 - protein, 20 aa, Artificial Sequence
  Description of Artificial Sequence: Synthetic peptide
  Seed: DPRMCSLMQGSTLPRRSGAA
DPRMFSLIQASTGPRRSGAA

SEQ ID NO: 67014 - protein, 20 aa, Artificial Sequence
  Description of Artificial Sequence: Synthetic peptide
  Seed: DPRMCSLMQGSTLPRRSGAA
DPRMFSLIQASTHPRRSGAA

SEQ ID NO: 67015 - protein, 20 aa, Artificial Sequence
  Description of Artificial Sequence: Synthetic peptide
  Seed: DPRMCSLMQGSTLPRRSGAA
DPRMFSLIQASTIPRRSGAA

SEQ ID NO: 67016 - protein, 20 aa, Artificial Sequence
  Description of Artificial Sequence: Synthetic peptide
  Seed: DPRMCSLMQGSTLPRRSGAA
DPRMFSLIQASTLPRRSGAA

SEQ ID NO: 67017 - protein, 20 aa, Artificial Sequence
  Description of Artificial Sequence: Synthetic peptide
  Seed: DPRMCSLMQGSTLPRRSGAA
DPRMFSLIQASTMPRRSGAA

SEQ ID NO: 67018 - protein, 20 aa, Artificial Sequence
  Description of Artificial Sequence: Synthetic peptide
  Seed: DPRMCSLMQGSTLPRRSGAA
DPRMFSLIQASTNPRRSGAA

SEQ ID NO: 67019 - protein, 20 aa, Artificial Sequence
  Description of Artificial Sequence: Synthetic peptide
  Seed: DPRMCSLMQGSTLPRRSGAA
DPRMFSLIQASTPPRRSGAA

SEQ ID NO: 67020 - protein, 20 aa, Artificial Sequence
  Description of Artificial Sequence: Synthetic peptide
  Seed: DPRMCSLMQGSTLPRRSGAA
DPRMFSLIQASTSPRRSGAA

SEQ ID NO: 67021 - protein, 20 aa, Artificial Sequence
  Description of Artificial Sequence: Synthetic peptide
  Seed: DPRMCSLMQGSTLPRRSGAA
DPRMFSLIQASTTPRRSGAA

SEQ ID NO: 67022 - protein, 20 aa, Artificial Sequence
  Description of Artificial Sequence: Synthetic peptide
  Seed: DPRMCSLMQGSTLPRRSGAA
DPRMFSLIQASTVPRRSGAA

SEQ ID NO: 67023 - protein, 20 aa, Artificial Sequence
  Description of Artificial Sequence: Synthetic peptide
  Seed: DPRMCSLMQGSTLPRRSGAA
DPRMFSLIQASTYPRRSGAA

SEQ ID NO: 67024 - protein, 20 aa, Artificial Sequence
  Description of Artificial Sequence: Synthetic peptide
  Seed: DPRMCSLMQGSTLPRRSGAA
DPRMFSLIQGSTAPRRSGAA

SEQ ID NO: 67025 - protein, 20 aa, Artificial Sequence
  Description of Artificial Sequence: Synthetic peptide
  Seed: DPRMCSLMQGSTLPRRSGAA
DPRMFSLIQGSTCPRRSGAA

SEQ ID NO: 67026 - protein, 20 aa, Artificial Sequence
  Description of Artificial Sequence: Synthetic peptide
  Seed: DPRMCSLMQGSTLPRRSGAA
DPRMFSLIQGSTFPRRSGAA

SEQ ID NO: 67027 - protein, 20 aa, Artificial Sequence
  Description of Artificial Sequence: Synthetic peptide
  Seed: DPRMCSLMQGSTLPRRSGAA
DPRMFSLIQGSTGPRRSGAA

SEQ ID NO: 67028 - protein, 20 aa, Artificial Sequence
  Description of Artificial Sequence: Synthetic peptide
  Seed: DPRMCSLMQGSTLPRRSGAA
DPRMFSLIQGSTIPRRSGAA

SEQ ID NO: 67029 - protein, 20 aa, Artificial Sequence
  Description of Artificial Sequence: Synthetic peptide
  Seed: DPRMCSLMQGSTLPRRSGAA
DPRMFSLIQGSTLPRRSGAA

SEQ ID NO: 67030 - protein, 20 aa, Artificial Sequence
  Description of Artificial Sequence: Synthetic peptide
  Seed: DPRMCSLMQGSTLPRRSGAA
DPRMFSLIQGSTMPRRSGAA

SEQ ID NO: 67031 - protein, 20 aa, Artificial Sequence
  Description of Artificial Sequence: Synthetic peptide
  Seed: DPRMCSLMQGSTLPRRSGAA
DPRMFSLIQGSTNPRRSGAA

SEQ ID NO: 67032 - protein, 20 aa, Artificial Sequence
  Description of Artificial Sequence: Synthetic peptide
  Seed: DPRMCSLMQGSTLPRRSGAA
DPRMFSLIQGSTSPRRSGAA

SEQ ID NO: 67033 - protein, 20 aa, Artificial Sequence
  Description of Artificial Sequence: Synthetic peptide
  Seed: DPRMCSLMQGSTLPRRSGAA
DPRMFSLIQGSTTPRRSGAA

SEQ ID NO: 67034 - protein, 20 aa, Artificial Sequence
  Description of Artificial Sequence: Synthetic peptide
  Seed: DPRMCSLMQGSTLPRRSGAA
DPRMFSLIQGSTVPRRSGAA

SEQ ID NO: 67035 - protein, 20 aa, Artificial Sequence
  Description of Artificial Sequence: Synthetic peptide
  Seed: DPRMCSLMQGSTLPRRSGAA
DPRMFSLIQISTAPRRSGAA

SEQ ID NO: 67036 - protein, 20 aa, Artificial Sequence
  Description of Artificial Sequence: Synthetic peptide
  Seed: DPRMCSLMQGSTLPRRSGAA
DPRMFSLIQISTIPRRSGAA

SEQ ID NO: 67037 - protein, 20 aa, Artificial Sequence
  Description of Artificial Sequence: Synthetic peptide
  Seed: DPRMCSLMQGSTLPRRSGAA
DPRMFSLIQISTVPRRSGAA

SEQ ID NO: 67038 - protein, 20 aa, Artificial Sequence
  Description of Artificial Sequence: Synthetic peptide
  Seed: DPRMCSLMQGSTLPRRSGAA
DPRMFSLIQNSTAPRRSGAA

SEQ ID NO: 67039 - protein, 20 aa, Artificial Sequence
  Description of Artificial Sequence: Synthetic peptide
  Seed: DPRMCSLMQGSTLPRRSGAA
DPRMFSLIQNSTGPRRSGAA

SEQ ID NO: 67040 - protein, 20 aa, Artificial Sequence
  Description of Artificial Sequence: Synthetic peptide
  Seed: DPRMCSLMQGSTLPRRSGAA
DPRMFSLIQNSTIPRRSGAA

SEQ ID NO: 67041 - protein, 20 aa, Artificial Sequence
  Description of Artificial Sequence: Synthetic peptide
  Seed: DPRMCSLMQGSTLPRRSGAA
DPRMFSLIQNSTLPRRSGAA

SEQ ID NO: 67042 - protein, 20 aa, Artificial Sequence
  Description of Artificial Sequence: Synthetic peptide
  Seed: DPRMCSLMQGSTLPRRSGAA
DPRMFSLIQNSTMPRRSGAA

SEQ ID NO: 67043 - protein, 20 aa, Artificial Sequence
  Description of Artificial Sequence: Synthetic peptide
  Seed: DPRMCSLMQGSTLPRRSGAA
DPRMFSLIQNSTSPRRSGAA

SEQ ID NO: 67044 - protein, 20 aa, Artificial Sequence
  Description of Artificial Sequence: Synthetic peptide
  Seed: DPRMCSLMQGSTLPRRSGAA
DPRMFSLIQNSTTPRRSGAA

SEQ ID NO: 67045 - protein, 20 aa, Artificial Sequence
  Description of Artificial Sequence: Synthetic peptide
  Seed: DPRMCSLMQGSTLPRRSGAA
DPRMFSLIQNSTVPRRSGAA

SEQ ID NO: 67046 - protein, 20 aa, Artificial Sequence
  Description of Artificial Sequence: Synthetic peptide
  Seed: DPRMCSLMQGSTLPRRSGAA
DPRMFSLIQPSTAPRRSGAA

SEQ ID NO: 67047 - protein, 20 aa, Artificial Sequence
  Description of Artificial Sequence: Synthetic peptide
  Seed: DPRMCSLMQGSTLPRRSGAA
DPRMFSLIQPSTCPRRSGAA

SEQ ID NO: 67048 - protein, 20 aa, Artificial Sequence
  Description of Artificial Sequence: Synthetic peptide
  Seed: DPRMCSLMQGSTLPRRSGAA
DPRMFSLIQPSTGPRRSGAA

SEQ ID NO: 67049 - protein, 20 aa, Artificial Sequence
  Description of Artificial Sequence: Synthetic peptide
  Seed: DPRMCSLMQGSTLPRRSGAA
DPRMFSLIQPSTIPRRSGAA

SEQ ID NO: 67050 - protein, 20 aa, Artificial Sequence
  Description of Artificial Sequence: Synthetic peptide
  Seed: DPRMCSLMQGSTLPRRSGAA
DPRMFSLIQPSTLPRRSGAA

SEQ ID NO: 67051 - protein, 20 aa, Artificial Sequence
  Description of Artificial Sequence: Synthetic peptide
  Seed: DPRMCSLMQGSTLPRRSGAA
DPRMFSLIQPSTMPRRSGAA

SEQ ID NO: 67052 - protein, 20 aa, Artificial Sequence
  Description of Artificial Sequence: Synthetic peptide
  Seed: DPRMCSLMQGSTLPRRSGAA
DPRMFSLIQPSTNPRRSGAA

SEQ ID NO: 67053 - protein, 20 aa, Artificial Sequence
  Description of Artificial Sequence: Synthetic peptide
  Seed: DPRMCSLMQGSTLPRRSGAA
DPRMFSLIQPSTSPRRSGAA

SEQ ID NO: 67054 - protein, 20 aa, Artificial Sequence
  Description of Artificial Sequence: Synthetic peptide
  Seed: DPRMCSLMQGSTLPRRSGAA
DPRMFSLIQPSTTPRRSGAA

SEQ ID NO: 67055 - protein, 20 aa, Artificial Sequence
  Description of Artificial Sequence: Synthetic peptide
  Seed: DPRMCSLMQGSTLPRRSGAA
DPRMFSLIQPSTVPRRSGAA

SEQ ID NO: 67056 - protein, 20 aa, Artificial Sequence
  Description of Artificial Sequence: Synthetic peptide
  Seed: DPRMCSLMQGSTLPRRSGAA
DPRMFSLIQSSTAPRRSGAA

SEQ ID NO: 67057 - protein, 20 aa, Artificial Sequence
  Description of Artificial Sequence: Synthetic peptide
  Seed: DPRMCSLMQGSTLPRRSGAA
DPRMFSLIQSSTCPRRSGAA

SEQ ID NO: 67058 - protein, 20 aa, Artificial Sequence
  Description of Artificial Sequence: Synthetic peptide
  Seed: DPRMCSLMQGSTLPRRSGAA
DPRMFSLIQSSTFPRRSGAA

SEQ ID NO: 67059 - protein, 20 aa, Artificial Sequence
  Description of Artificial Sequence: Synthetic peptide
  Seed: DPRMCSLMQGSTLPRRSGAA
DPRMFSLIQSSTGPRRSGAA

SEQ ID NO: 67060 - protein, 20 aa, Artificial Sequence
  Description of Artificial Sequence: Synthetic peptide
  Seed: DPRMCSLMQGSTLPRRSGAA
DPRMFSLIQSSTIPRRSGAA

SEQ ID NO: 67061 - protein, 20 aa, Artificial Sequence
  Description of Artificial Sequence: Synthetic peptide
  Seed: DPRMCSLMQGSTLPRRSGAA
DPRMFSLIQSSTLPRRSGAA

SEQ ID NO: 67062 - protein, 20 aa, Artificial Sequence
  Description of Artificial Sequence: Synthetic peptide
  Seed: DPRMCSLMQGSTLPRRSGAA
DPRMFSLIQSSTMPRRSGAA

SEQ ID NO: 67063 - protein, 20 aa, Artificial Sequence
  Description of Artificial Sequence: Synthetic peptide
  Seed: DPRMCSLMQGSTLPRRSGAA
DPRMFSLIQSSTNPRRSGAA

SEQ ID NO: 67064 - protein, 20 aa, Artificial Sequence
  Description of Artificial Sequence: Synthetic peptide
  Seed: DPRMCSLMQGSTLPRRSGAA
DPRMFSLIQSSTSPRRSGAA

SEQ ID NO: 67065 - protein, 20 aa, Artificial Sequence
  Description of Artificial Sequence: Synthetic peptide
  Seed: DPRMCSLMQGSTLPRRSGAA
DPRMFSLIQSSTTPRRSGAA

SEQ ID NO: 67066 - protein, 20 aa, Artificial Sequence
  Description of Artificial Sequence: Synthetic peptide
  Seed: DPRMCSLMQGSTLPRRSGAA
DPRMFSLIQSSTVPRRSGAA

SEQ ID NO: 67067 - protein, 20 aa, Artificial Sequence
  Description of Artificial Sequence: Synthetic peptide
  Seed: DPRMCSLMQGSTLPRRSGAA
DPRMFSLIQTSTAPRRSGAA

SEQ ID NO: 67068 - protein, 20 aa, Artificial Sequence
  Description of Artificial Sequence: Synthetic peptide
  Seed: DPRMCSLMQGSTLPRRSGAA
DPRMFSLIQTSTGPRRSGAA

SEQ ID NO: 67069 - protein, 20 aa, Artificial Sequence
  Description of Artificial Sequence: Synthetic peptide
  Seed: DPRMCSLMQGSTLPRRSGAA
DPRMFSLIQTSTIPRRSGAA

SEQ ID NO: 67070 - protein, 20 aa, Artificial Sequence
  Description of Artificial Sequence: Synthetic peptide
  Seed: DPRMCSLMQGSTLPRRSGAA
DPRMFSLIQTSTLPRRSGAA

SEQ ID NO: 67071 - protein, 20 aa, Artificial Sequence
  Description of Artificial Sequence: Synthetic peptide
  Seed: DPRMCSLMQGSTLPRRSGAA
DPRMFSLIQTSTMPRRSGAA

SEQ ID NO: 67072 - protein, 20 aa, Artificial Sequence
  Description of Artificial Sequence: Synthetic peptide
  Seed: DPRMCSLMQGSTLPRRSGAA
DPRMFSLIQTSTSPRRSGAA

SEQ ID NO: 67073 - protein, 20 aa, Artificial Sequence
  Description of Artificial Sequence: Synthetic peptide
  Seed: DPRMCSLMQGSTLPRRSGAA
DPRMFSLIQTSTTPRRSGAA

SEQ ID NO: 67074 - protein, 20 aa, Artificial Sequence
  Description of Artificial Sequence: Synthetic peptide
  Seed: DPRMCSLMQGSTLPRRSGAA
DPRMFSLIQTSTVPRRSGAA

SEQ ID NO: 67075 - protein, 20 aa, Artificial Sequence
  Description of Artificial Sequence: Synthetic peptide
  Seed: DPRMCSLMQGSTLPRRSGAA
DPRMFSLIQVSTAPRRSGAA

SEQ ID NO: 67076 - protein, 20 aa, Artificial Sequence
  Description of Artificial Sequence: Synthetic peptide
  Seed: DPRMCSLMQGSTLPRRSGAA
DPRMFSLIQVSTIPRRSGAA

SEQ ID NO: 67077 - protein, 20 aa, Artificial Sequence
  Description of Artificial Sequence: Synthetic peptide
  Seed: DPRMCSLMQGSTLPRRSGAA
DPRMFSLIQVSTLPRRSGAA

SEQ ID NO: 67078 - protein, 20 aa, Artificial Sequence
  Description of Artificial Sequence: Synthetic peptide
  Seed: DPRMCSLMQGSTLPRRSGAA
DPRMFSLIQVSTMPRRSGAA

SEQ ID NO: 67079 - protein, 20 aa, Artificial Sequence
  Description of Artificial Sequence: Synthetic peptide
  Seed: DPRMCSLMQGSTLPRRSGAA
DPRMFSLIQVSTSPRRSGAA

SEQ ID NO: 67080 - protein, 20 aa, Artificial Sequence
  Description of Artificial Sequence: Synthetic peptide
  Seed: DPRMCSLMQGSTLPRRSGAA
DPRMFSLIQVSTTPRRSGAA

SEQ ID NO: 67081 - protein, 20 aa, Artificial Sequence
  Description of Artificial Sequence: Synthetic peptide
  Seed: DPRMCSLMQGSTLPRRSGAA
DPRMFSLIQVSTVPRRSGAA

SEQ ID NO: 67082 - protein, 20 aa, Artificial Sequence
  Description of Artificial Sequence: Synthetic peptide
  Seed: DPRMCSLMQGSTLPRRSGAA
DPRMFSLLQASTAPRRSGAA

SEQ ID NO: 67083 - protein, 20 aa, Artificial Sequence
  Description of Artificial Sequence: Synthetic peptide
  Seed: DPRMCSLMQGSTLPRRSGAA
DPRMFSLLQASTCPRRSGAA

SEQ ID NO: 67084 - protein, 20 aa, Artificial Sequence
  Description of Artificial Sequence: Synthetic peptide
  Seed: DPRMCSLMQGSTLPRRSGAA
DPRMFSLLQASTFPRRSGAA

SEQ ID NO: 67085 - protein, 20 aa, Artificial Sequence
  Description of Artificial Sequence: Synthetic peptide
  Seed: DPRMCSLMQGSTLPRRSGAA
DPRMFSLLQASTGPRRSGAA

SEQ ID NO: 67086 - protein, 20 aa, Artificial Sequence
  Description of Artificial Sequence: Synthetic peptide
  Seed: DPRMCSLMQGSTLPRRSGAA
DPRMFSLLQASTHPRRSGAA

SEQ ID NO: 67087 - protein, 20 aa, Artificial Sequence
  Description of Artificial Sequence: Synthetic peptide
  Seed: DPRMCSLMQGSTLPRRSGAA
DPRMFSLLQASTIPRRSGAA

SEQ ID NO: 67088 - protein, 20 aa, Artificial Sequence
  Description of Artificial Sequence: Synthetic peptide
  Seed: DPRMCSLMQGSTLPRRSGAA
DPRMFSLLQASTKPRRSGAA

SEQ ID NO: 67089 - protein, 20 aa, Artificial Sequence
  Description of Artificial Sequence: Synthetic peptide
  Seed: DPRMCSLMQGSTLPRRSGAA
DPRMFSLLQASTLPRRSGAA

SEQ ID NO: 67090 - protein, 20 aa, Artificial Sequence
  Description of Artificial Sequence: Synthetic peptide
  Seed: DPRMCSLMQGSTLPRRSGAA
DPRMFSLLQASTMPRRSGAA

SEQ ID NO: 67091 - protein, 20 aa, Artificial Sequence
  Description of Artificial Sequence: Synthetic peptide
  Seed: DPRMCSLMQGSTLPRRSGAA
DPRMFSLLQASTNPRRSGAA

SEQ ID NO: 67092 - protein, 20 aa, Artificial Sequence
  Description of Artificial Sequence: Synthetic peptide
  Seed: DPRMCSLMQGSTLPRRSGAA
DPRMFSLLQASTPPRRSGAA

SEQ ID NO: 67093 - protein, 20 aa, Artificial Sequence
  Description of Artificial Sequence: Synthetic peptide
  Seed: DPRMCSLMQGSTLPRRSGAA
DPRMFSLLQASTQPRRSGAA

SEQ ID NO: 67094 - protein, 20 aa, Artificial Sequence
  Description of Artificial Sequence: Synthetic peptide
  Seed: DPRMCSLMQGSTLPRRSGAA
DPRMFSLLQASTRPRRSGAA

SEQ ID NO: 67095 - protein, 20 aa, Artificial Sequence
  Description of Artificial Sequence: Synthetic peptide
  Seed: DPRMCSLMQGSTLPRRSGAA
DPRMFSLLQASTSPRRSGAA

SEQ ID NO: 67096 - protein, 20 aa, Artificial Sequence
  Description of Artificial Sequence: Synthetic peptide
  Seed: DPRMCSLMQGSTLPRRSGAA
DPRMFSLLQASTTPRRSGAA

SEQ ID NO: 67097 - protein, 20 aa, Artificial Sequence
  Description of Artificial Sequence: Synthetic peptide
  Seed: DPRMCSLMQGSTLPRRSGAA
DPRMFSLLQASTVPRRSGAA

SEQ ID NO: 67098 - protein, 20 aa, Artificial Sequence
  Description of Artificial Sequence: Synthetic peptide
  Seed: DPRMCSLMQGSTLPRRSGAA
DPRMFSLLQASTWPRRSGAA

SEQ ID NO: 67099 - protein, 20 aa, Artificial Sequence
  Description of Artificial Sequence: Synthetic peptide
  Seed: DPRMCSLMQGSTLPRRSGAA
DPRMFSLLQASTYPRRSGAA

SEQ ID NO: 67100 - protein, 20 aa, Artificial Sequence
  Description of Artificial Sequence: Synthetic peptide
  Seed: DPRMCSLMQGSTLPRRSGAA
DPRMFSLLQCSTIPRRSGAA

SEQ ID NO: 67101 - protein, 20 aa, Artificial Sequence
  Description of Artificial Sequence: Synthetic peptide
  Seed: DPRMCSLMQGSTLPRRSGAA
DPRMFSLLQCSTLPRRSGAA

SEQ ID NO: 67102 - protein, 20 aa, Artificial Sequence
  Description of Artificial Sequence: Synthetic peptide
  Seed: DPRMCSLMQGSTLPRRSGAA
DPRMFSLLQCSTVPRRSGAA

SEQ ID NO: 67103 - protein, 20 aa, Artificial Sequence
  Description of Artificial Sequence: Synthetic peptide
  Seed: DPRMCSLMQGSTLPRRSGAA
DPRMFSLLQESTIPRRSGAA

SEQ ID NO: 67104 - protein, 20 aa, Artificial Sequence
  Description of Artificial Sequence: Synthetic peptide
  Seed: DPRMCSLMQGSTLPRRSGAA
DPRMFSLLQESTLPRRSGAA

SEQ ID NO: 67105 - protein, 20 aa, Artificial Sequence
  Description of Artificial Sequence: Synthetic peptide
  Seed: DPRMCSLMQGSTLPRRSGAA
DPRMFSLLQESTVPRRSGAA

SEQ ID NO: 67106 - protein, 20 aa, Artificial Sequence
  Description of Artificial Sequence: Synthetic peptide
  Seed: DPRMCSLMQGSTLPRRSGAA
DPRMFSLLQGSTAPRRSGAA

SEQ ID NO: 67107 - protein, 20 aa, Artificial Sequence
  Description of Artificial Sequence: Synthetic peptide
  Seed: DPRMCSLMQGSTLPRRSGAA
DPRMFSLLQGSTCPRRSGAA

SEQ ID NO: 67108 - protein, 20 aa, Artificial Sequence
  Description of Artificial Sequence: Synthetic peptide
  Seed: DPRMCSLMQGSTLPRRSGAA
DPRMFSLLQGSTFPRRSGAA

SEQ ID NO: 67109 - protein, 20 aa, Artificial Sequence
  Description of Artificial Sequence: Synthetic peptide
  Seed: DPRMCSLMQGSTLPRRSGAA
DPRMFSLLQGSTGPRRSGAA

SEQ ID NO: 67110 - protein, 20 aa, Artificial Sequence
  Description of Artificial Sequence: Synthetic peptide
  Seed: DPRMCSLMQGSTLPRRSGAA
DPRMFSLLQGSTHPRRSGAA

SEQ ID NO: 67111 - protein, 20 aa, Artificial Sequence
  Description of Artificial Sequence: Synthetic peptide
  Seed: DPRMCSLMQGSTLPRRSGAA
DPRMFSLLQGSTIPRRSGAA

SEQ ID NO: 67112 - protein, 20 aa, Artificial Sequence
  Description of Artificial Sequence: Synthetic peptide
  Seed: DPRMCSLMQGSTLPRRSGAA
DPRMFSLLQGSTLPRRSGAA

SEQ ID NO: 67113 - protein, 20 aa, Artificial Sequence
  Description of Artificial Sequence: Synthetic peptide
  Seed: DPRMCSLMQGSTLPRRSGAA
DPRMFSLLQGSTMPRRSGAA

SEQ ID NO: 67114 - protein, 20 aa, Artificial Sequence
  Description of Artificial Sequence: Synthetic peptide
  Seed: DPRMCSLMQGSTLPRRSGAA
DPRMFSLLQGSTNPRRSGAA

SEQ ID NO: 67115 - protein, 20 aa, Artificial Sequence
  Description of Artificial Sequence: Synthetic peptide
  Seed: DPRMCSLMQGSTLPRRSGAA
DPRMFSLLQGSTPPRRSGAA

SEQ ID NO: 67116 - protein, 20 aa, Artificial Sequence
  Description of Artificial Sequence: Synthetic peptide
  Seed: DPRMCSLMQGSTLPRRSGAA
DPRMFSLLQGSTQPRRSGAA

SEQ ID NO: 67117 - protein, 20 aa, Artificial Sequence
  Description of Artificial Sequence: Synthetic peptide
  Seed: DPRMCSLMQGSTLPRRSGAA
DPRMFSLLQGSTSPRRSGAA

SEQ ID NO: 67118 - protein, 20 aa, Artificial Sequence
  Description of Artificial Sequence: Synthetic peptide
  Seed: DPRMCSLMQGSTLPRRSGAA
DPRMFSLLQGSTTPRRSGAA

SEQ ID NO: 67119 - protein, 20 aa, Artificial Sequence
  Description of Artificial Sequence: Synthetic peptide
  Seed: DPRMCSLMQGSTLPRRSGAA
DPRMFSLLQGSTVPRRSGAA

SEQ ID NO: 67120 - protein, 20 aa, Artificial Sequence
  Description of Artificial Sequence: Synthetic peptide
  Seed: DPRMCSLMQGSTLPRRSGAA
DPRMFSLLQGSTYPRRSGAA

SEQ ID NO: 67121 - protein, 20 aa, Artificial Sequence
  Description of Artificial Sequence: Synthetic peptide
  Seed: DPRMCSLMQGSTLPRRSGAA
DPRMFSLLQHSTAPRRSGAA

SEQ ID NO: 67122 - protein, 20 aa, Artificial Sequence
  Description of Artificial Sequence: Synthetic peptide
  Seed: DPRMCSLMQGSTLPRRSGAA
DPRMFSLLQHSTIPRRSGAA

SEQ ID NO: 67123 - protein, 20 aa, Artificial Sequence
  Description of Artificial Sequence: Synthetic peptide
  Seed: DPRMCSLMQGSTLPRRSGAA
DPRMFSLLQHSTLPRRSGAA

SEQ ID NO: 67124 - protein, 20 aa, Artificial Sequence
  Description of Artificial Sequence: Synthetic peptide
  Seed: DPRMCSLMQGSTLPRRSGAA
DPRMFSLLQHSTVPRRSGAA

SEQ ID NO: 67125 - protein, 20 aa, Artificial Sequence
  Description of Artificial Sequence: Synthetic peptide
  Seed: DPRMCSLMQGSTLPRRSGAA
DPRMFSLLQISTAPRRSGAA

SEQ ID NO: 67126 - protein, 20 aa, Artificial Sequence
  Description of Artificial Sequence: Synthetic peptide
  Seed: DPRMCSLMQGSTLPRRSGAA
DPRMFSLLQISTIPRRSGAA

SEQ ID NO: 67127 - protein, 20 aa, Artificial Sequence
  Description of Artificial Sequence: Synthetic peptide
  Seed: DPRMCSLMQGSTLPRRSGAA
DPRMFSLLQISTLPRRSGAA

SEQ ID NO: 67128 - protein, 20 aa, Artificial Sequence
  Description of Artificial Sequence: Synthetic peptide
  Seed: DPRMCSLMQGSTLPRRSGAA
DPRMFSLLQISTMPRRSGAA

SEQ ID NO: 67129 - protein, 20 aa, Artificial Sequence
  Description of Artificial Sequence: Synthetic peptide
  Seed: DPRMCSLMQGSTLPRRSGAA
DPRMFSLLQISTSPRRSGAA

SEQ ID NO: 67130 - protein, 20 aa, Artificial Sequence
  Description of Artificial Sequence: Synthetic peptide
  Seed: DPRMCSLMQGSTLPRRSGAA
DPRMFSLLQISTTPRRSGAA

SEQ ID NO: 67131 - protein, 20 aa, Artificial Sequence
  Description of Artificial Sequence: Synthetic peptide
  Seed: DPRMCSLMQGSTLPRRSGAA
DPRMFSLLQISTVPRRSGAA

SEQ ID NO: 67132 - protein, 20 aa, Artificial Sequence
  Description of Artificial Sequence: Synthetic peptide
  Seed: DPRMCSLMQGSTLPRRSGAA
DPRMFSLLQLSTAPRRSGAA

SEQ ID NO: 67133 - protein, 20 aa, Artificial Sequence
  Description of Artificial Sequence: Synthetic peptide
  Seed: DPRMCSLMQGSTLPRRSGAA
DPRMFSLLQLSTIPRRSGAA

SEQ ID NO: 67134 - protein, 20 aa, Artificial Sequence
  Description of Artificial Sequence: Synthetic peptide
  Seed: DPRMCSLMQGSTLPRRSGAA
DPRMFSLLQLSTLPRRSGAA

SEQ ID NO: 67135 - protein, 20 aa, Artificial Sequence
  Description of Artificial Sequence: Synthetic peptide
  Seed: DPRMCSLMQGSTLPRRSGAA
DPRMFSLLQLSTVPRRSGAA

SEQ ID NO: 67136 - protein, 20 aa, Artificial Sequence
  Description of Artificial Sequence: Synthetic peptide
  Seed: DPRMCSLMQGSTLPRRSGAA
DPRMFSLLQMSTAPRRSGAA

SEQ ID NO: 67137 - protein, 20 aa, Artificial Sequence
  Description of Artificial Sequence: Synthetic peptide
  Seed: DPRMCSLMQGSTLPRRSGAA
DPRMFSLLQMSTIPRRSGAA

SEQ ID NO: 67138 - protein, 20 aa, Artificial Sequence
  Description of Artificial Sequence: Synthetic peptide
  Seed: DPRMCSLMQGSTLPRRSGAA
DPRMFSLLQMSTLPRRSGAA

SEQ ID NO: 67139 - protein, 20 aa, Artificial Sequence
  Description of Artificial Sequence: Synthetic peptide
  Seed: DPRMCSLMQGSTLPRRSGAA
DPRMFSLLQMSTVPRRSGAA

SEQ ID NO: 67140 - protein, 20 aa, Artificial Sequence
  Description of Artificial Sequence: Synthetic peptide
  Seed: DPRMCSLMQGSTLPRRSGAA
DPRMFSLLQNSTAPRRSGAA

SEQ ID NO: 67141 - protein, 20 aa, Artificial Sequence
  Description of Artificial Sequence: Synthetic peptide
  Seed: DPRMCSLMQGSTLPRRSGAA
DPRMFSLLQNSTCPRRSGAA

SEQ ID NO: 67142 - protein, 20 aa, Artificial Sequence
  Description of Artificial Sequence: Synthetic peptide
  Seed: DPRMCSLMQGSTLPRRSGAA
DPRMFSLLQNSTFPRRSGAA

SEQ ID NO: 67143 - protein, 20 aa, Artificial Sequence
  Description of Artificial Sequence: Synthetic peptide
  Seed: DPRMCSLMQGSTLPRRSGAA
DPRMFSLLQNSTGPRRSGAA

SEQ ID NO: 67144 - protein, 20 aa, Artificial Sequence
  Description of Artificial Sequence: Synthetic peptide
  Seed: DPRMCSLMQGSTLPRRSGAA
DPRMFSLLQNSTIPRRSGAA

SEQ ID NO: 67145 - protein, 20 aa, Artificial Sequence
  Description of Artificial Sequence: Synthetic peptide
  Seed: DPRMCSLMQGSTLPRRSGAA
DPRMFSLLQNSTLPRRSGAA

SEQ ID NO: 67146 - protein, 20 aa, Artificial Sequence
  Description of Artificial Sequence: Synthetic peptide
  Seed: DPRMCSLMQGSTLPRRSGAA
DPRMFSLLQNSTMPRRSGAA

SEQ ID NO: 67147 - protein, 20 aa, Artificial Sequence
  Description of Artificial Sequence: Synthetic peptide
  Seed: DPRMCSLMQGSTLPRRSGAA
DPRMFSLLQNSTSPRRSGAA

SEQ ID NO: 67148 - protein, 20 aa, Artificial Sequence
  Description of Artificial Sequence: Synthetic peptide
  Seed: DPRMCSLMQGSTLPRRSGAA
DPRMFSLLQNSTTPRRSGAA

SEQ ID NO: 67149 - protein, 20 aa, Artificial Sequence
  Description of Artificial Sequence: Synthetic peptide
  Seed: DPRMCSLMQGSTLPRRSGAA
DPRMFSLLQNSTVPRRSGAA

SEQ ID NO: 67150 - protein, 20 aa, Artificial Sequence
  Description of Artificial Sequence: Synthetic peptide
  Seed: DPRMCSLMQGSTLPRRSGAA
DPRMFSLLQPSTAPRRSGAA

SEQ ID NO: 67151 - protein, 20 aa, Artificial Sequence
  Description of Artificial Sequence: Synthetic peptide
  Seed: DPRMCSLMQGSTLPRRSGAA
DPRMFSLLQPSTCPRRSGAA

SEQ ID NO: 67152 - protein, 20 aa, Artificial Sequence
  Description of Artificial Sequence: Synthetic peptide
  Seed: DPRMCSLMQGSTLPRRSGAA
DPRMFSLLQPSTFPRRSGAA

SEQ ID NO: 67153 - protein, 20 aa, Artificial Sequence
  Description of Artificial Sequence: Synthetic peptide
  Seed: DPRMCSLMQGSTLPRRSGAA
DPRMFSLLQPSTGPRRSGAA

SEQ ID NO: 67154 - protein, 20 aa, Artificial Sequence
  Description of Artificial Sequence: Synthetic peptide
  Seed: DPRMCSLMQGSTLPRRSGAA
DPRMFSLLQPSTIPRRSGAA

SEQ ID NO: 67155 - protein, 20 aa, Artificial Sequence
  Description of Artificial Sequence: Synthetic peptide
  Seed: DPRMCSLMQGSTLPRRSGAA
DPRMFSLLQPSTLPRRSGAA

SEQ ID NO: 67156 - protein, 20 aa, Artificial Sequence
  Description of Artificial Sequence: Synthetic peptide
  Seed: DPRMCSLMQGSTLPRRSGAA
DPRMFSLLQPSTMPRRSGAA

SEQ ID NO: 67157 - protein, 20 aa, Artificial Sequence
  Description of Artificial Sequence: Synthetic peptide
  Seed: DPRMCSLMQGSTLPRRSGAA
DPRMFSLLQPSTNPRRSGAA

SEQ ID NO: 67158 - protein, 20 aa, Artificial Sequence
  Description of Artificial Sequence: Synthetic peptide
  Seed: DPRMCSLMQGSTLPRRSGAA
DPRMFSLLQPSTPPRRSGAA

SEQ ID NO: 67159 - protein, 20 aa, Artificial Sequence
  Description of Artificial Sequence: Synthetic peptide
  Seed: DPRMCSLMQGSTLPRRSGAA
DPRMFSLLQPSTSPRRSGAA

SEQ ID NO: 67160 - protein, 20 aa, Artificial Sequence
  Description of Artificial Sequence: Synthetic peptide
  Seed: DPRMCSLMQGSTLPRRSGAA
DPRMFSLLQPSTTPRRSGAA

SEQ ID NO: 67161 - protein, 20 aa, Artificial Sequence
  Description of Artificial Sequence: Synthetic peptide
  Seed: DPRMCSLMQGSTLPRRSGAA
DPRMFSLLQPSTVPRRSGAA

SEQ ID NO: 67162 - protein, 20 aa, Artificial Sequence
  Description of Artificial Sequence: Synthetic peptide
  Seed: DPRMCSLMQGSTLPRRSGAA
DPRMFSLLQPSTYPRRSGAA

SEQ ID NO: 67163 - protein, 20 aa, Artificial Sequence
  Description of Artificial Sequence: Synthetic peptide
  Seed: DPRMCSLMQGSTLPRRSGAA
DPRMFSLLQQSTIPRRSGAA

SEQ ID NO: 67164 - protein, 20 aa, Artificial Sequence
  Description of Artificial Sequence: Synthetic peptide
  Seed: DPRMCSLMQGSTLPRRSGAA
DPRMFSLLQQSTLPRRSGAA

SEQ ID NO: 67165 - protein, 20 aa, Artificial Sequence
  Description of Artificial Sequence: Synthetic peptide
  Seed: DPRMCSLMQGSTLPRRSGAA
DPRMFSLLQQSTVPRRSGAA

SEQ ID NO: 67166 - protein, 20 aa, Artificial Sequence
  Description of Artificial Sequence: Synthetic peptide
  Seed: DPRMCSLMQGSTLPRRSGAA
DPRMFSLLQSSTAPRRSGAA

SEQ ID NO: 67167 - protein, 20 aa, Artificial Sequence
  Description of Artificial Sequence: Synthetic peptide
  Seed: DPRMCSLMQGSTLPRRSGAA
DPRMFSLLQSSTCPRRSGAA

SEQ ID NO: 67168 - protein, 20 aa, Artificial Sequence
  Description of Artificial Sequence: Synthetic peptide
  Seed: DPRMCSLMQGSTLPRRSGAA
DPRMFSLLQSSTFPRRSGAA

SEQ ID NO: 67169 - protein, 20 aa, Artificial Sequence
  Description of Artificial Sequence: Synthetic peptide
  Seed: DPRMCSLMQGSTLPRRSGAA
DPRMFSLLQSSTGPRRSGAA

SEQ ID NO: 67170 - protein, 20 aa, Artificial Sequence
  Description of Artificial Sequence: Synthetic peptide
  Seed: DPRMCSLMQGSTLPRRSGAA
DPRMFSLLQSSTHPRRSGAA

SEQ ID NO: 67171 - protein, 20 aa, Artificial Sequence
  Description of Artificial Sequence: Synthetic peptide
  Seed: DPRMCSLMQGSTLPRRSGAA
DPRMFSLLQSSTIPRRSGAA

SEQ ID NO: 67172 - protein, 20 aa, Artificial Sequence
  Description of Artificial Sequence: Synthetic peptide
  Seed: DPRMCSLMQGSTLPRRSGAA
DPRMFSLLQSSTLPRRSGAA

SEQ ID NO: 67173 - protein, 20 aa, Artificial Sequence
  Description of Artificial Sequence: Synthetic peptide
  Seed: DPRMCSLMQGSTLPRRSGAA
DPRMFSLLQSSTMPRRSGAA

SEQ ID NO: 67174 - protein, 20 aa, Artificial Sequence
  Description of Artificial Sequence: Synthetic peptide
  Seed: DPRMCSLMQGSTLPRRSGAA
DPRMFSLLQSSTNPRRSGAA

SEQ ID NO: 67175 - protein, 20 aa, Artificial Sequence
  Description of Artificial Sequence: Synthetic peptide
  Seed: DPRMCSLMQGSTLPRRSGAA
DPRMFSLLQSSTPPRRSGAA

SEQ ID NO: 67176 - protein, 20 aa, Artificial Sequence
  Description of Artificial Sequence: Synthetic peptide
  Seed: DPRMCSLMQGSTLPRRSGAA
DPRMFSLLQSSTSPRRSGAA

SEQ ID NO: 67177 - protein, 20 aa, Artificial Sequence
  Description of Artificial Sequence: Synthetic peptide
  Seed: DPRMCSLMQGSTLPRRSGAA
DPRMFSLLQSSTTPRRSGAA

SEQ ID NO: 67178 - protein, 20 aa, Artificial Sequence
  Description of Artificial Sequence: Synthetic peptide
  Seed: DPRMCSLMQGSTLPRRSGAA
DPRMFSLLQSSTVPRRSGAA

SEQ ID NO: 67179 - protein, 20 aa, Artificial Sequence
  Description of Artificial Sequence: Synthetic peptide
  Seed: DPRMCSLMQGSTLPRRSGAA
DPRMFSLLQSSTYPRRSGAA

SEQ ID NO: 67180 - protein, 20 aa, Artificial Sequence
  Description of Artificial Sequence: Synthetic peptide
  Seed: DPRMCSLMQGSTLPRRSGAA
DPRMFSLLQTSTAPRRSGAA

SEQ ID NO: 67181 - protein, 20 aa, Artificial Sequence
  Description of Artificial Sequence: Synthetic peptide
  Seed: DPRMCSLMQGSTLPRRSGAA
DPRMFSLLQTSTCPRRSGAA

SEQ ID NO: 67182 - protein, 20 aa, Artificial Sequence
  Description of Artificial Sequence: Synthetic peptide
  Seed: DPRMCSLMQGSTLPRRSGAA
DPRMFSLLQTSTFPRRSGAA

SEQ ID NO: 67183 - protein, 20 aa, Artificial Sequence
  Description of Artificial Sequence: Synthetic peptide
  Seed: DPRMCSLMQGSTLPRRSGAA
DPRMFSLLQTSTGPRRSGAA

SEQ ID NO: 67184 - protein, 20 aa, Artificial Sequence
  Description of Artificial Sequence: Synthetic peptide
  Seed: DPRMCSLMQGSTLPRRSGAA
DPRMFSLLQTSTIPRRSGAA

SEQ ID NO: 67185 - protein, 20 aa, Artificial Sequence
  Description of Artificial Sequence: Synthetic peptide
  Seed: DPRMCSLMQGSTLPRRSGAA
DPRMFSLLQTSTLPRRSGAA

SEQ ID NO: 67186 - protein, 20 aa, Artificial Sequence
  Description of Artificial Sequence: Synthetic peptide
  Seed: DPRMCSLMQGSTLPRRSGAA
DPRMFSLLQTSTMPRRSGAA

SEQ ID NO: 67187 - protein, 20 aa, Artificial Sequence
  Description of Artificial Sequence: Synthetic peptide
  Seed: DPRMCSLMQGSTLPRRSGAA
DPRMFSLLQTSTNPRRSGAA

SEQ ID NO: 67188 - protein, 20 aa, Artificial Sequence
  Description of Artificial Sequence: Synthetic peptide
  Seed: DPRMCSLMQGSTLPRRSGAA
DPRMFSLLQTSTSPRRSGAA

SEQ ID NO: 67189 - protein, 20 aa, Artificial Sequence
  Description of Artificial Sequence: Synthetic peptide
  Seed: DPRMCSLMQGSTLPRRSGAA
DPRMFSLLQTSTTPRRSGAA

SEQ ID NO: 67190 - protein, 20 aa, Artificial Sequence
  Description of Artificial Sequence: Synthetic peptide
  Seed: DPRMCSLMQGSTLPRRSGAA
DPRMFSLLQTSTVPRRSGAA

SEQ ID NO: 67191 - protein, 20 aa, Artificial Sequence
  Description of Artificial Sequence: Synthetic peptide
  Seed: DPRMCSLMQGSTLPRRSGAA
DPRMFSLLQVSTAPRRSGAA

SEQ ID NO: 67192 - protein, 20 aa, Artificial Sequence
  Description of Artificial Sequence: Synthetic peptide
  Seed: DPRMCSLMQGSTLPRRSGAA
DPRMFSLLQVSTGPRRSGAA

SEQ ID NO: 67193 - protein, 20 aa, Artificial Sequence
  Description of Artificial Sequence: Synthetic peptide
  Seed: DPRMCSLMQGSTLPRRSGAA
DPRMFSLLQVSTIPRRSGAA

SEQ ID NO: 67194 - protein, 20 aa, Artificial Sequence
  Description of Artificial Sequence: Synthetic peptide
  Seed: DPRMCSLMQGSTLPRRSGAA
DPRMFSLLQVSTLPRRSGAA

SEQ ID NO: 67195 - protein, 20 aa, Artificial Sequence
  Description of Artificial Sequence: Synthetic peptide
  Seed: DPRMCSLMQGSTLPRRSGAA
DPRMFSLLQVSTMPRRSGAA

SEQ ID NO: 67196 - protein, 20 aa, Artificial Sequence
  Description of Artificial Sequence: Synthetic peptide
  Seed: DPRMCSLMQGSTLPRRSGAA
DPRMFSLLQVSTNPRRSGAA

SEQ ID NO: 67197 - protein, 20 aa, Artificial Sequence
  Description of Artificial Sequence: Synthetic peptide
  Seed: DPRMCSLMQGSTLPRRSGAA
DPRMFSLLQVSTSPRRSGAA

SEQ ID NO: 67198 - protein, 20 aa, Artificial Sequence
  Description of Artificial Sequence: Synthetic peptide
  Seed: DPRMCSLMQGSTLPRRSGAA
DPRMFSLLQVSTTPRRSGAA

SEQ ID NO: 67199 - protein, 20 aa, Artificial Sequence
  Description of Artificial Sequence: Synthetic peptide
  Seed: DPRMCSLMQGSTLPRRSGAA
DPRMFSLLQVSTVPRRSGAA

SEQ ID NO: 67200 - protein, 20 aa, Artificial Sequence
  Description of Artificial Sequence: Synthetic peptide
  Seed: DPRMCSLMQGSTLPRRSGAA
DPRMFSLMQASTAPRRSGAA

SEQ ID NO: 67201 - protein, 20 aa, Artificial Sequence
  Description of Artificial Sequence: Synthetic peptide
  Seed: DPRMCSLMQGSTLPRRSGAA
DPRMFSLMQASTCPRRSGAA

SEQ ID NO: 67202 - protein, 20 aa, Artificial Sequence
  Description of Artificial Sequence: Synthetic peptide
  Seed: DPRMCSLMQGSTLPRRSGAA
DPRMFSLMQASTFPRRSGAA

SEQ ID NO: 67203 - protein, 20 aa, Artificial Sequence
  Description of Artificial Sequence: Synthetic peptide
  Seed: DPRMCSLMQGSTLPRRSGAA
DPRMFSLMQASTGPRRSGAA

SEQ ID NO: 67204 - protein, 20 aa, Artificial Sequence
  Description of Artificial Sequence: Synthetic peptide
  Seed: DPRMCSLMQGSTLPRRSGAA
DPRMFSLMQASTHPRRSGAA

SEQ ID NO: 67205 - protein, 20 aa, Artificial Sequence
  Description of Artificial Sequence: Synthetic peptide
  Seed: DPRMCSLMQGSTLPRRSGAA
DPRMFSLMQASTIPRRSGAA

SEQ ID NO: 67206 - protein, 20 aa, Artificial Sequence
  Description of Artificial Sequence: Synthetic peptide
  Seed: DPRMCSLMQGSTLPRRSGAA
DPRMFSLMQASTKPRRSGAA

SEQ ID NO: 67207 - protein, 20 aa, Artificial Sequence
  Description of Artificial Sequence: Synthetic peptide
  Seed: DPRMCSLMQGSTLPRRSGAA
DPRMFSLMQASTLPRRSGAA

SEQ ID NO: 67208 - protein, 20 aa, Artificial Sequence
  Description of Artificial Sequence: Synthetic peptide
  Seed: DPRMCSLMQGSTLPRRSGAA
DPRMFSLMQASTMPRRSGAA

SEQ ID NO: 67209 - protein, 20 aa, Artificial Sequence
  Description of Artificial Sequence: Synthetic peptide
  Seed: DPRMCSLMQGSTLPRRSGAA
DPRMFSLMQASTNPRRSGAA

SEQ ID NO: 67210 - protein, 20 aa, Artificial Sequence
  Description of Artificial Sequence: Synthetic peptide
  Seed: DPRMCSLMQGSTLPRRSGAA
DPRMFSLMQASTPPRRSGAA

SEQ ID NO: 67211 - protein, 20 aa, Artificial Sequence
  Description of Artificial Sequence: Synthetic peptide
  Seed: DPRMCSLMQGSTLPRRSGAA
DPRMFSLMQASTQPRRSGAA

SEQ ID NO: 67212 - protein, 20 aa, Artificial Sequence
  Description of Artificial Sequence: Synthetic peptide
  Seed: DPRMCSLMQGSTLPRRSGAA
DPRMFSLMQASTRPRRSGAA

SEQ ID NO: 67213 - protein, 20 aa, Artificial Sequence
  Description of Artificial Sequence: Synthetic peptide
  Seed: DPRMCSLMQGSTLPRRSGAA
DPRMFSLMQASTSPRRSGAA

SEQ ID NO: 67214 - protein, 20 aa, Artificial Sequence
  Description of Artificial Sequence: Synthetic peptide
  Seed: DPRMCSLMQGSTLPRRSGAA
DPRMFSLMQASTTPRRSGAA

SEQ ID NO: 67215 - protein, 20 aa, Artificial Sequence
  Description of Artificial Sequence: Synthetic peptide
  Seed: DPRMCSLMQGSTLPRRSGAA
DPRMFSLMQASTVPRRSGAA

SEQ ID NO: 67216 - protein, 20 aa, Artificial Sequence
  Description of Artificial Sequence: Synthetic peptide
  Seed: DPRMCSLMQGSTLPRRSGAA
DPRMFSLMQASTWPRRSGAA

SEQ ID NO: 67217 - protein, 20 aa, Artificial Sequence
  Description of Artificial Sequence: Synthetic peptide
  Seed: DPRMCSLMQGSTLPRRSGAA
DPRMFSLMQASTYPRRSGAA

SEQ ID NO: 67218 - protein, 20 aa, Artificial Sequence
  Description of Artificial Sequence: Synthetic peptide
  Seed: DPRMCSLMQGSTLPRRSGAA
DPRMFSLMQCSTIPRRSGAA

SEQ ID NO: 67219 - protein, 20 aa, Artificial Sequence
  Description of Artificial Sequence: Synthetic peptide
  Seed: DPRMCSLMQGSTLPRRSGAA
DPRMFSLMQCSTLPRRSGAA

SEQ ID NO: 67220 - protein, 20 aa, Artificial Sequence
  Description of Artificial Sequence: Synthetic peptide
  Seed: DPRMCSLMQGSTLPRRSGAA
DPRMFSLMQCSTVPRRSGAA

SEQ ID NO: 67221 - protein, 20 aa, Artificial Sequence
  Description of Artificial Sequence: Synthetic peptide
  Seed: DPRMCSLMQGSTLPRRSGAA
DPRMFSLMQDSTVPRRSGAA

SEQ ID NO: 67222 - protein, 20 aa, Artificial Sequence
  Description of Artificial Sequence: Synthetic peptide
  Seed: DPRMCSLMQGSTLPRRSGAA
DPRMFSLMQESTIPRRSGAA

SEQ ID NO: 67223 - protein, 20 aa, Artificial Sequence
  Description of Artificial Sequence: Synthetic peptide
  Seed: DPRMCSLMQGSTLPRRSGAA
DPRMFSLMQESTLPRRSGAA

SEQ ID NO: 67224 - protein, 20 aa, Artificial Sequence
  Description of Artificial Sequence: Synthetic peptide
  Seed: DPRMCSLMQGSTLPRRSGAA
DPRMFSLMQESTVPRRSGAA

SEQ ID NO: 67225 - protein, 20 aa, Artificial Sequence
  Description of Artificial Sequence: Synthetic peptide
  Seed: DPRMCSLMQGSTLPRRSGAA
DPRMFSLMQGSTAPRRSGAA

SEQ ID NO: 67226 - protein, 20 aa, Artificial Sequence
  Description of Artificial Sequence: Synthetic peptide
  Seed: DPRMCSLMQGSTLPRRSGAA
DPRMFSLMQGSTCPRRSGAA

SEQ ID NO: 67227 - protein, 20 aa, Artificial Sequence
  Description of Artificial Sequence: Synthetic peptide
  Seed: DPRMCSLMQGSTLPRRSGAA
DPRMFSLMQGSTFPRRSGAA

SEQ ID NO: 67228 - protein, 20 aa, Artificial Sequence
  Description of Artificial Sequence: Synthetic peptide
  Seed: DPRMCSLMQGSTLPRRSGAA
DPRMFSLMQGSTGPRRSGAA

SEQ ID NO: 67229 - protein, 20 aa, Artificial Sequence
  Description of Artificial Sequence: Synthetic peptide
  Seed: DPRMCSLMQGSTLPRRSGAA
DPRMFSLMQGSTHPRRSGAA

SEQ ID NO: 67230 - protein, 20 aa, Artificial Sequence
  Description of Artificial Sequence: Synthetic peptide
  Seed: DPRMCSLMQGSTLPRRSGAA
DPRMFSLMQGSTIPRRSGAA

SEQ ID NO: 67231 - protein, 20 aa, Artificial Sequence
  Description of Artificial Sequence: Synthetic peptide
  Seed: DPRMCSLMQGSTLPRRSGAA
DPRMFSLMQGSTLPRRSGAA

SEQ ID NO: 67232 - protein, 20 aa, Artificial Sequence
  Description of Artificial Sequence: Synthetic peptide
  Seed: DPRMCSLMQGSTLPRRSGAA
DPRMFSLMQGSTMPRRSGAA

SEQ ID NO: 67233 - protein, 20 aa, Artificial Sequence
  Description of Artificial Sequence: Synthetic peptide
  Seed: DPRMCSLMQGSTLPRRSGAA
DPRMFSLMQGSTNPRRSGAA

SEQ ID NO: 67234 - protein, 20 aa, Artificial Sequence
  Description of Artificial Sequence: Synthetic peptide
  Seed: DPRMCSLMQGSTLPRRSGAA
DPRMFSLMQGSTPPRRSGAA

SEQ ID NO: 67235 - protein, 20 aa, Artificial Sequence
  Description of Artificial Sequence: Synthetic peptide
  Seed: DPRMCSLMQGSTLPRRSGAA
DPRMFSLMQGSTQPRRSGAA

SEQ ID NO: 67236 - protein, 20 aa, Artificial Sequence
  Description of Artificial Sequence: Synthetic peptide
  Seed: DPRMCSLMQGSTLPRRSGAA
DPRMFSLMQGSTSPRRSGAA

SEQ ID NO: 67237 - protein, 20 aa, Artificial Sequence
  Description of Artificial Sequence: Synthetic peptide
  Seed: DPRMCSLMQGSTLPRRSGAA
DPRMFSLMQGSTTPRRSGAA

SEQ ID NO: 67238 - protein, 20 aa, Artificial Sequence
  Description of Artificial Sequence: Synthetic peptide
  Seed: DPRMCSLMQGSTLPRRSGAA
DPRMFSLMQGSTVPRRSGAA

SEQ ID NO: 67239 - protein, 20 aa, Artificial Sequence
  Description of Artificial Sequence: Synthetic peptide
  Seed: DPRMCSLMQGSTLPRRSGAA
DPRMFSLMQGSTYPRRSGAA

SEQ ID NO: 67240 - protein, 20 aa, Artificial Sequence
  Description of Artificial Sequence: Synthetic peptide
  Seed: DPRMCSLMQGSTLPRRSGAA
DPRMFSLMQHSTAPRRSGAA

SEQ ID NO: 67241 - protein, 20 aa, Artificial Sequence
  Description of Artificial Sequence: Synthetic peptide
  Seed: DPRMCSLMQGSTLPRRSGAA
DPRMFSLMQHSTIPRRSGAA

SEQ ID NO: 67242 - protein, 20 aa, Artificial Sequence
  Description of Artificial Sequence: Synthetic peptide
  Seed: DPRMCSLMQGSTLPRRSGAA
DPRMFSLMQHSTLPRRSGAA

SEQ ID NO: 67243 - protein, 20 aa, Artificial Sequence
  Description of Artificial Sequence: Synthetic peptide
  Seed: DPRMCSLMQGSTLPRRSGAA
DPRMFSLMQHSTMPRRSGAA

SEQ ID NO: 67244 - protein, 20 aa, Artificial Sequence
  Description of Artificial Sequence: Synthetic peptide
  Seed: DPRMCSLMQGSTLPRRSGAA
DPRMFSLMQHSTVPRRSGAA

SEQ ID NO: 67245 - protein, 20 aa, Artificial Sequence
  Description of Artificial Sequence: Synthetic peptide
  Seed: DPRMCSLMQGSTLPRRSGAA
DPRMFSLMQISTAPRRSGAA

SEQ ID NO: 67246 - protein, 20 aa, Artificial Sequence
  Description of Artificial Sequence: Synthetic peptide
  Seed: DPRMCSLMQGSTLPRRSGAA
DPRMFSLMQISTIPRRSGAA

SEQ ID NO: 67247 - protein, 20 aa, Artificial Sequence
  Description of Artificial Sequence: Synthetic peptide
  Seed: DPRMCSLMQGSTLPRRSGAA
DPRMFSLMQISTLPRRSGAA

SEQ ID NO: 67248 - protein, 20 aa, Artificial Sequence
  Description of Artificial Sequence: Synthetic peptide
  Seed: DPRMCSLMQGSTLPRRSGAA
DPRMFSLMQISTMPRRSGAA

SEQ ID NO: 67249 - protein, 20 aa, Artificial Sequence
  Description of Artificial Sequence: Synthetic peptide
  Seed: DPRMCSLMQGSTLPRRSGAA
DPRMFSLMQISTSPRRSGAA

SEQ ID NO: 67250 - protein, 20 aa, Artificial Sequence
  Description of Artificial Sequence: Synthetic peptide
  Seed: DPRMCSLMQGSTLPRRSGAA
DPRMFSLMQISTTPRRSGAA

SEQ ID NO: 67251 - protein, 20 aa, Artificial Sequence
  Description of Artificial Sequence: Synthetic peptide
  Seed: DPRMCSLMQGSTLPRRSGAA
DPRMFSLMQISTVPRRSGAA

SEQ ID NO: 67252 - protein, 20 aa, Artificial Sequence
  Description of Artificial Sequence: Synthetic peptide
  Seed: DPRMCSLMQGSTLPRRSGAA
DPRMFSLMQLSTAPRRSGAA

SEQ ID NO: 67253 - protein, 20 aa, Artificial Sequence
  Description of Artificial Sequence: Synthetic peptide
  Seed: DPRMCSLMQGSTLPRRSGAA
DPRMFSLMQLSTIPRRSGAA

SEQ ID NO: 67254 - protein, 20 aa, Artificial Sequence
  Description of Artificial Sequence: Synthetic peptide
  Seed: DPRMCSLMQGSTLPRRSGAA
DPRMFSLMQLSTLPRRSGAA

SEQ ID NO: 67255 - protein, 20 aa, Artificial Sequence
  Description of Artificial Sequence: Synthetic peptide
  Seed: DPRMCSLMQGSTLPRRSGAA
DPRMFSLMQLSTVPRRSGAA

SEQ ID NO: 67256 - protein, 20 aa, Artificial Sequence
  Description of Artificial Sequence: Synthetic peptide
  Seed: DPRMCSLMQGSTLPRRSGAA
DPRMFSLMQMSTAPRRSGAA

SEQ ID NO: 67257 - protein, 20 aa, Artificial Sequence
  Description of Artificial Sequence: Synthetic peptide
  Seed: DPRMCSLMQGSTLPRRSGAA
DPRMFSLMQMSTIPRRSGAA

SEQ ID NO: 67258 - protein, 20 aa, Artificial Sequence
  Description of Artificial Sequence: Synthetic peptide
  Seed: DPRMCSLMQGSTLPRRSGAA
DPRMFSLMQMSTLPRRSGAA

SEQ ID NO: 67259 - protein, 20 aa, Artificial Sequence
  Description of Artificial Sequence: Synthetic peptide
  Seed: DPRMCSLMQGSTLPRRSGAA
DPRMFSLMQMSTMPRRSGAA

SEQ ID NO: 67260 - protein, 20 aa, Artificial Sequence
  Description of Artificial Sequence: Synthetic peptide
  Seed: DPRMCSLMQGSTLPRRSGAA
DPRMFSLMQMSTVPRRSGAA

SEQ ID NO: 67261 - protein, 20 aa, Artificial Sequence
  Description of Artificial Sequence: Synthetic peptide
  Seed: DPRMCSLMQGSTLPRRSGAA
DPRMFSLMQNSTAPRRSGAA

SEQ ID NO: 67262 - protein, 20 aa, Artificial Sequence
  Description of Artificial Sequence: Synthetic peptide
  Seed: DPRMCSLMQGSTLPRRSGAA
DPRMFSLMQNSTCPRRSGAA

SEQ ID NO: 67263 - protein, 20 aa, Artificial Sequence
  Description of Artificial Sequence: Synthetic peptide
  Seed: DPRMCSLMQGSTLPRRSGAA
DPRMFSLMQNSTFPRRSGAA

SEQ ID NO: 67264 - protein, 20 aa, Artificial Sequence
  Description of Artificial Sequence: Synthetic peptide
  Seed: DPRMCSLMQGSTLPRRSGAA
DPRMFSLMQNSTGPRRSGAA

SEQ ID NO: 67265 - protein, 20 aa, Artificial Sequence
  Description of Artificial Sequence: Synthetic peptide
  Seed: DPRMCSLMQGSTLPRRSGAA
DPRMFSLMQNSTIPRRSGAA

SEQ ID NO: 67266 - protein, 20 aa, Artificial Sequence
  Description of Artificial Sequence: Synthetic peptide
  Seed: DPRMCSLMQGSTLPRRSGAA
DPRMFSLMQNSTLPRRSGAA

SEQ ID NO: 67267 - protein, 20 aa, Artificial Sequence
  Description of Artificial Sequence: Synthetic peptide
  Seed: DPRMCSLMQGSTLPRRSGAA
DPRMFSLMQNSTMPRRSGAA

SEQ ID NO: 67268 - protein, 20 aa, Artificial Sequence
  Description of Artificial Sequence: Synthetic peptide
  Seed: DPRMCSLMQGSTLPRRSGAA
DPRMFSLMQNSTNPRRSGAA

SEQ ID NO: 67269 - protein, 20 aa, Artificial Sequence
  Description of Artificial Sequence: Synthetic peptide
  Seed: DPRMCSLMQGSTLPRRSGAA
DPRMFSLMQNSTSPRRSGAA

SEQ ID NO: 67270 - protein, 20 aa, Artificial Sequence
  Description of Artificial Sequence: Synthetic peptide
  Seed: DPRMCSLMQGSTLPRRSGAA
DPRMFSLMQNSTTPRRSGAA

SEQ ID NO: 67271 - protein, 20 aa, Artificial Sequence
  Description of Artificial Sequence: Synthetic peptide
  Seed: DPRMCSLMQGSTLPRRSGAA
DPRMFSLMQNSTVPRRSGAA

SEQ ID NO: 67272 - protein, 20 aa, Artificial Sequence
  Description of Artificial Sequence: Synthetic peptide
  Seed: DPRMCSLMQGSTLPRRSGAA
DPRMFSLMQPSTAPRRSGAA

SEQ ID NO: 67273 - protein, 20 aa, Artificial Sequence
  Description of Artificial Sequence: Synthetic peptide
  Seed: DPRMCSLMQGSTLPRRSGAA
DPRMFSLMQPSTCPRRSGAA

SEQ ID NO: 67274 - protein, 20 aa, Artificial Sequence
  Description of Artificial Sequence: Synthetic peptide
  Seed: DPRMCSLMQGSTLPRRSGAA
DPRMFSLMQPSTFPRRSGAA

SEQ ID NO: 67275 - protein, 20 aa, Artificial Sequence
  Description of Artificial Sequence: Synthetic peptide
  Seed: DPRMCSLMQGSTLPRRSGAA
DPRMFSLMQPSTGPRRSGAA

SEQ ID NO: 67276 - protein, 20 aa, Artificial Sequence
  Description of Artificial Sequence: Synthetic peptide
  Seed: DPRMCSLMQGSTLPRRSGAA
DPRMFSLMQPSTIPRRSGAA

SEQ ID NO: 67277 - protein, 20 aa, Artificial Sequence
  Description of Artificial Sequence: Synthetic peptide
  Seed: DPRMCSLMQGSTLPRRSGAA
DPRMFSLMQPSTLPRRSGAA

SEQ ID NO: 67278 - protein, 20 aa, Artificial Sequence
  Description of Artificial Sequence: Synthetic peptide
  Seed: DPRMCSLMQGSTLPRRSGAA
DPRMFSLMQPSTMPRRSGAA

SEQ ID NO: 67279 - protein, 20 aa, Artificial Sequence
  Description of Artificial Sequence: Synthetic peptide
  Seed: DPRMCSLMQGSTLPRRSGAA
DPRMFSLMQPSTNPRRSGAA

SEQ ID NO: 67280 - protein, 20 aa, Artificial Sequence
  Description of Artificial Sequence: Synthetic peptide
  Seed: DPRMCSLMQGSTLPRRSGAA
DPRMFSLMQPSTPPRRSGAA

SEQ ID NO: 67281 - protein, 20 aa, Artificial Sequence
  Description of Artificial Sequence: Synthetic peptide
  Seed: DPRMCSLMQGSTLPRRSGAA
DPRMFSLMQPSTSPRRSGAA

SEQ ID NO: 67282 - protein, 20 aa, Artificial Sequence
  Description of Artificial Sequence: Synthetic peptide
  Seed: DPRMCSLMQGSTLPRRSGAA
DPRMFSLMQPSTTPRRSGAA

SEQ ID NO: 67283 - protein, 20 aa, Artificial Sequence
  Description of Artificial Sequence: Synthetic peptide
  Seed: DPRMCSLMQGSTLPRRSGAA
DPRMFSLMQPSTVPRRSGAA

SEQ ID NO: 67284 - protein, 20 aa, Artificial Sequence
  Description of Artificial Sequence: Synthetic peptide
  Seed: DPRMCSLMQGSTLPRRSGAA
DPRMFSLMQPSTYPRRSGAA

SEQ ID NO: 67285 - protein, 20 aa, Artificial Sequence
  Description of Artificial Sequence: Synthetic peptide
  Seed: DPRMCSLMQGSTLPRRSGAA
DPRMFSLMQQSTAPRRSGAA

SEQ ID NO: 67286 - protein, 20 aa, Artificial Sequence
  Description of Artificial Sequence: Synthetic peptide
  Seed: DPRMCSLMQGSTLPRRSGAA
DPRMFSLMQQSTIPRRSGAA

SEQ ID NO: 67287 - protein, 20 aa, Artificial Sequence
  Description of Artificial Sequence: Synthetic peptide
  Seed: DPRMCSLMQGSTLPRRSGAA
DPRMFSLMQQSTLPRRSGAA

SEQ ID NO: 67288 - protein, 20 aa, Artificial Sequence
  Description of Artificial Sequence: Synthetic peptide
  Seed: DPRMCSLMQGSTLPRRSGAA
DPRMFSLMQQSTVPRRSGAA

SEQ ID NO: 67289 - protein, 20 aa, Artificial Sequence
  Description of Artificial Sequence: Synthetic peptide
  Seed: DPRMCSLMQGSTLPRRSGAA
DPRMFSLMQSSTAPRRSGAA

SEQ ID NO: 67290 - protein, 20 aa, Artificial Sequence
  Description of Artificial Sequence: Synthetic peptide
  Seed: DPRMCSLMQGSTLPRRSGAA
DPRMFSLMQSSTCPRRSGAA

SEQ ID NO: 67291 - protein, 20 aa, Artificial Sequence
  Description of Artificial Sequence: Synthetic peptide
  Seed: DPRMCSLMQGSTLPRRSGAA
DPRMFSLMQSSTFPRRSGAA

SEQ ID NO: 67292 - protein, 20 aa, Artificial Sequence
  Description of Artificial Sequence: Synthetic peptide
  Seed: DPRMCSLMQGSTLPRRSGAA
DPRMFSLMQSSTGPRRSGAA

SEQ ID NO: 67293 - protein, 20 aa, Artificial Sequence
  Description of Artificial Sequence: Synthetic peptide
  Seed: DPRMCSLMQGSTLPRRSGAA
DPRMFSLMQSSTHPRRSGAA

SEQ ID NO: 67294 - protein, 20 aa, Artificial Sequence
  Description of Artificial Sequence: Synthetic peptide
  Seed: DPRMCSLMQGSTLPRRSGAA
DPRMFSLMQSSTIPRRSGAA

SEQ ID NO: 67295 - protein, 20 aa, Artificial Sequence
  Description of Artificial Sequence: Synthetic peptide
  Seed: DPRMCSLMQGSTLPRRSGAA
DPRMFSLMQSSTLPRRSGAA

SEQ ID NO: 67296 - protein, 20 aa, Artificial Sequence
  Description of Artificial Sequence: Synthetic peptide
  Seed: DPRMCSLMQGSTLPRRSGAA
DPRMFSLMQSSTMPRRSGAA

SEQ ID NO: 67297 - protein, 20 aa, Artificial Sequence
  Description of Artificial Sequence: Synthetic peptide
  Seed: DPRMCSLMQGSTLPRRSGAA
DPRMFSLMQSSTNPRRSGAA

SEQ ID NO: 67298 - protein, 20 aa, Artificial Sequence
  Description of Artificial Sequence: Synthetic peptide
  Seed: DPRMCSLMQGSTLPRRSGAA
DPRMFSLMQSSTPPRRSGAA

SEQ ID NO: 67299 - protein, 20 aa, Artificial Sequence
  Description of Artificial Sequence: Synthetic peptide
  Seed: DPRMCSLMQGSTLPRRSGAA
DPRMFSLMQSSTQPRRSGAA

SEQ ID NO: 67300 - protein, 20 aa, Artificial Sequence
  Description of Artificial Sequence: Synthetic peptide
  Seed: DPRMCSLMQGSTLPRRSGAA
DPRMFSLMQSSTSPRRSGAA

SEQ ID NO: 67301 - protein, 20 aa, Artificial Sequence
  Description of Artificial Sequence: Synthetic peptide
  Seed: DPRMCSLMQGSTLPRRSGAA
DPRMFSLMQSSTTPRRSGAA

SEQ ID NO: 67302 - protein, 20 aa, Artificial Sequence
  Description of Artificial Sequence: Synthetic peptide
  Seed: DPRMCSLMQGSTLPRRSGAA
DPRMFSLMQSSTVPRRSGAA

SEQ ID NO: 67303 - protein, 20 aa, Artificial Sequence
  Description of Artificial Sequence: Synthetic peptide
  Seed: DPRMCSLMQGSTLPRRSGAA
DPRMFSLMQSSTYPRRSGAA

SEQ ID NO: 67304 - protein, 20 aa, Artificial Sequence
  Description of Artificial Sequence: Synthetic peptide
  Seed: DPRMCSLMQGSTLPRRSGAA
DPRMFSLMQTSTAPRRSGAA

SEQ ID NO: 67305 - protein, 20 aa, Artificial Sequence
  Description of Artificial Sequence: Synthetic peptide
  Seed: DPRMCSLMQGSTLPRRSGAA
DPRMFSLMQTSTCPRRSGAA

SEQ ID NO: 67306 - protein, 20 aa, Artificial Sequence
  Description of Artificial Sequence: Synthetic peptide
  Seed: DPRMCSLMQGSTLPRRSGAA
DPRMFSLMQTSTFPRRSGAA

SEQ ID NO: 67307 - protein, 20 aa, Artificial Sequence
  Description of Artificial Sequence: Synthetic peptide
  Seed: DPRMCSLMQGSTLPRRSGAA
DPRMFSLMQTSTGPRRSGAA

SEQ ID NO: 67308 - protein, 20 aa, Artificial Sequence
  Description of Artificial Sequence: Synthetic peptide
  Seed: DPRMCSLMQGSTLPRRSGAA
DPRMFSLMQTSTIPRRSGAA

SEQ ID NO: 67309 - protein, 20 aa, Artificial Sequence
  Description of Artificial Sequence: Synthetic peptide
  Seed: DPRMCSLMQGSTLPRRSGAA
DPRMFSLMQTSTLPRRSGAA

SEQ ID NO: 67310 - protein, 20 aa, Artificial Sequence
  Description of Artificial Sequence: Synthetic peptide
  Seed: DPRMCSLMQGSTLPRRSGAA
DPRMFSLMQTSTMPRRSGAA

SEQ ID NO: 67311 - protein, 20 aa, Artificial Sequence
  Description of Artificial Sequence: Synthetic peptide
  Seed: DPRMCSLMQGSTLPRRSGAA
DPRMFSLMQTSTNPRRSGAA

SEQ ID NO: 67312 - protein, 20 aa, Artificial Sequence
  Description of Artificial Sequence: Synthetic peptide
  Seed: DPRMCSLMQGSTLPRRSGAA
DPRMFSLMQTSTSPRRSGAA

SEQ ID NO: 67313 - protein, 20 aa, Artificial Sequence
  Description of Artificial Sequence: Synthetic peptide
  Seed: DPRMCSLMQGSTLPRRSGAA
DPRMFSLMQTSTTPRRSGAA

SEQ ID NO: 67314 - protein, 20 aa, Artificial Sequence
  Description of Artificial Sequence: Synthetic peptide
  Seed: DPRMCSLMQGSTLPRRSGAA
DPRMFSLMQTSTVPRRSGAA

SEQ ID NO: 67315 - protein, 20 aa, Artificial Sequence
  Description of Artificial Sequence: Synthetic peptide
  Seed: DPRMCSLMQGSTLPRRSGAA
DPRMFSLMQVSTAPRRSGAA

SEQ ID NO: 67316 - protein, 20 aa, Artificial Sequence
  Description of Artificial Sequence: Synthetic peptide
  Seed: DPRMCSLMQGSTLPRRSGAA
DPRMFSLMQVSTGPRRSGAA

SEQ ID NO: 67317 - protein, 20 aa, Artificial Sequence
  Description of Artificial Sequence: Synthetic peptide
  Seed: DPRMCSLMQGSTLPRRSGAA
DPRMFSLMQVSTIPRRSGAA

SEQ ID NO: 67318 - protein, 20 aa, Artificial Sequence
  Description of Artificial Sequence: Synthetic peptide
  Seed: DPRMCSLMQGSTLPRRSGAA
DPRMFSLMQVSTLPRRSGAA

SEQ ID NO: 67319 - protein, 20 aa, Artificial Sequence
  Description of Artificial Sequence: Synthetic peptide
  Seed: DPRMCSLMQGSTLPRRSGAA
DPRMFSLMQVSTMPRRSGAA

SEQ ID NO: 67320 - protein, 20 aa, Artificial Sequence
  Description of Artificial Sequence: Synthetic peptide
  Seed: DPRMCSLMQGSTLPRRSGAA
DPRMFSLMQVSTNPRRSGAA

SEQ ID NO: 67321 - protein, 20 aa, Artificial Sequence
  Description of Artificial Sequence: Synthetic peptide
  Seed: DPRMCSLMQGSTLPRRSGAA
DPRMFSLMQVSTSPRRSGAA

SEQ ID NO: 67322 - protein, 20 aa, Artificial Sequence
  Description of Artificial Sequence: Synthetic peptide
  Seed: DPRMCSLMQGSTLPRRSGAA
DPRMFSLMQVSTTPRRSGAA

SEQ ID NO: 67323 - protein, 20 aa, Artificial Sequence
  Description of Artificial Sequence: Synthetic peptide
  Seed: DPRMCSLMQGSTLPRRSGAA
DPRMFSLMQVSTVPRRSGAA

SEQ ID NO: 67324 - protein, 20 aa, Artificial Sequence
  Description of Artificial Sequence: Synthetic peptide
  Seed: DPRMCSLMQGSTLPRRSGAA
DPRMFSLNQASTAPRRSGAA

SEQ ID NO: 67325 - protein, 20 aa, Artificial Sequence
  Description of Artificial Sequence: Synthetic peptide
  Seed: DPRMCSLMQGSTLPRRSGAA
DPRMFSLNQASTIPRRSGAA

SEQ ID NO: 67326 - protein, 20 aa, Artificial Sequence
  Description of Artificial Sequence: Synthetic peptide
  Seed: DPRMCSLMQGSTLPRRSGAA
DPRMFSLNQASTLPRRSGAA

SEQ ID NO: 67327 - protein, 20 aa, Artificial Sequence
  Description of Artificial Sequence: Synthetic peptide
  Seed: DPRMCSLMQGSTLPRRSGAA
DPRMFSLNQASTMPRRSGAA

SEQ ID NO: 67328 - protein, 20 aa, Artificial Sequence
  Description of Artificial Sequence: Synthetic peptide
  Seed: DPRMCSLMQGSTLPRRSGAA
DPRMFSLNQASTVPRRSGAA

SEQ ID NO: 67329 - protein, 20 aa, Artificial Sequence
  Description of Artificial Sequence: Synthetic peptide
  Seed: DPRMCSLMQGSTLPRRSGAA
DPRMFSLNQGSTIPRRSGAA

SEQ ID NO: 67330 - protein, 20 aa, Artificial Sequence
  Description of Artificial Sequence: Synthetic peptide
  Seed: DPRMCSLMQGSTLPRRSGAA
DPRMFSLNQGSTLPRRSGAA

SEQ ID NO: 67331 - protein, 20 aa, Artificial Sequence
  Description of Artificial Sequence: Synthetic peptide
  Seed: DPRMCSLMQGSTLPRRSGAA
DPRMFSLNQGSTVPRRSGAA

SEQ ID NO: 67332 - protein, 20 aa, Artificial Sequence
  Description of Artificial Sequence: Synthetic peptide
  Seed: DPRMCSLMQGSTLPRRSGAA
DPRMFSLNQPSTIPRRSGAA

SEQ ID NO: 67333 - protein, 20 aa, Artificial Sequence
  Description of Artificial Sequence: Synthetic peptide
  Seed: DPRMCSLMQGSTLPRRSGAA
DPRMFSLNQPSTLPRRSGAA

SEQ ID NO: 67334 - protein, 20 aa, Artificial Sequence
  Description of Artificial Sequence: Synthetic peptide
  Seed: DPRMCSLMQGSTLPRRSGAA
DPRMFSLNQPSTVPRRSGAA

SEQ ID NO: 67335 - protein, 20 aa, Artificial Sequence
  Description of Artificial Sequence: Synthetic peptide
  Seed: DPRMCSLMQGSTLPRRSGAA
DPRMFSLNQSSTIPRRSGAA

SEQ ID NO: 67336 - protein, 20 aa, Artificial Sequence
  Description of Artificial Sequence: Synthetic peptide
  Seed: DPRMCSLMQGSTLPRRSGAA
DPRMFSLNQSSTLPRRSGAA

SEQ ID NO: 67337 - protein, 20 aa, Artificial Sequence
  Description of Artificial Sequence: Synthetic peptide
  Seed: DPRMCSLMQGSTLPRRSGAA
DPRMFSLNQSSTVPRRSGAA

SEQ ID NO: 67338 - protein, 20 aa, Artificial Sequence
  Description of Artificial Sequence: Synthetic peptide
  Seed: DPRMCSLMQGSTLPRRSGAA
DPRMFSLQQASTAPRRSGAA

SEQ ID NO: 67339 - protein, 20 aa, Artificial Sequence
  Description of Artificial Sequence: Synthetic peptide
  Seed: DPRMCSLMQGSTLPRRSGAA
DPRMFSLQQASTCPRRSGAA

SEQ ID NO: 67340 - protein, 20 aa, Artificial Sequence
  Description of Artificial Sequence: Synthetic peptide
  Seed: DPRMCSLMQGSTLPRRSGAA
DPRMFSLQQASTFPRRSGAA

SEQ ID NO: 67341 - protein, 20 aa, Artificial Sequence
  Description of Artificial Sequence: Synthetic peptide
  Seed: DPRMCSLMQGSTLPRRSGAA
DPRMFSLQQASTGPRRSGAA

SEQ ID NO: 67342 - protein, 20 aa, Artificial Sequence
  Description of Artificial Sequence: Synthetic peptide
  Seed: DPRMCSLMQGSTLPRRSGAA
DPRMFSLQQASTIPRRSGAA

SEQ ID NO: 67343 - protein, 20 aa, Artificial Sequence
  Description of Artificial Sequence: Synthetic peptide
  Seed: DPRMCSLMQGSTLPRRSGAA
DPRMFSLQQASTLPRRSGAA

SEQ ID NO: 67344 - protein, 20 aa, Artificial Sequence
  Description of Artificial Sequence: Synthetic peptide
  Seed: DPRMCSLMQGSTLPRRSGAA
DPRMFSLQQASTMPRRSGAA

SEQ ID NO: 67345 - protein, 20 aa, Artificial Sequence
  Description of Artificial Sequence: Synthetic peptide
  Seed: DPRMCSLMQGSTLPRRSGAA
DPRMFSLQQASTNPRRSGAA

SEQ ID NO: 67346 - protein, 20 aa, Artificial Sequence
  Description of Artificial Sequence: Synthetic peptide
  Seed: DPRMCSLMQGSTLPRRSGAA
DPRMFSLQQASTSPRRSGAA

SEQ ID NO: 67347 - protein, 20 aa, Artificial Sequence
  Description of Artificial Sequence: Synthetic peptide
  Seed: DPRMCSLMQGSTLPRRSGAA
DPRMFSLQQASTTPRRSGAA

SEQ ID NO: 67348 - protein, 20 aa, Artificial Sequence
  Description of Artificial Sequence: Synthetic peptide
  Seed: DPRMCSLMQGSTLPRRSGAA
DPRMFSLQQASTVPRRSGAA

SEQ ID NO: 67349 - protein, 20 aa, Artificial Sequence
  Description of Artificial Sequence: Synthetic peptide
  Seed: DPRMCSLMQGSTLPRRSGAA
DPRMFSLQQGSTAPRRSGAA

SEQ ID NO: 67350 - protein, 20 aa, Artificial Sequence
  Description of Artificial Sequence: Synthetic peptide
  Seed: DPRMCSLMQGSTLPRRSGAA
DPRMFSLQQGSTGPRRSGAA

SEQ ID NO: 67351 - protein, 20 aa, Artificial Sequence
  Description of Artificial Sequence: Synthetic peptide
  Seed: DPRMCSLMQGSTLPRRSGAA
DPRMFSLQQGSTIPRRSGAA

SEQ ID NO: 67352 - protein, 20 aa, Artificial Sequence
  Description of Artificial Sequence: Synthetic peptide
  Seed: DPRMCSLMQGSTLPRRSGAA
DPRMFSLQQGSTLPRRSGAA

SEQ ID NO: 67353 - protein, 20 aa, Artificial Sequence
  Description of Artificial Sequence: Synthetic peptide
  Seed: DPRMCSLMQGSTLPRRSGAA
DPRMFSLQQGSTMPRRSGAA

SEQ ID NO: 67354 - protein, 20 aa, Artificial Sequence
  Description of Artificial Sequence: Synthetic peptide
  Seed: DPRMCSLMQGSTLPRRSGAA
DPRMFSLQQGSTSPRRSGAA

SEQ ID NO: 67355 - protein, 20 aa, Artificial Sequence
  Description of Artificial Sequence: Synthetic peptide
  Seed: DPRMCSLMQGSTLPRRSGAA
DPRMFSLQQGSTTPRRSGAA

SEQ ID NO: 67356 - protein, 20 aa, Artificial Sequence
  Description of Artificial Sequence: Synthetic peptide
  Seed: DPRMCSLMQGSTLPRRSGAA
DPRMFSLQQGSTVPRRSGAA

SEQ ID NO: 67357 - protein, 20 aa, Artificial Sequence
  Description of Artificial Sequence: Synthetic peptide
  Seed: DPRMCSLMQGSTLPRRSGAA
DPRMFSLQQNSTAPRRSGAA

SEQ ID NO: 67358 - protein, 20 aa, Artificial Sequence
  Description of Artificial Sequence: Synthetic peptide
  Seed: DPRMCSLMQGSTLPRRSGAA
DPRMFSLQQNSTIPRRSGAA

SEQ ID NO: 67359 - protein, 20 aa, Artificial Sequence
  Description of Artificial Sequence: Synthetic peptide
  Seed: DPRMCSLMQGSTLPRRSGAA
DPRMFSLQQNSTLPRRSGAA

SEQ ID NO: 67360 - protein, 20 aa, Artificial Sequence
  Description of Artificial Sequence: Synthetic peptide
  Seed: DPRMCSLMQGSTLPRRSGAA
DPRMFSLQQNSTVPRRSGAA

SEQ ID NO: 67361 - protein, 20 aa, Artificial Sequence
  Description of Artificial Sequence: Synthetic peptide
  Seed: DPRMCSLMQGSTLPRRSGAA
DPRMFSLQQPSTAPRRSGAA

SEQ ID NO: 67362 - protein, 20 aa, Artificial Sequence
  Description of Artificial Sequence: Synthetic peptide
  Seed: DPRMCSLMQGSTLPRRSGAA
DPRMFSLQQPSTIPRRSGAA

SEQ ID NO: 67363 - protein, 20 aa, Artificial Sequence
  Description of Artificial Sequence: Synthetic peptide
  Seed: DPRMCSLMQGSTLPRRSGAA
DPRMFSLQQPSTLPRRSGAA

SEQ ID NO: 67364 - protein, 20 aa, Artificial Sequence
  Description of Artificial Sequence: Synthetic peptide
  Seed: DPRMCSLMQGSTLPRRSGAA
DPRMFSLQQPSTMPRRSGAA

SEQ ID NO: 67365 - protein, 20 aa, Artificial Sequence
  Description of Artificial Sequence: Synthetic peptide
  Seed: DPRMCSLMQGSTLPRRSGAA
DPRMFSLQQPSTTPRRSGAA

SEQ ID NO: 67366 - protein, 20 aa, Artificial Sequence
  Description of Artificial Sequence: Synthetic peptide
  Seed: DPRMCSLMQGSTLPRRSGAA
DPRMFSLQQPSTVPRRSGAA

SEQ ID NO: 67367 - protein, 20 aa, Artificial Sequence
  Description of Artificial Sequence: Synthetic peptide
  Seed: DPRMCSLMQGSTLPRRSGAA
DPRMFSLQQSSTAPRRSGAA

SEQ ID NO: 67368 - protein, 20 aa, Artificial Sequence
  Description of Artificial Sequence: Synthetic peptide
  Seed: DPRMCSLMQGSTLPRRSGAA
DPRMFSLQQSSTIPRRSGAA

SEQ ID NO: 67369 - protein, 20 aa, Artificial Sequence
  Description of Artificial Sequence: Synthetic peptide
  Seed: DPRMCSLMQGSTLPRRSGAA
DPRMFSLQQSSTLPRRSGAA

SEQ ID NO: 67370 - protein, 20 aa, Artificial Sequence
  Description of Artificial Sequence: Synthetic peptide
  Seed: DPRMCSLMQGSTLPRRSGAA
DPRMFSLQQSSTMPRRSGAA

SEQ ID NO: 67371 - protein, 20 aa, Artificial Sequence
  Description of Artificial Sequence: Synthetic peptide
  Seed: DPRMCSLMQGSTLPRRSGAA
DPRMFSLQQSSTSPRRSGAA

SEQ ID NO: 67372 - protein, 20 aa, Artificial Sequence
  Description of Artificial Sequence: Synthetic peptide
  Seed: DPRMCSLMQGSTLPRRSGAA
DPRMFSLQQSSTTPRRSGAA

SEQ ID NO: 67373 - protein, 20 aa, Artificial Sequence
  Description of Artificial Sequence: Synthetic peptide
  Seed: DPRMCSLMQGSTLPRRSGAA
DPRMFSLQQSSTVPRRSGAA

SEQ ID NO: 67374 - protein, 20 aa, Artificial Sequence
  Description of Artificial Sequence: Synthetic peptide
  Seed: DPRMCSLMQGSTLPRRSGAA
DPRMFSLQQTSTAPRRSGAA

SEQ ID NO: 67375 - protein, 20 aa, Artificial Sequence
  Description of Artificial Sequence: Synthetic peptide
  Seed: DPRMCSLMQGSTLPRRSGAA
DPRMFSLQQTSTIPRRSGAA

SEQ ID NO: 67376 - protein, 20 aa, Artificial Sequence
  Description of Artificial Sequence: Synthetic peptide
  Seed: DPRMCSLMQGSTLPRRSGAA
DPRMFSLQQTSTLPRRSGAA

SEQ ID NO: 67377 - protein, 20 aa, Artificial Sequence
  Description of Artificial Sequence: Synthetic peptide
  Seed: DPRMCSLMQGSTLPRRSGAA
DPRMFSLQQTSTVPRRSGAA

SEQ ID NO: 67378 - protein, 20 aa, Artificial Sequence
  Description of Artificial Sequence: Synthetic peptide
  Seed: DPRMCSLMQGSTLPRRSGAA
DPRMFSLQQVSTAPRRSGAA

SEQ ID NO: 67379 - protein, 20 aa, Artificial Sequence
  Description of Artificial Sequence: Synthetic peptide
  Seed: DPRMCSLMQGSTLPRRSGAA
DPRMFSLQQVSTIPRRSGAA

SEQ ID NO: 67380 - protein, 20 aa, Artificial Sequence
  Description of Artificial Sequence: Synthetic peptide
  Seed: DPRMCSLMQGSTLPRRSGAA
DPRMFSLQQVSTLPRRSGAA

SEQ ID NO: 67381 - protein, 20 aa, Artificial Sequence
  Description of Artificial Sequence: Synthetic peptide
  Seed: DPRMCSLMQGSTLPRRSGAA
DPRMFSLQQVSTVPRRSGAA

SEQ ID NO: 67382 - protein, 20 aa, Artificial Sequence
  Description of Artificial Sequence: Synthetic peptide
  Seed: DPRMCSLMQGSTLPRRSGAA
DPRMFSLSQASTAPRRSGAA

SEQ ID NO: 67383 - protein, 20 aa, Artificial Sequence
  Description of Artificial Sequence: Synthetic peptide
  Seed: DPRMCSLMQGSTLPRRSGAA
DPRMFSLSQASTFPRRSGAA

SEQ ID NO: 67384 - protein, 20 aa, Artificial Sequence
  Description of Artificial Sequence: Synthetic peptide
  Seed: DPRMCSLMQGSTLPRRSGAA
DPRMFSLSQASTIPRRSGAA

SEQ ID NO: 67385 - protein, 20 aa, Artificial Sequence
  Description of Artificial Sequence: Synthetic peptide
  Seed: DPRMCSLMQGSTLPRRSGAA
DPRMFSLSQASTLPRRSGAA

SEQ ID NO: 67386 - protein, 20 aa, Artificial Sequence
  Description of Artificial Sequence: Synthetic peptide
  Seed: DPRMCSLMQGSTLPRRSGAA
DPRMFSLSQASTMPRRSGAA

SEQ ID NO: 67387 - protein, 20 aa, Artificial Sequence
  Description of Artificial Sequence: Synthetic peptide
  Seed: DPRMCSLMQGSTLPRRSGAA
DPRMFSLSQASTSPRRSGAA

SEQ ID NO: 67388 - protein, 20 aa, Artificial Sequence
  Description of Artificial Sequence: Synthetic peptide
  Seed: DPRMCSLMQGSTLPRRSGAA
DPRMFSLSQASTTPRRSGAA

SEQ ID NO: 67389 - protein, 20 aa, Artificial Sequence
  Description of Artificial Sequence: Synthetic peptide
  Seed: DPRMCSLMQGSTLPRRSGAA
DPRMFSLSQASTVPRRSGAA

SEQ ID NO: 67390 - protein, 20 aa, Artificial Sequence
  Description of Artificial Sequence: Synthetic peptide
  Seed: DPRMCSLMQGSTLPRRSGAA
DPRMFSLSQGSTAPRRSGAA

SEQ ID NO: 67391 - protein, 20 aa, Artificial Sequence
  Description of Artificial Sequence: Synthetic peptide
  Seed: DPRMCSLMQGSTLPRRSGAA
DPRMFSLSQGSTIPRRSGAA

SEQ ID NO: 67392 - protein, 20 aa, Artificial Sequence
  Description of Artificial Sequence: Synthetic peptide
  Seed: DPRMCSLMQGSTLPRRSGAA
DPRMFSLSQGSTLPRRSGAA

SEQ ID NO: 67393 - protein, 20 aa, Artificial Sequence
  Description of Artificial Sequence: Synthetic peptide
  Seed: DPRMCSLMQGSTLPRRSGAA
DPRMFSLSQGSTMPRRSGAA

SEQ ID NO: 67394 - protein, 20 aa, Artificial Sequence
  Description of Artificial Sequence: Synthetic peptide
  Seed: DPRMCSLMQGSTLPRRSGAA
DPRMFSLSQGSTVPRRSGAA

SEQ ID NO: 67395 - protein, 20 aa, Artificial Sequence
  Description of Artificial Sequence: Synthetic peptide
  Seed: DPRMCSLMQGSTLPRRSGAA
DPRMFSLSQPSTAPRRSGAA

SEQ ID NO: 67396 - protein, 20 aa, Artificial Sequence
  Description of Artificial Sequence: Synthetic peptide
  Seed: DPRMCSLMQGSTLPRRSGAA
DPRMFSLSQPSTIPRRSGAA

SEQ ID NO: 67397 - protein, 20 aa, Artificial Sequence
  Description of Artificial Sequence: Synthetic peptide
  Seed: DPRMCSLMQGSTLPRRSGAA
DPRMFSLSQPSTLPRRSGAA

SEQ ID NO: 67398 - protein, 20 aa, Artificial Sequence
  Description of Artificial Sequence: Synthetic peptide
  Seed: DPRMCSLMQGSTLPRRSGAA
DPRMFSLSQPSTVPRRSGAA

SEQ ID NO: 67399 - protein, 20 aa, Artificial Sequence
  Description of Artificial Sequence: Synthetic peptide
  Seed: DPRMCSLMQGSTLPRRSGAA
DPRMFSLSQSSTAPRRSGAA

SEQ ID NO: 67400 - protein, 20 aa, Artificial Sequence
  Description of Artificial Sequence: Synthetic peptide
  Seed: DPRMCSLMQGSTLPRRSGAA
DPRMFSLSQSSTIPRRSGAA

SEQ ID NO: 67401 - protein, 20 aa, Artificial Sequence
  Description of Artificial Sequence: Synthetic peptide
  Seed: DPRMCSLMQGSTLPRRSGAA
DPRMFSLSQSSTLPRRSGAA

SEQ ID NO: 67402 - protein, 20 aa, Artificial Sequence
  Description of Artificial Sequence: Synthetic peptide
  Seed: DPRMCSLMQGSTLPRRSGAA
DPRMFSLSQSSTMPRRSGAA

SEQ ID NO: 67403 - protein, 20 aa, Artificial Sequence
  Description of Artificial Sequence: Synthetic peptide
  Seed: DPRMCSLMQGSTLPRRSGAA
DPRMFSLSQSSTVPRRSGAA

SEQ ID NO: 67404 - protein, 20 aa, Artificial Sequence
  Description of Artificial Sequence: Synthetic peptide
  Seed: DPRMCSLMQGSTLPRRSGAA
DPRMFSLSQTSTIPRRSGAA

SEQ ID NO: 67405 - protein, 20 aa, Artificial Sequence
  Description of Artificial Sequence: Synthetic peptide
  Seed: DPRMCSLMQGSTLPRRSGAA
DPRMFSLSQTSTVPRRSGAA

SEQ ID NO: 67406 - protein, 20 aa, Artificial Sequence
  Description of Artificial Sequence: Synthetic peptide
  Seed: DPRMCSLMQGSTLPRRSGAA
DPRMFSLTQASTAPRRSGAA

SEQ ID NO: 67407 - protein, 20 aa, Artificial Sequence
  Description of Artificial Sequence: Synthetic peptide
  Seed: DPRMCSLMQGSTLPRRSGAA
DPRMFSLTQASTIPRRSGAA

SEQ ID NO: 67408 - protein, 20 aa, Artificial Sequence
  Description of Artificial Sequence: Synthetic peptide
  Seed: DPRMCSLMQGSTLPRRSGAA
DPRMFSLTQASTLPRRSGAA

SEQ ID NO: 67409 - protein, 20 aa, Artificial Sequence
  Description of Artificial Sequence: Synthetic peptide
  Seed: DPRMCSLMQGSTLPRRSGAA
DPRMFSLTQASTMPRRSGAA

SEQ ID NO: 67410 - protein, 20 aa, Artificial Sequence
  Description of Artificial Sequence: Synthetic peptide
  Seed: DPRMCSLMQGSTLPRRSGAA
DPRMFSLTQASTSPRRSGAA

SEQ ID NO: 67411 - protein, 20 aa, Artificial Sequence
  Description of Artificial Sequence: Synthetic peptide
  Seed: DPRMCSLMQGSTLPRRSGAA
DPRMFSLTQASTTPRRSGAA

SEQ ID NO: 67412 - protein, 20 aa, Artificial Sequence
  Description of Artificial Sequence: Synthetic peptide
  Seed: DPRMCSLMQGSTLPRRSGAA
DPRMFSLTQASTVPRRSGAA

SEQ ID NO: 67413 - protein, 20 aa, Artificial Sequence
  Description of Artificial Sequence: Synthetic peptide
  Seed: DPRMCSLMQGSTLPRRSGAA
DPRMFSLTQGSTAPRRSGAA

SEQ ID NO: 67414 - protein, 20 aa, Artificial Sequence
  Description of Artificial Sequence: Synthetic peptide
  Seed: DPRMCSLMQGSTLPRRSGAA
DPRMFSLTQGSTIPRRSGAA

SEQ ID NO: 67415 - protein, 20 aa, Artificial Sequence
  Description of Artificial Sequence: Synthetic peptide
  Seed: DPRMCSLMQGSTLPRRSGAA
DPRMFSLTQGSTLPRRSGAA

SEQ ID NO: 67416 - protein, 20 aa, Artificial Sequence
  Description of Artificial Sequence: Synthetic peptide
  Seed: DPRMCSLMQGSTLPRRSGAA
DPRMFSLTQGSTVPRRSGAA

SEQ ID NO: 67417 - protein, 20 aa, Artificial Sequence
  Description of Artificial Sequence: Synthetic peptide
  Seed: DPRMCSLMQGSTLPRRSGAA
DPRMFSLTQPSTAPRRSGAA

SEQ ID NO: 67418 - protein, 20 aa, Artificial Sequence
  Description of Artificial Sequence: Synthetic peptide
  Seed: DPRMCSLMQGSTLPRRSGAA
DPRMFSLTQPSTIPRRSGAA

SEQ ID NO: 67419 - protein, 20 aa, Artificial Sequence
  Description of Artificial Sequence: Synthetic peptide
  Seed: DPRMCSLMQGSTLPRRSGAA
DPRMFSLTQPSTLPRRSGAA

SEQ ID NO: 67420 - protein, 20 aa, Artificial Sequence
  Description of Artificial Sequence: Synthetic peptide
  Seed: DPRMCSLMQGSTLPRRSGAA
DPRMFSLTQPSTVPRRSGAA

SEQ ID NO: 67421 - protein, 20 aa, Artificial Sequence
  Description of Artificial Sequence: Synthetic peptide
  Seed: DPRMCSLMQGSTLPRRSGAA
DPRMFSLTQSSTAPRRSGAA

SEQ ID NO: 67422 - protein, 20 aa, Artificial Sequence
  Description of Artificial Sequence: Synthetic peptide
  Seed: DPRMCSLMQGSTLPRRSGAA
DPRMFSLTQSSTIPRRSGAA

SEQ ID NO: 67423 - protein, 20 aa, Artificial Sequence
  Description of Artificial Sequence: Synthetic peptide
  Seed: DPRMCSLMQGSTLPRRSGAA
DPRMFSLTQSSTLPRRSGAA

SEQ ID NO: 67424 - protein, 20 aa, Artificial Sequence
  Description of Artificial Sequence: Synthetic peptide
  Seed: DPRMCSLMQGSTLPRRSGAA
DPRMFSLTQSSTVPRRSGAA

SEQ ID NO: 67425 - protein, 20 aa, Artificial Sequence
  Description of Artificial Sequence: Synthetic peptide
  Seed: DPRMCSLMQGSTLPRRSGAA
DPRMFSLVQASTAPRRSGAA

SEQ ID NO: 67426 - protein, 20 aa, Artificial Sequence
  Description of Artificial Sequence: Synthetic peptide
  Seed: DPRMCSLMQGSTLPRRSGAA
DPRMFSLVQASTCPRRSGAA

SEQ ID NO: 67427 - protein, 20 aa, Artificial Sequence
  Description of Artificial Sequence: Synthetic peptide
  Seed: DPRMCSLMQGSTLPRRSGAA
DPRMFSLVQASTFPRRSGAA

SEQ ID NO: 67428 - protein, 20 aa, Artificial Sequence
  Description of Artificial Sequence: Synthetic peptide
  Seed: DPRMCSLMQGSTLPRRSGAA
DPRMFSLVQASTGPRRSGAA

SEQ ID NO: 67429 - protein, 20 aa, Artificial Sequence
  Description of Artificial Sequence: Synthetic peptide
  Seed: DPRMCSLMQGSTLPRRSGAA
DPRMFSLVQASTIPRRSGAA

SEQ ID NO: 67430 - protein, 20 aa, Artificial Sequence
  Description of Artificial Sequence: Synthetic peptide
  Seed: DPRMCSLMQGSTLPRRSGAA
DPRMFSLVQASTLPRRSGAA

SEQ ID NO: 67431 - protein, 20 aa, Artificial Sequence
  Description of Artificial Sequence: Synthetic peptide
  Seed: DPRMCSLMQGSTLPRRSGAA
DPRMFSLVQASTMPRRSGAA

SEQ ID NO: 67432 - protein, 20 aa, Artificial Sequence
  Description of Artificial Sequence: Synthetic peptide
  Seed: DPRMCSLMQGSTLPRRSGAA
DPRMFSLVQASTNPRRSGAA

SEQ ID NO: 67433 - protein, 20 aa, Artificial Sequence
  Description of Artificial Sequence: Synthetic peptide
  Seed: DPRMCSLMQGSTLPRRSGAA
DPRMFSLVQASTSPRRSGAA

SEQ ID NO: 67434 - protein, 20 aa, Artificial Sequence
  Description of Artificial Sequence: Synthetic peptide
  Seed: DPRMCSLMQGSTLPRRSGAA
DPRMFSLVQASTTPRRSGAA

SEQ ID NO: 67435 - protein, 20 aa, Artificial Sequence
  Description of Artificial Sequence: Synthetic peptide
  Seed: DPRMCSLMQGSTLPRRSGAA
DPRMFSLVQASTVPRRSGAA

SEQ ID NO: 67436 - protein, 20 aa, Artificial Sequence
  Description of Artificial Sequence: Synthetic peptide
  Seed: DPRMCSLMQGSTLPRRSGAA
DPRMFSLVQGSTAPRRSGAA

SEQ ID NO: 67437 - protein, 20 aa, Artificial Sequence
  Description of Artificial Sequence: Synthetic peptide
  Seed: DPRMCSLMQGSTLPRRSGAA
DPRMFSLVQGSTGPRRSGAA

SEQ ID NO: 67438 - protein, 20 aa, Artificial Sequence
  Description of Artificial Sequence: Synthetic peptide
  Seed: DPRMCSLMQGSTLPRRSGAA
DPRMFSLVQGSTIPRRSGAA

SEQ ID NO: 67439 - protein, 20 aa, Artificial Sequence
  Description of Artificial Sequence: Synthetic peptide
  Seed: DPRMCSLMQGSTLPRRSGAA
DPRMFSLVQGSTLPRRSGAA

SEQ ID NO: 67440 - protein, 20 aa, Artificial Sequence
  Description of Artificial Sequence: Synthetic peptide
  Seed: DPRMCSLMQGSTLPRRSGAA
DPRMFSLVQGSTMPRRSGAA

SEQ ID NO: 67441 - protein, 20 aa, Artificial Sequence
  Description of Artificial Sequence: Synthetic peptide
  Seed: DPRMCSLMQGSTLPRRSGAA
DPRMFSLVQGSTSPRRSGAA

SEQ ID NO: 67442 - protein, 20 aa, Artificial Sequence
  Description of Artificial Sequence: Synthetic peptide
  Seed: DPRMCSLMQGSTLPRRSGAA
DPRMFSLVQGSTTPRRSGAA

SEQ ID NO: 67443 - protein, 20 aa, Artificial Sequence
  Description of Artificial Sequence: Synthetic peptide
  Seed: DPRMCSLMQGSTLPRRSGAA
DPRMFSLVQGSTVPRRSGAA

SEQ ID NO: 67444 - protein, 20 aa, Artificial Sequence
  Description of Artificial Sequence: Synthetic peptide
  Seed: DPRMCSLMQGSTLPRRSGAA
DPRMFSLVQNSTAPRRSGAA

SEQ ID NO: 67445 - protein, 20 aa, Artificial Sequence
  Description of Artificial Sequence: Synthetic peptide
  Seed: DPRMCSLMQGSTLPRRSGAA
DPRMFSLVQNSTIPRRSGAA

SEQ ID NO: 67446 - protein, 20 aa, Artificial Sequence
  Description of Artificial Sequence: Synthetic peptide
  Seed: DPRMCSLMQGSTLPRRSGAA
DPRMFSLVQNSTLPRRSGAA

SEQ ID NO: 67447 - protein, 20 aa, Artificial Sequence
  Description of Artificial Sequence: Synthetic peptide
  Seed: DPRMCSLMQGSTLPRRSGAA
DPRMFSLVQNSTVPRRSGAA

SEQ ID NO: 67448 - protein, 20 aa, Artificial Sequence
  Description of Artificial Sequence: Synthetic peptide
  Seed: DPRMCSLMQGSTLPRRSGAA
DPRMFSLVQPSTAPRRSGAA

SEQ ID NO: 67449 - protein, 20 aa, Artificial Sequence
  Description of Artificial Sequence: Synthetic peptide
  Seed: DPRMCSLMQGSTLPRRSGAA
DPRMFSLVQPSTIPRRSGAA

SEQ ID NO: 67450 - protein, 20 aa, Artificial Sequence
  Description of Artificial Sequence: Synthetic peptide
  Seed: DPRMCSLMQGSTLPRRSGAA
DPRMFSLVQPSTLPRRSGAA

SEQ ID NO: 67451 - protein, 20 aa, Artificial Sequence
  Description of Artificial Sequence: Synthetic peptide
  Seed: DPRMCSLMQGSTLPRRSGAA
DPRMFSLVQPSTMPRRSGAA

SEQ ID NO: 67452 - protein, 20 aa, Artificial Sequence
  Description of Artificial Sequence: Synthetic peptide
  Seed: DPRMCSLMQGSTLPRRSGAA
DPRMFSLVQPSTSPRRSGAA

SEQ ID NO: 67453 - protein, 20 aa, Artificial Sequence
  Description of Artificial Sequence: Synthetic peptide
  Seed: DPRMCSLMQGSTLPRRSGAA
DPRMFSLVQPSTTPRRSGAA

SEQ ID NO: 67454 - protein, 20 aa, Artificial Sequence
  Description of Artificial Sequence: Synthetic peptide
  Seed: DPRMCSLMQGSTLPRRSGAA
DPRMFSLVQPSTVPRRSGAA

SEQ ID NO: 67455 - protein, 20 aa, Artificial Sequence
  Description of Artificial Sequence: Synthetic peptide
  Seed: DPRMCSLMQGSTLPRRSGAA
DPRMFSLVQSSTAPRRSGAA

SEQ ID NO: 67456 - protein, 20 aa, Artificial Sequence
  Description of Artificial Sequence: Synthetic peptide
  Seed: DPRMCSLMQGSTLPRRSGAA
DPRMFSLVQSSTGPRRSGAA

SEQ ID NO: 67457 - protein, 20 aa, Artificial Sequence
  Description of Artificial Sequence: Synthetic peptide
  Seed: DPRMCSLMQGSTLPRRSGAA
DPRMFSLVQSSTIPRRSGAA

SEQ ID NO: 67458 - protein, 20 aa, Artificial Sequence
  Description of Artificial Sequence: Synthetic peptide
  Seed: DPRMCSLMQGSTLPRRSGAA
DPRMFSLVQSSTLPRRSGAA

SEQ ID NO: 67459 - protein, 20 aa, Artificial Sequence
  Description of Artificial Sequence: Synthetic peptide
  Seed: DPRMCSLMQGSTLPRRSGAA
DPRMFSLVQSSTMPRRSGAA

SEQ ID NO: 67460 - protein, 20 aa, Artificial Sequence
  Description of Artificial Sequence: Synthetic peptide
  Seed: DPRMCSLMQGSTLPRRSGAA
DPRMFSLVQSSTSPRRSGAA

SEQ ID NO: 67461 - protein, 20 aa, Artificial Sequence
  Description of Artificial Sequence: Synthetic peptide
  Seed: DPRMCSLMQGSTLPRRSGAA
DPRMFSLVQSSTTPRRSGAA

SEQ ID NO: 67462 - protein, 20 aa, Artificial Sequence
  Description of Artificial Sequence: Synthetic peptide
  Seed: DPRMCSLMQGSTLPRRSGAA
DPRMFSLVQSSTVPRRSGAA

SEQ ID NO: 67463 - protein, 20 aa, Artificial Sequence
  Description of Artificial Sequence: Synthetic peptide
  Seed: DPRMCSLMQGSTLPRRSGAA
DPRMFSLVQTSTAPRRSGAA

SEQ ID NO: 67464 - protein, 20 aa, Artificial Sequence
  Description of Artificial Sequence: Synthetic peptide
  Seed: DPRMCSLMQGSTLPRRSGAA
DPRMFSLVQTSTIPRRSGAA

SEQ ID NO: 67465 - protein, 20 aa, Artificial Sequence
  Description of Artificial Sequence: Synthetic peptide
  Seed: DPRMCSLMQGSTLPRRSGAA
DPRMFSLVQTSTLPRRSGAA

SEQ ID NO: 67466 - protein, 20 aa, Artificial Sequence
  Description of Artificial Sequence: Synthetic peptide
  Seed: DPRMCSLMQGSTLPRRSGAA
DPRMFSLVQTSTVPRRSGAA

SEQ ID NO: 67467 - protein, 20 aa, Artificial Sequence
  Description of Artificial Sequence: Synthetic peptide
  Seed: DPRMCSLMQGSTLPRRSGAA
DPRMFSLVQVSTAPRRSGAA

SEQ ID NO: 67468 - protein, 20 aa, Artificial Sequence
  Description of Artificial Sequence: Synthetic peptide
  Seed: DPRMCSLMQGSTLPRRSGAA
DPRMFSLVQVSTIPRRSGAA

SEQ ID NO: 67469 - protein, 20 aa, Artificial Sequence
  Description of Artificial Sequence: Synthetic peptide
  Seed: DPRMCSLMQGSTLPRRSGAA
DPRMFSLVQVSTLPRRSGAA

SEQ ID NO: 67470 - protein, 20 aa, Artificial Sequence
  Description of Artificial Sequence: Synthetic peptide
  Seed: DPRMCSLMQGSTLPRRSGAA
DPRMFSLVQVSTVPRRSGAA

SEQ ID NO: 67471 - protein, 20 aa, Artificial Sequence
  Description of Artificial Sequence: Synthetic peptide
  Seed: DPRMCSLMQGSTLPRRSGAA
DPRMFSLWQASTAPRRSGAA

SEQ ID NO: 67472 - protein, 20 aa, Artificial Sequence
  Description of Artificial Sequence: Synthetic peptide
  Seed: DPRMCSLMQGSTLPRRSGAA
DPRMFSLWQASTIPRRSGAA

SEQ ID NO: 67473 - protein, 20 aa, Artificial Sequence
  Description of Artificial Sequence: Synthetic peptide
  Seed: DPRMCSLMQGSTLPRRSGAA
DPRMFSLWQASTLPRRSGAA

SEQ ID NO: 67474 - protein, 20 aa, Artificial Sequence
  Description of Artificial Sequence: Synthetic peptide
  Seed: DPRMCSLMQGSTLPRRSGAA
DPRMFSLWQASTVPRRSGAA

SEQ ID NO: 67475 - protein, 20 aa, Artificial Sequence
  Description of Artificial Sequence: Synthetic peptide
  Seed: DPRMCSLMQGSTLPRRSGAA
DPRMISLAQASTAPRRSGAA

SEQ ID NO: 67476 - protein, 20 aa, Artificial Sequence
  Description of Artificial Sequence: Synthetic peptide
  Seed: DPRMCSLMQGSTLPRRSGAA
DPRMISLAQASTIPRRSGAA

SEQ ID NO: 67477 - protein, 20 aa, Artificial Sequence
  Description of Artificial Sequence: Synthetic peptide
  Seed: DPRMCSLMQGSTLPRRSGAA
DPRMISLAQASTLPRRSGAA

SEQ ID NO: 67478 - protein, 20 aa, Artificial Sequence
  Description of Artificial Sequence: Synthetic peptide
  Seed: DPRMCSLMQGSTLPRRSGAA
DPRMISLAQASTMPRRSGAA

SEQ ID NO: 67479 - protein, 20 aa, Artificial Sequence
  Description of Artificial Sequence: Synthetic peptide
  Seed: DPRMCSLMQGSTLPRRSGAA
DPRMISLAQASTTPRRSGAA

SEQ ID NO: 67480 - protein, 20 aa, Artificial Sequence
  Description of Artificial Sequence: Synthetic peptide
  Seed: DPRMCSLMQGSTLPRRSGAA
DPRMISLAQASTVPRRSGAA

SEQ ID NO: 67481 - protein, 20 aa, Artificial Sequence
  Description of Artificial Sequence: Synthetic peptide
  Seed: DPRMCSLMQGSTLPRRSGAA
DPRMISLAQGSTAPRRSGAA

SEQ ID NO: 67482 - protein, 20 aa, Artificial Sequence
  Description of Artificial Sequence: Synthetic peptide
  Seed: DPRMCSLMQGSTLPRRSGAA
DPRMISLAQGSTIPRRSGAA

SEQ ID NO: 67483 - protein, 20 aa, Artificial Sequence
  Description of Artificial Sequence: Synthetic peptide
  Seed: DPRMCSLMQGSTLPRRSGAA
DPRMISLAQGSTLPRRSGAA

SEQ ID NO: 67484 - protein, 20 aa, Artificial Sequence
  Description of Artificial Sequence: Synthetic peptide
  Seed: DPRMCSLMQGSTLPRRSGAA
DPRMISLAQGSTVPRRSGAA

SEQ ID NO: 67485 - protein, 20 aa, Artificial Sequence
  Description of Artificial Sequence: Synthetic peptide
  Seed: DPRMCSLMQGSTLPRRSGAA
DPRMISLAQPSTIPRRSGAA

SEQ ID NO: 67486 - protein, 20 aa, Artificial Sequence
  Description of Artificial Sequence: Synthetic peptide
  Seed: DPRMCSLMQGSTLPRRSGAA
DPRMISLAQPSTLPRRSGAA

SEQ ID NO: 67487 - protein, 20 aa, Artificial Sequence
  Description of Artificial Sequence: Synthetic peptide
  Seed: DPRMCSLMQGSTLPRRSGAA
DPRMISLAQPSTVPRRSGAA

SEQ ID NO: 67488 - protein, 20 aa, Artificial Sequence
  Description of Artificial Sequence: Synthetic peptide
  Seed: DPRMCSLMQGSTLPRRSGAA
DPRMISLAQSSTAPRRSGAA

SEQ ID NO: 67489 - protein, 20 aa, Artificial Sequence
  Description of Artificial Sequence: Synthetic peptide
  Seed: DPRMCSLMQGSTLPRRSGAA
DPRMISLAQSSTIPRRSGAA

SEQ ID NO: 67490 - protein, 20 aa, Artificial Sequence
  Description of Artificial Sequence: Synthetic peptide
  Seed: DPRMCSLMQGSTLPRRSGAA
DPRMISLAQSSTLPRRSGAA

SEQ ID NO: 67491 - protein, 20 aa, Artificial Sequence
  Description of Artificial Sequence: Synthetic peptide
  Seed: DPRMCSLMQGSTLPRRSGAA
DPRMISLAQSSTVPRRSGAA

SEQ ID NO: 67492 - protein, 20 aa, Artificial Sequence
  Description of Artificial Sequence: Synthetic peptide
  Seed: DPRMCSLMQGSTLPRRSGAA
DPRMISLEQASTLPRRSGAA

SEQ ID NO: 67493 - protein, 20 aa, Artificial Sequence
  Description of Artificial Sequence: Synthetic peptide
  Seed: DPRMCSLMQGSTLPRRSGAA
DPRMISLEQASTVPRRSGAA

SEQ ID NO: 67494 - protein, 20 aa, Artificial Sequence
  Description of Artificial Sequence: Synthetic peptide
  Seed: DPRMCSLMQGSTLPRRSGAA
DPRMISLFQASTAPRRSGAA

SEQ ID NO: 67495 - protein, 20 aa, Artificial Sequence
  Description of Artificial Sequence: Synthetic peptide
  Seed: DPRMCSLMQGSTLPRRSGAA
DPRMISLFQASTVPRRSGAA

SEQ ID NO: 67496 - protein, 20 aa, Artificial Sequence
  Description of Artificial Sequence: Synthetic peptide
  Seed: DPRMCSLMQGSTLPRRSGAA
DPRMISLFQDSTIPRRSGAA

SEQ ID NO: 67497 - protein, 20 aa, Artificial Sequence
  Description of Artificial Sequence: Synthetic peptide
  Seed: DPRMCSLMQGSTLPRRSGAA
DPRMISLFQDSTLPRRSGAA

SEQ ID NO: 67498 - protein, 20 aa, Artificial Sequence
  Description of Artificial Sequence: Synthetic peptide
  Seed: DPRMCSLMQGSTLPRRSGAA
DPRMISLFQDSTVPRRSGAA

SEQ ID NO: 67499 - protein, 20 aa, Artificial Sequence
  Description of Artificial Sequence: Synthetic peptide
  Seed: DPRMCSLMQGSTLPRRSGAA
DPRMISLIQASTAPRRSGAA

SEQ ID NO: 67500 - protein, 20 aa, Artificial Sequence
  Description of Artificial Sequence: Synthetic peptide
  Seed: DPRMCSLMQGSTLPRRSGAA
DPRMISLIQASTIPRRSGAA

SEQ ID NO: 67501 - protein, 20 aa, Artificial Sequence
  Description of Artificial Sequence: Synthetic peptide
  Seed: DPRMCSLMQGSTLPRRSGAA
DPRMISLIQASTLPRRSGAA

SEQ ID NO: 67502 - protein, 20 aa, Artificial Sequence
  Description of Artificial Sequence: Synthetic peptide
  Seed: DPRMCSLMQGSTLPRRSGAA
DPRMISLIQASTMPRRSGAA

SEQ ID NO: 67503 - protein, 20 aa, Artificial Sequence
  Description of Artificial Sequence: Synthetic peptide
  Seed: DPRMCSLMQGSTLPRRSGAA
DPRMISLIQASTSPRRSGAA

SEQ ID NO: 67504 - protein, 20 aa, Artificial Sequence
  Description of Artificial Sequence: Synthetic peptide
  Seed: DPRMCSLMQGSTLPRRSGAA
DPRMISLIQASTTPRRSGAA

SEQ ID NO: 67505 - protein, 20 aa, Artificial Sequence
  Description of Artificial Sequence: Synthetic peptide
  Seed: DPRMCSLMQGSTLPRRSGAA
DPRMISLIQASTVPRRSGAA

SEQ ID NO: 67506 - protein, 20 aa, Artificial Sequence
  Description of Artificial Sequence: Synthetic peptide
  Seed: DPRMCSLMQGSTLPRRSGAA
DPRMISLIQGSTAPRRSGAA

SEQ ID NO: 67507 - protein, 20 aa, Artificial Sequence
  Description of Artificial Sequence: Synthetic peptide
  Seed: DPRMCSLMQGSTLPRRSGAA
DPRMISLIQGSTIPRRSGAA

SEQ ID NO: 67508 - protein, 20 aa, Artificial Sequence
  Description of Artificial Sequence: Synthetic peptide
  Seed: DPRMCSLMQGSTLPRRSGAA
DPRMISLIQGSTLPRRSGAA

SEQ ID NO: 67509 - protein, 20 aa, Artificial Sequence
  Description of Artificial Sequence: Synthetic peptide
  Seed: DPRMCSLMQGSTLPRRSGAA
DPRMISLIQGSTMPRRSGAA

SEQ ID NO: 67510 - protein, 20 aa, Artificial Sequence
  Description of Artificial Sequence: Synthetic peptide
  Seed: DPRMCSLMQGSTLPRRSGAA
DPRMISLIQGSTTPRRSGAA

SEQ ID NO: 67511 - protein, 20 aa, Artificial Sequence
  Description of Artificial Sequence: Synthetic peptide
  Seed: DPRMCSLMQGSTLPRRSGAA
DPRMISLIQGSTVPRRSGAA

SEQ ID NO: 67512 - protein, 20 aa, Artificial Sequence
  Description of Artificial Sequence: Synthetic peptide
  Seed: DPRMCSLMQGSTLPRRSGAA
DPRMISLIQPSTAPRRSGAA

SEQ ID NO: 67513 - protein, 20 aa, Artificial Sequence
  Description of Artificial Sequence: Synthetic peptide
  Seed: DPRMCSLMQGSTLPRRSGAA
DPRMISLIQPSTIPRRSGAA

SEQ ID NO: 67514 - protein, 20 aa, Artificial Sequence
  Description of Artificial Sequence: Synthetic peptide
  Seed: DPRMCSLMQGSTLPRRSGAA
DPRMISLIQPSTLPRRSGAA

SEQ ID NO: 67515 - protein, 20 aa, Artificial Sequence
  Description of Artificial Sequence: Synthetic peptide
  Seed: DPRMCSLMQGSTLPRRSGAA
DPRMISLIQPSTVPRRSGAA

SEQ ID NO: 67516 - protein, 20 aa, Artificial Sequence
  Description of Artificial Sequence: Synthetic peptide
  Seed: DPRMCSLMQGSTLPRRSGAA
DPRMISLIQSSTAPRRSGAA

SEQ ID NO: 67517 - protein, 20 aa, Artificial Sequence
  Description of Artificial Sequence: Synthetic peptide
  Seed: DPRMCSLMQGSTLPRRSGAA
DPRMISLIQSSTIPRRSGAA

SEQ ID NO: 67518 - protein, 20 aa, Artificial Sequence
  Description of Artificial Sequence: Synthetic peptide
  Seed: DPRMCSLMQGSTLPRRSGAA
DPRMISLIQSSTLPRRSGAA

SEQ ID NO: 67519 - protein, 20 aa, Artificial Sequence
  Description of Artificial Sequence: Synthetic peptide
  Seed: DPRMCSLMQGSTLPRRSGAA
DPRMISLIQSSTVPRRSGAA

SEQ ID NO: 67520 - protein, 20 aa, Artificial Sequence
  Description of Artificial Sequence: Synthetic peptide
  Seed: DPRMCSLMQGSTLPRRSGAA
DPRMISLLQASTAPRRSGAA

SEQ ID NO: 67521 - protein, 20 aa, Artificial Sequence
  Description of Artificial Sequence: Synthetic peptide
  Seed: DPRMCSLMQGSTLPRRSGAA
DPRMISLLQASTCPRRSGAA

SEQ ID NO: 67522 - protein, 20 aa, Artificial Sequence
  Description of Artificial Sequence: Synthetic peptide
  Seed: DPRMCSLMQGSTLPRRSGAA
DPRMISLLQASTGPRRSGAA

SEQ ID NO: 67523 - protein, 20 aa, Artificial Sequence
  Description of Artificial Sequence: Synthetic peptide
  Seed: DPRMCSLMQGSTLPRRSGAA
DPRMISLLQASTIPRRSGAA

SEQ ID NO: 67524 - protein, 20 aa, Artificial Sequence
  Description of Artificial Sequence: Synthetic peptide
  Seed: DPRMCSLMQGSTLPRRSGAA
DPRMISLLQASTLPRRSGAA

SEQ ID NO: 67525 - protein, 20 aa, Artificial Sequence
  Description of Artificial Sequence: Synthetic peptide
  Seed: DPRMCSLMQGSTLPRRSGAA
DPRMISLLQASTMPRRSGAA

SEQ ID NO: 67526 - protein, 20 aa, Artificial Sequence
  Description of Artificial Sequence: Synthetic peptide
  Seed: DPRMCSLMQGSTLPRRSGAA
DPRMISLLQASTSPRRSGAA

SEQ ID NO: 67527 - protein, 20 aa, Artificial Sequence
  Description of Artificial Sequence: Synthetic peptide
  Seed: DPRMCSLMQGSTLPRRSGAA
DPRMISLLQASTTPRRSGAA

SEQ ID NO: 67528 - protein, 20 aa, Artificial Sequence
  Description of Artificial Sequence: Synthetic peptide
  Seed: DPRMCSLMQGSTLPRRSGAA
DPRMISLLQASTVPRRSGAA

SEQ ID NO: 67529 - protein, 20 aa, Artificial Sequence
  Description of Artificial Sequence: Synthetic peptide
  Seed: DPRMCSLMQGSTLPRRSGAA
DPRMISLLQGSTAPRRSGAA

SEQ ID NO: 67530 - protein, 20 aa, Artificial Sequence
  Description of Artificial Sequence: Synthetic peptide
  Seed: DPRMCSLMQGSTLPRRSGAA
DPRMISLLQGSTGPRRSGAA

SEQ ID NO: 67531 - protein, 20 aa, Artificial Sequence
  Description of Artificial Sequence: Synthetic peptide
  Seed: DPRMCSLMQGSTLPRRSGAA
DPRMISLLQGSTIPRRSGAA

SEQ ID NO: 67532 - protein, 20 aa, Artificial Sequence
  Description of Artificial Sequence: Synthetic peptide
  Seed: DPRMCSLMQGSTLPRRSGAA
DPRMISLLQGSTLPRRSGAA

SEQ ID NO: 67533 - protein, 20 aa, Artificial Sequence
  Description of Artificial Sequence: Synthetic peptide
  Seed: DPRMCSLMQGSTLPRRSGAA
DPRMISLLQGSTMPRRSGAA

SEQ ID NO: 67534 - protein, 20 aa, Artificial Sequence
  Description of Artificial Sequence: Synthetic peptide
  Seed: DPRMCSLMQGSTLPRRSGAA
DPRMISLLQGSTSPRRSGAA

SEQ ID NO: 67535 - protein, 20 aa, Artificial Sequence
  Description of Artificial Sequence: Synthetic peptide
  Seed: DPRMCSLMQGSTLPRRSGAA
DPRMISLLQGSTTPRRSGAA

SEQ ID NO: 67536 - protein, 20 aa, Artificial Sequence
  Description of Artificial Sequence: Synthetic peptide
  Seed: DPRMCSLMQGSTLPRRSGAA
DPRMISLLQGSTVPRRSGAA

SEQ ID NO: 67537 - protein, 20 aa, Artificial Sequence
  Description of Artificial Sequence: Synthetic peptide
  Seed: DPRMCSLMQGSTLPRRSGAA
DPRMISLLQNSTAPRRSGAA

SEQ ID NO: 67538 - protein, 20 aa, Artificial Sequence
  Description of Artificial Sequence: Synthetic peptide
  Seed: DPRMCSLMQGSTLPRRSGAA
DPRMISLLQNSTIPRRSGAA

SEQ ID NO: 67539 - protein, 20 aa, Artificial Sequence
  Description of Artificial Sequence: Synthetic peptide
  Seed: DPRMCSLMQGSTLPRRSGAA
DPRMISLLQNSTLPRRSGAA

SEQ ID NO: 67540 - protein, 20 aa, Artificial Sequence
  Description of Artificial Sequence: Synthetic peptide
  Seed: DPRMCSLMQGSTLPRRSGAA
DPRMISLLQNSTVPRRSGAA

SEQ ID NO: 67541 - protein, 20 aa, Artificial Sequence
  Description of Artificial Sequence: Synthetic peptide
  Seed: DPRMCSLMQGSTLPRRSGAA
DPRMISLLQPSTAPRRSGAA

SEQ ID NO: 67542 - protein, 20 aa, Artificial Sequence
  Description of Artificial Sequence: Synthetic peptide
  Seed: DPRMCSLMQGSTLPRRSGAA
DPRMISLLQPSTIPRRSGAA

SEQ ID NO: 67543 - protein, 20 aa, Artificial Sequence
  Description of Artificial Sequence: Synthetic peptide
  Seed: DPRMCSLMQGSTLPRRSGAA
DPRMISLLQPSTLPRRSGAA

SEQ ID NO: 67544 - protein, 20 aa, Artificial Sequence
  Description of Artificial Sequence: Synthetic peptide
  Seed: DPRMCSLMQGSTLPRRSGAA
DPRMISLLQPSTMPRRSGAA

SEQ ID NO: 67545 - protein, 20 aa, Artificial Sequence
  Description of Artificial Sequence: Synthetic peptide
  Seed: DPRMCSLMQGSTLPRRSGAA
DPRMISLLQPSTSPRRSGAA

SEQ ID NO: 67546 - protein, 20 aa, Artificial Sequence
  Description of Artificial Sequence: Synthetic peptide
  Seed: DPRMCSLMQGSTLPRRSGAA
DPRMISLLQPSTTPRRSGAA

SEQ ID NO: 67547 - protein, 20 aa, Artificial Sequence
  Description of Artificial Sequence: Synthetic peptide
  Seed: DPRMCSLMQGSTLPRRSGAA
DPRMISLLQPSTVPRRSGAA

SEQ ID NO: 67548 - protein, 20 aa, Artificial Sequence
  Description of Artificial Sequence: Synthetic peptide
  Seed: DPRMCSLMQGSTLPRRSGAA
DPRMISLLQSSTAPRRSGAA

SEQ ID NO: 67549 - protein, 20 aa, Artificial Sequence
  Description of Artificial Sequence: Synthetic peptide
  Seed: DPRMCSLMQGSTLPRRSGAA
DPRMISLLQSSTIPRRSGAA

SEQ ID NO: 67550 - protein, 20 aa, Artificial Sequence
  Description of Artificial Sequence: Synthetic peptide
  Seed: DPRMCSLMQGSTLPRRSGAA
DPRMISLLQSSTLPRRSGAA

SEQ ID NO: 67551 - protein, 20 aa, Artificial Sequence
  Description of Artificial Sequence: Synthetic peptide
  Seed: DPRMCSLMQGSTLPRRSGAA
DPRMISLLQSSTMPRRSGAA

SEQ ID NO: 67552 - protein, 20 aa, Artificial Sequence
  Description of Artificial Sequence: Synthetic peptide
  Seed: DPRMCSLMQGSTLPRRSGAA
DPRMISLLQSSTSPRRSGAA

SEQ ID NO: 67553 - protein, 20 aa, Artificial Sequence
  Description of Artificial Sequence: Synthetic peptide
  Seed: DPRMCSLMQGSTLPRRSGAA
DPRMISLLQSSTTPRRSGAA

SEQ ID NO: 67554 - protein, 20 aa, Artificial Sequence
  Description of Artificial Sequence: Synthetic peptide
  Seed: DPRMCSLMQGSTLPRRSGAA
DPRMISLLQSSTVPRRSGAA

SEQ ID NO: 67555 - protein, 20 aa, Artificial Sequence
  Description of Artificial Sequence: Synthetic peptide
  Seed: DPRMCSLMQGSTLPRRSGAA
DPRMISLLQTSTAPRRSGAA

SEQ ID NO: 67556 - protein, 20 aa, Artificial Sequence
  Description of Artificial Sequence: Synthetic peptide
  Seed: DPRMCSLMQGSTLPRRSGAA
DPRMISLLQTSTIPRRSGAA

SEQ ID NO: 67557 - protein, 20 aa, Artificial Sequence
  Description of Artificial Sequence: Synthetic peptide
  Seed: DPRMCSLMQGSTLPRRSGAA
DPRMISLLQTSTLPRRSGAA

SEQ ID NO: 67558 - protein, 20 aa, Artificial Sequence
  Description of Artificial Sequence: Synthetic peptide
  Seed: DPRMCSLMQGSTLPRRSGAA
DPRMISLLQTSTTPRRSGAA

SEQ ID NO: 67559 - protein, 20 aa, Artificial Sequence
  Description of Artificial Sequence: Synthetic peptide
  Seed: DPRMCSLMQGSTLPRRSGAA
DPRMISLLQTSTVPRRSGAA

SEQ ID NO: 67560 - protein, 20 aa, Artificial Sequence
  Description of Artificial Sequence: Synthetic peptide
  Seed: DPRMCSLMQGSTLPRRSGAA
DPRMISLLQVSTAPRRSGAA

SEQ ID NO: 67561 - protein, 20 aa, Artificial Sequence
  Description of Artificial Sequence: Synthetic peptide
  Seed: DPRMCSLMQGSTLPRRSGAA
DPRMISLLQVSTVPRRSGAA

SEQ ID NO: 67562 - protein, 20 aa, Artificial Sequence
  Description of Artificial Sequence: Synthetic peptide
  Seed: DPRMCSLMQGSTLPRRSGAA
DPRMISLMQASTAPRRSGAA

SEQ ID NO: 67563 - protein, 20 aa, Artificial Sequence
  Description of Artificial Sequence: Synthetic peptide
  Seed: DPRMCSLMQGSTLPRRSGAA
DPRMISLMQASTCPRRSGAA

SEQ ID NO: 67564 - protein, 20 aa, Artificial Sequence
  Description of Artificial Sequence: Synthetic peptide
  Seed: DPRMCSLMQGSTLPRRSGAA
DPRMISLMQASTFPRRSGAA

SEQ ID NO: 67565 - protein, 20 aa, Artificial Sequence
  Description of Artificial Sequence: Synthetic peptide
  Seed: DPRMCSLMQGSTLPRRSGAA
DPRMISLMQASTGPRRSGAA

SEQ ID NO: 67566 - protein, 20 aa, Artificial Sequence
  Description of Artificial Sequence: Synthetic peptide
  Seed: DPRMCSLMQGSTLPRRSGAA
DPRMISLMQASTIPRRSGAA

SEQ ID NO: 67567 - protein, 20 aa, Artificial Sequence
  Description of Artificial Sequence: Synthetic peptide
  Seed: DPRMCSLMQGSTLPRRSGAA
DPRMISLMQASTLPRRSGAA

SEQ ID NO: 67568 - protein, 20 aa, Artificial Sequence
  Description of Artificial Sequence: Synthetic peptide
  Seed: DPRMCSLMQGSTLPRRSGAA
DPRMISLMQASTMPRRSGAA

SEQ ID NO: 67569 - protein, 20 aa, Artificial Sequence
  Description of Artificial Sequence: Synthetic peptide
  Seed: DPRMCSLMQGSTLPRRSGAA
DPRMISLMQASTSPRRSGAA

SEQ ID NO: 67570 - protein, 20 aa, Artificial Sequence
  Description of Artificial Sequence: Synthetic peptide
  Seed: DPRMCSLMQGSTLPRRSGAA
DPRMISLMQASTTPRRSGAA

SEQ ID NO: 67571 - protein, 20 aa, Artificial Sequence
  Description of Artificial Sequence: Synthetic peptide
  Seed: DPRMCSLMQGSTLPRRSGAA
DPRMISLMQASTVPRRSGAA

SEQ ID NO: 67572 - protein, 20 aa, Artificial Sequence
  Description of Artificial Sequence: Synthetic peptide
  Seed: DPRMCSLMQGSTLPRRSGAA
DPRMISLMQGSTAPRRSGAA

SEQ ID NO: 67573 - protein, 20 aa, Artificial Sequence
  Description of Artificial Sequence: Synthetic peptide
  Seed: DPRMCSLMQGSTLPRRSGAA
DPRMISLMQGSTGPRRSGAA

SEQ ID NO: 67574 - protein, 20 aa, Artificial Sequence
  Description of Artificial Sequence: Synthetic peptide
  Seed: DPRMCSLMQGSTLPRRSGAA
DPRMISLMQGSTIPRRSGAA

SEQ ID NO: 67575 - protein, 20 aa, Artificial Sequence
  Description of Artificial Sequence: Synthetic peptide
  Seed: DPRMCSLMQGSTLPRRSGAA
DPRMISLMQGSTLPRRSGAA

SEQ ID NO: 67576 - protein, 20 aa, Artificial Sequence
  Description of Artificial Sequence: Synthetic peptide
  Seed: DPRMCSLMQGSTLPRRSGAA
DPRMISLMQGSTMPRRSGAA

SEQ ID NO: 67577 - protein, 20 aa, Artificial Sequence
  Description of Artificial Sequence: Synthetic peptide
  Seed: DPRMCSLMQGSTLPRRSGAA
DPRMISLMQGSTSPRRSGAA

SEQ ID NO: 67578 - protein, 20 aa, Artificial Sequence
  Description of Artificial Sequence: Synthetic peptide
  Seed: DPRMCSLMQGSTLPRRSGAA
DPRMISLMQGSTTPRRSGAA

SEQ ID NO: 67579 - protein, 20 aa, Artificial Sequence
  Description of Artificial Sequence: Synthetic peptide
  Seed: DPRMCSLMQGSTLPRRSGAA
DPRMISLMQGSTVPRRSGAA

SEQ ID NO: 67580 - protein, 20 aa, Artificial Sequence
  Description of Artificial Sequence: Synthetic peptide
  Seed: DPRMCSLMQGSTLPRRSGAA
DPRMISLMQNSTAPRRSGAA

SEQ ID NO: 67581 - protein, 20 aa, Artificial Sequence
  Description of Artificial Sequence: Synthetic peptide
  Seed: DPRMCSLMQGSTLPRRSGAA
DPRMISLMQNSTIPRRSGAA

SEQ ID NO: 67582 - protein, 20 aa, Artificial Sequence
  Description of Artificial Sequence: Synthetic peptide
  Seed: DPRMCSLMQGSTLPRRSGAA
DPRMISLMQNSTLPRRSGAA

SEQ ID NO: 67583 - protein, 20 aa, Artificial Sequence
  Description of Artificial Sequence: Synthetic peptide
  Seed: DPRMCSLMQGSTLPRRSGAA
DPRMISLMQNSTVPRRSGAA

SEQ ID NO: 67584 - protein, 20 aa, Artificial Sequence
  Description of Artificial Sequence: Synthetic peptide
  Seed: DPRMCSLMQGSTLPRRSGAA
DPRMISLMQPSTAPRRSGAA

SEQ ID NO: 67585 - protein, 20 aa, Artificial Sequence
  Description of Artificial Sequence: Synthetic peptide
  Seed: DPRMCSLMQGSTLPRRSGAA
DPRMISLMQPSTIPRRSGAA

SEQ ID NO: 67586 - protein, 20 aa, Artificial Sequence
  Description of Artificial Sequence: Synthetic peptide
  Seed: DPRMCSLMQGSTLPRRSGAA
DPRMISLMQPSTLPRRSGAA

SEQ ID NO: 67587 - protein, 20 aa, Artificial Sequence
  Description of Artificial Sequence: Synthetic peptide
  Seed: DPRMCSLMQGSTLPRRSGAA
DPRMISLMQPSTMPRRSGAA

SEQ ID NO: 67588 - protein, 20 aa, Artificial Sequence
  Description of Artificial Sequence: Synthetic peptide
  Seed: DPRMCSLMQGSTLPRRSGAA
DPRMISLMQPSTSPRRSGAA

SEQ ID NO: 67589 - protein, 20 aa, Artificial Sequence
  Description of Artificial Sequence: Synthetic peptide
  Seed: DPRMCSLMQGSTLPRRSGAA
DPRMISLMQPSTTPRRSGAA

SEQ ID NO: 67590 - protein, 20 aa, Artificial Sequence
  Description of Artificial Sequence: Synthetic peptide
  Seed: DPRMCSLMQGSTLPRRSGAA
DPRMISLMQPSTVPRRSGAA

SEQ ID NO: 67591 - protein, 20 aa, Artificial Sequence
  Description of Artificial Sequence: Synthetic peptide
  Seed: DPRMCSLMQGSTLPRRSGAA
DPRMISLMQSSTAPRRSGAA

SEQ ID NO: 67592 - protein, 20 aa, Artificial Sequence
  Description of Artificial Sequence: Synthetic peptide
  Seed: DPRMCSLMQGSTLPRRSGAA
DPRMISLMQSSTIPRRSGAA

SEQ ID NO: 67593 - protein, 20 aa, Artificial Sequence
  Description of Artificial Sequence: Synthetic peptide
  Seed: DPRMCSLMQGSTLPRRSGAA
DPRMISLMQSSTLPRRSGAA

SEQ ID NO: 67594 - protein, 20 aa, Artificial Sequence
  Description of Artificial Sequence: Synthetic peptide
  Seed: DPRMCSLMQGSTLPRRSGAA
DPRMISLMQSSTMPRRSGAA

SEQ ID NO: 67595 - protein, 20 aa, Artificial Sequence
  Description of Artificial Sequence: Synthetic peptide
  Seed: DPRMCSLMQGSTLPRRSGAA
DPRMISLMQSSTSPRRSGAA

SEQ ID NO: 67596 - protein, 20 aa, Artificial Sequence
  Description of Artificial Sequence: Synthetic peptide
  Seed: DPRMCSLMQGSTLPRRSGAA
DPRMISLMQSSTTPRRSGAA

SEQ ID NO: 67597 - protein, 20 aa, Artificial Sequence
  Description of Artificial Sequence: Synthetic peptide
  Seed: DPRMCSLMQGSTLPRRSGAA
DPRMISLMQSSTVPRRSGAA

SEQ ID NO: 67598 - protein, 20 aa, Artificial Sequence
  Description of Artificial Sequence: Synthetic peptide
  Seed: DPRMCSLMQGSTLPRRSGAA
DPRMISLMQTSTAPRRSGAA

SEQ ID NO: 67599 - protein, 20 aa, Artificial Sequence
  Description of Artificial Sequence: Synthetic peptide
  Seed: DPRMCSLMQGSTLPRRSGAA
DPRMISLMQTSTIPRRSGAA

SEQ ID NO: 67600 - protein, 20 aa, Artificial Sequence
  Description of Artificial Sequence: Synthetic peptide
  Seed: DPRMCSLMQGSTLPRRSGAA
DPRMISLMQTSTLPRRSGAA

SEQ ID NO: 67601 - protein, 20 aa, Artificial Sequence
  Description of Artificial Sequence: Synthetic peptide
  Seed: DPRMCSLMQGSTLPRRSGAA
DPRMISLMQTSTTPRRSGAA

SEQ ID NO: 67602 - protein, 20 aa, Artificial Sequence
  Description of Artificial Sequence: Synthetic peptide
  Seed: DPRMCSLMQGSTLPRRSGAA
DPRMISLMQTSTVPRRSGAA

SEQ ID NO: 67603 - protein, 20 aa, Artificial Sequence
  Description of Artificial Sequence: Synthetic peptide
  Seed: DPRMCSLMQGSTLPRRSGAA
DPRMISLMQVSTAPRRSGAA

SEQ ID NO: 67604 - protein, 20 aa, Artificial Sequence
  Description of Artificial Sequence: Synthetic peptide
  Seed: DPRMCSLMQGSTLPRRSGAA
DPRMISLMQVSTIPRRSGAA

SEQ ID NO: 67605 - protein, 20 aa, Artificial Sequence
  Description of Artificial Sequence: Synthetic peptide
  Seed: DPRMCSLMQGSTLPRRSGAA
DPRMISLMQVSTLPRRSGAA

SEQ ID NO: 67606 - protein, 20 aa, Artificial Sequence
  Description of Artificial Sequence: Synthetic peptide
  Seed: DPRMCSLMQGSTLPRRSGAA
DPRMISLMQVSTVPRRSGAA

SEQ ID NO: 67607 - protein, 20 aa, Artificial Sequence
  Description of Artificial Sequence: Synthetic peptide
  Seed: DPRMCSLMQGSTLPRRSGAA
DPRMISLQQASTAPRRSGAA

SEQ ID NO: 67608 - protein, 20 aa, Artificial Sequence
  Description of Artificial Sequence: Synthetic peptide
  Seed: DPRMCSLMQGSTLPRRSGAA
DPRMISLQQASTIPRRSGAA

SEQ ID NO: 67609 - protein, 20 aa, Artificial Sequence
  Description of Artificial Sequence: Synthetic peptide
  Seed: DPRMCSLMQGSTLPRRSGAA
DPRMISLQQASTLPRRSGAA

SEQ ID NO: 67610 - protein, 20 aa, Artificial Sequence
  Description of Artificial Sequence: Synthetic peptide
  Seed: DPRMCSLMQGSTLPRRSGAA
DPRMISLQQASTMPRRSGAA

SEQ ID NO: 67611 - protein, 20 aa, Artificial Sequence
  Description of Artificial Sequence: Synthetic peptide
  Seed: DPRMCSLMQGSTLPRRSGAA
DPRMISLQQASTVPRRSGAA

SEQ ID NO: 67612 - protein, 20 aa, Artificial Sequence
  Description of Artificial Sequence: Synthetic peptide
  Seed: DPRMCSLMQGSTLPRRSGAA
DPRMISLQQGSTAPRRSGAA

SEQ ID NO: 67613 - protein, 20 aa, Artificial Sequence
  Description of Artificial Sequence: Synthetic peptide
  Seed: DPRMCSLMQGSTLPRRSGAA
DPRMISLQQGSTIPRRSGAA

SEQ ID NO: 67614 - protein, 20 aa, Artificial Sequence
  Description of Artificial Sequence: Synthetic peptide
  Seed: DPRMCSLMQGSTLPRRSGAA
DPRMISLQQGSTLPRRSGAA

SEQ ID NO: 67615 - protein, 20 aa, Artificial Sequence
  Description of Artificial Sequence: Synthetic peptide
  Seed: DPRMCSLMQGSTLPRRSGAA
DPRMISLQQGSTVPRRSGAA

SEQ ID NO: 67616 - protein, 20 aa, Artificial Sequence
  Description of Artificial Sequence: Synthetic peptide
  Seed: DPRMCSLMQGSTLPRRSGAA
DPRMISLQQSSTIPRRSGAA

SEQ ID NO: 67617 - protein, 20 aa, Artificial Sequence
  Description of Artificial Sequence: Synthetic peptide
  Seed: DPRMCSLMQGSTLPRRSGAA
DPRMISLQQSSTLPRRSGAA

SEQ ID NO: 67618 - protein, 20 aa, Artificial Sequence
  Description of Artificial Sequence: Synthetic peptide
  Seed: DPRMCSLMQGSTLPRRSGAA
DPRMISLQQSSTVPRRSGAA

SEQ ID NO: 67619 - protein, 20 aa, Artificial Sequence
  Description of Artificial Sequence: Synthetic peptide
  Seed: DPRMCSLMQGSTLPRRSGAA
DPRMISLSQASTIPRRSGAA

SEQ ID NO: 67620 - protein, 20 aa, Artificial Sequence
  Description of Artificial Sequence: Synthetic peptide
  Seed: DPRMCSLMQGSTLPRRSGAA
DPRMISLSQASTLPRRSGAA

SEQ ID NO: 67621 - protein, 20 aa, Artificial Sequence
  Description of Artificial Sequence: Synthetic peptide
  Seed: DPRMCSLMQGSTLPRRSGAA
DPRMISLSQASTVPRRSGAA

SEQ ID NO: 67622 - protein, 20 aa, Artificial Sequence
  Description of Artificial Sequence: Synthetic peptide
  Seed: DPRMCSLMQGSTLPRRSGAA
DPRMISLVQASTAPRRSGAA

SEQ ID NO: 67623 - protein, 20 aa, Artificial Sequence
  Description of Artificial Sequence: Synthetic peptide
  Seed: DPRMCSLMQGSTLPRRSGAA
DPRMISLVQASTIPRRSGAA

SEQ ID NO: 67624 - protein, 20 aa, Artificial Sequence
  Description of Artificial Sequence: Synthetic peptide
  Seed: DPRMCSLMQGSTLPRRSGAA
DPRMISLVQASTLPRRSGAA

SEQ ID NO: 67625 - protein, 20 aa, Artificial Sequence
  Description of Artificial Sequence: Synthetic peptide
  Seed: DPRMCSLMQGSTLPRRSGAA
DPRMISLVQASTVPRRSGAA

SEQ ID NO: 67626 - protein, 20 aa, Artificial Sequence
  Description of Artificial Sequence: Synthetic peptide
  Seed: DPRMCSLMQGSTLPRRSGAA
DPRMISLVQGSTAPRRSGAA

SEQ ID NO: 67627 - protein, 20 aa, Artificial Sequence
  Description of Artificial Sequence: Synthetic peptide
  Seed: DPRMCSLMQGSTLPRRSGAA
DPRMISLVQGSTIPRRSGAA

SEQ ID NO: 67628 - protein, 20 aa, Artificial Sequence
  Description of Artificial Sequence: Synthetic peptide
  Seed: DPRMCSLMQGSTLPRRSGAA
DPRMISLVQGSTLPRRSGAA

SEQ ID NO: 67629 - protein, 20 aa, Artificial Sequence
  Description of Artificial Sequence: Synthetic peptide
  Seed: DPRMCSLMQGSTLPRRSGAA
DPRMISLVQGSTVPRRSGAA

SEQ ID NO: 67630 - protein, 20 aa, Artificial Sequence
  Description of Artificial Sequence: Synthetic peptide
  Seed: DPRMCSLMQGSTLPRRSGAA
DPRMISLVQSSTVPRRSGAA

SEQ ID NO: 67631 - protein, 20 aa, Artificial Sequence
  Description of Artificial Sequence: Synthetic peptide
  Seed: DPRMCSLMQGSTLPRRSGAA
DPRMLSLAQASTAPRRSGAA

SEQ ID NO: 67632 - protein, 20 aa, Artificial Sequence
  Description of Artificial Sequence: Synthetic peptide
  Seed: DPRMCSLMQGSTLPRRSGAA
DPRMLSLAQASTIPRRSGAA

SEQ ID NO: 67633 - protein, 20 aa, Artificial Sequence
  Description of Artificial Sequence: Synthetic peptide
  Seed: DPRMCSLMQGSTLPRRSGAA
DPRMLSLAQASTLPRRSGAA

SEQ ID NO: 67634 - protein, 20 aa, Artificial Sequence
  Description of Artificial Sequence: Synthetic peptide
  Seed: DPRMCSLMQGSTLPRRSGAA
DPRMLSLAQASTMPRRSGAA

SEQ ID NO: 67635 - protein, 20 aa, Artificial Sequence
  Description of Artificial Sequence: Synthetic peptide
  Seed: DPRMCSLMQGSTLPRRSGAA
DPRMLSLAQASTVPRRSGAA

SEQ ID NO: 67636 - protein, 20 aa, Artificial Sequence
  Description of Artificial Sequence: Synthetic peptide
  Seed: DPRMCSLMQGSTLPRRSGAA
DPRMLSLAQGSTIPRRSGAA

SEQ ID NO: 67637 - protein, 20 aa, Artificial Sequence
  Description of Artificial Sequence: Synthetic peptide
  Seed: DPRMCSLMQGSTLPRRSGAA
DPRMLSLAQGSTLPRRSGAA

SEQ ID NO: 67638 - protein, 20 aa, Artificial Sequence
  Description of Artificial Sequence: Synthetic peptide
  Seed: DPRMCSLMQGSTLPRRSGAA
DPRMLSLAQGSTVPRRSGAA

SEQ ID NO: 67639 - protein, 20 aa, Artificial Sequence
  Description of Artificial Sequence: Synthetic peptide
  Seed: DPRMCSLMQGSTLPRRSGAA
DPRMLSLAQSSTVPRRSGAA

SEQ ID NO: 67640 - protein, 20 aa, Artificial Sequence
  Description of Artificial Sequence: Synthetic peptide
  Seed: DPRMCSLMQGSTLPRRSGAA
DPRMLSLIQASTAPRRSGAA

SEQ ID NO: 67641 - protein, 20 aa, Artificial Sequence
  Description of Artificial Sequence: Synthetic peptide
  Seed: DPRMCSLMQGSTLPRRSGAA
DPRMLSLIQASTIPRRSGAA

SEQ ID NO: 67642 - protein, 20 aa, Artificial Sequence
  Description of Artificial Sequence: Synthetic peptide
  Seed: DPRMCSLMQGSTLPRRSGAA
DPRMLSLIQASTLPRRSGAA

SEQ ID NO: 67643 - protein, 20 aa, Artificial Sequence
  Description of Artificial Sequence: Synthetic peptide
  Seed: DPRMCSLMQGSTLPRRSGAA
DPRMLSLIQASTMPRRSGAA

SEQ ID NO: 67644 - protein, 20 aa, Artificial Sequence
  Description of Artificial Sequence: Synthetic peptide
  Seed: DPRMCSLMQGSTLPRRSGAA
DPRMLSLIQASTTPRRSGAA

SEQ ID NO: 67645 - protein, 20 aa, Artificial Sequence
  Description of Artificial Sequence: Synthetic peptide
  Seed: DPRMCSLMQGSTLPRRSGAA
DPRMLSLIQASTVPRRSGAA

SEQ ID NO: 67646 - protein, 20 aa, Artificial Sequence
  Description of Artificial Sequence: Synthetic peptide
  Seed: DPRMCSLMQGSTLPRRSGAA
DPRMLSLIQGSTAPRRSGAA

SEQ ID NO: 67647 - protein, 20 aa, Artificial Sequence
  Description of Artificial Sequence: Synthetic peptide
  Seed: DPRMCSLMQGSTLPRRSGAA
DPRMLSLIQGSTIPRRSGAA

SEQ ID NO: 67648 - protein, 20 aa, Artificial Sequence
  Description of Artificial Sequence: Synthetic peptide
  Seed: DPRMCSLMQGSTLPRRSGAA
DPRMLSLIQGSTLPRRSGAA

SEQ ID NO: 67649 - protein, 20 aa, Artificial Sequence
  Description of Artificial Sequence: Synthetic peptide
  Seed: DPRMCSLMQGSTLPRRSGAA
DPRMLSLIQGSTVPRRSGAA

SEQ ID NO: 67650 - protein, 20 aa, Artificial Sequence
  Description of Artificial Sequence: Synthetic peptide
  Seed: DPRMCSLMQGSTLPRRSGAA
DPRMLSLIQPSTVPRRSGAA

SEQ ID NO: 67651 - protein, 20 aa, Artificial Sequence
  Description of Artificial Sequence: Synthetic peptide
  Seed: DPRMCSLMQGSTLPRRSGAA
DPRMLSLIQSSTAPRRSGAA

SEQ ID NO: 67652 - protein, 20 aa, Artificial Sequence
  Description of Artificial Sequence: Synthetic peptide
  Seed: DPRMCSLMQGSTLPRRSGAA
DPRMLSLIQSSTIPRRSGAA

SEQ ID NO: 67653 - protein, 20 aa, Artificial Sequence
  Description of Artificial Sequence: Synthetic peptide
  Seed: DPRMCSLMQGSTLPRRSGAA
DPRMLSLIQSSTLPRRSGAA

SEQ ID NO: 67654 - protein, 20 aa, Artificial Sequence
  Description of Artificial Sequence: Synthetic peptide
  Seed: DPRMCSLMQGSTLPRRSGAA
DPRMLSLIQSSTVPRRSGAA

SEQ ID NO: 67655 - protein, 20 aa, Artificial Sequence
  Description of Artificial Sequence: Synthetic peptide
  Seed: DPRMCSLMQGSTLPRRSGAA
DPRMLSLLQASTAPRRSGAA

SEQ ID NO: 67656 - protein, 20 aa, Artificial Sequence
  Description of Artificial Sequence: Synthetic peptide
  Seed: DPRMCSLMQGSTLPRRSGAA
DPRMLSLLQASTGPRRSGAA

SEQ ID NO: 67657 - protein, 20 aa, Artificial Sequence
  Description of Artificial Sequence: Synthetic peptide
  Seed: DPRMCSLMQGSTLPRRSGAA
DPRMLSLLQASTIPRRSGAA

SEQ ID NO: 67658 - protein, 20 aa, Artificial Sequence
  Description of Artificial Sequence: Synthetic peptide
  Seed: DPRMCSLMQGSTLPRRSGAA
DPRMLSLLQASTLPRRSGAA

SEQ ID NO: 67659 - protein, 20 aa, Artificial Sequence
  Description of Artificial Sequence: Synthetic peptide
  Seed: DPRMCSLMQGSTLPRRSGAA
DPRMLSLLQASTMPRRSGAA

SEQ ID NO: 67660 - protein, 20 aa, Artificial Sequence
  Description of Artificial Sequence: Synthetic peptide
  Seed: DPRMCSLMQGSTLPRRSGAA
DPRMLSLLQASTSPRRSGAA

SEQ ID NO: 67661 - protein, 20 aa, Artificial Sequence
  Description of Artificial Sequence: Synthetic peptide
  Seed: DPRMCSLMQGSTLPRRSGAA
DPRMLSLLQASTTPRRSGAA

SEQ ID NO: 67662 - protein, 20 aa, Artificial Sequence
  Description of Artificial Sequence: Synthetic peptide
  Seed: DPRMCSLMQGSTLPRRSGAA
DPRMLSLLQASTVPRRSGAA

SEQ ID NO: 67663 - protein, 20 aa, Artificial Sequence
  Description of Artificial Sequence: Synthetic peptide
  Seed: DPRMCSLMQGSTLPRRSGAA
DPRMLSLLQGSTAPRRSGAA

SEQ ID NO: 67664 - protein, 20 aa, Artificial Sequence
  Description of Artificial Sequence: Synthetic peptide
  Seed: DPRMCSLMQGSTLPRRSGAA
DPRMLSLLQGSTGPRRSGAA

SEQ ID NO: 67665 - protein, 20 aa, Artificial Sequence
  Description of Artificial Sequence: Synthetic peptide
  Seed: DPRMCSLMQGSTLPRRSGAA
DPRMLSLLQGSTIPRRSGAA

SEQ ID NO: 67666 - protein, 20 aa, Artificial Sequence
  Description of Artificial Sequence: Synthetic peptide
  Seed: DPRMCSLMQGSTLPRRSGAA
DPRMLSLLQGSTLPRRSGAA

SEQ ID NO: 67667 - protein, 20 aa, Artificial Sequence
  Description of Artificial Sequence: Synthetic peptide
  Seed: DPRMCSLMQGSTLPRRSGAA
DPRMLSLLQGSTMPRRSGAA

SEQ ID NO: 67668 - protein, 20 aa, Artificial Sequence
  Description of Artificial Sequence: Synthetic peptide
  Seed: DPRMCSLMQGSTLPRRSGAA
DPRMLSLLQGSTSPRRSGAA

SEQ ID NO: 67669 - protein, 20 aa, Artificial Sequence
  Description of Artificial Sequence: Synthetic peptide
  Seed: DPRMCSLMQGSTLPRRSGAA
DPRMLSLLQGSTTPRRSGAA

SEQ ID NO: 67670 - protein, 20 aa, Artificial Sequence
  Description of Artificial Sequence: Synthetic peptide
  Seed: DPRMCSLMQGSTLPRRSGAA
DPRMLSLLQGSTVPRRSGAA

SEQ ID NO: 67671 - protein, 20 aa, Artificial Sequence
  Description of Artificial Sequence: Synthetic peptide
  Seed: DPRMCSLMQGSTLPRRSGAA
DPRMLSLLQNSTAPRRSGAA

SEQ ID NO: 67672 - protein, 20 aa, Artificial Sequence
  Description of Artificial Sequence: Synthetic peptide
  Seed: DPRMCSLMQGSTLPRRSGAA
DPRMLSLLQNSTIPRRSGAA

SEQ ID NO: 67673 - protein, 20 aa, Artificial Sequence
  Description of Artificial Sequence: Synthetic peptide
  Seed: DPRMCSLMQGSTLPRRSGAA
DPRMLSLLQNSTLPRRSGAA

SEQ ID NO: 67674 - protein, 20 aa, Artificial Sequence
  Description of Artificial Sequence: Synthetic peptide
  Seed: DPRMCSLMQGSTLPRRSGAA
DPRMLSLLQNSTVPRRSGAA

SEQ ID NO: 67675 - protein, 20 aa, Artificial Sequence
  Description of Artificial Sequence: Synthetic peptide
  Seed: DPRMCSLMQGSTLPRRSGAA
DPRMLSLLQPSTAPRRSGAA

SEQ ID NO: 67676 - protein, 20 aa, Artificial Sequence
  Description of Artificial Sequence: Synthetic peptide
  Seed: DPRMCSLMQGSTLPRRSGAA
DPRMLSLLQPSTIPRRSGAA

SEQ ID NO: 67677 - protein, 20 aa, Artificial Sequence
  Description of Artificial Sequence: Synthetic peptide
  Seed: DPRMCSLMQGSTLPRRSGAA
DPRMLSLLQPSTLPRRSGAA

SEQ ID NO: 67678 - protein, 20 aa, Artificial Sequence
  Description of Artificial Sequence: Synthetic peptide
  Seed: DPRMCSLMQGSTLPRRSGAA
DPRMLSLLQPSTMPRRSGAA

SEQ ID NO: 67679 - protein, 20 aa, Artificial Sequence
  Description of Artificial Sequence: Synthetic peptide
  Seed: DPRMCSLMQGSTLPRRSGAA
DPRMLSLLQPSTTPRRSGAA

SEQ ID NO: 67680 - protein, 20 aa, Artificial Sequence
  Description of Artificial Sequence: Synthetic peptide
  Seed: DPRMCSLMQGSTLPRRSGAA
DPRMLSLLQPSTVPRRSGAA

SEQ ID NO: 67681 - protein, 20 aa, Artificial Sequence
  Description of Artificial Sequence: Synthetic peptide
  Seed: DPRMCSLMQGSTLPRRSGAA
DPRMLSLLQSSTAPRRSGAA

SEQ ID NO: 67682 - protein, 20 aa, Artificial Sequence
  Description of Artificial Sequence: Synthetic peptide
  Seed: DPRMCSLMQGSTLPRRSGAA
DPRMLSLLQSSTIPRRSGAA

SEQ ID NO: 67683 - protein, 20 aa, Artificial Sequence
  Description of Artificial Sequence: Synthetic peptide
  Seed: DPRMCSLMQGSTLPRRSGAA
DPRMLSLLQSSTLPRRSGAA

SEQ ID NO: 67684 - protein, 20 aa, Artificial Sequence
  Description of Artificial Sequence: Synthetic peptide
  Seed: DPRMCSLMQGSTLPRRSGAA
DPRMLSLLQSSTMPRRSGAA

SEQ ID NO: 67685 - protein, 20 aa, Artificial Sequence
  Description of Artificial Sequence: Synthetic peptide
  Seed: DPRMCSLMQGSTLPRRSGAA
DPRMLSLLQSSTSPRRSGAA

SEQ ID NO: 67686 - protein, 20 aa, Artificial Sequence
  Description of Artificial Sequence: Synthetic peptide
  Seed: DPRMCSLMQGSTLPRRSGAA
DPRMLSLLQSSTTPRRSGAA

SEQ ID NO: 67687 - protein, 20 aa, Artificial Sequence
  Description of Artificial Sequence: Synthetic peptide
  Seed: DPRMCSLMQGSTLPRRSGAA
DPRMLSLLQSSTVPRRSGAA

SEQ ID NO: 67688 - protein, 20 aa, Artificial Sequence
  Description of Artificial Sequence: Synthetic peptide
  Seed: DPRMCSLMQGSTLPRRSGAA
DPRMLSLLQTSTAPRRSGAA

SEQ ID NO: 67689 - protein, 20 aa, Artificial Sequence
  Description of Artificial Sequence: Synthetic peptide
  Seed: DPRMCSLMQGSTLPRRSGAA
DPRMLSLLQTSTIPRRSGAA

SEQ ID NO: 67690 - protein, 20 aa, Artificial Sequence
  Description of Artificial Sequence: Synthetic peptide
  Seed: DPRMCSLMQGSTLPRRSGAA
DPRMLSLLQTSTLPRRSGAA

SEQ ID NO: 67691 - protein, 20 aa, Artificial Sequence
  Description of Artificial Sequence: Synthetic peptide
  Seed: DPRMCSLMQGSTLPRRSGAA
DPRMLSLLQTSTVPRRSGAA

SEQ ID NO: 67692 - protein, 20 aa, Artificial Sequence
  Description of Artificial Sequence: Synthetic peptide
  Seed: DPRMCSLMQGSTLPRRSGAA
DPRMLSLMQASTAPRRSGAA

SEQ ID NO: 67693 - protein, 20 aa, Artificial Sequence
  Description of Artificial Sequence: Synthetic peptide
  Seed: DPRMCSLMQGSTLPRRSGAA
DPRMLSLMQASTCPRRSGAA

SEQ ID NO: 67694 - protein, 20 aa, Artificial Sequence
  Description of Artificial Sequence: Synthetic peptide
  Seed: DPRMCSLMQGSTLPRRSGAA
DPRMLSLMQASTGPRRSGAA

SEQ ID NO: 67695 - protein, 20 aa, Artificial Sequence
  Description of Artificial Sequence: Synthetic peptide
  Seed: DPRMCSLMQGSTLPRRSGAA
DPRMLSLMQASTIPRRSGAA

SEQ ID NO: 67696 - protein, 20 aa, Artificial Sequence
  Description of Artificial Sequence: Synthetic peptide
  Seed: DPRMCSLMQGSTLPRRSGAA
DPRMLSLMQASTLPRRSGAA

SEQ ID NO: 67697 - protein, 20 aa, Artificial Sequence
  Description of Artificial Sequence: Synthetic peptide
  Seed: DPRMCSLMQGSTLPRRSGAA
DPRMLSLMQASTMPRRSGAA

SEQ ID NO: 67698 - protein, 20 aa, Artificial Sequence
  Description of Artificial Sequence: Synthetic peptide
  Seed: DPRMCSLMQGSTLPRRSGAA
DPRMLSLMQASTSPRRSGAA

SEQ ID NO: 67699 - protein, 20 aa, Artificial Sequence
  Description of Artificial Sequence: Synthetic peptide
  Seed: DPRMCSLMQGSTLPRRSGAA
DPRMLSLMQASTTPRRSGAA

SEQ ID NO: 67700 - protein, 20 aa, Artificial Sequence
  Description of Artificial Sequence: Synthetic peptide
  Seed: DPRMCSLMQGSTLPRRSGAA
DPRMLSLMQASTVPRRSGAA

SEQ ID NO: 67701 - protein, 20 aa, Artificial Sequence
  Description of Artificial Sequence: Synthetic peptide
  Seed: DPRMCSLMQGSTLPRRSGAA
DPRMLSLMQGSTAPRRSGAA

SEQ ID NO: 67702 - protein, 20 aa, Artificial Sequence
  Description of Artificial Sequence: Synthetic peptide
  Seed: DPRMCSLMQGSTLPRRSGAA
DPRMLSLMQGSTGPRRSGAA

SEQ ID NO: 67703 - protein, 20 aa, Artificial Sequence
  Description of Artificial Sequence: Synthetic peptide
  Seed: DPRMCSLMQGSTLPRRSGAA
DPRMLSLMQGSTIPRRSGAA

SEQ ID NO: 67704 - protein, 20 aa, Artificial Sequence
  Description of Artificial Sequence: Synthetic peptide
  Seed: DPRMCSLMQGSTLPRRSGAA
DPRMLSLMQGSTLPRRSGAA

SEQ ID NO: 67705 - protein, 20 aa, Artificial Sequence
  Description of Artificial Sequence: Synthetic peptide
  Seed: DPRMCSLMQGSTLPRRSGAA
DPRMLSLMQGSTMPRRSGAA

SEQ ID NO: 67706 - protein, 20 aa, Artificial Sequence
  Description of Artificial Sequence: Synthetic peptide
  Seed: DPRMCSLMQGSTLPRRSGAA
DPRMLSLMQGSTSPRRSGAA

SEQ ID NO: 67707 - protein, 20 aa, Artificial Sequence
  Description of Artificial Sequence: Synthetic peptide
  Seed: DPRMCSLMQGSTLPRRSGAA
DPRMLSLMQGSTTPRRSGAA

SEQ ID NO: 67708 - protein, 20 aa, Artificial Sequence
  Description of Artificial Sequence: Synthetic peptide
  Seed: DPRMCSLMQGSTLPRRSGAA
DPRMLSLMQGSTVPRRSGAA

SEQ ID NO: 67709 - protein, 20 aa, Artificial Sequence
  Description of Artificial Sequence: Synthetic peptide
  Seed: DPRMCSLMQGSTLPRRSGAA
DPRMLSLMQNSTAPRRSGAA

SEQ ID NO: 67710 - protein, 20 aa, Artificial Sequence
  Description of Artificial Sequence: Synthetic peptide
  Seed: DPRMCSLMQGSTLPRRSGAA
DPRMLSLMQNSTIPRRSGAA

SEQ ID NO: 67711 - protein, 20 aa, Artificial Sequence
  Description of Artificial Sequence: Synthetic peptide
  Seed: DPRMCSLMQGSTLPRRSGAA
DPRMLSLMQNSTLPRRSGAA

SEQ ID NO: 67712 - protein, 20 aa, Artificial Sequence
  Description of Artificial Sequence: Synthetic peptide
  Seed: DPRMCSLMQGSTLPRRSGAA
DPRMLSLMQNSTVPRRSGAA

SEQ ID NO: 67713 - protein, 20 aa, Artificial Sequence
  Description of Artificial Sequence: Synthetic peptide
  Seed: DPRMCSLMQGSTLPRRSGAA
DPRMLSLMQPSTAPRRSGAA

SEQ ID NO: 67714 - protein, 20 aa, Artificial Sequence
  Description of Artificial Sequence: Synthetic peptide
  Seed: DPRMCSLMQGSTLPRRSGAA
DPRMLSLMQPSTIPRRSGAA

SEQ ID NO: 67715 - protein, 20 aa, Artificial Sequence
  Description of Artificial Sequence: Synthetic peptide
  Seed: DPRMCSLMQGSTLPRRSGAA
DPRMLSLMQPSTLPRRSGAA

SEQ ID NO: 67716 - protein, 20 aa, Artificial Sequence
  Description of Artificial Sequence: Synthetic peptide
  Seed: DPRMCSLMQGSTLPRRSGAA
DPRMLSLMQPSTMPRRSGAA

SEQ ID NO: 67717 - protein, 20 aa, Artificial Sequence
  Description of Artificial Sequence: Synthetic peptide
  Seed: DPRMCSLMQGSTLPRRSGAA
DPRMLSLMQPSTTPRRSGAA

SEQ ID NO: 67718 - protein, 20 aa, Artificial Sequence
  Description of Artificial Sequence: Synthetic peptide
  Seed: DPRMCSLMQGSTLPRRSGAA
DPRMLSLMQPSTVPRRSGAA

SEQ ID NO: 67719 - protein, 20 aa, Artificial Sequence
  Description of Artificial Sequence: Synthetic peptide
  Seed: DPRMCSLMQGSTLPRRSGAA
DPRMLSLMQSSTAPRRSGAA

SEQ ID NO: 67720 - protein, 20 aa, Artificial Sequence
  Description of Artificial Sequence: Synthetic peptide
  Seed: DPRMCSLMQGSTLPRRSGAA
DPRMLSLMQSSTIPRRSGAA

SEQ ID NO: 67721 - protein, 20 aa, Artificial Sequence
  Description of Artificial Sequence: Synthetic peptide
  Seed: DPRMCSLMQGSTLPRRSGAA
DPRMLSLMQSSTLPRRSGAA

SEQ ID NO: 67722 - protein, 20 aa, Artificial Sequence
  Description of Artificial Sequence: Synthetic peptide
  Seed: DPRMCSLMQGSTLPRRSGAA
DPRMLSLMQSSTMPRRSGAA

SEQ ID NO: 67723 - protein, 20 aa, Artificial Sequence
  Description of Artificial Sequence: Synthetic peptide
  Seed: DPRMCSLMQGSTLPRRSGAA
DPRMLSLMQSSTSPRRSGAA

SEQ ID NO: 67724 - protein, 20 aa, Artificial Sequence
  Description of Artificial Sequence: Synthetic peptide
  Seed: DPRMCSLMQGSTLPRRSGAA
DPRMLSLMQSSTTPRRSGAA

SEQ ID NO: 67725 - protein, 20 aa, Artificial Sequence
  Description of Artificial Sequence: Synthetic peptide
  Seed: DPRMCSLMQGSTLPRRSGAA
DPRMLSLMQSSTVPRRSGAA

SEQ ID NO: 67726 - protein, 20 aa, Artificial Sequence
  Description of Artificial Sequence: Synthetic peptide
  Seed: DPRMCSLMQGSTLPRRSGAA
DPRMLSLMQTSTAPRRSGAA

SEQ ID NO: 67727 - protein, 20 aa, Artificial Sequence
  Description of Artificial Sequence: Synthetic peptide
  Seed: DPRMCSLMQGSTLPRRSGAA
DPRMLSLMQTSTIPRRSGAA

SEQ ID NO: 67728 - protein, 20 aa, Artificial Sequence
  Description of Artificial Sequence: Synthetic peptide
  Seed: DPRMCSLMQGSTLPRRSGAA
DPRMLSLMQTSTLPRRSGAA

SEQ ID NO: 67729 - protein, 20 aa, Artificial Sequence
  Description of Artificial Sequence: Synthetic peptide
  Seed: DPRMCSLMQGSTLPRRSGAA
DPRMLSLMQTSTVPRRSGAA

SEQ ID NO: 67730 - protein, 20 aa, Artificial Sequence
  Description of Artificial Sequence: Synthetic peptide
  Seed: DPRMCSLMQGSTLPRRSGAA
DPRMLSLMQVSTAPRRSGAA

SEQ ID NO: 67731 - protein, 20 aa, Artificial Sequence
  Description of Artificial Sequence: Synthetic peptide
  Seed: DPRMCSLMQGSTLPRRSGAA
DPRMLSLMQVSTVPRRSGAA

SEQ ID NO: 67732 - protein, 20 aa, Artificial Sequence
  Description of Artificial Sequence: Synthetic peptide
  Seed: DPRMCSLMQGSTLPRRSGAA
DPRMLSLQQASTAPRRSGAA

SEQ ID NO: 67733 - protein, 20 aa, Artificial Sequence
  Description of Artificial Sequence: Synthetic peptide
  Seed: DPRMCSLMQGSTLPRRSGAA
DPRMLSLQQASTIPRRSGAA

SEQ ID NO: 67734 - protein, 20 aa, Artificial Sequence
  Description of Artificial Sequence: Synthetic peptide
  Seed: DPRMCSLMQGSTLPRRSGAA
DPRMLSLQQASTLPRRSGAA

SEQ ID NO: 67735 - protein, 20 aa, Artificial Sequence
  Description of Artificial Sequence: Synthetic peptide
  Seed: DPRMCSLMQGSTLPRRSGAA
DPRMLSLQQASTVPRRSGAA

SEQ ID NO: 67736 - protein, 20 aa, Artificial Sequence
  Description of Artificial Sequence: Synthetic peptide
  Seed: DPRMCSLMQGSTLPRRSGAA
DPRMLSLQQGSTIPRRSGAA

SEQ ID NO: 67737 - protein, 20 aa, Artificial Sequence
  Description of Artificial Sequence: Synthetic peptide
  Seed: DPRMCSLMQGSTLPRRSGAA
DPRMLSLQQGSTLPRRSGAA

SEQ ID NO: 67738 - protein, 20 aa, Artificial Sequence
  Description of Artificial Sequence: Synthetic peptide
  Seed: DPRMCSLMQGSTLPRRSGAA
DPRMLSLQQGSTVPRRSGAA

SEQ ID NO: 67739 - protein, 20 aa, Artificial Sequence
  Description of Artificial Sequence: Synthetic peptide
  Seed: DPRMCSLMQGSTLPRRSGAA
DPRMLSLVQASTAPRRSGAA

SEQ ID NO: 67740 - protein, 20 aa, Artificial Sequence
  Description of Artificial Sequence: Synthetic peptide
  Seed: DPRMCSLMQGSTLPRRSGAA
DPRMLSLVQASTIPRRSGAA

SEQ ID NO: 67741 - protein, 20 aa, Artificial Sequence
  Description of Artificial Sequence: Synthetic peptide
  Seed: DPRMCSLMQGSTLPRRSGAA
DPRMLSLVQASTLPRRSGAA

SEQ ID NO: 67742 - protein, 20 aa, Artificial Sequence
  Description of Artificial Sequence: Synthetic peptide
  Seed: DPRMCSLMQGSTLPRRSGAA
DPRMLSLVQASTVPRRSGAA

SEQ ID NO: 67743 - protein, 20 aa, Artificial Sequence
  Description of Artificial Sequence: Synthetic peptide
  Seed: DPRMCSLMQGSTLPRRSGAA
DPRMLSLVQGSTVPRRSGAA

SEQ ID NO: 67744 - protein, 20 aa, Artificial Sequence
  Description of Artificial Sequence: Synthetic peptide
  Seed: DPRMCSLMQGSTLPRRSGAA
DPRMMSLAQASTIPRRSGAA

SEQ ID NO: 67745 - protein, 20 aa, Artificial Sequence
  Description of Artificial Sequence: Synthetic peptide
  Seed: DPRMCSLMQGSTLPRRSGAA
DPRMMSLAQASTLPRRSGAA

SEQ ID NO: 67746 - protein, 20 aa, Artificial Sequence
  Description of Artificial Sequence: Synthetic peptide
  Seed: DPRMCSLMQGSTLPRRSGAA
DPRMMSLAQASTVPRRSGAA

SEQ ID NO: 67747 - protein, 20 aa, Artificial Sequence
  Description of Artificial Sequence: Synthetic peptide
  Seed: DPRMCSLMQGSTLPRRSGAA
DPRMMSLIQASTAPRRSGAA

SEQ ID NO: 67748 - protein, 20 aa, Artificial Sequence
  Description of Artificial Sequence: Synthetic peptide
  Seed: DPRMCSLMQGSTLPRRSGAA
DPRMMSLIQASTIPRRSGAA

SEQ ID NO: 67749 - protein, 20 aa, Artificial Sequence
  Description of Artificial Sequence: Synthetic peptide
  Seed: DPRMCSLMQGSTLPRRSGAA
DPRMMSLIQASTLPRRSGAA

SEQ ID NO: 67750 - protein, 20 aa, Artificial Sequence
  Description of Artificial Sequence: Synthetic peptide
  Seed: DPRMCSLMQGSTLPRRSGAA
DPRMMSLIQASTVPRRSGAA

SEQ ID NO: 67751 - protein, 20 aa, Artificial Sequence
  Description of Artificial Sequence: Synthetic peptide
  Seed: DPRMCSLMQGSTLPRRSGAA
DPRMMSLIQGSTVPRRSGAA

SEQ ID NO: 67752 - protein, 20 aa, Artificial Sequence
  Description of Artificial Sequence: Synthetic peptide
  Seed: DPRMCSLMQGSTLPRRSGAA
DPRMMSLLQASTAPRRSGAA

SEQ ID NO: 67753 - protein, 20 aa, Artificial Sequence
  Description of Artificial Sequence: Synthetic peptide
  Seed: DPRMCSLMQGSTLPRRSGAA
DPRMMSLLQASTIPRRSGAA

SEQ ID NO: 67754 - protein, 20 aa, Artificial Sequence
  Description of Artificial Sequence: Synthetic peptide
  Seed: DPRMCSLMQGSTLPRRSGAA
DPRMMSLLQASTLPRRSGAA

SEQ ID NO: 67755 - protein, 20 aa, Artificial Sequence
  Description of Artificial Sequence: Synthetic peptide
  Seed: DPRMCSLMQGSTLPRRSGAA
DPRMMSLLQASTMPRRSGAA

SEQ ID NO: 67756 - protein, 20 aa, Artificial Sequence
  Description of Artificial Sequence: Synthetic peptide
  Seed: DPRMCSLMQGSTLPRRSGAA
DPRMMSLLQASTSPRRSGAA

SEQ ID NO: 67757 - protein, 20 aa, Artificial Sequence
  Description of Artificial Sequence: Synthetic peptide
  Seed: DPRMCSLMQGSTLPRRSGAA
DPRMMSLLQASTTPRRSGAA

SEQ ID NO: 67758 - protein, 20 aa, Artificial Sequence
  Description of Artificial Sequence: Synthetic peptide
  Seed: DPRMCSLMQGSTLPRRSGAA
DPRMMSLLQASTVPRRSGAA

SEQ ID NO: 67759 - protein, 20 aa, Artificial Sequence
  Description of Artificial Sequence: Synthetic peptide
  Seed: DPRMCSLMQGSTLPRRSGAA
DPRMMSLLQGSTAPRRSGAA

SEQ ID NO: 67760 - protein, 20 aa, Artificial Sequence
  Description of Artificial Sequence: Synthetic peptide
  Seed: DPRMCSLMQGSTLPRRSGAA
DPRMMSLLQGSTIPRRSGAA

SEQ ID NO: 67761 - protein, 20 aa, Artificial Sequence
  Description of Artificial Sequence: Synthetic peptide
  Seed: DPRMCSLMQGSTLPRRSGAA
DPRMMSLLQGSTLPRRSGAA

SEQ ID NO: 67762 - protein, 20 aa, Artificial Sequence
  Description of Artificial Sequence: Synthetic peptide
  Seed: DPRMCSLMQGSTLPRRSGAA
DPRMMSLLQGSTMPRRSGAA

SEQ ID NO: 67763 - protein, 20 aa, Artificial Sequence
  Description of Artificial Sequence: Synthetic peptide
  Seed: DPRMCSLMQGSTLPRRSGAA
DPRMMSLLQGSTTPRRSGAA

SEQ ID NO: 67764 - protein, 20 aa, Artificial Sequence
  Description of Artificial Sequence: Synthetic peptide
  Seed: DPRMCSLMQGSTLPRRSGAA
DPRMMSLLQGSTVPRRSGAA

SEQ ID NO: 67765 - protein, 20 aa, Artificial Sequence
  Description of Artificial Sequence: Synthetic peptide
  Seed: DPRMCSLMQGSTLPRRSGAA
DPRMMSLLQPSTAPRRSGAA

SEQ ID NO: 67766 - protein, 20 aa, Artificial Sequence
  Description of Artificial Sequence: Synthetic peptide
  Seed: DPRMCSLMQGSTLPRRSGAA
DPRMMSLLQPSTIPRRSGAA

SEQ ID NO: 67767 - protein, 20 aa, Artificial Sequence
  Description of Artificial Sequence: Synthetic peptide
  Seed: DPRMCSLMQGSTLPRRSGAA
DPRMMSLLQPSTLPRRSGAA

SEQ ID NO: 67768 - protein, 20 aa, Artificial Sequence
  Description of Artificial Sequence: Synthetic peptide
  Seed: DPRMCSLMQGSTLPRRSGAA
DPRMMSLLQPSTVPRRSGAA

SEQ ID NO: 67769 - protein, 20 aa, Artificial Sequence
  Description of Artificial Sequence: Synthetic peptide
  Seed: DPRMCSLMQGSTLPRRSGAA
DPRMMSLLQSSTAPRRSGAA

SEQ ID NO: 67770 - protein, 20 aa, Artificial Sequence
  Description of Artificial Sequence: Synthetic peptide
  Seed: DPRMCSLMQGSTLPRRSGAA
DPRMMSLLQSSTIPRRSGAA

SEQ ID NO: 67771 - protein, 20 aa, Artificial Sequence
  Description of Artificial Sequence: Synthetic peptide
  Seed: DPRMCSLMQGSTLPRRSGAA
DPRMMSLLQSSTLPRRSGAA

SEQ ID NO: 67772 - protein, 20 aa, Artificial Sequence
  Description of Artificial Sequence: Synthetic peptide
  Seed: DPRMCSLMQGSTLPRRSGAA
DPRMMSLLQSSTVPRRSGAA

SEQ ID NO: 67773 - protein, 20 aa, Artificial Sequence
  Description of Artificial Sequence: Synthetic peptide
  Seed: DPRMCSLMQGSTLPRRSGAA
DPRMMSLLQTSTVPRRSGAA

SEQ ID NO: 67774 - protein, 20 aa, Artificial Sequence
  Description of Artificial Sequence: Synthetic peptide
  Seed: DPRMCSLMQGSTLPRRSGAA
DPRMMSLMQASTAPRRSGAA

SEQ ID NO: 67775 - protein, 20 aa, Artificial Sequence
  Description of Artificial Sequence: Synthetic peptide
  Seed: DPRMCSLMQGSTLPRRSGAA
DPRMMSLMQASTIPRRSGAA

SEQ ID NO: 67776 - protein, 20 aa, Artificial Sequence
  Description of Artificial Sequence: Synthetic peptide
  Seed: DPRMCSLMQGSTLPRRSGAA
DPRMMSLMQASTLPRRSGAA

SEQ ID NO: 67777 - protein, 20 aa, Artificial Sequence
  Description of Artificial Sequence: Synthetic peptide
  Seed: DPRMCSLMQGSTLPRRSGAA
DPRMMSLMQASTMPRRSGAA

SEQ ID NO: 67778 - protein, 20 aa, Artificial Sequence
  Description of Artificial Sequence: Synthetic peptide
  Seed: DPRMCSLMQGSTLPRRSGAA
DPRMMSLMQASTSPRRSGAA

SEQ ID NO: 67779 - protein, 20 aa, Artificial Sequence
  Description of Artificial Sequence: Synthetic peptide
  Seed: DPRMCSLMQGSTLPRRSGAA
DPRMMSLMQASTTPRRSGAA

SEQ ID NO: 67780 - protein, 20 aa, Artificial Sequence
  Description of Artificial Sequence: Synthetic peptide
  Seed: DPRMCSLMQGSTLPRRSGAA
DPRMMSLMQASTVPRRSGAA

SEQ ID NO: 67781 - protein, 20 aa, Artificial Sequence
  Description of Artificial Sequence: Synthetic peptide
  Seed: DPRMCSLMQGSTLPRRSGAA
DPRMMSLMQGSTAPRRSGAA

SEQ ID NO: 67782 - protein, 20 aa, Artificial Sequence
  Description of Artificial Sequence: Synthetic peptide
  Seed: DPRMCSLMQGSTLPRRSGAA
DPRMMSLMQGSTIPRRSGAA

SEQ ID NO: 67783 - protein, 20 aa, Artificial Sequence
  Description of Artificial Sequence: Synthetic peptide
  Seed: DPRMCSLMQGSTLPRRSGAA
DPRMMSLMQGSTLPRRSGAA

SEQ ID NO: 67784 - protein, 20 aa, Artificial Sequence
  Description of Artificial Sequence: Synthetic peptide
  Seed: DPRMCSLMQGSTLPRRSGAA
DPRMMSLMQGSTMPRRSGAA

SEQ ID NO: 67785 - protein, 20 aa, Artificial Sequence
  Description of Artificial Sequence: Synthetic peptide
  Seed: DPRMCSLMQGSTLPRRSGAA
DPRMMSLMQGSTTPRRSGAA

SEQ ID NO: 67786 - protein, 20 aa, Artificial Sequence
  Description of Artificial Sequence: Synthetic peptide
  Seed: DPRMCSLMQGSTLPRRSGAA
DPRMMSLMQGSTVPRRSGAA

SEQ ID NO: 67787 - protein, 20 aa, Artificial Sequence
  Description of Artificial Sequence: Synthetic peptide
  Seed: DPRMCSLMQGSTLPRRSGAA
DPRMMSLMQPSTAPRRSGAA

SEQ ID NO: 67788 - protein, 20 aa, Artificial Sequence
  Description of Artificial Sequence: Synthetic peptide
  Seed: DPRMCSLMQGSTLPRRSGAA
DPRMMSLMQPSTIPRRSGAA

SEQ ID NO: 67789 - protein, 20 aa, Artificial Sequence
  Description of Artificial Sequence: Synthetic peptide
  Seed: DPRMCSLMQGSTLPRRSGAA
DPRMMSLMQPSTLPRRSGAA

SEQ ID NO: 67790 - protein, 20 aa, Artificial Sequence
  Description of Artificial Sequence: Synthetic peptide
  Seed: DPRMCSLMQGSTLPRRSGAA
DPRMMSLMQPSTVPRRSGAA

SEQ ID NO: 67791 - protein, 20 aa, Artificial Sequence
  Description of Artificial Sequence: Synthetic peptide
  Seed: DPRMCSLMQGSTLPRRSGAA
DPRMMSLMQSSTAPRRSGAA

SEQ ID NO: 67792 - protein, 20 aa, Artificial Sequence
  Description of Artificial Sequence: Synthetic peptide
  Seed: DPRMCSLMQGSTLPRRSGAA
DPRMMSLMQSSTIPRRSGAA

SEQ ID NO: 67793 - protein, 20 aa, Artificial Sequence
  Description of Artificial Sequence: Synthetic peptide
  Seed: DPRMCSLMQGSTLPRRSGAA
DPRMMSLMQSSTLPRRSGAA

SEQ ID NO: 67794 - protein, 20 aa, Artificial Sequence
  Description of Artificial Sequence: Synthetic peptide
  Seed: DPRMCSLMQGSTLPRRSGAA
DPRMMSLMQSSTVPRRSGAA

SEQ ID NO: 67795 - protein, 20 aa, Artificial Sequence
  Description of Artificial Sequence: Synthetic peptide
  Seed: DPRMCSLMQGSTLPRRSGAA
DPRMMSLMQTSTVPRRSGAA

SEQ ID NO: 67796 - protein, 20 aa, Artificial Sequence
  Description of Artificial Sequence: Synthetic peptide
  Seed: DPRMCSLMQGSTLPRRSGAA
DPRMMSLQQASTLPRRSGAA

SEQ ID NO: 67797 - protein, 20 aa, Artificial Sequence
  Description of Artificial Sequence: Synthetic peptide
  Seed: DPRMCSLMQGSTLPRRSGAA
DPRMMSLQQASTVPRRSGAA

SEQ ID NO: 67798 - protein, 20 aa, Artificial Sequence
  Description of Artificial Sequence: Synthetic peptide
  Seed: DPRMCSLMQGSTLPRRSGAA
DPRMVSLAQASTIPRRSGAA

SEQ ID NO: 67799 - protein, 20 aa, Artificial Sequence
  Description of Artificial Sequence: Synthetic peptide
  Seed: DPRMCSLMQGSTLPRRSGAA
DPRMVSLAQASTLPRRSGAA

SEQ ID NO: 67800 - protein, 20 aa, Artificial Sequence
  Description of Artificial Sequence: Synthetic peptide
  Seed: DPRMCSLMQGSTLPRRSGAA
DPRMVSLAQASTVPRRSGAA

SEQ ID NO: 67801 - protein, 20 aa, Artificial Sequence
  Description of Artificial Sequence: Synthetic peptide
  Seed: DPRMCSLMQGSTLPRRSGAA
DPRMVSLIQASTAPRRSGAA

SEQ ID NO: 67802 - protein, 20 aa, Artificial Sequence
  Description of Artificial Sequence: Synthetic peptide
  Seed: DPRMCSLMQGSTLPRRSGAA
DPRMVSLIQASTIPRRSGAA

SEQ ID NO: 67803 - protein, 20 aa, Artificial Sequence
  Description of Artificial Sequence: Synthetic peptide
  Seed: DPRMCSLMQGSTLPRRSGAA
DPRMVSLIQASTLPRRSGAA

SEQ ID NO: 67804 - protein, 20 aa, Artificial Sequence
  Description of Artificial Sequence: Synthetic peptide
  Seed: DPRMCSLMQGSTLPRRSGAA
DPRMVSLIQASTVPRRSGAA

SEQ ID NO: 67805 - protein, 20 aa, Artificial Sequence
  Description of Artificial Sequence: Synthetic peptide
  Seed: DPRMCSLMQGSTLPRRSGAA
DPRMVSLIQGSTAPRRSGAA

SEQ ID NO: 67806 - protein, 20 aa, Artificial Sequence
  Description of Artificial Sequence: Synthetic peptide
  Seed: DPRMCSLMQGSTLPRRSGAA
DPRMVSLIQGSTIPRRSGAA

SEQ ID NO: 67807 - protein, 20 aa, Artificial Sequence
  Description of Artificial Sequence: Synthetic peptide
  Seed: DPRMCSLMQGSTLPRRSGAA
DPRMVSLIQGSTLPRRSGAA

SEQ ID NO: 67808 - protein, 20 aa, Artificial Sequence
  Description of Artificial Sequence: Synthetic peptide
  Seed: DPRMCSLMQGSTLPRRSGAA
DPRMVSLIQGSTVPRRSGAA

SEQ ID NO: 67809 - protein, 20 aa, Artificial Sequence
  Description of Artificial Sequence: Synthetic peptide
  Seed: DPRMCSLMQGSTLPRRSGAA
DPRMVSLLQASTAPRRSGAA

SEQ ID NO: 67810 - protein, 20 aa, Artificial Sequence
  Description of Artificial Sequence: Synthetic peptide
  Seed: DPRMCSLMQGSTLPRRSGAA
DPRMVSLLQASTIPRRSGAA

SEQ ID NO: 67811 - protein, 20 aa, Artificial Sequence
  Description of Artificial Sequence: Synthetic peptide
  Seed: DPRMCSLMQGSTLPRRSGAA
DPRMVSLLQASTLPRRSGAA

SEQ ID NO: 67812 - protein, 20 aa, Artificial Sequence
  Description of Artificial Sequence: Synthetic peptide
  Seed: DPRMCSLMQGSTLPRRSGAA
DPRMVSLLQASTMPRRSGAA

SEQ ID NO: 67813 - protein, 20 aa, Artificial Sequence
  Description of Artificial Sequence: Synthetic peptide
  Seed: DPRMCSLMQGSTLPRRSGAA
DPRMVSLLQASTSPRRSGAA

SEQ ID NO: 67814 - protein, 20 aa, Artificial Sequence
  Description of Artificial Sequence: Synthetic peptide
  Seed: DPRMCSLMQGSTLPRRSGAA
DPRMVSLLQASTTPRRSGAA

SEQ ID NO: 67815 - protein, 20 aa, Artificial Sequence
  Description of Artificial Sequence: Synthetic peptide
  Seed: DPRMCSLMQGSTLPRRSGAA
DPRMVSLLQASTVPRRSGAA

SEQ ID NO: 67816 - protein, 20 aa, Artificial Sequence
  Description of Artificial Sequence: Synthetic peptide
  Seed: DPRMCSLMQGSTLPRRSGAA
DPRMVSLLQGSTAPRRSGAA

SEQ ID NO: 67817 - protein, 20 aa, Artificial Sequence
  Description of Artificial Sequence: Synthetic peptide
  Seed: DPRMCSLMQGSTLPRRSGAA
DPRMVSLLQGSTIPRRSGAA

SEQ ID NO: 67818 - protein, 20 aa, Artificial Sequence
  Description of Artificial Sequence: Synthetic peptide
  Seed: DPRMCSLMQGSTLPRRSGAA
DPRMVSLLQGSTLPRRSGAA

SEQ ID NO: 67819 - protein, 20 aa, Artificial Sequence
  Description of Artificial Sequence: Synthetic peptide
  Seed: DPRMCSLMQGSTLPRRSGAA
DPRMVSLLQGSTMPRRSGAA

SEQ ID NO: 67820 - protein, 20 aa, Artificial Sequence
  Description of Artificial Sequence: Synthetic peptide
  Seed: DPRMCSLMQGSTLPRRSGAA
DPRMVSLLQGSTTPRRSGAA

SEQ ID NO: 67821 - protein, 20 aa, Artificial Sequence
  Description of Artificial Sequence: Synthetic peptide
  Seed: DPRMCSLMQGSTLPRRSGAA
DPRMVSLLQGSTVPRRSGAA

SEQ ID NO: 67822 - protein, 20 aa, Artificial Sequence
  Description of Artificial Sequence: Synthetic peptide
  Seed: DPRMCSLMQGSTLPRRSGAA
DPRMVSLLQNSTVPRRSGAA

SEQ ID NO: 67823 - protein, 20 aa, Artificial Sequence
  Description of Artificial Sequence: Synthetic peptide
  Seed: DPRMCSLMQGSTLPRRSGAA
DPRMVSLLQPSTAPRRSGAA

SEQ ID NO: 67824 - protein, 20 aa, Artificial Sequence
  Description of Artificial Sequence: Synthetic peptide
  Seed: DPRMCSLMQGSTLPRRSGAA
DPRMVSLLQPSTIPRRSGAA

SEQ ID NO: 67825 - protein, 20 aa, Artificial Sequence
  Description of Artificial Sequence: Synthetic peptide
  Seed: DPRMCSLMQGSTLPRRSGAA
DPRMVSLLQPSTLPRRSGAA

SEQ ID NO: 67826 - protein, 20 aa, Artificial Sequence
  Description of Artificial Sequence: Synthetic peptide
  Seed: DPRMCSLMQGSTLPRRSGAA
DPRMVSLLQPSTVPRRSGAA

SEQ ID NO: 67827 - protein, 20 aa, Artificial Sequence
  Description of Artificial Sequence: Synthetic peptide
  Seed: DPRMCSLMQGSTLPRRSGAA
DPRMVSLLQSSTAPRRSGAA

SEQ ID NO: 67828 - protein, 20 aa, Artificial Sequence
  Description of Artificial Sequence: Synthetic peptide
  Seed: DPRMCSLMQGSTLPRRSGAA
DPRMVSLLQSSTIPRRSGAA

SEQ ID NO: 67829 - protein, 20 aa, Artificial Sequence
  Description of Artificial Sequence: Synthetic peptide
  Seed: DPRMCSLMQGSTLPRRSGAA
DPRMVSLLQSSTLPRRSGAA

SEQ ID NO: 67830 - protein, 20 aa, Artificial Sequence
  Description of Artificial Sequence: Synthetic peptide
  Seed: DPRMCSLMQGSTLPRRSGAA
DPRMVSLLQSSTVPRRSGAA

SEQ ID NO: 67831 - protein, 20 aa, Artificial Sequence
  Description of Artificial Sequence: Synthetic peptide
  Seed: DPRMCSLMQGSTLPRRSGAA
DPRMVSLLQTSTVPRRSGAA

SEQ ID NO: 67832 - protein, 20 aa, Artificial Sequence
  Description of Artificial Sequence: Synthetic peptide
  Seed: DPRMCSLMQGSTLPRRSGAA
DPRMVSLMQASTAPRRSGAA

SEQ ID NO: 67833 - protein, 20 aa, Artificial Sequence
  Description of Artificial Sequence: Synthetic peptide
  Seed: DPRMCSLMQGSTLPRRSGAA
DPRMVSLMQASTIPRRSGAA

SEQ ID NO: 67834 - protein, 20 aa, Artificial Sequence
  Description of Artificial Sequence: Synthetic peptide
  Seed: DPRMCSLMQGSTLPRRSGAA
DPRMVSLMQASTLPRRSGAA

SEQ ID NO: 67835 - protein, 20 aa, Artificial Sequence
  Description of Artificial Sequence: Synthetic peptide
  Seed: DPRMCSLMQGSTLPRRSGAA
DPRMVSLMQASTMPRRSGAA

SEQ ID NO: 67836 - protein, 20 aa, Artificial Sequence
  Description of Artificial Sequence: Synthetic peptide
  Seed: DPRMCSLMQGSTLPRRSGAA
DPRMVSLMQASTSPRRSGAA

SEQ ID NO: 67837 - protein, 20 aa, Artificial Sequence
  Description of Artificial Sequence: Synthetic peptide
  Seed: DPRMCSLMQGSTLPRRSGAA
DPRMVSLMQASTTPRRSGAA

SEQ ID NO: 67838 - protein, 20 aa, Artificial Sequence
  Description of Artificial Sequence: Synthetic peptide
  Seed: DPRMCSLMQGSTLPRRSGAA
DPRMVSLMQASTVPRRSGAA

SEQ ID NO: 67839 - protein, 20 aa, Artificial Sequence
  Description of Artificial Sequence: Synthetic peptide
  Seed: DPRMCSLMQGSTLPRRSGAA
DPRMVSLMQGSTAPRRSGAA

SEQ ID NO: 67840 - protein, 20 aa, Artificial Sequence
  Description of Artificial Sequence: Synthetic peptide
  Seed: DPRMCSLMQGSTLPRRSGAA
DPRMVSLMQGSTIPRRSGAA

SEQ ID NO: 67841 - protein, 20 aa, Artificial Sequence
  Description of Artificial Sequence: Synthetic peptide
  Seed: DPRMCSLMQGSTLPRRSGAA
DPRMVSLMQGSTLPRRSGAA

SEQ ID NO: 67842 - protein, 20 aa, Artificial Sequence
  Description of Artificial Sequence: Synthetic peptide
  Seed: DPRMCSLMQGSTLPRRSGAA
DPRMVSLMQGSTMPRRSGAA

SEQ ID NO: 67843 - protein, 20 aa, Artificial Sequence
  Description of Artificial Sequence: Synthetic peptide
  Seed: DPRMCSLMQGSTLPRRSGAA
DPRMVSLMQGSTTPRRSGAA

SEQ ID NO: 67844 - protein, 20 aa, Artificial Sequence
  Description of Artificial Sequence: Synthetic peptide
  Seed: DPRMCSLMQGSTLPRRSGAA
DPRMVSLMQGSTVPRRSGAA

SEQ ID NO: 67845 - protein, 20 aa, Artificial Sequence
  Description of Artificial Sequence: Synthetic peptide
  Seed: DPRMCSLMQGSTLPRRSGAA
DPRMVSLMQPSTAPRRSGAA

SEQ ID NO: 67846 - protein, 20 aa, Artificial Sequence
  Description of Artificial Sequence: Synthetic peptide
  Seed: DPRMCSLMQGSTLPRRSGAA
DPRMVSLMQPSTIPRRSGAA

SEQ ID NO: 67847 - protein, 20 aa, Artificial Sequence
  Description of Artificial Sequence: Synthetic peptide
  Seed: DPRMCSLMQGSTLPRRSGAA
DPRMVSLMQPSTLPRRSGAA

SEQ ID NO: 67848 - protein, 20 aa, Artificial Sequence
  Description of Artificial Sequence: Synthetic peptide
  Seed: DPRMCSLMQGSTLPRRSGAA
DPRMVSLMQPSTVPRRSGAA

SEQ ID NO: 67849 - protein, 20 aa, Artificial Sequence
  Description of Artificial Sequence: Synthetic peptide
  Seed: DPRMCSLMQGSTLPRRSGAA
DPRMVSLMQSSTAPRRSGAA

SEQ ID NO: 67850 - protein, 20 aa, Artificial Sequence
  Description of Artificial Sequence: Synthetic peptide
  Seed: DPRMCSLMQGSTLPRRSGAA
DPRMVSLMQSSTIPRRSGAA

SEQ ID NO: 67851 - protein, 20 aa, Artificial Sequence
  Description of Artificial Sequence: Synthetic peptide
  Seed: DPRMCSLMQGSTLPRRSGAA
DPRMVSLMQSSTLPRRSGAA

SEQ ID NO: 67852 - protein, 20 aa, Artificial Sequence
  Description of Artificial Sequence: Synthetic peptide
  Seed: DPRMCSLMQGSTLPRRSGAA
DPRMVSLMQSSTVPRRSGAA

SEQ ID NO: 67853 - protein, 20 aa, Artificial Sequence
  Description of Artificial Sequence: Synthetic peptide
  Seed: DPRMCSLMQGSTLPRRSGAA
DPRMVSLMQTSTVPRRSGAA

SEQ ID NO: 67854 - protein, 20 aa, Artificial Sequence
  Description of Artificial Sequence: Synthetic peptide
  Seed: DPRMCSLMQGSTLPRRSGAA
DPRMVSLQQASTLPRRSGAA

SEQ ID NO: 67855 - protein, 20 aa, Artificial Sequence
  Description of Artificial Sequence: Synthetic peptide
  Seed: DPRMCSLMQGSTLPRRSGAA
DPRMVSLQQASTVPRRSGAA

SEQ ID NO: 67856 - protein, 20 aa, Artificial Sequence
  Description of Artificial Sequence: Synthetic peptide
  Seed: DPRMCSLMQGSTLPRRSGAA
DPRMWSLAQASTAPRRSGAA

SEQ ID NO: 67857 - protein, 20 aa, Artificial Sequence
  Description of Artificial Sequence: Synthetic peptide
  Seed: DPRMCSLMQGSTLPRRSGAA
DPRMWSLAQASTIPRRSGAA

SEQ ID NO: 67858 - protein, 20 aa, Artificial Sequence
  Description of Artificial Sequence: Synthetic peptide
  Seed: DPRMCSLMQGSTLPRRSGAA
DPRMWSLAQASTLPRRSGAA

SEQ ID NO: 67859 - protein, 20 aa, Artificial Sequence
  Description of Artificial Sequence: Synthetic peptide
  Seed: DPRMCSLMQGSTLPRRSGAA
DPRMWSLAQASTMPRRSGAA

SEQ ID NO: 67860 - protein, 20 aa, Artificial Sequence
  Description of Artificial Sequence: Synthetic peptide
  Seed: DPRMCSLMQGSTLPRRSGAA
DPRMWSLAQASTSPRRSGAA

SEQ ID NO: 67861 - protein, 20 aa, Artificial Sequence
  Description of Artificial Sequence: Synthetic peptide
  Seed: DPRMCSLMQGSTLPRRSGAA
DPRMWSLAQASTTPRRSGAA

SEQ ID NO: 67862 - protein, 20 aa, Artificial Sequence
  Description of Artificial Sequence: Synthetic peptide
  Seed: DPRMCSLMQGSTLPRRSGAA
DPRMWSLAQASTVPRRSGAA

SEQ ID NO: 67863 - protein, 20 aa, Artificial Sequence
  Description of Artificial Sequence: Synthetic peptide
  Seed: DPRMCSLMQGSTLPRRSGAA
DPRMWSLAQGSTAPRRSGAA

SEQ ID NO: 67864 - protein, 20 aa, Artificial Sequence
  Description of Artificial Sequence: Synthetic peptide
  Seed: DPRMCSLMQGSTLPRRSGAA
DPRMWSLAQGSTIPRRSGAA

SEQ ID NO: 67865 - protein, 20 aa, Artificial Sequence
  Description of Artificial Sequence: Synthetic peptide
  Seed: DPRMCSLMQGSTLPRRSGAA
DPRMWSLAQGSTLPRRSGAA

SEQ ID NO: 67866 - protein, 20 aa, Artificial Sequence
  Description of Artificial Sequence: Synthetic peptide
  Seed: DPRMCSLMQGSTLPRRSGAA
DPRMWSLAQGSTMPRRSGAA

SEQ ID NO: 67867 - protein, 20 aa, Artificial Sequence
  Description of Artificial Sequence: Synthetic peptide
  Seed: DPRMCSLMQGSTLPRRSGAA
DPRMWSLAQGSTVPRRSGAA

SEQ ID NO: 67868 - protein, 20 aa, Artificial Sequence
  Description of Artificial Sequence: Synthetic peptide
  Seed: DPRMCSLMQGSTLPRRSGAA
DPRMWSLAQNSTVPRRSGAA

SEQ ID NO: 67869 - protein, 20 aa, Artificial Sequence
  Description of Artificial Sequence: Synthetic peptide
  Seed: DPRMCSLMQGSTLPRRSGAA
DPRMWSLAQPSTAPRRSGAA

SEQ ID NO: 67870 - protein, 20 aa, Artificial Sequence
  Description of Artificial Sequence: Synthetic peptide
  Seed: DPRMCSLMQGSTLPRRSGAA
DPRMWSLAQPSTIPRRSGAA

SEQ ID NO: 67871 - protein, 20 aa, Artificial Sequence
  Description of Artificial Sequence: Synthetic peptide
  Seed: DPRMCSLMQGSTLPRRSGAA
DPRMWSLAQPSTLPRRSGAA

SEQ ID NO: 67872 - protein, 20 aa, Artificial Sequence
  Description of Artificial Sequence: Synthetic peptide
  Seed: DPRMCSLMQGSTLPRRSGAA
DPRMWSLAQPSTVPRRSGAA

SEQ ID NO: 67873 - protein, 20 aa, Artificial Sequence
  Description of Artificial Sequence: Synthetic peptide
  Seed: DPRMCSLMQGSTLPRRSGAA
DPRMWSLAQSSTAPRRSGAA

SEQ ID NO: 67874 - protein, 20 aa, Artificial Sequence
  Description of Artificial Sequence: Synthetic peptide
  Seed: DPRMCSLMQGSTLPRRSGAA
DPRMWSLAQSSTIPRRSGAA

SEQ ID NO: 67875 - protein, 20 aa, Artificial Sequence
  Description of Artificial Sequence: Synthetic peptide
  Seed: DPRMCSLMQGSTLPRRSGAA
DPRMWSLAQSSTLPRRSGAA

SEQ ID NO: 67876 - protein, 20 aa, Artificial Sequence
  Description of Artificial Sequence: Synthetic peptide
  Seed: DPRMCSLMQGSTLPRRSGAA
DPRMWSLAQSSTMPRRSGAA

SEQ ID NO: 67877 - protein, 20 aa, Artificial Sequence
  Description of Artificial Sequence: Synthetic peptide
  Seed: DPRMCSLMQGSTLPRRSGAA
DPRMWSLAQSSTVPRRSGAA

SEQ ID NO: 67878 - protein, 20 aa, Artificial Sequence
  Description of Artificial Sequence: Synthetic peptide
  Seed: DPRMCSLMQGSTLPRRSGAA
DPRMWSLAQTSTVPRRSGAA

SEQ ID NO: 67879 - protein, 20 aa, Artificial Sequence
  Description of Artificial Sequence: Synthetic peptide
  Seed: DPRMCSLMQGSTLPRRSGAA
DPRMWSLEQASTIPRRSGAA

SEQ ID NO: 67880 - protein, 20 aa, Artificial Sequence
  Description of Artificial Sequence: Synthetic peptide
  Seed: DPRMCSLMQGSTLPRRSGAA
DPRMWSLEQASTLPRRSGAA

SEQ ID NO: 67881 - protein, 20 aa, Artificial Sequence
  Description of Artificial Sequence: Synthetic peptide
  Seed: DPRMCSLMQGSTLPRRSGAA
DPRMWSLEQASTVPRRSGAA

SEQ ID NO: 67882 - protein, 20 aa, Artificial Sequence
  Description of Artificial Sequence: Synthetic peptide
  Seed: DPRMCSLMQGSTLPRRSGAA
DPRMWSLFQASTAPRRSGAA

SEQ ID NO: 67883 - protein, 20 aa, Artificial Sequence
  Description of Artificial Sequence: Synthetic peptide
  Seed: DPRMCSLMQGSTLPRRSGAA
DPRMWSLFQASTVPRRSGAA

SEQ ID NO: 67884 - protein, 20 aa, Artificial Sequence
  Description of Artificial Sequence: Synthetic peptide
  Seed: DPRMCSLMQGSTLPRRSGAA
DPRMWSLGQASTIPRRSGAA

SEQ ID NO: 67885 - protein, 20 aa, Artificial Sequence
  Description of Artificial Sequence: Synthetic peptide
  Seed: DPRMCSLMQGSTLPRRSGAA
DPRMWSLGQASTLPRRSGAA

SEQ ID NO: 67886 - protein, 20 aa, Artificial Sequence
  Description of Artificial Sequence: Synthetic peptide
  Seed: DPRMCSLMQGSTLPRRSGAA
DPRMWSLGQASTVPRRSGAA

SEQ ID NO: 67887 - protein, 20 aa, Artificial Sequence
  Description of Artificial Sequence: Synthetic peptide
  Seed: DPRMCSLMQGSTLPRRSGAA
DPRMWSLIQASTAPRRSGAA

SEQ ID NO: 67888 - protein, 20 aa, Artificial Sequence
  Description of Artificial Sequence: Synthetic peptide
  Seed: DPRMCSLMQGSTLPRRSGAA
DPRMWSLIQASTGPRRSGAA

SEQ ID NO: 67889 - protein, 20 aa, Artificial Sequence
  Description of Artificial Sequence: Synthetic peptide
  Seed: DPRMCSLMQGSTLPRRSGAA
DPRMWSLIQASTIPRRSGAA

SEQ ID NO: 67890 - protein, 20 aa, Artificial Sequence
  Description of Artificial Sequence: Synthetic peptide
  Seed: DPRMCSLMQGSTLPRRSGAA
DPRMWSLIQASTLPRRSGAA

SEQ ID NO: 67891 - protein, 20 aa, Artificial Sequence
  Description of Artificial Sequence: Synthetic peptide
  Seed: DPRMCSLMQGSTLPRRSGAA
DPRMWSLIQASTMPRRSGAA

SEQ ID NO: 67892 - protein, 20 aa, Artificial Sequence
  Description of Artificial Sequence: Synthetic peptide
  Seed: DPRMCSLMQGSTLPRRSGAA
DPRMWSLIQASTSPRRSGAA

SEQ ID NO: 67893 - protein, 20 aa, Artificial Sequence
  Description of Artificial Sequence: Synthetic peptide
  Seed: DPRMCSLMQGSTLPRRSGAA
DPRMWSLIQASTTPRRSGAA

SEQ ID NO: 67894 - protein, 20 aa, Artificial Sequence
  Description of Artificial Sequence: Synthetic peptide
  Seed: DPRMCSLMQGSTLPRRSGAA
DPRMWSLIQASTVPRRSGAA

SEQ ID NO: 67895 - protein, 20 aa, Artificial Sequence
  Description of Artificial Sequence: Synthetic peptide
  Seed: DPRMCSLMQGSTLPRRSGAA
DPRMWSLIQGSTAPRRSGAA

SEQ ID NO: 67896 - protein, 20 aa, Artificial Sequence
  Description of Artificial Sequence: Synthetic peptide
  Seed: DPRMCSLMQGSTLPRRSGAA
DPRMWSLIQGSTIPRRSGAA

SEQ ID NO: 67897 - protein, 20 aa, Artificial Sequence
  Description of Artificial Sequence: Synthetic peptide
  Seed: DPRMCSLMQGSTLPRRSGAA
DPRMWSLIQGSTLPRRSGAA

SEQ ID NO: 67898 - protein, 20 aa, Artificial Sequence
  Description of Artificial Sequence: Synthetic peptide
  Seed: DPRMCSLMQGSTLPRRSGAA
DPRMWSLIQGSTMPRRSGAA

SEQ ID NO: 67899 - protein, 20 aa, Artificial Sequence
  Description of Artificial Sequence: Synthetic peptide
  Seed: DPRMCSLMQGSTLPRRSGAA
DPRMWSLIQGSTSPRRSGAA

SEQ ID NO: 67900 - protein, 20 aa, Artificial Sequence
  Description of Artificial Sequence: Synthetic peptide
  Seed: DPRMCSLMQGSTLPRRSGAA
DPRMWSLIQGSTTPRRSGAA

SEQ ID NO: 67901 - protein, 20 aa, Artificial Sequence
  Description of Artificial Sequence: Synthetic peptide
  Seed: DPRMCSLMQGSTLPRRSGAA
DPRMWSLIQGSTVPRRSGAA

SEQ ID NO: 67902 - protein, 20 aa, Artificial Sequence
  Description of Artificial Sequence: Synthetic peptide
  Seed: DPRMCSLMQGSTLPRRSGAA
DPRMWSLIQNSTIPRRSGAA

SEQ ID NO: 67903 - protein, 20 aa, Artificial Sequence
  Description of Artificial Sequence: Synthetic peptide
  Seed: DPRMCSLMQGSTLPRRSGAA
DPRMWSLIQNSTLPRRSGAA

SEQ ID NO: 67904 - protein, 20 aa, Artificial Sequence
  Description of Artificial Sequence: Synthetic peptide
  Seed: DPRMCSLMQGSTLPRRSGAA
DPRMWSLIQNSTVPRRSGAA

SEQ ID NO: 67905 - protein, 20 aa, Artificial Sequence
  Description of Artificial Sequence: Synthetic peptide
  Seed: DPRMCSLMQGSTLPRRSGAA
DPRMWSLIQPSTAPRRSGAA

SEQ ID NO: 67906 - protein, 20 aa, Artificial Sequence
  Description of Artificial Sequence: Synthetic peptide
  Seed: DPRMCSLMQGSTLPRRSGAA
DPRMWSLIQPSTIPRRSGAA

SEQ ID NO: 67907 - protein, 20 aa, Artificial Sequence
  Description of Artificial Sequence: Synthetic peptide
  Seed: DPRMCSLMQGSTLPRRSGAA
DPRMWSLIQPSTLPRRSGAA

SEQ ID NO: 67908 - protein, 20 aa, Artificial Sequence
  Description of Artificial Sequence: Synthetic peptide
  Seed: DPRMCSLMQGSTLPRRSGAA
DPRMWSLIQPSTVPRRSGAA

SEQ ID NO: 67909 - protein, 20 aa, Artificial Sequence
  Description of Artificial Sequence: Synthetic peptide
  Seed: DPRMCSLMQGSTLPRRSGAA
DPRMWSLIQSSTAPRRSGAA

SEQ ID NO: 67910 - protein, 20 aa, Artificial Sequence
  Description of Artificial Sequence: Synthetic peptide
  Seed: DPRMCSLMQGSTLPRRSGAA
DPRMWSLIQSSTIPRRSGAA

SEQ ID NO: 67911 - protein, 20 aa, Artificial Sequence
  Description of Artificial Sequence: Synthetic peptide
  Seed: DPRMCSLMQGSTLPRRSGAA
DPRMWSLIQSSTLPRRSGAA

SEQ ID NO: 67912 - protein, 20 aa, Artificial Sequence
  Description of Artificial Sequence: Synthetic peptide
  Seed: DPRMCSLMQGSTLPRRSGAA
DPRMWSLIQSSTMPRRSGAA

SEQ ID NO: 67913 - protein, 20 aa, Artificial Sequence
  Description of Artificial Sequence: Synthetic peptide
  Seed: DPRMCSLMQGSTLPRRSGAA
DPRMWSLIQSSTSPRRSGAA

SEQ ID NO: 67914 - protein, 20 aa, Artificial Sequence
  Description of Artificial Sequence: Synthetic peptide
  Seed: DPRMCSLMQGSTLPRRSGAA
DPRMWSLIQSSTTPRRSGAA

SEQ ID NO: 67915 - protein, 20 aa, Artificial Sequence
  Description of Artificial Sequence: Synthetic peptide
  Seed: DPRMCSLMQGSTLPRRSGAA
DPRMWSLIQSSTVPRRSGAA

SEQ ID NO: 67916 - protein, 20 aa, Artificial Sequence
  Description of Artificial Sequence: Synthetic peptide
  Seed: DPRMCSLMQGSTLPRRSGAA
DPRMWSLIQTSTAPRRSGAA

SEQ ID NO: 67917 - protein, 20 aa, Artificial Sequence
  Description of Artificial Sequence: Synthetic peptide
  Seed: DPRMCSLMQGSTLPRRSGAA
DPRMWSLIQTSTIPRRSGAA

SEQ ID NO: 67918 - protein, 20 aa, Artificial Sequence
  Description of Artificial Sequence: Synthetic peptide
  Seed: DPRMCSLMQGSTLPRRSGAA
DPRMWSLIQTSTLPRRSGAA

SEQ ID NO: 67919 - protein, 20 aa, Artificial Sequence
  Description of Artificial Sequence: Synthetic peptide
  Seed: DPRMCSLMQGSTLPRRSGAA
DPRMWSLIQTSTVPRRSGAA

SEQ ID NO: 67920 - protein, 20 aa, Artificial Sequence
  Description of Artificial Sequence: Synthetic peptide
  Seed: DPRMCSLMQGSTLPRRSGAA
DPRMWSLLQASTAPRRSGAA

SEQ ID NO: 67921 - protein, 20 aa, Artificial Sequence
  Description of Artificial Sequence: Synthetic peptide
  Seed: DPRMCSLMQGSTLPRRSGAA
DPRMWSLLQASTFPRRSGAA

SEQ ID NO: 67922 - protein, 20 aa, Artificial Sequence
  Description of Artificial Sequence: Synthetic peptide
  Seed: DPRMCSLMQGSTLPRRSGAA
DPRMWSLLQASTGPRRSGAA

SEQ ID NO: 67923 - protein, 20 aa, Artificial Sequence
  Description of Artificial Sequence: Synthetic peptide
  Seed: DPRMCSLMQGSTLPRRSGAA
DPRMWSLLQASTIPRRSGAA

SEQ ID NO: 67924 - protein, 20 aa, Artificial Sequence
  Description of Artificial Sequence: Synthetic peptide
  Seed: DPRMCSLMQGSTLPRRSGAA
DPRMWSLLQASTLPRRSGAA

SEQ ID NO: 67925 - protein, 20 aa, Artificial Sequence
  Description of Artificial Sequence: Synthetic peptide
  Seed: DPRMCSLMQGSTLPRRSGAA
DPRMWSLLQASTMPRRSGAA

SEQ ID NO: 67926 - protein, 20 aa, Artificial Sequence
  Description of Artificial Sequence: Synthetic peptide
  Seed: DPRMCSLMQGSTLPRRSGAA
DPRMWSLLQASTSPRRSGAA

SEQ ID NO: 67927 - protein, 20 aa, Artificial Sequence
  Description of Artificial Sequence: Synthetic peptide
  Seed: DPRMCSLMQGSTLPRRSGAA
DPRMWSLLQASTTPRRSGAA

SEQ ID NO: 67928 - protein, 20 aa, Artificial Sequence
  Description of Artificial Sequence: Synthetic peptide
  Seed: DPRMCSLMQGSTLPRRSGAA
DPRMWSLLQASTVPRRSGAA

SEQ ID NO: 67929 - protein, 20 aa, Artificial Sequence
  Description of Artificial Sequence: Synthetic peptide
  Seed: DPRMCSLMQGSTLPRRSGAA
DPRMWSLLQGSTAPRRSGAA

SEQ ID NO: 67930 - protein, 20 aa, Artificial Sequence
  Description of Artificial Sequence: Synthetic peptide
  Seed: DPRMCSLMQGSTLPRRSGAA
DPRMWSLLQGSTGPRRSGAA

SEQ ID NO: 67931 - protein, 20 aa, Artificial Sequence
  Description of Artificial Sequence: Synthetic peptide
  Seed: DPRMCSLMQGSTLPRRSGAA
DPRMWSLLQGSTIPRRSGAA

SEQ ID NO: 67932 - protein, 20 aa, Artificial Sequence
  Description of Artificial Sequence: Synthetic peptide
  Seed: DPRMCSLMQGSTLPRRSGAA
DPRMWSLLQGSTLPRRSGAA

SEQ ID NO: 67933 - protein, 20 aa, Artificial Sequence
  Description of Artificial Sequence: Synthetic peptide
  Seed: DPRMCSLMQGSTLPRRSGAA
DPRMWSLLQGSTMPRRSGAA

SEQ ID NO: 67934 - protein, 20 aa, Artificial Sequence
  Description of Artificial Sequence: Synthetic peptide
  Seed: DPRMCSLMQGSTLPRRSGAA
DPRMWSLLQGSTSPRRSGAA

SEQ ID NO: 67935 - protein, 20 aa, Artificial Sequence
  Description of Artificial Sequence: Synthetic peptide
  Seed: DPRMCSLMQGSTLPRRSGAA
DPRMWSLLQGSTTPRRSGAA

SEQ ID NO: 67936 - protein, 20 aa, Artificial Sequence
  Description of Artificial Sequence: Synthetic peptide
  Seed: DPRMCSLMQGSTLPRRSGAA
DPRMWSLLQGSTVPRRSGAA

SEQ ID NO: 67937 - protein, 20 aa, Artificial Sequence
  Description of Artificial Sequence: Synthetic peptide
  Seed: DPRMCSLMQGSTLPRRSGAA
DPRMWSLLQNSTAPRRSGAA

SEQ ID NO: 67938 - protein, 20 aa, Artificial Sequence
  Description of Artificial Sequence: Synthetic peptide
  Seed: DPRMCSLMQGSTLPRRSGAA
DPRMWSLLQNSTIPRRSGAA

SEQ ID NO: 67939 - protein, 20 aa, Artificial Sequence
  Description of Artificial Sequence: Synthetic peptide
  Seed: DPRMCSLMQGSTLPRRSGAA
DPRMWSLLQNSTLPRRSGAA

SEQ ID NO: 67940 - protein, 20 aa, Artificial Sequence
  Description of Artificial Sequence: Synthetic peptide
  Seed: DPRMCSLMQGSTLPRRSGAA
DPRMWSLLQNSTMPRRSGAA

SEQ ID NO: 67941 - protein, 20 aa, Artificial Sequence
  Description of Artificial Sequence: Synthetic peptide
  Seed: DPRMCSLMQGSTLPRRSGAA
DPRMWSLLQNSTTPRRSGAA

SEQ ID NO: 67942 - protein, 20 aa, Artificial Sequence
  Description of Artificial Sequence: Synthetic peptide
  Seed: DPRMCSLMQGSTLPRRSGAA
DPRMWSLLQNSTVPRRSGAA

SEQ ID NO: 67943 - protein, 20 aa, Artificial Sequence
  Description of Artificial Sequence: Synthetic peptide
  Seed: DPRMCSLMQGSTLPRRSGAA
DPRMWSLLQPSTAPRRSGAA

SEQ ID NO: 67944 - protein, 20 aa, Artificial Sequence
  Description of Artificial Sequence: Synthetic peptide
  Seed: DPRMCSLMQGSTLPRRSGAA
DPRMWSLLQPSTIPRRSGAA

SEQ ID NO: 67945 - protein, 20 aa, Artificial Sequence
  Description of Artificial Sequence: Synthetic peptide
  Seed: DPRMCSLMQGSTLPRRSGAA
DPRMWSLLQPSTLPRRSGAA

SEQ ID NO: 67946 - protein, 20 aa, Artificial Sequence
  Description of Artificial Sequence: Synthetic peptide
  Seed: DPRMCSLMQGSTLPRRSGAA
DPRMWSLLQPSTMPRRSGAA

SEQ ID NO: 67947 - protein, 20 aa, Artificial Sequence
  Description of Artificial Sequence: Synthetic peptide
  Seed: DPRMCSLMQGSTLPRRSGAA
DPRMWSLLQPSTSPRRSGAA

SEQ ID NO: 67948 - protein, 20 aa, Artificial Sequence
  Description of Artificial Sequence: Synthetic peptide
  Seed: DPRMCSLMQGSTLPRRSGAA
DPRMWSLLQPSTTPRRSGAA

SEQ ID NO: 67949 - protein, 20 aa, Artificial Sequence
  Description of Artificial Sequence: Synthetic peptide
  Seed: DPRMCSLMQGSTLPRRSGAA
DPRMWSLLQPSTVPRRSGAA

SEQ ID NO: 67950 - protein, 20 aa, Artificial Sequence
  Description of Artificial Sequence: Synthetic peptide
  Seed: DPRMCSLMQGSTLPRRSGAA
DPRMWSLLQSSTAPRRSGAA

SEQ ID NO: 67951 - protein, 20 aa, Artificial Sequence
  Description of Artificial Sequence: Synthetic peptide
  Seed: DPRMCSLMQGSTLPRRSGAA
DPRMWSLLQSSTGPRRSGAA

SEQ ID NO: 67952 - protein, 20 aa, Artificial Sequence
  Description of Artificial Sequence: Synthetic peptide
  Seed: DPRMCSLMQGSTLPRRSGAA
DPRMWSLLQSSTIPRRSGAA

SEQ ID NO: 67953 - protein, 20 aa, Artificial Sequence
  Description of Artificial Sequence: Synthetic peptide
  Seed: DPRMCSLMQGSTLPRRSGAA
DPRMWSLLQSSTLPRRSGAA

SEQ ID NO: 67954 - protein, 20 aa, Artificial Sequence
  Description of Artificial Sequence: Synthetic peptide
  Seed: DPRMCSLMQGSTLPRRSGAA
DPRMWSLLQSSTMPRRSGAA

SEQ ID NO: 67955 - protein, 20 aa, Artificial Sequence
  Description of Artificial Sequence: Synthetic peptide
  Seed: DPRMCSLMQGSTLPRRSGAA
DPRMWSLLQSSTSPRRSGAA

SEQ ID NO: 67956 - protein, 20 aa, Artificial Sequence
  Description of Artificial Sequence: Synthetic peptide
  Seed: DPRMCSLMQGSTLPRRSGAA
DPRMWSLLQSSTTPRRSGAA

SEQ ID NO: 67957 - protein, 20 aa, Artificial Sequence
  Description of Artificial Sequence: Synthetic peptide
  Seed: DPRMCSLMQGSTLPRRSGAA
DPRMWSLLQSSTVPRRSGAA

SEQ ID NO: 67958 - protein, 20 aa, Artificial Sequence
  Description of Artificial Sequence: Synthetic peptide
  Seed: DPRMCSLMQGSTLPRRSGAA
DPRMWSLLQTSTAPRRSGAA

SEQ ID NO: 67959 - protein, 20 aa, Artificial Sequence
  Description of Artificial Sequence: Synthetic peptide
  Seed: DPRMCSLMQGSTLPRRSGAA
DPRMWSLLQTSTIPRRSGAA

SEQ ID NO: 67960 - protein, 20 aa, Artificial Sequence
  Description of Artificial Sequence: Synthetic peptide
  Seed: DPRMCSLMQGSTLPRRSGAA
DPRMWSLLQTSTLPRRSGAA

SEQ ID NO: 67961 - protein, 20 aa, Artificial Sequence
  Description of Artificial Sequence: Synthetic peptide
  Seed: DPRMCSLMQGSTLPRRSGAA
DPRMWSLLQTSTMPRRSGAA

SEQ ID NO: 67962 - protein, 20 aa, Artificial Sequence
  Description of Artificial Sequence: Synthetic peptide
  Seed: DPRMCSLMQGSTLPRRSGAA
DPRMWSLLQTSTSPRRSGAA

SEQ ID NO: 67963 - protein, 20 aa, Artificial Sequence
  Description of Artificial Sequence: Synthetic peptide
  Seed: DPRMCSLMQGSTLPRRSGAA
DPRMWSLLQTSTTPRRSGAA

SEQ ID NO: 67964 - protein, 20 aa, Artificial Sequence
  Description of Artificial Sequence: Synthetic peptide
  Seed: DPRMCSLMQGSTLPRRSGAA
DPRMWSLLQTSTVPRRSGAA

SEQ ID NO: 67965 - protein, 20 aa, Artificial Sequence
  Description of Artificial Sequence: Synthetic peptide
  Seed: DPRMCSLMQGSTLPRRSGAA
DPRMWSLLQVSTAPRRSGAA

SEQ ID NO: 67966 - protein, 20 aa, Artificial Sequence
  Description of Artificial Sequence: Synthetic peptide
  Seed: DPRMCSLMQGSTLPRRSGAA
DPRMWSLLQVSTIPRRSGAA

SEQ ID NO: 67967 - protein, 20 aa, Artificial Sequence
  Description of Artificial Sequence: Synthetic peptide
  Seed: DPRMCSLMQGSTLPRRSGAA
DPRMWSLLQVSTLPRRSGAA

SEQ ID NO: 67968 - protein, 20 aa, Artificial Sequence
  Description of Artificial Sequence: Synthetic peptide
  Seed: DPRMCSLMQGSTLPRRSGAA
DPRMWSLLQVSTVPRRSGAA

SEQ ID NO: 67969 - protein, 20 aa, Artificial Sequence
  Description of Artificial Sequence: Synthetic peptide
  Seed: DPRMCSLMQGSTLPRRSGAA
DPRMWSLMQASTAPRRSGAA

SEQ ID NO: 67970 - protein, 20 aa, Artificial Sequence
  Description of Artificial Sequence: Synthetic peptide
  Seed: DPRMCSLMQGSTLPRRSGAA
DPRMWSLMQASTCPRRSGAA

SEQ ID NO: 67971 - protein, 20 aa, Artificial Sequence
  Description of Artificial Sequence: Synthetic peptide
  Seed: DPRMCSLMQGSTLPRRSGAA
DPRMWSLMQASTFPRRSGAA

SEQ ID NO: 67972 - protein, 20 aa, Artificial Sequence
  Description of Artificial Sequence: Synthetic peptide
  Seed: DPRMCSLMQGSTLPRRSGAA
DPRMWSLMQASTGPRRSGAA

SEQ ID NO: 67973 - protein, 20 aa, Artificial Sequence
  Description of Artificial Sequence: Synthetic peptide
  Seed: DPRMCSLMQGSTLPRRSGAA
DPRMWSLMQASTIPRRSGAA

SEQ ID NO: 67974 - protein, 20 aa, Artificial Sequence
  Description of Artificial Sequence: Synthetic peptide
  Seed: DPRMCSLMQGSTLPRRSGAA
DPRMWSLMQASTLPRRSGAA

SEQ ID NO: 67975 - protein, 20 aa, Artificial Sequence
  Description of Artificial Sequence: Synthetic peptide
  Seed: DPRMCSLMQGSTLPRRSGAA
DPRMWSLMQASTMPRRSGAA

SEQ ID NO: 67976 - protein, 20 aa, Artificial Sequence
  Description of Artificial Sequence: Synthetic peptide
  Seed: DPRMCSLMQGSTLPRRSGAA
DPRMWSLMQASTNPRRSGAA

SEQ ID NO: 67977 - protein, 20 aa, Artificial Sequence
  Description of Artificial Sequence: Synthetic peptide
  Seed: DPRMCSLMQGSTLPRRSGAA
DPRMWSLMQASTSPRRSGAA

SEQ ID NO: 67978 - protein, 20 aa, Artificial Sequence
  Description of Artificial Sequence: Synthetic peptide
  Seed: DPRMCSLMQGSTLPRRSGAA
DPRMWSLMQASTTPRRSGAA

SEQ ID NO: 67979 - protein, 20 aa, Artificial Sequence
  Description of Artificial Sequence: Synthetic peptide
  Seed: DPRMCSLMQGSTLPRRSGAA
DPRMWSLMQASTVPRRSGAA

SEQ ID NO: 67980 - protein, 20 aa, Artificial Sequence
  Description of Artificial Sequence: Synthetic peptide
  Seed: DPRMCSLMQGSTLPRRSGAA
DPRMWSLMQGSTAPRRSGAA

SEQ ID NO: 67981 - protein, 20 aa, Artificial Sequence
  Description of Artificial Sequence: Synthetic peptide
  Seed: DPRMCSLMQGSTLPRRSGAA
DPRMWSLMQGSTGPRRSGAA

SEQ ID NO: 67982 - protein, 20 aa, Artificial Sequence
  Description of Artificial Sequence: Synthetic peptide
  Seed: DPRMCSLMQGSTLPRRSGAA
DPRMWSLMQGSTIPRRSGAA

SEQ ID NO: 67983 - protein, 20 aa, Artificial Sequence
  Description of Artificial Sequence: Synthetic peptide
  Seed: DPRMCSLMQGSTLPRRSGAA
DPRMWSLMQGSTLPRRSGAA

SEQ ID NO: 67984 - protein, 20 aa, Artificial Sequence
  Description of Artificial Sequence: Synthetic peptide
  Seed: DPRMCSLMQGSTLPRRSGAA
DPRMWSLMQGSTMPRRSGAA

SEQ ID NO: 67985 - protein, 20 aa, Artificial Sequence
  Description of Artificial Sequence: Synthetic peptide
  Seed: DPRMCSLMQGSTLPRRSGAA
DPRMWSLMQGSTSPRRSGAA

SEQ ID NO: 67986 - protein, 20 aa, Artificial Sequence
  Description of Artificial Sequence: Synthetic peptide
  Seed: DPRMCSLMQGSTLPRRSGAA
DPRMWSLMQGSTTPRRSGAA

SEQ ID NO: 67987 - protein, 20 aa, Artificial Sequence
  Description of Artificial Sequence: Synthetic peptide
  Seed: DPRMCSLMQGSTLPRRSGAA
DPRMWSLMQGSTVPRRSGAA

SEQ ID NO: 67988 - protein, 20 aa, Artificial Sequence
  Description of Artificial Sequence: Synthetic peptide
  Seed: DPRMCSLMQGSTLPRRSGAA
DPRMWSLMQNSTAPRRSGAA

SEQ ID NO: 67989 - protein, 20 aa, Artificial Sequence
  Description of Artificial Sequence: Synthetic peptide
  Seed: DPRMCSLMQGSTLPRRSGAA
DPRMWSLMQNSTIPRRSGAA

SEQ ID NO: 67990 - protein, 20 aa, Artificial Sequence
  Description of Artificial Sequence: Synthetic peptide
  Seed: DPRMCSLMQGSTLPRRSGAA
DPRMWSLMQNSTLPRRSGAA

SEQ ID NO: 67991 - protein, 20 aa, Artificial Sequence
  Description of Artificial Sequence: Synthetic peptide
  Seed: DPRMCSLMQGSTLPRRSGAA
DPRMWSLMQNSTMPRRSGAA

SEQ ID NO: 67992 - protein, 20 aa, Artificial Sequence
  Description of Artificial Sequence: Synthetic peptide
  Seed: DPRMCSLMQGSTLPRRSGAA
DPRMWSLMQNSTTPRRSGAA

SEQ ID NO: 67993 - protein, 20 aa, Artificial Sequence
  Description of Artificial Sequence: Synthetic peptide
  Seed: DPRMCSLMQGSTLPRRSGAA
DPRMWSLMQNSTVPRRSGAA

SEQ ID NO: 67994 - protein, 20 aa, Artificial Sequence
  Description of Artificial Sequence: Synthetic peptide
  Seed: DPRMCSLMQGSTLPRRSGAA
DPRMWSLMQPSTAPRRSGAA

SEQ ID NO: 67995 - protein, 20 aa, Artificial Sequence
  Description of Artificial Sequence: Synthetic peptide
  Seed: DPRMCSLMQGSTLPRRSGAA
DPRMWSLMQPSTIPRRSGAA

SEQ ID NO: 67996 - protein, 20 aa, Artificial Sequence
  Description of Artificial Sequence: Synthetic peptide
  Seed: DPRMCSLMQGSTLPRRSGAA
DPRMWSLMQPSTLPRRSGAA

SEQ ID NO: 67997 - protein, 20 aa, Artificial Sequence
  Description of Artificial Sequence: Synthetic peptide
  Seed: DPRMCSLMQGSTLPRRSGAA
DPRMWSLMQPSTMPRRSGAA

SEQ ID NO: 67998 - protein, 20 aa, Artificial Sequence
  Description of Artificial Sequence: Synthetic peptide
  Seed: DPRMCSLMQGSTLPRRSGAA
DPRMWSLMQPSTSPRRSGAA

SEQ ID NO: 67999 - protein, 20 aa, Artificial Sequence
  Description of Artificial Sequence: Synthetic peptide
  Seed: DPRMCSLMQGSTLPRRSGAA
DPRMWSLMQPSTTPRRSGAA

SEQ ID NO: 68000 - protein, 20 aa, Artificial Sequence
  Description of Artificial Sequence: Synthetic peptide
  Seed: DPRMCSLMQGSTLPRRSGAA
DPRMWSLMQPSTVPRRSGAA

SEQ ID NO: 68001 - protein, 20 aa, Artificial Sequence
  Description of Artificial Sequence: Synthetic peptide
  Seed: DPRMCSLMQGSTLPRRSGAA
DPRMWSLMQSSTAPRRSGAA

SEQ ID NO: 68002 - protein, 20 aa, Artificial Sequence
  Description of Artificial Sequence: Synthetic peptide
  Seed: DPRMCSLMQGSTLPRRSGAA
DPRMWSLMQSSTGPRRSGAA

SEQ ID NO: 68003 - protein, 20 aa, Artificial Sequence
  Description of Artificial Sequence: Synthetic peptide
  Seed: DPRMCSLMQGSTLPRRSGAA
DPRMWSLMQSSTIPRRSGAA

SEQ ID NO: 68004 - protein, 20 aa, Artificial Sequence
  Description of Artificial Sequence: Synthetic peptide
  Seed: DPRMCSLMQGSTLPRRSGAA
DPRMWSLMQSSTLPRRSGAA

SEQ ID NO: 68005 - protein, 20 aa, Artificial Sequence
  Description of Artificial Sequence: Synthetic peptide
  Seed: DPRMCSLMQGSTLPRRSGAA
DPRMWSLMQSSTMPRRSGAA

SEQ ID NO: 68006 - protein, 20 aa, Artificial Sequence
  Description of Artificial Sequence: Synthetic peptide
  Seed: DPRMCSLMQGSTLPRRSGAA
DPRMWSLMQSSTSPRRSGAA

SEQ ID NO: 68007 - protein, 20 aa, Artificial Sequence
  Description of Artificial Sequence: Synthetic peptide
  Seed: DPRMCSLMQGSTLPRRSGAA
DPRMWSLMQSSTTPRRSGAA

SEQ ID NO: 68008 - protein, 20 aa, Artificial Sequence
  Description of Artificial Sequence: Synthetic peptide
  Seed: DPRMCSLMQGSTLPRRSGAA
DPRMWSLMQSSTVPRRSGAA

SEQ ID NO: 68009 - protein, 20 aa, Artificial Sequence
  Description of Artificial Sequence: Synthetic peptide
  Seed: DPRMCSLMQGSTLPRRSGAA
DPRMWSLMQTSTAPRRSGAA

SEQ ID NO: 68010 - protein, 20 aa, Artificial Sequence
  Description of Artificial Sequence: Synthetic peptide
  Seed: DPRMCSLMQGSTLPRRSGAA
DPRMWSLMQTSTIPRRSGAA

SEQ ID NO: 68011 - protein, 20 aa, Artificial Sequence
  Description of Artificial Sequence: Synthetic peptide
  Seed: DPRMCSLMQGSTLPRRSGAA
DPRMWSLMQTSTLPRRSGAA

SEQ ID NO: 68012 - protein, 20 aa, Artificial Sequence
  Description of Artificial Sequence: Synthetic peptide
  Seed: DPRMCSLMQGSTLPRRSGAA
DPRMWSLMQTSTMPRRSGAA

SEQ ID NO: 68013 - protein, 20 aa, Artificial Sequence
  Description of Artificial Sequence: Synthetic peptide
  Seed: DPRMCSLMQGSTLPRRSGAA
DPRMWSLMQTSTSPRRSGAA

SEQ ID NO: 68014 - protein, 20 aa, Artificial Sequence
  Description of Artificial Sequence: Synthetic peptide
  Seed: DPRMCSLMQGSTLPRRSGAA
DPRMWSLMQTSTTPRRSGAA

SEQ ID NO: 68015 - protein, 20 aa, Artificial Sequence
  Description of Artificial Sequence: Synthetic peptide
  Seed: DPRMCSLMQGSTLPRRSGAA
DPRMWSLMQTSTVPRRSGAA

SEQ ID NO: 68016 - protein, 20 aa, Artificial Sequence
  Description of Artificial Sequence: Synthetic peptide
  Seed: DPRMCSLMQGSTLPRRSGAA
DPRMWSLMQVSTAPRRSGAA

SEQ ID NO: 68017 - protein, 20 aa, Artificial Sequence
  Description of Artificial Sequence: Synthetic peptide
  Seed: DPRMCSLMQGSTLPRRSGAA
DPRMWSLMQVSTIPRRSGAA

SEQ ID NO: 68018 - protein, 20 aa, Artificial Sequence
  Description of Artificial Sequence: Synthetic peptide
  Seed: DPRMCSLMQGSTLPRRSGAA
DPRMWSLMQVSTLPRRSGAA

SEQ ID NO: 68019 - protein, 20 aa, Artificial Sequence
  Description of Artificial Sequence: Synthetic peptide
  Seed: DPRMCSLMQGSTLPRRSGAA
DPRMWSLMQVSTVPRRSGAA

SEQ ID NO: 68020 - protein, 20 aa, Artificial Sequence
  Description of Artificial Sequence: Synthetic peptide
  Seed: DPRMCSLMQGSTLPRRSGAA
DPRMWSLQQASTAPRRSGAA

SEQ ID NO: 68021 - protein, 20 aa, Artificial Sequence
  Description of Artificial Sequence: Synthetic peptide
  Seed: DPRMCSLMQGSTLPRRSGAA
DPRMWSLQQASTIPRRSGAA

SEQ ID NO: 68022 - protein, 20 aa, Artificial Sequence
  Description of Artificial Sequence: Synthetic peptide
  Seed: DPRMCSLMQGSTLPRRSGAA
DPRMWSLQQASTLPRRSGAA

SEQ ID NO: 68023 - protein, 20 aa, Artificial Sequence
  Description of Artificial Sequence: Synthetic peptide
  Seed: DPRMCSLMQGSTLPRRSGAA
DPRMWSLQQASTMPRRSGAA

SEQ ID NO: 68024 - protein, 20 aa, Artificial Sequence
  Description of Artificial Sequence: Synthetic peptide
  Seed: DPRMCSLMQGSTLPRRSGAA
DPRMWSLQQASTTPRRSGAA

SEQ ID NO: 68025 - protein, 20 aa, Artificial Sequence
  Description of Artificial Sequence: Synthetic peptide
  Seed: DPRMCSLMQGSTLPRRSGAA
DPRMWSLQQASTVPRRSGAA

SEQ ID NO: 68026 - protein, 20 aa, Artificial Sequence
  Description of Artificial Sequence: Synthetic peptide
  Seed: DPRMCSLMQGSTLPRRSGAA
DPRMWSLQQGSTAPRRSGAA

SEQ ID NO: 68027 - protein, 20 aa, Artificial Sequence
  Description of Artificial Sequence: Synthetic peptide
  Seed: DPRMCSLMQGSTLPRRSGAA
DPRMWSLQQGSTIPRRSGAA

SEQ ID NO: 68028 - protein, 20 aa, Artificial Sequence
  Description of Artificial Sequence: Synthetic peptide
  Seed: DPRMCSLMQGSTLPRRSGAA
DPRMWSLQQGSTLPRRSGAA

SEQ ID NO: 68029 - protein, 20 aa, Artificial Sequence
  Description of Artificial Sequence: Synthetic peptide
  Seed: DPRMCSLMQGSTLPRRSGAA
DPRMWSLQQGSTVPRRSGAA

SEQ ID NO: 68030 - protein, 20 aa, Artificial Sequence
  Description of Artificial Sequence: Synthetic peptide
  Seed: DPRMCSLMQGSTLPRRSGAA
DPRMWSLQQSSTAPRRSGAA

SEQ ID NO: 68031 - protein, 20 aa, Artificial Sequence
  Description of Artificial Sequence: Synthetic peptide
  Seed: DPRMCSLMQGSTLPRRSGAA
DPRMWSLQQSSTIPRRSGAA

SEQ ID NO: 68032 - protein, 20 aa, Artificial Sequence
  Description of Artificial Sequence: Synthetic peptide
  Seed: DPRMCSLMQGSTLPRRSGAA
DPRMWSLQQSSTLPRRSGAA

SEQ ID NO: 68033 - protein, 20 aa, Artificial Sequence
  Description of Artificial Sequence: Synthetic peptide
  Seed: DPRMCSLMQGSTLPRRSGAA
DPRMWSLQQSSTVPRRSGAA

SEQ ID NO: 68034 - protein, 20 aa, Artificial Sequence
  Description of Artificial Sequence: Synthetic peptide
  Seed: DPRMCSLMQGSTLPRRSGAA
DPRMWSLSQASTAPRRSGAA

SEQ ID NO: 68035 - protein, 20 aa, Artificial Sequence
  Description of Artificial Sequence: Synthetic peptide
  Seed: DPRMCSLMQGSTLPRRSGAA
DPRMWSLSQASTIPRRSGAA

SEQ ID NO: 68036 - protein, 20 aa, Artificial Sequence
  Description of Artificial Sequence: Synthetic peptide
  Seed: DPRMCSLMQGSTLPRRSGAA
DPRMWSLSQASTLPRRSGAA

SEQ ID NO: 68037 - protein, 20 aa, Artificial Sequence
  Description of Artificial Sequence: Synthetic peptide
  Seed: DPRMCSLMQGSTLPRRSGAA
DPRMWSLSQASTVPRRSGAA

SEQ ID NO: 68038 - protein, 20 aa, Artificial Sequence
  Description of Artificial Sequence: Synthetic peptide
  Seed: DPRMCSLMQGSTLPRRSGAA
DPRMWSLSQSSTIPRRSGAA

SEQ ID NO: 68039 - protein, 20 aa, Artificial Sequence
  Description of Artificial Sequence: Synthetic peptide
  Seed: DPRMCSLMQGSTLPRRSGAA
DPRMWSLTQASTVPRRSGAA

SEQ ID NO: 68040 - protein, 20 aa, Artificial Sequence
  Description of Artificial Sequence: Synthetic peptide
  Seed: DPRMCSLMQGSTLPRRSGAA
DPRMWSLVQASTAPRRSGAA

SEQ ID NO: 68041 - protein, 20 aa, Artificial Sequence
  Description of Artificial Sequence: Synthetic peptide
  Seed: DPRMCSLMQGSTLPRRSGAA
DPRMWSLVQASTIPRRSGAA

SEQ ID NO: 68042 - protein, 20 aa, Artificial Sequence
  Description of Artificial Sequence: Synthetic peptide
  Seed: DPRMCSLMQGSTLPRRSGAA
DPRMWSLVQASTLPRRSGAA

SEQ ID NO: 68043 - protein, 20 aa, Artificial Sequence
  Description of Artificial Sequence: Synthetic peptide
  Seed: DPRMCSLMQGSTLPRRSGAA
DPRMWSLVQASTMPRRSGAA

SEQ ID NO: 68044 - protein, 20 aa, Artificial Sequence
  Description of Artificial Sequence: Synthetic peptide
  Seed: DPRMCSLMQGSTLPRRSGAA
DPRMWSLVQASTTPRRSGAA

SEQ ID NO: 68045 - protein, 20 aa, Artificial Sequence
  Description of Artificial Sequence: Synthetic peptide
  Seed: DPRMCSLMQGSTLPRRSGAA
DPRMWSLVQASTVPRRSGAA

SEQ ID NO: 68046 - protein, 20 aa, Artificial Sequence
  Description of Artificial Sequence: Synthetic peptide
  Seed: DPRMCSLMQGSTLPRRSGAA
DPRMWSLVQGSTAPRRSGAA

SEQ ID NO: 68047 - protein, 20 aa, Artificial Sequence
  Description of Artificial Sequence: Synthetic peptide
  Seed: DPRMCSLMQGSTLPRRSGAA
DPRMWSLVQGSTIPRRSGAA

SEQ ID NO: 68048 - protein, 20 aa, Artificial Sequence
  Description of Artificial Sequence: Synthetic peptide
  Seed: DPRMCSLMQGSTLPRRSGAA
DPRMWSLVQGSTLPRRSGAA

SEQ ID NO: 68049 - protein, 20 aa, Artificial Sequence
  Description of Artificial Sequence: Synthetic peptide
  Seed: DPRMCSLMQGSTLPRRSGAA
DPRMWSLVQGSTVPRRSGAA

SEQ ID NO: 68050 - protein, 20 aa, Artificial Sequence
  Description of Artificial Sequence: Synthetic peptide
  Seed: DPRMCSLMQGSTLPRRSGAA
DPRMWSLVQPSTIPRRSGAA

SEQ ID NO: 68051 - protein, 20 aa, Artificial Sequence
  Description of Artificial Sequence: Synthetic peptide
  Seed: DPRMCSLMQGSTLPRRSGAA
DPRMWSLVQPSTVPRRSGAA

SEQ ID NO: 68052 - protein, 20 aa, Artificial Sequence
  Description of Artificial Sequence: Synthetic peptide
  Seed: DPRMCSLMQGSTLPRRSGAA
DPRMWSLVQSSTAPRRSGAA

SEQ ID NO: 68053 - protein, 20 aa, Artificial Sequence
  Description of Artificial Sequence: Synthetic peptide
  Seed: DPRMCSLMQGSTLPRRSGAA
DPRMWSLVQSSTIPRRSGAA

SEQ ID NO: 68054 - protein, 20 aa, Artificial Sequence
  Description of Artificial Sequence: Synthetic peptide
  Seed: DPRMCSLMQGSTLPRRSGAA
DPRMWSLVQSSTLPRRSGAA

SEQ ID NO: 68055 - protein, 20 aa, Artificial Sequence
  Description of Artificial Sequence: Synthetic peptide
  Seed: DPRMCSLMQGSTLPRRSGAA
DPRMWSLVQSSTVPRRSGAA

SEQ ID NO: 68056 - protein, 20 aa, Artificial Sequence
  Description of Artificial Sequence: Synthetic peptide
  Seed: DPRMCSLMQGSTLPRRSGAA
DPRMYSLAQASTAPRRSGAA

SEQ ID NO: 68057 - protein, 20 aa, Artificial Sequence
  Description of Artificial Sequence: Synthetic peptide
  Seed: DPRMCSLMQGSTLPRRSGAA
DPRMYSLAQASTCPRRSGAA

SEQ ID NO: 68058 - protein, 20 aa, Artificial Sequence
  Description of Artificial Sequence: Synthetic peptide
  Seed: DPRMCSLMQGSTLPRRSGAA
DPRMYSLAQASTFPRRSGAA

SEQ ID NO: 68059 - protein, 20 aa, Artificial Sequence
  Description of Artificial Sequence: Synthetic peptide
  Seed: DPRMCSLMQGSTLPRRSGAA
DPRMYSLAQASTGPRRSGAA

SEQ ID NO: 68060 - protein, 20 aa, Artificial Sequence
  Description of Artificial Sequence: Synthetic peptide
  Seed: DPRMCSLMQGSTLPRRSGAA
DPRMYSLAQASTIPRRSGAA

SEQ ID NO: 68061 - protein, 20 aa, Artificial Sequence
  Description of Artificial Sequence: Synthetic peptide
  Seed: DPRMCSLMQGSTLPRRSGAA
DPRMYSLAQASTLPRRSGAA

SEQ ID NO: 68062 - protein, 20 aa, Artificial Sequence
  Description of Artificial Sequence: Synthetic peptide
  Seed: DPRMCSLMQGSTLPRRSGAA
DPRMYSLAQASTMPRRSGAA

SEQ ID NO: 68063 - protein, 20 aa, Artificial Sequence
  Description of Artificial Sequence: Synthetic peptide
  Seed: DPRMCSLMQGSTLPRRSGAA
DPRMYSLAQASTNPRRSGAA

SEQ ID NO: 68064 - protein, 20 aa, Artificial Sequence
  Description of Artificial Sequence: Synthetic peptide
  Seed: DPRMCSLMQGSTLPRRSGAA
DPRMYSLAQASTSPRRSGAA

SEQ ID NO: 68065 - protein, 20 aa, Artificial Sequence
  Description of Artificial Sequence: Synthetic peptide
  Seed: DPRMCSLMQGSTLPRRSGAA
DPRMYSLAQASTTPRRSGAA

SEQ ID NO: 68066 - protein, 20 aa, Artificial Sequence
  Description of Artificial Sequence: Synthetic peptide
  Seed: DPRMCSLMQGSTLPRRSGAA
DPRMYSLAQASTVPRRSGAA

SEQ ID NO: 68067 - protein, 20 aa, Artificial Sequence
  Description of Artificial Sequence: Synthetic peptide
  Seed: DPRMCSLMQGSTLPRRSGAA
DPRMYSLAQGSTAPRRSGAA

SEQ ID NO: 68068 - protein, 20 aa, Artificial Sequence
  Description of Artificial Sequence: Synthetic peptide
  Seed: DPRMCSLMQGSTLPRRSGAA
DPRMYSLAQGSTIPRRSGAA

SEQ ID NO: 68069 - protein, 20 aa, Artificial Sequence
  Description of Artificial Sequence: Synthetic peptide
  Seed: DPRMCSLMQGSTLPRRSGAA
DPRMYSLAQGSTLPRRSGAA

SEQ ID NO: 68070 - protein, 20 aa, Artificial Sequence
  Description of Artificial Sequence: Synthetic peptide
  Seed: DPRMCSLMQGSTLPRRSGAA
DPRMYSLAQGSTMPRRSGAA

SEQ ID NO: 68071 - protein, 20 aa, Artificial Sequence
  Description of Artificial Sequence: Synthetic peptide
  Seed: DPRMCSLMQGSTLPRRSGAA
DPRMYSLAQGSTSPRRSGAA

SEQ ID NO: 68072 - protein, 20 aa, Artificial Sequence
  Description of Artificial Sequence: Synthetic peptide
  Seed: DPRMCSLMQGSTLPRRSGAA
DPRMYSLAQGSTTPRRSGAA

SEQ ID NO: 68073 - protein, 20 aa, Artificial Sequence
  Description of Artificial Sequence: Synthetic peptide
  Seed: DPRMCSLMQGSTLPRRSGAA
DPRMYSLAQGSTVPRRSGAA

SEQ ID NO: 68074 - protein, 20 aa, Artificial Sequence
  Description of Artificial Sequence: Synthetic peptide
  Seed: DPRMCSLMQGSTLPRRSGAA
DPRMYSLAQISTAPRRSGAA

SEQ ID NO: 68075 - protein, 20 aa, Artificial Sequence
  Description of Artificial Sequence: Synthetic peptide
  Seed: DPRMCSLMQGSTLPRRSGAA
DPRMYSLAQISTIPRRSGAA

SEQ ID NO: 68076 - protein, 20 aa, Artificial Sequence
  Description of Artificial Sequence: Synthetic peptide
  Seed: DPRMCSLMQGSTLPRRSGAA
DPRMYSLAQISTLPRRSGAA

SEQ ID NO: 68077 - protein, 20 aa, Artificial Sequence
  Description of Artificial Sequence: Synthetic peptide
  Seed: DPRMCSLMQGSTLPRRSGAA
DPRMYSLAQISTVPRRSGAA

SEQ ID NO: 68078 - protein, 20 aa, Artificial Sequence
  Description of Artificial Sequence: Synthetic peptide
  Seed: DPRMCSLMQGSTLPRRSGAA
DPRMYSLAQNSTAPRRSGAA

SEQ ID NO: 68079 - protein, 20 aa, Artificial Sequence
  Description of Artificial Sequence: Synthetic peptide
  Seed: DPRMCSLMQGSTLPRRSGAA
DPRMYSLAQNSTIPRRSGAA

SEQ ID NO: 68080 - protein, 20 aa, Artificial Sequence
  Description of Artificial Sequence: Synthetic peptide
  Seed: DPRMCSLMQGSTLPRRSGAA
DPRMYSLAQNSTLPRRSGAA

SEQ ID NO: 68081 - protein, 20 aa, Artificial Sequence
  Description of Artificial Sequence: Synthetic peptide
  Seed: DPRMCSLMQGSTLPRRSGAA
DPRMYSLAQNSTVPRRSGAA

SEQ ID NO: 68082 - protein, 20 aa, Artificial Sequence
  Description of Artificial Sequence: Synthetic peptide
  Seed: DPRMCSLMQGSTLPRRSGAA
DPRMYSLAQPSTAPRRSGAA

SEQ ID NO: 68083 - protein, 20 aa, Artificial Sequence
  Description of Artificial Sequence: Synthetic peptide
  Seed: DPRMCSLMQGSTLPRRSGAA
DPRMYSLAQPSTIPRRSGAA

SEQ ID NO: 68084 - protein, 20 aa, Artificial Sequence
  Description of Artificial Sequence: Synthetic peptide
  Seed: DPRMCSLMQGSTLPRRSGAA
DPRMYSLAQPSTLPRRSGAA

SEQ ID NO: 68085 - protein, 20 aa, Artificial Sequence
  Description of Artificial Sequence: Synthetic peptide
  Seed: DPRMCSLMQGSTLPRRSGAA
DPRMYSLAQPSTMPRRSGAA

SEQ ID NO: 68086 - protein, 20 aa, Artificial Sequence
  Description of Artificial Sequence: Synthetic peptide
  Seed: DPRMCSLMQGSTLPRRSGAA
DPRMYSLAQPSTSPRRSGAA

SEQ ID NO: 68087 - protein, 20 aa, Artificial Sequence
  Description of Artificial Sequence: Synthetic peptide
  Seed: DPRMCSLMQGSTLPRRSGAA
DPRMYSLAQPSTTPRRSGAA

SEQ ID NO: 68088 - protein, 20 aa, Artificial Sequence
  Description of Artificial Sequence: Synthetic peptide
  Seed: DPRMCSLMQGSTLPRRSGAA
DPRMYSLAQPSTVPRRSGAA

SEQ ID NO: 68089 - protein, 20 aa, Artificial Sequence
  Description of Artificial Sequence: Synthetic peptide
  Seed: DPRMCSLMQGSTLPRRSGAA
DPRMYSLAQSSTAPRRSGAA

SEQ ID NO: 68090 - protein, 20 aa, Artificial Sequence
  Description of Artificial Sequence: Synthetic peptide
  Seed: DPRMCSLMQGSTLPRRSGAA
DPRMYSLAQSSTIPRRSGAA

SEQ ID NO: 68091 - protein, 20 aa, Artificial Sequence
  Description of Artificial Sequence: Synthetic peptide
  Seed: DPRMCSLMQGSTLPRRSGAA
DPRMYSLAQSSTLPRRSGAA

SEQ ID NO: 68092 - protein, 20 aa, Artificial Sequence
  Description of Artificial Sequence: Synthetic peptide
  Seed: DPRMCSLMQGSTLPRRSGAA
DPRMYSLAQSSTMPRRSGAA

SEQ ID NO: 68093 - protein, 20 aa, Artificial Sequence
  Description of Artificial Sequence: Synthetic peptide
  Seed: DPRMCSLMQGSTLPRRSGAA
DPRMYSLAQSSTSPRRSGAA

SEQ ID NO: 68094 - protein, 20 aa, Artificial Sequence
  Description of Artificial Sequence: Synthetic peptide
  Seed: DPRMCSLMQGSTLPRRSGAA
DPRMYSLAQSSTTPRRSGAA

SEQ ID NO: 68095 - protein, 20 aa, Artificial Sequence
  Description of Artificial Sequence: Synthetic peptide
  Seed: DPRMCSLMQGSTLPRRSGAA
DPRMYSLAQSSTVPRRSGAA

SEQ ID NO: 68096 - protein, 20 aa, Artificial Sequence
  Description of Artificial Sequence: Synthetic peptide
  Seed: DPRMCSLMQGSTLPRRSGAA
DPRMYSLAQTSTAPRRSGAA

SEQ ID NO: 68097 - protein, 20 aa, Artificial Sequence
  Description of Artificial Sequence: Synthetic peptide
  Seed: DPRMCSLMQGSTLPRRSGAA
DPRMYSLAQTSTIPRRSGAA

SEQ ID NO: 68098 - protein, 20 aa, Artificial Sequence
  Description of Artificial Sequence: Synthetic peptide
  Seed: DPRMCSLMQGSTLPRRSGAA
DPRMYSLAQTSTLPRRSGAA

SEQ ID NO: 68099 - protein, 20 aa, Artificial Sequence
  Description of Artificial Sequence: Synthetic peptide
  Seed: DPRMCSLMQGSTLPRRSGAA
DPRMYSLAQTSTMPRRSGAA

SEQ ID NO: 68100 - protein, 20 aa, Artificial Sequence
  Description of Artificial Sequence: Synthetic peptide
  Seed: DPRMCSLMQGSTLPRRSGAA
DPRMYSLAQTSTVPRRSGAA

SEQ ID NO: 68101 - protein, 20 aa, Artificial Sequence
  Description of Artificial Sequence: Synthetic peptide
  Seed: DPRMCSLMQGSTLPRRSGAA
DPRMYSLAQVSTAPRRSGAA

SEQ ID NO: 68102 - protein, 20 aa, Artificial Sequence
  Description of Artificial Sequence: Synthetic peptide
  Seed: DPRMCSLMQGSTLPRRSGAA
DPRMYSLAQVSTIPRRSGAA

SEQ ID NO: 68103 - protein, 20 aa, Artificial Sequence
  Description of Artificial Sequence: Synthetic peptide
  Seed: DPRMCSLMQGSTLPRRSGAA
DPRMYSLAQVSTLPRRSGAA

SEQ ID NO: 68104 - protein, 20 aa, Artificial Sequence
  Description of Artificial Sequence: Synthetic peptide
  Seed: DPRMCSLMQGSTLPRRSGAA
DPRMYSLAQVSTMPRRSGAA

SEQ ID NO: 68105 - protein, 20 aa, Artificial Sequence
  Description of Artificial Sequence: Synthetic peptide
  Seed: DPRMCSLMQGSTLPRRSGAA
DPRMYSLAQVSTVPRRSGAA

SEQ ID NO: 68106 - protein, 20 aa, Artificial Sequence
  Description of Artificial Sequence: Synthetic peptide
  Seed: DPRMCSLMQGSTLPRRSGAA
DPRMYSLCQASTIPRRSGAA

SEQ ID NO: 68107 - protein, 20 aa, Artificial Sequence
  Description of Artificial Sequence: Synthetic peptide
  Seed: DPRMCSLMQGSTLPRRSGAA
DPRMYSLCQASTLPRRSGAA

SEQ ID NO: 68108 - protein, 20 aa, Artificial Sequence
  Description of Artificial Sequence: Synthetic peptide
  Seed: DPRMCSLMQGSTLPRRSGAA
DPRMYSLCQASTVPRRSGAA

SEQ ID NO: 68109 - protein, 20 aa, Artificial Sequence
  Description of Artificial Sequence: Synthetic peptide
  Seed: DPRMCSLMQGSTLPRRSGAA
DPRMYSLEQASTAPRRSGAA

SEQ ID NO: 68110 - protein, 20 aa, Artificial Sequence
  Description of Artificial Sequence: Synthetic peptide
  Seed: DPRMCSLMQGSTLPRRSGAA
DPRMYSLEQASTIPRRSGAA

SEQ ID NO: 68111 - protein, 20 aa, Artificial Sequence
  Description of Artificial Sequence: Synthetic peptide
  Seed: DPRMCSLMQGSTLPRRSGAA
DPRMYSLEQASTLPRRSGAA

SEQ ID NO: 68112 - protein, 20 aa, Artificial Sequence
  Description of Artificial Sequence: Synthetic peptide
  Seed: DPRMCSLMQGSTLPRRSGAA
DPRMYSLEQASTMPRRSGAA

SEQ ID NO: 68113 - protein, 20 aa, Artificial Sequence
  Description of Artificial Sequence: Synthetic peptide
  Seed: DPRMCSLMQGSTLPRRSGAA
DPRMYSLEQASTVPRRSGAA

SEQ ID NO: 68114 - protein, 20 aa, Artificial Sequence
  Description of Artificial Sequence: Synthetic peptide
  Seed: DPRMCSLMQGSTLPRRSGAA
DPRMYSLEQGSTAPRRSGAA

SEQ ID NO: 68115 - protein, 20 aa, Artificial Sequence
  Description of Artificial Sequence: Synthetic peptide
  Seed: DPRMCSLMQGSTLPRRSGAA
DPRMYSLEQGSTIPRRSGAA

SEQ ID NO: 68116 - protein, 20 aa, Artificial Sequence
  Description of Artificial Sequence: Synthetic peptide
  Seed: DPRMCSLMQGSTLPRRSGAA
DPRMYSLEQGSTLPRRSGAA

SEQ ID NO: 68117 - protein, 20 aa, Artificial Sequence
  Description of Artificial Sequence: Synthetic peptide
  Seed: DPRMCSLMQGSTLPRRSGAA
DPRMYSLEQGSTVPRRSGAA

SEQ ID NO: 68118 - protein, 20 aa, Artificial Sequence
  Description of Artificial Sequence: Synthetic peptide
  Seed: DPRMCSLMQGSTLPRRSGAA
DPRMYSLEQSSTAPRRSGAA

SEQ ID NO: 68119 - protein, 20 aa, Artificial Sequence
  Description of Artificial Sequence: Synthetic peptide
  Seed: DPRMCSLMQGSTLPRRSGAA
DPRMYSLEQSSTIPRRSGAA

SEQ ID NO: 68120 - protein, 20 aa, Artificial Sequence
  Description of Artificial Sequence: Synthetic peptide
  Seed: DPRMCSLMQGSTLPRRSGAA
DPRMYSLEQSSTLPRRSGAA

SEQ ID NO: 68121 - protein, 20 aa, Artificial Sequence
  Description of Artificial Sequence: Synthetic peptide
  Seed: DPRMCSLMQGSTLPRRSGAA
DPRMYSLEQSSTVPRRSGAA

SEQ ID NO: 68122 - protein, 20 aa, Artificial Sequence
  Description of Artificial Sequence: Synthetic peptide
  Seed: DPRMCSLMQGSTLPRRSGAA
DPRMYSLFQASTAPRRSGAA

SEQ ID NO: 68123 - protein, 20 aa, Artificial Sequence
  Description of Artificial Sequence: Synthetic peptide
  Seed: DPRMCSLMQGSTLPRRSGAA
DPRMYSLFQASTIPRRSGAA

SEQ ID NO: 68124 - protein, 20 aa, Artificial Sequence
  Description of Artificial Sequence: Synthetic peptide
  Seed: DPRMCSLMQGSTLPRRSGAA
DPRMYSLFQASTLPRRSGAA

SEQ ID NO: 68125 - protein, 20 aa, Artificial Sequence
  Description of Artificial Sequence: Synthetic peptide
  Seed: DPRMCSLMQGSTLPRRSGAA
DPRMYSLFQASTMPRRSGAA

SEQ ID NO: 68126 - protein, 20 aa, Artificial Sequence
  Description of Artificial Sequence: Synthetic peptide
  Seed: DPRMCSLMQGSTLPRRSGAA
DPRMYSLFQASTSPRRSGAA

SEQ ID NO: 68127 - protein, 20 aa, Artificial Sequence
  Description of Artificial Sequence: Synthetic peptide
  Seed: DPRMCSLMQGSTLPRRSGAA
DPRMYSLFQASTTPRRSGAA

SEQ ID NO: 68128 - protein, 20 aa, Artificial Sequence
  Description of Artificial Sequence: Synthetic peptide
  Seed: DPRMCSLMQGSTLPRRSGAA
DPRMYSLFQASTVPRRSGAA

SEQ ID NO: 68129 - protein, 20 aa, Artificial Sequence
  Description of Artificial Sequence: Synthetic peptide
  Seed: DPRMCSLMQGSTLPRRSGAA
DPRMYSLFQGSTAPRRSGAA

SEQ ID NO: 68130 - protein, 20 aa, Artificial Sequence
  Description of Artificial Sequence: Synthetic peptide
  Seed: DPRMCSLMQGSTLPRRSGAA
DPRMYSLFQGSTIPRRSGAA

SEQ ID NO: 68131 - protein, 20 aa, Artificial Sequence
  Description of Artificial Sequence: Synthetic peptide
  Seed: DPRMCSLMQGSTLPRRSGAA
DPRMYSLFQGSTLPRRSGAA

SEQ ID NO: 68132 - protein, 20 aa, Artificial Sequence
  Description of Artificial Sequence: Synthetic peptide
  Seed: DPRMCSLMQGSTLPRRSGAA
DPRMYSLFQGSTVPRRSGAA

SEQ ID NO: 68133 - protein, 20 aa, Artificial Sequence
  Description of Artificial Sequence: Synthetic peptide
  Seed: DPRMCSLMQGSTLPRRSGAA
DPRMYSLFQPSTAPRRSGAA

SEQ ID NO: 68134 - protein, 20 aa, Artificial Sequence
  Description of Artificial Sequence: Synthetic peptide
  Seed: DPRMCSLMQGSTLPRRSGAA
DPRMYSLFQPSTIPRRSGAA

SEQ ID NO: 68135 - protein, 20 aa, Artificial Sequence
  Description of Artificial Sequence: Synthetic peptide
  Seed: DPRMCSLMQGSTLPRRSGAA
DPRMYSLFQPSTVPRRSGAA

SEQ ID NO: 68136 - protein, 20 aa, Artificial Sequence
  Description of Artificial Sequence: Synthetic peptide
  Seed: DPRMCSLMQGSTLPRRSGAA
DPRMYSLFQSSTAPRRSGAA

SEQ ID NO: 68137 - protein, 20 aa, Artificial Sequence
  Description of Artificial Sequence: Synthetic peptide
  Seed: DPRMCSLMQGSTLPRRSGAA
DPRMYSLFQSSTIPRRSGAA

SEQ ID NO: 68138 - protein, 20 aa, Artificial Sequence
  Description of Artificial Sequence: Synthetic peptide
  Seed: DPRMCSLMQGSTLPRRSGAA
DPRMYSLFQSSTLPRRSGAA

SEQ ID NO: 68139 - protein, 20 aa, Artificial Sequence
  Description of Artificial Sequence: Synthetic peptide
  Seed: DPRMCSLMQGSTLPRRSGAA
DPRMYSLFQSSTVPRRSGAA

SEQ ID NO: 68140 - protein, 20 aa, Artificial Sequence
  Description of Artificial Sequence: Synthetic peptide
  Seed: DPRMCSLMQGSTLPRRSGAA
DPRMYSLFQTSTAPRRSGAA

SEQ ID NO: 68141 - protein, 20 aa, Artificial Sequence
  Description of Artificial Sequence: Synthetic peptide
  Seed: DPRMCSLMQGSTLPRRSGAA
DPRMYSLGQASTAPRRSGAA

SEQ ID NO: 68142 - protein, 20 aa, Artificial Sequence
  Description of Artificial Sequence: Synthetic peptide
  Seed: DPRMCSLMQGSTLPRRSGAA
DPRMYSLGQASTIPRRSGAA

SEQ ID NO: 68143 - protein, 20 aa, Artificial Sequence
  Description of Artificial Sequence: Synthetic peptide
  Seed: DPRMCSLMQGSTLPRRSGAA
DPRMYSLGQASTLPRRSGAA

SEQ ID NO: 68144 - protein, 20 aa, Artificial Sequence
  Description of Artificial Sequence: Synthetic peptide
  Seed: DPRMCSLMQGSTLPRRSGAA
DPRMYSLGQASTMPRRSGAA

SEQ ID NO: 68145 - protein, 20 aa, Artificial Sequence
  Description of Artificial Sequence: Synthetic peptide
  Seed: DPRMCSLMQGSTLPRRSGAA
DPRMYSLGQASTVPRRSGAA

SEQ ID NO: 68146 - protein, 20 aa, Artificial Sequence
  Description of Artificial Sequence: Synthetic peptide
  Seed: DPRMCSLMQGSTLPRRSGAA
DPRMYSLGQGSTIPRRSGAA

SEQ ID NO: 68147 - protein, 20 aa, Artificial Sequence
  Description of Artificial Sequence: Synthetic peptide
  Seed: DPRMCSLMQGSTLPRRSGAA
DPRMYSLGQGSTLPRRSGAA

SEQ ID NO: 68148 - protein, 20 aa, Artificial Sequence
  Description of Artificial Sequence: Synthetic peptide
  Seed: DPRMCSLMQGSTLPRRSGAA
DPRMYSLGQGSTVPRRSGAA

SEQ ID NO: 68149 - protein, 20 aa, Artificial Sequence
  Description of Artificial Sequence: Synthetic peptide
  Seed: DPRMCSLMQGSTLPRRSGAA
DPRMYSLGQSSTIPRRSGAA

SEQ ID NO: 68150 - protein, 20 aa, Artificial Sequence
  Description of Artificial Sequence: Synthetic peptide
  Seed: DPRMCSLMQGSTLPRRSGAA
DPRMYSLGQSSTLPRRSGAA

SEQ ID NO: 68151 - protein, 20 aa, Artificial Sequence
  Description of Artificial Sequence: Synthetic peptide
  Seed: DPRMCSLMQGSTLPRRSGAA
DPRMYSLGQSSTVPRRSGAA

SEQ ID NO: 68152 - protein, 20 aa, Artificial Sequence
  Description of Artificial Sequence: Synthetic peptide
  Seed: DPRMCSLMQGSTLPRRSGAA
DPRMYSLHQASTIPRRSGAA

SEQ ID NO: 68153 - protein, 20 aa, Artificial Sequence
  Description of Artificial Sequence: Synthetic peptide
  Seed: DPRMCSLMQGSTLPRRSGAA
DPRMYSLHQASTLPRRSGAA

SEQ ID NO: 68154 - protein, 20 aa, Artificial Sequence
  Description of Artificial Sequence: Synthetic peptide
  Seed: DPRMCSLMQGSTLPRRSGAA
DPRMYSLHQASTVPRRSGAA

SEQ ID NO: 68155 - protein, 20 aa, Artificial Sequence
  Description of Artificial Sequence: Synthetic peptide
  Seed: DPRMCSLMQGSTLPRRSGAA
DPRMYSLIQASTAPRRSGAA

SEQ ID NO: 68156 - protein, 20 aa, Artificial Sequence
  Description of Artificial Sequence: Synthetic peptide
  Seed: DPRMCSLMQGSTLPRRSGAA
DPRMYSLIQASTCPRRSGAA

SEQ ID NO: 68157 - protein, 20 aa, Artificial Sequence
  Description of Artificial Sequence: Synthetic peptide
  Seed: DPRMCSLMQGSTLPRRSGAA
DPRMYSLIQASTFPRRSGAA

SEQ ID NO: 68158 - protein, 20 aa, Artificial Sequence
  Description of Artificial Sequence: Synthetic peptide
  Seed: DPRMCSLMQGSTLPRRSGAA
DPRMYSLIQASTGPRRSGAA

SEQ ID NO: 68159 - protein, 20 aa, Artificial Sequence
  Description of Artificial Sequence: Synthetic peptide
  Seed: DPRMCSLMQGSTLPRRSGAA
DPRMYSLIQASTIPRRSGAA

SEQ ID NO: 68160 - protein, 20 aa, Artificial Sequence
  Description of Artificial Sequence: Synthetic peptide
  Seed: DPRMCSLMQGSTLPRRSGAA
DPRMYSLIQASTLPRRSGAA

SEQ ID NO: 68161 - protein, 20 aa, Artificial Sequence
  Description of Artificial Sequence: Synthetic peptide
  Seed: DPRMCSLMQGSTLPRRSGAA
DPRMYSLIQASTMPRRSGAA

SEQ ID NO: 68162 - protein, 20 aa, Artificial Sequence
  Description of Artificial Sequence: Synthetic peptide
  Seed: DPRMCSLMQGSTLPRRSGAA
DPRMYSLIQASTNPRRSGAA

SEQ ID NO: 68163 - protein, 20 aa, Artificial Sequence
  Description of Artificial Sequence: Synthetic peptide
  Seed: DPRMCSLMQGSTLPRRSGAA
DPRMYSLIQASTSPRRSGAA

SEQ ID NO: 68164 - protein, 20 aa, Artificial Sequence
  Description of Artificial Sequence: Synthetic peptide
  Seed: DPRMCSLMQGSTLPRRSGAA
DPRMYSLIQASTTPRRSGAA

SEQ ID NO: 68165 - protein, 20 aa, Artificial Sequence
  Description of Artificial Sequence: Synthetic peptide
  Seed: DPRMCSLMQGSTLPRRSGAA
DPRMYSLIQASTVPRRSGAA

SEQ ID NO: 68166 - protein, 20 aa, Artificial Sequence
  Description of Artificial Sequence: Synthetic peptide
  Seed: DPRMCSLMQGSTLPRRSGAA
DPRMYSLIQGSTAPRRSGAA

SEQ ID NO: 68167 - protein, 20 aa, Artificial Sequence
  Description of Artificial Sequence: Synthetic peptide
  Seed: DPRMCSLMQGSTLPRRSGAA
DPRMYSLIQGSTCPRRSGAA

SEQ ID NO: 68168 - protein, 20 aa, Artificial Sequence
  Description of Artificial Sequence: Synthetic peptide
  Seed: DPRMCSLMQGSTLPRRSGAA
DPRMYSLIQGSTGPRRSGAA

SEQ ID NO: 68169 - protein, 20 aa, Artificial Sequence
  Description of Artificial Sequence: Synthetic peptide
  Seed: DPRMCSLMQGSTLPRRSGAA
DPRMYSLIQGSTIPRRSGAA

SEQ ID NO: 68170 - protein, 20 aa, Artificial Sequence
  Description of Artificial Sequence: Synthetic peptide
  Seed: DPRMCSLMQGSTLPRRSGAA
DPRMYSLIQGSTLPRRSGAA

SEQ ID NO: 68171 - protein, 20 aa, Artificial Sequence
  Description of Artificial Sequence: Synthetic peptide
  Seed: DPRMCSLMQGSTLPRRSGAA
DPRMYSLIQGSTMPRRSGAA

SEQ ID NO: 68172 - protein, 20 aa, Artificial Sequence
  Description of Artificial Sequence: Synthetic peptide
  Seed: DPRMCSLMQGSTLPRRSGAA
DPRMYSLIQGSTSPRRSGAA

SEQ ID NO: 68173 - protein, 20 aa, Artificial Sequence
  Description of Artificial Sequence: Synthetic peptide
  Seed: DPRMCSLMQGSTLPRRSGAA
DPRMYSLIQGSTTPRRSGAA

SEQ ID NO: 68174 - protein, 20 aa, Artificial Sequence
  Description of Artificial Sequence: Synthetic peptide
  Seed: DPRMCSLMQGSTLPRRSGAA
DPRMYSLIQGSTVPRRSGAA

SEQ ID NO: 68175 - protein, 20 aa, Artificial Sequence
  Description of Artificial Sequence: Synthetic peptide
  Seed: DPRMCSLMQGSTLPRRSGAA
DPRMYSLIQISTAPRRSGAA

SEQ ID NO: 68176 - protein, 20 aa, Artificial Sequence
  Description of Artificial Sequence: Synthetic peptide
  Seed: DPRMCSLMQGSTLPRRSGAA
DPRMYSLIQISTIPRRSGAA

SEQ ID NO: 68177 - protein, 20 aa, Artificial Sequence
  Description of Artificial Sequence: Synthetic peptide
  Seed: DPRMCSLMQGSTLPRRSGAA
DPRMYSLIQISTVPRRSGAA

SEQ ID NO: 68178 - protein, 20 aa, Artificial Sequence
  Description of Artificial Sequence: Synthetic peptide
  Seed: DPRMCSLMQGSTLPRRSGAA
DPRMYSLIQNSTAPRRSGAA

SEQ ID NO: 68179 - protein, 20 aa, Artificial Sequence
  Description of Artificial Sequence: Synthetic peptide
  Seed: DPRMCSLMQGSTLPRRSGAA
DPRMYSLIQNSTIPRRSGAA

SEQ ID NO: 68180 - protein, 20 aa, Artificial Sequence
  Description of Artificial Sequence: Synthetic peptide
  Seed: DPRMCSLMQGSTLPRRSGAA
DPRMYSLIQNSTLPRRSGAA

SEQ ID NO: 68181 - protein, 20 aa, Artificial Sequence
  Description of Artificial Sequence: Synthetic peptide
  Seed: DPRMCSLMQGSTLPRRSGAA
DPRMYSLIQNSTMPRRSGAA

SEQ ID NO: 68182 - protein, 20 aa, Artificial Sequence
  Description of Artificial Sequence: Synthetic peptide
  Seed: DPRMCSLMQGSTLPRRSGAA
DPRMYSLIQNSTTPRRSGAA

SEQ ID NO: 68183 - protein, 20 aa, Artificial Sequence
  Description of Artificial Sequence: Synthetic peptide
  Seed: DPRMCSLMQGSTLPRRSGAA
DPRMYSLIQNSTVPRRSGAA

SEQ ID NO: 68184 - protein, 20 aa, Artificial Sequence
  Description of Artificial Sequence: Synthetic peptide
  Seed: DPRMCSLMQGSTLPRRSGAA
DPRMYSLIQPSTAPRRSGAA

SEQ ID NO: 68185 - protein, 20 aa, Artificial Sequence
  Description of Artificial Sequence: Synthetic peptide
  Seed: DPRMCSLMQGSTLPRRSGAA
DPRMYSLIQPSTGPRRSGAA

SEQ ID NO: 68186 - protein, 20 aa, Artificial Sequence
  Description of Artificial Sequence: Synthetic peptide
  Seed: DPRMCSLMQGSTLPRRSGAA
DPRMYSLIQPSTIPRRSGAA

SEQ ID NO: 68187 - protein, 20 aa, Artificial Sequence
  Description of Artificial Sequence: Synthetic peptide
  Seed: DPRMCSLMQGSTLPRRSGAA
DPRMYSLIQPSTLPRRSGAA

SEQ ID NO: 68188 - protein, 20 aa, Artificial Sequence
  Description of Artificial Sequence: Synthetic peptide
  Seed: DPRMCSLMQGSTLPRRSGAA
DPRMYSLIQPSTMPRRSGAA

SEQ ID NO: 68189 - protein, 20 aa, Artificial Sequence
  Description of Artificial Sequence: Synthetic peptide
  Seed: DPRMCSLMQGSTLPRRSGAA
DPRMYSLIQPSTSPRRSGAA

SEQ ID NO: 68190 - protein, 20 aa, Artificial Sequence
  Description of Artificial Sequence: Synthetic peptide
  Seed: DPRMCSLMQGSTLPRRSGAA
DPRMYSLIQPSTTPRRSGAA

SEQ ID NO: 68191 - protein, 20 aa, Artificial Sequence
  Description of Artificial Sequence: Synthetic peptide
  Seed: DPRMCSLMQGSTLPRRSGAA
DPRMYSLIQPSTVPRRSGAA

SEQ ID NO: 68192 - protein, 20 aa, Artificial Sequence
  Description of Artificial Sequence: Synthetic peptide
  Seed: DPRMCSLMQGSTLPRRSGAA
DPRMYSLIQSSTAPRRSGAA

SEQ ID NO: 68193 - protein, 20 aa, Artificial Sequence
  Description of Artificial Sequence: Synthetic peptide
  Seed: DPRMCSLMQGSTLPRRSGAA
DPRMYSLIQSSTGPRRSGAA

SEQ ID NO: 68194 - protein, 20 aa, Artificial Sequence
  Description of Artificial Sequence: Synthetic peptide
  Seed: DPRMCSLMQGSTLPRRSGAA
DPRMYSLIQSSTIPRRSGAA

SEQ ID NO: 68195 - protein, 20 aa, Artificial Sequence
  Description of Artificial Sequence: Synthetic peptide
  Seed: DPRMCSLMQGSTLPRRSGAA
DPRMYSLIQSSTLPRRSGAA

SEQ ID NO: 68196 - protein, 20 aa, Artificial Sequence
  Description of Artificial Sequence: Synthetic peptide
  Seed: DPRMCSLMQGSTLPRRSGAA
DPRMYSLIQSSTMPRRSGAA

SEQ ID NO: 68197 - protein, 20 aa, Artificial Sequence
  Description of Artificial Sequence: Synthetic peptide
  Seed: DPRMCSLMQGSTLPRRSGAA
DPRMYSLIQSSTSPRRSGAA

SEQ ID NO: 68198 - protein, 20 aa, Artificial Sequence
  Description of Artificial Sequence: Synthetic peptide
  Seed: DPRMCSLMQGSTLPRRSGAA
DPRMYSLIQSSTTPRRSGAA

SEQ ID NO: 68199 - protein, 20 aa, Artificial Sequence
  Description of Artificial Sequence: Synthetic peptide
  Seed: DPRMCSLMQGSTLPRRSGAA
DPRMYSLIQSSTVPRRSGAA

SEQ ID NO: 68200 - protein, 20 aa, Artificial Sequence
  Description of Artificial Sequence: Synthetic peptide
  Seed: DPRMCSLMQGSTLPRRSGAA
DPRMYSLIQTSTAPRRSGAA

SEQ ID NO: 68201 - protein, 20 aa, Artificial Sequence
  Description of Artificial Sequence: Synthetic peptide
  Seed: DPRMCSLMQGSTLPRRSGAA
DPRMYSLIQTSTIPRRSGAA

SEQ ID NO: 68202 - protein, 20 aa, Artificial Sequence
  Description of Artificial Sequence: Synthetic peptide
  Seed: DPRMCSLMQGSTLPRRSGAA
DPRMYSLIQTSTLPRRSGAA

SEQ ID NO: 68203 - protein, 20 aa, Artificial Sequence
  Description of Artificial Sequence: Synthetic peptide
  Seed: DPRMCSLMQGSTLPRRSGAA
DPRMYSLIQTSTMPRRSGAA

SEQ ID NO: 68204 - protein, 20 aa, Artificial Sequence
  Description of Artificial Sequence: Synthetic peptide
  Seed: DPRMCSLMQGSTLPRRSGAA
DPRMYSLIQTSTSPRRSGAA

SEQ ID NO: 68205 - protein, 20 aa, Artificial Sequence
  Description of Artificial Sequence: Synthetic peptide
  Seed: DPRMCSLMQGSTLPRRSGAA
DPRMYSLIQTSTTPRRSGAA

SEQ ID NO: 68206 - protein, 20 aa, Artificial Sequence
  Description of Artificial Sequence: Synthetic peptide
  Seed: DPRMCSLMQGSTLPRRSGAA
DPRMYSLIQTSTVPRRSGAA

SEQ ID NO: 68207 - protein, 20 aa, Artificial Sequence
  Description of Artificial Sequence: Synthetic peptide
  Seed: DPRMCSLMQGSTLPRRSGAA
DPRMYSLIQVSTAPRRSGAA

SEQ ID NO: 68208 - protein, 20 aa, Artificial Sequence
  Description of Artificial Sequence: Synthetic peptide
  Seed: DPRMCSLMQGSTLPRRSGAA
DPRMYSLIQVSTIPRRSGAA

SEQ ID NO: 68209 - protein, 20 aa, Artificial Sequence
  Description of Artificial Sequence: Synthetic peptide
  Seed: DPRMCSLMQGSTLPRRSGAA
DPRMYSLIQVSTLPRRSGAA

SEQ ID NO: 68210 - protein, 20 aa, Artificial Sequence
  Description of Artificial Sequence: Synthetic peptide
  Seed: DPRMCSLMQGSTLPRRSGAA
DPRMYSLIQVSTMPRRSGAA

SEQ ID NO: 68211 - protein, 20 aa, Artificial Sequence
  Description of Artificial Sequence: Synthetic peptide
  Seed: DPRMCSLMQGSTLPRRSGAA
DPRMYSLIQVSTTPRRSGAA

SEQ ID NO: 68212 - protein, 20 aa, Artificial Sequence
  Description of Artificial Sequence: Synthetic peptide
  Seed: DPRMCSLMQGSTLPRRSGAA
DPRMYSLIQVSTVPRRSGAA

SEQ ID NO: 68213 - protein, 20 aa, Artificial Sequence
  Description of Artificial Sequence: Synthetic peptide
  Seed: DPRMCSLMQGSTLPRRSGAA
DPRMYSLLQASTAPRRSGAA

SEQ ID NO: 68214 - protein, 20 aa, Artificial Sequence
  Description of Artificial Sequence: Synthetic peptide
  Seed: DPRMCSLMQGSTLPRRSGAA
DPRMYSLLQASTCPRRSGAA

SEQ ID NO: 68215 - protein, 20 aa, Artificial Sequence
  Description of Artificial Sequence: Synthetic peptide
  Seed: DPRMCSLMQGSTLPRRSGAA
DPRMYSLLQASTFPRRSGAA

SEQ ID NO: 68216 - protein, 20 aa, Artificial Sequence
  Description of Artificial Sequence: Synthetic peptide
  Seed: DPRMCSLMQGSTLPRRSGAA
DPRMYSLLQASTGPRRSGAA

SEQ ID NO: 68217 - protein, 20 aa, Artificial Sequence
  Description of Artificial Sequence: Synthetic peptide
  Seed: DPRMCSLMQGSTLPRRSGAA
DPRMYSLLQASTHPRRSGAA

SEQ ID NO: 68218 - protein, 20 aa, Artificial Sequence
  Description of Artificial Sequence: Synthetic peptide
  Seed: DPRMCSLMQGSTLPRRSGAA
DPRMYSLLQASTIPRRSGAA

SEQ ID NO: 68219 - protein, 20 aa, Artificial Sequence
  Description of Artificial Sequence: Synthetic peptide
  Seed: DPRMCSLMQGSTLPRRSGAA
DPRMYSLLQASTLPRRSGAA

SEQ ID NO: 68220 - protein, 20 aa, Artificial Sequence
  Description of Artificial Sequence: Synthetic peptide
  Seed: DPRMCSLMQGSTLPRRSGAA
DPRMYSLLQASTMPRRSGAA

SEQ ID NO: 68221 - protein, 20 aa, Artificial Sequence
  Description of Artificial Sequence: Synthetic peptide
  Seed: DPRMCSLMQGSTLPRRSGAA
DPRMYSLLQASTNPRRSGAA

SEQ ID NO: 68222 - protein, 20 aa, Artificial Sequence
  Description of Artificial Sequence: Synthetic peptide
  Seed: DPRMCSLMQGSTLPRRSGAA
DPRMYSLLQASTPPRRSGAA

SEQ ID NO: 68223 - protein, 20 aa, Artificial Sequence
  Description of Artificial Sequence: Synthetic peptide
  Seed: DPRMCSLMQGSTLPRRSGAA
DPRMYSLLQASTQPRRSGAA

SEQ ID NO: 68224 - protein, 20 aa, Artificial Sequence
  Description of Artificial Sequence: Synthetic peptide
  Seed: DPRMCSLMQGSTLPRRSGAA
DPRMYSLLQASTSPRRSGAA

SEQ ID NO: 68225 - protein, 20 aa, Artificial Sequence
  Description of Artificial Sequence: Synthetic peptide
  Seed: DPRMCSLMQGSTLPRRSGAA
DPRMYSLLQASTTPRRSGAA

SEQ ID NO: 68226 - protein, 20 aa, Artificial Sequence
  Description of Artificial Sequence: Synthetic peptide
  Seed: DPRMCSLMQGSTLPRRSGAA
DPRMYSLLQASTVPRRSGAA

SEQ ID NO: 68227 - protein, 20 aa, Artificial Sequence
  Description of Artificial Sequence: Synthetic peptide
  Seed: DPRMCSLMQGSTLPRRSGAA
DPRMYSLLQASTYPRRSGAA

SEQ ID NO: 68228 - protein, 20 aa, Artificial Sequence
  Description of Artificial Sequence: Synthetic peptide
  Seed: DPRMCSLMQGSTLPRRSGAA
DPRMYSLLQGSTAPRRSGAA

SEQ ID NO: 68229 - protein, 20 aa, Artificial Sequence
  Description of Artificial Sequence: Synthetic peptide
  Seed: DPRMCSLMQGSTLPRRSGAA
DPRMYSLLQGSTCPRRSGAA

SEQ ID NO: 68230 - protein, 20 aa, Artificial Sequence
  Description of Artificial Sequence: Synthetic peptide
  Seed: DPRMCSLMQGSTLPRRSGAA
DPRMYSLLQGSTFPRRSGAA

SEQ ID NO: 68231 - protein, 20 aa, Artificial Sequence
  Description of Artificial Sequence: Synthetic peptide
  Seed: DPRMCSLMQGSTLPRRSGAA
DPRMYSLLQGSTGPRRSGAA

SEQ ID NO: 68232 - protein, 20 aa, Artificial Sequence
  Description of Artificial Sequence: Synthetic peptide
  Seed: DPRMCSLMQGSTLPRRSGAA
DPRMYSLLQGSTIPRRSGAA

SEQ ID NO: 68233 - protein, 20 aa, Artificial Sequence
  Description of Artificial Sequence: Synthetic peptide
  Seed: DPRMCSLMQGSTLPRRSGAA
DPRMYSLLQGSTLPRRSGAA

SEQ ID NO: 68234 - protein, 20 aa, Artificial Sequence
  Description of Artificial Sequence: Synthetic peptide
  Seed: DPRMCSLMQGSTLPRRSGAA
DPRMYSLLQGSTMPRRSGAA

SEQ ID NO: 68235 - protein, 20 aa, Artificial Sequence
  Description of Artificial Sequence: Synthetic peptide
  Seed: DPRMCSLMQGSTLPRRSGAA
DPRMYSLLQGSTNPRRSGAA

SEQ ID NO: 68236 - protein, 20 aa, Artificial Sequence
  Description of Artificial Sequence: Synthetic peptide
  Seed: DPRMCSLMQGSTLPRRSGAA
DPRMYSLLQGSTSPRRSGAA

SEQ ID NO: 68237 - protein, 20 aa, Artificial Sequence
  Description of Artificial Sequence: Synthetic peptide
  Seed: DPRMCSLMQGSTLPRRSGAA
DPRMYSLLQGSTTPRRSGAA

SEQ ID NO: 68238 - protein, 20 aa, Artificial Sequence
  Description of Artificial Sequence: Synthetic peptide
  Seed: DPRMCSLMQGSTLPRRSGAA
DPRMYSLLQGSTVPRRSGAA

SEQ ID NO: 68239 - protein, 20 aa, Artificial Sequence
  Description of Artificial Sequence: Synthetic peptide
  Seed: DPRMCSLMQGSTLPRRSGAA
DPRMYSLLQGSTYPRRSGAA

SEQ ID NO: 68240 - protein, 20 aa, Artificial Sequence
  Description of Artificial Sequence: Synthetic peptide
  Seed: DPRMCSLMQGSTLPRRSGAA
DPRMYSLLQHSTIPRRSGAA

SEQ ID NO: 68241 - protein, 20 aa, Artificial Sequence
  Description of Artificial Sequence: Synthetic peptide
  Seed: DPRMCSLMQGSTLPRRSGAA
DPRMYSLLQHSTLPRRSGAA

SEQ ID NO: 68242 - protein, 20 aa, Artificial Sequence
  Description of Artificial Sequence: Synthetic peptide
  Seed: DPRMCSLMQGSTLPRRSGAA
DPRMYSLLQHSTVPRRSGAA

SEQ ID NO: 68243 - protein, 20 aa, Artificial Sequence
  Description of Artificial Sequence: Synthetic peptide
  Seed: DPRMCSLMQGSTLPRRSGAA
DPRMYSLLQISTAPRRSGAA

SEQ ID NO: 68244 - protein, 20 aa, Artificial Sequence
  Description of Artificial Sequence: Synthetic peptide
  Seed: DPRMCSLMQGSTLPRRSGAA
DPRMYSLLQISTIPRRSGAA

SEQ ID NO: 68245 - protein, 20 aa, Artificial Sequence
  Description of Artificial Sequence: Synthetic peptide
  Seed: DPRMCSLMQGSTLPRRSGAA
DPRMYSLLQISTLPRRSGAA

SEQ ID NO: 68246 - protein, 20 aa, Artificial Sequence
  Description of Artificial Sequence: Synthetic peptide
  Seed: DPRMCSLMQGSTLPRRSGAA
DPRMYSLLQISTMPRRSGAA

SEQ ID NO: 68247 - protein, 20 aa, Artificial Sequence
  Description of Artificial Sequence: Synthetic peptide
  Seed: DPRMCSLMQGSTLPRRSGAA
DPRMYSLLQISTSPRRSGAA

SEQ ID NO: 68248 - protein, 20 aa, Artificial Sequence
  Description of Artificial Sequence: Synthetic peptide
  Seed: DPRMCSLMQGSTLPRRSGAA
DPRMYSLLQISTTPRRSGAA

SEQ ID NO: 68249 - protein, 20 aa, Artificial Sequence
  Description of Artificial Sequence: Synthetic peptide
  Seed: DPRMCSLMQGSTLPRRSGAA
DPRMYSLLQISTVPRRSGAA

SEQ ID NO: 68250 - protein, 20 aa, Artificial Sequence
  Description of Artificial Sequence: Synthetic peptide
  Seed: DPRMCSLMQGSTLPRRSGAA
DPRMYSLLQLSTAPRRSGAA

SEQ ID NO: 68251 - protein, 20 aa, Artificial Sequence
  Description of Artificial Sequence: Synthetic peptide
  Seed: DPRMCSLMQGSTLPRRSGAA
DPRMYSLLQLSTVPRRSGAA

SEQ ID NO: 68252 - protein, 20 aa, Artificial Sequence
  Description of Artificial Sequence: Synthetic peptide
  Seed: DPRMCSLMQGSTLPRRSGAA
DPRMYSLLQMSTAPRRSGAA

SEQ ID NO: 68253 - protein, 20 aa, Artificial Sequence
  Description of Artificial Sequence: Synthetic peptide
  Seed: DPRMCSLMQGSTLPRRSGAA
DPRMYSLLQMSTIPRRSGAA

SEQ ID NO: 68254 - protein, 20 aa, Artificial Sequence
  Description of Artificial Sequence: Synthetic peptide
  Seed: DPRMCSLMQGSTLPRRSGAA
DPRMYSLLQMSTLPRRSGAA

SEQ ID NO: 68255 - protein, 20 aa, Artificial Sequence
  Description of Artificial Sequence: Synthetic peptide
  Seed: DPRMCSLMQGSTLPRRSGAA
DPRMYSLLQMSTVPRRSGAA

SEQ ID NO: 68256 - protein, 20 aa, Artificial Sequence
  Description of Artificial Sequence: Synthetic peptide
  Seed: DPRMCSLMQGSTLPRRSGAA
DPRMYSLLQNSTAPRRSGAA

SEQ ID NO: 68257 - protein, 20 aa, Artificial Sequence
  Description of Artificial Sequence: Synthetic peptide
  Seed: DPRMCSLMQGSTLPRRSGAA
DPRMYSLLQNSTGPRRSGAA

SEQ ID NO: 68258 - protein, 20 aa, Artificial Sequence
  Description of Artificial Sequence: Synthetic peptide
  Seed: DPRMCSLMQGSTLPRRSGAA
DPRMYSLLQNSTIPRRSGAA

SEQ ID NO: 68259 - protein, 20 aa, Artificial Sequence
  Description of Artificial Sequence: Synthetic peptide
  Seed: DPRMCSLMQGSTLPRRSGAA
DPRMYSLLQNSTLPRRSGAA

SEQ ID NO: 68260 - protein, 20 aa, Artificial Sequence
  Description of Artificial Sequence: Synthetic peptide
  Seed: DPRMCSLMQGSTLPRRSGAA
DPRMYSLLQNSTMPRRSGAA

SEQ ID NO: 68261 - protein, 20 aa, Artificial Sequence
  Description of Artificial Sequence: Synthetic peptide
  Seed: DPRMCSLMQGSTLPRRSGAA
DPRMYSLLQNSTSPRRSGAA

SEQ ID NO: 68262 - protein, 20 aa, Artificial Sequence
  Description of Artificial Sequence: Synthetic peptide
  Seed: DPRMCSLMQGSTLPRRSGAA
DPRMYSLLQNSTTPRRSGAA

SEQ ID NO: 68263 - protein, 20 aa, Artificial Sequence
  Description of Artificial Sequence: Synthetic peptide
  Seed: DPRMCSLMQGSTLPRRSGAA
DPRMYSLLQNSTVPRRSGAA

SEQ ID NO: 68264 - protein, 20 aa, Artificial Sequence
  Description of Artificial Sequence: Synthetic peptide
  Seed: DPRMCSLMQGSTLPRRSGAA
DPRMYSLLQPSTAPRRSGAA

SEQ ID NO: 68265 - protein, 20 aa, Artificial Sequence
  Description of Artificial Sequence: Synthetic peptide
  Seed: DPRMCSLMQGSTLPRRSGAA
DPRMYSLLQPSTCPRRSGAA

SEQ ID NO: 68266 - protein, 20 aa, Artificial Sequence
  Description of Artificial Sequence: Synthetic peptide
  Seed: DPRMCSLMQGSTLPRRSGAA
DPRMYSLLQPSTFPRRSGAA

SEQ ID NO: 68267 - protein, 20 aa, Artificial Sequence
  Description of Artificial Sequence: Synthetic peptide
  Seed: DPRMCSLMQGSTLPRRSGAA
DPRMYSLLQPSTGPRRSGAA

SEQ ID NO: 68268 - protein, 20 aa, Artificial Sequence
  Description of Artificial Sequence: Synthetic peptide
  Seed: DPRMCSLMQGSTLPRRSGAA
DPRMYSLLQPSTIPRRSGAA

SEQ ID NO: 68269 - protein, 20 aa, Artificial Sequence
  Description of Artificial Sequence: Synthetic peptide
  Seed: DPRMCSLMQGSTLPRRSGAA
DPRMYSLLQPSTLPRRSGAA

SEQ ID NO: 68270 - protein, 20 aa, Artificial Sequence
  Description of Artificial Sequence: Synthetic peptide
  Seed: DPRMCSLMQGSTLPRRSGAA
DPRMYSLLQPSTMPRRSGAA

SEQ ID NO: 68271 - protein, 20 aa, Artificial Sequence
  Description of Artificial Sequence: Synthetic peptide
  Seed: DPRMCSLMQGSTLPRRSGAA
DPRMYSLLQPSTNPRRSGAA

SEQ ID NO: 68272 - protein, 20 aa, Artificial Sequence
  Description of Artificial Sequence: Synthetic peptide
  Seed: DPRMCSLMQGSTLPRRSGAA
DPRMYSLLQPSTSPRRSGAA

SEQ ID NO: 68273 - protein, 20 aa, Artificial Sequence
  Description of Artificial Sequence: Synthetic peptide
  Seed: DPRMCSLMQGSTLPRRSGAA
DPRMYSLLQPSTTPRRSGAA

SEQ ID NO: 68274 - protein, 20 aa, Artificial Sequence
  Description of Artificial Sequence: Synthetic peptide
  Seed: DPRMCSLMQGSTLPRRSGAA
DPRMYSLLQPSTVPRRSGAA

SEQ ID NO: 68275 - protein, 20 aa, Artificial Sequence
  Description of Artificial Sequence: Synthetic peptide
  Seed: DPRMCSLMQGSTLPRRSGAA
DPRMYSLLQQSTLPRRSGAA

SEQ ID NO: 68276 - protein, 20 aa, Artificial Sequence
  Description of Artificial Sequence: Synthetic peptide
  Seed: DPRMCSLMQGSTLPRRSGAA
DPRMYSLLQQSTVPRRSGAA

SEQ ID NO: 68277 - protein, 20 aa, Artificial Sequence
  Description of Artificial Sequence: Synthetic peptide
  Seed: DPRMCSLMQGSTLPRRSGAA
DPRMYSLLQSSTAPRRSGAA

SEQ ID NO: 68278 - protein, 20 aa, Artificial Sequence
  Description of Artificial Sequence: Synthetic peptide
  Seed: DPRMCSLMQGSTLPRRSGAA
DPRMYSLLQSSTCPRRSGAA

SEQ ID NO: 68279 - protein, 20 aa, Artificial Sequence
  Description of Artificial Sequence: Synthetic peptide
  Seed: DPRMCSLMQGSTLPRRSGAA
DPRMYSLLQSSTFPRRSGAA

SEQ ID NO: 68280 - protein, 20 aa, Artificial Sequence
  Description of Artificial Sequence: Synthetic peptide
  Seed: DPRMCSLMQGSTLPRRSGAA
DPRMYSLLQSSTGPRRSGAA

SEQ ID NO: 68281 - protein, 20 aa, Artificial Sequence
  Description of Artificial Sequence: Synthetic peptide
  Seed: DPRMCSLMQGSTLPRRSGAA
DPRMYSLLQSSTIPRRSGAA

SEQ ID NO: 68282 - protein, 20 aa, Artificial Sequence
  Description of Artificial Sequence: Synthetic peptide
  Seed: DPRMCSLMQGSTLPRRSGAA
DPRMYSLLQSSTLPRRSGAA

SEQ ID NO: 68283 - protein, 20 aa, Artificial Sequence
  Description of Artificial Sequence: Synthetic peptide
  Seed: DPRMCSLMQGSTLPRRSGAA
DPRMYSLLQSSTMPRRSGAA

SEQ ID NO: 68284 - protein, 20 aa, Artificial Sequence
  Description of Artificial Sequence: Synthetic peptide
  Seed: DPRMCSLMQGSTLPRRSGAA
DPRMYSLLQSSTNPRRSGAA

SEQ ID NO: 68285 - protein, 20 aa, Artificial Sequence
  Description of Artificial Sequence: Synthetic peptide
  Seed: DPRMCSLMQGSTLPRRSGAA
DPRMYSLLQSSTSPRRSGAA

SEQ ID NO: 68286 - protein, 20 aa, Artificial Sequence
  Description of Artificial Sequence: Synthetic peptide
  Seed: DPRMCSLMQGSTLPRRSGAA
DPRMYSLLQSSTTPRRSGAA

SEQ ID NO: 68287 - protein, 20 aa, Artificial Sequence
  Description of Artificial Sequence: Synthetic peptide
  Seed: DPRMCSLMQGSTLPRRSGAA
DPRMYSLLQSSTVPRRSGAA

SEQ ID NO: 68288 - protein, 20 aa, Artificial Sequence
  Description of Artificial Sequence: Synthetic peptide
  Seed: DPRMCSLMQGSTLPRRSGAA
DPRMYSLLQTSTAPRRSGAA

SEQ ID NO: 68289 - protein, 20 aa, Artificial Sequence
  Description of Artificial Sequence: Synthetic peptide
  Seed: DPRMCSLMQGSTLPRRSGAA
DPRMYSLLQTSTGPRRSGAA

SEQ ID NO: 68290 - protein, 20 aa, Artificial Sequence
  Description of Artificial Sequence: Synthetic peptide
  Seed: DPRMCSLMQGSTLPRRSGAA
DPRMYSLLQTSTIPRRSGAA

SEQ ID NO: 68291 - protein, 20 aa, Artificial Sequence
  Description of Artificial Sequence: Synthetic peptide
  Seed: DPRMCSLMQGSTLPRRSGAA
DPRMYSLLQTSTLPRRSGAA

SEQ ID NO: 68292 - protein, 20 aa, Artificial Sequence
  Description of Artificial Sequence: Synthetic peptide
  Seed: DPRMCSLMQGSTLPRRSGAA
DPRMYSLLQTSTMPRRSGAA

SEQ ID NO: 68293 - protein, 20 aa, Artificial Sequence
  Description of Artificial Sequence: Synthetic peptide
  Seed: DPRMCSLMQGSTLPRRSGAA
DPRMYSLLQTSTSPRRSGAA

SEQ ID NO: 68294 - protein, 20 aa, Artificial Sequence
  Description of Artificial Sequence: Synthetic peptide
  Seed: DPRMCSLMQGSTLPRRSGAA
DPRMYSLLQTSTTPRRSGAA

SEQ ID NO: 68295 - protein, 20 aa, Artificial Sequence
  Description of Artificial Sequence: Synthetic peptide
  Seed: DPRMCSLMQGSTLPRRSGAA
DPRMYSLLQTSTVPRRSGAA

SEQ ID NO: 68296 - protein, 20 aa, Artificial Sequence
  Description of Artificial Sequence: Synthetic peptide
  Seed: DPRMCSLMQGSTLPRRSGAA
DPRMYSLLQVSTAPRRSGAA

SEQ ID NO: 68297 - protein, 20 aa, Artificial Sequence
  Description of Artificial Sequence: Synthetic peptide
  Seed: DPRMCSLMQGSTLPRRSGAA
DPRMYSLLQVSTGPRRSGAA

SEQ ID NO: 68298 - protein, 20 aa, Artificial Sequence
  Description of Artificial Sequence: Synthetic peptide
  Seed: DPRMCSLMQGSTLPRRSGAA
DPRMYSLLQVSTIPRRSGAA

SEQ ID NO: 68299 - protein, 20 aa, Artificial Sequence
  Description of Artificial Sequence: Synthetic peptide
  Seed: DPRMCSLMQGSTLPRRSGAA
DPRMYSLLQVSTLPRRSGAA

SEQ ID NO: 68300 - protein, 20 aa, Artificial Sequence
  Description of Artificial Sequence: Synthetic peptide
  Seed: DPRMCSLMQGSTLPRRSGAA
DPRMYSLLQVSTMPRRSGAA

SEQ ID NO: 68301 - protein, 20 aa, Artificial Sequence
  Description of Artificial Sequence: Synthetic peptide
  Seed: DPRMCSLMQGSTLPRRSGAA
DPRMYSLLQVSTSPRRSGAA

SEQ ID NO: 68302 - protein, 20 aa, Artificial Sequence
  Description of Artificial Sequence: Synthetic peptide
  Seed: DPRMCSLMQGSTLPRRSGAA
DPRMYSLLQVSTTPRRSGAA

SEQ ID NO: 68303 - protein, 20 aa, Artificial Sequence
  Description of Artificial Sequence: Synthetic peptide
  Seed: DPRMCSLMQGSTLPRRSGAA
DPRMYSLLQVSTVPRRSGAA

SEQ ID NO: 68304 - protein, 20 aa, Artificial Sequence
  Description of Artificial Sequence: Synthetic peptide
  Seed: DPRMCSLMQGSTLPRRSGAA
DPRMYSLMQASTAPRRSGAA

SEQ ID NO: 68305 - protein, 20 aa, Artificial Sequence
  Description of Artificial Sequence: Synthetic peptide
  Seed: DPRMCSLMQGSTLPRRSGAA
DPRMYSLMQASTCPRRSGAA

SEQ ID NO: 68306 - protein, 20 aa, Artificial Sequence
  Description of Artificial Sequence: Synthetic peptide
  Seed: DPRMCSLMQGSTLPRRSGAA
DPRMYSLMQASTFPRRSGAA

SEQ ID NO: 68307 - protein, 20 aa, Artificial Sequence
  Description of Artificial Sequence: Synthetic peptide
  Seed: DPRMCSLMQGSTLPRRSGAA
DPRMYSLMQASTGPRRSGAA

SEQ ID NO: 68308 - protein, 20 aa, Artificial Sequence
  Description of Artificial Sequence: Synthetic peptide
  Seed: DPRMCSLMQGSTLPRRSGAA
DPRMYSLMQASTHPRRSGAA

SEQ ID NO: 68309 - protein, 20 aa, Artificial Sequence
  Description of Artificial Sequence: Synthetic peptide
  Seed: DPRMCSLMQGSTLPRRSGAA
DPRMYSLMQASTIPRRSGAA

SEQ ID NO: 68310 - protein, 20 aa, Artificial Sequence
  Description of Artificial Sequence: Synthetic peptide
  Seed: DPRMCSLMQGSTLPRRSGAA
DPRMYSLMQASTLPRRSGAA

SEQ ID NO: 68311 - protein, 20 aa, Artificial Sequence
  Description of Artificial Sequence: Synthetic peptide
  Seed: DPRMCSLMQGSTLPRRSGAA
DPRMYSLMQASTMPRRSGAA

SEQ ID NO: 68312 - protein, 20 aa, Artificial Sequence
  Description of Artificial Sequence: Synthetic peptide
  Seed: DPRMCSLMQGSTLPRRSGAA
DPRMYSLMQASTNPRRSGAA

SEQ ID NO: 68313 - protein, 20 aa, Artificial Sequence
  Description of Artificial Sequence: Synthetic peptide
  Seed: DPRMCSLMQGSTLPRRSGAA
DPRMYSLMQASTPPRRSGAA

SEQ ID NO: 68314 - protein, 20 aa, Artificial Sequence
  Description of Artificial Sequence: Synthetic peptide
  Seed: DPRMCSLMQGSTLPRRSGAA
DPRMYSLMQASTQPRRSGAA

SEQ ID NO: 68315 - protein, 20 aa, Artificial Sequence
  Description of Artificial Sequence: Synthetic peptide
  Seed: DPRMCSLMQGSTLPRRSGAA
DPRMYSLMQASTRPRRSGAA

SEQ ID NO: 68316 - protein, 20 aa, Artificial Sequence
  Description of Artificial Sequence: Synthetic peptide
  Seed: DPRMCSLMQGSTLPRRSGAA
DPRMYSLMQASTSPRRSGAA

SEQ ID NO: 68317 - protein, 20 aa, Artificial Sequence
  Description of Artificial Sequence: Synthetic peptide
  Seed: DPRMCSLMQGSTLPRRSGAA
DPRMYSLMQASTTPRRSGAA

SEQ ID NO: 68318 - protein, 20 aa, Artificial Sequence
  Description of Artificial Sequence: Synthetic peptide
  Seed: DPRMCSLMQGSTLPRRSGAA
DPRMYSLMQASTVPRRSGAA

SEQ ID NO: 68319 - protein, 20 aa, Artificial Sequence
  Description of Artificial Sequence: Synthetic peptide
  Seed: DPRMCSLMQGSTLPRRSGAA
DPRMYSLMQASTWPRRSGAA

SEQ ID NO: 68320 - protein, 20 aa, Artificial Sequence
  Description of Artificial Sequence: Synthetic peptide
  Seed: DPRMCSLMQGSTLPRRSGAA
DPRMYSLMQASTYPRRSGAA

SEQ ID NO: 68321 - protein, 20 aa, Artificial Sequence
  Description of Artificial Sequence: Synthetic peptide
  Seed: DPRMCSLMQGSTLPRRSGAA
DPRMYSLMQCSTVPRRSGAA

SEQ ID NO: 68322 - protein, 20 aa, Artificial Sequence
  Description of Artificial Sequence: Synthetic peptide
  Seed: DPRMCSLMQGSTLPRRSGAA
DPRMYSLMQGSTAPRRSGAA

SEQ ID NO: 68323 - protein, 20 aa, Artificial Sequence
  Description of Artificial Sequence: Synthetic peptide
  Seed: DPRMCSLMQGSTLPRRSGAA
DPRMYSLMQGSTCPRRSGAA

SEQ ID NO: 68324 - protein, 20 aa, Artificial Sequence
  Description of Artificial Sequence: Synthetic peptide
  Seed: DPRMCSLMQGSTLPRRSGAA
DPRMYSLMQGSTFPRRSGAA

SEQ ID NO: 68325 - protein, 20 aa, Artificial Sequence
  Description of Artificial Sequence: Synthetic peptide
  Seed: DPRMCSLMQGSTLPRRSGAA
DPRMYSLMQGSTGPRRSGAA

SEQ ID NO: 68326 - protein, 20 aa, Artificial Sequence
  Description of Artificial Sequence: Synthetic peptide
  Seed: DPRMCSLMQGSTLPRRSGAA
DPRMYSLMQGSTIPRRSGAA

SEQ ID NO: 68327 - protein, 20 aa, Artificial Sequence
  Description of Artificial Sequence: Synthetic peptide
  Seed: DPRMCSLMQGSTLPRRSGAA
DPRMYSLMQGSTLPRRSGAA

SEQ ID NO: 68328 - protein, 20 aa, Artificial Sequence
  Description of Artificial Sequence: Synthetic peptide
  Seed: DPRMCSLMQGSTLPRRSGAA
DPRMYSLMQGSTMPRRSGAA

SEQ ID NO: 68329 - protein, 20 aa, Artificial Sequence
  Description of Artificial Sequence: Synthetic peptide
  Seed: DPRMCSLMQGSTLPRRSGAA
DPRMYSLMQGSTNPRRSGAA

SEQ ID NO: 68330 - protein, 20 aa, Artificial Sequence
  Description of Artificial Sequence: Synthetic peptide
  Seed: DPRMCSLMQGSTLPRRSGAA
DPRMYSLMQGSTSPRRSGAA

SEQ ID NO: 68331 - protein, 20 aa, Artificial Sequence
  Description of Artificial Sequence: Synthetic peptide
  Seed: DPRMCSLMQGSTLPRRSGAA
DPRMYSLMQGSTTPRRSGAA

SEQ ID NO: 68332 - protein, 20 aa, Artificial Sequence
  Description of Artificial Sequence: Synthetic peptide
  Seed: DPRMCSLMQGSTLPRRSGAA
DPRMYSLMQGSTVPRRSGAA

SEQ ID NO: 68333 - protein, 20 aa, Artificial Sequence
  Description of Artificial Sequence: Synthetic peptide
  Seed: DPRMCSLMQGSTLPRRSGAA
DPRMYSLMQGSTYPRRSGAA

SEQ ID NO: 68334 - protein, 20 aa, Artificial Sequence
  Description of Artificial Sequence: Synthetic peptide
  Seed: DPRMCSLMQGSTLPRRSGAA
DPRMYSLMQHSTAPRRSGAA

SEQ ID NO: 68335 - protein, 20 aa, Artificial Sequence
  Description of Artificial Sequence: Synthetic peptide
  Seed: DPRMCSLMQGSTLPRRSGAA
DPRMYSLMQHSTIPRRSGAA

SEQ ID NO: 68336 - protein, 20 aa, Artificial Sequence
  Description of Artificial Sequence: Synthetic peptide
  Seed: DPRMCSLMQGSTLPRRSGAA
DPRMYSLMQHSTLPRRSGAA

SEQ ID NO: 68337 - protein, 20 aa, Artificial Sequence
  Description of Artificial Sequence: Synthetic peptide
  Seed: DPRMCSLMQGSTLPRRSGAA
DPRMYSLMQHSTVPRRSGAA

SEQ ID NO: 68338 - protein, 20 aa, Artificial Sequence
  Description of Artificial Sequence: Synthetic peptide
  Seed: DPRMCSLMQGSTLPRRSGAA
DPRMYSLMQISTAPRRSGAA

SEQ ID NO: 68339 - protein, 20 aa, Artificial Sequence
  Description of Artificial Sequence: Synthetic peptide
  Seed: DPRMCSLMQGSTLPRRSGAA
DPRMYSLMQISTIPRRSGAA

SEQ ID NO: 68340 - protein, 20 aa, Artificial Sequence
  Description of Artificial Sequence: Synthetic peptide
  Seed: DPRMCSLMQGSTLPRRSGAA
DPRMYSLMQISTLPRRSGAA

SEQ ID NO: 68341 - protein, 20 aa, Artificial Sequence
  Description of Artificial Sequence: Synthetic peptide
  Seed: DPRMCSLMQGSTLPRRSGAA
DPRMYSLMQISTMPRRSGAA

SEQ ID NO: 68342 - protein, 20 aa, Artificial Sequence
  Description of Artificial Sequence: Synthetic peptide
  Seed: DPRMCSLMQGSTLPRRSGAA
DPRMYSLMQISTSPRRSGAA

SEQ ID NO: 68343 - protein, 20 aa, Artificial Sequence
  Description of Artificial Sequence: Synthetic peptide
  Seed: DPRMCSLMQGSTLPRRSGAA
DPRMYSLMQISTTPRRSGAA

SEQ ID NO: 68344 - protein, 20 aa, Artificial Sequence
  Description of Artificial Sequence: Synthetic peptide
  Seed: DPRMCSLMQGSTLPRRSGAA
DPRMYSLMQISTVPRRSGAA

SEQ ID NO: 68345 - protein, 20 aa, Artificial Sequence
  Description of Artificial Sequence: Synthetic peptide
  Seed: DPRMCSLMQGSTLPRRSGAA
DPRMYSLMQLSTAPRRSGAA

SEQ ID NO: 68346 - protein, 20 aa, Artificial Sequence
  Description of Artificial Sequence: Synthetic peptide
  Seed: DPRMCSLMQGSTLPRRSGAA
DPRMYSLMQLSTVPRRSGAA

SEQ ID NO: 68347 - protein, 20 aa, Artificial Sequence
  Description of Artificial Sequence: Synthetic peptide
  Seed: DPRMCSLMQGSTLPRRSGAA
DPRMYSLMQMSTAPRRSGAA

SEQ ID NO: 68348 - protein, 20 aa, Artificial Sequence
  Description of Artificial Sequence: Synthetic peptide
  Seed: DPRMCSLMQGSTLPRRSGAA
DPRMYSLMQMSTIPRRSGAA

SEQ ID NO: 68349 - protein, 20 aa, Artificial Sequence
  Description of Artificial Sequence: Synthetic peptide
  Seed: DPRMCSLMQGSTLPRRSGAA
DPRMYSLMQMSTLPRRSGAA

SEQ ID NO: 68350 - protein, 20 aa, Artificial Sequence
  Description of Artificial Sequence: Synthetic peptide
  Seed: DPRMCSLMQGSTLPRRSGAA
DPRMYSLMQMSTVPRRSGAA

SEQ ID NO: 68351 - protein, 20 aa, Artificial Sequence
  Description of Artificial Sequence: Synthetic peptide
  Seed: DPRMCSLMQGSTLPRRSGAA
DPRMYSLMQNSTAPRRSGAA

SEQ ID NO: 68352 - protein, 20 aa, Artificial Sequence
  Description of Artificial Sequence: Synthetic peptide
  Seed: DPRMCSLMQGSTLPRRSGAA
DPRMYSLMQNSTGPRRSGAA

SEQ ID NO: 68353 - protein, 20 aa, Artificial Sequence
  Description of Artificial Sequence: Synthetic peptide
  Seed: DPRMCSLMQGSTLPRRSGAA
DPRMYSLMQNSTIPRRSGAA

SEQ ID NO: 68354 - protein, 20 aa, Artificial Sequence
  Description of Artificial Sequence: Synthetic peptide
  Seed: DPRMCSLMQGSTLPRRSGAA
DPRMYSLMQNSTLPRRSGAA

SEQ ID NO: 68355 - protein, 20 aa, Artificial Sequence
  Description of Artificial Sequence: Synthetic peptide
  Seed: DPRMCSLMQGSTLPRRSGAA
DPRMYSLMQNSTMPRRSGAA

SEQ ID NO: 68356 - protein, 20 aa, Artificial Sequence
  Description of Artificial Sequence: Synthetic peptide
  Seed: DPRMCSLMQGSTLPRRSGAA
DPRMYSLMQNSTSPRRSGAA

SEQ ID NO: 68357 - protein, 20 aa, Artificial Sequence
  Description of Artificial Sequence: Synthetic peptide
  Seed: DPRMCSLMQGSTLPRRSGAA
DPRMYSLMQNSTTPRRSGAA

SEQ ID NO: 68358 - protein, 20 aa, Artificial Sequence
  Description of Artificial Sequence: Synthetic peptide
  Seed: DPRMCSLMQGSTLPRRSGAA
DPRMYSLMQNSTVPRRSGAA

SEQ ID NO: 68359 - protein, 20 aa, Artificial Sequence
  Description of Artificial Sequence: Synthetic peptide
  Seed: DPRMCSLMQGSTLPRRSGAA
DPRMYSLMQPSTAPRRSGAA

SEQ ID NO: 68360 - protein, 20 aa, Artificial Sequence
  Description of Artificial Sequence: Synthetic peptide
  Seed: DPRMCSLMQGSTLPRRSGAA
DPRMYSLMQPSTFPRRSGAA

SEQ ID NO: 68361 - protein, 20 aa, Artificial Sequence
  Description of Artificial Sequence: Synthetic peptide
  Seed: DPRMCSLMQGSTLPRRSGAA
DPRMYSLMQPSTGPRRSGAA

SEQ ID NO: 68362 - protein, 20 aa, Artificial Sequence
  Description of Artificial Sequence: Synthetic peptide
  Seed: DPRMCSLMQGSTLPRRSGAA
DPRMYSLMQPSTIPRRSGAA

SEQ ID NO: 68363 - protein, 20 aa, Artificial Sequence
  Description of Artificial Sequence: Synthetic peptide
  Seed: DPRMCSLMQGSTLPRRSGAA
DPRMYSLMQPSTLPRRSGAA

SEQ ID NO: 68364 - protein, 20 aa, Artificial Sequence
  Description of Artificial Sequence: Synthetic peptide
  Seed: DPRMCSLMQGSTLPRRSGAA
DPRMYSLMQPSTMPRRSGAA

SEQ ID NO: 68365 - protein, 20 aa, Artificial Sequence
  Description of Artificial Sequence: Synthetic peptide
  Seed: DPRMCSLMQGSTLPRRSGAA
DPRMYSLMQPSTNPRRSGAA

SEQ ID NO: 68366 - protein, 20 aa, Artificial Sequence
  Description of Artificial Sequence: Synthetic peptide
  Seed: DPRMCSLMQGSTLPRRSGAA
DPRMYSLMQPSTSPRRSGAA

SEQ ID NO: 68367 - protein, 20 aa, Artificial Sequence
  Description of Artificial Sequence: Synthetic peptide
  Seed: DPRMCSLMQGSTLPRRSGAA
DPRMYSLMQPSTTPRRSGAA

SEQ ID NO: 68368 - protein, 20 aa, Artificial Sequence
  Description of Artificial Sequence: Synthetic peptide
  Seed: DPRMCSLMQGSTLPRRSGAA
DPRMYSLMQPSTVPRRSGAA

SEQ ID NO: 68369 - protein, 20 aa, Artificial Sequence
  Description of Artificial Sequence: Synthetic peptide
  Seed: DPRMCSLMQGSTLPRRSGAA
DPRMYSLMQQSTIPRRSGAA

SEQ ID NO: 68370 - protein, 20 aa, Artificial Sequence
  Description of Artificial Sequence: Synthetic peptide
  Seed: DPRMCSLMQGSTLPRRSGAA
DPRMYSLMQQSTLPRRSGAA

SEQ ID NO: 68371 - protein, 20 aa, Artificial Sequence
  Description of Artificial Sequence: Synthetic peptide
  Seed: DPRMCSLMQGSTLPRRSGAA
DPRMYSLMQQSTVPRRSGAA

SEQ ID NO: 68372 - protein, 20 aa, Artificial Sequence
  Description of Artificial Sequence: Synthetic peptide
  Seed: DPRMCSLMQGSTLPRRSGAA
DPRMYSLMQSSTAPRRSGAA

SEQ ID NO: 68373 - protein, 20 aa, Artificial Sequence
  Description of Artificial Sequence: Synthetic peptide
  Seed: DPRMCSLMQGSTLPRRSGAA
DPRMYSLMQSSTCPRRSGAA

SEQ ID NO: 68374 - protein, 20 aa, Artificial Sequence
  Description of Artificial Sequence: Synthetic peptide
  Seed: DPRMCSLMQGSTLPRRSGAA
DPRMYSLMQSSTFPRRSGAA

SEQ ID NO: 68375 - protein, 20 aa, Artificial Sequence
  Description of Artificial Sequence: Synthetic peptide
  Seed: DPRMCSLMQGSTLPRRSGAA
DPRMYSLMQSSTGPRRSGAA

SEQ ID NO: 68376 - protein, 20 aa, Artificial Sequence
  Description of Artificial Sequence: Synthetic peptide
  Seed: DPRMCSLMQGSTLPRRSGAA
DPRMYSLMQSSTIPRRSGAA

SEQ ID NO: 68377 - protein, 20 aa, Artificial Sequence
  Description of Artificial Sequence: Synthetic peptide
  Seed: DPRMCSLMQGSTLPRRSGAA
DPRMYSLMQSSTLPRRSGAA

SEQ ID NO: 68378 - protein, 20 aa, Artificial Sequence
  Description of Artificial Sequence: Synthetic peptide
  Seed: DPRMCSLMQGSTLPRRSGAA
DPRMYSLMQSSTMPRRSGAA

SEQ ID NO: 68379 - protein, 20 aa, Artificial Sequence
  Description of Artificial Sequence: Synthetic peptide
  Seed: DPRMCSLMQGSTLPRRSGAA
DPRMYSLMQSSTNPRRSGAA

SEQ ID NO: 68380 - protein, 20 aa, Artificial Sequence
  Description of Artificial Sequence: Synthetic peptide
  Seed: DPRMCSLMQGSTLPRRSGAA
DPRMYSLMQSSTSPRRSGAA

SEQ ID NO: 68381 - protein, 20 aa, Artificial Sequence
  Description of Artificial Sequence: Synthetic peptide
  Seed: DPRMCSLMQGSTLPRRSGAA
DPRMYSLMQSSTTPRRSGAA

SEQ ID NO: 68382 - protein, 20 aa, Artificial Sequence
  Description of Artificial Sequence: Synthetic peptide
  Seed: DPRMCSLMQGSTLPRRSGAA
DPRMYSLMQSSTVPRRSGAA

SEQ ID NO: 68383 - protein, 20 aa, Artificial Sequence
  Description of Artificial Sequence: Synthetic peptide
  Seed: DPRMCSLMQGSTLPRRSGAA
DPRMYSLMQTSTAPRRSGAA

SEQ ID NO: 68384 - protein, 20 aa, Artificial Sequence
  Description of Artificial Sequence: Synthetic peptide
  Seed: DPRMCSLMQGSTLPRRSGAA
DPRMYSLMQTSTGPRRSGAA

SEQ ID NO: 68385 - protein, 20 aa, Artificial Sequence
  Description of Artificial Sequence: Synthetic peptide
  Seed: DPRMCSLMQGSTLPRRSGAA
DPRMYSLMQTSTIPRRSGAA

SEQ ID NO: 68386 - protein, 20 aa, Artificial Sequence
  Description of Artificial Sequence: Synthetic peptide
  Seed: DPRMCSLMQGSTLPRRSGAA
DPRMYSLMQTSTLPRRSGAA

SEQ ID NO: 68387 - protein, 20 aa, Artificial Sequence
  Description of Artificial Sequence: Synthetic peptide
  Seed: DPRMCSLMQGSTLPRRSGAA
DPRMYSLMQTSTMPRRSGAA

SEQ ID NO: 68388 - protein, 20 aa, Artificial Sequence
  Description of Artificial Sequence: Synthetic peptide
  Seed: DPRMCSLMQGSTLPRRSGAA
DPRMYSLMQTSTSPRRSGAA

SEQ ID NO: 68389 - protein, 20 aa, Artificial Sequence
  Description of Artificial Sequence: Synthetic peptide
  Seed: DPRMCSLMQGSTLPRRSGAA
DPRMYSLMQTSTTPRRSGAA

SEQ ID NO: 68390 - protein, 20 aa, Artificial Sequence
  Description of Artificial Sequence: Synthetic peptide
  Seed: DPRMCSLMQGSTLPRRSGAA
DPRMYSLMQTSTVPRRSGAA

SEQ ID NO: 68391 - protein, 20 aa, Artificial Sequence
  Description of Artificial Sequence: Synthetic peptide
  Seed: DPRMCSLMQGSTLPRRSGAA
DPRMYSLMQVSTAPRRSGAA

SEQ ID NO: 68392 - protein, 20 aa, Artificial Sequence
  Description of Artificial Sequence: Synthetic peptide
  Seed: DPRMCSLMQGSTLPRRSGAA
DPRMYSLMQVSTGPRRSGAA

SEQ ID NO: 68393 - protein, 20 aa, Artificial Sequence
  Description of Artificial Sequence: Synthetic peptide
  Seed: DPRMCSLMQGSTLPRRSGAA
DPRMYSLMQVSTIPRRSGAA

SEQ ID NO: 68394 - protein, 20 aa, Artificial Sequence
  Description of Artificial Sequence: Synthetic peptide
  Seed: DPRMCSLMQGSTLPRRSGAA
DPRMYSLMQVSTLPRRSGAA

SEQ ID NO: 68395 - protein, 20 aa, Artificial Sequence
  Description of Artificial Sequence: Synthetic peptide
  Seed: DPRMCSLMQGSTLPRRSGAA
DPRMYSLMQVSTMPRRSGAA

SEQ ID NO: 68396 - protein, 20 aa, Artificial Sequence
  Description of Artificial Sequence: Synthetic peptide
  Seed: DPRMCSLMQGSTLPRRSGAA
DPRMYSLMQVSTSPRRSGAA

SEQ ID NO: 68397 - protein, 20 aa, Artificial Sequence
  Description of Artificial Sequence: Synthetic peptide
  Seed: DPRMCSLMQGSTLPRRSGAA
DPRMYSLMQVSTTPRRSGAA

SEQ ID NO: 68398 - protein, 20 aa, Artificial Sequence
  Description of Artificial Sequence: Synthetic peptide
  Seed: DPRMCSLMQGSTLPRRSGAA
DPRMYSLMQVSTVPRRSGAA

SEQ ID NO: 68399 - protein, 20 aa, Artificial Sequence
  Description of Artificial Sequence: Synthetic peptide
  Seed: DPRMCSLMQGSTLPRRSGAA
DPRMYSLNQASTAPRRSGAA

SEQ ID NO: 68400 - protein, 20 aa, Artificial Sequence
  Description of Artificial Sequence: Synthetic peptide
  Seed: DPRMCSLMQGSTLPRRSGAA
DPRMYSLNQASTIPRRSGAA

SEQ ID NO: 68401 - protein, 20 aa, Artificial Sequence
  Description of Artificial Sequence: Synthetic peptide
  Seed: DPRMCSLMQGSTLPRRSGAA
DPRMYSLNQASTLPRRSGAA

SEQ ID NO: 68402 - protein, 20 aa, Artificial Sequence
  Description of Artificial Sequence: Synthetic peptide
  Seed: DPRMCSLMQGSTLPRRSGAA
DPRMYSLNQASTVPRRSGAA

SEQ ID NO: 68403 - protein, 20 aa, Artificial Sequence
  Description of Artificial Sequence: Synthetic peptide
  Seed: DPRMCSLMQGSTLPRRSGAA
DPRMYSLQQASTAPRRSGAA

SEQ ID NO: 68404 - protein, 20 aa, Artificial Sequence
  Description of Artificial Sequence: Synthetic peptide
  Seed: DPRMCSLMQGSTLPRRSGAA
DPRMYSLQQASTGPRRSGAA

SEQ ID NO: 68405 - protein, 20 aa, Artificial Sequence
  Description of Artificial Sequence: Synthetic peptide
  Seed: DPRMCSLMQGSTLPRRSGAA
DPRMYSLQQASTIPRRSGAA

SEQ ID NO: 68406 - protein, 20 aa, Artificial Sequence
  Description of Artificial Sequence: Synthetic peptide
  Seed: DPRMCSLMQGSTLPRRSGAA
DPRMYSLQQASTLPRRSGAA

SEQ ID NO: 68407 - protein, 20 aa, Artificial Sequence
  Description of Artificial Sequence: Synthetic peptide
  Seed: DPRMCSLMQGSTLPRRSGAA
DPRMYSLQQASTMPRRSGAA

SEQ ID NO: 68408 - protein, 20 aa, Artificial Sequence
  Description of Artificial Sequence: Synthetic peptide
  Seed: DPRMCSLMQGSTLPRRSGAA
DPRMYSLQQASTSPRRSGAA

SEQ ID NO: 68409 - protein, 20 aa, Artificial Sequence
  Description of Artificial Sequence: Synthetic peptide
  Seed: DPRMCSLMQGSTLPRRSGAA
DPRMYSLQQASTTPRRSGAA

SEQ ID NO: 68410 - protein, 20 aa, Artificial Sequence
  Description of Artificial Sequence: Synthetic peptide
  Seed: DPRMCSLMQGSTLPRRSGAA
DPRMYSLQQASTVPRRSGAA

SEQ ID NO: 68411 - protein, 20 aa, Artificial Sequence
  Description of Artificial Sequence: Synthetic peptide
  Seed: DPRMCSLMQGSTLPRRSGAA
DPRMYSLQQGSTAPRRSGAA

SEQ ID NO: 68412 - protein, 20 aa, Artificial Sequence
  Description of Artificial Sequence: Synthetic peptide
  Seed: DPRMCSLMQGSTLPRRSGAA
DPRMYSLQQGSTIPRRSGAA

SEQ ID NO: 68413 - protein, 20 aa, Artificial Sequence
  Description of Artificial Sequence: Synthetic peptide
  Seed: DPRMCSLMQGSTLPRRSGAA
DPRMYSLQQGSTLPRRSGAA

SEQ ID NO: 68414 - protein, 20 aa, Artificial Sequence
  Description of Artificial Sequence: Synthetic peptide
  Seed: DPRMCSLMQGSTLPRRSGAA
DPRMYSLQQGSTMPRRSGAA

SEQ ID NO: 68415 - protein, 20 aa, Artificial Sequence
  Description of Artificial Sequence: Synthetic peptide
  Seed: DPRMCSLMQGSTLPRRSGAA
DPRMYSLQQGSTSPRRSGAA

SEQ ID NO: 68416 - protein, 20 aa, Artificial Sequence
  Description of Artificial Sequence: Synthetic peptide
  Seed: DPRMCSLMQGSTLPRRSGAA
DPRMYSLQQGSTTPRRSGAA

SEQ ID NO: 68417 - protein, 20 aa, Artificial Sequence
  Description of Artificial Sequence: Synthetic peptide
  Seed: DPRMCSLMQGSTLPRRSGAA
DPRMYSLQQGSTVPRRSGAA

SEQ ID NO: 68418 - protein, 20 aa, Artificial Sequence
  Description of Artificial Sequence: Synthetic peptide
  Seed: DPRMCSLMQGSTLPRRSGAA
DPRMYSLQQNSTAPRRSGAA

SEQ ID NO: 68419 - protein, 20 aa, Artificial Sequence
  Description of Artificial Sequence: Synthetic peptide
  Seed: DPRMCSLMQGSTLPRRSGAA
DPRMYSLQQNSTIPRRSGAA

SEQ ID NO: 68420 - protein, 20 aa, Artificial Sequence
  Description of Artificial Sequence: Synthetic peptide
  Seed: DPRMCSLMQGSTLPRRSGAA
DPRMYSLQQNSTLPRRSGAA

SEQ ID NO: 68421 - protein, 20 aa, Artificial Sequence
  Description of Artificial Sequence: Synthetic peptide
  Seed: DPRMCSLMQGSTLPRRSGAA
DPRMYSLQQNSTVPRRSGAA

SEQ ID NO: 68422 - protein, 20 aa, Artificial Sequence
  Description of Artificial Sequence: Synthetic peptide
  Seed: DPRMCSLMQGSTLPRRSGAA
DPRMYSLQQPSTAPRRSGAA

SEQ ID NO: 68423 - protein, 20 aa, Artificial Sequence
  Description of Artificial Sequence: Synthetic peptide
  Seed: DPRMCSLMQGSTLPRRSGAA
DPRMYSLQQPSTIPRRSGAA

SEQ ID NO: 68424 - protein, 20 aa, Artificial Sequence
  Description of Artificial Sequence: Synthetic peptide
  Seed: DPRMCSLMQGSTLPRRSGAA
DPRMYSLQQPSTLPRRSGAA

SEQ ID NO: 68425 - protein, 20 aa, Artificial Sequence
  Description of Artificial Sequence: Synthetic peptide
  Seed: DPRMCSLMQGSTLPRRSGAA
DPRMYSLQQPSTVPRRSGAA

SEQ ID NO: 68426 - protein, 20 aa, Artificial Sequence
  Description of Artificial Sequence: Synthetic peptide
  Seed: DPRMCSLMQGSTLPRRSGAA
DPRMYSLQQSSTAPRRSGAA

SEQ ID NO: 68427 - protein, 20 aa, Artificial Sequence
  Description of Artificial Sequence: Synthetic peptide
  Seed: DPRMCSLMQGSTLPRRSGAA
DPRMYSLQQSSTIPRRSGAA

SEQ ID NO: 68428 - protein, 20 aa, Artificial Sequence
  Description of Artificial Sequence: Synthetic peptide
  Seed: DPRMCSLMQGSTLPRRSGAA
DPRMYSLQQSSTLPRRSGAA

SEQ ID NO: 68429 - protein, 20 aa, Artificial Sequence
  Description of Artificial Sequence: Synthetic peptide
  Seed: DPRMCSLMQGSTLPRRSGAA
DPRMYSLQQSSTMPRRSGAA

SEQ ID NO: 68430 - protein, 20 aa, Artificial Sequence
  Description of Artificial Sequence: Synthetic peptide
  Seed: DPRMCSLMQGSTLPRRSGAA
DPRMYSLQQSSTSPRRSGAA

SEQ ID NO: 68431 - protein, 20 aa, Artificial Sequence
  Description of Artificial Sequence: Synthetic peptide
  Seed: DPRMCSLMQGSTLPRRSGAA
DPRMYSLQQSSTTPRRSGAA

SEQ ID NO: 68432 - protein, 20 aa, Artificial Sequence
  Description of Artificial Sequence: Synthetic peptide
  Seed: DPRMCSLMQGSTLPRRSGAA
DPRMYSLQQSSTVPRRSGAA

SEQ ID NO: 68433 - protein, 20 aa, Artificial Sequence
  Description of Artificial Sequence: Synthetic peptide
  Seed: DPRMCSLMQGSTLPRRSGAA
DPRMYSLQQTSTAPRRSGAA

SEQ ID NO: 68434 - protein, 20 aa, Artificial Sequence
  Description of Artificial Sequence: Synthetic peptide
  Seed: DPRMCSLMQGSTLPRRSGAA
DPRMYSLQQTSTIPRRSGAA

SEQ ID NO: 68435 - protein, 20 aa, Artificial Sequence
  Description of Artificial Sequence: Synthetic peptide
  Seed: DPRMCSLMQGSTLPRRSGAA
DPRMYSLQQTSTLPRRSGAA

SEQ ID NO: 68436 - protein, 20 aa, Artificial Sequence
  Description of Artificial Sequence: Synthetic peptide
  Seed: DPRMCSLMQGSTLPRRSGAA
DPRMYSLQQTSTVPRRSGAA

SEQ ID NO: 68437 - protein, 20 aa, Artificial Sequence
  Description of Artificial Sequence: Synthetic peptide
  Seed: DPRMCSLMQGSTLPRRSGAA
DPRMYSLQQVSTAPRRSGAA

SEQ ID NO: 68438 - protein, 20 aa, Artificial Sequence
  Description of Artificial Sequence: Synthetic peptide
  Seed: DPRMCSLMQGSTLPRRSGAA
DPRMYSLQQVSTIPRRSGAA

SEQ ID NO: 68439 - protein, 20 aa, Artificial Sequence
  Description of Artificial Sequence: Synthetic peptide
  Seed: DPRMCSLMQGSTLPRRSGAA
DPRMYSLQQVSTLPRRSGAA

SEQ ID NO: 68440 - protein, 20 aa, Artificial Sequence
  Description of Artificial Sequence: Synthetic peptide
  Seed: DPRMCSLMQGSTLPRRSGAA
DPRMYSLQQVSTVPRRSGAA

SEQ ID NO: 68441 - protein, 20 aa, Artificial Sequence
  Description of Artificial Sequence: Synthetic peptide
  Seed: DPRMCSLMQGSTLPRRSGAA
DPRMYSLSQASTAPRRSGAA

SEQ ID NO: 68442 - protein, 20 aa, Artificial Sequence
  Description of Artificial Sequence: Synthetic peptide
  Seed: DPRMCSLMQGSTLPRRSGAA
DPRMYSLSQASTIPRRSGAA

SEQ ID NO: 68443 - protein, 20 aa, Artificial Sequence
  Description of Artificial Sequence: Synthetic peptide
  Seed: DPRMCSLMQGSTLPRRSGAA
DPRMYSLSQASTLPRRSGAA

SEQ ID NO: 68444 - protein, 20 aa, Artificial Sequence
  Description of Artificial Sequence: Synthetic peptide
  Seed: DPRMCSLMQGSTLPRRSGAA
DPRMYSLSQASTMPRRSGAA

SEQ ID NO: 68445 - protein, 20 aa, Artificial Sequence
  Description of Artificial Sequence: Synthetic peptide
  Seed: DPRMCSLMQGSTLPRRSGAA
DPRMYSLSQASTSPRRSGAA

SEQ ID NO: 68446 - protein, 20 aa, Artificial Sequence
  Description of Artificial Sequence: Synthetic peptide
  Seed: DPRMCSLMQGSTLPRRSGAA
DPRMYSLSQASTTPRRSGAA

SEQ ID NO: 68447 - protein, 20 aa, Artificial Sequence
  Description of Artificial Sequence: Synthetic peptide
  Seed: DPRMCSLMQGSTLPRRSGAA
DPRMYSLSQASTVPRRSGAA

SEQ ID NO: 68448 - protein, 20 aa, Artificial Sequence
  Description of Artificial Sequence: Synthetic peptide
  Seed: DPRMCSLMQGSTLPRRSGAA
DPRMYSLSQGSTAPRRSGAA

SEQ ID NO: 68449 - protein, 20 aa, Artificial Sequence
  Description of Artificial Sequence: Synthetic peptide
  Seed: DPRMCSLMQGSTLPRRSGAA
DPRMYSLSQGSTIPRRSGAA

SEQ ID NO: 68450 - protein, 20 aa, Artificial Sequence
  Description of Artificial Sequence: Synthetic peptide
  Seed: DPRMCSLMQGSTLPRRSGAA
DPRMYSLSQGSTLPRRSGAA

SEQ ID NO: 68451 - protein, 20 aa, Artificial Sequence
  Description of Artificial Sequence: Synthetic peptide
  Seed: DPRMCSLMQGSTLPRRSGAA
DPRMYSLSQGSTVPRRSGAA

SEQ ID NO: 68452 - protein, 20 aa, Artificial Sequence
  Description of Artificial Sequence: Synthetic peptide
  Seed: DPRMCSLMQGSTLPRRSGAA
DPRMYSLSQPSTAPRRSGAA

SEQ ID NO: 68453 - protein, 20 aa, Artificial Sequence
  Description of Artificial Sequence: Synthetic peptide
  Seed: DPRMCSLMQGSTLPRRSGAA
DPRMYSLSQPSTIPRRSGAA

SEQ ID NO: 68454 - protein, 20 aa, Artificial Sequence
  Description of Artificial Sequence: Synthetic peptide
  Seed: DPRMCSLMQGSTLPRRSGAA
DPRMYSLSQPSTLPRRSGAA

SEQ ID NO: 68455 - protein, 20 aa, Artificial Sequence
  Description of Artificial Sequence: Synthetic peptide
  Seed: DPRMCSLMQGSTLPRRSGAA
DPRMYSLSQPSTVPRRSGAA

SEQ ID NO: 68456 - protein, 20 aa, Artificial Sequence
  Description of Artificial Sequence: Synthetic peptide
  Seed: DPRMCSLMQGSTLPRRSGAA
DPRMYSLSQSSTAPRRSGAA

SEQ ID NO: 68457 - protein, 20 aa, Artificial Sequence
  Description of Artificial Sequence: Synthetic peptide
  Seed: DPRMCSLMQGSTLPRRSGAA
DPRMYSLSQSSTIPRRSGAA

SEQ ID NO: 68458 - protein, 20 aa, Artificial Sequence
  Description of Artificial Sequence: Synthetic peptide
  Seed: DPRMCSLMQGSTLPRRSGAA
DPRMYSLSQSSTLPRRSGAA

SEQ ID NO: 68459 - protein, 20 aa, Artificial Sequence
  Description of Artificial Sequence: Synthetic peptide
  Seed: DPRMCSLMQGSTLPRRSGAA
DPRMYSLSQSSTVPRRSGAA

SEQ ID NO: 68460 - protein, 20 aa, Artificial Sequence
  Description of Artificial Sequence: Synthetic peptide
  Seed: DPRMCSLMQGSTLPRRSGAA
DPRMYSLTQASTAPRRSGAA

SEQ ID NO: 68461 - protein, 20 aa, Artificial Sequence
  Description of Artificial Sequence: Synthetic peptide
  Seed: DPRMCSLMQGSTLPRRSGAA
DPRMYSLTQASTIPRRSGAA

SEQ ID NO: 68462 - protein, 20 aa, Artificial Sequence
  Description of Artificial Sequence: Synthetic peptide
  Seed: DPRMCSLMQGSTLPRRSGAA
DPRMYSLTQASTLPRRSGAA

SEQ ID NO: 68463 - protein, 20 aa, Artificial Sequence
  Description of Artificial Sequence: Synthetic peptide
  Seed: DPRMCSLMQGSTLPRRSGAA
DPRMYSLTQASTMPRRSGAA

SEQ ID NO: 68464 - protein, 20 aa, Artificial Sequence
  Description of Artificial Sequence: Synthetic peptide
  Seed: DPRMCSLMQGSTLPRRSGAA
DPRMYSLTQASTVPRRSGAA

SEQ ID NO: 68465 - protein, 20 aa, Artificial Sequence
  Description of Artificial Sequence: Synthetic peptide
  Seed: DPRMCSLMQGSTLPRRSGAA
DPRMYSLTQGSTIPRRSGAA

SEQ ID NO: 68466 - protein, 20 aa, Artificial Sequence
  Description of Artificial Sequence: Synthetic peptide
  Seed: DPRMCSLMQGSTLPRRSGAA
DPRMYSLTQGSTLPRRSGAA

SEQ ID NO: 68467 - protein, 20 aa, Artificial Sequence
  Description of Artificial Sequence: Synthetic peptide
  Seed: DPRMCSLMQGSTLPRRSGAA
DPRMYSLTQGSTVPRRSGAA

SEQ ID NO: 68468 - protein, 20 aa, Artificial Sequence
  Description of Artificial Sequence: Synthetic peptide
  Seed: DPRMCSLMQGSTLPRRSGAA
DPRMYSLTQPSTVPRRSGAA

SEQ ID NO: 68469 - protein, 20 aa, Artificial Sequence
  Description of Artificial Sequence: Synthetic peptide
  Seed: DPRMCSLMQGSTLPRRSGAA
DPRMYSLTQSSTIPRRSGAA

SEQ ID NO: 68470 - protein, 20 aa, Artificial Sequence
  Description of Artificial Sequence: Synthetic peptide
  Seed: DPRMCSLMQGSTLPRRSGAA
DPRMYSLTQSSTLPRRSGAA

SEQ ID NO: 68471 - protein, 20 aa, Artificial Sequence
  Description of Artificial Sequence: Synthetic peptide
  Seed: DPRMCSLMQGSTLPRRSGAA
DPRMYSLTQSSTVPRRSGAA

SEQ ID NO: 68472 - protein, 20 aa, Artificial Sequence
  Description of Artificial Sequence: Synthetic peptide
  Seed: DPRMCSLMQGSTLPRRSGAA
DPRMYSLVQASTAPRRSGAA

SEQ ID NO: 68473 - protein, 20 aa, Artificial Sequence
  Description of Artificial Sequence: Synthetic peptide
  Seed: DPRMCSLMQGSTLPRRSGAA
DPRMYSLVQASTGPRRSGAA

SEQ ID NO: 68474 - protein, 20 aa, Artificial Sequence
  Description of Artificial Sequence: Synthetic peptide
  Seed: DPRMCSLMQGSTLPRRSGAA
DPRMYSLVQASTIPRRSGAA

SEQ ID NO: 68475 - protein, 20 aa, Artificial Sequence
  Description of Artificial Sequence: Synthetic peptide
  Seed: DPRMCSLMQGSTLPRRSGAA
DPRMYSLVQASTLPRRSGAA

SEQ ID NO: 68476 - protein, 20 aa, Artificial Sequence
  Description of Artificial Sequence: Synthetic peptide
  Seed: DPRMCSLMQGSTLPRRSGAA
DPRMYSLVQASTMPRRSGAA

SEQ ID NO: 68477 - protein, 20 aa, Artificial Sequence
  Description of Artificial Sequence: Synthetic peptide
  Seed: DPRMCSLMQGSTLPRRSGAA
DPRMYSLVQASTSPRRSGAA

SEQ ID NO: 68478 - protein, 20 aa, Artificial Sequence
  Description of Artificial Sequence: Synthetic peptide
  Seed: DPRMCSLMQGSTLPRRSGAA
DPRMYSLVQASTTPRRSGAA

SEQ ID NO: 68479 - protein, 20 aa, Artificial Sequence
  Description of Artificial Sequence: Synthetic peptide
  Seed: DPRMCSLMQGSTLPRRSGAA
DPRMYSLVQASTVPRRSGAA

SEQ ID NO: 68480 - protein, 20 aa, Artificial Sequence
  Description of Artificial Sequence: Synthetic peptide
  Seed: DPRMCSLMQGSTLPRRSGAA
DPRMYSLVQGSTAPRRSGAA

SEQ ID NO: 68481 - protein, 20 aa, Artificial Sequence
  Description of Artificial Sequence: Synthetic peptide
  Seed: DPRMCSLMQGSTLPRRSGAA
DPRMYSLVQGSTIPRRSGAA

SEQ ID NO: 68482 - protein, 20 aa, Artificial Sequence
  Description of Artificial Sequence: Synthetic peptide
  Seed: DPRMCSLMQGSTLPRRSGAA
DPRMYSLVQGSTLPRRSGAA

SEQ ID NO: 68483 - protein, 20 aa, Artificial Sequence
  Description of Artificial Sequence: Synthetic peptide
  Seed: DPRMCSLMQGSTLPRRSGAA
DPRMYSLVQGSTMPRRSGAA

SEQ ID NO: 68484 - protein, 20 aa, Artificial Sequence
  Description of Artificial Sequence: Synthetic peptide
  Seed: DPRMCSLMQGSTLPRRSGAA
DPRMYSLVQGSTSPRRSGAA

SEQ ID NO: 68485 - protein, 20 aa, Artificial Sequence
  Description of Artificial Sequence: Synthetic peptide
  Seed: DPRMCSLMQGSTLPRRSGAA
DPRMYSLVQGSTTPRRSGAA

SEQ ID NO: 68486 - protein, 20 aa, Artificial Sequence
  Description of Artificial Sequence: Synthetic peptide
  Seed: DPRMCSLMQGSTLPRRSGAA
DPRMYSLVQGSTVPRRSGAA

SEQ ID NO: 68487 - protein, 20 aa, Artificial Sequence
  Description of Artificial Sequence: Synthetic peptide
  Seed: DPRMCSLMQGSTLPRRSGAA
DPRMYSLVQNSTAPRRSGAA

SEQ ID NO: 68488 - protein, 20 aa, Artificial Sequence
  Description of Artificial Sequence: Synthetic peptide
  Seed: DPRMCSLMQGSTLPRRSGAA
DPRMYSLVQNSTIPRRSGAA

SEQ ID NO: 68489 - protein, 20 aa, Artificial Sequence
  Description of Artificial Sequence: Synthetic peptide
  Seed: DPRMCSLMQGSTLPRRSGAA
DPRMYSLVQNSTLPRRSGAA

SEQ ID NO: 68490 - protein, 20 aa, Artificial Sequence
  Description of Artificial Sequence: Synthetic peptide
  Seed: DPRMCSLMQGSTLPRRSGAA
DPRMYSLVQNSTVPRRSGAA

SEQ ID NO: 68491 - protein, 20 aa, Artificial Sequence
  Description of Artificial Sequence: Synthetic peptide
  Seed: DPRMCSLMQGSTLPRRSGAA
DPRMYSLVQPSTAPRRSGAA

SEQ ID NO: 68492 - protein, 20 aa, Artificial Sequence
  Description of Artificial Sequence: Synthetic peptide
  Seed: DPRMCSLMQGSTLPRRSGAA
DPRMYSLVQPSTIPRRSGAA

SEQ ID NO: 68493 - protein, 20 aa, Artificial Sequence
  Description of Artificial Sequence: Synthetic peptide
  Seed: DPRMCSLMQGSTLPRRSGAA
DPRMYSLVQPSTLPRRSGAA

SEQ ID NO: 68494 - protein, 20 aa, Artificial Sequence
  Description of Artificial Sequence: Synthetic peptide
  Seed: DPRMCSLMQGSTLPRRSGAA
DPRMYSLVQPSTMPRRSGAA

SEQ ID NO: 68495 - protein, 20 aa, Artificial Sequence
  Description of Artificial Sequence: Synthetic peptide
  Seed: DPRMCSLMQGSTLPRRSGAA
DPRMYSLVQPSTTPRRSGAA

SEQ ID NO: 68496 - protein, 20 aa, Artificial Sequence
  Description of Artificial Sequence: Synthetic peptide
  Seed: DPRMCSLMQGSTLPRRSGAA
DPRMYSLVQPSTVPRRSGAA

SEQ ID NO: 68497 - protein, 20 aa, Artificial Sequence
  Description of Artificial Sequence: Synthetic peptide
  Seed: DPRMCSLMQGSTLPRRSGAA
DPRMYSLVQSSTAPRRSGAA

SEQ ID NO: 68498 - protein, 20 aa, Artificial Sequence
  Description of Artificial Sequence: Synthetic peptide
  Seed: DPRMCSLMQGSTLPRRSGAA
DPRMYSLVQSSTIPRRSGAA

SEQ ID NO: 68499 - protein, 20 aa, Artificial Sequence
  Description of Artificial Sequence: Synthetic peptide
  Seed: DPRMCSLMQGSTLPRRSGAA
DPRMYSLVQSSTLPRRSGAA

SEQ ID NO: 68500 - protein, 20 aa, Artificial Sequence
  Description of Artificial Sequence: Synthetic peptide
  Seed: DPRMCSLMQGSTLPRRSGAA
DPRMYSLVQSSTMPRRSGAA

SEQ ID NO: 68501 - protein, 20 aa, Artificial Sequence
  Description of Artificial Sequence: Synthetic peptide
  Seed: DPRMCSLMQGSTLPRRSGAA
DPRMYSLVQSSTSPRRSGAA

SEQ ID NO: 68502 - protein, 20 aa, Artificial Sequence
  Description of Artificial Sequence: Synthetic peptide
  Seed: DPRMCSLMQGSTLPRRSGAA
DPRMYSLVQSSTTPRRSGAA

SEQ ID NO: 68503 - protein, 20 aa, Artificial Sequence
  Description of Artificial Sequence: Synthetic peptide
  Seed: DPRMCSLMQGSTLPRRSGAA
DPRMYSLVQSSTVPRRSGAA

SEQ ID NO: 68504 - protein, 20 aa, Artificial Sequence
  Description of Artificial Sequence: Synthetic peptide
  Seed: DPRMCSLMQGSTLPRRSGAA
DPRMYSLVQTSTAPRRSGAA

SEQ ID NO: 68505 - protein, 20 aa, Artificial Sequence
  Description of Artificial Sequence: Synthetic peptide
  Seed: DPRMCSLMQGSTLPRRSGAA
DPRMYSLVQTSTIPRRSGAA

SEQ ID NO: 68506 - protein, 20 aa, Artificial Sequence
  Description of Artificial Sequence: Synthetic peptide
  Seed: DPRMCSLMQGSTLPRRSGAA
DPRMYSLVQTSTLPRRSGAA

SEQ ID NO: 68507 - protein, 20 aa, Artificial Sequence
  Description of Artificial Sequence: Synthetic peptide
  Seed: DPRMCSLMQGSTLPRRSGAA
DPRMYSLVQTSTVPRRSGAA

SEQ ID NO: 68508 - protein, 20 aa, Artificial Sequence
  Description of Artificial Sequence: Synthetic peptide
  Seed: DPRMCSLMQGSTLPRRSGAA
DPRMYSLVQVSTAPRRSGAA

SEQ ID NO: 68509 - protein, 20 aa, Artificial Sequence
  Description of Artificial Sequence: Synthetic peptide
  Seed: DPRMCSLMQGSTLPRRSGAA
DPRMYSLVQVSTIPRRSGAA

SEQ ID NO: 68510 - protein, 20 aa, Artificial Sequence
  Description of Artificial Sequence: Synthetic peptide
  Seed: DPRMCSLMQGSTLPRRSGAA
DPRMYSLVQVSTVPRRSGAA

SEQ ID NO: 68511 - protein, 20 aa, Artificial Sequence
  Description of Artificial Sequence: Synthetic peptide
  Seed: DPRMCSLMQGSTLPRRSGAA
DPRMCSFMQMSRLPSRSGAA

SEQ ID NO: 68512 - protein, 20 aa, Artificial Sequence
  Description of Artificial Sequence: Synthetic peptide
  Seed: DPRMCSLMQGSTLPRRSGAA
DPRMCSIMQISKLPARSGAA

SEQ ID NO: 68513 - protein, 20 aa, Artificial Sequence
  Description of Artificial Sequence: Synthetic peptide
  Seed: DPRMCSLMQGSTLPRRSGAA
DPRMCSIMQISKLPGRSGAA

SEQ ID NO: 68514 - protein, 20 aa, Artificial Sequence
  Description of Artificial Sequence: Synthetic peptide
  Seed: DPRMCSLMQGSTLPRRSGAA
DPRMCSIMQISKLPSRSGAA

SEQ ID NO: 68515 - protein, 20 aa, Artificial Sequence
  Description of Artificial Sequence: Synthetic peptide
  Seed: DPRMCSLMQGSTLPRRSGAA
DPRMCSIMQISRLPARSGAA

SEQ ID NO: 68516 - protein, 20 aa, Artificial Sequence
  Description of Artificial Sequence: Synthetic peptide
  Seed: DPRMCSLMQGSTLPRRSGAA
DPRMCSIMQISRLPGRSGAA

SEQ ID NO: 68517 - protein, 20 aa, Artificial Sequence
  Description of Artificial Sequence: Synthetic peptide
  Seed: DPRMCSLMQGSTLPRRSGAA
DPRMCSIMQISRLPHRSGAA

SEQ ID NO: 68518 - protein, 20 aa, Artificial Sequence
  Description of Artificial Sequence: Synthetic peptide
  Seed: DPRMCSLMQGSTLPRRSGAA
DPRMCSIMQISRLPQRSGAA

SEQ ID NO: 68519 - protein, 20 aa, Artificial Sequence
  Description of Artificial Sequence: Synthetic peptide
  Seed: DPRMCSLMQGSTLPRRSGAA
DPRMCSIMQISRLPSRSGAA

SEQ ID NO: 68520 - protein, 20 aa, Artificial Sequence
  Description of Artificial Sequence: Synthetic peptide
  Seed: DPRMCSLMQGSTLPRRSGAA
DPRMCSIMQISRLPTRSGAA

SEQ ID NO: 68521 - protein, 20 aa, Artificial Sequence
  Description of Artificial Sequence: Synthetic peptide
  Seed: DPRMCSLMQGSTLPRRSGAA
DPRMCSIMQLSKLPARSGAA

SEQ ID NO: 68522 - protein, 20 aa, Artificial Sequence
  Description of Artificial Sequence: Synthetic peptide
  Seed: DPRMCSLMQGSTLPRRSGAA
DPRMCSIMQLSKLPGRSGAA

SEQ ID NO: 68523 - protein, 20 aa, Artificial Sequence
  Description of Artificial Sequence: Synthetic peptide
  Seed: DPRMCSLMQGSTLPRRSGAA
DPRMCSIMQLSKLPSRSGAA

SEQ ID NO: 68524 - protein, 20 aa, Artificial Sequence
  Description of Artificial Sequence: Synthetic peptide
  Seed: DPRMCSLMQGSTLPRRSGAA
DPRMCSIMQLSRLPARSGAA

SEQ ID NO: 68525 - protein, 20 aa, Artificial Sequence
  Description of Artificial Sequence: Synthetic peptide
  Seed: DPRMCSLMQGSTLPRRSGAA
DPRMCSIMQLSRLPGRSGAA

SEQ ID NO: 68526 - protein, 20 aa, Artificial Sequence
  Description of Artificial Sequence: Synthetic peptide
  Seed: DPRMCSLMQGSTLPRRSGAA
DPRMCSIMQLSRLPHRSGAA

SEQ ID NO: 68527 - protein, 20 aa, Artificial Sequence
  Description of Artificial Sequence: Synthetic peptide
  Seed: DPRMCSLMQGSTLPRRSGAA
DPRMCSIMQLSRLPQRSGAA

SEQ ID NO: 68528 - protein, 20 aa, Artificial Sequence
  Description of Artificial Sequence: Synthetic peptide
  Seed: DPRMCSLMQGSTLPRRSGAA
DPRMCSIMQLSRLPSRSGAA

SEQ ID NO: 68529 - protein, 20 aa, Artificial Sequence
  Description of Artificial Sequence: Synthetic peptide
  Seed: DPRMCSLMQGSTLPRRSGAA
DPRMCSIMQLSRLPTRSGAA

SEQ ID NO: 68530 - protein, 20 aa, Artificial Sequence
  Description of Artificial Sequence: Synthetic peptide
  Seed: DPRMCSLMQGSTLPRRSGAA
DPRMCSIMQMSKLPARSGAA

SEQ ID NO: 68531 - protein, 20 aa, Artificial Sequence
  Description of Artificial Sequence: Synthetic peptide
  Seed: DPRMCSLMQGSTLPRRSGAA
DPRMCSIMQMSKLPGRSGAA

SEQ ID NO: 68532 - protein, 20 aa, Artificial Sequence
  Description of Artificial Sequence: Synthetic peptide
  Seed: DPRMCSLMQGSTLPRRSGAA
DPRMCSIMQMSKLPHRSGAA

SEQ ID NO: 68533 - protein, 20 aa, Artificial Sequence
  Description of Artificial Sequence: Synthetic peptide
  Seed: DPRMCSLMQGSTLPRRSGAA
DPRMCSIMQMSKLPKRSGAA

SEQ ID NO: 68534 - protein, 20 aa, Artificial Sequence
  Description of Artificial Sequence: Synthetic peptide
  Seed: DPRMCSLMQGSTLPRRSGAA
DPRMCSIMQMSKLPQRSGAA

SEQ ID NO: 68535 - protein, 20 aa, Artificial Sequence
  Description of Artificial Sequence: Synthetic peptide
  Seed: DPRMCSLMQGSTLPRRSGAA
DPRMCSIMQMSKLPRRSGAA

SEQ ID NO: 68536 - protein, 20 aa, Artificial Sequence
  Description of Artificial Sequence: Synthetic peptide
  Seed: DPRMCSLMQGSTLPRRSGAA
DPRMCSIMQMSKLPSRSGAA

SEQ ID NO: 68537 - protein, 20 aa, Artificial Sequence
  Description of Artificial Sequence: Synthetic peptide
  Seed: DPRMCSLMQGSTLPRRSGAA
DPRMCSIMQMSKLPTRSGAA

SEQ ID NO: 68538 - protein, 20 aa, Artificial Sequence
  Description of Artificial Sequence: Synthetic peptide
  Seed: DPRMCSLMQGSTLPRRSGAA
DPRMCSIMQMSRLPARSGAA

SEQ ID NO: 68539 - protein, 20 aa, Artificial Sequence
  Description of Artificial Sequence: Synthetic peptide
  Seed: DPRMCSLMQGSTLPRRSGAA
DPRMCSIMQMSRLPGRSGAA

SEQ ID NO: 68540 - protein, 20 aa, Artificial Sequence
  Description of Artificial Sequence: Synthetic peptide
  Seed: DPRMCSLMQGSTLPRRSGAA
DPRMCSIMQMSRLPHRSGAA

SEQ ID NO: 68541 - protein, 20 aa, Artificial Sequence
  Description of Artificial Sequence: Synthetic peptide
  Seed: DPRMCSLMQGSTLPRRSGAA
DPRMCSIMQMSRLPKRSGAA

SEQ ID NO: 68542 - protein, 20 aa, Artificial Sequence
  Description of Artificial Sequence: Synthetic peptide
  Seed: DPRMCSLMQGSTLPRRSGAA
DPRMCSIMQMSRLPQRSGAA

SEQ ID NO: 68543 - protein, 20 aa, Artificial Sequence
  Description of Artificial Sequence: Synthetic peptide
  Seed: DPRMCSLMQGSTLPRRSGAA
DPRMCSIMQMSRLPRRSGAA

SEQ ID NO: 68544 - protein, 20 aa, Artificial Sequence
  Description of Artificial Sequence: Synthetic peptide
  Seed: DPRMCSLMQGSTLPRRSGAA
DPRMCSIMQMSRLPSRSGAA

SEQ ID NO: 68545 - protein, 20 aa, Artificial Sequence
  Description of Artificial Sequence: Synthetic peptide
  Seed: DPRMCSLMQGSTLPRRSGAA
DPRMCSIMQMSRLPTRSGAA

SEQ ID NO: 68546 - protein, 20 aa, Artificial Sequence
  Description of Artificial Sequence: Synthetic peptide
  Seed: DPRMCSLMQGSTLPRRSGAA
DPRMCSIMQVSKLPARSGAA

SEQ ID NO: 68547 - protein, 20 aa, Artificial Sequence
  Description of Artificial Sequence: Synthetic peptide
  Seed: DPRMCSLMQGSTLPRRSGAA
DPRMCSIMQVSKLPSRSGAA

SEQ ID NO: 68548 - protein, 20 aa, Artificial Sequence
  Description of Artificial Sequence: Synthetic peptide
  Seed: DPRMCSLMQGSTLPRRSGAA
DPRMCSIMQVSRLPARSGAA

SEQ ID NO: 68549 - protein, 20 aa, Artificial Sequence
  Description of Artificial Sequence: Synthetic peptide
  Seed: DPRMCSLMQGSTLPRRSGAA
DPRMCSIMQVSRLPSRSGAA

SEQ ID NO: 68550 - protein, 20 aa, Artificial Sequence
  Description of Artificial Sequence: Synthetic peptide
  Seed: DPRMCSLMQGSTLPRRSGAA
DPRMCSLMQISKLPARSGAA

SEQ ID NO: 68551 - protein, 20 aa, Artificial Sequence
  Description of Artificial Sequence: Synthetic peptide
  Seed: DPRMCSLMQGSTLPRRSGAA
DPRMCSLMQISKLPSRSGAA

SEQ ID NO: 68552 - protein, 20 aa, Artificial Sequence
  Description of Artificial Sequence: Synthetic peptide
  Seed: DPRMCSLMQGSTLPRRSGAA
DPRMCSLMQISRLPARSGAA

SEQ ID NO: 68553 - protein, 20 aa, Artificial Sequence
  Description of Artificial Sequence: Synthetic peptide
  Seed: DPRMCSLMQGSTLPRRSGAA
DPRMCSLMQISRLPSRSGAA

SEQ ID NO: 68554 - protein, 20 aa, Artificial Sequence
  Description of Artificial Sequence: Synthetic peptide
  Seed: DPRMCSLMQGSTLPRRSGAA
DPRMCSLMQLSRLPARSGAA

SEQ ID NO: 68555 - protein, 20 aa, Artificial Sequence
  Description of Artificial Sequence: Synthetic peptide
  Seed: DPRMCSLMQGSTLPRRSGAA
DPRMCSLMQLSRLPSRSGAA

SEQ ID NO: 68556 - protein, 20 aa, Artificial Sequence
  Description of Artificial Sequence: Synthetic peptide
  Seed: DPRMCSLMQGSTLPRRSGAA
DPRMCSLMQMSKLPARSGAA

SEQ ID NO: 68557 - protein, 20 aa, Artificial Sequence
  Description of Artificial Sequence: Synthetic peptide
  Seed: DPRMCSLMQGSTLPRRSGAA
DPRMCSLMQMSKLPSRSGAA

SEQ ID NO: 68558 - protein, 20 aa, Artificial Sequence
  Description of Artificial Sequence: Synthetic peptide
  Seed: DPRMCSLMQGSTLPRRSGAA
DPRMCSLMQMSRLPARSGAA

SEQ ID NO: 68559 - protein, 20 aa, Artificial Sequence
  Description of Artificial Sequence: Synthetic peptide
  Seed: DPRMCSLMQGSTLPRRSGAA
DPRMCSLMQMSRLPGRSGAA

SEQ ID NO: 68560 - protein, 20 aa, Artificial Sequence
  Description of Artificial Sequence: Synthetic peptide
  Seed: DPRMCSLMQGSTLPRRSGAA
DPRMCSLMQMSRLPQRSGAA

SEQ ID NO: 68561 - protein, 20 aa, Artificial Sequence
  Description of Artificial Sequence: Synthetic peptide
  Seed: DPRMCSLMQGSTLPRRSGAA
DPRMCSLMQMSRLPSRSGAA

SEQ ID NO: 68562 - protein, 20 aa, Artificial Sequence
  Description of Artificial Sequence: Synthetic peptide
  Seed: DPRMCSLMQGSTLPRRSGAA
DPRMCSMMQMSRLPARSGAA

SEQ ID NO: 68563 - protein, 20 aa, Artificial Sequence
  Description of Artificial Sequence: Synthetic peptide
  Seed: DPRMCSLMQGSTLPRRSGAA
DPRMCSMMQMSRLPSRSGAA

SEQ ID NO: 68564 - protein, 20 aa, Artificial Sequence
  Description of Artificial Sequence: Synthetic peptide
  Seed: DPRMCSLMQGSTLPRRSGAA
DPRMCSVMQISRLPARSGAA

SEQ ID NO: 68565 - protein, 20 aa, Artificial Sequence
  Description of Artificial Sequence: Synthetic peptide
  Seed: DPRMCSLMQGSTLPRRSGAA
DPRMCSVMQISRLPSRSGAA

SEQ ID NO: 68566 - protein, 20 aa, Artificial Sequence
  Description of Artificial Sequence: Synthetic peptide
  Seed: DPRMCSLMQGSTLPRRSGAA
DPRMCSVMQLSRLPARSGAA

SEQ ID NO: 68567 - protein, 20 aa, Artificial Sequence
  Description of Artificial Sequence: Synthetic peptide
  Seed: DPRMCSLMQGSTLPRRSGAA
DPRMCSVMQLSRLPSRSGAA

SEQ ID NO: 68568 - protein, 20 aa, Artificial Sequence
  Description of Artificial Sequence: Synthetic peptide
  Seed: DPRMCSLMQGSTLPRRSGAA
DPRMCSVMQMSKLPARSGAA

SEQ ID NO: 68569 - protein, 20 aa, Artificial Sequence
  Description of Artificial Sequence: Synthetic peptide
  Seed: DPRMCSLMQGSTLPRRSGAA
DPRMCSVMQMSRLPARSGAA

SEQ ID NO: 68570 - protein, 20 aa, Artificial Sequence
  Description of Artificial Sequence: Synthetic peptide
  Seed: DPRMCSLMQGSTLPRRSGAA
DPRMCSVMQMSRLPSRSGAA

SEQ ID NO: 68571 - protein, 20 aa, Artificial Sequence
  Description of Artificial Sequence: Synthetic peptide
  Seed: DPRMCSLMQGSTLPRRSGAA
DPRMCSLMFGSALARRAGAA

SEQ ID NO: 68572 - protein, 20 aa, Artificial Sequence
  Description of Artificial Sequence: Synthetic peptide
  Seed: DPRMCSLMQGSTLPRRSGAA
DPRMCSLMFGSALARRGGAA

SEQ ID NO: 68573 - protein, 20 aa, Artificial Sequence
  Description of Artificial Sequence: Synthetic peptide
  Seed: DPRMCSLMQGSTLPRRSGAA
DPRMCSLMFGSALARRIGAA

SEQ ID NO: 68574 - protein, 20 aa, Artificial Sequence
  Description of Artificial Sequence: Synthetic peptide
  Seed: DPRMCSLMQGSTLPRRSGAA
DPRMCSLMFGSALARRLGAA

SEQ ID NO: 68575 - protein, 20 aa, Artificial Sequence
  Description of Artificial Sequence: Synthetic peptide
  Seed: DPRMCSLMQGSTLPRRSGAA
DPRMCSLMFGSALARRMGAA

SEQ ID NO: 68576 - protein, 20 aa, Artificial Sequence
  Description of Artificial Sequence: Synthetic peptide
  Seed: DPRMCSLMQGSTLPRRSGAA
DPRMCSLMFGSALARRNGAA

SEQ ID NO: 68577 - protein, 20 aa, Artificial Sequence
  Description of Artificial Sequence: Synthetic peptide
  Seed: DPRMCSLMQGSTLPRRSGAA
DPRMCSLMFGSALARRSGAA

SEQ ID NO: 68578 - protein, 20 aa, Artificial Sequence
  Description of Artificial Sequence: Synthetic peptide
  Seed: DPRMCSLMQGSTLPRRSGAA
DPRMCSLMFGSALARRTGAA

SEQ ID NO: 68579 - protein, 20 aa, Artificial Sequence
  Description of Artificial Sequence: Synthetic peptide
  Seed: DPRMCSLMQGSTLPRRSGAA
DPRMCSLMFGSALARRVGAA

SEQ ID NO: 68580 - protein, 20 aa, Artificial Sequence
  Description of Artificial Sequence: Synthetic peptide
  Seed: DPRMCSLMQGSTLPRRSGAA
DPRMCSLMFGSALPRRAGAA

SEQ ID NO: 68581 - protein, 20 aa, Artificial Sequence
  Description of Artificial Sequence: Synthetic peptide
  Seed: DPRMCSLMQGSTLPRRSGAA
DPRMCSLMFGSALPRRIGAA

SEQ ID NO: 68582 - protein, 20 aa, Artificial Sequence
  Description of Artificial Sequence: Synthetic peptide
  Seed: DPRMCSLMQGSTLPRRSGAA
DPRMCSLMFGSALPRRNGAA

SEQ ID NO: 68583 - protein, 20 aa, Artificial Sequence
  Description of Artificial Sequence: Synthetic peptide
  Seed: DPRMCSLMQGSTLPRRSGAA
DPRMCSLMFGSALPRRSGAA

SEQ ID NO: 68584 - protein, 20 aa, Artificial Sequence
  Description of Artificial Sequence: Synthetic peptide
  Seed: DPRMCSLMQGSTLPRRSGAA
DPRMCSLMFGSALPRRVGAA

SEQ ID NO: 68585 - protein, 20 aa, Artificial Sequence
  Description of Artificial Sequence: Synthetic peptide
  Seed: DPRMCSLMQGSTLPRRSGAA
DPRMCSLMFGSALSRRAGAA

SEQ ID NO: 68586 - protein, 20 aa, Artificial Sequence
  Description of Artificial Sequence: Synthetic peptide
  Seed: DPRMCSLMQGSTLPRRSGAA
DPRMCSLMFGSALSRRIGAA

SEQ ID NO: 68587 - protein, 20 aa, Artificial Sequence
  Description of Artificial Sequence: Synthetic peptide
  Seed: DPRMCSLMQGSTLPRRSGAA
DPRMCSLMFGSALSRRLGAA

SEQ ID NO: 68588 - protein, 20 aa, Artificial Sequence
  Description of Artificial Sequence: Synthetic peptide
  Seed: DPRMCSLMQGSTLPRRSGAA
DPRMCSLMFGSALSRRNGAA

SEQ ID NO: 68589 - protein, 20 aa, Artificial Sequence
  Description of Artificial Sequence: Synthetic peptide
  Seed: DPRMCSLMQGSTLPRRSGAA
DPRMCSLMFGSALSRRSGAA

SEQ ID NO: 68590 - protein, 20 aa, Artificial Sequence
  Description of Artificial Sequence: Synthetic peptide
  Seed: DPRMCSLMQGSTLPRRSGAA
DPRMCSLMFGSALSRRVGAA

SEQ ID NO: 68591 - protein, 20 aa, Artificial Sequence
  Description of Artificial Sequence: Synthetic peptide
  Seed: DPRMCSLMQGSTLPRRSGAA
DPRMCSLMFGSALTRRAGAA

SEQ ID NO: 68592 - protein, 20 aa, Artificial Sequence
  Description of Artificial Sequence: Synthetic peptide
  Seed: DPRMCSLMQGSTLPRRSGAA
DPRMCSLMFGSALTRRIGAA

SEQ ID NO: 68593 - protein, 20 aa, Artificial Sequence
  Description of Artificial Sequence: Synthetic peptide
  Seed: DPRMCSLMQGSTLPRRSGAA
DPRMCSLMFGSALTRRLGAA

SEQ ID NO: 68594 - protein, 20 aa, Artificial Sequence
  Description of Artificial Sequence: Synthetic peptide
  Seed: DPRMCSLMQGSTLPRRSGAA
DPRMCSLMFGSALTRRNGAA

SEQ ID NO: 68595 - protein, 20 aa, Artificial Sequence
  Description of Artificial Sequence: Synthetic peptide
  Seed: DPRMCSLMQGSTLPRRSGAA
DPRMCSLMFGSALTRRSGAA

SEQ ID NO: 68596 - protein, 20 aa, Artificial Sequence
  Description of Artificial Sequence: Synthetic peptide
  Seed: DPRMCSLMQGSTLPRRSGAA
DPRMCSLMFGSALTRRVGAA

SEQ ID NO: 68597 - protein, 20 aa, Artificial Sequence
  Description of Artificial Sequence: Synthetic peptide
  Seed: DPRMCSLMQGSTLPRRSGAA
DPRMCSLMFGSALVRRAGAA

SEQ ID NO: 68598 - protein, 20 aa, Artificial Sequence
  Description of Artificial Sequence: Synthetic peptide
  Seed: DPRMCSLMQGSTLPRRSGAA
DPRMCSLMFGSALVRRNGAA

SEQ ID NO: 68599 - protein, 20 aa, Artificial Sequence
  Description of Artificial Sequence: Synthetic peptide
  Seed: DPRMCSLMQGSTLPRRSGAA
DPRMCSLMFGSALVRRSGAA

SEQ ID NO: 68600 - protein, 20 aa, Artificial Sequence
  Description of Artificial Sequence: Synthetic peptide
  Seed: DPRMCSLMQGSTLPRRSGAA
DPRMCSLMFGSALVRRVGAA

SEQ ID NO: 68601 - protein, 20 aa, Artificial Sequence
  Description of Artificial Sequence: Synthetic peptide
  Seed: DPRMCSLMQGSTLPRRSGAA
DPRMCSLMFGSILARRAGAA

SEQ ID NO: 68602 - protein, 20 aa, Artificial Sequence
  Description of Artificial Sequence: Synthetic peptide
  Seed: DPRMCSLMQGSTLPRRSGAA
DPRMCSLMFGSILARRGGAA

SEQ ID NO: 68603 - protein, 20 aa, Artificial Sequence
  Description of Artificial Sequence: Synthetic peptide
  Seed: DPRMCSLMQGSTLPRRSGAA
DPRMCSLMFGSILARRIGAA

SEQ ID NO: 68604 - protein, 20 aa, Artificial Sequence
  Description of Artificial Sequence: Synthetic peptide
  Seed: DPRMCSLMQGSTLPRRSGAA
DPRMCSLMFGSILARRLGAA

SEQ ID NO: 68605 - protein, 20 aa, Artificial Sequence
  Description of Artificial Sequence: Synthetic peptide
  Seed: DPRMCSLMQGSTLPRRSGAA
DPRMCSLMFGSILARRMGAA

SEQ ID NO: 68606 - protein, 20 aa, Artificial Sequence
  Description of Artificial Sequence: Synthetic peptide
  Seed: DPRMCSLMQGSTLPRRSGAA
DPRMCSLMFGSILARRNGAA

SEQ ID NO: 68607 - protein, 20 aa, Artificial Sequence
  Description of Artificial Sequence: Synthetic peptide
  Seed: DPRMCSLMQGSTLPRRSGAA
DPRMCSLMFGSILARRSGAA

SEQ ID NO: 68608 - protein, 20 aa, Artificial Sequence
  Description of Artificial Sequence: Synthetic peptide
  Seed: DPRMCSLMQGSTLPRRSGAA
DPRMCSLMFGSILARRTGAA

SEQ ID NO: 68609 - protein, 20 aa, Artificial Sequence
  Description of Artificial Sequence: Synthetic peptide
  Seed: DPRMCSLMQGSTLPRRSGAA
DPRMCSLMFGSILARRVGAA

SEQ ID NO: 68610 - protein, 20 aa, Artificial Sequence
  Description of Artificial Sequence: Synthetic peptide
  Seed: DPRMCSLMQGSTLPRRSGAA
DPRMCSLMFGSILGRRAGAA

SEQ ID NO: 68611 - protein, 20 aa, Artificial Sequence
  Description of Artificial Sequence: Synthetic peptide
  Seed: DPRMCSLMQGSTLPRRSGAA
DPRMCSLMFGSILPRRAGAA

SEQ ID NO: 68612 - protein, 20 aa, Artificial Sequence
  Description of Artificial Sequence: Synthetic peptide
  Seed: DPRMCSLMQGSTLPRRSGAA
DPRMCSLMFGSILPRRIGAA

SEQ ID NO: 68613 - protein, 20 aa, Artificial Sequence
  Description of Artificial Sequence: Synthetic peptide
  Seed: DPRMCSLMQGSTLPRRSGAA
DPRMCSLMFGSILPRRLGAA

SEQ ID NO: 68614 - protein, 20 aa, Artificial Sequence
  Description of Artificial Sequence: Synthetic peptide
  Seed: DPRMCSLMQGSTLPRRSGAA
DPRMCSLMFGSILPRRNGAA

SEQ ID NO: 68615 - protein, 20 aa, Artificial Sequence
  Description of Artificial Sequence: Synthetic peptide
  Seed: DPRMCSLMQGSTLPRRSGAA
DPRMCSLMFGSILPRRSGAA

SEQ ID NO: 68616 - protein, 20 aa, Artificial Sequence
  Description of Artificial Sequence: Synthetic peptide
  Seed: DPRMCSLMQGSTLPRRSGAA
DPRMCSLMFGSILPRRTGAA

SEQ ID NO: 68617 - protein, 20 aa, Artificial Sequence
  Description of Artificial Sequence: Synthetic peptide
  Seed: DPRMCSLMQGSTLPRRSGAA
DPRMCSLMFGSILPRRVGAA

SEQ ID NO: 68618 - protein, 20 aa, Artificial Sequence
  Description of Artificial Sequence: Synthetic peptide
  Seed: DPRMCSLMQGSTLPRRSGAA
DPRMCSLMFGSILSRRAGAA

SEQ ID NO: 68619 - protein, 20 aa, Artificial Sequence
  Description of Artificial Sequence: Synthetic peptide
  Seed: DPRMCSLMQGSTLPRRSGAA
DPRMCSLMFGSILSRRIGAA

SEQ ID NO: 68620 - protein, 20 aa, Artificial Sequence
  Description of Artificial Sequence: Synthetic peptide
  Seed: DPRMCSLMQGSTLPRRSGAA
DPRMCSLMFGSILSRRLGAA

SEQ ID NO: 68621 - protein, 20 aa, Artificial Sequence
  Description of Artificial Sequence: Synthetic peptide
  Seed: DPRMCSLMQGSTLPRRSGAA
DPRMCSLMFGSILSRRMGAA

SEQ ID NO: 68622 - protein, 20 aa, Artificial Sequence
  Description of Artificial Sequence: Synthetic peptide
  Seed: DPRMCSLMQGSTLPRRSGAA
DPRMCSLMFGSILSRRNGAA

SEQ ID NO: 68623 - protein, 20 aa, Artificial Sequence
  Description of Artificial Sequence: Synthetic peptide
  Seed: DPRMCSLMQGSTLPRRSGAA
DPRMCSLMFGSILSRRSGAA

SEQ ID NO: 68624 - protein, 20 aa, Artificial Sequence
  Description of Artificial Sequence: Synthetic peptide
  Seed: DPRMCSLMQGSTLPRRSGAA
DPRMCSLMFGSILSRRTGAA

SEQ ID NO: 68625 - protein, 20 aa, Artificial Sequence
  Description of Artificial Sequence: Synthetic peptide
  Seed: DPRMCSLMQGSTLPRRSGAA
DPRMCSLMFGSILSRRVGAA

SEQ ID NO: 68626 - protein, 20 aa, Artificial Sequence
  Description of Artificial Sequence: Synthetic peptide
  Seed: DPRMCSLMQGSTLPRRSGAA
DPRMCSLMFGSILTRRAGAA

SEQ ID NO: 68627 - protein, 20 aa, Artificial Sequence
  Description of Artificial Sequence: Synthetic peptide
  Seed: DPRMCSLMQGSTLPRRSGAA
DPRMCSLMFGSILTRRIGAA

SEQ ID NO: 68628 - protein, 20 aa, Artificial Sequence
  Description of Artificial Sequence: Synthetic peptide
  Seed: DPRMCSLMQGSTLPRRSGAA
DPRMCSLMFGSILTRRLGAA

SEQ ID NO: 68629 - protein, 20 aa, Artificial Sequence
  Description of Artificial Sequence: Synthetic peptide
  Seed: DPRMCSLMQGSTLPRRSGAA
DPRMCSLMFGSILTRRMGAA

SEQ ID NO: 68630 - protein, 20 aa, Artificial Sequence
  Description of Artificial Sequence: Synthetic peptide
  Seed: DPRMCSLMQGSTLPRRSGAA
DPRMCSLMFGSILTRRNGAA

SEQ ID NO: 68631 - protein, 20 aa, Artificial Sequence
  Description of Artificial Sequence: Synthetic peptide
  Seed: DPRMCSLMQGSTLPRRSGAA
DPRMCSLMFGSILTRRSGAA

SEQ ID NO: 68632 - protein, 20 aa, Artificial Sequence
  Description of Artificial Sequence: Synthetic peptide
  Seed: DPRMCSLMQGSTLPRRSGAA
DPRMCSLMFGSILTRRTGAA

SEQ ID NO: 68633 - protein, 20 aa, Artificial Sequence
  Description of Artificial Sequence: Synthetic peptide
  Seed: DPRMCSLMQGSTLPRRSGAA
DPRMCSLMFGSILTRRVGAA

SEQ ID NO: 68634 - protein, 20 aa, Artificial Sequence
  Description of Artificial Sequence: Synthetic peptide
  Seed: DPRMCSLMQGSTLPRRSGAA
DPRMCSLMFGSILVRRAGAA

SEQ ID NO: 68635 - protein, 20 aa, Artificial Sequence
  Description of Artificial Sequence: Synthetic peptide
  Seed: DPRMCSLMQGSTLPRRSGAA
DPRMCSLMFGSILVRRNGAA

SEQ ID NO: 68636 - protein, 20 aa, Artificial Sequence
  Description of Artificial Sequence: Synthetic peptide
  Seed: DPRMCSLMQGSTLPRRSGAA
DPRMCSLMFGSILVRRSGAA

SEQ ID NO: 68637 - protein, 20 aa, Artificial Sequence
  Description of Artificial Sequence: Synthetic peptide
  Seed: DPRMCSLMQGSTLPRRSGAA
DPRMCSLMFGSILVRRVGAA

SEQ ID NO: 68638 - protein, 20 aa, Artificial Sequence
  Description of Artificial Sequence: Synthetic peptide
  Seed: DPRMCSLMQGSTLPRRSGAA
DPRMCSLMFGSLLARRAGAA

SEQ ID NO: 68639 - protein, 20 aa, Artificial Sequence
  Description of Artificial Sequence: Synthetic peptide
  Seed: DPRMCSLMQGSTLPRRSGAA
DPRMCSLMFGSLLARRDGAA

SEQ ID NO: 68640 - protein, 20 aa, Artificial Sequence
  Description of Artificial Sequence: Synthetic peptide
  Seed: DPRMCSLMQGSTLPRRSGAA
DPRMCSLMFGSLLARRGGAA

SEQ ID NO: 68641 - protein, 20 aa, Artificial Sequence
  Description of Artificial Sequence: Synthetic peptide
  Seed: DPRMCSLMQGSTLPRRSGAA
DPRMCSLMFGSLLARRIGAA

SEQ ID NO: 68642 - protein, 20 aa, Artificial Sequence
  Description of Artificial Sequence: Synthetic peptide
  Seed: DPRMCSLMQGSTLPRRSGAA
DPRMCSLMFGSLLARRLGAA

SEQ ID NO: 68643 - protein, 20 aa, Artificial Sequence
  Description of Artificial Sequence: Synthetic peptide
  Seed: DPRMCSLMQGSTLPRRSGAA
DPRMCSLMFGSLLARRMGAA

SEQ ID NO: 68644 - protein, 20 aa, Artificial Sequence
  Description of Artificial Sequence: Synthetic peptide
  Seed: DPRMCSLMQGSTLPRRSGAA
DPRMCSLMFGSLLARRNGAA

SEQ ID NO: 68645 - protein, 20 aa, Artificial Sequence
  Description of Artificial Sequence: Synthetic peptide
  Seed: DPRMCSLMQGSTLPRRSGAA
DPRMCSLMFGSLLARRSGAA

SEQ ID NO: 68646 - protein, 20 aa, Artificial Sequence
  Description of Artificial Sequence: Synthetic peptide
  Seed: DPRMCSLMQGSTLPRRSGAA
DPRMCSLMFGSLLARRTGAA

SEQ ID NO: 68647 - protein, 20 aa, Artificial Sequence
  Description of Artificial Sequence: Synthetic peptide
  Seed: DPRMCSLMQGSTLPRRSGAA
DPRMCSLMFGSLLARRVGAA

SEQ ID NO: 68648 - protein, 20 aa, Artificial Sequence
  Description of Artificial Sequence: Synthetic peptide
  Seed: DPRMCSLMQGSTLPRRSGAA
DPRMCSLMFGSLLGRRAGAA

SEQ ID NO: 68649 - protein, 20 aa, Artificial Sequence
  Description of Artificial Sequence: Synthetic peptide
  Seed: DPRMCSLMQGSTLPRRSGAA
DPRMCSLMFGSLLGRRVGAA

SEQ ID NO: 68650 - protein, 20 aa, Artificial Sequence
  Description of Artificial Sequence: Synthetic peptide
  Seed: DPRMCSLMQGSTLPRRSGAA
DPRMCSLMFGSLLIRRAGAA

SEQ ID NO: 68651 - protein, 20 aa, Artificial Sequence
  Description of Artificial Sequence: Synthetic peptide
  Seed: DPRMCSLMQGSTLPRRSGAA
DPRMCSLMFGSLLIRRNGAA

SEQ ID NO: 68652 - protein, 20 aa, Artificial Sequence
  Description of Artificial Sequence: Synthetic peptide
  Seed: DPRMCSLMQGSTLPRRSGAA
DPRMCSLMFGSLLNRRAGAA

SEQ ID NO: 68653 - protein, 20 aa, Artificial Sequence
  Description of Artificial Sequence: Synthetic peptide
  Seed: DPRMCSLMQGSTLPRRSGAA
DPRMCSLMFGSLLPRRAGAA

SEQ ID NO: 68654 - protein, 20 aa, Artificial Sequence
  Description of Artificial Sequence: Synthetic peptide
  Seed: DPRMCSLMQGSTLPRRSGAA
DPRMCSLMFGSLLPRRIGAA

SEQ ID NO: 68655 - protein, 20 aa, Artificial Sequence
  Description of Artificial Sequence: Synthetic peptide
  Seed: DPRMCSLMQGSTLPRRSGAA
DPRMCSLMFGSLLPRRLGAA

SEQ ID NO: 68656 - protein, 20 aa, Artificial Sequence
  Description of Artificial Sequence: Synthetic peptide
  Seed: DPRMCSLMQGSTLPRRSGAA
DPRMCSLMFGSLLPRRMGAA

SEQ ID NO: 68657 - protein, 20 aa, Artificial Sequence
  Description of Artificial Sequence: Synthetic peptide
  Seed: DPRMCSLMQGSTLPRRSGAA
DPRMCSLMFGSLLPRRNGAA

SEQ ID NO: 68658 - protein, 20 aa, Artificial Sequence
  Description of Artificial Sequence: Synthetic peptide
  Seed: DPRMCSLMQGSTLPRRSGAA
DPRMCSLMFGSLLPRRSGAA

SEQ ID NO: 68659 - protein, 20 aa, Artificial Sequence
  Description of Artificial Sequence: Synthetic peptide
  Seed: DPRMCSLMQGSTLPRRSGAA
DPRMCSLMFGSLLPRRTGAA

SEQ ID NO: 68660 - protein, 20 aa, Artificial Sequence
  Description of Artificial Sequence: Synthetic peptide
  Seed: DPRMCSLMQGSTLPRRSGAA
DPRMCSLMFGSLLPRRVGAA

SEQ ID NO: 68661 - protein, 20 aa, Artificial Sequence
  Description of Artificial Sequence: Synthetic peptide
  Seed: DPRMCSLMQGSTLPRRSGAA
DPRMCSLMFGSLLSRRAGAA

SEQ ID NO: 68662 - protein, 20 aa, Artificial Sequence
  Description of Artificial Sequence: Synthetic peptide
  Seed: DPRMCSLMQGSTLPRRSGAA
DPRMCSLMFGSLLSRRIGAA

SEQ ID NO: 68663 - protein, 20 aa, Artificial Sequence
  Description of Artificial Sequence: Synthetic peptide
  Seed: DPRMCSLMQGSTLPRRSGAA
DPRMCSLMFGSLLSRRLGAA

SEQ ID NO: 68664 - protein, 20 aa, Artificial Sequence
  Description of Artificial Sequence: Synthetic peptide
  Seed: DPRMCSLMQGSTLPRRSGAA
DPRMCSLMFGSLLSRRMGAA

SEQ ID NO: 68665 - protein, 20 aa, Artificial Sequence
  Description of Artificial Sequence: Synthetic peptide
  Seed: DPRMCSLMQGSTLPRRSGAA
DPRMCSLMFGSLLSRRNGAA

SEQ ID NO: 68666 - protein, 20 aa, Artificial Sequence
  Description of Artificial Sequence: Synthetic peptide
  Seed: DPRMCSLMQGSTLPRRSGAA
DPRMCSLMFGSLLSRRSGAA

SEQ ID NO: 68667 - protein, 20 aa, Artificial Sequence
  Description of Artificial Sequence: Synthetic peptide
  Seed: DPRMCSLMQGSTLPRRSGAA
DPRMCSLMFGSLLSRRTGAA

SEQ ID NO: 68668 - protein, 20 aa, Artificial Sequence
  Description of Artificial Sequence: Synthetic peptide
  Seed: DPRMCSLMQGSTLPRRSGAA
DPRMCSLMFGSLLSRRVGAA

SEQ ID NO: 68669 - protein, 20 aa, Artificial Sequence
  Description of Artificial Sequence: Synthetic peptide
  Seed: DPRMCSLMQGSTLPRRSGAA
DPRMCSLMFGSLLTRRAGAA

SEQ ID NO: 68670 - protein, 20 aa, Artificial Sequence
  Description of Artificial Sequence: Synthetic peptide
  Seed: DPRMCSLMQGSTLPRRSGAA
DPRMCSLMFGSLLTRRIGAA

SEQ ID NO: 68671 - protein, 20 aa, Artificial Sequence
  Description of Artificial Sequence: Synthetic peptide
  Seed: DPRMCSLMQGSTLPRRSGAA
DPRMCSLMFGSLLTRRLGAA

SEQ ID NO: 68672 - protein, 20 aa, Artificial Sequence
  Description of Artificial Sequence: Synthetic peptide
  Seed: DPRMCSLMQGSTLPRRSGAA
DPRMCSLMFGSLLTRRMGAA

SEQ ID NO: 68673 - protein, 20 aa, Artificial Sequence
  Description of Artificial Sequence: Synthetic peptide
  Seed: DPRMCSLMQGSTLPRRSGAA
DPRMCSLMFGSLLTRRNGAA

SEQ ID NO: 68674 - protein, 20 aa, Artificial Sequence
  Description of Artificial Sequence: Synthetic peptide
  Seed: DPRMCSLMQGSTLPRRSGAA
DPRMCSLMFGSLLTRRSGAA

SEQ ID NO: 68675 - protein, 20 aa, Artificial Sequence
  Description of Artificial Sequence: Synthetic peptide
  Seed: DPRMCSLMQGSTLPRRSGAA
DPRMCSLMFGSLLTRRTGAA

SEQ ID NO: 68676 - protein, 20 aa, Artificial Sequence
  Description of Artificial Sequence: Synthetic peptide
  Seed: DPRMCSLMQGSTLPRRSGAA
DPRMCSLMFGSLLTRRVGAA

SEQ ID NO: 68677 - protein, 20 aa, Artificial Sequence
  Description of Artificial Sequence: Synthetic peptide
  Seed: DPRMCSLMQGSTLPRRSGAA
DPRMCSLMFGSLLVRRAGAA

SEQ ID NO: 68678 - protein, 20 aa, Artificial Sequence
  Description of Artificial Sequence: Synthetic peptide
  Seed: DPRMCSLMQGSTLPRRSGAA
DPRMCSLMFGSLLVRRIGAA

SEQ ID NO: 68679 - protein, 20 aa, Artificial Sequence
  Description of Artificial Sequence: Synthetic peptide
  Seed: DPRMCSLMQGSTLPRRSGAA
DPRMCSLMFGSLLVRRNGAA

SEQ ID NO: 68680 - protein, 20 aa, Artificial Sequence
  Description of Artificial Sequence: Synthetic peptide
  Seed: DPRMCSLMQGSTLPRRSGAA
DPRMCSLMFGSLLVRRSGAA

SEQ ID NO: 68681 - protein, 20 aa, Artificial Sequence
  Description of Artificial Sequence: Synthetic peptide
  Seed: DPRMCSLMQGSTLPRRSGAA
DPRMCSLMFGSLLVRRTGAA

SEQ ID NO: 68682 - protein, 20 aa, Artificial Sequence
  Description of Artificial Sequence: Synthetic peptide
  Seed: DPRMCSLMQGSTLPRRSGAA
DPRMCSLMFGSLLVRRVGAA

SEQ ID NO: 68683 - protein, 20 aa, Artificial Sequence
  Description of Artificial Sequence: Synthetic peptide
  Seed: DPRMCSLMQGSTLPRRSGAA
DPRMCSLMFGSMLARRAGAA

SEQ ID NO: 68684 - protein, 20 aa, Artificial Sequence
  Description of Artificial Sequence: Synthetic peptide
  Seed: DPRMCSLMQGSTLPRRSGAA
DPRMCSLMFGSMLARRDGAA

SEQ ID NO: 68685 - protein, 20 aa, Artificial Sequence
  Description of Artificial Sequence: Synthetic peptide
  Seed: DPRMCSLMQGSTLPRRSGAA
DPRMCSLMFGSMLARREGAA

SEQ ID NO: 68686 - protein, 20 aa, Artificial Sequence
  Description of Artificial Sequence: Synthetic peptide
  Seed: DPRMCSLMQGSTLPRRSGAA
DPRMCSLMFGSMLARRGGAA

SEQ ID NO: 68687 - protein, 20 aa, Artificial Sequence
  Description of Artificial Sequence: Synthetic peptide
  Seed: DPRMCSLMQGSTLPRRSGAA
DPRMCSLMFGSMLARRHGAA

SEQ ID NO: 68688 - protein, 20 aa, Artificial Sequence
  Description of Artificial Sequence: Synthetic peptide
  Seed: DPRMCSLMQGSTLPRRSGAA
DPRMCSLMFGSMLARRIGAA

SEQ ID NO: 68689 - protein, 20 aa, Artificial Sequence
  Description of Artificial Sequence: Synthetic peptide
  Seed: DPRMCSLMQGSTLPRRSGAA
DPRMCSLMFGSMLARRLGAA

SEQ ID NO: 68690 - protein, 20 aa, Artificial Sequence
  Description of Artificial Sequence: Synthetic peptide
  Seed: DPRMCSLMQGSTLPRRSGAA
DPRMCSLMFGSMLARRMGAA

SEQ ID NO: 68691 - protein, 20 aa, Artificial Sequence
  Description of Artificial Sequence: Synthetic peptide
  Seed: DPRMCSLMQGSTLPRRSGAA
DPRMCSLMFGSMLARRNGAA

SEQ ID NO: 68692 - protein, 20 aa, Artificial Sequence
  Description of Artificial Sequence: Synthetic peptide
  Seed: DPRMCSLMQGSTLPRRSGAA
DPRMCSLMFGSMLARRPGAA

SEQ ID NO: 68693 - protein, 20 aa, Artificial Sequence
  Description of Artificial Sequence: Synthetic peptide
  Seed: DPRMCSLMQGSTLPRRSGAA
DPRMCSLMFGSMLARRQGAA

SEQ ID NO: 68694 - protein, 20 aa, Artificial Sequence
  Description of Artificial Sequence: Synthetic peptide
  Seed: DPRMCSLMQGSTLPRRSGAA
DPRMCSLMFGSMLARRSGAA

SEQ ID NO: 68695 - protein, 20 aa, Artificial Sequence
  Description of Artificial Sequence: Synthetic peptide
  Seed: DPRMCSLMQGSTLPRRSGAA
DPRMCSLMFGSMLARRTGAA

SEQ ID NO: 68696 - protein, 20 aa, Artificial Sequence
  Description of Artificial Sequence: Synthetic peptide
  Seed: DPRMCSLMQGSTLPRRSGAA
DPRMCSLMFGSMLARRVGAA

SEQ ID NO: 68697 - protein, 20 aa, Artificial Sequence
  Description of Artificial Sequence: Synthetic peptide
  Seed: DPRMCSLMQGSTLPRRSGAA
DPRMCSLMFGSMLGRRAGAA

SEQ ID NO: 68698 - protein, 20 aa, Artificial Sequence
  Description of Artificial Sequence: Synthetic peptide
  Seed: DPRMCSLMQGSTLPRRSGAA
DPRMCSLMFGSMLGRRIGAA

SEQ ID NO: 68699 - protein, 20 aa, Artificial Sequence
  Description of Artificial Sequence: Synthetic peptide
  Seed: DPRMCSLMQGSTLPRRSGAA
DPRMCSLMFGSMLGRRLGAA

SEQ ID NO: 68700 - protein, 20 aa, Artificial Sequence
  Description of Artificial Sequence: Synthetic peptide
  Seed: DPRMCSLMQGSTLPRRSGAA
DPRMCSLMFGSMLGRRMGAA

SEQ ID NO: 68701 - protein, 20 aa, Artificial Sequence
  Description of Artificial Sequence: Synthetic peptide
  Seed: DPRMCSLMQGSTLPRRSGAA
DPRMCSLMFGSMLGRRNGAA

SEQ ID NO: 68702 - protein, 20 aa, Artificial Sequence
  Description of Artificial Sequence: Synthetic peptide
  Seed: DPRMCSLMQGSTLPRRSGAA
DPRMCSLMFGSMLGRRSGAA

SEQ ID NO: 68703 - protein, 20 aa, Artificial Sequence
  Description of Artificial Sequence: Synthetic peptide
  Seed: DPRMCSLMQGSTLPRRSGAA
DPRMCSLMFGSMLGRRVGAA

SEQ ID NO: 68704 - protein, 20 aa, Artificial Sequence
  Description of Artificial Sequence: Synthetic peptide
  Seed: DPRMCSLMQGSTLPRRSGAA
DPRMCSLMFGSMLIRRAGAA

SEQ ID NO: 68705 - protein, 20 aa, Artificial Sequence
  Description of Artificial Sequence: Synthetic peptide
  Seed: DPRMCSLMQGSTLPRRSGAA
DPRMCSLMFGSMLIRRNGAA

SEQ ID NO: 68706 - protein, 20 aa, Artificial Sequence
  Description of Artificial Sequence: Synthetic peptide
  Seed: DPRMCSLMQGSTLPRRSGAA
DPRMCSLMFGSMLIRRSGAA

SEQ ID NO: 68707 - protein, 20 aa, Artificial Sequence
  Description of Artificial Sequence: Synthetic peptide
  Seed: DPRMCSLMQGSTLPRRSGAA
DPRMCSLMFGSMLIRRVGAA

SEQ ID NO: 68708 - protein, 20 aa, Artificial Sequence
  Description of Artificial Sequence: Synthetic peptide
  Seed: DPRMCSLMQGSTLPRRSGAA
DPRMCSLMFGSMLNRRAGAA

SEQ ID NO: 68709 - protein, 20 aa, Artificial Sequence
  Description of Artificial Sequence: Synthetic peptide
  Seed: DPRMCSLMQGSTLPRRSGAA
DPRMCSLMFGSMLNRRNGAA

SEQ ID NO: 68710 - protein, 20 aa, Artificial Sequence
  Description of Artificial Sequence: Synthetic peptide
  Seed: DPRMCSLMQGSTLPRRSGAA
DPRMCSLMFGSMLNRRSGAA

SEQ ID NO: 68711 - protein, 20 aa, Artificial Sequence
  Description of Artificial Sequence: Synthetic peptide
  Seed: DPRMCSLMQGSTLPRRSGAA
DPRMCSLMFGSMLNRRVGAA

SEQ ID NO: 68712 - protein, 20 aa, Artificial Sequence
  Description of Artificial Sequence: Synthetic peptide
  Seed: DPRMCSLMQGSTLPRRSGAA
DPRMCSLMFGSMLPRRAGAA

SEQ ID NO: 68713 - protein, 20 aa, Artificial Sequence
  Description of Artificial Sequence: Synthetic peptide
  Seed: DPRMCSLMQGSTLPRRSGAA
DPRMCSLMFGSMLPRRGGAA

SEQ ID NO: 68714 - protein, 20 aa, Artificial Sequence
  Description of Artificial Sequence: Synthetic peptide
  Seed: DPRMCSLMQGSTLPRRSGAA
DPRMCSLMFGSMLPRRIGAA

SEQ ID NO: 68715 - protein, 20 aa, Artificial Sequence
  Description of Artificial Sequence: Synthetic peptide
  Seed: DPRMCSLMQGSTLPRRSGAA
DPRMCSLMFGSMLPRRLGAA

SEQ ID NO: 68716 - protein, 20 aa, Artificial Sequence
  Description of Artificial Sequence: Synthetic peptide
  Seed: DPRMCSLMQGSTLPRRSGAA
DPRMCSLMFGSMLPRRMGAA

SEQ ID NO: 68717 - protein, 20 aa, Artificial Sequence
  Description of Artificial Sequence: Synthetic peptide
  Seed: DPRMCSLMQGSTLPRRSGAA
DPRMCSLMFGSMLPRRNGAA

SEQ ID NO: 68718 - protein, 20 aa, Artificial Sequence
  Description of Artificial Sequence: Synthetic peptide
  Seed: DPRMCSLMQGSTLPRRSGAA
DPRMCSLMFGSMLPRRSGAA

SEQ ID NO: 68719 - protein, 20 aa, Artificial Sequence
  Description of Artificial Sequence: Synthetic peptide
  Seed: DPRMCSLMQGSTLPRRSGAA
DPRMCSLMFGSMLPRRTGAA

SEQ ID NO: 68720 - protein, 20 aa, Artificial Sequence
  Description of Artificial Sequence: Synthetic peptide
  Seed: DPRMCSLMQGSTLPRRSGAA
DPRMCSLMFGSMLPRRVGAA

SEQ ID NO: 68721 - protein, 20 aa, Artificial Sequence
  Description of Artificial Sequence: Synthetic peptide
  Seed: DPRMCSLMQGSTLPRRSGAA
DPRMCSLMFGSMLSRRAGAA

SEQ ID NO: 68722 - protein, 20 aa, Artificial Sequence
  Description of Artificial Sequence: Synthetic peptide
  Seed: DPRMCSLMQGSTLPRRSGAA
DPRMCSLMFGSMLSRRGGAA

SEQ ID NO: 68723 - protein, 20 aa, Artificial Sequence
  Description of Artificial Sequence: Synthetic peptide
  Seed: DPRMCSLMQGSTLPRRSGAA
DPRMCSLMFGSMLSRRIGAA

SEQ ID NO: 68724 - protein, 20 aa, Artificial Sequence
  Description of Artificial Sequence: Synthetic peptide
  Seed: DPRMCSLMQGSTLPRRSGAA
DPRMCSLMFGSMLSRRLGAA

SEQ ID NO: 68725 - protein, 20 aa, Artificial Sequence
  Description of Artificial Sequence: Synthetic peptide
  Seed: DPRMCSLMQGSTLPRRSGAA
DPRMCSLMFGSMLSRRMGAA

SEQ ID NO: 68726 - protein, 20 aa, Artificial Sequence
  Description of Artificial Sequence: Synthetic peptide
  Seed: DPRMCSLMQGSTLPRRSGAA
DPRMCSLMFGSMLSRRNGAA

SEQ ID NO: 68727 - protein, 20 aa, Artificial Sequence
  Description of Artificial Sequence: Synthetic peptide
  Seed: DPRMCSLMQGSTLPRRSGAA
DPRMCSLMFGSMLSRRSGAA

SEQ ID NO: 68728 - protein, 20 aa, Artificial Sequence
  Description of Artificial Sequence: Synthetic peptide
  Seed: DPRMCSLMQGSTLPRRSGAA
DPRMCSLMFGSMLSRRTGAA

SEQ ID NO: 68729 - protein, 20 aa, Artificial Sequence
  Description of Artificial Sequence: Synthetic peptide
  Seed: DPRMCSLMQGSTLPRRSGAA
DPRMCSLMFGSMLSRRVGAA

SEQ ID NO: 68730 - protein, 20 aa, Artificial Sequence
  Description of Artificial Sequence: Synthetic peptide
  Seed: DPRMCSLMQGSTLPRRSGAA
DPRMCSLMFGSMLTRRAGAA

SEQ ID NO: 68731 - protein, 20 aa, Artificial Sequence
  Description of Artificial Sequence: Synthetic peptide
  Seed: DPRMCSLMQGSTLPRRSGAA
DPRMCSLMFGSMLTRRIGAA

SEQ ID NO: 68732 - protein, 20 aa, Artificial Sequence
  Description of Artificial Sequence: Synthetic peptide
  Seed: DPRMCSLMQGSTLPRRSGAA
DPRMCSLMFGSMLTRRLGAA

SEQ ID NO: 68733 - protein, 20 aa, Artificial Sequence
  Description of Artificial Sequence: Synthetic peptide
  Seed: DPRMCSLMQGSTLPRRSGAA
DPRMCSLMFGSMLTRRMGAA

SEQ ID NO: 68734 - protein, 20 aa, Artificial Sequence
  Description of Artificial Sequence: Synthetic peptide
  Seed: DPRMCSLMQGSTLPRRSGAA
DPRMCSLMFGSMLTRRNGAA

SEQ ID NO: 68735 - protein, 20 aa, Artificial Sequence
  Description of Artificial Sequence: Synthetic peptide
  Seed: DPRMCSLMQGSTLPRRSGAA
DPRMCSLMFGSMLTRRSGAA

SEQ ID NO: 68736 - protein, 20 aa, Artificial Sequence
  Description of Artificial Sequence: Synthetic peptide
  Seed: DPRMCSLMQGSTLPRRSGAA
DPRMCSLMFGSMLTRRTGAA

SEQ ID NO: 68737 - protein, 20 aa, Artificial Sequence
  Description of Artificial Sequence: Synthetic peptide
  Seed: DPRMCSLMQGSTLPRRSGAA
DPRMCSLMFGSMLTRRVGAA

SEQ ID NO: 68738 - protein, 20 aa, Artificial Sequence
  Description of Artificial Sequence: Synthetic peptide
  Seed: DPRMCSLMQGSTLPRRSGAA
DPRMCSLMFGSMLVRRAGAA

SEQ ID NO: 68739 - protein, 20 aa, Artificial Sequence
  Description of Artificial Sequence: Synthetic peptide
  Seed: DPRMCSLMQGSTLPRRSGAA
DPRMCSLMFGSMLVRRIGAA

SEQ ID NO: 68740 - protein, 20 aa, Artificial Sequence
  Description of Artificial Sequence: Synthetic peptide
  Seed: DPRMCSLMQGSTLPRRSGAA
DPRMCSLMFGSMLVRRLGAA

SEQ ID NO: 68741 - protein, 20 aa, Artificial Sequence
  Description of Artificial Sequence: Synthetic peptide
  Seed: DPRMCSLMQGSTLPRRSGAA
DPRMCSLMFGSMLVRRMGAA

SEQ ID NO: 68742 - protein, 20 aa, Artificial Sequence
  Description of Artificial Sequence: Synthetic peptide
  Seed: DPRMCSLMQGSTLPRRSGAA
DPRMCSLMFGSMLVRRNGAA

SEQ ID NO: 68743 - protein, 20 aa, Artificial Sequence
  Description of Artificial Sequence: Synthetic peptide
  Seed: DPRMCSLMQGSTLPRRSGAA
DPRMCSLMFGSMLVRRSGAA

SEQ ID NO: 68744 - protein, 20 aa, Artificial Sequence
  Description of Artificial Sequence: Synthetic peptide
  Seed: DPRMCSLMQGSTLPRRSGAA
DPRMCSLMFGSMLVRRTGAA

SEQ ID NO: 68745 - protein, 20 aa, Artificial Sequence
  Description of Artificial Sequence: Synthetic peptide
  Seed: DPRMCSLMQGSTLPRRSGAA
DPRMCSLMFGSMLVRRVGAA

SEQ ID NO: 68746 - protein, 20 aa, Artificial Sequence
  Description of Artificial Sequence: Synthetic peptide
  Seed: DPRMCSLMQGSTLPRRSGAA
DPRMCSLMFGSQLARRAGAA

SEQ ID NO: 68747 - protein, 20 aa, Artificial Sequence
  Description of Artificial Sequence: Synthetic peptide
  Seed: DPRMCSLMQGSTLPRRSGAA
DPRMCSLMFGSQLARRVGAA

SEQ ID NO: 68748 - protein, 20 aa, Artificial Sequence
  Description of Artificial Sequence: Synthetic peptide
  Seed: DPRMCSLMQGSTLPRRSGAA
DPRMCSLMFGSVLARRAGAA

SEQ ID NO: 68749 - protein, 20 aa, Artificial Sequence
  Description of Artificial Sequence: Synthetic peptide
  Seed: DPRMCSLMQGSTLPRRSGAA
DPRMCSLMFGSVLARRIGAA

SEQ ID NO: 68750 - protein, 20 aa, Artificial Sequence
  Description of Artificial Sequence: Synthetic peptide
  Seed: DPRMCSLMQGSTLPRRSGAA
DPRMCSLMFGSVLARRNGAA

SEQ ID NO: 68751 - protein, 20 aa, Artificial Sequence
  Description of Artificial Sequence: Synthetic peptide
  Seed: DPRMCSLMQGSTLPRRSGAA
DPRMCSLMFGSVLARRSGAA

SEQ ID NO: 68752 - protein, 20 aa, Artificial Sequence
  Description of Artificial Sequence: Synthetic peptide
  Seed: DPRMCSLMQGSTLPRRSGAA
DPRMCSLMFGSVLARRVGAA

SEQ ID NO: 68753 - protein, 20 aa, Artificial Sequence
  Description of Artificial Sequence: Synthetic peptide
  Seed: DPRMCSLMQGSTLPRRSGAA
DPRMCSLMFGSVLPRRAGAA

SEQ ID NO: 68754 - protein, 20 aa, Artificial Sequence
  Description of Artificial Sequence: Synthetic peptide
  Seed: DPRMCSLMQGSTLPRRSGAA
DPRMCSLMFGSVLPRRNGAA

SEQ ID NO: 68755 - protein, 20 aa, Artificial Sequence
  Description of Artificial Sequence: Synthetic peptide
  Seed: DPRMCSLMQGSTLPRRSGAA
DPRMCSLMFGSVLPRRSGAA

SEQ ID NO: 68756 - protein, 20 aa, Artificial Sequence
  Description of Artificial Sequence: Synthetic peptide
  Seed: DPRMCSLMQGSTLPRRSGAA
DPRMCSLMFGSVLPRRVGAA

SEQ ID NO: 68757 - protein, 20 aa, Artificial Sequence
  Description of Artificial Sequence: Synthetic peptide
  Seed: DPRMCSLMQGSTLPRRSGAA
DPRMCSLMFGSVLSRRAGAA

SEQ ID NO: 68758 - protein, 20 aa, Artificial Sequence
  Description of Artificial Sequence: Synthetic peptide
  Seed: DPRMCSLMQGSTLPRRSGAA
DPRMCSLMFGSVLSRRNGAA

SEQ ID NO: 68759 - protein, 20 aa, Artificial Sequence
  Description of Artificial Sequence: Synthetic peptide
  Seed: DPRMCSLMQGSTLPRRSGAA
DPRMCSLMFGSVLSRRSGAA

SEQ ID NO: 68760 - protein, 20 aa, Artificial Sequence
  Description of Artificial Sequence: Synthetic peptide
  Seed: DPRMCSLMQGSTLPRRSGAA
DPRMCSLMFGSVLSRRVGAA

SEQ ID NO: 68761 - protein, 20 aa, Artificial Sequence
  Description of Artificial Sequence: Synthetic peptide
  Seed: DPRMCSLMQGSTLPRRSGAA
DPRMCSLMFGSVLTRRAGAA

SEQ ID NO: 68762 - protein, 20 aa, Artificial Sequence
  Description of Artificial Sequence: Synthetic peptide
  Seed: DPRMCSLMQGSTLPRRSGAA
DPRMCSLMFGSVLTRRNGAA

SEQ ID NO: 68763 - protein, 20 aa, Artificial Sequence
  Description of Artificial Sequence: Synthetic peptide
  Seed: DPRMCSLMQGSTLPRRSGAA
DPRMCSLMFGSVLTRRSGAA

SEQ ID NO: 68764 - protein, 20 aa, Artificial Sequence
  Description of Artificial Sequence: Synthetic peptide
  Seed: DPRMCSLMQGSTLPRRSGAA
DPRMCSLMFGSVLTRRVGAA

SEQ ID NO: 68765 - protein, 20 aa, Artificial Sequence
  Description of Artificial Sequence: Synthetic peptide
  Seed: DPRMCSLMQGSTLPRRSGAA
DPRMCSLMIGSALARRAGAA

SEQ ID NO: 68766 - protein, 20 aa, Artificial Sequence
  Description of Artificial Sequence: Synthetic peptide
  Seed: DPRMCSLMQGSTLPRRSGAA
DPRMCSLMIGSALARRSGAA

SEQ ID NO: 68767 - protein, 20 aa, Artificial Sequence
  Description of Artificial Sequence: Synthetic peptide
  Seed: DPRMCSLMQGSTLPRRSGAA
DPRMCSLMIGSALARRTGAA

SEQ ID NO: 68768 - protein, 20 aa, Artificial Sequence
  Description of Artificial Sequence: Synthetic peptide
  Seed: DPRMCSLMQGSTLPRRSGAA
DPRMCSLMIGSALARRVGAA

SEQ ID NO: 68769 - protein, 20 aa, Artificial Sequence
  Description of Artificial Sequence: Synthetic peptide
  Seed: DPRMCSLMQGSTLPRRSGAA
DPRMCSLMIGSALIRRAGAA

SEQ ID NO: 68770 - protein, 20 aa, Artificial Sequence
  Description of Artificial Sequence: Synthetic peptide
  Seed: DPRMCSLMQGSTLPRRSGAA
DPRMCSLMIGSALIRRSGAA

SEQ ID NO: 68771 - protein, 20 aa, Artificial Sequence
  Description of Artificial Sequence: Synthetic peptide
  Seed: DPRMCSLMQGSTLPRRSGAA
DPRMCSLMIGSALVRRAGAA

SEQ ID NO: 68772 - protein, 20 aa, Artificial Sequence
  Description of Artificial Sequence: Synthetic peptide
  Seed: DPRMCSLMQGSTLPRRSGAA
DPRMCSLMIGSALVRRSGAA

SEQ ID NO: 68773 - protein, 20 aa, Artificial Sequence
  Description of Artificial Sequence: Synthetic peptide
  Seed: DPRMCSLMQGSTLPRRSGAA
DPRMCSLMIGSGLARRAGAA

SEQ ID NO: 68774 - protein, 20 aa, Artificial Sequence
  Description of Artificial Sequence: Synthetic peptide
  Seed: DPRMCSLMQGSTLPRRSGAA
DPRMCSLMIGSGLARRIGAA

SEQ ID NO: 68775 - protein, 20 aa, Artificial Sequence
  Description of Artificial Sequence: Synthetic peptide
  Seed: DPRMCSLMQGSTLPRRSGAA
DPRMCSLMIGSGLARRVGAA

SEQ ID NO: 68776 - protein, 20 aa, Artificial Sequence
  Description of Artificial Sequence: Synthetic peptide
  Seed: DPRMCSLMQGSTLPRRSGAA
DPRMCSLMIGSGLVRRAGAA

SEQ ID NO: 68777 - protein, 20 aa, Artificial Sequence
  Description of Artificial Sequence: Synthetic peptide
  Seed: DPRMCSLMQGSTLPRRSGAA
DPRMCSLMIGSGLVRRVGAA

SEQ ID NO: 68778 - protein, 20 aa, Artificial Sequence
  Description of Artificial Sequence: Synthetic peptide
  Seed: DPRMCSLMQGSTLPRRSGAA
DPRMCSLMIGSMLARRAGAA

SEQ ID NO: 68779 - protein, 20 aa, Artificial Sequence
  Description of Artificial Sequence: Synthetic peptide
  Seed: DPRMCSLMQGSTLPRRSGAA
DPRMCSLMIGSMLARRNGAA

SEQ ID NO: 68780 - protein, 20 aa, Artificial Sequence
  Description of Artificial Sequence: Synthetic peptide
  Seed: DPRMCSLMQGSTLPRRSGAA
DPRMCSLMIGSMLARRSGAA

SEQ ID NO: 68781 - protein, 20 aa, Artificial Sequence
  Description of Artificial Sequence: Synthetic peptide
  Seed: DPRMCSLMQGSTLPRRSGAA
DPRMCSLMIGSSLIRRAGAA

SEQ ID NO: 68782 - protein, 20 aa, Artificial Sequence
  Description of Artificial Sequence: Synthetic peptide
  Seed: DPRMCSLMQGSTLPRRSGAA
DPRMCSLMLGSALIRRAGAA

SEQ ID NO: 68783 - protein, 20 aa, Artificial Sequence
  Description of Artificial Sequence: Synthetic peptide
  Seed: DPRMCSLMQGSTLPRRSGAA
DPRMCSLMLGSMLARRAGAA

SEQ ID NO: 68784 - protein, 20 aa, Artificial Sequence
  Description of Artificial Sequence: Synthetic peptide
  Seed: DPRMCSLMQGSTLPRRSGAA
DPRMCSLMMGSALVRRAGAA

SEQ ID NO: 68785 - protein, 20 aa, Artificial Sequence
  Description of Artificial Sequence: Synthetic peptide
  Seed: DPRMCSLMQGSTLPRRSGAA
DPRMCSLMNGSALIRRAGAA

SEQ ID NO: 68786 - protein, 20 aa, Artificial Sequence
  Description of Artificial Sequence: Synthetic peptide
  Seed: DPRMCSLMQGSTLPRRSGAA
DPRMCSLMNGSALVRRAGAA

SEQ ID NO: 68787 - protein, 20 aa, Artificial Sequence
  Description of Artificial Sequence: Synthetic peptide
  Seed: DPRMCSLMQGSTLPRRSGAA
DPRMCSLMVGSALARRAGAA

SEQ ID NO: 68788 - protein, 20 aa, Artificial Sequence
  Description of Artificial Sequence: Synthetic peptide
  Seed: DPRMCSLMQGSTLPRRSGAA
DPRMCSLMVGSALARRVGAA

SEQ ID NO: 68789 - protein, 20 aa, Artificial Sequence
  Description of Artificial Sequence: Synthetic peptide
  Seed: DPRMCSLMQGSTLPRRSGAA
DPRMCSLMVGSGLARRAGAA

SEQ ID NO: 68790 - protein, 20 aa, Artificial Sequence
  Description of Artificial Sequence: Synthetic peptide
  Seed: DPRMCSLMQGSTLPRRSGAA
DPRMCSLMVGSGLARRIGAA

SEQ ID NO: 68791 - protein, 20 aa, Artificial Sequence
  Description of Artificial Sequence: Synthetic peptide
  Seed: DPRMCSLMQGSTLPRRSGAA
DPRMCSLMVGSGLARRVGAA

SEQ ID NO: 68792 - protein, 20 aa, Artificial Sequence
  Description of Artificial Sequence: Synthetic peptide
  Seed: DPRMCSLMQGSTLPRRSGAA
DPRMCSLMWGSMLARRAGAA

SEQ ID NO: 68793 - protein, 20 aa, Artificial Sequence
  Description of Artificial Sequence: Synthetic peptide
  Seed: DPRMCSLMQGSTLPRRSGAA
DPRMCSLMYGSALARRAGAA

SEQ ID NO: 68794 - protein, 20 aa, Artificial Sequence
  Description of Artificial Sequence: Synthetic peptide
  Seed: DPRMCSLMQGSTLPRRSGAA
DPRMCSLMYGSALARRIGAA

SEQ ID NO: 68795 - protein, 20 aa, Artificial Sequence
  Description of Artificial Sequence: Synthetic peptide
  Seed: DPRMCSLMQGSTLPRRSGAA
DPRMCSLMYGSALARRLGAA

SEQ ID NO: 68796 - protein, 20 aa, Artificial Sequence
  Description of Artificial Sequence: Synthetic peptide
  Seed: DPRMCSLMQGSTLPRRSGAA
DPRMCSLMYGSALARRMGAA

SEQ ID NO: 68797 - protein, 20 aa, Artificial Sequence
  Description of Artificial Sequence: Synthetic peptide
  Seed: DPRMCSLMQGSTLPRRSGAA
DPRMCSLMYGSALARRNGAA

SEQ ID NO: 68798 - protein, 20 aa, Artificial Sequence
  Description of Artificial Sequence: Synthetic peptide
  Seed: DPRMCSLMQGSTLPRRSGAA
DPRMCSLMYGSALARRSGAA

SEQ ID NO: 68799 - protein, 20 aa, Artificial Sequence
  Description of Artificial Sequence: Synthetic peptide
  Seed: DPRMCSLMQGSTLPRRSGAA
DPRMCSLMYGSALARRVGAA

SEQ ID NO: 68800 - protein, 20 aa, Artificial Sequence
  Description of Artificial Sequence: Synthetic peptide
  Seed: DPRMCSLMQGSTLPRRSGAA
DPRMCSLMYGSALPRRAGAA

SEQ ID NO: 68801 - protein, 20 aa, Artificial Sequence
  Description of Artificial Sequence: Synthetic peptide
  Seed: DPRMCSLMQGSTLPRRSGAA
DPRMCSLMYGSALSRRAGAA

SEQ ID NO: 68802 - protein, 20 aa, Artificial Sequence
  Description of Artificial Sequence: Synthetic peptide
  Seed: DPRMCSLMQGSTLPRRSGAA
DPRMCSLMYGSALSRRIGAA

SEQ ID NO: 68803 - protein, 20 aa, Artificial Sequence
  Description of Artificial Sequence: Synthetic peptide
  Seed: DPRMCSLMQGSTLPRRSGAA
DPRMCSLMYGSALSRRVGAA

SEQ ID NO: 68804 - protein, 20 aa, Artificial Sequence
  Description of Artificial Sequence: Synthetic peptide
  Seed: DPRMCSLMQGSTLPRRSGAA
DPRMCSLMYGSALTRRAGAA

SEQ ID NO: 68805 - protein, 20 aa, Artificial Sequence
  Description of Artificial Sequence: Synthetic peptide
  Seed: DPRMCSLMQGSTLPRRSGAA
DPRMCSLMYGSALTRRIGAA

SEQ ID NO: 68806 - protein, 20 aa, Artificial Sequence
  Description of Artificial Sequence: Synthetic peptide
  Seed: DPRMCSLMQGSTLPRRSGAA
DPRMCSLMYGSALTRRVGAA

SEQ ID NO: 68807 - protein, 20 aa, Artificial Sequence
  Description of Artificial Sequence: Synthetic peptide
  Seed: DPRMCSLMQGSTLPRRSGAA
DPRMCSLMYGSALVRRAGAA

SEQ ID NO: 68808 - protein, 20 aa, Artificial Sequence
  Description of Artificial Sequence: Synthetic peptide
  Seed: DPRMCSLMQGSTLPRRSGAA
DPRMCSLMYGSILARRAGAA

SEQ ID NO: 68809 - protein, 20 aa, Artificial Sequence
  Description of Artificial Sequence: Synthetic peptide
  Seed: DPRMCSLMQGSTLPRRSGAA
DPRMCSLMYGSILARRIGAA

SEQ ID NO: 68810 - protein, 20 aa, Artificial Sequence
  Description of Artificial Sequence: Synthetic peptide
  Seed: DPRMCSLMQGSTLPRRSGAA
DPRMCSLMYGSILARRLGAA

SEQ ID NO: 68811 - protein, 20 aa, Artificial Sequence
  Description of Artificial Sequence: Synthetic peptide
  Seed: DPRMCSLMQGSTLPRRSGAA
DPRMCSLMYGSILARRMGAA

SEQ ID NO: 68812 - protein, 20 aa, Artificial Sequence
  Description of Artificial Sequence: Synthetic peptide
  Seed: DPRMCSLMQGSTLPRRSGAA
DPRMCSLMYGSILARRNGAA

SEQ ID NO: 68813 - protein, 20 aa, Artificial Sequence
  Description of Artificial Sequence: Synthetic peptide
  Seed: DPRMCSLMQGSTLPRRSGAA
DPRMCSLMYGSILARRSGAA

SEQ ID NO: 68814 - protein, 20 aa, Artificial Sequence
  Description of Artificial Sequence: Synthetic peptide
  Seed: DPRMCSLMQGSTLPRRSGAA
DPRMCSLMYGSILARRTGAA

SEQ ID NO: 68815 - protein, 20 aa, Artificial Sequence
  Description of Artificial Sequence: Synthetic peptide
  Seed: DPRMCSLMQGSTLPRRSGAA
DPRMCSLMYGSILARRVGAA

SEQ ID NO: 68816 - protein, 20 aa, Artificial Sequence
  Description of Artificial Sequence: Synthetic peptide
  Seed: DPRMCSLMQGSTLPRRSGAA
DPRMCSLMYGSILPRRAGAA

SEQ ID NO: 68817 - protein, 20 aa, Artificial Sequence
  Description of Artificial Sequence: Synthetic peptide
  Seed: DPRMCSLMQGSTLPRRSGAA
DPRMCSLMYGSILPRRIGAA

SEQ ID NO: 68818 - protein, 20 aa, Artificial Sequence
  Description of Artificial Sequence: Synthetic peptide
  Seed: DPRMCSLMQGSTLPRRSGAA
DPRMCSLMYGSILPRRNGAA

SEQ ID NO: 68819 - protein, 20 aa, Artificial Sequence
  Description of Artificial Sequence: Synthetic peptide
  Seed: DPRMCSLMQGSTLPRRSGAA
DPRMCSLMYGSILPRRSGAA

SEQ ID NO: 68820 - protein, 20 aa, Artificial Sequence
  Description of Artificial Sequence: Synthetic peptide
  Seed: DPRMCSLMQGSTLPRRSGAA
DPRMCSLMYGSILPRRVGAA

SEQ ID NO: 68821 - protein, 20 aa, Artificial Sequence
  Description of Artificial Sequence: Synthetic peptide
  Seed: DPRMCSLMQGSTLPRRSGAA
DPRMCSLMYGSILSRRAGAA

SEQ ID NO: 68822 - protein, 20 aa, Artificial Sequence
  Description of Artificial Sequence: Synthetic peptide
  Seed: DPRMCSLMQGSTLPRRSGAA
DPRMCSLMYGSILSRRIGAA

SEQ ID NO: 68823 - protein, 20 aa, Artificial Sequence
  Description of Artificial Sequence: Synthetic peptide
  Seed: DPRMCSLMQGSTLPRRSGAA
DPRMCSLMYGSILSRRLGAA

SEQ ID NO: 68824 - protein, 20 aa, Artificial Sequence
  Description of Artificial Sequence: Synthetic peptide
  Seed: DPRMCSLMQGSTLPRRSGAA
DPRMCSLMYGSILSRRNGAA

SEQ ID NO: 68825 - protein, 20 aa, Artificial Sequence
  Description of Artificial Sequence: Synthetic peptide
  Seed: DPRMCSLMQGSTLPRRSGAA
DPRMCSLMYGSILSRRSGAA

SEQ ID NO: 68826 - protein, 20 aa, Artificial Sequence
  Description of Artificial Sequence: Synthetic peptide
  Seed: DPRMCSLMQGSTLPRRSGAA
DPRMCSLMYGSILSRRTGAA

SEQ ID NO: 68827 - protein, 20 aa, Artificial Sequence
  Description of Artificial Sequence: Synthetic peptide
  Seed: DPRMCSLMQGSTLPRRSGAA
DPRMCSLMYGSILSRRVGAA

SEQ ID NO: 68828 - protein, 20 aa, Artificial Sequence
  Description of Artificial Sequence: Synthetic peptide
  Seed: DPRMCSLMQGSTLPRRSGAA
DPRMCSLMYGSILTRRAGAA

SEQ ID NO: 68829 - protein, 20 aa, Artificial Sequence
  Description of Artificial Sequence: Synthetic peptide
  Seed: DPRMCSLMQGSTLPRRSGAA
DPRMCSLMYGSILTRRIGAA

SEQ ID NO: 68830 - protein, 20 aa, Artificial Sequence
  Description of Artificial Sequence: Synthetic peptide
  Seed: DPRMCSLMQGSTLPRRSGAA
DPRMCSLMYGSILTRRLGAA

SEQ ID NO: 68831 - protein, 20 aa, Artificial Sequence
  Description of Artificial Sequence: Synthetic peptide
  Seed: DPRMCSLMQGSTLPRRSGAA
DPRMCSLMYGSILTRRNGAA

SEQ ID NO: 68832 - protein, 20 aa, Artificial Sequence
  Description of Artificial Sequence: Synthetic peptide
  Seed: DPRMCSLMQGSTLPRRSGAA
DPRMCSLMYGSILTRRSGAA

SEQ ID NO: 68833 - protein, 20 aa, Artificial Sequence
  Description of Artificial Sequence: Synthetic peptide
  Seed: DPRMCSLMQGSTLPRRSGAA
DPRMCSLMYGSILTRRTGAA

SEQ ID NO: 68834 - protein, 20 aa, Artificial Sequence
  Description of Artificial Sequence: Synthetic peptide
  Seed: DPRMCSLMQGSTLPRRSGAA
DPRMCSLMYGSILTRRVGAA

SEQ ID NO: 68835 - protein, 20 aa, Artificial Sequence
  Description of Artificial Sequence: Synthetic peptide
  Seed: DPRMCSLMQGSTLPRRSGAA
DPRMCSLMYGSILVRRAGAA

SEQ ID NO: 68836 - protein, 20 aa, Artificial Sequence
  Description of Artificial Sequence: Synthetic peptide
  Seed: DPRMCSLMQGSTLPRRSGAA
DPRMCSLMYGSILVRRNGAA

SEQ ID NO: 68837 - protein, 20 aa, Artificial Sequence
  Description of Artificial Sequence: Synthetic peptide
  Seed: DPRMCSLMQGSTLPRRSGAA
DPRMCSLMYGSILVRRSGAA

SEQ ID NO: 68838 - protein, 20 aa, Artificial Sequence
  Description of Artificial Sequence: Synthetic peptide
  Seed: DPRMCSLMQGSTLPRRSGAA
DPRMCSLMYGSILVRRVGAA

SEQ ID NO: 68839 - protein, 20 aa, Artificial Sequence
  Description of Artificial Sequence: Synthetic peptide
  Seed: DPRMCSLMQGSTLPRRSGAA
DPRMCSLMYGSLLARRAGAA

SEQ ID NO: 68840 - protein, 20 aa, Artificial Sequence
  Description of Artificial Sequence: Synthetic peptide
  Seed: DPRMCSLMQGSTLPRRSGAA
DPRMCSLMYGSLLARRIGAA

SEQ ID NO: 68841 - protein, 20 aa, Artificial Sequence
  Description of Artificial Sequence: Synthetic peptide
  Seed: DPRMCSLMQGSTLPRRSGAA
DPRMCSLMYGSLLARRLGAA

SEQ ID NO: 68842 - protein, 20 aa, Artificial Sequence
  Description of Artificial Sequence: Synthetic peptide
  Seed: DPRMCSLMQGSTLPRRSGAA
DPRMCSLMYGSLLARRMGAA

SEQ ID NO: 68843 - protein, 20 aa, Artificial Sequence
  Description of Artificial Sequence: Synthetic peptide
  Seed: DPRMCSLMQGSTLPRRSGAA
DPRMCSLMYGSLLARRNGAA

SEQ ID NO: 68844 - protein, 20 aa, Artificial Sequence
  Description of Artificial Sequence: Synthetic peptide
  Seed: DPRMCSLMQGSTLPRRSGAA
DPRMCSLMYGSLLARRSGAA

SEQ ID NO: 68845 - protein, 20 aa, Artificial Sequence
  Description of Artificial Sequence: Synthetic peptide
  Seed: DPRMCSLMQGSTLPRRSGAA
DPRMCSLMYGSLLARRTGAA

SEQ ID NO: 68846 - protein, 20 aa, Artificial Sequence
  Description of Artificial Sequence: Synthetic peptide
  Seed: DPRMCSLMQGSTLPRRSGAA
DPRMCSLMYGSLLARRVGAA

SEQ ID NO: 68847 - protein, 20 aa, Artificial Sequence
  Description of Artificial Sequence: Synthetic peptide
  Seed: DPRMCSLMQGSTLPRRSGAA
DPRMCSLMYGSLLGRRAGAA

SEQ ID NO: 68848 - protein, 20 aa, Artificial Sequence
  Description of Artificial Sequence: Synthetic peptide
  Seed: DPRMCSLMQGSTLPRRSGAA
DPRMCSLMYGSLLGRRVGAA

SEQ ID NO: 68849 - protein, 20 aa, Artificial Sequence
  Description of Artificial Sequence: Synthetic peptide
  Seed: DPRMCSLMQGSTLPRRSGAA
DPRMCSLMYGSLLIRRAGAA

SEQ ID NO: 68850 - protein, 20 aa, Artificial Sequence
  Description of Artificial Sequence: Synthetic peptide
  Seed: DPRMCSLMQGSTLPRRSGAA
DPRMCSLMYGSLLPRRAGAA

SEQ ID NO: 68851 - protein, 20 aa, Artificial Sequence
  Description of Artificial Sequence: Synthetic peptide
  Seed: DPRMCSLMQGSTLPRRSGAA
DPRMCSLMYGSLLPRRIGAA

SEQ ID NO: 68852 - protein, 20 aa, Artificial Sequence
  Description of Artificial Sequence: Synthetic peptide
  Seed: DPRMCSLMQGSTLPRRSGAA
DPRMCSLMYGSLLPRRLGAA

SEQ ID NO: 68853 - protein, 20 aa, Artificial Sequence
  Description of Artificial Sequence: Synthetic peptide
  Seed: DPRMCSLMQGSTLPRRSGAA
DPRMCSLMYGSLLPRRMGAA

SEQ ID NO: 68854 - protein, 20 aa, Artificial Sequence
  Description of Artificial Sequence: Synthetic peptide
  Seed: DPRMCSLMQGSTLPRRSGAA
DPRMCSLMYGSLLPRRNGAA

SEQ ID NO: 68855 - protein, 20 aa, Artificial Sequence
  Description of Artificial Sequence: Synthetic peptide
  Seed: DPRMCSLMQGSTLPRRSGAA
DPRMCSLMYGSLLPRRSGAA

SEQ ID NO: 68856 - protein, 20 aa, Artificial Sequence
  Description of Artificial Sequence: Synthetic peptide
  Seed: DPRMCSLMQGSTLPRRSGAA
DPRMCSLMYGSLLPRRVGAA

SEQ ID NO: 68857 - protein, 20 aa, Artificial Sequence
  Description of Artificial Sequence: Synthetic peptide
  Seed: DPRMCSLMQGSTLPRRSGAA
DPRMCSLMYGSLLSRRAGAA

SEQ ID NO: 68858 - protein, 20 aa, Artificial Sequence
  Description of Artificial Sequence: Synthetic peptide
  Seed: DPRMCSLMQGSTLPRRSGAA
DPRMCSLMYGSLLSRRIGAA

SEQ ID NO: 68859 - protein, 20 aa, Artificial Sequence
  Description of Artificial Sequence: Synthetic peptide
  Seed: DPRMCSLMQGSTLPRRSGAA
DPRMCSLMYGSLLSRRLGAA

SEQ ID NO: 68860 - protein, 20 aa, Artificial Sequence
  Description of Artificial Sequence: Synthetic peptide
  Seed: DPRMCSLMQGSTLPRRSGAA
DPRMCSLMYGSLLSRRMGAA

SEQ ID NO: 68861 - protein, 20 aa, Artificial Sequence
  Description of Artificial Sequence: Synthetic peptide
  Seed: DPRMCSLMQGSTLPRRSGAA
DPRMCSLMYGSLLSRRNGAA

SEQ ID NO: 68862 - protein, 20 aa, Artificial Sequence
  Description of Artificial Sequence: Synthetic peptide
  Seed: DPRMCSLMQGSTLPRRSGAA
DPRMCSLMYGSLLSRRSGAA

SEQ ID NO: 68863 - protein, 20 aa, Artificial Sequence
  Description of Artificial Sequence: Synthetic peptide
  Seed: DPRMCSLMQGSTLPRRSGAA
DPRMCSLMYGSLLSRRTGAA

SEQ ID NO: 68864 - protein, 20 aa, Artificial Sequence
  Description of Artificial Sequence: Synthetic peptide
  Seed: DPRMCSLMQGSTLPRRSGAA
DPRMCSLMYGSLLSRRVGAA

SEQ ID NO: 68865 - protein, 20 aa, Artificial Sequence
  Description of Artificial Sequence: Synthetic peptide
  Seed: DPRMCSLMQGSTLPRRSGAA
DPRMCSLMYGSLLTRRAGAA

SEQ ID NO: 68866 - protein, 20 aa, Artificial Sequence
  Description of Artificial Sequence: Synthetic peptide
  Seed: DPRMCSLMQGSTLPRRSGAA
DPRMCSLMYGSLLTRRIGAA

SEQ ID NO: 68867 - protein, 20 aa, Artificial Sequence
  Description of Artificial Sequence: Synthetic peptide
  Seed: DPRMCSLMQGSTLPRRSGAA
DPRMCSLMYGSLLTRRLGAA

SEQ ID NO: 68868 - protein, 20 aa, Artificial Sequence
  Description of Artificial Sequence: Synthetic peptide
  Seed: DPRMCSLMQGSTLPRRSGAA
DPRMCSLMYGSLLTRRMGAA

SEQ ID NO: 68869 - protein, 20 aa, Artificial Sequence
  Description of Artificial Sequence: Synthetic peptide
  Seed: DPRMCSLMQGSTLPRRSGAA
DPRMCSLMYGSLLTRRNGAA

SEQ ID NO: 68870 - protein, 20 aa, Artificial Sequence
  Description of Artificial Sequence: Synthetic peptide
  Seed: DPRMCSLMQGSTLPRRSGAA
DPRMCSLMYGSLLTRRSGAA

SEQ ID NO: 68871 - protein, 20 aa, Artificial Sequence
  Description of Artificial Sequence: Synthetic peptide
  Seed: DPRMCSLMQGSTLPRRSGAA
DPRMCSLMYGSLLTRRTGAA

SEQ ID NO: 68872 - protein, 20 aa, Artificial Sequence
  Description of Artificial Sequence: Synthetic peptide
  Seed: DPRMCSLMQGSTLPRRSGAA
DPRMCSLMYGSLLTRRVGAA

SEQ ID NO: 68873 - protein, 20 aa, Artificial Sequence
  Description of Artificial Sequence: Synthetic peptide
  Seed: DPRMCSLMQGSTLPRRSGAA
DPRMCSLMYGSLLVRRAGAA

SEQ ID NO: 68874 - protein, 20 aa, Artificial Sequence
  Description of Artificial Sequence: Synthetic peptide
  Seed: DPRMCSLMQGSTLPRRSGAA
DPRMCSLMYGSLLVRRIGAA

SEQ ID NO: 68875 - protein, 20 aa, Artificial Sequence
  Description of Artificial Sequence: Synthetic peptide
  Seed: DPRMCSLMQGSTLPRRSGAA
DPRMCSLMYGSLLVRRNGAA

SEQ ID NO: 68876 - protein, 20 aa, Artificial Sequence
  Description of Artificial Sequence: Synthetic peptide
  Seed: DPRMCSLMQGSTLPRRSGAA
DPRMCSLMYGSLLVRRSGAA

SEQ ID NO: 68877 - protein, 20 aa, Artificial Sequence
  Description of Artificial Sequence: Synthetic peptide
  Seed: DPRMCSLMQGSTLPRRSGAA
DPRMCSLMYGSLLVRRTGAA

SEQ ID NO: 68878 - protein, 20 aa, Artificial Sequence
  Description of Artificial Sequence: Synthetic peptide
  Seed: DPRMCSLMQGSTLPRRSGAA
DPRMCSLMYGSLLVRRVGAA

SEQ ID NO: 68879 - protein, 20 aa, Artificial Sequence
  Description of Artificial Sequence: Synthetic peptide
  Seed: DPRMCSLMQGSTLPRRSGAA
DPRMCSLMYGSMLARRAGAA

SEQ ID NO: 68880 - protein, 20 aa, Artificial Sequence
  Description of Artificial Sequence: Synthetic peptide
  Seed: DPRMCSLMQGSTLPRRSGAA
DPRMCSLMYGSMLARRGGAA

SEQ ID NO: 68881 - protein, 20 aa, Artificial Sequence
  Description of Artificial Sequence: Synthetic peptide
  Seed: DPRMCSLMQGSTLPRRSGAA
DPRMCSLMYGSMLARRIGAA

SEQ ID NO: 68882 - protein, 20 aa, Artificial Sequence
  Description of Artificial Sequence: Synthetic peptide
  Seed: DPRMCSLMQGSTLPRRSGAA
DPRMCSLMYGSMLARRLGAA

SEQ ID NO: 68883 - protein, 20 aa, Artificial Sequence
  Description of Artificial Sequence: Synthetic peptide
  Seed: DPRMCSLMQGSTLPRRSGAA
DPRMCSLMYGSMLARRMGAA

SEQ ID NO: 68884 - protein, 20 aa, Artificial Sequence
  Description of Artificial Sequence: Synthetic peptide
  Seed: DPRMCSLMQGSTLPRRSGAA
DPRMCSLMYGSMLARRNGAA

SEQ ID NO: 68885 - protein, 20 aa, Artificial Sequence
  Description of Artificial Sequence: Synthetic peptide
  Seed: DPRMCSLMQGSTLPRRSGAA
DPRMCSLMYGSMLARRSGAA

SEQ ID NO: 68886 - protein, 20 aa, Artificial Sequence
  Description of Artificial Sequence: Synthetic peptide
  Seed: DPRMCSLMQGSTLPRRSGAA
DPRMCSLMYGSMLARRTGAA

SEQ ID NO: 68887 - protein, 20 aa, Artificial Sequence
  Description of Artificial Sequence: Synthetic peptide
  Seed: DPRMCSLMQGSTLPRRSGAA
DPRMCSLMYGSMLARRVGAA

SEQ ID NO: 68888 - protein, 20 aa, Artificial Sequence
  Description of Artificial Sequence: Synthetic peptide
  Seed: DPRMCSLMQGSTLPRRSGAA
DPRMCSLMYGSMLGRRAGAA

SEQ ID NO: 68889 - protein, 20 aa, Artificial Sequence
  Description of Artificial Sequence: Synthetic peptide
  Seed: DPRMCSLMQGSTLPRRSGAA
DPRMCSLMYGSMLGRRIGAA

SEQ ID NO: 68890 - protein, 20 aa, Artificial Sequence
  Description of Artificial Sequence: Synthetic peptide
  Seed: DPRMCSLMQGSTLPRRSGAA
DPRMCSLMYGSMLGRRVGAA

SEQ ID NO: 68891 - protein, 20 aa, Artificial Sequence
  Description of Artificial Sequence: Synthetic peptide
  Seed: DPRMCSLMQGSTLPRRSGAA
DPRMCSLMYGSMLIRRAGAA

SEQ ID NO: 68892 - protein, 20 aa, Artificial Sequence
  Description of Artificial Sequence: Synthetic peptide
  Seed: DPRMCSLMQGSTLPRRSGAA
DPRMCSLMYGSMLIRRNGAA

SEQ ID NO: 68893 - protein, 20 aa, Artificial Sequence
  Description of Artificial Sequence: Synthetic peptide
  Seed: DPRMCSLMQGSTLPRRSGAA
DPRMCSLMYGSMLIRRVGAA

SEQ ID NO: 68894 - protein, 20 aa, Artificial Sequence
  Description of Artificial Sequence: Synthetic peptide
  Seed: DPRMCSLMQGSTLPRRSGAA
DPRMCSLMYGSMLNRRAGAA

SEQ ID NO: 68895 - protein, 20 aa, Artificial Sequence
  Description of Artificial Sequence: Synthetic peptide
  Seed: DPRMCSLMQGSTLPRRSGAA
DPRMCSLMYGSMLPRRAGAA

SEQ ID NO: 68896 - protein, 20 aa, Artificial Sequence
  Description of Artificial Sequence: Synthetic peptide
  Seed: DPRMCSLMQGSTLPRRSGAA
DPRMCSLMYGSMLPRRIGAA

SEQ ID NO: 68897 - protein, 20 aa, Artificial Sequence
  Description of Artificial Sequence: Synthetic peptide
  Seed: DPRMCSLMQGSTLPRRSGAA
DPRMCSLMYGSMLPRRLGAA

SEQ ID NO: 68898 - protein, 20 aa, Artificial Sequence
  Description of Artificial Sequence: Synthetic peptide
  Seed: DPRMCSLMQGSTLPRRSGAA
DPRMCSLMYGSMLPRRMGAA

SEQ ID NO: 68899 - protein, 20 aa, Artificial Sequence
  Description of Artificial Sequence: Synthetic peptide
  Seed: DPRMCSLMQGSTLPRRSGAA
DPRMCSLMYGSMLPRRNGAA

SEQ ID NO: 68900 - protein, 20 aa, Artificial Sequence
  Description of Artificial Sequence: Synthetic peptide
  Seed: DPRMCSLMQGSTLPRRSGAA
DPRMCSLMYGSMLPRRSGAA

SEQ ID NO: 68901 - protein, 20 aa, Artificial Sequence
  Description of Artificial Sequence: Synthetic peptide
  Seed: DPRMCSLMQGSTLPRRSGAA
DPRMCSLMYGSMLPRRTGAA

SEQ ID NO: 68902 - protein, 20 aa, Artificial Sequence
  Description of Artificial Sequence: Synthetic peptide
  Seed: DPRMCSLMQGSTLPRRSGAA
DPRMCSLMYGSMLPRRVGAA

SEQ ID NO: 68903 - protein, 20 aa, Artificial Sequence
  Description of Artificial Sequence: Synthetic peptide
  Seed: DPRMCSLMQGSTLPRRSGAA
DPRMCSLMYGSMLSRRAGAA

SEQ ID NO: 68904 - protein, 20 aa, Artificial Sequence
  Description of Artificial Sequence: Synthetic peptide
  Seed: DPRMCSLMQGSTLPRRSGAA
DPRMCSLMYGSMLSRRIGAA

SEQ ID NO: 68905 - protein, 20 aa, Artificial Sequence
  Description of Artificial Sequence: Synthetic peptide
  Seed: DPRMCSLMQGSTLPRRSGAA
DPRMCSLMYGSMLSRRLGAA

SEQ ID NO: 68906 - protein, 20 aa, Artificial Sequence
  Description of Artificial Sequence: Synthetic peptide
  Seed: DPRMCSLMQGSTLPRRSGAA
DPRMCSLMYGSMLSRRMGAA

SEQ ID NO: 68907 - protein, 20 aa, Artificial Sequence
  Description of Artificial Sequence: Synthetic peptide
  Seed: DPRMCSLMQGSTLPRRSGAA
DPRMCSLMYGSMLSRRNGAA

SEQ ID NO: 68908 - protein, 20 aa, Artificial Sequence
  Description of Artificial Sequence: Synthetic peptide
  Seed: DPRMCSLMQGSTLPRRSGAA
DPRMCSLMYGSMLSRRSGAA

SEQ ID NO: 68909 - protein, 20 aa, Artificial Sequence
  Description of Artificial Sequence: Synthetic peptide
  Seed: DPRMCSLMQGSTLPRRSGAA
DPRMCSLMYGSMLSRRTGAA

SEQ ID NO: 68910 - protein, 20 aa, Artificial Sequence
  Description of Artificial Sequence: Synthetic peptide
  Seed: DPRMCSLMQGSTLPRRSGAA
DPRMCSLMYGSMLSRRVGAA

SEQ ID NO: 68911 - protein, 20 aa, Artificial Sequence
  Description of Artificial Sequence: Synthetic peptide
  Seed: DPRMCSLMQGSTLPRRSGAA
DPRMCSLMYGSMLTRRAGAA

SEQ ID NO: 68912 - protein, 20 aa, Artificial Sequence
  Description of Artificial Sequence: Synthetic peptide
  Seed: DPRMCSLMQGSTLPRRSGAA
DPRMCSLMYGSMLTRRIGAA

SEQ ID NO: 68913 - protein, 20 aa, Artificial Sequence
  Description of Artificial Sequence: Synthetic peptide
  Seed: DPRMCSLMQGSTLPRRSGAA
DPRMCSLMYGSMLTRRLGAA

SEQ ID NO: 68914 - protein, 20 aa, Artificial Sequence
  Description of Artificial Sequence: Synthetic peptide
  Seed: DPRMCSLMQGSTLPRRSGAA
DPRMCSLMYGSMLTRRMGAA

SEQ ID NO: 68915 - protein, 20 aa, Artificial Sequence
  Description of Artificial Sequence: Synthetic peptide
  Seed: DPRMCSLMQGSTLPRRSGAA
DPRMCSLMYGSMLTRRNGAA

SEQ ID NO: 68916 - protein, 20 aa, Artificial Sequence
  Description of Artificial Sequence: Synthetic peptide
  Seed: DPRMCSLMQGSTLPRRSGAA
DPRMCSLMYGSMLTRRSGAA

SEQ ID NO: 68917 - protein, 20 aa, Artificial Sequence
  Description of Artificial Sequence: Synthetic peptide
  Seed: DPRMCSLMQGSTLPRRSGAA
DPRMCSLMYGSMLTRRTGAA

SEQ ID NO: 68918 - protein, 20 aa, Artificial Sequence
  Description of Artificial Sequence: Synthetic peptide
  Seed: DPRMCSLMQGSTLPRRSGAA
DPRMCSLMYGSMLTRRVGAA

SEQ ID NO: 68919 - protein, 20 aa, Artificial Sequence
  Description of Artificial Sequence: Synthetic peptide
  Seed: DPRMCSLMQGSTLPRRSGAA
DPRMCSLMYGSMLVRRAGAA

SEQ ID NO: 68920 - protein, 20 aa, Artificial Sequence
  Description of Artificial Sequence: Synthetic peptide
  Seed: DPRMCSLMQGSTLPRRSGAA
DPRMCSLMYGSMLVRRIGAA

SEQ ID NO: 68921 - protein, 20 aa, Artificial Sequence
  Description of Artificial Sequence: Synthetic peptide
  Seed: DPRMCSLMQGSTLPRRSGAA
DPRMCSLMYGSMLVRRLGAA

SEQ ID NO: 68922 - protein, 20 aa, Artificial Sequence
  Description of Artificial Sequence: Synthetic peptide
  Seed: DPRMCSLMQGSTLPRRSGAA
DPRMCSLMYGSMLVRRMGAA

SEQ ID NO: 68923 - protein, 20 aa, Artificial Sequence
  Description of Artificial Sequence: Synthetic peptide
  Seed: DPRMCSLMQGSTLPRRSGAA
DPRMCSLMYGSMLVRRNGAA

SEQ ID NO: 68924 - protein, 20 aa, Artificial Sequence
  Description of Artificial Sequence: Synthetic peptide
  Seed: DPRMCSLMQGSTLPRRSGAA
DPRMCSLMYGSMLVRRSGAA

SEQ ID NO: 68925 - protein, 20 aa, Artificial Sequence
  Description of Artificial Sequence: Synthetic peptide
  Seed: DPRMCSLMQGSTLPRRSGAA
DPRMCSLMYGSMLVRRTGAA

SEQ ID NO: 68926 - protein, 20 aa, Artificial Sequence
  Description of Artificial Sequence: Synthetic peptide
  Seed: DPRMCSLMQGSTLPRRSGAA
DPRMCSLMYGSMLVRRVGAA

SEQ ID NO: 68927 - protein, 20 aa, Artificial Sequence
  Description of Artificial Sequence: Synthetic peptide
  Seed: DPRMCSLMQGSTLPRRSGAA
DPRMCSLMYGSVLARRAGAA

SEQ ID NO: 68928 - protein, 20 aa, Artificial Sequence
  Description of Artificial Sequence: Synthetic peptide
  Seed: DPRMCSLMQGSTLPRRSGAA
DPRMCSLMYGSVLARRIGAA

SEQ ID NO: 68929 - protein, 20 aa, Artificial Sequence
  Description of Artificial Sequence: Synthetic peptide
  Seed: DPRMCSLMQGSTLPRRSGAA
DPRMCSLMYGSVLARRNGAA

SEQ ID NO: 68930 - protein, 20 aa, Artificial Sequence
  Description of Artificial Sequence: Synthetic peptide
  Seed: DPRMCSLMQGSTLPRRSGAA
DPRMCSLMYGSVLARRSGAA

SEQ ID NO: 68931 - protein, 20 aa, Artificial Sequence
  Description of Artificial Sequence: Synthetic peptide
  Seed: DPRMCSLMQGSTLPRRSGAA
DPRMCSLMYGSVLARRVGAA

SEQ ID NO: 68932 - protein, 20 aa, Artificial Sequence
  Description of Artificial Sequence: Synthetic peptide
  Seed: DPRMCSLMQGSTLPRRSGAA
DPRMCSLMYGSVLPRRAGAA

SEQ ID NO: 68933 - protein, 20 aa, Artificial Sequence
  Description of Artificial Sequence: Synthetic peptide
  Seed: DPRMCSLMQGSTLPRRSGAA
DPRMCSLMYGSVLSRRAGAA

SEQ ID NO: 68934 - protein, 20 aa, Artificial Sequence
  Description of Artificial Sequence: Synthetic peptide
  Seed: DPRMCSLMQGSTLPRRSGAA
DPRMCSLMYGSVLTRRAGAA

SEQ ID NO: 68935 - protein, 21 aa, Artificial Sequence
  Description of Artificial Sequence: Synthetic peptide
  Seed: DPRMCSLMQGSTLPRRSGAAG
DPRMFSLAQASTAPRRSGAAG

SEQ ID NO: 68936 - protein, 21 aa, Artificial Sequence
  Description of Artificial Sequence: Synthetic peptide
  Seed: DPRMCSLMQGSTLPRRSGAAG
DPRMFSLAQASTGPRRSGAAG

SEQ ID NO: 68937 - protein, 21 aa, Artificial Sequence
  Description of Artificial Sequence: Synthetic peptide
  Seed: DPRMCSLMQGSTLPRRSGAAG
DPRMFSLAQASTIPRRSGAAG

SEQ ID NO: 68938 - protein, 21 aa, Artificial Sequence
  Description of Artificial Sequence: Synthetic peptide
  Seed: DPRMCSLMQGSTLPRRSGAAG
DPRMFSLAQASTLPRRSGAAG

SEQ ID NO: 68939 - protein, 21 aa, Artificial Sequence
  Description of Artificial Sequence: Synthetic peptide
  Seed: DPRMCSLMQGSTLPRRSGAAG
DPRMFSLAQASTMPRRSGAAG

SEQ ID NO: 68940 - protein, 21 aa, Artificial Sequence
  Description of Artificial Sequence: Synthetic peptide
  Seed: DPRMCSLMQGSTLPRRSGAAG
DPRMFSLAQASTSPRRSGAAG

SEQ ID NO: 68941 - protein, 21 aa, Artificial Sequence
  Description of Artificial Sequence: Synthetic peptide
  Seed: DPRMCSLMQGSTLPRRSGAAG
DPRMFSLAQASTTPRRSGAAG

SEQ ID NO: 68942 - protein, 21 aa, Artificial Sequence
  Description of Artificial Sequence: Synthetic peptide
  Seed: DPRMCSLMQGSTLPRRSGAAG
DPRMFSLAQASTVPRRSGAAG

SEQ ID NO: 68943 - protein, 21 aa, Artificial Sequence
  Description of Artificial Sequence: Synthetic peptide
  Seed: DPRMCSLMQGSTLPRRSGAAG
DPRMFSLAQGSTAPRRSGAAG

SEQ ID NO: 68944 - protein, 21 aa, Artificial Sequence
  Description of Artificial Sequence: Synthetic peptide
  Seed: DPRMCSLMQGSTLPRRSGAAG
DPRMFSLAQGSTIPRRSGAAG

SEQ ID NO: 68945 - protein, 21 aa, Artificial Sequence
  Description of Artificial Sequence: Synthetic peptide
  Seed: DPRMCSLMQGSTLPRRSGAAG
DPRMFSLAQGSTLPRRSGAAG

SEQ ID NO: 68946 - protein, 21 aa, Artificial Sequence
  Description of Artificial Sequence: Synthetic peptide
  Seed: DPRMCSLMQGSTLPRRSGAAG
DPRMFSLAQGSTMPRRSGAAG

SEQ ID NO: 68947 - protein, 21 aa, Artificial Sequence
  Description of Artificial Sequence: Synthetic peptide
  Seed: DPRMCSLMQGSTLPRRSGAAG
DPRMFSLAQGSTTPRRSGAAG

SEQ ID NO: 68948 - protein, 21 aa, Artificial Sequence
  Description of Artificial Sequence: Synthetic peptide
  Seed: DPRMCSLMQGSTLPRRSGAAG
DPRMFSLAQGSTVPRRSGAAG

SEQ ID NO: 68949 - protein, 21 aa, Artificial Sequence
  Description of Artificial Sequence: Synthetic peptide
  Seed: DPRMCSLMQGSTLPRRSGAAG
DPRMFSLAQNSTIPRRSGAAG

SEQ ID NO: 68950 - protein, 21 aa, Artificial Sequence
  Description of Artificial Sequence: Synthetic peptide
  Seed: DPRMCSLMQGSTLPRRSGAAG
DPRMFSLAQNSTLPRRSGAAG

SEQ ID NO: 68951 - protein, 21 aa, Artificial Sequence
  Description of Artificial Sequence: Synthetic peptide
  Seed: DPRMCSLMQGSTLPRRSGAAG
DPRMFSLAQNSTVPRRSGAAG

SEQ ID NO: 68952 - protein, 21 aa, Artificial Sequence
  Description of Artificial Sequence: Synthetic peptide
  Seed: DPRMCSLMQGSTLPRRSGAAG
DPRMFSLAQPSTAPRRSGAAG

SEQ ID NO: 68953 - protein, 21 aa, Artificial Sequence
  Description of Artificial Sequence: Synthetic peptide
  Seed: DPRMCSLMQGSTLPRRSGAAG
DPRMFSLAQPSTIPRRSGAAG

SEQ ID NO: 68954 - protein, 21 aa, Artificial Sequence
  Description of Artificial Sequence: Synthetic peptide
  Seed: DPRMCSLMQGSTLPRRSGAAG
DPRMFSLAQPSTLPRRSGAAG

SEQ ID NO: 68955 - protein, 21 aa, Artificial Sequence
  Description of Artificial Sequence: Synthetic peptide
  Seed: DPRMCSLMQGSTLPRRSGAAG
DPRMFSLAQPSTMPRRSGAAG

SEQ ID NO: 68956 - protein, 21 aa, Artificial Sequence
  Description of Artificial Sequence: Synthetic peptide
  Seed: DPRMCSLMQGSTLPRRSGAAG
DPRMFSLAQPSTVPRRSGAAG

SEQ ID NO: 68957 - protein, 21 aa, Artificial Sequence
  Description of Artificial Sequence: Synthetic peptide
  Seed: DPRMCSLMQGSTLPRRSGAAG
DPRMFSLAQSSTAPRRSGAAG

SEQ ID NO: 68958 - protein, 21 aa, Artificial Sequence
  Description of Artificial Sequence: Synthetic peptide
  Seed: DPRMCSLMQGSTLPRRSGAAG
DPRMFSLAQSSTIPRRSGAAG

SEQ ID NO: 68959 - protein, 21 aa, Artificial Sequence
  Description of Artificial Sequence: Synthetic peptide
  Seed: DPRMCSLMQGSTLPRRSGAAG
DPRMFSLAQSSTLPRRSGAAG

SEQ ID NO: 68960 - protein, 21 aa, Artificial Sequence
  Description of Artificial Sequence: Synthetic peptide
  Seed: DPRMCSLMQGSTLPRRSGAAG
DPRMFSLAQSSTMPRRSGAAG

SEQ ID NO: 68961 - protein, 21 aa, Artificial Sequence
  Description of Artificial Sequence: Synthetic peptide
  Seed: DPRMCSLMQGSTLPRRSGAAG
DPRMFSLAQSSTTPRRSGAAG

SEQ ID NO: 68962 - protein, 21 aa, Artificial Sequence
  Description of Artificial Sequence: Synthetic peptide
  Seed: DPRMCSLMQGSTLPRRSGAAG
DPRMFSLAQSSTVPRRSGAAG

SEQ ID NO: 68963 - protein, 21 aa, Artificial Sequence
  Description of Artificial Sequence: Synthetic peptide
  Seed: DPRMCSLMQGSTLPRRSGAAG
DPRMFSLAQTSTIPRRSGAAG

SEQ ID NO: 68964 - protein, 21 aa, Artificial Sequence
  Description of Artificial Sequence: Synthetic peptide
  Seed: DPRMCSLMQGSTLPRRSGAAG
DPRMFSLAQTSTLPRRSGAAG

SEQ ID NO: 68965 - protein, 21 aa, Artificial Sequence
  Description of Artificial Sequence: Synthetic peptide
  Seed: DPRMCSLMQGSTLPRRSGAAG
DPRMFSLAQTSTVPRRSGAAG

SEQ ID NO: 68966 - protein, 21 aa, Artificial Sequence
  Description of Artificial Sequence: Synthetic peptide
  Seed: DPRMCSLMQGSTLPRRSGAAG
DPRMFSLAQVSTVPRRSGAAG

SEQ ID NO: 68967 - protein, 21 aa, Artificial Sequence
  Description of Artificial Sequence: Synthetic peptide
  Seed: DPRMCSLMQGSTLPRRSGAAG
DPRMFSLEQASTAPRRSGAAG

SEQ ID NO: 68968 - protein, 21 aa, Artificial Sequence
  Description of Artificial Sequence: Synthetic peptide
  Seed: DPRMCSLMQGSTLPRRSGAAG
DPRMFSLEQASTIPRRSGAAG

SEQ ID NO: 68969 - protein, 21 aa, Artificial Sequence
  Description of Artificial Sequence: Synthetic peptide
  Seed: DPRMCSLMQGSTLPRRSGAAG
DPRMFSLEQASTLPRRSGAAG

SEQ ID NO: 68970 - protein, 21 aa, Artificial Sequence
  Description of Artificial Sequence: Synthetic peptide
  Seed: DPRMCSLMQGSTLPRRSGAAG
DPRMFSLEQASTVPRRSGAAG

SEQ ID NO: 68971 - protein, 21 aa, Artificial Sequence
  Description of Artificial Sequence: Synthetic peptide
  Seed: DPRMCSLMQGSTLPRRSGAAG
DPRMFSLEQGSTLPRRSGAAG

SEQ ID NO: 68972 - protein, 21 aa, Artificial Sequence
  Description of Artificial Sequence: Synthetic peptide
  Seed: DPRMCSLMQGSTLPRRSGAAG
DPRMFSLEQGSTVPRRSGAAG

SEQ ID NO: 68973 - protein, 21 aa, Artificial Sequence
  Description of Artificial Sequence: Synthetic peptide
  Seed: DPRMCSLMQGSTLPRRSGAAG
DPRMFSLFQASTAPRRSGAAG

SEQ ID NO: 68974 - protein, 21 aa, Artificial Sequence
  Description of Artificial Sequence: Synthetic peptide
  Seed: DPRMCSLMQGSTLPRRSGAAG
DPRMFSLFQASTIPRRSGAAG

SEQ ID NO: 68975 - protein, 21 aa, Artificial Sequence
  Description of Artificial Sequence: Synthetic peptide
  Seed: DPRMCSLMQGSTLPRRSGAAG
DPRMFSLFQASTLPRRSGAAG

SEQ ID NO: 68976 - protein, 21 aa, Artificial Sequence
  Description of Artificial Sequence: Synthetic peptide
  Seed: DPRMCSLMQGSTLPRRSGAAG
DPRMFSLFQASTVPRRSGAAG

SEQ ID NO: 68977 - protein, 21 aa, Artificial Sequence
  Description of Artificial Sequence: Synthetic peptide
  Seed: DPRMCSLMQGSTLPRRSGAAG
DPRMFSLFQGSTVPRRSGAAG

SEQ ID NO: 68978 - protein, 21 aa, Artificial Sequence
  Description of Artificial Sequence: Synthetic peptide
  Seed: DPRMCSLMQGSTLPRRSGAAG
DPRMFSLGQASTIPRRSGAAG

SEQ ID NO: 68979 - protein, 21 aa, Artificial Sequence
  Description of Artificial Sequence: Synthetic peptide
  Seed: DPRMCSLMQGSTLPRRSGAAG
DPRMFSLGQASTLPRRSGAAG

SEQ ID NO: 68980 - protein, 21 aa, Artificial Sequence
  Description of Artificial Sequence: Synthetic peptide
  Seed: DPRMCSLMQGSTLPRRSGAAG
DPRMFSLGQASTVPRRSGAAG

SEQ ID NO: 68981 - protein, 21 aa, Artificial Sequence
  Description of Artificial Sequence: Synthetic peptide
  Seed: DPRMCSLMQGSTLPRRSGAAG
DPRMFSLIQASTAPRRSGAAG

SEQ ID NO: 68982 - protein, 21 aa, Artificial Sequence
  Description of Artificial Sequence: Synthetic peptide
  Seed: DPRMCSLMQGSTLPRRSGAAG
DPRMFSLIQASTCPRRSGAAG

SEQ ID NO: 68983 - protein, 21 aa, Artificial Sequence
  Description of Artificial Sequence: Synthetic peptide
  Seed: DPRMCSLMQGSTLPRRSGAAG
DPRMFSLIQASTGPRRSGAAG

SEQ ID NO: 68984 - protein, 21 aa, Artificial Sequence
  Description of Artificial Sequence: Synthetic peptide
  Seed: DPRMCSLMQGSTLPRRSGAAG
DPRMFSLIQASTIPRRSGAAG

SEQ ID NO: 68985 - protein, 21 aa, Artificial Sequence
  Description of Artificial Sequence: Synthetic peptide
  Seed: DPRMCSLMQGSTLPRRSGAAG
DPRMFSLIQASTLPRRSGAAG

SEQ ID NO: 68986 - protein, 21 aa, Artificial Sequence
  Description of Artificial Sequence: Synthetic peptide
  Seed: DPRMCSLMQGSTLPRRSGAAG
DPRMFSLIQASTMPRRSGAAG

SEQ ID NO: 68987 - protein, 21 aa, Artificial Sequence
  Description of Artificial Sequence: Synthetic peptide
  Seed: DPRMCSLMQGSTLPRRSGAAG
DPRMFSLIQASTNPRRSGAAG

SEQ ID NO: 68988 - protein, 21 aa, Artificial Sequence
  Description of Artificial Sequence: Synthetic peptide
  Seed: DPRMCSLMQGSTLPRRSGAAG
DPRMFSLIQASTSPRRSGAAG

SEQ ID NO: 68989 - protein, 21 aa, Artificial Sequence
  Description of Artificial Sequence: Synthetic peptide
  Seed: DPRMCSLMQGSTLPRRSGAAG
DPRMFSLIQASTTPRRSGAAG

SEQ ID NO: 68990 - protein, 21 aa, Artificial Sequence
  Description of Artificial Sequence: Synthetic peptide
  Seed: DPRMCSLMQGSTLPRRSGAAG
DPRMFSLIQASTVPRRSGAAG

SEQ ID NO: 68991 - protein, 21 aa, Artificial Sequence
  Description of Artificial Sequence: Synthetic peptide
  Seed: DPRMCSLMQGSTLPRRSGAAG
DPRMFSLIQGSTAPRRSGAAG

SEQ ID NO: 68992 - protein, 21 aa, Artificial Sequence
  Description of Artificial Sequence: Synthetic peptide
  Seed: DPRMCSLMQGSTLPRRSGAAG
DPRMFSLIQGSTGPRRSGAAG

SEQ ID NO: 68993 - protein, 21 aa, Artificial Sequence
  Description of Artificial Sequence: Synthetic peptide
  Seed: DPRMCSLMQGSTLPRRSGAAG
DPRMFSLIQGSTIPRRSGAAG

SEQ ID NO: 68994 - protein, 21 aa, Artificial Sequence
  Description of Artificial Sequence: Synthetic peptide
  Seed: DPRMCSLMQGSTLPRRSGAAG
DPRMFSLIQGSTLPRRSGAAG

SEQ ID NO: 68995 - protein, 21 aa, Artificial Sequence
  Description of Artificial Sequence: Synthetic peptide
  Seed: DPRMCSLMQGSTLPRRSGAAG
DPRMFSLIQGSTMPRRSGAAG

SEQ ID NO: 68996 - protein, 21 aa, Artificial Sequence
  Description of Artificial Sequence: Synthetic peptide
  Seed: DPRMCSLMQGSTLPRRSGAAG
DPRMFSLIQGSTSPRRSGAAG

SEQ ID NO: 68997 - protein, 21 aa, Artificial Sequence
  Description of Artificial Sequence: Synthetic peptide
  Seed: DPRMCSLMQGSTLPRRSGAAG
DPRMFSLIQGSTTPRRSGAAG

SEQ ID NO: 68998 - protein, 21 aa, Artificial Sequence
  Description of Artificial Sequence: Synthetic peptide
  Seed: DPRMCSLMQGSTLPRRSGAAG
DPRMFSLIQGSTVPRRSGAAG

SEQ ID NO: 68999 - protein, 21 aa, Artificial Sequence
  Description of Artificial Sequence: Synthetic peptide
  Seed: DPRMCSLMQGSTLPRRSGAAG
DPRMFSLIQNSTAPRRSGAAG

SEQ ID NO: 69000 - protein, 21 aa, Artificial Sequence
  Description of Artificial Sequence: Synthetic peptide
  Seed: DPRMCSLMQGSTLPRRSGAAG
DPRMFSLIQNSTIPRRSGAAG

SEQ ID NO: 69001 - protein, 21 aa, Artificial Sequence
  Description of Artificial Sequence: Synthetic peptide
  Seed: DPRMCSLMQGSTLPRRSGAAG
DPRMFSLIQNSTLPRRSGAAG

SEQ ID NO: 69002 - protein, 21 aa, Artificial Sequence
  Description of Artificial Sequence: Synthetic peptide
  Seed: DPRMCSLMQGSTLPRRSGAAG
DPRMFSLIQNSTVPRRSGAAG

SEQ ID NO: 69003 - protein, 21 aa, Artificial Sequence
  Description of Artificial Sequence: Synthetic peptide
  Seed: DPRMCSLMQGSTLPRRSGAAG
DPRMFSLIQPSTAPRRSGAAG

SEQ ID NO: 69004 - protein, 21 aa, Artificial Sequence
  Description of Artificial Sequence: Synthetic peptide
  Seed: DPRMCSLMQGSTLPRRSGAAG
DPRMFSLIQPSTIPRRSGAAG

SEQ ID NO: 69005 - protein, 21 aa, Artificial Sequence
  Description of Artificial Sequence: Synthetic peptide
  Seed: DPRMCSLMQGSTLPRRSGAAG
DPRMFSLIQPSTLPRRSGAAG

SEQ ID NO: 69006 - protein, 21 aa, Artificial Sequence
  Description of Artificial Sequence: Synthetic peptide
  Seed: DPRMCSLMQGSTLPRRSGAAG
DPRMFSLIQPSTMPRRSGAAG

SEQ ID NO: 69007 - protein, 21 aa, Artificial Sequence
  Description of Artificial Sequence: Synthetic peptide
  Seed: DPRMCSLMQGSTLPRRSGAAG
DPRMFSLIQPSTSPRRSGAAG

SEQ ID NO: 69008 - protein, 21 aa, Artificial Sequence
  Description of Artificial Sequence: Synthetic peptide
  Seed: DPRMCSLMQGSTLPRRSGAAG
DPRMFSLIQPSTTPRRSGAAG

SEQ ID NO: 69009 - protein, 21 aa, Artificial Sequence
  Description of Artificial Sequence: Synthetic peptide
  Seed: DPRMCSLMQGSTLPRRSGAAG
DPRMFSLIQPSTVPRRSGAAG

SEQ ID NO: 69010 - protein, 21 aa, Artificial Sequence
  Description of Artificial Sequence: Synthetic peptide
  Seed: DPRMCSLMQGSTLPRRSGAAG
DPRMFSLIQSSTAPRRSGAAG

SEQ ID NO: 69011 - protein, 21 aa, Artificial Sequence
  Description of Artificial Sequence: Synthetic peptide
  Seed: DPRMCSLMQGSTLPRRSGAAG
DPRMFSLIQSSTIPRRSGAAG

SEQ ID NO: 69012 - protein, 21 aa, Artificial Sequence
  Description of Artificial Sequence: Synthetic peptide
  Seed: DPRMCSLMQGSTLPRRSGAAG
DPRMFSLIQSSTLPRRSGAAG

SEQ ID NO: 69013 - protein, 21 aa, Artificial Sequence
  Description of Artificial Sequence: Synthetic peptide
  Seed: DPRMCSLMQGSTLPRRSGAAG
DPRMFSLIQSSTMPRRSGAAG

SEQ ID NO: 69014 - protein, 21 aa, Artificial Sequence
  Description of Artificial Sequence: Synthetic peptide
  Seed: DPRMCSLMQGSTLPRRSGAAG
DPRMFSLIQSSTSPRRSGAAG

SEQ ID NO: 69015 - protein, 21 aa, Artificial Sequence
  Description of Artificial Sequence: Synthetic peptide
  Seed: DPRMCSLMQGSTLPRRSGAAG
DPRMFSLIQSSTTPRRSGAAG

SEQ ID NO: 69016 - protein, 21 aa, Artificial Sequence
  Description of Artificial Sequence: Synthetic peptide
  Seed: DPRMCSLMQGSTLPRRSGAAG
DPRMFSLIQSSTVPRRSGAAG

SEQ ID NO: 69017 - protein, 21 aa, Artificial Sequence
  Description of Artificial Sequence: Synthetic peptide
  Seed: DPRMCSLMQGSTLPRRSGAAG
DPRMFSLIQTSTAPRRSGAAG

SEQ ID NO: 69018 - protein, 21 aa, Artificial Sequence
  Description of Artificial Sequence: Synthetic peptide
  Seed: DPRMCSLMQGSTLPRRSGAAG
DPRMFSLIQTSTIPRRSGAAG

SEQ ID NO: 69019 - protein, 21 aa, Artificial Sequence
  Description of Artificial Sequence: Synthetic peptide
  Seed: DPRMCSLMQGSTLPRRSGAAG
DPRMFSLIQTSTLPRRSGAAG

SEQ ID NO: 69020 - protein, 21 aa, Artificial Sequence
  Description of Artificial Sequence: Synthetic peptide
  Seed: DPRMCSLMQGSTLPRRSGAAG
DPRMFSLIQTSTVPRRSGAAG

SEQ ID NO: 69021 - protein, 21 aa, Artificial Sequence
  Description of Artificial Sequence: Synthetic peptide
  Seed: DPRMCSLMQGSTLPRRSGAAG
DPRMFSLIQVSTAPRRSGAAG

SEQ ID NO: 69022 - protein, 21 aa, Artificial Sequence
  Description of Artificial Sequence: Synthetic peptide
  Seed: DPRMCSLMQGSTLPRRSGAAG
DPRMFSLIQVSTVPRRSGAAG

SEQ ID NO: 69023 - protein, 21 aa, Artificial Sequence
  Description of Artificial Sequence: Synthetic peptide
  Seed: DPRMCSLMQGSTLPRRSGAAG
DPRMFSLLQASTAPRRSGAAG

SEQ ID NO: 69024 - protein, 21 aa, Artificial Sequence
  Description of Artificial Sequence: Synthetic peptide
  Seed: DPRMCSLMQGSTLPRRSGAAG
DPRMFSLLQASTCPRRSGAAG

SEQ ID NO: 69025 - protein, 21 aa, Artificial Sequence
  Description of Artificial Sequence: Synthetic peptide
  Seed: DPRMCSLMQGSTLPRRSGAAG
DPRMFSLLQASTFPRRSGAAG

SEQ ID NO: 69026 - protein, 21 aa, Artificial Sequence
  Description of Artificial Sequence: Synthetic peptide
  Seed: DPRMCSLMQGSTLPRRSGAAG
DPRMFSLLQASTGPRRSGAAG

SEQ ID NO: 69027 - protein, 21 aa, Artificial Sequence
  Description of Artificial Sequence: Synthetic peptide
  Seed: DPRMCSLMQGSTLPRRSGAAG
DPRMFSLLQASTHPRRSGAAG

SEQ ID NO: 69028 - protein, 21 aa, Artificial Sequence
  Description of Artificial Sequence: Synthetic peptide
  Seed: DPRMCSLMQGSTLPRRSGAAG
DPRMFSLLQASTIPRRSGAAG

SEQ ID NO: 69029 - protein, 21 aa, Artificial Sequence
  Description of Artificial Sequence: Synthetic peptide
  Seed: DPRMCSLMQGSTLPRRSGAAG
DPRMFSLLQASTLPRRSGAAG

SEQ ID NO: 69030 - protein, 21 aa, Artificial Sequence
  Description of Artificial Sequence: Synthetic peptide
  Seed: DPRMCSLMQGSTLPRRSGAAG
DPRMFSLLQASTMPRRSGAAG

SEQ ID NO: 69031 - protein, 21 aa, Artificial Sequence
  Description of Artificial Sequence: Synthetic peptide
  Seed: DPRMCSLMQGSTLPRRSGAAG
DPRMFSLLQASTNPRRSGAAG

SEQ ID NO: 69032 - protein, 21 aa, Artificial Sequence
  Description of Artificial Sequence: Synthetic peptide
  Seed: DPRMCSLMQGSTLPRRSGAAG
DPRMFSLLQASTPPRRSGAAG

SEQ ID NO: 69033 - protein, 21 aa, Artificial Sequence
  Description of Artificial Sequence: Synthetic peptide
  Seed: DPRMCSLMQGSTLPRRSGAAG
DPRMFSLLQASTSPRRSGAAG

SEQ ID NO: 69034 - protein, 21 aa, Artificial Sequence
  Description of Artificial Sequence: Synthetic peptide
  Seed: DPRMCSLMQGSTLPRRSGAAG
DPRMFSLLQASTTPRRSGAAG

SEQ ID NO: 69035 - protein, 21 aa, Artificial Sequence
  Description of Artificial Sequence: Synthetic peptide
  Seed: DPRMCSLMQGSTLPRRSGAAG
DPRMFSLLQASTVPRRSGAAG

SEQ ID NO: 69036 - protein, 21 aa, Artificial Sequence
  Description of Artificial Sequence: Synthetic peptide
  Seed: DPRMCSLMQGSTLPRRSGAAG
DPRMFSLLQASTYPRRSGAAG

SEQ ID NO: 69037 - protein, 21 aa, Artificial Sequence
  Description of Artificial Sequence: Synthetic peptide
  Seed: DPRMCSLMQGSTLPRRSGAAG
DPRMFSLLQGSTAPRRSGAAG

SEQ ID NO: 69038 - protein, 21 aa, Artificial Sequence
  Description of Artificial Sequence: Synthetic peptide
  Seed: DPRMCSLMQGSTLPRRSGAAG
DPRMFSLLQGSTCPRRSGAAG

SEQ ID NO: 69039 - protein, 21 aa, Artificial Sequence
  Description of Artificial Sequence: Synthetic peptide
  Seed: DPRMCSLMQGSTLPRRSGAAG
DPRMFSLLQGSTFPRRSGAAG

SEQ ID NO: 69040 - protein, 21 aa, Artificial Sequence
  Description of Artificial Sequence: Synthetic peptide
  Seed: DPRMCSLMQGSTLPRRSGAAG
DPRMFSLLQGSTGPRRSGAAG

SEQ ID NO: 69041 - protein, 21 aa, Artificial Sequence
  Description of Artificial Sequence: Synthetic peptide
  Seed: DPRMCSLMQGSTLPRRSGAAG
DPRMFSLLQGSTIPRRSGAAG

SEQ ID NO: 69042 - protein, 21 aa, Artificial Sequence
  Description of Artificial Sequence: Synthetic peptide
  Seed: DPRMCSLMQGSTLPRRSGAAG
DPRMFSLLQGSTLPRRSGAAG

SEQ ID NO: 69043 - protein, 21 aa, Artificial Sequence
  Description of Artificial Sequence: Synthetic peptide
  Seed: DPRMCSLMQGSTLPRRSGAAG
DPRMFSLLQGSTMPRRSGAAG

SEQ ID NO: 69044 - protein, 21 aa, Artificial Sequence
  Description of Artificial Sequence: Synthetic peptide
  Seed: DPRMCSLMQGSTLPRRSGAAG
DPRMFSLLQGSTNPRRSGAAG

SEQ ID NO: 69045 - protein, 21 aa, Artificial Sequence
  Description of Artificial Sequence: Synthetic peptide
  Seed: DPRMCSLMQGSTLPRRSGAAG
DPRMFSLLQGSTSPRRSGAAG

SEQ ID NO: 69046 - protein, 21 aa, Artificial Sequence
  Description of Artificial Sequence: Synthetic peptide
  Seed: DPRMCSLMQGSTLPRRSGAAG
DPRMFSLLQGSTTPRRSGAAG

SEQ ID NO: 69047 - protein, 21 aa, Artificial Sequence
  Description of Artificial Sequence: Synthetic peptide
  Seed: DPRMCSLMQGSTLPRRSGAAG
DPRMFSLLQGSTVPRRSGAAG

SEQ ID NO: 69048 - protein, 21 aa, Artificial Sequence
  Description of Artificial Sequence: Synthetic peptide
  Seed: DPRMCSLMQGSTLPRRSGAAG
DPRMFSLLQISTAPRRSGAAG

SEQ ID NO: 69049 - protein, 21 aa, Artificial Sequence
  Description of Artificial Sequence: Synthetic peptide
  Seed: DPRMCSLMQGSTLPRRSGAAG
DPRMFSLLQISTVPRRSGAAG

SEQ ID NO: 69050 - protein, 21 aa, Artificial Sequence
  Description of Artificial Sequence: Synthetic peptide
  Seed: DPRMCSLMQGSTLPRRSGAAG
DPRMFSLLQNSTAPRRSGAAG

SEQ ID NO: 69051 - protein, 21 aa, Artificial Sequence
  Description of Artificial Sequence: Synthetic peptide
  Seed: DPRMCSLMQGSTLPRRSGAAG
DPRMFSLLQNSTGPRRSGAAG

SEQ ID NO: 69052 - protein, 21 aa, Artificial Sequence
  Description of Artificial Sequence: Synthetic peptide
  Seed: DPRMCSLMQGSTLPRRSGAAG
DPRMFSLLQNSTIPRRSGAAG

SEQ ID NO: 69053 - protein, 21 aa, Artificial Sequence
  Description of Artificial Sequence: Synthetic peptide
  Seed: DPRMCSLMQGSTLPRRSGAAG
DPRMFSLLQNSTLPRRSGAAG

SEQ ID NO: 69054 - protein, 21 aa, Artificial Sequence
  Description of Artificial Sequence: Synthetic peptide
  Seed: DPRMCSLMQGSTLPRRSGAAG
DPRMFSLLQNSTMPRRSGAAG

SEQ ID NO: 69055 - protein, 21 aa, Artificial Sequence
  Description of Artificial Sequence: Synthetic peptide
  Seed: DPRMCSLMQGSTLPRRSGAAG
DPRMFSLLQNSTSPRRSGAAG

SEQ ID NO: 69056 - protein, 21 aa, Artificial Sequence
  Description of Artificial Sequence: Synthetic peptide
  Seed: DPRMCSLMQGSTLPRRSGAAG
DPRMFSLLQNSTTPRRSGAAG

SEQ ID NO: 69057 - protein, 21 aa, Artificial Sequence
  Description of Artificial Sequence: Synthetic peptide
  Seed: DPRMCSLMQGSTLPRRSGAAG
DPRMFSLLQNSTVPRRSGAAG

SEQ ID NO: 69058 - protein, 21 aa, Artificial Sequence
  Description of Artificial Sequence: Synthetic peptide
  Seed: DPRMCSLMQGSTLPRRSGAAG
DPRMFSLLQPSTAPRRSGAAG

SEQ ID NO: 69059 - protein, 21 aa, Artificial Sequence
  Description of Artificial Sequence: Synthetic peptide
  Seed: DPRMCSLMQGSTLPRRSGAAG
DPRMFSLLQPSTCPRRSGAAG

SEQ ID NO: 69060 - protein, 21 aa, Artificial Sequence
  Description of Artificial Sequence: Synthetic peptide
  Seed: DPRMCSLMQGSTLPRRSGAAG
DPRMFSLLQPSTFPRRSGAAG

SEQ ID NO: 69061 - protein, 21 aa, Artificial Sequence
  Description of Artificial Sequence: Synthetic peptide
  Seed: DPRMCSLMQGSTLPRRSGAAG
DPRMFSLLQPSTGPRRSGAAG

SEQ ID NO: 69062 - protein, 21 aa, Artificial Sequence
  Description of Artificial Sequence: Synthetic peptide
  Seed: DPRMCSLMQGSTLPRRSGAAG
DPRMFSLLQPSTIPRRSGAAG

SEQ ID NO: 69063 - protein, 21 aa, Artificial Sequence
  Description of Artificial Sequence: Synthetic peptide
  Seed: DPRMCSLMQGSTLPRRSGAAG
DPRMFSLLQPSTLPRRSGAAG

SEQ ID NO: 69064 - protein, 21 aa, Artificial Sequence
  Description of Artificial Sequence: Synthetic peptide
  Seed: DPRMCSLMQGSTLPRRSGAAG
DPRMFSLLQPSTMPRRSGAAG

SEQ ID NO: 69065 - protein, 21 aa, Artificial Sequence
  Description of Artificial Sequence: Synthetic peptide
  Seed: DPRMCSLMQGSTLPRRSGAAG
DPRMFSLLQPSTSPRRSGAAG

SEQ ID NO: 69066 - protein, 21 aa, Artificial Sequence
  Description of Artificial Sequence: Synthetic peptide
  Seed: DPRMCSLMQGSTLPRRSGAAG
DPRMFSLLQPSTTPRRSGAAG

SEQ ID NO: 69067 - protein, 21 aa, Artificial Sequence
  Description of Artificial Sequence: Synthetic peptide
  Seed: DPRMCSLMQGSTLPRRSGAAG
DPRMFSLLQPSTVPRRSGAAG

SEQ ID NO: 69068 - protein, 21 aa, Artificial Sequence
  Description of Artificial Sequence: Synthetic peptide
  Seed: DPRMCSLMQGSTLPRRSGAAG
DPRMFSLLQSSTAPRRSGAAG

SEQ ID NO: 69069 - protein, 21 aa, Artificial Sequence
  Description of Artificial Sequence: Synthetic peptide
  Seed: DPRMCSLMQGSTLPRRSGAAG
DPRMFSLLQSSTCPRRSGAAG

SEQ ID NO: 69070 - protein, 21 aa, Artificial Sequence
  Description of Artificial Sequence: Synthetic peptide
  Seed: DPRMCSLMQGSTLPRRSGAAG
DPRMFSLLQSSTGPRRSGAAG

SEQ ID NO: 69071 - protein, 21 aa, Artificial Sequence
  Description of Artificial Sequence: Synthetic peptide
  Seed: DPRMCSLMQGSTLPRRSGAAG
DPRMFSLLQSSTIPRRSGAAG

SEQ ID NO: 69072 - protein, 21 aa, Artificial Sequence
  Description of Artificial Sequence: Synthetic peptide
  Seed: DPRMCSLMQGSTLPRRSGAAG
DPRMFSLLQSSTLPRRSGAAG

SEQ ID NO: 69073 - protein, 21 aa, Artificial Sequence
  Description of Artificial Sequence: Synthetic peptide
  Seed: DPRMCSLMQGSTLPRRSGAAG
DPRMFSLLQSSTMPRRSGAAG

SEQ ID NO: 69074 - protein, 21 aa, Artificial Sequence
  Description of Artificial Sequence: Synthetic peptide
  Seed: DPRMCSLMQGSTLPRRSGAAG
DPRMFSLLQSSTNPRRSGAAG

SEQ ID NO: 69075 - protein, 21 aa, Artificial Sequence
  Description of Artificial Sequence: Synthetic peptide
  Seed: DPRMCSLMQGSTLPRRSGAAG
DPRMFSLLQSSTSPRRSGAAG

SEQ ID NO: 69076 - protein, 21 aa, Artificial Sequence
  Description of Artificial Sequence: Synthetic peptide
  Seed: DPRMCSLMQGSTLPRRSGAAG
DPRMFSLLQSSTTPRRSGAAG

SEQ ID NO: 69077 - protein, 21 aa, Artificial Sequence
  Description of Artificial Sequence: Synthetic peptide
  Seed: DPRMCSLMQGSTLPRRSGAAG
DPRMFSLLQSSTVPRRSGAAG

SEQ ID NO: 69078 - protein, 21 aa, Artificial Sequence
  Description of Artificial Sequence: Synthetic peptide
  Seed: DPRMCSLMQGSTLPRRSGAAG
DPRMFSLLQTSTAPRRSGAAG

SEQ ID NO: 69079 - protein, 21 aa, Artificial Sequence
  Description of Artificial Sequence: Synthetic peptide
  Seed: DPRMCSLMQGSTLPRRSGAAG
DPRMFSLLQTSTGPRRSGAAG

SEQ ID NO: 69080 - protein, 21 aa, Artificial Sequence
  Description of Artificial Sequence: Synthetic peptide
  Seed: DPRMCSLMQGSTLPRRSGAAG
DPRMFSLLQTSTIPRRSGAAG

SEQ ID NO: 69081 - protein, 21 aa, Artificial Sequence
  Description of Artificial Sequence: Synthetic peptide
  Seed: DPRMCSLMQGSTLPRRSGAAG
DPRMFSLLQTSTLPRRSGAAG

SEQ ID NO: 69082 - protein, 21 aa, Artificial Sequence
  Description of Artificial Sequence: Synthetic peptide
  Seed: DPRMCSLMQGSTLPRRSGAAG
DPRMFSLLQTSTMPRRSGAAG

SEQ ID NO: 69083 - protein, 21 aa, Artificial Sequence
  Description of Artificial Sequence: Synthetic peptide
  Seed: DPRMCSLMQGSTLPRRSGAAG
DPRMFSLLQTSTSPRRSGAAG

SEQ ID NO: 69084 - protein, 21 aa, Artificial Sequence
  Description of Artificial Sequence: Synthetic peptide
  Seed: DPRMCSLMQGSTLPRRSGAAG
DPRMFSLLQTSTTPRRSGAAG

SEQ ID NO: 69085 - protein, 21 aa, Artificial Sequence
  Description of Artificial Sequence: Synthetic peptide
  Seed: DPRMCSLMQGSTLPRRSGAAG
DPRMFSLLQTSTVPRRSGAAG

SEQ ID NO: 69086 - protein, 21 aa, Artificial Sequence
  Description of Artificial Sequence: Synthetic peptide
  Seed: DPRMCSLMQGSTLPRRSGAAG
DPRMFSLLQVSTAPRRSGAAG

SEQ ID NO: 69087 - protein, 21 aa, Artificial Sequence
  Description of Artificial Sequence: Synthetic peptide
  Seed: DPRMCSLMQGSTLPRRSGAAG
DPRMFSLLQVSTIPRRSGAAG

SEQ ID NO: 69088 - protein, 21 aa, Artificial Sequence
  Description of Artificial Sequence: Synthetic peptide
  Seed: DPRMCSLMQGSTLPRRSGAAG
DPRMFSLLQVSTLPRRSGAAG

SEQ ID NO: 69089 - protein, 21 aa, Artificial Sequence
  Description of Artificial Sequence: Synthetic peptide
  Seed: DPRMCSLMQGSTLPRRSGAAG
DPRMFSLLQVSTMPRRSGAAG

SEQ ID NO: 69090 - protein, 21 aa, Artificial Sequence
  Description of Artificial Sequence: Synthetic peptide
  Seed: DPRMCSLMQGSTLPRRSGAAG
DPRMFSLLQVSTSPRRSGAAG

SEQ ID NO: 69091 - protein, 21 aa, Artificial Sequence
  Description of Artificial Sequence: Synthetic peptide
  Seed: DPRMCSLMQGSTLPRRSGAAG
DPRMFSLLQVSTTPRRSGAAG

SEQ ID NO: 69092 - protein, 21 aa, Artificial Sequence
  Description of Artificial Sequence: Synthetic peptide
  Seed: DPRMCSLMQGSTLPRRSGAAG
DPRMFSLLQVSTVPRRSGAAG

SEQ ID NO: 69093 - protein, 21 aa, Artificial Sequence
  Description of Artificial Sequence: Synthetic peptide
  Seed: DPRMCSLMQGSTLPRRSGAAG
DPRMFSLMQASTAPRRSGAAG

SEQ ID NO: 69094 - protein, 21 aa, Artificial Sequence
  Description of Artificial Sequence: Synthetic peptide
  Seed: DPRMCSLMQGSTLPRRSGAAG
DPRMFSLMQASTCPRRSGAAG

SEQ ID NO: 69095 - protein, 21 aa, Artificial Sequence
  Description of Artificial Sequence: Synthetic peptide
  Seed: DPRMCSLMQGSTLPRRSGAAG
DPRMFSLMQASTFPRRSGAAG

SEQ ID NO: 69096 - protein, 21 aa, Artificial Sequence
  Description of Artificial Sequence: Synthetic peptide
  Seed: DPRMCSLMQGSTLPRRSGAAG
DPRMFSLMQASTGPRRSGAAG

SEQ ID NO: 69097 - protein, 21 aa, Artificial Sequence
  Description of Artificial Sequence: Synthetic peptide
  Seed: DPRMCSLMQGSTLPRRSGAAG
DPRMFSLMQASTHPRRSGAAG

SEQ ID NO: 69098 - protein, 21 aa, Artificial Sequence
  Description of Artificial Sequence: Synthetic peptide
  Seed: DPRMCSLMQGSTLPRRSGAAG
DPRMFSLMQASTIPRRSGAAG

SEQ ID NO: 69099 - protein, 21 aa, Artificial Sequence
  Description of Artificial Sequence: Synthetic peptide
  Seed: DPRMCSLMQGSTLPRRSGAAG
DPRMFSLMQASTLPRRSGAAG

SEQ ID NO: 69100 - protein, 21 aa, Artificial Sequence
  Description of Artificial Sequence: Synthetic peptide
  Seed: DPRMCSLMQGSTLPRRSGAAG
DPRMFSLMQASTMPRRSGAAG

SEQ ID NO: 69101 - protein, 21 aa, Artificial Sequence
  Description of Artificial Sequence: Synthetic peptide
  Seed: DPRMCSLMQGSTLPRRSGAAG
DPRMFSLMQASTNPRRSGAAG

SEQ ID NO: 69102 - protein, 21 aa, Artificial Sequence
  Description of Artificial Sequence: Synthetic peptide
  Seed: DPRMCSLMQGSTLPRRSGAAG
DPRMFSLMQASTPPRRSGAAG

SEQ ID NO: 69103 - protein, 21 aa, Artificial Sequence
  Description of Artificial Sequence: Synthetic peptide
  Seed: DPRMCSLMQGSTLPRRSGAAG
DPRMFSLMQASTQPRRSGAAG

SEQ ID NO: 69104 - protein, 21 aa, Artificial Sequence
  Description of Artificial Sequence: Synthetic peptide
  Seed: DPRMCSLMQGSTLPRRSGAAG
DPRMFSLMQASTSPRRSGAAG

SEQ ID NO: 69105 - protein, 21 aa, Artificial Sequence
  Description of Artificial Sequence: Synthetic peptide
  Seed: DPRMCSLMQGSTLPRRSGAAG
DPRMFSLMQASTTPRRSGAAG

SEQ ID NO: 69106 - protein, 21 aa, Artificial Sequence
  Description of Artificial Sequence: Synthetic peptide
  Seed: DPRMCSLMQGSTLPRRSGAAG
DPRMFSLMQASTVPRRSGAAG

SEQ ID NO: 69107 - protein, 21 aa, Artificial Sequence
  Description of Artificial Sequence: Synthetic peptide
  Seed: DPRMCSLMQGSTLPRRSGAAG
DPRMFSLMQASTYPRRSGAAG

SEQ ID NO: 69108 - protein, 21 aa, Artificial Sequence
  Description of Artificial Sequence: Synthetic peptide
  Seed: DPRMCSLMQGSTLPRRSGAAG
DPRMFSLMQGSTAPRRSGAAG

SEQ ID NO: 69109 - protein, 21 aa, Artificial Sequence
  Description of Artificial Sequence: Synthetic peptide
  Seed: DPRMCSLMQGSTLPRRSGAAG
DPRMFSLMQGSTCPRRSGAAG

SEQ ID NO: 69110 - protein, 21 aa, Artificial Sequence
  Description of Artificial Sequence: Synthetic peptide
  Seed: DPRMCSLMQGSTLPRRSGAAG
DPRMFSLMQGSTFPRRSGAAG

SEQ ID NO: 69111 - protein, 21 aa, Artificial Sequence
  Description of Artificial Sequence: Synthetic peptide
  Seed: DPRMCSLMQGSTLPRRSGAAG
DPRMFSLMQGSTGPRRSGAAG

SEQ ID NO: 69112 - protein, 21 aa, Artificial Sequence
  Description of Artificial Sequence: Synthetic peptide
  Seed: DPRMCSLMQGSTLPRRSGAAG
DPRMFSLMQGSTIPRRSGAAG

SEQ ID NO: 69113 - protein, 21 aa, Artificial Sequence
  Description of Artificial Sequence: Synthetic peptide
  Seed: DPRMCSLMQGSTLPRRSGAAG
DPRMFSLMQGSTLPRRSGAAG

SEQ ID NO: 69114 - protein, 21 aa, Artificial Sequence
  Description of Artificial Sequence: Synthetic peptide
  Seed: DPRMCSLMQGSTLPRRSGAAG
DPRMFSLMQGSTMPRRSGAAG

SEQ ID NO: 69115 - protein, 21 aa, Artificial Sequence
  Description of Artificial Sequence: Synthetic peptide
  Seed: DPRMCSLMQGSTLPRRSGAAG
DPRMFSLMQGSTNPRRSGAAG

SEQ ID NO: 69116 - protein, 21 aa, Artificial Sequence
  Description of Artificial Sequence: Synthetic peptide
  Seed: DPRMCSLMQGSTLPRRSGAAG
DPRMFSLMQGSTSPRRSGAAG

SEQ ID NO: 69117 - protein, 21 aa, Artificial Sequence
  Description of Artificial Sequence: Synthetic peptide
  Seed: DPRMCSLMQGSTLPRRSGAAG
DPRMFSLMQGSTTPRRSGAAG

SEQ ID NO: 69118 - protein, 21 aa, Artificial Sequence
  Description of Artificial Sequence: Synthetic peptide
  Seed: DPRMCSLMQGSTLPRRSGAAG
DPRMFSLMQGSTVPRRSGAAG

SEQ ID NO: 69119 - protein, 21 aa, Artificial Sequence
  Description of Artificial Sequence: Synthetic peptide
  Seed: DPRMCSLMQGSTLPRRSGAAG
DPRMFSLMQHSTVPRRSGAAG

SEQ ID NO: 69120 - protein, 21 aa, Artificial Sequence
  Description of Artificial Sequence: Synthetic peptide
  Seed: DPRMCSLMQGSTLPRRSGAAG
DPRMFSLMQISTAPRRSGAAG

SEQ ID NO: 69121 - protein, 21 aa, Artificial Sequence
  Description of Artificial Sequence: Synthetic peptide
  Seed: DPRMCSLMQGSTLPRRSGAAG
DPRMFSLMQISTIPRRSGAAG

SEQ ID NO: 69122 - protein, 21 aa, Artificial Sequence
  Description of Artificial Sequence: Synthetic peptide
  Seed: DPRMCSLMQGSTLPRRSGAAG
DPRMFSLMQISTLPRRSGAAG

SEQ ID NO: 69123 - protein, 21 aa, Artificial Sequence
  Description of Artificial Sequence: Synthetic peptide
  Seed: DPRMCSLMQGSTLPRRSGAAG
DPRMFSLMQISTVPRRSGAAG

SEQ ID NO: 69124 - protein, 21 aa, Artificial Sequence
  Description of Artificial Sequence: Synthetic peptide
  Seed: DPRMCSLMQGSTLPRRSGAAG
DPRMFSLMQNSTAPRRSGAAG

SEQ ID NO: 69125 - protein, 21 aa, Artificial Sequence
  Description of Artificial Sequence: Synthetic peptide
  Seed: DPRMCSLMQGSTLPRRSGAAG
DPRMFSLMQNSTGPRRSGAAG

SEQ ID NO: 69126 - protein, 21 aa, Artificial Sequence
  Description of Artificial Sequence: Synthetic peptide
  Seed: DPRMCSLMQGSTLPRRSGAAG
DPRMFSLMQNSTIPRRSGAAG

SEQ ID NO: 69127 - protein, 21 aa, Artificial Sequence
  Description of Artificial Sequence: Synthetic peptide
  Seed: DPRMCSLMQGSTLPRRSGAAG
DPRMFSLMQNSTLPRRSGAAG

SEQ ID NO: 69128 - protein, 21 aa, Artificial Sequence
  Description of Artificial Sequence: Synthetic peptide
  Seed: DPRMCSLMQGSTLPRRSGAAG
DPRMFSLMQNSTMPRRSGAAG

SEQ ID NO: 69129 - protein, 21 aa, Artificial Sequence
  Description of Artificial Sequence: Synthetic peptide
  Seed: DPRMCSLMQGSTLPRRSGAAG
DPRMFSLMQNSTSPRRSGAAG

SEQ ID NO: 69130 - protein, 21 aa, Artificial Sequence
  Description of Artificial Sequence: Synthetic peptide
  Seed: DPRMCSLMQGSTLPRRSGAAG
DPRMFSLMQNSTTPRRSGAAG

SEQ ID NO: 69131 - protein, 21 aa, Artificial Sequence
  Description of Artificial Sequence: Synthetic peptide
  Seed: DPRMCSLMQGSTLPRRSGAAG
DPRMFSLMQNSTVPRRSGAAG

SEQ ID NO: 69132 - protein, 21 aa, Artificial Sequence
  Description of Artificial Sequence: Synthetic peptide
  Seed: DPRMCSLMQGSTLPRRSGAAG
DPRMFSLMQPSTAPRRSGAAG

SEQ ID NO: 69133 - protein, 21 aa, Artificial Sequence
  Description of Artificial Sequence: Synthetic peptide
  Seed: DPRMCSLMQGSTLPRRSGAAG
DPRMFSLMQPSTFPRRSGAAG

SEQ ID NO: 69134 - protein, 21 aa, Artificial Sequence
  Description of Artificial Sequence: Synthetic peptide
  Seed: DPRMCSLMQGSTLPRRSGAAG
DPRMFSLMQPSTGPRRSGAAG

SEQ ID NO: 69135 - protein, 21 aa, Artificial Sequence
  Description of Artificial Sequence: Synthetic peptide
  Seed: DPRMCSLMQGSTLPRRSGAAG
DPRMFSLMQPSTIPRRSGAAG

SEQ ID NO: 69136 - protein, 21 aa, Artificial Sequence
  Description of Artificial Sequence: Synthetic peptide
  Seed: DPRMCSLMQGSTLPRRSGAAG
DPRMFSLMQPSTLPRRSGAAG

SEQ ID NO: 69137 - protein, 21 aa, Artificial Sequence
  Description of Artificial Sequence: Synthetic peptide
  Seed: DPRMCSLMQGSTLPRRSGAAG
DPRMFSLMQPSTMPRRSGAAG

SEQ ID NO: 69138 - protein, 21 aa, Artificial Sequence
  Description of Artificial Sequence: Synthetic peptide
  Seed: DPRMCSLMQGSTLPRRSGAAG
DPRMFSLMQPSTSPRRSGAAG

SEQ ID NO: 69139 - protein, 21 aa, Artificial Sequence
  Description of Artificial Sequence: Synthetic peptide
  Seed: DPRMCSLMQGSTLPRRSGAAG
DPRMFSLMQPSTTPRRSGAAG

SEQ ID NO: 69140 - protein, 21 aa, Artificial Sequence
  Description of Artificial Sequence: Synthetic peptide
  Seed: DPRMCSLMQGSTLPRRSGAAG
DPRMFSLMQPSTVPRRSGAAG

SEQ ID NO: 69141 - protein, 21 aa, Artificial Sequence
  Description of Artificial Sequence: Synthetic peptide
  Seed: DPRMCSLMQGSTLPRRSGAAG
DPRMFSLMQSSTAPRRSGAAG

SEQ ID NO: 69142 - protein, 21 aa, Artificial Sequence
  Description of Artificial Sequence: Synthetic peptide
  Seed: DPRMCSLMQGSTLPRRSGAAG
DPRMFSLMQSSTCPRRSGAAG

SEQ ID NO: 69143 - protein, 21 aa, Artificial Sequence
  Description of Artificial Sequence: Synthetic peptide
  Seed: DPRMCSLMQGSTLPRRSGAAG
DPRMFSLMQSSTFPRRSGAAG

SEQ ID NO: 69144 - protein, 21 aa, Artificial Sequence
  Description of Artificial Sequence: Synthetic peptide
  Seed: DPRMCSLMQGSTLPRRSGAAG
DPRMFSLMQSSTGPRRSGAAG

SEQ ID NO: 69145 - protein, 21 aa, Artificial Sequence
  Description of Artificial Sequence: Synthetic peptide
  Seed: DPRMCSLMQGSTLPRRSGAAG
DPRMFSLMQSSTIPRRSGAAG

SEQ ID NO: 69146 - protein, 21 aa, Artificial Sequence
  Description of Artificial Sequence: Synthetic peptide
  Seed: DPRMCSLMQGSTLPRRSGAAG
DPRMFSLMQSSTLPRRSGAAG

SEQ ID NO: 69147 - protein, 21 aa, Artificial Sequence
  Description of Artificial Sequence: Synthetic peptide
  Seed: DPRMCSLMQGSTLPRRSGAAG
DPRMFSLMQSSTMPRRSGAAG

SEQ ID NO: 69148 - protein, 21 aa, Artificial Sequence
  Description of Artificial Sequence: Synthetic peptide
  Seed: DPRMCSLMQGSTLPRRSGAAG
DPRMFSLMQSSTNPRRSGAAG

SEQ ID NO: 69149 - protein, 21 aa, Artificial Sequence
  Description of Artificial Sequence: Synthetic peptide
  Seed: DPRMCSLMQGSTLPRRSGAAG
DPRMFSLMQSSTSPRRSGAAG

SEQ ID NO: 69150 - protein, 21 aa, Artificial Sequence
  Description of Artificial Sequence: Synthetic peptide
  Seed: DPRMCSLMQGSTLPRRSGAAG
DPRMFSLMQSSTTPRRSGAAG

SEQ ID NO: 69151 - protein, 21 aa, Artificial Sequence
  Description of Artificial Sequence: Synthetic peptide
  Seed: DPRMCSLMQGSTLPRRSGAAG
DPRMFSLMQSSTVPRRSGAAG

SEQ ID NO: 69152 - protein, 21 aa, Artificial Sequence
  Description of Artificial Sequence: Synthetic peptide
  Seed: DPRMCSLMQGSTLPRRSGAAG
DPRMFSLMQTSTAPRRSGAAG

SEQ ID NO: 69153 - protein, 21 aa, Artificial Sequence
  Description of Artificial Sequence: Synthetic peptide
  Seed: DPRMCSLMQGSTLPRRSGAAG
DPRMFSLMQTSTIPRRSGAAG

SEQ ID NO: 69154 - protein, 21 aa, Artificial Sequence
  Description of Artificial Sequence: Synthetic peptide
  Seed: DPRMCSLMQGSTLPRRSGAAG
DPRMFSLMQTSTLPRRSGAAG

SEQ ID NO: 69155 - protein, 21 aa, Artificial Sequence
  Description of Artificial Sequence: Synthetic peptide
  Seed: DPRMCSLMQGSTLPRRSGAAG
DPRMFSLMQTSTMPRRSGAAG

SEQ ID NO: 69156 - protein, 21 aa, Artificial Sequence
  Description of Artificial Sequence: Synthetic peptide
  Seed: DPRMCSLMQGSTLPRRSGAAG
DPRMFSLMQTSTSPRRSGAAG

SEQ ID NO: 69157 - protein, 21 aa, Artificial Sequence
  Description of Artificial Sequence: Synthetic peptide
  Seed: DPRMCSLMQGSTLPRRSGAAG
DPRMFSLMQTSTTPRRSGAAG

SEQ ID NO: 69158 - protein, 21 aa, Artificial Sequence
  Description of Artificial Sequence: Synthetic peptide
  Seed: DPRMCSLMQGSTLPRRSGAAG
DPRMFSLMQTSTVPRRSGAAG

SEQ ID NO: 69159 - protein, 21 aa, Artificial Sequence
  Description of Artificial Sequence: Synthetic peptide
  Seed: DPRMCSLMQGSTLPRRSGAAG
DPRMFSLMQVSTAPRRSGAAG

SEQ ID NO: 69160 - protein, 21 aa, Artificial Sequence
  Description of Artificial Sequence: Synthetic peptide
  Seed: DPRMCSLMQGSTLPRRSGAAG
DPRMFSLMQVSTIPRRSGAAG

SEQ ID NO: 69161 - protein, 21 aa, Artificial Sequence
  Description of Artificial Sequence: Synthetic peptide
  Seed: DPRMCSLMQGSTLPRRSGAAG
DPRMFSLMQVSTLPRRSGAAG

SEQ ID NO: 69162 - protein, 21 aa, Artificial Sequence
  Description of Artificial Sequence: Synthetic peptide
  Seed: DPRMCSLMQGSTLPRRSGAAG
DPRMFSLMQVSTMPRRSGAAG

SEQ ID NO: 69163 - protein, 21 aa, Artificial Sequence
  Description of Artificial Sequence: Synthetic peptide
  Seed: DPRMCSLMQGSTLPRRSGAAG
DPRMFSLMQVSTSPRRSGAAG

SEQ ID NO: 69164 - protein, 21 aa, Artificial Sequence
  Description of Artificial Sequence: Synthetic peptide
  Seed: DPRMCSLMQGSTLPRRSGAAG
DPRMFSLMQVSTTPRRSGAAG

SEQ ID NO: 69165 - protein, 21 aa, Artificial Sequence
  Description of Artificial Sequence: Synthetic peptide
  Seed: DPRMCSLMQGSTLPRRSGAAG
DPRMFSLMQVSTVPRRSGAAG

SEQ ID NO: 69166 - protein, 21 aa, Artificial Sequence
  Description of Artificial Sequence: Synthetic peptide
  Seed: DPRMCSLMQGSTLPRRSGAAG
DPRMFSLNQASTIPRRSGAAG

SEQ ID NO: 69167 - protein, 21 aa, Artificial Sequence
  Description of Artificial Sequence: Synthetic peptide
  Seed: DPRMCSLMQGSTLPRRSGAAG
DPRMFSLNQASTLPRRSGAAG

SEQ ID NO: 69168 - protein, 21 aa, Artificial Sequence
  Description of Artificial Sequence: Synthetic peptide
  Seed: DPRMCSLMQGSTLPRRSGAAG
DPRMFSLNQASTVPRRSGAAG

SEQ ID NO: 69169 - protein, 21 aa, Artificial Sequence
  Description of Artificial Sequence: Synthetic peptide
  Seed: DPRMCSLMQGSTLPRRSGAAG
DPRMFSLQQASTAPRRSGAAG

SEQ ID NO: 69170 - protein, 21 aa, Artificial Sequence
  Description of Artificial Sequence: Synthetic peptide
  Seed: DPRMCSLMQGSTLPRRSGAAG
DPRMFSLQQASTIPRRSGAAG

SEQ ID NO: 69171 - protein, 21 aa, Artificial Sequence
  Description of Artificial Sequence: Synthetic peptide
  Seed: DPRMCSLMQGSTLPRRSGAAG
DPRMFSLQQASTLPRRSGAAG

SEQ ID NO: 69172 - protein, 21 aa, Artificial Sequence
  Description of Artificial Sequence: Synthetic peptide
  Seed: DPRMCSLMQGSTLPRRSGAAG
DPRMFSLQQASTMPRRSGAAG

SEQ ID NO: 69173 - protein, 21 aa, Artificial Sequence
  Description of Artificial Sequence: Synthetic peptide
  Seed: DPRMCSLMQGSTLPRRSGAAG
DPRMFSLQQASTSPRRSGAAG

SEQ ID NO: 69174 - protein, 21 aa, Artificial Sequence
  Description of Artificial Sequence: Synthetic peptide
  Seed: DPRMCSLMQGSTLPRRSGAAG
DPRMFSLQQASTTPRRSGAAG

SEQ ID NO: 69175 - protein, 21 aa, Artificial Sequence
  Description of Artificial Sequence: Synthetic peptide
  Seed: DPRMCSLMQGSTLPRRSGAAG
DPRMFSLQQASTVPRRSGAAG

SEQ ID NO: 69176 - protein, 21 aa, Artificial Sequence
  Description of Artificial Sequence: Synthetic peptide
  Seed: DPRMCSLMQGSTLPRRSGAAG
DPRMFSLQQGSTAPRRSGAAG

SEQ ID NO: 69177 - protein, 21 aa, Artificial Sequence
  Description of Artificial Sequence: Synthetic peptide
  Seed: DPRMCSLMQGSTLPRRSGAAG
DPRMFSLQQGSTIPRRSGAAG

SEQ ID NO: 69178 - protein, 21 aa, Artificial Sequence
  Description of Artificial Sequence: Synthetic peptide
  Seed: DPRMCSLMQGSTLPRRSGAAG
DPRMFSLQQGSTLPRRSGAAG

SEQ ID NO: 69179 - protein, 21 aa, Artificial Sequence
  Description of Artificial Sequence: Synthetic peptide
  Seed: DPRMCSLMQGSTLPRRSGAAG
DPRMFSLQQGSTMPRRSGAAG

SEQ ID NO: 69180 - protein, 21 aa, Artificial Sequence
  Description of Artificial Sequence: Synthetic peptide
  Seed: DPRMCSLMQGSTLPRRSGAAG
DPRMFSLQQGSTVPRRSGAAG

SEQ ID NO: 69181 - protein, 21 aa, Artificial Sequence
  Description of Artificial Sequence: Synthetic peptide
  Seed: DPRMCSLMQGSTLPRRSGAAG
DPRMFSLQQPSTIPRRSGAAG

SEQ ID NO: 69182 - protein, 21 aa, Artificial Sequence
  Description of Artificial Sequence: Synthetic peptide
  Seed: DPRMCSLMQGSTLPRRSGAAG
DPRMFSLQQPSTLPRRSGAAG

SEQ ID NO: 69183 - protein, 21 aa, Artificial Sequence
  Description of Artificial Sequence: Synthetic peptide
  Seed: DPRMCSLMQGSTLPRRSGAAG
DPRMFSLQQPSTVPRRSGAAG

SEQ ID NO: 69184 - protein, 21 aa, Artificial Sequence
  Description of Artificial Sequence: Synthetic peptide
  Seed: DPRMCSLMQGSTLPRRSGAAG
DPRMFSLQQSSTAPRRSGAAG

SEQ ID NO: 69185 - protein, 21 aa, Artificial Sequence
  Description of Artificial Sequence: Synthetic peptide
  Seed: DPRMCSLMQGSTLPRRSGAAG
DPRMFSLQQSSTIPRRSGAAG

SEQ ID NO: 69186 - protein, 21 aa, Artificial Sequence
  Description of Artificial Sequence: Synthetic peptide
  Seed: DPRMCSLMQGSTLPRRSGAAG
DPRMFSLQQSSTLPRRSGAAG

SEQ ID NO: 69187 - protein, 21 aa, Artificial Sequence
  Description of Artificial Sequence: Synthetic peptide
  Seed: DPRMCSLMQGSTLPRRSGAAG
DPRMFSLQQSSTVPRRSGAAG

SEQ ID NO: 69188 - protein, 21 aa, Artificial Sequence
  Description of Artificial Sequence: Synthetic peptide
  Seed: DPRMCSLMQGSTLPRRSGAAG
DPRMFSLSQASTAPRRSGAAG

SEQ ID NO: 69189 - protein, 21 aa, Artificial Sequence
  Description of Artificial Sequence: Synthetic peptide
  Seed: DPRMCSLMQGSTLPRRSGAAG
DPRMFSLSQASTIPRRSGAAG

SEQ ID NO: 69190 - protein, 21 aa, Artificial Sequence
  Description of Artificial Sequence: Synthetic peptide
  Seed: DPRMCSLMQGSTLPRRSGAAG
DPRMFSLSQASTLPRRSGAAG

SEQ ID NO: 69191 - protein, 21 aa, Artificial Sequence
  Description of Artificial Sequence: Synthetic peptide
  Seed: DPRMCSLMQGSTLPRRSGAAG
DPRMFSLSQASTMPRRSGAAG

SEQ ID NO: 69192 - protein, 21 aa, Artificial Sequence
  Description of Artificial Sequence: Synthetic peptide
  Seed: DPRMCSLMQGSTLPRRSGAAG
DPRMFSLSQASTVPRRSGAAG

SEQ ID NO: 69193 - protein, 21 aa, Artificial Sequence
  Description of Artificial Sequence: Synthetic peptide
  Seed: DPRMCSLMQGSTLPRRSGAAG
DPRMFSLSQGSTIPRRSGAAG

SEQ ID NO: 69194 - protein, 21 aa, Artificial Sequence
  Description of Artificial Sequence: Synthetic peptide
  Seed: DPRMCSLMQGSTLPRRSGAAG
DPRMFSLSQGSTLPRRSGAAG

SEQ ID NO: 69195 - protein, 21 aa, Artificial Sequence
  Description of Artificial Sequence: Synthetic peptide
  Seed: DPRMCSLMQGSTLPRRSGAAG
DPRMFSLSQGSTVPRRSGAAG

SEQ ID NO: 69196 - protein, 21 aa, Artificial Sequence
  Description of Artificial Sequence: Synthetic peptide
  Seed: DPRMCSLMQGSTLPRRSGAAG
DPRMFSLTQASTAPRRSGAAG

SEQ ID NO: 69197 - protein, 21 aa, Artificial Sequence
  Description of Artificial Sequence: Synthetic peptide
  Seed: DPRMCSLMQGSTLPRRSGAAG
DPRMFSLTQASTIPRRSGAAG

SEQ ID NO: 69198 - protein, 21 aa, Artificial Sequence
  Description of Artificial Sequence: Synthetic peptide
  Seed: DPRMCSLMQGSTLPRRSGAAG
DPRMFSLTQASTLPRRSGAAG

SEQ ID NO: 69199 - protein, 21 aa, Artificial Sequence
  Description of Artificial Sequence: Synthetic peptide
  Seed: DPRMCSLMQGSTLPRRSGAAG
DPRMFSLTQASTVPRRSGAAG

SEQ ID NO: 69200 - protein, 21 aa, Artificial Sequence
  Description of Artificial Sequence: Synthetic peptide
  Seed: DPRMCSLMQGSTLPRRSGAAG
DPRMFSLVQASTAPRRSGAAG

SEQ ID NO: 69201 - protein, 21 aa, Artificial Sequence
  Description of Artificial Sequence: Synthetic peptide
  Seed: DPRMCSLMQGSTLPRRSGAAG
DPRMFSLVQASTIPRRSGAAG

SEQ ID NO: 69202 - protein, 21 aa, Artificial Sequence
  Description of Artificial Sequence: Synthetic peptide
  Seed: DPRMCSLMQGSTLPRRSGAAG
DPRMFSLVQASTLPRRSGAAG

SEQ ID NO: 69203 - protein, 21 aa, Artificial Sequence
  Description of Artificial Sequence: Synthetic peptide
  Seed: DPRMCSLMQGSTLPRRSGAAG
DPRMFSLVQASTMPRRSGAAG

SEQ ID NO: 69204 - protein, 21 aa, Artificial Sequence
  Description of Artificial Sequence: Synthetic peptide
  Seed: DPRMCSLMQGSTLPRRSGAAG
DPRMFSLVQASTSPRRSGAAG

SEQ ID NO: 69205 - protein, 21 aa, Artificial Sequence
  Description of Artificial Sequence: Synthetic peptide
  Seed: DPRMCSLMQGSTLPRRSGAAG
DPRMFSLVQASTTPRRSGAAG

SEQ ID NO: 69206 - protein, 21 aa, Artificial Sequence
  Description of Artificial Sequence: Synthetic peptide
  Seed: DPRMCSLMQGSTLPRRSGAAG
DPRMFSLVQASTVPRRSGAAG

SEQ ID NO: 69207 - protein, 21 aa, Artificial Sequence
  Description of Artificial Sequence: Synthetic peptide
  Seed: DPRMCSLMQGSTLPRRSGAAG
DPRMFSLVQGSTAPRRSGAAG

SEQ ID NO: 69208 - protein, 21 aa, Artificial Sequence
  Description of Artificial Sequence: Synthetic peptide
  Seed: DPRMCSLMQGSTLPRRSGAAG
DPRMFSLVQGSTIPRRSGAAG

SEQ ID NO: 69209 - protein, 21 aa, Artificial Sequence
  Description of Artificial Sequence: Synthetic peptide
  Seed: DPRMCSLMQGSTLPRRSGAAG
DPRMFSLVQGSTLPRRSGAAG

SEQ ID NO: 69210 - protein, 21 aa, Artificial Sequence
  Description of Artificial Sequence: Synthetic peptide
  Seed: DPRMCSLMQGSTLPRRSGAAG
DPRMFSLVQGSTMPRRSGAAG

SEQ ID NO: 69211 - protein, 21 aa, Artificial Sequence
  Description of Artificial Sequence: Synthetic peptide
  Seed: DPRMCSLMQGSTLPRRSGAAG
DPRMFSLVQGSTTPRRSGAAG

SEQ ID NO: 69212 - protein, 21 aa, Artificial Sequence
  Description of Artificial Sequence: Synthetic peptide
  Seed: DPRMCSLMQGSTLPRRSGAAG
DPRMFSLVQGSTVPRRSGAAG

SEQ ID NO: 69213 - protein, 21 aa, Artificial Sequence
  Description of Artificial Sequence: Synthetic peptide
  Seed: DPRMCSLMQGSTLPRRSGAAG
DPRMFSLVQNSTVPRRSGAAG

SEQ ID NO: 69214 - protein, 21 aa, Artificial Sequence
  Description of Artificial Sequence: Synthetic peptide
  Seed: DPRMCSLMQGSTLPRRSGAAG
DPRMFSLVQPSTAPRRSGAAG

SEQ ID NO: 69215 - protein, 21 aa, Artificial Sequence
  Description of Artificial Sequence: Synthetic peptide
  Seed: DPRMCSLMQGSTLPRRSGAAG
DPRMFSLVQPSTIPRRSGAAG

SEQ ID NO: 69216 - protein, 21 aa, Artificial Sequence
  Description of Artificial Sequence: Synthetic peptide
  Seed: DPRMCSLMQGSTLPRRSGAAG
DPRMFSLVQPSTLPRRSGAAG

SEQ ID NO: 69217 - protein, 21 aa, Artificial Sequence
  Description of Artificial Sequence: Synthetic peptide
  Seed: DPRMCSLMQGSTLPRRSGAAG
DPRMFSLVQPSTVPRRSGAAG

SEQ ID NO: 69218 - protein, 21 aa, Artificial Sequence
  Description of Artificial Sequence: Synthetic peptide
  Seed: DPRMCSLMQGSTLPRRSGAAG
DPRMFSLVQSSTAPRRSGAAG

SEQ ID NO: 69219 - protein, 21 aa, Artificial Sequence
  Description of Artificial Sequence: Synthetic peptide
  Seed: DPRMCSLMQGSTLPRRSGAAG
DPRMFSLVQSSTIPRRSGAAG

SEQ ID NO: 69220 - protein, 21 aa, Artificial Sequence
  Description of Artificial Sequence: Synthetic peptide
  Seed: DPRMCSLMQGSTLPRRSGAAG
DPRMFSLVQSSTLPRRSGAAG

SEQ ID NO: 69221 - protein, 21 aa, Artificial Sequence
  Description of Artificial Sequence: Synthetic peptide
  Seed: DPRMCSLMQGSTLPRRSGAAG
DPRMFSLVQSSTVPRRSGAAG

SEQ ID NO: 69222 - protein, 21 aa, Artificial Sequence
  Description of Artificial Sequence: Synthetic peptide
  Seed: DPRMCSLMQGSTLPRRSGAAG
DPRMFSLVQTSTVPRRSGAAG

SEQ ID NO: 69223 - protein, 21 aa, Artificial Sequence
  Description of Artificial Sequence: Synthetic peptide
  Seed: DPRMCSLMQGSTLPRRSGAAG
DPRMISLAQASTIPRRSGAAG

SEQ ID NO: 69224 - protein, 21 aa, Artificial Sequence
  Description of Artificial Sequence: Synthetic peptide
  Seed: DPRMCSLMQGSTLPRRSGAAG
DPRMISLAQASTLPRRSGAAG

SEQ ID NO: 69225 - protein, 21 aa, Artificial Sequence
  Description of Artificial Sequence: Synthetic peptide
  Seed: DPRMCSLMQGSTLPRRSGAAG
DPRMISLAQASTVPRRSGAAG

SEQ ID NO: 69226 - protein, 21 aa, Artificial Sequence
  Description of Artificial Sequence: Synthetic peptide
  Seed: DPRMCSLMQGSTLPRRSGAAG
DPRMISLIQASTAPRRSGAAG

SEQ ID NO: 69227 - protein, 21 aa, Artificial Sequence
  Description of Artificial Sequence: Synthetic peptide
  Seed: DPRMCSLMQGSTLPRRSGAAG
DPRMISLIQASTIPRRSGAAG

SEQ ID NO: 69228 - protein, 21 aa, Artificial Sequence
  Description of Artificial Sequence: Synthetic peptide
  Seed: DPRMCSLMQGSTLPRRSGAAG
DPRMISLIQASTLPRRSGAAG

SEQ ID NO: 69229 - protein, 21 aa, Artificial Sequence
  Description of Artificial Sequence: Synthetic peptide
  Seed: DPRMCSLMQGSTLPRRSGAAG
DPRMISLIQASTVPRRSGAAG

SEQ ID NO: 69230 - protein, 21 aa, Artificial Sequence
  Description of Artificial Sequence: Synthetic peptide
  Seed: DPRMCSLMQGSTLPRRSGAAG
DPRMISLIQGSTAPRRSGAAG

SEQ ID NO: 69231 - protein, 21 aa, Artificial Sequence
  Description of Artificial Sequence: Synthetic peptide
  Seed: DPRMCSLMQGSTLPRRSGAAG
DPRMISLIQGSTIPRRSGAAG

SEQ ID NO: 69232 - protein, 21 aa, Artificial Sequence
  Description of Artificial Sequence: Synthetic peptide
  Seed: DPRMCSLMQGSTLPRRSGAAG
DPRMISLIQGSTLPRRSGAAG

SEQ ID NO: 69233 - protein, 21 aa, Artificial Sequence
  Description of Artificial Sequence: Synthetic peptide
  Seed: DPRMCSLMQGSTLPRRSGAAG
DPRMISLIQGSTVPRRSGAAG

SEQ ID NO: 69234 - protein, 21 aa, Artificial Sequence
  Description of Artificial Sequence: Synthetic peptide
  Seed: DPRMCSLMQGSTLPRRSGAAG
DPRMISLIQSSTVPRRSGAAG

SEQ ID NO: 69235 - protein, 21 aa, Artificial Sequence
  Description of Artificial Sequence: Synthetic peptide
  Seed: DPRMCSLMQGSTLPRRSGAAG
DPRMISLLQASTAPRRSGAAG

SEQ ID NO: 69236 - protein, 21 aa, Artificial Sequence
  Description of Artificial Sequence: Synthetic peptide
  Seed: DPRMCSLMQGSTLPRRSGAAG
DPRMISLLQASTGPRRSGAAG

SEQ ID NO: 69237 - protein, 21 aa, Artificial Sequence
  Description of Artificial Sequence: Synthetic peptide
  Seed: DPRMCSLMQGSTLPRRSGAAG
DPRMISLLQASTIPRRSGAAG

SEQ ID NO: 69238 - protein, 21 aa, Artificial Sequence
  Description of Artificial Sequence: Synthetic peptide
  Seed: DPRMCSLMQGSTLPRRSGAAG
DPRMISLLQASTLPRRSGAAG

SEQ ID NO: 69239 - protein, 21 aa, Artificial Sequence
  Description of Artificial Sequence: Synthetic peptide
  Seed: DPRMCSLMQGSTLPRRSGAAG
DPRMISLLQASTMPRRSGAAG

SEQ ID NO: 69240 - protein, 21 aa, Artificial Sequence
  Description of Artificial Sequence: Synthetic peptide
  Seed: DPRMCSLMQGSTLPRRSGAAG
DPRMISLLQASTSPRRSGAAG

SEQ ID NO: 69241 - protein, 21 aa, Artificial Sequence
  Description of Artificial Sequence: Synthetic peptide
  Seed: DPRMCSLMQGSTLPRRSGAAG
DPRMISLLQASTTPRRSGAAG

SEQ ID NO: 69242 - protein, 21 aa, Artificial Sequence
  Description of Artificial Sequence: Synthetic peptide
  Seed: DPRMCSLMQGSTLPRRSGAAG
DPRMISLLQASTVPRRSGAAG

SEQ ID NO: 69243 - protein, 21 aa, Artificial Sequence
  Description of Artificial Sequence: Synthetic peptide
  Seed: DPRMCSLMQGSTLPRRSGAAG
DPRMISLLQGSTAPRRSGAAG

SEQ ID NO: 69244 - protein, 21 aa, Artificial Sequence
  Description of Artificial Sequence: Synthetic peptide
  Seed: DPRMCSLMQGSTLPRRSGAAG
DPRMISLLQGSTIPRRSGAAG

SEQ ID NO: 69245 - protein, 21 aa, Artificial Sequence
  Description of Artificial Sequence: Synthetic peptide
  Seed: DPRMCSLMQGSTLPRRSGAAG
DPRMISLLQGSTLPRRSGAAG

SEQ ID NO: 69246 - protein, 21 aa, Artificial Sequence
  Description of Artificial Sequence: Synthetic peptide
  Seed: DPRMCSLMQGSTLPRRSGAAG
DPRMISLLQGSTMPRRSGAAG

SEQ ID NO: 69247 - protein, 21 aa, Artificial Sequence
  Description of Artificial Sequence: Synthetic peptide
  Seed: DPRMCSLMQGSTLPRRSGAAG
DPRMISLLQGSTSPRRSGAAG

SEQ ID NO: 69248 - protein, 21 aa, Artificial Sequence
  Description of Artificial Sequence: Synthetic peptide
  Seed: DPRMCSLMQGSTLPRRSGAAG
DPRMISLLQGSTTPRRSGAAG

SEQ ID NO: 69249 - protein, 21 aa, Artificial Sequence
  Description of Artificial Sequence: Synthetic peptide
  Seed: DPRMCSLMQGSTLPRRSGAAG
DPRMISLLQGSTVPRRSGAAG

SEQ ID NO: 69250 - protein, 21 aa, Artificial Sequence
  Description of Artificial Sequence: Synthetic peptide
  Seed: DPRMCSLMQGSTLPRRSGAAG
DPRMISLLQNSTLPRRSGAAG

SEQ ID NO: 69251 - protein, 21 aa, Artificial Sequence
  Description of Artificial Sequence: Synthetic peptide
  Seed: DPRMCSLMQGSTLPRRSGAAG
DPRMISLLQNSTVPRRSGAAG

SEQ ID NO: 69252 - protein, 21 aa, Artificial Sequence
  Description of Artificial Sequence: Synthetic peptide
  Seed: DPRMCSLMQGSTLPRRSGAAG
DPRMISLLQPSTAPRRSGAAG

SEQ ID NO: 69253 - protein, 21 aa, Artificial Sequence
  Description of Artificial Sequence: Synthetic peptide
  Seed: DPRMCSLMQGSTLPRRSGAAG
DPRMISLLQPSTIPRRSGAAG

SEQ ID NO: 69254 - protein, 21 aa, Artificial Sequence
  Description of Artificial Sequence: Synthetic peptide
  Seed: DPRMCSLMQGSTLPRRSGAAG
DPRMISLLQPSTLPRRSGAAG

SEQ ID NO: 69255 - protein, 21 aa, Artificial Sequence
  Description of Artificial Sequence: Synthetic peptide
  Seed: DPRMCSLMQGSTLPRRSGAAG
DPRMISLLQPSTVPRRSGAAG

SEQ ID NO: 69256 - protein, 21 aa, Artificial Sequence
  Description of Artificial Sequence: Synthetic peptide
  Seed: DPRMCSLMQGSTLPRRSGAAG
DPRMISLLQSSTAPRRSGAAG

SEQ ID NO: 69257 - protein, 21 aa, Artificial Sequence
  Description of Artificial Sequence: Synthetic peptide
  Seed: DPRMCSLMQGSTLPRRSGAAG
DPRMISLLQSSTIPRRSGAAG

SEQ ID NO: 69258 - protein, 21 aa, Artificial Sequence
  Description of Artificial Sequence: Synthetic peptide
  Seed: DPRMCSLMQGSTLPRRSGAAG
DPRMISLLQSSTLPRRSGAAG

SEQ ID NO: 69259 - protein, 21 aa, Artificial Sequence
  Description of Artificial Sequence: Synthetic peptide
  Seed: DPRMCSLMQGSTLPRRSGAAG
DPRMISLLQSSTMPRRSGAAG

SEQ ID NO: 69260 - protein, 21 aa, Artificial Sequence
  Description of Artificial Sequence: Synthetic peptide
  Seed: DPRMCSLMQGSTLPRRSGAAG
DPRMISLLQSSTTPRRSGAAG

SEQ ID NO: 69261 - protein, 21 aa, Artificial Sequence
  Description of Artificial Sequence: Synthetic peptide
  Seed: DPRMCSLMQGSTLPRRSGAAG
DPRMISLLQSSTVPRRSGAAG

SEQ ID NO: 69262 - protein, 21 aa, Artificial Sequence
  Description of Artificial Sequence: Synthetic peptide
  Seed: DPRMCSLMQGSTLPRRSGAAG
DPRMISLLQTSTLPRRSGAAG

SEQ ID NO: 69263 - protein, 21 aa, Artificial Sequence
  Description of Artificial Sequence: Synthetic peptide
  Seed: DPRMCSLMQGSTLPRRSGAAG
DPRMISLLQTSTVPRRSGAAG

SEQ ID NO: 69264 - protein, 21 aa, Artificial Sequence
  Description of Artificial Sequence: Synthetic peptide
  Seed: DPRMCSLMQGSTLPRRSGAAG
DPRMISLMQASTAPRRSGAAG

SEQ ID NO: 69265 - protein, 21 aa, Artificial Sequence
  Description of Artificial Sequence: Synthetic peptide
  Seed: DPRMCSLMQGSTLPRRSGAAG
DPRMISLMQASTIPRRSGAAG

SEQ ID NO: 69266 - protein, 21 aa, Artificial Sequence
  Description of Artificial Sequence: Synthetic peptide
  Seed: DPRMCSLMQGSTLPRRSGAAG
DPRMISLMQASTLPRRSGAAG

SEQ ID NO: 69267 - protein, 21 aa, Artificial Sequence
  Description of Artificial Sequence: Synthetic peptide
  Seed: DPRMCSLMQGSTLPRRSGAAG
DPRMISLMQASTMPRRSGAAG

SEQ ID NO: 69268 - protein, 21 aa, Artificial Sequence
  Description of Artificial Sequence: Synthetic peptide
  Seed: DPRMCSLMQGSTLPRRSGAAG
DPRMISLMQASTSPRRSGAAG

SEQ ID NO: 69269 - protein, 21 aa, Artificial Sequence
  Description of Artificial Sequence: Synthetic peptide
  Seed: DPRMCSLMQGSTLPRRSGAAG
DPRMISLMQASTTPRRSGAAG

SEQ ID NO: 69270 - protein, 21 aa, Artificial Sequence
  Description of Artificial Sequence: Synthetic peptide
  Seed: DPRMCSLMQGSTLPRRSGAAG
DPRMISLMQASTVPRRSGAAG

SEQ ID NO: 69271 - protein, 21 aa, Artificial Sequence
  Description of Artificial Sequence: Synthetic peptide
  Seed: DPRMCSLMQGSTLPRRSGAAG
DPRMISLMQGSTAPRRSGAAG

SEQ ID NO: 69272 - protein, 21 aa, Artificial Sequence
  Description of Artificial Sequence: Synthetic peptide
  Seed: DPRMCSLMQGSTLPRRSGAAG
DPRMISLMQGSTIPRRSGAAG

SEQ ID NO: 69273 - protein, 21 aa, Artificial Sequence
  Description of Artificial Sequence: Synthetic peptide
  Seed: DPRMCSLMQGSTLPRRSGAAG
DPRMISLMQGSTLPRRSGAAG

SEQ ID NO: 69274 - protein, 21 aa, Artificial Sequence
  Description of Artificial Sequence: Synthetic peptide
  Seed: DPRMCSLMQGSTLPRRSGAAG
DPRMISLMQGSTMPRRSGAAG

SEQ ID NO: 69275 - protein, 21 aa, Artificial Sequence
  Description of Artificial Sequence: Synthetic peptide
  Seed: DPRMCSLMQGSTLPRRSGAAG
DPRMISLMQGSTSPRRSGAAG

SEQ ID NO: 69276 - protein, 21 aa, Artificial Sequence
  Description of Artificial Sequence: Synthetic peptide
  Seed: DPRMCSLMQGSTLPRRSGAAG
DPRMISLMQGSTTPRRSGAAG

SEQ ID NO: 69277 - protein, 21 aa, Artificial Sequence
  Description of Artificial Sequence: Synthetic peptide
  Seed: DPRMCSLMQGSTLPRRSGAAG
DPRMISLMQGSTVPRRSGAAG

SEQ ID NO: 69278 - protein, 21 aa, Artificial Sequence
  Description of Artificial Sequence: Synthetic peptide
  Seed: DPRMCSLMQGSTLPRRSGAAG
DPRMISLMQNSTLPRRSGAAG

SEQ ID NO: 69279 - protein, 21 aa, Artificial Sequence
  Description of Artificial Sequence: Synthetic peptide
  Seed: DPRMCSLMQGSTLPRRSGAAG
DPRMISLMQNSTVPRRSGAAG

SEQ ID NO: 69280 - protein, 21 aa, Artificial Sequence
  Description of Artificial Sequence: Synthetic peptide
  Seed: DPRMCSLMQGSTLPRRSGAAG
DPRMISLMQPSTAPRRSGAAG

SEQ ID NO: 69281 - protein, 21 aa, Artificial Sequence
  Description of Artificial Sequence: Synthetic peptide
  Seed: DPRMCSLMQGSTLPRRSGAAG
DPRMISLMQPSTIPRRSGAAG

SEQ ID NO: 69282 - protein, 21 aa, Artificial Sequence
  Description of Artificial Sequence: Synthetic peptide
  Seed: DPRMCSLMQGSTLPRRSGAAG
DPRMISLMQPSTLPRRSGAAG

SEQ ID NO: 69283 - protein, 21 aa, Artificial Sequence
  Description of Artificial Sequence: Synthetic peptide
  Seed: DPRMCSLMQGSTLPRRSGAAG
DPRMISLMQPSTVPRRSGAAG

SEQ ID NO: 69284 - protein, 21 aa, Artificial Sequence
  Description of Artificial Sequence: Synthetic peptide
  Seed: DPRMCSLMQGSTLPRRSGAAG
DPRMISLMQSSTAPRRSGAAG

SEQ ID NO: 69285 - protein, 21 aa, Artificial Sequence
  Description of Artificial Sequence: Synthetic peptide
  Seed: DPRMCSLMQGSTLPRRSGAAG
DPRMISLMQSSTIPRRSGAAG

SEQ ID NO: 69286 - protein, 21 aa, Artificial Sequence
  Description of Artificial Sequence: Synthetic peptide
  Seed: DPRMCSLMQGSTLPRRSGAAG
DPRMISLMQSSTLPRRSGAAG

SEQ ID NO: 69287 - protein, 21 aa, Artificial Sequence
  Description of Artificial Sequence: Synthetic peptide
  Seed: DPRMCSLMQGSTLPRRSGAAG
DPRMISLMQSSTMPRRSGAAG

SEQ ID NO: 69288 - protein, 21 aa, Artificial Sequence
  Description of Artificial Sequence: Synthetic peptide
  Seed: DPRMCSLMQGSTLPRRSGAAG
DPRMISLMQSSTTPRRSGAAG

SEQ ID NO: 69289 - protein, 21 aa, Artificial Sequence
  Description of Artificial Sequence: Synthetic peptide
  Seed: DPRMCSLMQGSTLPRRSGAAG
DPRMISLMQSSTVPRRSGAAG

SEQ ID NO: 69290 - protein, 21 aa, Artificial Sequence
  Description of Artificial Sequence: Synthetic peptide
  Seed: DPRMCSLMQGSTLPRRSGAAG
DPRMISLMQTSTLPRRSGAAG

SEQ ID NO: 69291 - protein, 21 aa, Artificial Sequence
  Description of Artificial Sequence: Synthetic peptide
  Seed: DPRMCSLMQGSTLPRRSGAAG
DPRMISLMQTSTVPRRSGAAG

SEQ ID NO: 69292 - protein, 21 aa, Artificial Sequence
  Description of Artificial Sequence: Synthetic peptide
  Seed: DPRMCSLMQGSTLPRRSGAAG
DPRMISLQQASTIPRRSGAAG

SEQ ID NO: 69293 - protein, 21 aa, Artificial Sequence
  Description of Artificial Sequence: Synthetic peptide
  Seed: DPRMCSLMQGSTLPRRSGAAG
DPRMISLQQASTLPRRSGAAG

SEQ ID NO: 69294 - protein, 21 aa, Artificial Sequence
  Description of Artificial Sequence: Synthetic peptide
  Seed: DPRMCSLMQGSTLPRRSGAAG
DPRMISLQQASTVPRRSGAAG

SEQ ID NO: 69295 - protein, 21 aa, Artificial Sequence
  Description of Artificial Sequence: Synthetic peptide
  Seed: DPRMCSLMQGSTLPRRSGAAG
DPRMLSLAQASTVPRRSGAAG

SEQ ID NO: 69296 - protein, 21 aa, Artificial Sequence
  Description of Artificial Sequence: Synthetic peptide
  Seed: DPRMCSLMQGSTLPRRSGAAG
DPRMLSLIQASTAPRRSGAAG

SEQ ID NO: 69297 - protein, 21 aa, Artificial Sequence
  Description of Artificial Sequence: Synthetic peptide
  Seed: DPRMCSLMQGSTLPRRSGAAG
DPRMLSLIQASTIPRRSGAAG

SEQ ID NO: 69298 - protein, 21 aa, Artificial Sequence
  Description of Artificial Sequence: Synthetic peptide
  Seed: DPRMCSLMQGSTLPRRSGAAG
DPRMLSLIQASTLPRRSGAAG

SEQ ID NO: 69299 - protein, 21 aa, Artificial Sequence
  Description of Artificial Sequence: Synthetic peptide
  Seed: DPRMCSLMQGSTLPRRSGAAG
DPRMLSLIQASTVPRRSGAAG

SEQ ID NO: 69300 - protein, 21 aa, Artificial Sequence
  Description of Artificial Sequence: Synthetic peptide
  Seed: DPRMCSLMQGSTLPRRSGAAG
DPRMLSLIQGSTVPRRSGAAG

SEQ ID NO: 69301 - protein, 21 aa, Artificial Sequence
  Description of Artificial Sequence: Synthetic peptide
  Seed: DPRMCSLMQGSTLPRRSGAAG
DPRMLSLLQASTAPRRSGAAG

SEQ ID NO: 69302 - protein, 21 aa, Artificial Sequence
  Description of Artificial Sequence: Synthetic peptide
  Seed: DPRMCSLMQGSTLPRRSGAAG
DPRMLSLLQASTIPRRSGAAG

SEQ ID NO: 69303 - protein, 21 aa, Artificial Sequence
  Description of Artificial Sequence: Synthetic peptide
  Seed: DPRMCSLMQGSTLPRRSGAAG
DPRMLSLLQASTLPRRSGAAG

SEQ ID NO: 69304 - protein, 21 aa, Artificial Sequence
  Description of Artificial Sequence: Synthetic peptide
  Seed: DPRMCSLMQGSTLPRRSGAAG
DPRMLSLLQASTMPRRSGAAG

SEQ ID NO: 69305 - protein, 21 aa, Artificial Sequence
  Description of Artificial Sequence: Synthetic peptide
  Seed: DPRMCSLMQGSTLPRRSGAAG
DPRMLSLLQASTSPRRSGAAG

SEQ ID NO: 69306 - protein, 21 aa, Artificial Sequence
  Description of Artificial Sequence: Synthetic peptide
  Seed: DPRMCSLMQGSTLPRRSGAAG
DPRMLSLLQASTTPRRSGAAG

SEQ ID NO: 69307 - protein, 21 aa, Artificial Sequence
  Description of Artificial Sequence: Synthetic peptide
  Seed: DPRMCSLMQGSTLPRRSGAAG
DPRMLSLLQASTVPRRSGAAG

SEQ ID NO: 69308 - protein, 21 aa, Artificial Sequence
  Description of Artificial Sequence: Synthetic peptide
  Seed: DPRMCSLMQGSTLPRRSGAAG
DPRMLSLLQGSTAPRRSGAAG

SEQ ID NO: 69309 - protein, 21 aa, Artificial Sequence
  Description of Artificial Sequence: Synthetic peptide
  Seed: DPRMCSLMQGSTLPRRSGAAG
DPRMLSLLQGSTIPRRSGAAG

SEQ ID NO: 69310 - protein, 21 aa, Artificial Sequence
  Description of Artificial Sequence: Synthetic peptide
  Seed: DPRMCSLMQGSTLPRRSGAAG
DPRMLSLLQGSTLPRRSGAAG

SEQ ID NO: 69311 - protein, 21 aa, Artificial Sequence
  Description of Artificial Sequence: Synthetic peptide
  Seed: DPRMCSLMQGSTLPRRSGAAG
DPRMLSLLQGSTMPRRSGAAG

SEQ ID NO: 69312 - protein, 21 aa, Artificial Sequence
  Description of Artificial Sequence: Synthetic peptide
  Seed: DPRMCSLMQGSTLPRRSGAAG
DPRMLSLLQGSTSPRRSGAAG

SEQ ID NO: 69313 - protein, 21 aa, Artificial Sequence
  Description of Artificial Sequence: Synthetic peptide
  Seed: DPRMCSLMQGSTLPRRSGAAG
DPRMLSLLQGSTTPRRSGAAG

SEQ ID NO: 69314 - protein, 21 aa, Artificial Sequence
  Description of Artificial Sequence: Synthetic peptide
  Seed: DPRMCSLMQGSTLPRRSGAAG
DPRMLSLLQGSTVPRRSGAAG

SEQ ID NO: 69315 - protein, 21 aa, Artificial Sequence
  Description of Artificial Sequence: Synthetic peptide
  Seed: DPRMCSLMQGSTLPRRSGAAG
DPRMLSLLQPSTAPRRSGAAG

SEQ ID NO: 69316 - protein, 21 aa, Artificial Sequence
  Description of Artificial Sequence: Synthetic peptide
  Seed: DPRMCSLMQGSTLPRRSGAAG
DPRMLSLLQPSTIPRRSGAAG

SEQ ID NO: 69317 - protein, 21 aa, Artificial Sequence
  Description of Artificial Sequence: Synthetic peptide
  Seed: DPRMCSLMQGSTLPRRSGAAG
DPRMLSLLQPSTLPRRSGAAG

SEQ ID NO: 69318 - protein, 21 aa, Artificial Sequence
  Description of Artificial Sequence: Synthetic peptide
  Seed: DPRMCSLMQGSTLPRRSGAAG
DPRMLSLLQPSTVPRRSGAAG

SEQ ID NO: 69319 - protein, 21 aa, Artificial Sequence
  Description of Artificial Sequence: Synthetic peptide
  Seed: DPRMCSLMQGSTLPRRSGAAG
DPRMLSLLQSSTAPRRSGAAG

SEQ ID NO: 69320 - protein, 21 aa, Artificial Sequence
  Description of Artificial Sequence: Synthetic peptide
  Seed: DPRMCSLMQGSTLPRRSGAAG
DPRMLSLLQSSTIPRRSGAAG

SEQ ID NO: 69321 - protein, 21 aa, Artificial Sequence
  Description of Artificial Sequence: Synthetic peptide
  Seed: DPRMCSLMQGSTLPRRSGAAG
DPRMLSLLQSSTLPRRSGAAG

SEQ ID NO: 69322 - protein, 21 aa, Artificial Sequence
  Description of Artificial Sequence: Synthetic peptide
  Seed: DPRMCSLMQGSTLPRRSGAAG
DPRMLSLLQSSTVPRRSGAAG

SEQ ID NO: 69323 - protein, 21 aa, Artificial Sequence
  Description of Artificial Sequence: Synthetic peptide
  Seed: DPRMCSLMQGSTLPRRSGAAG
DPRMLSLMQASTAPRRSGAAG

SEQ ID NO: 69324 - protein, 21 aa, Artificial Sequence
  Description of Artificial Sequence: Synthetic peptide
  Seed: DPRMCSLMQGSTLPRRSGAAG
DPRMLSLMQASTIPRRSGAAG

SEQ ID NO: 69325 - protein, 21 aa, Artificial Sequence
  Description of Artificial Sequence: Synthetic peptide
  Seed: DPRMCSLMQGSTLPRRSGAAG
DPRMLSLMQASTLPRRSGAAG

SEQ ID NO: 69326 - protein, 21 aa, Artificial Sequence
  Description of Artificial Sequence: Synthetic peptide
  Seed: DPRMCSLMQGSTLPRRSGAAG
DPRMLSLMQASTMPRRSGAAG

SEQ ID NO: 69327 - protein, 21 aa, Artificial Sequence
  Description of Artificial Sequence: Synthetic peptide
  Seed: DPRMCSLMQGSTLPRRSGAAG
DPRMLSLMQASTSPRRSGAAG

SEQ ID NO: 69328 - protein, 21 aa, Artificial Sequence
  Description of Artificial Sequence: Synthetic peptide
  Seed: DPRMCSLMQGSTLPRRSGAAG
DPRMLSLMQASTTPRRSGAAG

SEQ ID NO: 69329 - protein, 21 aa, Artificial Sequence
  Description of Artificial Sequence: Synthetic peptide
  Seed: DPRMCSLMQGSTLPRRSGAAG
DPRMLSLMQASTVPRRSGAAG

SEQ ID NO: 69330 - protein, 21 aa, Artificial Sequence
  Description of Artificial Sequence: Synthetic peptide
  Seed: DPRMCSLMQGSTLPRRSGAAG
DPRMLSLMQGSTAPRRSGAAG

SEQ ID NO: 69331 - protein, 21 aa, Artificial Sequence
  Description of Artificial Sequence: Synthetic peptide
  Seed: DPRMCSLMQGSTLPRRSGAAG
DPRMLSLMQGSTIPRRSGAAG

SEQ ID NO: 69332 - protein, 21 aa, Artificial Sequence
  Description of Artificial Sequence: Synthetic peptide
  Seed: DPRMCSLMQGSTLPRRSGAAG
DPRMLSLMQGSTLPRRSGAAG

SEQ ID NO: 69333 - protein, 21 aa, Artificial Sequence
  Description of Artificial Sequence: Synthetic peptide
  Seed: DPRMCSLMQGSTLPRRSGAAG
DPRMLSLMQGSTMPRRSGAAG

SEQ ID NO: 69334 - protein, 21 aa, Artificial Sequence
  Description of Artificial Sequence: Synthetic peptide
  Seed: DPRMCSLMQGSTLPRRSGAAG
DPRMLSLMQGSTTPRRSGAAG

SEQ ID NO: 69335 - protein, 21 aa, Artificial Sequence
  Description of Artificial Sequence: Synthetic peptide
  Seed: DPRMCSLMQGSTLPRRSGAAG
DPRMLSLMQGSTVPRRSGAAG

SEQ ID NO: 69336 - protein, 21 aa, Artificial Sequence
  Description of Artificial Sequence: Synthetic peptide
  Seed: DPRMCSLMQGSTLPRRSGAAG
DPRMLSLMQPSTAPRRSGAAG

SEQ ID NO: 69337 - protein, 21 aa, Artificial Sequence
  Description of Artificial Sequence: Synthetic peptide
  Seed: DPRMCSLMQGSTLPRRSGAAG
DPRMLSLMQPSTIPRRSGAAG

SEQ ID NO: 69338 - protein, 21 aa, Artificial Sequence
  Description of Artificial Sequence: Synthetic peptide
  Seed: DPRMCSLMQGSTLPRRSGAAG
DPRMLSLMQPSTLPRRSGAAG

SEQ ID NO: 69339 - protein, 21 aa, Artificial Sequence
  Description of Artificial Sequence: Synthetic peptide
  Seed: DPRMCSLMQGSTLPRRSGAAG
DPRMLSLMQPSTVPRRSGAAG

SEQ ID NO: 69340 - protein, 21 aa, Artificial Sequence
  Description of Artificial Sequence: Synthetic peptide
  Seed: DPRMCSLMQGSTLPRRSGAAG
DPRMLSLMQSSTAPRRSGAAG

SEQ ID NO: 69341 - protein, 21 aa, Artificial Sequence
  Description of Artificial Sequence: Synthetic peptide
  Seed: DPRMCSLMQGSTLPRRSGAAG
DPRMLSLMQSSTIPRRSGAAG

SEQ ID NO: 69342 - protein, 21 aa, Artificial Sequence
  Description of Artificial Sequence: Synthetic peptide
  Seed: DPRMCSLMQGSTLPRRSGAAG
DPRMLSLMQSSTLPRRSGAAG

SEQ ID NO: 69343 - protein, 21 aa, Artificial Sequence
  Description of Artificial Sequence: Synthetic peptide
  Seed: DPRMCSLMQGSTLPRRSGAAG
DPRMLSLMQSSTVPRRSGAAG

SEQ ID NO: 69344 - protein, 21 aa, Artificial Sequence
  Description of Artificial Sequence: Synthetic peptide
  Seed: DPRMCSLMQGSTLPRRSGAAG
DPRMMSLLQASTAPRRSGAAG

SEQ ID NO: 69345 - protein, 21 aa, Artificial Sequence
  Description of Artificial Sequence: Synthetic peptide
  Seed: DPRMCSLMQGSTLPRRSGAAG
DPRMMSLLQASTIPRRSGAAG

SEQ ID NO: 69346 - protein, 21 aa, Artificial Sequence
  Description of Artificial Sequence: Synthetic peptide
  Seed: DPRMCSLMQGSTLPRRSGAAG
DPRMMSLLQASTLPRRSGAAG

SEQ ID NO: 69347 - protein, 21 aa, Artificial Sequence
  Description of Artificial Sequence: Synthetic peptide
  Seed: DPRMCSLMQGSTLPRRSGAAG
DPRMMSLLQASTVPRRSGAAG

SEQ ID NO: 69348 - protein, 21 aa, Artificial Sequence
  Description of Artificial Sequence: Synthetic peptide
  Seed: DPRMCSLMQGSTLPRRSGAAG
DPRMMSLLQGSTAPRRSGAAG

SEQ ID NO: 69349 - protein, 21 aa, Artificial Sequence
  Description of Artificial Sequence: Synthetic peptide
  Seed: DPRMCSLMQGSTLPRRSGAAG
DPRMMSLLQGSTIPRRSGAAG

SEQ ID NO: 69350 - protein, 21 aa, Artificial Sequence
  Description of Artificial Sequence: Synthetic peptide
  Seed: DPRMCSLMQGSTLPRRSGAAG
DPRMMSLLQGSTLPRRSGAAG

SEQ ID NO: 69351 - protein, 21 aa, Artificial Sequence
  Description of Artificial Sequence: Synthetic peptide
  Seed: DPRMCSLMQGSTLPRRSGAAG
DPRMMSLLQGSTVPRRSGAAG

SEQ ID NO: 69352 - protein, 21 aa, Artificial Sequence
  Description of Artificial Sequence: Synthetic peptide
  Seed: DPRMCSLMQGSTLPRRSGAAG
DPRMMSLLQPSTVPRRSGAAG

SEQ ID NO: 69353 - protein, 21 aa, Artificial Sequence
  Description of Artificial Sequence: Synthetic peptide
  Seed: DPRMCSLMQGSTLPRRSGAAG
DPRMMSLLQSSTVPRRSGAAG

SEQ ID NO: 69354 - protein, 21 aa, Artificial Sequence
  Description of Artificial Sequence: Synthetic peptide
  Seed: DPRMCSLMQGSTLPRRSGAAG
DPRMMSLMQASTAPRRSGAAG

SEQ ID NO: 69355 - protein, 21 aa, Artificial Sequence
  Description of Artificial Sequence: Synthetic peptide
  Seed: DPRMCSLMQGSTLPRRSGAAG
DPRMMSLMQASTIPRRSGAAG

SEQ ID NO: 69356 - protein, 21 aa, Artificial Sequence
  Description of Artificial Sequence: Synthetic peptide
  Seed: DPRMCSLMQGSTLPRRSGAAG
DPRMMSLMQASTLPRRSGAAG

SEQ ID NO: 69357 - protein, 21 aa, Artificial Sequence
  Description of Artificial Sequence: Synthetic peptide
  Seed: DPRMCSLMQGSTLPRRSGAAG
DPRMMSLMQASTVPRRSGAAG

SEQ ID NO: 69358 - protein, 21 aa, Artificial Sequence
  Description of Artificial Sequence: Synthetic peptide
  Seed: DPRMCSLMQGSTLPRRSGAAG
DPRMMSLMQGSTAPRRSGAAG

SEQ ID NO: 69359 - protein, 21 aa, Artificial Sequence
  Description of Artificial Sequence: Synthetic peptide
  Seed: DPRMCSLMQGSTLPRRSGAAG
DPRMMSLMQGSTIPRRSGAAG

SEQ ID NO: 69360 - protein, 21 aa, Artificial Sequence
  Description of Artificial Sequence: Synthetic peptide
  Seed: DPRMCSLMQGSTLPRRSGAAG
DPRMMSLMQGSTLPRRSGAAG

SEQ ID NO: 69361 - protein, 21 aa, Artificial Sequence
  Description of Artificial Sequence: Synthetic peptide
  Seed: DPRMCSLMQGSTLPRRSGAAG
DPRMMSLMQGSTVPRRSGAAG

SEQ ID NO: 69362 - protein, 21 aa, Artificial Sequence
  Description of Artificial Sequence: Synthetic peptide
  Seed: DPRMCSLMQGSTLPRRSGAAG
DPRMMSLMQSSTVPRRSGAAG

SEQ ID NO: 69363 - protein, 21 aa, Artificial Sequence
  Description of Artificial Sequence: Synthetic peptide
  Seed: DPRMCSLMQGSTLPRRSGAAG
DPRMVSLLQASTAPRRSGAAG

SEQ ID NO: 69364 - protein, 21 aa, Artificial Sequence
  Description of Artificial Sequence: Synthetic peptide
  Seed: DPRMCSLMQGSTLPRRSGAAG
DPRMVSLLQASTIPRRSGAAG

SEQ ID NO: 69365 - protein, 21 aa, Artificial Sequence
  Description of Artificial Sequence: Synthetic peptide
  Seed: DPRMCSLMQGSTLPRRSGAAG
DPRMVSLLQASTLPRRSGAAG

SEQ ID NO: 69366 - protein, 21 aa, Artificial Sequence
  Description of Artificial Sequence: Synthetic peptide
  Seed: DPRMCSLMQGSTLPRRSGAAG
DPRMVSLLQASTVPRRSGAAG

SEQ ID NO: 69367 - protein, 21 aa, Artificial Sequence
  Description of Artificial Sequence: Synthetic peptide
  Seed: DPRMCSLMQGSTLPRRSGAAG
DPRMVSLLQGSTAPRRSGAAG

SEQ ID NO: 69368 - protein, 21 aa, Artificial Sequence
  Description of Artificial Sequence: Synthetic peptide
  Seed: DPRMCSLMQGSTLPRRSGAAG
DPRMVSLLQGSTIPRRSGAAG

SEQ ID NO: 69369 - protein, 21 aa, Artificial Sequence
  Description of Artificial Sequence: Synthetic peptide
  Seed: DPRMCSLMQGSTLPRRSGAAG
DPRMVSLLQGSTLPRRSGAAG

SEQ ID NO: 69370 - protein, 21 aa, Artificial Sequence
  Description of Artificial Sequence: Synthetic peptide
  Seed: DPRMCSLMQGSTLPRRSGAAG
DPRMVSLLQGSTVPRRSGAAG

SEQ ID NO: 69371 - protein, 21 aa, Artificial Sequence
  Description of Artificial Sequence: Synthetic peptide
  Seed: DPRMCSLMQGSTLPRRSGAAG
DPRMVSLLQPSTVPRRSGAAG

SEQ ID NO: 69372 - protein, 21 aa, Artificial Sequence
  Description of Artificial Sequence: Synthetic peptide
  Seed: DPRMCSLMQGSTLPRRSGAAG
DPRMVSLLQSSTIPRRSGAAG

SEQ ID NO: 69373 - protein, 21 aa, Artificial Sequence
  Description of Artificial Sequence: Synthetic peptide
  Seed: DPRMCSLMQGSTLPRRSGAAG
DPRMVSLLQSSTLPRRSGAAG

SEQ ID NO: 69374 - protein, 21 aa, Artificial Sequence
  Description of Artificial Sequence: Synthetic peptide
  Seed: DPRMCSLMQGSTLPRRSGAAG
DPRMVSLLQSSTVPRRSGAAG

SEQ ID NO: 69375 - protein, 21 aa, Artificial Sequence
  Description of Artificial Sequence: Synthetic peptide
  Seed: DPRMCSLMQGSTLPRRSGAAG
DPRMVSLMQASTAPRRSGAAG

SEQ ID NO: 69376 - protein, 21 aa, Artificial Sequence
  Description of Artificial Sequence: Synthetic peptide
  Seed: DPRMCSLMQGSTLPRRSGAAG
DPRMVSLMQASTIPRRSGAAG

SEQ ID NO: 69377 - protein, 21 aa, Artificial Sequence
  Description of Artificial Sequence: Synthetic peptide
  Seed: DPRMCSLMQGSTLPRRSGAAG
DPRMVSLMQASTLPRRSGAAG

SEQ ID NO: 69378 - protein, 21 aa, Artificial Sequence
  Description of Artificial Sequence: Synthetic peptide
  Seed: DPRMCSLMQGSTLPRRSGAAG
DPRMVSLMQASTVPRRSGAAG

SEQ ID NO: 69379 - protein, 21 aa, Artificial Sequence
  Description of Artificial Sequence: Synthetic peptide
  Seed: DPRMCSLMQGSTLPRRSGAAG
DPRMVSLMQGSTAPRRSGAAG

SEQ ID NO: 69380 - protein, 21 aa, Artificial Sequence
  Description of Artificial Sequence: Synthetic peptide
  Seed: DPRMCSLMQGSTLPRRSGAAG
DPRMVSLMQGSTIPRRSGAAG

SEQ ID NO: 69381 - protein, 21 aa, Artificial Sequence
  Description of Artificial Sequence: Synthetic peptide
  Seed: DPRMCSLMQGSTLPRRSGAAG
DPRMVSLMQGSTLPRRSGAAG

SEQ ID NO: 69382 - protein, 21 aa, Artificial Sequence
  Description of Artificial Sequence: Synthetic peptide
  Seed: DPRMCSLMQGSTLPRRSGAAG
DPRMVSLMQGSTVPRRSGAAG

SEQ ID NO: 69383 - protein, 21 aa, Artificial Sequence
  Description of Artificial Sequence: Synthetic peptide
  Seed: DPRMCSLMQGSTLPRRSGAAG
DPRMVSLMQSSTIPRRSGAAG

SEQ ID NO: 69384 - protein, 21 aa, Artificial Sequence
  Description of Artificial Sequence: Synthetic peptide
  Seed: DPRMCSLMQGSTLPRRSGAAG
DPRMVSLMQSSTLPRRSGAAG

SEQ ID NO: 69385 - protein, 21 aa, Artificial Sequence
  Description of Artificial Sequence: Synthetic peptide
  Seed: DPRMCSLMQGSTLPRRSGAAG
DPRMVSLMQSSTVPRRSGAAG

SEQ ID NO: 69386 - protein, 21 aa, Artificial Sequence
  Description of Artificial Sequence: Synthetic peptide
  Seed: DPRMCSLMQGSTLPRRSGAAG
DPRMWSLAQASTAPRRSGAAG

SEQ ID NO: 69387 - protein, 21 aa, Artificial Sequence
  Description of Artificial Sequence: Synthetic peptide
  Seed: DPRMCSLMQGSTLPRRSGAAG
DPRMWSLAQASTIPRRSGAAG

SEQ ID NO: 69388 - protein, 21 aa, Artificial Sequence
  Description of Artificial Sequence: Synthetic peptide
  Seed: DPRMCSLMQGSTLPRRSGAAG
DPRMWSLAQASTLPRRSGAAG

SEQ ID NO: 69389 - protein, 21 aa, Artificial Sequence
  Description of Artificial Sequence: Synthetic peptide
  Seed: DPRMCSLMQGSTLPRRSGAAG
DPRMWSLAQASTVPRRSGAAG

SEQ ID NO: 69390 - protein, 21 aa, Artificial Sequence
  Description of Artificial Sequence: Synthetic peptide
  Seed: DPRMCSLMQGSTLPRRSGAAG
DPRMWSLAQGSTIPRRSGAAG

SEQ ID NO: 69391 - protein, 21 aa, Artificial Sequence
  Description of Artificial Sequence: Synthetic peptide
  Seed: DPRMCSLMQGSTLPRRSGAAG
DPRMWSLAQGSTLPRRSGAAG

SEQ ID NO: 69392 - protein, 21 aa, Artificial Sequence
  Description of Artificial Sequence: Synthetic peptide
  Seed: DPRMCSLMQGSTLPRRSGAAG
DPRMWSLAQGSTVPRRSGAAG

SEQ ID NO: 69393 - protein, 21 aa, Artificial Sequence
  Description of Artificial Sequence: Synthetic peptide
  Seed: DPRMCSLMQGSTLPRRSGAAG
DPRMWSLAQSSTVPRRSGAAG

SEQ ID NO: 69394 - protein, 21 aa, Artificial Sequence
  Description of Artificial Sequence: Synthetic peptide
  Seed: DPRMCSLMQGSTLPRRSGAAG
DPRMWSLIQASTAPRRSGAAG

SEQ ID NO: 69395 - protein, 21 aa, Artificial Sequence
  Description of Artificial Sequence: Synthetic peptide
  Seed: DPRMCSLMQGSTLPRRSGAAG
DPRMWSLIQASTIPRRSGAAG

SEQ ID NO: 69396 - protein, 21 aa, Artificial Sequence
  Description of Artificial Sequence: Synthetic peptide
  Seed: DPRMCSLMQGSTLPRRSGAAG
DPRMWSLIQASTLPRRSGAAG

SEQ ID NO: 69397 - protein, 21 aa, Artificial Sequence
  Description of Artificial Sequence: Synthetic peptide
  Seed: DPRMCSLMQGSTLPRRSGAAG
DPRMWSLIQASTMPRRSGAAG

SEQ ID NO: 69398 - protein, 21 aa, Artificial Sequence
  Description of Artificial Sequence: Synthetic peptide
  Seed: DPRMCSLMQGSTLPRRSGAAG
DPRMWSLIQASTTPRRSGAAG

SEQ ID NO: 69399 - protein, 21 aa, Artificial Sequence
  Description of Artificial Sequence: Synthetic peptide
  Seed: DPRMCSLMQGSTLPRRSGAAG
DPRMWSLIQASTVPRRSGAAG

SEQ ID NO: 69400 - protein, 21 aa, Artificial Sequence
  Description of Artificial Sequence: Synthetic peptide
  Seed: DPRMCSLMQGSTLPRRSGAAG
DPRMWSLIQGSTAPRRSGAAG

SEQ ID NO: 69401 - protein, 21 aa, Artificial Sequence
  Description of Artificial Sequence: Synthetic peptide
  Seed: DPRMCSLMQGSTLPRRSGAAG
DPRMWSLIQGSTIPRRSGAAG

SEQ ID NO: 69402 - protein, 21 aa, Artificial Sequence
  Description of Artificial Sequence: Synthetic peptide
  Seed: DPRMCSLMQGSTLPRRSGAAG
DPRMWSLIQGSTLPRRSGAAG

SEQ ID NO: 69403 - protein, 21 aa, Artificial Sequence
  Description of Artificial Sequence: Synthetic peptide
  Seed: DPRMCSLMQGSTLPRRSGAAG
DPRMWSLIQGSTVPRRSGAAG

SEQ ID NO: 69404 - protein, 21 aa, Artificial Sequence
  Description of Artificial Sequence: Synthetic peptide
  Seed: DPRMCSLMQGSTLPRRSGAAG
DPRMWSLIQPSTIPRRSGAAG

SEQ ID NO: 69405 - protein, 21 aa, Artificial Sequence
  Description of Artificial Sequence: Synthetic peptide
  Seed: DPRMCSLMQGSTLPRRSGAAG
DPRMWSLIQPSTVPRRSGAAG

SEQ ID NO: 69406 - protein, 21 aa, Artificial Sequence
  Description of Artificial Sequence: Synthetic peptide
  Seed: DPRMCSLMQGSTLPRRSGAAG
DPRMWSLIQSSTAPRRSGAAG

SEQ ID NO: 69407 - protein, 21 aa, Artificial Sequence
  Description of Artificial Sequence: Synthetic peptide
  Seed: DPRMCSLMQGSTLPRRSGAAG
DPRMWSLIQSSTIPRRSGAAG

SEQ ID NO: 69408 - protein, 21 aa, Artificial Sequence
  Description of Artificial Sequence: Synthetic peptide
  Seed: DPRMCSLMQGSTLPRRSGAAG
DPRMWSLIQSSTLPRRSGAAG

SEQ ID NO: 69409 - protein, 21 aa, Artificial Sequence
  Description of Artificial Sequence: Synthetic peptide
  Seed: DPRMCSLMQGSTLPRRSGAAG
DPRMWSLIQSSTVPRRSGAAG

SEQ ID NO: 69410 - protein, 21 aa, Artificial Sequence
  Description of Artificial Sequence: Synthetic peptide
  Seed: DPRMCSLMQGSTLPRRSGAAG
DPRMWSLLQASTAPRRSGAAG

SEQ ID NO: 69411 - protein, 21 aa, Artificial Sequence
  Description of Artificial Sequence: Synthetic peptide
  Seed: DPRMCSLMQGSTLPRRSGAAG
DPRMWSLLQASTGPRRSGAAG

SEQ ID NO: 69412 - protein, 21 aa, Artificial Sequence
  Description of Artificial Sequence: Synthetic peptide
  Seed: DPRMCSLMQGSTLPRRSGAAG
DPRMWSLLQASTIPRRSGAAG

SEQ ID NO: 69413 - protein, 21 aa, Artificial Sequence
  Description of Artificial Sequence: Synthetic peptide
  Seed: DPRMCSLMQGSTLPRRSGAAG
DPRMWSLLQASTLPRRSGAAG

SEQ ID NO: 69414 - protein, 21 aa, Artificial Sequence
  Description of Artificial Sequence: Synthetic peptide
  Seed: DPRMCSLMQGSTLPRRSGAAG
DPRMWSLLQASTMPRRSGAAG

SEQ ID NO: 69415 - protein, 21 aa, Artificial Sequence
  Description of Artificial Sequence: Synthetic peptide
  Seed: DPRMCSLMQGSTLPRRSGAAG
DPRMWSLLQASTSPRRSGAAG

SEQ ID NO: 69416 - protein, 21 aa, Artificial Sequence
  Description of Artificial Sequence: Synthetic peptide
  Seed: DPRMCSLMQGSTLPRRSGAAG
DPRMWSLLQASTTPRRSGAAG

SEQ ID NO: 69417 - protein, 21 aa, Artificial Sequence
  Description of Artificial Sequence: Synthetic peptide
  Seed: DPRMCSLMQGSTLPRRSGAAG
DPRMWSLLQASTVPRRSGAAG

SEQ ID NO: 69418 - protein, 21 aa, Artificial Sequence
  Description of Artificial Sequence: Synthetic peptide
  Seed: DPRMCSLMQGSTLPRRSGAAG
DPRMWSLLQGSTAPRRSGAAG

SEQ ID NO: 69419 - protein, 21 aa, Artificial Sequence
  Description of Artificial Sequence: Synthetic peptide
  Seed: DPRMCSLMQGSTLPRRSGAAG
DPRMWSLLQGSTIPRRSGAAG

SEQ ID NO: 69420 - protein, 21 aa, Artificial Sequence
  Description of Artificial Sequence: Synthetic peptide
  Seed: DPRMCSLMQGSTLPRRSGAAG
DPRMWSLLQGSTLPRRSGAAG

SEQ ID NO: 69421 - protein, 21 aa, Artificial Sequence
  Description of Artificial Sequence: Synthetic peptide
  Seed: DPRMCSLMQGSTLPRRSGAAG
DPRMWSLLQGSTMPRRSGAAG

SEQ ID NO: 69422 - protein, 21 aa, Artificial Sequence
  Description of Artificial Sequence: Synthetic peptide
  Seed: DPRMCSLMQGSTLPRRSGAAG
DPRMWSLLQGSTSPRRSGAAG

SEQ ID NO: 69423 - protein, 21 aa, Artificial Sequence
  Description of Artificial Sequence: Synthetic peptide
  Seed: DPRMCSLMQGSTLPRRSGAAG
DPRMWSLLQGSTTPRRSGAAG

SEQ ID NO: 69424 - protein, 21 aa, Artificial Sequence
  Description of Artificial Sequence: Synthetic peptide
  Seed: DPRMCSLMQGSTLPRRSGAAG
DPRMWSLLQGSTVPRRSGAAG

SEQ ID NO: 69425 - protein, 21 aa, Artificial Sequence
  Description of Artificial Sequence: Synthetic peptide
  Seed: DPRMCSLMQGSTLPRRSGAAG
DPRMWSLLQNSTAPRRSGAAG

SEQ ID NO: 69426 - protein, 21 aa, Artificial Sequence
  Description of Artificial Sequence: Synthetic peptide
  Seed: DPRMCSLMQGSTLPRRSGAAG
DPRMWSLLQNSTIPRRSGAAG

SEQ ID NO: 69427 - protein, 21 aa, Artificial Sequence
  Description of Artificial Sequence: Synthetic peptide
  Seed: DPRMCSLMQGSTLPRRSGAAG
DPRMWSLLQNSTLPRRSGAAG

SEQ ID NO: 69428 - protein, 21 aa, Artificial Sequence
  Description of Artificial Sequence: Synthetic peptide
  Seed: DPRMCSLMQGSTLPRRSGAAG
DPRMWSLLQNSTVPRRSGAAG

SEQ ID NO: 69429 - protein, 21 aa, Artificial Sequence
  Description of Artificial Sequence: Synthetic peptide
  Seed: DPRMCSLMQGSTLPRRSGAAG
DPRMWSLLQPSTAPRRSGAAG

SEQ ID NO: 69430 - protein, 21 aa, Artificial Sequence
  Description of Artificial Sequence: Synthetic peptide
  Seed: DPRMCSLMQGSTLPRRSGAAG
DPRMWSLLQPSTIPRRSGAAG

SEQ ID NO: 69431 - protein, 21 aa, Artificial Sequence
  Description of Artificial Sequence: Synthetic peptide
  Seed: DPRMCSLMQGSTLPRRSGAAG
DPRMWSLLQPSTLPRRSGAAG

SEQ ID NO: 69432 - protein, 21 aa, Artificial Sequence
  Description of Artificial Sequence: Synthetic peptide
  Seed: DPRMCSLMQGSTLPRRSGAAG
DPRMWSLLQPSTMPRRSGAAG

SEQ ID NO: 69433 - protein, 21 aa, Artificial Sequence
  Description of Artificial Sequence: Synthetic peptide
  Seed: DPRMCSLMQGSTLPRRSGAAG
DPRMWSLLQPSTTPRRSGAAG

SEQ ID NO: 69434 - protein, 21 aa, Artificial Sequence
  Description of Artificial Sequence: Synthetic peptide
  Seed: DPRMCSLMQGSTLPRRSGAAG
DPRMWSLLQPSTVPRRSGAAG

SEQ ID NO: 69435 - protein, 21 aa, Artificial Sequence
  Description of Artificial Sequence: Synthetic peptide
  Seed: DPRMCSLMQGSTLPRRSGAAG
DPRMWSLLQSSTAPRRSGAAG

SEQ ID NO: 69436 - protein, 21 aa, Artificial Sequence
  Description of Artificial Sequence: Synthetic peptide
  Seed: DPRMCSLMQGSTLPRRSGAAG
DPRMWSLLQSSTIPRRSGAAG

SEQ ID NO: 69437 - protein, 21 aa, Artificial Sequence
  Description of Artificial Sequence: Synthetic peptide
  Seed: DPRMCSLMQGSTLPRRSGAAG
DPRMWSLLQSSTLPRRSGAAG

SEQ ID NO: 69438 - protein, 21 aa, Artificial Sequence
  Description of Artificial Sequence: Synthetic peptide
  Seed: DPRMCSLMQGSTLPRRSGAAG
DPRMWSLLQSSTMPRRSGAAG

SEQ ID NO: 69439 - protein, 21 aa, Artificial Sequence
  Description of Artificial Sequence: Synthetic peptide
  Seed: DPRMCSLMQGSTLPRRSGAAG
DPRMWSLLQSSTSPRRSGAAG

SEQ ID NO: 69440 - protein, 21 aa, Artificial Sequence
  Description of Artificial Sequence: Synthetic peptide
  Seed: DPRMCSLMQGSTLPRRSGAAG
DPRMWSLLQSSTTPRRSGAAG

SEQ ID NO: 69441 - protein, 21 aa, Artificial Sequence
  Description of Artificial Sequence: Synthetic peptide
  Seed: DPRMCSLMQGSTLPRRSGAAG
DPRMWSLLQSSTVPRRSGAAG

SEQ ID NO: 69442 - protein, 21 aa, Artificial Sequence
  Description of Artificial Sequence: Synthetic peptide
  Seed: DPRMCSLMQGSTLPRRSGAAG
DPRMWSLLQTSTAPRRSGAAG

SEQ ID NO: 69443 - protein, 21 aa, Artificial Sequence
  Description of Artificial Sequence: Synthetic peptide
  Seed: DPRMCSLMQGSTLPRRSGAAG
DPRMWSLLQTSTIPRRSGAAG

SEQ ID NO: 69444 - protein, 21 aa, Artificial Sequence
  Description of Artificial Sequence: Synthetic peptide
  Seed: DPRMCSLMQGSTLPRRSGAAG
DPRMWSLLQTSTLPRRSGAAG

SEQ ID NO: 69445 - protein, 21 aa, Artificial Sequence
  Description of Artificial Sequence: Synthetic peptide
  Seed: DPRMCSLMQGSTLPRRSGAAG
DPRMWSLLQTSTVPRRSGAAG

SEQ ID NO: 69446 - protein, 21 aa, Artificial Sequence
  Description of Artificial Sequence: Synthetic peptide
  Seed: DPRMCSLMQGSTLPRRSGAAG
DPRMWSLMQASTAPRRSGAAG

SEQ ID NO: 69447 - protein, 21 aa, Artificial Sequence
  Description of Artificial Sequence: Synthetic peptide
  Seed: DPRMCSLMQGSTLPRRSGAAG
DPRMWSLMQASTGPRRSGAAG

SEQ ID NO: 69448 - protein, 21 aa, Artificial Sequence
  Description of Artificial Sequence: Synthetic peptide
  Seed: DPRMCSLMQGSTLPRRSGAAG
DPRMWSLMQASTIPRRSGAAG

SEQ ID NO: 69449 - protein, 21 aa, Artificial Sequence
  Description of Artificial Sequence: Synthetic peptide
  Seed: DPRMCSLMQGSTLPRRSGAAG
DPRMWSLMQASTLPRRSGAAG

SEQ ID NO: 69450 - protein, 21 aa, Artificial Sequence
  Description of Artificial Sequence: Synthetic peptide
  Seed: DPRMCSLMQGSTLPRRSGAAG
DPRMWSLMQASTMPRRSGAAG

SEQ ID NO: 69451 - protein, 21 aa, Artificial Sequence
  Description of Artificial Sequence: Synthetic peptide
  Seed: DPRMCSLMQGSTLPRRSGAAG
DPRMWSLMQASTSPRRSGAAG

SEQ ID NO: 69452 - protein, 21 aa, Artificial Sequence
  Description of Artificial Sequence: Synthetic peptide
  Seed: DPRMCSLMQGSTLPRRSGAAG
DPRMWSLMQASTTPRRSGAAG

SEQ ID NO: 69453 - protein, 21 aa, Artificial Sequence
  Description of Artificial Sequence: Synthetic peptide
  Seed: DPRMCSLMQGSTLPRRSGAAG
DPRMWSLMQASTVPRRSGAAG

SEQ ID NO: 69454 - protein, 21 aa, Artificial Sequence
  Description of Artificial Sequence: Synthetic peptide
  Seed: DPRMCSLMQGSTLPRRSGAAG
DPRMWSLMQGSTAPRRSGAAG

SEQ ID NO: 69455 - protein, 21 aa, Artificial Sequence
  Description of Artificial Sequence: Synthetic peptide
  Seed: DPRMCSLMQGSTLPRRSGAAG
DPRMWSLMQGSTIPRRSGAAG

SEQ ID NO: 69456 - protein, 21 aa, Artificial Sequence
  Description of Artificial Sequence: Synthetic peptide
  Seed: DPRMCSLMQGSTLPRRSGAAG
DPRMWSLMQGSTLPRRSGAAG

SEQ ID NO: 69457 - protein, 21 aa, Artificial Sequence
  Description of Artificial Sequence: Synthetic peptide
  Seed: DPRMCSLMQGSTLPRRSGAAG
DPRMWSLMQGSTMPRRSGAAG

SEQ ID NO: 69458 - protein, 21 aa, Artificial Sequence
  Description of Artificial Sequence: Synthetic peptide
  Seed: DPRMCSLMQGSTLPRRSGAAG
DPRMWSLMQGSTSPRRSGAAG

SEQ ID NO: 69459 - protein, 21 aa, Artificial Sequence
  Description of Artificial Sequence: Synthetic peptide
  Seed: DPRMCSLMQGSTLPRRSGAAG
DPRMWSLMQGSTTPRRSGAAG

SEQ ID NO: 69460 - protein, 21 aa, Artificial Sequence
  Description of Artificial Sequence: Synthetic peptide
  Seed: DPRMCSLMQGSTLPRRSGAAG
DPRMWSLMQGSTVPRRSGAAG

SEQ ID NO: 69461 - protein, 21 aa, Artificial Sequence
  Description of Artificial Sequence: Synthetic peptide
  Seed: DPRMCSLMQGSTLPRRSGAAG
DPRMWSLMQNSTAPRRSGAAG

SEQ ID NO: 69462 - protein, 21 aa, Artificial Sequence
  Description of Artificial Sequence: Synthetic peptide
  Seed: DPRMCSLMQGSTLPRRSGAAG
DPRMWSLMQNSTIPRRSGAAG

SEQ ID NO: 69463 - protein, 21 aa, Artificial Sequence
  Description of Artificial Sequence: Synthetic peptide
  Seed: DPRMCSLMQGSTLPRRSGAAG
DPRMWSLMQNSTLPRRSGAAG

SEQ ID NO: 69464 - protein, 21 aa, Artificial Sequence
  Description of Artificial Sequence: Synthetic peptide
  Seed: DPRMCSLMQGSTLPRRSGAAG
DPRMWSLMQNSTVPRRSGAAG

SEQ ID NO: 69465 - protein, 21 aa, Artificial Sequence
  Description of Artificial Sequence: Synthetic peptide
  Seed: DPRMCSLMQGSTLPRRSGAAG
DPRMWSLMQPSTAPRRSGAAG

SEQ ID NO: 69466 - protein, 21 aa, Artificial Sequence
  Description of Artificial Sequence: Synthetic peptide
  Seed: DPRMCSLMQGSTLPRRSGAAG
DPRMWSLMQPSTIPRRSGAAG

SEQ ID NO: 69467 - protein, 21 aa, Artificial Sequence
  Description of Artificial Sequence: Synthetic peptide
  Seed: DPRMCSLMQGSTLPRRSGAAG
DPRMWSLMQPSTLPRRSGAAG

SEQ ID NO: 69468 - protein, 21 aa, Artificial Sequence
  Description of Artificial Sequence: Synthetic peptide
  Seed: DPRMCSLMQGSTLPRRSGAAG
DPRMWSLMQPSTMPRRSGAAG

SEQ ID NO: 69469 - protein, 21 aa, Artificial Sequence
  Description of Artificial Sequence: Synthetic peptide
  Seed: DPRMCSLMQGSTLPRRSGAAG
DPRMWSLMQPSTTPRRSGAAG

SEQ ID NO: 69470 - protein, 21 aa, Artificial Sequence
  Description of Artificial Sequence: Synthetic peptide
  Seed: DPRMCSLMQGSTLPRRSGAAG
DPRMWSLMQPSTVPRRSGAAG

SEQ ID NO: 69471 - protein, 21 aa, Artificial Sequence
  Description of Artificial Sequence: Synthetic peptide
  Seed: DPRMCSLMQGSTLPRRSGAAG
DPRMWSLMQSSTAPRRSGAAG

SEQ ID NO: 69472 - protein, 21 aa, Artificial Sequence
  Description of Artificial Sequence: Synthetic peptide
  Seed: DPRMCSLMQGSTLPRRSGAAG
DPRMWSLMQSSTIPRRSGAAG

SEQ ID NO: 69473 - protein, 21 aa, Artificial Sequence
  Description of Artificial Sequence: Synthetic peptide
  Seed: DPRMCSLMQGSTLPRRSGAAG
DPRMWSLMQSSTLPRRSGAAG

SEQ ID NO: 69474 - protein, 21 aa, Artificial Sequence
  Description of Artificial Sequence: Synthetic peptide
  Seed: DPRMCSLMQGSTLPRRSGAAG
DPRMWSLMQSSTMPRRSGAAG

SEQ ID NO: 69475 - protein, 21 aa, Artificial Sequence
  Description of Artificial Sequence: Synthetic peptide
  Seed: DPRMCSLMQGSTLPRRSGAAG
DPRMWSLMQSSTSPRRSGAAG

SEQ ID NO: 69476 - protein, 21 aa, Artificial Sequence
  Description of Artificial Sequence: Synthetic peptide
  Seed: DPRMCSLMQGSTLPRRSGAAG
DPRMWSLMQSSTTPRRSGAAG

SEQ ID NO: 69477 - protein, 21 aa, Artificial Sequence
  Description of Artificial Sequence: Synthetic peptide
  Seed: DPRMCSLMQGSTLPRRSGAAG
DPRMWSLMQSSTVPRRSGAAG

SEQ ID NO: 69478 - protein, 21 aa, Artificial Sequence
  Description of Artificial Sequence: Synthetic peptide
  Seed: DPRMCSLMQGSTLPRRSGAAG
DPRMWSLMQTSTAPRRSGAAG

SEQ ID NO: 69479 - protein, 21 aa, Artificial Sequence
  Description of Artificial Sequence: Synthetic peptide
  Seed: DPRMCSLMQGSTLPRRSGAAG
DPRMWSLMQTSTIPRRSGAAG

SEQ ID NO: 69480 - protein, 21 aa, Artificial Sequence
  Description of Artificial Sequence: Synthetic peptide
  Seed: DPRMCSLMQGSTLPRRSGAAG
DPRMWSLMQTSTLPRRSGAAG

SEQ ID NO: 69481 - protein, 21 aa, Artificial Sequence
  Description of Artificial Sequence: Synthetic peptide
  Seed: DPRMCSLMQGSTLPRRSGAAG
DPRMWSLMQTSTVPRRSGAAG

SEQ ID NO: 69482 - protein, 21 aa, Artificial Sequence
  Description of Artificial Sequence: Synthetic peptide
  Seed: DPRMCSLMQGSTLPRRSGAAG
DPRMWSLQQASTAPRRSGAAG

SEQ ID NO: 69483 - protein, 21 aa, Artificial Sequence
  Description of Artificial Sequence: Synthetic peptide
  Seed: DPRMCSLMQGSTLPRRSGAAG
DPRMWSLQQASTIPRRSGAAG

SEQ ID NO: 69484 - protein, 21 aa, Artificial Sequence
  Description of Artificial Sequence: Synthetic peptide
  Seed: DPRMCSLMQGSTLPRRSGAAG
DPRMWSLQQASTLPRRSGAAG

SEQ ID NO: 69485 - protein, 21 aa, Artificial Sequence
  Description of Artificial Sequence: Synthetic peptide
  Seed: DPRMCSLMQGSTLPRRSGAAG
DPRMWSLQQASTVPRRSGAAG

SEQ ID NO: 69486 - protein, 21 aa, Artificial Sequence
  Description of Artificial Sequence: Synthetic peptide
  Seed: DPRMCSLMQGSTLPRRSGAAG
DPRMWSLVQASTAPRRSGAAG

SEQ ID NO: 69487 - protein, 21 aa, Artificial Sequence
  Description of Artificial Sequence: Synthetic peptide
  Seed: DPRMCSLMQGSTLPRRSGAAG
DPRMWSLVQASTIPRRSGAAG

SEQ ID NO: 69488 - protein, 21 aa, Artificial Sequence
  Description of Artificial Sequence: Synthetic peptide
  Seed: DPRMCSLMQGSTLPRRSGAAG
DPRMWSLVQASTLPRRSGAAG

SEQ ID NO: 69489 - protein, 21 aa, Artificial Sequence
  Description of Artificial Sequence: Synthetic peptide
  Seed: DPRMCSLMQGSTLPRRSGAAG
DPRMWSLVQASTVPRRSGAAG

SEQ ID NO: 69490 - protein, 21 aa, Artificial Sequence
  Description of Artificial Sequence: Synthetic peptide
  Seed: DPRMCSLMQGSTLPRRSGAAG
DPRMWSLVQGSTVPRRSGAAG

SEQ ID NO: 69491 - protein, 21 aa, Artificial Sequence
  Description of Artificial Sequence: Synthetic peptide
  Seed: DPRMCSLMQGSTLPRRSGAAG
DPRMYSLAQASTAPRRSGAAG

SEQ ID NO: 69492 - protein, 21 aa, Artificial Sequence
  Description of Artificial Sequence: Synthetic peptide
  Seed: DPRMCSLMQGSTLPRRSGAAG
DPRMYSLAQASTIPRRSGAAG

SEQ ID NO: 69493 - protein, 21 aa, Artificial Sequence
  Description of Artificial Sequence: Synthetic peptide
  Seed: DPRMCSLMQGSTLPRRSGAAG
DPRMYSLAQASTLPRRSGAAG

SEQ ID NO: 69494 - protein, 21 aa, Artificial Sequence
  Description of Artificial Sequence: Synthetic peptide
  Seed: DPRMCSLMQGSTLPRRSGAAG
DPRMYSLAQASTMPRRSGAAG

SEQ ID NO: 69495 - protein, 21 aa, Artificial Sequence
  Description of Artificial Sequence: Synthetic peptide
  Seed: DPRMCSLMQGSTLPRRSGAAG
DPRMYSLAQASTSPRRSGAAG

SEQ ID NO: 69496 - protein, 21 aa, Artificial Sequence
  Description of Artificial Sequence: Synthetic peptide
  Seed: DPRMCSLMQGSTLPRRSGAAG
DPRMYSLAQASTTPRRSGAAG

SEQ ID NO: 69497 - protein, 21 aa, Artificial Sequence
  Description of Artificial Sequence: Synthetic peptide
  Seed: DPRMCSLMQGSTLPRRSGAAG
DPRMYSLAQASTVPRRSGAAG

SEQ ID NO: 69498 - protein, 21 aa, Artificial Sequence
  Description of Artificial Sequence: Synthetic peptide
  Seed: DPRMCSLMQGSTLPRRSGAAG
DPRMYSLAQGSTAPRRSGAAG

SEQ ID NO: 69499 - protein, 21 aa, Artificial Sequence
  Description of Artificial Sequence: Synthetic peptide
  Seed: DPRMCSLMQGSTLPRRSGAAG
DPRMYSLAQGSTIPRRSGAAG

SEQ ID NO: 69500 - protein, 21 aa, Artificial Sequence
  Description of Artificial Sequence: Synthetic peptide
  Seed: DPRMCSLMQGSTLPRRSGAAG
DPRMYSLAQGSTLPRRSGAAG

SEQ ID NO: 69501 - protein, 21 aa, Artificial Sequence
  Description of Artificial Sequence: Synthetic peptide
  Seed: DPRMCSLMQGSTLPRRSGAAG
DPRMYSLAQGSTMPRRSGAAG

SEQ ID NO: 69502 - protein, 21 aa, Artificial Sequence
  Description of Artificial Sequence: Synthetic peptide
  Seed: DPRMCSLMQGSTLPRRSGAAG
DPRMYSLAQGSTVPRRSGAAG

SEQ ID NO: 69503 - protein, 21 aa, Artificial Sequence
  Description of Artificial Sequence: Synthetic peptide
  Seed: DPRMCSLMQGSTLPRRSGAAG
DPRMYSLAQNSTVPRRSGAAG

SEQ ID NO: 69504 - protein, 21 aa, Artificial Sequence
  Description of Artificial Sequence: Synthetic peptide
  Seed: DPRMCSLMQGSTLPRRSGAAG
DPRMYSLAQPSTAPRRSGAAG

SEQ ID NO: 69505 - protein, 21 aa, Artificial Sequence
  Description of Artificial Sequence: Synthetic peptide
  Seed: DPRMCSLMQGSTLPRRSGAAG
DPRMYSLAQPSTIPRRSGAAG

SEQ ID NO: 69506 - protein, 21 aa, Artificial Sequence
  Description of Artificial Sequence: Synthetic peptide
  Seed: DPRMCSLMQGSTLPRRSGAAG
DPRMYSLAQPSTLPRRSGAAG

SEQ ID NO: 69507 - protein, 21 aa, Artificial Sequence
  Description of Artificial Sequence: Synthetic peptide
  Seed: DPRMCSLMQGSTLPRRSGAAG
DPRMYSLAQPSTVPRRSGAAG

SEQ ID NO: 69508 - protein, 21 aa, Artificial Sequence
  Description of Artificial Sequence: Synthetic peptide
  Seed: DPRMCSLMQGSTLPRRSGAAG
DPRMYSLAQSSTAPRRSGAAG

SEQ ID NO: 69509 - protein, 21 aa, Artificial Sequence
  Description of Artificial Sequence: Synthetic peptide
  Seed: DPRMCSLMQGSTLPRRSGAAG
DPRMYSLAQSSTIPRRSGAAG

SEQ ID NO: 69510 - protein, 21 aa, Artificial Sequence
  Description of Artificial Sequence: Synthetic peptide
  Seed: DPRMCSLMQGSTLPRRSGAAG
DPRMYSLAQSSTLPRRSGAAG

SEQ ID NO: 69511 - protein, 21 aa, Artificial Sequence
  Description of Artificial Sequence: Synthetic peptide
  Seed: DPRMCSLMQGSTLPRRSGAAG
DPRMYSLAQSSTMPRRSGAAG

SEQ ID NO: 69512 - protein, 21 aa, Artificial Sequence
  Description of Artificial Sequence: Synthetic peptide
  Seed: DPRMCSLMQGSTLPRRSGAAG
DPRMYSLAQSSTVPRRSGAAG

SEQ ID NO: 69513 - protein, 21 aa, Artificial Sequence
  Description of Artificial Sequence: Synthetic peptide
  Seed: DPRMCSLMQGSTLPRRSGAAG
DPRMYSLAQTSTIPRRSGAAG

SEQ ID NO: 69514 - protein, 21 aa, Artificial Sequence
  Description of Artificial Sequence: Synthetic peptide
  Seed: DPRMCSLMQGSTLPRRSGAAG
DPRMYSLAQTSTLPRRSGAAG

SEQ ID NO: 69515 - protein, 21 aa, Artificial Sequence
  Description of Artificial Sequence: Synthetic peptide
  Seed: DPRMCSLMQGSTLPRRSGAAG
DPRMYSLAQTSTVPRRSGAAG

SEQ ID NO: 69516 - protein, 21 aa, Artificial Sequence
  Description of Artificial Sequence: Synthetic peptide
  Seed: DPRMCSLMQGSTLPRRSGAAG
DPRMYSLEQASTIPRRSGAAG

SEQ ID NO: 69517 - protein, 21 aa, Artificial Sequence
  Description of Artificial Sequence: Synthetic peptide
  Seed: DPRMCSLMQGSTLPRRSGAAG
DPRMYSLEQASTLPRRSGAAG

SEQ ID NO: 69518 - protein, 21 aa, Artificial Sequence
  Description of Artificial Sequence: Synthetic peptide
  Seed: DPRMCSLMQGSTLPRRSGAAG
DPRMYSLEQASTVPRRSGAAG

SEQ ID NO: 69519 - protein, 21 aa, Artificial Sequence
  Description of Artificial Sequence: Synthetic peptide
  Seed: DPRMCSLMQGSTLPRRSGAAG
DPRMYSLFQASTAPRRSGAAG

SEQ ID NO: 69520 - protein, 21 aa, Artificial Sequence
  Description of Artificial Sequence: Synthetic peptide
  Seed: DPRMCSLMQGSTLPRRSGAAG
DPRMYSLFQASTIPRRSGAAG

SEQ ID NO: 69521 - protein, 21 aa, Artificial Sequence
  Description of Artificial Sequence: Synthetic peptide
  Seed: DPRMCSLMQGSTLPRRSGAAG
DPRMYSLFQASTLPRRSGAAG

SEQ ID NO: 69522 - protein, 21 aa, Artificial Sequence
  Description of Artificial Sequence: Synthetic peptide
  Seed: DPRMCSLMQGSTLPRRSGAAG
DPRMYSLFQASTVPRRSGAAG

SEQ ID NO: 69523 - protein, 21 aa, Artificial Sequence
  Description of Artificial Sequence: Synthetic peptide
  Seed: DPRMCSLMQGSTLPRRSGAAG
DPRMYSLGQASTIPRRSGAAG

SEQ ID NO: 69524 - protein, 21 aa, Artificial Sequence
  Description of Artificial Sequence: Synthetic peptide
  Seed: DPRMCSLMQGSTLPRRSGAAG
DPRMYSLGQASTLPRRSGAAG

SEQ ID NO: 69525 - protein, 21 aa, Artificial Sequence
  Description of Artificial Sequence: Synthetic peptide
  Seed: DPRMCSLMQGSTLPRRSGAAG
DPRMYSLGQASTVPRRSGAAG

SEQ ID NO: 69526 - protein, 21 aa, Artificial Sequence
  Description of Artificial Sequence: Synthetic peptide
  Seed: DPRMCSLMQGSTLPRRSGAAG
DPRMYSLIQASTAPRRSGAAG

SEQ ID NO: 69527 - protein, 21 aa, Artificial Sequence
  Description of Artificial Sequence: Synthetic peptide
  Seed: DPRMCSLMQGSTLPRRSGAAG
DPRMYSLIQASTGPRRSGAAG

SEQ ID NO: 69528 - protein, 21 aa, Artificial Sequence
  Description of Artificial Sequence: Synthetic peptide
  Seed: DPRMCSLMQGSTLPRRSGAAG
DPRMYSLIQASTIPRRSGAAG

SEQ ID NO: 69529 - protein, 21 aa, Artificial Sequence
  Description of Artificial Sequence: Synthetic peptide
  Seed: DPRMCSLMQGSTLPRRSGAAG
DPRMYSLIQASTLPRRSGAAG

SEQ ID NO: 69530 - protein, 21 aa, Artificial Sequence
  Description of Artificial Sequence: Synthetic peptide
  Seed: DPRMCSLMQGSTLPRRSGAAG
DPRMYSLIQASTMPRRSGAAG

SEQ ID NO: 69531 - protein, 21 aa, Artificial Sequence
  Description of Artificial Sequence: Synthetic peptide
  Seed: DPRMCSLMQGSTLPRRSGAAG
DPRMYSLIQASTSPRRSGAAG

SEQ ID NO: 69532 - protein, 21 aa, Artificial Sequence
  Description of Artificial Sequence: Synthetic peptide
  Seed: DPRMCSLMQGSTLPRRSGAAG
DPRMYSLIQASTTPRRSGAAG

SEQ ID NO: 69533 - protein, 21 aa, Artificial Sequence
  Description of Artificial Sequence: Synthetic peptide
  Seed: DPRMCSLMQGSTLPRRSGAAG
DPRMYSLIQASTVPRRSGAAG

SEQ ID NO: 69534 - protein, 21 aa, Artificial Sequence
  Description of Artificial Sequence: Synthetic peptide
  Seed: DPRMCSLMQGSTLPRRSGAAG
DPRMYSLIQGSTAPRRSGAAG

SEQ ID NO: 69535 - protein, 21 aa, Artificial Sequence
  Description of Artificial Sequence: Synthetic peptide
  Seed: DPRMCSLMQGSTLPRRSGAAG
DPRMYSLIQGSTIPRRSGAAG

SEQ ID NO: 69536 - protein, 21 aa, Artificial Sequence
  Description of Artificial Sequence: Synthetic peptide
  Seed: DPRMCSLMQGSTLPRRSGAAG
DPRMYSLIQGSTLPRRSGAAG

SEQ ID NO: 69537 - protein, 21 aa, Artificial Sequence
  Description of Artificial Sequence: Synthetic peptide
  Seed: DPRMCSLMQGSTLPRRSGAAG
DPRMYSLIQGSTMPRRSGAAG

SEQ ID NO: 69538 - protein, 21 aa, Artificial Sequence
  Description of Artificial Sequence: Synthetic peptide
  Seed: DPRMCSLMQGSTLPRRSGAAG
DPRMYSLIQGSTSPRRSGAAG

SEQ ID NO: 69539 - protein, 21 aa, Artificial Sequence
  Description of Artificial Sequence: Synthetic peptide
  Seed: DPRMCSLMQGSTLPRRSGAAG
DPRMYSLIQGSTTPRRSGAAG

SEQ ID NO: 69540 - protein, 21 aa, Artificial Sequence
  Description of Artificial Sequence: Synthetic peptide
  Seed: DPRMCSLMQGSTLPRRSGAAG
DPRMYSLIQGSTVPRRSGAAG

SEQ ID NO: 69541 - protein, 21 aa, Artificial Sequence
  Description of Artificial Sequence: Synthetic peptide
  Seed: DPRMCSLMQGSTLPRRSGAAG
DPRMYSLIQNSTAPRRSGAAG

SEQ ID NO: 69542 - protein, 21 aa, Artificial Sequence
  Description of Artificial Sequence: Synthetic peptide
  Seed: DPRMCSLMQGSTLPRRSGAAG
DPRMYSLIQNSTIPRRSGAAG

SEQ ID NO: 69543 - protein, 21 aa, Artificial Sequence
  Description of Artificial Sequence: Synthetic peptide
  Seed: DPRMCSLMQGSTLPRRSGAAG
DPRMYSLIQNSTLPRRSGAAG

SEQ ID NO: 69544 - protein, 21 aa, Artificial Sequence
  Description of Artificial Sequence: Synthetic peptide
  Seed: DPRMCSLMQGSTLPRRSGAAG
DPRMYSLIQNSTVPRRSGAAG

SEQ ID NO: 69545 - protein, 21 aa, Artificial Sequence
  Description of Artificial Sequence: Synthetic peptide
  Seed: DPRMCSLMQGSTLPRRSGAAG
DPRMYSLIQPSTAPRRSGAAG

SEQ ID NO: 69546 - protein, 21 aa, Artificial Sequence
  Description of Artificial Sequence: Synthetic peptide
  Seed: DPRMCSLMQGSTLPRRSGAAG
DPRMYSLIQPSTIPRRSGAAG

SEQ ID NO: 69547 - protein, 21 aa, Artificial Sequence
  Description of Artificial Sequence: Synthetic peptide
  Seed: DPRMCSLMQGSTLPRRSGAAG
DPRMYSLIQPSTLPRRSGAAG

SEQ ID NO: 69548 - protein, 21 aa, Artificial Sequence
  Description of Artificial Sequence: Synthetic peptide
  Seed: DPRMCSLMQGSTLPRRSGAAG
DPRMYSLIQPSTMPRRSGAAG

SEQ ID NO: 69549 - protein, 21 aa, Artificial Sequence
  Description of Artificial Sequence: Synthetic peptide
  Seed: DPRMCSLMQGSTLPRRSGAAG
DPRMYSLIQPSTTPRRSGAAG

SEQ ID NO: 69550 - protein, 21 aa, Artificial Sequence
  Description of Artificial Sequence: Synthetic peptide
  Seed: DPRMCSLMQGSTLPRRSGAAG
DPRMYSLIQPSTVPRRSGAAG

SEQ ID NO: 69551 - protein, 21 aa, Artificial Sequence
  Description of Artificial Sequence: Synthetic peptide
  Seed: DPRMCSLMQGSTLPRRSGAAG
DPRMYSLIQSSTAPRRSGAAG

SEQ ID NO: 69552 - protein, 21 aa, Artificial Sequence
  Description of Artificial Sequence: Synthetic peptide
  Seed: DPRMCSLMQGSTLPRRSGAAG
DPRMYSLIQSSTIPRRSGAAG

SEQ ID NO: 69553 - protein, 21 aa, Artificial Sequence
  Description of Artificial Sequence: Synthetic peptide
  Seed: DPRMCSLMQGSTLPRRSGAAG
DPRMYSLIQSSTLPRRSGAAG

SEQ ID NO: 69554 - protein, 21 aa, Artificial Sequence
  Description of Artificial Sequence: Synthetic peptide
  Seed: DPRMCSLMQGSTLPRRSGAAG
DPRMYSLIQSSTMPRRSGAAG

SEQ ID NO: 69555 - protein, 21 aa, Artificial Sequence
  Description of Artificial Sequence: Synthetic peptide
  Seed: DPRMCSLMQGSTLPRRSGAAG
DPRMYSLIQSSTSPRRSGAAG

SEQ ID NO: 69556 - protein, 21 aa, Artificial Sequence
  Description of Artificial Sequence: Synthetic peptide
  Seed: DPRMCSLMQGSTLPRRSGAAG
DPRMYSLIQSSTTPRRSGAAG

SEQ ID NO: 69557 - protein, 21 aa, Artificial Sequence
  Description of Artificial Sequence: Synthetic peptide
  Seed: DPRMCSLMQGSTLPRRSGAAG
DPRMYSLIQSSTVPRRSGAAG

SEQ ID NO: 69558 - protein, 21 aa, Artificial Sequence
  Description of Artificial Sequence: Synthetic peptide
  Seed: DPRMCSLMQGSTLPRRSGAAG
DPRMYSLIQTSTAPRRSGAAG

SEQ ID NO: 69559 - protein, 21 aa, Artificial Sequence
  Description of Artificial Sequence: Synthetic peptide
  Seed: DPRMCSLMQGSTLPRRSGAAG
DPRMYSLIQTSTIPRRSGAAG

SEQ ID NO: 69560 - protein, 21 aa, Artificial Sequence
  Description of Artificial Sequence: Synthetic peptide
  Seed: DPRMCSLMQGSTLPRRSGAAG
DPRMYSLIQTSTLPRRSGAAG

SEQ ID NO: 69561 - protein, 21 aa, Artificial Sequence
  Description of Artificial Sequence: Synthetic peptide
  Seed: DPRMCSLMQGSTLPRRSGAAG
DPRMYSLIQTSTVPRRSGAAG

SEQ ID NO: 69562 - protein, 21 aa, Artificial Sequence
  Description of Artificial Sequence: Synthetic peptide
  Seed: DPRMCSLMQGSTLPRRSGAAG
DPRMYSLIQVSTVPRRSGAAG

SEQ ID NO: 69563 - protein, 21 aa, Artificial Sequence
  Description of Artificial Sequence: Synthetic peptide
  Seed: DPRMCSLMQGSTLPRRSGAAG
DPRMYSLLQASTAPRRSGAAG

SEQ ID NO: 69564 - protein, 21 aa, Artificial Sequence
  Description of Artificial Sequence: Synthetic peptide
  Seed: DPRMCSLMQGSTLPRRSGAAG
DPRMYSLLQASTCPRRSGAAG

SEQ ID NO: 69565 - protein, 21 aa, Artificial Sequence
  Description of Artificial Sequence: Synthetic peptide
  Seed: DPRMCSLMQGSTLPRRSGAAG
DPRMYSLLQASTFPRRSGAAG

SEQ ID NO: 69566 - protein, 21 aa, Artificial Sequence
  Description of Artificial Sequence: Synthetic peptide
  Seed: DPRMCSLMQGSTLPRRSGAAG
DPRMYSLLQASTGPRRSGAAG

SEQ ID NO: 69567 - protein, 21 aa, Artificial Sequence
  Description of Artificial Sequence: Synthetic peptide
  Seed: DPRMCSLMQGSTLPRRSGAAG
DPRMYSLLQASTIPRRSGAAG

SEQ ID NO: 69568 - protein, 21 aa, Artificial Sequence
  Description of Artificial Sequence: Synthetic peptide
  Seed: DPRMCSLMQGSTLPRRSGAAG
DPRMYSLLQASTLPRRSGAAG

SEQ ID NO: 69569 - protein, 21 aa, Artificial Sequence
  Description of Artificial Sequence: Synthetic peptide
  Seed: DPRMCSLMQGSTLPRRSGAAG
DPRMYSLLQASTMPRRSGAAG

SEQ ID NO: 69570 - protein, 21 aa, Artificial Sequence
  Description of Artificial Sequence: Synthetic peptide
  Seed: DPRMCSLMQGSTLPRRSGAAG
DPRMYSLLQASTNPRRSGAAG

SEQ ID NO: 69571 - protein, 21 aa, Artificial Sequence
  Description of Artificial Sequence: Synthetic peptide
  Seed: DPRMCSLMQGSTLPRRSGAAG
DPRMYSLLQASTSPRRSGAAG

SEQ ID NO: 69572 - protein, 21 aa, Artificial Sequence
  Description of Artificial Sequence: Synthetic peptide
  Seed: DPRMCSLMQGSTLPRRSGAAG
DPRMYSLLQASTTPRRSGAAG

SEQ ID NO: 69573 - protein, 21 aa, Artificial Sequence
  Description of Artificial Sequence: Synthetic peptide
  Seed: DPRMCSLMQGSTLPRRSGAAG
DPRMYSLLQASTVPRRSGAAG

SEQ ID NO: 69574 - protein, 21 aa, Artificial Sequence
  Description of Artificial Sequence: Synthetic peptide
  Seed: DPRMCSLMQGSTLPRRSGAAG
DPRMYSLLQGSTAPRRSGAAG

SEQ ID NO: 69575 - protein, 21 aa, Artificial Sequence
  Description of Artificial Sequence: Synthetic peptide
  Seed: DPRMCSLMQGSTLPRRSGAAG
DPRMYSLLQGSTCPRRSGAAG

SEQ ID NO: 69576 - protein, 21 aa, Artificial Sequence
  Description of Artificial Sequence: Synthetic peptide
  Seed: DPRMCSLMQGSTLPRRSGAAG
DPRMYSLLQGSTGPRRSGAAG

SEQ ID NO: 69577 - protein, 21 aa, Artificial Sequence
  Description of Artificial Sequence: Synthetic peptide
  Seed: DPRMCSLMQGSTLPRRSGAAG
DPRMYSLLQGSTIPRRSGAAG

SEQ ID NO: 69578 - protein, 21 aa, Artificial Sequence
  Description of Artificial Sequence: Synthetic peptide
  Seed: DPRMCSLMQGSTLPRRSGAAG
DPRMYSLLQGSTLPRRSGAAG

SEQ ID NO: 69579 - protein, 21 aa, Artificial Sequence
  Description of Artificial Sequence: Synthetic peptide
  Seed: DPRMCSLMQGSTLPRRSGAAG
DPRMYSLLQGSTMPRRSGAAG

SEQ ID NO: 69580 - protein, 21 aa, Artificial Sequence
  Description of Artificial Sequence: Synthetic peptide
  Seed: DPRMCSLMQGSTLPRRSGAAG
DPRMYSLLQGSTSPRRSGAAG

SEQ ID NO: 69581 - protein, 21 aa, Artificial Sequence
  Description of Artificial Sequence: Synthetic peptide
  Seed: DPRMCSLMQGSTLPRRSGAAG
DPRMYSLLQGSTTPRRSGAAG

SEQ ID NO: 69582 - protein, 21 aa, Artificial Sequence
  Description of Artificial Sequence: Synthetic peptide
  Seed: DPRMCSLMQGSTLPRRSGAAG
DPRMYSLLQGSTVPRRSGAAG

SEQ ID NO: 69583 - protein, 21 aa, Artificial Sequence
  Description of Artificial Sequence: Synthetic peptide
  Seed: DPRMCSLMQGSTLPRRSGAAG
DPRMYSLLQISTAPRRSGAAG

SEQ ID NO: 69584 - protein, 21 aa, Artificial Sequence
  Description of Artificial Sequence: Synthetic peptide
  Seed: DPRMCSLMQGSTLPRRSGAAG
DPRMYSLLQISTVPRRSGAAG

SEQ ID NO: 69585 - protein, 21 aa, Artificial Sequence
  Description of Artificial Sequence: Synthetic peptide
  Seed: DPRMCSLMQGSTLPRRSGAAG
DPRMYSLLQNSTAPRRSGAAG

SEQ ID NO: 69586 - protein, 21 aa, Artificial Sequence
  Description of Artificial Sequence: Synthetic peptide
  Seed: DPRMCSLMQGSTLPRRSGAAG
DPRMYSLLQNSTIPRRSGAAG

SEQ ID NO: 69587 - protein, 21 aa, Artificial Sequence
  Description of Artificial Sequence: Synthetic peptide
  Seed: DPRMCSLMQGSTLPRRSGAAG
DPRMYSLLQNSTLPRRSGAAG

SEQ ID NO: 69588 - protein, 21 aa, Artificial Sequence
  Description of Artificial Sequence: Synthetic peptide
  Seed: DPRMCSLMQGSTLPRRSGAAG
DPRMYSLLQNSTMPRRSGAAG

SEQ ID NO: 69589 - protein, 21 aa, Artificial Sequence
  Description of Artificial Sequence: Synthetic peptide
  Seed: DPRMCSLMQGSTLPRRSGAAG
DPRMYSLLQNSTTPRRSGAAG

SEQ ID NO: 69590 - protein, 21 aa, Artificial Sequence
  Description of Artificial Sequence: Synthetic peptide
  Seed: DPRMCSLMQGSTLPRRSGAAG
DPRMYSLLQNSTVPRRSGAAG

SEQ ID NO: 69591 - protein, 21 aa, Artificial Sequence
  Description of Artificial Sequence: Synthetic peptide
  Seed: DPRMCSLMQGSTLPRRSGAAG
DPRMYSLLQPSTAPRRSGAAG

SEQ ID NO: 69592 - protein, 21 aa, Artificial Sequence
  Description of Artificial Sequence: Synthetic peptide
  Seed: DPRMCSLMQGSTLPRRSGAAG
DPRMYSLLQPSTGPRRSGAAG

SEQ ID NO: 69593 - protein, 21 aa, Artificial Sequence
  Description of Artificial Sequence: Synthetic peptide
  Seed: DPRMCSLMQGSTLPRRSGAAG
DPRMYSLLQPSTIPRRSGAAG

SEQ ID NO: 69594 - protein, 21 aa, Artificial Sequence
  Description of Artificial Sequence: Synthetic peptide
  Seed: DPRMCSLMQGSTLPRRSGAAG
DPRMYSLLQPSTLPRRSGAAG

SEQ ID NO: 69595 - protein, 21 aa, Artificial Sequence
  Description of Artificial Sequence: Synthetic peptide
  Seed: DPRMCSLMQGSTLPRRSGAAG
DPRMYSLLQPSTMPRRSGAAG

SEQ ID NO: 69596 - protein, 21 aa, Artificial Sequence
  Description of Artificial Sequence: Synthetic peptide
  Seed: DPRMCSLMQGSTLPRRSGAAG
DPRMYSLLQPSTSPRRSGAAG

SEQ ID NO: 69597 - protein, 21 aa, Artificial Sequence
  Description of Artificial Sequence: Synthetic peptide
  Seed: DPRMCSLMQGSTLPRRSGAAG
DPRMYSLLQPSTTPRRSGAAG

SEQ ID NO: 69598 - protein, 21 aa, Artificial Sequence
  Description of Artificial Sequence: Synthetic peptide
  Seed: DPRMCSLMQGSTLPRRSGAAG
DPRMYSLLQPSTVPRRSGAAG

SEQ ID NO: 69599 - protein, 21 aa, Artificial Sequence
  Description of Artificial Sequence: Synthetic peptide
  Seed: DPRMCSLMQGSTLPRRSGAAG
DPRMYSLLQSSTAPRRSGAAG

SEQ ID NO: 69600 - protein, 21 aa, Artificial Sequence
  Description of Artificial Sequence: Synthetic peptide
  Seed: DPRMCSLMQGSTLPRRSGAAG
DPRMYSLLQSSTGPRRSGAAG

SEQ ID NO: 69601 - protein, 21 aa, Artificial Sequence
  Description of Artificial Sequence: Synthetic peptide
  Seed: DPRMCSLMQGSTLPRRSGAAG
DPRMYSLLQSSTIPRRSGAAG

SEQ ID NO: 69602 - protein, 21 aa, Artificial Sequence
  Description of Artificial Sequence: Synthetic peptide
  Seed: DPRMCSLMQGSTLPRRSGAAG
DPRMYSLLQSSTLPRRSGAAG

SEQ ID NO: 69603 - protein, 21 aa, Artificial Sequence
  Description of Artificial Sequence: Synthetic peptide
  Seed: DPRMCSLMQGSTLPRRSGAAG
DPRMYSLLQSSTMPRRSGAAG

SEQ ID NO: 69604 - protein, 21 aa, Artificial Sequence
  Description of Artificial Sequence: Synthetic peptide
  Seed: DPRMCSLMQGSTLPRRSGAAG
DPRMYSLLQSSTSPRRSGAAG

SEQ ID NO: 69605 - protein, 21 aa, Artificial Sequence
  Description of Artificial Sequence: Synthetic peptide
  Seed: DPRMCSLMQGSTLPRRSGAAG
DPRMYSLLQSSTTPRRSGAAG

SEQ ID NO: 69606 - protein, 21 aa, Artificial Sequence
  Description of Artificial Sequence: Synthetic peptide
  Seed: DPRMCSLMQGSTLPRRSGAAG
DPRMYSLLQSSTVPRRSGAAG

SEQ ID NO: 69607 - protein, 21 aa, Artificial Sequence
  Description of Artificial Sequence: Synthetic peptide
  Seed: DPRMCSLMQGSTLPRRSGAAG
DPRMYSLLQTSTAPRRSGAAG

SEQ ID NO: 69608 - protein, 21 aa, Artificial Sequence
  Description of Artificial Sequence: Synthetic peptide
  Seed: DPRMCSLMQGSTLPRRSGAAG
DPRMYSLLQTSTIPRRSGAAG

SEQ ID NO: 69609 - protein, 21 aa, Artificial Sequence
  Description of Artificial Sequence: Synthetic peptide
  Seed: DPRMCSLMQGSTLPRRSGAAG
DPRMYSLLQTSTLPRRSGAAG

SEQ ID NO: 69610 - protein, 21 aa, Artificial Sequence
  Description of Artificial Sequence: Synthetic peptide
  Seed: DPRMCSLMQGSTLPRRSGAAG
DPRMYSLLQTSTMPRRSGAAG

SEQ ID NO: 69611 - protein, 21 aa, Artificial Sequence
  Description of Artificial Sequence: Synthetic peptide
  Seed: DPRMCSLMQGSTLPRRSGAAG
DPRMYSLLQTSTSPRRSGAAG

SEQ ID NO: 69612 - protein, 21 aa, Artificial Sequence
  Description of Artificial Sequence: Synthetic peptide
  Seed: DPRMCSLMQGSTLPRRSGAAG
DPRMYSLLQTSTTPRRSGAAG

SEQ ID NO: 69613 - protein, 21 aa, Artificial Sequence
  Description of Artificial Sequence: Synthetic peptide
  Seed: DPRMCSLMQGSTLPRRSGAAG
DPRMYSLLQTSTVPRRSGAAG

SEQ ID NO: 69614 - protein, 21 aa, Artificial Sequence
  Description of Artificial Sequence: Synthetic peptide
  Seed: DPRMCSLMQGSTLPRRSGAAG
DPRMYSLLQVSTAPRRSGAAG

SEQ ID NO: 69615 - protein, 21 aa, Artificial Sequence
  Description of Artificial Sequence: Synthetic peptide
  Seed: DPRMCSLMQGSTLPRRSGAAG
DPRMYSLLQVSTIPRRSGAAG

SEQ ID NO: 69616 - protein, 21 aa, Artificial Sequence
  Description of Artificial Sequence: Synthetic peptide
  Seed: DPRMCSLMQGSTLPRRSGAAG
DPRMYSLLQVSTLPRRSGAAG

SEQ ID NO: 69617 - protein, 21 aa, Artificial Sequence
  Description of Artificial Sequence: Synthetic peptide
  Seed: DPRMCSLMQGSTLPRRSGAAG
DPRMYSLLQVSTTPRRSGAAG

SEQ ID NO: 69618 - protein, 21 aa, Artificial Sequence
  Description of Artificial Sequence: Synthetic peptide
  Seed: DPRMCSLMQGSTLPRRSGAAG
DPRMYSLLQVSTVPRRSGAAG

SEQ ID NO: 69619 - protein, 21 aa, Artificial Sequence
  Description of Artificial Sequence: Synthetic peptide
  Seed: DPRMCSLMQGSTLPRRSGAAG
DPRMYSLMQASTAPRRSGAAG

SEQ ID NO: 69620 - protein, 21 aa, Artificial Sequence
  Description of Artificial Sequence: Synthetic peptide
  Seed: DPRMCSLMQGSTLPRRSGAAG
DPRMYSLMQASTCPRRSGAAG

SEQ ID NO: 69621 - protein, 21 aa, Artificial Sequence
  Description of Artificial Sequence: Synthetic peptide
  Seed: DPRMCSLMQGSTLPRRSGAAG
DPRMYSLMQASTFPRRSGAAG

SEQ ID NO: 69622 - protein, 21 aa, Artificial Sequence
  Description of Artificial Sequence: Synthetic peptide
  Seed: DPRMCSLMQGSTLPRRSGAAG
DPRMYSLMQASTGPRRSGAAG

SEQ ID NO: 69623 - protein, 21 aa, Artificial Sequence
  Description of Artificial Sequence: Synthetic peptide
  Seed: DPRMCSLMQGSTLPRRSGAAG
DPRMYSLMQASTIPRRSGAAG

SEQ ID NO: 69624 - protein, 21 aa, Artificial Sequence
  Description of Artificial Sequence: Synthetic peptide
  Seed: DPRMCSLMQGSTLPRRSGAAG
DPRMYSLMQASTLPRRSGAAG

SEQ ID NO: 69625 - protein, 21 aa, Artificial Sequence
  Description of Artificial Sequence: Synthetic peptide
  Seed: DPRMCSLMQGSTLPRRSGAAG
DPRMYSLMQASTMPRRSGAAG

SEQ ID NO: 69626 - protein, 21 aa, Artificial Sequence
  Description of Artificial Sequence: Synthetic peptide
  Seed: DPRMCSLMQGSTLPRRSGAAG
DPRMYSLMQASTNPRRSGAAG

SEQ ID NO: 69627 - protein, 21 aa, Artificial Sequence
  Description of Artificial Sequence: Synthetic peptide
  Seed: DPRMCSLMQGSTLPRRSGAAG
DPRMYSLMQASTSPRRSGAAG

SEQ ID NO: 69628 - protein, 21 aa, Artificial Sequence
  Description of Artificial Sequence: Synthetic peptide
  Seed: DPRMCSLMQGSTLPRRSGAAG
DPRMYSLMQASTTPRRSGAAG

SEQ ID NO: 69629 - protein, 21 aa, Artificial Sequence
  Description of Artificial Sequence: Synthetic peptide
  Seed: DPRMCSLMQGSTLPRRSGAAG
DPRMYSLMQASTVPRRSGAAG

SEQ ID NO: 69630 - protein, 21 aa, Artificial Sequence
  Description of Artificial Sequence: Synthetic peptide
  Seed: DPRMCSLMQGSTLPRRSGAAG
DPRMYSLMQGSTAPRRSGAAG

SEQ ID NO: 69631 - protein, 21 aa, Artificial Sequence
  Description of Artificial Sequence: Synthetic peptide
  Seed: DPRMCSLMQGSTLPRRSGAAG
DPRMYSLMQGSTCPRRSGAAG

SEQ ID NO: 69632 - protein, 21 aa, Artificial Sequence
  Description of Artificial Sequence: Synthetic peptide
  Seed: DPRMCSLMQGSTLPRRSGAAG
DPRMYSLMQGSTFPRRSGAAG

SEQ ID NO: 69633 - protein, 21 aa, Artificial Sequence
  Description of Artificial Sequence: Synthetic peptide
  Seed: DPRMCSLMQGSTLPRRSGAAG
DPRMYSLMQGSTGPRRSGAAG

SEQ ID NO: 69634 - protein, 21 aa, Artificial Sequence
  Description of Artificial Sequence: Synthetic peptide
  Seed: DPRMCSLMQGSTLPRRSGAAG
DPRMYSLMQGSTIPRRSGAAG

SEQ ID NO: 69635 - protein, 21 aa, Artificial Sequence
  Description of Artificial Sequence: Synthetic peptide
  Seed: DPRMCSLMQGSTLPRRSGAAG
DPRMYSLMQGSTLPRRSGAAG

SEQ ID NO: 69636 - protein, 21 aa, Artificial Sequence
  Description of Artificial Sequence: Synthetic peptide
  Seed: DPRMCSLMQGSTLPRRSGAAG
DPRMYSLMQGSTMPRRSGAAG

SEQ ID NO: 69637 - protein, 21 aa, Artificial Sequence
  Description of Artificial Sequence: Synthetic peptide
  Seed: DPRMCSLMQGSTLPRRSGAAG
DPRMYSLMQGSTSPRRSGAAG

SEQ ID NO: 69638 - protein, 21 aa, Artificial Sequence
  Description of Artificial Sequence: Synthetic peptide
  Seed: DPRMCSLMQGSTLPRRSGAAG
DPRMYSLMQGSTTPRRSGAAG

SEQ ID NO: 69639 - protein, 21 aa, Artificial Sequence
  Description of Artificial Sequence: Synthetic peptide
  Seed: DPRMCSLMQGSTLPRRSGAAG
DPRMYSLMQGSTVPRRSGAAG

SEQ ID NO: 69640 - protein, 21 aa, Artificial Sequence
  Description of Artificial Sequence: Synthetic peptide
  Seed: DPRMCSLMQGSTLPRRSGAAG
DPRMYSLMQISTVPRRSGAAG

SEQ ID NO: 69641 - protein, 21 aa, Artificial Sequence
  Description of Artificial Sequence: Synthetic peptide
  Seed: DPRMCSLMQGSTLPRRSGAAG
DPRMYSLMQNSTAPRRSGAAG

SEQ ID NO: 69642 - protein, 21 aa, Artificial Sequence
  Description of Artificial Sequence: Synthetic peptide
  Seed: DPRMCSLMQGSTLPRRSGAAG
DPRMYSLMQNSTIPRRSGAAG

SEQ ID NO: 69643 - protein, 21 aa, Artificial Sequence
  Description of Artificial Sequence: Synthetic peptide
  Seed: DPRMCSLMQGSTLPRRSGAAG
DPRMYSLMQNSTLPRRSGAAG

SEQ ID NO: 69644 - protein, 21 aa, Artificial Sequence
  Description of Artificial Sequence: Synthetic peptide
  Seed: DPRMCSLMQGSTLPRRSGAAG
DPRMYSLMQNSTMPRRSGAAG

SEQ ID NO: 69645 - protein, 21 aa, Artificial Sequence
  Description of Artificial Sequence: Synthetic peptide
  Seed: DPRMCSLMQGSTLPRRSGAAG
DPRMYSLMQNSTTPRRSGAAG

SEQ ID NO: 69646 - protein, 21 aa, Artificial Sequence
  Description of Artificial Sequence: Synthetic peptide
  Seed: DPRMCSLMQGSTLPRRSGAAG
DPRMYSLMQNSTVPRRSGAAG

SEQ ID NO: 69647 - protein, 21 aa, Artificial Sequence
  Description of Artificial Sequence: Synthetic peptide
  Seed: DPRMCSLMQGSTLPRRSGAAG
DPRMYSLMQPSTAPRRSGAAG

SEQ ID NO: 69648 - protein, 21 aa, Artificial Sequence
  Description of Artificial Sequence: Synthetic peptide
  Seed: DPRMCSLMQGSTLPRRSGAAG
DPRMYSLMQPSTIPRRSGAAG

SEQ ID NO: 69649 - protein, 21 aa, Artificial Sequence
  Description of Artificial Sequence: Synthetic peptide
  Seed: DPRMCSLMQGSTLPRRSGAAG
DPRMYSLMQPSTLPRRSGAAG

SEQ ID NO: 69650 - protein, 21 aa, Artificial Sequence
  Description of Artificial Sequence: Synthetic peptide
  Seed: DPRMCSLMQGSTLPRRSGAAG
DPRMYSLMQPSTMPRRSGAAG

SEQ ID NO: 69651 - protein, 21 aa, Artificial Sequence
  Description of Artificial Sequence: Synthetic peptide
  Seed: DPRMCSLMQGSTLPRRSGAAG
DPRMYSLMQPSTSPRRSGAAG

SEQ ID NO: 69652 - protein, 21 aa, Artificial Sequence
  Description of Artificial Sequence: Synthetic peptide
  Seed: DPRMCSLMQGSTLPRRSGAAG
DPRMYSLMQPSTTPRRSGAAG

SEQ ID NO: 69653 - protein, 21 aa, Artificial Sequence
  Description of Artificial Sequence: Synthetic peptide
  Seed: DPRMCSLMQGSTLPRRSGAAG
DPRMYSLMQPSTVPRRSGAAG

SEQ ID NO: 69654 - protein, 21 aa, Artificial Sequence
  Description of Artificial Sequence: Synthetic peptide
  Seed: DPRMCSLMQGSTLPRRSGAAG
DPRMYSLMQSSTAPRRSGAAG

SEQ ID NO: 69655 - protein, 21 aa, Artificial Sequence
  Description of Artificial Sequence: Synthetic peptide
  Seed: DPRMCSLMQGSTLPRRSGAAG
DPRMYSLMQSSTGPRRSGAAG

SEQ ID NO: 69656 - protein, 21 aa, Artificial Sequence
  Description of Artificial Sequence: Synthetic peptide
  Seed: DPRMCSLMQGSTLPRRSGAAG
DPRMYSLMQSSTIPRRSGAAG

SEQ ID NO: 69657 - protein, 21 aa, Artificial Sequence
  Description of Artificial Sequence: Synthetic peptide
  Seed: DPRMCSLMQGSTLPRRSGAAG
DPRMYSLMQSSTLPRRSGAAG

SEQ ID NO: 69658 - protein, 21 aa, Artificial Sequence
  Description of Artificial Sequence: Synthetic peptide
  Seed: DPRMCSLMQGSTLPRRSGAAG
DPRMYSLMQSSTMPRRSGAAG

SEQ ID NO: 69659 - protein, 21 aa, Artificial Sequence
  Description of Artificial Sequence: Synthetic peptide
  Seed: DPRMCSLMQGSTLPRRSGAAG
DPRMYSLMQSSTSPRRSGAAG

SEQ ID NO: 69660 - protein, 21 aa, Artificial Sequence
  Description of Artificial Sequence: Synthetic peptide
  Seed: DPRMCSLMQGSTLPRRSGAAG
DPRMYSLMQSSTTPRRSGAAG

SEQ ID NO: 69661 - protein, 21 aa, Artificial Sequence
  Description of Artificial Sequence: Synthetic peptide
  Seed: DPRMCSLMQGSTLPRRSGAAG
DPRMYSLMQSSTVPRRSGAAG

SEQ ID NO: 69662 - protein, 21 aa, Artificial Sequence
  Description of Artificial Sequence: Synthetic peptide
  Seed: DPRMCSLMQGSTLPRRSGAAG
DPRMYSLMQTSTAPRRSGAAG

SEQ ID NO: 69663 - protein, 21 aa, Artificial Sequence
  Description of Artificial Sequence: Synthetic peptide
  Seed: DPRMCSLMQGSTLPRRSGAAG
DPRMYSLMQTSTIPRRSGAAG

SEQ ID NO: 69664 - protein, 21 aa, Artificial Sequence
  Description of Artificial Sequence: Synthetic peptide
  Seed: DPRMCSLMQGSTLPRRSGAAG
DPRMYSLMQTSTLPRRSGAAG

SEQ ID NO: 69665 - protein, 21 aa, Artificial Sequence
  Description of Artificial Sequence: Synthetic peptide
  Seed: DPRMCSLMQGSTLPRRSGAAG
DPRMYSLMQTSTMPRRSGAAG

SEQ ID NO: 69666 - protein, 21 aa, Artificial Sequence
  Description of Artificial Sequence: Synthetic peptide
  Seed: DPRMCSLMQGSTLPRRSGAAG
DPRMYSLMQTSTSPRRSGAAG

SEQ ID NO: 69667 - protein, 21 aa, Artificial Sequence
  Description of Artificial Sequence: Synthetic peptide
  Seed: DPRMCSLMQGSTLPRRSGAAG
DPRMYSLMQTSTTPRRSGAAG

SEQ ID NO: 69668 - protein, 21 aa, Artificial Sequence
  Description of Artificial Sequence: Synthetic peptide
  Seed: DPRMCSLMQGSTLPRRSGAAG
DPRMYSLMQTSTVPRRSGAAG

SEQ ID NO: 69669 - protein, 21 aa, Artificial Sequence
  Description of Artificial Sequence: Synthetic peptide
  Seed: DPRMCSLMQGSTLPRRSGAAG
DPRMYSLMQVSTAPRRSGAAG

SEQ ID NO: 69670 - protein, 21 aa, Artificial Sequence
  Description of Artificial Sequence: Synthetic peptide
  Seed: DPRMCSLMQGSTLPRRSGAAG
DPRMYSLMQVSTIPRRSGAAG

SEQ ID NO: 69671 - protein, 21 aa, Artificial Sequence
  Description of Artificial Sequence: Synthetic peptide
  Seed: DPRMCSLMQGSTLPRRSGAAG
DPRMYSLMQVSTLPRRSGAAG

SEQ ID NO: 69672 - protein, 21 aa, Artificial Sequence
  Description of Artificial Sequence: Synthetic peptide
  Seed: DPRMCSLMQGSTLPRRSGAAG
DPRMYSLMQVSTMPRRSGAAG

SEQ ID NO: 69673 - protein, 21 aa, Artificial Sequence
  Description of Artificial Sequence: Synthetic peptide
  Seed: DPRMCSLMQGSTLPRRSGAAG
DPRMYSLMQVSTTPRRSGAAG

SEQ ID NO: 69674 - protein, 21 aa, Artificial Sequence
  Description of Artificial Sequence: Synthetic peptide
  Seed: DPRMCSLMQGSTLPRRSGAAG
DPRMYSLMQVSTVPRRSGAAG

SEQ ID NO: 69675 - protein, 21 aa, Artificial Sequence
  Description of Artificial Sequence: Synthetic peptide
  Seed: DPRMCSLMQGSTLPRRSGAAG
DPRMYSLNQASTLPRRSGAAG

SEQ ID NO: 69676 - protein, 21 aa, Artificial Sequence
  Description of Artificial Sequence: Synthetic peptide
  Seed: DPRMCSLMQGSTLPRRSGAAG
DPRMYSLQQASTAPRRSGAAG

SEQ ID NO: 69677 - protein, 21 aa, Artificial Sequence
  Description of Artificial Sequence: Synthetic peptide
  Seed: DPRMCSLMQGSTLPRRSGAAG
DPRMYSLQQASTIPRRSGAAG

SEQ ID NO: 69678 - protein, 21 aa, Artificial Sequence
  Description of Artificial Sequence: Synthetic peptide
  Seed: DPRMCSLMQGSTLPRRSGAAG
DPRMYSLQQASTLPRRSGAAG

SEQ ID NO: 69679 - protein, 21 aa, Artificial Sequence
  Description of Artificial Sequence: Synthetic peptide
  Seed: DPRMCSLMQGSTLPRRSGAAG
DPRMYSLQQASTMPRRSGAAG

SEQ ID NO: 69680 - protein, 21 aa, Artificial Sequence
  Description of Artificial Sequence: Synthetic peptide
  Seed: DPRMCSLMQGSTLPRRSGAAG
DPRMYSLQQASTTPRRSGAAG

SEQ ID NO: 69681 - protein, 21 aa, Artificial Sequence
  Description of Artificial Sequence: Synthetic peptide
  Seed: DPRMCSLMQGSTLPRRSGAAG
DPRMYSLQQASTVPRRSGAAG

SEQ ID NO: 69682 - protein, 21 aa, Artificial Sequence
  Description of Artificial Sequence: Synthetic peptide
  Seed: DPRMCSLMQGSTLPRRSGAAG
DPRMYSLQQGSTAPRRSGAAG

SEQ ID NO: 69683 - protein, 21 aa, Artificial Sequence
  Description of Artificial Sequence: Synthetic peptide
  Seed: DPRMCSLMQGSTLPRRSGAAG
DPRMYSLQQGSTIPRRSGAAG

SEQ ID NO: 69684 - protein, 21 aa, Artificial Sequence
  Description of Artificial Sequence: Synthetic peptide
  Seed: DPRMCSLMQGSTLPRRSGAAG
DPRMYSLQQGSTLPRRSGAAG

SEQ ID NO: 69685 - protein, 21 aa, Artificial Sequence
  Description of Artificial Sequence: Synthetic peptide
  Seed: DPRMCSLMQGSTLPRRSGAAG
DPRMYSLQQGSTVPRRSGAAG

SEQ ID NO: 69686 - protein, 21 aa, Artificial Sequence
  Description of Artificial Sequence: Synthetic peptide
  Seed: DPRMCSLMQGSTLPRRSGAAG
DPRMYSLQQPSTIPRRSGAAG

SEQ ID NO: 69687 - protein, 21 aa, Artificial Sequence
  Description of Artificial Sequence: Synthetic peptide
  Seed: DPRMCSLMQGSTLPRRSGAAG
DPRMYSLQQPSTLPRRSGAAG

SEQ ID NO: 69688 - protein, 21 aa, Artificial Sequence
  Description of Artificial Sequence: Synthetic peptide
  Seed: DPRMCSLMQGSTLPRRSGAAG
DPRMYSLQQPSTVPRRSGAAG

SEQ ID NO: 69689 - protein, 21 aa, Artificial Sequence
  Description of Artificial Sequence: Synthetic peptide
  Seed: DPRMCSLMQGSTLPRRSGAAG
DPRMYSLQQSSTAPRRSGAAG

SEQ ID NO: 69690 - protein, 21 aa, Artificial Sequence
  Description of Artificial Sequence: Synthetic peptide
  Seed: DPRMCSLMQGSTLPRRSGAAG
DPRMYSLQQSSTIPRRSGAAG

SEQ ID NO: 69691 - protein, 21 aa, Artificial Sequence
  Description of Artificial Sequence: Synthetic peptide
  Seed: DPRMCSLMQGSTLPRRSGAAG
DPRMYSLQQSSTLPRRSGAAG

SEQ ID NO: 69692 - protein, 21 aa, Artificial Sequence
  Description of Artificial Sequence: Synthetic peptide
  Seed: DPRMCSLMQGSTLPRRSGAAG
DPRMYSLQQSSTVPRRSGAAG

SEQ ID NO: 69693 - protein, 21 aa, Artificial Sequence
  Description of Artificial Sequence: Synthetic peptide
  Seed: DPRMCSLMQGSTLPRRSGAAG
DPRMYSLSQASTAPRRSGAAG

SEQ ID NO: 69694 - protein, 21 aa, Artificial Sequence
  Description of Artificial Sequence: Synthetic peptide
  Seed: DPRMCSLMQGSTLPRRSGAAG
DPRMYSLSQASTIPRRSGAAG

SEQ ID NO: 69695 - protein, 21 aa, Artificial Sequence
  Description of Artificial Sequence: Synthetic peptide
  Seed: DPRMCSLMQGSTLPRRSGAAG
DPRMYSLSQASTLPRRSGAAG

SEQ ID NO: 69696 - protein, 21 aa, Artificial Sequence
  Description of Artificial Sequence: Synthetic peptide
  Seed: DPRMCSLMQGSTLPRRSGAAG
DPRMYSLSQASTVPRRSGAAG

SEQ ID NO: 69697 - protein, 21 aa, Artificial Sequence
  Description of Artificial Sequence: Synthetic peptide
  Seed: DPRMCSLMQGSTLPRRSGAAG
DPRMYSLTQASTIPRRSGAAG

SEQ ID NO: 69698 - protein, 21 aa, Artificial Sequence
  Description of Artificial Sequence: Synthetic peptide
  Seed: DPRMCSLMQGSTLPRRSGAAG
DPRMYSLTQASTLPRRSGAAG

SEQ ID NO: 69699 - protein, 21 aa, Artificial Sequence
  Description of Artificial Sequence: Synthetic peptide
  Seed: DPRMCSLMQGSTLPRRSGAAG
DPRMYSLTQASTVPRRSGAAG

SEQ ID NO: 69700 - protein, 21 aa, Artificial Sequence
  Description of Artificial Sequence: Synthetic peptide
  Seed: DPRMCSLMQGSTLPRRSGAAG
DPRMYSLVQASTAPRRSGAAG

SEQ ID NO: 69701 - protein, 21 aa, Artificial Sequence
  Description of Artificial Sequence: Synthetic peptide
  Seed: DPRMCSLMQGSTLPRRSGAAG
DPRMYSLVQASTIPRRSGAAG

SEQ ID NO: 69702 - protein, 21 aa, Artificial Sequence
  Description of Artificial Sequence: Synthetic peptide
  Seed: DPRMCSLMQGSTLPRRSGAAG
DPRMYSLVQASTLPRRSGAAG

SEQ ID NO: 69703 - protein, 21 aa, Artificial Sequence
  Description of Artificial Sequence: Synthetic peptide
  Seed: DPRMCSLMQGSTLPRRSGAAG
DPRMYSLVQASTMPRRSGAAG

SEQ ID NO: 69704 - protein, 21 aa, Artificial Sequence
  Description of Artificial Sequence: Synthetic peptide
  Seed: DPRMCSLMQGSTLPRRSGAAG
DPRMYSLVQASTSPRRSGAAG

SEQ ID NO: 69705 - protein, 21 aa, Artificial Sequence
  Description of Artificial Sequence: Synthetic peptide
  Seed: DPRMCSLMQGSTLPRRSGAAG
DPRMYSLVQASTTPRRSGAAG

SEQ ID NO: 69706 - protein, 21 aa, Artificial Sequence
  Description of Artificial Sequence: Synthetic peptide
  Seed: DPRMCSLMQGSTLPRRSGAAG
DPRMYSLVQASTVPRRSGAAG

SEQ ID NO: 69707 - protein, 21 aa, Artificial Sequence
  Description of Artificial Sequence: Synthetic peptide
  Seed: DPRMCSLMQGSTLPRRSGAAG
DPRMYSLVQGSTAPRRSGAAG

SEQ ID NO: 69708 - protein, 21 aa, Artificial Sequence
  Description of Artificial Sequence: Synthetic peptide
  Seed: DPRMCSLMQGSTLPRRSGAAG
DPRMYSLVQGSTIPRRSGAAG

SEQ ID NO: 69709 - protein, 21 aa, Artificial Sequence
  Description of Artificial Sequence: Synthetic peptide
  Seed: DPRMCSLMQGSTLPRRSGAAG
DPRMYSLVQGSTLPRRSGAAG

SEQ ID NO: 69710 - protein, 21 aa, Artificial Sequence
  Description of Artificial Sequence: Synthetic peptide
  Seed: DPRMCSLMQGSTLPRRSGAAG
DPRMYSLVQGSTVPRRSGAAG

SEQ ID NO: 69711 - protein, 21 aa, Artificial Sequence
  Description of Artificial Sequence: Synthetic peptide
  Seed: DPRMCSLMQGSTLPRRSGAAG
DPRMYSLVQPSTAPRRSGAAG

SEQ ID NO: 69712 - protein, 21 aa, Artificial Sequence
  Description of Artificial Sequence: Synthetic peptide
  Seed: DPRMCSLMQGSTLPRRSGAAG
DPRMYSLVQPSTIPRRSGAAG

SEQ ID NO: 69713 - protein, 21 aa, Artificial Sequence
  Description of Artificial Sequence: Synthetic peptide
  Seed: DPRMCSLMQGSTLPRRSGAAG
DPRMYSLVQPSTLPRRSGAAG

SEQ ID NO: 69714 - protein, 21 aa, Artificial Sequence
  Description of Artificial Sequence: Synthetic peptide
  Seed: DPRMCSLMQGSTLPRRSGAAG
DPRMYSLVQPSTVPRRSGAAG

SEQ ID NO: 69715 - protein, 21 aa, Artificial Sequence
  Description of Artificial Sequence: Synthetic peptide
  Seed: DPRMCSLMQGSTLPRRSGAAG
DPRMYSLVQSSTAPRRSGAAG

SEQ ID NO: 69716 - protein, 21 aa, Artificial Sequence
  Description of Artificial Sequence: Synthetic peptide
  Seed: DPRMCSLMQGSTLPRRSGAAG
DPRMYSLVQSSTIPRRSGAAG

SEQ ID NO: 69717 - protein, 21 aa, Artificial Sequence
  Description of Artificial Sequence: Synthetic peptide
  Seed: DPRMCSLMQGSTLPRRSGAAG
DPRMYSLVQSSTLPRRSGAAG

SEQ ID NO: 69718 - protein, 21 aa, Artificial Sequence
  Description of Artificial Sequence: Synthetic peptide
  Seed: DPRMCSLMQGSTLPRRSGAAG
DPRMYSLVQSSTVPRRSGAAG

SEQ ID NO: 69719 - protein, 21 aa, Artificial Sequence
  Description of Artificial Sequence: Synthetic peptide
  Seed: DPRMCSLMQGSTLPRRSGAAG
DPRMCSLMFGSALARRAGAAG

SEQ ID NO: 69720 - protein, 21 aa, Artificial Sequence
  Description of Artificial Sequence: Synthetic peptide
  Seed: DPRMCSLMQGSTLPRRSGAAG
DPRMCSLMFGSILARRAGAAG

SEQ ID NO: 69721 - protein, 21 aa, Artificial Sequence
  Description of Artificial Sequence: Synthetic peptide
  Seed: DPRMCSLMQGSTLPRRSGAAG
DPRMCSLMFGSILARRNGAAG

SEQ ID NO: 69722 - protein, 21 aa, Artificial Sequence
  Description of Artificial Sequence: Synthetic peptide
  Seed: DPRMCSLMQGSTLPRRSGAAG
DPRMCSLMFGSILARRSGAAG

SEQ ID NO: 69723 - protein, 21 aa, Artificial Sequence
  Description of Artificial Sequence: Synthetic peptide
  Seed: DPRMCSLMQGSTLPRRSGAAG
DPRMCSLMFGSILARRVGAAG

SEQ ID NO: 69724 - protein, 21 aa, Artificial Sequence
  Description of Artificial Sequence: Synthetic peptide
  Seed: DPRMCSLMQGSTLPRRSGAAG
DPRMCSLMFGSILPRRAGAAG

SEQ ID NO: 69725 - protein, 21 aa, Artificial Sequence
  Description of Artificial Sequence: Synthetic peptide
  Seed: DPRMCSLMQGSTLPRRSGAAG
DPRMCSLMFGSILSRRAGAAG

SEQ ID NO: 69726 - protein, 21 aa, Artificial Sequence
  Description of Artificial Sequence: Synthetic peptide
  Seed: DPRMCSLMQGSTLPRRSGAAG
DPRMCSLMFGSILSRRNGAAG

SEQ ID NO: 69727 - protein, 21 aa, Artificial Sequence
  Description of Artificial Sequence: Synthetic peptide
  Seed: DPRMCSLMQGSTLPRRSGAAG
DPRMCSLMFGSILTRRAGAAG

SEQ ID NO: 69728 - protein, 21 aa, Artificial Sequence
  Description of Artificial Sequence: Synthetic peptide
  Seed: DPRMCSLMQGSTLPRRSGAAG
DPRMCSLMFGSILTRRNGAAG

SEQ ID NO: 69729 - protein, 21 aa, Artificial Sequence
  Description of Artificial Sequence: Synthetic peptide
  Seed: DPRMCSLMQGSTLPRRSGAAG
DPRMCSLMFGSLLARRAGAAG

SEQ ID NO: 69730 - protein, 21 aa, Artificial Sequence
  Description of Artificial Sequence: Synthetic peptide
  Seed: DPRMCSLMQGSTLPRRSGAAG
DPRMCSLMFGSLLARRIGAAG

SEQ ID NO: 69731 - protein, 21 aa, Artificial Sequence
  Description of Artificial Sequence: Synthetic peptide
  Seed: DPRMCSLMQGSTLPRRSGAAG
DPRMCSLMFGSLLARRLGAAG

SEQ ID NO: 69732 - protein, 21 aa, Artificial Sequence
  Description of Artificial Sequence: Synthetic peptide
  Seed: DPRMCSLMQGSTLPRRSGAAG
DPRMCSLMFGSLLARRNGAAG

SEQ ID NO: 69733 - protein, 21 aa, Artificial Sequence
  Description of Artificial Sequence: Synthetic peptide
  Seed: DPRMCSLMQGSTLPRRSGAAG
DPRMCSLMFGSLLARRSGAAG

SEQ ID NO: 69734 - protein, 21 aa, Artificial Sequence
  Description of Artificial Sequence: Synthetic peptide
  Seed: DPRMCSLMQGSTLPRRSGAAG
DPRMCSLMFGSLLARRTGAAG

SEQ ID NO: 69735 - protein, 21 aa, Artificial Sequence
  Description of Artificial Sequence: Synthetic peptide
  Seed: DPRMCSLMQGSTLPRRSGAAG
DPRMCSLMFGSLLARRVGAAG

SEQ ID NO: 69736 - protein, 21 aa, Artificial Sequence
  Description of Artificial Sequence: Synthetic peptide
  Seed: DPRMCSLMQGSTLPRRSGAAG
DPRMCSLMFGSLLPRRAGAAG

SEQ ID NO: 69737 - protein, 21 aa, Artificial Sequence
  Description of Artificial Sequence: Synthetic peptide
  Seed: DPRMCSLMQGSTLPRRSGAAG
DPRMCSLMFGSLLPRRVGAAG

SEQ ID NO: 69738 - protein, 21 aa, Artificial Sequence
  Description of Artificial Sequence: Synthetic peptide
  Seed: DPRMCSLMQGSTLPRRSGAAG
DPRMCSLMFGSLLSRRAGAAG

SEQ ID NO: 69739 - protein, 21 aa, Artificial Sequence
  Description of Artificial Sequence: Synthetic peptide
  Seed: DPRMCSLMQGSTLPRRSGAAG
DPRMCSLMFGSLLSRRIGAAG

SEQ ID NO: 69740 - protein, 21 aa, Artificial Sequence
  Description of Artificial Sequence: Synthetic peptide
  Seed: DPRMCSLMQGSTLPRRSGAAG
DPRMCSLMFGSLLSRRNGAAG

SEQ ID NO: 69741 - protein, 21 aa, Artificial Sequence
  Description of Artificial Sequence: Synthetic peptide
  Seed: DPRMCSLMQGSTLPRRSGAAG
DPRMCSLMFGSLLSRRSGAAG

SEQ ID NO: 69742 - protein, 21 aa, Artificial Sequence
  Description of Artificial Sequence: Synthetic peptide
  Seed: DPRMCSLMQGSTLPRRSGAAG
DPRMCSLMFGSLLSRRVGAAG

SEQ ID NO: 69743 - protein, 21 aa, Artificial Sequence
  Description of Artificial Sequence: Synthetic peptide
  Seed: DPRMCSLMQGSTLPRRSGAAG
DPRMCSLMFGSLLTRRAGAAG

SEQ ID NO: 69744 - protein, 21 aa, Artificial Sequence
  Description of Artificial Sequence: Synthetic peptide
  Seed: DPRMCSLMQGSTLPRRSGAAG
DPRMCSLMFGSLLTRRNGAAG

SEQ ID NO: 69745 - protein, 21 aa, Artificial Sequence
  Description of Artificial Sequence: Synthetic peptide
  Seed: DPRMCSLMQGSTLPRRSGAAG
DPRMCSLMFGSLLTRRVGAAG

SEQ ID NO: 69746 - protein, 21 aa, Artificial Sequence
  Description of Artificial Sequence: Synthetic peptide
  Seed: DPRMCSLMQGSTLPRRSGAAG
DPRMCSLMFGSLLVRRAGAAG

SEQ ID NO: 69747 - protein, 21 aa, Artificial Sequence
  Description of Artificial Sequence: Synthetic peptide
  Seed: DPRMCSLMQGSTLPRRSGAAG
DPRMCSLMFGSLLVRRNGAAG

SEQ ID NO: 69748 - protein, 21 aa, Artificial Sequence
  Description of Artificial Sequence: Synthetic peptide
  Seed: DPRMCSLMQGSTLPRRSGAAG
DPRMCSLMFGSMLARRAGAAG

SEQ ID NO: 69749 - protein, 21 aa, Artificial Sequence
  Description of Artificial Sequence: Synthetic peptide
  Seed: DPRMCSLMQGSTLPRRSGAAG
DPRMCSLMFGSMLARRIGAAG

SEQ ID NO: 69750 - protein, 21 aa, Artificial Sequence
  Description of Artificial Sequence: Synthetic peptide
  Seed: DPRMCSLMQGSTLPRRSGAAG
DPRMCSLMFGSMLARRLGAAG

SEQ ID NO: 69751 - protein, 21 aa, Artificial Sequence
  Description of Artificial Sequence: Synthetic peptide
  Seed: DPRMCSLMQGSTLPRRSGAAG
DPRMCSLMFGSMLARRMGAAG

SEQ ID NO: 69752 - protein, 21 aa, Artificial Sequence
  Description of Artificial Sequence: Synthetic peptide
  Seed: DPRMCSLMQGSTLPRRSGAAG
DPRMCSLMFGSMLARRNGAAG

SEQ ID NO: 69753 - protein, 21 aa, Artificial Sequence
  Description of Artificial Sequence: Synthetic peptide
  Seed: DPRMCSLMQGSTLPRRSGAAG
DPRMCSLMFGSMLARRSGAAG

SEQ ID NO: 69754 - protein, 21 aa, Artificial Sequence
  Description of Artificial Sequence: Synthetic peptide
  Seed: DPRMCSLMQGSTLPRRSGAAG
DPRMCSLMFGSMLARRTGAAG

SEQ ID NO: 69755 - protein, 21 aa, Artificial Sequence
  Description of Artificial Sequence: Synthetic peptide
  Seed: DPRMCSLMQGSTLPRRSGAAG
DPRMCSLMFGSMLARRVGAAG

SEQ ID NO: 69756 - protein, 21 aa, Artificial Sequence
  Description of Artificial Sequence: Synthetic peptide
  Seed: DPRMCSLMQGSTLPRRSGAAG
DPRMCSLMFGSMLGRRAGAAG

SEQ ID NO: 69757 - protein, 21 aa, Artificial Sequence
  Description of Artificial Sequence: Synthetic peptide
  Seed: DPRMCSLMQGSTLPRRSGAAG
DPRMCSLMFGSMLPRRAGAAG

SEQ ID NO: 69758 - protein, 21 aa, Artificial Sequence
  Description of Artificial Sequence: Synthetic peptide
  Seed: DPRMCSLMQGSTLPRRSGAAG
DPRMCSLMFGSMLPRRIGAAG

SEQ ID NO: 69759 - protein, 21 aa, Artificial Sequence
  Description of Artificial Sequence: Synthetic peptide
  Seed: DPRMCSLMQGSTLPRRSGAAG
DPRMCSLMFGSMLPRRLGAAG

SEQ ID NO: 69760 - protein, 21 aa, Artificial Sequence
  Description of Artificial Sequence: Synthetic peptide
  Seed: DPRMCSLMQGSTLPRRSGAAG
DPRMCSLMFGSMLPRRNGAAG

SEQ ID NO: 69761 - protein, 21 aa, Artificial Sequence
  Description of Artificial Sequence: Synthetic peptide
  Seed: DPRMCSLMQGSTLPRRSGAAG
DPRMCSLMFGSMLPRRSGAAG

SEQ ID NO: 69762 - protein, 21 aa, Artificial Sequence
  Description of Artificial Sequence: Synthetic peptide
  Seed: DPRMCSLMQGSTLPRRSGAAG
DPRMCSLMFGSMLPRRVGAAG

SEQ ID NO: 69763 - protein, 21 aa, Artificial Sequence
  Description of Artificial Sequence: Synthetic peptide
  Seed: DPRMCSLMQGSTLPRRSGAAG
DPRMCSLMFGSMLSRRAGAAG

SEQ ID NO: 69764 - protein, 21 aa, Artificial Sequence
  Description of Artificial Sequence: Synthetic peptide
  Seed: DPRMCSLMQGSTLPRRSGAAG
DPRMCSLMFGSMLSRRIGAAG

SEQ ID NO: 69765 - protein, 21 aa, Artificial Sequence
  Description of Artificial Sequence: Synthetic peptide
  Seed: DPRMCSLMQGSTLPRRSGAAG
DPRMCSLMFGSMLSRRLGAAG

SEQ ID NO: 69766 - protein, 21 aa, Artificial Sequence
  Description of Artificial Sequence: Synthetic peptide
  Seed: DPRMCSLMQGSTLPRRSGAAG
DPRMCSLMFGSMLSRRNGAAG

SEQ ID NO: 69767 - protein, 21 aa, Artificial Sequence
  Description of Artificial Sequence: Synthetic peptide
  Seed: DPRMCSLMQGSTLPRRSGAAG
DPRMCSLMFGSMLSRRSGAAG

SEQ ID NO: 69768 - protein, 21 aa, Artificial Sequence
  Description of Artificial Sequence: Synthetic peptide
  Seed: DPRMCSLMQGSTLPRRSGAAG
DPRMCSLMFGSMLSRRTGAAG

SEQ ID NO: 69769 - protein, 21 aa, Artificial Sequence
  Description of Artificial Sequence: Synthetic peptide
  Seed: DPRMCSLMQGSTLPRRSGAAG
DPRMCSLMFGSMLSRRVGAAG

SEQ ID NO: 69770 - protein, 21 aa, Artificial Sequence
  Description of Artificial Sequence: Synthetic peptide
  Seed: DPRMCSLMQGSTLPRRSGAAG
DPRMCSLMFGSMLTRRAGAAG

SEQ ID NO: 69771 - protein, 21 aa, Artificial Sequence
  Description of Artificial Sequence: Synthetic peptide
  Seed: DPRMCSLMQGSTLPRRSGAAG
DPRMCSLMFGSMLTRRIGAAG

SEQ ID NO: 69772 - protein, 21 aa, Artificial Sequence
  Description of Artificial Sequence: Synthetic peptide
  Seed: DPRMCSLMQGSTLPRRSGAAG
DPRMCSLMFGSMLTRRLGAAG

SEQ ID NO: 69773 - protein, 21 aa, Artificial Sequence
  Description of Artificial Sequence: Synthetic peptide
  Seed: DPRMCSLMQGSTLPRRSGAAG
DPRMCSLMFGSMLTRRNGAAG

SEQ ID NO: 69774 - protein, 21 aa, Artificial Sequence
  Description of Artificial Sequence: Synthetic peptide
  Seed: DPRMCSLMQGSTLPRRSGAAG
DPRMCSLMFGSMLTRRSGAAG

SEQ ID NO: 69775 - protein, 21 aa, Artificial Sequence
  Description of Artificial Sequence: Synthetic peptide
  Seed: DPRMCSLMQGSTLPRRSGAAG
DPRMCSLMFGSMLTRRTGAAG

SEQ ID NO: 69776 - protein, 21 aa, Artificial Sequence
  Description of Artificial Sequence: Synthetic peptide
  Seed: DPRMCSLMQGSTLPRRSGAAG
DPRMCSLMFGSMLTRRVGAAG

SEQ ID NO: 69777 - protein, 21 aa, Artificial Sequence
  Description of Artificial Sequence: Synthetic peptide
  Seed: DPRMCSLMQGSTLPRRSGAAG
DPRMCSLMFGSMLVRRAGAAG

SEQ ID NO: 69778 - protein, 21 aa, Artificial Sequence
  Description of Artificial Sequence: Synthetic peptide
  Seed: DPRMCSLMQGSTLPRRSGAAG
DPRMCSLMFGSMLVRRNGAAG

SEQ ID NO: 69779 - protein, 21 aa, Artificial Sequence
  Description of Artificial Sequence: Synthetic peptide
  Seed: DPRMCSLMQGSTLPRRSGAAG
DPRMCSLMFGSMLVRRSGAAG

SEQ ID NO: 69780 - protein, 21 aa, Artificial Sequence
  Description of Artificial Sequence: Synthetic peptide
  Seed: DPRMCSLMQGSTLPRRSGAAG
DPRMCSLMFGSMLVRRVGAAG

SEQ ID NO: 69781 - protein, 21 aa, Artificial Sequence
  Description of Artificial Sequence: Synthetic peptide
  Seed: DPRMCSLMQGSTLPRRSGAAG
DPRMCSLMYGSILARRAGAAG

SEQ ID NO: 69782 - protein, 21 aa, Artificial Sequence
  Description of Artificial Sequence: Synthetic peptide
  Seed: DPRMCSLMQGSTLPRRSGAAG
DPRMCSLMYGSILARRVGAAG

SEQ ID NO: 69783 - protein, 21 aa, Artificial Sequence
  Description of Artificial Sequence: Synthetic peptide
  Seed: DPRMCSLMQGSTLPRRSGAAG
DPRMCSLMYGSLLARRAGAAG

SEQ ID NO: 69784 - protein, 21 aa, Artificial Sequence
  Description of Artificial Sequence: Synthetic peptide
  Seed: DPRMCSLMQGSTLPRRSGAAG
DPRMCSLMYGSLLARRIGAAG

SEQ ID NO: 69785 - protein, 21 aa, Artificial Sequence
  Description of Artificial Sequence: Synthetic peptide
  Seed: DPRMCSLMQGSTLPRRSGAAG
DPRMCSLMYGSLLARRLGAAG

SEQ ID NO: 69786 - protein, 21 aa, Artificial Sequence
  Description of Artificial Sequence: Synthetic peptide
  Seed: DPRMCSLMQGSTLPRRSGAAG
DPRMCSLMYGSLLARRNGAAG

SEQ ID NO: 69787 - protein, 21 aa, Artificial Sequence
  Description of Artificial Sequence: Synthetic peptide
  Seed: DPRMCSLMQGSTLPRRSGAAG
DPRMCSLMYGSLLARRSGAAG

SEQ ID NO: 69788 - protein, 21 aa, Artificial Sequence
  Description of Artificial Sequence: Synthetic peptide
  Seed: DPRMCSLMQGSTLPRRSGAAG
DPRMCSLMYGSLLARRVGAAG

SEQ ID NO: 69789 - protein, 21 aa, Artificial Sequence
  Description of Artificial Sequence: Synthetic peptide
  Seed: DPRMCSLMQGSTLPRRSGAAG
DPRMCSLMYGSLLPRRAGAAG

SEQ ID NO: 69790 - protein, 21 aa, Artificial Sequence
  Description of Artificial Sequence: Synthetic peptide
  Seed: DPRMCSLMQGSTLPRRSGAAG
DPRMCSLMYGSLLSRRAGAAG

SEQ ID NO: 69791 - protein, 21 aa, Artificial Sequence
  Description of Artificial Sequence: Synthetic peptide
  Seed: DPRMCSLMQGSTLPRRSGAAG
DPRMCSLMYGSLLSRRVGAAG

SEQ ID NO: 69792 - protein, 21 aa, Artificial Sequence
  Description of Artificial Sequence: Synthetic peptide
  Seed: DPRMCSLMQGSTLPRRSGAAG
DPRMCSLMYGSLLTRRAGAAG

SEQ ID NO: 69793 - protein, 21 aa, Artificial Sequence
  Description of Artificial Sequence: Synthetic peptide
  Seed: DPRMCSLMQGSTLPRRSGAAG
DPRMCSLMYGSLLTRRVGAAG

SEQ ID NO: 69794 - protein, 21 aa, Artificial Sequence
  Description of Artificial Sequence: Synthetic peptide
  Seed: DPRMCSLMQGSTLPRRSGAAG
DPRMCSLMYGSMLARRAGAAG

SEQ ID NO: 69795 - protein, 21 aa, Artificial Sequence
  Description of Artificial Sequence: Synthetic peptide
  Seed: DPRMCSLMQGSTLPRRSGAAG
DPRMCSLMYGSMLARRIGAAG

SEQ ID NO: 69796 - protein, 21 aa, Artificial Sequence
  Description of Artificial Sequence: Synthetic peptide
  Seed: DPRMCSLMQGSTLPRRSGAAG
DPRMCSLMYGSMLARRLGAAG

SEQ ID NO: 69797 - protein, 21 aa, Artificial Sequence
  Description of Artificial Sequence: Synthetic peptide
  Seed: DPRMCSLMQGSTLPRRSGAAG
DPRMCSLMYGSMLARRMGAAG

SEQ ID NO: 69798 - protein, 21 aa, Artificial Sequence
  Description of Artificial Sequence: Synthetic peptide
  Seed: DPRMCSLMQGSTLPRRSGAAG
DPRMCSLMYGSMLARRNGAAG

SEQ ID NO: 69799 - protein, 21 aa, Artificial Sequence
  Description of Artificial Sequence: Synthetic peptide
  Seed: DPRMCSLMQGSTLPRRSGAAG
DPRMCSLMYGSMLARRSGAAG

SEQ ID NO: 69800 - protein, 21 aa, Artificial Sequence
  Description of Artificial Sequence: Synthetic peptide
  Seed: DPRMCSLMQGSTLPRRSGAAG
DPRMCSLMYGSMLARRTGAAG

SEQ ID NO: 69801 - protein, 21 aa, Artificial Sequence
  Description of Artificial Sequence: Synthetic peptide
  Seed: DPRMCSLMQGSTLPRRSGAAG
DPRMCSLMYGSMLARRVGAAG

SEQ ID NO: 69802 - protein, 21 aa, Artificial Sequence
  Description of Artificial Sequence: Synthetic peptide
  Seed: DPRMCSLMQGSTLPRRSGAAG
DPRMCSLMYGSMLPRRAGAAG

SEQ ID NO: 69803 - protein, 21 aa, Artificial Sequence
  Description of Artificial Sequence: Synthetic peptide
  Seed: DPRMCSLMQGSTLPRRSGAAG
DPRMCSLMYGSMLPRRIGAAG

SEQ ID NO: 69804 - protein, 21 aa, Artificial Sequence
  Description of Artificial Sequence: Synthetic peptide
  Seed: DPRMCSLMQGSTLPRRSGAAG
DPRMCSLMYGSMLPRRVGAAG

SEQ ID NO: 69805 - protein, 21 aa, Artificial Sequence
  Description of Artificial Sequence: Synthetic peptide
  Seed: DPRMCSLMQGSTLPRRSGAAG
DPRMCSLMYGSMLSRRAGAAG

SEQ ID NO: 69806 - protein, 21 aa, Artificial Sequence
  Description of Artificial Sequence: Synthetic peptide
  Seed: DPRMCSLMQGSTLPRRSGAAG
DPRMCSLMYGSMLSRRIGAAG

SEQ ID NO: 69807 - protein, 21 aa, Artificial Sequence
  Description of Artificial Sequence: Synthetic peptide
  Seed: DPRMCSLMQGSTLPRRSGAAG
DPRMCSLMYGSMLSRRNGAAG

SEQ ID NO: 69808 - protein, 21 aa, Artificial Sequence
  Description of Artificial Sequence: Synthetic peptide
  Seed: DPRMCSLMQGSTLPRRSGAAG
DPRMCSLMYGSMLSRRSGAAG

SEQ ID NO: 69809 - protein, 21 aa, Artificial Sequence
  Description of Artificial Sequence: Synthetic peptide
  Seed: DPRMCSLMQGSTLPRRSGAAG
DPRMCSLMYGSMLSRRVGAAG

SEQ ID NO: 69810 - protein, 21 aa, Artificial Sequence
  Description of Artificial Sequence: Synthetic peptide
  Seed: DPRMCSLMQGSTLPRRSGAAG
DPRMCSLMYGSMLTRRAGAAG

SEQ ID NO: 69811 - protein, 21 aa, Artificial Sequence
  Description of Artificial Sequence: Synthetic peptide
  Seed: DPRMCSLMQGSTLPRRSGAAG
DPRMCSLMYGSMLTRRIGAAG

SEQ ID NO: 69812 - protein, 21 aa, Artificial Sequence
  Description of Artificial Sequence: Synthetic peptide
  Seed: DPRMCSLMQGSTLPRRSGAAG
DPRMCSLMYGSMLTRRNGAAG

SEQ ID NO: 69813 - protein, 21 aa, Artificial Sequence
  Description of Artificial Sequence: Synthetic peptide
  Seed: DPRMCSLMQGSTLPRRSGAAG
DPRMCSLMYGSMLTRRVGAAG

SEQ ID NO: 69814 - protein, 21 aa, Artificial Sequence
  Description of Artificial Sequence: Synthetic peptide
  Seed: DPRMCSLMQGSTLPRRSGAAG
DPRMCSLMYGSMLVRRAGAAG

SEQ ID NO: 69815 - protein, 21 aa, Artificial Sequence
  Description of Artificial Sequence: Synthetic peptide
  Seed: DPRMCSLMQGSTLPRRSGAAG
DPRMCSLMYGSMLVRRNGAAG

SEQ ID NO: 69816 - protein, 21 aa, Artificial Sequence
  Description of Artificial Sequence: Synthetic peptide
  Seed: DPRMCSLMQGSTLPRRSGAAG
DPRMCSLMYGSMLVRRVGAAG

SEQ ID NO: 69817 - protein, 22 aa, Artificial Sequence
  Description of Artificial Sequence: Synthetic peptide
  Seed: DPRMCSLMQGSTLPRRSGAAGA
DPRMFSLAQASTAPRRSGAAGA

SEQ ID NO: 69818 - protein, 22 aa, Artificial Sequence
  Description of Artificial Sequence: Synthetic peptide
  Seed: DPRMCSLMQGSTLPRRSGAAGA
DPRMFSLAQASTGPRRSGAAGA

SEQ ID NO: 69819 - protein, 22 aa, Artificial Sequence
  Description of Artificial Sequence: Synthetic peptide
  Seed: DPRMCSLMQGSTLPRRSGAAGA
DPRMFSLAQASTIPRRSGAAGA

SEQ ID NO: 69820 - protein, 22 aa, Artificial Sequence
  Description of Artificial Sequence: Synthetic peptide
  Seed: DPRMCSLMQGSTLPRRSGAAGA
DPRMFSLAQASTLPRRSGAAGA

SEQ ID NO: 69821 - protein, 22 aa, Artificial Sequence
  Description of Artificial Sequence: Synthetic peptide
  Seed: DPRMCSLMQGSTLPRRSGAAGA
DPRMFSLAQASTMPRRSGAAGA

SEQ ID NO: 69822 - protein, 22 aa, Artificial Sequence
  Description of Artificial Sequence: Synthetic peptide
  Seed: DPRMCSLMQGSTLPRRSGAAGA
DPRMFSLAQASTSPRRSGAAGA

SEQ ID NO: 69823 - protein, 22 aa, Artificial Sequence
  Description of Artificial Sequence: Synthetic peptide
  Seed: DPRMCSLMQGSTLPRRSGAAGA
DPRMFSLAQASTTPRRSGAAGA

SEQ ID NO: 69824 - protein, 22 aa, Artificial Sequence
  Description of Artificial Sequence: Synthetic peptide
  Seed: DPRMCSLMQGSTLPRRSGAAGA
DPRMFSLAQASTVPRRSGAAGA

SEQ ID NO: 69825 - protein, 22 aa, Artificial Sequence
  Description of Artificial Sequence: Synthetic peptide
  Seed: DPRMCSLMQGSTLPRRSGAAGA
DPRMFSLAQGSTAPRRSGAAGA

SEQ ID NO: 69826 - protein, 22 aa, Artificial Sequence
  Description of Artificial Sequence: Synthetic peptide
  Seed: DPRMCSLMQGSTLPRRSGAAGA
DPRMFSLAQGSTIPRRSGAAGA

SEQ ID NO: 69827 - protein, 22 aa, Artificial Sequence
  Description of Artificial Sequence: Synthetic peptide
  Seed: DPRMCSLMQGSTLPRRSGAAGA
DPRMFSLAQGSTLPRRSGAAGA

SEQ ID NO: 69828 - protein, 22 aa, Artificial Sequence
  Description of Artificial Sequence: Synthetic peptide
  Seed: DPRMCSLMQGSTLPRRSGAAGA
DPRMFSLAQGSTMPRRSGAAGA

SEQ ID NO: 69829 - protein, 22 aa, Artificial Sequence
  Description of Artificial Sequence: Synthetic peptide
  Seed: DPRMCSLMQGSTLPRRSGAAGA
DPRMFSLAQGSTTPRRSGAAGA

SEQ ID NO: 69830 - protein, 22 aa, Artificial Sequence
  Description of Artificial Sequence: Synthetic peptide
  Seed: DPRMCSLMQGSTLPRRSGAAGA
DPRMFSLAQGSTVPRRSGAAGA

SEQ ID NO: 69831 - protein, 22 aa, Artificial Sequence
  Description of Artificial Sequence: Synthetic peptide
  Seed: DPRMCSLMQGSTLPRRSGAAGA
DPRMFSLAQNSTIPRRSGAAGA

SEQ ID NO: 69832 - protein, 22 aa, Artificial Sequence
  Description of Artificial Sequence: Synthetic peptide
  Seed: DPRMCSLMQGSTLPRRSGAAGA
DPRMFSLAQNSTLPRRSGAAGA

SEQ ID NO: 69833 - protein, 22 aa, Artificial Sequence
  Description of Artificial Sequence: Synthetic peptide
  Seed: DPRMCSLMQGSTLPRRSGAAGA
DPRMFSLAQNSTVPRRSGAAGA

SEQ ID NO: 69834 - protein, 22 aa, Artificial Sequence
  Description of Artificial Sequence: Synthetic peptide
  Seed: DPRMCSLMQGSTLPRRSGAAGA
DPRMFSLAQPSTAPRRSGAAGA

SEQ ID NO: 69835 - protein, 22 aa, Artificial Sequence
  Description of Artificial Sequence: Synthetic peptide
  Seed: DPRMCSLMQGSTLPRRSGAAGA
DPRMFSLAQPSTIPRRSGAAGA

SEQ ID NO: 69836 - protein, 22 aa, Artificial Sequence
  Description of Artificial Sequence: Synthetic peptide
  Seed: DPRMCSLMQGSTLPRRSGAAGA
DPRMFSLAQPSTLPRRSGAAGA

SEQ ID NO: 69837 - protein, 22 aa, Artificial Sequence
  Description of Artificial Sequence: Synthetic peptide
  Seed: DPRMCSLMQGSTLPRRSGAAGA
DPRMFSLAQPSTMPRRSGAAGA

SEQ ID NO: 69838 - protein, 22 aa, Artificial Sequence
  Description of Artificial Sequence: Synthetic peptide
  Seed: DPRMCSLMQGSTLPRRSGAAGA
DPRMFSLAQPSTVPRRSGAAGA

SEQ ID NO: 69839 - protein, 22 aa, Artificial Sequence
  Description of Artificial Sequence: Synthetic peptide
  Seed: DPRMCSLMQGSTLPRRSGAAGA
DPRMFSLAQSSTAPRRSGAAGA

SEQ ID NO: 69840 - protein, 22 aa, Artificial Sequence
  Description of Artificial Sequence: Synthetic peptide
  Seed: DPRMCSLMQGSTLPRRSGAAGA
DPRMFSLAQSSTIPRRSGAAGA

SEQ ID NO: 69841 - protein, 22 aa, Artificial Sequence
  Description of Artificial Sequence: Synthetic peptide
  Seed: DPRMCSLMQGSTLPRRSGAAGA
DPRMFSLAQSSTLPRRSGAAGA

SEQ ID NO: 69842 - protein, 22 aa, Artificial Sequence
  Description of Artificial Sequence: Synthetic peptide
  Seed: DPRMCSLMQGSTLPRRSGAAGA
DPRMFSLAQSSTMPRRSGAAGA

SEQ ID NO: 69843 - protein, 22 aa, Artificial Sequence
  Description of Artificial Sequence: Synthetic peptide
  Seed: DPRMCSLMQGSTLPRRSGAAGA
DPRMFSLAQSSTTPRRSGAAGA

SEQ ID NO: 69844 - protein, 22 aa, Artificial Sequence
  Description of Artificial Sequence: Synthetic peptide
  Seed: DPRMCSLMQGSTLPRRSGAAGA
DPRMFSLAQSSTVPRRSGAAGA

SEQ ID NO: 69845 - protein, 22 aa, Artificial Sequence
  Description of Artificial Sequence: Synthetic peptide
  Seed: DPRMCSLMQGSTLPRRSGAAGA
DPRMFSLAQTSTIPRRSGAAGA

SEQ ID NO: 69846 - protein, 22 aa, Artificial Sequence
  Description of Artificial Sequence: Synthetic peptide
  Seed: DPRMCSLMQGSTLPRRSGAAGA
DPRMFSLAQTSTLPRRSGAAGA

SEQ ID NO: 69847 - protein, 22 aa, Artificial Sequence
  Description of Artificial Sequence: Synthetic peptide
  Seed: DPRMCSLMQGSTLPRRSGAAGA
DPRMFSLAQTSTVPRRSGAAGA

SEQ ID NO: 69848 - protein, 22 aa, Artificial Sequence
  Description of Artificial Sequence: Synthetic peptide
  Seed: DPRMCSLMQGSTLPRRSGAAGA
DPRMFSLAQVSTIPRRSGAAGA

SEQ ID NO: 69849 - protein, 22 aa, Artificial Sequence
  Description of Artificial Sequence: Synthetic peptide
  Seed: DPRMCSLMQGSTLPRRSGAAGA
DPRMFSLAQVSTVPRRSGAAGA

SEQ ID NO: 69850 - protein, 22 aa, Artificial Sequence
  Description of Artificial Sequence: Synthetic peptide
  Seed: DPRMCSLMQGSTLPRRSGAAGA
DPRMFSLEQASTAPRRSGAAGA

SEQ ID NO: 69851 - protein, 22 aa, Artificial Sequence
  Description of Artificial Sequence: Synthetic peptide
  Seed: DPRMCSLMQGSTLPRRSGAAGA
DPRMFSLEQASTIPRRSGAAGA

SEQ ID NO: 69852 - protein, 22 aa, Artificial Sequence
  Description of Artificial Sequence: Synthetic peptide
  Seed: DPRMCSLMQGSTLPRRSGAAGA
DPRMFSLEQASTLPRRSGAAGA

SEQ ID NO: 69853 - protein, 22 aa, Artificial Sequence
  Description of Artificial Sequence: Synthetic peptide
  Seed: DPRMCSLMQGSTLPRRSGAAGA
DPRMFSLEQASTVPRRSGAAGA

SEQ ID NO: 69854 - protein, 22 aa, Artificial Sequence
  Description of Artificial Sequence: Synthetic peptide
  Seed: DPRMCSLMQGSTLPRRSGAAGA
DPRMFSLEQGSTLPRRSGAAGA

SEQ ID NO: 69855 - protein, 22 aa, Artificial Sequence
  Description of Artificial Sequence: Synthetic peptide
  Seed: DPRMCSLMQGSTLPRRSGAAGA
DPRMFSLEQGSTVPRRSGAAGA

SEQ ID NO: 69856 - protein, 22 aa, Artificial Sequence
  Description of Artificial Sequence: Synthetic peptide
  Seed: DPRMCSLMQGSTLPRRSGAAGA
DPRMFSLFQASTAPRRSGAAGA

SEQ ID NO: 69857 - protein, 22 aa, Artificial Sequence
  Description of Artificial Sequence: Synthetic peptide
  Seed: DPRMCSLMQGSTLPRRSGAAGA
DPRMFSLFQASTIPRRSGAAGA

SEQ ID NO: 69858 - protein, 22 aa, Artificial Sequence
  Description of Artificial Sequence: Synthetic peptide
  Seed: DPRMCSLMQGSTLPRRSGAAGA
DPRMFSLFQASTLPRRSGAAGA

SEQ ID NO: 69859 - protein, 22 aa, Artificial Sequence
  Description of Artificial Sequence: Synthetic peptide
  Seed: DPRMCSLMQGSTLPRRSGAAGA
DPRMFSLFQASTVPRRSGAAGA

SEQ ID NO: 69860 - protein, 22 aa, Artificial Sequence
  Description of Artificial Sequence: Synthetic peptide
  Seed: DPRMCSLMQGSTLPRRSGAAGA
DPRMFSLFQGSTVPRRSGAAGA

SEQ ID NO: 69861 - protein, 22 aa, Artificial Sequence
  Description of Artificial Sequence: Synthetic peptide
  Seed: DPRMCSLMQGSTLPRRSGAAGA
DPRMFSLGQASTIPRRSGAAGA

SEQ ID NO: 69862 - protein, 22 aa, Artificial Sequence
  Description of Artificial Sequence: Synthetic peptide
  Seed: DPRMCSLMQGSTLPRRSGAAGA
DPRMFSLGQASTLPRRSGAAGA

SEQ ID NO: 69863 - protein, 22 aa, Artificial Sequence
  Description of Artificial Sequence: Synthetic peptide
  Seed: DPRMCSLMQGSTLPRRSGAAGA
DPRMFSLGQASTVPRRSGAAGA

SEQ ID NO: 69864 - protein, 22 aa, Artificial Sequence
  Description of Artificial Sequence: Synthetic peptide
  Seed: DPRMCSLMQGSTLPRRSGAAGA
DPRMFSLIQASTAPRRSGAAGA

SEQ ID NO: 69865 - protein, 22 aa, Artificial Sequence
  Description of Artificial Sequence: Synthetic peptide
  Seed: DPRMCSLMQGSTLPRRSGAAGA
DPRMFSLIQASTCPRRSGAAGA

SEQ ID NO: 69866 - protein, 22 aa, Artificial Sequence
  Description of Artificial Sequence: Synthetic peptide
  Seed: DPRMCSLMQGSTLPRRSGAAGA
DPRMFSLIQASTGPRRSGAAGA

SEQ ID NO: 69867 - protein, 22 aa, Artificial Sequence
  Description of Artificial Sequence: Synthetic peptide
  Seed: DPRMCSLMQGSTLPRRSGAAGA
DPRMFSLIQASTIPRRSGAAGA

SEQ ID NO: 69868 - protein, 22 aa, Artificial Sequence
  Description of Artificial Sequence: Synthetic peptide
  Seed: DPRMCSLMQGSTLPRRSGAAGA
DPRMFSLIQASTLPRRSGAAGA

SEQ ID NO: 69869 - protein, 22 aa, Artificial Sequence
  Description of Artificial Sequence: Synthetic peptide
  Seed: DPRMCSLMQGSTLPRRSGAAGA
DPRMFSLIQASTMPRRSGAAGA

SEQ ID NO: 69870 - protein, 22 aa, Artificial Sequence
  Description of Artificial Sequence: Synthetic peptide
  Seed: DPRMCSLMQGSTLPRRSGAAGA
DPRMFSLIQASTNPRRSGAAGA

SEQ ID NO: 69871 - protein, 22 aa, Artificial Sequence
  Description of Artificial Sequence: Synthetic peptide
  Seed: DPRMCSLMQGSTLPRRSGAAGA
DPRMFSLIQASTSPRRSGAAGA

SEQ ID NO: 69872 - protein, 22 aa, Artificial Sequence
  Description of Artificial Sequence: Synthetic peptide
  Seed: DPRMCSLMQGSTLPRRSGAAGA
DPRMFSLIQASTTPRRSGAAGA

SEQ ID NO: 69873 - protein, 22 aa, Artificial Sequence
  Description of Artificial Sequence: Synthetic peptide
  Seed: DPRMCSLMQGSTLPRRSGAAGA
DPRMFSLIQASTVPRRSGAAGA

SEQ ID NO: 69874 - protein, 22 aa, Artificial Sequence
  Description of Artificial Sequence: Synthetic peptide
  Seed: DPRMCSLMQGSTLPRRSGAAGA
DPRMFSLIQGSTAPRRSGAAGA

SEQ ID NO: 69875 - protein, 22 aa, Artificial Sequence
  Description of Artificial Sequence: Synthetic peptide
  Seed: DPRMCSLMQGSTLPRRSGAAGA
DPRMFSLIQGSTGPRRSGAAGA

SEQ ID NO: 69876 - protein, 22 aa, Artificial Sequence
  Description of Artificial Sequence: Synthetic peptide
  Seed: DPRMCSLMQGSTLPRRSGAAGA
DPRMFSLIQGSTIPRRSGAAGA

SEQ ID NO: 69877 - protein, 22 aa, Artificial Sequence
  Description of Artificial Sequence: Synthetic peptide
  Seed: DPRMCSLMQGSTLPRRSGAAGA
DPRMFSLIQGSTLPRRSGAAGA

SEQ ID NO: 69878 - protein, 22 aa, Artificial Sequence
  Description of Artificial Sequence: Synthetic peptide
  Seed: DPRMCSLMQGSTLPRRSGAAGA
DPRMFSLIQGSTMPRRSGAAGA

SEQ ID NO: 69879 - protein, 22 aa, Artificial Sequence
  Description of Artificial Sequence: Synthetic peptide
  Seed: DPRMCSLMQGSTLPRRSGAAGA
DPRMFSLIQGSTSPRRSGAAGA

SEQ ID NO: 69880 - protein, 22 aa, Artificial Sequence
  Description of Artificial Sequence: Synthetic peptide
  Seed: DPRMCSLMQGSTLPRRSGAAGA
DPRMFSLIQGSTTPRRSGAAGA

SEQ ID NO: 69881 - protein, 22 aa, Artificial Sequence
  Description of Artificial Sequence: Synthetic peptide
  Seed: DPRMCSLMQGSTLPRRSGAAGA
DPRMFSLIQGSTVPRRSGAAGA

SEQ ID NO: 69882 - protein, 22 aa, Artificial Sequence
  Description of Artificial Sequence: Synthetic peptide
  Seed: DPRMCSLMQGSTLPRRSGAAGA
DPRMFSLIQNSTAPRRSGAAGA

SEQ ID NO: 69883 - protein, 22 aa, Artificial Sequence
  Description of Artificial Sequence: Synthetic peptide
  Seed: DPRMCSLMQGSTLPRRSGAAGA
DPRMFSLIQNSTIPRRSGAAGA

SEQ ID NO: 69884 - protein, 22 aa, Artificial Sequence
  Description of Artificial Sequence: Synthetic peptide
  Seed: DPRMCSLMQGSTLPRRSGAAGA
DPRMFSLIQNSTLPRRSGAAGA

SEQ ID NO: 69885 - protein, 22 aa, Artificial Sequence
  Description of Artificial Sequence: Synthetic peptide
  Seed: DPRMCSLMQGSTLPRRSGAAGA
DPRMFSLIQNSTVPRRSGAAGA

SEQ ID NO: 69886 - protein, 22 aa, Artificial Sequence
  Description of Artificial Sequence: Synthetic peptide
  Seed: DPRMCSLMQGSTLPRRSGAAGA
DPRMFSLIQPSTAPRRSGAAGA

SEQ ID NO: 69887 - protein, 22 aa, Artificial Sequence
  Description of Artificial Sequence: Synthetic peptide
  Seed: DPRMCSLMQGSTLPRRSGAAGA
DPRMFSLIQPSTIPRRSGAAGA

SEQ ID NO: 69888 - protein, 22 aa, Artificial Sequence
  Description of Artificial Sequence: Synthetic peptide
  Seed: DPRMCSLMQGSTLPRRSGAAGA
DPRMFSLIQPSTLPRRSGAAGA

SEQ ID NO: 69889 - protein, 22 aa, Artificial Sequence
  Description of Artificial Sequence: Synthetic peptide
  Seed: DPRMCSLMQGSTLPRRSGAAGA
DPRMFSLIQPSTMPRRSGAAGA

SEQ ID NO: 69890 - protein, 22 aa, Artificial Sequence
  Description of Artificial Sequence: Synthetic peptide
  Seed: DPRMCSLMQGSTLPRRSGAAGA
DPRMFSLIQPSTSPRRSGAAGA

SEQ ID NO: 69891 - protein, 22 aa, Artificial Sequence
  Description of Artificial Sequence: Synthetic peptide
  Seed: DPRMCSLMQGSTLPRRSGAAGA
DPRMFSLIQPSTTPRRSGAAGA

SEQ ID NO: 69892 - protein, 22 aa, Artificial Sequence
  Description of Artificial Sequence: Synthetic peptide
  Seed: DPRMCSLMQGSTLPRRSGAAGA
DPRMFSLIQPSTVPRRSGAAGA

SEQ ID NO: 69893 - protein, 22 aa, Artificial Sequence
  Description of Artificial Sequence: Synthetic peptide
  Seed: DPRMCSLMQGSTLPRRSGAAGA
DPRMFSLIQSSTAPRRSGAAGA

SEQ ID NO: 69894 - protein, 22 aa, Artificial Sequence
  Description of Artificial Sequence: Synthetic peptide
  Seed: DPRMCSLMQGSTLPRRSGAAGA
DPRMFSLIQSSTGPRRSGAAGA

SEQ ID NO: 69895 - protein, 22 aa, Artificial Sequence
  Description of Artificial Sequence: Synthetic peptide
  Seed: DPRMCSLMQGSTLPRRSGAAGA
DPRMFSLIQSSTIPRRSGAAGA

SEQ ID NO: 69896 - protein, 22 aa, Artificial Sequence
  Description of Artificial Sequence: Synthetic peptide
  Seed: DPRMCSLMQGSTLPRRSGAAGA
DPRMFSLIQSSTLPRRSGAAGA

SEQ ID NO: 69897 - protein, 22 aa, Artificial Sequence
  Description of Artificial Sequence: Synthetic peptide
  Seed: DPRMCSLMQGSTLPRRSGAAGA
DPRMFSLIQSSTMPRRSGAAGA

SEQ ID NO: 69898 - protein, 22 aa, Artificial Sequence
  Description of Artificial Sequence: Synthetic peptide
  Seed: DPRMCSLMQGSTLPRRSGAAGA
DPRMFSLIQSSTSPRRSGAAGA

SEQ ID NO: 69899 - protein, 22 aa, Artificial Sequence
  Description of Artificial Sequence: Synthetic peptide
  Seed: DPRMCSLMQGSTLPRRSGAAGA
DPRMFSLIQSSTTPRRSGAAGA

SEQ ID NO: 69900 - protein, 22 aa, Artificial Sequence
  Description of Artificial Sequence: Synthetic peptide
  Seed: DPRMCSLMQGSTLPRRSGAAGA
DPRMFSLIQSSTVPRRSGAAGA

SEQ ID NO: 69901 - protein, 22 aa, Artificial Sequence
  Description of Artificial Sequence: Synthetic peptide
  Seed: DPRMCSLMQGSTLPRRSGAAGA
DPRMFSLIQTSTAPRRSGAAGA

SEQ ID NO: 69902 - protein, 22 aa, Artificial Sequence
  Description of Artificial Sequence: Synthetic peptide
  Seed: DPRMCSLMQGSTLPRRSGAAGA
DPRMFSLIQTSTIPRRSGAAGA

SEQ ID NO: 69903 - protein, 22 aa, Artificial Sequence
  Description of Artificial Sequence: Synthetic peptide
  Seed: DPRMCSLMQGSTLPRRSGAAGA
DPRMFSLIQTSTLPRRSGAAGA

SEQ ID NO: 69904 - protein, 22 aa, Artificial Sequence
  Description of Artificial Sequence: Synthetic peptide
  Seed: DPRMCSLMQGSTLPRRSGAAGA
DPRMFSLIQTSTVPRRSGAAGA

SEQ ID NO: 69905 - protein, 22 aa, Artificial Sequence
  Description of Artificial Sequence: Synthetic peptide
  Seed: DPRMCSLMQGSTLPRRSGAAGA
DPRMFSLIQVSTAPRRSGAAGA

SEQ ID NO: 69906 - protein, 22 aa, Artificial Sequence
  Description of Artificial Sequence: Synthetic peptide
  Seed: DPRMCSLMQGSTLPRRSGAAGA
DPRMFSLIQVSTVPRRSGAAGA

SEQ ID NO: 69907 - protein, 22 aa, Artificial Sequence
  Description of Artificial Sequence: Synthetic peptide
  Seed: DPRMCSLMQGSTLPRRSGAAGA
DPRMFSLLQASTAPRRSGAAGA

SEQ ID NO: 69908 - protein, 22 aa, Artificial Sequence
  Description of Artificial Sequence: Synthetic peptide
  Seed: DPRMCSLMQGSTLPRRSGAAGA
DPRMFSLLQASTCPRRSGAAGA

SEQ ID NO: 69909 - protein, 22 aa, Artificial Sequence
  Description of Artificial Sequence: Synthetic peptide
  Seed: DPRMCSLMQGSTLPRRSGAAGA
DPRMFSLLQASTFPRRSGAAGA

SEQ ID NO: 69910 - protein, 22 aa, Artificial Sequence
  Description of Artificial Sequence: Synthetic peptide
  Seed: DPRMCSLMQGSTLPRRSGAAGA
DPRMFSLLQASTGPRRSGAAGA

SEQ ID NO: 69911 - protein, 22 aa, Artificial Sequence
  Description of Artificial Sequence: Synthetic peptide
  Seed: DPRMCSLMQGSTLPRRSGAAGA
DPRMFSLLQASTHPRRSGAAGA

SEQ ID NO: 69912 - protein, 22 aa, Artificial Sequence
  Description of Artificial Sequence: Synthetic peptide
  Seed: DPRMCSLMQGSTLPRRSGAAGA
DPRMFSLLQASTIPRRSGAAGA

SEQ ID NO: 69913 - protein, 22 aa, Artificial Sequence
  Description of Artificial Sequence: Synthetic peptide
  Seed: DPRMCSLMQGSTLPRRSGAAGA
DPRMFSLLQASTLPRRSGAAGA

SEQ ID NO: 69914 - protein, 22 aa, Artificial Sequence
  Description of Artificial Sequence: Synthetic peptide
  Seed: DPRMCSLMQGSTLPRRSGAAGA
DPRMFSLLQASTMPRRSGAAGA

SEQ ID NO: 69915 - protein, 22 aa, Artificial Sequence
  Description of Artificial Sequence: Synthetic peptide
  Seed: DPRMCSLMQGSTLPRRSGAAGA
DPRMFSLLQASTNPRRSGAAGA

SEQ ID NO: 69916 - protein, 22 aa, Artificial Sequence
  Description of Artificial Sequence: Synthetic peptide
  Seed: DPRMCSLMQGSTLPRRSGAAGA
DPRMFSLLQASTPPRRSGAAGA

SEQ ID NO: 69917 - protein, 22 aa, Artificial Sequence
  Description of Artificial Sequence: Synthetic peptide
  Seed: DPRMCSLMQGSTLPRRSGAAGA
DPRMFSLLQASTSPRRSGAAGA

SEQ ID NO: 69918 - protein, 22 aa, Artificial Sequence
  Description of Artificial Sequence: Synthetic peptide
  Seed: DPRMCSLMQGSTLPRRSGAAGA
DPRMFSLLQASTTPRRSGAAGA

SEQ ID NO: 69919 - protein, 22 aa, Artificial Sequence
  Description of Artificial Sequence: Synthetic peptide
  Seed: DPRMCSLMQGSTLPRRSGAAGA
DPRMFSLLQASTVPRRSGAAGA

SEQ ID NO: 69920 - protein, 22 aa, Artificial Sequence
  Description of Artificial Sequence: Synthetic peptide
  Seed: DPRMCSLMQGSTLPRRSGAAGA
DPRMFSLLQASTYPRRSGAAGA

SEQ ID NO: 69921 - protein, 22 aa, Artificial Sequence
  Description of Artificial Sequence: Synthetic peptide
  Seed: DPRMCSLMQGSTLPRRSGAAGA
DPRMFSLLQGSTAPRRSGAAGA

SEQ ID NO: 69922 - protein, 22 aa, Artificial Sequence
  Description of Artificial Sequence: Synthetic peptide
  Seed: DPRMCSLMQGSTLPRRSGAAGA
DPRMFSLLQGSTCPRRSGAAGA

SEQ ID NO: 69923 - protein, 22 aa, Artificial Sequence
  Description of Artificial Sequence: Synthetic peptide
  Seed: DPRMCSLMQGSTLPRRSGAAGA
DPRMFSLLQGSTFPRRSGAAGA

SEQ ID NO: 69924 - protein, 22 aa, Artificial Sequence
  Description of Artificial Sequence: Synthetic peptide
  Seed: DPRMCSLMQGSTLPRRSGAAGA
DPRMFSLLQGSTGPRRSGAAGA

SEQ ID NO: 69925 - protein, 22 aa, Artificial Sequence
  Description of Artificial Sequence: Synthetic peptide
  Seed: DPRMCSLMQGSTLPRRSGAAGA
DPRMFSLLQGSTIPRRSGAAGA

SEQ ID NO: 69926 - protein, 22 aa, Artificial Sequence
  Description of Artificial Sequence: Synthetic peptide
  Seed: DPRMCSLMQGSTLPRRSGAAGA
DPRMFSLLQGSTLPRRSGAAGA

SEQ ID NO: 69927 - protein, 22 aa, Artificial Sequence
  Description of Artificial Sequence: Synthetic peptide
  Seed: DPRMCSLMQGSTLPRRSGAAGA
DPRMFSLLQGSTMPRRSGAAGA

SEQ ID NO: 69928 - protein, 22 aa, Artificial Sequence
  Description of Artificial Sequence: Synthetic peptide
  Seed: DPRMCSLMQGSTLPRRSGAAGA
DPRMFSLLQGSTNPRRSGAAGA

SEQ ID NO: 69929 - protein, 22 aa, Artificial Sequence
  Description of Artificial Sequence: Synthetic peptide
  Seed: DPRMCSLMQGSTLPRRSGAAGA
DPRMFSLLQGSTSPRRSGAAGA

SEQ ID NO: 69930 - protein, 22 aa, Artificial Sequence
  Description of Artificial Sequence: Synthetic peptide
  Seed: DPRMCSLMQGSTLPRRSGAAGA
DPRMFSLLQGSTTPRRSGAAGA

SEQ ID NO: 69931 - protein, 22 aa, Artificial Sequence
  Description of Artificial Sequence: Synthetic peptide
  Seed: DPRMCSLMQGSTLPRRSGAAGA
DPRMFSLLQGSTVPRRSGAAGA

SEQ ID NO: 69932 - protein, 22 aa, Artificial Sequence
  Description of Artificial Sequence: Synthetic peptide
  Seed: DPRMCSLMQGSTLPRRSGAAGA
DPRMFSLLQISTAPRRSGAAGA

SEQ ID NO: 69933 - protein, 22 aa, Artificial Sequence
  Description of Artificial Sequence: Synthetic peptide
  Seed: DPRMCSLMQGSTLPRRSGAAGA
DPRMFSLLQISTIPRRSGAAGA

SEQ ID NO: 69934 - protein, 22 aa, Artificial Sequence
  Description of Artificial Sequence: Synthetic peptide
  Seed: DPRMCSLMQGSTLPRRSGAAGA
DPRMFSLLQISTVPRRSGAAGA

SEQ ID NO: 69935 - protein, 22 aa, Artificial Sequence
  Description of Artificial Sequence: Synthetic peptide
  Seed: DPRMCSLMQGSTLPRRSGAAGA
DPRMFSLLQNSTAPRRSGAAGA

SEQ ID NO: 69936 - protein, 22 aa, Artificial Sequence
  Description of Artificial Sequence: Synthetic peptide
  Seed: DPRMCSLMQGSTLPRRSGAAGA
DPRMFSLLQNSTGPRRSGAAGA

SEQ ID NO: 69937 - protein, 22 aa, Artificial Sequence
  Description of Artificial Sequence: Synthetic peptide
  Seed: DPRMCSLMQGSTLPRRSGAAGA
DPRMFSLLQNSTIPRRSGAAGA

SEQ ID NO: 69938 - protein, 22 aa, Artificial Sequence
  Description of Artificial Sequence: Synthetic peptide
  Seed: DPRMCSLMQGSTLPRRSGAAGA
DPRMFSLLQNSTLPRRSGAAGA

SEQ ID NO: 69939 - protein, 22 aa, Artificial Sequence
  Description of Artificial Sequence: Synthetic peptide
  Seed: DPRMCSLMQGSTLPRRSGAAGA
DPRMFSLLQNSTMPRRSGAAGA

SEQ ID NO: 69940 - protein, 22 aa, Artificial Sequence
  Description of Artificial Sequence: Synthetic peptide
  Seed: DPRMCSLMQGSTLPRRSGAAGA
DPRMFSLLQNSTSPRRSGAAGA

SEQ ID NO: 69941 - protein, 22 aa, Artificial Sequence
  Description of Artificial Sequence: Synthetic peptide
  Seed: DPRMCSLMQGSTLPRRSGAAGA
DPRMFSLLQNSTTPRRSGAAGA

SEQ ID NO: 69942 - protein, 22 aa, Artificial Sequence
  Description of Artificial Sequence: Synthetic peptide
  Seed: DPRMCSLMQGSTLPRRSGAAGA
DPRMFSLLQNSTVPRRSGAAGA

SEQ ID NO: 69943 - protein, 22 aa, Artificial Sequence
  Description of Artificial Sequence: Synthetic peptide
  Seed: DPRMCSLMQGSTLPRRSGAAGA
DPRMFSLLQPSTAPRRSGAAGA

SEQ ID NO: 69944 - protein, 22 aa, Artificial Sequence
  Description of Artificial Sequence: Synthetic peptide
  Seed: DPRMCSLMQGSTLPRRSGAAGA
DPRMFSLLQPSTCPRRSGAAGA

SEQ ID NO: 69945 - protein, 22 aa, Artificial Sequence
  Description of Artificial Sequence: Synthetic peptide
  Seed: DPRMCSLMQGSTLPRRSGAAGA
DPRMFSLLQPSTFPRRSGAAGA

SEQ ID NO: 69946 - protein, 22 aa, Artificial Sequence
  Description of Artificial Sequence: Synthetic peptide
  Seed: DPRMCSLMQGSTLPRRSGAAGA
DPRMFSLLQPSTGPRRSGAAGA

SEQ ID NO: 69947 - protein, 22 aa, Artificial Sequence
  Description of Artificial Sequence: Synthetic peptide
  Seed: DPRMCSLMQGSTLPRRSGAAGA
DPRMFSLLQPSTIPRRSGAAGA

SEQ ID NO: 69948 - protein, 22 aa, Artificial Sequence
  Description of Artificial Sequence: Synthetic peptide
  Seed: DPRMCSLMQGSTLPRRSGAAGA
DPRMFSLLQPSTLPRRSGAAGA

SEQ ID NO: 69949 - protein, 22 aa, Artificial Sequence
  Description of Artificial Sequence: Synthetic peptide
  Seed: DPRMCSLMQGSTLPRRSGAAGA
DPRMFSLLQPSTMPRRSGAAGA

SEQ ID NO: 69950 - protein, 22 aa, Artificial Sequence
  Description of Artificial Sequence: Synthetic peptide
  Seed: DPRMCSLMQGSTLPRRSGAAGA
DPRMFSLLQPSTNPRRSGAAGA

SEQ ID NO: 69951 - protein, 22 aa, Artificial Sequence
  Description of Artificial Sequence: Synthetic peptide
  Seed: DPRMCSLMQGSTLPRRSGAAGA
DPRMFSLLQPSTSPRRSGAAGA

SEQ ID NO: 69952 - protein, 22 aa, Artificial Sequence
  Description of Artificial Sequence: Synthetic peptide
  Seed: DPRMCSLMQGSTLPRRSGAAGA
DPRMFSLLQPSTTPRRSGAAGA

SEQ ID NO: 69953 - protein, 22 aa, Artificial Sequence
  Description of Artificial Sequence: Synthetic peptide
  Seed: DPRMCSLMQGSTLPRRSGAAGA
DPRMFSLLQPSTVPRRSGAAGA

SEQ ID NO: 69954 - protein, 22 aa, Artificial Sequence
  Description of Artificial Sequence: Synthetic peptide
  Seed: DPRMCSLMQGSTLPRRSGAAGA
DPRMFSLLQSSTAPRRSGAAGA

SEQ ID NO: 69955 - protein, 22 aa, Artificial Sequence
  Description of Artificial Sequence: Synthetic peptide
  Seed: DPRMCSLMQGSTLPRRSGAAGA
DPRMFSLLQSSTCPRRSGAAGA

SEQ ID NO: 69956 - protein, 22 aa, Artificial Sequence
  Description of Artificial Sequence: Synthetic peptide
  Seed: DPRMCSLMQGSTLPRRSGAAGA
DPRMFSLLQSSTGPRRSGAAGA

SEQ ID NO: 69957 - protein, 22 aa, Artificial Sequence
  Description of Artificial Sequence: Synthetic peptide
  Seed: DPRMCSLMQGSTLPRRSGAAGA
DPRMFSLLQSSTIPRRSGAAGA

SEQ ID NO: 69958 - protein, 22 aa, Artificial Sequence
  Description of Artificial Sequence: Synthetic peptide
  Seed: DPRMCSLMQGSTLPRRSGAAGA
DPRMFSLLQSSTLPRRSGAAGA

SEQ ID NO: 69959 - protein, 22 aa, Artificial Sequence
  Description of Artificial Sequence: Synthetic peptide
  Seed: DPRMCSLMQGSTLPRRSGAAGA
DPRMFSLLQSSTMPRRSGAAGA

SEQ ID NO: 69960 - protein, 22 aa, Artificial Sequence
  Description of Artificial Sequence: Synthetic peptide
  Seed: DPRMCSLMQGSTLPRRSGAAGA
DPRMFSLLQSSTNPRRSGAAGA

SEQ ID NO: 69961 - protein, 22 aa, Artificial Sequence
  Description of Artificial Sequence: Synthetic peptide
  Seed: DPRMCSLMQGSTLPRRSGAAGA
DPRMFSLLQSSTSPRRSGAAGA

SEQ ID NO: 69962 - protein, 22 aa, Artificial Sequence
  Description of Artificial Sequence: Synthetic peptide
  Seed: DPRMCSLMQGSTLPRRSGAAGA
DPRMFSLLQSSTTPRRSGAAGA

SEQ ID NO: 69963 - protein, 22 aa, Artificial Sequence
  Description of Artificial Sequence: Synthetic peptide
  Seed: DPRMCSLMQGSTLPRRSGAAGA
DPRMFSLLQSSTVPRRSGAAGA

SEQ ID NO: 69964 - protein, 22 aa, Artificial Sequence
  Description of Artificial Sequence: Synthetic peptide
  Seed: DPRMCSLMQGSTLPRRSGAAGA
DPRMFSLLQTSTAPRRSGAAGA

SEQ ID NO: 69965 - protein, 22 aa, Artificial Sequence
  Description of Artificial Sequence: Synthetic peptide
  Seed: DPRMCSLMQGSTLPRRSGAAGA
DPRMFSLLQTSTGPRRSGAAGA

SEQ ID NO: 69966 - protein, 22 aa, Artificial Sequence
  Description of Artificial Sequence: Synthetic peptide
  Seed: DPRMCSLMQGSTLPRRSGAAGA
DPRMFSLLQTSTIPRRSGAAGA

SEQ ID NO: 69967 - protein, 22 aa, Artificial Sequence
  Description of Artificial Sequence: Synthetic peptide
  Seed: DPRMCSLMQGSTLPRRSGAAGA
DPRMFSLLQTSTLPRRSGAAGA

SEQ ID NO: 69968 - protein, 22 aa, Artificial Sequence
  Description of Artificial Sequence: Synthetic peptide
  Seed: DPRMCSLMQGSTLPRRSGAAGA
DPRMFSLLQTSTMPRRSGAAGA

SEQ ID NO: 69969 - protein, 22 aa, Artificial Sequence
  Description of Artificial Sequence: Synthetic peptide
  Seed: DPRMCSLMQGSTLPRRSGAAGA
DPRMFSLLQTSTSPRRSGAAGA

SEQ ID NO: 69970 - protein, 22 aa, Artificial Sequence
  Description of Artificial Sequence: Synthetic peptide
  Seed: DPRMCSLMQGSTLPRRSGAAGA
DPRMFSLLQTSTTPRRSGAAGA

SEQ ID NO: 69971 - protein, 22 aa, Artificial Sequence
  Description of Artificial Sequence: Synthetic peptide
  Seed: DPRMCSLMQGSTLPRRSGAAGA
DPRMFSLLQTSTVPRRSGAAGA

SEQ ID NO: 69972 - protein, 22 aa, Artificial Sequence
  Description of Artificial Sequence: Synthetic peptide
  Seed: DPRMCSLMQGSTLPRRSGAAGA
DPRMFSLLQVSTAPRRSGAAGA

SEQ ID NO: 69973 - protein, 22 aa, Artificial Sequence
  Description of Artificial Sequence: Synthetic peptide
  Seed: DPRMCSLMQGSTLPRRSGAAGA
DPRMFSLLQVSTIPRRSGAAGA

SEQ ID NO: 69974 - protein, 22 aa, Artificial Sequence
  Description of Artificial Sequence: Synthetic peptide
  Seed: DPRMCSLMQGSTLPRRSGAAGA
DPRMFSLLQVSTLPRRSGAAGA

SEQ ID NO: 69975 - protein, 22 aa, Artificial Sequence
  Description of Artificial Sequence: Synthetic peptide
  Seed: DPRMCSLMQGSTLPRRSGAAGA
DPRMFSLLQVSTMPRRSGAAGA

SEQ ID NO: 69976 - protein, 22 aa, Artificial Sequence
  Description of Artificial Sequence: Synthetic peptide
  Seed: DPRMCSLMQGSTLPRRSGAAGA
DPRMFSLLQVSTSPRRSGAAGA

SEQ ID NO: 69977 - protein, 22 aa, Artificial Sequence
  Description of Artificial Sequence: Synthetic peptide
  Seed: DPRMCSLMQGSTLPRRSGAAGA
DPRMFSLLQVSTTPRRSGAAGA

SEQ ID NO: 69978 - protein, 22 aa, Artificial Sequence
  Description of Artificial Sequence: Synthetic peptide
  Seed: DPRMCSLMQGSTLPRRSGAAGA
DPRMFSLLQVSTVPRRSGAAGA

SEQ ID NO: 69979 - protein, 22 aa, Artificial Sequence
  Description of Artificial Sequence: Synthetic peptide
  Seed: DPRMCSLMQGSTLPRRSGAAGA
DPRMFSLMQASTAPRRSGAAGA

SEQ ID NO: 69980 - protein, 22 aa, Artificial Sequence
  Description of Artificial Sequence: Synthetic peptide
  Seed: DPRMCSLMQGSTLPRRSGAAGA
DPRMFSLMQASTCPRRSGAAGA

SEQ ID NO: 69981 - protein, 22 aa, Artificial Sequence
  Description of Artificial Sequence: Synthetic peptide
  Seed: DPRMCSLMQGSTLPRRSGAAGA
DPRMFSLMQASTFPRRSGAAGA

SEQ ID NO: 69982 - protein, 22 aa, Artificial Sequence
  Description of Artificial Sequence: Synthetic peptide
  Seed: DPRMCSLMQGSTLPRRSGAAGA
DPRMFSLMQASTGPRRSGAAGA

SEQ ID NO: 69983 - protein, 22 aa, Artificial Sequence
  Description of Artificial Sequence: Synthetic peptide
  Seed: DPRMCSLMQGSTLPRRSGAAGA
DPRMFSLMQASTHPRRSGAAGA

SEQ ID NO: 69984 - protein, 22 aa, Artificial Sequence
  Description of Artificial Sequence: Synthetic peptide
  Seed: DPRMCSLMQGSTLPRRSGAAGA
DPRMFSLMQASTIPRRSGAAGA

SEQ ID NO: 69985 - protein, 22 aa, Artificial Sequence
  Description of Artificial Sequence: Synthetic peptide
  Seed: DPRMCSLMQGSTLPRRSGAAGA
DPRMFSLMQASTLPRRSGAAGA

SEQ ID NO: 69986 - protein, 22 aa, Artificial Sequence
  Description of Artificial Sequence: Synthetic peptide
  Seed: DPRMCSLMQGSTLPRRSGAAGA
DPRMFSLMQASTMPRRSGAAGA

SEQ ID NO: 69987 - protein, 22 aa, Artificial Sequence
  Description of Artificial Sequence: Synthetic peptide
  Seed: DPRMCSLMQGSTLPRRSGAAGA
DPRMFSLMQASTNPRRSGAAGA

SEQ ID NO: 69988 - protein, 22 aa, Artificial Sequence
  Description of Artificial Sequence: Synthetic peptide
  Seed: DPRMCSLMQGSTLPRRSGAAGA
DPRMFSLMQASTPPRRSGAAGA

SEQ ID NO: 69989 - protein, 22 aa, Artificial Sequence
  Description of Artificial Sequence: Synthetic peptide
  Seed: DPRMCSLMQGSTLPRRSGAAGA
DPRMFSLMQASTQPRRSGAAGA

SEQ ID NO: 69990 - protein, 22 aa, Artificial Sequence
  Description of Artificial Sequence: Synthetic peptide
  Seed: DPRMCSLMQGSTLPRRSGAAGA
DPRMFSLMQASTSPRRSGAAGA

SEQ ID NO: 69991 - protein, 22 aa, Artificial Sequence
  Description of Artificial Sequence: Synthetic peptide
  Seed: DPRMCSLMQGSTLPRRSGAAGA
DPRMFSLMQASTTPRRSGAAGA

SEQ ID NO: 69992 - protein, 22 aa, Artificial Sequence
  Description of Artificial Sequence: Synthetic peptide
  Seed: DPRMCSLMQGSTLPRRSGAAGA
DPRMFSLMQASTVPRRSGAAGA

SEQ ID NO: 69993 - protein, 22 aa, Artificial Sequence
  Description of Artificial Sequence: Synthetic peptide
  Seed: DPRMCSLMQGSTLPRRSGAAGA
DPRMFSLMQASTYPRRSGAAGA

SEQ ID NO: 69994 - protein, 22 aa, Artificial Sequence
  Description of Artificial Sequence: Synthetic peptide
  Seed: DPRMCSLMQGSTLPRRSGAAGA
DPRMFSLMQGSTAPRRSGAAGA

SEQ ID NO: 69995 - protein, 22 aa, Artificial Sequence
  Description of Artificial Sequence: Synthetic peptide
  Seed: DPRMCSLMQGSTLPRRSGAAGA
DPRMFSLMQGSTCPRRSGAAGA

SEQ ID NO: 69996 - protein, 22 aa, Artificial Sequence
  Description of Artificial Sequence: Synthetic peptide
  Seed: DPRMCSLMQGSTLPRRSGAAGA
DPRMFSLMQGSTFPRRSGAAGA

SEQ ID NO: 69997 - protein, 22 aa, Artificial Sequence
  Description of Artificial Sequence: Synthetic peptide
  Seed: DPRMCSLMQGSTLPRRSGAAGA
DPRMFSLMQGSTGPRRSGAAGA

SEQ ID NO: 69998 - protein, 22 aa, Artificial Sequence
  Description of Artificial Sequence: Synthetic peptide
  Seed: DPRMCSLMQGSTLPRRSGAAGA
DPRMFSLMQGSTIPRRSGAAGA

SEQ ID NO: 69999 - protein, 22 aa, Artificial Sequence
  Description of Artificial Sequence: Synthetic peptide
  Seed: DPRMCSLMQGSTLPRRSGAAGA
DPRMFSLMQGSTLPRRSGAAGA

SEQ ID NO: 70000 - protein, 22 aa, Artificial Sequence
  Description of Artificial Sequence: Synthetic peptide
  Seed: DPRMCSLMQGSTLPRRSGAAGA
DPRMFSLMQGSTMPRRSGAAGA

SEQ ID NO: 70001 - protein, 22 aa, Artificial Sequence
  Description of Artificial Sequence: Synthetic peptide
  Seed: DPRMCSLMQGSTLPRRSGAAGA
DPRMFSLMQGSTNPRRSGAAGA

SEQ ID NO: 70002 - protein, 22 aa, Artificial Sequence
  Description of Artificial Sequence: Synthetic peptide
  Seed: DPRMCSLMQGSTLPRRSGAAGA
DPRMFSLMQGSTSPRRSGAAGA

SEQ ID NO: 70003 - protein, 22 aa, Artificial Sequence
  Description of Artificial Sequence: Synthetic peptide
  Seed: DPRMCSLMQGSTLPRRSGAAGA
DPRMFSLMQGSTTPRRSGAAGA

SEQ ID NO: 70004 - protein, 22 aa, Artificial Sequence
  Description of Artificial Sequence: Synthetic peptide
  Seed: DPRMCSLMQGSTLPRRSGAAGA
DPRMFSLMQGSTVPRRSGAAGA

SEQ ID NO: 70005 - protein, 22 aa, Artificial Sequence
  Description of Artificial Sequence: Synthetic peptide
  Seed: DPRMCSLMQGSTLPRRSGAAGA
DPRMFSLMQHSTVPRRSGAAGA

SEQ ID NO: 70006 - protein, 22 aa, Artificial Sequence
  Description of Artificial Sequence: Synthetic peptide
  Seed: DPRMCSLMQGSTLPRRSGAAGA
DPRMFSLMQISTAPRRSGAAGA

SEQ ID NO: 70007 - protein, 22 aa, Artificial Sequence
  Description of Artificial Sequence: Synthetic peptide
  Seed: DPRMCSLMQGSTLPRRSGAAGA
DPRMFSLMQISTIPRRSGAAGA

SEQ ID NO: 70008 - protein, 22 aa, Artificial Sequence
  Description of Artificial Sequence: Synthetic peptide
  Seed: DPRMCSLMQGSTLPRRSGAAGA
DPRMFSLMQISTLPRRSGAAGA

SEQ ID NO: 70009 - protein, 22 aa, Artificial Sequence
  Description of Artificial Sequence: Synthetic peptide
  Seed: DPRMCSLMQGSTLPRRSGAAGA
DPRMFSLMQISTVPRRSGAAGA

SEQ ID NO: 70010 - protein, 22 aa, Artificial Sequence
  Description of Artificial Sequence: Synthetic peptide
  Seed: DPRMCSLMQGSTLPRRSGAAGA
DPRMFSLMQNSTAPRRSGAAGA

SEQ ID NO: 70011 - protein, 22 aa, Artificial Sequence
  Description of Artificial Sequence: Synthetic peptide
  Seed: DPRMCSLMQGSTLPRRSGAAGA
DPRMFSLMQNSTGPRRSGAAGA

SEQ ID NO: 70012 - protein, 22 aa, Artificial Sequence
  Description of Artificial Sequence: Synthetic peptide
  Seed: DPRMCSLMQGSTLPRRSGAAGA
DPRMFSLMQNSTIPRRSGAAGA

SEQ ID NO: 70013 - protein, 22 aa, Artificial Sequence
  Description of Artificial Sequence: Synthetic peptide
  Seed: DPRMCSLMQGSTLPRRSGAAGA
DPRMFSLMQNSTLPRRSGAAGA

SEQ ID NO: 70014 - protein, 22 aa, Artificial Sequence
  Description of Artificial Sequence: Synthetic peptide
  Seed: DPRMCSLMQGSTLPRRSGAAGA
DPRMFSLMQNSTMPRRSGAAGA

SEQ ID NO: 70015 - protein, 22 aa, Artificial Sequence
  Description of Artificial Sequence: Synthetic peptide
  Seed: DPRMCSLMQGSTLPRRSGAAGA
DPRMFSLMQNSTSPRRSGAAGA

SEQ ID NO: 70016 - protein, 22 aa, Artificial Sequence
  Description of Artificial Sequence: Synthetic peptide
  Seed: DPRMCSLMQGSTLPRRSGAAGA
DPRMFSLMQNSTTPRRSGAAGA

SEQ ID NO: 70017 - protein, 22 aa, Artificial Sequence
  Description of Artificial Sequence: Synthetic peptide
  Seed: DPRMCSLMQGSTLPRRSGAAGA
DPRMFSLMQNSTVPRRSGAAGA

SEQ ID NO: 70018 - protein, 22 aa, Artificial Sequence
  Description of Artificial Sequence: Synthetic peptide
  Seed: DPRMCSLMQGSTLPRRSGAAGA
DPRMFSLMQPSTAPRRSGAAGA

SEQ ID NO: 70019 - protein, 22 aa, Artificial Sequence
  Description of Artificial Sequence: Synthetic peptide
  Seed: DPRMCSLMQGSTLPRRSGAAGA
DPRMFSLMQPSTFPRRSGAAGA

SEQ ID NO: 70020 - protein, 22 aa, Artificial Sequence
  Description of Artificial Sequence: Synthetic peptide
  Seed: DPRMCSLMQGSTLPRRSGAAGA
DPRMFSLMQPSTGPRRSGAAGA

SEQ ID NO: 70021 - protein, 22 aa, Artificial Sequence
  Description of Artificial Sequence: Synthetic peptide
  Seed: DPRMCSLMQGSTLPRRSGAAGA
DPRMFSLMQPSTIPRRSGAAGA

SEQ ID NO: 70022 - protein, 22 aa, Artificial Sequence
  Description of Artificial Sequence: Synthetic peptide
  Seed: DPRMCSLMQGSTLPRRSGAAGA
DPRMFSLMQPSTLPRRSGAAGA

SEQ ID NO: 70023 - protein, 22 aa, Artificial Sequence
  Description of Artificial Sequence: Synthetic peptide
  Seed: DPRMCSLMQGSTLPRRSGAAGA
DPRMFSLMQPSTMPRRSGAAGA

SEQ ID NO: 70024 - protein, 22 aa, Artificial Sequence
  Description of Artificial Sequence: Synthetic peptide
  Seed: DPRMCSLMQGSTLPRRSGAAGA
DPRMFSLMQPSTSPRRSGAAGA

SEQ ID NO: 70025 - protein, 22 aa, Artificial Sequence
  Description of Artificial Sequence: Synthetic peptide
  Seed: DPRMCSLMQGSTLPRRSGAAGA
DPRMFSLMQPSTTPRRSGAAGA

SEQ ID NO: 70026 - protein, 22 aa, Artificial Sequence
  Description of Artificial Sequence: Synthetic peptide
  Seed: DPRMCSLMQGSTLPRRSGAAGA
DPRMFSLMQPSTVPRRSGAAGA

SEQ ID NO: 70027 - protein, 22 aa, Artificial Sequence
  Description of Artificial Sequence: Synthetic peptide
  Seed: DPRMCSLMQGSTLPRRSGAAGA
DPRMFSLMQSSTAPRRSGAAGA

SEQ ID NO: 70028 - protein, 22 aa, Artificial Sequence
  Description of Artificial Sequence: Synthetic peptide
  Seed: DPRMCSLMQGSTLPRRSGAAGA
DPRMFSLMQSSTCPRRSGAAGA

SEQ ID NO: 70029 - protein, 22 aa, Artificial Sequence
  Description of Artificial Sequence: Synthetic peptide
  Seed: DPRMCSLMQGSTLPRRSGAAGA
DPRMFSLMQSSTFPRRSGAAGA

SEQ ID NO: 70030 - protein, 22 aa, Artificial Sequence
  Description of Artificial Sequence: Synthetic peptide
  Seed: DPRMCSLMQGSTLPRRSGAAGA
DPRMFSLMQSSTGPRRSGAAGA

SEQ ID NO: 70031 - protein, 22 aa, Artificial Sequence
  Description of Artificial Sequence: Synthetic peptide
  Seed: DPRMCSLMQGSTLPRRSGAAGA
DPRMFSLMQSSTIPRRSGAAGA

SEQ ID NO: 70032 - protein, 22 aa, Artificial Sequence
  Description of Artificial Sequence: Synthetic peptide
  Seed: DPRMCSLMQGSTLPRRSGAAGA
DPRMFSLMQSSTLPRRSGAAGA

SEQ ID NO: 70033 - protein, 22 aa, Artificial Sequence
  Description of Artificial Sequence: Synthetic peptide
  Seed: DPRMCSLMQGSTLPRRSGAAGA
DPRMFSLMQSSTMPRRSGAAGA

SEQ ID NO: 70034 - protein, 22 aa, Artificial Sequence
  Description of Artificial Sequence: Synthetic peptide
  Seed: DPRMCSLMQGSTLPRRSGAAGA
DPRMFSLMQSSTNPRRSGAAGA

SEQ ID NO: 70035 - protein, 22 aa, Artificial Sequence
  Description of Artificial Sequence: Synthetic peptide
  Seed: DPRMCSLMQGSTLPRRSGAAGA
DPRMFSLMQSSTSPRRSGAAGA

SEQ ID NO: 70036 - protein, 22 aa, Artificial Sequence
  Description of Artificial Sequence: Synthetic peptide
  Seed: DPRMCSLMQGSTLPRRSGAAGA
DPRMFSLMQSSTTPRRSGAAGA

SEQ ID NO: 70037 - protein, 22 aa, Artificial Sequence
  Description of Artificial Sequence: Synthetic peptide
  Seed: DPRMCSLMQGSTLPRRSGAAGA
DPRMFSLMQSSTVPRRSGAAGA

SEQ ID NO: 70038 - protein, 22 aa, Artificial Sequence
  Description of Artificial Sequence: Synthetic peptide
  Seed: DPRMCSLMQGSTLPRRSGAAGA
DPRMFSLMQTSTAPRRSGAAGA

SEQ ID NO: 70039 - protein, 22 aa, Artificial Sequence
  Description of Artificial Sequence: Synthetic peptide
  Seed: DPRMCSLMQGSTLPRRSGAAGA
DPRMFSLMQTSTGPRRSGAAGA

SEQ ID NO: 70040 - protein, 22 aa, Artificial Sequence
  Description of Artificial Sequence: Synthetic peptide
  Seed: DPRMCSLMQGSTLPRRSGAAGA
DPRMFSLMQTSTIPRRSGAAGA

SEQ ID NO: 70041 - protein, 22 aa, Artificial Sequence
  Description of Artificial Sequence: Synthetic peptide
  Seed: DPRMCSLMQGSTLPRRSGAAGA
DPRMFSLMQTSTLPRRSGAAGA

SEQ ID NO: 70042 - protein, 22 aa, Artificial Sequence
  Description of Artificial Sequence: Synthetic peptide
  Seed: DPRMCSLMQGSTLPRRSGAAGA
DPRMFSLMQTSTMPRRSGAAGA

SEQ ID NO: 70043 - protein, 22 aa, Artificial Sequence
  Description of Artificial Sequence: Synthetic peptide
  Seed: DPRMCSLMQGSTLPRRSGAAGA
DPRMFSLMQTSTSPRRSGAAGA

SEQ ID NO: 70044 - protein, 22 aa, Artificial Sequence
  Description of Artificial Sequence: Synthetic peptide
  Seed: DPRMCSLMQGSTLPRRSGAAGA
DPRMFSLMQTSTTPRRSGAAGA

SEQ ID NO: 70045 - protein, 22 aa, Artificial Sequence
  Description of Artificial Sequence: Synthetic peptide
  Seed: DPRMCSLMQGSTLPRRSGAAGA
DPRMFSLMQTSTVPRRSGAAGA

SEQ ID NO: 70046 - protein, 22 aa, Artificial Sequence
  Description of Artificial Sequence: Synthetic peptide
  Seed: DPRMCSLMQGSTLPRRSGAAGA
DPRMFSLMQVSTAPRRSGAAGA

SEQ ID NO: 70047 - protein, 22 aa, Artificial Sequence
  Description of Artificial Sequence: Synthetic peptide
  Seed: DPRMCSLMQGSTLPRRSGAAGA
DPRMFSLMQVSTIPRRSGAAGA

SEQ ID NO: 70048 - protein, 22 aa, Artificial Sequence
  Description of Artificial Sequence: Synthetic peptide
  Seed: DPRMCSLMQGSTLPRRSGAAGA
DPRMFSLMQVSTLPRRSGAAGA

SEQ ID NO: 70049 - protein, 22 aa, Artificial Sequence
  Description of Artificial Sequence: Synthetic peptide
  Seed: DPRMCSLMQGSTLPRRSGAAGA
DPRMFSLMQVSTMPRRSGAAGA

SEQ ID NO: 70050 - protein, 22 aa, Artificial Sequence
  Description of Artificial Sequence: Synthetic peptide
  Seed: DPRMCSLMQGSTLPRRSGAAGA
DPRMFSLMQVSTSPRRSGAAGA

SEQ ID NO: 70051 - protein, 22 aa, Artificial Sequence
  Description of Artificial Sequence: Synthetic peptide
  Seed: DPRMCSLMQGSTLPRRSGAAGA
DPRMFSLMQVSTTPRRSGAAGA

SEQ ID NO: 70052 - protein, 22 aa, Artificial Sequence
  Description of Artificial Sequence: Synthetic peptide
  Seed: DPRMCSLMQGSTLPRRSGAAGA
DPRMFSLMQVSTVPRRSGAAGA

SEQ ID NO: 70053 - protein, 22 aa, Artificial Sequence
  Description of Artificial Sequence: Synthetic peptide
  Seed: DPRMCSLMQGSTLPRRSGAAGA
DPRMFSLNQASTIPRRSGAAGA

SEQ ID NO: 70054 - protein, 22 aa, Artificial Sequence
  Description of Artificial Sequence: Synthetic peptide
  Seed: DPRMCSLMQGSTLPRRSGAAGA
DPRMFSLNQASTLPRRSGAAGA

SEQ ID NO: 70055 - protein, 22 aa, Artificial Sequence
  Description of Artificial Sequence: Synthetic peptide
  Seed: DPRMCSLMQGSTLPRRSGAAGA
DPRMFSLNQASTVPRRSGAAGA

SEQ ID NO: 70056 - protein, 22 aa, Artificial Sequence
  Description of Artificial Sequence: Synthetic peptide
  Seed: DPRMCSLMQGSTLPRRSGAAGA
DPRMFSLQQASTAPRRSGAAGA

SEQ ID NO: 70057 - protein, 22 aa, Artificial Sequence
  Description of Artificial Sequence: Synthetic peptide
  Seed: DPRMCSLMQGSTLPRRSGAAGA
DPRMFSLQQASTIPRRSGAAGA

SEQ ID NO: 70058 - protein, 22 aa, Artificial Sequence
  Description of Artificial Sequence: Synthetic peptide
  Seed: DPRMCSLMQGSTLPRRSGAAGA
DPRMFSLQQASTLPRRSGAAGA

SEQ ID NO: 70059 - protein, 22 aa, Artificial Sequence
  Description of Artificial Sequence: Synthetic peptide
  Seed: DPRMCSLMQGSTLPRRSGAAGA
DPRMFSLQQASTMPRRSGAAGA

SEQ ID NO: 70060 - protein, 22 aa, Artificial Sequence
  Description of Artificial Sequence: Synthetic peptide
  Seed: DPRMCSLMQGSTLPRRSGAAGA
DPRMFSLQQASTSPRRSGAAGA

SEQ ID NO: 70061 - protein, 22 aa, Artificial Sequence
  Description of Artificial Sequence: Synthetic peptide
  Seed: DPRMCSLMQGSTLPRRSGAAGA
DPRMFSLQQASTTPRRSGAAGA

SEQ ID NO: 70062 - protein, 22 aa, Artificial Sequence
  Description of Artificial Sequence: Synthetic peptide
  Seed: DPRMCSLMQGSTLPRRSGAAGA
DPRMFSLQQASTVPRRSGAAGA

SEQ ID NO: 70063 - protein, 22 aa, Artificial Sequence
  Description of Artificial Sequence: Synthetic peptide
  Seed: DPRMCSLMQGSTLPRRSGAAGA
DPRMFSLQQGSTAPRRSGAAGA

SEQ ID NO: 70064 - protein, 22 aa, Artificial Sequence
  Description of Artificial Sequence: Synthetic peptide
  Seed: DPRMCSLMQGSTLPRRSGAAGA
DPRMFSLQQGSTIPRRSGAAGA

SEQ ID NO: 70065 - protein, 22 aa, Artificial Sequence
  Description of Artificial Sequence: Synthetic peptide
  Seed: DPRMCSLMQGSTLPRRSGAAGA
DPRMFSLQQGSTLPRRSGAAGA

SEQ ID NO: 70066 - protein, 22 aa, Artificial Sequence
  Description of Artificial Sequence: Synthetic peptide
  Seed: DPRMCSLMQGSTLPRRSGAAGA
DPRMFSLQQGSTMPRRSGAAGA

SEQ ID NO: 70067 - protein, 22 aa, Artificial Sequence
  Description of Artificial Sequence: Synthetic peptide
  Seed: DPRMCSLMQGSTLPRRSGAAGA
DPRMFSLQQGSTVPRRSGAAGA

SEQ ID NO: 70068 - protein, 22 aa, Artificial Sequence
  Description of Artificial Sequence: Synthetic peptide
  Seed: DPRMCSLMQGSTLPRRSGAAGA
DPRMFSLQQPSTAPRRSGAAGA

SEQ ID NO: 70069 - protein, 22 aa, Artificial Sequence
  Description of Artificial Sequence: Synthetic peptide
  Seed: DPRMCSLMQGSTLPRRSGAAGA
DPRMFSLQQPSTIPRRSGAAGA

SEQ ID NO: 70070 - protein, 22 aa, Artificial Sequence
  Description of Artificial Sequence: Synthetic peptide
  Seed: DPRMCSLMQGSTLPRRSGAAGA
DPRMFSLQQPSTLPRRSGAAGA

SEQ ID NO: 70071 - protein, 22 aa, Artificial Sequence
  Description of Artificial Sequence: Synthetic peptide
  Seed: DPRMCSLMQGSTLPRRSGAAGA
DPRMFSLQQPSTVPRRSGAAGA

SEQ ID NO: 70072 - protein, 22 aa, Artificial Sequence
  Description of Artificial Sequence: Synthetic peptide
  Seed: DPRMCSLMQGSTLPRRSGAAGA
DPRMFSLQQSSTAPRRSGAAGA

SEQ ID NO: 70073 - protein, 22 aa, Artificial Sequence
  Description of Artificial Sequence: Synthetic peptide
  Seed: DPRMCSLMQGSTLPRRSGAAGA
DPRMFSLQQSSTIPRRSGAAGA

SEQ ID NO: 70074 - protein, 22 aa, Artificial Sequence
  Description of Artificial Sequence: Synthetic peptide
  Seed: DPRMCSLMQGSTLPRRSGAAGA
DPRMFSLQQSSTLPRRSGAAGA

SEQ ID NO: 70075 - protein, 22 aa, Artificial Sequence
  Description of Artificial Sequence: Synthetic peptide
  Seed: DPRMCSLMQGSTLPRRSGAAGA
DPRMFSLQQSSTVPRRSGAAGA

SEQ ID NO: 70076 - protein, 22 aa, Artificial Sequence
  Description of Artificial Sequence: Synthetic peptide
  Seed: DPRMCSLMQGSTLPRRSGAAGA
DPRMFSLQQTSTVPRRSGAAGA

SEQ ID NO: 70077 - protein, 22 aa, Artificial Sequence
  Description of Artificial Sequence: Synthetic peptide
  Seed: DPRMCSLMQGSTLPRRSGAAGA
DPRMFSLSQASTAPRRSGAAGA

SEQ ID NO: 70078 - protein, 22 aa, Artificial Sequence
  Description of Artificial Sequence: Synthetic peptide
  Seed: DPRMCSLMQGSTLPRRSGAAGA
DPRMFSLSQASTIPRRSGAAGA

SEQ ID NO: 70079 - protein, 22 aa, Artificial Sequence
  Description of Artificial Sequence: Synthetic peptide
  Seed: DPRMCSLMQGSTLPRRSGAAGA
DPRMFSLSQASTLPRRSGAAGA

SEQ ID NO: 70080 - protein, 22 aa, Artificial Sequence
  Description of Artificial Sequence: Synthetic peptide
  Seed: DPRMCSLMQGSTLPRRSGAAGA
DPRMFSLSQASTMPRRSGAAGA

SEQ ID NO: 70081 - protein, 22 aa, Artificial Sequence
  Description of Artificial Sequence: Synthetic peptide
  Seed: DPRMCSLMQGSTLPRRSGAAGA
DPRMFSLSQASTVPRRSGAAGA

SEQ ID NO: 70082 - protein, 22 aa, Artificial Sequence
  Description of Artificial Sequence: Synthetic peptide
  Seed: DPRMCSLMQGSTLPRRSGAAGA
DPRMFSLSQGSTIPRRSGAAGA

SEQ ID NO: 70083 - protein, 22 aa, Artificial Sequence
  Description of Artificial Sequence: Synthetic peptide
  Seed: DPRMCSLMQGSTLPRRSGAAGA
DPRMFSLSQGSTLPRRSGAAGA

SEQ ID NO: 70084 - protein, 22 aa, Artificial Sequence
  Description of Artificial Sequence: Synthetic peptide
  Seed: DPRMCSLMQGSTLPRRSGAAGA
DPRMFSLSQGSTVPRRSGAAGA

SEQ ID NO: 70085 - protein, 22 aa, Artificial Sequence
  Description of Artificial Sequence: Synthetic peptide
  Seed: DPRMCSLMQGSTLPRRSGAAGA
DPRMFSLSQSSTVPRRSGAAGA

SEQ ID NO: 70086 - protein, 22 aa, Artificial Sequence
  Description of Artificial Sequence: Synthetic peptide
  Seed: DPRMCSLMQGSTLPRRSGAAGA
DPRMFSLTQASTAPRRSGAAGA

SEQ ID NO: 70087 - protein, 22 aa, Artificial Sequence
  Description of Artificial Sequence: Synthetic peptide
  Seed: DPRMCSLMQGSTLPRRSGAAGA
DPRMFSLTQASTIPRRSGAAGA

SEQ ID NO: 70088 - protein, 22 aa, Artificial Sequence
  Description of Artificial Sequence: Synthetic peptide
  Seed: DPRMCSLMQGSTLPRRSGAAGA
DPRMFSLTQASTLPRRSGAAGA

SEQ ID NO: 70089 - protein, 22 aa, Artificial Sequence
  Description of Artificial Sequence: Synthetic peptide
  Seed: DPRMCSLMQGSTLPRRSGAAGA
DPRMFSLTQASTVPRRSGAAGA

SEQ ID NO: 70090 - protein, 22 aa, Artificial Sequence
  Description of Artificial Sequence: Synthetic peptide
  Seed: DPRMCSLMQGSTLPRRSGAAGA
DPRMFSLVQASTAPRRSGAAGA

SEQ ID NO: 70091 - protein, 22 aa, Artificial Sequence
  Description of Artificial Sequence: Synthetic peptide
  Seed: DPRMCSLMQGSTLPRRSGAAGA
DPRMFSLVQASTIPRRSGAAGA

SEQ ID NO: 70092 - protein, 22 aa, Artificial Sequence
  Description of Artificial Sequence: Synthetic peptide
  Seed: DPRMCSLMQGSTLPRRSGAAGA
DPRMFSLVQASTLPRRSGAAGA

SEQ ID NO: 70093 - protein, 22 aa, Artificial Sequence
  Description of Artificial Sequence: Synthetic peptide
  Seed: DPRMCSLMQGSTLPRRSGAAGA
DPRMFSLVQASTMPRRSGAAGA

SEQ ID NO: 70094 - protein, 22 aa, Artificial Sequence
  Description of Artificial Sequence: Synthetic peptide
  Seed: DPRMCSLMQGSTLPRRSGAAGA
DPRMFSLVQASTSPRRSGAAGA

SEQ ID NO: 70095 - protein, 22 aa, Artificial Sequence
  Description of Artificial Sequence: Synthetic peptide
  Seed: DPRMCSLMQGSTLPRRSGAAGA
DPRMFSLVQASTTPRRSGAAGA

SEQ ID NO: 70096 - protein, 22 aa, Artificial Sequence
  Description of Artificial Sequence: Synthetic peptide
  Seed: DPRMCSLMQGSTLPRRSGAAGA
DPRMFSLVQASTVPRRSGAAGA

SEQ ID NO: 70097 - protein, 22 aa, Artificial Sequence
  Description of Artificial Sequence: Synthetic peptide
  Seed: DPRMCSLMQGSTLPRRSGAAGA
DPRMFSLVQGSTAPRRSGAAGA

SEQ ID NO: 70098 - protein, 22 aa, Artificial Sequence
  Description of Artificial Sequence: Synthetic peptide
  Seed: DPRMCSLMQGSTLPRRSGAAGA
DPRMFSLVQGSTIPRRSGAAGA

SEQ ID NO: 70099 - protein, 22 aa, Artificial Sequence
  Description of Artificial Sequence: Synthetic peptide
  Seed: DPRMCSLMQGSTLPRRSGAAGA
DPRMFSLVQGSTLPRRSGAAGA

SEQ ID NO: 70100 - protein, 22 aa, Artificial Sequence
  Description of Artificial Sequence: Synthetic peptide
  Seed: DPRMCSLMQGSTLPRRSGAAGA
DPRMFSLVQGSTMPRRSGAAGA

SEQ ID NO: 70101 - protein, 22 aa, Artificial Sequence
  Description of Artificial Sequence: Synthetic peptide
  Seed: DPRMCSLMQGSTLPRRSGAAGA
DPRMFSLVQGSTTPRRSGAAGA

SEQ ID NO: 70102 - protein, 22 aa, Artificial Sequence
  Description of Artificial Sequence: Synthetic peptide
  Seed: DPRMCSLMQGSTLPRRSGAAGA
DPRMFSLVQGSTVPRRSGAAGA

SEQ ID NO: 70103 - protein, 22 aa, Artificial Sequence
  Description of Artificial Sequence: Synthetic peptide
  Seed: DPRMCSLMQGSTLPRRSGAAGA
DPRMFSLVQNSTVPRRSGAAGA

SEQ ID NO: 70104 - protein, 22 aa, Artificial Sequence
  Description of Artificial Sequence: Synthetic peptide
  Seed: DPRMCSLMQGSTLPRRSGAAGA
DPRMFSLVQPSTAPRRSGAAGA

SEQ ID NO: 70105 - protein, 22 aa, Artificial Sequence
  Description of Artificial Sequence: Synthetic peptide
  Seed: DPRMCSLMQGSTLPRRSGAAGA
DPRMFSLVQPSTIPRRSGAAGA

SEQ ID NO: 70106 - protein, 22 aa, Artificial Sequence
  Description of Artificial Sequence: Synthetic peptide
  Seed: DPRMCSLMQGSTLPRRSGAAGA
DPRMFSLVQPSTLPRRSGAAGA

SEQ ID NO: 70107 - protein, 22 aa, Artificial Sequence
  Description of Artificial Sequence: Synthetic peptide
  Seed: DPRMCSLMQGSTLPRRSGAAGA
DPRMFSLVQPSTVPRRSGAAGA

SEQ ID NO: 70108 - protein, 22 aa, Artificial Sequence
  Description of Artificial Sequence: Synthetic peptide
  Seed: DPRMCSLMQGSTLPRRSGAAGA
DPRMFSLVQSSTAPRRSGAAGA

SEQ ID NO: 70109 - protein, 22 aa, Artificial Sequence
  Description of Artificial Sequence: Synthetic peptide
  Seed: DPRMCSLMQGSTLPRRSGAAGA
DPRMFSLVQSSTIPRRSGAAGA

SEQ ID NO: 70110 - protein, 22 aa, Artificial Sequence
  Description of Artificial Sequence: Synthetic peptide
  Seed: DPRMCSLMQGSTLPRRSGAAGA
DPRMFSLVQSSTLPRRSGAAGA

SEQ ID NO: 70111 - protein, 22 aa, Artificial Sequence
  Description of Artificial Sequence: Synthetic peptide
  Seed: DPRMCSLMQGSTLPRRSGAAGA
DPRMFSLVQSSTVPRRSGAAGA

SEQ ID NO: 70112 - protein, 22 aa, Artificial Sequence
  Description of Artificial Sequence: Synthetic peptide
  Seed: DPRMCSLMQGSTLPRRSGAAGA
DPRMFSLVQTSTVPRRSGAAGA

SEQ ID NO: 70113 - protein, 22 aa, Artificial Sequence
  Description of Artificial Sequence: Synthetic peptide
  Seed: DPRMCSLMQGSTLPRRSGAAGA
DPRMISLAQASTAPRRSGAAGA

SEQ ID NO: 70114 - protein, 22 aa, Artificial Sequence
  Description of Artificial Sequence: Synthetic peptide
  Seed: DPRMCSLMQGSTLPRRSGAAGA
DPRMISLAQASTIPRRSGAAGA

SEQ ID NO: 70115 - protein, 22 aa, Artificial Sequence
  Description of Artificial Sequence: Synthetic peptide
  Seed: DPRMCSLMQGSTLPRRSGAAGA
DPRMISLAQASTLPRRSGAAGA

SEQ ID NO: 70116 - protein, 22 aa, Artificial Sequence
  Description of Artificial Sequence: Synthetic peptide
  Seed: DPRMCSLMQGSTLPRRSGAAGA
DPRMISLAQASTVPRRSGAAGA

SEQ ID NO: 70117 - protein, 22 aa, Artificial Sequence
  Description of Artificial Sequence: Synthetic peptide
  Seed: DPRMCSLMQGSTLPRRSGAAGA
DPRMISLIQASTAPRRSGAAGA

SEQ ID NO: 70118 - protein, 22 aa, Artificial Sequence
  Description of Artificial Sequence: Synthetic peptide
  Seed: DPRMCSLMQGSTLPRRSGAAGA
DPRMISLIQASTIPRRSGAAGA

SEQ ID NO: 70119 - protein, 22 aa, Artificial Sequence
  Description of Artificial Sequence: Synthetic peptide
  Seed: DPRMCSLMQGSTLPRRSGAAGA
DPRMISLIQASTLPRRSGAAGA

SEQ ID NO: 70120 - protein, 22 aa, Artificial Sequence
  Description of Artificial Sequence: Synthetic peptide
  Seed: DPRMCSLMQGSTLPRRSGAAGA
DPRMISLIQASTVPRRSGAAGA

SEQ ID NO: 70121 - protein, 22 aa, Artificial Sequence
  Description of Artificial Sequence: Synthetic peptide
  Seed: DPRMCSLMQGSTLPRRSGAAGA
DPRMISLIQGSTAPRRSGAAGA

SEQ ID NO: 70122 - protein, 22 aa, Artificial Sequence
  Description of Artificial Sequence: Synthetic peptide
  Seed: DPRMCSLMQGSTLPRRSGAAGA
DPRMISLIQGSTIPRRSGAAGA

SEQ ID NO: 70123 - protein, 22 aa, Artificial Sequence
  Description of Artificial Sequence: Synthetic peptide
  Seed: DPRMCSLMQGSTLPRRSGAAGA
DPRMISLIQGSTLPRRSGAAGA

SEQ ID NO: 70124 - protein, 22 aa, Artificial Sequence
  Description of Artificial Sequence: Synthetic peptide
  Seed: DPRMCSLMQGSTLPRRSGAAGA
DPRMISLIQGSTVPRRSGAAGA

SEQ ID NO: 70125 - protein, 22 aa, Artificial Sequence
  Description of Artificial Sequence: Synthetic peptide
  Seed: DPRMCSLMQGSTLPRRSGAAGA
DPRMISLIQSSTVPRRSGAAGA

SEQ ID NO: 70126 - protein, 22 aa, Artificial Sequence
  Description of Artificial Sequence: Synthetic peptide
  Seed: DPRMCSLMQGSTLPRRSGAAGA
DPRMISLLQASTAPRRSGAAGA

SEQ ID NO: 70127 - protein, 22 aa, Artificial Sequence
  Description of Artificial Sequence: Synthetic peptide
  Seed: DPRMCSLMQGSTLPRRSGAAGA
DPRMISLLQASTGPRRSGAAGA

SEQ ID NO: 70128 - protein, 22 aa, Artificial Sequence
  Description of Artificial Sequence: Synthetic peptide
  Seed: DPRMCSLMQGSTLPRRSGAAGA
DPRMISLLQASTIPRRSGAAGA

SEQ ID NO: 70129 - protein, 22 aa, Artificial Sequence
  Description of Artificial Sequence: Synthetic peptide
  Seed: DPRMCSLMQGSTLPRRSGAAGA
DPRMISLLQASTLPRRSGAAGA

SEQ ID NO: 70130 - protein, 22 aa, Artificial Sequence
  Description of Artificial Sequence: Synthetic peptide
  Seed: DPRMCSLMQGSTLPRRSGAAGA
DPRMISLLQASTMPRRSGAAGA

SEQ ID NO: 70131 - protein, 22 aa, Artificial Sequence
  Description of Artificial Sequence: Synthetic peptide
  Seed: DPRMCSLMQGSTLPRRSGAAGA
DPRMISLLQASTSPRRSGAAGA

SEQ ID NO: 70132 - protein, 22 aa, Artificial Sequence
  Description of Artificial Sequence: Synthetic peptide
  Seed: DPRMCSLMQGSTLPRRSGAAGA
DPRMISLLQASTTPRRSGAAGA

SEQ ID NO: 70133 - protein, 22 aa, Artificial Sequence
  Description of Artificial Sequence: Synthetic peptide
  Seed: DPRMCSLMQGSTLPRRSGAAGA
DPRMISLLQASTVPRRSGAAGA

SEQ ID NO: 70134 - protein, 22 aa, Artificial Sequence
  Description of Artificial Sequence: Synthetic peptide
  Seed: DPRMCSLMQGSTLPRRSGAAGA
DPRMISLLQGSTAPRRSGAAGA

SEQ ID NO: 70135 - protein, 22 aa, Artificial Sequence
  Description of Artificial Sequence: Synthetic peptide
  Seed: DPRMCSLMQGSTLPRRSGAAGA
DPRMISLLQGSTIPRRSGAAGA

SEQ ID NO: 70136 - protein, 22 aa, Artificial Sequence
  Description of Artificial Sequence: Synthetic peptide
  Seed: DPRMCSLMQGSTLPRRSGAAGA
DPRMISLLQGSTLPRRSGAAGA

SEQ ID NO: 70137 - protein, 22 aa, Artificial Sequence
  Description of Artificial Sequence: Synthetic peptide
  Seed: DPRMCSLMQGSTLPRRSGAAGA
DPRMISLLQGSTMPRRSGAAGA

SEQ ID NO: 70138 - protein, 22 aa, Artificial Sequence
  Description of Artificial Sequence: Synthetic peptide
  Seed: DPRMCSLMQGSTLPRRSGAAGA
DPRMISLLQGSTSPRRSGAAGA

SEQ ID NO: 70139 - protein, 22 aa, Artificial Sequence
  Description of Artificial Sequence: Synthetic peptide
  Seed: DPRMCSLMQGSTLPRRSGAAGA
DPRMISLLQGSTTPRRSGAAGA

SEQ ID NO: 70140 - protein, 22 aa, Artificial Sequence
  Description of Artificial Sequence: Synthetic peptide
  Seed: DPRMCSLMQGSTLPRRSGAAGA
DPRMISLLQGSTVPRRSGAAGA

SEQ ID NO: 70141 - protein, 22 aa, Artificial Sequence
  Description of Artificial Sequence: Synthetic peptide
  Seed: DPRMCSLMQGSTLPRRSGAAGA
DPRMISLLQNSTLPRRSGAAGA

SEQ ID NO: 70142 - protein, 22 aa, Artificial Sequence
  Description of Artificial Sequence: Synthetic peptide
  Seed: DPRMCSLMQGSTLPRRSGAAGA
DPRMISLLQNSTVPRRSGAAGA

SEQ ID NO: 70143 - protein, 22 aa, Artificial Sequence
  Description of Artificial Sequence: Synthetic peptide
  Seed: DPRMCSLMQGSTLPRRSGAAGA
DPRMISLLQPSTAPRRSGAAGA

SEQ ID NO: 70144 - protein, 22 aa, Artificial Sequence
  Description of Artificial Sequence: Synthetic peptide
  Seed: DPRMCSLMQGSTLPRRSGAAGA
DPRMISLLQPSTIPRRSGAAGA

SEQ ID NO: 70145 - protein, 22 aa, Artificial Sequence
  Description of Artificial Sequence: Synthetic peptide
  Seed: DPRMCSLMQGSTLPRRSGAAGA
DPRMISLLQPSTLPRRSGAAGA

SEQ ID NO: 70146 - protein, 22 aa, Artificial Sequence
  Description of Artificial Sequence: Synthetic peptide
  Seed: DPRMCSLMQGSTLPRRSGAAGA
DPRMISLLQPSTMPRRSGAAGA

SEQ ID NO: 70147 - protein, 22 aa, Artificial Sequence
  Description of Artificial Sequence: Synthetic peptide
  Seed: DPRMCSLMQGSTLPRRSGAAGA
DPRMISLLQPSTVPRRSGAAGA

SEQ ID NO: 70148 - protein, 22 aa, Artificial Sequence
  Description of Artificial Sequence: Synthetic peptide
  Seed: DPRMCSLMQGSTLPRRSGAAGA
DPRMISLLQSSTAPRRSGAAGA

SEQ ID NO: 70149 - protein, 22 aa, Artificial Sequence
  Description of Artificial Sequence: Synthetic peptide
  Seed: DPRMCSLMQGSTLPRRSGAAGA
DPRMISLLQSSTIPRRSGAAGA

SEQ ID NO: 70150 - protein, 22 aa, Artificial Sequence
  Description of Artificial Sequence: Synthetic peptide
  Seed: DPRMCSLMQGSTLPRRSGAAGA
DPRMISLLQSSTLPRRSGAAGA

SEQ ID NO: 70151 - protein, 22 aa, Artificial Sequence
  Description of Artificial Sequence: Synthetic peptide
  Seed: DPRMCSLMQGSTLPRRSGAAGA
DPRMISLLQSSTMPRRSGAAGA

SEQ ID NO: 70152 - protein, 22 aa, Artificial Sequence
  Description of Artificial Sequence: Synthetic peptide
  Seed: DPRMCSLMQGSTLPRRSGAAGA
DPRMISLLQSSTTPRRSGAAGA

SEQ ID NO: 70153 - protein, 22 aa, Artificial Sequence
  Description of Artificial Sequence: Synthetic peptide
  Seed: DPRMCSLMQGSTLPRRSGAAGA
DPRMISLLQSSTVPRRSGAAGA

SEQ ID NO: 70154 - protein, 22 aa, Artificial Sequence
  Description of Artificial Sequence: Synthetic peptide
  Seed: DPRMCSLMQGSTLPRRSGAAGA
DPRMISLLQTSTIPRRSGAAGA

SEQ ID NO: 70155 - protein, 22 aa, Artificial Sequence
  Description of Artificial Sequence: Synthetic peptide
  Seed: DPRMCSLMQGSTLPRRSGAAGA
DPRMISLLQTSTLPRRSGAAGA

SEQ ID NO: 70156 - protein, 22 aa, Artificial Sequence
  Description of Artificial Sequence: Synthetic peptide
  Seed: DPRMCSLMQGSTLPRRSGAAGA
DPRMISLLQTSTVPRRSGAAGA

SEQ ID NO: 70157 - protein, 22 aa, Artificial Sequence
  Description of Artificial Sequence: Synthetic peptide
  Seed: DPRMCSLMQGSTLPRRSGAAGA
DPRMISLMQASTAPRRSGAAGA

SEQ ID NO: 70158 - protein, 22 aa, Artificial Sequence
  Description of Artificial Sequence: Synthetic peptide
  Seed: DPRMCSLMQGSTLPRRSGAAGA
DPRMISLMQASTIPRRSGAAGA

SEQ ID NO: 70159 - protein, 22 aa, Artificial Sequence
  Description of Artificial Sequence: Synthetic peptide
  Seed: DPRMCSLMQGSTLPRRSGAAGA
DPRMISLMQASTLPRRSGAAGA

SEQ ID NO: 70160 - protein, 22 aa, Artificial Sequence
  Description of Artificial Sequence: Synthetic peptide
  Seed: DPRMCSLMQGSTLPRRSGAAGA
DPRMISLMQASTMPRRSGAAGA

SEQ ID NO: 70161 - protein, 22 aa, Artificial Sequence
  Description of Artificial Sequence: Synthetic peptide
  Seed: DPRMCSLMQGSTLPRRSGAAGA
DPRMISLMQASTSPRRSGAAGA

SEQ ID NO: 70162 - protein, 22 aa, Artificial Sequence
  Description of Artificial Sequence: Synthetic peptide
  Seed: DPRMCSLMQGSTLPRRSGAAGA
DPRMISLMQASTTPRRSGAAGA

SEQ ID NO: 70163 - protein, 22 aa, Artificial Sequence
  Description of Artificial Sequence: Synthetic peptide
  Seed: DPRMCSLMQGSTLPRRSGAAGA
DPRMISLMQASTVPRRSGAAGA

SEQ ID NO: 70164 - protein, 22 aa, Artificial Sequence
  Description of Artificial Sequence: Synthetic peptide
  Seed: DPRMCSLMQGSTLPRRSGAAGA
DPRMISLMQGSTAPRRSGAAGA

SEQ ID NO: 70165 - protein, 22 aa, Artificial Sequence
  Description of Artificial Sequence: Synthetic peptide
  Seed: DPRMCSLMQGSTLPRRSGAAGA
DPRMISLMQGSTIPRRSGAAGA

SEQ ID NO: 70166 - protein, 22 aa, Artificial Sequence
  Description of Artificial Sequence: Synthetic peptide
  Seed: DPRMCSLMQGSTLPRRSGAAGA
DPRMISLMQGSTLPRRSGAAGA

SEQ ID NO: 70167 - protein, 22 aa, Artificial Sequence
  Description of Artificial Sequence: Synthetic peptide
  Seed: DPRMCSLMQGSTLPRRSGAAGA
DPRMISLMQGSTMPRRSGAAGA

SEQ ID NO: 70168 - protein, 22 aa, Artificial Sequence
  Description of Artificial Sequence: Synthetic peptide
  Seed: DPRMCSLMQGSTLPRRSGAAGA
DPRMISLMQGSTSPRRSGAAGA

SEQ ID NO: 70169 - protein, 22 aa, Artificial Sequence
  Description of Artificial Sequence: Synthetic peptide
  Seed: DPRMCSLMQGSTLPRRSGAAGA
DPRMISLMQGSTTPRRSGAAGA

SEQ ID NO: 70170 - protein, 22 aa, Artificial Sequence
  Description of Artificial Sequence: Synthetic peptide
  Seed: DPRMCSLMQGSTLPRRSGAAGA
DPRMISLMQGSTVPRRSGAAGA

SEQ ID NO: 70171 - protein, 22 aa, Artificial Sequence
  Description of Artificial Sequence: Synthetic peptide
  Seed: DPRMCSLMQGSTLPRRSGAAGA
DPRMISLMQNSTLPRRSGAAGA

SEQ ID NO: 70172 - protein, 22 aa, Artificial Sequence
  Description of Artificial Sequence: Synthetic peptide
  Seed: DPRMCSLMQGSTLPRRSGAAGA
DPRMISLMQNSTVPRRSGAAGA

SEQ ID NO: 70173 - protein, 22 aa, Artificial Sequence
  Description of Artificial Sequence: Synthetic peptide
  Seed: DPRMCSLMQGSTLPRRSGAAGA
DPRMISLMQPSTAPRRSGAAGA

SEQ ID NO: 70174 - protein, 22 aa, Artificial Sequence
  Description of Artificial Sequence: Synthetic peptide
  Seed: DPRMCSLMQGSTLPRRSGAAGA
DPRMISLMQPSTIPRRSGAAGA

SEQ ID NO: 70175 - protein, 22 aa, Artificial Sequence
  Description of Artificial Sequence: Synthetic peptide
  Seed: DPRMCSLMQGSTLPRRSGAAGA
DPRMISLMQPSTLPRRSGAAGA

SEQ ID NO: 70176 - protein, 22 aa, Artificial Sequence
  Description of Artificial Sequence: Synthetic peptide
  Seed: DPRMCSLMQGSTLPRRSGAAGA
DPRMISLMQPSTMPRRSGAAGA

SEQ ID NO: 70177 - protein, 22 aa, Artificial Sequence
  Description of Artificial Sequence: Synthetic peptide
  Seed: DPRMCSLMQGSTLPRRSGAAGA
DPRMISLMQPSTVPRRSGAAGA

SEQ ID NO: 70178 - protein, 22 aa, Artificial Sequence
  Description of Artificial Sequence: Synthetic peptide
  Seed: DPRMCSLMQGSTLPRRSGAAGA
DPRMISLMQSSTAPRRSGAAGA

SEQ ID NO: 70179 - protein, 22 aa, Artificial Sequence
  Description of Artificial Sequence: Synthetic peptide
  Seed: DPRMCSLMQGSTLPRRSGAAGA
DPRMISLMQSSTIPRRSGAAGA

SEQ ID NO: 70180 - protein, 22 aa, Artificial Sequence
  Description of Artificial Sequence: Synthetic peptide
  Seed: DPRMCSLMQGSTLPRRSGAAGA
DPRMISLMQSSTLPRRSGAAGA

SEQ ID NO: 70181 - protein, 22 aa, Artificial Sequence
  Description of Artificial Sequence: Synthetic peptide
  Seed: DPRMCSLMQGSTLPRRSGAAGA
DPRMISLMQSSTMPRRSGAAGA

SEQ ID NO: 70182 - protein, 22 aa, Artificial Sequence
  Description of Artificial Sequence: Synthetic peptide
  Seed: DPRMCSLMQGSTLPRRSGAAGA
DPRMISLMQSSTTPRRSGAAGA

SEQ ID NO: 70183 - protein, 22 aa, Artificial Sequence
  Description of Artificial Sequence: Synthetic peptide
  Seed: DPRMCSLMQGSTLPRRSGAAGA
DPRMISLMQSSTVPRRSGAAGA

SEQ ID NO: 70184 - protein, 22 aa, Artificial Sequence
  Description of Artificial Sequence: Synthetic peptide
  Seed: DPRMCSLMQGSTLPRRSGAAGA
DPRMISLMQTSTIPRRSGAAGA

SEQ ID NO: 70185 - protein, 22 aa, Artificial Sequence
  Description of Artificial Sequence: Synthetic peptide
  Seed: DPRMCSLMQGSTLPRRSGAAGA
DPRMISLMQTSTLPRRSGAAGA

SEQ ID NO: 70186 - protein, 22 aa, Artificial Sequence
  Description of Artificial Sequence: Synthetic peptide
  Seed: DPRMCSLMQGSTLPRRSGAAGA
DPRMISLMQTSTVPRRSGAAGA

SEQ ID NO: 70187 - protein, 22 aa, Artificial Sequence
  Description of Artificial Sequence: Synthetic peptide
  Seed: DPRMCSLMQGSTLPRRSGAAGA
DPRMISLQQASTIPRRSGAAGA

SEQ ID NO: 70188 - protein, 22 aa, Artificial Sequence
  Description of Artificial Sequence: Synthetic peptide
  Seed: DPRMCSLMQGSTLPRRSGAAGA
DPRMISLQQASTLPRRSGAAGA

SEQ ID NO: 70189 - protein, 22 aa, Artificial Sequence
  Description of Artificial Sequence: Synthetic peptide
  Seed: DPRMCSLMQGSTLPRRSGAAGA
DPRMISLQQASTVPRRSGAAGA

SEQ ID NO: 70190 - protein, 22 aa, Artificial Sequence
  Description of Artificial Sequence: Synthetic peptide
  Seed: DPRMCSLMQGSTLPRRSGAAGA
DPRMISLVQASTVPRRSGAAGA

SEQ ID NO: 70191 - protein, 22 aa, Artificial Sequence
  Description of Artificial Sequence: Synthetic peptide
  Seed: DPRMCSLMQGSTLPRRSGAAGA
DPRMLSLAQASTLPRRSGAAGA

SEQ ID NO: 70192 - protein, 22 aa, Artificial Sequence
  Description of Artificial Sequence: Synthetic peptide
  Seed: DPRMCSLMQGSTLPRRSGAAGA
DPRMLSLAQASTVPRRSGAAGA

SEQ ID NO: 70193 - protein, 22 aa, Artificial Sequence
  Description of Artificial Sequence: Synthetic peptide
  Seed: DPRMCSLMQGSTLPRRSGAAGA
DPRMLSLIQASTAPRRSGAAGA

SEQ ID NO: 70194 - protein, 22 aa, Artificial Sequence
  Description of Artificial Sequence: Synthetic peptide
  Seed: DPRMCSLMQGSTLPRRSGAAGA
DPRMLSLIQASTIPRRSGAAGA

SEQ ID NO: 70195 - protein, 22 aa, Artificial Sequence
  Description of Artificial Sequence: Synthetic peptide
  Seed: DPRMCSLMQGSTLPRRSGAAGA
DPRMLSLIQASTLPRRSGAAGA

SEQ ID NO: 70196 - protein, 22 aa, Artificial Sequence
  Description of Artificial Sequence: Synthetic peptide
  Seed: DPRMCSLMQGSTLPRRSGAAGA
DPRMLSLIQASTVPRRSGAAGA

SEQ ID NO: 70197 - protein, 22 aa, Artificial Sequence
  Description of Artificial Sequence: Synthetic peptide
  Seed: DPRMCSLMQGSTLPRRSGAAGA
DPRMLSLIQGSTVPRRSGAAGA

SEQ ID NO: 70198 - protein, 22 aa, Artificial Sequence
  Description of Artificial Sequence: Synthetic peptide
  Seed: DPRMCSLMQGSTLPRRSGAAGA
DPRMLSLLQASTAPRRSGAAGA

SEQ ID NO: 70199 - protein, 22 aa, Artificial Sequence
  Description of Artificial Sequence: Synthetic peptide
  Seed: DPRMCSLMQGSTLPRRSGAAGA
DPRMLSLLQASTIPRRSGAAGA

SEQ ID NO: 70200 - protein, 22 aa, Artificial Sequence
  Description of Artificial Sequence: Synthetic peptide
  Seed: DPRMCSLMQGSTLPRRSGAAGA
DPRMLSLLQASTLPRRSGAAGA

SEQ ID NO: 70201 - protein, 22 aa, Artificial Sequence
  Description of Artificial Sequence: Synthetic peptide
  Seed: DPRMCSLMQGSTLPRRSGAAGA
DPRMLSLLQASTMPRRSGAAGA

SEQ ID NO: 70202 - protein, 22 aa, Artificial Sequence
  Description of Artificial Sequence: Synthetic peptide
  Seed: DPRMCSLMQGSTLPRRSGAAGA
DPRMLSLLQASTSPRRSGAAGA

SEQ ID NO: 70203 - protein, 22 aa, Artificial Sequence
  Description of Artificial Sequence: Synthetic peptide
  Seed: DPRMCSLMQGSTLPRRSGAAGA
DPRMLSLLQASTTPRRSGAAGA

SEQ ID NO: 70204 - protein, 22 aa, Artificial Sequence
  Description of Artificial Sequence: Synthetic peptide
  Seed: DPRMCSLMQGSTLPRRSGAAGA
DPRMLSLLQASTVPRRSGAAGA

SEQ ID NO: 70205 - protein, 22 aa, Artificial Sequence
  Description of Artificial Sequence: Synthetic peptide
  Seed: DPRMCSLMQGSTLPRRSGAAGA
DPRMLSLLQGSTAPRRSGAAGA

SEQ ID NO: 70206 - protein, 22 aa, Artificial Sequence
  Description of Artificial Sequence: Synthetic peptide
  Seed: DPRMCSLMQGSTLPRRSGAAGA
DPRMLSLLQGSTIPRRSGAAGA

SEQ ID NO: 70207 - protein, 22 aa, Artificial Sequence
  Description of Artificial Sequence: Synthetic peptide
  Seed: DPRMCSLMQGSTLPRRSGAAGA
DPRMLSLLQGSTLPRRSGAAGA

SEQ ID NO: 70208 - protein, 22 aa, Artificial Sequence
  Description of Artificial Sequence: Synthetic peptide
  Seed: DPRMCSLMQGSTLPRRSGAAGA
DPRMLSLLQGSTMPRRSGAAGA

SEQ ID NO: 70209 - protein, 22 aa, Artificial Sequence
  Description of Artificial Sequence: Synthetic peptide
  Seed: DPRMCSLMQGSTLPRRSGAAGA
DPRMLSLLQGSTSPRRSGAAGA

SEQ ID NO: 70210 - protein, 22 aa, Artificial Sequence
  Description of Artificial Sequence: Synthetic peptide
  Seed: DPRMCSLMQGSTLPRRSGAAGA
DPRMLSLLQGSTTPRRSGAAGA

SEQ ID NO: 70211 - protein, 22 aa, Artificial Sequence
  Description of Artificial Sequence: Synthetic peptide
  Seed: DPRMCSLMQGSTLPRRSGAAGA
DPRMLSLLQGSTVPRRSGAAGA

SEQ ID NO: 70212 - protein, 22 aa, Artificial Sequence
  Description of Artificial Sequence: Synthetic peptide
  Seed: DPRMCSLMQGSTLPRRSGAAGA
DPRMLSLLQPSTAPRRSGAAGA

SEQ ID NO: 70213 - protein, 22 aa, Artificial Sequence
  Description of Artificial Sequence: Synthetic peptide
  Seed: DPRMCSLMQGSTLPRRSGAAGA
DPRMLSLLQPSTIPRRSGAAGA

SEQ ID NO: 70214 - protein, 22 aa, Artificial Sequence
  Description of Artificial Sequence: Synthetic peptide
  Seed: DPRMCSLMQGSTLPRRSGAAGA
DPRMLSLLQPSTLPRRSGAAGA

SEQ ID NO: 70215 - protein, 22 aa, Artificial Sequence
  Description of Artificial Sequence: Synthetic peptide
  Seed: DPRMCSLMQGSTLPRRSGAAGA
DPRMLSLLQPSTVPRRSGAAGA

SEQ ID NO: 70216 - protein, 22 aa, Artificial Sequence
  Description of Artificial Sequence: Synthetic peptide
  Seed: DPRMCSLMQGSTLPRRSGAAGA
DPRMLSLLQSSTAPRRSGAAGA

SEQ ID NO: 70217 - protein, 22 aa, Artificial Sequence
  Description of Artificial Sequence: Synthetic peptide
  Seed: DPRMCSLMQGSTLPRRSGAAGA
DPRMLSLLQSSTIPRRSGAAGA

SEQ ID NO: 70218 - protein, 22 aa, Artificial Sequence
  Description of Artificial Sequence: Synthetic peptide
  Seed: DPRMCSLMQGSTLPRRSGAAGA
DPRMLSLLQSSTLPRRSGAAGA

SEQ ID NO: 70219 - protein, 22 aa, Artificial Sequence
  Description of Artificial Sequence: Synthetic peptide
  Seed: DPRMCSLMQGSTLPRRSGAAGA
DPRMLSLLQSSTVPRRSGAAGA

SEQ ID NO: 70220 - protein, 22 aa, Artificial Sequence
  Description of Artificial Sequence: Synthetic peptide
  Seed: DPRMCSLMQGSTLPRRSGAAGA
DPRMLSLMQASTAPRRSGAAGA

SEQ ID NO: 70221 - protein, 22 aa, Artificial Sequence
  Description of Artificial Sequence: Synthetic peptide
  Seed: DPRMCSLMQGSTLPRRSGAAGA
DPRMLSLMQASTIPRRSGAAGA

SEQ ID NO: 70222 - protein, 22 aa, Artificial Sequence
  Description of Artificial Sequence: Synthetic peptide
  Seed: DPRMCSLMQGSTLPRRSGAAGA
DPRMLSLMQASTLPRRSGAAGA

SEQ ID NO: 70223 - protein, 22 aa, Artificial Sequence
  Description of Artificial Sequence: Synthetic peptide
  Seed: DPRMCSLMQGSTLPRRSGAAGA
DPRMLSLMQASTMPRRSGAAGA

SEQ ID NO: 70224 - protein, 22 aa, Artificial Sequence
  Description of Artificial Sequence: Synthetic peptide
  Seed: DPRMCSLMQGSTLPRRSGAAGA
DPRMLSLMQASTSPRRSGAAGA

SEQ ID NO: 70225 - protein, 22 aa, Artificial Sequence
  Description of Artificial Sequence: Synthetic peptide
  Seed: DPRMCSLMQGSTLPRRSGAAGA
DPRMLSLMQASTTPRRSGAAGA

SEQ ID NO: 70226 - protein, 22 aa, Artificial Sequence
  Description of Artificial Sequence: Synthetic peptide
  Seed: DPRMCSLMQGSTLPRRSGAAGA
DPRMLSLMQASTVPRRSGAAGA

SEQ ID NO: 70227 - protein, 22 aa, Artificial Sequence
  Description of Artificial Sequence: Synthetic peptide
  Seed: DPRMCSLMQGSTLPRRSGAAGA
DPRMLSLMQGSTAPRRSGAAGA

SEQ ID NO: 70228 - protein, 22 aa, Artificial Sequence
  Description of Artificial Sequence: Synthetic peptide
  Seed: DPRMCSLMQGSTLPRRSGAAGA
DPRMLSLMQGSTIPRRSGAAGA

SEQ ID NO: 70229 - protein, 22 aa, Artificial Sequence
  Description of Artificial Sequence: Synthetic peptide
  Seed: DPRMCSLMQGSTLPRRSGAAGA
DPRMLSLMQGSTLPRRSGAAGA

SEQ ID NO: 70230 - protein, 22 aa, Artificial Sequence
  Description of Artificial Sequence: Synthetic peptide
  Seed: DPRMCSLMQGSTLPRRSGAAGA
DPRMLSLMQGSTMPRRSGAAGA

SEQ ID NO: 70231 - protein, 22 aa, Artificial Sequence
  Description of Artificial Sequence: Synthetic peptide
  Seed: DPRMCSLMQGSTLPRRSGAAGA
DPRMLSLMQGSTTPRRSGAAGA

SEQ ID NO: 70232 - protein, 22 aa, Artificial Sequence
  Description of Artificial Sequence: Synthetic peptide
  Seed: DPRMCSLMQGSTLPRRSGAAGA
DPRMLSLMQGSTVPRRSGAAGA

SEQ ID NO: 70233 - protein, 22 aa, Artificial Sequence
  Description of Artificial Sequence: Synthetic peptide
  Seed: DPRMCSLMQGSTLPRRSGAAGA
DPRMLSLMQPSTAPRRSGAAGA

SEQ ID NO: 70234 - protein, 22 aa, Artificial Sequence
  Description of Artificial Sequence: Synthetic peptide
  Seed: DPRMCSLMQGSTLPRRSGAAGA
DPRMLSLMQPSTIPRRSGAAGA

SEQ ID NO: 70235 - protein, 22 aa, Artificial Sequence
  Description of Artificial Sequence: Synthetic peptide
  Seed: DPRMCSLMQGSTLPRRSGAAGA
DPRMLSLMQPSTLPRRSGAAGA

SEQ ID NO: 70236 - protein, 22 aa, Artificial Sequence
  Description of Artificial Sequence: Synthetic peptide
  Seed: DPRMCSLMQGSTLPRRSGAAGA
DPRMLSLMQPSTVPRRSGAAGA

SEQ ID NO: 70237 - protein, 22 aa, Artificial Sequence
  Description of Artificial Sequence: Synthetic peptide
  Seed: DPRMCSLMQGSTLPRRSGAAGA
DPRMLSLMQSSTAPRRSGAAGA

SEQ ID NO: 70238 - protein, 22 aa, Artificial Sequence
  Description of Artificial Sequence: Synthetic peptide
  Seed: DPRMCSLMQGSTLPRRSGAAGA
DPRMLSLMQSSTIPRRSGAAGA

SEQ ID NO: 70239 - protein, 22 aa, Artificial Sequence
  Description of Artificial Sequence: Synthetic peptide
  Seed: DPRMCSLMQGSTLPRRSGAAGA
DPRMLSLMQSSTLPRRSGAAGA

SEQ ID NO: 70240 - protein, 22 aa, Artificial Sequence
  Description of Artificial Sequence: Synthetic peptide
  Seed: DPRMCSLMQGSTLPRRSGAAGA
DPRMLSLMQSSTVPRRSGAAGA

SEQ ID NO: 70241 - protein, 22 aa, Artificial Sequence
  Description of Artificial Sequence: Synthetic peptide
  Seed: DPRMCSLMQGSTLPRRSGAAGA
DPRMMSLLQASTAPRRSGAAGA

SEQ ID NO: 70242 - protein, 22 aa, Artificial Sequence
  Description of Artificial Sequence: Synthetic peptide
  Seed: DPRMCSLMQGSTLPRRSGAAGA
DPRMMSLLQASTIPRRSGAAGA

SEQ ID NO: 70243 - protein, 22 aa, Artificial Sequence
  Description of Artificial Sequence: Synthetic peptide
  Seed: DPRMCSLMQGSTLPRRSGAAGA
DPRMMSLLQASTLPRRSGAAGA

SEQ ID NO: 70244 - protein, 22 aa, Artificial Sequence
  Description of Artificial Sequence: Synthetic peptide
  Seed: DPRMCSLMQGSTLPRRSGAAGA
DPRMMSLLQASTVPRRSGAAGA

SEQ ID NO: 70245 - protein, 22 aa, Artificial Sequence
  Description of Artificial Sequence: Synthetic peptide
  Seed: DPRMCSLMQGSTLPRRSGAAGA
DPRMMSLLQGSTAPRRSGAAGA

SEQ ID NO: 70246 - protein, 22 aa, Artificial Sequence
  Description of Artificial Sequence: Synthetic peptide
  Seed: DPRMCSLMQGSTLPRRSGAAGA
DPRMMSLLQGSTIPRRSGAAGA

SEQ ID NO: 70247 - protein, 22 aa, Artificial Sequence
  Description of Artificial Sequence: Synthetic peptide
  Seed: DPRMCSLMQGSTLPRRSGAAGA
DPRMMSLLQGSTLPRRSGAAGA

SEQ ID NO: 70248 - protein, 22 aa, Artificial Sequence
  Description of Artificial Sequence: Synthetic peptide
  Seed: DPRMCSLMQGSTLPRRSGAAGA
DPRMMSLLQGSTVPRRSGAAGA

SEQ ID NO: 70249 - protein, 22 aa, Artificial Sequence
  Description of Artificial Sequence: Synthetic peptide
  Seed: DPRMCSLMQGSTLPRRSGAAGA
DPRMMSLLQPSTVPRRSGAAGA

SEQ ID NO: 70250 - protein, 22 aa, Artificial Sequence
  Description of Artificial Sequence: Synthetic peptide
  Seed: DPRMCSLMQGSTLPRRSGAAGA
DPRMMSLLQSSTVPRRSGAAGA

SEQ ID NO: 70251 - protein, 22 aa, Artificial Sequence
  Description of Artificial Sequence: Synthetic peptide
  Seed: DPRMCSLMQGSTLPRRSGAAGA
DPRMMSLMQASTAPRRSGAAGA

SEQ ID NO: 70252 - protein, 22 aa, Artificial Sequence
  Description of Artificial Sequence: Synthetic peptide
  Seed: DPRMCSLMQGSTLPRRSGAAGA
DPRMMSLMQASTIPRRSGAAGA

SEQ ID NO: 70253 - protein, 22 aa, Artificial Sequence
  Description of Artificial Sequence: Synthetic peptide
  Seed: DPRMCSLMQGSTLPRRSGAAGA
DPRMMSLMQASTLPRRSGAAGA

SEQ ID NO: 70254 - protein, 22 aa, Artificial Sequence
  Description of Artificial Sequence: Synthetic peptide
  Seed: DPRMCSLMQGSTLPRRSGAAGA
DPRMMSLMQASTVPRRSGAAGA

SEQ ID NO: 70255 - protein, 22 aa, Artificial Sequence
  Description of Artificial Sequence: Synthetic peptide
  Seed: DPRMCSLMQGSTLPRRSGAAGA
DPRMMSLMQGSTAPRRSGAAGA

SEQ ID NO: 70256 - protein, 22 aa, Artificial Sequence
  Description of Artificial Sequence: Synthetic peptide
  Seed: DPRMCSLMQGSTLPRRSGAAGA
DPRMMSLMQGSTIPRRSGAAGA

SEQ ID NO: 70257 - protein, 22 aa, Artificial Sequence
  Description of Artificial Sequence: Synthetic peptide
  Seed: DPRMCSLMQGSTLPRRSGAAGA
DPRMMSLMQGSTLPRRSGAAGA

SEQ ID NO: 70258 - protein, 22 aa, Artificial Sequence
  Description of Artificial Sequence: Synthetic peptide
  Seed: DPRMCSLMQGSTLPRRSGAAGA
DPRMMSLMQGSTVPRRSGAAGA

SEQ ID NO: 70259 - protein, 22 aa, Artificial Sequence
  Description of Artificial Sequence: Synthetic peptide
  Seed: DPRMCSLMQGSTLPRRSGAAGA
DPRMMSLMQSSTVPRRSGAAGA

SEQ ID NO: 70260 - protein, 22 aa, Artificial Sequence
  Description of Artificial Sequence: Synthetic peptide
  Seed: DPRMCSLMQGSTLPRRSGAAGA
DPRMVSLLQASTAPRRSGAAGA

SEQ ID NO: 70261 - protein, 22 aa, Artificial Sequence
  Description of Artificial Sequence: Synthetic peptide
  Seed: DPRMCSLMQGSTLPRRSGAAGA
DPRMVSLLQASTIPRRSGAAGA

SEQ ID NO: 70262 - protein, 22 aa, Artificial Sequence
  Description of Artificial Sequence: Synthetic peptide
  Seed: DPRMCSLMQGSTLPRRSGAAGA
DPRMVSLLQASTLPRRSGAAGA

SEQ ID NO: 70263 - protein, 22 aa, Artificial Sequence
  Description of Artificial Sequence: Synthetic peptide
  Seed: DPRMCSLMQGSTLPRRSGAAGA
DPRMVSLLQASTVPRRSGAAGA

SEQ ID NO: 70264 - protein, 22 aa, Artificial Sequence
  Description of Artificial Sequence: Synthetic peptide
  Seed: DPRMCSLMQGSTLPRRSGAAGA
DPRMVSLLQGSTAPRRSGAAGA

SEQ ID NO: 70265 - protein, 22 aa, Artificial Sequence
  Description of Artificial Sequence: Synthetic peptide
  Seed: DPRMCSLMQGSTLPRRSGAAGA
DPRMVSLLQGSTIPRRSGAAGA

SEQ ID NO: 70266 - protein, 22 aa, Artificial Sequence
  Description of Artificial Sequence: Synthetic peptide
  Seed: DPRMCSLMQGSTLPRRSGAAGA
DPRMVSLLQGSTLPRRSGAAGA

SEQ ID NO: 70267 - protein, 22 aa, Artificial Sequence
  Description of Artificial Sequence: Synthetic peptide
  Seed: DPRMCSLMQGSTLPRRSGAAGA
DPRMVSLLQGSTVPRRSGAAGA

SEQ ID NO: 70268 - protein, 22 aa, Artificial Sequence
  Description of Artificial Sequence: Synthetic peptide
  Seed: DPRMCSLMQGSTLPRRSGAAGA
DPRMVSLLQPSTVPRRSGAAGA

SEQ ID NO: 70269 - protein, 22 aa, Artificial Sequence
  Description of Artificial Sequence: Synthetic peptide
  Seed: DPRMCSLMQGSTLPRRSGAAGA
DPRMVSLLQSSTIPRRSGAAGA

SEQ ID NO: 70270 - protein, 22 aa, Artificial Sequence
  Description of Artificial Sequence: Synthetic peptide
  Seed: DPRMCSLMQGSTLPRRSGAAGA
DPRMVSLLQSSTLPRRSGAAGA

SEQ ID NO: 70271 - protein, 22 aa, Artificial Sequence
  Description of Artificial Sequence: Synthetic peptide
  Seed: DPRMCSLMQGSTLPRRSGAAGA
DPRMVSLLQSSTVPRRSGAAGA

SEQ ID NO: 70272 - protein, 22 aa, Artificial Sequence
  Description of Artificial Sequence: Synthetic peptide
  Seed: DPRMCSLMQGSTLPRRSGAAGA
DPRMVSLMQASTAPRRSGAAGA

SEQ ID NO: 70273 - protein, 22 aa, Artificial Sequence
  Description of Artificial Sequence: Synthetic peptide
  Seed: DPRMCSLMQGSTLPRRSGAAGA
DPRMVSLMQASTIPRRSGAAGA

SEQ ID NO: 70274 - protein, 22 aa, Artificial Sequence
  Description of Artificial Sequence: Synthetic peptide
  Seed: DPRMCSLMQGSTLPRRSGAAGA
DPRMVSLMQASTLPRRSGAAGA

SEQ ID NO: 70275 - protein, 22 aa, Artificial Sequence
  Description of Artificial Sequence: Synthetic peptide
  Seed: DPRMCSLMQGSTLPRRSGAAGA
DPRMVSLMQASTVPRRSGAAGA

SEQ ID NO: 70276 - protein, 22 aa, Artificial Sequence
  Description of Artificial Sequence: Synthetic peptide
  Seed: DPRMCSLMQGSTLPRRSGAAGA
DPRMVSLMQGSTAPRRSGAAGA

SEQ ID NO: 70277 - protein, 22 aa, Artificial Sequence
  Description of Artificial Sequence: Synthetic peptide
  Seed: DPRMCSLMQGSTLPRRSGAAGA
DPRMVSLMQGSTIPRRSGAAGA

SEQ ID NO: 70278 - protein, 22 aa, Artificial Sequence
  Description of Artificial Sequence: Synthetic peptide
  Seed: DPRMCSLMQGSTLPRRSGAAGA
DPRMVSLMQGSTLPRRSGAAGA

SEQ ID NO: 70279 - protein, 22 aa, Artificial Sequence
  Description of Artificial Sequence: Synthetic peptide
  Seed: DPRMCSLMQGSTLPRRSGAAGA
DPRMVSLMQGSTVPRRSGAAGA

SEQ ID NO: 70280 - protein, 22 aa, Artificial Sequence
  Description of Artificial Sequence: Synthetic peptide
  Seed: DPRMCSLMQGSTLPRRSGAAGA
DPRMVSLMQSSTIPRRSGAAGA

SEQ ID NO: 70281 - protein, 22 aa, Artificial Sequence
  Description of Artificial Sequence: Synthetic peptide
  Seed: DPRMCSLMQGSTLPRRSGAAGA
DPRMVSLMQSSTLPRRSGAAGA

SEQ ID NO: 70282 - protein, 22 aa, Artificial Sequence
  Description of Artificial Sequence: Synthetic peptide
  Seed: DPRMCSLMQGSTLPRRSGAAGA
DPRMVSLMQSSTVPRRSGAAGA

SEQ ID NO: 70283 - protein, 22 aa, Artificial Sequence
  Description of Artificial Sequence: Synthetic peptide
  Seed: DPRMCSLMQGSTLPRRSGAAGA
DPRMWSLAQASTAPRRSGAAGA

SEQ ID NO: 70284 - protein, 22 aa, Artificial Sequence
  Description of Artificial Sequence: Synthetic peptide
  Seed: DPRMCSLMQGSTLPRRSGAAGA
DPRMWSLAQASTIPRRSGAAGA

SEQ ID NO: 70285 - protein, 22 aa, Artificial Sequence
  Description of Artificial Sequence: Synthetic peptide
  Seed: DPRMCSLMQGSTLPRRSGAAGA
DPRMWSLAQASTLPRRSGAAGA

SEQ ID NO: 70286 - protein, 22 aa, Artificial Sequence
  Description of Artificial Sequence: Synthetic peptide
  Seed: DPRMCSLMQGSTLPRRSGAAGA
DPRMWSLAQASTVPRRSGAAGA

SEQ ID NO: 70287 - protein, 22 aa, Artificial Sequence
  Description of Artificial Sequence: Synthetic peptide
  Seed: DPRMCSLMQGSTLPRRSGAAGA
DPRMWSLAQGSTIPRRSGAAGA

SEQ ID NO: 70288 - protein, 22 aa, Artificial Sequence
  Description of Artificial Sequence: Synthetic peptide
  Seed: DPRMCSLMQGSTLPRRSGAAGA
DPRMWSLAQGSTLPRRSGAAGA

SEQ ID NO: 70289 - protein, 22 aa, Artificial Sequence
  Description of Artificial Sequence: Synthetic peptide
  Seed: DPRMCSLMQGSTLPRRSGAAGA
DPRMWSLAQGSTVPRRSGAAGA

SEQ ID NO: 70290 - protein, 22 aa, Artificial Sequence
  Description of Artificial Sequence: Synthetic peptide
  Seed: DPRMCSLMQGSTLPRRSGAAGA
DPRMWSLAQSSTVPRRSGAAGA

SEQ ID NO: 70291 - protein, 22 aa, Artificial Sequence
  Description of Artificial Sequence: Synthetic peptide
  Seed: DPRMCSLMQGSTLPRRSGAAGA
DPRMWSLIQASTAPRRSGAAGA

SEQ ID NO: 70292 - protein, 22 aa, Artificial Sequence
  Description of Artificial Sequence: Synthetic peptide
  Seed: DPRMCSLMQGSTLPRRSGAAGA
DPRMWSLIQASTIPRRSGAAGA

SEQ ID NO: 70293 - protein, 22 aa, Artificial Sequence
  Description of Artificial Sequence: Synthetic peptide
  Seed: DPRMCSLMQGSTLPRRSGAAGA
DPRMWSLIQASTLPRRSGAAGA

SEQ ID NO: 70294 - protein, 22 aa, Artificial Sequence
  Description of Artificial Sequence: Synthetic peptide
  Seed: DPRMCSLMQGSTLPRRSGAAGA
DPRMWSLIQASTMPRRSGAAGA

SEQ ID NO: 70295 - protein, 22 aa, Artificial Sequence
  Description of Artificial Sequence: Synthetic peptide
  Seed: DPRMCSLMQGSTLPRRSGAAGA
DPRMWSLIQASTTPRRSGAAGA

SEQ ID NO: 70296 - protein, 22 aa, Artificial Sequence
  Description of Artificial Sequence: Synthetic peptide
  Seed: DPRMCSLMQGSTLPRRSGAAGA
DPRMWSLIQASTVPRRSGAAGA

SEQ ID NO: 70297 - protein, 22 aa, Artificial Sequence
  Description of Artificial Sequence: Synthetic peptide
  Seed: DPRMCSLMQGSTLPRRSGAAGA
DPRMWSLIQGSTAPRRSGAAGA

SEQ ID NO: 70298 - protein, 22 aa, Artificial Sequence
  Description of Artificial Sequence: Synthetic peptide
  Seed: DPRMCSLMQGSTLPRRSGAAGA
DPRMWSLIQGSTIPRRSGAAGA

SEQ ID NO: 70299 - protein, 22 aa, Artificial Sequence
  Description of Artificial Sequence: Synthetic peptide
  Seed: DPRMCSLMQGSTLPRRSGAAGA
DPRMWSLIQGSTLPRRSGAAGA

SEQ ID NO: 70300 - protein, 22 aa, Artificial Sequence
  Description of Artificial Sequence: Synthetic peptide
  Seed: DPRMCSLMQGSTLPRRSGAAGA
DPRMWSLIQGSTVPRRSGAAGA

SEQ ID NO: 70301 - protein, 22 aa, Artificial Sequence
  Description of Artificial Sequence: Synthetic peptide
  Seed: DPRMCSLMQGSTLPRRSGAAGA
DPRMWSLIQPSTIPRRSGAAGA

SEQ ID NO: 70302 - protein, 22 aa, Artificial Sequence
  Description of Artificial Sequence: Synthetic peptide
  Seed: DPRMCSLMQGSTLPRRSGAAGA
DPRMWSLIQPSTVPRRSGAAGA

SEQ ID NO: 70303 - protein, 22 aa, Artificial Sequence
  Description of Artificial Sequence: Synthetic peptide
  Seed: DPRMCSLMQGSTLPRRSGAAGA
DPRMWSLIQSSTAPRRSGAAGA

SEQ ID NO: 70304 - protein, 22 aa, Artificial Sequence
  Description of Artificial Sequence: Synthetic peptide
  Seed: DPRMCSLMQGSTLPRRSGAAGA
DPRMWSLIQSSTIPRRSGAAGA

SEQ ID NO: 70305 - protein, 22 aa, Artificial Sequence
  Description of Artificial Sequence: Synthetic peptide
  Seed: DPRMCSLMQGSTLPRRSGAAGA
DPRMWSLIQSSTLPRRSGAAGA

SEQ ID NO: 70306 - protein, 22 aa, Artificial Sequence
  Description of Artificial Sequence: Synthetic peptide
  Seed: DPRMCSLMQGSTLPRRSGAAGA
DPRMWSLIQSSTVPRRSGAAGA

SEQ ID NO: 70307 - protein, 22 aa, Artificial Sequence
  Description of Artificial Sequence: Synthetic peptide
  Seed: DPRMCSLMQGSTLPRRSGAAGA
DPRMWSLLQASTAPRRSGAAGA

SEQ ID NO: 70308 - protein, 22 aa, Artificial Sequence
  Description of Artificial Sequence: Synthetic peptide
  Seed: DPRMCSLMQGSTLPRRSGAAGA
DPRMWSLLQASTGPRRSGAAGA

SEQ ID NO: 70309 - protein, 22 aa, Artificial Sequence
  Description of Artificial Sequence: Synthetic peptide
  Seed: DPRMCSLMQGSTLPRRSGAAGA
DPRMWSLLQASTIPRRSGAAGA

SEQ ID NO: 70310 - protein, 22 aa, Artificial Sequence
  Description of Artificial Sequence: Synthetic peptide
  Seed: DPRMCSLMQGSTLPRRSGAAGA
DPRMWSLLQASTLPRRSGAAGA

SEQ ID NO: 70311 - protein, 22 aa, Artificial Sequence
  Description of Artificial Sequence: Synthetic peptide
  Seed: DPRMCSLMQGSTLPRRSGAAGA
DPRMWSLLQASTMPRRSGAAGA

SEQ ID NO: 70312 - protein, 22 aa, Artificial Sequence
  Description of Artificial Sequence: Synthetic peptide
  Seed: DPRMCSLMQGSTLPRRSGAAGA
DPRMWSLLQASTSPRRSGAAGA

SEQ ID NO: 70313 - protein, 22 aa, Artificial Sequence
  Description of Artificial Sequence: Synthetic peptide
  Seed: DPRMCSLMQGSTLPRRSGAAGA
DPRMWSLLQASTTPRRSGAAGA

SEQ ID NO: 70314 - protein, 22 aa, Artificial Sequence
  Description of Artificial Sequence: Synthetic peptide
  Seed: DPRMCSLMQGSTLPRRSGAAGA
DPRMWSLLQASTVPRRSGAAGA

SEQ ID NO: 70315 - protein, 22 aa, Artificial Sequence
  Description of Artificial Sequence: Synthetic peptide
  Seed: DPRMCSLMQGSTLPRRSGAAGA
DPRMWSLLQGSTAPRRSGAAGA

SEQ ID NO: 70316 - protein, 22 aa, Artificial Sequence
  Description of Artificial Sequence: Synthetic peptide
  Seed: DPRMCSLMQGSTLPRRSGAAGA
DPRMWSLLQGSTIPRRSGAAGA

SEQ ID NO: 70317 - protein, 22 aa, Artificial Sequence
  Description of Artificial Sequence: Synthetic peptide
  Seed: DPRMCSLMQGSTLPRRSGAAGA
DPRMWSLLQGSTLPRRSGAAGA

SEQ ID NO: 70318 - protein, 22 aa, Artificial Sequence
  Description of Artificial Sequence: Synthetic peptide
  Seed: DPRMCSLMQGSTLPRRSGAAGA
DPRMWSLLQGSTMPRRSGAAGA

SEQ ID NO: 70319 - protein, 22 aa, Artificial Sequence
  Description of Artificial Sequence: Synthetic peptide
  Seed: DPRMCSLMQGSTLPRRSGAAGA
DPRMWSLLQGSTSPRRSGAAGA

SEQ ID NO: 70320 - protein, 22 aa, Artificial Sequence
  Description of Artificial Sequence: Synthetic peptide
  Seed: DPRMCSLMQGSTLPRRSGAAGA
DPRMWSLLQGSTTPRRSGAAGA

SEQ ID NO: 70321 - protein, 22 aa, Artificial Sequence
  Description of Artificial Sequence: Synthetic peptide
  Seed: DPRMCSLMQGSTLPRRSGAAGA
DPRMWSLLQGSTVPRRSGAAGA

SEQ ID NO: 70322 - protein, 22 aa, Artificial Sequence
  Description of Artificial Sequence: Synthetic peptide
  Seed: DPRMCSLMQGSTLPRRSGAAGA
DPRMWSLLQNSTAPRRSGAAGA

SEQ ID NO: 70323 - protein, 22 aa, Artificial Sequence
  Description of Artificial Sequence: Synthetic peptide
  Seed: DPRMCSLMQGSTLPRRSGAAGA
DPRMWSLLQNSTIPRRSGAAGA

SEQ ID NO: 70324 - protein, 22 aa, Artificial Sequence
  Description of Artificial Sequence: Synthetic peptide
  Seed: DPRMCSLMQGSTLPRRSGAAGA
DPRMWSLLQNSTLPRRSGAAGA

SEQ ID NO: 70325 - protein, 22 aa, Artificial Sequence
  Description of Artificial Sequence: Synthetic peptide
  Seed: DPRMCSLMQGSTLPRRSGAAGA
DPRMWSLLQNSTVPRRSGAAGA

SEQ ID NO: 70326 - protein, 22 aa, Artificial Sequence
  Description of Artificial Sequence: Synthetic peptide
  Seed: DPRMCSLMQGSTLPRRSGAAGA
DPRMWSLLQPSTAPRRSGAAGA

SEQ ID NO: 70327 - protein, 22 aa, Artificial Sequence
  Description of Artificial Sequence: Synthetic peptide
  Seed: DPRMCSLMQGSTLPRRSGAAGA
DPRMWSLLQPSTIPRRSGAAGA

SEQ ID NO: 70328 - protein, 22 aa, Artificial Sequence
  Description of Artificial Sequence: Synthetic peptide
  Seed: DPRMCSLMQGSTLPRRSGAAGA
DPRMWSLLQPSTLPRRSGAAGA

SEQ ID NO: 70329 - protein, 22 aa, Artificial Sequence
  Description of Artificial Sequence: Synthetic peptide
  Seed: DPRMCSLMQGSTLPRRSGAAGA
DPRMWSLLQPSTMPRRSGAAGA

SEQ ID NO: 70330 - protein, 22 aa, Artificial Sequence
  Description of Artificial Sequence: Synthetic peptide
  Seed: DPRMCSLMQGSTLPRRSGAAGA
DPRMWSLLQPSTTPRRSGAAGA

SEQ ID NO: 70331 - protein, 22 aa, Artificial Sequence
  Description of Artificial Sequence: Synthetic peptide
  Seed: DPRMCSLMQGSTLPRRSGAAGA
DPRMWSLLQPSTVPRRSGAAGA

SEQ ID NO: 70332 - protein, 22 aa, Artificial Sequence
  Description of Artificial Sequence: Synthetic peptide
  Seed: DPRMCSLMQGSTLPRRSGAAGA
DPRMWSLLQSSTAPRRSGAAGA

SEQ ID NO: 70333 - protein, 22 aa, Artificial Sequence
  Description of Artificial Sequence: Synthetic peptide
  Seed: DPRMCSLMQGSTLPRRSGAAGA
DPRMWSLLQSSTIPRRSGAAGA

SEQ ID NO: 70334 - protein, 22 aa, Artificial Sequence
  Description of Artificial Sequence: Synthetic peptide
  Seed: DPRMCSLMQGSTLPRRSGAAGA
DPRMWSLLQSSTLPRRSGAAGA

SEQ ID NO: 70335 - protein, 22 aa, Artificial Sequence
  Description of Artificial Sequence: Synthetic peptide
  Seed: DPRMCSLMQGSTLPRRSGAAGA
DPRMWSLLQSSTMPRRSGAAGA

SEQ ID NO: 70336 - protein, 22 aa, Artificial Sequence
  Description of Artificial Sequence: Synthetic peptide
  Seed: DPRMCSLMQGSTLPRRSGAAGA
DPRMWSLLQSSTSPRRSGAAGA

SEQ ID NO: 70337 - protein, 22 aa, Artificial Sequence
  Description of Artificial Sequence: Synthetic peptide
  Seed: DPRMCSLMQGSTLPRRSGAAGA
DPRMWSLLQSSTTPRRSGAAGA

SEQ ID NO: 70338 - protein, 22 aa, Artificial Sequence
  Description of Artificial Sequence: Synthetic peptide
  Seed: DPRMCSLMQGSTLPRRSGAAGA
DPRMWSLLQSSTVPRRSGAAGA

SEQ ID NO: 70339 - protein, 22 aa, Artificial Sequence
  Description of Artificial Sequence: Synthetic peptide
  Seed: DPRMCSLMQGSTLPRRSGAAGA
DPRMWSLLQTSTAPRRSGAAGA

SEQ ID NO: 70340 - protein, 22 aa, Artificial Sequence
  Description of Artificial Sequence: Synthetic peptide
  Seed: DPRMCSLMQGSTLPRRSGAAGA
DPRMWSLLQTSTIPRRSGAAGA

SEQ ID NO: 70341 - protein, 22 aa, Artificial Sequence
  Description of Artificial Sequence: Synthetic peptide
  Seed: DPRMCSLMQGSTLPRRSGAAGA
DPRMWSLLQTSTLPRRSGAAGA

SEQ ID NO: 70342 - protein, 22 aa, Artificial Sequence
  Description of Artificial Sequence: Synthetic peptide
  Seed: DPRMCSLMQGSTLPRRSGAAGA
DPRMWSLLQTSTVPRRSGAAGA

SEQ ID NO: 70343 - protein, 22 aa, Artificial Sequence
  Description of Artificial Sequence: Synthetic peptide
  Seed: DPRMCSLMQGSTLPRRSGAAGA
DPRMWSLMQASTAPRRSGAAGA

SEQ ID NO: 70344 - protein, 22 aa, Artificial Sequence
  Description of Artificial Sequence: Synthetic peptide
  Seed: DPRMCSLMQGSTLPRRSGAAGA
DPRMWSLMQASTGPRRSGAAGA

SEQ ID NO: 70345 - protein, 22 aa, Artificial Sequence
  Description of Artificial Sequence: Synthetic peptide
  Seed: DPRMCSLMQGSTLPRRSGAAGA
DPRMWSLMQASTIPRRSGAAGA

SEQ ID NO: 70346 - protein, 22 aa, Artificial Sequence
  Description of Artificial Sequence: Synthetic peptide
  Seed: DPRMCSLMQGSTLPRRSGAAGA
DPRMWSLMQASTLPRRSGAAGA

SEQ ID NO: 70347 - protein, 22 aa, Artificial Sequence
  Description of Artificial Sequence: Synthetic peptide
  Seed: DPRMCSLMQGSTLPRRSGAAGA
DPRMWSLMQASTMPRRSGAAGA

SEQ ID NO: 70348 - protein, 22 aa, Artificial Sequence
  Description of Artificial Sequence: Synthetic peptide
  Seed: DPRMCSLMQGSTLPRRSGAAGA
DPRMWSLMQASTSPRRSGAAGA

SEQ ID NO: 70349 - protein, 22 aa, Artificial Sequence
  Description of Artificial Sequence: Synthetic peptide
  Seed: DPRMCSLMQGSTLPRRSGAAGA
DPRMWSLMQASTTPRRSGAAGA

SEQ ID NO: 70350 - protein, 22 aa, Artificial Sequence
  Description of Artificial Sequence: Synthetic peptide
  Seed: DPRMCSLMQGSTLPRRSGAAGA
DPRMWSLMQASTVPRRSGAAGA

SEQ ID NO: 70351 - protein, 22 aa, Artificial Sequence
  Description of Artificial Sequence: Synthetic peptide
  Seed: DPRMCSLMQGSTLPRRSGAAGA
DPRMWSLMQGSTAPRRSGAAGA

SEQ ID NO: 70352 - protein, 22 aa, Artificial Sequence
  Description of Artificial Sequence: Synthetic peptide
  Seed: DPRMCSLMQGSTLPRRSGAAGA
DPRMWSLMQGSTIPRRSGAAGA

SEQ ID NO: 70353 - protein, 22 aa, Artificial Sequence
  Description of Artificial Sequence: Synthetic peptide
  Seed: DPRMCSLMQGSTLPRRSGAAGA
DPRMWSLMQGSTLPRRSGAAGA

SEQ ID NO: 70354 - protein, 22 aa, Artificial Sequence
  Description of Artificial Sequence: Synthetic peptide
  Seed: DPRMCSLMQGSTLPRRSGAAGA
DPRMWSLMQGSTMPRRSGAAGA

SEQ ID NO: 70355 - protein, 22 aa, Artificial Sequence
  Description of Artificial Sequence: Synthetic peptide
  Seed: DPRMCSLMQGSTLPRRSGAAGA
DPRMWSLMQGSTSPRRSGAAGA

SEQ ID NO: 70356 - protein, 22 aa, Artificial Sequence
  Description of Artificial Sequence: Synthetic peptide
  Seed: DPRMCSLMQGSTLPRRSGAAGA
DPRMWSLMQGSTTPRRSGAAGA

SEQ ID NO: 70357 - protein, 22 aa, Artificial Sequence
  Description of Artificial Sequence: Synthetic peptide
  Seed: DPRMCSLMQGSTLPRRSGAAGA
DPRMWSLMQGSTVPRRSGAAGA

SEQ ID NO: 70358 - protein, 22 aa, Artificial Sequence
  Description of Artificial Sequence: Synthetic peptide
  Seed: DPRMCSLMQGSTLPRRSGAAGA
DPRMWSLMQNSTAPRRSGAAGA

SEQ ID NO: 70359 - protein, 22 aa, Artificial Sequence
  Description of Artificial Sequence: Synthetic peptide
  Seed: DPRMCSLMQGSTLPRRSGAAGA
DPRMWSLMQNSTIPRRSGAAGA

SEQ ID NO: 70360 - protein, 22 aa, Artificial Sequence
  Description of Artificial Sequence: Synthetic peptide
  Seed: DPRMCSLMQGSTLPRRSGAAGA
DPRMWSLMQNSTLPRRSGAAGA

SEQ ID NO: 70361 - protein, 22 aa, Artificial Sequence
  Description of Artificial Sequence: Synthetic peptide
  Seed: DPRMCSLMQGSTLPRRSGAAGA
DPRMWSLMQNSTVPRRSGAAGA

SEQ ID NO: 70362 - protein, 22 aa, Artificial Sequence
  Description of Artificial Sequence: Synthetic peptide
  Seed: DPRMCSLMQGSTLPRRSGAAGA
DPRMWSLMQPSTAPRRSGAAGA

SEQ ID NO: 70363 - protein, 22 aa, Artificial Sequence
  Description of Artificial Sequence: Synthetic peptide
  Seed: DPRMCSLMQGSTLPRRSGAAGA
DPRMWSLMQPSTIPRRSGAAGA

SEQ ID NO: 70364 - protein, 22 aa, Artificial Sequence
  Description of Artificial Sequence: Synthetic peptide
  Seed: DPRMCSLMQGSTLPRRSGAAGA
DPRMWSLMQPSTLPRRSGAAGA

SEQ ID NO: 70365 - protein, 22 aa, Artificial Sequence
  Description of Artificial Sequence: Synthetic peptide
  Seed: DPRMCSLMQGSTLPRRSGAAGA
DPRMWSLMQPSTMPRRSGAAGA

SEQ ID NO: 70366 - protein, 22 aa, Artificial Sequence
  Description of Artificial Sequence: Synthetic peptide
  Seed: DPRMCSLMQGSTLPRRSGAAGA
DPRMWSLMQPSTTPRRSGAAGA

SEQ ID NO: 70367 - protein, 22 aa, Artificial Sequence
  Description of Artificial Sequence: Synthetic peptide
  Seed: DPRMCSLMQGSTLPRRSGAAGA
DPRMWSLMQPSTVPRRSGAAGA

SEQ ID NO: 70368 - protein, 22 aa, Artificial Sequence
  Description of Artificial Sequence: Synthetic peptide
  Seed: DPRMCSLMQGSTLPRRSGAAGA
DPRMWSLMQSSTAPRRSGAAGA

SEQ ID NO: 70369 - protein, 22 aa, Artificial Sequence
  Description of Artificial Sequence: Synthetic peptide
  Seed: DPRMCSLMQGSTLPRRSGAAGA
DPRMWSLMQSSTIPRRSGAAGA

SEQ ID NO: 70370 - protein, 22 aa, Artificial Sequence
  Description of Artificial Sequence: Synthetic peptide
  Seed: DPRMCSLMQGSTLPRRSGAAGA
DPRMWSLMQSSTLPRRSGAAGA

SEQ ID NO: 70371 - protein, 22 aa, Artificial Sequence
  Description of Artificial Sequence: Synthetic peptide
  Seed: DPRMCSLMQGSTLPRRSGAAGA
DPRMWSLMQSSTMPRRSGAAGA

SEQ ID NO: 70372 - protein, 22 aa, Artificial Sequence
  Description of Artificial Sequence: Synthetic peptide
  Seed: DPRMCSLMQGSTLPRRSGAAGA
DPRMWSLMQSSTSPRRSGAAGA

SEQ ID NO: 70373 - protein, 22 aa, Artificial Sequence
  Description of Artificial Sequence: Synthetic peptide
  Seed: DPRMCSLMQGSTLPRRSGAAGA
DPRMWSLMQSSTTPRRSGAAGA

SEQ ID NO: 70374 - protein, 22 aa, Artificial Sequence
  Description of Artificial Sequence: Synthetic peptide
  Seed: DPRMCSLMQGSTLPRRSGAAGA
DPRMWSLMQSSTVPRRSGAAGA

SEQ ID NO: 70375 - protein, 22 aa, Artificial Sequence
  Description of Artificial Sequence: Synthetic peptide
  Seed: DPRMCSLMQGSTLPRRSGAAGA
DPRMWSLMQTSTAPRRSGAAGA

SEQ ID NO: 70376 - protein, 22 aa, Artificial Sequence
  Description of Artificial Sequence: Synthetic peptide
  Seed: DPRMCSLMQGSTLPRRSGAAGA
DPRMWSLMQTSTIPRRSGAAGA

SEQ ID NO: 70377 - protein, 22 aa, Artificial Sequence
  Description of Artificial Sequence: Synthetic peptide
  Seed: DPRMCSLMQGSTLPRRSGAAGA
DPRMWSLMQTSTLPRRSGAAGA

SEQ ID NO: 70378 - protein, 22 aa, Artificial Sequence
  Description of Artificial Sequence: Synthetic peptide
  Seed: DPRMCSLMQGSTLPRRSGAAGA
DPRMWSLMQTSTVPRRSGAAGA

SEQ ID NO: 70379 - protein, 22 aa, Artificial Sequence
  Description of Artificial Sequence: Synthetic peptide
  Seed: DPRMCSLMQGSTLPRRSGAAGA
DPRMWSLQQASTAPRRSGAAGA

SEQ ID NO: 70380 - protein, 22 aa, Artificial Sequence
  Description of Artificial Sequence: Synthetic peptide
  Seed: DPRMCSLMQGSTLPRRSGAAGA
DPRMWSLQQASTIPRRSGAAGA

SEQ ID NO: 70381 - protein, 22 aa, Artificial Sequence
  Description of Artificial Sequence: Synthetic peptide
  Seed: DPRMCSLMQGSTLPRRSGAAGA
DPRMWSLQQASTLPRRSGAAGA

SEQ ID NO: 70382 - protein, 22 aa, Artificial Sequence
  Description of Artificial Sequence: Synthetic peptide
  Seed: DPRMCSLMQGSTLPRRSGAAGA
DPRMWSLQQASTVPRRSGAAGA

SEQ ID NO: 70383 - protein, 22 aa, Artificial Sequence
  Description of Artificial Sequence: Synthetic peptide
  Seed: DPRMCSLMQGSTLPRRSGAAGA
DPRMWSLVQASTAPRRSGAAGA

SEQ ID NO: 70384 - protein, 22 aa, Artificial Sequence
  Description of Artificial Sequence: Synthetic peptide
  Seed: DPRMCSLMQGSTLPRRSGAAGA
DPRMWSLVQASTIPRRSGAAGA

SEQ ID NO: 70385 - protein, 22 aa, Artificial Sequence
  Description of Artificial Sequence: Synthetic peptide
  Seed: DPRMCSLMQGSTLPRRSGAAGA
DPRMWSLVQASTLPRRSGAAGA

SEQ ID NO: 70386 - protein, 22 aa, Artificial Sequence
  Description of Artificial Sequence: Synthetic peptide
  Seed: DPRMCSLMQGSTLPRRSGAAGA
DPRMWSLVQASTVPRRSGAAGA

SEQ ID NO: 70387 - protein, 22 aa, Artificial Sequence
  Description of Artificial Sequence: Synthetic peptide
  Seed: DPRMCSLMQGSTLPRRSGAAGA
DPRMWSLVQGSTVPRRSGAAGA

SEQ ID NO: 70388 - protein, 22 aa, Artificial Sequence
  Description of Artificial Sequence: Synthetic peptide
  Seed: DPRMCSLMQGSTLPRRSGAAGA
DPRMYSLAQASTAPRRSGAAGA

SEQ ID NO: 70389 - protein, 22 aa, Artificial Sequence
  Description of Artificial Sequence: Synthetic peptide
  Seed: DPRMCSLMQGSTLPRRSGAAGA
DPRMYSLAQASTIPRRSGAAGA

SEQ ID NO: 70390 - protein, 22 aa, Artificial Sequence
  Description of Artificial Sequence: Synthetic peptide
  Seed: DPRMCSLMQGSTLPRRSGAAGA
DPRMYSLAQASTLPRRSGAAGA

SEQ ID NO: 70391 - protein, 22 aa, Artificial Sequence
  Description of Artificial Sequence: Synthetic peptide
  Seed: DPRMCSLMQGSTLPRRSGAAGA
DPRMYSLAQASTMPRRSGAAGA

SEQ ID NO: 70392 - protein, 22 aa, Artificial Sequence
  Description of Artificial Sequence: Synthetic peptide
  Seed: DPRMCSLMQGSTLPRRSGAAGA
DPRMYSLAQASTSPRRSGAAGA

SEQ ID NO: 70393 - protein, 22 aa, Artificial Sequence
  Description of Artificial Sequence: Synthetic peptide
  Seed: DPRMCSLMQGSTLPRRSGAAGA
DPRMYSLAQASTTPRRSGAAGA

SEQ ID NO: 70394 - protein, 22 aa, Artificial Sequence
  Description of Artificial Sequence: Synthetic peptide
  Seed: DPRMCSLMQGSTLPRRSGAAGA
DPRMYSLAQASTVPRRSGAAGA

SEQ ID NO: 70395 - protein, 22 aa, Artificial Sequence
  Description of Artificial Sequence: Synthetic peptide
  Seed: DPRMCSLMQGSTLPRRSGAAGA
DPRMYSLAQGSTAPRRSGAAGA

SEQ ID NO: 70396 - protein, 22 aa, Artificial Sequence
  Description of Artificial Sequence: Synthetic peptide
  Seed: DPRMCSLMQGSTLPRRSGAAGA
DPRMYSLAQGSTIPRRSGAAGA

SEQ ID NO: 70397 - protein, 22 aa, Artificial Sequence
  Description of Artificial Sequence: Synthetic peptide
  Seed: DPRMCSLMQGSTLPRRSGAAGA
DPRMYSLAQGSTLPRRSGAAGA

SEQ ID NO: 70398 - protein, 22 aa, Artificial Sequence
  Description of Artificial Sequence: Synthetic peptide
  Seed: DPRMCSLMQGSTLPRRSGAAGA
DPRMYSLAQGSTMPRRSGAAGA

SEQ ID NO: 70399 - protein, 22 aa, Artificial Sequence
  Description of Artificial Sequence: Synthetic peptide
  Seed: DPRMCSLMQGSTLPRRSGAAGA
DPRMYSLAQGSTVPRRSGAAGA

SEQ ID NO: 70400 - protein, 22 aa, Artificial Sequence
  Description of Artificial Sequence: Synthetic peptide
  Seed: DPRMCSLMQGSTLPRRSGAAGA
DPRMYSLAQNSTVPRRSGAAGA

SEQ ID NO: 70401 - protein, 22 aa, Artificial Sequence
  Description of Artificial Sequence: Synthetic peptide
  Seed: DPRMCSLMQGSTLPRRSGAAGA
DPRMYSLAQPSTAPRRSGAAGA

SEQ ID NO: 70402 - protein, 22 aa, Artificial Sequence
  Description of Artificial Sequence: Synthetic peptide
  Seed: DPRMCSLMQGSTLPRRSGAAGA
DPRMYSLAQPSTIPRRSGAAGA

SEQ ID NO: 70403 - protein, 22 aa, Artificial Sequence
  Description of Artificial Sequence: Synthetic peptide
  Seed: DPRMCSLMQGSTLPRRSGAAGA
DPRMYSLAQPSTLPRRSGAAGA

SEQ ID NO: 70404 - protein, 22 aa, Artificial Sequence
  Description of Artificial Sequence: Synthetic peptide
  Seed: DPRMCSLMQGSTLPRRSGAAGA
DPRMYSLAQPSTVPRRSGAAGA

SEQ ID NO: 70405 - protein, 22 aa, Artificial Sequence
  Description of Artificial Sequence: Synthetic peptide
  Seed: DPRMCSLMQGSTLPRRSGAAGA
DPRMYSLAQSSTAPRRSGAAGA

SEQ ID NO: 70406 - protein, 22 aa, Artificial Sequence
  Description of Artificial Sequence: Synthetic peptide
  Seed: DPRMCSLMQGSTLPRRSGAAGA
DPRMYSLAQSSTIPRRSGAAGA

SEQ ID NO: 70407 - protein, 22 aa, Artificial Sequence
  Description of Artificial Sequence: Synthetic peptide
  Seed: DPRMCSLMQGSTLPRRSGAAGA
DPRMYSLAQSSTLPRRSGAAGA

SEQ ID NO: 70408 - protein, 22 aa, Artificial Sequence
  Description of Artificial Sequence: Synthetic peptide
  Seed: DPRMCSLMQGSTLPRRSGAAGA
DPRMYSLAQSSTMPRRSGAAGA

SEQ ID NO: 70409 - protein, 22 aa, Artificial Sequence
  Description of Artificial Sequence: Synthetic peptide
  Seed: DPRMCSLMQGSTLPRRSGAAGA
DPRMYSLAQSSTVPRRSGAAGA

SEQ ID NO: 70410 - protein, 22 aa, Artificial Sequence
  Description of Artificial Sequence: Synthetic peptide
  Seed: DPRMCSLMQGSTLPRRSGAAGA
DPRMYSLAQTSTIPRRSGAAGA

SEQ ID NO: 70411 - protein, 22 aa, Artificial Sequence
  Description of Artificial Sequence: Synthetic peptide
  Seed: DPRMCSLMQGSTLPRRSGAAGA
DPRMYSLAQTSTLPRRSGAAGA

SEQ ID NO: 70412 - protein, 22 aa, Artificial Sequence
  Description of Artificial Sequence: Synthetic peptide
  Seed: DPRMCSLMQGSTLPRRSGAAGA
DPRMYSLAQTSTVPRRSGAAGA

SEQ ID NO: 70413 - protein, 22 aa, Artificial Sequence
  Description of Artificial Sequence: Synthetic peptide
  Seed: DPRMCSLMQGSTLPRRSGAAGA
DPRMYSLEQASTIPRRSGAAGA

SEQ ID NO: 70414 - protein, 22 aa, Artificial Sequence
  Description of Artificial Sequence: Synthetic peptide
  Seed: DPRMCSLMQGSTLPRRSGAAGA
DPRMYSLEQASTLPRRSGAAGA

SEQ ID NO: 70415 - protein, 22 aa, Artificial Sequence
  Description of Artificial Sequence: Synthetic peptide
  Seed: DPRMCSLMQGSTLPRRSGAAGA
DPRMYSLEQASTVPRRSGAAGA

SEQ ID NO: 70416 - protein, 22 aa, Artificial Sequence
  Description of Artificial Sequence: Synthetic peptide
  Seed: DPRMCSLMQGSTLPRRSGAAGA
DPRMYSLFQASTAPRRSGAAGA

SEQ ID NO: 70417 - protein, 22 aa, Artificial Sequence
  Description of Artificial Sequence: Synthetic peptide
  Seed: DPRMCSLMQGSTLPRRSGAAGA
DPRMYSLFQASTIPRRSGAAGA

SEQ ID NO: 70418 - protein, 22 aa, Artificial Sequence
  Description of Artificial Sequence: Synthetic peptide
  Seed: DPRMCSLMQGSTLPRRSGAAGA
DPRMYSLFQASTLPRRSGAAGA

SEQ ID NO: 70419 - protein, 22 aa, Artificial Sequence
  Description of Artificial Sequence: Synthetic peptide
  Seed: DPRMCSLMQGSTLPRRSGAAGA
DPRMYSLFQASTVPRRSGAAGA

SEQ ID NO: 70420 - protein, 22 aa, Artificial Sequence
  Description of Artificial Sequence: Synthetic peptide
  Seed: DPRMCSLMQGSTLPRRSGAAGA
DPRMYSLGQASTIPRRSGAAGA

SEQ ID NO: 70421 - protein, 22 aa, Artificial Sequence
  Description of Artificial Sequence: Synthetic peptide
  Seed: DPRMCSLMQGSTLPRRSGAAGA
DPRMYSLGQASTLPRRSGAAGA

SEQ ID NO: 70422 - protein, 22 aa, Artificial Sequence
  Description of Artificial Sequence: Synthetic peptide
  Seed: DPRMCSLMQGSTLPRRSGAAGA
DPRMYSLGQASTVPRRSGAAGA

SEQ ID NO: 70423 - protein, 22 aa, Artificial Sequence
  Description of Artificial Sequence: Synthetic peptide
  Seed: DPRMCSLMQGSTLPRRSGAAGA
DPRMYSLIQASTAPRRSGAAGA

SEQ ID NO: 70424 - protein, 22 aa, Artificial Sequence
  Description of Artificial Sequence: Synthetic peptide
  Seed: DPRMCSLMQGSTLPRRSGAAGA
DPRMYSLIQASTGPRRSGAAGA

SEQ ID NO: 70425 - protein, 22 aa, Artificial Sequence
  Description of Artificial Sequence: Synthetic peptide
  Seed: DPRMCSLMQGSTLPRRSGAAGA
DPRMYSLIQASTIPRRSGAAGA

SEQ ID NO: 70426 - protein, 22 aa, Artificial Sequence
  Description of Artificial Sequence: Synthetic peptide
  Seed: DPRMCSLMQGSTLPRRSGAAGA
DPRMYSLIQASTLPRRSGAAGA

SEQ ID NO: 70427 - protein, 22 aa, Artificial Sequence
  Description of Artificial Sequence: Synthetic peptide
  Seed: DPRMCSLMQGSTLPRRSGAAGA
DPRMYSLIQASTMPRRSGAAGA

SEQ ID NO: 70428 - protein, 22 aa, Artificial Sequence
  Description of Artificial Sequence: Synthetic peptide
  Seed: DPRMCSLMQGSTLPRRSGAAGA
DPRMYSLIQASTSPRRSGAAGA

SEQ ID NO: 70429 - protein, 22 aa, Artificial Sequence
  Description of Artificial Sequence: Synthetic peptide
  Seed: DPRMCSLMQGSTLPRRSGAAGA
DPRMYSLIQASTTPRRSGAAGA

SEQ ID NO: 70430 - protein, 22 aa, Artificial Sequence
  Description of Artificial Sequence: Synthetic peptide
  Seed: DPRMCSLMQGSTLPRRSGAAGA
DPRMYSLIQASTVPRRSGAAGA

SEQ ID NO: 70431 - protein, 22 aa, Artificial Sequence
  Description of Artificial Sequence: Synthetic peptide
  Seed: DPRMCSLMQGSTLPRRSGAAGA
DPRMYSLIQGSTAPRRSGAAGA

SEQ ID NO: 70432 - protein, 22 aa, Artificial Sequence
  Description of Artificial Sequence: Synthetic peptide
  Seed: DPRMCSLMQGSTLPRRSGAAGA
DPRMYSLIQGSTIPRRSGAAGA

SEQ ID NO: 70433 - protein, 22 aa, Artificial Sequence
  Description of Artificial Sequence: Synthetic peptide
  Seed: DPRMCSLMQGSTLPRRSGAAGA
DPRMYSLIQGSTLPRRSGAAGA

SEQ ID NO: 70434 - protein, 22 aa, Artificial Sequence
  Description of Artificial Sequence: Synthetic peptide
  Seed: DPRMCSLMQGSTLPRRSGAAGA
DPRMYSLIQGSTMPRRSGAAGA

SEQ ID NO: 70435 - protein, 22 aa, Artificial Sequence
  Description of Artificial Sequence: Synthetic peptide
  Seed: DPRMCSLMQGSTLPRRSGAAGA
DPRMYSLIQGSTSPRRSGAAGA

SEQ ID NO: 70436 - protein, 22 aa, Artificial Sequence
  Description of Artificial Sequence: Synthetic peptide
  Seed: DPRMCSLMQGSTLPRRSGAAGA
DPRMYSLIQGSTTPRRSGAAGA

SEQ ID NO: 70437 - protein, 22 aa, Artificial Sequence
  Description of Artificial Sequence: Synthetic peptide
  Seed: DPRMCSLMQGSTLPRRSGAAGA
DPRMYSLIQGSTVPRRSGAAGA

SEQ ID NO: 70438 - protein, 22 aa, Artificial Sequence
  Description of Artificial Sequence: Synthetic peptide
  Seed: DPRMCSLMQGSTLPRRSGAAGA
DPRMYSLIQNSTAPRRSGAAGA

SEQ ID NO: 70439 - protein, 22 aa, Artificial Sequence
  Description of Artificial Sequence: Synthetic peptide
  Seed: DPRMCSLMQGSTLPRRSGAAGA
DPRMYSLIQNSTIPRRSGAAGA

SEQ ID NO: 70440 - protein, 22 aa, Artificial Sequence
  Description of Artificial Sequence: Synthetic peptide
  Seed: DPRMCSLMQGSTLPRRSGAAGA
DPRMYSLIQNSTLPRRSGAAGA

SEQ ID NO: 70441 - protein, 22 aa, Artificial Sequence
  Description of Artificial Sequence: Synthetic peptide
  Seed: DPRMCSLMQGSTLPRRSGAAGA
DPRMYSLIQNSTVPRRSGAAGA

SEQ ID NO: 70442 - protein, 22 aa, Artificial Sequence
  Description of Artificial Sequence: Synthetic peptide
  Seed: DPRMCSLMQGSTLPRRSGAAGA
DPRMYSLIQPSTAPRRSGAAGA

SEQ ID NO: 70443 - protein, 22 aa, Artificial Sequence
  Description of Artificial Sequence: Synthetic peptide
  Seed: DPRMCSLMQGSTLPRRSGAAGA
DPRMYSLIQPSTIPRRSGAAGA

SEQ ID NO: 70444 - protein, 22 aa, Artificial Sequence
  Description of Artificial Sequence: Synthetic peptide
  Seed: DPRMCSLMQGSTLPRRSGAAGA
DPRMYSLIQPSTLPRRSGAAGA

SEQ ID NO: 70445 - protein, 22 aa, Artificial Sequence
  Description of Artificial Sequence: Synthetic peptide
  Seed: DPRMCSLMQGSTLPRRSGAAGA
DPRMYSLIQPSTMPRRSGAAGA

SEQ ID NO: 70446 - protein, 22 aa, Artificial Sequence
  Description of Artificial Sequence: Synthetic peptide
  Seed: DPRMCSLMQGSTLPRRSGAAGA
DPRMYSLIQPSTTPRRSGAAGA

SEQ ID NO: 70447 - protein, 22 aa, Artificial Sequence
  Description of Artificial Sequence: Synthetic peptide
  Seed: DPRMCSLMQGSTLPRRSGAAGA
DPRMYSLIQPSTVPRRSGAAGA

SEQ ID NO: 70448 - protein, 22 aa, Artificial Sequence
  Description of Artificial Sequence: Synthetic peptide
  Seed: DPRMCSLMQGSTLPRRSGAAGA
DPRMYSLIQSSTAPRRSGAAGA

SEQ ID NO: 70449 - protein, 22 aa, Artificial Sequence
  Description of Artificial Sequence: Synthetic peptide
  Seed: DPRMCSLMQGSTLPRRSGAAGA
DPRMYSLIQSSTIPRRSGAAGA

SEQ ID NO: 70450 - protein, 22 aa, Artificial Sequence
  Description of Artificial Sequence: Synthetic peptide
  Seed: DPRMCSLMQGSTLPRRSGAAGA
DPRMYSLIQSSTLPRRSGAAGA

SEQ ID NO: 70451 - protein, 22 aa, Artificial Sequence
  Description of Artificial Sequence: Synthetic peptide
  Seed: DPRMCSLMQGSTLPRRSGAAGA
DPRMYSLIQSSTMPRRSGAAGA

SEQ ID NO: 70452 - protein, 22 aa, Artificial Sequence
  Description of Artificial Sequence: Synthetic peptide
  Seed: DPRMCSLMQGSTLPRRSGAAGA
DPRMYSLIQSSTSPRRSGAAGA

SEQ ID NO: 70453 - protein, 22 aa, Artificial Sequence
  Description of Artificial Sequence: Synthetic peptide
  Seed: DPRMCSLMQGSTLPRRSGAAGA
DPRMYSLIQSSTTPRRSGAAGA

SEQ ID NO: 70454 - protein, 22 aa, Artificial Sequence
  Description of Artificial Sequence: Synthetic peptide
  Seed: DPRMCSLMQGSTLPRRSGAAGA
DPRMYSLIQSSTVPRRSGAAGA

SEQ ID NO: 70455 - protein, 22 aa, Artificial Sequence
  Description of Artificial Sequence: Synthetic peptide
  Seed: DPRMCSLMQGSTLPRRSGAAGA
DPRMYSLIQTSTAPRRSGAAGA

SEQ ID NO: 70456 - protein, 22 aa, Artificial Sequence
  Description of Artificial Sequence: Synthetic peptide
  Seed: DPRMCSLMQGSTLPRRSGAAGA
DPRMYSLIQTSTIPRRSGAAGA

SEQ ID NO: 70457 - protein, 22 aa, Artificial Sequence
  Description of Artificial Sequence: Synthetic peptide
  Seed: DPRMCSLMQGSTLPRRSGAAGA
DPRMYSLIQTSTLPRRSGAAGA

SEQ ID NO: 70458 - protein, 22 aa, Artificial Sequence
  Description of Artificial Sequence: Synthetic peptide
  Seed: DPRMCSLMQGSTLPRRSGAAGA
DPRMYSLIQTSTVPRRSGAAGA

SEQ ID NO: 70459 - protein, 22 aa, Artificial Sequence
  Description of Artificial Sequence: Synthetic peptide
  Seed: DPRMCSLMQGSTLPRRSGAAGA
DPRMYSLIQVSTVPRRSGAAGA

SEQ ID NO: 70460 - protein, 22 aa, Artificial Sequence
  Description of Artificial Sequence: Synthetic peptide
  Seed: DPRMCSLMQGSTLPRRSGAAGA
DPRMYSLLQASTAPRRSGAAGA

SEQ ID NO: 70461 - protein, 22 aa, Artificial Sequence
  Description of Artificial Sequence: Synthetic peptide
  Seed: DPRMCSLMQGSTLPRRSGAAGA
DPRMYSLLQASTCPRRSGAAGA

SEQ ID NO: 70462 - protein, 22 aa, Artificial Sequence
  Description of Artificial Sequence: Synthetic peptide
  Seed: DPRMCSLMQGSTLPRRSGAAGA
DPRMYSLLQASTFPRRSGAAGA

SEQ ID NO: 70463 - protein, 22 aa, Artificial Sequence
  Description of Artificial Sequence: Synthetic peptide
  Seed: DPRMCSLMQGSTLPRRSGAAGA
DPRMYSLLQASTGPRRSGAAGA

SEQ ID NO: 70464 - protein, 22 aa, Artificial Sequence
  Description of Artificial Sequence: Synthetic peptide
  Seed: DPRMCSLMQGSTLPRRSGAAGA
DPRMYSLLQASTIPRRSGAAGA

SEQ ID NO: 70465 - protein, 22 aa, Artificial Sequence
  Description of Artificial Sequence: Synthetic peptide
  Seed: DPRMCSLMQGSTLPRRSGAAGA
DPRMYSLLQASTLPRRSGAAGA

SEQ ID NO: 70466 - protein, 22 aa, Artificial Sequence
  Description of Artificial Sequence: Synthetic peptide
  Seed: DPRMCSLMQGSTLPRRSGAAGA
DPRMYSLLQASTMPRRSGAAGA

SEQ ID NO: 70467 - protein, 22 aa, Artificial Sequence
  Description of Artificial Sequence: Synthetic peptide
  Seed: DPRMCSLMQGSTLPRRSGAAGA
DPRMYSLLQASTNPRRSGAAGA

SEQ ID NO: 70468 - protein, 22 aa, Artificial Sequence
  Description of Artificial Sequence: Synthetic peptide
  Seed: DPRMCSLMQGSTLPRRSGAAGA
DPRMYSLLQASTSPRRSGAAGA

SEQ ID NO: 70469 - protein, 22 aa, Artificial Sequence
  Description of Artificial Sequence: Synthetic peptide
  Seed: DPRMCSLMQGSTLPRRSGAAGA
DPRMYSLLQASTTPRRSGAAGA

SEQ ID NO: 70470 - protein, 22 aa, Artificial Sequence
  Description of Artificial Sequence: Synthetic peptide
  Seed: DPRMCSLMQGSTLPRRSGAAGA
DPRMYSLLQASTVPRRSGAAGA

SEQ ID NO: 70471 - protein, 22 aa, Artificial Sequence
  Description of Artificial Sequence: Synthetic peptide
  Seed: DPRMCSLMQGSTLPRRSGAAGA
DPRMYSLLQGSTAPRRSGAAGA

SEQ ID NO: 70472 - protein, 22 aa, Artificial Sequence
  Description of Artificial Sequence: Synthetic peptide
  Seed: DPRMCSLMQGSTLPRRSGAAGA
DPRMYSLLQGSTCPRRSGAAGA

SEQ ID NO: 70473 - protein, 22 aa, Artificial Sequence
  Description of Artificial Sequence: Synthetic peptide
  Seed: DPRMCSLMQGSTLPRRSGAAGA
DPRMYSLLQGSTFPRRSGAAGA

SEQ ID NO: 70474 - protein, 22 aa, Artificial Sequence
  Description of Artificial Sequence: Synthetic peptide
  Seed: DPRMCSLMQGSTLPRRSGAAGA
DPRMYSLLQGSTGPRRSGAAGA

SEQ ID NO: 70475 - protein, 22 aa, Artificial Sequence
  Description of Artificial Sequence: Synthetic peptide
  Seed: DPRMCSLMQGSTLPRRSGAAGA
DPRMYSLLQGSTIPRRSGAAGA

SEQ ID NO: 70476 - protein, 22 aa, Artificial Sequence
  Description of Artificial Sequence: Synthetic peptide
  Seed: DPRMCSLMQGSTLPRRSGAAGA
DPRMYSLLQGSTLPRRSGAAGA

SEQ ID NO: 70477 - protein, 22 aa, Artificial Sequence
  Description of Artificial Sequence: Synthetic peptide
  Seed: DPRMCSLMQGSTLPRRSGAAGA
DPRMYSLLQGSTMPRRSGAAGA

SEQ ID NO: 70478 - protein, 22 aa, Artificial Sequence
  Description of Artificial Sequence: Synthetic peptide
  Seed: DPRMCSLMQGSTLPRRSGAAGA
DPRMYSLLQGSTSPRRSGAAGA

SEQ ID NO: 70479 - protein, 22 aa, Artificial Sequence
  Description of Artificial Sequence: Synthetic peptide
  Seed: DPRMCSLMQGSTLPRRSGAAGA
DPRMYSLLQGSTTPRRSGAAGA

SEQ ID NO: 70480 - protein, 22 aa, Artificial Sequence
  Description of Artificial Sequence: Synthetic peptide
  Seed: DPRMCSLMQGSTLPRRSGAAGA
DPRMYSLLQGSTVPRRSGAAGA

SEQ ID NO: 70481 - protein, 22 aa, Artificial Sequence
  Description of Artificial Sequence: Synthetic peptide
  Seed: DPRMCSLMQGSTLPRRSGAAGA
DPRMYSLLQISTAPRRSGAAGA

SEQ ID NO: 70482 - protein, 22 aa, Artificial Sequence
  Description of Artificial Sequence: Synthetic peptide
  Seed: DPRMCSLMQGSTLPRRSGAAGA
DPRMYSLLQISTVPRRSGAAGA

SEQ ID NO: 70483 - protein, 22 aa, Artificial Sequence
  Description of Artificial Sequence: Synthetic peptide
  Seed: DPRMCSLMQGSTLPRRSGAAGA
DPRMYSLLQNSTAPRRSGAAGA

SEQ ID NO: 70484 - protein, 22 aa, Artificial Sequence
  Description of Artificial Sequence: Synthetic peptide
  Seed: DPRMCSLMQGSTLPRRSGAAGA
DPRMYSLLQNSTIPRRSGAAGA

SEQ ID NO: 70485 - protein, 22 aa, Artificial Sequence
  Description of Artificial Sequence: Synthetic peptide
  Seed: DPRMCSLMQGSTLPRRSGAAGA
DPRMYSLLQNSTLPRRSGAAGA

SEQ ID NO: 70486 - protein, 22 aa, Artificial Sequence
  Description of Artificial Sequence: Synthetic peptide
  Seed: DPRMCSLMQGSTLPRRSGAAGA
DPRMYSLLQNSTMPRRSGAAGA

SEQ ID NO: 70487 - protein, 22 aa, Artificial Sequence
  Description of Artificial Sequence: Synthetic peptide
  Seed: DPRMCSLMQGSTLPRRSGAAGA
DPRMYSLLQNSTSPRRSGAAGA

SEQ ID NO: 70488 - protein, 22 aa, Artificial Sequence
  Description of Artificial Sequence: Synthetic peptide
  Seed: DPRMCSLMQGSTLPRRSGAAGA
DPRMYSLLQNSTTPRRSGAAGA

SEQ ID NO: 70489 - protein, 22 aa, Artificial Sequence
  Description of Artificial Sequence: Synthetic peptide
  Seed: DPRMCSLMQGSTLPRRSGAAGA
DPRMYSLLQNSTVPRRSGAAGA

SEQ ID NO: 70490 - protein, 22 aa, Artificial Sequence
  Description of Artificial Sequence: Synthetic peptide
  Seed: DPRMCSLMQGSTLPRRSGAAGA
DPRMYSLLQPSTAPRRSGAAGA

SEQ ID NO: 70491 - protein, 22 aa, Artificial Sequence
  Description of Artificial Sequence: Synthetic peptide
  Seed: DPRMCSLMQGSTLPRRSGAAGA
DPRMYSLLQPSTGPRRSGAAGA

SEQ ID NO: 70492 - protein, 22 aa, Artificial Sequence
  Description of Artificial Sequence: Synthetic peptide
  Seed: DPRMCSLMQGSTLPRRSGAAGA
DPRMYSLLQPSTIPRRSGAAGA

SEQ ID NO: 70493 - protein, 22 aa, Artificial Sequence
  Description of Artificial Sequence: Synthetic peptide
  Seed: DPRMCSLMQGSTLPRRSGAAGA
DPRMYSLLQPSTLPRRSGAAGA

SEQ ID NO: 70494 - protein, 22 aa, Artificial Sequence
  Description of Artificial Sequence: Synthetic peptide
  Seed: DPRMCSLMQGSTLPRRSGAAGA
DPRMYSLLQPSTMPRRSGAAGA

SEQ ID NO: 70495 - protein, 22 aa, Artificial Sequence
  Description of Artificial Sequence: Synthetic peptide
  Seed: DPRMCSLMQGSTLPRRSGAAGA
DPRMYSLLQPSTSPRRSGAAGA

SEQ ID NO: 70496 - protein, 22 aa, Artificial Sequence
  Description of Artificial Sequence: Synthetic peptide
  Seed: DPRMCSLMQGSTLPRRSGAAGA
DPRMYSLLQPSTTPRRSGAAGA

SEQ ID NO: 70497 - protein, 22 aa, Artificial Sequence
  Description of Artificial Sequence: Synthetic peptide
  Seed: DPRMCSLMQGSTLPRRSGAAGA
DPRMYSLLQPSTVPRRSGAAGA

SEQ ID NO: 70498 - protein, 22 aa, Artificial Sequence
  Description of Artificial Sequence: Synthetic peptide
  Seed: DPRMCSLMQGSTLPRRSGAAGA
DPRMYSLLQSSTAPRRSGAAGA

SEQ ID NO: 70499 - protein, 22 aa, Artificial Sequence
  Description of Artificial Sequence: Synthetic peptide
  Seed: DPRMCSLMQGSTLPRRSGAAGA
DPRMYSLLQSSTGPRRSGAAGA

SEQ ID NO: 70500 - protein, 22 aa, Artificial Sequence
  Description of Artificial Sequence: Synthetic peptide
  Seed: DPRMCSLMQGSTLPRRSGAAGA
DPRMYSLLQSSTIPRRSGAAGA

SEQ ID NO: 70501 - protein, 22 aa, Artificial Sequence
  Description of Artificial Sequence: Synthetic peptide
  Seed: DPRMCSLMQGSTLPRRSGAAGA
DPRMYSLLQSSTLPRRSGAAGA

SEQ ID NO: 70502 - protein, 22 aa, Artificial Sequence
  Description of Artificial Sequence: Synthetic peptide
  Seed: DPRMCSLMQGSTLPRRSGAAGA
DPRMYSLLQSSTMPRRSGAAGA

SEQ ID NO: 70503 - protein, 22 aa, Artificial Sequence
  Description of Artificial Sequence: Synthetic peptide
  Seed: DPRMCSLMQGSTLPRRSGAAGA
DPRMYSLLQSSTSPRRSGAAGA

SEQ ID NO: 70504 - protein, 22 aa, Artificial Sequence
  Description of Artificial Sequence: Synthetic peptide
  Seed: DPRMCSLMQGSTLPRRSGAAGA
DPRMYSLLQSSTTPRRSGAAGA

SEQ ID NO: 70505 - protein, 22 aa, Artificial Sequence
  Description of Artificial Sequence: Synthetic peptide
  Seed: DPRMCSLMQGSTLPRRSGAAGA
DPRMYSLLQSSTVPRRSGAAGA

SEQ ID NO: 70506 - protein, 22 aa, Artificial Sequence
  Description of Artificial Sequence: Synthetic peptide
  Seed: DPRMCSLMQGSTLPRRSGAAGA
DPRMYSLLQTSTAPRRSGAAGA

SEQ ID NO: 70507 - protein, 22 aa, Artificial Sequence
  Description of Artificial Sequence: Synthetic peptide
  Seed: DPRMCSLMQGSTLPRRSGAAGA
DPRMYSLLQTSTIPRRSGAAGA

SEQ ID NO: 70508 - protein, 22 aa, Artificial Sequence
  Description of Artificial Sequence: Synthetic peptide
  Seed: DPRMCSLMQGSTLPRRSGAAGA
DPRMYSLLQTSTLPRRSGAAGA

SEQ ID NO: 70509 - protein, 22 aa, Artificial Sequence
  Description of Artificial Sequence: Synthetic peptide
  Seed: DPRMCSLMQGSTLPRRSGAAGA
DPRMYSLLQTSTMPRRSGAAGA

SEQ ID NO: 70510 - protein, 22 aa, Artificial Sequence
  Description of Artificial Sequence: Synthetic peptide
  Seed: DPRMCSLMQGSTLPRRSGAAGA
DPRMYSLLQTSTSPRRSGAAGA

SEQ ID NO: 70511 - protein, 22 aa, Artificial Sequence
  Description of Artificial Sequence: Synthetic peptide
  Seed: DPRMCSLMQGSTLPRRSGAAGA
DPRMYSLLQTSTTPRRSGAAGA

SEQ ID NO: 70512 - protein, 22 aa, Artificial Sequence
  Description of Artificial Sequence: Synthetic peptide
  Seed: DPRMCSLMQGSTLPRRSGAAGA
DPRMYSLLQTSTVPRRSGAAGA

SEQ ID NO: 70513 - protein, 22 aa, Artificial Sequence
  Description of Artificial Sequence: Synthetic peptide
  Seed: DPRMCSLMQGSTLPRRSGAAGA
DPRMYSLLQVSTAPRRSGAAGA

SEQ ID NO: 70514 - protein, 22 aa, Artificial Sequence
  Description of Artificial Sequence: Synthetic peptide
  Seed: DPRMCSLMQGSTLPRRSGAAGA
DPRMYSLLQVSTIPRRSGAAGA

SEQ ID NO: 70515 - protein, 22 aa, Artificial Sequence
  Description of Artificial Sequence: Synthetic peptide
  Seed: DPRMCSLMQGSTLPRRSGAAGA
DPRMYSLLQVSTLPRRSGAAGA

SEQ ID NO: 70516 - protein, 22 aa, Artificial Sequence
  Description of Artificial Sequence: Synthetic peptide
  Seed: DPRMCSLMQGSTLPRRSGAAGA
DPRMYSLLQVSTMPRRSGAAGA

SEQ ID NO: 70517 - protein, 22 aa, Artificial Sequence
  Description of Artificial Sequence: Synthetic peptide
  Seed: DPRMCSLMQGSTLPRRSGAAGA
DPRMYSLLQVSTTPRRSGAAGA

SEQ ID NO: 70518 - protein, 22 aa, Artificial Sequence
  Description of Artificial Sequence: Synthetic peptide
  Seed: DPRMCSLMQGSTLPRRSGAAGA
DPRMYSLLQVSTVPRRSGAAGA

SEQ ID NO: 70519 - protein, 22 aa, Artificial Sequence
  Description of Artificial Sequence: Synthetic peptide
  Seed: DPRMCSLMQGSTLPRRSGAAGA
DPRMYSLMQASTAPRRSGAAGA

SEQ ID NO: 70520 - protein, 22 aa, Artificial Sequence
  Description of Artificial Sequence: Synthetic peptide
  Seed: DPRMCSLMQGSTLPRRSGAAGA
DPRMYSLMQASTCPRRSGAAGA

SEQ ID NO: 70521 - protein, 22 aa, Artificial Sequence
  Description of Artificial Sequence: Synthetic peptide
  Seed: DPRMCSLMQGSTLPRRSGAAGA
DPRMYSLMQASTFPRRSGAAGA

SEQ ID NO: 70522 - protein, 22 aa, Artificial Sequence
  Description of Artificial Sequence: Synthetic peptide
  Seed: DPRMCSLMQGSTLPRRSGAAGA
DPRMYSLMQASTGPRRSGAAGA

SEQ ID NO: 70523 - protein, 22 aa, Artificial Sequence
  Description of Artificial Sequence: Synthetic peptide
  Seed: DPRMCSLMQGSTLPRRSGAAGA
DPRMYSLMQASTIPRRSGAAGA

SEQ ID NO: 70524 - protein, 22 aa, Artificial Sequence
  Description of Artificial Sequence: Synthetic peptide
  Seed: DPRMCSLMQGSTLPRRSGAAGA
DPRMYSLMQASTLPRRSGAAGA

SEQ ID NO: 70525 - protein, 22 aa, Artificial Sequence
  Description of Artificial Sequence: Synthetic peptide
  Seed: DPRMCSLMQGSTLPRRSGAAGA
DPRMYSLMQASTMPRRSGAAGA

SEQ ID NO: 70526 - protein, 22 aa, Artificial Sequence
  Description of Artificial Sequence: Synthetic peptide
  Seed: DPRMCSLMQGSTLPRRSGAAGA
DPRMYSLMQASTNPRRSGAAGA

SEQ ID NO: 70527 - protein, 22 aa, Artificial Sequence
  Description of Artificial Sequence: Synthetic peptide
  Seed: DPRMCSLMQGSTLPRRSGAAGA
DPRMYSLMQASTSPRRSGAAGA

SEQ ID NO: 70528 - protein, 22 aa, Artificial Sequence
  Description of Artificial Sequence: Synthetic peptide
  Seed: DPRMCSLMQGSTLPRRSGAAGA
DPRMYSLMQASTTPRRSGAAGA

SEQ ID NO: 70529 - protein, 22 aa, Artificial Sequence
  Description of Artificial Sequence: Synthetic peptide
  Seed: DPRMCSLMQGSTLPRRSGAAGA
DPRMYSLMQASTVPRRSGAAGA

SEQ ID NO: 70530 - protein, 22 aa, Artificial Sequence
  Description of Artificial Sequence: Synthetic peptide
  Seed: DPRMCSLMQGSTLPRRSGAAGA
DPRMYSLMQGSTAPRRSGAAGA

SEQ ID NO: 70531 - protein, 22 aa, Artificial Sequence
  Description of Artificial Sequence: Synthetic peptide
  Seed: DPRMCSLMQGSTLPRRSGAAGA
DPRMYSLMQGSTCPRRSGAAGA

SEQ ID NO: 70532 - protein, 22 aa, Artificial Sequence
  Description of Artificial Sequence: Synthetic peptide
  Seed: DPRMCSLMQGSTLPRRSGAAGA
DPRMYSLMQGSTFPRRSGAAGA

SEQ ID NO: 70533 - protein, 22 aa, Artificial Sequence
  Description of Artificial Sequence: Synthetic peptide
  Seed: DPRMCSLMQGSTLPRRSGAAGA
DPRMYSLMQGSTGPRRSGAAGA

SEQ ID NO: 70534 - protein, 22 aa, Artificial Sequence
  Description of Artificial Sequence: Synthetic peptide
  Seed: DPRMCSLMQGSTLPRRSGAAGA
DPRMYSLMQGSTIPRRSGAAGA

SEQ ID NO: 70535 - protein, 22 aa, Artificial Sequence
  Description of Artificial Sequence: Synthetic peptide
  Seed: DPRMCSLMQGSTLPRRSGAAGA
DPRMYSLMQGSTLPRRSGAAGA

SEQ ID NO: 70536 - protein, 22 aa, Artificial Sequence
  Description of Artificial Sequence: Synthetic peptide
  Seed: DPRMCSLMQGSTLPRRSGAAGA
DPRMYSLMQGSTMPRRSGAAGA

SEQ ID NO: 70537 - protein, 22 aa, Artificial Sequence
  Description of Artificial Sequence: Synthetic peptide
  Seed: DPRMCSLMQGSTLPRRSGAAGA
DPRMYSLMQGSTSPRRSGAAGA

SEQ ID NO: 70538 - protein, 22 aa, Artificial Sequence
  Description of Artificial Sequence: Synthetic peptide
  Seed: DPRMCSLMQGSTLPRRSGAAGA
DPRMYSLMQGSTTPRRSGAAGA

SEQ ID NO: 70539 - protein, 22 aa, Artificial Sequence
  Description of Artificial Sequence: Synthetic peptide
  Seed: DPRMCSLMQGSTLPRRSGAAGA
DPRMYSLMQGSTVPRRSGAAGA

SEQ ID NO: 70540 - protein, 22 aa, Artificial Sequence
  Description of Artificial Sequence: Synthetic peptide
  Seed: DPRMCSLMQGSTLPRRSGAAGA
DPRMYSLMQISTVPRRSGAAGA

SEQ ID NO: 70541 - protein, 22 aa, Artificial Sequence
  Description of Artificial Sequence: Synthetic peptide
  Seed: DPRMCSLMQGSTLPRRSGAAGA
DPRMYSLMQNSTAPRRSGAAGA

SEQ ID NO: 70542 - protein, 22 aa, Artificial Sequence
  Description of Artificial Sequence: Synthetic peptide
  Seed: DPRMCSLMQGSTLPRRSGAAGA
DPRMYSLMQNSTIPRRSGAAGA

SEQ ID NO: 70543 - protein, 22 aa, Artificial Sequence
  Description of Artificial Sequence: Synthetic peptide
  Seed: DPRMCSLMQGSTLPRRSGAAGA
DPRMYSLMQNSTLPRRSGAAGA

SEQ ID NO: 70544 - protein, 22 aa, Artificial Sequence
  Description of Artificial Sequence: Synthetic peptide
  Seed: DPRMCSLMQGSTLPRRSGAAGA
DPRMYSLMQNSTMPRRSGAAGA

SEQ ID NO: 70545 - protein, 22 aa, Artificial Sequence
  Description of Artificial Sequence: Synthetic peptide
  Seed: DPRMCSLMQGSTLPRRSGAAGA
DPRMYSLMQNSTSPRRSGAAGA

SEQ ID NO: 70546 - protein, 22 aa, Artificial Sequence
  Description of Artificial Sequence: Synthetic peptide
  Seed: DPRMCSLMQGSTLPRRSGAAGA
DPRMYSLMQNSTTPRRSGAAGA

SEQ ID NO: 70547 - protein, 22 aa, Artificial Sequence
  Description of Artificial Sequence: Synthetic peptide
  Seed: DPRMCSLMQGSTLPRRSGAAGA
DPRMYSLMQNSTVPRRSGAAGA

SEQ ID NO: 70548 - protein, 22 aa, Artificial Sequence
  Description of Artificial Sequence: Synthetic peptide
  Seed: DPRMCSLMQGSTLPRRSGAAGA
DPRMYSLMQPSTAPRRSGAAGA

SEQ ID NO: 70549 - protein, 22 aa, Artificial Sequence
  Description of Artificial Sequence: Synthetic peptide
  Seed: DPRMCSLMQGSTLPRRSGAAGA
DPRMYSLMQPSTIPRRSGAAGA

SEQ ID NO: 70550 - protein, 22 aa, Artificial Sequence
  Description of Artificial Sequence: Synthetic peptide
  Seed: DPRMCSLMQGSTLPRRSGAAGA
DPRMYSLMQPSTLPRRSGAAGA

SEQ ID NO: 70551 - protein, 22 aa, Artificial Sequence
  Description of Artificial Sequence: Synthetic peptide
  Seed: DPRMCSLMQGSTLPRRSGAAGA
DPRMYSLMQPSTMPRRSGAAGA

SEQ ID NO: 70552 - protein, 22 aa, Artificial Sequence
  Description of Artificial Sequence: Synthetic peptide
  Seed: DPRMCSLMQGSTLPRRSGAAGA
DPRMYSLMQPSTSPRRSGAAGA

SEQ ID NO: 70553 - protein, 22 aa, Artificial Sequence
  Description of Artificial Sequence: Synthetic peptide
  Seed: DPRMCSLMQGSTLPRRSGAAGA
DPRMYSLMQPSTTPRRSGAAGA

SEQ ID NO: 70554 - protein, 22 aa, Artificial Sequence
  Description of Artificial Sequence: Synthetic peptide
  Seed: DPRMCSLMQGSTLPRRSGAAGA
DPRMYSLMQPSTVPRRSGAAGA

SEQ ID NO: 70555 - protein, 22 aa, Artificial Sequence
  Description of Artificial Sequence: Synthetic peptide
  Seed: DPRMCSLMQGSTLPRRSGAAGA
DPRMYSLMQSSTAPRRSGAAGA

SEQ ID NO: 70556 - protein, 22 aa, Artificial Sequence
  Description of Artificial Sequence: Synthetic peptide
  Seed: DPRMCSLMQGSTLPRRSGAAGA
DPRMYSLMQSSTGPRRSGAAGA

SEQ ID NO: 70557 - protein, 22 aa, Artificial Sequence
  Description of Artificial Sequence: Synthetic peptide
  Seed: DPRMCSLMQGSTLPRRSGAAGA
DPRMYSLMQSSTIPRRSGAAGA

SEQ ID NO: 70558 - protein, 22 aa, Artificial Sequence
  Description of Artificial Sequence: Synthetic peptide
  Seed: DPRMCSLMQGSTLPRRSGAAGA
DPRMYSLMQSSTLPRRSGAAGA

SEQ ID NO: 70559 - protein, 22 aa, Artificial Sequence
  Description of Artificial Sequence: Synthetic peptide
  Seed: DPRMCSLMQGSTLPRRSGAAGA
DPRMYSLMQSSTMPRRSGAAGA

SEQ ID NO: 70560 - protein, 22 aa, Artificial Sequence
  Description of Artificial Sequence: Synthetic peptide
  Seed: DPRMCSLMQGSTLPRRSGAAGA
DPRMYSLMQSSTSPRRSGAAGA

SEQ ID NO: 70561 - protein, 22 aa, Artificial Sequence
  Description of Artificial Sequence: Synthetic peptide
  Seed: DPRMCSLMQGSTLPRRSGAAGA
DPRMYSLMQSSTTPRRSGAAGA

SEQ ID NO: 70562 - protein, 22 aa, Artificial Sequence
  Description of Artificial Sequence: Synthetic peptide
  Seed: DPRMCSLMQGSTLPRRSGAAGA
DPRMYSLMQSSTVPRRSGAAGA

SEQ ID NO: 70563 - protein, 22 aa, Artificial Sequence
  Description of Artificial Sequence: Synthetic peptide
  Seed: DPRMCSLMQGSTLPRRSGAAGA
DPRMYSLMQTSTAPRRSGAAGA

SEQ ID NO: 70564 - protein, 22 aa, Artificial Sequence
  Description of Artificial Sequence: Synthetic peptide
  Seed: DPRMCSLMQGSTLPRRSGAAGA
DPRMYSLMQTSTIPRRSGAAGA

SEQ ID NO: 70565 - protein, 22 aa, Artificial Sequence
  Description of Artificial Sequence: Synthetic peptide
  Seed: DPRMCSLMQGSTLPRRSGAAGA
DPRMYSLMQTSTLPRRSGAAGA

SEQ ID NO: 70566 - protein, 22 aa, Artificial Sequence
  Description of Artificial Sequence: Synthetic peptide
  Seed: DPRMCSLMQGSTLPRRSGAAGA
DPRMYSLMQTSTMPRRSGAAGA

SEQ ID NO: 70567 - protein, 22 aa, Artificial Sequence
  Description of Artificial Sequence: Synthetic peptide
  Seed: DPRMCSLMQGSTLPRRSGAAGA
DPRMYSLMQTSTSPRRSGAAGA

SEQ ID NO: 70568 - protein, 22 aa, Artificial Sequence
  Description of Artificial Sequence: Synthetic peptide
  Seed: DPRMCSLMQGSTLPRRSGAAGA
DPRMYSLMQTSTTPRRSGAAGA

SEQ ID NO: 70569 - protein, 22 aa, Artificial Sequence
  Description of Artificial Sequence: Synthetic peptide
  Seed: DPRMCSLMQGSTLPRRSGAAGA
DPRMYSLMQTSTVPRRSGAAGA

SEQ ID NO: 70570 - protein, 22 aa, Artificial Sequence
  Description of Artificial Sequence: Synthetic peptide
  Seed: DPRMCSLMQGSTLPRRSGAAGA
DPRMYSLMQVSTAPRRSGAAGA

SEQ ID NO: 70571 - protein, 22 aa, Artificial Sequence
  Description of Artificial Sequence: Synthetic peptide
  Seed: DPRMCSLMQGSTLPRRSGAAGA
DPRMYSLMQVSTIPRRSGAAGA

SEQ ID NO: 70572 - protein, 22 aa, Artificial Sequence
  Description of Artificial Sequence: Synthetic peptide
  Seed: DPRMCSLMQGSTLPRRSGAAGA
DPRMYSLMQVSTLPRRSGAAGA

SEQ ID NO: 70573 - protein, 22 aa, Artificial Sequence
  Description of Artificial Sequence: Synthetic peptide
  Seed: DPRMCSLMQGSTLPRRSGAAGA
DPRMYSLMQVSTMPRRSGAAGA

SEQ ID NO: 70574 - protein, 22 aa, Artificial Sequence
  Description of Artificial Sequence: Synthetic peptide
  Seed: DPRMCSLMQGSTLPRRSGAAGA
DPRMYSLMQVSTTPRRSGAAGA

SEQ ID NO: 70575 - protein, 22 aa, Artificial Sequence
  Description of Artificial Sequence: Synthetic peptide
  Seed: DPRMCSLMQGSTLPRRSGAAGA
DPRMYSLMQVSTVPRRSGAAGA

SEQ ID NO: 70576 - protein, 22 aa, Artificial Sequence
  Description of Artificial Sequence: Synthetic peptide
  Seed: DPRMCSLMQGSTLPRRSGAAGA
DPRMYSLNQASTLPRRSGAAGA

SEQ ID NO: 70577 - protein, 22 aa, Artificial Sequence
  Description of Artificial Sequence: Synthetic peptide
  Seed: DPRMCSLMQGSTLPRRSGAAGA
DPRMYSLQQASTAPRRSGAAGA

SEQ ID NO: 70578 - protein, 22 aa, Artificial Sequence
  Description of Artificial Sequence: Synthetic peptide
  Seed: DPRMCSLMQGSTLPRRSGAAGA
DPRMYSLQQASTIPRRSGAAGA

SEQ ID NO: 70579 - protein, 22 aa, Artificial Sequence
  Description of Artificial Sequence: Synthetic peptide
  Seed: DPRMCSLMQGSTLPRRSGAAGA
DPRMYSLQQASTLPRRSGAAGA

SEQ ID NO: 70580 - protein, 22 aa, Artificial Sequence
  Description of Artificial Sequence: Synthetic peptide
  Seed: DPRMCSLMQGSTLPRRSGAAGA
DPRMYSLQQASTMPRRSGAAGA

SEQ ID NO: 70581 - protein, 22 aa, Artificial Sequence
  Description of Artificial Sequence: Synthetic peptide
  Seed: DPRMCSLMQGSTLPRRSGAAGA
DPRMYSLQQASTTPRRSGAAGA

SEQ ID NO: 70582 - protein, 22 aa, Artificial Sequence
  Description of Artificial Sequence: Synthetic peptide
  Seed: DPRMCSLMQGSTLPRRSGAAGA
DPRMYSLQQASTVPRRSGAAGA

SEQ ID NO: 70583 - protein, 22 aa, Artificial Sequence
  Description of Artificial Sequence: Synthetic peptide
  Seed: DPRMCSLMQGSTLPRRSGAAGA
DPRMYSLQQGSTAPRRSGAAGA

SEQ ID NO: 70584 - protein, 22 aa, Artificial Sequence
  Description of Artificial Sequence: Synthetic peptide
  Seed: DPRMCSLMQGSTLPRRSGAAGA
DPRMYSLQQGSTIPRRSGAAGA

SEQ ID NO: 70585 - protein, 22 aa, Artificial Sequence
  Description of Artificial Sequence: Synthetic peptide
  Seed: DPRMCSLMQGSTLPRRSGAAGA
DPRMYSLQQGSTLPRRSGAAGA

SEQ ID NO: 70586 - protein, 22 aa, Artificial Sequence
  Description of Artificial Sequence: Synthetic peptide
  Seed: DPRMCSLMQGSTLPRRSGAAGA
DPRMYSLQQGSTVPRRSGAAGA

SEQ ID NO: 70587 - protein, 22 aa, Artificial Sequence
  Description of Artificial Sequence: Synthetic peptide
  Seed: DPRMCSLMQGSTLPRRSGAAGA
DPRMYSLQQPSTIPRRSGAAGA

SEQ ID NO: 70588 - protein, 22 aa, Artificial Sequence
  Description of Artificial Sequence: Synthetic peptide
  Seed: DPRMCSLMQGSTLPRRSGAAGA
DPRMYSLQQPSTLPRRSGAAGA

SEQ ID NO: 70589 - protein, 22 aa, Artificial Sequence
  Description of Artificial Sequence: Synthetic peptide
  Seed: DPRMCSLMQGSTLPRRSGAAGA
DPRMYSLQQPSTVPRRSGAAGA

SEQ ID NO: 70590 - protein, 22 aa, Artificial Sequence
  Description of Artificial Sequence: Synthetic peptide
  Seed: DPRMCSLMQGSTLPRRSGAAGA
DPRMYSLQQSSTAPRRSGAAGA

SEQ ID NO: 70591 - protein, 22 aa, Artificial Sequence
  Description of Artificial Sequence: Synthetic peptide
  Seed: DPRMCSLMQGSTLPRRSGAAGA
DPRMYSLQQSSTIPRRSGAAGA

SEQ ID NO: 70592 - protein, 22 aa, Artificial Sequence
  Description of Artificial Sequence: Synthetic peptide
  Seed: DPRMCSLMQGSTLPRRSGAAGA
DPRMYSLQQSSTLPRRSGAAGA

SEQ ID NO: 70593 - protein, 22 aa, Artificial Sequence
  Description of Artificial Sequence: Synthetic peptide
  Seed: DPRMCSLMQGSTLPRRSGAAGA
DPRMYSLQQSSTVPRRSGAAGA

SEQ ID NO: 70594 - protein, 22 aa, Artificial Sequence
  Description of Artificial Sequence: Synthetic peptide
  Seed: DPRMCSLMQGSTLPRRSGAAGA
DPRMYSLSQASTAPRRSGAAGA

SEQ ID NO: 70595 - protein, 22 aa, Artificial Sequence
  Description of Artificial Sequence: Synthetic peptide
  Seed: DPRMCSLMQGSTLPRRSGAAGA
DPRMYSLSQASTIPRRSGAAGA

SEQ ID NO: 70596 - protein, 22 aa, Artificial Sequence
  Description of Artificial Sequence: Synthetic peptide
  Seed: DPRMCSLMQGSTLPRRSGAAGA
DPRMYSLSQASTLPRRSGAAGA

SEQ ID NO: 70597 - protein, 22 aa, Artificial Sequence
  Description of Artificial Sequence: Synthetic peptide
  Seed: DPRMCSLMQGSTLPRRSGAAGA
DPRMYSLSQASTVPRRSGAAGA

SEQ ID NO: 70598 - protein, 22 aa, Artificial Sequence
  Description of Artificial Sequence: Synthetic peptide
  Seed: DPRMCSLMQGSTLPRRSGAAGA
DPRMYSLSQGSTLPRRSGAAGA

SEQ ID NO: 70599 - protein, 22 aa, Artificial Sequence
  Description of Artificial Sequence: Synthetic peptide
  Seed: DPRMCSLMQGSTLPRRSGAAGA
DPRMYSLTQASTIPRRSGAAGA

SEQ ID NO: 70600 - protein, 22 aa, Artificial Sequence
  Description of Artificial Sequence: Synthetic peptide
  Seed: DPRMCSLMQGSTLPRRSGAAGA
DPRMYSLTQASTLPRRSGAAGA

SEQ ID NO: 70601 - protein, 22 aa, Artificial Sequence
  Description of Artificial Sequence: Synthetic peptide
  Seed: DPRMCSLMQGSTLPRRSGAAGA
DPRMYSLTQASTVPRRSGAAGA

SEQ ID NO: 70602 - protein, 22 aa, Artificial Sequence
  Description of Artificial Sequence: Synthetic peptide
  Seed: DPRMCSLMQGSTLPRRSGAAGA
DPRMYSLVQASTAPRRSGAAGA

SEQ ID NO: 70603 - protein, 22 aa, Artificial Sequence
  Description of Artificial Sequence: Synthetic peptide
  Seed: DPRMCSLMQGSTLPRRSGAAGA
DPRMYSLVQASTIPRRSGAAGA

SEQ ID NO: 70604 - protein, 22 aa, Artificial Sequence
  Description of Artificial Sequence: Synthetic peptide
  Seed: DPRMCSLMQGSTLPRRSGAAGA
DPRMYSLVQASTLPRRSGAAGA

SEQ ID NO: 70605 - protein, 22 aa, Artificial Sequence
  Description of Artificial Sequence: Synthetic peptide
  Seed: DPRMCSLMQGSTLPRRSGAAGA
DPRMYSLVQASTMPRRSGAAGA

SEQ ID NO: 70606 - protein, 22 aa, Artificial Sequence
  Description of Artificial Sequence: Synthetic peptide
  Seed: DPRMCSLMQGSTLPRRSGAAGA
DPRMYSLVQASTSPRRSGAAGA

SEQ ID NO: 70607 - protein, 22 aa, Artificial Sequence
  Description of Artificial Sequence: Synthetic peptide
  Seed: DPRMCSLMQGSTLPRRSGAAGA
DPRMYSLVQASTTPRRSGAAGA

SEQ ID NO: 70608 - protein, 22 aa, Artificial Sequence
  Description of Artificial Sequence: Synthetic peptide
  Seed: DPRMCSLMQGSTLPRRSGAAGA
DPRMYSLVQASTVPRRSGAAGA

SEQ ID NO: 70609 - protein, 22 aa, Artificial Sequence
  Description of Artificial Sequence: Synthetic peptide
  Seed: DPRMCSLMQGSTLPRRSGAAGA
DPRMYSLVQGSTAPRRSGAAGA

SEQ ID NO: 70610 - protein, 22 aa, Artificial Sequence
  Description of Artificial Sequence: Synthetic peptide
  Seed: DPRMCSLMQGSTLPRRSGAAGA
DPRMYSLVQGSTIPRRSGAAGA

SEQ ID NO: 70611 - protein, 22 aa, Artificial Sequence
  Description of Artificial Sequence: Synthetic peptide
  Seed: DPRMCSLMQGSTLPRRSGAAGA
DPRMYSLVQGSTLPRRSGAAGA

SEQ ID NO: 70612 - protein, 22 aa, Artificial Sequence
  Description of Artificial Sequence: Synthetic peptide
  Seed: DPRMCSLMQGSTLPRRSGAAGA
DPRMYSLVQGSTMPRRSGAAGA

SEQ ID NO: 70613 - protein, 22 aa, Artificial Sequence
  Description of Artificial Sequence: Synthetic peptide
  Seed: DPRMCSLMQGSTLPRRSGAAGA
DPRMYSLVQGSTVPRRSGAAGA

SEQ ID NO: 70614 - protein, 22 aa, Artificial Sequence
  Description of Artificial Sequence: Synthetic peptide
  Seed: DPRMCSLMQGSTLPRRSGAAGA
DPRMYSLVQPSTAPRRSGAAGA

SEQ ID NO: 70615 - protein, 22 aa, Artificial Sequence
  Description of Artificial Sequence: Synthetic peptide
  Seed: DPRMCSLMQGSTLPRRSGAAGA
DPRMYSLVQPSTIPRRSGAAGA

SEQ ID NO: 70616 - protein, 22 aa, Artificial Sequence
  Description of Artificial Sequence: Synthetic peptide
  Seed: DPRMCSLMQGSTLPRRSGAAGA
DPRMYSLVQPSTLPRRSGAAGA

SEQ ID NO: 70617 - protein, 22 aa, Artificial Sequence
  Description of Artificial Sequence: Synthetic peptide
  Seed: DPRMCSLMQGSTLPRRSGAAGA
DPRMYSLVQPSTVPRRSGAAGA

SEQ ID NO: 70618 - protein, 22 aa, Artificial Sequence
  Description of Artificial Sequence: Synthetic peptide
  Seed: DPRMCSLMQGSTLPRRSGAAGA
DPRMYSLVQSSTAPRRSGAAGA

SEQ ID NO: 70619 - protein, 22 aa, Artificial Sequence
  Description of Artificial Sequence: Synthetic peptide
  Seed: DPRMCSLMQGSTLPRRSGAAGA
DPRMYSLVQSSTIPRRSGAAGA

SEQ ID NO: 70620 - protein, 22 aa, Artificial Sequence
  Description of Artificial Sequence: Synthetic peptide
  Seed: DPRMCSLMQGSTLPRRSGAAGA
DPRMYSLVQSSTLPRRSGAAGA

SEQ ID NO: 70621 - protein, 22 aa, Artificial Sequence
  Description of Artificial Sequence: Synthetic peptide
  Seed: DPRMCSLMQGSTLPRRSGAAGA
DPRMYSLVQSSTVPRRSGAAGA

SEQ ID NO: 70622 - protein, 22 aa, Artificial Sequence
  Description of Artificial Sequence: Synthetic peptide
  Seed: DPRMCSLMQGSTLPRRSGAAGA
DPRMCSLMFGSALARRAGAAGA

SEQ ID NO: 70623 - protein, 22 aa, Artificial Sequence
  Description of Artificial Sequence: Synthetic peptide
  Seed: DPRMCSLMQGSTLPRRSGAAGA
DPRMCSLMFGSILARRAGAAGA

SEQ ID NO: 70624 - protein, 22 aa, Artificial Sequence
  Description of Artificial Sequence: Synthetic peptide
  Seed: DPRMCSLMQGSTLPRRSGAAGA
DPRMCSLMFGSILARRNGAAGA

SEQ ID NO: 70625 - protein, 22 aa, Artificial Sequence
  Description of Artificial Sequence: Synthetic peptide
  Seed: DPRMCSLMQGSTLPRRSGAAGA
DPRMCSLMFGSILARRSGAAGA

SEQ ID NO: 70626 - protein, 22 aa, Artificial Sequence
  Description of Artificial Sequence: Synthetic peptide
  Seed: DPRMCSLMQGSTLPRRSGAAGA
DPRMCSLMFGSILARRVGAAGA

SEQ ID NO: 70627 - protein, 22 aa, Artificial Sequence
  Description of Artificial Sequence: Synthetic peptide
  Seed: DPRMCSLMQGSTLPRRSGAAGA
DPRMCSLMFGSILPRRAGAAGA

SEQ ID NO: 70628 - protein, 22 aa, Artificial Sequence
  Description of Artificial Sequence: Synthetic peptide
  Seed: DPRMCSLMQGSTLPRRSGAAGA
DPRMCSLMFGSILSRRAGAAGA

SEQ ID NO: 70629 - protein, 22 aa, Artificial Sequence
  Description of Artificial Sequence: Synthetic peptide
  Seed: DPRMCSLMQGSTLPRRSGAAGA
DPRMCSLMFGSILSRRNGAAGA

SEQ ID NO: 70630 - protein, 22 aa, Artificial Sequence
  Description of Artificial Sequence: Synthetic peptide
  Seed: DPRMCSLMQGSTLPRRSGAAGA
DPRMCSLMFGSILSRRSGAAGA

SEQ ID NO: 70631 - protein, 22 aa, Artificial Sequence
  Description of Artificial Sequence: Synthetic peptide
  Seed: DPRMCSLMQGSTLPRRSGAAGA
DPRMCSLMFGSILTRRAGAAGA

SEQ ID NO: 70632 - protein, 22 aa, Artificial Sequence
  Description of Artificial Sequence: Synthetic peptide
  Seed: DPRMCSLMQGSTLPRRSGAAGA
DPRMCSLMFGSILTRRNGAAGA

SEQ ID NO: 70633 - protein, 22 aa, Artificial Sequence
  Description of Artificial Sequence: Synthetic peptide
  Seed: DPRMCSLMQGSTLPRRSGAAGA
DPRMCSLMFGSLLARRAGAAGA

SEQ ID NO: 70634 - protein, 22 aa, Artificial Sequence
  Description of Artificial Sequence: Synthetic peptide
  Seed: DPRMCSLMQGSTLPRRSGAAGA
DPRMCSLMFGSLLARRIGAAGA

SEQ ID NO: 70635 - protein, 22 aa, Artificial Sequence
  Description of Artificial Sequence: Synthetic peptide
  Seed: DPRMCSLMQGSTLPRRSGAAGA
DPRMCSLMFGSLLARRLGAAGA

SEQ ID NO: 70636 - protein, 22 aa, Artificial Sequence
  Description of Artificial Sequence: Synthetic peptide
  Seed: DPRMCSLMQGSTLPRRSGAAGA
DPRMCSLMFGSLLARRMGAAGA

SEQ ID NO: 70637 - protein, 22 aa, Artificial Sequence
  Description of Artificial Sequence: Synthetic peptide
  Seed: DPRMCSLMQGSTLPRRSGAAGA
DPRMCSLMFGSLLARRNGAAGA

SEQ ID NO: 70638 - protein, 22 aa, Artificial Sequence
  Description of Artificial Sequence: Synthetic peptide
  Seed: DPRMCSLMQGSTLPRRSGAAGA
DPRMCSLMFGSLLARRSGAAGA

SEQ ID NO: 70639 - protein, 22 aa, Artificial Sequence
  Description of Artificial Sequence: Synthetic peptide
  Seed: DPRMCSLMQGSTLPRRSGAAGA
DPRMCSLMFGSLLARRTGAAGA

SEQ ID NO: 70640 - protein, 22 aa, Artificial Sequence
  Description of Artificial Sequence: Synthetic peptide
  Seed: DPRMCSLMQGSTLPRRSGAAGA
DPRMCSLMFGSLLARRVGAAGA

SEQ ID NO: 70641 - protein, 22 aa, Artificial Sequence
  Description of Artificial Sequence: Synthetic peptide
  Seed: DPRMCSLMQGSTLPRRSGAAGA
DPRMCSLMFGSLLPRRAGAAGA

SEQ ID NO: 70642 - protein, 22 aa, Artificial Sequence
  Description of Artificial Sequence: Synthetic peptide
  Seed: DPRMCSLMQGSTLPRRSGAAGA
DPRMCSLMFGSLLPRRNGAAGA

SEQ ID NO: 70643 - protein, 22 aa, Artificial Sequence
  Description of Artificial Sequence: Synthetic peptide
  Seed: DPRMCSLMQGSTLPRRSGAAGA
DPRMCSLMFGSLLPRRSGAAGA

SEQ ID NO: 70644 - protein, 22 aa, Artificial Sequence
  Description of Artificial Sequence: Synthetic peptide
  Seed: DPRMCSLMQGSTLPRRSGAAGA
DPRMCSLMFGSLLPRRVGAAGA

SEQ ID NO: 70645 - protein, 22 aa, Artificial Sequence
  Description of Artificial Sequence: Synthetic peptide
  Seed: DPRMCSLMQGSTLPRRSGAAGA
DPRMCSLMFGSLLSRRAGAAGA

SEQ ID NO: 70646 - protein, 22 aa, Artificial Sequence
  Description of Artificial Sequence: Synthetic peptide
  Seed: DPRMCSLMQGSTLPRRSGAAGA
DPRMCSLMFGSLLSRRIGAAGA

SEQ ID NO: 70647 - protein, 22 aa, Artificial Sequence
  Description of Artificial Sequence: Synthetic peptide
  Seed: DPRMCSLMQGSTLPRRSGAAGA
DPRMCSLMFGSLLSRRNGAAGA

SEQ ID NO: 70648 - protein, 22 aa, Artificial Sequence
  Description of Artificial Sequence: Synthetic peptide
  Seed: DPRMCSLMQGSTLPRRSGAAGA
DPRMCSLMFGSLLSRRSGAAGA

SEQ ID NO: 70649 - protein, 22 aa, Artificial Sequence
  Description of Artificial Sequence: Synthetic peptide
  Seed: DPRMCSLMQGSTLPRRSGAAGA
DPRMCSLMFGSLLSRRVGAAGA

SEQ ID NO: 70650 - protein, 22 aa, Artificial Sequence
  Description of Artificial Sequence: Synthetic peptide
  Seed: DPRMCSLMQGSTLPRRSGAAGA
DPRMCSLMFGSLLTRRAGAAGA

SEQ ID NO: 70651 - protein, 22 aa, Artificial Sequence
  Description of Artificial Sequence: Synthetic peptide
  Seed: DPRMCSLMQGSTLPRRSGAAGA
DPRMCSLMFGSLLTRRIGAAGA

SEQ ID NO: 70652 - protein, 22 aa, Artificial Sequence
  Description of Artificial Sequence: Synthetic peptide
  Seed: DPRMCSLMQGSTLPRRSGAAGA
DPRMCSLMFGSLLTRRNGAAGA

SEQ ID NO: 70653 - protein, 22 aa, Artificial Sequence
  Description of Artificial Sequence: Synthetic peptide
  Seed: DPRMCSLMQGSTLPRRSGAAGA
DPRMCSLMFGSLLTRRSGAAGA

SEQ ID NO: 70654 - protein, 22 aa, Artificial Sequence
  Description of Artificial Sequence: Synthetic peptide
  Seed: DPRMCSLMQGSTLPRRSGAAGA
DPRMCSLMFGSLLTRRVGAAGA

SEQ ID NO: 70655 - protein, 22 aa, Artificial Sequence
  Description of Artificial Sequence: Synthetic peptide
  Seed: DPRMCSLMQGSTLPRRSGAAGA
DPRMCSLMFGSLLVRRAGAAGA

SEQ ID NO: 70656 - protein, 22 aa, Artificial Sequence
  Description of Artificial Sequence: Synthetic peptide
  Seed: DPRMCSLMQGSTLPRRSGAAGA
DPRMCSLMFGSLLVRRNGAAGA

SEQ ID NO: 70657 - protein, 22 aa, Artificial Sequence
  Description of Artificial Sequence: Synthetic peptide
  Seed: DPRMCSLMQGSTLPRRSGAAGA
DPRMCSLMFGSMLARRAGAAGA

SEQ ID NO: 70658 - protein, 22 aa, Artificial Sequence
  Description of Artificial Sequence: Synthetic peptide
  Seed: DPRMCSLMQGSTLPRRSGAAGA
DPRMCSLMFGSMLARRIGAAGA

SEQ ID NO: 70659 - protein, 22 aa, Artificial Sequence
  Description of Artificial Sequence: Synthetic peptide
  Seed: DPRMCSLMQGSTLPRRSGAAGA
DPRMCSLMFGSMLARRLGAAGA

SEQ ID NO: 70660 - protein, 22 aa, Artificial Sequence
  Description of Artificial Sequence: Synthetic peptide
  Seed: DPRMCSLMQGSTLPRRSGAAGA
DPRMCSLMFGSMLARRMGAAGA

SEQ ID NO: 70661 - protein, 22 aa, Artificial Sequence
  Description of Artificial Sequence: Synthetic peptide
  Seed: DPRMCSLMQGSTLPRRSGAAGA
DPRMCSLMFGSMLARRNGAAGA

SEQ ID NO: 70662 - protein, 22 aa, Artificial Sequence
  Description of Artificial Sequence: Synthetic peptide
  Seed: DPRMCSLMQGSTLPRRSGAAGA
DPRMCSLMFGSMLARRSGAAGA

SEQ ID NO: 70663 - protein, 22 aa, Artificial Sequence
  Description of Artificial Sequence: Synthetic peptide
  Seed: DPRMCSLMQGSTLPRRSGAAGA
DPRMCSLMFGSMLARRTGAAGA

SEQ ID NO: 70664 - protein, 22 aa, Artificial Sequence
  Description of Artificial Sequence: Synthetic peptide
  Seed: DPRMCSLMQGSTLPRRSGAAGA
DPRMCSLMFGSMLARRVGAAGA

SEQ ID NO: 70665 - protein, 22 aa, Artificial Sequence
  Description of Artificial Sequence: Synthetic peptide
  Seed: DPRMCSLMQGSTLPRRSGAAGA
DPRMCSLMFGSMLGRRAGAAGA

SEQ ID NO: 70666 - protein, 22 aa, Artificial Sequence
  Description of Artificial Sequence: Synthetic peptide
  Seed: DPRMCSLMQGSTLPRRSGAAGA
DPRMCSLMFGSMLPRRAGAAGA

SEQ ID NO: 70667 - protein, 22 aa, Artificial Sequence
  Description of Artificial Sequence: Synthetic peptide
  Seed: DPRMCSLMQGSTLPRRSGAAGA
DPRMCSLMFGSMLPRRIGAAGA

SEQ ID NO: 70668 - protein, 22 aa, Artificial Sequence
  Description of Artificial Sequence: Synthetic peptide
  Seed: DPRMCSLMQGSTLPRRSGAAGA
DPRMCSLMFGSMLPRRLGAAGA

SEQ ID NO: 70669 - protein, 22 aa, Artificial Sequence
  Description of Artificial Sequence: Synthetic peptide
  Seed: DPRMCSLMQGSTLPRRSGAAGA
DPRMCSLMFGSMLPRRMGAAGA

SEQ ID NO: 70670 - protein, 22 aa, Artificial Sequence
  Description of Artificial Sequence: Synthetic peptide
  Seed: DPRMCSLMQGSTLPRRSGAAGA
DPRMCSLMFGSMLPRRNGAAGA

SEQ ID NO: 70671 - protein, 22 aa, Artificial Sequence
  Description of Artificial Sequence: Synthetic peptide
  Seed: DPRMCSLMQGSTLPRRSGAAGA
DPRMCSLMFGSMLPRRSGAAGA

SEQ ID NO: 70672 - protein, 22 aa, Artificial Sequence
  Description of Artificial Sequence: Synthetic peptide
  Seed: DPRMCSLMQGSTLPRRSGAAGA
DPRMCSLMFGSMLPRRVGAAGA

SEQ ID NO: 70673 - protein, 22 aa, Artificial Sequence
  Description of Artificial Sequence: Synthetic peptide
  Seed: DPRMCSLMQGSTLPRRSGAAGA
DPRMCSLMFGSMLSRRAGAAGA

SEQ ID NO: 70674 - protein, 22 aa, Artificial Sequence
  Description of Artificial Sequence: Synthetic peptide
  Seed: DPRMCSLMQGSTLPRRSGAAGA
DPRMCSLMFGSMLSRRIGAAGA

SEQ ID NO: 70675 - protein, 22 aa, Artificial Sequence
  Description of Artificial Sequence: Synthetic peptide
  Seed: DPRMCSLMQGSTLPRRSGAAGA
DPRMCSLMFGSMLSRRLGAAGA

SEQ ID NO: 70676 - protein, 22 aa, Artificial Sequence
  Description of Artificial Sequence: Synthetic peptide
  Seed: DPRMCSLMQGSTLPRRSGAAGA
DPRMCSLMFGSMLSRRNGAAGA

SEQ ID NO: 70677 - protein, 22 aa, Artificial Sequence
  Description of Artificial Sequence: Synthetic peptide
  Seed: DPRMCSLMQGSTLPRRSGAAGA
DPRMCSLMFGSMLSRRSGAAGA

SEQ ID NO: 70678 - protein, 22 aa, Artificial Sequence
  Description of Artificial Sequence: Synthetic peptide
  Seed: DPRMCSLMQGSTLPRRSGAAGA
DPRMCSLMFGSMLSRRTGAAGA

SEQ ID NO: 70679 - protein, 22 aa, Artificial Sequence
  Description of Artificial Sequence: Synthetic peptide
  Seed: DPRMCSLMQGSTLPRRSGAAGA
DPRMCSLMFGSMLSRRVGAAGA

SEQ ID NO: 70680 - protein, 22 aa, Artificial Sequence
  Description of Artificial Sequence: Synthetic peptide
  Seed: DPRMCSLMQGSTLPRRSGAAGA
DPRMCSLMFGSMLTRRAGAAGA

SEQ ID NO: 70681 - protein, 22 aa, Artificial Sequence
  Description of Artificial Sequence: Synthetic peptide
  Seed: DPRMCSLMQGSTLPRRSGAAGA
DPRMCSLMFGSMLTRRIGAAGA

SEQ ID NO: 70682 - protein, 22 aa, Artificial Sequence
  Description of Artificial Sequence: Synthetic peptide
  Seed: DPRMCSLMQGSTLPRRSGAAGA
DPRMCSLMFGSMLTRRLGAAGA

SEQ ID NO: 70683 - protein, 22 aa, Artificial Sequence
  Description of Artificial Sequence: Synthetic peptide
  Seed: DPRMCSLMQGSTLPRRSGAAGA
DPRMCSLMFGSMLTRRMGAAGA

SEQ ID NO: 70684 - protein, 22 aa, Artificial Sequence
  Description of Artificial Sequence: Synthetic peptide
  Seed: DPRMCSLMQGSTLPRRSGAAGA
DPRMCSLMFGSMLTRRNGAAGA

SEQ ID NO: 70685 - protein, 22 aa, Artificial Sequence
  Description of Artificial Sequence: Synthetic peptide
  Seed: DPRMCSLMQGSTLPRRSGAAGA
DPRMCSLMFGSMLTRRSGAAGA

SEQ ID NO: 70686 - protein, 22 aa, Artificial Sequence
  Description of Artificial Sequence: Synthetic peptide
  Seed: DPRMCSLMQGSTLPRRSGAAGA
DPRMCSLMFGSMLTRRTGAAGA

SEQ ID NO: 70687 - protein, 22 aa, Artificial Sequence
  Description of Artificial Sequence: Synthetic peptide
  Seed: DPRMCSLMQGSTLPRRSGAAGA
DPRMCSLMFGSMLTRRVGAAGA

SEQ ID NO: 70688 - protein, 22 aa, Artificial Sequence
  Description of Artificial Sequence: Synthetic peptide
  Seed: DPRMCSLMQGSTLPRRSGAAGA
DPRMCSLMFGSMLVRRAGAAGA

SEQ ID NO: 70689 - protein, 22 aa, Artificial Sequence
  Description of Artificial Sequence: Synthetic peptide
  Seed: DPRMCSLMQGSTLPRRSGAAGA
DPRMCSLMFGSMLVRRNGAAGA

SEQ ID NO: 70690 - protein, 22 aa, Artificial Sequence
  Description of Artificial Sequence: Synthetic peptide
  Seed: DPRMCSLMQGSTLPRRSGAAGA
DPRMCSLMFGSMLVRRSGAAGA

SEQ ID NO: 70691 - protein, 22 aa, Artificial Sequence
  Description of Artificial Sequence: Synthetic peptide
  Seed: DPRMCSLMQGSTLPRRSGAAGA
DPRMCSLMFGSMLVRRTGAAGA

SEQ ID NO: 70692 - protein, 22 aa, Artificial Sequence
  Description of Artificial Sequence: Synthetic peptide
  Seed: DPRMCSLMQGSTLPRRSGAAGA
DPRMCSLMFGSMLVRRVGAAGA

SEQ ID NO: 70693 - protein, 22 aa, Artificial Sequence
  Description of Artificial Sequence: Synthetic peptide
  Seed: DPRMCSLMQGSTLPRRSGAAGA
DPRMCSLMFGSVLARRAGAAGA

SEQ ID NO: 70694 - protein, 22 aa, Artificial Sequence
  Description of Artificial Sequence: Synthetic peptide
  Seed: DPRMCSLMQGSTLPRRSGAAGA
DPRMCSLMYGSILARRAGAAGA

SEQ ID NO: 70695 - protein, 22 aa, Artificial Sequence
  Description of Artificial Sequence: Synthetic peptide
  Seed: DPRMCSLMQGSTLPRRSGAAGA
DPRMCSLMYGSILARRVGAAGA

SEQ ID NO: 70696 - protein, 22 aa, Artificial Sequence
  Description of Artificial Sequence: Synthetic peptide
  Seed: DPRMCSLMQGSTLPRRSGAAGA
DPRMCSLMYGSILSRRAGAAGA

SEQ ID NO: 70697 - protein, 22 aa, Artificial Sequence
  Description of Artificial Sequence: Synthetic peptide
  Seed: DPRMCSLMQGSTLPRRSGAAGA
DPRMCSLMYGSLLARRAGAAGA

SEQ ID NO: 70698 - protein, 22 aa, Artificial Sequence
  Description of Artificial Sequence: Synthetic peptide
  Seed: DPRMCSLMQGSTLPRRSGAAGA
DPRMCSLMYGSLLARRIGAAGA

SEQ ID NO: 70699 - protein, 22 aa, Artificial Sequence
  Description of Artificial Sequence: Synthetic peptide
  Seed: DPRMCSLMQGSTLPRRSGAAGA
DPRMCSLMYGSLLARRLGAAGA

SEQ ID NO: 70700 - protein, 22 aa, Artificial Sequence
  Description of Artificial Sequence: Synthetic peptide
  Seed: DPRMCSLMQGSTLPRRSGAAGA
DPRMCSLMYGSLLARRNGAAGA

SEQ ID NO: 70701 - protein, 22 aa, Artificial Sequence
  Description of Artificial Sequence: Synthetic peptide
  Seed: DPRMCSLMQGSTLPRRSGAAGA
DPRMCSLMYGSLLARRSGAAGA

SEQ ID NO: 70702 - protein, 22 aa, Artificial Sequence
  Description of Artificial Sequence: Synthetic peptide
  Seed: DPRMCSLMQGSTLPRRSGAAGA
DPRMCSLMYGSLLARRVGAAGA

SEQ ID NO: 70703 - protein, 22 aa, Artificial Sequence
  Description of Artificial Sequence: Synthetic peptide
  Seed: DPRMCSLMQGSTLPRRSGAAGA
DPRMCSLMYGSLLPRRAGAAGA

SEQ ID NO: 70704 - protein, 22 aa, Artificial Sequence
  Description of Artificial Sequence: Synthetic peptide
  Seed: DPRMCSLMQGSTLPRRSGAAGA
DPRMCSLMYGSLLPRRVGAAGA

SEQ ID NO: 70705 - protein, 22 aa, Artificial Sequence
  Description of Artificial Sequence: Synthetic peptide
  Seed: DPRMCSLMQGSTLPRRSGAAGA
DPRMCSLMYGSLLSRRAGAAGA

SEQ ID NO: 70706 - protein, 22 aa, Artificial Sequence
  Description of Artificial Sequence: Synthetic peptide
  Seed: DPRMCSLMQGSTLPRRSGAAGA
DPRMCSLMYGSLLSRRVGAAGA

SEQ ID NO: 70707 - protein, 22 aa, Artificial Sequence
  Description of Artificial Sequence: Synthetic peptide
  Seed: DPRMCSLMQGSTLPRRSGAAGA
DPRMCSLMYGSLLTRRAGAAGA

SEQ ID NO: 70708 - protein, 22 aa, Artificial Sequence
  Description of Artificial Sequence: Synthetic peptide
  Seed: DPRMCSLMQGSTLPRRSGAAGA
DPRMCSLMYGSLLTRRVGAAGA

SEQ ID NO: 70709 - protein, 22 aa, Artificial Sequence
  Description of Artificial Sequence: Synthetic peptide
  Seed: DPRMCSLMQGSTLPRRSGAAGA
DPRMCSLMYGSLLVRRAGAAGA

SEQ ID NO: 70710 - protein, 22 aa, Artificial Sequence
  Description of Artificial Sequence: Synthetic peptide
  Seed: DPRMCSLMQGSTLPRRSGAAGA
DPRMCSLMYGSMLARRAGAAGA

SEQ ID NO: 70711 - protein, 22 aa, Artificial Sequence
  Description of Artificial Sequence: Synthetic peptide
  Seed: DPRMCSLMQGSTLPRRSGAAGA
DPRMCSLMYGSMLARRIGAAGA

SEQ ID NO: 70712 - protein, 22 aa, Artificial Sequence
  Description of Artificial Sequence: Synthetic peptide
  Seed: DPRMCSLMQGSTLPRRSGAAGA
DPRMCSLMYGSMLARRLGAAGA

SEQ ID NO: 70713 - protein, 22 aa, Artificial Sequence
  Description of Artificial Sequence: Synthetic peptide
  Seed: DPRMCSLMQGSTLPRRSGAAGA
DPRMCSLMYGSMLARRMGAAGA

SEQ ID NO: 70714 - protein, 22 aa, Artificial Sequence
  Description of Artificial Sequence: Synthetic peptide
  Seed: DPRMCSLMQGSTLPRRSGAAGA
DPRMCSLMYGSMLARRNGAAGA

SEQ ID NO: 70715 - protein, 22 aa, Artificial Sequence
  Description of Artificial Sequence: Synthetic peptide
  Seed: DPRMCSLMQGSTLPRRSGAAGA
DPRMCSLMYGSMLARRSGAAGA

SEQ ID NO: 70716 - protein, 22 aa, Artificial Sequence
  Description of Artificial Sequence: Synthetic peptide
  Seed: DPRMCSLMQGSTLPRRSGAAGA
DPRMCSLMYGSMLARRTGAAGA

SEQ ID NO: 70717 - protein, 22 aa, Artificial Sequence
  Description of Artificial Sequence: Synthetic peptide
  Seed: DPRMCSLMQGSTLPRRSGAAGA
DPRMCSLMYGSMLARRVGAAGA

SEQ ID NO: 70718 - protein, 22 aa, Artificial Sequence
  Description of Artificial Sequence: Synthetic peptide
  Seed: DPRMCSLMQGSTLPRRSGAAGA
DPRMCSLMYGSMLPRRAGAAGA

SEQ ID NO: 70719 - protein, 22 aa, Artificial Sequence
  Description of Artificial Sequence: Synthetic peptide
  Seed: DPRMCSLMQGSTLPRRSGAAGA
DPRMCSLMYGSMLPRRIGAAGA

SEQ ID NO: 70720 - protein, 22 aa, Artificial Sequence
  Description of Artificial Sequence: Synthetic peptide
  Seed: DPRMCSLMQGSTLPRRSGAAGA
DPRMCSLMYGSMLPRRVGAAGA

SEQ ID NO: 70721 - protein, 22 aa, Artificial Sequence
  Description of Artificial Sequence: Synthetic peptide
  Seed: DPRMCSLMQGSTLPRRSGAAGA
DPRMCSLMYGSMLSRRAGAAGA

SEQ ID NO: 70722 - protein, 22 aa, Artificial Sequence
  Description of Artificial Sequence: Synthetic peptide
  Seed: DPRMCSLMQGSTLPRRSGAAGA
DPRMCSLMYGSMLSRRIGAAGA

SEQ ID NO: 70723 - protein, 22 aa, Artificial Sequence
  Description of Artificial Sequence: Synthetic peptide
  Seed: DPRMCSLMQGSTLPRRSGAAGA
DPRMCSLMYGSMLSRRNGAAGA

SEQ ID NO: 70724 - protein, 22 aa, Artificial Sequence
  Description of Artificial Sequence: Synthetic peptide
  Seed: DPRMCSLMQGSTLPRRSGAAGA
DPRMCSLMYGSMLSRRSGAAGA

SEQ ID NO: 70725 - protein, 22 aa, Artificial Sequence
  Description of Artificial Sequence: Synthetic peptide
  Seed: DPRMCSLMQGSTLPRRSGAAGA
DPRMCSLMYGSMLSRRVGAAGA

SEQ ID NO: 70726 - protein, 22 aa, Artificial Sequence
  Description of Artificial Sequence: Synthetic peptide
  Seed: DPRMCSLMQGSTLPRRSGAAGA
DPRMCSLMYGSMLTRRAGAAGA

SEQ ID NO: 70727 - protein, 22 aa, Artificial Sequence
  Description of Artificial Sequence: Synthetic peptide
  Seed: DPRMCSLMQGSTLPRRSGAAGA
DPRMCSLMYGSMLTRRIGAAGA

SEQ ID NO: 70728 - protein, 22 aa, Artificial Sequence
  Description of Artificial Sequence: Synthetic peptide
  Seed: DPRMCSLMQGSTLPRRSGAAGA
DPRMCSLMYGSMLTRRNGAAGA

SEQ ID NO: 70729 - protein, 22 aa, Artificial Sequence
  Description of Artificial Sequence: Synthetic peptide
  Seed: DPRMCSLMQGSTLPRRSGAAGA
DPRMCSLMYGSMLTRRVGAAGA

SEQ ID NO: 70730 - protein, 22 aa, Artificial Sequence
  Description of Artificial Sequence: Synthetic peptide
  Seed: DPRMCSLMQGSTLPRRSGAAGA
DPRMCSLMYGSMLVRRAGAAGA

SEQ ID NO: 70731 - protein, 22 aa, Artificial Sequence
  Description of Artificial Sequence: Synthetic peptide
  Seed: DPRMCSLMQGSTLPRRSGAAGA
DPRMCSLMYGSMLVRRNGAAGA

SEQ ID NO: 70732 - protein, 22 aa, Artificial Sequence
  Description of Artificial Sequence: Synthetic peptide
  Seed: DPRMCSLMQGSTLPRRSGAAGA
DPRMCSLMYGSMLVRRSGAAGA

SEQ ID NO: 70733 - protein, 22 aa, Artificial Sequence
  Description of Artificial Sequence: Synthetic peptide
  Seed: DPRMCSLMQGSTLPRRSGAAGA
DPRMCSLMYGSMLVRRVGAAGA

SEQ ID NO: 70734 - protein, 15 aa, Artificial Sequence
  Description of Artificial Sequence: Synthetic peptide
  Seed: GMDPRMCSLMQGSTL
GMDPRMFSLAQASTA

SEQ ID NO: 70735 - protein, 15 aa, Artificial Sequence
  Description of Artificial Sequence: Synthetic peptide
  Seed: GMDPRMCSLMQGSTL
GMDPRMFSLAQASTF

SEQ ID NO: 70736 - protein, 15 aa, Artificial Sequence
  Description of Artificial Sequence: Synthetic peptide
  Seed: GMDPRMCSLMQGSTL
GMDPRMFSLAQASTI

SEQ ID NO: 70737 - protein, 15 aa, Artificial Sequence
  Description of Artificial Sequence: Synthetic peptide
  Seed: GMDPRMCSLMQGSTL
GMDPRMFSLAQASTL

SEQ ID NO: 70738 - protein, 15 aa, Artificial Sequence
  Description of Artificial Sequence: Synthetic peptide
  Seed: GMDPRMCSLMQGSTL
GMDPRMFSLAQASTM

SEQ ID NO: 70739 - protein, 15 aa, Artificial Sequence
  Description of Artificial Sequence: Synthetic peptide
  Seed: GMDPRMCSLMQGSTL
GMDPRMFSLAQASTS

SEQ ID NO: 70740 - protein, 15 aa, Artificial Sequence
  Description of Artificial Sequence: Synthetic peptide
  Seed: GMDPRMCSLMQGSTL
GMDPRMFSLAQASTT

SEQ ID NO: 70741 - protein, 15 aa, Artificial Sequence
  Description of Artificial Sequence: Synthetic peptide
  Seed: GMDPRMCSLMQGSTL
GMDPRMFSLAQASTV

SEQ ID NO: 70742 - protein, 15 aa, Artificial Sequence
  Description of Artificial Sequence: Synthetic peptide
  Seed: GMDPRMCSLMQGSTL
GMDPRMFSLAQGSTA

SEQ ID NO: 70743 - protein, 15 aa, Artificial Sequence
  Description of Artificial Sequence: Synthetic peptide
  Seed: GMDPRMCSLMQGSTL
GMDPRMFSLAQGSTI

SEQ ID NO: 70744 - protein, 15 aa, Artificial Sequence
  Description of Artificial Sequence: Synthetic peptide
  Seed: GMDPRMCSLMQGSTL
GMDPRMFSLAQGSTL

SEQ ID NO: 70745 - protein, 15 aa, Artificial Sequence
  Description of Artificial Sequence: Synthetic peptide
  Seed: GMDPRMCSLMQGSTL
GMDPRMFSLAQGSTM

SEQ ID NO: 70746 - protein, 15 aa, Artificial Sequence
  Description of Artificial Sequence: Synthetic peptide
  Seed: GMDPRMCSLMQGSTL
GMDPRMFSLAQGSTV

SEQ ID NO: 70747 - protein, 15 aa, Artificial Sequence
  Description of Artificial Sequence: Synthetic peptide
  Seed: GMDPRMCSLMQGSTL
GMDPRMFSLAQPSTA

SEQ ID NO: 70748 - protein, 15 aa, Artificial Sequence
  Description of Artificial Sequence: Synthetic peptide
  Seed: GMDPRMCSLMQGSTL
GMDPRMFSLAQPSTI

SEQ ID NO: 70749 - protein, 15 aa, Artificial Sequence
  Description of Artificial Sequence: Synthetic peptide
  Seed: GMDPRMCSLMQGSTL
GMDPRMFSLAQPSTL

SEQ ID NO: 70750 - protein, 15 aa, Artificial Sequence
  Description of Artificial Sequence: Synthetic peptide
  Seed: GMDPRMCSLMQGSTL
GMDPRMFSLAQPSTM

SEQ ID NO: 70751 - protein, 15 aa, Artificial Sequence
  Description of Artificial Sequence: Synthetic peptide
  Seed: GMDPRMCSLMQGSTL
GMDPRMFSLAQPSTV

SEQ ID NO: 70752 - protein, 15 aa, Artificial Sequence
  Description of Artificial Sequence: Synthetic peptide
  Seed: GMDPRMCSLMQGSTL
GMDPRMFSLAQSSTA

SEQ ID NO: 70753 - protein, 15 aa, Artificial Sequence
  Description of Artificial Sequence: Synthetic peptide
  Seed: GMDPRMCSLMQGSTL
GMDPRMFSLAQSSTI

SEQ ID NO: 70754 - protein, 15 aa, Artificial Sequence
  Description of Artificial Sequence: Synthetic peptide
  Seed: GMDPRMCSLMQGSTL
GMDPRMFSLAQSSTL

SEQ ID NO: 70755 - protein, 15 aa, Artificial Sequence
  Description of Artificial Sequence: Synthetic peptide
  Seed: GMDPRMCSLMQGSTL
GMDPRMFSLAQSSTM

SEQ ID NO: 70756 - protein, 15 aa, Artificial Sequence
  Description of Artificial Sequence: Synthetic peptide
  Seed: GMDPRMCSLMQGSTL
GMDPRMFSLAQSSTV

SEQ ID NO: 70757 - protein, 15 aa, Artificial Sequence
  Description of Artificial Sequence: Synthetic peptide
  Seed: GMDPRMCSLMQGSTL
GMDPRMFSLAQTSTI

SEQ ID NO: 70758 - protein, 15 aa, Artificial Sequence
  Description of Artificial Sequence: Synthetic peptide
  Seed: GMDPRMCSLMQGSTL
GMDPRMFSLAQTSTL

SEQ ID NO: 70759 - protein, 15 aa, Artificial Sequence
  Description of Artificial Sequence: Synthetic peptide
  Seed: GMDPRMCSLMQGSTL
GMDPRMFSLAQTSTV

SEQ ID NO: 70760 - protein, 15 aa, Artificial Sequence
  Description of Artificial Sequence: Synthetic peptide
  Seed: GMDPRMCSLMQGSTL
GMDPRMFSLEQASTI

SEQ ID NO: 70761 - protein, 15 aa, Artificial Sequence
  Description of Artificial Sequence: Synthetic peptide
  Seed: GMDPRMCSLMQGSTL
GMDPRMFSLEQASTL

SEQ ID NO: 70762 - protein, 15 aa, Artificial Sequence
  Description of Artificial Sequence: Synthetic peptide
  Seed: GMDPRMCSLMQGSTL
GMDPRMFSLEQASTV

SEQ ID NO: 70763 - protein, 15 aa, Artificial Sequence
  Description of Artificial Sequence: Synthetic peptide
  Seed: GMDPRMCSLMQGSTL
GMDPRMFSLFQASTA

SEQ ID NO: 70764 - protein, 15 aa, Artificial Sequence
  Description of Artificial Sequence: Synthetic peptide
  Seed: GMDPRMCSLMQGSTL
GMDPRMFSLFQASTI

SEQ ID NO: 70765 - protein, 15 aa, Artificial Sequence
  Description of Artificial Sequence: Synthetic peptide
  Seed: GMDPRMCSLMQGSTL
GMDPRMFSLFQASTL

SEQ ID NO: 70766 - protein, 15 aa, Artificial Sequence
  Description of Artificial Sequence: Synthetic peptide
  Seed: GMDPRMCSLMQGSTL
GMDPRMFSLFQASTV

SEQ ID NO: 70767 - protein, 15 aa, Artificial Sequence
  Description of Artificial Sequence: Synthetic peptide
  Seed: GMDPRMCSLMQGSTL
GMDPRMFSLGQASTI

SEQ ID NO: 70768 - protein, 15 aa, Artificial Sequence
  Description of Artificial Sequence: Synthetic peptide
  Seed: GMDPRMCSLMQGSTL
GMDPRMFSLGQASTL

SEQ ID NO: 70769 - protein, 15 aa, Artificial Sequence
  Description of Artificial Sequence: Synthetic peptide
  Seed: GMDPRMCSLMQGSTL
GMDPRMFSLGQASTV

SEQ ID NO: 70770 - protein, 15 aa, Artificial Sequence
  Description of Artificial Sequence: Synthetic peptide
  Seed: GMDPRMCSLMQGSTL
GMDPRMFSLIQASTA

SEQ ID NO: 70771 - protein, 15 aa, Artificial Sequence
  Description of Artificial Sequence: Synthetic peptide
  Seed: GMDPRMCSLMQGSTL
GMDPRMFSLIQASTG

SEQ ID NO: 70772 - protein, 15 aa, Artificial Sequence
  Description of Artificial Sequence: Synthetic peptide
  Seed: GMDPRMCSLMQGSTL
GMDPRMFSLIQASTI

SEQ ID NO: 70773 - protein, 15 aa, Artificial Sequence
  Description of Artificial Sequence: Synthetic peptide
  Seed: GMDPRMCSLMQGSTL
GMDPRMFSLIQASTL

SEQ ID NO: 70774 - protein, 15 aa, Artificial Sequence
  Description of Artificial Sequence: Synthetic peptide
  Seed: GMDPRMCSLMQGSTL
GMDPRMFSLIQASTM

SEQ ID NO: 70775 - protein, 15 aa, Artificial Sequence
  Description of Artificial Sequence: Synthetic peptide
  Seed: GMDPRMCSLMQGSTL
GMDPRMFSLIQASTN

SEQ ID NO: 70776 - protein, 15 aa, Artificial Sequence
  Description of Artificial Sequence: Synthetic peptide
  Seed: GMDPRMCSLMQGSTL
GMDPRMFSLIQASTS

SEQ ID NO: 70777 - protein, 15 aa, Artificial Sequence
  Description of Artificial Sequence: Synthetic peptide
  Seed: GMDPRMCSLMQGSTL
GMDPRMFSLIQASTT

SEQ ID NO: 70778 - protein, 15 aa, Artificial Sequence
  Description of Artificial Sequence: Synthetic peptide
  Seed: GMDPRMCSLMQGSTL
GMDPRMFSLIQASTV

SEQ ID NO: 70779 - protein, 15 aa, Artificial Sequence
  Description of Artificial Sequence: Synthetic peptide
  Seed: GMDPRMCSLMQGSTL
GMDPRMFSLIQGSTA

SEQ ID NO: 70780 - protein, 15 aa, Artificial Sequence
  Description of Artificial Sequence: Synthetic peptide
  Seed: GMDPRMCSLMQGSTL
GMDPRMFSLIQGSTG

SEQ ID NO: 70781 - protein, 15 aa, Artificial Sequence
  Description of Artificial Sequence: Synthetic peptide
  Seed: GMDPRMCSLMQGSTL
GMDPRMFSLIQGSTI

SEQ ID NO: 70782 - protein, 15 aa, Artificial Sequence
  Description of Artificial Sequence: Synthetic peptide
  Seed: GMDPRMCSLMQGSTL
GMDPRMFSLIQGSTL

SEQ ID NO: 70783 - protein, 15 aa, Artificial Sequence
  Description of Artificial Sequence: Synthetic peptide
  Seed: GMDPRMCSLMQGSTL
GMDPRMFSLIQGSTM

SEQ ID NO: 70784 - protein, 15 aa, Artificial Sequence
  Description of Artificial Sequence: Synthetic peptide
  Seed: GMDPRMCSLMQGSTL
GMDPRMFSLIQGSTS

SEQ ID NO: 70785 - protein, 15 aa, Artificial Sequence
  Description of Artificial Sequence: Synthetic peptide
  Seed: GMDPRMCSLMQGSTL
GMDPRMFSLIQGSTT

SEQ ID NO: 70786 - protein, 15 aa, Artificial Sequence
  Description of Artificial Sequence: Synthetic peptide
  Seed: GMDPRMCSLMQGSTL
GMDPRMFSLIQGSTV

SEQ ID NO: 70787 - protein, 15 aa, Artificial Sequence
  Description of Artificial Sequence: Synthetic peptide
  Seed: GMDPRMCSLMQGSTL
GMDPRMFSLIQNSTA

SEQ ID NO: 70788 - protein, 15 aa, Artificial Sequence
  Description of Artificial Sequence: Synthetic peptide
  Seed: GMDPRMCSLMQGSTL
GMDPRMFSLIQNSTI

SEQ ID NO: 70789 - protein, 15 aa, Artificial Sequence
  Description of Artificial Sequence: Synthetic peptide
  Seed: GMDPRMCSLMQGSTL
GMDPRMFSLIQNSTL

SEQ ID NO: 70790 - protein, 15 aa, Artificial Sequence
  Description of Artificial Sequence: Synthetic peptide
  Seed: GMDPRMCSLMQGSTL
GMDPRMFSLIQNSTV

SEQ ID NO: 70791 - protein, 15 aa, Artificial Sequence
  Description of Artificial Sequence: Synthetic peptide
  Seed: GMDPRMCSLMQGSTL
GMDPRMFSLIQPSTA

SEQ ID NO: 70792 - protein, 15 aa, Artificial Sequence
  Description of Artificial Sequence: Synthetic peptide
  Seed: GMDPRMCSLMQGSTL
GMDPRMFSLIQPSTI

SEQ ID NO: 70793 - protein, 15 aa, Artificial Sequence
  Description of Artificial Sequence: Synthetic peptide
  Seed: GMDPRMCSLMQGSTL
GMDPRMFSLIQPSTL

SEQ ID NO: 70794 - protein, 15 aa, Artificial Sequence
  Description of Artificial Sequence: Synthetic peptide
  Seed: GMDPRMCSLMQGSTL
GMDPRMFSLIQPSTM

SEQ ID NO: 70795 - protein, 15 aa, Artificial Sequence
  Description of Artificial Sequence: Synthetic peptide
  Seed: GMDPRMCSLMQGSTL
GMDPRMFSLIQPSTS

SEQ ID NO: 70796 - protein, 15 aa, Artificial Sequence
  Description of Artificial Sequence: Synthetic peptide
  Seed: GMDPRMCSLMQGSTL
GMDPRMFSLIQPSTT

SEQ ID NO: 70797 - protein, 15 aa, Artificial Sequence
  Description of Artificial Sequence: Synthetic peptide
  Seed: GMDPRMCSLMQGSTL
GMDPRMFSLIQPSTV

SEQ ID NO: 70798 - protein, 15 aa, Artificial Sequence
  Description of Artificial Sequence: Synthetic peptide
  Seed: GMDPRMCSLMQGSTL
GMDPRMFSLIQSSTA

SEQ ID NO: 70799 - protein, 15 aa, Artificial Sequence
  Description of Artificial Sequence: Synthetic peptide
  Seed: GMDPRMCSLMQGSTL
GMDPRMFSLIQSSTI

SEQ ID NO: 70800 - protein, 15 aa, Artificial Sequence
  Description of Artificial Sequence: Synthetic peptide
  Seed: GMDPRMCSLMQGSTL
GMDPRMFSLIQSSTL

SEQ ID NO: 70801 - protein, 15 aa, Artificial Sequence
  Description of Artificial Sequence: Synthetic peptide
  Seed: GMDPRMCSLMQGSTL
GMDPRMFSLIQSSTM

SEQ ID NO: 70802 - protein, 15 aa, Artificial Sequence
  Description of Artificial Sequence: Synthetic peptide
  Seed: GMDPRMCSLMQGSTL
GMDPRMFSLIQSSTS

SEQ ID NO: 70803 - protein, 15 aa, Artificial Sequence
  Description of Artificial Sequence: Synthetic peptide
  Seed: GMDPRMCSLMQGSTL
GMDPRMFSLIQSSTT

SEQ ID NO: 70804 - protein, 15 aa, Artificial Sequence
  Description of Artificial Sequence: Synthetic peptide
  Seed: GMDPRMCSLMQGSTL
GMDPRMFSLIQSSTV

SEQ ID NO: 70805 - protein, 15 aa, Artificial Sequence
  Description of Artificial Sequence: Synthetic peptide
  Seed: GMDPRMCSLMQGSTL
GMDPRMFSLIQTSTA

SEQ ID NO: 70806 - protein, 15 aa, Artificial Sequence
  Description of Artificial Sequence: Synthetic peptide
  Seed: GMDPRMCSLMQGSTL
GMDPRMFSLIQTSTI

SEQ ID NO: 70807 - protein, 15 aa, Artificial Sequence
  Description of Artificial Sequence: Synthetic peptide
  Seed: GMDPRMCSLMQGSTL
GMDPRMFSLIQTSTL

SEQ ID NO: 70808 - protein, 15 aa, Artificial Sequence
  Description of Artificial Sequence: Synthetic peptide
  Seed: GMDPRMCSLMQGSTL
GMDPRMFSLIQTSTV

SEQ ID NO: 70809 - protein, 15 aa, Artificial Sequence
  Description of Artificial Sequence: Synthetic peptide
  Seed: GMDPRMCSLMQGSTL
GMDPRMFSLIQVSTV

SEQ ID NO: 70810 - protein, 15 aa, Artificial Sequence
  Description of Artificial Sequence: Synthetic peptide
  Seed: GMDPRMCSLMQGSTL
GMDPRMFSLLQASTA

SEQ ID NO: 70811 - protein, 15 aa, Artificial Sequence
  Description of Artificial Sequence: Synthetic peptide
  Seed: GMDPRMCSLMQGSTL
GMDPRMFSLLQASTC

SEQ ID NO: 70812 - protein, 15 aa, Artificial Sequence
  Description of Artificial Sequence: Synthetic peptide
  Seed: GMDPRMCSLMQGSTL
GMDPRMFSLLQASTF

SEQ ID NO: 70813 - protein, 15 aa, Artificial Sequence
  Description of Artificial Sequence: Synthetic peptide
  Seed: GMDPRMCSLMQGSTL
GMDPRMFSLLQASTG

SEQ ID NO: 70814 - protein, 15 aa, Artificial Sequence
  Description of Artificial Sequence: Synthetic peptide
  Seed: GMDPRMCSLMQGSTL
GMDPRMFSLLQASTH

SEQ ID NO: 70815 - protein, 15 aa, Artificial Sequence
  Description of Artificial Sequence: Synthetic peptide
  Seed: GMDPRMCSLMQGSTL
GMDPRMFSLLQASTI

SEQ ID NO: 70816 - protein, 15 aa, Artificial Sequence
  Description of Artificial Sequence: Synthetic peptide
  Seed: GMDPRMCSLMQGSTL
GMDPRMFSLLQASTK

SEQ ID NO: 70817 - protein, 15 aa, Artificial Sequence
  Description of Artificial Sequence: Synthetic peptide
  Seed: GMDPRMCSLMQGSTL
GMDPRMFSLLQASTL

SEQ ID NO: 70818 - protein, 15 aa, Artificial Sequence
  Description of Artificial Sequence: Synthetic peptide
  Seed: GMDPRMCSLMQGSTL
GMDPRMFSLLQASTM

SEQ ID NO: 70819 - protein, 15 aa, Artificial Sequence
  Description of Artificial Sequence: Synthetic peptide
  Seed: GMDPRMCSLMQGSTL
GMDPRMFSLLQASTN

SEQ ID NO: 70820 - protein, 15 aa, Artificial Sequence
  Description of Artificial Sequence: Synthetic peptide
  Seed: GMDPRMCSLMQGSTL
GMDPRMFSLLQASTQ

SEQ ID NO: 70821 - protein, 15 aa, Artificial Sequence
  Description of Artificial Sequence: Synthetic peptide
  Seed: GMDPRMCSLMQGSTL
GMDPRMFSLLQASTR

SEQ ID NO: 70822 - protein, 15 aa, Artificial Sequence
  Description of Artificial Sequence: Synthetic peptide
  Seed: GMDPRMCSLMQGSTL
GMDPRMFSLLQASTS

SEQ ID NO: 70823 - protein, 15 aa, Artificial Sequence
  Description of Artificial Sequence: Synthetic peptide
  Seed: GMDPRMCSLMQGSTL
GMDPRMFSLLQASTT

SEQ ID NO: 70824 - protein, 15 aa, Artificial Sequence
  Description of Artificial Sequence: Synthetic peptide
  Seed: GMDPRMCSLMQGSTL
GMDPRMFSLLQASTV

SEQ ID NO: 70825 - protein, 15 aa, Artificial Sequence
  Description of Artificial Sequence: Synthetic peptide
  Seed: GMDPRMCSLMQGSTL
GMDPRMFSLLQASTY

SEQ ID NO: 70826 - protein, 15 aa, Artificial Sequence
  Description of Artificial Sequence: Synthetic peptide
  Seed: GMDPRMCSLMQGSTL
GMDPRMFSLLQGSTA

SEQ ID NO: 70827 - protein, 15 aa, Artificial Sequence
  Description of Artificial Sequence: Synthetic peptide
  Seed: GMDPRMCSLMQGSTL
GMDPRMFSLLQGSTC

SEQ ID NO: 70828 - protein, 15 aa, Artificial Sequence
  Description of Artificial Sequence: Synthetic peptide
  Seed: GMDPRMCSLMQGSTL
GMDPRMFSLLQGSTF

SEQ ID NO: 70829 - protein, 15 aa, Artificial Sequence
  Description of Artificial Sequence: Synthetic peptide
  Seed: GMDPRMCSLMQGSTL
GMDPRMFSLLQGSTG

SEQ ID NO: 70830 - protein, 15 aa, Artificial Sequence
  Description of Artificial Sequence: Synthetic peptide
  Seed: GMDPRMCSLMQGSTL
GMDPRMFSLLQGSTI

SEQ ID NO: 70831 - protein, 15 aa, Artificial Sequence
  Description of Artificial Sequence: Synthetic peptide
  Seed: GMDPRMCSLMQGSTL
GMDPRMFSLLQGSTL

SEQ ID NO: 70832 - protein, 15 aa, Artificial Sequence
  Description of Artificial Sequence: Synthetic peptide
  Seed: GMDPRMCSLMQGSTL
GMDPRMFSLLQGSTM

SEQ ID NO: 70833 - protein, 15 aa, Artificial Sequence
  Description of Artificial Sequence: Synthetic peptide
  Seed: GMDPRMCSLMQGSTL
GMDPRMFSLLQGSTN

SEQ ID NO: 70834 - protein, 15 aa, Artificial Sequence
  Description of Artificial Sequence: Synthetic peptide
  Seed: GMDPRMCSLMQGSTL
GMDPRMFSLLQGSTS

SEQ ID NO: 70835 - protein, 15 aa, Artificial Sequence
  Description of Artificial Sequence: Synthetic peptide
  Seed: GMDPRMCSLMQGSTL
GMDPRMFSLLQGSTT

SEQ ID NO: 70836 - protein, 15 aa, Artificial Sequence
  Description of Artificial Sequence: Synthetic peptide
  Seed: GMDPRMCSLMQGSTL
GMDPRMFSLLQGSTV

SEQ ID NO: 70837 - protein, 15 aa, Artificial Sequence
  Description of Artificial Sequence: Synthetic peptide
  Seed: GMDPRMCSLMQGSTL
GMDPRMFSLLQHSTL

SEQ ID NO: 70838 - protein, 15 aa, Artificial Sequence
  Description of Artificial Sequence: Synthetic peptide
  Seed: GMDPRMCSLMQGSTL
GMDPRMFSLLQHSTV

SEQ ID NO: 70839 - protein, 15 aa, Artificial Sequence
  Description of Artificial Sequence: Synthetic peptide
  Seed: GMDPRMCSLMQGSTL
GMDPRMFSLLQISTA

SEQ ID NO: 70840 - protein, 15 aa, Artificial Sequence
  Description of Artificial Sequence: Synthetic peptide
  Seed: GMDPRMCSLMQGSTL
GMDPRMFSLLQISTV

SEQ ID NO: 70841 - protein, 15 aa, Artificial Sequence
  Description of Artificial Sequence: Synthetic peptide
  Seed: GMDPRMCSLMQGSTL
GMDPRMFSLLQNSTA

SEQ ID NO: 70842 - protein, 15 aa, Artificial Sequence
  Description of Artificial Sequence: Synthetic peptide
  Seed: GMDPRMCSLMQGSTL
GMDPRMFSLLQNSTI

SEQ ID NO: 70843 - protein, 15 aa, Artificial Sequence
  Description of Artificial Sequence: Synthetic peptide
  Seed: GMDPRMCSLMQGSTL
GMDPRMFSLLQNSTL

SEQ ID NO: 70844 - protein, 15 aa, Artificial Sequence
  Description of Artificial Sequence: Synthetic peptide
  Seed: GMDPRMCSLMQGSTL
GMDPRMFSLLQNSTM

SEQ ID NO: 70845 - protein, 15 aa, Artificial Sequence
  Description of Artificial Sequence: Synthetic peptide
  Seed: GMDPRMCSLMQGSTL
GMDPRMFSLLQNSTS

SEQ ID NO: 70846 - protein, 15 aa, Artificial Sequence
  Description of Artificial Sequence: Synthetic peptide
  Seed: GMDPRMCSLMQGSTL
GMDPRMFSLLQNSTT

SEQ ID NO: 70847 - protein, 15 aa, Artificial Sequence
  Description of Artificial Sequence: Synthetic peptide
  Seed: GMDPRMCSLMQGSTL
GMDPRMFSLLQNSTV

SEQ ID NO: 70848 - protein, 15 aa, Artificial Sequence
  Description of Artificial Sequence: Synthetic peptide
  Seed: GMDPRMCSLMQGSTL
GMDPRMFSLLQPSTA

SEQ ID NO: 70849 - protein, 15 aa, Artificial Sequence
  Description of Artificial Sequence: Synthetic peptide
  Seed: GMDPRMCSLMQGSTL
GMDPRMFSLLQPSTF

SEQ ID NO: 70850 - protein, 15 aa, Artificial Sequence
  Description of Artificial Sequence: Synthetic peptide
  Seed: GMDPRMCSLMQGSTL
GMDPRMFSLLQPSTG

SEQ ID NO: 70851 - protein, 15 aa, Artificial Sequence
  Description of Artificial Sequence: Synthetic peptide
  Seed: GMDPRMCSLMQGSTL
GMDPRMFSLLQPSTI

SEQ ID NO: 70852 - protein, 15 aa, Artificial Sequence
  Description of Artificial Sequence: Synthetic peptide
  Seed: GMDPRMCSLMQGSTL
GMDPRMFSLLQPSTL

SEQ ID NO: 70853 - protein, 15 aa, Artificial Sequence
  Description of Artificial Sequence: Synthetic peptide
  Seed: GMDPRMCSLMQGSTL
GMDPRMFSLLQPSTM

SEQ ID NO: 70854 - protein, 15 aa, Artificial Sequence
  Description of Artificial Sequence: Synthetic peptide
  Seed: GMDPRMCSLMQGSTL
GMDPRMFSLLQPSTN

SEQ ID NO: 70855 - protein, 15 aa, Artificial Sequence
  Description of Artificial Sequence: Synthetic peptide
  Seed: GMDPRMCSLMQGSTL
GMDPRMFSLLQPSTS

SEQ ID NO: 70856 - protein, 15 aa, Artificial Sequence
  Description of Artificial Sequence: Synthetic peptide
  Seed: GMDPRMCSLMQGSTL
GMDPRMFSLLQPSTT

SEQ ID NO: 70857 - protein, 15 aa, Artificial Sequence
  Description of Artificial Sequence: Synthetic peptide
  Seed: GMDPRMCSLMQGSTL
GMDPRMFSLLQPSTV

SEQ ID NO: 70858 - protein, 15 aa, Artificial Sequence
  Description of Artificial Sequence: Synthetic peptide
  Seed: GMDPRMCSLMQGSTL
GMDPRMFSLLQSSTA

SEQ ID NO: 70859 - protein, 15 aa, Artificial Sequence
  Description of Artificial Sequence: Synthetic peptide
  Seed: GMDPRMCSLMQGSTL
GMDPRMFSLLQSSTC

SEQ ID NO: 70860 - protein, 15 aa, Artificial Sequence
  Description of Artificial Sequence: Synthetic peptide
  Seed: GMDPRMCSLMQGSTL
GMDPRMFSLLQSSTG

SEQ ID NO: 70861 - protein, 15 aa, Artificial Sequence
  Description of Artificial Sequence: Synthetic peptide
  Seed: GMDPRMCSLMQGSTL
GMDPRMFSLLQSSTI

SEQ ID NO: 70862 - protein, 15 aa, Artificial Sequence
  Description of Artificial Sequence: Synthetic peptide
  Seed: GMDPRMCSLMQGSTL
GMDPRMFSLLQSSTL

SEQ ID NO: 70863 - protein, 15 aa, Artificial Sequence
  Description of Artificial Sequence: Synthetic peptide
  Seed: GMDPRMCSLMQGSTL
GMDPRMFSLLQSSTM

SEQ ID NO: 70864 - protein, 15 aa, Artificial Sequence
  Description of Artificial Sequence: Synthetic peptide
  Seed: GMDPRMCSLMQGSTL
GMDPRMFSLLQSSTN

SEQ ID NO: 70865 - protein, 15 aa, Artificial Sequence
  Description of Artificial Sequence: Synthetic peptide
  Seed: GMDPRMCSLMQGSTL
GMDPRMFSLLQSSTS

SEQ ID NO: 70866 - protein, 15 aa, Artificial Sequence
  Description of Artificial Sequence: Synthetic peptide
  Seed: GMDPRMCSLMQGSTL
GMDPRMFSLLQSSTT

SEQ ID NO: 70867 - protein, 15 aa, Artificial Sequence
  Description of Artificial Sequence: Synthetic peptide
  Seed: GMDPRMCSLMQGSTL
GMDPRMFSLLQSSTV

SEQ ID NO: 70868 - protein, 15 aa, Artificial Sequence
  Description of Artificial Sequence: Synthetic peptide
  Seed: GMDPRMCSLMQGSTL
GMDPRMFSLLQTSTA

SEQ ID NO: 70869 - protein, 15 aa, Artificial Sequence
  Description of Artificial Sequence: Synthetic peptide
  Seed: GMDPRMCSLMQGSTL
GMDPRMFSLLQTSTI

SEQ ID NO: 70870 - protein, 15 aa, Artificial Sequence
  Description of Artificial Sequence: Synthetic peptide
  Seed: GMDPRMCSLMQGSTL
GMDPRMFSLLQTSTL

SEQ ID NO: 70871 - protein, 15 aa, Artificial Sequence
  Description of Artificial Sequence: Synthetic peptide
  Seed: GMDPRMCSLMQGSTL
GMDPRMFSLLQTSTM

SEQ ID NO: 70872 - protein, 15 aa, Artificial Sequence
  Description of Artificial Sequence: Synthetic peptide
  Seed: GMDPRMCSLMQGSTL
GMDPRMFSLLQTSTS

SEQ ID NO: 70873 - protein, 15 aa, Artificial Sequence
  Description of Artificial Sequence: Synthetic peptide
  Seed: GMDPRMCSLMQGSTL
GMDPRMFSLLQTSTT

SEQ ID NO: 70874 - protein, 15 aa, Artificial Sequence
  Description of Artificial Sequence: Synthetic peptide
  Seed: GMDPRMCSLMQGSTL
GMDPRMFSLLQTSTV

SEQ ID NO: 70875 - protein, 15 aa, Artificial Sequence
  Description of Artificial Sequence: Synthetic peptide
  Seed: GMDPRMCSLMQGSTL
GMDPRMFSLLQVSTA

SEQ ID NO: 70876 - protein, 15 aa, Artificial Sequence
  Description of Artificial Sequence: Synthetic peptide
  Seed: GMDPRMCSLMQGSTL
GMDPRMFSLLQVSTI

SEQ ID NO: 70877 - protein, 15 aa, Artificial Sequence
  Description of Artificial Sequence: Synthetic peptide
  Seed: GMDPRMCSLMQGSTL
GMDPRMFSLLQVSTL

SEQ ID NO: 70878 - protein, 15 aa, Artificial Sequence
  Description of Artificial Sequence: Synthetic peptide
  Seed: GMDPRMCSLMQGSTL
GMDPRMFSLLQVSTM

SEQ ID NO: 70879 - protein, 15 aa, Artificial Sequence
  Description of Artificial Sequence: Synthetic peptide
  Seed: GMDPRMCSLMQGSTL
GMDPRMFSLLQVSTS

SEQ ID NO: 70880 - protein, 15 aa, Artificial Sequence
  Description of Artificial Sequence: Synthetic peptide
  Seed: GMDPRMCSLMQGSTL
GMDPRMFSLLQVSTT

SEQ ID NO: 70881 - protein, 15 aa, Artificial Sequence
  Description of Artificial Sequence: Synthetic peptide
  Seed: GMDPRMCSLMQGSTL
GMDPRMFSLLQVSTV

SEQ ID NO: 70882 - protein, 15 aa, Artificial Sequence
  Description of Artificial Sequence: Synthetic peptide
  Seed: GMDPRMCSLMQGSTL
GMDPRMFSLMQASTA

SEQ ID NO: 70883 - protein, 15 aa, Artificial Sequence
  Description of Artificial Sequence: Synthetic peptide
  Seed: GMDPRMCSLMQGSTL
GMDPRMFSLMQASTC

SEQ ID NO: 70884 - protein, 15 aa, Artificial Sequence
  Description of Artificial Sequence: Synthetic peptide
  Seed: GMDPRMCSLMQGSTL
GMDPRMFSLMQASTF

SEQ ID NO: 70885 - protein, 15 aa, Artificial Sequence
  Description of Artificial Sequence: Synthetic peptide
  Seed: GMDPRMCSLMQGSTL
GMDPRMFSLMQASTG

SEQ ID NO: 70886 - protein, 15 aa, Artificial Sequence
  Description of Artificial Sequence: Synthetic peptide
  Seed: GMDPRMCSLMQGSTL
GMDPRMFSLMQASTH

SEQ ID NO: 70887 - protein, 15 aa, Artificial Sequence
  Description of Artificial Sequence: Synthetic peptide
  Seed: GMDPRMCSLMQGSTL
GMDPRMFSLMQASTI

SEQ ID NO: 70888 - protein, 15 aa, Artificial Sequence
  Description of Artificial Sequence: Synthetic peptide
  Seed: GMDPRMCSLMQGSTL
GMDPRMFSLMQASTK

SEQ ID NO: 70889 - protein, 15 aa, Artificial Sequence
  Description of Artificial Sequence: Synthetic peptide
  Seed: GMDPRMCSLMQGSTL
GMDPRMFSLMQASTL

SEQ ID NO: 70890 - protein, 15 aa, Artificial Sequence
  Description of Artificial Sequence: Synthetic peptide
  Seed: GMDPRMCSLMQGSTL
GMDPRMFSLMQASTM

SEQ ID NO: 70891 - protein, 15 aa, Artificial Sequence
  Description of Artificial Sequence: Synthetic peptide
  Seed: GMDPRMCSLMQGSTL
GMDPRMFSLMQASTN

SEQ ID NO: 70892 - protein, 15 aa, Artificial Sequence
  Description of Artificial Sequence: Synthetic peptide
  Seed: GMDPRMCSLMQGSTL
GMDPRMFSLMQASTQ

SEQ ID NO: 70893 - protein, 15 aa, Artificial Sequence
  Description of Artificial Sequence: Synthetic peptide
  Seed: GMDPRMCSLMQGSTL
GMDPRMFSLMQASTR

SEQ ID NO: 70894 - protein, 15 aa, Artificial Sequence
  Description of Artificial Sequence: Synthetic peptide
  Seed: GMDPRMCSLMQGSTL
GMDPRMFSLMQASTS

SEQ ID NO: 70895 - protein, 15 aa, Artificial Sequence
  Description of Artificial Sequence: Synthetic peptide
  Seed: GMDPRMCSLMQGSTL
GMDPRMFSLMQASTT

SEQ ID NO: 70896 - protein, 15 aa, Artificial Sequence
  Description of Artificial Sequence: Synthetic peptide
  Seed: GMDPRMCSLMQGSTL
GMDPRMFSLMQASTV

SEQ ID NO: 70897 - protein, 15 aa, Artificial Sequence
  Description of Artificial Sequence: Synthetic peptide
  Seed: GMDPRMCSLMQGSTL
GMDPRMFSLMQASTY

SEQ ID NO: 70898 - protein, 15 aa, Artificial Sequence
  Description of Artificial Sequence: Synthetic peptide
  Seed: GMDPRMCSLMQGSTL
GMDPRMFSLMQGSTA

SEQ ID NO: 70899 - protein, 15 aa, Artificial Sequence
  Description of Artificial Sequence: Synthetic peptide
  Seed: GMDPRMCSLMQGSTL
GMDPRMFSLMQGSTC

SEQ ID NO: 70900 - protein, 15 aa, Artificial Sequence
  Description of Artificial Sequence: Synthetic peptide
  Seed: GMDPRMCSLMQGSTL
GMDPRMFSLMQGSTF

SEQ ID NO: 70901 - protein, 15 aa, Artificial Sequence
  Description of Artificial Sequence: Synthetic peptide
  Seed: GMDPRMCSLMQGSTL
GMDPRMFSLMQGSTG

SEQ ID NO: 70902 - protein, 15 aa, Artificial Sequence
  Description of Artificial Sequence: Synthetic peptide
  Seed: GMDPRMCSLMQGSTL
GMDPRMFSLMQGSTI

SEQ ID NO: 70903 - protein, 15 aa, Artificial Sequence
  Description of Artificial Sequence: Synthetic peptide
  Seed: GMDPRMCSLMQGSTL
GMDPRMFSLMQGSTL

SEQ ID NO: 70904 - protein, 15 aa, Artificial Sequence
  Description of Artificial Sequence: Synthetic peptide
  Seed: GMDPRMCSLMQGSTL
GMDPRMFSLMQGSTM

SEQ ID NO: 70905 - protein, 15 aa, Artificial Sequence
  Description of Artificial Sequence: Synthetic peptide
  Seed: GMDPRMCSLMQGSTL
GMDPRMFSLMQGSTN

SEQ ID NO: 70906 - protein, 15 aa, Artificial Sequence
  Description of Artificial Sequence: Synthetic peptide
  Seed: GMDPRMCSLMQGSTL
GMDPRMFSLMQGSTS

SEQ ID NO: 70907 - protein, 15 aa, Artificial Sequence
  Description of Artificial Sequence: Synthetic peptide
  Seed: GMDPRMCSLMQGSTL
GMDPRMFSLMQGSTT

SEQ ID NO: 70908 - protein, 15 aa, Artificial Sequence
  Description of Artificial Sequence: Synthetic peptide
  Seed: GMDPRMCSLMQGSTL
GMDPRMFSLMQGSTV

SEQ ID NO: 70909 - protein, 15 aa, Artificial Sequence
  Description of Artificial Sequence: Synthetic peptide
  Seed: GMDPRMCSLMQGSTL
GMDPRMFSLMQHSTI

SEQ ID NO: 70910 - protein, 15 aa, Artificial Sequence
  Description of Artificial Sequence: Synthetic peptide
  Seed: GMDPRMCSLMQGSTL
GMDPRMFSLMQHSTL

SEQ ID NO: 70911 - protein, 15 aa, Artificial Sequence
  Description of Artificial Sequence: Synthetic peptide
  Seed: GMDPRMCSLMQGSTL
GMDPRMFSLMQHSTV

SEQ ID NO: 70912 - protein, 15 aa, Artificial Sequence
  Description of Artificial Sequence: Synthetic peptide
  Seed: GMDPRMCSLMQGSTL
GMDPRMFSLMQISTA

SEQ ID NO: 70913 - protein, 15 aa, Artificial Sequence
  Description of Artificial Sequence: Synthetic peptide
  Seed: GMDPRMCSLMQGSTL
GMDPRMFSLMQISTV

SEQ ID NO: 70914 - protein, 15 aa, Artificial Sequence
  Description of Artificial Sequence: Synthetic peptide
  Seed: GMDPRMCSLMQGSTL
GMDPRMFSLMQNSTA

SEQ ID NO: 70915 - protein, 15 aa, Artificial Sequence
  Description of Artificial Sequence: Synthetic peptide
  Seed: GMDPRMCSLMQGSTL
GMDPRMFSLMQNSTI

SEQ ID NO: 70916 - protein, 15 aa, Artificial Sequence
  Description of Artificial Sequence: Synthetic peptide
  Seed: GMDPRMCSLMQGSTL
GMDPRMFSLMQNSTL

SEQ ID NO: 70917 - protein, 15 aa, Artificial Sequence
  Description of Artificial Sequence: Synthetic peptide
  Seed: GMDPRMCSLMQGSTL
GMDPRMFSLMQNSTM

SEQ ID NO: 70918 - protein, 15 aa, Artificial Sequence
  Description of Artificial Sequence: Synthetic peptide
  Seed: GMDPRMCSLMQGSTL
GMDPRMFSLMQNSTS

SEQ ID NO: 70919 - protein, 15 aa, Artificial Sequence
  Description of Artificial Sequence: Synthetic peptide
  Seed: GMDPRMCSLMQGSTL
GMDPRMFSLMQNSTT

SEQ ID NO: 70920 - protein, 15 aa, Artificial Sequence
  Description of Artificial Sequence: Synthetic peptide
  Seed: GMDPRMCSLMQGSTL
GMDPRMFSLMQNSTV

SEQ ID NO: 70921 - protein, 15 aa, Artificial Sequence
  Description of Artificial Sequence: Synthetic peptide
  Seed: GMDPRMCSLMQGSTL
GMDPRMFSLMQPSTA

SEQ ID NO: 70922 - protein, 15 aa, Artificial Sequence
  Description of Artificial Sequence: Synthetic peptide
  Seed: GMDPRMCSLMQGSTL
GMDPRMFSLMQPSTG

SEQ ID NO: 70923 - protein, 15 aa, Artificial Sequence
  Description of Artificial Sequence: Synthetic peptide
  Seed: GMDPRMCSLMQGSTL
GMDPRMFSLMQPSTI

SEQ ID NO: 70924 - protein, 15 aa, Artificial Sequence
  Description of Artificial Sequence: Synthetic peptide
  Seed: GMDPRMCSLMQGSTL
GMDPRMFSLMQPSTL

SEQ ID NO: 70925 - protein, 15 aa, Artificial Sequence
  Description of Artificial Sequence: Synthetic peptide
  Seed: GMDPRMCSLMQGSTL
GMDPRMFSLMQPSTM

SEQ ID NO: 70926 - protein, 15 aa, Artificial Sequence
  Description of Artificial Sequence: Synthetic peptide
  Seed: GMDPRMCSLMQGSTL
GMDPRMFSLMQPSTS

SEQ ID NO: 70927 - protein, 15 aa, Artificial Sequence
  Description of Artificial Sequence: Synthetic peptide
  Seed: GMDPRMCSLMQGSTL
GMDPRMFSLMQPSTT

SEQ ID NO: 70928 - protein, 15 aa, Artificial Sequence
  Description of Artificial Sequence: Synthetic peptide
  Seed: GMDPRMCSLMQGSTL
GMDPRMFSLMQPSTV

SEQ ID NO: 70929 - protein, 15 aa, Artificial Sequence
  Description of Artificial Sequence: Synthetic peptide
  Seed: GMDPRMCSLMQGSTL
GMDPRMFSLMQSSTA

SEQ ID NO: 70930 - protein, 15 aa, Artificial Sequence
  Description of Artificial Sequence: Synthetic peptide
  Seed: GMDPRMCSLMQGSTL
GMDPRMFSLMQSSTG

SEQ ID NO: 70931 - protein, 15 aa, Artificial Sequence
  Description of Artificial Sequence: Synthetic peptide
  Seed: GMDPRMCSLMQGSTL
GMDPRMFSLMQSSTI

SEQ ID NO: 70932 - protein, 15 aa, Artificial Sequence
  Description of Artificial Sequence: Synthetic peptide
  Seed: GMDPRMCSLMQGSTL
GMDPRMFSLMQSSTL

SEQ ID NO: 70933 - protein, 15 aa, Artificial Sequence
  Description of Artificial Sequence: Synthetic peptide
  Seed: GMDPRMCSLMQGSTL
GMDPRMFSLMQSSTM

SEQ ID NO: 70934 - protein, 15 aa, Artificial Sequence
  Description of Artificial Sequence: Synthetic peptide
  Seed: GMDPRMCSLMQGSTL
GMDPRMFSLMQSSTN

SEQ ID NO: 70935 - protein, 15 aa, Artificial Sequence
  Description of Artificial Sequence: Synthetic peptide
  Seed: GMDPRMCSLMQGSTL
GMDPRMFSLMQSSTS

SEQ ID NO: 70936 - protein, 15 aa, Artificial Sequence
  Description of Artificial Sequence: Synthetic peptide
  Seed: GMDPRMCSLMQGSTL
GMDPRMFSLMQSSTT

SEQ ID NO: 70937 - protein, 15 aa, Artificial Sequence
  Description of Artificial Sequence: Synthetic peptide
  Seed: GMDPRMCSLMQGSTL
GMDPRMFSLMQSSTV

SEQ ID NO: 70938 - protein, 15 aa, Artificial Sequence
  Description of Artificial Sequence: Synthetic peptide
  Seed: GMDPRMCSLMQGSTL
GMDPRMFSLMQTSTA

SEQ ID NO: 70939 - protein, 15 aa, Artificial Sequence
  Description of Artificial Sequence: Synthetic peptide
  Seed: GMDPRMCSLMQGSTL
GMDPRMFSLMQTSTI

SEQ ID NO: 70940 - protein, 15 aa, Artificial Sequence
  Description of Artificial Sequence: Synthetic peptide
  Seed: GMDPRMCSLMQGSTL
GMDPRMFSLMQTSTL

SEQ ID NO: 70941 - protein, 15 aa, Artificial Sequence
  Description of Artificial Sequence: Synthetic peptide
  Seed: GMDPRMCSLMQGSTL
GMDPRMFSLMQTSTM

SEQ ID NO: 70942 - protein, 15 aa, Artificial Sequence
  Description of Artificial Sequence: Synthetic peptide
  Seed: GMDPRMCSLMQGSTL
GMDPRMFSLMQTSTS

SEQ ID NO: 70943 - protein, 15 aa, Artificial Sequence
  Description of Artificial Sequence: Synthetic peptide
  Seed: GMDPRMCSLMQGSTL
GMDPRMFSLMQTSTT

SEQ ID NO: 70944 - protein, 15 aa, Artificial Sequence
  Description of Artificial Sequence: Synthetic peptide
  Seed: GMDPRMCSLMQGSTL
GMDPRMFSLMQTSTV

SEQ ID NO: 70945 - protein, 15 aa, Artificial Sequence
  Description of Artificial Sequence: Synthetic peptide
  Seed: GMDPRMCSLMQGSTL
GMDPRMFSLMQVSTA

SEQ ID NO: 70946 - protein, 15 aa, Artificial Sequence
  Description of Artificial Sequence: Synthetic peptide
  Seed: GMDPRMCSLMQGSTL
GMDPRMFSLMQVSTI

SEQ ID NO: 70947 - protein, 15 aa, Artificial Sequence
  Description of Artificial Sequence: Synthetic peptide
  Seed: GMDPRMCSLMQGSTL
GMDPRMFSLMQVSTL

SEQ ID NO: 70948 - protein, 15 aa, Artificial Sequence
  Description of Artificial Sequence: Synthetic peptide
  Seed: GMDPRMCSLMQGSTL
GMDPRMFSLMQVSTM

SEQ ID NO: 70949 - protein, 15 aa, Artificial Sequence
  Description of Artificial Sequence: Synthetic peptide
  Seed: GMDPRMCSLMQGSTL
GMDPRMFSLMQVSTS

SEQ ID NO: 70950 - protein, 15 aa, Artificial Sequence
  Description of Artificial Sequence: Synthetic peptide
  Seed: GMDPRMCSLMQGSTL
GMDPRMFSLMQVSTT

SEQ ID NO: 70951 - protein, 15 aa, Artificial Sequence
  Description of Artificial Sequence: Synthetic peptide
  Seed: GMDPRMCSLMQGSTL
GMDPRMFSLMQVSTV

SEQ ID NO: 70952 - protein, 15 aa, Artificial Sequence
  Description of Artificial Sequence: Synthetic peptide
  Seed: GMDPRMCSLMQGSTL
GMDPRMFSLNQASTL

SEQ ID NO: 70953 - protein, 15 aa, Artificial Sequence
  Description of Artificial Sequence: Synthetic peptide
  Seed: GMDPRMCSLMQGSTL
GMDPRMFSLQQASTA

SEQ ID NO: 70954 - protein, 15 aa, Artificial Sequence
  Description of Artificial Sequence: Synthetic peptide
  Seed: GMDPRMCSLMQGSTL
GMDPRMFSLQQASTI

SEQ ID NO: 70955 - protein, 15 aa, Artificial Sequence
  Description of Artificial Sequence: Synthetic peptide
  Seed: GMDPRMCSLMQGSTL
GMDPRMFSLQQASTL

SEQ ID NO: 70956 - protein, 15 aa, Artificial Sequence
  Description of Artificial Sequence: Synthetic peptide
  Seed: GMDPRMCSLMQGSTL
GMDPRMFSLQQASTM

SEQ ID NO: 70957 - protein, 15 aa, Artificial Sequence
  Description of Artificial Sequence: Synthetic peptide
  Seed: GMDPRMCSLMQGSTL
GMDPRMFSLQQASTS

SEQ ID NO: 70958 - protein, 15 aa, Artificial Sequence
  Description of Artificial Sequence: Synthetic peptide
  Seed: GMDPRMCSLMQGSTL
GMDPRMFSLQQASTT

SEQ ID NO: 70959 - protein, 15 aa, Artificial Sequence
  Description of Artificial Sequence: Synthetic peptide
  Seed: GMDPRMCSLMQGSTL
GMDPRMFSLQQASTV

SEQ ID NO: 70960 - protein, 15 aa, Artificial Sequence
  Description of Artificial Sequence: Synthetic peptide
  Seed: GMDPRMCSLMQGSTL
GMDPRMFSLQQGSTA

SEQ ID NO: 70961 - protein, 15 aa, Artificial Sequence
  Description of Artificial Sequence: Synthetic peptide
  Seed: GMDPRMCSLMQGSTL
GMDPRMFSLQQGSTI

SEQ ID NO: 70962 - protein, 15 aa, Artificial Sequence
  Description of Artificial Sequence: Synthetic peptide
  Seed: GMDPRMCSLMQGSTL
GMDPRMFSLQQGSTL

SEQ ID NO: 70963 - protein, 15 aa, Artificial Sequence
  Description of Artificial Sequence: Synthetic peptide
  Seed: GMDPRMCSLMQGSTL
GMDPRMFSLQQGSTV

SEQ ID NO: 70964 - protein, 15 aa, Artificial Sequence
  Description of Artificial Sequence: Synthetic peptide
  Seed: GMDPRMCSLMQGSTL
GMDPRMFSLQQPSTI

SEQ ID NO: 70965 - protein, 15 aa, Artificial Sequence
  Description of Artificial Sequence: Synthetic peptide
  Seed: GMDPRMCSLMQGSTL
GMDPRMFSLQQPSTL

SEQ ID NO: 70966 - protein, 15 aa, Artificial Sequence
  Description of Artificial Sequence: Synthetic peptide
  Seed: GMDPRMCSLMQGSTL
GMDPRMFSLQQPSTV

SEQ ID NO: 70967 - protein, 15 aa, Artificial Sequence
  Description of Artificial Sequence: Synthetic peptide
  Seed: GMDPRMCSLMQGSTL
GMDPRMFSLQQSSTA

SEQ ID NO: 70968 - protein, 15 aa, Artificial Sequence
  Description of Artificial Sequence: Synthetic peptide
  Seed: GMDPRMCSLMQGSTL
GMDPRMFSLQQSSTI

SEQ ID NO: 70969 - protein, 15 aa, Artificial Sequence
  Description of Artificial Sequence: Synthetic peptide
  Seed: GMDPRMCSLMQGSTL
GMDPRMFSLQQSSTL

SEQ ID NO: 70970 - protein, 15 aa, Artificial Sequence
  Description of Artificial Sequence: Synthetic peptide
  Seed: GMDPRMCSLMQGSTL
GMDPRMFSLQQSSTV

SEQ ID NO: 70971 - protein, 15 aa, Artificial Sequence
  Description of Artificial Sequence: Synthetic peptide
  Seed: GMDPRMCSLMQGSTL
GMDPRMFSLSQASTA

SEQ ID NO: 70972 - protein, 15 aa, Artificial Sequence
  Description of Artificial Sequence: Synthetic peptide
  Seed: GMDPRMCSLMQGSTL
GMDPRMFSLSQASTI

SEQ ID NO: 70973 - protein, 15 aa, Artificial Sequence
  Description of Artificial Sequence: Synthetic peptide
  Seed: GMDPRMCSLMQGSTL
GMDPRMFSLSQASTL

SEQ ID NO: 70974 - protein, 15 aa, Artificial Sequence
  Description of Artificial Sequence: Synthetic peptide
  Seed: GMDPRMCSLMQGSTL
GMDPRMFSLSQASTM

SEQ ID NO: 70975 - protein, 15 aa, Artificial Sequence
  Description of Artificial Sequence: Synthetic peptide
  Seed: GMDPRMCSLMQGSTL
GMDPRMFSLSQASTV

SEQ ID NO: 70976 - protein, 15 aa, Artificial Sequence
  Description of Artificial Sequence: Synthetic peptide
  Seed: GMDPRMCSLMQGSTL
GMDPRMFSLSQGSTI

SEQ ID NO: 70977 - protein, 15 aa, Artificial Sequence
  Description of Artificial Sequence: Synthetic peptide
  Seed: GMDPRMCSLMQGSTL
GMDPRMFSLSQGSTL

SEQ ID NO: 70978 - protein, 15 aa, Artificial Sequence
  Description of Artificial Sequence: Synthetic peptide
  Seed: GMDPRMCSLMQGSTL
GMDPRMFSLSQPSTI

SEQ ID NO: 70979 - protein, 15 aa, Artificial Sequence
  Description of Artificial Sequence: Synthetic peptide
  Seed: GMDPRMCSLMQGSTL
GMDPRMFSLSQSSTI

SEQ ID NO: 70980 - protein, 15 aa, Artificial Sequence
  Description of Artificial Sequence: Synthetic peptide
  Seed: GMDPRMCSLMQGSTL
GMDPRMFSLSQSSTL

SEQ ID NO: 70981 - protein, 15 aa, Artificial Sequence
  Description of Artificial Sequence: Synthetic peptide
  Seed: GMDPRMCSLMQGSTL
GMDPRMFSLSQSSTV

SEQ ID NO: 70982 - protein, 15 aa, Artificial Sequence
  Description of Artificial Sequence: Synthetic peptide
  Seed: GMDPRMCSLMQGSTL
GMDPRMFSLTQASTI

SEQ ID NO: 70983 - protein, 15 aa, Artificial Sequence
  Description of Artificial Sequence: Synthetic peptide
  Seed: GMDPRMCSLMQGSTL
GMDPRMFSLTQASTL

SEQ ID NO: 70984 - protein, 15 aa, Artificial Sequence
  Description of Artificial Sequence: Synthetic peptide
  Seed: GMDPRMCSLMQGSTL
GMDPRMFSLTQASTV

SEQ ID NO: 70985 - protein, 15 aa, Artificial Sequence
  Description of Artificial Sequence: Synthetic peptide
  Seed: GMDPRMCSLMQGSTL
GMDPRMFSLTQGSTI

SEQ ID NO: 70986 - protein, 15 aa, Artificial Sequence
  Description of Artificial Sequence: Synthetic peptide
  Seed: GMDPRMCSLMQGSTL
GMDPRMFSLTQSSTI

SEQ ID NO: 70987 - protein, 15 aa, Artificial Sequence
  Description of Artificial Sequence: Synthetic peptide
  Seed: GMDPRMCSLMQGSTL
GMDPRMFSLTQSSTL

SEQ ID NO: 70988 - protein, 15 aa, Artificial Sequence
  Description of Artificial Sequence: Synthetic peptide
  Seed: GMDPRMCSLMQGSTL
GMDPRMFSLTQSSTV

SEQ ID NO: 70989 - protein, 15 aa, Artificial Sequence
  Description of Artificial Sequence: Synthetic peptide
  Seed: GMDPRMCSLMQGSTL
GMDPRMFSLVQASTA

SEQ ID NO: 70990 - protein, 15 aa, Artificial Sequence
  Description of Artificial Sequence: Synthetic peptide
  Seed: GMDPRMCSLMQGSTL
GMDPRMFSLVQASTI

SEQ ID NO: 70991 - protein, 15 aa, Artificial Sequence
  Description of Artificial Sequence: Synthetic peptide
  Seed: GMDPRMCSLMQGSTL
GMDPRMFSLVQASTL

SEQ ID NO: 70992 - protein, 15 aa, Artificial Sequence
  Description of Artificial Sequence: Synthetic peptide
  Seed: GMDPRMCSLMQGSTL
GMDPRMFSLVQASTM

SEQ ID NO: 70993 - protein, 15 aa, Artificial Sequence
  Description of Artificial Sequence: Synthetic peptide
  Seed: GMDPRMCSLMQGSTL
GMDPRMFSLVQASTS

SEQ ID NO: 70994 - protein, 15 aa, Artificial Sequence
  Description of Artificial Sequence: Synthetic peptide
  Seed: GMDPRMCSLMQGSTL
GMDPRMFSLVQASTT

SEQ ID NO: 70995 - protein, 15 aa, Artificial Sequence
  Description of Artificial Sequence: Synthetic peptide
  Seed: GMDPRMCSLMQGSTL
GMDPRMFSLVQASTV

SEQ ID NO: 70996 - protein, 15 aa, Artificial Sequence
  Description of Artificial Sequence: Synthetic peptide
  Seed: GMDPRMCSLMQGSTL
GMDPRMFSLVQGSTA

SEQ ID NO: 70997 - protein, 15 aa, Artificial Sequence
  Description of Artificial Sequence: Synthetic peptide
  Seed: GMDPRMCSLMQGSTL
GMDPRMFSLVQGSTI

SEQ ID NO: 70998 - protein, 15 aa, Artificial Sequence
  Description of Artificial Sequence: Synthetic peptide
  Seed: GMDPRMCSLMQGSTL
GMDPRMFSLVQGSTL

SEQ ID NO: 70999 - protein, 15 aa, Artificial Sequence
  Description of Artificial Sequence: Synthetic peptide
  Seed: GMDPRMCSLMQGSTL
GMDPRMFSLVQGSTM

SEQ ID NO: 71000 - protein, 15 aa, Artificial Sequence
  Description of Artificial Sequence: Synthetic peptide
  Seed: GMDPRMCSLMQGSTL
GMDPRMFSLVQGSTT

SEQ ID NO: 71001 - protein, 15 aa, Artificial Sequence
  Description of Artificial Sequence: Synthetic peptide
  Seed: GMDPRMCSLMQGSTL
GMDPRMFSLVQGSTV

SEQ ID NO: 71002 - protein, 15 aa, Artificial Sequence
  Description of Artificial Sequence: Synthetic peptide
  Seed: GMDPRMCSLMQGSTL
GMDPRMFSLVQPSTA

SEQ ID NO: 71003 - protein, 15 aa, Artificial Sequence
  Description of Artificial Sequence: Synthetic peptide
  Seed: GMDPRMCSLMQGSTL
GMDPRMFSLVQPSTI

SEQ ID NO: 71004 - protein, 15 aa, Artificial Sequence
  Description of Artificial Sequence: Synthetic peptide
  Seed: GMDPRMCSLMQGSTL
GMDPRMFSLVQPSTL

SEQ ID NO: 71005 - protein, 15 aa, Artificial Sequence
  Description of Artificial Sequence: Synthetic peptide
  Seed: GMDPRMCSLMQGSTL
GMDPRMFSLVQPSTV

SEQ ID NO: 71006 - protein, 15 aa, Artificial Sequence
  Description of Artificial Sequence: Synthetic peptide
  Seed: GMDPRMCSLMQGSTL
GMDPRMFSLVQSSTA

SEQ ID NO: 71007 - protein, 15 aa, Artificial Sequence
  Description of Artificial Sequence: Synthetic peptide
  Seed: GMDPRMCSLMQGSTL
GMDPRMFSLVQSSTI

SEQ ID NO: 71008 - protein, 15 aa, Artificial Sequence
  Description of Artificial Sequence: Synthetic peptide
  Seed: GMDPRMCSLMQGSTL
GMDPRMFSLVQSSTL

SEQ ID NO: 71009 - protein, 15 aa, Artificial Sequence
  Description of Artificial Sequence: Synthetic peptide
  Seed: GMDPRMCSLMQGSTL
GMDPRMFSLVQSSTV

SEQ ID NO: 71010 - protein, 15 aa, Artificial Sequence
  Description of Artificial Sequence: Synthetic peptide
  Seed: GMDPRMCSLMQGSTL
GMDPRMISLAQASTL

SEQ ID NO: 71011 - protein, 15 aa, Artificial Sequence
  Description of Artificial Sequence: Synthetic peptide
  Seed: GMDPRMCSLMQGSTL
GMDPRMISLIQASTI

SEQ ID NO: 71012 - protein, 15 aa, Artificial Sequence
  Description of Artificial Sequence: Synthetic peptide
  Seed: GMDPRMCSLMQGSTL
GMDPRMISLIQASTL

SEQ ID NO: 71013 - protein, 15 aa, Artificial Sequence
  Description of Artificial Sequence: Synthetic peptide
  Seed: GMDPRMCSLMQGSTL
GMDPRMISLIQASTV

SEQ ID NO: 71014 - protein, 15 aa, Artificial Sequence
  Description of Artificial Sequence: Synthetic peptide
  Seed: GMDPRMCSLMQGSTL
GMDPRMISLLQASTA

SEQ ID NO: 71015 - protein, 15 aa, Artificial Sequence
  Description of Artificial Sequence: Synthetic peptide
  Seed: GMDPRMCSLMQGSTL
GMDPRMISLLQASTI

SEQ ID NO: 71016 - protein, 15 aa, Artificial Sequence
  Description of Artificial Sequence: Synthetic peptide
  Seed: GMDPRMCSLMQGSTL
GMDPRMISLLQASTL

SEQ ID NO: 71017 - protein, 15 aa, Artificial Sequence
  Description of Artificial Sequence: Synthetic peptide
  Seed: GMDPRMCSLMQGSTL
GMDPRMISLLQASTM

SEQ ID NO: 71018 - protein, 15 aa, Artificial Sequence
  Description of Artificial Sequence: Synthetic peptide
  Seed: GMDPRMCSLMQGSTL
GMDPRMISLLQASTS

SEQ ID NO: 71019 - protein, 15 aa, Artificial Sequence
  Description of Artificial Sequence: Synthetic peptide
  Seed: GMDPRMCSLMQGSTL
GMDPRMISLLQASTT

SEQ ID NO: 71020 - protein, 15 aa, Artificial Sequence
  Description of Artificial Sequence: Synthetic peptide
  Seed: GMDPRMCSLMQGSTL
GMDPRMISLLQASTV

SEQ ID NO: 71021 - protein, 15 aa, Artificial Sequence
  Description of Artificial Sequence: Synthetic peptide
  Seed: GMDPRMCSLMQGSTL
GMDPRMISLLQGSTA

SEQ ID NO: 71022 - protein, 15 aa, Artificial Sequence
  Description of Artificial Sequence: Synthetic peptide
  Seed: GMDPRMCSLMQGSTL
GMDPRMISLLQGSTI

SEQ ID NO: 71023 - protein, 15 aa, Artificial Sequence
  Description of Artificial Sequence: Synthetic peptide
  Seed: GMDPRMCSLMQGSTL
GMDPRMISLLQGSTL

SEQ ID NO: 71024 - protein, 15 aa, Artificial Sequence
  Description of Artificial Sequence: Synthetic peptide
  Seed: GMDPRMCSLMQGSTL
GMDPRMISLLQGSTM

SEQ ID NO: 71025 - protein, 15 aa, Artificial Sequence
  Description of Artificial Sequence: Synthetic peptide
  Seed: GMDPRMCSLMQGSTL
GMDPRMISLLQGSTS

SEQ ID NO: 71026 - protein, 15 aa, Artificial Sequence
  Description of Artificial Sequence: Synthetic peptide
  Seed: GMDPRMCSLMQGSTL
GMDPRMISLLQGSTT

SEQ ID NO: 71027 - protein, 15 aa, Artificial Sequence
  Description of Artificial Sequence: Synthetic peptide
  Seed: GMDPRMCSLMQGSTL
GMDPRMISLLQGSTV

SEQ ID NO: 71028 - protein, 15 aa, Artificial Sequence
  Description of Artificial Sequence: Synthetic peptide
  Seed: GMDPRMCSLMQGSTL
GMDPRMISLLQPSTA

SEQ ID NO: 71029 - protein, 15 aa, Artificial Sequence
  Description of Artificial Sequence: Synthetic peptide
  Seed: GMDPRMCSLMQGSTL
GMDPRMISLLQPSTI

SEQ ID NO: 71030 - protein, 15 aa, Artificial Sequence
  Description of Artificial Sequence: Synthetic peptide
  Seed: GMDPRMCSLMQGSTL
GMDPRMISLLQPSTL

SEQ ID NO: 71031 - protein, 15 aa, Artificial Sequence
  Description of Artificial Sequence: Synthetic peptide
  Seed: GMDPRMCSLMQGSTL
GMDPRMISLLQPSTV

SEQ ID NO: 71032 - protein, 15 aa, Artificial Sequence
  Description of Artificial Sequence: Synthetic peptide
  Seed: GMDPRMCSLMQGSTL
GMDPRMISLLQSSTA

SEQ ID NO: 71033 - protein, 15 aa, Artificial Sequence
  Description of Artificial Sequence: Synthetic peptide
  Seed: GMDPRMCSLMQGSTL
GMDPRMISLLQSSTI

SEQ ID NO: 71034 - protein, 15 aa, Artificial Sequence
  Description of Artificial Sequence: Synthetic peptide
  Seed: GMDPRMCSLMQGSTL
GMDPRMISLLQSSTL

SEQ ID NO: 71035 - protein, 15 aa, Artificial Sequence
  Description of Artificial Sequence: Synthetic peptide
  Seed: GMDPRMCSLMQGSTL
GMDPRMISLLQSSTV

SEQ ID NO: 71036 - protein, 15 aa, Artificial Sequence
  Description of Artificial Sequence: Synthetic peptide
  Seed: GMDPRMCSLMQGSTL
GMDPRMISLMQASTA

SEQ ID NO: 71037 - protein, 15 aa, Artificial Sequence
  Description of Artificial Sequence: Synthetic peptide
  Seed: GMDPRMCSLMQGSTL
GMDPRMISLMQASTI

SEQ ID NO: 71038 - protein, 15 aa, Artificial Sequence
  Description of Artificial Sequence: Synthetic peptide
  Seed: GMDPRMCSLMQGSTL
GMDPRMISLMQASTL

SEQ ID NO: 71039 - protein, 15 aa, Artificial Sequence
  Description of Artificial Sequence: Synthetic peptide
  Seed: GMDPRMCSLMQGSTL
GMDPRMISLMQASTM

SEQ ID NO: 71040 - protein, 15 aa, Artificial Sequence
  Description of Artificial Sequence: Synthetic peptide
  Seed: GMDPRMCSLMQGSTL
GMDPRMISLMQASTS

SEQ ID NO: 71041 - protein, 15 aa, Artificial Sequence
  Description of Artificial Sequence: Synthetic peptide
  Seed: GMDPRMCSLMQGSTL
GMDPRMISLMQASTT

SEQ ID NO: 71042 - protein, 15 aa, Artificial Sequence
  Description of Artificial Sequence: Synthetic peptide
  Seed: GMDPRMCSLMQGSTL
GMDPRMISLMQASTV

SEQ ID NO: 71043 - protein, 15 aa, Artificial Sequence
  Description of Artificial Sequence: Synthetic peptide
  Seed: GMDPRMCSLMQGSTL
GMDPRMISLMQGSTA

SEQ ID NO: 71044 - protein, 15 aa, Artificial Sequence
  Description of Artificial Sequence: Synthetic peptide
  Seed: GMDPRMCSLMQGSTL
GMDPRMISLMQGSTI

SEQ ID NO: 71045 - protein, 15 aa, Artificial Sequence
  Description of Artificial Sequence: Synthetic peptide
  Seed: GMDPRMCSLMQGSTL
GMDPRMISLMQGSTL

SEQ ID NO: 71046 - protein, 15 aa, Artificial Sequence
  Description of Artificial Sequence: Synthetic peptide
  Seed: GMDPRMCSLMQGSTL
GMDPRMISLMQGSTM

SEQ ID NO: 71047 - protein, 15 aa, Artificial Sequence
  Description of Artificial Sequence: Synthetic peptide
  Seed: GMDPRMCSLMQGSTL
GMDPRMISLMQGSTT

SEQ ID NO: 71048 - protein, 15 aa, Artificial Sequence
  Description of Artificial Sequence: Synthetic peptide
  Seed: GMDPRMCSLMQGSTL
GMDPRMISLMQGSTV

SEQ ID NO: 71049 - protein, 15 aa, Artificial Sequence
  Description of Artificial Sequence: Synthetic peptide
  Seed: GMDPRMCSLMQGSTL
GMDPRMISLMQPSTA

SEQ ID NO: 71050 - protein, 15 aa, Artificial Sequence
  Description of Artificial Sequence: Synthetic peptide
  Seed: GMDPRMCSLMQGSTL
GMDPRMISLMQPSTI

SEQ ID NO: 71051 - protein, 15 aa, Artificial Sequence
  Description of Artificial Sequence: Synthetic peptide
  Seed: GMDPRMCSLMQGSTL
GMDPRMISLMQPSTL

SEQ ID NO: 71052 - protein, 15 aa, Artificial Sequence
  Description of Artificial Sequence: Synthetic peptide
  Seed: GMDPRMCSLMQGSTL
GMDPRMISLMQPSTV

SEQ ID NO: 71053 - protein, 15 aa, Artificial Sequence
  Description of Artificial Sequence: Synthetic peptide
  Seed: GMDPRMCSLMQGSTL
GMDPRMISLMQSSTA

SEQ ID NO: 71054 - protein, 15 aa, Artificial Sequence
  Description of Artificial Sequence: Synthetic peptide
  Seed: GMDPRMCSLMQGSTL
GMDPRMISLMQSSTI

SEQ ID NO: 71055 - protein, 15 aa, Artificial Sequence
  Description of Artificial Sequence: Synthetic peptide
  Seed: GMDPRMCSLMQGSTL
GMDPRMISLMQSSTL

SEQ ID NO: 71056 - protein, 15 aa, Artificial Sequence
  Description of Artificial Sequence: Synthetic peptide
  Seed: GMDPRMCSLMQGSTL
GMDPRMISLMQSSTV

SEQ ID NO: 71057 - protein, 15 aa, Artificial Sequence
  Description of Artificial Sequence: Synthetic peptide
  Seed: GMDPRMCSLMQGSTL
GMDPRMLSLIQASTL

SEQ ID NO: 71058 - protein, 15 aa, Artificial Sequence
  Description of Artificial Sequence: Synthetic peptide
  Seed: GMDPRMCSLMQGSTL
GMDPRMLSLIQASTV

SEQ ID NO: 71059 - protein, 15 aa, Artificial Sequence
  Description of Artificial Sequence: Synthetic peptide
  Seed: GMDPRMCSLMQGSTL
GMDPRMLSLLQASTA

SEQ ID NO: 71060 - protein, 15 aa, Artificial Sequence
  Description of Artificial Sequence: Synthetic peptide
  Seed: GMDPRMCSLMQGSTL
GMDPRMLSLLQASTI

SEQ ID NO: 71061 - protein, 15 aa, Artificial Sequence
  Description of Artificial Sequence: Synthetic peptide
  Seed: GMDPRMCSLMQGSTL
GMDPRMLSLLQASTL

SEQ ID NO: 71062 - protein, 15 aa, Artificial Sequence
  Description of Artificial Sequence: Synthetic peptide
  Seed: GMDPRMCSLMQGSTL
GMDPRMLSLLQASTM

SEQ ID NO: 71063 - protein, 15 aa, Artificial Sequence
  Description of Artificial Sequence: Synthetic peptide
  Seed: GMDPRMCSLMQGSTL
GMDPRMLSLLQASTS

SEQ ID NO: 71064 - protein, 15 aa, Artificial Sequence
  Description of Artificial Sequence: Synthetic peptide
  Seed: GMDPRMCSLMQGSTL
GMDPRMLSLLQASTT

SEQ ID NO: 71065 - protein, 15 aa, Artificial Sequence
  Description of Artificial Sequence: Synthetic peptide
  Seed: GMDPRMCSLMQGSTL
GMDPRMLSLLQASTV

SEQ ID NO: 71066 - protein, 15 aa, Artificial Sequence
  Description of Artificial Sequence: Synthetic peptide
  Seed: GMDPRMCSLMQGSTL
GMDPRMLSLLQGSTA

SEQ ID NO: 71067 - protein, 15 aa, Artificial Sequence
  Description of Artificial Sequence: Synthetic peptide
  Seed: GMDPRMCSLMQGSTL
GMDPRMLSLLQGSTI

SEQ ID NO: 71068 - protein, 15 aa, Artificial Sequence
  Description of Artificial Sequence: Synthetic peptide
  Seed: GMDPRMCSLMQGSTL
GMDPRMLSLLQGSTL

SEQ ID NO: 71069 - protein, 15 aa, Artificial Sequence
  Description of Artificial Sequence: Synthetic peptide
  Seed: GMDPRMCSLMQGSTL
GMDPRMLSLLQGSTT

SEQ ID NO: 71070 - protein, 15 aa, Artificial Sequence
  Description of Artificial Sequence: Synthetic peptide
  Seed: GMDPRMCSLMQGSTL
GMDPRMLSLLQGSTV

SEQ ID NO: 71071 - protein, 15 aa, Artificial Sequence
  Description of Artificial Sequence: Synthetic peptide
  Seed: GMDPRMCSLMQGSTL
GMDPRMLSLLQPSTI

SEQ ID NO: 71072 - protein, 15 aa, Artificial Sequence
  Description of Artificial Sequence: Synthetic peptide
  Seed: GMDPRMCSLMQGSTL
GMDPRMLSLLQPSTL

SEQ ID NO: 71073 - protein, 15 aa, Artificial Sequence
  Description of Artificial Sequence: Synthetic peptide
  Seed: GMDPRMCSLMQGSTL
GMDPRMLSLLQPSTV

SEQ ID NO: 71074 - protein, 15 aa, Artificial Sequence
  Description of Artificial Sequence: Synthetic peptide
  Seed: GMDPRMCSLMQGSTL
GMDPRMLSLLQSSTA

SEQ ID NO: 71075 - protein, 15 aa, Artificial Sequence
  Description of Artificial Sequence: Synthetic peptide
  Seed: GMDPRMCSLMQGSTL
GMDPRMLSLLQSSTI

SEQ ID NO: 71076 - protein, 15 aa, Artificial Sequence
  Description of Artificial Sequence: Synthetic peptide
  Seed: GMDPRMCSLMQGSTL
GMDPRMLSLLQSSTL

SEQ ID NO: 71077 - protein, 15 aa, Artificial Sequence
  Description of Artificial Sequence: Synthetic peptide
  Seed: GMDPRMCSLMQGSTL
GMDPRMLSLLQSSTV

SEQ ID NO: 71078 - protein, 15 aa, Artificial Sequence
  Description of Artificial Sequence: Synthetic peptide
  Seed: GMDPRMCSLMQGSTL
GMDPRMLSLMQASTA

SEQ ID NO: 71079 - protein, 15 aa, Artificial Sequence
  Description of Artificial Sequence: Synthetic peptide
  Seed: GMDPRMCSLMQGSTL
GMDPRMLSLMQASTI

SEQ ID NO: 71080 - protein, 15 aa, Artificial Sequence
  Description of Artificial Sequence: Synthetic peptide
  Seed: GMDPRMCSLMQGSTL
GMDPRMLSLMQASTL

SEQ ID NO: 71081 - protein, 15 aa, Artificial Sequence
  Description of Artificial Sequence: Synthetic peptide
  Seed: GMDPRMCSLMQGSTL
GMDPRMLSLMQASTM

SEQ ID NO: 71082 - protein, 15 aa, Artificial Sequence
  Description of Artificial Sequence: Synthetic peptide
  Seed: GMDPRMCSLMQGSTL
GMDPRMLSLMQASTS

SEQ ID NO: 71083 - protein, 15 aa, Artificial Sequence
  Description of Artificial Sequence: Synthetic peptide
  Seed: GMDPRMCSLMQGSTL
GMDPRMLSLMQASTT

SEQ ID NO: 71084 - protein, 15 aa, Artificial Sequence
  Description of Artificial Sequence: Synthetic peptide
  Seed: GMDPRMCSLMQGSTL
GMDPRMLSLMQASTV

SEQ ID NO: 71085 - protein, 15 aa, Artificial Sequence
  Description of Artificial Sequence: Synthetic peptide
  Seed: GMDPRMCSLMQGSTL
GMDPRMLSLMQGSTA

SEQ ID NO: 71086 - protein, 15 aa, Artificial Sequence
  Description of Artificial Sequence: Synthetic peptide
  Seed: GMDPRMCSLMQGSTL
GMDPRMLSLMQGSTI

SEQ ID NO: 71087 - protein, 15 aa, Artificial Sequence
  Description of Artificial Sequence: Synthetic peptide
  Seed: GMDPRMCSLMQGSTL
GMDPRMLSLMQGSTL

SEQ ID NO: 71088 - protein, 15 aa, Artificial Sequence
  Description of Artificial Sequence: Synthetic peptide
  Seed: GMDPRMCSLMQGSTL
GMDPRMLSLMQGSTV

SEQ ID NO: 71089 - protein, 15 aa, Artificial Sequence
  Description of Artificial Sequence: Synthetic peptide
  Seed: GMDPRMCSLMQGSTL
GMDPRMLSLMQPSTI

SEQ ID NO: 71090 - protein, 15 aa, Artificial Sequence
  Description of Artificial Sequence: Synthetic peptide
  Seed: GMDPRMCSLMQGSTL
GMDPRMLSLMQPSTL

SEQ ID NO: 71091 - protein, 15 aa, Artificial Sequence
  Description of Artificial Sequence: Synthetic peptide
  Seed: GMDPRMCSLMQGSTL
GMDPRMLSLMQPSTV

SEQ ID NO: 71092 - protein, 15 aa, Artificial Sequence
  Description of Artificial Sequence: Synthetic peptide
  Seed: GMDPRMCSLMQGSTL
GMDPRMLSLMQSSTA

SEQ ID NO: 71093 - protein, 15 aa, Artificial Sequence
  Description of Artificial Sequence: Synthetic peptide
  Seed: GMDPRMCSLMQGSTL
GMDPRMLSLMQSSTI

SEQ ID NO: 71094 - protein, 15 aa, Artificial Sequence
  Description of Artificial Sequence: Synthetic peptide
  Seed: GMDPRMCSLMQGSTL
GMDPRMLSLMQSSTL

SEQ ID NO: 71095 - protein, 15 aa, Artificial Sequence
  Description of Artificial Sequence: Synthetic peptide
  Seed: GMDPRMCSLMQGSTL
GMDPRMLSLMQSSTV

SEQ ID NO: 71096 - protein, 15 aa, Artificial Sequence
  Description of Artificial Sequence: Synthetic peptide
  Seed: GMDPRMCSLMQGSTL
GMDPRMMSLLQASTA

SEQ ID NO: 71097 - protein, 15 aa, Artificial Sequence
  Description of Artificial Sequence: Synthetic peptide
  Seed: GMDPRMCSLMQGSTL
GMDPRMMSLLQASTI

SEQ ID NO: 71098 - protein, 15 aa, Artificial Sequence
  Description of Artificial Sequence: Synthetic peptide
  Seed: GMDPRMCSLMQGSTL
GMDPRMMSLLQASTL

SEQ ID NO: 71099 - protein, 15 aa, Artificial Sequence
  Description of Artificial Sequence: Synthetic peptide
  Seed: GMDPRMCSLMQGSTL
GMDPRMMSLLQASTV

SEQ ID NO: 71100 - protein, 15 aa, Artificial Sequence
  Description of Artificial Sequence: Synthetic peptide
  Seed: GMDPRMCSLMQGSTL
GMDPRMMSLLQGSTL

SEQ ID NO: 71101 - protein, 15 aa, Artificial Sequence
  Description of Artificial Sequence: Synthetic peptide
  Seed: GMDPRMCSLMQGSTL
GMDPRMMSLLQGSTV

SEQ ID NO: 71102 - protein, 15 aa, Artificial Sequence
  Description of Artificial Sequence: Synthetic peptide
  Seed: GMDPRMCSLMQGSTL
GMDPRMMSLMQASTA

SEQ ID NO: 71103 - protein, 15 aa, Artificial Sequence
  Description of Artificial Sequence: Synthetic peptide
  Seed: GMDPRMCSLMQGSTL
GMDPRMMSLMQASTI

SEQ ID NO: 71104 - protein, 15 aa, Artificial Sequence
  Description of Artificial Sequence: Synthetic peptide
  Seed: GMDPRMCSLMQGSTL
GMDPRMMSLMQASTL

SEQ ID NO: 71105 - protein, 15 aa, Artificial Sequence
  Description of Artificial Sequence: Synthetic peptide
  Seed: GMDPRMCSLMQGSTL
GMDPRMMSLMQASTV

SEQ ID NO: 71106 - protein, 15 aa, Artificial Sequence
  Description of Artificial Sequence: Synthetic peptide
  Seed: GMDPRMCSLMQGSTL
GMDPRMMSLMQGSTL

SEQ ID NO: 71107 - protein, 15 aa, Artificial Sequence
  Description of Artificial Sequence: Synthetic peptide
  Seed: GMDPRMCSLMQGSTL
GMDPRMMSLMQGSTV

SEQ ID NO: 71108 - protein, 15 aa, Artificial Sequence
  Description of Artificial Sequence: Synthetic peptide
  Seed: GMDPRMCSLMQGSTL
GMDPRMVSLLQASTA

SEQ ID NO: 71109 - protein, 15 aa, Artificial Sequence
  Description of Artificial Sequence: Synthetic peptide
  Seed: GMDPRMCSLMQGSTL
GMDPRMVSLLQASTI

SEQ ID NO: 71110 - protein, 15 aa, Artificial Sequence
  Description of Artificial Sequence: Synthetic peptide
  Seed: GMDPRMCSLMQGSTL
GMDPRMVSLLQASTL

SEQ ID NO: 71111 - protein, 15 aa, Artificial Sequence
  Description of Artificial Sequence: Synthetic peptide
  Seed: GMDPRMCSLMQGSTL
GMDPRMVSLLQASTV

SEQ ID NO: 71112 - protein, 15 aa, Artificial Sequence
  Description of Artificial Sequence: Synthetic peptide
  Seed: GMDPRMCSLMQGSTL
GMDPRMVSLLQGSTI

SEQ ID NO: 71113 - protein, 15 aa, Artificial Sequence
  Description of Artificial Sequence: Synthetic peptide
  Seed: GMDPRMCSLMQGSTL
GMDPRMVSLLQGSTL

SEQ ID NO: 71114 - protein, 15 aa, Artificial Sequence
  Description of Artificial Sequence: Synthetic peptide
  Seed: GMDPRMCSLMQGSTL
GMDPRMVSLLQGSTV

SEQ ID NO: 71115 - protein, 15 aa, Artificial Sequence
  Description of Artificial Sequence: Synthetic peptide
  Seed: GMDPRMCSLMQGSTL
GMDPRMVSLMQASTA

SEQ ID NO: 71116 - protein, 15 aa, Artificial Sequence
  Description of Artificial Sequence: Synthetic peptide
  Seed: GMDPRMCSLMQGSTL
GMDPRMVSLMQASTI

SEQ ID NO: 71117 - protein, 15 aa, Artificial Sequence
  Description of Artificial Sequence: Synthetic peptide
  Seed: GMDPRMCSLMQGSTL
GMDPRMVSLMQASTL

SEQ ID NO: 71118 - protein, 15 aa, Artificial Sequence
  Description of Artificial Sequence: Synthetic peptide
  Seed: GMDPRMCSLMQGSTL
GMDPRMVSLMQASTV

SEQ ID NO: 71119 - protein, 15 aa, Artificial Sequence
  Description of Artificial Sequence: Synthetic peptide
  Seed: GMDPRMCSLMQGSTL
GMDPRMVSLMQGSTL

SEQ ID NO: 71120 - protein, 15 aa, Artificial Sequence
  Description of Artificial Sequence: Synthetic peptide
  Seed: GMDPRMCSLMQGSTL
GMDPRMVSLMQGSTV

SEQ ID NO: 71121 - protein, 15 aa, Artificial Sequence
  Description of Artificial Sequence: Synthetic peptide
  Seed: GMDPRMCSLMQGSTL
GMDPRMWSLAQASTI

SEQ ID NO: 71122 - protein, 15 aa, Artificial Sequence
  Description of Artificial Sequence: Synthetic peptide
  Seed: GMDPRMCSLMQGSTL
GMDPRMWSLAQASTL

SEQ ID NO: 71123 - protein, 15 aa, Artificial Sequence
  Description of Artificial Sequence: Synthetic peptide
  Seed: GMDPRMCSLMQGSTL
GMDPRMWSLAQASTV

SEQ ID NO: 71124 - protein, 15 aa, Artificial Sequence
  Description of Artificial Sequence: Synthetic peptide
  Seed: GMDPRMCSLMQGSTL
GMDPRMWSLAQSSTI

SEQ ID NO: 71125 - protein, 15 aa, Artificial Sequence
  Description of Artificial Sequence: Synthetic peptide
  Seed: GMDPRMCSLMQGSTL
GMDPRMWSLIQASTA

SEQ ID NO: 71126 - protein, 15 aa, Artificial Sequence
  Description of Artificial Sequence: Synthetic peptide
  Seed: GMDPRMCSLMQGSTL
GMDPRMWSLIQASTI

SEQ ID NO: 71127 - protein, 15 aa, Artificial Sequence
  Description of Artificial Sequence: Synthetic peptide
  Seed: GMDPRMCSLMQGSTL
GMDPRMWSLIQASTL

SEQ ID NO: 71128 - protein, 15 aa, Artificial Sequence
  Description of Artificial Sequence: Synthetic peptide
  Seed: GMDPRMCSLMQGSTL
GMDPRMWSLIQASTV

SEQ ID NO: 71129 - protein, 15 aa, Artificial Sequence
  Description of Artificial Sequence: Synthetic peptide
  Seed: GMDPRMCSLMQGSTL
GMDPRMWSLIQGSTA

SEQ ID NO: 71130 - protein, 15 aa, Artificial Sequence
  Description of Artificial Sequence: Synthetic peptide
  Seed: GMDPRMCSLMQGSTL
GMDPRMWSLIQGSTI

SEQ ID NO: 71131 - protein, 15 aa, Artificial Sequence
  Description of Artificial Sequence: Synthetic peptide
  Seed: GMDPRMCSLMQGSTL
GMDPRMWSLIQGSTL

SEQ ID NO: 71132 - protein, 15 aa, Artificial Sequence
  Description of Artificial Sequence: Synthetic peptide
  Seed: GMDPRMCSLMQGSTL
GMDPRMWSLIQGSTV

SEQ ID NO: 71133 - protein, 15 aa, Artificial Sequence
  Description of Artificial Sequence: Synthetic peptide
  Seed: GMDPRMCSLMQGSTL
GMDPRMWSLIQSSTV

SEQ ID NO: 71134 - protein, 15 aa, Artificial Sequence
  Description of Artificial Sequence: Synthetic peptide
  Seed: GMDPRMCSLMQGSTL
GMDPRMWSLLQASTA

SEQ ID NO: 71135 - protein, 15 aa, Artificial Sequence
  Description of Artificial Sequence: Synthetic peptide
  Seed: GMDPRMCSLMQGSTL
GMDPRMWSLLQASTI

SEQ ID NO: 71136 - protein, 15 aa, Artificial Sequence
  Description of Artificial Sequence: Synthetic peptide
  Seed: GMDPRMCSLMQGSTL
GMDPRMWSLLQASTL

SEQ ID NO: 71137 - protein, 15 aa, Artificial Sequence
  Description of Artificial Sequence: Synthetic peptide
  Seed: GMDPRMCSLMQGSTL
GMDPRMWSLLQASTM

SEQ ID NO: 71138 - protein, 15 aa, Artificial Sequence
  Description of Artificial Sequence: Synthetic peptide
  Seed: GMDPRMCSLMQGSTL
GMDPRMWSLLQASTS

SEQ ID NO: 71139 - protein, 15 aa, Artificial Sequence
  Description of Artificial Sequence: Synthetic peptide
  Seed: GMDPRMCSLMQGSTL
GMDPRMWSLLQASTT

SEQ ID NO: 71140 - protein, 15 aa, Artificial Sequence
  Description of Artificial Sequence: Synthetic peptide
  Seed: GMDPRMCSLMQGSTL
GMDPRMWSLLQASTV

SEQ ID NO: 71141 - protein, 15 aa, Artificial Sequence
  Description of Artificial Sequence: Synthetic peptide
  Seed: GMDPRMCSLMQGSTL
GMDPRMWSLLQGSTA

SEQ ID NO: 71142 - protein, 15 aa, Artificial Sequence
  Description of Artificial Sequence: Synthetic peptide
  Seed: GMDPRMCSLMQGSTL
GMDPRMWSLLQGSTI

SEQ ID NO: 71143 - protein, 15 aa, Artificial Sequence
  Description of Artificial Sequence: Synthetic peptide
  Seed: GMDPRMCSLMQGSTL
GMDPRMWSLLQGSTL

SEQ ID NO: 71144 - protein, 15 aa, Artificial Sequence
  Description of Artificial Sequence: Synthetic peptide
  Seed: GMDPRMCSLMQGSTL
GMDPRMWSLLQGSTM

SEQ ID NO: 71145 - protein, 15 aa, Artificial Sequence
  Description of Artificial Sequence: Synthetic peptide
  Seed: GMDPRMCSLMQGSTL
GMDPRMWSLLQGSTS

SEQ ID NO: 71146 - protein, 15 aa, Artificial Sequence
  Description of Artificial Sequence: Synthetic peptide
  Seed: GMDPRMCSLMQGSTL
GMDPRMWSLLQGSTT

SEQ ID NO: 71147 - protein, 15 aa, Artificial Sequence
  Description of Artificial Sequence: Synthetic peptide
  Seed: GMDPRMCSLMQGSTL
GMDPRMWSLLQGSTV

SEQ ID NO: 71148 - protein, 15 aa, Artificial Sequence
  Description of Artificial Sequence: Synthetic peptide
  Seed: GMDPRMCSLMQGSTL
GMDPRMWSLLQNSTL

SEQ ID NO: 71149 - protein, 15 aa, Artificial Sequence
  Description of Artificial Sequence: Synthetic peptide
  Seed: GMDPRMCSLMQGSTL
GMDPRMWSLLQNSTV

SEQ ID NO: 71150 - protein, 15 aa, Artificial Sequence
  Description of Artificial Sequence: Synthetic peptide
  Seed: GMDPRMCSLMQGSTL
GMDPRMWSLLQPSTA

SEQ ID NO: 71151 - protein, 15 aa, Artificial Sequence
  Description of Artificial Sequence: Synthetic peptide
  Seed: GMDPRMCSLMQGSTL
GMDPRMWSLLQPSTI

SEQ ID NO: 71152 - protein, 15 aa, Artificial Sequence
  Description of Artificial Sequence: Synthetic peptide
  Seed: GMDPRMCSLMQGSTL
GMDPRMWSLLQPSTL

SEQ ID NO: 71153 - protein, 15 aa, Artificial Sequence
  Description of Artificial Sequence: Synthetic peptide
  Seed: GMDPRMCSLMQGSTL
GMDPRMWSLLQPSTT

SEQ ID NO: 71154 - protein, 15 aa, Artificial Sequence
  Description of Artificial Sequence: Synthetic peptide
  Seed: GMDPRMCSLMQGSTL
GMDPRMWSLLQPSTV

SEQ ID NO: 71155 - protein, 15 aa, Artificial Sequence
  Description of Artificial Sequence: Synthetic peptide
  Seed: GMDPRMCSLMQGSTL
GMDPRMWSLLQSSTA

SEQ ID NO: 71156 - protein, 15 aa, Artificial Sequence
  Description of Artificial Sequence: Synthetic peptide
  Seed: GMDPRMCSLMQGSTL
GMDPRMWSLLQSSTI

SEQ ID NO: 71157 - protein, 15 aa, Artificial Sequence
  Description of Artificial Sequence: Synthetic peptide
  Seed: GMDPRMCSLMQGSTL
GMDPRMWSLLQSSTL

SEQ ID NO: 71158 - protein, 15 aa, Artificial Sequence
  Description of Artificial Sequence: Synthetic peptide
  Seed: GMDPRMCSLMQGSTL
GMDPRMWSLLQSSTM

SEQ ID NO: 71159 - protein, 15 aa, Artificial Sequence
  Description of Artificial Sequence: Synthetic peptide
  Seed: GMDPRMCSLMQGSTL
GMDPRMWSLLQSSTT

SEQ ID NO: 71160 - protein, 15 aa, Artificial Sequence
  Description of Artificial Sequence: Synthetic peptide
  Seed: GMDPRMCSLMQGSTL
GMDPRMWSLLQSSTV

SEQ ID NO: 71161 - protein, 15 aa, Artificial Sequence
  Description of Artificial Sequence: Synthetic peptide
  Seed: GMDPRMCSLMQGSTL
GMDPRMWSLLQTSTI

SEQ ID NO: 71162 - protein, 15 aa, Artificial Sequence
  Description of Artificial Sequence: Synthetic peptide
  Seed: GMDPRMCSLMQGSTL
GMDPRMWSLLQTSTL

SEQ ID NO: 71163 - protein, 15 aa, Artificial Sequence
  Description of Artificial Sequence: Synthetic peptide
  Seed: GMDPRMCSLMQGSTL
GMDPRMWSLLQTSTV

SEQ ID NO: 71164 - protein, 15 aa, Artificial Sequence
  Description of Artificial Sequence: Synthetic peptide
  Seed: GMDPRMCSLMQGSTL
GMDPRMWSLMQASTA

SEQ ID NO: 71165 - protein, 15 aa, Artificial Sequence
  Description of Artificial Sequence: Synthetic peptide
  Seed: GMDPRMCSLMQGSTL
GMDPRMWSLMQASTI

SEQ ID NO: 71166 - protein, 15 aa, Artificial Sequence
  Description of Artificial Sequence: Synthetic peptide
  Seed: GMDPRMCSLMQGSTL
GMDPRMWSLMQASTL

SEQ ID NO: 71167 - protein, 15 aa, Artificial Sequence
  Description of Artificial Sequence: Synthetic peptide
  Seed: GMDPRMCSLMQGSTL
GMDPRMWSLMQASTM

SEQ ID NO: 71168 - protein, 15 aa, Artificial Sequence
  Description of Artificial Sequence: Synthetic peptide
  Seed: GMDPRMCSLMQGSTL
GMDPRMWSLMQASTS

SEQ ID NO: 71169 - protein, 15 aa, Artificial Sequence
  Description of Artificial Sequence: Synthetic peptide
  Seed: GMDPRMCSLMQGSTL
GMDPRMWSLMQASTT

SEQ ID NO: 71170 - protein, 15 aa, Artificial Sequence
  Description of Artificial Sequence: Synthetic peptide
  Seed: GMDPRMCSLMQGSTL
GMDPRMWSLMQASTV

SEQ ID NO: 71171 - protein, 15 aa, Artificial Sequence
  Description of Artificial Sequence: Synthetic peptide
  Seed: GMDPRMCSLMQGSTL
GMDPRMWSLMQGSTA

SEQ ID NO: 71172 - protein, 15 aa, Artificial Sequence
  Description of Artificial Sequence: Synthetic peptide
  Seed: GMDPRMCSLMQGSTL
GMDPRMWSLMQGSTI

SEQ ID NO: 71173 - protein, 15 aa, Artificial Sequence
  Description of Artificial Sequence: Synthetic peptide
  Seed: GMDPRMCSLMQGSTL
GMDPRMWSLMQGSTL

SEQ ID NO: 71174 - protein, 15 aa, Artificial Sequence
  Description of Artificial Sequence: Synthetic peptide
  Seed: GMDPRMCSLMQGSTL
GMDPRMWSLMQGSTM

SEQ ID NO: 71175 - protein, 15 aa, Artificial Sequence
  Description of Artificial Sequence: Synthetic peptide
  Seed: GMDPRMCSLMQGSTL
GMDPRMWSLMQGSTS

SEQ ID NO: 71176 - protein, 15 aa, Artificial Sequence
  Description of Artificial Sequence: Synthetic peptide
  Seed: GMDPRMCSLMQGSTL
GMDPRMWSLMQGSTT

SEQ ID NO: 71177 - protein, 15 aa, Artificial Sequence
  Description of Artificial Sequence: Synthetic peptide
  Seed: GMDPRMCSLMQGSTL
GMDPRMWSLMQGSTV

SEQ ID NO: 71178 - protein, 15 aa, Artificial Sequence
  Description of Artificial Sequence: Synthetic peptide
  Seed: GMDPRMCSLMQGSTL
GMDPRMWSLMQNSTV

SEQ ID NO: 71179 - protein, 15 aa, Artificial Sequence
  Description of Artificial Sequence: Synthetic peptide
  Seed: GMDPRMCSLMQGSTL
GMDPRMWSLMQPSTA

SEQ ID NO: 71180 - protein, 15 aa, Artificial Sequence
  Description of Artificial Sequence: Synthetic peptide
  Seed: GMDPRMCSLMQGSTL
GMDPRMWSLMQPSTI

SEQ ID NO: 71181 - protein, 15 aa, Artificial Sequence
  Description of Artificial Sequence: Synthetic peptide
  Seed: GMDPRMCSLMQGSTL
GMDPRMWSLMQPSTL

SEQ ID NO: 71182 - protein, 15 aa, Artificial Sequence
  Description of Artificial Sequence: Synthetic peptide
  Seed: GMDPRMCSLMQGSTL
GMDPRMWSLMQPSTV

SEQ ID NO: 71183 - protein, 15 aa, Artificial Sequence
  Description of Artificial Sequence: Synthetic peptide
  Seed: GMDPRMCSLMQGSTL
GMDPRMWSLMQSSTA

SEQ ID NO: 71184 - protein, 15 aa, Artificial Sequence
  Description of Artificial Sequence: Synthetic peptide
  Seed: GMDPRMCSLMQGSTL
GMDPRMWSLMQSSTI

SEQ ID NO: 71185 - protein, 15 aa, Artificial Sequence
  Description of Artificial Sequence: Synthetic peptide
  Seed: GMDPRMCSLMQGSTL
GMDPRMWSLMQSSTL

SEQ ID NO: 71186 - protein, 15 aa, Artificial Sequence
  Description of Artificial Sequence: Synthetic peptide
  Seed: GMDPRMCSLMQGSTL
GMDPRMWSLMQSSTM

SEQ ID NO: 71187 - protein, 15 aa, Artificial Sequence
  Description of Artificial Sequence: Synthetic peptide
  Seed: GMDPRMCSLMQGSTL
GMDPRMWSLMQSSTT

SEQ ID NO: 71188 - protein, 15 aa, Artificial Sequence
  Description of Artificial Sequence: Synthetic peptide
  Seed: GMDPRMCSLMQGSTL
GMDPRMWSLMQSSTV

SEQ ID NO: 71189 - protein, 15 aa, Artificial Sequence
  Description of Artificial Sequence: Synthetic peptide
  Seed: GMDPRMCSLMQGSTL
GMDPRMWSLMQTSTL

SEQ ID NO: 71190 - protein, 15 aa, Artificial Sequence
  Description of Artificial Sequence: Synthetic peptide
  Seed: GMDPRMCSLMQGSTL
GMDPRMWSLMQTSTV

SEQ ID NO: 71191 - protein, 15 aa, Artificial Sequence
  Description of Artificial Sequence: Synthetic peptide
  Seed: GMDPRMCSLMQGSTL
GMDPRMWSLQQASTL

SEQ ID NO: 71192 - protein, 15 aa, Artificial Sequence
  Description of Artificial Sequence: Synthetic peptide
  Seed: GMDPRMCSLMQGSTL
GMDPRMYSLAQASTA

SEQ ID NO: 71193 - protein, 15 aa, Artificial Sequence
  Description of Artificial Sequence: Synthetic peptide
  Seed: GMDPRMCSLMQGSTL
GMDPRMYSLAQASTI

SEQ ID NO: 71194 - protein, 15 aa, Artificial Sequence
  Description of Artificial Sequence: Synthetic peptide
  Seed: GMDPRMCSLMQGSTL
GMDPRMYSLAQASTL

SEQ ID NO: 71195 - protein, 15 aa, Artificial Sequence
  Description of Artificial Sequence: Synthetic peptide
  Seed: GMDPRMCSLMQGSTL
GMDPRMYSLAQASTM

SEQ ID NO: 71196 - protein, 15 aa, Artificial Sequence
  Description of Artificial Sequence: Synthetic peptide
  Seed: GMDPRMCSLMQGSTL
GMDPRMYSLAQASTS

SEQ ID NO: 71197 - protein, 15 aa, Artificial Sequence
  Description of Artificial Sequence: Synthetic peptide
  Seed: GMDPRMCSLMQGSTL
GMDPRMYSLAQASTT

SEQ ID NO: 71198 - protein, 15 aa, Artificial Sequence
  Description of Artificial Sequence: Synthetic peptide
  Seed: GMDPRMCSLMQGSTL
GMDPRMYSLAQASTV

SEQ ID NO: 71199 - protein, 15 aa, Artificial Sequence
  Description of Artificial Sequence: Synthetic peptide
  Seed: GMDPRMCSLMQGSTL
GMDPRMYSLAQGSTA

SEQ ID NO: 71200 - protein, 15 aa, Artificial Sequence
  Description of Artificial Sequence: Synthetic peptide
  Seed: GMDPRMCSLMQGSTL
GMDPRMYSLAQGSTI

SEQ ID NO: 71201 - protein, 15 aa, Artificial Sequence
  Description of Artificial Sequence: Synthetic peptide
  Seed: GMDPRMCSLMQGSTL
GMDPRMYSLAQGSTL

SEQ ID NO: 71202 - protein, 15 aa, Artificial Sequence
  Description of Artificial Sequence: Synthetic peptide
  Seed: GMDPRMCSLMQGSTL
GMDPRMYSLAQGSTM

SEQ ID NO: 71203 - protein, 15 aa, Artificial Sequence
  Description of Artificial Sequence: Synthetic peptide
  Seed: GMDPRMCSLMQGSTL
GMDPRMYSLAQGSTV

SEQ ID NO: 71204 - protein, 15 aa, Artificial Sequence
  Description of Artificial Sequence: Synthetic peptide
  Seed: GMDPRMCSLMQGSTL
GMDPRMYSLAQPSTI

SEQ ID NO: 71205 - protein, 15 aa, Artificial Sequence
  Description of Artificial Sequence: Synthetic peptide
  Seed: GMDPRMCSLMQGSTL
GMDPRMYSLAQPSTL

SEQ ID NO: 71206 - protein, 15 aa, Artificial Sequence
  Description of Artificial Sequence: Synthetic peptide
  Seed: GMDPRMCSLMQGSTL
GMDPRMYSLAQPSTV

SEQ ID NO: 71207 - protein, 15 aa, Artificial Sequence
  Description of Artificial Sequence: Synthetic peptide
  Seed: GMDPRMCSLMQGSTL
GMDPRMYSLAQSSTA

SEQ ID NO: 71208 - protein, 15 aa, Artificial Sequence
  Description of Artificial Sequence: Synthetic peptide
  Seed: GMDPRMCSLMQGSTL
GMDPRMYSLAQSSTI

SEQ ID NO: 71209 - protein, 15 aa, Artificial Sequence
  Description of Artificial Sequence: Synthetic peptide
  Seed: GMDPRMCSLMQGSTL
GMDPRMYSLAQSSTL

SEQ ID NO: 71210 - protein, 15 aa, Artificial Sequence
  Description of Artificial Sequence: Synthetic peptide
  Seed: GMDPRMCSLMQGSTL
GMDPRMYSLAQSSTM

SEQ ID NO: 71211 - protein, 15 aa, Artificial Sequence
  Description of Artificial Sequence: Synthetic peptide
  Seed: GMDPRMCSLMQGSTL
GMDPRMYSLAQSSTV

SEQ ID NO: 71212 - protein, 15 aa, Artificial Sequence
  Description of Artificial Sequence: Synthetic peptide
  Seed: GMDPRMCSLMQGSTL
GMDPRMYSLFQASTL

SEQ ID NO: 71213 - protein, 15 aa, Artificial Sequence
  Description of Artificial Sequence: Synthetic peptide
  Seed: GMDPRMCSLMQGSTL
GMDPRMYSLFQASTV

SEQ ID NO: 71214 - protein, 15 aa, Artificial Sequence
  Description of Artificial Sequence: Synthetic peptide
  Seed: GMDPRMCSLMQGSTL
GMDPRMYSLIQASTA

SEQ ID NO: 71215 - protein, 15 aa, Artificial Sequence
  Description of Artificial Sequence: Synthetic peptide
  Seed: GMDPRMCSLMQGSTL
GMDPRMYSLIQASTG

SEQ ID NO: 71216 - protein, 15 aa, Artificial Sequence
  Description of Artificial Sequence: Synthetic peptide
  Seed: GMDPRMCSLMQGSTL
GMDPRMYSLIQASTI

SEQ ID NO: 71217 - protein, 15 aa, Artificial Sequence
  Description of Artificial Sequence: Synthetic peptide
  Seed: GMDPRMCSLMQGSTL
GMDPRMYSLIQASTL

SEQ ID NO: 71218 - protein, 15 aa, Artificial Sequence
  Description of Artificial Sequence: Synthetic peptide
  Seed: GMDPRMCSLMQGSTL
GMDPRMYSLIQASTM

SEQ ID NO: 71219 - protein, 15 aa, Artificial Sequence
  Description of Artificial Sequence: Synthetic peptide
  Seed: GMDPRMCSLMQGSTL
GMDPRMYSLIQASTS

SEQ ID NO: 71220 - protein, 15 aa, Artificial Sequence
  Description of Artificial Sequence: Synthetic peptide
  Seed: GMDPRMCSLMQGSTL
GMDPRMYSLIQASTT

SEQ ID NO: 71221 - protein, 15 aa, Artificial Sequence
  Description of Artificial Sequence: Synthetic peptide
  Seed: GMDPRMCSLMQGSTL
GMDPRMYSLIQASTV

SEQ ID NO: 71222 - protein, 15 aa, Artificial Sequence
  Description of Artificial Sequence: Synthetic peptide
  Seed: GMDPRMCSLMQGSTL
GMDPRMYSLIQGSTA

SEQ ID NO: 71223 - protein, 15 aa, Artificial Sequence
  Description of Artificial Sequence: Synthetic peptide
  Seed: GMDPRMCSLMQGSTL
GMDPRMYSLIQGSTI

SEQ ID NO: 71224 - protein, 15 aa, Artificial Sequence
  Description of Artificial Sequence: Synthetic peptide
  Seed: GMDPRMCSLMQGSTL
GMDPRMYSLIQGSTL

SEQ ID NO: 71225 - protein, 15 aa, Artificial Sequence
  Description of Artificial Sequence: Synthetic peptide
  Seed: GMDPRMCSLMQGSTL
GMDPRMYSLIQGSTM

SEQ ID NO: 71226 - protein, 15 aa, Artificial Sequence
  Description of Artificial Sequence: Synthetic peptide
  Seed: GMDPRMCSLMQGSTL
GMDPRMYSLIQGSTS

SEQ ID NO: 71227 - protein, 15 aa, Artificial Sequence
  Description of Artificial Sequence: Synthetic peptide
  Seed: GMDPRMCSLMQGSTL
GMDPRMYSLIQGSTT

SEQ ID NO: 71228 - protein, 15 aa, Artificial Sequence
  Description of Artificial Sequence: Synthetic peptide
  Seed: GMDPRMCSLMQGSTL
GMDPRMYSLIQGSTV

SEQ ID NO: 71229 - protein, 15 aa, Artificial Sequence
  Description of Artificial Sequence: Synthetic peptide
  Seed: GMDPRMCSLMQGSTL
GMDPRMYSLIQNSTL

SEQ ID NO: 71230 - protein, 15 aa, Artificial Sequence
  Description of Artificial Sequence: Synthetic peptide
  Seed: GMDPRMCSLMQGSTL
GMDPRMYSLIQNSTV

SEQ ID NO: 71231 - protein, 15 aa, Artificial Sequence
  Description of Artificial Sequence: Synthetic peptide
  Seed: GMDPRMCSLMQGSTL
GMDPRMYSLIQPSTA

SEQ ID NO: 71232 - protein, 15 aa, Artificial Sequence
  Description of Artificial Sequence: Synthetic peptide
  Seed: GMDPRMCSLMQGSTL
GMDPRMYSLIQPSTI

SEQ ID NO: 71233 - protein, 15 aa, Artificial Sequence
  Description of Artificial Sequence: Synthetic peptide
  Seed: GMDPRMCSLMQGSTL
GMDPRMYSLIQPSTL

SEQ ID NO: 71234 - protein, 15 aa, Artificial Sequence
  Description of Artificial Sequence: Synthetic peptide
  Seed: GMDPRMCSLMQGSTL
GMDPRMYSLIQPSTM

SEQ ID NO: 71235 - protein, 15 aa, Artificial Sequence
  Description of Artificial Sequence: Synthetic peptide
  Seed: GMDPRMCSLMQGSTL
GMDPRMYSLIQPSTV

SEQ ID NO: 71236 - protein, 15 aa, Artificial Sequence
  Description of Artificial Sequence: Synthetic peptide
  Seed: GMDPRMCSLMQGSTL
GMDPRMYSLIQSSTA

SEQ ID NO: 71237 - protein, 15 aa, Artificial Sequence
  Description of Artificial Sequence: Synthetic peptide
  Seed: GMDPRMCSLMQGSTL
GMDPRMYSLIQSSTI

SEQ ID NO: 71238 - protein, 15 aa, Artificial Sequence
  Description of Artificial Sequence: Synthetic peptide
  Seed: GMDPRMCSLMQGSTL
GMDPRMYSLIQSSTL

SEQ ID NO: 71239 - protein, 15 aa, Artificial Sequence
  Description of Artificial Sequence: Synthetic peptide
  Seed: GMDPRMCSLMQGSTL
GMDPRMYSLIQSSTM

SEQ ID NO: 71240 - protein, 15 aa, Artificial Sequence
  Description of Artificial Sequence: Synthetic peptide
  Seed: GMDPRMCSLMQGSTL
GMDPRMYSLIQSSTT

SEQ ID NO: 71241 - protein, 15 aa, Artificial Sequence
  Description of Artificial Sequence: Synthetic peptide
  Seed: GMDPRMCSLMQGSTL
GMDPRMYSLIQSSTV

SEQ ID NO: 71242 - protein, 15 aa, Artificial Sequence
  Description of Artificial Sequence: Synthetic peptide
  Seed: GMDPRMCSLMQGSTL
GMDPRMYSLIQTSTI

SEQ ID NO: 71243 - protein, 15 aa, Artificial Sequence
  Description of Artificial Sequence: Synthetic peptide
  Seed: GMDPRMCSLMQGSTL
GMDPRMYSLIQTSTL

SEQ ID NO: 71244 - protein, 15 aa, Artificial Sequence
  Description of Artificial Sequence: Synthetic peptide
  Seed: GMDPRMCSLMQGSTL
GMDPRMYSLIQTSTV

SEQ ID NO: 71245 - protein, 15 aa, Artificial Sequence
  Description of Artificial Sequence: Synthetic peptide
  Seed: GMDPRMCSLMQGSTL
GMDPRMYSLLQASTA

SEQ ID NO: 71246 - protein, 15 aa, Artificial Sequence
  Description of Artificial Sequence: Synthetic peptide
  Seed: GMDPRMCSLMQGSTL
GMDPRMYSLLQASTC

SEQ ID NO: 71247 - protein, 15 aa, Artificial Sequence
  Description of Artificial Sequence: Synthetic peptide
  Seed: GMDPRMCSLMQGSTL
GMDPRMYSLLQASTF

SEQ ID NO: 71248 - protein, 15 aa, Artificial Sequence
  Description of Artificial Sequence: Synthetic peptide
  Seed: GMDPRMCSLMQGSTL
GMDPRMYSLLQASTG

SEQ ID NO: 71249 - protein, 15 aa, Artificial Sequence
  Description of Artificial Sequence: Synthetic peptide
  Seed: GMDPRMCSLMQGSTL
GMDPRMYSLLQASTI

SEQ ID NO: 71250 - protein, 15 aa, Artificial Sequence
  Description of Artificial Sequence: Synthetic peptide
  Seed: GMDPRMCSLMQGSTL
GMDPRMYSLLQASTL

SEQ ID NO: 71251 - protein, 15 aa, Artificial Sequence
  Description of Artificial Sequence: Synthetic peptide
  Seed: GMDPRMCSLMQGSTL
GMDPRMYSLLQASTM

SEQ ID NO: 71252 - protein, 15 aa, Artificial Sequence
  Description of Artificial Sequence: Synthetic peptide
  Seed: GMDPRMCSLMQGSTL
GMDPRMYSLLQASTN

SEQ ID NO: 71253 - protein, 15 aa, Artificial Sequence
  Description of Artificial Sequence: Synthetic peptide
  Seed: GMDPRMCSLMQGSTL
GMDPRMYSLLQASTS

SEQ ID NO: 71254 - protein, 15 aa, Artificial Sequence
  Description of Artificial Sequence: Synthetic peptide
  Seed: GMDPRMCSLMQGSTL
GMDPRMYSLLQASTT

SEQ ID NO: 71255 - protein, 15 aa, Artificial Sequence
  Description of Artificial Sequence: Synthetic peptide
  Seed: GMDPRMCSLMQGSTL
GMDPRMYSLLQASTV

SEQ ID NO: 71256 - protein, 15 aa, Artificial Sequence
  Description of Artificial Sequence: Synthetic peptide
  Seed: GMDPRMCSLMQGSTL
GMDPRMYSLLQGSTA

SEQ ID NO: 71257 - protein, 15 aa, Artificial Sequence
  Description of Artificial Sequence: Synthetic peptide
  Seed: GMDPRMCSLMQGSTL
GMDPRMYSLLQGSTG

SEQ ID NO: 71258 - protein, 15 aa, Artificial Sequence
  Description of Artificial Sequence: Synthetic peptide
  Seed: GMDPRMCSLMQGSTL
GMDPRMYSLLQGSTI

SEQ ID NO: 71259 - protein, 15 aa, Artificial Sequence
  Description of Artificial Sequence: Synthetic peptide
  Seed: GMDPRMCSLMQGSTL
GMDPRMYSLLQGSTL

SEQ ID NO: 71260 - protein, 15 aa, Artificial Sequence
  Description of Artificial Sequence: Synthetic peptide
  Seed: GMDPRMCSLMQGSTL
GMDPRMYSLLQGSTM

SEQ ID NO: 71261 - protein, 15 aa, Artificial Sequence
  Description of Artificial Sequence: Synthetic peptide
  Seed: GMDPRMCSLMQGSTL
GMDPRMYSLLQGSTN

SEQ ID NO: 71262 - protein, 15 aa, Artificial Sequence
  Description of Artificial Sequence: Synthetic peptide
  Seed: GMDPRMCSLMQGSTL
GMDPRMYSLLQGSTS

SEQ ID NO: 71263 - protein, 15 aa, Artificial Sequence
  Description of Artificial Sequence: Synthetic peptide
  Seed: GMDPRMCSLMQGSTL
GMDPRMYSLLQGSTT

SEQ ID NO: 71264 - protein, 15 aa, Artificial Sequence
  Description of Artificial Sequence: Synthetic peptide
  Seed: GMDPRMCSLMQGSTL
GMDPRMYSLLQGSTV

SEQ ID NO: 71265 - protein, 15 aa, Artificial Sequence
  Description of Artificial Sequence: Synthetic peptide
  Seed: GMDPRMCSLMQGSTL
GMDPRMYSLLQISTV

SEQ ID NO: 71266 - protein, 15 aa, Artificial Sequence
  Description of Artificial Sequence: Synthetic peptide
  Seed: GMDPRMCSLMQGSTL
GMDPRMYSLLQNSTA

SEQ ID NO: 71267 - protein, 15 aa, Artificial Sequence
  Description of Artificial Sequence: Synthetic peptide
  Seed: GMDPRMCSLMQGSTL
GMDPRMYSLLQNSTI

SEQ ID NO: 71268 - protein, 15 aa, Artificial Sequence
  Description of Artificial Sequence: Synthetic peptide
  Seed: GMDPRMCSLMQGSTL
GMDPRMYSLLQNSTL

SEQ ID NO: 71269 - protein, 15 aa, Artificial Sequence
  Description of Artificial Sequence: Synthetic peptide
  Seed: GMDPRMCSLMQGSTL
GMDPRMYSLLQNSTM

SEQ ID NO: 71270 - protein, 15 aa, Artificial Sequence
  Description of Artificial Sequence: Synthetic peptide
  Seed: GMDPRMCSLMQGSTL
GMDPRMYSLLQNSTT

SEQ ID NO: 71271 - protein, 15 aa, Artificial Sequence
  Description of Artificial Sequence: Synthetic peptide
  Seed: GMDPRMCSLMQGSTL
GMDPRMYSLLQNSTV

SEQ ID NO: 71272 - protein, 15 aa, Artificial Sequence
  Description of Artificial Sequence: Synthetic peptide
  Seed: GMDPRMCSLMQGSTL
GMDPRMYSLLQPSTA

SEQ ID NO: 71273 - protein, 15 aa, Artificial Sequence
  Description of Artificial Sequence: Synthetic peptide
  Seed: GMDPRMCSLMQGSTL
GMDPRMYSLLQPSTG

SEQ ID NO: 71274 - protein, 15 aa, Artificial Sequence
  Description of Artificial Sequence: Synthetic peptide
  Seed: GMDPRMCSLMQGSTL
GMDPRMYSLLQPSTI

SEQ ID NO: 71275 - protein, 15 aa, Artificial Sequence
  Description of Artificial Sequence: Synthetic peptide
  Seed: GMDPRMCSLMQGSTL
GMDPRMYSLLQPSTL

SEQ ID NO: 71276 - protein, 15 aa, Artificial Sequence
  Description of Artificial Sequence: Synthetic peptide
  Seed: GMDPRMCSLMQGSTL
GMDPRMYSLLQPSTM

SEQ ID NO: 71277 - protein, 15 aa, Artificial Sequence
  Description of Artificial Sequence: Synthetic peptide
  Seed: GMDPRMCSLMQGSTL
GMDPRMYSLLQPSTS

SEQ ID NO: 71278 - protein, 15 aa, Artificial Sequence
  Description of Artificial Sequence: Synthetic peptide
  Seed: GMDPRMCSLMQGSTL
GMDPRMYSLLQPSTT

SEQ ID NO: 71279 - protein, 15 aa, Artificial Sequence
  Description of Artificial Sequence: Synthetic peptide
  Seed: GMDPRMCSLMQGSTL
GMDPRMYSLLQPSTV

SEQ ID NO: 71280 - protein, 15 aa, Artificial Sequence
  Description of Artificial Sequence: Synthetic peptide
  Seed: GMDPRMCSLMQGSTL
GMDPRMYSLLQSSTA

SEQ ID NO: 71281 - protein, 15 aa, Artificial Sequence
  Description of Artificial Sequence: Synthetic peptide
  Seed: GMDPRMCSLMQGSTL
GMDPRMYSLLQSSTG

SEQ ID NO: 71282 - protein, 15 aa, Artificial Sequence
  Description of Artificial Sequence: Synthetic peptide
  Seed: GMDPRMCSLMQGSTL
GMDPRMYSLLQSSTI

SEQ ID NO: 71283 - protein, 15 aa, Artificial Sequence
  Description of Artificial Sequence: Synthetic peptide
  Seed: GMDPRMCSLMQGSTL
GMDPRMYSLLQSSTL

SEQ ID NO: 71284 - protein, 15 aa, Artificial Sequence
  Description of Artificial Sequence: Synthetic peptide
  Seed: GMDPRMCSLMQGSTL
GMDPRMYSLLQSSTM

SEQ ID NO: 71285 - protein, 15 aa, Artificial Sequence
  Description of Artificial Sequence: Synthetic peptide
  Seed: GMDPRMCSLMQGSTL
GMDPRMYSLLQSSTS

SEQ ID NO: 71286 - protein, 15 aa, Artificial Sequence
  Description of Artificial Sequence: Synthetic peptide
  Seed: GMDPRMCSLMQGSTL
GMDPRMYSLLQSSTT

SEQ ID NO: 71287 - protein, 15 aa, Artificial Sequence
  Description of Artificial Sequence: Synthetic peptide
  Seed: GMDPRMCSLMQGSTL
GMDPRMYSLLQSSTV

SEQ ID NO: 71288 - protein, 15 aa, Artificial Sequence
  Description of Artificial Sequence: Synthetic peptide
  Seed: GMDPRMCSLMQGSTL
GMDPRMYSLLQTSTA

SEQ ID NO: 71289 - protein, 15 aa, Artificial Sequence
  Description of Artificial Sequence: Synthetic peptide
  Seed: GMDPRMCSLMQGSTL
GMDPRMYSLLQTSTI

SEQ ID NO: 71290 - protein, 15 aa, Artificial Sequence
  Description of Artificial Sequence: Synthetic peptide
  Seed: GMDPRMCSLMQGSTL
GMDPRMYSLLQTSTL

SEQ ID NO: 71291 - protein, 15 aa, Artificial Sequence
  Description of Artificial Sequence: Synthetic peptide
  Seed: GMDPRMCSLMQGSTL
GMDPRMYSLLQTSTM

SEQ ID NO: 71292 - protein, 15 aa, Artificial Sequence
  Description of Artificial Sequence: Synthetic peptide
  Seed: GMDPRMCSLMQGSTL
GMDPRMYSLLQTSTS

SEQ ID NO: 71293 - protein, 15 aa, Artificial Sequence
  Description of Artificial Sequence: Synthetic peptide
  Seed: GMDPRMCSLMQGSTL
GMDPRMYSLLQTSTT

SEQ ID NO: 71294 - protein, 15 aa, Artificial Sequence
  Description of Artificial Sequence: Synthetic peptide
  Seed: GMDPRMCSLMQGSTL
GMDPRMYSLLQTSTV

SEQ ID NO: 71295 - protein, 15 aa, Artificial Sequence
  Description of Artificial Sequence: Synthetic peptide
  Seed: GMDPRMCSLMQGSTL
GMDPRMYSLLQVSTA

SEQ ID NO: 71296 - protein, 15 aa, Artificial Sequence
  Description of Artificial Sequence: Synthetic peptide
  Seed: GMDPRMCSLMQGSTL
GMDPRMYSLLQVSTI

SEQ ID NO: 71297 - protein, 15 aa, Artificial Sequence
  Description of Artificial Sequence: Synthetic peptide
  Seed: GMDPRMCSLMQGSTL
GMDPRMYSLLQVSTL

SEQ ID NO: 71298 - protein, 15 aa, Artificial Sequence
  Description of Artificial Sequence: Synthetic peptide
  Seed: GMDPRMCSLMQGSTL
GMDPRMYSLLQVSTT

SEQ ID NO: 71299 - protein, 15 aa, Artificial Sequence
  Description of Artificial Sequence: Synthetic peptide
  Seed: GMDPRMCSLMQGSTL
GMDPRMYSLLQVSTV

SEQ ID NO: 71300 - protein, 15 aa, Artificial Sequence
  Description of Artificial Sequence: Synthetic peptide
  Seed: GMDPRMCSLMQGSTL
GMDPRMYSLMQASTA

SEQ ID NO: 71301 - protein, 15 aa, Artificial Sequence
  Description of Artificial Sequence: Synthetic peptide
  Seed: GMDPRMCSLMQGSTL
GMDPRMYSLMQASTF

SEQ ID NO: 71302 - protein, 15 aa, Artificial Sequence
  Description of Artificial Sequence: Synthetic peptide
  Seed: GMDPRMCSLMQGSTL
GMDPRMYSLMQASTG

SEQ ID NO: 71303 - protein, 15 aa, Artificial Sequence
  Description of Artificial Sequence: Synthetic peptide
  Seed: GMDPRMCSLMQGSTL
GMDPRMYSLMQASTI

SEQ ID NO: 71304 - protein, 15 aa, Artificial Sequence
  Description of Artificial Sequence: Synthetic peptide
  Seed: GMDPRMCSLMQGSTL
GMDPRMYSLMQASTL

SEQ ID NO: 71305 - protein, 15 aa, Artificial Sequence
  Description of Artificial Sequence: Synthetic peptide
  Seed: GMDPRMCSLMQGSTL
GMDPRMYSLMQASTM

SEQ ID NO: 71306 - protein, 15 aa, Artificial Sequence
  Description of Artificial Sequence: Synthetic peptide
  Seed: GMDPRMCSLMQGSTL
GMDPRMYSLMQASTN

SEQ ID NO: 71307 - protein, 15 aa, Artificial Sequence
  Description of Artificial Sequence: Synthetic peptide
  Seed: GMDPRMCSLMQGSTL
GMDPRMYSLMQASTS

SEQ ID NO: 71308 - protein, 15 aa, Artificial Sequence
  Description of Artificial Sequence: Synthetic peptide
  Seed: GMDPRMCSLMQGSTL
GMDPRMYSLMQASTT

SEQ ID NO: 71309 - protein, 15 aa, Artificial Sequence
  Description of Artificial Sequence: Synthetic peptide
  Seed: GMDPRMCSLMQGSTL
GMDPRMYSLMQASTV

SEQ ID NO: 71310 - protein, 15 aa, Artificial Sequence
  Description of Artificial Sequence: Synthetic peptide
  Seed: GMDPRMCSLMQGSTL
GMDPRMYSLMQGSTA

SEQ ID NO: 71311 - protein, 15 aa, Artificial Sequence
  Description of Artificial Sequence: Synthetic peptide
  Seed: GMDPRMCSLMQGSTL
GMDPRMYSLMQGSTG

SEQ ID NO: 71312 - protein, 15 aa, Artificial Sequence
  Description of Artificial Sequence: Synthetic peptide
  Seed: GMDPRMCSLMQGSTL
GMDPRMYSLMQGSTI

SEQ ID NO: 71313 - protein, 15 aa, Artificial Sequence
  Description of Artificial Sequence: Synthetic peptide
  Seed: GMDPRMCSLMQGSTL
GMDPRMYSLMQGSTL

SEQ ID NO: 71314 - protein, 15 aa, Artificial Sequence
  Description of Artificial Sequence: Synthetic peptide
  Seed: GMDPRMCSLMQGSTL
GMDPRMYSLMQGSTM

SEQ ID NO: 71315 - protein, 15 aa, Artificial Sequence
  Description of Artificial Sequence: Synthetic peptide
  Seed: GMDPRMCSLMQGSTL
GMDPRMYSLMQGSTS

SEQ ID NO: 71316 - protein, 15 aa, Artificial Sequence
  Description of Artificial Sequence: Synthetic peptide
  Seed: GMDPRMCSLMQGSTL
GMDPRMYSLMQGSTT

SEQ ID NO: 71317 - protein, 15 aa, Artificial Sequence
  Description of Artificial Sequence: Synthetic peptide
  Seed: GMDPRMCSLMQGSTL
GMDPRMYSLMQGSTV

SEQ ID NO: 71318 - protein, 15 aa, Artificial Sequence
  Description of Artificial Sequence: Synthetic peptide
  Seed: GMDPRMCSLMQGSTL
GMDPRMYSLMQISTV

SEQ ID NO: 71319 - protein, 15 aa, Artificial Sequence
  Description of Artificial Sequence: Synthetic peptide
  Seed: GMDPRMCSLMQGSTL
GMDPRMYSLMQNSTA

SEQ ID NO: 71320 - protein, 15 aa, Artificial Sequence
  Description of Artificial Sequence: Synthetic peptide
  Seed: GMDPRMCSLMQGSTL
GMDPRMYSLMQNSTI

SEQ ID NO: 71321 - protein, 15 aa, Artificial Sequence
  Description of Artificial Sequence: Synthetic peptide
  Seed: GMDPRMCSLMQGSTL
GMDPRMYSLMQNSTL

SEQ ID NO: 71322 - protein, 15 aa, Artificial Sequence
  Description of Artificial Sequence: Synthetic peptide
  Seed: GMDPRMCSLMQGSTL
GMDPRMYSLMQNSTM

SEQ ID NO: 71323 - protein, 15 aa, Artificial Sequence
  Description of Artificial Sequence: Synthetic peptide
  Seed: GMDPRMCSLMQGSTL
GMDPRMYSLMQNSTV

SEQ ID NO: 71324 - protein, 15 aa, Artificial Sequence
  Description of Artificial Sequence: Synthetic peptide
  Seed: GMDPRMCSLMQGSTL
GMDPRMYSLMQPSTA

SEQ ID NO: 71325 - protein, 15 aa, Artificial Sequence
  Description of Artificial Sequence: Synthetic peptide
  Seed: GMDPRMCSLMQGSTL
GMDPRMYSLMQPSTI

SEQ ID NO: 71326 - protein, 15 aa, Artificial Sequence
  Description of Artificial Sequence: Synthetic peptide
  Seed: GMDPRMCSLMQGSTL
GMDPRMYSLMQPSTL

SEQ ID NO: 71327 - protein, 15 aa, Artificial Sequence
  Description of Artificial Sequence: Synthetic peptide
  Seed: GMDPRMCSLMQGSTL
GMDPRMYSLMQPSTM

SEQ ID NO: 71328 - protein, 15 aa, Artificial Sequence
  Description of Artificial Sequence: Synthetic peptide
  Seed: GMDPRMCSLMQGSTL
GMDPRMYSLMQPSTS

SEQ ID NO: 71329 - protein, 15 aa, Artificial Sequence
  Description of Artificial Sequence: Synthetic peptide
  Seed: GMDPRMCSLMQGSTL
GMDPRMYSLMQPSTT

SEQ ID NO: 71330 - protein, 15 aa, Artificial Sequence
  Description of Artificial Sequence: Synthetic peptide
  Seed: GMDPRMCSLMQGSTL
GMDPRMYSLMQPSTV

SEQ ID NO: 71331 - protein, 15 aa, Artificial Sequence
  Description of Artificial Sequence: Synthetic peptide
  Seed: GMDPRMCSLMQGSTL
GMDPRMYSLMQSSTA

SEQ ID NO: 71332 - protein, 15 aa, Artificial Sequence
  Description of Artificial Sequence: Synthetic peptide
  Seed: GMDPRMCSLMQGSTL
GMDPRMYSLMQSSTI

SEQ ID NO: 71333 - protein, 15 aa, Artificial Sequence
  Description of Artificial Sequence: Synthetic peptide
  Seed: GMDPRMCSLMQGSTL
GMDPRMYSLMQSSTL

SEQ ID NO: 71334 - protein, 15 aa, Artificial Sequence
  Description of Artificial Sequence: Synthetic peptide
  Seed: GMDPRMCSLMQGSTL
GMDPRMYSLMQSSTM

SEQ ID NO: 71335 - protein, 15 aa, Artificial Sequence
  Description of Artificial Sequence: Synthetic peptide
  Seed: GMDPRMCSLMQGSTL
GMDPRMYSLMQSSTS

SEQ ID NO: 71336 - protein, 15 aa, Artificial Sequence
  Description of Artificial Sequence: Synthetic peptide
  Seed: GMDPRMCSLMQGSTL
GMDPRMYSLMQSSTT

SEQ ID NO: 71337 - protein, 15 aa, Artificial Sequence
  Description of Artificial Sequence: Synthetic peptide
  Seed: GMDPRMCSLMQGSTL
GMDPRMYSLMQSSTV

SEQ ID NO: 71338 - protein, 15 aa, Artificial Sequence
  Description of Artificial Sequence: Synthetic peptide
  Seed: GMDPRMCSLMQGSTL
GMDPRMYSLMQTSTA

SEQ ID NO: 71339 - protein, 15 aa, Artificial Sequence
  Description of Artificial Sequence: Synthetic peptide
  Seed: GMDPRMCSLMQGSTL
GMDPRMYSLMQTSTI

SEQ ID NO: 71340 - protein, 15 aa, Artificial Sequence
  Description of Artificial Sequence: Synthetic peptide
  Seed: GMDPRMCSLMQGSTL
GMDPRMYSLMQTSTL

SEQ ID NO: 71341 - protein, 15 aa, Artificial Sequence
  Description of Artificial Sequence: Synthetic peptide
  Seed: GMDPRMCSLMQGSTL
GMDPRMYSLMQTSTM

SEQ ID NO: 71342 - protein, 15 aa, Artificial Sequence
  Description of Artificial Sequence: Synthetic peptide
  Seed: GMDPRMCSLMQGSTL
GMDPRMYSLMQTSTT

SEQ ID NO: 71343 - protein, 15 aa, Artificial Sequence
  Description of Artificial Sequence: Synthetic peptide
  Seed: GMDPRMCSLMQGSTL
GMDPRMYSLMQTSTV

SEQ ID NO: 71344 - protein, 15 aa, Artificial Sequence
  Description of Artificial Sequence: Synthetic peptide
  Seed: GMDPRMCSLMQGSTL
GMDPRMYSLMQVSTA

SEQ ID NO: 71345 - protein, 15 aa, Artificial Sequence
  Description of Artificial Sequence: Synthetic peptide
  Seed: GMDPRMCSLMQGSTL
GMDPRMYSLMQVSTI

SEQ ID NO: 71346 - protein, 15 aa, Artificial Sequence
  Description of Artificial Sequence: Synthetic peptide
  Seed: GMDPRMCSLMQGSTL
GMDPRMYSLMQVSTL

SEQ ID NO: 71347 - protein, 15 aa, Artificial Sequence
  Description of Artificial Sequence: Synthetic peptide
  Seed: GMDPRMCSLMQGSTL
GMDPRMYSLMQVSTV

SEQ ID NO: 71348 - protein, 15 aa, Artificial Sequence
  Description of Artificial Sequence: Synthetic peptide
  Seed: GMDPRMCSLMQGSTL
GMDPRMYSLQQASTA

SEQ ID NO: 71349 - protein, 15 aa, Artificial Sequence
  Description of Artificial Sequence: Synthetic peptide
  Seed: GMDPRMCSLMQGSTL
GMDPRMYSLQQASTI

SEQ ID NO: 71350 - protein, 15 aa, Artificial Sequence
  Description of Artificial Sequence: Synthetic peptide
  Seed: GMDPRMCSLMQGSTL
GMDPRMYSLQQASTL

SEQ ID NO: 71351 - protein, 15 aa, Artificial Sequence
  Description of Artificial Sequence: Synthetic peptide
  Seed: GMDPRMCSLMQGSTL
GMDPRMYSLQQASTM

SEQ ID NO: 71352 - protein, 15 aa, Artificial Sequence
  Description of Artificial Sequence: Synthetic peptide
  Seed: GMDPRMCSLMQGSTL
GMDPRMYSLQQASTV

SEQ ID NO: 71353 - protein, 15 aa, Artificial Sequence
  Description of Artificial Sequence: Synthetic peptide
  Seed: GMDPRMCSLMQGSTL
GMDPRMYSLQQGSTI

SEQ ID NO: 71354 - protein, 15 aa, Artificial Sequence
  Description of Artificial Sequence: Synthetic peptide
  Seed: GMDPRMCSLMQGSTL
GMDPRMYSLQQGSTL

SEQ ID NO: 71355 - protein, 15 aa, Artificial Sequence
  Description of Artificial Sequence: Synthetic peptide
  Seed: GMDPRMCSLMQGSTL
GMDPRMYSLQQGSTV

SEQ ID NO: 71356 - protein, 15 aa, Artificial Sequence
  Description of Artificial Sequence: Synthetic peptide
  Seed: GMDPRMCSLMQGSTL
GMDPRMYSLQQSSTI

SEQ ID NO: 71357 - protein, 15 aa, Artificial Sequence
  Description of Artificial Sequence: Synthetic peptide
  Seed: GMDPRMCSLMQGSTL
GMDPRMYSLQQSSTL

SEQ ID NO: 71358 - protein, 15 aa, Artificial Sequence
  Description of Artificial Sequence: Synthetic peptide
  Seed: GMDPRMCSLMQGSTL
GMDPRMYSLQQSSTV

SEQ ID NO: 71359 - protein, 15 aa, Artificial Sequence
  Description of Artificial Sequence: Synthetic peptide
  Seed: GMDPRMCSLMQGSTL
GMDPRMYSLSQASTI

SEQ ID NO: 71360 - protein, 15 aa, Artificial Sequence
  Description of Artificial Sequence: Synthetic peptide
  Seed: GMDPRMCSLMQGSTL
GMDPRMYSLSQASTL

SEQ ID NO: 71361 - protein, 15 aa, Artificial Sequence
  Description of Artificial Sequence: Synthetic peptide
  Seed: GMDPRMCSLMQGSTL
GMDPRMYSLSQASTV

SEQ ID NO: 71362 - protein, 15 aa, Artificial Sequence
  Description of Artificial Sequence: Synthetic peptide
  Seed: GMDPRMCSLMQGSTL
GMDPRMYSLSQSSTI

SEQ ID NO: 71363 - protein, 15 aa, Artificial Sequence
  Description of Artificial Sequence: Synthetic peptide
  Seed: GMDPRMCSLMQGSTL
GMDPRMYSLSQSSTL

SEQ ID NO: 71364 - protein, 15 aa, Artificial Sequence
  Description of Artificial Sequence: Synthetic peptide
  Seed: GMDPRMCSLMQGSTL
GMDPRMYSLTQASTI

SEQ ID NO: 71365 - protein, 15 aa, Artificial Sequence
  Description of Artificial Sequence: Synthetic peptide
  Seed: GMDPRMCSLMQGSTL
GMDPRMYSLTQASTL

SEQ ID NO: 71366 - protein, 15 aa, Artificial Sequence
  Description of Artificial Sequence: Synthetic peptide
  Seed: GMDPRMCSLMQGSTL
GMDPRMYSLVQASTA

SEQ ID NO: 71367 - protein, 15 aa, Artificial Sequence
  Description of Artificial Sequence: Synthetic peptide
  Seed: GMDPRMCSLMQGSTL
GMDPRMYSLVQASTI

SEQ ID NO: 71368 - protein, 15 aa, Artificial Sequence
  Description of Artificial Sequence: Synthetic peptide
  Seed: GMDPRMCSLMQGSTL
GMDPRMYSLVQASTL

SEQ ID NO: 71369 - protein, 15 aa, Artificial Sequence
  Description of Artificial Sequence: Synthetic peptide
  Seed: GMDPRMCSLMQGSTL
GMDPRMYSLVQASTM

SEQ ID NO: 71370 - protein, 15 aa, Artificial Sequence
  Description of Artificial Sequence: Synthetic peptide
  Seed: GMDPRMCSLMQGSTL
GMDPRMYSLVQASTT

SEQ ID NO: 71371 - protein, 15 aa, Artificial Sequence
  Description of Artificial Sequence: Synthetic peptide
  Seed: GMDPRMCSLMQGSTL
GMDPRMYSLVQASTV

SEQ ID NO: 71372 - protein, 15 aa, Artificial Sequence
  Description of Artificial Sequence: Synthetic peptide
  Seed: GMDPRMCSLMQGSTL
GMDPRMYSLVQGSTA

SEQ ID NO: 71373 - protein, 15 aa, Artificial Sequence
  Description of Artificial Sequence: Synthetic peptide
  Seed: GMDPRMCSLMQGSTL
GMDPRMYSLVQGSTI

SEQ ID NO: 71374 - protein, 15 aa, Artificial Sequence
  Description of Artificial Sequence: Synthetic peptide
  Seed: GMDPRMCSLMQGSTL
GMDPRMYSLVQGSTL

SEQ ID NO: 71375 - protein, 15 aa, Artificial Sequence
  Description of Artificial Sequence: Synthetic peptide
  Seed: GMDPRMCSLMQGSTL
GMDPRMYSLVQGSTV

SEQ ID NO: 71376 - protein, 15 aa, Artificial Sequence
  Description of Artificial Sequence: Synthetic peptide
  Seed: GMDPRMCSLMQGSTL
GMDPRMYSLVQPSTI

SEQ ID NO: 71377 - protein, 15 aa, Artificial Sequence
  Description of Artificial Sequence: Synthetic peptide
  Seed: GMDPRMCSLMQGSTL
GMDPRMYSLVQPSTL

SEQ ID NO: 71378 - protein, 15 aa, Artificial Sequence
  Description of Artificial Sequence: Synthetic peptide
  Seed: GMDPRMCSLMQGSTL
GMDPRMYSLVQPSTV

SEQ ID NO: 71379 - protein, 15 aa, Artificial Sequence
  Description of Artificial Sequence: Synthetic peptide
  Seed: GMDPRMCSLMQGSTL
GMDPRMYSLVQSSTI

SEQ ID NO: 71380 - protein, 15 aa, Artificial Sequence
  Description of Artificial Sequence: Synthetic peptide
  Seed: GMDPRMCSLMQGSTL
GMDPRMYSLVQSSTL

SEQ ID NO: 71381 - protein, 15 aa, Artificial Sequence
  Description of Artificial Sequence: Synthetic peptide
  Seed: GMDPRMCSLMQGSTL
GMDPRMYSLVQSSTV

SEQ ID NO: 71382 - protein, 15 aa, Artificial Sequence
  Description of Artificial Sequence: Synthetic peptide
  Seed: GMDPRMCSLMQGSTL
GMDCRMLSAMQASTL

SEQ ID NO: 71383 - protein, 15 aa, Artificial Sequence
  Description of Artificial Sequence: Synthetic peptide
  Seed: GMDPRMCSLMQGSTL
GMDCRMMSAMQASTL

SEQ ID NO: 71384 - protein, 15 aa, Artificial Sequence
  Description of Artificial Sequence: Synthetic peptide
  Seed: GMDPRMCSLMQGSTL
GMDFRMASAMQASTL

SEQ ID NO: 71385 - protein, 15 aa, Artificial Sequence
  Description of Artificial Sequence: Synthetic peptide
  Seed: GMDPRMCSLMQGSTL
GMDFRMASAMQCSTL

SEQ ID NO: 71386 - protein, 15 aa, Artificial Sequence
  Description of Artificial Sequence: Synthetic peptide
  Seed: GMDPRMCSLMQGSTL
GMDFRMASAMQDSTL

SEQ ID NO: 71387 - protein, 15 aa, Artificial Sequence
  Description of Artificial Sequence: Synthetic peptide
  Seed: GMDPRMCSLMQGSTL
GMDFRMASAMQESTL

SEQ ID NO: 71388 - protein, 15 aa, Artificial Sequence
  Description of Artificial Sequence: Synthetic peptide
  Seed: GMDPRMCSLMQGSTL
GMDFRMASAMQFSTL

SEQ ID NO: 71389 - protein, 15 aa, Artificial Sequence
  Description of Artificial Sequence: Synthetic peptide
  Seed: GMDPRMCSLMQGSTL
GMDFRMASAMQGSTL

SEQ ID NO: 71390 - protein, 15 aa, Artificial Sequence
  Description of Artificial Sequence: Synthetic peptide
  Seed: GMDPRMCSLMQGSTL
GMDFRMASAMQHSTL

SEQ ID NO: 71391 - protein, 15 aa, Artificial Sequence
  Description of Artificial Sequence: Synthetic peptide
  Seed: GMDPRMCSLMQGSTL
GMDFRMASAMQISTL

SEQ ID NO: 71392 - protein, 15 aa, Artificial Sequence
  Description of Artificial Sequence: Synthetic peptide
  Seed: GMDPRMCSLMQGSTL
GMDFRMASAMQKSTL

SEQ ID NO: 71393 - protein, 15 aa, Artificial Sequence
  Description of Artificial Sequence: Synthetic peptide
  Seed: GMDPRMCSLMQGSTL
GMDFRMASAMQLSTL

SEQ ID NO: 71394 - protein, 15 aa, Artificial Sequence
  Description of Artificial Sequence: Synthetic peptide
  Seed: GMDPRMCSLMQGSTL
GMDFRMASAMQMSTL

SEQ ID NO: 71395 - protein, 15 aa, Artificial Sequence
  Description of Artificial Sequence: Synthetic peptide
  Seed: GMDPRMCSLMQGSTL
GMDFRMASAMQNSTL

SEQ ID NO: 71396 - protein, 15 aa, Artificial Sequence
  Description of Artificial Sequence: Synthetic peptide
  Seed: GMDPRMCSLMQGSTL
GMDFRMASAMQPSTL

SEQ ID NO: 71397 - protein, 15 aa, Artificial Sequence
  Description of Artificial Sequence: Synthetic peptide
  Seed: GMDPRMCSLMQGSTL
GMDFRMASAMQQSTL

SEQ ID NO: 71398 - protein, 15 aa, Artificial Sequence
  Description of Artificial Sequence: Synthetic peptide
  Seed: GMDPRMCSLMQGSTL
GMDFRMASAMQRSTL

SEQ ID NO: 71399 - protein, 15 aa, Artificial Sequence
  Description of Artificial Sequence: Synthetic peptide
  Seed: GMDPRMCSLMQGSTL
GMDFRMASAMQSSTL

SEQ ID NO: 71400 - protein, 15 aa, Artificial Sequence
  Description of Artificial Sequence: Synthetic peptide
  Seed: GMDPRMCSLMQGSTL
GMDFRMASAMQTSTL

SEQ ID NO: 71401 - protein, 15 aa, Artificial Sequence
  Description of Artificial Sequence: Synthetic peptide
  Seed: GMDPRMCSLMQGSTL
GMDFRMASAMQVSTL

SEQ ID NO: 71402 - protein, 15 aa, Artificial Sequence
  Description of Artificial Sequence: Synthetic peptide
  Seed: GMDPRMCSLMQGSTL
GMDFRMASAMQWSTL

SEQ ID NO: 71403 - protein, 15 aa, Artificial Sequence
  Description of Artificial Sequence: Synthetic peptide
  Seed: GMDPRMCSLMQGSTL
GMDFRMASAMQYSTL

SEQ ID NO: 71404 - protein, 15 aa, Artificial Sequence
  Description of Artificial Sequence: Synthetic peptide
  Seed: GMDPRMCSLMQGSTL
GMDFRMASCMQASTL

SEQ ID NO: 71405 - protein, 15 aa, Artificial Sequence
  Description of Artificial Sequence: Synthetic peptide
  Seed: GMDPRMCSLMQGSTL
GMDFRMASCMQNSTL

SEQ ID NO: 71406 - protein, 15 aa, Artificial Sequence
  Description of Artificial Sequence: Synthetic peptide
  Seed: GMDPRMCSLMQGSTL
GMDFRMASCMQSSTL

SEQ ID NO: 71407 - protein, 15 aa, Artificial Sequence
  Description of Artificial Sequence: Synthetic peptide
  Seed: GMDPRMCSLMQGSTL
GMDFRMASEMQASTL

SEQ ID NO: 71408 - protein, 15 aa, Artificial Sequence
  Description of Artificial Sequence: Synthetic peptide
  Seed: GMDPRMCSLMQGSTL
GMDFRMASEMQNSTL

SEQ ID NO: 71409 - protein, 15 aa, Artificial Sequence
  Description of Artificial Sequence: Synthetic peptide
  Seed: GMDPRMCSLMQGSTL
GMDFRMASEMQSSTL

SEQ ID NO: 71410 - protein, 15 aa, Artificial Sequence
  Description of Artificial Sequence: Synthetic peptide
  Seed: GMDPRMCSLMQGSTL
GMDFRMASEMQTSTL

SEQ ID NO: 71411 - protein, 15 aa, Artificial Sequence
  Description of Artificial Sequence: Synthetic peptide
  Seed: GMDPRMCSLMQGSTL
GMDFRMASFMQASTL

SEQ ID NO: 71412 - protein, 15 aa, Artificial Sequence
  Description of Artificial Sequence: Synthetic peptide
  Seed: GMDPRMCSLMQGSTL
GMDFRMASFMQNSTL

SEQ ID NO: 71413 - protein, 15 aa, Artificial Sequence
  Description of Artificial Sequence: Synthetic peptide
  Seed: GMDPRMCSLMQGSTL
GMDFRMASFMQSSTL

SEQ ID NO: 71414 - protein, 15 aa, Artificial Sequence
  Description of Artificial Sequence: Synthetic peptide
  Seed: GMDPRMCSLMQGSTL
GMDFRMASGMQASTL

SEQ ID NO: 71415 - protein, 15 aa, Artificial Sequence
  Description of Artificial Sequence: Synthetic peptide
  Seed: GMDPRMCSLMQGSTL
GMDFRMASGMQCSTL

SEQ ID NO: 71416 - protein, 15 aa, Artificial Sequence
  Description of Artificial Sequence: Synthetic peptide
  Seed: GMDPRMCSLMQGSTL
GMDFRMASGMQDSTL

SEQ ID NO: 71417 - protein, 15 aa, Artificial Sequence
  Description of Artificial Sequence: Synthetic peptide
  Seed: GMDPRMCSLMQGSTL
GMDFRMASGMQESTL

SEQ ID NO: 71418 - protein, 15 aa, Artificial Sequence
  Description of Artificial Sequence: Synthetic peptide
  Seed: GMDPRMCSLMQGSTL
GMDFRMASGMQFSTL

SEQ ID NO: 71419 - protein, 15 aa, Artificial Sequence
  Description of Artificial Sequence: Synthetic peptide
  Seed: GMDPRMCSLMQGSTL
GMDFRMASGMQGSTL

SEQ ID NO: 71420 - protein, 15 aa, Artificial Sequence
  Description of Artificial Sequence: Synthetic peptide
  Seed: GMDPRMCSLMQGSTL
GMDFRMASGMQHSTL

SEQ ID NO: 71421 - protein, 15 aa, Artificial Sequence
  Description of Artificial Sequence: Synthetic peptide
  Seed: GMDPRMCSLMQGSTL
GMDFRMASGMQISTL

SEQ ID NO: 71422 - protein, 15 aa, Artificial Sequence
  Description of Artificial Sequence: Synthetic peptide
  Seed: GMDPRMCSLMQGSTL
GMDFRMASGMQLSTL

SEQ ID NO: 71423 - protein, 15 aa, Artificial Sequence
  Description of Artificial Sequence: Synthetic peptide
  Seed: GMDPRMCSLMQGSTL
GMDFRMASGMQMSTL

SEQ ID NO: 71424 - protein, 15 aa, Artificial Sequence
  Description of Artificial Sequence: Synthetic peptide
  Seed: GMDPRMCSLMQGSTL
GMDFRMASGMQNSTL

SEQ ID NO: 71425 - protein, 15 aa, Artificial Sequence
  Description of Artificial Sequence: Synthetic peptide
  Seed: GMDPRMCSLMQGSTL
GMDFRMASGMQPSTL

SEQ ID NO: 71426 - protein, 15 aa, Artificial Sequence
  Description of Artificial Sequence: Synthetic peptide
  Seed: GMDPRMCSLMQGSTL
GMDFRMASGMQQSTL

SEQ ID NO: 71427 - protein, 15 aa, Artificial Sequence
  Description of Artificial Sequence: Synthetic peptide
  Seed: GMDPRMCSLMQGSTL
GMDFRMASGMQSSTL

SEQ ID NO: 71428 - protein, 15 aa, Artificial Sequence
  Description of Artificial Sequence: Synthetic peptide
  Seed: GMDPRMCSLMQGSTL
GMDFRMASGMQTSTL

SEQ ID NO: 71429 - protein, 15 aa, Artificial Sequence
  Description of Artificial Sequence: Synthetic peptide
  Seed: GMDPRMCSLMQGSTL
GMDFRMASGMQVSTL

SEQ ID NO: 71430 - protein, 15 aa, Artificial Sequence
  Description of Artificial Sequence: Synthetic peptide
  Seed: GMDPRMCSLMQGSTL
GMDFRMASGMQYSTL

SEQ ID NO: 71431 - protein, 15 aa, Artificial Sequence
  Description of Artificial Sequence: Synthetic peptide
  Seed: GMDPRMCSLMQGSTL
GMDFRMASHMQASTL

SEQ ID NO: 71432 - protein, 15 aa, Artificial Sequence
  Description of Artificial Sequence: Synthetic peptide
  Seed: GMDPRMCSLMQGSTL
GMDFRMASHMQNSTL

SEQ ID NO: 71433 - protein, 15 aa, Artificial Sequence
  Description of Artificial Sequence: Synthetic peptide
  Seed: GMDPRMCSLMQGSTL
GMDFRMASHMQSSTL

SEQ ID NO: 71434 - protein, 15 aa, Artificial Sequence
  Description of Artificial Sequence: Synthetic peptide
  Seed: GMDPRMCSLMQGSTL
GMDFRMASHMQTSTL

SEQ ID NO: 71435 - protein, 15 aa, Artificial Sequence
  Description of Artificial Sequence: Synthetic peptide
  Seed: GMDPRMCSLMQGSTL
GMDFRMASIMQASTL

SEQ ID NO: 71436 - protein, 15 aa, Artificial Sequence
  Description of Artificial Sequence: Synthetic peptide
  Seed: GMDPRMCSLMQGSTL
GMDFRMASIMQCSTL

SEQ ID NO: 71437 - protein, 15 aa, Artificial Sequence
  Description of Artificial Sequence: Synthetic peptide
  Seed: GMDPRMCSLMQGSTL
GMDFRMASIMQDSTL

SEQ ID NO: 71438 - protein, 15 aa, Artificial Sequence
  Description of Artificial Sequence: Synthetic peptide
  Seed: GMDPRMCSLMQGSTL
GMDFRMASIMQESTL

SEQ ID NO: 71439 - protein, 15 aa, Artificial Sequence
  Description of Artificial Sequence: Synthetic peptide
  Seed: GMDPRMCSLMQGSTL
GMDFRMASIMQFSTL

SEQ ID NO: 71440 - protein, 15 aa, Artificial Sequence
  Description of Artificial Sequence: Synthetic peptide
  Seed: GMDPRMCSLMQGSTL
GMDFRMASIMQGSTL

SEQ ID NO: 71441 - protein, 15 aa, Artificial Sequence
  Description of Artificial Sequence: Synthetic peptide
  Seed: GMDPRMCSLMQGSTL
GMDFRMASIMQHSTL

SEQ ID NO: 71442 - protein, 15 aa, Artificial Sequence
  Description of Artificial Sequence: Synthetic peptide
  Seed: GMDPRMCSLMQGSTL
GMDFRMASIMQISTL

SEQ ID NO: 71443 - protein, 15 aa, Artificial Sequence
  Description of Artificial Sequence: Synthetic peptide
  Seed: GMDPRMCSLMQGSTL
GMDFRMASIMQKSTL

SEQ ID NO: 71444 - protein, 15 aa, Artificial Sequence
  Description of Artificial Sequence: Synthetic peptide
  Seed: GMDPRMCSLMQGSTL
GMDFRMASIMQLSTL

SEQ ID NO: 71445 - protein, 15 aa, Artificial Sequence
  Description of Artificial Sequence: Synthetic peptide
  Seed: GMDPRMCSLMQGSTL
GMDFRMASIMQMSTL

SEQ ID NO: 71446 - protein, 15 aa, Artificial Sequence
  Description of Artificial Sequence: Synthetic peptide
  Seed: GMDPRMCSLMQGSTL
GMDFRMASIMQNSTL

SEQ ID NO: 71447 - protein, 15 aa, Artificial Sequence
  Description of Artificial Sequence: Synthetic peptide
  Seed: GMDPRMCSLMQGSTL
GMDFRMASIMQPSTL

SEQ ID NO: 71448 - protein, 15 aa, Artificial Sequence
  Description of Artificial Sequence: Synthetic peptide
  Seed: GMDPRMCSLMQGSTL
GMDFRMASIMQQSTL

SEQ ID NO: 71449 - protein, 15 aa, Artificial Sequence
  Description of Artificial Sequence: Synthetic peptide
  Seed: GMDPRMCSLMQGSTL
GMDFRMASIMQRSTL

SEQ ID NO: 71450 - protein, 15 aa, Artificial Sequence
  Description of Artificial Sequence: Synthetic peptide
  Seed: GMDPRMCSLMQGSTL
GMDFRMASIMQSSTL

SEQ ID NO: 71451 - protein, 15 aa, Artificial Sequence
  Description of Artificial Sequence: Synthetic peptide
  Seed: GMDPRMCSLMQGSTL
GMDFRMASIMQTSTL

SEQ ID NO: 71452 - protein, 15 aa, Artificial Sequence
  Description of Artificial Sequence: Synthetic peptide
  Seed: GMDPRMCSLMQGSTL
GMDFRMASIMQVSTL

SEQ ID NO: 71453 - protein, 15 aa, Artificial Sequence
  Description of Artificial Sequence: Synthetic peptide
  Seed: GMDPRMCSLMQGSTL
GMDFRMASIMQYSTL

SEQ ID NO: 71454 - protein, 15 aa, Artificial Sequence
  Description of Artificial Sequence: Synthetic peptide
  Seed: GMDPRMCSLMQGSTL
GMDFRMASLMQASTL

SEQ ID NO: 71455 - protein, 15 aa, Artificial Sequence
  Description of Artificial Sequence: Synthetic peptide
  Seed: GMDPRMCSLMQGSTL
GMDFRMASLMQDSTL

SEQ ID NO: 71456 - protein, 15 aa, Artificial Sequence
  Description of Artificial Sequence: Synthetic peptide
  Seed: GMDPRMCSLMQGSTL
GMDFRMASLMQESTL

SEQ ID NO: 71457 - protein, 15 aa, Artificial Sequence
  Description of Artificial Sequence: Synthetic peptide
  Seed: GMDPRMCSLMQGSTL
GMDFRMASLMQGSTL

SEQ ID NO: 71458 - protein, 15 aa, Artificial Sequence
  Description of Artificial Sequence: Synthetic peptide
  Seed: GMDPRMCSLMQGSTL
GMDFRMASLMQHSTL

SEQ ID NO: 71459 - protein, 15 aa, Artificial Sequence
  Description of Artificial Sequence: Synthetic peptide
  Seed: GMDPRMCSLMQGSTL
GMDFRMASLMQISTL

SEQ ID NO: 71460 - protein, 15 aa, Artificial Sequence
  Description of Artificial Sequence: Synthetic peptide
  Seed: GMDPRMCSLMQGSTL
GMDFRMASLMQLSTL

SEQ ID NO: 71461 - protein, 15 aa, Artificial Sequence
  Description of Artificial Sequence: Synthetic peptide
  Seed: GMDPRMCSLMQGSTL
GMDFRMASLMQMSTL

SEQ ID NO: 71462 - protein, 15 aa, Artificial Sequence
  Description of Artificial Sequence: Synthetic peptide
  Seed: GMDPRMCSLMQGSTL
GMDFRMASLMQNSTL

SEQ ID NO: 71463 - protein, 15 aa, Artificial Sequence
  Description of Artificial Sequence: Synthetic peptide
  Seed: GMDPRMCSLMQGSTL
GMDFRMASLMQPSTL

SEQ ID NO: 71464 - protein, 15 aa, Artificial Sequence
  Description of Artificial Sequence: Synthetic peptide
  Seed: GMDPRMCSLMQGSTL
GMDFRMASLMQQSTL

SEQ ID NO: 71465 - protein, 15 aa, Artificial Sequence
  Description of Artificial Sequence: Synthetic peptide
  Seed: GMDPRMCSLMQGSTL
GMDFRMASLMQSSTL

SEQ ID NO: 71466 - protein, 15 aa, Artificial Sequence
  Description of Artificial Sequence: Synthetic peptide
  Seed: GMDPRMCSLMQGSTL
GMDFRMASLMQTSTL

SEQ ID NO: 71467 - protein, 15 aa, Artificial Sequence
  Description of Artificial Sequence: Synthetic peptide
  Seed: GMDPRMCSLMQGSTL
GMDFRMASLMQVSTL

SEQ ID NO: 71468 - protein, 15 aa, Artificial Sequence
  Description of Artificial Sequence: Synthetic peptide
  Seed: GMDPRMCSLMQGSTL
GMDFRMASMMQASTL

SEQ ID NO: 71469 - protein, 15 aa, Artificial Sequence
  Description of Artificial Sequence: Synthetic peptide
  Seed: GMDPRMCSLMQGSTL
GMDFRMASMMQDSTL

SEQ ID NO: 71470 - protein, 15 aa, Artificial Sequence
  Description of Artificial Sequence: Synthetic peptide
  Seed: GMDPRMCSLMQGSTL
GMDFRMASMMQESTL

SEQ ID NO: 71471 - protein, 15 aa, Artificial Sequence
  Description of Artificial Sequence: Synthetic peptide
  Seed: GMDPRMCSLMQGSTL
GMDFRMASMMQGSTL

SEQ ID NO: 71472 - protein, 15 aa, Artificial Sequence
  Description of Artificial Sequence: Synthetic peptide
  Seed: GMDPRMCSLMQGSTL
GMDFRMASMMQHSTL

SEQ ID NO: 71473 - protein, 15 aa, Artificial Sequence
  Description of Artificial Sequence: Synthetic peptide
  Seed: GMDPRMCSLMQGSTL
GMDFRMASMMQISTL

SEQ ID NO: 71474 - protein, 15 aa, Artificial Sequence
  Description of Artificial Sequence: Synthetic peptide
  Seed: GMDPRMCSLMQGSTL
GMDFRMASMMQLSTL

SEQ ID NO: 71475 - protein, 15 aa, Artificial Sequence
  Description of Artificial Sequence: Synthetic peptide
  Seed: GMDPRMCSLMQGSTL
GMDFRMASMMQMSTL

SEQ ID NO: 71476 - protein, 15 aa, Artificial Sequence
  Description of Artificial Sequence: Synthetic peptide
  Seed: GMDPRMCSLMQGSTL
GMDFRMASMMQNSTL

SEQ ID NO: 71477 - protein, 15 aa, Artificial Sequence
  Description of Artificial Sequence: Synthetic peptide
  Seed: GMDPRMCSLMQGSTL
GMDFRMASMMQPSTL

SEQ ID NO: 71478 - protein, 15 aa, Artificial Sequence
  Description of Artificial Sequence: Synthetic peptide
  Seed: GMDPRMCSLMQGSTL
GMDFRMASMMQQSTL

SEQ ID NO: 71479 - protein, 15 aa, Artificial Sequence
  Description of Artificial Sequence: Synthetic peptide
  Seed: GMDPRMCSLMQGSTL
GMDFRMASMMQSSTL

SEQ ID NO: 71480 - protein, 15 aa, Artificial Sequence
  Description of Artificial Sequence: Synthetic peptide
  Seed: GMDPRMCSLMQGSTL
GMDFRMASMMQTSTL

SEQ ID NO: 71481 - protein, 15 aa, Artificial Sequence
  Description of Artificial Sequence: Synthetic peptide
  Seed: GMDPRMCSLMQGSTL
GMDFRMASMMQVSTL

SEQ ID NO: 71482 - protein, 15 aa, Artificial Sequence
  Description of Artificial Sequence: Synthetic peptide
  Seed: GMDPRMCSLMQGSTL
GMDFRMASNMQASTL

SEQ ID NO: 71483 - protein, 15 aa, Artificial Sequence
  Description of Artificial Sequence: Synthetic peptide
  Seed: GMDPRMCSLMQGSTL
GMDFRMASNMQCSTL

SEQ ID NO: 71484 - protein, 15 aa, Artificial Sequence
  Description of Artificial Sequence: Synthetic peptide
  Seed: GMDPRMCSLMQGSTL
GMDFRMASNMQDSTL

SEQ ID NO: 71485 - protein, 15 aa, Artificial Sequence
  Description of Artificial Sequence: Synthetic peptide
  Seed: GMDPRMCSLMQGSTL
GMDFRMASNMQESTL

SEQ ID NO: 71486 - protein, 15 aa, Artificial Sequence
  Description of Artificial Sequence: Synthetic peptide
  Seed: GMDPRMCSLMQGSTL
GMDFRMASNMQFSTL

SEQ ID NO: 71487 - protein, 15 aa, Artificial Sequence
  Description of Artificial Sequence: Synthetic peptide
  Seed: GMDPRMCSLMQGSTL
GMDFRMASNMQGSTL

SEQ ID NO: 71488 - protein, 15 aa, Artificial Sequence
  Description of Artificial Sequence: Synthetic peptide
  Seed: GMDPRMCSLMQGSTL
GMDFRMASNMQHSTL

SEQ ID NO: 71489 - protein, 15 aa, Artificial Sequence
  Description of Artificial Sequence: Synthetic peptide
  Seed: GMDPRMCSLMQGSTL
GMDFRMASNMQISTL

SEQ ID NO: 71490 - protein, 15 aa, Artificial Sequence
  Description of Artificial Sequence: Synthetic peptide
  Seed: GMDPRMCSLMQGSTL
GMDFRMASNMQLSTL

SEQ ID NO: 71491 - protein, 15 aa, Artificial Sequence
  Description of Artificial Sequence: Synthetic peptide
  Seed: GMDPRMCSLMQGSTL
GMDFRMASNMQMSTL

SEQ ID NO: 71492 - protein, 15 aa, Artificial Sequence
  Description of Artificial Sequence: Synthetic peptide
  Seed: GMDPRMCSLMQGSTL
GMDFRMASNMQNSTL

SEQ ID NO: 71493 - protein, 15 aa, Artificial Sequence
  Description of Artificial Sequence: Synthetic peptide
  Seed: GMDPRMCSLMQGSTL
GMDFRMASNMQPSTL

SEQ ID NO: 71494 - protein, 15 aa, Artificial Sequence
  Description of Artificial Sequence: Synthetic peptide
  Seed: GMDPRMCSLMQGSTL
GMDFRMASNMQQSTL

SEQ ID NO: 71495 - protein, 15 aa, Artificial Sequence
  Description of Artificial Sequence: Synthetic peptide
  Seed: GMDPRMCSLMQGSTL
GMDFRMASNMQSSTL

SEQ ID NO: 71496 - protein, 15 aa, Artificial Sequence
  Description of Artificial Sequence: Synthetic peptide
  Seed: GMDPRMCSLMQGSTL
GMDFRMASNMQTSTL

SEQ ID NO: 71497 - protein, 15 aa, Artificial Sequence
  Description of Artificial Sequence: Synthetic peptide
  Seed: GMDPRMCSLMQGSTL
GMDFRMASNMQVSTL

SEQ ID NO: 71498 - protein, 15 aa, Artificial Sequence
  Description of Artificial Sequence: Synthetic peptide
  Seed: GMDPRMCSLMQGSTL
GMDFRMASNMQYSTL

SEQ ID NO: 71499 - protein, 15 aa, Artificial Sequence
  Description of Artificial Sequence: Synthetic peptide
  Seed: GMDPRMCSLMQGSTL
GMDFRMASPMQASTL

SEQ ID NO: 71500 - protein, 15 aa, Artificial Sequence
  Description of Artificial Sequence: Synthetic peptide
  Seed: GMDPRMCSLMQGSTL
GMDFRMASPMQCSTL

SEQ ID NO: 71501 - protein, 15 aa, Artificial Sequence
  Description of Artificial Sequence: Synthetic peptide
  Seed: GMDPRMCSLMQGSTL
GMDFRMASPMQDSTL

SEQ ID NO: 71502 - protein, 15 aa, Artificial Sequence
  Description of Artificial Sequence: Synthetic peptide
  Seed: GMDPRMCSLMQGSTL
GMDFRMASPMQESTL

SEQ ID NO: 71503 - protein, 15 aa, Artificial Sequence
  Description of Artificial Sequence: Synthetic peptide
  Seed: GMDPRMCSLMQGSTL
GMDFRMASPMQFSTL

SEQ ID NO: 71504 - protein, 15 aa, Artificial Sequence
  Description of Artificial Sequence: Synthetic peptide
  Seed: GMDPRMCSLMQGSTL
GMDFRMASPMQGSTL

SEQ ID NO: 71505 - protein, 15 aa, Artificial Sequence
  Description of Artificial Sequence: Synthetic peptide
  Seed: GMDPRMCSLMQGSTL
GMDFRMASPMQHSTL

SEQ ID NO: 71506 - protein, 15 aa, Artificial Sequence
  Description of Artificial Sequence: Synthetic peptide
  Seed: GMDPRMCSLMQGSTL
GMDFRMASPMQISTL

SEQ ID NO: 71507 - protein, 15 aa, Artificial Sequence
  Description of Artificial Sequence: Synthetic peptide
  Seed: GMDPRMCSLMQGSTL
GMDFRMASPMQKSTL

SEQ ID NO: 71508 - protein, 15 aa, Artificial Sequence
  Description of Artificial Sequence: Synthetic peptide
  Seed: GMDPRMCSLMQGSTL
GMDFRMASPMQLSTL

SEQ ID NO: 71509 - protein, 15 aa, Artificial Sequence
  Description of Artificial Sequence: Synthetic peptide
  Seed: GMDPRMCSLMQGSTL
GMDFRMASPMQMSTL

SEQ ID NO: 71510 - protein, 15 aa, Artificial Sequence
  Description of Artificial Sequence: Synthetic peptide
  Seed: GMDPRMCSLMQGSTL
GMDFRMASPMQNSTL

SEQ ID NO: 71511 - protein, 15 aa, Artificial Sequence
  Description of Artificial Sequence: Synthetic peptide
  Seed: GMDPRMCSLMQGSTL
GMDFRMASPMQPSTL

SEQ ID NO: 71512 - protein, 15 aa, Artificial Sequence
  Description of Artificial Sequence: Synthetic peptide
  Seed: GMDPRMCSLMQGSTL
GMDFRMASPMQQSTL

SEQ ID NO: 71513 - protein, 15 aa, Artificial Sequence
  Description of Artificial Sequence: Synthetic peptide
  Seed: GMDPRMCSLMQGSTL
GMDFRMASPMQRSTL

SEQ ID NO: 71514 - protein, 15 aa, Artificial Sequence
  Description of Artificial Sequence: Synthetic peptide
  Seed: GMDPRMCSLMQGSTL
GMDFRMASPMQSSTL

SEQ ID NO: 71515 - protein, 15 aa, Artificial Sequence
  Description of Artificial Sequence: Synthetic peptide
  Seed: GMDPRMCSLMQGSTL
GMDFRMASPMQTSTL

SEQ ID NO: 71516 - protein, 15 aa, Artificial Sequence
  Description of Artificial Sequence: Synthetic peptide
  Seed: GMDPRMCSLMQGSTL
GMDFRMASPMQVSTL

SEQ ID NO: 71517 - protein, 15 aa, Artificial Sequence
  Description of Artificial Sequence: Synthetic peptide
  Seed: GMDPRMCSLMQGSTL
GMDFRMASPMQWSTL

SEQ ID NO: 71518 - protein, 15 aa, Artificial Sequence
  Description of Artificial Sequence: Synthetic peptide
  Seed: GMDPRMCSLMQGSTL
GMDFRMASPMQYSTL

SEQ ID NO: 71519 - protein, 15 aa, Artificial Sequence
  Description of Artificial Sequence: Synthetic peptide
  Seed: GMDPRMCSLMQGSTL
GMDFRMASQMQASTL

SEQ ID NO: 71520 - protein, 15 aa, Artificial Sequence
  Description of Artificial Sequence: Synthetic peptide
  Seed: GMDPRMCSLMQGSTL
GMDFRMASQMQHSTL

SEQ ID NO: 71521 - protein, 15 aa, Artificial Sequence
  Description of Artificial Sequence: Synthetic peptide
  Seed: GMDPRMCSLMQGSTL
GMDFRMASQMQISTL

SEQ ID NO: 71522 - protein, 15 aa, Artificial Sequence
  Description of Artificial Sequence: Synthetic peptide
  Seed: GMDPRMCSLMQGSTL
GMDFRMASQMQLSTL

SEQ ID NO: 71523 - protein, 15 aa, Artificial Sequence
  Description of Artificial Sequence: Synthetic peptide
  Seed: GMDPRMCSLMQGSTL
GMDFRMASQMQMSTL

SEQ ID NO: 71524 - protein, 15 aa, Artificial Sequence
  Description of Artificial Sequence: Synthetic peptide
  Seed: GMDPRMCSLMQGSTL
GMDFRMASQMQNSTL

SEQ ID NO: 71525 - protein, 15 aa, Artificial Sequence
  Description of Artificial Sequence: Synthetic peptide
  Seed: GMDPRMCSLMQGSTL
GMDFRMASQMQSSTL

SEQ ID NO: 71526 - protein, 15 aa, Artificial Sequence
  Description of Artificial Sequence: Synthetic peptide
  Seed: GMDPRMCSLMQGSTL
GMDFRMASQMQTSTL

SEQ ID NO: 71527 - protein, 15 aa, Artificial Sequence
  Description of Artificial Sequence: Synthetic peptide
  Seed: GMDPRMCSLMQGSTL
GMDFRMASQMQVSTL

SEQ ID NO: 71528 - protein, 15 aa, Artificial Sequence
  Description of Artificial Sequence: Synthetic peptide
  Seed: GMDPRMCSLMQGSTL
GMDFRMASSMQASTL

SEQ ID NO: 71529 - protein, 15 aa, Artificial Sequence
  Description of Artificial Sequence: Synthetic peptide
  Seed: GMDPRMCSLMQGSTL
GMDFRMASSMQCSTL

SEQ ID NO: 71530 - protein, 15 aa, Artificial Sequence
  Description of Artificial Sequence: Synthetic peptide
  Seed: GMDPRMCSLMQGSTL
GMDFRMASSMQDSTL

SEQ ID NO: 71531 - protein, 15 aa, Artificial Sequence
  Description of Artificial Sequence: Synthetic peptide
  Seed: GMDPRMCSLMQGSTL
GMDFRMASSMQESTL

SEQ ID NO: 71532 - protein, 15 aa, Artificial Sequence
  Description of Artificial Sequence: Synthetic peptide
  Seed: GMDPRMCSLMQGSTL
GMDFRMASSMQFSTL

SEQ ID NO: 71533 - protein, 15 aa, Artificial Sequence
  Description of Artificial Sequence: Synthetic peptide
  Seed: GMDPRMCSLMQGSTL
GMDFRMASSMQGSTL

SEQ ID NO: 71534 - protein, 15 aa, Artificial Sequence
  Description of Artificial Sequence: Synthetic peptide
  Seed: GMDPRMCSLMQGSTL
GMDFRMASSMQHSTL

SEQ ID NO: 71535 - protein, 15 aa, Artificial Sequence
  Description of Artificial Sequence: Synthetic peptide
  Seed: GMDPRMCSLMQGSTL
GMDFRMASSMQISTL

SEQ ID NO: 71536 - protein, 15 aa, Artificial Sequence
  Description of Artificial Sequence: Synthetic peptide
  Seed: GMDPRMCSLMQGSTL
GMDFRMASSMQKSTL

SEQ ID NO: 71537 - protein, 15 aa, Artificial Sequence
  Description of Artificial Sequence: Synthetic peptide
  Seed: GMDPRMCSLMQGSTL
GMDFRMASSMQLSTL

SEQ ID NO: 71538 - protein, 15 aa, Artificial Sequence
  Description of Artificial Sequence: Synthetic peptide
  Seed: GMDPRMCSLMQGSTL
GMDFRMASSMQMSTL

SEQ ID NO: 71539 - protein, 15 aa, Artificial Sequence
  Description of Artificial Sequence: Synthetic peptide
  Seed: GMDPRMCSLMQGSTL
GMDFRMASSMQNSTL

SEQ ID NO: 71540 - protein, 15 aa, Artificial Sequence
  Description of Artificial Sequence: Synthetic peptide
  Seed: GMDPRMCSLMQGSTL
GMDFRMASSMQPSTL

SEQ ID NO: 71541 - protein, 15 aa, Artificial Sequence
  Description of Artificial Sequence: Synthetic peptide
  Seed: GMDPRMCSLMQGSTL
GMDFRMASSMQQSTL

SEQ ID NO: 71542 - protein, 15 aa, Artificial Sequence
  Description of Artificial Sequence: Synthetic peptide
  Seed: GMDPRMCSLMQGSTL
GMDFRMASSMQRSTL

SEQ ID NO: 71543 - protein, 15 aa, Artificial Sequence
  Description of Artificial Sequence: Synthetic peptide
  Seed: GMDPRMCSLMQGSTL
GMDFRMASSMQSSTL

SEQ ID NO: 71544 - protein, 15 aa, Artificial Sequence
  Description of Artificial Sequence: Synthetic peptide
  Seed: GMDPRMCSLMQGSTL
GMDFRMASSMQTSTL

SEQ ID NO: 71545 - protein, 15 aa, Artificial Sequence
  Description of Artificial Sequence: Synthetic peptide
  Seed: GMDPRMCSLMQGSTL
GMDFRMASSMQVSTL

SEQ ID NO: 71546 - protein, 15 aa, Artificial Sequence
  Description of Artificial Sequence: Synthetic peptide
  Seed: GMDPRMCSLMQGSTL
GMDFRMASSMQWSTL

SEQ ID NO: 71547 - protein, 15 aa, Artificial Sequence
  Description of Artificial Sequence: Synthetic peptide
  Seed: GMDPRMCSLMQGSTL
GMDFRMASSMQYSTL

SEQ ID NO: 71548 - protein, 15 aa, Artificial Sequence
  Description of Artificial Sequence: Synthetic peptide
  Seed: GMDPRMCSLMQGSTL
GMDFRMASTMQASTL

SEQ ID NO: 71549 - protein, 15 aa, Artificial Sequence
  Description of Artificial Sequence: Synthetic peptide
  Seed: GMDPRMCSLMQGSTL
GMDFRMASTMQCSTL

SEQ ID NO: 71550 - protein, 15 aa, Artificial Sequence
  Description of Artificial Sequence: Synthetic peptide
  Seed: GMDPRMCSLMQGSTL
GMDFRMASTMQDSTL

SEQ ID NO: 71551 - protein, 15 aa, Artificial Sequence
  Description of Artificial Sequence: Synthetic peptide
  Seed: GMDPRMCSLMQGSTL
GMDFRMASTMQESTL

SEQ ID NO: 71552 - protein, 15 aa, Artificial Sequence
  Description of Artificial Sequence: Synthetic peptide
  Seed: GMDPRMCSLMQGSTL
GMDFRMASTMQFSTL

SEQ ID NO: 71553 - protein, 15 aa, Artificial Sequence
  Description of Artificial Sequence: Synthetic peptide
  Seed: GMDPRMCSLMQGSTL
GMDFRMASTMQGSTL

SEQ ID NO: 71554 - protein, 15 aa, Artificial Sequence
  Description of Artificial Sequence: Synthetic peptide
  Seed: GMDPRMCSLMQGSTL
GMDFRMASTMQHSTL

SEQ ID NO: 71555 - protein, 15 aa, Artificial Sequence
  Description of Artificial Sequence: Synthetic peptide
  Seed: GMDPRMCSLMQGSTL
GMDFRMASTMQISTL

SEQ ID NO: 71556 - protein, 15 aa, Artificial Sequence
  Description of Artificial Sequence: Synthetic peptide
  Seed: GMDPRMCSLMQGSTL
GMDFRMASTMQKSTL

SEQ ID NO: 71557 - protein, 15 aa, Artificial Sequence
  Description of Artificial Sequence: Synthetic peptide
  Seed: GMDPRMCSLMQGSTL
GMDFRMASTMQLSTL

SEQ ID NO: 71558 - protein, 15 aa, Artificial Sequence
  Description of Artificial Sequence: Synthetic peptide
  Seed: GMDPRMCSLMQGSTL
GMDFRMASTMQMSTL

SEQ ID NO: 71559 - protein, 15 aa, Artificial Sequence
  Description of Artificial Sequence: Synthetic peptide
  Seed: GMDPRMCSLMQGSTL
GMDFRMASTMQNSTL

SEQ ID NO: 71560 - protein, 15 aa, Artificial Sequence
  Description of Artificial Sequence: Synthetic peptide
  Seed: GMDPRMCSLMQGSTL
GMDFRMASTMQPSTL

SEQ ID NO: 71561 - protein, 15 aa, Artificial Sequence
  Description of Artificial Sequence: Synthetic peptide
  Seed: GMDPRMCSLMQGSTL
GMDFRMASTMQQSTL

SEQ ID NO: 71562 - protein, 15 aa, Artificial Sequence
  Description of Artificial Sequence: Synthetic peptide
  Seed: GMDPRMCSLMQGSTL
GMDFRMASTMQRSTL

SEQ ID NO: 71563 - protein, 15 aa, Artificial Sequence
  Description of Artificial Sequence: Synthetic peptide
  Seed: GMDPRMCSLMQGSTL
GMDFRMASTMQSSTL

SEQ ID NO: 71564 - protein, 15 aa, Artificial Sequence
  Description of Artificial Sequence: Synthetic peptide
  Seed: GMDPRMCSLMQGSTL
GMDFRMASTMQTSTL

SEQ ID NO: 71565 - protein, 15 aa, Artificial Sequence
  Description of Artificial Sequence: Synthetic peptide
  Seed: GMDPRMCSLMQGSTL
GMDFRMASTMQVSTL

SEQ ID NO: 71566 - protein, 15 aa, Artificial Sequence
  Description of Artificial Sequence: Synthetic peptide
  Seed: GMDPRMCSLMQGSTL
GMDFRMASTMQWSTL

SEQ ID NO: 71567 - protein, 15 aa, Artificial Sequence
  Description of Artificial Sequence: Synthetic peptide
  Seed: GMDPRMCSLMQGSTL
GMDFRMASTMQYSTL

SEQ ID NO: 71568 - protein, 15 aa, Artificial Sequence
  Description of Artificial Sequence: Synthetic peptide
  Seed: GMDPRMCSLMQGSTL
GMDFRMASVMQASTL

SEQ ID NO: 71569 - protein, 15 aa, Artificial Sequence
  Description of Artificial Sequence: Synthetic peptide
  Seed: GMDPRMCSLMQGSTL
GMDFRMASVMQCSTL

SEQ ID NO: 71570 - protein, 15 aa, Artificial Sequence
  Description of Artificial Sequence: Synthetic peptide
  Seed: GMDPRMCSLMQGSTL
GMDFRMASVMQDSTL

SEQ ID NO: 71571 - protein, 15 aa, Artificial Sequence
  Description of Artificial Sequence: Synthetic peptide
  Seed: GMDPRMCSLMQGSTL
GMDFRMASVMQESTL

SEQ ID NO: 71572 - protein, 15 aa, Artificial Sequence
  Description of Artificial Sequence: Synthetic peptide
  Seed: GMDPRMCSLMQGSTL
GMDFRMASVMQFSTL

SEQ ID NO: 71573 - protein, 15 aa, Artificial Sequence
  Description of Artificial Sequence: Synthetic peptide
  Seed: GMDPRMCSLMQGSTL
GMDFRMASVMQGSTL

SEQ ID NO: 71574 - protein, 15 aa, Artificial Sequence
  Description of Artificial Sequence: Synthetic peptide
  Seed: GMDPRMCSLMQGSTL
GMDFRMASVMQHSTL

SEQ ID NO: 71575 - protein, 15 aa, Artificial Sequence
  Description of Artificial Sequence: Synthetic peptide
  Seed: GMDPRMCSLMQGSTL
GMDFRMASVMQISTL

SEQ ID NO: 71576 - protein, 15 aa, Artificial Sequence
  Description of Artificial Sequence: Synthetic peptide
  Seed: GMDPRMCSLMQGSTL
GMDFRMASVMQKSTL

SEQ ID NO: 71577 - protein, 15 aa, Artificial Sequence
  Description of Artificial Sequence: Synthetic peptide
  Seed: GMDPRMCSLMQGSTL
GMDFRMASVMQLSTL

SEQ ID NO: 71578 - protein, 15 aa, Artificial Sequence
  Description of Artificial Sequence: Synthetic peptide
  Seed: GMDPRMCSLMQGSTL
GMDFRMASVMQMSTL

SEQ ID NO: 71579 - protein, 15 aa, Artificial Sequence
  Description of Artificial Sequence: Synthetic peptide
  Seed: GMDPRMCSLMQGSTL
GMDFRMASVMQNSTL

SEQ ID NO: 71580 - protein, 15 aa, Artificial Sequence
  Description of Artificial Sequence: Synthetic peptide
  Seed: GMDPRMCSLMQGSTL
GMDFRMASVMQPSTL

SEQ ID NO: 71581 - protein, 15 aa, Artificial Sequence
  Description of Artificial Sequence: Synthetic peptide
  Seed: GMDPRMCSLMQGSTL
GMDFRMASVMQQSTL

SEQ ID NO: 71582 - protein, 15 aa, Artificial Sequence
  Description of Artificial Sequence: Synthetic peptide
  Seed: GMDPRMCSLMQGSTL
GMDFRMASVMQRSTL

SEQ ID NO: 71583 - protein, 15 aa, Artificial Sequence
  Description of Artificial Sequence: Synthetic peptide
  Seed: GMDPRMCSLMQGSTL
GMDFRMASVMQSSTL

SEQ ID NO: 71584 - protein, 15 aa, Artificial Sequence
  Description of Artificial Sequence: Synthetic peptide
  Seed: GMDPRMCSLMQGSTL
GMDFRMASVMQTSTL

SEQ ID NO: 71585 - protein, 15 aa, Artificial Sequence
  Description of Artificial Sequence: Synthetic peptide
  Seed: GMDPRMCSLMQGSTL
GMDFRMASVMQVSTL

SEQ ID NO: 71586 - protein, 15 aa, Artificial Sequence
  Description of Artificial Sequence: Synthetic peptide
  Seed: GMDPRMCSLMQGSTL
GMDFRMASVMQYSTL

SEQ ID NO: 71587 - protein, 15 aa, Artificial Sequence
  Description of Artificial Sequence: Synthetic peptide
  Seed: GMDPRMCSLMQGSTL
GMDFRMASWMQASTL

SEQ ID NO: 71588 - protein, 15 aa, Artificial Sequence
  Description of Artificial Sequence: Synthetic peptide
  Seed: GMDPRMCSLMQGSTL
GMDFRMASWMQNSTL

SEQ ID NO: 71589 - protein, 15 aa, Artificial Sequence
  Description of Artificial Sequence: Synthetic peptide
  Seed: GMDPRMCSLMQGSTL
GMDFRMASWMQSSTL

SEQ ID NO: 71590 - protein, 15 aa, Artificial Sequence
  Description of Artificial Sequence: Synthetic peptide
  Seed: GMDPRMCSLMQGSTL
GMDFRMASYMQNSTL

SEQ ID NO: 71591 - protein, 15 aa, Artificial Sequence
  Description of Artificial Sequence: Synthetic peptide
  Seed: GMDPRMCSLMQGSTL
GMDFRMCSAMQASTL

SEQ ID NO: 71592 - protein, 15 aa, Artificial Sequence
  Description of Artificial Sequence: Synthetic peptide
  Seed: GMDPRMCSLMQGSTL
GMDFRMCSAMQGSTL

SEQ ID NO: 71593 - protein, 15 aa, Artificial Sequence
  Description of Artificial Sequence: Synthetic peptide
  Seed: GMDPRMCSLMQGSTL
GMDFRMCSAMQHSTL

SEQ ID NO: 71594 - protein, 15 aa, Artificial Sequence
  Description of Artificial Sequence: Synthetic peptide
  Seed: GMDPRMCSLMQGSTL
GMDFRMCSAMQISTL

SEQ ID NO: 71595 - protein, 15 aa, Artificial Sequence
  Description of Artificial Sequence: Synthetic peptide
  Seed: GMDPRMCSLMQGSTL
GMDFRMCSAMQLSTL

SEQ ID NO: 71596 - protein, 15 aa, Artificial Sequence
  Description of Artificial Sequence: Synthetic peptide
  Seed: GMDPRMCSLMQGSTL
GMDFRMCSAMQMSTL

SEQ ID NO: 71597 - protein, 15 aa, Artificial Sequence
  Description of Artificial Sequence: Synthetic peptide
  Seed: GMDPRMCSLMQGSTL
GMDFRMCSAMQNSTL

SEQ ID NO: 71598 - protein, 15 aa, Artificial Sequence
  Description of Artificial Sequence: Synthetic peptide
  Seed: GMDPRMCSLMQGSTL
GMDFRMCSAMQQSTL

SEQ ID NO: 71599 - protein, 15 aa, Artificial Sequence
  Description of Artificial Sequence: Synthetic peptide
  Seed: GMDPRMCSLMQGSTL
GMDFRMCSAMQSSTL

SEQ ID NO: 71600 - protein, 15 aa, Artificial Sequence
  Description of Artificial Sequence: Synthetic peptide
  Seed: GMDPRMCSLMQGSTL
GMDFRMCSAMQTSTL

SEQ ID NO: 71601 - protein, 15 aa, Artificial Sequence
  Description of Artificial Sequence: Synthetic peptide
  Seed: GMDPRMCSLMQGSTL
GMDFRMCSAMQVSTL

SEQ ID NO: 71602 - protein, 15 aa, Artificial Sequence
  Description of Artificial Sequence: Synthetic peptide
  Seed: GMDPRMCSLMQGSTL
GMDFRMCSIMQASTL

SEQ ID NO: 71603 - protein, 15 aa, Artificial Sequence
  Description of Artificial Sequence: Synthetic peptide
  Seed: GMDPRMCSLMQGSTL
GMDFRMCSIMQNSTL

SEQ ID NO: 71604 - protein, 15 aa, Artificial Sequence
  Description of Artificial Sequence: Synthetic peptide
  Seed: GMDPRMCSLMQGSTL
GMDFRMCSIMQSSTL

SEQ ID NO: 71605 - protein, 15 aa, Artificial Sequence
  Description of Artificial Sequence: Synthetic peptide
  Seed: GMDPRMCSLMQGSTL
GMDFRMCSPMQASTL

SEQ ID NO: 71606 - protein, 15 aa, Artificial Sequence
  Description of Artificial Sequence: Synthetic peptide
  Seed: GMDPRMCSLMQGSTL
GMDFRMCSPMQISTL

SEQ ID NO: 71607 - protein, 15 aa, Artificial Sequence
  Description of Artificial Sequence: Synthetic peptide
  Seed: GMDPRMCSLMQGSTL
GMDFRMCSPMQLSTL

SEQ ID NO: 71608 - protein, 15 aa, Artificial Sequence
  Description of Artificial Sequence: Synthetic peptide
  Seed: GMDPRMCSLMQGSTL
GMDFRMCSPMQMSTL

SEQ ID NO: 71609 - protein, 15 aa, Artificial Sequence
  Description of Artificial Sequence: Synthetic peptide
  Seed: GMDPRMCSLMQGSTL
GMDFRMCSPMQNSTL

SEQ ID NO: 71610 - protein, 15 aa, Artificial Sequence
  Description of Artificial Sequence: Synthetic peptide
  Seed: GMDPRMCSLMQGSTL
GMDFRMCSPMQSSTL

SEQ ID NO: 71611 - protein, 15 aa, Artificial Sequence
  Description of Artificial Sequence: Synthetic peptide
  Seed: GMDPRMCSLMQGSTL
GMDFRMCSPMQTSTL

SEQ ID NO: 71612 - protein, 15 aa, Artificial Sequence
  Description of Artificial Sequence: Synthetic peptide
  Seed: GMDPRMCSLMQGSTL
GMDFRMCSPMQVSTL

SEQ ID NO: 71613 - protein, 15 aa, Artificial Sequence
  Description of Artificial Sequence: Synthetic peptide
  Seed: GMDPRMCSLMQGSTL
GMDFRMCSSMQASTL

SEQ ID NO: 71614 - protein, 15 aa, Artificial Sequence
  Description of Artificial Sequence: Synthetic peptide
  Seed: GMDPRMCSLMQGSTL
GMDFRMCSSMQISTL

SEQ ID NO: 71615 - protein, 15 aa, Artificial Sequence
  Description of Artificial Sequence: Synthetic peptide
  Seed: GMDPRMCSLMQGSTL
GMDFRMCSSMQLSTL

SEQ ID NO: 71616 - protein, 15 aa, Artificial Sequence
  Description of Artificial Sequence: Synthetic peptide
  Seed: GMDPRMCSLMQGSTL
GMDFRMCSSMQMSTL

SEQ ID NO: 71617 - protein, 15 aa, Artificial Sequence
  Description of Artificial Sequence: Synthetic peptide
  Seed: GMDPRMCSLMQGSTL
GMDFRMCSSMQNSTL

SEQ ID NO: 71618 - protein, 15 aa, Artificial Sequence
  Description of Artificial Sequence: Synthetic peptide
  Seed: GMDPRMCSLMQGSTL
GMDFRMCSSMQSSTL

SEQ ID NO: 71619 - protein, 15 aa, Artificial Sequence
  Description of Artificial Sequence: Synthetic peptide
  Seed: GMDPRMCSLMQGSTL
GMDFRMCSSMQTSTL

SEQ ID NO: 71620 - protein, 15 aa, Artificial Sequence
  Description of Artificial Sequence: Synthetic peptide
  Seed: GMDPRMCSLMQGSTL
GMDFRMCSSMQVSTL

SEQ ID NO: 71621 - protein, 15 aa, Artificial Sequence
  Description of Artificial Sequence: Synthetic peptide
  Seed: GMDPRMCSLMQGSTL
GMDFRMCSTMQASTL

SEQ ID NO: 71622 - protein, 15 aa, Artificial Sequence
  Description of Artificial Sequence: Synthetic peptide
  Seed: GMDPRMCSLMQGSTL
GMDFRMCSTMQLSTL

SEQ ID NO: 71623 - protein, 15 aa, Artificial Sequence
  Description of Artificial Sequence: Synthetic peptide
  Seed: GMDPRMCSLMQGSTL
GMDFRMCSTMQMSTL

SEQ ID NO: 71624 - protein, 15 aa, Artificial Sequence
  Description of Artificial Sequence: Synthetic peptide
  Seed: GMDPRMCSLMQGSTL
GMDFRMCSTMQNSTL

SEQ ID NO: 71625 - protein, 15 aa, Artificial Sequence
  Description of Artificial Sequence: Synthetic peptide
  Seed: GMDPRMCSLMQGSTL
GMDFRMCSTMQSSTL

SEQ ID NO: 71626 - protein, 15 aa, Artificial Sequence
  Description of Artificial Sequence: Synthetic peptide
  Seed: GMDPRMCSLMQGSTL
GMDFRMCSTMQVSTL

SEQ ID NO: 71627 - protein, 15 aa, Artificial Sequence
  Description of Artificial Sequence: Synthetic peptide
  Seed: GMDPRMCSLMQGSTL
GMDFRMCSVMQASTL

SEQ ID NO: 71628 - protein, 15 aa, Artificial Sequence
  Description of Artificial Sequence: Synthetic peptide
  Seed: GMDPRMCSLMQGSTL
GMDFRMCSVMQNSTL

SEQ ID NO: 71629 - protein, 15 aa, Artificial Sequence
  Description of Artificial Sequence: Synthetic peptide
  Seed: GMDPRMCSLMQGSTL
GMDFRMCSVMQSSTL

SEQ ID NO: 71630 - protein, 15 aa, Artificial Sequence
  Description of Artificial Sequence: Synthetic peptide
  Seed: GMDPRMCSLMQGSTL
GMDFRMCSVMQTSTL

SEQ ID NO: 71631 - protein, 15 aa, Artificial Sequence
  Description of Artificial Sequence: Synthetic peptide
  Seed: GMDPRMCSLMQGSTL
GMDFRMDSAMQASTL

SEQ ID NO: 71632 - protein, 15 aa, Artificial Sequence
  Description of Artificial Sequence: Synthetic peptide
  Seed: GMDPRMCSLMQGSTL
GMDFRMDSAMQNSTL

SEQ ID NO: 71633 - protein, 15 aa, Artificial Sequence
  Description of Artificial Sequence: Synthetic peptide
  Seed: GMDPRMCSLMQGSTL
GMDFRMDSAMQSSTL

SEQ ID NO: 71634 - protein, 15 aa, Artificial Sequence
  Description of Artificial Sequence: Synthetic peptide
  Seed: GMDPRMCSLMQGSTL
GMDFRMESAMQASTL

SEQ ID NO: 71635 - protein, 15 aa, Artificial Sequence
  Description of Artificial Sequence: Synthetic peptide
  Seed: GMDPRMCSLMQGSTL
GMDFRMESAMQESTL

SEQ ID NO: 71636 - protein, 15 aa, Artificial Sequence
  Description of Artificial Sequence: Synthetic peptide
  Seed: GMDPRMCSLMQGSTL
GMDFRMESAMQGSTL

SEQ ID NO: 71637 - protein, 15 aa, Artificial Sequence
  Description of Artificial Sequence: Synthetic peptide
  Seed: GMDPRMCSLMQGSTL
GMDFRMESAMQHSTL

SEQ ID NO: 71638 - protein, 15 aa, Artificial Sequence
  Description of Artificial Sequence: Synthetic peptide
  Seed: GMDPRMCSLMQGSTL
GMDFRMESAMQISTL

SEQ ID NO: 71639 - protein, 15 aa, Artificial Sequence
  Description of Artificial Sequence: Synthetic peptide
  Seed: GMDPRMCSLMQGSTL
GMDFRMESAMQLSTL

SEQ ID NO: 71640 - protein, 15 aa, Artificial Sequence
  Description of Artificial Sequence: Synthetic peptide
  Seed: GMDPRMCSLMQGSTL
GMDFRMESAMQMSTL

SEQ ID NO: 71641 - protein, 15 aa, Artificial Sequence
  Description of Artificial Sequence: Synthetic peptide
  Seed: GMDPRMCSLMQGSTL
GMDFRMESAMQNSTL

SEQ ID NO: 71642 - protein, 15 aa, Artificial Sequence
  Description of Artificial Sequence: Synthetic peptide
  Seed: GMDPRMCSLMQGSTL
GMDFRMESAMQPSTL

SEQ ID NO: 71643 - protein, 15 aa, Artificial Sequence
  Description of Artificial Sequence: Synthetic peptide
  Seed: GMDPRMCSLMQGSTL
GMDFRMESAMQQSTL

SEQ ID NO: 71644 - protein, 15 aa, Artificial Sequence
  Description of Artificial Sequence: Synthetic peptide
  Seed: GMDPRMCSLMQGSTL
GMDFRMESAMQSSTL

SEQ ID NO: 71645 - protein, 15 aa, Artificial Sequence
  Description of Artificial Sequence: Synthetic peptide
  Seed: GMDPRMCSLMQGSTL
GMDFRMESAMQTSTL

SEQ ID NO: 71646 - protein, 15 aa, Artificial Sequence
  Description of Artificial Sequence: Synthetic peptide
  Seed: GMDPRMCSLMQGSTL
GMDFRMESAMQVSTL

SEQ ID NO: 71647 - protein, 15 aa, Artificial Sequence
  Description of Artificial Sequence: Synthetic peptide
  Seed: GMDPRMCSLMQGSTL
GMDFRMESGMQASTL

SEQ ID NO: 71648 - protein, 15 aa, Artificial Sequence
  Description of Artificial Sequence: Synthetic peptide
  Seed: GMDPRMCSLMQGSTL
GMDFRMESGMQNSTL

SEQ ID NO: 71649 - protein, 15 aa, Artificial Sequence
  Description of Artificial Sequence: Synthetic peptide
  Seed: GMDPRMCSLMQGSTL
GMDFRMESGMQSSTL

SEQ ID NO: 71650 - protein, 15 aa, Artificial Sequence
  Description of Artificial Sequence: Synthetic peptide
  Seed: GMDPRMCSLMQGSTL
GMDFRMESGMQTSTL

SEQ ID NO: 71651 - protein, 15 aa, Artificial Sequence
  Description of Artificial Sequence: Synthetic peptide
  Seed: GMDPRMCSLMQGSTL
GMDFRMESIMQASTL

SEQ ID NO: 71652 - protein, 15 aa, Artificial Sequence
  Description of Artificial Sequence: Synthetic peptide
  Seed: GMDPRMCSLMQGSTL
GMDFRMESIMQGSTL

SEQ ID NO: 71653 - protein, 15 aa, Artificial Sequence
  Description of Artificial Sequence: Synthetic peptide
  Seed: GMDPRMCSLMQGSTL
GMDFRMESIMQHSTL

SEQ ID NO: 71654 - protein, 15 aa, Artificial Sequence
  Description of Artificial Sequence: Synthetic peptide
  Seed: GMDPRMCSLMQGSTL
GMDFRMESIMQISTL

SEQ ID NO: 71655 - protein, 15 aa, Artificial Sequence
  Description of Artificial Sequence: Synthetic peptide
  Seed: GMDPRMCSLMQGSTL
GMDFRMESIMQLSTL

SEQ ID NO: 71656 - protein, 15 aa, Artificial Sequence
  Description of Artificial Sequence: Synthetic peptide
  Seed: GMDPRMCSLMQGSTL
GMDFRMESIMQMSTL

SEQ ID NO: 71657 - protein, 15 aa, Artificial Sequence
  Description of Artificial Sequence: Synthetic peptide
  Seed: GMDPRMCSLMQGSTL
GMDFRMESIMQNSTL

SEQ ID NO: 71658 - protein, 15 aa, Artificial Sequence
  Description of Artificial Sequence: Synthetic peptide
  Seed: GMDPRMCSLMQGSTL
GMDFRMESIMQSSTL

SEQ ID NO: 71659 - protein, 15 aa, Artificial Sequence
  Description of Artificial Sequence: Synthetic peptide
  Seed: GMDPRMCSLMQGSTL
GMDFRMESIMQTSTL

SEQ ID NO: 71660 - protein, 15 aa, Artificial Sequence
  Description of Artificial Sequence: Synthetic peptide
  Seed: GMDPRMCSLMQGSTL
GMDFRMESIMQVSTL

SEQ ID NO: 71661 - protein, 15 aa, Artificial Sequence
  Description of Artificial Sequence: Synthetic peptide
  Seed: GMDPRMCSLMQGSTL
GMDFRMESLMQASTL

SEQ ID NO: 71662 - protein, 15 aa, Artificial Sequence
  Description of Artificial Sequence: Synthetic peptide
  Seed: GMDPRMCSLMQGSTL
GMDFRMESLMQNSTL

SEQ ID NO: 71663 - protein, 15 aa, Artificial Sequence
  Description of Artificial Sequence: Synthetic peptide
  Seed: GMDPRMCSLMQGSTL
GMDFRMESLMQSSTL

SEQ ID NO: 71664 - protein, 15 aa, Artificial Sequence
  Description of Artificial Sequence: Synthetic peptide
  Seed: GMDPRMCSLMQGSTL
GMDFRMESMMQASTL

SEQ ID NO: 71665 - protein, 15 aa, Artificial Sequence
  Description of Artificial Sequence: Synthetic peptide
  Seed: GMDPRMCSLMQGSTL
GMDFRMESMMQNSTL

SEQ ID NO: 71666 - protein, 15 aa, Artificial Sequence
  Description of Artificial Sequence: Synthetic peptide
  Seed: GMDPRMCSLMQGSTL
GMDFRMESMMQSSTL

SEQ ID NO: 71667 - protein, 15 aa, Artificial Sequence
  Description of Artificial Sequence: Synthetic peptide
  Seed: GMDPRMCSLMQGSTL
GMDFRMESNMQASTL

SEQ ID NO: 71668 - protein, 15 aa, Artificial Sequence
  Description of Artificial Sequence: Synthetic peptide
  Seed: GMDPRMCSLMQGSTL
GMDFRMESNMQNSTL

SEQ ID NO: 71669 - protein, 15 aa, Artificial Sequence
  Description of Artificial Sequence: Synthetic peptide
  Seed: GMDPRMCSLMQGSTL
GMDFRMESNMQSSTL

SEQ ID NO: 71670 - protein, 15 aa, Artificial Sequence
  Description of Artificial Sequence: Synthetic peptide
  Seed: GMDPRMCSLMQGSTL
GMDFRMESPMQASTL

SEQ ID NO: 71671 - protein, 15 aa, Artificial Sequence
  Description of Artificial Sequence: Synthetic peptide
  Seed: GMDPRMCSLMQGSTL
GMDFRMESPMQGSTL

SEQ ID NO: 71672 - protein, 15 aa, Artificial Sequence
  Description of Artificial Sequence: Synthetic peptide
  Seed: GMDPRMCSLMQGSTL
GMDFRMESPMQHSTL

SEQ ID NO: 71673 - protein, 15 aa, Artificial Sequence
  Description of Artificial Sequence: Synthetic peptide
  Seed: GMDPRMCSLMQGSTL
GMDFRMESPMQISTL

SEQ ID NO: 71674 - protein, 15 aa, Artificial Sequence
  Description of Artificial Sequence: Synthetic peptide
  Seed: GMDPRMCSLMQGSTL
GMDFRMESPMQLSTL

SEQ ID NO: 71675 - protein, 15 aa, Artificial Sequence
  Description of Artificial Sequence: Synthetic peptide
  Seed: GMDPRMCSLMQGSTL
GMDFRMESPMQMSTL

SEQ ID NO: 71676 - protein, 15 aa, Artificial Sequence
  Description of Artificial Sequence: Synthetic peptide
  Seed: GMDPRMCSLMQGSTL
GMDFRMESPMQNSTL

SEQ ID NO: 71677 - protein, 15 aa, Artificial Sequence
  Description of Artificial Sequence: Synthetic peptide
  Seed: GMDPRMCSLMQGSTL
GMDFRMESPMQQSTL

SEQ ID NO: 71678 - protein, 15 aa, Artificial Sequence
  Description of Artificial Sequence: Synthetic peptide
  Seed: GMDPRMCSLMQGSTL
GMDFRMESPMQSSTL

SEQ ID NO: 71679 - protein, 15 aa, Artificial Sequence
  Description of Artificial Sequence: Synthetic peptide
  Seed: GMDPRMCSLMQGSTL
GMDFRMESPMQTSTL

SEQ ID NO: 71680 - protein, 15 aa, Artificial Sequence
  Description of Artificial Sequence: Synthetic peptide
  Seed: GMDPRMCSLMQGSTL
GMDFRMESPMQVSTL

SEQ ID NO: 71681 - protein, 15 aa, Artificial Sequence
  Description of Artificial Sequence: Synthetic peptide
  Seed: GMDPRMCSLMQGSTL
GMDFRMESSMQASTL

SEQ ID NO: 71682 - protein, 15 aa, Artificial Sequence
  Description of Artificial Sequence: Synthetic peptide
  Seed: GMDPRMCSLMQGSTL
GMDFRMESSMQGSTL

SEQ ID NO: 71683 - protein, 15 aa, Artificial Sequence
  Description of Artificial Sequence: Synthetic peptide
  Seed: GMDPRMCSLMQGSTL
GMDFRMESSMQHSTL

SEQ ID NO: 71684 - protein, 15 aa, Artificial Sequence
  Description of Artificial Sequence: Synthetic peptide
  Seed: GMDPRMCSLMQGSTL
GMDFRMESSMQISTL

SEQ ID NO: 71685 - protein, 15 aa, Artificial Sequence
  Description of Artificial Sequence: Synthetic peptide
  Seed: GMDPRMCSLMQGSTL
GMDFRMESSMQLSTL

SEQ ID NO: 71686 - protein, 15 aa, Artificial Sequence
  Description of Artificial Sequence: Synthetic peptide
  Seed: GMDPRMCSLMQGSTL
GMDFRMESSMQMSTL

SEQ ID NO: 71687 - protein, 15 aa, Artificial Sequence
  Description of Artificial Sequence: Synthetic peptide
  Seed: GMDPRMCSLMQGSTL
GMDFRMESSMQNSTL

SEQ ID NO: 71688 - protein, 15 aa, Artificial Sequence
  Description of Artificial Sequence: Synthetic peptide
  Seed: GMDPRMCSLMQGSTL
GMDFRMESSMQSSTL

SEQ ID NO: 71689 - protein, 15 aa, Artificial Sequence
  Description of Artificial Sequence: Synthetic peptide
  Seed: GMDPRMCSLMQGSTL
GMDFRMESSMQTSTL

SEQ ID NO: 71690 - protein, 15 aa, Artificial Sequence
  Description of Artificial Sequence: Synthetic peptide
  Seed: GMDPRMCSLMQGSTL
GMDFRMESSMQVSTL

SEQ ID NO: 71691 - protein, 15 aa, Artificial Sequence
  Description of Artificial Sequence: Synthetic peptide
  Seed: GMDPRMCSLMQGSTL
GMDFRMESTMQASTL

SEQ ID NO: 71692 - protein, 15 aa, Artificial Sequence
  Description of Artificial Sequence: Synthetic peptide
  Seed: GMDPRMCSLMQGSTL
GMDFRMESTMQGSTL

SEQ ID NO: 71693 - protein, 15 aa, Artificial Sequence
  Description of Artificial Sequence: Synthetic peptide
  Seed: GMDPRMCSLMQGSTL
GMDFRMESTMQHSTL

SEQ ID NO: 71694 - protein, 15 aa, Artificial Sequence
  Description of Artificial Sequence: Synthetic peptide
  Seed: GMDPRMCSLMQGSTL
GMDFRMESTMQISTL

SEQ ID NO: 71695 - protein, 15 aa, Artificial Sequence
  Description of Artificial Sequence: Synthetic peptide
  Seed: GMDPRMCSLMQGSTL
GMDFRMESTMQLSTL

SEQ ID NO: 71696 - protein, 15 aa, Artificial Sequence
  Description of Artificial Sequence: Synthetic peptide
  Seed: GMDPRMCSLMQGSTL
GMDFRMESTMQMSTL

SEQ ID NO: 71697 - protein, 15 aa, Artificial Sequence
  Description of Artificial Sequence: Synthetic peptide
  Seed: GMDPRMCSLMQGSTL
GMDFRMESTMQNSTL

SEQ ID NO: 71698 - protein, 15 aa, Artificial Sequence
  Description of Artificial Sequence: Synthetic peptide
  Seed: GMDPRMCSLMQGSTL
GMDFRMESTMQSSTL

SEQ ID NO: 71699 - protein, 15 aa, Artificial Sequence
  Description of Artificial Sequence: Synthetic peptide
  Seed: GMDPRMCSLMQGSTL
GMDFRMESTMQTSTL

SEQ ID NO: 71700 - protein, 15 aa, Artificial Sequence
  Description of Artificial Sequence: Synthetic peptide
  Seed: GMDPRMCSLMQGSTL
GMDFRMESTMQVSTL

SEQ ID NO: 71701 - protein, 15 aa, Artificial Sequence
  Description of Artificial Sequence: Synthetic peptide
  Seed: GMDPRMCSLMQGSTL
GMDFRMESVMQASTL

SEQ ID NO: 71702 - protein, 15 aa, Artificial Sequence
  Description of Artificial Sequence: Synthetic peptide
  Seed: GMDPRMCSLMQGSTL
GMDFRMESVMQGSTL

SEQ ID NO: 71703 - protein, 15 aa, Artificial Sequence
  Description of Artificial Sequence: Synthetic peptide
  Seed: GMDPRMCSLMQGSTL
GMDFRMESVMQHSTL

SEQ ID NO: 71704 - protein, 15 aa, Artificial Sequence
  Description of Artificial Sequence: Synthetic peptide
  Seed: GMDPRMCSLMQGSTL
GMDFRMESVMQISTL

SEQ ID NO: 71705 - protein, 15 aa, Artificial Sequence
  Description of Artificial Sequence: Synthetic peptide
  Seed: GMDPRMCSLMQGSTL
GMDFRMESVMQLSTL

SEQ ID NO: 71706 - protein, 15 aa, Artificial Sequence
  Description of Artificial Sequence: Synthetic peptide
  Seed: GMDPRMCSLMQGSTL
GMDFRMESVMQMSTL

SEQ ID NO: 71707 - protein, 15 aa, Artificial Sequence
  Description of Artificial Sequence: Synthetic peptide
  Seed: GMDPRMCSLMQGSTL
GMDFRMESVMQNSTL

SEQ ID NO: 71708 - protein, 15 aa, Artificial Sequence
  Description of Artificial Sequence: Synthetic peptide
  Seed: GMDPRMCSLMQGSTL
GMDFRMESVMQQSTL

SEQ ID NO: 71709 - protein, 15 aa, Artificial Sequence
  Description of Artificial Sequence: Synthetic peptide
  Seed: GMDPRMCSLMQGSTL
GMDFRMESVMQSSTL

SEQ ID NO: 71710 - protein, 15 aa, Artificial Sequence
  Description of Artificial Sequence: Synthetic peptide
  Seed: GMDPRMCSLMQGSTL
GMDFRMESVMQTSTL

SEQ ID NO: 71711 - protein, 15 aa, Artificial Sequence
  Description of Artificial Sequence: Synthetic peptide
  Seed: GMDPRMCSLMQGSTL
GMDFRMESVMQVSTL

SEQ ID NO: 71712 - protein, 15 aa, Artificial Sequence
  Description of Artificial Sequence: Synthetic peptide
  Seed: GMDPRMCSLMQGSTL
GMDFRMFSAMQASTL

SEQ ID NO: 71713 - protein, 15 aa, Artificial Sequence
  Description of Artificial Sequence: Synthetic peptide
  Seed: GMDPRMCSLMQGSTL
GMDFRMFSAMQCSTL

SEQ ID NO: 71714 - protein, 15 aa, Artificial Sequence
  Description of Artificial Sequence: Synthetic peptide
  Seed: GMDPRMCSLMQGSTL
GMDFRMFSAMQDSTL

SEQ ID NO: 71715 - protein, 15 aa, Artificial Sequence
  Description of Artificial Sequence: Synthetic peptide
  Seed: GMDPRMCSLMQGSTL
GMDFRMFSAMQESTL

SEQ ID NO: 71716 - protein, 15 aa, Artificial Sequence
  Description of Artificial Sequence: Synthetic peptide
  Seed: GMDPRMCSLMQGSTL
GMDFRMFSAMQFSTL

SEQ ID NO: 71717 - protein, 15 aa, Artificial Sequence
  Description of Artificial Sequence: Synthetic peptide
  Seed: GMDPRMCSLMQGSTL
GMDFRMFSAMQGSTL

SEQ ID NO: 71718 - protein, 15 aa, Artificial Sequence
  Description of Artificial Sequence: Synthetic peptide
  Seed: GMDPRMCSLMQGSTL
GMDFRMFSAMQHSTL

SEQ ID NO: 71719 - protein, 15 aa, Artificial Sequence
  Description of Artificial Sequence: Synthetic peptide
  Seed: GMDPRMCSLMQGSTL
GMDFRMFSAMQISTL

SEQ ID NO: 71720 - protein, 15 aa, Artificial Sequence
  Description of Artificial Sequence: Synthetic peptide
  Seed: GMDPRMCSLMQGSTL
GMDFRMFSAMQKSTL

SEQ ID NO: 71721 - protein, 15 aa, Artificial Sequence
  Description of Artificial Sequence: Synthetic peptide
  Seed: GMDPRMCSLMQGSTL
GMDFRMFSAMQLSTL

SEQ ID NO: 71722 - protein, 15 aa, Artificial Sequence
  Description of Artificial Sequence: Synthetic peptide
  Seed: GMDPRMCSLMQGSTL
GMDFRMFSAMQMSTL

SEQ ID NO: 71723 - protein, 15 aa, Artificial Sequence
  Description of Artificial Sequence: Synthetic peptide
  Seed: GMDPRMCSLMQGSTL
GMDFRMFSAMQNSTL

SEQ ID NO: 71724 - protein, 15 aa, Artificial Sequence
  Description of Artificial Sequence: Synthetic peptide
  Seed: GMDPRMCSLMQGSTL
GMDFRMFSAMQPSTL

SEQ ID NO: 71725 - protein, 15 aa, Artificial Sequence
  Description of Artificial Sequence: Synthetic peptide
  Seed: GMDPRMCSLMQGSTL
GMDFRMFSAMQQSTL

SEQ ID NO: 71726 - protein, 15 aa, Artificial Sequence
  Description of Artificial Sequence: Synthetic peptide
  Seed: GMDPRMCSLMQGSTL
GMDFRMFSAMQRSTL

SEQ ID NO: 71727 - protein, 15 aa, Artificial Sequence
  Description of Artificial Sequence: Synthetic peptide
  Seed: GMDPRMCSLMQGSTL
GMDFRMFSAMQSSTL

SEQ ID NO: 71728 - protein, 15 aa, Artificial Sequence
  Description of Artificial Sequence: Synthetic peptide
  Seed: GMDPRMCSLMQGSTL
GMDFRMFSAMQTSTL

SEQ ID NO: 71729 - protein, 15 aa, Artificial Sequence
  Description of Artificial Sequence: Synthetic peptide
  Seed: GMDPRMCSLMQGSTL
GMDFRMFSAMQVSTL

SEQ ID NO: 71730 - protein, 15 aa, Artificial Sequence
  Description of Artificial Sequence: Synthetic peptide
  Seed: GMDPRMCSLMQGSTL
GMDFRMFSAMQYSTL

SEQ ID NO: 71731 - protein, 15 aa, Artificial Sequence
  Description of Artificial Sequence: Synthetic peptide
  Seed: GMDPRMCSLMQGSTL
GMDFRMFSCMQASTL

SEQ ID NO: 71732 - protein, 15 aa, Artificial Sequence
  Description of Artificial Sequence: Synthetic peptide
  Seed: GMDPRMCSLMQGSTL
GMDFRMFSCMQNSTL

SEQ ID NO: 71733 - protein, 15 aa, Artificial Sequence
  Description of Artificial Sequence: Synthetic peptide
  Seed: GMDPRMCSLMQGSTL
GMDFRMFSCMQSSTL

SEQ ID NO: 71734 - protein, 15 aa, Artificial Sequence
  Description of Artificial Sequence: Synthetic peptide
  Seed: GMDPRMCSLMQGSTL
GMDFRMFSEMQASTL

SEQ ID NO: 71735 - protein, 15 aa, Artificial Sequence
  Description of Artificial Sequence: Synthetic peptide
  Seed: GMDPRMCSLMQGSTL
GMDFRMFSGMQASTL

SEQ ID NO: 71736 - protein, 15 aa, Artificial Sequence
  Description of Artificial Sequence: Synthetic peptide
  Seed: GMDPRMCSLMQGSTL
GMDFRMFSGMQGSTL

SEQ ID NO: 71737 - protein, 15 aa, Artificial Sequence
  Description of Artificial Sequence: Synthetic peptide
  Seed: GMDPRMCSLMQGSTL
GMDFRMFSGMQHSTL

SEQ ID NO: 71738 - protein, 15 aa, Artificial Sequence
  Description of Artificial Sequence: Synthetic peptide
  Seed: GMDPRMCSLMQGSTL
GMDFRMFSGMQISTL

SEQ ID NO: 71739 - protein, 15 aa, Artificial Sequence
  Description of Artificial Sequence: Synthetic peptide
  Seed: GMDPRMCSLMQGSTL
GMDFRMFSGMQLSTL

SEQ ID NO: 71740 - protein, 15 aa, Artificial Sequence
  Description of Artificial Sequence: Synthetic peptide
  Seed: GMDPRMCSLMQGSTL
GMDFRMFSGMQMSTL

SEQ ID NO: 71741 - protein, 15 aa, Artificial Sequence
  Description of Artificial Sequence: Synthetic peptide
  Seed: GMDPRMCSLMQGSTL
GMDFRMFSGMQNSTL

SEQ ID NO: 71742 - protein, 15 aa, Artificial Sequence
  Description of Artificial Sequence: Synthetic peptide
  Seed: GMDPRMCSLMQGSTL
GMDFRMFSGMQPSTL

SEQ ID NO: 71743 - protein, 15 aa, Artificial Sequence
  Description of Artificial Sequence: Synthetic peptide
  Seed: GMDPRMCSLMQGSTL
GMDFRMFSGMQQSTL

SEQ ID NO: 71744 - protein, 15 aa, Artificial Sequence
  Description of Artificial Sequence: Synthetic peptide
  Seed: GMDPRMCSLMQGSTL
GMDFRMFSGMQSSTL

SEQ ID NO: 71745 - protein, 15 aa, Artificial Sequence
  Description of Artificial Sequence: Synthetic peptide
  Seed: GMDPRMCSLMQGSTL
GMDFRMFSGMQTSTL

SEQ ID NO: 71746 - protein, 15 aa, Artificial Sequence
  Description of Artificial Sequence: Synthetic peptide
  Seed: GMDPRMCSLMQGSTL
GMDFRMFSGMQVSTL

SEQ ID NO: 71747 - protein, 15 aa, Artificial Sequence
  Description of Artificial Sequence: Synthetic peptide
  Seed: GMDPRMCSLMQGSTL
GMDFRMFSHMQASTL

SEQ ID NO: 71748 - protein, 15 aa, Artificial Sequence
  Description of Artificial Sequence: Synthetic peptide
  Seed: GMDPRMCSLMQGSTL
GMDFRMFSHMQGSTL

SEQ ID NO: 71749 - protein, 15 aa, Artificial Sequence
  Description of Artificial Sequence: Synthetic peptide
  Seed: GMDPRMCSLMQGSTL
GMDFRMFSHMQISTL

SEQ ID NO: 71750 - protein, 15 aa, Artificial Sequence
  Description of Artificial Sequence: Synthetic peptide
  Seed: GMDPRMCSLMQGSTL
GMDFRMFSHMQNSTL

SEQ ID NO: 71751 - protein, 15 aa, Artificial Sequence
  Description of Artificial Sequence: Synthetic peptide
  Seed: GMDPRMCSLMQGSTL
GMDFRMFSHMQSSTL

SEQ ID NO: 71752 - protein, 15 aa, Artificial Sequence
  Description of Artificial Sequence: Synthetic peptide
  Seed: GMDPRMCSLMQGSTL
GMDFRMFSHMQTSTL

SEQ ID NO: 71753 - protein, 15 aa, Artificial Sequence
  Description of Artificial Sequence: Synthetic peptide
  Seed: GMDPRMCSLMQGSTL
GMDFRMFSHMQVSTL

SEQ ID NO: 71754 - protein, 15 aa, Artificial Sequence
  Description of Artificial Sequence: Synthetic peptide
  Seed: GMDPRMCSLMQGSTL
GMDFRMFSIMQASTL

SEQ ID NO: 71755 - protein, 15 aa, Artificial Sequence
  Description of Artificial Sequence: Synthetic peptide
  Seed: GMDPRMCSLMQGSTL
GMDFRMFSIMQDSTL

SEQ ID NO: 71756 - protein, 15 aa, Artificial Sequence
  Description of Artificial Sequence: Synthetic peptide
  Seed: GMDPRMCSLMQGSTL
GMDFRMFSIMQESTL

SEQ ID NO: 71757 - protein, 15 aa, Artificial Sequence
  Description of Artificial Sequence: Synthetic peptide
  Seed: GMDPRMCSLMQGSTL
GMDFRMFSIMQGSTL

SEQ ID NO: 71758 - protein, 15 aa, Artificial Sequence
  Description of Artificial Sequence: Synthetic peptide
  Seed: GMDPRMCSLMQGSTL
GMDFRMFSIMQHSTL

SEQ ID NO: 71759 - protein, 15 aa, Artificial Sequence
  Description of Artificial Sequence: Synthetic peptide
  Seed: GMDPRMCSLMQGSTL
GMDFRMFSIMQISTL

SEQ ID NO: 71760 - protein, 15 aa, Artificial Sequence
  Description of Artificial Sequence: Synthetic peptide
  Seed: GMDPRMCSLMQGSTL
GMDFRMFSIMQLSTL

SEQ ID NO: 71761 - protein, 15 aa, Artificial Sequence
  Description of Artificial Sequence: Synthetic peptide
  Seed: GMDPRMCSLMQGSTL
GMDFRMFSIMQMSTL

SEQ ID NO: 71762 - protein, 15 aa, Artificial Sequence
  Description of Artificial Sequence: Synthetic peptide
  Seed: GMDPRMCSLMQGSTL
GMDFRMFSIMQNSTL

SEQ ID NO: 71763 - protein, 15 aa, Artificial Sequence
  Description of Artificial Sequence: Synthetic peptide
  Seed: GMDPRMCSLMQGSTL
GMDFRMFSIMQQSTL

SEQ ID NO: 71764 - protein, 15 aa, Artificial Sequence
  Description of Artificial Sequence: Synthetic peptide
  Seed: GMDPRMCSLMQGSTL
GMDFRMFSIMQSSTL

SEQ ID NO: 71765 - protein, 15 aa, Artificial Sequence
  Description of Artificial Sequence: Synthetic peptide
  Seed: GMDPRMCSLMQGSTL
GMDFRMFSIMQTSTL

SEQ ID NO: 71766 - protein, 15 aa, Artificial Sequence
  Description of Artificial Sequence: Synthetic peptide
  Seed: GMDPRMCSLMQGSTL
GMDFRMFSIMQVSTL

SEQ ID NO: 71767 - protein, 15 aa, Artificial Sequence
  Description of Artificial Sequence: Synthetic peptide
  Seed: GMDPRMCSLMQGSTL
GMDFRMFSKMQASTL

SEQ ID NO: 71768 - protein, 15 aa, Artificial Sequence
  Description of Artificial Sequence: Synthetic peptide
  Seed: GMDPRMCSLMQGSTL
GMDFRMFSKMQSSTL

SEQ ID NO: 71769 - protein, 15 aa, Artificial Sequence
  Description of Artificial Sequence: Synthetic peptide
  Seed: GMDPRMCSLMQGSTL
GMDFRMFSKMQTSTL

SEQ ID NO: 71770 - protein, 15 aa, Artificial Sequence
  Description of Artificial Sequence: Synthetic peptide
  Seed: GMDPRMCSLMQGSTL
GMDFRMFSKMQVSTL

SEQ ID NO: 71771 - protein, 15 aa, Artificial Sequence
  Description of Artificial Sequence: Synthetic peptide
  Seed: GMDPRMCSLMQGSTL
GMDFRMFSLMQASTL

SEQ ID NO: 71772 - protein, 15 aa, Artificial Sequence
  Description of Artificial Sequence: Synthetic peptide
  Seed: GMDPRMCSLMQGSTL
GMDFRMFSLMQGSTL

SEQ ID NO: 71773 - protein, 15 aa, Artificial Sequence
  Description of Artificial Sequence: Synthetic peptide
  Seed: GMDPRMCSLMQGSTL
GMDFRMFSLMQHSTL

SEQ ID NO: 71774 - protein, 15 aa, Artificial Sequence
  Description of Artificial Sequence: Synthetic peptide
  Seed: GMDPRMCSLMQGSTL
GMDFRMFSLMQISTL

SEQ ID NO: 71775 - protein, 15 aa, Artificial Sequence
  Description of Artificial Sequence: Synthetic peptide
  Seed: GMDPRMCSLMQGSTL
GMDFRMFSLMQMSTL

SEQ ID NO: 71776 - protein, 15 aa, Artificial Sequence
  Description of Artificial Sequence: Synthetic peptide
  Seed: GMDPRMCSLMQGSTL
GMDFRMFSLMQNSTL

SEQ ID NO: 71777 - protein, 15 aa, Artificial Sequence
  Description of Artificial Sequence: Synthetic peptide
  Seed: GMDPRMCSLMQGSTL
GMDFRMFSLMQSSTL

SEQ ID NO: 71778 - protein, 15 aa, Artificial Sequence
  Description of Artificial Sequence: Synthetic peptide
  Seed: GMDPRMCSLMQGSTL
GMDFRMFSLMQTSTL

SEQ ID NO: 71779 - protein, 15 aa, Artificial Sequence
  Description of Artificial Sequence: Synthetic peptide
  Seed: GMDPRMCSLMQGSTL
GMDFRMFSLMQVSTL

SEQ ID NO: 71780 - protein, 15 aa, Artificial Sequence
  Description of Artificial Sequence: Synthetic peptide
  Seed: GMDPRMCSLMQGSTL
GMDFRMFSMMQESTL

SEQ ID NO: 71781 - protein, 15 aa, Artificial Sequence
  Description of Artificial Sequence: Synthetic peptide
  Seed: GMDPRMCSLMQGSTL
GMDFRMFSMMQGSTL

SEQ ID NO: 71782 - protein, 15 aa, Artificial Sequence
  Description of Artificial Sequence: Synthetic peptide
  Seed: GMDPRMCSLMQGSTL
GMDFRMFSMMQHSTL

SEQ ID NO: 71783 - protein, 15 aa, Artificial Sequence
  Description of Artificial Sequence: Synthetic peptide
  Seed: GMDPRMCSLMQGSTL
GMDFRMFSMMQISTL

SEQ ID NO: 71784 - protein, 15 aa, Artificial Sequence
  Description of Artificial Sequence: Synthetic peptide
  Seed: GMDPRMCSLMQGSTL
GMDFRMFSMMQLSTL

SEQ ID NO: 71785 - protein, 15 aa, Artificial Sequence
  Description of Artificial Sequence: Synthetic peptide
  Seed: GMDPRMCSLMQGSTL
GMDFRMFSMMQMSTL

SEQ ID NO: 71786 - protein, 15 aa, Artificial Sequence
  Description of Artificial Sequence: Synthetic peptide
  Seed: GMDPRMCSLMQGSTL
GMDFRMFSMMQNSTL

SEQ ID NO: 71787 - protein, 15 aa, Artificial Sequence
  Description of Artificial Sequence: Synthetic peptide
  Seed: GMDPRMCSLMQGSTL
GMDFRMFSMMQQSTL

SEQ ID NO: 71788 - protein, 15 aa, Artificial Sequence
  Description of Artificial Sequence: Synthetic peptide
  Seed: GMDPRMCSLMQGSTL
GMDFRMFSMMQSSTL

SEQ ID NO: 71789 - protein, 15 aa, Artificial Sequence
  Description of Artificial Sequence: Synthetic peptide
  Seed: GMDPRMCSLMQGSTL
GMDFRMFSNMQASTL

SEQ ID NO: 71790 - protein, 15 aa, Artificial Sequence
  Description of Artificial Sequence: Synthetic peptide
  Seed: GMDPRMCSLMQGSTL
GMDFRMFSNMQGSTL

SEQ ID NO: 71791 - protein, 15 aa, Artificial Sequence
  Description of Artificial Sequence: Synthetic peptide
  Seed: GMDPRMCSLMQGSTL
GMDFRMFSNMQHSTL

SEQ ID NO: 71792 - protein, 15 aa, Artificial Sequence
  Description of Artificial Sequence: Synthetic peptide
  Seed: GMDPRMCSLMQGSTL
GMDFRMFSNMQISTL

SEQ ID NO: 71793 - protein, 15 aa, Artificial Sequence
  Description of Artificial Sequence: Synthetic peptide
  Seed: GMDPRMCSLMQGSTL
GMDFRMFSNMQLSTL

SEQ ID NO: 71794 - protein, 15 aa, Artificial Sequence
  Description of Artificial Sequence: Synthetic peptide
  Seed: GMDPRMCSLMQGSTL
GMDFRMFSNMQMSTL

SEQ ID NO: 71795 - protein, 15 aa, Artificial Sequence
  Description of Artificial Sequence: Synthetic peptide
  Seed: GMDPRMCSLMQGSTL
GMDFRMFSNMQNSTL

SEQ ID NO: 71796 - protein, 15 aa, Artificial Sequence
  Description of Artificial Sequence: Synthetic peptide
  Seed: GMDPRMCSLMQGSTL
GMDFRMFSNMQPSTL

SEQ ID NO: 71797 - protein, 15 aa, Artificial Sequence
  Description of Artificial Sequence: Synthetic peptide
  Seed: GMDPRMCSLMQGSTL
GMDFRMFSNMQSSTL

SEQ ID NO: 71798 - protein, 15 aa, Artificial Sequence
  Description of Artificial Sequence: Synthetic peptide
  Seed: GMDPRMCSLMQGSTL
GMDFRMFSNMQTSTL

SEQ ID NO: 71799 - protein, 15 aa, Artificial Sequence
  Description of Artificial Sequence: Synthetic peptide
  Seed: GMDPRMCSLMQGSTL
GMDFRMFSNMQVSTL

SEQ ID NO: 71800 - protein, 15 aa, Artificial Sequence
  Description of Artificial Sequence: Synthetic peptide
  Seed: GMDPRMCSLMQGSTL
GMDFRMFSPMQASTL

SEQ ID NO: 71801 - protein, 15 aa, Artificial Sequence
  Description of Artificial Sequence: Synthetic peptide
  Seed: GMDPRMCSLMQGSTL
GMDFRMFSPMQCSTL

SEQ ID NO: 71802 - protein, 15 aa, Artificial Sequence
  Description of Artificial Sequence: Synthetic peptide
  Seed: GMDPRMCSLMQGSTL
GMDFRMFSPMQDSTL

SEQ ID NO: 71803 - protein, 15 aa, Artificial Sequence
  Description of Artificial Sequence: Synthetic peptide
  Seed: GMDPRMCSLMQGSTL
GMDFRMFSPMQESTL

SEQ ID NO: 71804 - protein, 15 aa, Artificial Sequence
  Description of Artificial Sequence: Synthetic peptide
  Seed: GMDPRMCSLMQGSTL
GMDFRMFSPMQFSTL

SEQ ID NO: 71805 - protein, 15 aa, Artificial Sequence
  Description of Artificial Sequence: Synthetic peptide
  Seed: GMDPRMCSLMQGSTL
GMDFRMFSPMQGSTL

SEQ ID NO: 71806 - protein, 15 aa, Artificial Sequence
  Description of Artificial Sequence: Synthetic peptide
  Seed: GMDPRMCSLMQGSTL
GMDFRMFSPMQHSTL

SEQ ID NO: 71807 - protein, 15 aa, Artificial Sequence
  Description of Artificial Sequence: Synthetic peptide
  Seed: GMDPRMCSLMQGSTL
GMDFRMFSPMQISTL

SEQ ID NO: 71808 - protein, 15 aa, Artificial Sequence
  Description of Artificial Sequence: Synthetic peptide
  Seed: GMDPRMCSLMQGSTL
GMDFRMFSPMQLSTL

SEQ ID NO: 71809 - protein, 15 aa, Artificial Sequence
  Description of Artificial Sequence: Synthetic peptide
  Seed: GMDPRMCSLMQGSTL
GMDFRMFSPMQMSTL

SEQ ID NO: 71810 - protein, 15 aa, Artificial Sequence
  Description of Artificial Sequence: Synthetic peptide
  Seed: GMDPRMCSLMQGSTL
GMDFRMFSPMQNSTL

SEQ ID NO: 71811 - protein, 15 aa, Artificial Sequence
  Description of Artificial Sequence: Synthetic peptide
  Seed: GMDPRMCSLMQGSTL
GMDFRMFSPMQPSTL

SEQ ID NO: 71812 - protein, 15 aa, Artificial Sequence
  Description of Artificial Sequence: Synthetic peptide
  Seed: GMDPRMCSLMQGSTL
GMDFRMFSPMQQSTL

SEQ ID NO: 71813 - protein, 15 aa, Artificial Sequence
  Description of Artificial Sequence: Synthetic peptide
  Seed: GMDPRMCSLMQGSTL
GMDFRMFSPMQSSTL

SEQ ID NO: 71814 - protein, 15 aa, Artificial Sequence
  Description of Artificial Sequence: Synthetic peptide
  Seed: GMDPRMCSLMQGSTL
GMDFRMFSPMQTSTL

SEQ ID NO: 71815 - protein, 15 aa, Artificial Sequence
  Description of Artificial Sequence: Synthetic peptide
  Seed: GMDPRMCSLMQGSTL
GMDFRMFSPMQVSTL

SEQ ID NO: 71816 - protein, 15 aa, Artificial Sequence
  Description of Artificial Sequence: Synthetic peptide
  Seed: GMDPRMCSLMQGSTL
GMDFRMFSPMQYSTL

SEQ ID NO: 71817 - protein, 15 aa, Artificial Sequence
  Description of Artificial Sequence: Synthetic peptide
  Seed: GMDPRMCSLMQGSTL
GMDFRMFSQMQASTL

SEQ ID NO: 71818 - protein, 15 aa, Artificial Sequence
  Description of Artificial Sequence: Synthetic peptide
  Seed: GMDPRMCSLMQGSTL
GMDFRMFSQMQGSTL

SEQ ID NO: 71819 - protein, 15 aa, Artificial Sequence
  Description of Artificial Sequence: Synthetic peptide
  Seed: GMDPRMCSLMQGSTL
GMDFRMFSQMQNSTL

SEQ ID NO: 71820 - protein, 15 aa, Artificial Sequence
  Description of Artificial Sequence: Synthetic peptide
  Seed: GMDPRMCSLMQGSTL
GMDFRMFSQMQSSTL

SEQ ID NO: 71821 - protein, 15 aa, Artificial Sequence
  Description of Artificial Sequence: Synthetic peptide
  Seed: GMDPRMCSLMQGSTL
GMDFRMFSQMQTSTL

SEQ ID NO: 71822 - protein, 15 aa, Artificial Sequence
  Description of Artificial Sequence: Synthetic peptide
  Seed: GMDPRMCSLMQGSTL
GMDFRMFSQMQVSTL

SEQ ID NO: 71823 - protein, 15 aa, Artificial Sequence
  Description of Artificial Sequence: Synthetic peptide
  Seed: GMDPRMCSLMQGSTL
GMDFRMFSRMQASTL

SEQ ID NO: 71824 - protein, 15 aa, Artificial Sequence
  Description of Artificial Sequence: Synthetic peptide
  Seed: GMDPRMCSLMQGSTL
GMDFRMFSRMQGSTL

SEQ ID NO: 71825 - protein, 15 aa, Artificial Sequence
  Description of Artificial Sequence: Synthetic peptide
  Seed: GMDPRMCSLMQGSTL
GMDFRMFSRMQNSTL

SEQ ID NO: 71826 - protein, 15 aa, Artificial Sequence
  Description of Artificial Sequence: Synthetic peptide
  Seed: GMDPRMCSLMQGSTL
GMDFRMFSRMQSSTL

SEQ ID NO: 71827 - protein, 15 aa, Artificial Sequence
  Description of Artificial Sequence: Synthetic peptide
  Seed: GMDPRMCSLMQGSTL
GMDFRMFSRMQTSTL

SEQ ID NO: 71828 - protein, 15 aa, Artificial Sequence
  Description of Artificial Sequence: Synthetic peptide
  Seed: GMDPRMCSLMQGSTL
GMDFRMFSRMQVSTL

SEQ ID NO: 71829 - protein, 15 aa, Artificial Sequence
  Description of Artificial Sequence: Synthetic peptide
  Seed: GMDPRMCSLMQGSTL
GMDFRMFSSMQASTL

SEQ ID NO: 71830 - protein, 15 aa, Artificial Sequence
  Description of Artificial Sequence: Synthetic peptide
  Seed: GMDPRMCSLMQGSTL
GMDFRMFSSMQDSTL

SEQ ID NO: 71831 - protein, 15 aa, Artificial Sequence
  Description of Artificial Sequence: Synthetic peptide
  Seed: GMDPRMCSLMQGSTL
GMDFRMFSSMQESTL

SEQ ID NO: 71832 - protein, 15 aa, Artificial Sequence
  Description of Artificial Sequence: Synthetic peptide
  Seed: GMDPRMCSLMQGSTL
GMDFRMFSSMQFSTL

SEQ ID NO: 71833 - protein, 15 aa, Artificial Sequence
  Description of Artificial Sequence: Synthetic peptide
  Seed: GMDPRMCSLMQGSTL
GMDFRMFSSMQGSTL

SEQ ID NO: 71834 - protein, 15 aa, Artificial Sequence
  Description of Artificial Sequence: Synthetic peptide
  Seed: GMDPRMCSLMQGSTL
GMDFRMFSSMQHSTL

SEQ ID NO: 71835 - protein, 15 aa, Artificial Sequence
  Description of Artificial Sequence: Synthetic peptide
  Seed: GMDPRMCSLMQGSTL
GMDFRMFSSMQISTL

SEQ ID NO: 71836 - protein, 15 aa, Artificial Sequence
  Description of Artificial Sequence: Synthetic peptide
  Seed: GMDPRMCSLMQGSTL
GMDFRMFSSMQKSTL

SEQ ID NO: 71837 - protein, 15 aa, Artificial Sequence
  Description of Artificial Sequence: Synthetic peptide
  Seed: GMDPRMCSLMQGSTL
GMDFRMFSSMQLSTL

SEQ ID NO: 71838 - protein, 15 aa, Artificial Sequence
  Description of Artificial Sequence: Synthetic peptide
  Seed: GMDPRMCSLMQGSTL
GMDFRMFSSMQMSTL

SEQ ID NO: 71839 - protein, 15 aa, Artificial Sequence
  Description of Artificial Sequence: Synthetic peptide
  Seed: GMDPRMCSLMQGSTL
GMDFRMFSSMQNSTL

SEQ ID NO: 71840 - protein, 15 aa, Artificial Sequence
  Description of Artificial Sequence: Synthetic peptide
  Seed: GMDPRMCSLMQGSTL
GMDFRMFSSMQPSTL

SEQ ID NO: 71841 - protein, 15 aa, Artificial Sequence
  Description of Artificial Sequence: Synthetic peptide
  Seed: GMDPRMCSLMQGSTL
GMDFRMFSSMQQSTL

SEQ ID NO: 71842 - protein, 15 aa, Artificial Sequence
  Description of Artificial Sequence: Synthetic peptide
  Seed: GMDPRMCSLMQGSTL
GMDFRMFSSMQSSTL

SEQ ID NO: 71843 - protein, 15 aa, Artificial Sequence
  Description of Artificial Sequence: Synthetic peptide
  Seed: GMDPRMCSLMQGSTL
GMDFRMFSSMQTSTL

SEQ ID NO: 71844 - protein, 15 aa, Artificial Sequence
  Description of Artificial Sequence: Synthetic peptide
  Seed: GMDPRMCSLMQGSTL
GMDFRMFSSMQVSTL

SEQ ID NO: 71845 - protein, 15 aa, Artificial Sequence
  Description of Artificial Sequence: Synthetic peptide
  Seed: GMDPRMCSLMQGSTL
GMDFRMFSSMQYSTL

SEQ ID NO: 71846 - protein, 15 aa, Artificial Sequence
  Description of Artificial Sequence: Synthetic peptide
  Seed: GMDPRMCSLMQGSTL
GMDFRMFSTMQASTL

SEQ ID NO: 71847 - protein, 15 aa, Artificial Sequence
  Description of Artificial Sequence: Synthetic peptide
  Seed: GMDPRMCSLMQGSTL
GMDFRMFSTMQDSTL

SEQ ID NO: 71848 - protein, 15 aa, Artificial Sequence
  Description of Artificial Sequence: Synthetic peptide
  Seed: GMDPRMCSLMQGSTL
GMDFRMFSTMQESTL

SEQ ID NO: 71849 - protein, 15 aa, Artificial Sequence
  Description of Artificial Sequence: Synthetic peptide
  Seed: GMDPRMCSLMQGSTL
GMDFRMFSTMQGSTL

SEQ ID NO: 71850 - protein, 15 aa, Artificial Sequence
  Description of Artificial Sequence: Synthetic peptide
  Seed: GMDPRMCSLMQGSTL
GMDFRMFSTMQHSTL

SEQ ID NO: 71851 - protein, 15 aa, Artificial Sequence
  Description of Artificial Sequence: Synthetic peptide
  Seed: GMDPRMCSLMQGSTL
GMDFRMFSTMQISTL

SEQ ID NO: 71852 - protein, 15 aa, Artificial Sequence
  Description of Artificial Sequence: Synthetic peptide
  Seed: GMDPRMCSLMQGSTL
GMDFRMFSTMQKSTL

SEQ ID NO: 71853 - protein, 15 aa, Artificial Sequence
  Description of Artificial Sequence: Synthetic peptide
  Seed: GMDPRMCSLMQGSTL
GMDFRMFSTMQLSTL

SEQ ID NO: 71854 - protein, 15 aa, Artificial Sequence
  Description of Artificial Sequence: Synthetic peptide
  Seed: GMDPRMCSLMQGSTL
GMDFRMFSTMQMSTL

SEQ ID NO: 71855 - protein, 15 aa, Artificial Sequence
  Description of Artificial Sequence: Synthetic peptide
  Seed: GMDPRMCSLMQGSTL
GMDFRMFSTMQNSTL

SEQ ID NO: 71856 - protein, 15 aa, Artificial Sequence
  Description of Artificial Sequence: Synthetic peptide
  Seed: GMDPRMCSLMQGSTL
GMDFRMFSTMQPSTL

SEQ ID NO: 71857 - protein, 15 aa, Artificial Sequence
  Description of Artificial Sequence: Synthetic peptide
  Seed: GMDPRMCSLMQGSTL
GMDFRMFSTMQQSTL

SEQ ID NO: 71858 - protein, 15 aa, Artificial Sequence
  Description of Artificial Sequence: Synthetic peptide
  Seed: GMDPRMCSLMQGSTL
GMDFRMFSTMQSSTL

SEQ ID NO: 71859 - protein, 15 aa, Artificial Sequence
  Description of Artificial Sequence: Synthetic peptide
  Seed: GMDPRMCSLMQGSTL
GMDFRMFSTMQTSTL

SEQ ID NO: 71860 - protein, 15 aa, Artificial Sequence
  Description of Artificial Sequence: Synthetic peptide
  Seed: GMDPRMCSLMQGSTL
GMDFRMFSTMQVSTL

SEQ ID NO: 71861 - protein, 15 aa, Artificial Sequence
  Description of Artificial Sequence: Synthetic peptide
  Seed: GMDPRMCSLMQGSTL
GMDFRMFSTMQYSTL

SEQ ID NO: 71862 - protein, 15 aa, Artificial Sequence
  Description of Artificial Sequence: Synthetic peptide
  Seed: GMDPRMCSLMQGSTL
GMDFRMFSVMQASTL

SEQ ID NO: 71863 - protein, 15 aa, Artificial Sequence
  Description of Artificial Sequence: Synthetic peptide
  Seed: GMDPRMCSLMQGSTL
GMDFRMFSVMQDSTL

SEQ ID NO: 71864 - protein, 15 aa, Artificial Sequence
  Description of Artificial Sequence: Synthetic peptide
  Seed: GMDPRMCSLMQGSTL
GMDFRMFSVMQESTL

SEQ ID NO: 71865 - protein, 15 aa, Artificial Sequence
  Description of Artificial Sequence: Synthetic peptide
  Seed: GMDPRMCSLMQGSTL
GMDFRMFSVMQGSTL

SEQ ID NO: 71866 - protein, 15 aa, Artificial Sequence
  Description of Artificial Sequence: Synthetic peptide
  Seed: GMDPRMCSLMQGSTL
GMDFRMFSVMQHSTL

SEQ ID NO: 71867 - protein, 15 aa, Artificial Sequence
  Description of Artificial Sequence: Synthetic peptide
  Seed: GMDPRMCSLMQGSTL
GMDFRMFSVMQISTL

SEQ ID NO: 71868 - protein, 15 aa, Artificial Sequence
  Description of Artificial Sequence: Synthetic peptide
  Seed: GMDPRMCSLMQGSTL
GMDFRMFSVMQKSTL

SEQ ID NO: 71869 - protein, 15 aa, Artificial Sequence
  Description of Artificial Sequence: Synthetic peptide
  Seed: GMDPRMCSLMQGSTL
GMDFRMFSVMQLSTL

SEQ ID NO: 71870 - protein, 15 aa, Artificial Sequence
  Description of Artificial Sequence: Synthetic peptide
  Seed: GMDPRMCSLMQGSTL
GMDFRMFSVMQMSTL

SEQ ID NO: 71871 - protein, 15 aa, Artificial Sequence
  Description of Artificial Sequence: Synthetic peptide
  Seed: GMDPRMCSLMQGSTL
GMDFRMFSVMQNSTL

SEQ ID NO: 71872 - protein, 15 aa, Artificial Sequence
  Description of Artificial Sequence: Synthetic peptide
  Seed: GMDPRMCSLMQGSTL
GMDFRMFSVMQPSTL

SEQ ID NO: 71873 - protein, 15 aa, Artificial Sequence
  Description of Artificial Sequence: Synthetic peptide
  Seed: GMDPRMCSLMQGSTL
GMDFRMFSVMQQSTL

SEQ ID NO: 71874 - protein, 15 aa, Artificial Sequence
  Description of Artificial Sequence: Synthetic peptide
  Seed: GMDPRMCSLMQGSTL
GMDFRMFSVMQSSTL

SEQ ID NO: 71875 - protein, 15 aa, Artificial Sequence
  Description of Artificial Sequence: Synthetic peptide
  Seed: GMDPRMCSLMQGSTL
GMDFRMFSVMQTSTL

SEQ ID NO: 71876 - protein, 15 aa, Artificial Sequence
  Description of Artificial Sequence: Synthetic peptide
  Seed: GMDPRMCSLMQGSTL
GMDFRMFSVMQVSTL

SEQ ID NO: 71877 - protein, 15 aa, Artificial Sequence
  Description of Artificial Sequence: Synthetic peptide
  Seed: GMDPRMCSLMQGSTL
GMDFRMFSYMQNSTL

SEQ ID NO: 71878 - protein, 15 aa, Artificial Sequence
  Description of Artificial Sequence: Synthetic peptide
  Seed: GMDPRMCSLMQGSTL
GMDFRMGSAMQASTL

SEQ ID NO: 71879 - protein, 15 aa, Artificial Sequence
  Description of Artificial Sequence: Synthetic peptide
  Seed: GMDPRMCSLMQGSTL
GMDFRMGSAMQHSTL

SEQ ID NO: 71880 - protein, 15 aa, Artificial Sequence
  Description of Artificial Sequence: Synthetic peptide
  Seed: GMDPRMCSLMQGSTL
GMDFRMGSAMQISTL

SEQ ID NO: 71881 - protein, 15 aa, Artificial Sequence
  Description of Artificial Sequence: Synthetic peptide
  Seed: GMDPRMCSLMQGSTL
GMDFRMGSAMQLSTL

SEQ ID NO: 71882 - protein, 15 aa, Artificial Sequence
  Description of Artificial Sequence: Synthetic peptide
  Seed: GMDPRMCSLMQGSTL
GMDFRMGSAMQMSTL

SEQ ID NO: 71883 - protein, 15 aa, Artificial Sequence
  Description of Artificial Sequence: Synthetic peptide
  Seed: GMDPRMCSLMQGSTL
GMDFRMGSAMQNSTL

SEQ ID NO: 71884 - protein, 15 aa, Artificial Sequence
  Description of Artificial Sequence: Synthetic peptide
  Seed: GMDPRMCSLMQGSTL
GMDFRMGSAMQQSTL

SEQ ID NO: 71885 - protein, 15 aa, Artificial Sequence
  Description of Artificial Sequence: Synthetic peptide
  Seed: GMDPRMCSLMQGSTL
GMDFRMGSAMQSSTL

SEQ ID NO: 71886 - protein, 15 aa, Artificial Sequence
  Description of Artificial Sequence: Synthetic peptide
  Seed: GMDPRMCSLMQGSTL
GMDFRMGSAMQTSTL

SEQ ID NO: 71887 - protein, 15 aa, Artificial Sequence
  Description of Artificial Sequence: Synthetic peptide
  Seed: GMDPRMCSLMQGSTL
GMDFRMGSAMQVSTL

SEQ ID NO: 71888 - protein, 15 aa, Artificial Sequence
  Description of Artificial Sequence: Synthetic peptide
  Seed: GMDPRMCSLMQGSTL
GMDFRMGSIMQASTL

SEQ ID NO: 71889 - protein, 15 aa, Artificial Sequence
  Description of Artificial Sequence: Synthetic peptide
  Seed: GMDPRMCSLMQGSTL
GMDFRMGSIMQISTL

SEQ ID NO: 71890 - protein, 15 aa, Artificial Sequence
  Description of Artificial Sequence: Synthetic peptide
  Seed: GMDPRMCSLMQGSTL
GMDFRMGSIMQLSTL

SEQ ID NO: 71891 - protein, 15 aa, Artificial Sequence
  Description of Artificial Sequence: Synthetic peptide
  Seed: GMDPRMCSLMQGSTL
GMDFRMGSIMQMSTL

SEQ ID NO: 71892 - protein, 15 aa, Artificial Sequence
  Description of Artificial Sequence: Synthetic peptide
  Seed: GMDPRMCSLMQGSTL
GMDFRMGSIMQNSTL

SEQ ID NO: 71893 - protein, 15 aa, Artificial Sequence
  Description of Artificial Sequence: Synthetic peptide
  Seed: GMDPRMCSLMQGSTL
GMDFRMGSIMQSSTL

SEQ ID NO: 71894 - protein, 15 aa, Artificial Sequence
  Description of Artificial Sequence: Synthetic peptide
  Seed: GMDPRMCSLMQGSTL
GMDFRMGSIMQTSTL

SEQ ID NO: 71895 - protein, 15 aa, Artificial Sequence
  Description of Artificial Sequence: Synthetic peptide
  Seed: GMDPRMCSLMQGSTL
GMDFRMGSIMQVSTL

SEQ ID NO: 71896 - protein, 15 aa, Artificial Sequence
  Description of Artificial Sequence: Synthetic peptide
  Seed: GMDPRMCSLMQGSTL
GMDFRMGSLMQNSTL

SEQ ID NO: 71897 - protein, 15 aa, Artificial Sequence
  Description of Artificial Sequence: Synthetic peptide
  Seed: GMDPRMCSLMQGSTL
GMDFRMGSNMQASTL

SEQ ID NO: 71898 - protein, 15 aa, Artificial Sequence
  Description of Artificial Sequence: Synthetic peptide
  Seed: GMDPRMCSLMQGSTL
GMDFRMGSNMQNSTL

SEQ ID NO: 71899 - protein, 15 aa, Artificial Sequence
  Description of Artificial Sequence: Synthetic peptide
  Seed: GMDPRMCSLMQGSTL
GMDFRMGSPMQASTL

SEQ ID NO: 71900 - protein, 15 aa, Artificial Sequence
  Description of Artificial Sequence: Synthetic peptide
  Seed: GMDPRMCSLMQGSTL
GMDFRMGSPMQISTL

SEQ ID NO: 71901 - protein, 15 aa, Artificial Sequence
  Description of Artificial Sequence: Synthetic peptide
  Seed: GMDPRMCSLMQGSTL
GMDFRMGSPMQLSTL

SEQ ID NO: 71902 - protein, 15 aa, Artificial Sequence
  Description of Artificial Sequence: Synthetic peptide
  Seed: GMDPRMCSLMQGSTL
GMDFRMGSPMQMSTL

SEQ ID NO: 71903 - protein, 15 aa, Artificial Sequence
  Description of Artificial Sequence: Synthetic peptide
  Seed: GMDPRMCSLMQGSTL
GMDFRMGSPMQNSTL

SEQ ID NO: 71904 - protein, 15 aa, Artificial Sequence
  Description of Artificial Sequence: Synthetic peptide
  Seed: GMDPRMCSLMQGSTL
GMDFRMGSPMQSSTL

SEQ ID NO: 71905 - protein, 15 aa, Artificial Sequence
  Description of Artificial Sequence: Synthetic peptide
  Seed: GMDPRMCSLMQGSTL
GMDFRMGSPMQVSTL

SEQ ID NO: 71906 - protein, 15 aa, Artificial Sequence
  Description of Artificial Sequence: Synthetic peptide
  Seed: GMDPRMCSLMQGSTL
GMDFRMGSSMQASTL

SEQ ID NO: 71907 - protein, 15 aa, Artificial Sequence
  Description of Artificial Sequence: Synthetic peptide
  Seed: GMDPRMCSLMQGSTL
GMDFRMGSSMQISTL

SEQ ID NO: 71908 - protein, 15 aa, Artificial Sequence
  Description of Artificial Sequence: Synthetic peptide
  Seed: GMDPRMCSLMQGSTL
GMDFRMGSSMQLSTL

SEQ ID NO: 71909 - protein, 15 aa, Artificial Sequence
  Description of Artificial Sequence: Synthetic peptide
  Seed: GMDPRMCSLMQGSTL
GMDFRMGSSMQMSTL

SEQ ID NO: 71910 - protein, 15 aa, Artificial Sequence
  Description of Artificial Sequence: Synthetic peptide
  Seed: GMDPRMCSLMQGSTL
GMDFRMGSSMQNSTL

SEQ ID NO: 71911 - protein, 15 aa, Artificial Sequence
  Description of Artificial Sequence: Synthetic peptide
  Seed: GMDPRMCSLMQGSTL
GMDFRMGSSMQSSTL

SEQ ID NO: 71912 - protein, 15 aa, Artificial Sequence
  Description of Artificial Sequence: Synthetic peptide
  Seed: GMDPRMCSLMQGSTL
GMDFRMGSSMQTSTL

SEQ ID NO: 71913 - protein, 15 aa, Artificial Sequence
  Description of Artificial Sequence: Synthetic peptide
  Seed: GMDPRMCSLMQGSTL
GMDFRMGSSMQVSTL

SEQ ID NO: 71914 - protein, 15 aa, Artificial Sequence
  Description of Artificial Sequence: Synthetic peptide
  Seed: GMDPRMCSLMQGSTL
GMDFRMGSTMQASTL

SEQ ID NO: 71915 - protein, 15 aa, Artificial Sequence
  Description of Artificial Sequence: Synthetic peptide
  Seed: GMDPRMCSLMQGSTL
GMDFRMGSTMQHSTL

SEQ ID NO: 71916 - protein, 15 aa, Artificial Sequence
  Description of Artificial Sequence: Synthetic peptide
  Seed: GMDPRMCSLMQGSTL
GMDFRMGSTMQISTL

SEQ ID NO: 71917 - protein, 15 aa, Artificial Sequence
  Description of Artificial Sequence: Synthetic peptide
  Seed: GMDPRMCSLMQGSTL
GMDFRMGSTMQLSTL

SEQ ID NO: 71918 - protein, 15 aa, Artificial Sequence
  Description of Artificial Sequence: Synthetic peptide
  Seed: GMDPRMCSLMQGSTL
GMDFRMGSTMQMSTL

SEQ ID NO: 71919 - protein, 15 aa, Artificial Sequence
  Description of Artificial Sequence: Synthetic peptide
  Seed: GMDPRMCSLMQGSTL
GMDFRMGSTMQNSTL

SEQ ID NO: 71920 - protein, 15 aa, Artificial Sequence
  Description of Artificial Sequence: Synthetic peptide
  Seed: GMDPRMCSLMQGSTL
GMDFRMGSTMQSSTL

SEQ ID NO: 71921 - protein, 15 aa, Artificial Sequence
  Description of Artificial Sequence: Synthetic peptide
  Seed: GMDPRMCSLMQGSTL
GMDFRMGSTMQTSTL

SEQ ID NO: 71922 - protein, 15 aa, Artificial Sequence
  Description of Artificial Sequence: Synthetic peptide
  Seed: GMDPRMCSLMQGSTL
GMDFRMGSTMQVSTL

SEQ ID NO: 71923 - protein, 15 aa, Artificial Sequence
  Description of Artificial Sequence: Synthetic peptide
  Seed: GMDPRMCSLMQGSTL
GMDFRMGSVMQASTL

SEQ ID NO: 71924 - protein, 15 aa, Artificial Sequence
  Description of Artificial Sequence: Synthetic peptide
  Seed: GMDPRMCSLMQGSTL
GMDFRMGSVMQHSTL

SEQ ID NO: 71925 - protein, 15 aa, Artificial Sequence
  Description of Artificial Sequence: Synthetic peptide
  Seed: GMDPRMCSLMQGSTL
GMDFRMGSVMQISTL

SEQ ID NO: 71926 - protein, 15 aa, Artificial Sequence
  Description of Artificial Sequence: Synthetic peptide
  Seed: GMDPRMCSLMQGSTL
GMDFRMGSVMQLSTL

SEQ ID NO: 71927 - protein, 15 aa, Artificial Sequence
  Description of Artificial Sequence: Synthetic peptide
  Seed: GMDPRMCSLMQGSTL
GMDFRMGSVMQMSTL

SEQ ID NO: 71928 - protein, 15 aa, Artificial Sequence
  Description of Artificial Sequence: Synthetic peptide
  Seed: GMDPRMCSLMQGSTL
GMDFRMGSVMQNSTL

SEQ ID NO: 71929 - protein, 15 aa, Artificial Sequence
  Description of Artificial Sequence: Synthetic peptide
  Seed: GMDPRMCSLMQGSTL
GMDFRMGSVMQSSTL

SEQ ID NO: 71930 - protein, 15 aa, Artificial Sequence
  Description of Artificial Sequence: Synthetic peptide
  Seed: GMDPRMCSLMQGSTL
GMDFRMGSVMQTSTL

SEQ ID NO: 71931 - protein, 15 aa, Artificial Sequence
  Description of Artificial Sequence: Synthetic peptide
  Seed: GMDPRMCSLMQGSTL
GMDFRMGSVMQVSTL

SEQ ID NO: 71932 - protein, 15 aa, Artificial Sequence
  Description of Artificial Sequence: Synthetic peptide
  Seed: GMDPRMCSLMQGSTL
GMDFRMHSAMQASTL

SEQ ID NO: 71933 - protein, 15 aa, Artificial Sequence
  Description of Artificial Sequence: Synthetic peptide
  Seed: GMDPRMCSLMQGSTL
GMDFRMHSAMQHSTL

SEQ ID NO: 71934 - protein, 15 aa, Artificial Sequence
  Description of Artificial Sequence: Synthetic peptide
  Seed: GMDPRMCSLMQGSTL
GMDFRMHSAMQISTL

SEQ ID NO: 71935 - protein, 15 aa, Artificial Sequence
  Description of Artificial Sequence: Synthetic peptide
  Seed: GMDPRMCSLMQGSTL
GMDFRMHSAMQLSTL

SEQ ID NO: 71936 - protein, 15 aa, Artificial Sequence
  Description of Artificial Sequence: Synthetic peptide
  Seed: GMDPRMCSLMQGSTL
GMDFRMHSAMQMSTL

SEQ ID NO: 71937 - protein, 15 aa, Artificial Sequence
  Description of Artificial Sequence: Synthetic peptide
  Seed: GMDPRMCSLMQGSTL
GMDFRMHSAMQNSTL

SEQ ID NO: 71938 - protein, 15 aa, Artificial Sequence
  Description of Artificial Sequence: Synthetic peptide
  Seed: GMDPRMCSLMQGSTL
GMDFRMHSAMQSSTL

SEQ ID NO: 71939 - protein, 15 aa, Artificial Sequence
  Description of Artificial Sequence: Synthetic peptide
  Seed: GMDPRMCSLMQGSTL
GMDFRMHSAMQTSTL

SEQ ID NO: 71940 - protein, 15 aa, Artificial Sequence
  Description of Artificial Sequence: Synthetic peptide
  Seed: GMDPRMCSLMQGSTL
GMDFRMHSAMQVSTL

SEQ ID NO: 71941 - protein, 15 aa, Artificial Sequence
  Description of Artificial Sequence: Synthetic peptide
  Seed: GMDPRMCSLMQGSTL
GMDFRMHSIMQASTL

SEQ ID NO: 71942 - protein, 15 aa, Artificial Sequence
  Description of Artificial Sequence: Synthetic peptide
  Seed: GMDPRMCSLMQGSTL
GMDFRMHSIMQNSTL

SEQ ID NO: 71943 - protein, 15 aa, Artificial Sequence
  Description of Artificial Sequence: Synthetic peptide
  Seed: GMDPRMCSLMQGSTL
GMDFRMHSIMQSSTL

SEQ ID NO: 71944 - protein, 15 aa, Artificial Sequence
  Description of Artificial Sequence: Synthetic peptide
  Seed: GMDPRMCSLMQGSTL
GMDFRMHSPMQASTL

SEQ ID NO: 71945 - protein, 15 aa, Artificial Sequence
  Description of Artificial Sequence: Synthetic peptide
  Seed: GMDPRMCSLMQGSTL
GMDFRMHSPMQNSTL

SEQ ID NO: 71946 - protein, 15 aa, Artificial Sequence
  Description of Artificial Sequence: Synthetic peptide
  Seed: GMDPRMCSLMQGSTL
GMDFRMHSPMQSSTL

SEQ ID NO: 71947 - protein, 15 aa, Artificial Sequence
  Description of Artificial Sequence: Synthetic peptide
  Seed: GMDPRMCSLMQGSTL
GMDFRMHSSMQASTL

SEQ ID NO: 71948 - protein, 15 aa, Artificial Sequence
  Description of Artificial Sequence: Synthetic peptide
  Seed: GMDPRMCSLMQGSTL
GMDFRMHSSMQNSTL

SEQ ID NO: 71949 - protein, 15 aa, Artificial Sequence
  Description of Artificial Sequence: Synthetic peptide
  Seed: GMDPRMCSLMQGSTL
GMDFRMHSSMQSSTL

SEQ ID NO: 71950 - protein, 15 aa, Artificial Sequence
  Description of Artificial Sequence: Synthetic peptide
  Seed: GMDPRMCSLMQGSTL
GMDFRMHSTMQASTL

SEQ ID NO: 71951 - protein, 15 aa, Artificial Sequence
  Description of Artificial Sequence: Synthetic peptide
  Seed: GMDPRMCSLMQGSTL
GMDFRMHSTMQNSTL

SEQ ID NO: 71952 - protein, 15 aa, Artificial Sequence
  Description of Artificial Sequence: Synthetic peptide
  Seed: GMDPRMCSLMQGSTL
GMDFRMHSTMQSSTL

SEQ ID NO: 71953 - protein, 15 aa, Artificial Sequence
  Description of Artificial Sequence: Synthetic peptide
  Seed: GMDPRMCSLMQGSTL
GMDFRMHSVMQASTL

SEQ ID NO: 71954 - protein, 15 aa, Artificial Sequence
  Description of Artificial Sequence: Synthetic peptide
  Seed: GMDPRMCSLMQGSTL
GMDFRMHSVMQHSTL

SEQ ID NO: 71955 - protein, 15 aa, Artificial Sequence
  Description of Artificial Sequence: Synthetic peptide
  Seed: GMDPRMCSLMQGSTL
GMDFRMHSVMQLSTL

SEQ ID NO: 71956 - protein, 15 aa, Artificial Sequence
  Description of Artificial Sequence: Synthetic peptide
  Seed: GMDPRMCSLMQGSTL
GMDFRMHSVMQNSTL

SEQ ID NO: 71957 - protein, 15 aa, Artificial Sequence
  Description of Artificial Sequence: Synthetic peptide
  Seed: GMDPRMCSLMQGSTL
GMDFRMHSVMQSSTL

SEQ ID NO: 71958 - protein, 15 aa, Artificial Sequence
  Description of Artificial Sequence: Synthetic peptide
  Seed: GMDPRMCSLMQGSTL
GMDFRMISAMQASTL

SEQ ID NO: 71959 - protein, 15 aa, Artificial Sequence
  Description of Artificial Sequence: Synthetic peptide
  Seed: GMDPRMCSLMQGSTL
GMDFRMISAMQCSTL

SEQ ID NO: 71960 - protein, 15 aa, Artificial Sequence
  Description of Artificial Sequence: Synthetic peptide
  Seed: GMDPRMCSLMQGSTL
GMDFRMISAMQDSTL

SEQ ID NO: 71961 - protein, 15 aa, Artificial Sequence
  Description of Artificial Sequence: Synthetic peptide
  Seed: GMDPRMCSLMQGSTL
GMDFRMISAMQESTL

SEQ ID NO: 71962 - protein, 15 aa, Artificial Sequence
  Description of Artificial Sequence: Synthetic peptide
  Seed: GMDPRMCSLMQGSTL
GMDFRMISAMQFSTL

SEQ ID NO: 71963 - protein, 15 aa, Artificial Sequence
  Description of Artificial Sequence: Synthetic peptide
  Seed: GMDPRMCSLMQGSTL
GMDFRMISAMQGSTL

SEQ ID NO: 71964 - protein, 15 aa, Artificial Sequence
  Description of Artificial Sequence: Synthetic peptide
  Seed: GMDPRMCSLMQGSTL
GMDFRMISAMQHSTL

SEQ ID NO: 71965 - protein, 15 aa, Artificial Sequence
  Description of Artificial Sequence: Synthetic peptide
  Seed: GMDPRMCSLMQGSTL
GMDFRMISAMQISTL

SEQ ID NO: 71966 - protein, 15 aa, Artificial Sequence
  Description of Artificial Sequence: Synthetic peptide
  Seed: GMDPRMCSLMQGSTL
GMDFRMISAMQKSTL

SEQ ID NO: 71967 - protein, 15 aa, Artificial Sequence
  Description of Artificial Sequence: Synthetic peptide
  Seed: GMDPRMCSLMQGSTL
GMDFRMISAMQLSTL

SEQ ID NO: 71968 - protein, 15 aa, Artificial Sequence
  Description of Artificial Sequence: Synthetic peptide
  Seed: GMDPRMCSLMQGSTL
GMDFRMISAMQMSTL

SEQ ID NO: 71969 - protein, 15 aa, Artificial Sequence
  Description of Artificial Sequence: Synthetic peptide
  Seed: GMDPRMCSLMQGSTL
GMDFRMISAMQNSTL

SEQ ID NO: 71970 - protein, 15 aa, Artificial Sequence
  Description of Artificial Sequence: Synthetic peptide
  Seed: GMDPRMCSLMQGSTL
GMDFRMISAMQPSTL

SEQ ID NO: 71971 - protein, 15 aa, Artificial Sequence
  Description of Artificial Sequence: Synthetic peptide
  Seed: GMDPRMCSLMQGSTL
GMDFRMISAMQQSTL

SEQ ID NO: 71972 - protein, 15 aa, Artificial Sequence
  Description of Artificial Sequence: Synthetic peptide
  Seed: GMDPRMCSLMQGSTL
GMDFRMISAMQRSTL

SEQ ID NO: 71973 - protein, 15 aa, Artificial Sequence
  Description of Artificial Sequence: Synthetic peptide
  Seed: GMDPRMCSLMQGSTL
GMDFRMISAMQSSTL

SEQ ID NO: 71974 - protein, 15 aa, Artificial Sequence
  Description of Artificial Sequence: Synthetic peptide
  Seed: GMDPRMCSLMQGSTL
GMDFRMISAMQTSTL

SEQ ID NO: 71975 - protein, 15 aa, Artificial Sequence
  Description of Artificial Sequence: Synthetic peptide
  Seed: GMDPRMCSLMQGSTL
GMDFRMISAMQVSTL

SEQ ID NO: 71976 - protein, 15 aa, Artificial Sequence
  Description of Artificial Sequence: Synthetic peptide
  Seed: GMDPRMCSLMQGSTL
GMDFRMISAMQWSTL

SEQ ID NO: 71977 - protein, 15 aa, Artificial Sequence
  Description of Artificial Sequence: Synthetic peptide
  Seed: GMDPRMCSLMQGSTL
GMDFRMISAMQYSTL

SEQ ID NO: 71978 - protein, 15 aa, Artificial Sequence
  Description of Artificial Sequence: Synthetic peptide
  Seed: GMDPRMCSLMQGSTL
GMDFRMISCMQASTL

SEQ ID NO: 71979 - protein, 15 aa, Artificial Sequence
  Description of Artificial Sequence: Synthetic peptide
  Seed: GMDPRMCSLMQGSTL
GMDFRMISCMQNSTL

SEQ ID NO: 71980 - protein, 15 aa, Artificial Sequence
  Description of Artificial Sequence: Synthetic peptide
  Seed: GMDPRMCSLMQGSTL
GMDFRMISCMQSSTL

SEQ ID NO: 71981 - protein, 15 aa, Artificial Sequence
  Description of Artificial Sequence: Synthetic peptide
  Seed: GMDPRMCSLMQGSTL
GMDFRMISDMQASTL

SEQ ID NO: 71982 - protein, 15 aa, Artificial Sequence
  Description of Artificial Sequence: Synthetic peptide
  Seed: GMDPRMCSLMQGSTL
GMDFRMISDMQSSTL

SEQ ID NO: 71983 - protein, 15 aa, Artificial Sequence
  Description of Artificial Sequence: Synthetic peptide
  Seed: GMDPRMCSLMQGSTL
GMDFRMISEMQASTL

SEQ ID NO: 71984 - protein, 15 aa, Artificial Sequence
  Description of Artificial Sequence: Synthetic peptide
  Seed: GMDPRMCSLMQGSTL
GMDFRMISEMQNSTL

SEQ ID NO: 71985 - protein, 15 aa, Artificial Sequence
  Description of Artificial Sequence: Synthetic peptide
  Seed: GMDPRMCSLMQGSTL
GMDFRMISEMQSSTL

SEQ ID NO: 71986 - protein, 15 aa, Artificial Sequence
  Description of Artificial Sequence: Synthetic peptide
  Seed: GMDPRMCSLMQGSTL
GMDFRMISEMQTSTL

SEQ ID NO: 71987 - protein, 15 aa, Artificial Sequence
  Description of Artificial Sequence: Synthetic peptide
  Seed: GMDPRMCSLMQGSTL
GMDFRMISFMQASTL

SEQ ID NO: 71988 - protein, 15 aa, Artificial Sequence
  Description of Artificial Sequence: Synthetic peptide
  Seed: GMDPRMCSLMQGSTL
GMDFRMISFMQHSTL

SEQ ID NO: 71989 - protein, 15 aa, Artificial Sequence
  Description of Artificial Sequence: Synthetic peptide
  Seed: GMDPRMCSLMQGSTL
GMDFRMISFMQNSTL

SEQ ID NO: 71990 - protein, 15 aa, Artificial Sequence
  Description of Artificial Sequence: Synthetic peptide
  Seed: GMDPRMCSLMQGSTL
GMDFRMISFMQSSTL

SEQ ID NO: 71991 - protein, 15 aa, Artificial Sequence
  Description of Artificial Sequence: Synthetic peptide
  Seed: GMDPRMCSLMQGSTL
GMDFRMISFMQTSTL

SEQ ID NO: 71992 - protein, 15 aa, Artificial Sequence
  Description of Artificial Sequence: Synthetic peptide
  Seed: GMDPRMCSLMQGSTL
GMDFRMISGMQASTL

SEQ ID NO: 71993 - protein, 15 aa, Artificial Sequence
  Description of Artificial Sequence: Synthetic peptide
  Seed: GMDPRMCSLMQGSTL
GMDFRMISGMQCSTL

SEQ ID NO: 71994 - protein, 15 aa, Artificial Sequence
  Description of Artificial Sequence: Synthetic peptide
  Seed: GMDPRMCSLMQGSTL
GMDFRMISGMQDSTL

SEQ ID NO: 71995 - protein, 15 aa, Artificial Sequence
  Description of Artificial Sequence: Synthetic peptide
  Seed: GMDPRMCSLMQGSTL
GMDFRMISGMQESTL

SEQ ID NO: 71996 - protein, 15 aa, Artificial Sequence
  Description of Artificial Sequence: Synthetic peptide
  Seed: GMDPRMCSLMQGSTL
GMDFRMISGMQFSTL

SEQ ID NO: 71997 - protein, 15 aa, Artificial Sequence
  Description of Artificial Sequence: Synthetic peptide
  Seed: GMDPRMCSLMQGSTL
GMDFRMISGMQGSTL

SEQ ID NO: 71998 - protein, 15 aa, Artificial Sequence
  Description of Artificial Sequence: Synthetic peptide
  Seed: GMDPRMCSLMQGSTL
GMDFRMISGMQHSTL

SEQ ID NO: 71999 - protein, 15 aa, Artificial Sequence
  Description of Artificial Sequence: Synthetic peptide
  Seed: GMDPRMCSLMQGSTL
GMDFRMISGMQISTL

SEQ ID NO: 72000 - protein, 15 aa, Artificial Sequence
  Description of Artificial Sequence: Synthetic peptide
  Seed: GMDPRMCSLMQGSTL
GMDFRMISGMQKSTL

SEQ ID NO: 72001 - protein, 15 aa, Artificial Sequence
  Description of Artificial Sequence: Synthetic peptide
  Seed: GMDPRMCSLMQGSTL
GMDFRMISGMQLSTL

SEQ ID NO: 72002 - protein, 15 aa, Artificial Sequence
  Description of Artificial Sequence: Synthetic peptide
  Seed: GMDPRMCSLMQGSTL
GMDFRMISGMQMSTL

SEQ ID NO: 72003 - protein, 15 aa, Artificial Sequence
  Description of Artificial Sequence: Synthetic peptide
  Seed: GMDPRMCSLMQGSTL
GMDFRMISGMQNSTL

SEQ ID NO: 72004 - protein, 15 aa, Artificial Sequence
  Description of Artificial Sequence: Synthetic peptide
  Seed: GMDPRMCSLMQGSTL
GMDFRMISGMQPSTL

SEQ ID NO: 72005 - protein, 15 aa, Artificial Sequence
  Description of Artificial Sequence: Synthetic peptide
  Seed: GMDPRMCSLMQGSTL
GMDFRMISGMQQSTL

SEQ ID NO: 72006 - protein, 15 aa, Artificial Sequence
  Description of Artificial Sequence: Synthetic peptide
  Seed: GMDPRMCSLMQGSTL
GMDFRMISGMQSSTL

SEQ ID NO: 72007 - protein, 15 aa, Artificial Sequence
  Description of Artificial Sequence: Synthetic peptide
  Seed: GMDPRMCSLMQGSTL
GMDFRMISGMQTSTL

SEQ ID NO: 72008 - protein, 15 aa, Artificial Sequence
  Description of Artificial Sequence: Synthetic peptide
  Seed: GMDPRMCSLMQGSTL
GMDFRMISGMQVSTL

SEQ ID NO: 72009 - protein, 15 aa, Artificial Sequence
  Description of Artificial Sequence: Synthetic peptide
  Seed: GMDPRMCSLMQGSTL
GMDFRMISGMQYSTL

SEQ ID NO: 72010 - protein, 15 aa, Artificial Sequence
  Description of Artificial Sequence: Synthetic peptide
  Seed: GMDPRMCSLMQGSTL
GMDFRMISHMQASTL

SEQ ID NO: 72011 - protein, 15 aa, Artificial Sequence
  Description of Artificial Sequence: Synthetic peptide
  Seed: GMDPRMCSLMQGSTL
GMDFRMISHMQGSTL

SEQ ID NO: 72012 - protein, 15 aa, Artificial Sequence
  Description of Artificial Sequence: Synthetic peptide
  Seed: GMDPRMCSLMQGSTL
GMDFRMISHMQLSTL

SEQ ID NO: 72013 - protein, 15 aa, Artificial Sequence
  Description of Artificial Sequence: Synthetic peptide
  Seed: GMDPRMCSLMQGSTL
GMDFRMISHMQMSTL

SEQ ID NO: 72014 - protein, 15 aa, Artificial Sequence
  Description of Artificial Sequence: Synthetic peptide
  Seed: GMDPRMCSLMQGSTL
GMDFRMISHMQNSTL

SEQ ID NO: 72015 - protein, 15 aa, Artificial Sequence
  Description of Artificial Sequence: Synthetic peptide
  Seed: GMDPRMCSLMQGSTL
GMDFRMISHMQPSTL

SEQ ID NO: 72016 - protein, 15 aa, Artificial Sequence
  Description of Artificial Sequence: Synthetic peptide
  Seed: GMDPRMCSLMQGSTL
GMDFRMISHMQSSTL

SEQ ID NO: 72017 - protein, 15 aa, Artificial Sequence
  Description of Artificial Sequence: Synthetic peptide
  Seed: GMDPRMCSLMQGSTL
GMDFRMISHMQTSTL

SEQ ID NO: 72018 - protein, 15 aa, Artificial Sequence
  Description of Artificial Sequence: Synthetic peptide
  Seed: GMDPRMCSLMQGSTL
GMDFRMISHMQVSTL

SEQ ID NO: 72019 - protein, 15 aa, Artificial Sequence
  Description of Artificial Sequence: Synthetic peptide
  Seed: GMDPRMCSLMQGSTL
GMDFRMISIMQASTL

SEQ ID NO: 72020 - protein, 15 aa, Artificial Sequence
  Description of Artificial Sequence: Synthetic peptide
  Seed: GMDPRMCSLMQGSTL
GMDFRMISIMQDSTL

SEQ ID NO: 72021 - protein, 15 aa, Artificial Sequence
  Description of Artificial Sequence: Synthetic peptide
  Seed: GMDPRMCSLMQGSTL
GMDFRMISIMQESTL

SEQ ID NO: 72022 - protein, 15 aa, Artificial Sequence
  Description of Artificial Sequence: Synthetic peptide
  Seed: GMDPRMCSLMQGSTL
GMDFRMISIMQGSTL

SEQ ID NO: 72023 - protein, 15 aa, Artificial Sequence
  Description of Artificial Sequence: Synthetic peptide
  Seed: GMDPRMCSLMQGSTL
GMDFRMISIMQHSTL

SEQ ID NO: 72024 - protein, 15 aa, Artificial Sequence
  Description of Artificial Sequence: Synthetic peptide
  Seed: GMDPRMCSLMQGSTL
GMDFRMISIMQISTL

SEQ ID NO: 72025 - protein, 15 aa, Artificial Sequence
  Description of Artificial Sequence: Synthetic peptide
  Seed: GMDPRMCSLMQGSTL
GMDFRMISIMQKSTL

SEQ ID NO: 72026 - protein, 15 aa, Artificial Sequence
  Description of Artificial Sequence: Synthetic peptide
  Seed: GMDPRMCSLMQGSTL
GMDFRMISIMQLSTL

SEQ ID NO: 72027 - protein, 15 aa, Artificial Sequence
  Description of Artificial Sequence: Synthetic peptide
  Seed: GMDPRMCSLMQGSTL
GMDFRMISIMQMSTL

SEQ ID NO: 72028 - protein, 15 aa, Artificial Sequence
  Description of Artificial Sequence: Synthetic peptide
  Seed: GMDPRMCSLMQGSTL
GMDFRMISIMQNSTL

SEQ ID NO: 72029 - protein, 15 aa, Artificial Sequence
  Description of Artificial Sequence: Synthetic peptide
  Seed: GMDPRMCSLMQGSTL
GMDFRMISIMQPSTL

SEQ ID NO: 72030 - protein, 15 aa, Artificial Sequence
  Description of Artificial Sequence: Synthetic peptide
  Seed: GMDPRMCSLMQGSTL
GMDFRMISIMQQSTL

SEQ ID NO: 72031 - protein, 15 aa, Artificial Sequence
  Description of Artificial Sequence: Synthetic peptide
  Seed: GMDPRMCSLMQGSTL
GMDFRMISIMQRSTL

SEQ ID NO: 72032 - protein, 15 aa, Artificial Sequence
  Description of Artificial Sequence: Synthetic peptide
  Seed: GMDPRMCSLMQGSTL
GMDFRMISIMQSSTL

SEQ ID NO: 72033 - protein, 15 aa, Artificial Sequence
  Description of Artificial Sequence: Synthetic peptide
  Seed: GMDPRMCSLMQGSTL
GMDFRMISIMQTSTL

SEQ ID NO: 72034 - protein, 15 aa, Artificial Sequence
  Description of Artificial Sequence: Synthetic peptide
  Seed: GMDPRMCSLMQGSTL
GMDFRMISIMQVSTL

SEQ ID NO: 72035 - protein, 15 aa, Artificial Sequence
  Description of Artificial Sequence: Synthetic peptide
  Seed: GMDPRMCSLMQGSTL
GMDFRMISIMQYSTL

SEQ ID NO: 72036 - protein, 15 aa, Artificial Sequence
  Description of Artificial Sequence: Synthetic peptide
  Seed: GMDPRMCSLMQGSTL
GMDFRMISLMQASTL

SEQ ID NO: 72037 - protein, 15 aa, Artificial Sequence
  Description of Artificial Sequence: Synthetic peptide
  Seed: GMDPRMCSLMQGSTL
GMDFRMISLMQDSTL

SEQ ID NO: 72038 - protein, 15 aa, Artificial Sequence
  Description of Artificial Sequence: Synthetic peptide
  Seed: GMDPRMCSLMQGSTL
GMDFRMISLMQESTL

SEQ ID NO: 72039 - protein, 15 aa, Artificial Sequence
  Description of Artificial Sequence: Synthetic peptide
  Seed: GMDPRMCSLMQGSTL
GMDFRMISLMQGSTL

SEQ ID NO: 72040 - protein, 15 aa, Artificial Sequence
  Description of Artificial Sequence: Synthetic peptide
  Seed: GMDPRMCSLMQGSTL
GMDFRMISLMQHSTL

SEQ ID NO: 72041 - protein, 15 aa, Artificial Sequence
  Description of Artificial Sequence: Synthetic peptide
  Seed: GMDPRMCSLMQGSTL
GMDFRMISLMQISTL

SEQ ID NO: 72042 - protein, 15 aa, Artificial Sequence
  Description of Artificial Sequence: Synthetic peptide
  Seed: GMDPRMCSLMQGSTL
GMDFRMISLMQLSTL

SEQ ID NO: 72043 - protein, 15 aa, Artificial Sequence
  Description of Artificial Sequence: Synthetic peptide
  Seed: GMDPRMCSLMQGSTL
GMDFRMISLMQMSTL

SEQ ID NO: 72044 - protein, 15 aa, Artificial Sequence
  Description of Artificial Sequence: Synthetic peptide
  Seed: GMDPRMCSLMQGSTL
GMDFRMISLMQNSTL

SEQ ID NO: 72045 - protein, 15 aa, Artificial Sequence
  Description of Artificial Sequence: Synthetic peptide
  Seed: GMDPRMCSLMQGSTL
GMDFRMISLMQPSTL

SEQ ID NO: 72046 - protein, 15 aa, Artificial Sequence
  Description of Artificial Sequence: Synthetic peptide
  Seed: GMDPRMCSLMQGSTL
GMDFRMISLMQQSTL

SEQ ID NO: 72047 - protein, 15 aa, Artificial Sequence
  Description of Artificial Sequence: Synthetic peptide
  Seed: GMDPRMCSLMQGSTL
GMDFRMISLMQSSTL

SEQ ID NO: 72048 - protein, 15 aa, Artificial Sequence
  Description of Artificial Sequence: Synthetic peptide
  Seed: GMDPRMCSLMQGSTL
GMDFRMISLMQTSTL

SEQ ID NO: 72049 - protein, 15 aa, Artificial Sequence
  Description of Artificial Sequence: Synthetic peptide
  Seed: GMDPRMCSLMQGSTL
GMDFRMISLMQVSTL

SEQ ID NO: 72050 - protein, 15 aa, Artificial Sequence
  Description of Artificial Sequence: Synthetic peptide
  Seed: GMDPRMCSLMQGSTL
GMDFRMISMMQASTL

SEQ ID NO: 72051 - protein, 15 aa, Artificial Sequence
  Description of Artificial Sequence: Synthetic peptide
  Seed: GMDPRMCSLMQGSTL
GMDFRMISMMQDSTL

SEQ ID NO: 72052 - protein, 15 aa, Artificial Sequence
  Description of Artificial Sequence: Synthetic peptide
  Seed: GMDPRMCSLMQGSTL
GMDFRMISMMQESTL

SEQ ID NO: 72053 - protein, 15 aa, Artificial Sequence
  Description of Artificial Sequence: Synthetic peptide
  Seed: GMDPRMCSLMQGSTL
GMDFRMISMMQGSTL

SEQ ID NO: 72054 - protein, 15 aa, Artificial Sequence
  Description of Artificial Sequence: Synthetic peptide
  Seed: GMDPRMCSLMQGSTL
GMDFRMISMMQHSTL

SEQ ID NO: 72055 - protein, 15 aa, Artificial Sequence
  Description of Artificial Sequence: Synthetic peptide
  Seed: GMDPRMCSLMQGSTL
GMDFRMISMMQISTL

SEQ ID NO: 72056 - protein, 15 aa, Artificial Sequence
  Description of Artificial Sequence: Synthetic peptide
  Seed: GMDPRMCSLMQGSTL
GMDFRMISMMQKSTL

SEQ ID NO: 72057 - protein, 15 aa, Artificial Sequence
  Description of Artificial Sequence: Synthetic peptide
  Seed: GMDPRMCSLMQGSTL
GMDFRMISMMQLSTL

SEQ ID NO: 72058 - protein, 15 aa, Artificial Sequence
  Description of Artificial Sequence: Synthetic peptide
  Seed: GMDPRMCSLMQGSTL
GMDFRMISMMQMSTL

SEQ ID NO: 72059 - protein, 15 aa, Artificial Sequence
  Description of Artificial Sequence: Synthetic peptide
  Seed: GMDPRMCSLMQGSTL
GMDFRMISMMQNSTL

SEQ ID NO: 72060 - protein, 15 aa, Artificial Sequence
  Description of Artificial Sequence: Synthetic peptide
  Seed: GMDPRMCSLMQGSTL
GMDFRMISMMQPSTL

SEQ ID NO: 72061 - protein, 15 aa, Artificial Sequence
  Description of Artificial Sequence: Synthetic peptide
  Seed: GMDPRMCSLMQGSTL
GMDFRMISMMQQSTL

SEQ ID NO: 72062 - protein, 15 aa, Artificial Sequence
  Description of Artificial Sequence: Synthetic peptide
  Seed: GMDPRMCSLMQGSTL
GMDFRMISMMQRSTL

SEQ ID NO: 72063 - protein, 15 aa, Artificial Sequence
  Description of Artificial Sequence: Synthetic peptide
  Seed: GMDPRMCSLMQGSTL
GMDFRMISMMQSSTL

SEQ ID NO: 72064 - protein, 15 aa, Artificial Sequence
  Description of Artificial Sequence: Synthetic peptide
  Seed: GMDPRMCSLMQGSTL
GMDFRMISMMQTSTL

SEQ ID NO: 72065 - protein, 15 aa, Artificial Sequence
  Description of Artificial Sequence: Synthetic peptide
  Seed: GMDPRMCSLMQGSTL
GMDFRMISMMQVSTL

SEQ ID NO: 72066 - protein, 15 aa, Artificial Sequence
  Description of Artificial Sequence: Synthetic peptide
  Seed: GMDPRMCSLMQGSTL
GMDFRMISNMQASTL

SEQ ID NO: 72067 - protein, 15 aa, Artificial Sequence
  Description of Artificial Sequence: Synthetic peptide
  Seed: GMDPRMCSLMQGSTL
GMDFRMISNMQCSTL

SEQ ID NO: 72068 - protein, 15 aa, Artificial Sequence
  Description of Artificial Sequence: Synthetic peptide
  Seed: GMDPRMCSLMQGSTL
GMDFRMISNMQDSTL

SEQ ID NO: 72069 - protein, 15 aa, Artificial Sequence
  Description of Artificial Sequence: Synthetic peptide
  Seed: GMDPRMCSLMQGSTL
GMDFRMISNMQESTL

SEQ ID NO: 72070 - protein, 15 aa, Artificial Sequence
  Description of Artificial Sequence: Synthetic peptide
  Seed: GMDPRMCSLMQGSTL
GMDFRMISNMQFSTL

SEQ ID NO: 72071 - protein, 15 aa, Artificial Sequence
  Description of Artificial Sequence: Synthetic peptide
  Seed: GMDPRMCSLMQGSTL
GMDFRMISNMQGSTL

SEQ ID NO: 72072 - protein, 15 aa, Artificial Sequence
  Description of Artificial Sequence: Synthetic peptide
  Seed: GMDPRMCSLMQGSTL
GMDFRMISNMQHSTL

SEQ ID NO: 72073 - protein, 15 aa, Artificial Sequence
  Description of Artificial Sequence: Synthetic peptide
  Seed: GMDPRMCSLMQGSTL
GMDFRMISNMQISTL

SEQ ID NO: 72074 - protein, 15 aa, Artificial Sequence
  Description of Artificial Sequence: Synthetic peptide
  Seed: GMDPRMCSLMQGSTL
GMDFRMISNMQLSTL

SEQ ID NO: 72075 - protein, 15 aa, Artificial Sequence
  Description of Artificial Sequence: Synthetic peptide
  Seed: GMDPRMCSLMQGSTL
GMDFRMISNMQMSTL

SEQ ID NO: 72076 - protein, 15 aa, Artificial Sequence
  Description of Artificial Sequence: Synthetic peptide
  Seed: GMDPRMCSLMQGSTL
GMDFRMISNMQNSTL

SEQ ID NO: 72077 - protein, 15 aa, Artificial Sequence
  Description of Artificial Sequence: Synthetic peptide
  Seed: GMDPRMCSLMQGSTL
GMDFRMISNMQPSTL

SEQ ID NO: 72078 - protein, 15 aa, Artificial Sequence
  Description of Artificial Sequence: Synthetic peptide
  Seed: GMDPRMCSLMQGSTL
GMDFRMISNMQQSTL

SEQ ID NO: 72079 - protein, 15 aa, Artificial Sequence
  Description of Artificial Sequence: Synthetic peptide
  Seed: GMDPRMCSLMQGSTL
GMDFRMISNMQSSTL

SEQ ID NO: 72080 - protein, 15 aa, Artificial Sequence
  Description of Artificial Sequence: Synthetic peptide
  Seed: GMDPRMCSLMQGSTL
GMDFRMISNMQTSTL

SEQ ID NO: 72081 - protein, 15 aa, Artificial Sequence
  Description of Artificial Sequence: Synthetic peptide
  Seed: GMDPRMCSLMQGSTL
GMDFRMISNMQVSTL

SEQ ID NO: 72082 - protein, 15 aa, Artificial Sequence
  Description of Artificial Sequence: Synthetic peptide
  Seed: GMDPRMCSLMQGSTL
GMDFRMISPMQASTL

SEQ ID NO: 72083 - protein, 15 aa, Artificial Sequence
  Description of Artificial Sequence: Synthetic peptide
  Seed: GMDPRMCSLMQGSTL
GMDFRMISPMQCSTL

SEQ ID NO: 72084 - protein, 15 aa, Artificial Sequence
  Description of Artificial Sequence: Synthetic peptide
  Seed: GMDPRMCSLMQGSTL
GMDFRMISPMQDSTL

SEQ ID NO: 72085 - protein, 15 aa, Artificial Sequence
  Description of Artificial Sequence: Synthetic peptide
  Seed: GMDPRMCSLMQGSTL
GMDFRMISPMQESTL

SEQ ID NO: 72086 - protein, 15 aa, Artificial Sequence
  Description of Artificial Sequence: Synthetic peptide
  Seed: GMDPRMCSLMQGSTL
GMDFRMISPMQFSTL

SEQ ID NO: 72087 - protein, 15 aa, Artificial Sequence
  Description of Artificial Sequence: Synthetic peptide
  Seed: GMDPRMCSLMQGSTL
GMDFRMISPMQGSTL

SEQ ID NO: 72088 - protein, 15 aa, Artificial Sequence
  Description of Artificial Sequence: Synthetic peptide
  Seed: GMDPRMCSLMQGSTL
GMDFRMISPMQHSTL

SEQ ID NO: 72089 - protein, 15 aa, Artificial Sequence
  Description of Artificial Sequence: Synthetic peptide
  Seed: GMDPRMCSLMQGSTL
GMDFRMISPMQISTL

SEQ ID NO: 72090 - protein, 15 aa, Artificial Sequence
  Description of Artificial Sequence: Synthetic peptide
  Seed: GMDPRMCSLMQGSTL
GMDFRMISPMQKSTL

SEQ ID NO: 72091 - protein, 15 aa, Artificial Sequence
  Description of Artificial Sequence: Synthetic peptide
  Seed: GMDPRMCSLMQGSTL
GMDFRMISPMQLSTL

SEQ ID NO: 72092 - protein, 15 aa, Artificial Sequence
  Description of Artificial Sequence: Synthetic peptide
  Seed: GMDPRMCSLMQGSTL
GMDFRMISPMQMSTL

SEQ ID NO: 72093 - protein, 15 aa, Artificial Sequence
  Description of Artificial Sequence: Synthetic peptide
  Seed: GMDPRMCSLMQGSTL
GMDFRMISPMQNSTL

SEQ ID NO: 72094 - protein, 15 aa, Artificial Sequence
  Description of Artificial Sequence: Synthetic peptide
  Seed: GMDPRMCSLMQGSTL
GMDFRMISPMQPSTL

SEQ ID NO: 72095 - protein, 15 aa, Artificial Sequence
  Description of Artificial Sequence: Synthetic peptide
  Seed: GMDPRMCSLMQGSTL
GMDFRMISPMQQSTL

SEQ ID NO: 72096 - protein, 15 aa, Artificial Sequence
  Description of Artificial Sequence: Synthetic peptide
  Seed: GMDPRMCSLMQGSTL
GMDFRMISPMQRSTL

SEQ ID NO: 72097 - protein, 15 aa, Artificial Sequence
  Description of Artificial Sequence: Synthetic peptide
  Seed: GMDPRMCSLMQGSTL
GMDFRMISPMQSSTL

SEQ ID NO: 72098 - protein, 15 aa, Artificial Sequence
  Description of Artificial Sequence: Synthetic peptide
  Seed: GMDPRMCSLMQGSTL
GMDFRMISPMQTSTL

SEQ ID NO: 72099 - protein, 15 aa, Artificial Sequence
  Description of Artificial Sequence: Synthetic peptide
  Seed: GMDPRMCSLMQGSTL
GMDFRMISPMQVSTL

SEQ ID NO: 72100 - protein, 15 aa, Artificial Sequence
  Description of Artificial Sequence: Synthetic peptide
  Seed: GMDPRMCSLMQGSTL
GMDFRMISPMQWSTL

SEQ ID NO: 72101 - protein, 15 aa, Artificial Sequence
  Description of Artificial Sequence: Synthetic peptide
  Seed: GMDPRMCSLMQGSTL
GMDFRMISPMQYSTL

SEQ ID NO: 72102 - protein, 15 aa, Artificial Sequence
  Description of Artificial Sequence: Synthetic peptide
  Seed: GMDPRMCSLMQGSTL
GMDFRMISQMQASTL

SEQ ID NO: 72103 - protein, 15 aa, Artificial Sequence
  Description of Artificial Sequence: Synthetic peptide
  Seed: GMDPRMCSLMQGSTL
GMDFRMISQMQGSTL

SEQ ID NO: 72104 - protein, 15 aa, Artificial Sequence
  Description of Artificial Sequence: Synthetic peptide
  Seed: GMDPRMCSLMQGSTL
GMDFRMISQMQHSTL

SEQ ID NO: 72105 - protein, 15 aa, Artificial Sequence
  Description of Artificial Sequence: Synthetic peptide
  Seed: GMDPRMCSLMQGSTL
GMDFRMISQMQLSTL

SEQ ID NO: 72106 - protein, 15 aa, Artificial Sequence
  Description of Artificial Sequence: Synthetic peptide
  Seed: GMDPRMCSLMQGSTL
GMDFRMISQMQMSTL

SEQ ID NO: 72107 - protein, 15 aa, Artificial Sequence
  Description of Artificial Sequence: Synthetic peptide
  Seed: GMDPRMCSLMQGSTL
GMDFRMISQMQNSTL

SEQ ID NO: 72108 - protein, 15 aa, Artificial Sequence
  Description of Artificial Sequence: Synthetic peptide
  Seed: GMDPRMCSLMQGSTL
GMDFRMISQMQSSTL

SEQ ID NO: 72109 - protein, 15 aa, Artificial Sequence
  Description of Artificial Sequence: Synthetic peptide
  Seed: GMDPRMCSLMQGSTL
GMDFRMISQMQTSTL

SEQ ID NO: 72110 - protein, 15 aa, Artificial Sequence
  Description of Artificial Sequence: Synthetic peptide
  Seed: GMDPRMCSLMQGSTL
GMDFRMISQMQVSTL

SEQ ID NO: 72111 - protein, 15 aa, Artificial Sequence
  Description of Artificial Sequence: Synthetic peptide
  Seed: GMDPRMCSLMQGSTL
GMDFRMISSMQASTL

SEQ ID NO: 72112 - protein, 15 aa, Artificial Sequence
  Description of Artificial Sequence: Synthetic peptide
  Seed: GMDPRMCSLMQGSTL
GMDFRMISSMQCSTL

SEQ ID NO: 72113 - protein, 15 aa, Artificial Sequence
  Description of Artificial Sequence: Synthetic peptide
  Seed: GMDPRMCSLMQGSTL
GMDFRMISSMQDSTL

SEQ ID NO: 72114 - protein, 15 aa, Artificial Sequence
  Description of Artificial Sequence: Synthetic peptide
  Seed: GMDPRMCSLMQGSTL
GMDFRMISSMQESTL

SEQ ID NO: 72115 - protein, 15 aa, Artificial Sequence
  Description of Artificial Sequence: Synthetic peptide
  Seed: GMDPRMCSLMQGSTL
GMDFRMISSMQFSTL

SEQ ID NO: 72116 - protein, 15 aa, Artificial Sequence
  Description of Artificial Sequence: Synthetic peptide
  Seed: GMDPRMCSLMQGSTL
GMDFRMISSMQGSTL

SEQ ID NO: 72117 - protein, 15 aa, Artificial Sequence
  Description of Artificial Sequence: Synthetic peptide
  Seed: GMDPRMCSLMQGSTL
GMDFRMISSMQHSTL

SEQ ID NO: 72118 - protein, 15 aa, Artificial Sequence
  Description of Artificial Sequence: Synthetic peptide
  Seed: GMDPRMCSLMQGSTL
GMDFRMISSMQISTL

SEQ ID NO: 72119 - protein, 15 aa, Artificial Sequence
  Description of Artificial Sequence: Synthetic peptide
  Seed: GMDPRMCSLMQGSTL
GMDFRMISSMQKSTL

SEQ ID NO: 72120 - protein, 15 aa, Artificial Sequence
  Description of Artificial Sequence: Synthetic peptide
  Seed: GMDPRMCSLMQGSTL
GMDFRMISSMQLSTL

SEQ ID NO: 72121 - protein, 15 aa, Artificial Sequence
  Description of Artificial Sequence: Synthetic peptide
  Seed: GMDPRMCSLMQGSTL
GMDFRMISSMQMSTL

SEQ ID NO: 72122 - protein, 15 aa, Artificial Sequence
  Description of Artificial Sequence: Synthetic peptide
  Seed: GMDPRMCSLMQGSTL
GMDFRMISSMQNSTL

SEQ ID NO: 72123 - protein, 15 aa, Artificial Sequence
  Description of Artificial Sequence: Synthetic peptide
  Seed: GMDPRMCSLMQGSTL
GMDFRMISSMQPSTL

SEQ ID NO: 72124 - protein, 15 aa, Artificial Sequence
  Description of Artificial Sequence: Synthetic peptide
  Seed: GMDPRMCSLMQGSTL
GMDFRMISSMQQSTL

SEQ ID NO: 72125 - protein, 15 aa, Artificial Sequence
  Description of Artificial Sequence: Synthetic peptide
  Seed: GMDPRMCSLMQGSTL
GMDFRMISSMQRSTL

SEQ ID NO: 72126 - protein, 15 aa, Artificial Sequence
  Description of Artificial Sequence: Synthetic peptide
  Seed: GMDPRMCSLMQGSTL
GMDFRMISSMQSSTL

SEQ ID NO: 72127 - protein, 15 aa, Artificial Sequence
  Description of Artificial Sequence: Synthetic peptide
  Seed: GMDPRMCSLMQGSTL
GMDFRMISSMQTSTL

SEQ ID NO: 72128 - protein, 15 aa, Artificial Sequence
  Description of Artificial Sequence: Synthetic peptide
  Seed: GMDPRMCSLMQGSTL
GMDFRMISSMQVSTL

SEQ ID NO: 72129 - protein, 15 aa, Artificial Sequence
  Description of Artificial Sequence: Synthetic peptide
  Seed: GMDPRMCSLMQGSTL
GMDFRMISSMQYSTL

SEQ ID NO: 72130 - protein, 15 aa, Artificial Sequence
  Description of Artificial Sequence: Synthetic peptide
  Seed: GMDPRMCSLMQGSTL
GMDFRMISTMQASTL

SEQ ID NO: 72131 - protein, 15 aa, Artificial Sequence
  Description of Artificial Sequence: Synthetic peptide
  Seed: GMDPRMCSLMQGSTL
GMDFRMISTMQCSTL

SEQ ID NO: 72132 - protein, 15 aa, Artificial Sequence
  Description of Artificial Sequence: Synthetic peptide
  Seed: GMDPRMCSLMQGSTL
GMDFRMISTMQDSTL

SEQ ID NO: 72133 - protein, 15 aa, Artificial Sequence
  Description of Artificial Sequence: Synthetic peptide
  Seed: GMDPRMCSLMQGSTL
GMDFRMISTMQESTL

SEQ ID NO: 72134 - protein, 15 aa, Artificial Sequence
  Description of Artificial Sequence: Synthetic peptide
  Seed: GMDPRMCSLMQGSTL
GMDFRMISTMQFSTL

SEQ ID NO: 72135 - protein, 15 aa, Artificial Sequence
  Description of Artificial Sequence: Synthetic peptide
  Seed: GMDPRMCSLMQGSTL
GMDFRMISTMQGSTL

SEQ ID NO: 72136 - protein, 15 aa, Artificial Sequence
  Description of Artificial Sequence: Synthetic peptide
  Seed: GMDPRMCSLMQGSTL
GMDFRMISTMQHSTL

SEQ ID NO: 72137 - protein, 15 aa, Artificial Sequence
  Description of Artificial Sequence: Synthetic peptide
  Seed: GMDPRMCSLMQGSTL
GMDFRMISTMQISTL

SEQ ID NO: 72138 - protein, 15 aa, Artificial Sequence
  Description of Artificial Sequence: Synthetic peptide
  Seed: GMDPRMCSLMQGSTL
GMDFRMISTMQKSTL

SEQ ID NO: 72139 - protein, 15 aa, Artificial Sequence
  Description of Artificial Sequence: Synthetic peptide
  Seed: GMDPRMCSLMQGSTL
GMDFRMISTMQLSTL

SEQ ID NO: 72140 - protein, 15 aa, Artificial Sequence
  Description of Artificial Sequence: Synthetic peptide
  Seed: GMDPRMCSLMQGSTL
GMDFRMISTMQMSTL

SEQ ID NO: 72141 - protein, 15 aa, Artificial Sequence
  Description of Artificial Sequence: Synthetic peptide
  Seed: GMDPRMCSLMQGSTL
GMDFRMISTMQNSTL

SEQ ID NO: 72142 - protein, 15 aa, Artificial Sequence
  Description of Artificial Sequence: Synthetic peptide
  Seed: GMDPRMCSLMQGSTL
GMDFRMISTMQPSTL

SEQ ID NO: 72143 - protein, 15 aa, Artificial Sequence
  Description of Artificial Sequence: Synthetic peptide
  Seed: GMDPRMCSLMQGSTL
GMDFRMISTMQQSTL

SEQ ID NO: 72144 - protein, 15 aa, Artificial Sequence
  Description of Artificial Sequence: Synthetic peptide
  Seed: GMDPRMCSLMQGSTL
GMDFRMISTMQRSTL

SEQ ID NO: 72145 - protein, 15 aa, Artificial Sequence
  Description of Artificial Sequence: Synthetic peptide
  Seed: GMDPRMCSLMQGSTL
GMDFRMISTMQSSTL

SEQ ID NO: 72146 - protein, 15 aa, Artificial Sequence
  Description of Artificial Sequence: Synthetic peptide
  Seed: GMDPRMCSLMQGSTL
GMDFRMISTMQTSTL

SEQ ID NO: 72147 - protein, 15 aa, Artificial Sequence
  Description of Artificial Sequence: Synthetic peptide
  Seed: GMDPRMCSLMQGSTL
GMDFRMISTMQVSTL

SEQ ID NO: 72148 - protein, 15 aa, Artificial Sequence
  Description of Artificial Sequence: Synthetic peptide
  Seed: GMDPRMCSLMQGSTL
GMDFRMISTMQYSTL

SEQ ID NO: 72149 - protein, 15 aa, Artificial Sequence
  Description of Artificial Sequence: Synthetic peptide
  Seed: GMDPRMCSLMQGSTL
GMDFRMISVMQASTL

SEQ ID NO: 72150 - protein, 15 aa, Artificial Sequence
  Description of Artificial Sequence: Synthetic peptide
  Seed: GMDPRMCSLMQGSTL
GMDFRMISVMQCSTL

SEQ ID NO: 72151 - protein, 15 aa, Artificial Sequence
  Description of Artificial Sequence: Synthetic peptide
  Seed: GMDPRMCSLMQGSTL
GMDFRMISVMQDSTL

SEQ ID NO: 72152 - protein, 15 aa, Artificial Sequence
  Description of Artificial Sequence: Synthetic peptide
  Seed: GMDPRMCSLMQGSTL
GMDFRMISVMQESTL

SEQ ID NO: 72153 - protein, 15 aa, Artificial Sequence
  Description of Artificial Sequence: Synthetic peptide
  Seed: GMDPRMCSLMQGSTL
GMDFRMISVMQFSTL

SEQ ID NO: 72154 - protein, 15 aa, Artificial Sequence
  Description of Artificial Sequence: Synthetic peptide
  Seed: GMDPRMCSLMQGSTL
GMDFRMISVMQGSTL

SEQ ID NO: 72155 - protein, 15 aa, Artificial Sequence
  Description of Artificial Sequence: Synthetic peptide
  Seed: GMDPRMCSLMQGSTL
GMDFRMISVMQHSTL

SEQ ID NO: 72156 - protein, 15 aa, Artificial Sequence
  Description of Artificial Sequence: Synthetic peptide
  Seed: GMDPRMCSLMQGSTL
GMDFRMISVMQISTL

SEQ ID NO: 72157 - protein, 15 aa, Artificial Sequence
  Description of Artificial Sequence: Synthetic peptide
  Seed: GMDPRMCSLMQGSTL
GMDFRMISVMQKSTL

SEQ ID NO: 72158 - protein, 15 aa, Artificial Sequence
  Description of Artificial Sequence: Synthetic peptide
  Seed: GMDPRMCSLMQGSTL
GMDFRMISVMQLSTL

SEQ ID NO: 72159 - protein, 15 aa, Artificial Sequence
  Description of Artificial Sequence: Synthetic peptide
  Seed: GMDPRMCSLMQGSTL
GMDFRMISVMQMSTL

SEQ ID NO: 72160 - protein, 15 aa, Artificial Sequence
  Description of Artificial Sequence: Synthetic peptide
  Seed: GMDPRMCSLMQGSTL
GMDFRMISVMQNSTL

SEQ ID NO: 72161 - protein, 15 aa, Artificial Sequence
  Description of Artificial Sequence: Synthetic peptide
  Seed: GMDPRMCSLMQGSTL
GMDFRMISVMQPSTL

SEQ ID NO: 72162 - protein, 15 aa, Artificial Sequence
  Description of Artificial Sequence: Synthetic peptide
  Seed: GMDPRMCSLMQGSTL
GMDFRMISVMQQSTL

SEQ ID NO: 72163 - protein, 15 aa, Artificial Sequence
  Description of Artificial Sequence: Synthetic peptide
  Seed: GMDPRMCSLMQGSTL
GMDFRMISVMQRSTL

SEQ ID NO: 72164 - protein, 15 aa, Artificial Sequence
  Description of Artificial Sequence: Synthetic peptide
  Seed: GMDPRMCSLMQGSTL
GMDFRMISVMQSSTL

SEQ ID NO: 72165 - protein, 15 aa, Artificial Sequence
  Description of Artificial Sequence: Synthetic peptide
  Seed: GMDPRMCSLMQGSTL
GMDFRMISVMQTSTL

SEQ ID NO: 72166 - protein, 15 aa, Artificial Sequence
  Description of Artificial Sequence: Synthetic peptide
  Seed: GMDPRMCSLMQGSTL
GMDFRMISVMQVSTL

SEQ ID NO: 72167 - protein, 15 aa, Artificial Sequence
  Description of Artificial Sequence: Synthetic peptide
  Seed: GMDPRMCSLMQGSTL
GMDFRMISVMQYSTL

SEQ ID NO: 72168 - protein, 15 aa, Artificial Sequence
  Description of Artificial Sequence: Synthetic peptide
  Seed: GMDPRMCSLMQGSTL
GMDFRMISWMQASTL

SEQ ID NO: 72169 - protein, 15 aa, Artificial Sequence
  Description of Artificial Sequence: Synthetic peptide
  Seed: GMDPRMCSLMQGSTL
GMDFRMISWMQHSTL

SEQ ID NO: 72170 - protein, 15 aa, Artificial Sequence
  Description of Artificial Sequence: Synthetic peptide
  Seed: GMDPRMCSLMQGSTL
GMDFRMISWMQNSTL

SEQ ID NO: 72171 - protein, 15 aa, Artificial Sequence
  Description of Artificial Sequence: Synthetic peptide
  Seed: GMDPRMCSLMQGSTL
GMDFRMISWMQSSTL

SEQ ID NO: 72172 - protein, 15 aa, Artificial Sequence
  Description of Artificial Sequence: Synthetic peptide
  Seed: GMDPRMCSLMQGSTL
GMDFRMISWMQTSTL

SEQ ID NO: 72173 - protein, 15 aa, Artificial Sequence
  Description of Artificial Sequence: Synthetic peptide
  Seed: GMDPRMCSLMQGSTL
GMDFRMISWMQVSTL

SEQ ID NO: 72174 - protein, 15 aa, Artificial Sequence
  Description of Artificial Sequence: Synthetic peptide
  Seed: GMDPRMCSLMQGSTL
GMDFRMISYMQASTL

SEQ ID NO: 72175 - protein, 15 aa, Artificial Sequence
  Description of Artificial Sequence: Synthetic peptide
  Seed: GMDPRMCSLMQGSTL
GMDFRMISYMQGSTL

SEQ ID NO: 72176 - protein, 15 aa, Artificial Sequence
  Description of Artificial Sequence: Synthetic peptide
  Seed: GMDPRMCSLMQGSTL
GMDFRMISYMQNSTL

SEQ ID NO: 72177 - protein, 15 aa, Artificial Sequence
  Description of Artificial Sequence: Synthetic peptide
  Seed: GMDPRMCSLMQGSTL
GMDFRMISYMQPSTL

SEQ ID NO: 72178 - protein, 15 aa, Artificial Sequence
  Description of Artificial Sequence: Synthetic peptide
  Seed: GMDPRMCSLMQGSTL
GMDFRMISYMQSSTL

SEQ ID NO: 72179 - protein, 15 aa, Artificial Sequence
  Description of Artificial Sequence: Synthetic peptide
  Seed: GMDPRMCSLMQGSTL
GMDFRMISYMQTSTL

SEQ ID NO: 72180 - protein, 15 aa, Artificial Sequence
  Description of Artificial Sequence: Synthetic peptide
  Seed: GMDPRMCSLMQGSTL
GMDFRMISYMQVSTL

SEQ ID NO: 72181 - protein, 15 aa, Artificial Sequence
  Description of Artificial Sequence: Synthetic peptide
  Seed: GMDPRMCSLMQGSTL
GMDFRMKSAMQSSTL

SEQ ID NO: 72182 - protein, 15 aa, Artificial Sequence
  Description of Artificial Sequence: Synthetic peptide
  Seed: GMDPRMCSLMQGSTL
GMDFRMKSVMQNSTL

SEQ ID NO: 72183 - protein, 15 aa, Artificial Sequence
  Description of Artificial Sequence: Synthetic peptide
  Seed: GMDPRMCSLMQGSTL
GMDFRMLSAMQASTL

SEQ ID NO: 72184 - protein, 15 aa, Artificial Sequence
  Description of Artificial Sequence: Synthetic peptide
  Seed: GMDPRMCSLMQGSTL
GMDFRMLSAMQCSTL

SEQ ID NO: 72185 - protein, 15 aa, Artificial Sequence
  Description of Artificial Sequence: Synthetic peptide
  Seed: GMDPRMCSLMQGSTL
GMDFRMLSAMQDSTL

SEQ ID NO: 72186 - protein, 15 aa, Artificial Sequence
  Description of Artificial Sequence: Synthetic peptide
  Seed: GMDPRMCSLMQGSTL
GMDFRMLSAMQESTL

SEQ ID NO: 72187 - protein, 15 aa, Artificial Sequence
  Description of Artificial Sequence: Synthetic peptide
  Seed: GMDPRMCSLMQGSTL
GMDFRMLSAMQFSTL

SEQ ID NO: 72188 - protein, 15 aa, Artificial Sequence
  Description of Artificial Sequence: Synthetic peptide
  Seed: GMDPRMCSLMQGSTL
GMDFRMLSAMQGSTL

SEQ ID NO: 72189 - protein, 15 aa, Artificial Sequence
  Description of Artificial Sequence: Synthetic peptide
  Seed: GMDPRMCSLMQGSTL
GMDFRMLSAMQHSTL

SEQ ID NO: 72190 - protein, 15 aa, Artificial Sequence
  Description of Artificial Sequence: Synthetic peptide
  Seed: GMDPRMCSLMQGSTL
GMDFRMLSAMQISTL

SEQ ID NO: 72191 - protein, 15 aa, Artificial Sequence
  Description of Artificial Sequence: Synthetic peptide
  Seed: GMDPRMCSLMQGSTL
GMDFRMLSAMQKSTL

SEQ ID NO: 72192 - protein, 15 aa, Artificial Sequence
  Description of Artificial Sequence: Synthetic peptide
  Seed: GMDPRMCSLMQGSTL
GMDFRMLSAMQLSTL

SEQ ID NO: 72193 - protein, 15 aa, Artificial Sequence
  Description of Artificial Sequence: Synthetic peptide
  Seed: GMDPRMCSLMQGSTL
GMDFRMLSAMQMSTL

SEQ ID NO: 72194 - protein, 15 aa, Artificial Sequence
  Description of Artificial Sequence: Synthetic peptide
  Seed: GMDPRMCSLMQGSTL
GMDFRMLSAMQNSTL

SEQ ID NO: 72195 - protein, 15 aa, Artificial Sequence
  Description of Artificial Sequence: Synthetic peptide
  Seed: GMDPRMCSLMQGSTL
GMDFRMLSAMQPSTL

SEQ ID NO: 72196 - protein, 15 aa, Artificial Sequence
  Description of Artificial Sequence: Synthetic peptide
  Seed: GMDPRMCSLMQGSTL
GMDFRMLSAMQQSTL

SEQ ID NO: 72197 - protein, 15 aa, Artificial Sequence
  Description of Artificial Sequence: Synthetic peptide
  Seed: GMDPRMCSLMQGSTL
GMDFRMLSAMQRSTL

SEQ ID NO: 72198 - protein, 15 aa, Artificial Sequence
  Description of Artificial Sequence: Synthetic peptide
  Seed: GMDPRMCSLMQGSTL
GMDFRMLSAMQSSTL

SEQ ID NO: 72199 - protein, 15 aa, Artificial Sequence
  Description of Artificial Sequence: Synthetic peptide
  Seed: GMDPRMCSLMQGSTL
GMDFRMLSAMQTSTL

SEQ ID NO: 72200 - protein, 15 aa, Artificial Sequence
  Description of Artificial Sequence: Synthetic peptide
  Seed: GMDPRMCSLMQGSTL
GMDFRMLSAMQVSTL

SEQ ID NO: 72201 - protein, 15 aa, Artificial Sequence
  Description of Artificial Sequence: Synthetic peptide
  Seed: GMDPRMCSLMQGSTL
GMDFRMLSAMQWSTL

SEQ ID NO: 72202 - protein, 15 aa, Artificial Sequence
  Description of Artificial Sequence: Synthetic peptide
  Seed: GMDPRMCSLMQGSTL
GMDFRMLSAMQYSTL

SEQ ID NO: 72203 - protein, 15 aa, Artificial Sequence
  Description of Artificial Sequence: Synthetic peptide
  Seed: GMDPRMCSLMQGSTL
GMDFRMLSCMQASTL

SEQ ID NO: 72204 - protein, 15 aa, Artificial Sequence
  Description of Artificial Sequence: Synthetic peptide
  Seed: GMDPRMCSLMQGSTL
GMDFRMLSCMQHSTL

SEQ ID NO: 72205 - protein, 15 aa, Artificial Sequence
  Description of Artificial Sequence: Synthetic peptide
  Seed: GMDPRMCSLMQGSTL
GMDFRMLSCMQNSTL

SEQ ID NO: 72206 - protein, 15 aa, Artificial Sequence
  Description of Artificial Sequence: Synthetic peptide
  Seed: GMDPRMCSLMQGSTL
GMDFRMLSCMQSSTL

SEQ ID NO: 72207 - protein, 15 aa, Artificial Sequence
  Description of Artificial Sequence: Synthetic peptide
  Seed: GMDPRMCSLMQGSTL
GMDFRMLSCMQTSTL

SEQ ID NO: 72208 - protein, 15 aa, Artificial Sequence
  Description of Artificial Sequence: Synthetic peptide
  Seed: GMDPRMCSLMQGSTL
GMDFRMLSDMQASTL

SEQ ID NO: 72209 - protein, 15 aa, Artificial Sequence
  Description of Artificial Sequence: Synthetic peptide
  Seed: GMDPRMCSLMQGSTL
GMDFRMLSDMQISTL

SEQ ID NO: 72210 - protein, 15 aa, Artificial Sequence
  Description of Artificial Sequence: Synthetic peptide
  Seed: GMDPRMCSLMQGSTL
GMDFRMLSDMQLSTL

SEQ ID NO: 72211 - protein, 15 aa, Artificial Sequence
  Description of Artificial Sequence: Synthetic peptide
  Seed: GMDPRMCSLMQGSTL
GMDFRMLSDMQMSTL

SEQ ID NO: 72212 - protein, 15 aa, Artificial Sequence
  Description of Artificial Sequence: Synthetic peptide
  Seed: GMDPRMCSLMQGSTL
GMDFRMLSDMQNSTL

SEQ ID NO: 72213 - protein, 15 aa, Artificial Sequence
  Description of Artificial Sequence: Synthetic peptide
  Seed: GMDPRMCSLMQGSTL
GMDFRMLSDMQSSTL

SEQ ID NO: 72214 - protein, 15 aa, Artificial Sequence
  Description of Artificial Sequence: Synthetic peptide
  Seed: GMDPRMCSLMQGSTL
GMDFRMLSDMQTSTL

SEQ ID NO: 72215 - protein, 15 aa, Artificial Sequence
  Description of Artificial Sequence: Synthetic peptide
  Seed: GMDPRMCSLMQGSTL
GMDFRMLSDMQVSTL

SEQ ID NO: 72216 - protein, 15 aa, Artificial Sequence
  Description of Artificial Sequence: Synthetic peptide
  Seed: GMDPRMCSLMQGSTL
GMDFRMLSEMQASTL

SEQ ID NO: 72217 - protein, 15 aa, Artificial Sequence
  Description of Artificial Sequence: Synthetic peptide
  Seed: GMDPRMCSLMQGSTL
GMDFRMLSEMQHSTL

SEQ ID NO: 72218 - protein, 15 aa, Artificial Sequence
  Description of Artificial Sequence: Synthetic peptide
  Seed: GMDPRMCSLMQGSTL
GMDFRMLSEMQLSTL

SEQ ID NO: 72219 - protein, 15 aa, Artificial Sequence
  Description of Artificial Sequence: Synthetic peptide
  Seed: GMDPRMCSLMQGSTL
GMDFRMLSEMQMSTL

SEQ ID NO: 72220 - protein, 15 aa, Artificial Sequence
  Description of Artificial Sequence: Synthetic peptide
  Seed: GMDPRMCSLMQGSTL
GMDFRMLSEMQNSTL

SEQ ID NO: 72221 - protein, 15 aa, Artificial Sequence
  Description of Artificial Sequence: Synthetic peptide
  Seed: GMDPRMCSLMQGSTL
GMDFRMLSEMQSSTL

SEQ ID NO: 72222 - protein, 15 aa, Artificial Sequence
  Description of Artificial Sequence: Synthetic peptide
  Seed: GMDPRMCSLMQGSTL
GMDFRMLSEMQTSTL

SEQ ID NO: 72223 - protein, 15 aa, Artificial Sequence
  Description of Artificial Sequence: Synthetic peptide
  Seed: GMDPRMCSLMQGSTL
GMDFRMLSEMQVSTL

SEQ ID NO: 72224 - protein, 15 aa, Artificial Sequence
  Description of Artificial Sequence: Synthetic peptide
  Seed: GMDPRMCSLMQGSTL
GMDFRMLSFMQASTL

SEQ ID NO: 72225 - protein, 15 aa, Artificial Sequence
  Description of Artificial Sequence: Synthetic peptide
  Seed: GMDPRMCSLMQGSTL
GMDFRMLSFMQGSTL

SEQ ID NO: 72226 - protein, 15 aa, Artificial Sequence
  Description of Artificial Sequence: Synthetic peptide
  Seed: GMDPRMCSLMQGSTL
GMDFRMLSFMQHSTL

SEQ ID NO: 72227 - protein, 15 aa, Artificial Sequence
  Description of Artificial Sequence: Synthetic peptide
  Seed: GMDPRMCSLMQGSTL
GMDFRMLSFMQNSTL

SEQ ID NO: 72228 - protein, 15 aa, Artificial Sequence
  Description of Artificial Sequence: Synthetic peptide
  Seed: GMDPRMCSLMQGSTL
GMDFRMLSFMQPSTL

SEQ ID NO: 72229 - protein, 15 aa, Artificial Sequence
  Description of Artificial Sequence: Synthetic peptide
  Seed: GMDPRMCSLMQGSTL
GMDFRMLSFMQSSTL

SEQ ID NO: 72230 - protein, 15 aa, Artificial Sequence
  Description of Artificial Sequence: Synthetic peptide
  Seed: GMDPRMCSLMQGSTL
GMDFRMLSFMQTSTL

SEQ ID NO: 72231 - protein, 15 aa, Artificial Sequence
  Description of Artificial Sequence: Synthetic peptide
  Seed: GMDPRMCSLMQGSTL
GMDFRMLSGMQASTL

SEQ ID NO: 72232 - protein, 15 aa, Artificial Sequence
  Description of Artificial Sequence: Synthetic peptide
  Seed: GMDPRMCSLMQGSTL
GMDFRMLSGMQCSTL

SEQ ID NO: 72233 - protein, 15 aa, Artificial Sequence
  Description of Artificial Sequence: Synthetic peptide
  Seed: GMDPRMCSLMQGSTL
GMDFRMLSGMQDSTL

SEQ ID NO: 72234 - protein, 15 aa, Artificial Sequence
  Description of Artificial Sequence: Synthetic peptide
  Seed: GMDPRMCSLMQGSTL
GMDFRMLSGMQESTL

SEQ ID NO: 72235 - protein, 15 aa, Artificial Sequence
  Description of Artificial Sequence: Synthetic peptide
  Seed: GMDPRMCSLMQGSTL
GMDFRMLSGMQFSTL

SEQ ID NO: 72236 - protein, 15 aa, Artificial Sequence
  Description of Artificial Sequence: Synthetic peptide
  Seed: GMDPRMCSLMQGSTL
GMDFRMLSGMQGSTL

SEQ ID NO: 72237 - protein, 15 aa, Artificial Sequence
  Description of Artificial Sequence: Synthetic peptide
  Seed: GMDPRMCSLMQGSTL
GMDFRMLSGMQHSTL

SEQ ID NO: 72238 - protein, 15 aa, Artificial Sequence
  Description of Artificial Sequence: Synthetic peptide
  Seed: GMDPRMCSLMQGSTL
GMDFRMLSGMQISTL

SEQ ID NO: 72239 - protein, 15 aa, Artificial Sequence
  Description of Artificial Sequence: Synthetic peptide
  Seed: GMDPRMCSLMQGSTL
GMDFRMLSGMQKSTL

SEQ ID NO: 72240 - protein, 15 aa, Artificial Sequence
  Description of Artificial Sequence: Synthetic peptide
  Seed: GMDPRMCSLMQGSTL
GMDFRMLSGMQLSTL

SEQ ID NO: 72241 - protein, 15 aa, Artificial Sequence
  Description of Artificial Sequence: Synthetic peptide
  Seed: GMDPRMCSLMQGSTL
GMDFRMLSGMQMSTL

SEQ ID NO: 72242 - protein, 15 aa, Artificial Sequence
  Description of Artificial Sequence: Synthetic peptide
  Seed: GMDPRMCSLMQGSTL
GMDFRMLSGMQNSTL

SEQ ID NO: 72243 - protein, 15 aa, Artificial Sequence
  Description of Artificial Sequence: Synthetic peptide
  Seed: GMDPRMCSLMQGSTL
GMDFRMLSGMQPSTL

SEQ ID NO: 72244 - protein, 15 aa, Artificial Sequence
  Description of Artificial Sequence: Synthetic peptide
  Seed: GMDPRMCSLMQGSTL
GMDFRMLSGMQQSTL

SEQ ID NO: 72245 - protein, 15 aa, Artificial Sequence
  Description of Artificial Sequence: Synthetic peptide
  Seed: GMDPRMCSLMQGSTL
GMDFRMLSGMQRSTL

SEQ ID NO: 72246 - protein, 15 aa, Artificial Sequence
  Description of Artificial Sequence: Synthetic peptide
  Seed: GMDPRMCSLMQGSTL
GMDFRMLSGMQSSTL

SEQ ID NO: 72247 - protein, 15 aa, Artificial Sequence
  Description of Artificial Sequence: Synthetic peptide
  Seed: GMDPRMCSLMQGSTL
GMDFRMLSGMQTSTL

SEQ ID NO: 72248 - protein, 15 aa, Artificial Sequence
  Description of Artificial Sequence: Synthetic peptide
  Seed: GMDPRMCSLMQGSTL
GMDFRMLSGMQVSTL

SEQ ID NO: 72249 - protein, 15 aa, Artificial Sequence
  Description of Artificial Sequence: Synthetic peptide
  Seed: GMDPRMCSLMQGSTL
GMDFRMLSGMQYSTL

SEQ ID NO: 72250 - protein, 15 aa, Artificial Sequence
  Description of Artificial Sequence: Synthetic peptide
  Seed: GMDPRMCSLMQGSTL
GMDFRMLSHMQASTL

SEQ ID NO: 72251 - protein, 15 aa, Artificial Sequence
  Description of Artificial Sequence: Synthetic peptide
  Seed: GMDPRMCSLMQGSTL
GMDFRMLSHMQGSTL

SEQ ID NO: 72252 - protein, 15 aa, Artificial Sequence
  Description of Artificial Sequence: Synthetic peptide
  Seed: GMDPRMCSLMQGSTL
GMDFRMLSHMQHSTL

SEQ ID NO: 72253 - protein, 15 aa, Artificial Sequence
  Description of Artificial Sequence: Synthetic peptide
  Seed: GMDPRMCSLMQGSTL
GMDFRMLSHMQISTL

SEQ ID NO: 72254 - protein, 15 aa, Artificial Sequence
  Description of Artificial Sequence: Synthetic peptide
  Seed: GMDPRMCSLMQGSTL
GMDFRMLSHMQLSTL

SEQ ID NO: 72255 - protein, 15 aa, Artificial Sequence
  Description of Artificial Sequence: Synthetic peptide
  Seed: GMDPRMCSLMQGSTL
GMDFRMLSHMQMSTL

SEQ ID NO: 72256 - protein, 15 aa, Artificial Sequence
  Description of Artificial Sequence: Synthetic peptide
  Seed: GMDPRMCSLMQGSTL
GMDFRMLSHMQNSTL

SEQ ID NO: 72257 - protein, 15 aa, Artificial Sequence
  Description of Artificial Sequence: Synthetic peptide
  Seed: GMDPRMCSLMQGSTL
GMDFRMLSHMQPSTL

SEQ ID NO: 72258 - protein, 15 aa, Artificial Sequence
  Description of Artificial Sequence: Synthetic peptide
  Seed: GMDPRMCSLMQGSTL
GMDFRMLSHMQSSTL

SEQ ID NO: 72259 - protein, 15 aa, Artificial Sequence
  Description of Artificial Sequence: Synthetic peptide
  Seed: GMDPRMCSLMQGSTL
GMDFRMLSHMQTSTL

SEQ ID NO: 72260 - protein, 15 aa, Artificial Sequence
  Description of Artificial Sequence: Synthetic peptide
  Seed: GMDPRMCSLMQGSTL
GMDFRMLSHMQVSTL

SEQ ID NO: 72261 - protein, 15 aa, Artificial Sequence
  Description of Artificial Sequence: Synthetic peptide
  Seed: GMDPRMCSLMQGSTL
GMDFRMLSIMQASTL

SEQ ID NO: 72262 - protein, 15 aa, Artificial Sequence
  Description of Artificial Sequence: Synthetic peptide
  Seed: GMDPRMCSLMQGSTL
GMDFRMLSIMQCSTL

SEQ ID NO: 72263 - protein, 15 aa, Artificial Sequence
  Description of Artificial Sequence: Synthetic peptide
  Seed: GMDPRMCSLMQGSTL
GMDFRMLSIMQDSTL

SEQ ID NO: 72264 - protein, 15 aa, Artificial Sequence
  Description of Artificial Sequence: Synthetic peptide
  Seed: GMDPRMCSLMQGSTL
GMDFRMLSIMQESTL

SEQ ID NO: 72265 - protein, 15 aa, Artificial Sequence
  Description of Artificial Sequence: Synthetic peptide
  Seed: GMDPRMCSLMQGSTL
GMDFRMLSIMQGSTL

SEQ ID NO: 72266 - protein, 15 aa, Artificial Sequence
  Description of Artificial Sequence: Synthetic peptide
  Seed: GMDPRMCSLMQGSTL
GMDFRMLSIMQHSTL

SEQ ID NO: 72267 - protein, 15 aa, Artificial Sequence
  Description of Artificial Sequence: Synthetic peptide
  Seed: GMDPRMCSLMQGSTL
GMDFRMLSIMQISTL

SEQ ID NO: 72268 - protein, 15 aa, Artificial Sequence
  Description of Artificial Sequence: Synthetic peptide
  Seed: GMDPRMCSLMQGSTL
GMDFRMLSIMQKSTL

SEQ ID NO: 72269 - protein, 15 aa, Artificial Sequence
  Description of Artificial Sequence: Synthetic peptide
  Seed: GMDPRMCSLMQGSTL
GMDFRMLSIMQLSTL

SEQ ID NO: 72270 - protein, 15 aa, Artificial Sequence
  Description of Artificial Sequence: Synthetic peptide
  Seed: GMDPRMCSLMQGSTL
GMDFRMLSIMQMSTL

SEQ ID NO: 72271 - protein, 15 aa, Artificial Sequence
  Description of Artificial Sequence: Synthetic peptide
  Seed: GMDPRMCSLMQGSTL
GMDFRMLSIMQNSTL

SEQ ID NO: 72272 - protein, 15 aa, Artificial Sequence
  Description of Artificial Sequence: Synthetic peptide
  Seed: GMDPRMCSLMQGSTL
GMDFRMLSIMQPSTL

SEQ ID NO: 72273 - protein, 15 aa, Artificial Sequence
  Description of Artificial Sequence: Synthetic peptide
  Seed: GMDPRMCSLMQGSTL
GMDFRMLSIMQQSTL

SEQ ID NO: 72274 - protein, 15 aa, Artificial Sequence
  Description of Artificial Sequence: Synthetic peptide
  Seed: GMDPRMCSLMQGSTL
GMDFRMLSIMQRSTL

SEQ ID NO: 72275 - protein, 15 aa, Artificial Sequence
  Description of Artificial Sequence: Synthetic peptide
  Seed: GMDPRMCSLMQGSTL
GMDFRMLSIMQSSTL

SEQ ID NO: 72276 - protein, 15 aa, Artificial Sequence
  Description of Artificial Sequence: Synthetic peptide
  Seed: GMDPRMCSLMQGSTL
GMDFRMLSIMQTSTL

SEQ ID NO: 72277 - protein, 15 aa, Artificial Sequence
  Description of Artificial Sequence: Synthetic peptide
  Seed: GMDPRMCSLMQGSTL
GMDFRMLSIMQVSTL

SEQ ID NO: 72278 - protein, 15 aa, Artificial Sequence
  Description of Artificial Sequence: Synthetic peptide
  Seed: GMDPRMCSLMQGSTL
GMDFRMLSIMQYSTL

SEQ ID NO: 72279 - protein, 15 aa, Artificial Sequence
  Description of Artificial Sequence: Synthetic peptide
  Seed: GMDPRMCSLMQGSTL
GMDFRMLSLMQASTL

SEQ ID NO: 72280 - protein, 15 aa, Artificial Sequence
  Description of Artificial Sequence: Synthetic peptide
  Seed: GMDPRMCSLMQGSTL
GMDFRMLSLMQDSTL

SEQ ID NO: 72281 - protein, 15 aa, Artificial Sequence
  Description of Artificial Sequence: Synthetic peptide
  Seed: GMDPRMCSLMQGSTL
GMDFRMLSLMQESTL

SEQ ID NO: 72282 - protein, 15 aa, Artificial Sequence
  Description of Artificial Sequence: Synthetic peptide
  Seed: GMDPRMCSLMQGSTL
GMDFRMLSLMQGSTL

SEQ ID NO: 72283 - protein, 15 aa, Artificial Sequence
  Description of Artificial Sequence: Synthetic peptide
  Seed: GMDPRMCSLMQGSTL
GMDFRMLSLMQHSTL

SEQ ID NO: 72284 - protein, 15 aa, Artificial Sequence
  Description of Artificial Sequence: Synthetic peptide
  Seed: GMDPRMCSLMQGSTL
GMDFRMLSLMQISTL

SEQ ID NO: 72285 - protein, 15 aa, Artificial Sequence
  Description of Artificial Sequence: Synthetic peptide
  Seed: GMDPRMCSLMQGSTL
GMDFRMLSLMQKSTL

SEQ ID NO: 72286 - protein, 15 aa, Artificial Sequence
  Description of Artificial Sequence: Synthetic peptide
  Seed: GMDPRMCSLMQGSTL
GMDFRMLSLMQLSTL

SEQ ID NO: 72287 - protein, 15 aa, Artificial Sequence
  Description of Artificial Sequence: Synthetic peptide
  Seed: GMDPRMCSLMQGSTL
GMDFRMLSLMQMSTL

SEQ ID NO: 72288 - protein, 15 aa, Artificial Sequence
  Description of Artificial Sequence: Synthetic peptide
  Seed: GMDPRMCSLMQGSTL
GMDFRMLSLMQNSTL

SEQ ID NO: 72289 - protein, 15 aa, Artificial Sequence
  Description of Artificial Sequence: Synthetic peptide
  Seed: GMDPRMCSLMQGSTL
GMDFRMLSLMQPSTL

SEQ ID NO: 72290 - protein, 15 aa, Artificial Sequence
  Description of Artificial Sequence: Synthetic peptide
  Seed: GMDPRMCSLMQGSTL
GMDFRMLSLMQQSTL

SEQ ID NO: 72291 - protein, 15 aa, Artificial Sequence
  Description of Artificial Sequence: Synthetic peptide
  Seed: GMDPRMCSLMQGSTL
GMDFRMLSLMQRSTL

SEQ ID NO: 72292 - protein, 15 aa, Artificial Sequence
  Description of Artificial Sequence: Synthetic peptide
  Seed: GMDPRMCSLMQGSTL
GMDFRMLSLMQSSTL

SEQ ID NO: 72293 - protein, 15 aa, Artificial Sequence
  Description of Artificial Sequence: Synthetic peptide
  Seed: GMDPRMCSLMQGSTL
GMDFRMLSLMQTSTL

SEQ ID NO: 72294 - protein, 15 aa, Artificial Sequence
  Description of Artificial Sequence: Synthetic peptide
  Seed: GMDPRMCSLMQGSTL
GMDFRMLSLMQVSTL

SEQ ID NO: 72295 - protein, 15 aa, Artificial Sequence
  Description of Artificial Sequence: Synthetic peptide
  Seed: GMDPRMCSLMQGSTL
GMDFRMLSMMQASTL

SEQ ID NO: 72296 - protein, 15 aa, Artificial Sequence
  Description of Artificial Sequence: Synthetic peptide
  Seed: GMDPRMCSLMQGSTL
GMDFRMLSMMQDSTL

SEQ ID NO: 72297 - protein, 15 aa, Artificial Sequence
  Description of Artificial Sequence: Synthetic peptide
  Seed: GMDPRMCSLMQGSTL
GMDFRMLSMMQESTL

SEQ ID NO: 72298 - protein, 15 aa, Artificial Sequence
  Description of Artificial Sequence: Synthetic peptide
  Seed: GMDPRMCSLMQGSTL
GMDFRMLSMMQGSTL

SEQ ID NO: 72299 - protein, 15 aa, Artificial Sequence
  Description of Artificial Sequence: Synthetic peptide
  Seed: GMDPRMCSLMQGSTL
GMDFRMLSMMQHSTL

SEQ ID NO: 72300 - protein, 15 aa, Artificial Sequence
  Description of Artificial Sequence: Synthetic peptide
  Seed: GMDPRMCSLMQGSTL
GMDFRMLSMMQISTL

SEQ ID NO: 72301 - protein, 15 aa, Artificial Sequence
  Description of Artificial Sequence: Synthetic peptide
  Seed: GMDPRMCSLMQGSTL
GMDFRMLSMMQKSTL

SEQ ID NO: 72302 - protein, 15 aa, Artificial Sequence
  Description of Artificial Sequence: Synthetic peptide
  Seed: GMDPRMCSLMQGSTL
GMDFRMLSMMQLSTL

SEQ ID NO: 72303 - protein, 15 aa, Artificial Sequence
  Description of Artificial Sequence: Synthetic peptide
  Seed: GMDPRMCSLMQGSTL
GMDFRMLSMMQMSTL

SEQ ID NO: 72304 - protein, 15 aa, Artificial Sequence
  Description of Artificial Sequence: Synthetic peptide
  Seed: GMDPRMCSLMQGSTL
GMDFRMLSMMQNSTL

SEQ ID NO: 72305 - protein, 15 aa, Artificial Sequence
  Description of Artificial Sequence: Synthetic peptide
  Seed: GMDPRMCSLMQGSTL
GMDFRMLSMMQPSTL

SEQ ID NO: 72306 - protein, 15 aa, Artificial Sequence
  Description of Artificial Sequence: Synthetic peptide
  Seed: GMDPRMCSLMQGSTL
GMDFRMLSMMQQSTL

SEQ ID NO: 72307 - protein, 15 aa, Artificial Sequence
  Description of Artificial Sequence: Synthetic peptide
  Seed: GMDPRMCSLMQGSTL
GMDFRMLSMMQRSTL

SEQ ID NO: 72308 - protein, 15 aa, Artificial Sequence
  Description of Artificial Sequence: Synthetic peptide
  Seed: GMDPRMCSLMQGSTL
GMDFRMLSMMQSSTL

SEQ ID NO: 72309 - protein, 15 aa, Artificial Sequence
  Description of Artificial Sequence: Synthetic peptide
  Seed: GMDPRMCSLMQGSTL
GMDFRMLSMMQTSTL

SEQ ID NO: 72310 - protein, 15 aa, Artificial Sequence
  Description of Artificial Sequence: Synthetic peptide
  Seed: GMDPRMCSLMQGSTL
GMDFRMLSMMQVSTL

SEQ ID NO: 72311 - protein, 15 aa, Artificial Sequence
  Description of Artificial Sequence: Synthetic peptide
  Seed: GMDPRMCSLMQGSTL
GMDFRMLSNMQASTL

SEQ ID NO: 72312 - protein, 15 aa, Artificial Sequence
  Description of Artificial Sequence: Synthetic peptide
  Seed: GMDPRMCSLMQGSTL
GMDFRMLSNMQCSTL

SEQ ID NO: 72313 - protein, 15 aa, Artificial Sequence
  Description of Artificial Sequence: Synthetic peptide
  Seed: GMDPRMCSLMQGSTL
GMDFRMLSNMQDSTL

SEQ ID NO: 72314 - protein, 15 aa, Artificial Sequence
  Description of Artificial Sequence: Synthetic peptide
  Seed: GMDPRMCSLMQGSTL
GMDFRMLSNMQESTL

SEQ ID NO: 72315 - protein, 15 aa, Artificial Sequence
  Description of Artificial Sequence: Synthetic peptide
  Seed: GMDPRMCSLMQGSTL
GMDFRMLSNMQFSTL

SEQ ID NO: 72316 - protein, 15 aa, Artificial Sequence
  Description of Artificial Sequence: Synthetic peptide
  Seed: GMDPRMCSLMQGSTL
GMDFRMLSNMQGSTL

SEQ ID NO: 72317 - protein, 15 aa, Artificial Sequence
  Description of Artificial Sequence: Synthetic peptide
  Seed: GMDPRMCSLMQGSTL
GMDFRMLSNMQHSTL

SEQ ID NO: 72318 - protein, 15 aa, Artificial Sequence
  Description of Artificial Sequence: Synthetic peptide
  Seed: GMDPRMCSLMQGSTL
GMDFRMLSNMQISTL

SEQ ID NO: 72319 - protein, 15 aa, Artificial Sequence
  Description of Artificial Sequence: Synthetic peptide
  Seed: GMDPRMCSLMQGSTL
GMDFRMLSNMQLSTL

SEQ ID NO: 72320 - protein, 15 aa, Artificial Sequence
  Description of Artificial Sequence: Synthetic peptide
  Seed: GMDPRMCSLMQGSTL
GMDFRMLSNMQMSTL

SEQ ID NO: 72321 - protein, 15 aa, Artificial Sequence
  Description of Artificial Sequence: Synthetic peptide
  Seed: GMDPRMCSLMQGSTL
GMDFRMLSNMQNSTL

SEQ ID NO: 72322 - protein, 15 aa, Artificial Sequence
  Description of Artificial Sequence: Synthetic peptide
  Seed: GMDPRMCSLMQGSTL
GMDFRMLSNMQPSTL

SEQ ID NO: 72323 - protein, 15 aa, Artificial Sequence
  Description of Artificial Sequence: Synthetic peptide
  Seed: GMDPRMCSLMQGSTL
GMDFRMLSNMQQSTL

SEQ ID NO: 72324 - protein, 15 aa, Artificial Sequence
  Description of Artificial Sequence: Synthetic peptide
  Seed: GMDPRMCSLMQGSTL
GMDFRMLSNMQSSTL

SEQ ID NO: 72325 - protein, 15 aa, Artificial Sequence
  Description of Artificial Sequence: Synthetic peptide
  Seed: GMDPRMCSLMQGSTL
GMDFRMLSNMQTSTL

SEQ ID NO: 72326 - protein, 15 aa, Artificial Sequence
  Description of Artificial Sequence: Synthetic peptide
  Seed: GMDPRMCSLMQGSTL
GMDFRMLSNMQVSTL

SEQ ID NO: 72327 - protein, 15 aa, Artificial Sequence
  Description of Artificial Sequence: Synthetic peptide
  Seed: GMDPRMCSLMQGSTL
GMDFRMLSNMQYSTL

SEQ ID NO: 72328 - protein, 15 aa, Artificial Sequence
  Description of Artificial Sequence: Synthetic peptide
  Seed: GMDPRMCSLMQGSTL
GMDFRMLSPMQASTL

SEQ ID NO: 72329 - protein, 15 aa, Artificial Sequence
  Description of Artificial Sequence: Synthetic peptide
  Seed: GMDPRMCSLMQGSTL
GMDFRMLSPMQCSTL

SEQ ID NO: 72330 - protein, 15 aa, Artificial Sequence
  Description of Artificial Sequence: Synthetic peptide
  Seed: GMDPRMCSLMQGSTL
GMDFRMLSPMQDSTL

SEQ ID NO: 72331 - protein, 15 aa, Artificial Sequence
  Description of Artificial Sequence: Synthetic peptide
  Seed: GMDPRMCSLMQGSTL
GMDFRMLSPMQESTL

SEQ ID NO: 72332 - protein, 15 aa, Artificial Sequence
  Description of Artificial Sequence: Synthetic peptide
  Seed: GMDPRMCSLMQGSTL
GMDFRMLSPMQFSTL

SEQ ID NO: 72333 - protein, 15 aa, Artificial Sequence
  Description of Artificial Sequence: Synthetic peptide
  Seed: GMDPRMCSLMQGSTL
GMDFRMLSPMQGSTL

SEQ ID NO: 72334 - protein, 15 aa, Artificial Sequence
  Description of Artificial Sequence: Synthetic peptide
  Seed: GMDPRMCSLMQGSTL
GMDFRMLSPMQHSTL

SEQ ID NO: 72335 - protein, 15 aa, Artificial Sequence
  Description of Artificial Sequence: Synthetic peptide
  Seed: GMDPRMCSLMQGSTL
GMDFRMLSPMQISTL

SEQ ID NO: 72336 - protein, 15 aa, Artificial Sequence
  Description of Artificial Sequence: Synthetic peptide
  Seed: GMDPRMCSLMQGSTL
GMDFRMLSPMQKSTL

SEQ ID NO: 72337 - protein, 15 aa, Artificial Sequence
  Description of Artificial Sequence: Synthetic peptide
  Seed: GMDPRMCSLMQGSTL
GMDFRMLSPMQLSTL

SEQ ID NO: 72338 - protein, 15 aa, Artificial Sequence
  Description of Artificial Sequence: Synthetic peptide
  Seed: GMDPRMCSLMQGSTL
GMDFRMLSPMQMSTL

SEQ ID NO: 72339 - protein, 15 aa, Artificial Sequence
  Description of Artificial Sequence: Synthetic peptide
  Seed: GMDPRMCSLMQGSTL
GMDFRMLSPMQNSTL

SEQ ID NO: 72340 - protein, 15 aa, Artificial Sequence
  Description of Artificial Sequence: Synthetic peptide
  Seed: GMDPRMCSLMQGSTL
GMDFRMLSPMQPSTL

SEQ ID NO: 72341 - protein, 15 aa, Artificial Sequence
  Description of Artificial Sequence: Synthetic peptide
  Seed: GMDPRMCSLMQGSTL
GMDFRMLSPMQQSTL

SEQ ID NO: 72342 - protein, 15 aa, Artificial Sequence
  Description of Artificial Sequence: Synthetic peptide
  Seed: GMDPRMCSLMQGSTL
GMDFRMLSPMQRSTL

SEQ ID NO: 72343 - protein, 15 aa, Artificial Sequence
  Description of Artificial Sequence: Synthetic peptide
  Seed: GMDPRMCSLMQGSTL
GMDFRMLSPMQSSTL

SEQ ID NO: 72344 - protein, 15 aa, Artificial Sequence
  Description of Artificial Sequence: Synthetic peptide
  Seed: GMDPRMCSLMQGSTL
GMDFRMLSPMQTSTL

SEQ ID NO: 72345 - protein, 15 aa, Artificial Sequence
  Description of Artificial Sequence: Synthetic peptide
  Seed: GMDPRMCSLMQGSTL
GMDFRMLSPMQVSTL

SEQ ID NO: 72346 - protein, 15 aa, Artificial Sequence
  Description of Artificial Sequence: Synthetic peptide
  Seed: GMDPRMCSLMQGSTL
GMDFRMLSPMQWSTL

SEQ ID NO: 72347 - protein, 15 aa, Artificial Sequence
  Description of Artificial Sequence: Synthetic peptide
  Seed: GMDPRMCSLMQGSTL
GMDFRMLSPMQYSTL

SEQ ID NO: 72348 - protein, 15 aa, Artificial Sequence
  Description of Artificial Sequence: Synthetic peptide
  Seed: GMDPRMCSLMQGSTL
GMDFRMLSQMQASTL

SEQ ID NO: 72349 - protein, 15 aa, Artificial Sequence
  Description of Artificial Sequence: Synthetic peptide
  Seed: GMDPRMCSLMQGSTL
GMDFRMLSQMQGSTL

SEQ ID NO: 72350 - protein, 15 aa, Artificial Sequence
  Description of Artificial Sequence: Synthetic peptide
  Seed: GMDPRMCSLMQGSTL
GMDFRMLSQMQHSTL

SEQ ID NO: 72351 - protein, 15 aa, Artificial Sequence
  Description of Artificial Sequence: Synthetic peptide
  Seed: GMDPRMCSLMQGSTL
GMDFRMLSQMQISTL

SEQ ID NO: 72352 - protein, 15 aa, Artificial Sequence
  Description of Artificial Sequence: Synthetic peptide
  Seed: GMDPRMCSLMQGSTL
GMDFRMLSQMQLSTL

SEQ ID NO: 72353 - protein, 15 aa, Artificial Sequence
  Description of Artificial Sequence: Synthetic peptide
  Seed: GMDPRMCSLMQGSTL
GMDFRMLSQMQMSTL

SEQ ID NO: 72354 - protein, 15 aa, Artificial Sequence
  Description of Artificial Sequence: Synthetic peptide
  Seed: GMDPRMCSLMQGSTL
GMDFRMLSQMQNSTL

SEQ ID NO: 72355 - protein, 15 aa, Artificial Sequence
  Description of Artificial Sequence: Synthetic peptide
  Seed: GMDPRMCSLMQGSTL
GMDFRMLSQMQSSTL

SEQ ID NO: 72356 - protein, 15 aa, Artificial Sequence
  Description of Artificial Sequence: Synthetic peptide
  Seed: GMDPRMCSLMQGSTL
GMDFRMLSQMQTSTL

SEQ ID NO: 72357 - protein, 15 aa, Artificial Sequence
  Description of Artificial Sequence: Synthetic peptide
  Seed: GMDPRMCSLMQGSTL
GMDFRMLSQMQVSTL

SEQ ID NO: 72358 - protein, 15 aa, Artificial Sequence
  Description of Artificial Sequence: Synthetic peptide
  Seed: GMDPRMCSLMQGSTL
GMDFRMLSSMQASTL

SEQ ID NO: 72359 - protein, 15 aa, Artificial Sequence
  Description of Artificial Sequence: Synthetic peptide
  Seed: GMDPRMCSLMQGSTL
GMDFRMLSSMQCSTL

SEQ ID NO: 72360 - protein, 15 aa, Artificial Sequence
  Description of Artificial Sequence: Synthetic peptide
  Seed: GMDPRMCSLMQGSTL
GMDFRMLSSMQDSTL

SEQ ID NO: 72361 - protein, 15 aa, Artificial Sequence
  Description of Artificial Sequence: Synthetic peptide
  Seed: GMDPRMCSLMQGSTL
GMDFRMLSSMQESTL

SEQ ID NO: 72362 - protein, 15 aa, Artificial Sequence
  Description of Artificial Sequence: Synthetic peptide
  Seed: GMDPRMCSLMQGSTL
GMDFRMLSSMQFSTL

SEQ ID NO: 72363 - protein, 15 aa, Artificial Sequence
  Description of Artificial Sequence: Synthetic peptide
  Seed: GMDPRMCSLMQGSTL
GMDFRMLSSMQGSTL

SEQ ID NO: 72364 - protein, 15 aa, Artificial Sequence
  Description of Artificial Sequence: Synthetic peptide
  Seed: GMDPRMCSLMQGSTL
GMDFRMLSSMQHSTL

SEQ ID NO: 72365 - protein, 15 aa, Artificial Sequence
  Description of Artificial Sequence: Synthetic peptide
  Seed: GMDPRMCSLMQGSTL
GMDFRMLSSMQISTL

SEQ ID NO: 72366 - protein, 15 aa, Artificial Sequence
  Description of Artificial Sequence: Synthetic peptide
  Seed: GMDPRMCSLMQGSTL
GMDFRMLSSMQKSTL

SEQ ID NO: 72367 - protein, 15 aa, Artificial Sequence
  Description of Artificial Sequence: Synthetic peptide
  Seed: GMDPRMCSLMQGSTL
GMDFRMLSSMQLSTL

SEQ ID NO: 72368 - protein, 15 aa, Artificial Sequence
  Description of Artificial Sequence: Synthetic peptide
  Seed: GMDPRMCSLMQGSTL
GMDFRMLSSMQMSTL

SEQ ID NO: 72369 - protein, 15 aa, Artificial Sequence
  Description of Artificial Sequence: Synthetic peptide
  Seed: GMDPRMCSLMQGSTL
GMDFRMLSSMQNSTL

SEQ ID NO: 72370 - protein, 15 aa, Artificial Sequence
  Description of Artificial Sequence: Synthetic peptide
  Seed: GMDPRMCSLMQGSTL
GMDFRMLSSMQPSTL

SEQ ID NO: 72371 - protein, 15 aa, Artificial Sequence
  Description of Artificial Sequence: Synthetic peptide
  Seed: GMDPRMCSLMQGSTL
GMDFRMLSSMQQSTL

SEQ ID NO: 72372 - protein, 15 aa, Artificial Sequence
  Description of Artificial Sequence: Synthetic peptide
  Seed: GMDPRMCSLMQGSTL
GMDFRMLSSMQRSTL

SEQ ID NO: 72373 - protein, 15 aa, Artificial Sequence
  Description of Artificial Sequence: Synthetic peptide
  Seed: GMDPRMCSLMQGSTL
GMDFRMLSSMQSSTL

SEQ ID NO: 72374 - protein, 15 aa, Artificial Sequence
  Description of Artificial Sequence: Synthetic peptide
  Seed: GMDPRMCSLMQGSTL
GMDFRMLSSMQTSTL

SEQ ID NO: 72375 - protein, 15 aa, Artificial Sequence
  Description of Artificial Sequence: Synthetic peptide
  Seed: GMDPRMCSLMQGSTL
GMDFRMLSSMQVSTL

SEQ ID NO: 72376 - protein, 15 aa, Artificial Sequence
  Description of Artificial Sequence: Synthetic peptide
  Seed: GMDPRMCSLMQGSTL
GMDFRMLSSMQWSTL

SEQ ID NO: 72377 - protein, 15 aa, Artificial Sequence
  Description of Artificial Sequence: Synthetic peptide
  Seed: GMDPRMCSLMQGSTL
GMDFRMLSSMQYSTL

SEQ ID NO: 72378 - protein, 15 aa, Artificial Sequence
  Description of Artificial Sequence: Synthetic peptide
  Seed: GMDPRMCSLMQGSTL
GMDFRMLSTMQASTL

SEQ ID NO: 72379 - protein, 15 aa, Artificial Sequence
  Description of Artificial Sequence: Synthetic peptide
  Seed: GMDPRMCSLMQGSTL
GMDFRMLSTMQCSTL

SEQ ID NO: 72380 - protein, 15 aa, Artificial Sequence
  Description of Artificial Sequence: Synthetic peptide
  Seed: GMDPRMCSLMQGSTL
GMDFRMLSTMQDSTL

SEQ ID NO: 72381 - protein, 15 aa, Artificial Sequence
  Description of Artificial Sequence: Synthetic peptide
  Seed: GMDPRMCSLMQGSTL
GMDFRMLSTMQESTL

SEQ ID NO: 72382 - protein, 15 aa, Artificial Sequence
  Description of Artificial Sequence: Synthetic peptide
  Seed: GMDPRMCSLMQGSTL
GMDFRMLSTMQFSTL

SEQ ID NO: 72383 - protein, 15 aa, Artificial Sequence
  Description of Artificial Sequence: Synthetic peptide
  Seed: GMDPRMCSLMQGSTL
GMDFRMLSTMQGSTL

SEQ ID NO: 72384 - protein, 15 aa, Artificial Sequence
  Description of Artificial Sequence: Synthetic peptide
  Seed: GMDPRMCSLMQGSTL
GMDFRMLSTMQHSTL

SEQ ID NO: 72385 - protein, 15 aa, Artificial Sequence
  Description of Artificial Sequence: Synthetic peptide
  Seed: GMDPRMCSLMQGSTL
GMDFRMLSTMQISTL

SEQ ID NO: 72386 - protein, 15 aa, Artificial Sequence
  Description of Artificial Sequence: Synthetic peptide
  Seed: GMDPRMCSLMQGSTL
GMDFRMLSTMQKSTL

SEQ ID NO: 72387 - protein, 15 aa, Artificial Sequence
  Description of Artificial Sequence: Synthetic peptide
  Seed: GMDPRMCSLMQGSTL
GMDFRMLSTMQLSTL

SEQ ID NO: 72388 - protein, 15 aa, Artificial Sequence
  Description of Artificial Sequence: Synthetic peptide
  Seed: GMDPRMCSLMQGSTL
GMDFRMLSTMQMSTL

SEQ ID NO: 72389 - protein, 15 aa, Artificial Sequence
  Description of Artificial Sequence: Synthetic peptide
  Seed: GMDPRMCSLMQGSTL
GMDFRMLSTMQNSTL

SEQ ID NO: 72390 - protein, 15 aa, Artificial Sequence
  Description of Artificial Sequence: Synthetic peptide
  Seed: GMDPRMCSLMQGSTL
GMDFRMLSTMQPSTL

SEQ ID NO: 72391 - protein, 15 aa, Artificial Sequence
  Description of Artificial Sequence: Synthetic peptide
  Seed: GMDPRMCSLMQGSTL
GMDFRMLSTMQQSTL

SEQ ID NO: 72392 - protein, 15 aa, Artificial Sequence
  Description of Artificial Sequence: Synthetic peptide
  Seed: GMDPRMCSLMQGSTL
GMDFRMLSTMQRSTL

SEQ ID NO: 72393 - protein, 15 aa, Artificial Sequence
  Description of Artificial Sequence: Synthetic peptide
  Seed: GMDPRMCSLMQGSTL
GMDFRMLSTMQSSTL

SEQ ID NO: 72394 - protein, 15 aa, Artificial Sequence
  Description of Artificial Sequence: Synthetic peptide
  Seed: GMDPRMCSLMQGSTL
GMDFRMLSTMQTSTL

SEQ ID NO: 72395 - protein, 15 aa, Artificial Sequence
  Description of Artificial Sequence: Synthetic peptide
  Seed: GMDPRMCSLMQGSTL
GMDFRMLSTMQVSTL

SEQ ID NO: 72396 - protein, 15 aa, Artificial Sequence
  Description of Artificial Sequence: Synthetic peptide
  Seed: GMDPRMCSLMQGSTL
GMDFRMLSTMQWSTL

SEQ ID NO: 72397 - protein, 15 aa, Artificial Sequence
  Description of Artificial Sequence: Synthetic peptide
  Seed: GMDPRMCSLMQGSTL
GMDFRMLSTMQYSTL

SEQ ID NO: 72398 - protein, 15 aa, Artificial Sequence
  Description of Artificial Sequence: Synthetic peptide
  Seed: GMDPRMCSLMQGSTL
GMDFRMLSVMQASTL

SEQ ID NO: 72399 - protein, 15 aa, Artificial Sequence
  Description of Artificial Sequence: Synthetic peptide
  Seed: GMDPRMCSLMQGSTL
GMDFRMLSVMQCSTL

SEQ ID NO: 72400 - protein, 15 aa, Artificial Sequence
  Description of Artificial Sequence: Synthetic peptide
  Seed: GMDPRMCSLMQGSTL
GMDFRMLSVMQDSTL

SEQ ID NO: 72401 - protein, 15 aa, Artificial Sequence
  Description of Artificial Sequence: Synthetic peptide
  Seed: GMDPRMCSLMQGSTL
GMDFRMLSVMQESTL

SEQ ID NO: 72402 - protein, 15 aa, Artificial Sequence
  Description of Artificial Sequence: Synthetic peptide
  Seed: GMDPRMCSLMQGSTL
GMDFRMLSVMQFSTL

SEQ ID NO: 72403 - protein, 15 aa, Artificial Sequence
  Description of Artificial Sequence: Synthetic peptide
  Seed: GMDPRMCSLMQGSTL
GMDFRMLSVMQGSTL

SEQ ID NO: 72404 - protein, 15 aa, Artificial Sequence
  Description of Artificial Sequence: Synthetic peptide
  Seed: GMDPRMCSLMQGSTL
GMDFRMLSVMQHSTL

SEQ ID NO: 72405 - protein, 15 aa, Artificial Sequence
  Description of Artificial Sequence: Synthetic peptide
  Seed: GMDPRMCSLMQGSTL
GMDFRMLSVMQISTL

SEQ ID NO: 72406 - protein, 15 aa, Artificial Sequence
  Description of Artificial Sequence: Synthetic peptide
  Seed: GMDPRMCSLMQGSTL
GMDFRMLSVMQKSTL

SEQ ID NO: 72407 - protein, 15 aa, Artificial Sequence
  Description of Artificial Sequence: Synthetic peptide
  Seed: GMDPRMCSLMQGSTL
GMDFRMLSVMQLSTL

SEQ ID NO: 72408 - protein, 15 aa, Artificial Sequence
  Description of Artificial Sequence: Synthetic peptide
  Seed: GMDPRMCSLMQGSTL
GMDFRMLSVMQMSTL

SEQ ID NO: 72409 - protein, 15 aa, Artificial Sequence
  Description of Artificial Sequence: Synthetic peptide
  Seed: GMDPRMCSLMQGSTL
GMDFRMLSVMQNSTL

SEQ ID NO: 72410 - protein, 15 aa, Artificial Sequence
  Description of Artificial Sequence: Synthetic peptide
  Seed: GMDPRMCSLMQGSTL
GMDFRMLSVMQPSTL

SEQ ID NO: 72411 - protein, 15 aa, Artificial Sequence
  Description of Artificial Sequence: Synthetic peptide
  Seed: GMDPRMCSLMQGSTL
GMDFRMLSVMQQSTL

SEQ ID NO: 72412 - protein, 15 aa, Artificial Sequence
  Description of Artificial Sequence: Synthetic peptide
  Seed: GMDPRMCSLMQGSTL
GMDFRMLSVMQRSTL

SEQ ID NO: 72413 - protein, 15 aa, Artificial Sequence
  Description of Artificial Sequence: Synthetic peptide
  Seed: GMDPRMCSLMQGSTL
GMDFRMLSVMQSSTL

SEQ ID NO: 72414 - protein, 15 aa, Artificial Sequence
  Description of Artificial Sequence: Synthetic peptide
  Seed: GMDPRMCSLMQGSTL
GMDFRMLSVMQTSTL

SEQ ID NO: 72415 - protein, 15 aa, Artificial Sequence
  Description of Artificial Sequence: Synthetic peptide
  Seed: GMDPRMCSLMQGSTL
GMDFRMLSVMQVSTL

SEQ ID NO: 72416 - protein, 15 aa, Artificial Sequence
  Description of Artificial Sequence: Synthetic peptide
  Seed: GMDPRMCSLMQGSTL
GMDFRMLSVMQYSTL

SEQ ID NO: 72417 - protein, 15 aa, Artificial Sequence
  Description of Artificial Sequence: Synthetic peptide
  Seed: GMDPRMCSLMQGSTL
GMDFRMLSWMQASTL

SEQ ID NO: 72418 - protein, 15 aa, Artificial Sequence
  Description of Artificial Sequence: Synthetic peptide
  Seed: GMDPRMCSLMQGSTL
GMDFRMLSWMQGSTL

SEQ ID NO: 72419 - protein, 15 aa, Artificial Sequence
  Description of Artificial Sequence: Synthetic peptide
  Seed: GMDPRMCSLMQGSTL
GMDFRMLSWMQHSTL

SEQ ID NO: 72420 - protein, 15 aa, Artificial Sequence
  Description of Artificial Sequence: Synthetic peptide
  Seed: GMDPRMCSLMQGSTL
GMDFRMLSWMQNSTL

SEQ ID NO: 72421 - protein, 15 aa, Artificial Sequence
  Description of Artificial Sequence: Synthetic peptide
  Seed: GMDPRMCSLMQGSTL
GMDFRMLSWMQSSTL

SEQ ID NO: 72422 - protein, 15 aa, Artificial Sequence
  Description of Artificial Sequence: Synthetic peptide
  Seed: GMDPRMCSLMQGSTL
GMDFRMLSWMQTSTL

SEQ ID NO: 72423 - protein, 15 aa, Artificial Sequence
  Description of Artificial Sequence: Synthetic peptide
  Seed: GMDPRMCSLMQGSTL
GMDFRMLSWMQVSTL

SEQ ID NO: 72424 - protein, 15 aa, Artificial Sequence
  Description of Artificial Sequence: Synthetic peptide
  Seed: GMDPRMCSLMQGSTL
GMDFRMLSYMQASTL

SEQ ID NO: 72425 - protein, 15 aa, Artificial Sequence
  Description of Artificial Sequence: Synthetic peptide
  Seed: GMDPRMCSLMQGSTL
GMDFRMLSYMQGSTL

SEQ ID NO: 72426 - protein, 15 aa, Artificial Sequence
  Description of Artificial Sequence: Synthetic peptide
  Seed: GMDPRMCSLMQGSTL
GMDFRMLSYMQHSTL

SEQ ID NO: 72427 - protein, 15 aa, Artificial Sequence
  Description of Artificial Sequence: Synthetic peptide
  Seed: GMDPRMCSLMQGSTL
GMDFRMLSYMQNSTL

SEQ ID NO: 72428 - protein, 15 aa, Artificial Sequence
  Description of Artificial Sequence: Synthetic peptide
  Seed: GMDPRMCSLMQGSTL
GMDFRMLSYMQPSTL

SEQ ID NO: 72429 - protein, 15 aa, Artificial Sequence
  Description of Artificial Sequence: Synthetic peptide
  Seed: GMDPRMCSLMQGSTL
GMDFRMLSYMQSSTL

SEQ ID NO: 72430 - protein, 15 aa, Artificial Sequence
  Description of Artificial Sequence: Synthetic peptide
  Seed: GMDPRMCSLMQGSTL
GMDFRMLSYMQTSTL

SEQ ID NO: 72431 - protein, 15 aa, Artificial Sequence
  Description of Artificial Sequence: Synthetic peptide
  Seed: GMDPRMCSLMQGSTL
GMDFRMLSYMQVSTL

SEQ ID NO: 72432 - protein, 15 aa, Artificial Sequence
  Description of Artificial Sequence: Synthetic peptide
  Seed: GMDPRMCSLMQGSTL
GMDFRMMSAMQASTL

SEQ ID NO: 72433 - protein, 15 aa, Artificial Sequence
  Description of Artificial Sequence: Synthetic peptide
  Seed: GMDPRMCSLMQGSTL
GMDFRMMSAMQCSTL

SEQ ID NO: 72434 - protein, 15 aa, Artificial Sequence
  Description of Artificial Sequence: Synthetic peptide
  Seed: GMDPRMCSLMQGSTL
GMDFRMMSAMQDSTL

SEQ ID NO: 72435 - protein, 15 aa, Artificial Sequence
  Description of Artificial Sequence: Synthetic peptide
  Seed: GMDPRMCSLMQGSTL
GMDFRMMSAMQESTL

SEQ ID NO: 72436 - protein, 15 aa, Artificial Sequence
  Description of Artificial Sequence: Synthetic peptide
  Seed: GMDPRMCSLMQGSTL
GMDFRMMSAMQFSTL

SEQ ID NO: 72437 - protein, 15 aa, Artificial Sequence
  Description of Artificial Sequence: Synthetic peptide
  Seed: GMDPRMCSLMQGSTL
GMDFRMMSAMQGSTL

SEQ ID NO: 72438 - protein, 15 aa, Artificial Sequence
  Description of Artificial Sequence: Synthetic peptide
  Seed: GMDPRMCSLMQGSTL
GMDFRMMSAMQHSTL

SEQ ID NO: 72439 - protein, 15 aa, Artificial Sequence
  Description of Artificial Sequence: Synthetic peptide
  Seed: GMDPRMCSLMQGSTL
GMDFRMMSAMQISTL

SEQ ID NO: 72440 - protein, 15 aa, Artificial Sequence
  Description of Artificial Sequence: Synthetic peptide
  Seed: GMDPRMCSLMQGSTL
GMDFRMMSAMQKSTL

SEQ ID NO: 72441 - protein, 15 aa, Artificial Sequence
  Description of Artificial Sequence: Synthetic peptide
  Seed: GMDPRMCSLMQGSTL
GMDFRMMSAMQLSTL

SEQ ID NO: 72442 - protein, 15 aa, Artificial Sequence
  Description of Artificial Sequence: Synthetic peptide
  Seed: GMDPRMCSLMQGSTL
GMDFRMMSAMQMSTL

SEQ ID NO: 72443 - protein, 15 aa, Artificial Sequence
  Description of Artificial Sequence: Synthetic peptide
  Seed: GMDPRMCSLMQGSTL
GMDFRMMSAMQNSTL

SEQ ID NO: 72444 - protein, 15 aa, Artificial Sequence
  Description of Artificial Sequence: Synthetic peptide
  Seed: GMDPRMCSLMQGSTL
GMDFRMMSAMQPSTL

SEQ ID NO: 72445 - protein, 15 aa, Artificial Sequence
  Description of Artificial Sequence: Synthetic peptide
  Seed: GMDPRMCSLMQGSTL
GMDFRMMSAMQQSTL

SEQ ID NO: 72446 - protein, 15 aa, Artificial Sequence
  Description of Artificial Sequence: Synthetic peptide
  Seed: GMDPRMCSLMQGSTL
GMDFRMMSAMQRSTL

SEQ ID NO: 72447 - protein, 15 aa, Artificial Sequence
  Description of Artificial Sequence: Synthetic peptide
  Seed: GMDPRMCSLMQGSTL
GMDFRMMSAMQSSTL

SEQ ID NO: 72448 - protein, 15 aa, Artificial Sequence
  Description of Artificial Sequence: Synthetic peptide
  Seed: GMDPRMCSLMQGSTL
GMDFRMMSAMQTSTL

SEQ ID NO: 72449 - protein, 15 aa, Artificial Sequence
  Description of Artificial Sequence: Synthetic peptide
  Seed: GMDPRMCSLMQGSTL
GMDFRMMSAMQVSTL

SEQ ID NO: 72450 - protein, 15 aa, Artificial Sequence
  Description of Artificial Sequence: Synthetic peptide
  Seed: GMDPRMCSLMQGSTL
GMDFRMMSAMQWSTL

SEQ ID NO: 72451 - protein, 15 aa, Artificial Sequence
  Description of Artificial Sequence: Synthetic peptide
  Seed: GMDPRMCSLMQGSTL
GMDFRMMSAMQYSTL

SEQ ID NO: 72452 - protein, 15 aa, Artificial Sequence
  Description of Artificial Sequence: Synthetic peptide
  Seed: GMDPRMCSLMQGSTL
GMDFRMMSCMQASTL

SEQ ID NO: 72453 - protein, 15 aa, Artificial Sequence
  Description of Artificial Sequence: Synthetic peptide
  Seed: GMDPRMCSLMQGSTL
GMDFRMMSCMQHSTL

SEQ ID NO: 72454 - protein, 15 aa, Artificial Sequence
  Description of Artificial Sequence: Synthetic peptide
  Seed: GMDPRMCSLMQGSTL
GMDFRMMSCMQMSTL

SEQ ID NO: 72455 - protein, 15 aa, Artificial Sequence
  Description of Artificial Sequence: Synthetic peptide
  Seed: GMDPRMCSLMQGSTL
GMDFRMMSCMQNSTL

SEQ ID NO: 72456 - protein, 15 aa, Artificial Sequence
  Description of Artificial Sequence: Synthetic peptide
  Seed: GMDPRMCSLMQGSTL
GMDFRMMSCMQSSTL

SEQ ID NO: 72457 - protein, 15 aa, Artificial Sequence
  Description of Artificial Sequence: Synthetic peptide
  Seed: GMDPRMCSLMQGSTL
GMDFRMMSCMQTSTL

SEQ ID NO: 72458 - protein, 15 aa, Artificial Sequence
  Description of Artificial Sequence: Synthetic peptide
  Seed: GMDPRMCSLMQGSTL
GMDFRMMSCMQVSTL

SEQ ID NO: 72459 - protein, 15 aa, Artificial Sequence
  Description of Artificial Sequence: Synthetic peptide
  Seed: GMDPRMCSLMQGSTL
GMDFRMMSDMQASTL

SEQ ID NO: 72460 - protein, 15 aa, Artificial Sequence
  Description of Artificial Sequence: Synthetic peptide
  Seed: GMDPRMCSLMQGSTL
GMDFRMMSDMQISTL

SEQ ID NO: 72461 - protein, 15 aa, Artificial Sequence
  Description of Artificial Sequence: Synthetic peptide
  Seed: GMDPRMCSLMQGSTL
GMDFRMMSDMQLSTL

SEQ ID NO: 72462 - protein, 15 aa, Artificial Sequence
  Description of Artificial Sequence: Synthetic peptide
  Seed: GMDPRMCSLMQGSTL
GMDFRMMSDMQMSTL

SEQ ID NO: 72463 - protein, 15 aa, Artificial Sequence
  Description of Artificial Sequence: Synthetic peptide
  Seed: GMDPRMCSLMQGSTL
GMDFRMMSDMQNSTL

SEQ ID NO: 72464 - protein, 15 aa, Artificial Sequence
  Description of Artificial Sequence: Synthetic peptide
  Seed: GMDPRMCSLMQGSTL
GMDFRMMSDMQSSTL

SEQ ID NO: 72465 - protein, 15 aa, Artificial Sequence
  Description of Artificial Sequence: Synthetic peptide
  Seed: GMDPRMCSLMQGSTL
GMDFRMMSDMQTSTL

SEQ ID NO: 72466 - protein, 15 aa, Artificial Sequence
  Description of Artificial Sequence: Synthetic peptide
  Seed: GMDPRMCSLMQGSTL
GMDFRMMSDMQVSTL

SEQ ID NO: 72467 - protein, 15 aa, Artificial Sequence
  Description of Artificial Sequence: Synthetic peptide
  Seed: GMDPRMCSLMQGSTL
GMDFRMMSEMQASTL

SEQ ID NO: 72468 - protein, 15 aa, Artificial Sequence
  Description of Artificial Sequence: Synthetic peptide
  Seed: GMDPRMCSLMQGSTL
GMDFRMMSEMQHSTL

SEQ ID NO: 72469 - protein, 15 aa, Artificial Sequence
  Description of Artificial Sequence: Synthetic peptide
  Seed: GMDPRMCSLMQGSTL
GMDFRMMSEMQISTL

SEQ ID NO: 72470 - protein, 15 aa, Artificial Sequence
  Description of Artificial Sequence: Synthetic peptide
  Seed: GMDPRMCSLMQGSTL
GMDFRMMSEMQLSTL

SEQ ID NO: 72471 - protein, 15 aa, Artificial Sequence
  Description of Artificial Sequence: Synthetic peptide
  Seed: GMDPRMCSLMQGSTL
GMDFRMMSEMQMSTL

SEQ ID NO: 72472 - protein, 15 aa, Artificial Sequence
  Description of Artificial Sequence: Synthetic peptide
  Seed: GMDPRMCSLMQGSTL
GMDFRMMSEMQNSTL

SEQ ID NO: 72473 - protein, 15 aa, Artificial Sequence
  Description of Artificial Sequence: Synthetic peptide
  Seed: GMDPRMCSLMQGSTL
GMDFRMMSEMQSSTL

SEQ ID NO: 72474 - protein, 15 aa, Artificial Sequence
  Description of Artificial Sequence: Synthetic peptide
  Seed: GMDPRMCSLMQGSTL
GMDFRMMSEMQTSTL

SEQ ID NO: 72475 - protein, 15 aa, Artificial Sequence
  Description of Artificial Sequence: Synthetic peptide
  Seed: GMDPRMCSLMQGSTL
GMDFRMMSEMQVSTL

SEQ ID NO: 72476 - protein, 15 aa, Artificial Sequence
  Description of Artificial Sequence: Synthetic peptide
  Seed: GMDPRMCSLMQGSTL
GMDFRMMSFMQASTL

SEQ ID NO: 72477 - protein, 15 aa, Artificial Sequence
  Description of Artificial Sequence: Synthetic peptide
  Seed: GMDPRMCSLMQGSTL
GMDFRMMSFMQGSTL

SEQ ID NO: 72478 - protein, 15 aa, Artificial Sequence
  Description of Artificial Sequence: Synthetic peptide
  Seed: GMDPRMCSLMQGSTL
GMDFRMMSFMQHSTL

SEQ ID NO: 72479 - protein, 15 aa, Artificial Sequence
  Description of Artificial Sequence: Synthetic peptide
  Seed: GMDPRMCSLMQGSTL
GMDFRMMSFMQISTL

SEQ ID NO: 72480 - protein, 15 aa, Artificial Sequence
  Description of Artificial Sequence: Synthetic peptide
  Seed: GMDPRMCSLMQGSTL
GMDFRMMSFMQLSTL

SEQ ID NO: 72481 - protein, 15 aa, Artificial Sequence
  Description of Artificial Sequence: Synthetic peptide
  Seed: GMDPRMCSLMQGSTL
GMDFRMMSFMQMSTL

SEQ ID NO: 72482 - protein, 15 aa, Artificial Sequence
  Description of Artificial Sequence: Synthetic peptide
  Seed: GMDPRMCSLMQGSTL
GMDFRMMSFMQNSTL

SEQ ID NO: 72483 - protein, 15 aa, Artificial Sequence
  Description of Artificial Sequence: Synthetic peptide
  Seed: GMDPRMCSLMQGSTL
GMDFRMMSFMQPSTL

SEQ ID NO: 72484 - protein, 15 aa, Artificial Sequence
  Description of Artificial Sequence: Synthetic peptide
  Seed: GMDPRMCSLMQGSTL
GMDFRMMSFMQSSTL

SEQ ID NO: 72485 - protein, 15 aa, Artificial Sequence
  Description of Artificial Sequence: Synthetic peptide
  Seed: GMDPRMCSLMQGSTL
GMDFRMMSFMQTSTL

SEQ ID NO: 72486 - protein, 15 aa, Artificial Sequence
  Description of Artificial Sequence: Synthetic peptide
  Seed: GMDPRMCSLMQGSTL
GMDFRMMSFMQVSTL

SEQ ID NO: 72487 - protein, 15 aa, Artificial Sequence
  Description of Artificial Sequence: Synthetic peptide
  Seed: GMDPRMCSLMQGSTL
GMDFRMMSGMQASTL

SEQ ID NO: 72488 - protein, 15 aa, Artificial Sequence
  Description of Artificial Sequence: Synthetic peptide
  Seed: GMDPRMCSLMQGSTL
GMDFRMMSGMQCSTL

SEQ ID NO: 72489 - protein, 15 aa, Artificial Sequence
  Description of Artificial Sequence: Synthetic peptide
  Seed: GMDPRMCSLMQGSTL
GMDFRMMSGMQDSTL

SEQ ID NO: 72490 - protein, 15 aa, Artificial Sequence
  Description of Artificial Sequence: Synthetic peptide
  Seed: GMDPRMCSLMQGSTL
GMDFRMMSGMQESTL

SEQ ID NO: 72491 - protein, 15 aa, Artificial Sequence
  Description of Artificial Sequence: Synthetic peptide
  Seed: GMDPRMCSLMQGSTL
GMDFRMMSGMQFSTL

SEQ ID NO: 72492 - protein, 15 aa, Artificial Sequence
  Description of Artificial Sequence: Synthetic peptide
  Seed: GMDPRMCSLMQGSTL
GMDFRMMSGMQGSTL

SEQ ID NO: 72493 - protein, 15 aa, Artificial Sequence
  Description of Artificial Sequence: Synthetic peptide
  Seed: GMDPRMCSLMQGSTL
GMDFRMMSGMQHSTL

SEQ ID NO: 72494 - protein, 15 aa, Artificial Sequence
  Description of Artificial Sequence: Synthetic peptide
  Seed: GMDPRMCSLMQGSTL
GMDFRMMSGMQISTL

SEQ ID NO: 72495 - protein, 15 aa, Artificial Sequence
  Description of Artificial Sequence: Synthetic peptide
  Seed: GMDPRMCSLMQGSTL
GMDFRMMSGMQKSTL

SEQ ID NO: 72496 - protein, 15 aa, Artificial Sequence
  Description of Artificial Sequence: Synthetic peptide
  Seed: GMDPRMCSLMQGSTL
GMDFRMMSGMQLSTL

SEQ ID NO: 72497 - protein, 15 aa, Artificial Sequence
  Description of Artificial Sequence: Synthetic peptide
  Seed: GMDPRMCSLMQGSTL
GMDFRMMSGMQMSTL

SEQ ID NO: 72498 - protein, 15 aa, Artificial Sequence
  Description of Artificial Sequence: Synthetic peptide
  Seed: GMDPRMCSLMQGSTL
GMDFRMMSGMQNSTL

SEQ ID NO: 72499 - protein, 15 aa, Artificial Sequence
  Description of Artificial Sequence: Synthetic peptide
  Seed: GMDPRMCSLMQGSTL
GMDFRMMSGMQPSTL

SEQ ID NO: 72500 - protein, 15 aa, Artificial Sequence
  Description of Artificial Sequence: Synthetic peptide
  Seed: GMDPRMCSLMQGSTL
GMDFRMMSGMQQSTL

SEQ ID NO: 72501 - protein, 15 aa, Artificial Sequence
  Description of Artificial Sequence: Synthetic peptide
  Seed: GMDPRMCSLMQGSTL
GMDFRMMSGMQRSTL

SEQ ID NO: 72502 - protein, 15 aa, Artificial Sequence
  Description of Artificial Sequence: Synthetic peptide
  Seed: GMDPRMCSLMQGSTL
GMDFRMMSGMQSSTL

SEQ ID NO: 72503 - protein, 15 aa, Artificial Sequence
  Description of Artificial Sequence: Synthetic peptide
  Seed: GMDPRMCSLMQGSTL
GMDFRMMSGMQTSTL

SEQ ID NO: 72504 - protein, 15 aa, Artificial Sequence
  Description of Artificial Sequence: Synthetic peptide
  Seed: GMDPRMCSLMQGSTL
GMDFRMMSGMQVSTL

SEQ ID NO: 72505 - protein, 15 aa, Artificial Sequence
  Description of Artificial Sequence: Synthetic peptide
  Seed: GMDPRMCSLMQGSTL
GMDFRMMSGMQWSTL

SEQ ID NO: 72506 - protein, 15 aa, Artificial Sequence
  Description of Artificial Sequence: Synthetic peptide
  Seed: GMDPRMCSLMQGSTL
GMDFRMMSGMQYSTL

SEQ ID NO: 72507 - protein, 15 aa, Artificial Sequence
  Description of Artificial Sequence: Synthetic peptide
  Seed: GMDPRMCSLMQGSTL
GMDFRMMSHMQASTL

SEQ ID NO: 72508 - protein, 15 aa, Artificial Sequence
  Description of Artificial Sequence: Synthetic peptide
  Seed: GMDPRMCSLMQGSTL
GMDFRMMSHMQDSTL

SEQ ID NO: 72509 - protein, 15 aa, Artificial Sequence
  Description of Artificial Sequence: Synthetic peptide
  Seed: GMDPRMCSLMQGSTL
GMDFRMMSHMQGSTL

SEQ ID NO: 72510 - protein, 15 aa, Artificial Sequence
  Description of Artificial Sequence: Synthetic peptide
  Seed: GMDPRMCSLMQGSTL
GMDFRMMSHMQHSTL

SEQ ID NO: 72511 - protein, 15 aa, Artificial Sequence
  Description of Artificial Sequence: Synthetic peptide
  Seed: GMDPRMCSLMQGSTL
GMDFRMMSHMQISTL

SEQ ID NO: 72512 - protein, 15 aa, Artificial Sequence
  Description of Artificial Sequence: Synthetic peptide
  Seed: GMDPRMCSLMQGSTL
GMDFRMMSHMQLSTL

SEQ ID NO: 72513 - protein, 15 aa, Artificial Sequence
  Description of Artificial Sequence: Synthetic peptide
  Seed: GMDPRMCSLMQGSTL
GMDFRMMSHMQMSTL

SEQ ID NO: 72514 - protein, 15 aa, Artificial Sequence
  Description of Artificial Sequence: Synthetic peptide
  Seed: GMDPRMCSLMQGSTL
GMDFRMMSHMQNSTL

SEQ ID NO: 72515 - protein, 15 aa, Artificial Sequence
  Description of Artificial Sequence: Synthetic peptide
  Seed: GMDPRMCSLMQGSTL
GMDFRMMSHMQPSTL

SEQ ID NO: 72516 - protein, 15 aa, Artificial Sequence
  Description of Artificial Sequence: Synthetic peptide
  Seed: GMDPRMCSLMQGSTL
GMDFRMMSHMQSSTL

SEQ ID NO: 72517 - protein, 15 aa, Artificial Sequence
  Description of Artificial Sequence: Synthetic peptide
  Seed: GMDPRMCSLMQGSTL
GMDFRMMSHMQTSTL

SEQ ID NO: 72518 - protein, 15 aa, Artificial Sequence
  Description of Artificial Sequence: Synthetic peptide
  Seed: GMDPRMCSLMQGSTL
GMDFRMMSHMQVSTL

SEQ ID NO: 72519 - protein, 15 aa, Artificial Sequence
  Description of Artificial Sequence: Synthetic peptide
  Seed: GMDPRMCSLMQGSTL
GMDFRMMSIMQASTL

SEQ ID NO: 72520 - protein, 15 aa, Artificial Sequence
  Description of Artificial Sequence: Synthetic peptide
  Seed: GMDPRMCSLMQGSTL
GMDFRMMSIMQCSTL

SEQ ID NO: 72521 - protein, 15 aa, Artificial Sequence
  Description of Artificial Sequence: Synthetic peptide
  Seed: GMDPRMCSLMQGSTL
GMDFRMMSIMQDSTL

SEQ ID NO: 72522 - protein, 15 aa, Artificial Sequence
  Description of Artificial Sequence: Synthetic peptide
  Seed: GMDPRMCSLMQGSTL
GMDFRMMSIMQESTL

SEQ ID NO: 72523 - protein, 15 aa, Artificial Sequence
  Description of Artificial Sequence: Synthetic peptide
  Seed: GMDPRMCSLMQGSTL
GMDFRMMSIMQFSTL

SEQ ID NO: 72524 - protein, 15 aa, Artificial Sequence
  Description of Artificial Sequence: Synthetic peptide
  Seed: GMDPRMCSLMQGSTL
GMDFRMMSIMQGSTL

SEQ ID NO: 72525 - protein, 15 aa, Artificial Sequence
  Description of Artificial Sequence: Synthetic peptide
  Seed: GMDPRMCSLMQGSTL
GMDFRMMSIMQHSTL

SEQ ID NO: 72526 - protein, 15 aa, Artificial Sequence
  Description of Artificial Sequence: Synthetic peptide
  Seed: GMDPRMCSLMQGSTL
GMDFRMMSIMQISTL

SEQ ID NO: 72527 - protein, 15 aa, Artificial Sequence
  Description of Artificial Sequence: Synthetic peptide
  Seed: GMDPRMCSLMQGSTL
GMDFRMMSIMQKSTL

SEQ ID NO: 72528 - protein, 15 aa, Artificial Sequence
  Description of Artificial Sequence: Synthetic peptide
  Seed: GMDPRMCSLMQGSTL
GMDFRMMSIMQLSTL

SEQ ID NO: 72529 - protein, 15 aa, Artificial Sequence
  Description of Artificial Sequence: Synthetic peptide
  Seed: GMDPRMCSLMQGSTL
GMDFRMMSIMQMSTL

SEQ ID NO: 72530 - protein, 15 aa, Artificial Sequence
  Description of Artificial Sequence: Synthetic peptide
  Seed: GMDPRMCSLMQGSTL
GMDFRMMSIMQNSTL

SEQ ID NO: 72531 - protein, 15 aa, Artificial Sequence
  Description of Artificial Sequence: Synthetic peptide
  Seed: GMDPRMCSLMQGSTL
GMDFRMMSIMQPSTL

SEQ ID NO: 72532 - protein, 15 aa, Artificial Sequence
  Description of Artificial Sequence: Synthetic peptide
  Seed: GMDPRMCSLMQGSTL
GMDFRMMSIMQQSTL

SEQ ID NO: 72533 - protein, 15 aa, Artificial Sequence
  Description of Artificial Sequence: Synthetic peptide
  Seed: GMDPRMCSLMQGSTL
GMDFRMMSIMQRSTL

SEQ ID NO: 72534 - protein, 15 aa, Artificial Sequence
  Description of Artificial Sequence: Synthetic peptide
  Seed: GMDPRMCSLMQGSTL
GMDFRMMSIMQSSTL

SEQ ID NO: 72535 - protein, 15 aa, Artificial Sequence
  Description of Artificial Sequence: Synthetic peptide
  Seed: GMDPRMCSLMQGSTL
GMDFRMMSIMQTSTL

SEQ ID NO: 72536 - protein, 15 aa, Artificial Sequence
  Description of Artificial Sequence: Synthetic peptide
  Seed: GMDPRMCSLMQGSTL
GMDFRMMSIMQVSTL

SEQ ID NO: 72537 - protein, 15 aa, Artificial Sequence
  Description of Artificial Sequence: Synthetic peptide
  Seed: GMDPRMCSLMQGSTL
GMDFRMMSIMQYSTL

SEQ ID NO: 72538 - protein, 15 aa, Artificial Sequence
  Description of Artificial Sequence: Synthetic peptide
  Seed: GMDPRMCSLMQGSTL
GMDFRMMSKMQASTL

SEQ ID NO: 72539 - protein, 15 aa, Artificial Sequence
  Description of Artificial Sequence: Synthetic peptide
  Seed: GMDPRMCSLMQGSTL
GMDFRMMSKMQSSTL

SEQ ID NO: 72540 - protein, 15 aa, Artificial Sequence
  Description of Artificial Sequence: Synthetic peptide
  Seed: GMDPRMCSLMQGSTL
GMDFRMMSLMQASTL

SEQ ID NO: 72541 - protein, 15 aa, Artificial Sequence
  Description of Artificial Sequence: Synthetic peptide
  Seed: GMDPRMCSLMQGSTL
GMDFRMMSLMQDSTL

SEQ ID NO: 72542 - protein, 15 aa, Artificial Sequence
  Description of Artificial Sequence: Synthetic peptide
  Seed: GMDPRMCSLMQGSTL
GMDFRMMSLMQESTL

SEQ ID NO: 72543 - protein, 15 aa, Artificial Sequence
  Description of Artificial Sequence: Synthetic peptide
  Seed: GMDPRMCSLMQGSTL
GMDFRMMSLMQGSTL

SEQ ID NO: 72544 - protein, 15 aa, Artificial Sequence
  Description of Artificial Sequence: Synthetic peptide
  Seed: GMDPRMCSLMQGSTL
GMDFRMMSLMQHSTL

SEQ ID NO: 72545 - protein, 15 aa, Artificial Sequence
  Description of Artificial Sequence: Synthetic peptide
  Seed: GMDPRMCSLMQGSTL
GMDFRMMSLMQISTL

SEQ ID NO: 72546 - protein, 15 aa, Artificial Sequence
  Description of Artificial Sequence: Synthetic peptide
  Seed: GMDPRMCSLMQGSTL
GMDFRMMSLMQKSTL

SEQ ID NO: 72547 - protein, 15 aa, Artificial Sequence
  Description of Artificial Sequence: Synthetic peptide
  Seed: GMDPRMCSLMQGSTL
GMDFRMMSLMQLSTL

SEQ ID NO: 72548 - protein, 15 aa, Artificial Sequence
  Description of Artificial Sequence: Synthetic peptide
  Seed: GMDPRMCSLMQGSTL
GMDFRMMSLMQMSTL

SEQ ID NO: 72549 - protein, 15 aa, Artificial Sequence
  Description of Artificial Sequence: Synthetic peptide
  Seed: GMDPRMCSLMQGSTL
GMDFRMMSLMQNSTL

SEQ ID NO: 72550 - protein, 15 aa, Artificial Sequence
  Description of Artificial Sequence: Synthetic peptide
  Seed: GMDPRMCSLMQGSTL
GMDFRMMSLMQPSTL

SEQ ID NO: 72551 - protein, 15 aa, Artificial Sequence
  Description of Artificial Sequence: Synthetic peptide
  Seed: GMDPRMCSLMQGSTL
GMDFRMMSLMQQSTL

SEQ ID NO: 72552 - protein, 15 aa, Artificial Sequence
  Description of Artificial Sequence: Synthetic peptide
  Seed: GMDPRMCSLMQGSTL
GMDFRMMSLMQRSTL

SEQ ID NO: 72553 - protein, 15 aa, Artificial Sequence
  Description of Artificial Sequence: Synthetic peptide
  Seed: GMDPRMCSLMQGSTL
GMDFRMMSLMQSSTL

SEQ ID NO: 72554 - protein, 15 aa, Artificial Sequence
  Description of Artificial Sequence: Synthetic peptide
  Seed: GMDPRMCSLMQGSTL
GMDFRMMSLMQTSTL

SEQ ID NO: 72555 - protein, 15 aa, Artificial Sequence
  Description of Artificial Sequence: Synthetic peptide
  Seed: GMDPRMCSLMQGSTL
GMDFRMMSLMQVSTL

SEQ ID NO: 72556 - protein, 15 aa, Artificial Sequence
  Description of Artificial Sequence: Synthetic peptide
  Seed: GMDPRMCSLMQGSTL
GMDFRMMSLMQYSTL

SEQ ID NO: 72557 - protein, 15 aa, Artificial Sequence
  Description of Artificial Sequence: Synthetic peptide
  Seed: GMDPRMCSLMQGSTL
GMDFRMMSMMQASTL

SEQ ID NO: 72558 - protein, 15 aa, Artificial Sequence
  Description of Artificial Sequence: Synthetic peptide
  Seed: GMDPRMCSLMQGSTL
GMDFRMMSMMQCSTL

SEQ ID NO: 72559 - protein, 15 aa, Artificial Sequence
  Description of Artificial Sequence: Synthetic peptide
  Seed: GMDPRMCSLMQGSTL
GMDFRMMSMMQDSTL

SEQ ID NO: 72560 - protein, 15 aa, Artificial Sequence
  Description of Artificial Sequence: Synthetic peptide
  Seed: GMDPRMCSLMQGSTL
GMDFRMMSMMQESTL

SEQ ID NO: 72561 - protein, 15 aa, Artificial Sequence
  Description of Artificial Sequence: Synthetic peptide
  Seed: GMDPRMCSLMQGSTL
GMDFRMMSMMQFSTL

SEQ ID NO: 72562 - protein, 15 aa, Artificial Sequence
  Description of Artificial Sequence: Synthetic peptide
  Seed: GMDPRMCSLMQGSTL
GMDFRMMSMMQGSTL

SEQ ID NO: 72563 - protein, 15 aa, Artificial Sequence
  Description of Artificial Sequence: Synthetic peptide
  Seed: GMDPRMCSLMQGSTL
GMDFRMMSMMQHSTL

SEQ ID NO: 72564 - protein, 15 aa, Artificial Sequence
  Description of Artificial Sequence: Synthetic peptide
  Seed: GMDPRMCSLMQGSTL
GMDFRMMSMMQISTL

SEQ ID NO: 72565 - protein, 15 aa, Artificial Sequence
  Description of Artificial Sequence: Synthetic peptide
  Seed: GMDPRMCSLMQGSTL
GMDFRMMSMMQKSTL

SEQ ID NO: 72566 - protein, 15 aa, Artificial Sequence
  Description of Artificial Sequence: Synthetic peptide
  Seed: GMDPRMCSLMQGSTL
GMDFRMMSMMQLSTL

SEQ ID NO: 72567 - protein, 15 aa, Artificial Sequence
  Description of Artificial Sequence: Synthetic peptide
  Seed: GMDPRMCSLMQGSTL
GMDFRMMSMMQMSTL

SEQ ID NO: 72568 - protein, 15 aa, Artificial Sequence
  Description of Artificial Sequence: Synthetic peptide
  Seed: GMDPRMCSLMQGSTL
GMDFRMMSMMQNSTL

SEQ ID NO: 72569 - protein, 15 aa, Artificial Sequence
  Description of Artificial Sequence: Synthetic peptide
  Seed: GMDPRMCSLMQGSTL
GMDFRMMSMMQPSTL

SEQ ID NO: 72570 - protein, 15 aa, Artificial Sequence
  Description of Artificial Sequence: Synthetic peptide
  Seed: GMDPRMCSLMQGSTL
GMDFRMMSMMQQSTL

SEQ ID NO: 72571 - protein, 15 aa, Artificial Sequence
  Description of Artificial Sequence: Synthetic peptide
  Seed: GMDPRMCSLMQGSTL
GMDFRMMSMMQRSTL

SEQ ID NO: 72572 - protein, 15 aa, Artificial Sequence
  Description of Artificial Sequence: Synthetic peptide
  Seed: GMDPRMCSLMQGSTL
GMDFRMMSMMQSSTL

SEQ ID NO: 72573 - protein, 15 aa, Artificial Sequence
  Description of Artificial Sequence: Synthetic peptide
  Seed: GMDPRMCSLMQGSTL
GMDFRMMSMMQTSTL

SEQ ID NO: 72574 - protein, 15 aa, Artificial Sequence
  Description of Artificial Sequence: Synthetic peptide
  Seed: GMDPRMCSLMQGSTL
GMDFRMMSMMQVSTL

SEQ ID NO: 72575 - protein, 15 aa, Artificial Sequence
  Description of Artificial Sequence: Synthetic peptide
  Seed: GMDPRMCSLMQGSTL
GMDFRMMSMMQYSTL

SEQ ID NO: 72576 - protein, 15 aa, Artificial Sequence
  Description of Artificial Sequence: Synthetic peptide
  Seed: GMDPRMCSLMQGSTL
GMDFRMMSNMQASTL

SEQ ID NO: 72577 - protein, 15 aa, Artificial Sequence
  Description of Artificial Sequence: Synthetic peptide
  Seed: GMDPRMCSLMQGSTL
GMDFRMMSNMQCSTL

SEQ ID NO: 72578 - protein, 15 aa, Artificial Sequence
  Description of Artificial Sequence: Synthetic peptide
  Seed: GMDPRMCSLMQGSTL
GMDFRMMSNMQDSTL

SEQ ID NO: 72579 - protein, 15 aa, Artificial Sequence
  Description of Artificial Sequence: Synthetic peptide
  Seed: GMDPRMCSLMQGSTL
GMDFRMMSNMQESTL

SEQ ID NO: 72580 - protein, 15 aa, Artificial Sequence
  Description of Artificial Sequence: Synthetic peptide
  Seed: GMDPRMCSLMQGSTL
GMDFRMMSNMQFSTL

SEQ ID NO: 72581 - protein, 15 aa, Artificial Sequence
  Description of Artificial Sequence: Synthetic peptide
  Seed: GMDPRMCSLMQGSTL
GMDFRMMSNMQGSTL

SEQ ID NO: 72582 - protein, 15 aa, Artificial Sequence
  Description of Artificial Sequence: Synthetic peptide
  Seed: GMDPRMCSLMQGSTL
GMDFRMMSNMQHSTL

SEQ ID NO: 72583 - protein, 15 aa, Artificial Sequence
  Description of Artificial Sequence: Synthetic peptide
  Seed: GMDPRMCSLMQGSTL
GMDFRMMSNMQISTL

SEQ ID NO: 72584 - protein, 15 aa, Artificial Sequence
  Description of Artificial Sequence: Synthetic peptide
  Seed: GMDPRMCSLMQGSTL
GMDFRMMSNMQKSTL

SEQ ID NO: 72585 - protein, 15 aa, Artificial Sequence
  Description of Artificial Sequence: Synthetic peptide
  Seed: GMDPRMCSLMQGSTL
GMDFRMMSNMQLSTL

SEQ ID NO: 72586 - protein, 15 aa, Artificial Sequence
  Description of Artificial Sequence: Synthetic peptide
  Seed: GMDPRMCSLMQGSTL
GMDFRMMSNMQMSTL

SEQ ID NO: 72587 - protein, 15 aa, Artificial Sequence
  Description of Artificial Sequence: Synthetic peptide
  Seed: GMDPRMCSLMQGSTL
GMDFRMMSNMQNSTL

SEQ ID NO: 72588 - protein, 15 aa, Artificial Sequence
  Description of Artificial Sequence: Synthetic peptide
  Seed: GMDPRMCSLMQGSTL
GMDFRMMSNMQPSTL

SEQ ID NO: 72589 - protein, 15 aa, Artificial Sequence
  Description of Artificial Sequence: Synthetic peptide
  Seed: GMDPRMCSLMQGSTL
GMDFRMMSNMQQSTL

SEQ ID NO: 72590 - protein, 15 aa, Artificial Sequence
  Description of Artificial Sequence: Synthetic peptide
  Seed: GMDPRMCSLMQGSTL
GMDFRMMSNMQRSTL

SEQ ID NO: 72591 - protein, 15 aa, Artificial Sequence
  Description of Artificial Sequence: Synthetic peptide
  Seed: GMDPRMCSLMQGSTL
GMDFRMMSNMQSSTL

SEQ ID NO: 72592 - protein, 15 aa, Artificial Sequence
  Description of Artificial Sequence: Synthetic peptide
  Seed: GMDPRMCSLMQGSTL
GMDFRMMSNMQTSTL

SEQ ID NO: 72593 - protein, 15 aa, Artificial Sequence
  Description of Artificial Sequence: Synthetic peptide
  Seed: GMDPRMCSLMQGSTL
GMDFRMMSNMQVSTL

SEQ ID NO: 72594 - protein, 15 aa, Artificial Sequence
  Description of Artificial Sequence: Synthetic peptide
  Seed: GMDPRMCSLMQGSTL
GMDFRMMSNMQWSTL

SEQ ID NO: 72595 - protein, 15 aa, Artificial Sequence
  Description of Artificial Sequence: Synthetic peptide
  Seed: GMDPRMCSLMQGSTL
GMDFRMMSNMQYSTL

SEQ ID NO: 72596 - protein, 15 aa, Artificial Sequence
  Description of Artificial Sequence: Synthetic peptide
  Seed: GMDPRMCSLMQGSTL
GMDFRMMSPMQASTL

SEQ ID NO: 72597 - protein, 15 aa, Artificial Sequence
  Description of Artificial Sequence: Synthetic peptide
  Seed: GMDPRMCSLMQGSTL
GMDFRMMSPMQCSTL

SEQ ID NO: 72598 - protein, 15 aa, Artificial Sequence
  Description of Artificial Sequence: Synthetic peptide
  Seed: GMDPRMCSLMQGSTL
GMDFRMMSPMQDSTL

SEQ ID NO: 72599 - protein, 15 aa, Artificial Sequence
  Description of Artificial Sequence: Synthetic peptide
  Seed: GMDPRMCSLMQGSTL
GMDFRMMSPMQESTL

SEQ ID NO: 72600 - protein, 15 aa, Artificial Sequence
  Description of Artificial Sequence: Synthetic peptide
  Seed: GMDPRMCSLMQGSTL
GMDFRMMSPMQFSTL

SEQ ID NO: 72601 - protein, 15 aa, Artificial Sequence
  Description of Artificial Sequence: Synthetic peptide
  Seed: GMDPRMCSLMQGSTL
GMDFRMMSPMQGSTL

SEQ ID NO: 72602 - protein, 15 aa, Artificial Sequence
  Description of Artificial Sequence: Synthetic peptide
  Seed: GMDPRMCSLMQGSTL
GMDFRMMSPMQHSTL

SEQ ID NO: 72603 - protein, 15 aa, Artificial Sequence
  Description of Artificial Sequence: Synthetic peptide
  Seed: GMDPRMCSLMQGSTL
GMDFRMMSPMQISTL

SEQ ID NO: 72604 - protein, 15 aa, Artificial Sequence
  Description of Artificial Sequence: Synthetic peptide
  Seed: GMDPRMCSLMQGSTL
GMDFRMMSPMQKSTL

SEQ ID NO: 72605 - protein, 15 aa, Artificial Sequence
  Description of Artificial Sequence: Synthetic peptide
  Seed: GMDPRMCSLMQGSTL
GMDFRMMSPMQLSTL

SEQ ID NO: 72606 - protein, 15 aa, Artificial Sequence
  Description of Artificial Sequence: Synthetic peptide
  Seed: GMDPRMCSLMQGSTL
GMDFRMMSPMQMSTL

SEQ ID NO: 72607 - protein, 15 aa, Artificial Sequence
  Description of Artificial Sequence: Synthetic peptide
  Seed: GMDPRMCSLMQGSTL
GMDFRMMSPMQNSTL

SEQ ID NO: 72608 - protein, 15 aa, Artificial Sequence
  Description of Artificial Sequence: Synthetic peptide
  Seed: GMDPRMCSLMQGSTL
GMDFRMMSPMQPSTL

SEQ ID NO: 72609 - protein, 15 aa, Artificial Sequence
  Description of Artificial Sequence: Synthetic peptide
  Seed: GMDPRMCSLMQGSTL
GMDFRMMSPMQQSTL

SEQ ID NO: 72610 - protein, 15 aa, Artificial Sequence
  Description of Artificial Sequence: Synthetic peptide
  Seed: GMDPRMCSLMQGSTL
GMDFRMMSPMQRSTL

SEQ ID NO: 72611 - protein, 15 aa, Artificial Sequence
  Description of Artificial Sequence: Synthetic peptide
  Seed: GMDPRMCSLMQGSTL
GMDFRMMSPMQSSTL

SEQ ID NO: 72612 - protein, 15 aa, Artificial Sequence
  Description of Artificial Sequence: Synthetic peptide
  Seed: GMDPRMCSLMQGSTL
GMDFRMMSPMQTSTL

SEQ ID NO: 72613 - protein, 15 aa, Artificial Sequence
  Description of Artificial Sequence: Synthetic peptide
  Seed: GMDPRMCSLMQGSTL
GMDFRMMSPMQVSTL

SEQ ID NO: 72614 - protein, 15 aa, Artificial Sequence
  Description of Artificial Sequence: Synthetic peptide
  Seed: GMDPRMCSLMQGSTL
GMDFRMMSPMQWSTL

SEQ ID NO: 72615 - protein, 15 aa, Artificial Sequence
  Description of Artificial Sequence: Synthetic peptide
  Seed: GMDPRMCSLMQGSTL
GMDFRMMSPMQYSTL

SEQ ID NO: 72616 - protein, 15 aa, Artificial Sequence
  Description of Artificial Sequence: Synthetic peptide
  Seed: GMDPRMCSLMQGSTL
GMDFRMMSQMQASTL

SEQ ID NO: 72617 - protein, 15 aa, Artificial Sequence
  Description of Artificial Sequence: Synthetic peptide
  Seed: GMDPRMCSLMQGSTL
GMDFRMMSQMQGSTL

SEQ ID NO: 72618 - protein, 15 aa, Artificial Sequence
  Description of Artificial Sequence: Synthetic peptide
  Seed: GMDPRMCSLMQGSTL
GMDFRMMSQMQHSTL

SEQ ID NO: 72619 - protein, 15 aa, Artificial Sequence
  Description of Artificial Sequence: Synthetic peptide
  Seed: GMDPRMCSLMQGSTL
GMDFRMMSQMQISTL

SEQ ID NO: 72620 - protein, 15 aa, Artificial Sequence
  Description of Artificial Sequence: Synthetic peptide
  Seed: GMDPRMCSLMQGSTL
GMDFRMMSQMQLSTL

SEQ ID NO: 72621 - protein, 15 aa, Artificial Sequence
  Description of Artificial Sequence: Synthetic peptide
  Seed: GMDPRMCSLMQGSTL
GMDFRMMSQMQMSTL

SEQ ID NO: 72622 - protein, 15 aa, Artificial Sequence
  Description of Artificial Sequence: Synthetic peptide
  Seed: GMDPRMCSLMQGSTL
GMDFRMMSQMQNSTL

SEQ ID NO: 72623 - protein, 15 aa, Artificial Sequence
  Description of Artificial Sequence: Synthetic peptide
  Seed: GMDPRMCSLMQGSTL
GMDFRMMSQMQSSTL

SEQ ID NO: 72624 - protein, 15 aa, Artificial Sequence
  Description of Artificial Sequence: Synthetic peptide
  Seed: GMDPRMCSLMQGSTL
GMDFRMMSQMQTSTL

SEQ ID NO: 72625 - protein, 15 aa, Artificial Sequence
  Description of Artificial Sequence: Synthetic peptide
  Seed: GMDPRMCSLMQGSTL
GMDFRMMSQMQVSTL

SEQ ID NO: 72626 - protein, 15 aa, Artificial Sequence
  Description of Artificial Sequence: Synthetic peptide
  Seed: GMDPRMCSLMQGSTL
GMDFRMMSRMQASTL

SEQ ID NO: 72627 - protein, 15 aa, Artificial Sequence
  Description of Artificial Sequence: Synthetic peptide
  Seed: GMDPRMCSLMQGSTL
GMDFRMMSRMQSSTL

SEQ ID NO: 72628 - protein, 15 aa, Artificial Sequence
  Description of Artificial Sequence: Synthetic peptide
  Seed: GMDPRMCSLMQGSTL
GMDFRMMSSMQASTL

SEQ ID NO: 72629 - protein, 15 aa, Artificial Sequence
  Description of Artificial Sequence: Synthetic peptide
  Seed: GMDPRMCSLMQGSTL
GMDFRMMSSMQCSTL

SEQ ID NO: 72630 - protein, 15 aa, Artificial Sequence
  Description of Artificial Sequence: Synthetic peptide
  Seed: GMDPRMCSLMQGSTL
GMDFRMMSSMQDSTL

SEQ ID NO: 72631 - protein, 15 aa, Artificial Sequence
  Description of Artificial Sequence: Synthetic peptide
  Seed: GMDPRMCSLMQGSTL
GMDFRMMSSMQESTL

SEQ ID NO: 72632 - protein, 15 aa, Artificial Sequence
  Description of Artificial Sequence: Synthetic peptide
  Seed: GMDPRMCSLMQGSTL
GMDFRMMSSMQFSTL

SEQ ID NO: 72633 - protein, 15 aa, Artificial Sequence
  Description of Artificial Sequence: Synthetic peptide
  Seed: GMDPRMCSLMQGSTL
GMDFRMMSSMQGSTL

SEQ ID NO: 72634 - protein, 15 aa, Artificial Sequence
  Description of Artificial Sequence: Synthetic peptide
  Seed: GMDPRMCSLMQGSTL
GMDFRMMSSMQHSTL

SEQ ID NO: 72635 - protein, 15 aa, Artificial Sequence
  Description of Artificial Sequence: Synthetic peptide
  Seed: GMDPRMCSLMQGSTL
GMDFRMMSSMQISTL

SEQ ID NO: 72636 - protein, 15 aa, Artificial Sequence
  Description of Artificial Sequence: Synthetic peptide
  Seed: GMDPRMCSLMQGSTL
GMDFRMMSSMQKSTL

SEQ ID NO: 72637 - protein, 15 aa, Artificial Sequence
  Description of Artificial Sequence: Synthetic peptide
  Seed: GMDPRMCSLMQGSTL
GMDFRMMSSMQLSTL

SEQ ID NO: 72638 - protein, 15 aa, Artificial Sequence
  Description of Artificial Sequence: Synthetic peptide
  Seed: GMDPRMCSLMQGSTL
GMDFRMMSSMQMSTL

SEQ ID NO: 72639 - protein, 15 aa, Artificial Sequence
  Description of Artificial Sequence: Synthetic peptide
  Seed: GMDPRMCSLMQGSTL
GMDFRMMSSMQNSTL

SEQ ID NO: 72640 - protein, 15 aa, Artificial Sequence
  Description of Artificial Sequence: Synthetic peptide
  Seed: GMDPRMCSLMQGSTL
GMDFRMMSSMQPSTL

SEQ ID NO: 72641 - protein, 15 aa, Artificial Sequence
  Description of Artificial Sequence: Synthetic peptide
  Seed: GMDPRMCSLMQGSTL
GMDFRMMSSMQQSTL

SEQ ID NO: 72642 - protein, 15 aa, Artificial Sequence
  Description of Artificial Sequence: Synthetic peptide
  Seed: GMDPRMCSLMQGSTL
GMDFRMMSSMQRSTL

SEQ ID NO: 72643 - protein, 15 aa, Artificial Sequence
  Description of Artificial Sequence: Synthetic peptide
  Seed: GMDPRMCSLMQGSTL
GMDFRMMSSMQSSTL

SEQ ID NO: 72644 - protein, 15 aa, Artificial Sequence
  Description of Artificial Sequence: Synthetic peptide
  Seed: GMDPRMCSLMQGSTL
GMDFRMMSSMQTSTL

SEQ ID NO: 72645 - protein, 15 aa, Artificial Sequence
  Description of Artificial Sequence: Synthetic peptide
  Seed: GMDPRMCSLMQGSTL
GMDFRMMSSMQVSTL

SEQ ID NO: 72646 - protein, 15 aa, Artificial Sequence
  Description of Artificial Sequence: Synthetic peptide
  Seed: GMDPRMCSLMQGSTL
GMDFRMMSSMQWSTL

SEQ ID NO: 72647 - protein, 15 aa, Artificial Sequence
  Description of Artificial Sequence: Synthetic peptide
  Seed: GMDPRMCSLMQGSTL
GMDFRMMSSMQYSTL

SEQ ID NO: 72648 - protein, 15 aa, Artificial Sequence
  Description of Artificial Sequence: Synthetic peptide
  Seed: GMDPRMCSLMQGSTL
GMDFRMMSTMQASTL

SEQ ID NO: 72649 - protein, 15 aa, Artificial Sequence
  Description of Artificial Sequence: Synthetic peptide
  Seed: GMDPRMCSLMQGSTL
GMDFRMMSTMQCSTL

SEQ ID NO: 72650 - protein, 15 aa, Artificial Sequence
  Description of Artificial Sequence: Synthetic peptide
  Seed: GMDPRMCSLMQGSTL
GMDFRMMSTMQDSTL

SEQ ID NO: 72651 - protein, 15 aa, Artificial Sequence
  Description of Artificial Sequence: Synthetic peptide
  Seed: GMDPRMCSLMQGSTL
GMDFRMMSTMQESTL

SEQ ID NO: 72652 - protein, 15 aa, Artificial Sequence
  Description of Artificial Sequence: Synthetic peptide
  Seed: GMDPRMCSLMQGSTL
GMDFRMMSTMQFSTL

SEQ ID NO: 72653 - protein, 15 aa, Artificial Sequence
  Description of Artificial Sequence: Synthetic peptide
  Seed: GMDPRMCSLMQGSTL
GMDFRMMSTMQGSTL

SEQ ID NO: 72654 - protein, 15 aa, Artificial Sequence
  Description of Artificial Sequence: Synthetic peptide
  Seed: GMDPRMCSLMQGSTL
GMDFRMMSTMQHSTL

SEQ ID NO: 72655 - protein, 15 aa, Artificial Sequence
  Description of Artificial Sequence: Synthetic peptide
  Seed: GMDPRMCSLMQGSTL
GMDFRMMSTMQISTL

SEQ ID NO: 72656 - protein, 15 aa, Artificial Sequence
  Description of Artificial Sequence: Synthetic peptide
  Seed: GMDPRMCSLMQGSTL
GMDFRMMSTMQKSTL

SEQ ID NO: 72657 - protein, 15 aa, Artificial Sequence
  Description of Artificial Sequence: Synthetic peptide
  Seed: GMDPRMCSLMQGSTL
GMDFRMMSTMQLSTL

SEQ ID NO: 72658 - protein, 15 aa, Artificial Sequence
  Description of Artificial Sequence: Synthetic peptide
  Seed: GMDPRMCSLMQGSTL
GMDFRMMSTMQMSTL

SEQ ID NO: 72659 - protein, 15 aa, Artificial Sequence
  Description of Artificial Sequence: Synthetic peptide
  Seed: GMDPRMCSLMQGSTL
GMDFRMMSTMQNSTL

SEQ ID NO: 72660 - protein, 15 aa, Artificial Sequence
  Description of Artificial Sequence: Synthetic peptide
  Seed: GMDPRMCSLMQGSTL
GMDFRMMSTMQPSTL

SEQ ID NO: 72661 - protein, 15 aa, Artificial Sequence
  Description of Artificial Sequence: Synthetic peptide
  Seed: GMDPRMCSLMQGSTL
GMDFRMMSTMQQSTL

SEQ ID NO: 72662 - protein, 15 aa, Artificial Sequence
  Description of Artificial Sequence: Synthetic peptide
  Seed: GMDPRMCSLMQGSTL
GMDFRMMSTMQRSTL

SEQ ID NO: 72663 - protein, 15 aa, Artificial Sequence
  Description of Artificial Sequence: Synthetic peptide
  Seed: GMDPRMCSLMQGSTL
GMDFRMMSTMQSSTL

SEQ ID NO: 72664 - protein, 15 aa, Artificial Sequence
  Description of Artificial Sequence: Synthetic peptide
  Seed: GMDPRMCSLMQGSTL
GMDFRMMSTMQTSTL

SEQ ID NO: 72665 - protein, 15 aa, Artificial Sequence
  Description of Artificial Sequence: Synthetic peptide
  Seed: GMDPRMCSLMQGSTL
GMDFRMMSTMQVSTL

SEQ ID NO: 72666 - protein, 15 aa, Artificial Sequence
  Description of Artificial Sequence: Synthetic peptide
  Seed: GMDPRMCSLMQGSTL
GMDFRMMSTMQWSTL

SEQ ID NO: 72667 - protein, 15 aa, Artificial Sequence
  Description of Artificial Sequence: Synthetic peptide
  Seed: GMDPRMCSLMQGSTL
GMDFRMMSTMQYSTL

SEQ ID NO: 72668 - protein, 15 aa, Artificial Sequence
  Description of Artificial Sequence: Synthetic peptide
  Seed: GMDPRMCSLMQGSTL
GMDFRMMSVMQASTL

SEQ ID NO: 72669 - protein, 15 aa, Artificial Sequence
  Description of Artificial Sequence: Synthetic peptide
  Seed: GMDPRMCSLMQGSTL
GMDFRMMSVMQCSTL

SEQ ID NO: 72670 - protein, 15 aa, Artificial Sequence
  Description of Artificial Sequence: Synthetic peptide
  Seed: GMDPRMCSLMQGSTL
GMDFRMMSVMQDSTL

SEQ ID NO: 72671 - protein, 15 aa, Artificial Sequence
  Description of Artificial Sequence: Synthetic peptide
  Seed: GMDPRMCSLMQGSTL
GMDFRMMSVMQESTL

SEQ ID NO: 72672 - protein, 15 aa, Artificial Sequence
  Description of Artificial Sequence: Synthetic peptide
  Seed: GMDPRMCSLMQGSTL
GMDFRMMSVMQFSTL

SEQ ID NO: 72673 - protein, 15 aa, Artificial Sequence
  Description of Artificial Sequence: Synthetic peptide
  Seed: GMDPRMCSLMQGSTL
GMDFRMMSVMQGSTL

SEQ ID NO: 72674 - protein, 15 aa, Artificial Sequence
  Description of Artificial Sequence: Synthetic peptide
  Seed: GMDPRMCSLMQGSTL
GMDFRMMSVMQHSTL

SEQ ID NO: 72675 - protein, 15 aa, Artificial Sequence
  Description of Artificial Sequence: Synthetic peptide
  Seed: GMDPRMCSLMQGSTL
GMDFRMMSVMQISTL

SEQ ID NO: 72676 - protein, 15 aa, Artificial Sequence
  Description of Artificial Sequence: Synthetic peptide
  Seed: GMDPRMCSLMQGSTL
GMDFRMMSVMQKSTL

SEQ ID NO: 72677 - protein, 15 aa, Artificial Sequence
  Description of Artificial Sequence: Synthetic peptide
  Seed: GMDPRMCSLMQGSTL
GMDFRMMSVMQLSTL

SEQ ID NO: 72678 - protein, 15 aa, Artificial Sequence
  Description of Artificial Sequence: Synthetic peptide
  Seed: GMDPRMCSLMQGSTL
GMDFRMMSVMQMSTL

SEQ ID NO: 72679 - protein, 15 aa, Artificial Sequence
  Description of Artificial Sequence: Synthetic peptide
  Seed: GMDPRMCSLMQGSTL
GMDFRMMSVMQNSTL

SEQ ID NO: 72680 - protein, 15 aa, Artificial Sequence
  Description of Artificial Sequence: Synthetic peptide
  Seed: GMDPRMCSLMQGSTL
GMDFRMMSVMQPSTL

SEQ ID NO: 72681 - protein, 15 aa, Artificial Sequence
  Description of Artificial Sequence: Synthetic peptide
  Seed: GMDPRMCSLMQGSTL
GMDFRMMSVMQQSTL

SEQ ID NO: 72682 - protein, 15 aa, Artificial Sequence
  Description of Artificial Sequence: Synthetic peptide
  Seed: GMDPRMCSLMQGSTL
GMDFRMMSVMQRSTL

SEQ ID NO: 72683 - protein, 15 aa, Artificial Sequence
  Description of Artificial Sequence: Synthetic peptide
  Seed: GMDPRMCSLMQGSTL
GMDFRMMSVMQSSTL

SEQ ID NO: 72684 - protein, 15 aa, Artificial Sequence
  Description of Artificial Sequence: Synthetic peptide
  Seed: GMDPRMCSLMQGSTL
GMDFRMMSVMQTSTL

SEQ ID NO: 72685 - protein, 15 aa, Artificial Sequence
  Description of Artificial Sequence: Synthetic peptide
  Seed: GMDPRMCSLMQGSTL
GMDFRMMSVMQVSTL

SEQ ID NO: 72686 - protein, 15 aa, Artificial Sequence
  Description of Artificial Sequence: Synthetic peptide
  Seed: GMDPRMCSLMQGSTL
GMDFRMMSVMQYSTL

SEQ ID NO: 72687 - protein, 15 aa, Artificial Sequence
  Description of Artificial Sequence: Synthetic peptide
  Seed: GMDPRMCSLMQGSTL
GMDFRMMSWMQASTL

SEQ ID NO: 72688 - protein, 15 aa, Artificial Sequence
  Description of Artificial Sequence: Synthetic peptide
  Seed: GMDPRMCSLMQGSTL
GMDFRMMSWMQGSTL

SEQ ID NO: 72689 - protein, 15 aa, Artificial Sequence
  Description of Artificial Sequence: Synthetic peptide
  Seed: GMDPRMCSLMQGSTL
GMDFRMMSWMQHSTL

SEQ ID NO: 72690 - protein, 15 aa, Artificial Sequence
  Description of Artificial Sequence: Synthetic peptide
  Seed: GMDPRMCSLMQGSTL
GMDFRMMSWMQISTL

SEQ ID NO: 72691 - protein, 15 aa, Artificial Sequence
  Description of Artificial Sequence: Synthetic peptide
  Seed: GMDPRMCSLMQGSTL
GMDFRMMSWMQLSTL

SEQ ID NO: 72692 - protein, 15 aa, Artificial Sequence
  Description of Artificial Sequence: Synthetic peptide
  Seed: GMDPRMCSLMQGSTL
GMDFRMMSWMQMSTL

SEQ ID NO: 72693 - protein, 15 aa, Artificial Sequence
  Description of Artificial Sequence: Synthetic peptide
  Seed: GMDPRMCSLMQGSTL
GMDFRMMSWMQNSTL

SEQ ID NO: 72694 - protein, 15 aa, Artificial Sequence
  Description of Artificial Sequence: Synthetic peptide
  Seed: GMDPRMCSLMQGSTL
GMDFRMMSWMQSSTL

SEQ ID NO: 72695 - protein, 15 aa, Artificial Sequence
  Description of Artificial Sequence: Synthetic peptide
  Seed: GMDPRMCSLMQGSTL
GMDFRMMSWMQTSTL

SEQ ID NO: 72696 - protein, 15 aa, Artificial Sequence
  Description of Artificial Sequence: Synthetic peptide
  Seed: GMDPRMCSLMQGSTL
GMDFRMMSWMQVSTL

SEQ ID NO: 72697 - protein, 15 aa, Artificial Sequence
  Description of Artificial Sequence: Synthetic peptide
  Seed: GMDPRMCSLMQGSTL
GMDFRMMSYMQASTL

SEQ ID NO: 72698 - protein, 15 aa, Artificial Sequence
  Description of Artificial Sequence: Synthetic peptide
  Seed: GMDPRMCSLMQGSTL
GMDFRMMSYMQGSTL

SEQ ID NO: 72699 - protein, 15 aa, Artificial Sequence
  Description of Artificial Sequence: Synthetic peptide
  Seed: GMDPRMCSLMQGSTL
GMDFRMMSYMQHSTL

SEQ ID NO: 72700 - protein, 15 aa, Artificial Sequence
  Description of Artificial Sequence: Synthetic peptide
  Seed: GMDPRMCSLMQGSTL
GMDFRMMSYMQISTL

SEQ ID NO: 72701 - protein, 15 aa, Artificial Sequence
  Description of Artificial Sequence: Synthetic peptide
  Seed: GMDPRMCSLMQGSTL
GMDFRMMSYMQLSTL

SEQ ID NO: 72702 - protein, 15 aa, Artificial Sequence
  Description of Artificial Sequence: Synthetic peptide
  Seed: GMDPRMCSLMQGSTL
GMDFRMMSYMQMSTL

SEQ ID NO: 72703 - protein, 15 aa, Artificial Sequence
  Description of Artificial Sequence: Synthetic peptide
  Seed: GMDPRMCSLMQGSTL
GMDFRMMSYMQNSTL

SEQ ID NO: 72704 - protein, 15 aa, Artificial Sequence
  Description of Artificial Sequence: Synthetic peptide
  Seed: GMDPRMCSLMQGSTL
GMDFRMMSYMQSSTL

SEQ ID NO: 72705 - protein, 15 aa, Artificial Sequence
  Description of Artificial Sequence: Synthetic peptide
  Seed: GMDPRMCSLMQGSTL
GMDFRMMSYMQTSTL

SEQ ID NO: 72706 - protein, 15 aa, Artificial Sequence
  Description of Artificial Sequence: Synthetic peptide
  Seed: GMDPRMCSLMQGSTL
GMDFRMMSYMQVSTL

SEQ ID NO: 72707 - protein, 15 aa, Artificial Sequence
  Description of Artificial Sequence: Synthetic peptide
  Seed: GMDPRMCSLMQGSTL
GMDFRMNSAMQASTL

SEQ ID NO: 72708 - protein, 15 aa, Artificial Sequence
  Description of Artificial Sequence: Synthetic peptide
  Seed: GMDPRMCSLMQGSTL
GMDFRMNSAMQHSTL

SEQ ID NO: 72709 - protein, 15 aa, Artificial Sequence
  Description of Artificial Sequence: Synthetic peptide
  Seed: GMDPRMCSLMQGSTL
GMDFRMNSAMQISTL

SEQ ID NO: 72710 - protein, 15 aa, Artificial Sequence
  Description of Artificial Sequence: Synthetic peptide
  Seed: GMDPRMCSLMQGSTL
GMDFRMNSAMQLSTL

SEQ ID NO: 72711 - protein, 15 aa, Artificial Sequence
  Description of Artificial Sequence: Synthetic peptide
  Seed: GMDPRMCSLMQGSTL
GMDFRMNSAMQMSTL

SEQ ID NO: 72712 - protein, 15 aa, Artificial Sequence
  Description of Artificial Sequence: Synthetic peptide
  Seed: GMDPRMCSLMQGSTL
GMDFRMNSAMQNSTL

SEQ ID NO: 72713 - protein, 15 aa, Artificial Sequence
  Description of Artificial Sequence: Synthetic peptide
  Seed: GMDPRMCSLMQGSTL
GMDFRMNSAMQSSTL

SEQ ID NO: 72714 - protein, 15 aa, Artificial Sequence
  Description of Artificial Sequence: Synthetic peptide
  Seed: GMDPRMCSLMQGSTL
GMDFRMNSAMQTSTL

SEQ ID NO: 72715 - protein, 15 aa, Artificial Sequence
  Description of Artificial Sequence: Synthetic peptide
  Seed: GMDPRMCSLMQGSTL
GMDFRMNSAMQVSTL

SEQ ID NO: 72716 - protein, 15 aa, Artificial Sequence
  Description of Artificial Sequence: Synthetic peptide
  Seed: GMDPRMCSLMQGSTL
GMDFRMNSIMQASTL

SEQ ID NO: 72717 - protein, 15 aa, Artificial Sequence
  Description of Artificial Sequence: Synthetic peptide
  Seed: GMDPRMCSLMQGSTL
GMDFRMNSIMQNSTL

SEQ ID NO: 72718 - protein, 15 aa, Artificial Sequence
  Description of Artificial Sequence: Synthetic peptide
  Seed: GMDPRMCSLMQGSTL
GMDFRMNSIMQSSTL

SEQ ID NO: 72719 - protein, 15 aa, Artificial Sequence
  Description of Artificial Sequence: Synthetic peptide
  Seed: GMDPRMCSLMQGSTL
GMDFRMNSPMQASTL

SEQ ID NO: 72720 - protein, 15 aa, Artificial Sequence
  Description of Artificial Sequence: Synthetic peptide
  Seed: GMDPRMCSLMQGSTL
GMDFRMNSPMQNSTL

SEQ ID NO: 72721 - protein, 15 aa, Artificial Sequence
  Description of Artificial Sequence: Synthetic peptide
  Seed: GMDPRMCSLMQGSTL
GMDFRMNSPMQSSTL

SEQ ID NO: 72722 - protein, 15 aa, Artificial Sequence
  Description of Artificial Sequence: Synthetic peptide
  Seed: GMDPRMCSLMQGSTL
GMDFRMNSSMQNSTL

SEQ ID NO: 72723 - protein, 15 aa, Artificial Sequence
  Description of Artificial Sequence: Synthetic peptide
  Seed: GMDPRMCSLMQGSTL
GMDFRMNSSMQSSTL

SEQ ID NO: 72724 - protein, 15 aa, Artificial Sequence
  Description of Artificial Sequence: Synthetic peptide
  Seed: GMDPRMCSLMQGSTL
GMDFRMNSTMQNSTL

SEQ ID NO: 72725 - protein, 15 aa, Artificial Sequence
  Description of Artificial Sequence: Synthetic peptide
  Seed: GMDPRMCSLMQGSTL
GMDFRMNSVMQASTL

SEQ ID NO: 72726 - protein, 15 aa, Artificial Sequence
  Description of Artificial Sequence: Synthetic peptide
  Seed: GMDPRMCSLMQGSTL
GMDFRMNSVMQMSTL

SEQ ID NO: 72727 - protein, 15 aa, Artificial Sequence
  Description of Artificial Sequence: Synthetic peptide
  Seed: GMDPRMCSLMQGSTL
GMDFRMNSVMQNSTL

SEQ ID NO: 72728 - protein, 15 aa, Artificial Sequence
  Description of Artificial Sequence: Synthetic peptide
  Seed: GMDPRMCSLMQGSTL
GMDFRMNSVMQSSTL

SEQ ID NO: 72729 - protein, 15 aa, Artificial Sequence
  Description of Artificial Sequence: Synthetic peptide
  Seed: GMDPRMCSLMQGSTL
GMDFRMQSAMQASTL

SEQ ID NO: 72730 - protein, 15 aa, Artificial Sequence
  Description of Artificial Sequence: Synthetic peptide
  Seed: GMDPRMCSLMQGSTL
GMDFRMQSAMQCSTL

SEQ ID NO: 72731 - protein, 15 aa, Artificial Sequence
  Description of Artificial Sequence: Synthetic peptide
  Seed: GMDPRMCSLMQGSTL
GMDFRMQSAMQDSTL

SEQ ID NO: 72732 - protein, 15 aa, Artificial Sequence
  Description of Artificial Sequence: Synthetic peptide
  Seed: GMDPRMCSLMQGSTL
GMDFRMQSAMQESTL

SEQ ID NO: 72733 - protein, 15 aa, Artificial Sequence
  Description of Artificial Sequence: Synthetic peptide
  Seed: GMDPRMCSLMQGSTL
GMDFRMQSAMQFSTL

SEQ ID NO: 72734 - protein, 15 aa, Artificial Sequence
  Description of Artificial Sequence: Synthetic peptide
  Seed: GMDPRMCSLMQGSTL
GMDFRMQSAMQGSTL

SEQ ID NO: 72735 - protein, 15 aa, Artificial Sequence
  Description of Artificial Sequence: Synthetic peptide
  Seed: GMDPRMCSLMQGSTL
GMDFRMQSAMQHSTL

SEQ ID NO: 72736 - protein, 15 aa, Artificial Sequence
  Description of Artificial Sequence: Synthetic peptide
  Seed: GMDPRMCSLMQGSTL
GMDFRMQSAMQISTL

SEQ ID NO: 72737 - protein, 15 aa, Artificial Sequence
  Description of Artificial Sequence: Synthetic peptide
  Seed: GMDPRMCSLMQGSTL
GMDFRMQSAMQKSTL

SEQ ID NO: 72738 - protein, 15 aa, Artificial Sequence
  Description of Artificial Sequence: Synthetic peptide
  Seed: GMDPRMCSLMQGSTL
GMDFRMQSAMQLSTL

SEQ ID NO: 72739 - protein, 15 aa, Artificial Sequence
  Description of Artificial Sequence: Synthetic peptide
  Seed: GMDPRMCSLMQGSTL
GMDFRMQSAMQMSTL

SEQ ID NO: 72740 - protein, 15 aa, Artificial Sequence
  Description of Artificial Sequence: Synthetic peptide
  Seed: GMDPRMCSLMQGSTL
GMDFRMQSAMQNSTL

SEQ ID NO: 72741 - protein, 15 aa, Artificial Sequence
  Description of Artificial Sequence: Synthetic peptide
  Seed: GMDPRMCSLMQGSTL
GMDFRMQSAMQPSTL

SEQ ID NO: 72742 - protein, 15 aa, Artificial Sequence
  Description of Artificial Sequence: Synthetic peptide
  Seed: GMDPRMCSLMQGSTL
GMDFRMQSAMQQSTL

SEQ ID NO: 72743 - protein, 15 aa, Artificial Sequence
  Description of Artificial Sequence: Synthetic peptide
  Seed: GMDPRMCSLMQGSTL
GMDFRMQSAMQRSTL

SEQ ID NO: 72744 - protein, 15 aa, Artificial Sequence
  Description of Artificial Sequence: Synthetic peptide
  Seed: GMDPRMCSLMQGSTL
GMDFRMQSAMQSSTL

SEQ ID NO: 72745 - protein, 15 aa, Artificial Sequence
  Description of Artificial Sequence: Synthetic peptide
  Seed: GMDPRMCSLMQGSTL
GMDFRMQSAMQTSTL

SEQ ID NO: 72746 - protein, 15 aa, Artificial Sequence
  Description of Artificial Sequence: Synthetic peptide
  Seed: GMDPRMCSLMQGSTL
GMDFRMQSAMQVSTL

SEQ ID NO: 72747 - protein, 15 aa, Artificial Sequence
  Description of Artificial Sequence: Synthetic peptide
  Seed: GMDPRMCSLMQGSTL
GMDFRMQSAMQWSTL

SEQ ID NO: 72748 - protein, 15 aa, Artificial Sequence
  Description of Artificial Sequence: Synthetic peptide
  Seed: GMDPRMCSLMQGSTL
GMDFRMQSAMQYSTL

SEQ ID NO: 72749 - protein, 15 aa, Artificial Sequence
  Description of Artificial Sequence: Synthetic peptide
  Seed: GMDPRMCSLMQGSTL
GMDFRMQSFMQASTL

SEQ ID NO: 72750 - protein, 15 aa, Artificial Sequence
  Description of Artificial Sequence: Synthetic peptide
  Seed: GMDPRMCSLMQGSTL
GMDFRMQSGMQASTL

SEQ ID NO: 72751 - protein, 15 aa, Artificial Sequence
  Description of Artificial Sequence: Synthetic peptide
  Seed: GMDPRMCSLMQGSTL
GMDFRMQSGMQGSTL

SEQ ID NO: 72752 - protein, 15 aa, Artificial Sequence
  Description of Artificial Sequence: Synthetic peptide
  Seed: GMDPRMCSLMQGSTL
GMDFRMQSGMQHSTL

SEQ ID NO: 72753 - protein, 15 aa, Artificial Sequence
  Description of Artificial Sequence: Synthetic peptide
  Seed: GMDPRMCSLMQGSTL
GMDFRMQSGMQISTL

SEQ ID NO: 72754 - protein, 15 aa, Artificial Sequence
  Description of Artificial Sequence: Synthetic peptide
  Seed: GMDPRMCSLMQGSTL
GMDFRMQSGMQLSTL

SEQ ID NO: 72755 - protein, 15 aa, Artificial Sequence
  Description of Artificial Sequence: Synthetic peptide
  Seed: GMDPRMCSLMQGSTL
GMDFRMQSGMQMSTL

SEQ ID NO: 72756 - protein, 15 aa, Artificial Sequence
  Description of Artificial Sequence: Synthetic peptide
  Seed: GMDPRMCSLMQGSTL
GMDFRMQSGMQNSTL

SEQ ID NO: 72757 - protein, 15 aa, Artificial Sequence
  Description of Artificial Sequence: Synthetic peptide
  Seed: GMDPRMCSLMQGSTL
GMDFRMQSGMQQSTL

SEQ ID NO: 72758 - protein, 15 aa, Artificial Sequence
  Description of Artificial Sequence: Synthetic peptide
  Seed: GMDPRMCSLMQGSTL
GMDFRMQSGMQSSTL

SEQ ID NO: 72759 - protein, 15 aa, Artificial Sequence
  Description of Artificial Sequence: Synthetic peptide
  Seed: GMDPRMCSLMQGSTL
GMDFRMQSGMQTSTL

SEQ ID NO: 72760 - protein, 15 aa, Artificial Sequence
  Description of Artificial Sequence: Synthetic peptide
  Seed: GMDPRMCSLMQGSTL
GMDFRMQSGMQVSTL

SEQ ID NO: 72761 - protein, 15 aa, Artificial Sequence
  Description of Artificial Sequence: Synthetic peptide
  Seed: GMDPRMCSLMQGSTL
GMDFRMQSIMQASTL

SEQ ID NO: 72762 - protein, 15 aa, Artificial Sequence
  Description of Artificial Sequence: Synthetic peptide
  Seed: GMDPRMCSLMQGSTL
GMDFRMQSIMQCSTL

SEQ ID NO: 72763 - protein, 15 aa, Artificial Sequence
  Description of Artificial Sequence: Synthetic peptide
  Seed: GMDPRMCSLMQGSTL
GMDFRMQSIMQDSTL

SEQ ID NO: 72764 - protein, 15 aa, Artificial Sequence
  Description of Artificial Sequence: Synthetic peptide
  Seed: GMDPRMCSLMQGSTL
GMDFRMQSIMQESTL

SEQ ID NO: 72765 - protein, 15 aa, Artificial Sequence
  Description of Artificial Sequence: Synthetic peptide
  Seed: GMDPRMCSLMQGSTL
GMDFRMQSIMQGSTL

SEQ ID NO: 72766 - protein, 15 aa, Artificial Sequence
  Description of Artificial Sequence: Synthetic peptide
  Seed: GMDPRMCSLMQGSTL
GMDFRMQSIMQHSTL

SEQ ID NO: 72767 - protein, 15 aa, Artificial Sequence
  Description of Artificial Sequence: Synthetic peptide
  Seed: GMDPRMCSLMQGSTL
GMDFRMQSIMQISTL

SEQ ID NO: 72768 - protein, 15 aa, Artificial Sequence
  Description of Artificial Sequence: Synthetic peptide
  Seed: GMDPRMCSLMQGSTL
GMDFRMQSIMQLSTL

SEQ ID NO: 72769 - protein, 15 aa, Artificial Sequence
  Description of Artificial Sequence: Synthetic peptide
  Seed: GMDPRMCSLMQGSTL
GMDFRMQSIMQMSTL

SEQ ID NO: 72770 - protein, 15 aa, Artificial Sequence
  Description of Artificial Sequence: Synthetic peptide
  Seed: GMDPRMCSLMQGSTL
GMDFRMQSIMQNSTL

SEQ ID NO: 72771 - protein, 15 aa, Artificial Sequence
  Description of Artificial Sequence: Synthetic peptide
  Seed: GMDPRMCSLMQGSTL
GMDFRMQSIMQPSTL

SEQ ID NO: 72772 - protein, 15 aa, Artificial Sequence
  Description of Artificial Sequence: Synthetic peptide
  Seed: GMDPRMCSLMQGSTL
GMDFRMQSIMQQSTL

SEQ ID NO: 72773 - protein, 15 aa, Artificial Sequence
  Description of Artificial Sequence: Synthetic peptide
  Seed: GMDPRMCSLMQGSTL
GMDFRMQSIMQSSTL

SEQ ID NO: 72774 - protein, 15 aa, Artificial Sequence
  Description of Artificial Sequence: Synthetic peptide
  Seed: GMDPRMCSLMQGSTL
GMDFRMQSIMQTSTL

SEQ ID NO: 72775 - protein, 15 aa, Artificial Sequence
  Description of Artificial Sequence: Synthetic peptide
  Seed: GMDPRMCSLMQGSTL
GMDFRMQSIMQVSTL

SEQ ID NO: 72776 - protein, 15 aa, Artificial Sequence
  Description of Artificial Sequence: Synthetic peptide
  Seed: GMDPRMCSLMQGSTL
GMDFRMQSLMQASTL

SEQ ID NO: 72777 - protein, 15 aa, Artificial Sequence
  Description of Artificial Sequence: Synthetic peptide
  Seed: GMDPRMCSLMQGSTL
GMDFRMQSLMQGSTL

SEQ ID NO: 72778 - protein, 15 aa, Artificial Sequence
  Description of Artificial Sequence: Synthetic peptide
  Seed: GMDPRMCSLMQGSTL
GMDFRMQSLMQHSTL

SEQ ID NO: 72779 - protein, 15 aa, Artificial Sequence
  Description of Artificial Sequence: Synthetic peptide
  Seed: GMDPRMCSLMQGSTL
GMDFRMQSLMQISTL

SEQ ID NO: 72780 - protein, 15 aa, Artificial Sequence
  Description of Artificial Sequence: Synthetic peptide
  Seed: GMDPRMCSLMQGSTL
GMDFRMQSLMQLSTL

SEQ ID NO: 72781 - protein, 15 aa, Artificial Sequence
  Description of Artificial Sequence: Synthetic peptide
  Seed: GMDPRMCSLMQGSTL
GMDFRMQSLMQMSTL

SEQ ID NO: 72782 - protein, 15 aa, Artificial Sequence
  Description of Artificial Sequence: Synthetic peptide
  Seed: GMDPRMCSLMQGSTL
GMDFRMQSLMQNSTL

SEQ ID NO: 72783 - protein, 15 aa, Artificial Sequence
  Description of Artificial Sequence: Synthetic peptide
  Seed: GMDPRMCSLMQGSTL
GMDFRMQSLMQSSTL

SEQ ID NO: 72784 - protein, 15 aa, Artificial Sequence
  Description of Artificial Sequence: Synthetic peptide
  Seed: GMDPRMCSLMQGSTL
GMDFRMQSLMQTSTL

SEQ ID NO: 72785 - protein, 15 aa, Artificial Sequence
  Description of Artificial Sequence: Synthetic peptide
  Seed: GMDPRMCSLMQGSTL
GMDFRMQSLMQVSTL

SEQ ID NO: 72786 - protein, 15 aa, Artificial Sequence
  Description of Artificial Sequence: Synthetic peptide
  Seed: GMDPRMCSLMQGSTL
GMDFRMQSMMQASTL

SEQ ID NO: 72787 - protein, 15 aa, Artificial Sequence
  Description of Artificial Sequence: Synthetic peptide
  Seed: GMDPRMCSLMQGSTL
GMDFRMQSMMQGSTL

SEQ ID NO: 72788 - protein, 15 aa, Artificial Sequence
  Description of Artificial Sequence: Synthetic peptide
  Seed: GMDPRMCSLMQGSTL
GMDFRMQSMMQHSTL

SEQ ID NO: 72789 - protein, 15 aa, Artificial Sequence
  Description of Artificial Sequence: Synthetic peptide
  Seed: GMDPRMCSLMQGSTL
GMDFRMQSMMQISTL

SEQ ID NO: 72790 - protein, 15 aa, Artificial Sequence
  Description of Artificial Sequence: Synthetic peptide
  Seed: GMDPRMCSLMQGSTL
GMDFRMQSMMQLSTL

SEQ ID NO: 72791 - protein, 15 aa, Artificial Sequence
  Description of Artificial Sequence: Synthetic peptide
  Seed: GMDPRMCSLMQGSTL
GMDFRMQSMMQMSTL

SEQ ID NO: 72792 - protein, 15 aa, Artificial Sequence
  Description of Artificial Sequence: Synthetic peptide
  Seed: GMDPRMCSLMQGSTL
GMDFRMQSMMQNSTL

SEQ ID NO: 72793 - protein, 15 aa, Artificial Sequence
  Description of Artificial Sequence: Synthetic peptide
  Seed: GMDPRMCSLMQGSTL
GMDFRMQSMMQSSTL

SEQ ID NO: 72794 - protein, 15 aa, Artificial Sequence
  Description of Artificial Sequence: Synthetic peptide
  Seed: GMDPRMCSLMQGSTL
GMDFRMQSMMQTSTL

SEQ ID NO: 72795 - protein, 15 aa, Artificial Sequence
  Description of Artificial Sequence: Synthetic peptide
  Seed: GMDPRMCSLMQGSTL
GMDFRMQSMMQVSTL

SEQ ID NO: 72796 - protein, 15 aa, Artificial Sequence
  Description of Artificial Sequence: Synthetic peptide
  Seed: GMDPRMCSLMQGSTL
GMDFRMQSNMQASTL

SEQ ID NO: 72797 - protein, 15 aa, Artificial Sequence
  Description of Artificial Sequence: Synthetic peptide
  Seed: GMDPRMCSLMQGSTL
GMDFRMQSNMQGSTL

SEQ ID NO: 72798 - protein, 15 aa, Artificial Sequence
  Description of Artificial Sequence: Synthetic peptide
  Seed: GMDPRMCSLMQGSTL
GMDFRMQSNMQHSTL

SEQ ID NO: 72799 - protein, 15 aa, Artificial Sequence
  Description of Artificial Sequence: Synthetic peptide
  Seed: GMDPRMCSLMQGSTL
GMDFRMQSNMQISTL

SEQ ID NO: 72800 - protein, 15 aa, Artificial Sequence
  Description of Artificial Sequence: Synthetic peptide
  Seed: GMDPRMCSLMQGSTL
GMDFRMQSNMQLSTL

SEQ ID NO: 72801 - protein, 15 aa, Artificial Sequence
  Description of Artificial Sequence: Synthetic peptide
  Seed: GMDPRMCSLMQGSTL
GMDFRMQSNMQMSTL

SEQ ID NO: 72802 - protein, 15 aa, Artificial Sequence
  Description of Artificial Sequence: Synthetic peptide
  Seed: GMDPRMCSLMQGSTL
GMDFRMQSNMQNSTL

SEQ ID NO: 72803 - protein, 15 aa, Artificial Sequence
  Description of Artificial Sequence: Synthetic peptide
  Seed: GMDPRMCSLMQGSTL
GMDFRMQSNMQSSTL

SEQ ID NO: 72804 - protein, 15 aa, Artificial Sequence
  Description of Artificial Sequence: Synthetic peptide
  Seed: GMDPRMCSLMQGSTL
GMDFRMQSNMQTSTL

SEQ ID NO: 72805 - protein, 15 aa, Artificial Sequence
  Description of Artificial Sequence: Synthetic peptide
  Seed: GMDPRMCSLMQGSTL
GMDFRMQSNMQVSTL

SEQ ID NO: 72806 - protein, 15 aa, Artificial Sequence
  Description of Artificial Sequence: Synthetic peptide
  Seed: GMDPRMCSLMQGSTL
GMDFRMQSPMQASTL

SEQ ID NO: 72807 - protein, 15 aa, Artificial Sequence
  Description of Artificial Sequence: Synthetic peptide
  Seed: GMDPRMCSLMQGSTL
GMDFRMQSPMQCSTL

SEQ ID NO: 72808 - protein, 15 aa, Artificial Sequence
  Description of Artificial Sequence: Synthetic peptide
  Seed: GMDPRMCSLMQGSTL
GMDFRMQSPMQDSTL

SEQ ID NO: 72809 - protein, 15 aa, Artificial Sequence
  Description of Artificial Sequence: Synthetic peptide
  Seed: GMDPRMCSLMQGSTL
GMDFRMQSPMQESTL

SEQ ID NO: 72810 - protein, 15 aa, Artificial Sequence
  Description of Artificial Sequence: Synthetic peptide
  Seed: GMDPRMCSLMQGSTL
GMDFRMQSPMQFSTL

SEQ ID NO: 72811 - protein, 15 aa, Artificial Sequence
  Description of Artificial Sequence: Synthetic peptide
  Seed: GMDPRMCSLMQGSTL
GMDFRMQSPMQGSTL

SEQ ID NO: 72812 - protein, 15 aa, Artificial Sequence
  Description of Artificial Sequence: Synthetic peptide
  Seed: GMDPRMCSLMQGSTL
GMDFRMQSPMQHSTL

SEQ ID NO: 72813 - protein, 15 aa, Artificial Sequence
  Description of Artificial Sequence: Synthetic peptide
  Seed: GMDPRMCSLMQGSTL
GMDFRMQSPMQISTL

SEQ ID NO: 72814 - protein, 15 aa, Artificial Sequence
  Description of Artificial Sequence: Synthetic peptide
  Seed: GMDPRMCSLMQGSTL
GMDFRMQSPMQLSTL

SEQ ID NO: 72815 - protein, 15 aa, Artificial Sequence
  Description of Artificial Sequence: Synthetic peptide
  Seed: GMDPRMCSLMQGSTL
GMDFRMQSPMQMSTL

SEQ ID NO: 72816 - protein, 15 aa, Artificial Sequence
  Description of Artificial Sequence: Synthetic peptide
  Seed: GMDPRMCSLMQGSTL
GMDFRMQSPMQNSTL

SEQ ID NO: 72817 - protein, 15 aa, Artificial Sequence
  Description of Artificial Sequence: Synthetic peptide
  Seed: GMDPRMCSLMQGSTL
GMDFRMQSPMQPSTL

SEQ ID NO: 72818 - protein, 15 aa, Artificial Sequence
  Description of Artificial Sequence: Synthetic peptide
  Seed: GMDPRMCSLMQGSTL
GMDFRMQSPMQQSTL

SEQ ID NO: 72819 - protein, 15 aa, Artificial Sequence
  Description of Artificial Sequence: Synthetic peptide
  Seed: GMDPRMCSLMQGSTL
GMDFRMQSPMQSSTL

SEQ ID NO: 72820 - protein, 15 aa, Artificial Sequence
  Description of Artificial Sequence: Synthetic peptide
  Seed: GMDPRMCSLMQGSTL
GMDFRMQSPMQTSTL

SEQ ID NO: 72821 - protein, 15 aa, Artificial Sequence
  Description of Artificial Sequence: Synthetic peptide
  Seed: GMDPRMCSLMQGSTL
GMDFRMQSPMQVSTL

SEQ ID NO: 72822 - protein, 15 aa, Artificial Sequence
  Description of Artificial Sequence: Synthetic peptide
  Seed: GMDPRMCSLMQGSTL
GMDFRMQSPMQWSTL

SEQ ID NO: 72823 - protein, 15 aa, Artificial Sequence
  Description of Artificial Sequence: Synthetic peptide
  Seed: GMDPRMCSLMQGSTL
GMDFRMQSPMQYSTL

SEQ ID NO: 72824 - protein, 15 aa, Artificial Sequence
  Description of Artificial Sequence: Synthetic peptide
  Seed: GMDPRMCSLMQGSTL
GMDFRMQSQMQSSTL

SEQ ID NO: 72825 - protein, 15 aa, Artificial Sequence
  Description of Artificial Sequence: Synthetic peptide
  Seed: GMDPRMCSLMQGSTL
GMDFRMQSSMQASTL

SEQ ID NO: 72826 - protein, 15 aa, Artificial Sequence
  Description of Artificial Sequence: Synthetic peptide
  Seed: GMDPRMCSLMQGSTL
GMDFRMQSSMQCSTL

SEQ ID NO: 72827 - protein, 15 aa, Artificial Sequence
  Description of Artificial Sequence: Synthetic peptide
  Seed: GMDPRMCSLMQGSTL
GMDFRMQSSMQDSTL

SEQ ID NO: 72828 - protein, 15 aa, Artificial Sequence
  Description of Artificial Sequence: Synthetic peptide
  Seed: GMDPRMCSLMQGSTL
GMDFRMQSSMQESTL

SEQ ID NO: 72829 - protein, 15 aa, Artificial Sequence
  Description of Artificial Sequence: Synthetic peptide
  Seed: GMDPRMCSLMQGSTL
GMDFRMQSSMQGSTL

SEQ ID NO: 72830 - protein, 15 aa, Artificial Sequence
  Description of Artificial Sequence: Synthetic peptide
  Seed: GMDPRMCSLMQGSTL
GMDFRMQSSMQHSTL

SEQ ID NO: 72831 - protein, 15 aa, Artificial Sequence
  Description of Artificial Sequence: Synthetic peptide
  Seed: GMDPRMCSLMQGSTL
GMDFRMQSSMQISTL

SEQ ID NO: 72832 - protein, 15 aa, Artificial Sequence
  Description of Artificial Sequence: Synthetic peptide
  Seed: GMDPRMCSLMQGSTL
GMDFRMQSSMQLSTL

SEQ ID NO: 72833 - protein, 15 aa, Artificial Sequence
  Description of Artificial Sequence: Synthetic peptide
  Seed: GMDPRMCSLMQGSTL
GMDFRMQSSMQMSTL

SEQ ID NO: 72834 - protein, 15 aa, Artificial Sequence
  Description of Artificial Sequence: Synthetic peptide
  Seed: GMDPRMCSLMQGSTL
GMDFRMQSSMQNSTL

SEQ ID NO: 72835 - protein, 15 aa, Artificial Sequence
  Description of Artificial Sequence: Synthetic peptide
  Seed: GMDPRMCSLMQGSTL
GMDFRMQSSMQPSTL

SEQ ID NO: 72836 - protein, 15 aa, Artificial Sequence
  Description of Artificial Sequence: Synthetic peptide
  Seed: GMDPRMCSLMQGSTL
GMDFRMQSSMQQSTL

SEQ ID NO: 72837 - protein, 15 aa, Artificial Sequence
  Description of Artificial Sequence: Synthetic peptide
  Seed: GMDPRMCSLMQGSTL
GMDFRMQSSMQSSTL

SEQ ID NO: 72838 - protein, 15 aa, Artificial Sequence
  Description of Artificial Sequence: Synthetic peptide
  Seed: GMDPRMCSLMQGSTL
GMDFRMQSSMQTSTL

SEQ ID NO: 72839 - protein, 15 aa, Artificial Sequence
  Description of Artificial Sequence: Synthetic peptide
  Seed: GMDPRMCSLMQGSTL
GMDFRMQSSMQVSTL

SEQ ID NO: 72840 - protein, 15 aa, Artificial Sequence
  Description of Artificial Sequence: Synthetic peptide
  Seed: GMDPRMCSLMQGSTL
GMDFRMQSTMQASTL

SEQ ID NO: 72841 - protein, 15 aa, Artificial Sequence
  Description of Artificial Sequence: Synthetic peptide
  Seed: GMDPRMCSLMQGSTL
GMDFRMQSTMQCSTL

SEQ ID NO: 72842 - protein, 15 aa, Artificial Sequence
  Description of Artificial Sequence: Synthetic peptide
  Seed: GMDPRMCSLMQGSTL
GMDFRMQSTMQDSTL

SEQ ID NO: 72843 - protein, 15 aa, Artificial Sequence
  Description of Artificial Sequence: Synthetic peptide
  Seed: GMDPRMCSLMQGSTL
GMDFRMQSTMQESTL

SEQ ID NO: 72844 - protein, 15 aa, Artificial Sequence
  Description of Artificial Sequence: Synthetic peptide
  Seed: GMDPRMCSLMQGSTL
GMDFRMQSTMQFSTL

SEQ ID NO: 72845 - protein, 15 aa, Artificial Sequence
  Description of Artificial Sequence: Synthetic peptide
  Seed: GMDPRMCSLMQGSTL
GMDFRMQSTMQGSTL

SEQ ID NO: 72846 - protein, 15 aa, Artificial Sequence
  Description of Artificial Sequence: Synthetic peptide
  Seed: GMDPRMCSLMQGSTL
GMDFRMQSTMQHSTL

SEQ ID NO: 72847 - protein, 15 aa, Artificial Sequence
  Description of Artificial Sequence: Synthetic peptide
  Seed: GMDPRMCSLMQGSTL
GMDFRMQSTMQISTL

SEQ ID NO: 72848 - protein, 15 aa, Artificial Sequence
  Description of Artificial Sequence: Synthetic peptide
  Seed: GMDPRMCSLMQGSTL
GMDFRMQSTMQLSTL

SEQ ID NO: 72849 - protein, 15 aa, Artificial Sequence
  Description of Artificial Sequence: Synthetic peptide
  Seed: GMDPRMCSLMQGSTL
GMDFRMQSTMQMSTL

SEQ ID NO: 72850 - protein, 15 aa, Artificial Sequence
  Description of Artificial Sequence: Synthetic peptide
  Seed: GMDPRMCSLMQGSTL
GMDFRMQSTMQNSTL

SEQ ID NO: 72851 - protein, 15 aa, Artificial Sequence
  Description of Artificial Sequence: Synthetic peptide
  Seed: GMDPRMCSLMQGSTL
GMDFRMQSTMQPSTL

SEQ ID NO: 72852 - protein, 15 aa, Artificial Sequence
  Description of Artificial Sequence: Synthetic peptide
  Seed: GMDPRMCSLMQGSTL
GMDFRMQSTMQQSTL

SEQ ID NO: 72853 - protein, 15 aa, Artificial Sequence
  Description of Artificial Sequence: Synthetic peptide
  Seed: GMDPRMCSLMQGSTL
GMDFRMQSTMQSSTL

SEQ ID NO: 72854 - protein, 15 aa, Artificial Sequence
  Description of Artificial Sequence: Synthetic peptide
  Seed: GMDPRMCSLMQGSTL
GMDFRMQSTMQTSTL

SEQ ID NO: 72855 - protein, 15 aa, Artificial Sequence
  Description of Artificial Sequence: Synthetic peptide
  Seed: GMDPRMCSLMQGSTL
GMDFRMQSTMQVSTL

SEQ ID NO: 72856 - protein, 15 aa, Artificial Sequence
  Description of Artificial Sequence: Synthetic peptide
  Seed: GMDPRMCSLMQGSTL
GMDFRMQSTMQYSTL

SEQ ID NO: 72857 - protein, 15 aa, Artificial Sequence
  Description of Artificial Sequence: Synthetic peptide
  Seed: GMDPRMCSLMQGSTL
GMDFRMQSVMQASTL

SEQ ID NO: 72858 - protein, 15 aa, Artificial Sequence
  Description of Artificial Sequence: Synthetic peptide
  Seed: GMDPRMCSLMQGSTL
GMDFRMQSVMQCSTL

SEQ ID NO: 72859 - protein, 15 aa, Artificial Sequence
  Description of Artificial Sequence: Synthetic peptide
  Seed: GMDPRMCSLMQGSTL
GMDFRMQSVMQDSTL

SEQ ID NO: 72860 - protein, 15 aa, Artificial Sequence
  Description of Artificial Sequence: Synthetic peptide
  Seed: GMDPRMCSLMQGSTL
GMDFRMQSVMQESTL

SEQ ID NO: 72861 - protein, 15 aa, Artificial Sequence
  Description of Artificial Sequence: Synthetic peptide
  Seed: GMDPRMCSLMQGSTL
GMDFRMQSVMQFSTL

SEQ ID NO: 72862 - protein, 15 aa, Artificial Sequence
  Description of Artificial Sequence: Synthetic peptide
  Seed: GMDPRMCSLMQGSTL
GMDFRMQSVMQGSTL

SEQ ID NO: 72863 - protein, 15 aa, Artificial Sequence
  Description of Artificial Sequence: Synthetic peptide
  Seed: GMDPRMCSLMQGSTL
GMDFRMQSVMQHSTL

SEQ ID NO: 72864 - protein, 15 aa, Artificial Sequence
  Description of Artificial Sequence: Synthetic peptide
  Seed: GMDPRMCSLMQGSTL
GMDFRMQSVMQISTL

SEQ ID NO: 72865 - protein, 15 aa, Artificial Sequence
  Description of Artificial Sequence: Synthetic peptide
  Seed: GMDPRMCSLMQGSTL
GMDFRMQSVMQLSTL

SEQ ID NO: 72866 - protein, 15 aa, Artificial Sequence
  Description of Artificial Sequence: Synthetic peptide
  Seed: GMDPRMCSLMQGSTL
GMDFRMQSVMQMSTL

SEQ ID NO: 72867 - protein, 15 aa, Artificial Sequence
  Description of Artificial Sequence: Synthetic peptide
  Seed: GMDPRMCSLMQGSTL
GMDFRMQSVMQNSTL

SEQ ID NO: 72868 - protein, 15 aa, Artificial Sequence
  Description of Artificial Sequence: Synthetic peptide
  Seed: GMDPRMCSLMQGSTL
GMDFRMQSVMQPSTL

SEQ ID NO: 72869 - protein, 15 aa, Artificial Sequence
  Description of Artificial Sequence: Synthetic peptide
  Seed: GMDPRMCSLMQGSTL
GMDFRMQSVMQQSTL

SEQ ID NO: 72870 - protein, 15 aa, Artificial Sequence
  Description of Artificial Sequence: Synthetic peptide
  Seed: GMDPRMCSLMQGSTL
GMDFRMQSVMQSSTL

SEQ ID NO: 72871 - protein, 15 aa, Artificial Sequence
  Description of Artificial Sequence: Synthetic peptide
  Seed: GMDPRMCSLMQGSTL
GMDFRMQSVMQTSTL

SEQ ID NO: 72872 - protein, 15 aa, Artificial Sequence
  Description of Artificial Sequence: Synthetic peptide
  Seed: GMDPRMCSLMQGSTL
GMDFRMQSVMQVSTL

SEQ ID NO: 72873 - protein, 15 aa, Artificial Sequence
  Description of Artificial Sequence: Synthetic peptide
  Seed: GMDPRMCSLMQGSTL
GMDFRMSSAMQASTL

SEQ ID NO: 72874 - protein, 15 aa, Artificial Sequence
  Description of Artificial Sequence: Synthetic peptide
  Seed: GMDPRMCSLMQGSTL
GMDFRMSSAMQCSTL

SEQ ID NO: 72875 - protein, 15 aa, Artificial Sequence
  Description of Artificial Sequence: Synthetic peptide
  Seed: GMDPRMCSLMQGSTL
GMDFRMSSAMQDSTL

SEQ ID NO: 72876 - protein, 15 aa, Artificial Sequence
  Description of Artificial Sequence: Synthetic peptide
  Seed: GMDPRMCSLMQGSTL
GMDFRMSSAMQESTL

SEQ ID NO: 72877 - protein, 15 aa, Artificial Sequence
  Description of Artificial Sequence: Synthetic peptide
  Seed: GMDPRMCSLMQGSTL
GMDFRMSSAMQFSTL

SEQ ID NO: 72878 - protein, 15 aa, Artificial Sequence
  Description of Artificial Sequence: Synthetic peptide
  Seed: GMDPRMCSLMQGSTL
GMDFRMSSAMQGSTL

SEQ ID NO: 72879 - protein, 15 aa, Artificial Sequence
  Description of Artificial Sequence: Synthetic peptide
  Seed: GMDPRMCSLMQGSTL
GMDFRMSSAMQHSTL

SEQ ID NO: 72880 - protein, 15 aa, Artificial Sequence
  Description of Artificial Sequence: Synthetic peptide
  Seed: GMDPRMCSLMQGSTL
GMDFRMSSAMQISTL

SEQ ID NO: 72881 - protein, 15 aa, Artificial Sequence
  Description of Artificial Sequence: Synthetic peptide
  Seed: GMDPRMCSLMQGSTL
GMDFRMSSAMQKSTL

SEQ ID NO: 72882 - protein, 15 aa, Artificial Sequence
  Description of Artificial Sequence: Synthetic peptide
  Seed: GMDPRMCSLMQGSTL
GMDFRMSSAMQLSTL

SEQ ID NO: 72883 - protein, 15 aa, Artificial Sequence
  Description of Artificial Sequence: Synthetic peptide
  Seed: GMDPRMCSLMQGSTL
GMDFRMSSAMQMSTL

SEQ ID NO: 72884 - protein, 15 aa, Artificial Sequence
  Description of Artificial Sequence: Synthetic peptide
  Seed: GMDPRMCSLMQGSTL
GMDFRMSSAMQNSTL

SEQ ID NO: 72885 - protein, 15 aa, Artificial Sequence
  Description of Artificial Sequence: Synthetic peptide
  Seed: GMDPRMCSLMQGSTL
GMDFRMSSAMQPSTL

SEQ ID NO: 72886 - protein, 15 aa, Artificial Sequence
  Description of Artificial Sequence: Synthetic peptide
  Seed: GMDPRMCSLMQGSTL
GMDFRMSSAMQQSTL

SEQ ID NO: 72887 - protein, 15 aa, Artificial Sequence
  Description of Artificial Sequence: Synthetic peptide
  Seed: GMDPRMCSLMQGSTL
GMDFRMSSAMQRSTL

SEQ ID NO: 72888 - protein, 15 aa, Artificial Sequence
  Description of Artificial Sequence: Synthetic peptide
  Seed: GMDPRMCSLMQGSTL
GMDFRMSSAMQSSTL

SEQ ID NO: 72889 - protein, 15 aa, Artificial Sequence
  Description of Artificial Sequence: Synthetic peptide
  Seed: GMDPRMCSLMQGSTL
GMDFRMSSAMQTSTL

SEQ ID NO: 72890 - protein, 15 aa, Artificial Sequence
  Description of Artificial Sequence: Synthetic peptide
  Seed: GMDPRMCSLMQGSTL
GMDFRMSSAMQVSTL

SEQ ID NO: 72891 - protein, 15 aa, Artificial Sequence
  Description of Artificial Sequence: Synthetic peptide
  Seed: GMDPRMCSLMQGSTL
GMDFRMSSAMQWSTL

SEQ ID NO: 72892 - protein, 15 aa, Artificial Sequence
  Description of Artificial Sequence: Synthetic peptide
  Seed: GMDPRMCSLMQGSTL
GMDFRMSSAMQYSTL

SEQ ID NO: 72893 - protein, 15 aa, Artificial Sequence
  Description of Artificial Sequence: Synthetic peptide
  Seed: GMDPRMCSLMQGSTL
GMDFRMSSGMQASTL

SEQ ID NO: 72894 - protein, 15 aa, Artificial Sequence
  Description of Artificial Sequence: Synthetic peptide
  Seed: GMDPRMCSLMQGSTL
GMDFRMSSGMQGSTL

SEQ ID NO: 72895 - protein, 15 aa, Artificial Sequence
  Description of Artificial Sequence: Synthetic peptide
  Seed: GMDPRMCSLMQGSTL
GMDFRMSSGMQHSTL

SEQ ID NO: 72896 - protein, 15 aa, Artificial Sequence
  Description of Artificial Sequence: Synthetic peptide
  Seed: GMDPRMCSLMQGSTL
GMDFRMSSGMQISTL

SEQ ID NO: 72897 - protein, 15 aa, Artificial Sequence
  Description of Artificial Sequence: Synthetic peptide
  Seed: GMDPRMCSLMQGSTL
GMDFRMSSGMQLSTL

SEQ ID NO: 72898 - protein, 15 aa, Artificial Sequence
  Description of Artificial Sequence: Synthetic peptide
  Seed: GMDPRMCSLMQGSTL
GMDFRMSSGMQMSTL

SEQ ID NO: 72899 - protein, 15 aa, Artificial Sequence
  Description of Artificial Sequence: Synthetic peptide
  Seed: GMDPRMCSLMQGSTL
GMDFRMSSGMQNSTL

SEQ ID NO: 72900 - protein, 15 aa, Artificial Sequence
  Description of Artificial Sequence: Synthetic peptide
  Seed: GMDPRMCSLMQGSTL
GMDFRMSSGMQQSTL

SEQ ID NO: 72901 - protein, 15 aa, Artificial Sequence
  Description of Artificial Sequence: Synthetic peptide
  Seed: GMDPRMCSLMQGSTL
GMDFRMSSGMQSSTL

SEQ ID NO: 72902 - protein, 15 aa, Artificial Sequence
  Description of Artificial Sequence: Synthetic peptide
  Seed: GMDPRMCSLMQGSTL
GMDFRMSSGMQTSTL

SEQ ID NO: 72903 - protein, 15 aa, Artificial Sequence
  Description of Artificial Sequence: Synthetic peptide
  Seed: GMDPRMCSLMQGSTL
GMDFRMSSGMQVSTL

SEQ ID NO: 72904 - protein, 15 aa, Artificial Sequence
  Description of Artificial Sequence: Synthetic peptide
  Seed: GMDPRMCSLMQGSTL
GMDFRMSSIMQASTL

SEQ ID NO: 72905 - protein, 15 aa, Artificial Sequence
  Description of Artificial Sequence: Synthetic peptide
  Seed: GMDPRMCSLMQGSTL
GMDFRMSSIMQGSTL

SEQ ID NO: 72906 - protein, 15 aa, Artificial Sequence
  Description of Artificial Sequence: Synthetic peptide
  Seed: GMDPRMCSLMQGSTL
GMDFRMSSIMQHSTL

SEQ ID NO: 72907 - protein, 15 aa, Artificial Sequence
  Description of Artificial Sequence: Synthetic peptide
  Seed: GMDPRMCSLMQGSTL
GMDFRMSSIMQISTL

SEQ ID NO: 72908 - protein, 15 aa, Artificial Sequence
  Description of Artificial Sequence: Synthetic peptide
  Seed: GMDPRMCSLMQGSTL
GMDFRMSSIMQLSTL

SEQ ID NO: 72909 - protein, 15 aa, Artificial Sequence
  Description of Artificial Sequence: Synthetic peptide
  Seed: GMDPRMCSLMQGSTL
GMDFRMSSIMQMSTL

SEQ ID NO: 72910 - protein, 15 aa, Artificial Sequence
  Description of Artificial Sequence: Synthetic peptide
  Seed: GMDPRMCSLMQGSTL
GMDFRMSSIMQNSTL

SEQ ID NO: 72911 - protein, 15 aa, Artificial Sequence
  Description of Artificial Sequence: Synthetic peptide
  Seed: GMDPRMCSLMQGSTL
GMDFRMSSIMQQSTL

SEQ ID NO: 72912 - protein, 15 aa, Artificial Sequence
  Description of Artificial Sequence: Synthetic peptide
  Seed: GMDPRMCSLMQGSTL
GMDFRMSSIMQSSTL

SEQ ID NO: 72913 - protein, 15 aa, Artificial Sequence
  Description of Artificial Sequence: Synthetic peptide
  Seed: GMDPRMCSLMQGSTL
GMDFRMSSIMQTSTL

SEQ ID NO: 72914 - protein, 15 aa, Artificial Sequence
  Description of Artificial Sequence: Synthetic peptide
  Seed: GMDPRMCSLMQGSTL
GMDFRMSSIMQVSTL

SEQ ID NO: 72915 - protein, 15 aa, Artificial Sequence
  Description of Artificial Sequence: Synthetic peptide
  Seed: GMDPRMCSLMQGSTL
GMDFRMSSLMQASTL

SEQ ID NO: 72916 - protein, 15 aa, Artificial Sequence
  Description of Artificial Sequence: Synthetic peptide
  Seed: GMDPRMCSLMQGSTL
GMDFRMSSLMQMSTL

SEQ ID NO: 72917 - protein, 15 aa, Artificial Sequence
  Description of Artificial Sequence: Synthetic peptide
  Seed: GMDPRMCSLMQGSTL
GMDFRMSSLMQNSTL

SEQ ID NO: 72918 - protein, 15 aa, Artificial Sequence
  Description of Artificial Sequence: Synthetic peptide
  Seed: GMDPRMCSLMQGSTL
GMDFRMSSLMQSSTL

SEQ ID NO: 72919 - protein, 15 aa, Artificial Sequence
  Description of Artificial Sequence: Synthetic peptide
  Seed: GMDPRMCSLMQGSTL
GMDFRMSSLMQTSTL

SEQ ID NO: 72920 - protein, 15 aa, Artificial Sequence
  Description of Artificial Sequence: Synthetic peptide
  Seed: GMDPRMCSLMQGSTL
GMDFRMSSLMQVSTL

SEQ ID NO: 72921 - protein, 15 aa, Artificial Sequence
  Description of Artificial Sequence: Synthetic peptide
  Seed: GMDPRMCSLMQGSTL
GMDFRMSSMMQASTL

SEQ ID NO: 72922 - protein, 15 aa, Artificial Sequence
  Description of Artificial Sequence: Synthetic peptide
  Seed: GMDPRMCSLMQGSTL
GMDFRMSSMMQLSTL

SEQ ID NO: 72923 - protein, 15 aa, Artificial Sequence
  Description of Artificial Sequence: Synthetic peptide
  Seed: GMDPRMCSLMQGSTL
GMDFRMSSMMQMSTL

SEQ ID NO: 72924 - protein, 15 aa, Artificial Sequence
  Description of Artificial Sequence: Synthetic peptide
  Seed: GMDPRMCSLMQGSTL
GMDFRMSSMMQNSTL

SEQ ID NO: 72925 - protein, 15 aa, Artificial Sequence
  Description of Artificial Sequence: Synthetic peptide
  Seed: GMDPRMCSLMQGSTL
GMDFRMSSMMQSSTL

SEQ ID NO: 72926 - protein, 15 aa, Artificial Sequence
  Description of Artificial Sequence: Synthetic peptide
  Seed: GMDPRMCSLMQGSTL
GMDFRMSSMMQVSTL

SEQ ID NO: 72927 - protein, 15 aa, Artificial Sequence
  Description of Artificial Sequence: Synthetic peptide
  Seed: GMDPRMCSLMQGSTL
GMDFRMSSNMQASTL

SEQ ID NO: 72928 - protein, 15 aa, Artificial Sequence
  Description of Artificial Sequence: Synthetic peptide
  Seed: GMDPRMCSLMQGSTL
GMDFRMSSNMQGSTL

SEQ ID NO: 72929 - protein, 15 aa, Artificial Sequence
  Description of Artificial Sequence: Synthetic peptide
  Seed: GMDPRMCSLMQGSTL
GMDFRMSSNMQHSTL

SEQ ID NO: 72930 - protein, 15 aa, Artificial Sequence
  Description of Artificial Sequence: Synthetic peptide
  Seed: GMDPRMCSLMQGSTL
GMDFRMSSNMQISTL

SEQ ID NO: 72931 - protein, 15 aa, Artificial Sequence
  Description of Artificial Sequence: Synthetic peptide
  Seed: GMDPRMCSLMQGSTL
GMDFRMSSNMQLSTL

SEQ ID NO: 72932 - protein, 15 aa, Artificial Sequence
  Description of Artificial Sequence: Synthetic peptide
  Seed: GMDPRMCSLMQGSTL
GMDFRMSSNMQMSTL

SEQ ID NO: 72933 - protein, 15 aa, Artificial Sequence
  Description of Artificial Sequence: Synthetic peptide
  Seed: GMDPRMCSLMQGSTL
GMDFRMSSNMQNSTL

SEQ ID NO: 72934 - protein, 15 aa, Artificial Sequence
  Description of Artificial Sequence: Synthetic peptide
  Seed: GMDPRMCSLMQGSTL
GMDFRMSSNMQSSTL

SEQ ID NO: 72935 - protein, 15 aa, Artificial Sequence
  Description of Artificial Sequence: Synthetic peptide
  Seed: GMDPRMCSLMQGSTL
GMDFRMSSNMQTSTL

SEQ ID NO: 72936 - protein, 15 aa, Artificial Sequence
  Description of Artificial Sequence: Synthetic peptide
  Seed: GMDPRMCSLMQGSTL
GMDFRMSSNMQVSTL

SEQ ID NO: 72937 - protein, 15 aa, Artificial Sequence
  Description of Artificial Sequence: Synthetic peptide
  Seed: GMDPRMCSLMQGSTL
GMDFRMSSPMQASTL

SEQ ID NO: 72938 - protein, 15 aa, Artificial Sequence
  Description of Artificial Sequence: Synthetic peptide
  Seed: GMDPRMCSLMQGSTL
GMDFRMSSPMQESTL

SEQ ID NO: 72939 - protein, 15 aa, Artificial Sequence
  Description of Artificial Sequence: Synthetic peptide
  Seed: GMDPRMCSLMQGSTL
GMDFRMSSPMQFSTL

SEQ ID NO: 72940 - protein, 15 aa, Artificial Sequence
  Description of Artificial Sequence: Synthetic peptide
  Seed: GMDPRMCSLMQGSTL
GMDFRMSSPMQGSTL

SEQ ID NO: 72941 - protein, 15 aa, Artificial Sequence
  Description of Artificial Sequence: Synthetic peptide
  Seed: GMDPRMCSLMQGSTL
GMDFRMSSPMQHSTL

SEQ ID NO: 72942 - protein, 15 aa, Artificial Sequence
  Description of Artificial Sequence: Synthetic peptide
  Seed: GMDPRMCSLMQGSTL
GMDFRMSSPMQISTL

SEQ ID NO: 72943 - protein, 15 aa, Artificial Sequence
  Description of Artificial Sequence: Synthetic peptide
  Seed: GMDPRMCSLMQGSTL
GMDFRMSSPMQLSTL

SEQ ID NO: 72944 - protein, 15 aa, Artificial Sequence
  Description of Artificial Sequence: Synthetic peptide
  Seed: GMDPRMCSLMQGSTL
GMDFRMSSPMQMSTL

SEQ ID NO: 72945 - protein, 15 aa, Artificial Sequence
  Description of Artificial Sequence: Synthetic peptide
  Seed: GMDPRMCSLMQGSTL
GMDFRMSSPMQNSTL

SEQ ID NO: 72946 - protein, 15 aa, Artificial Sequence
  Description of Artificial Sequence: Synthetic peptide
  Seed: GMDPRMCSLMQGSTL
GMDFRMSSPMQPSTL

SEQ ID NO: 72947 - protein, 15 aa, Artificial Sequence
  Description of Artificial Sequence: Synthetic peptide
  Seed: GMDPRMCSLMQGSTL
GMDFRMSSPMQQSTL

SEQ ID NO: 72948 - protein, 15 aa, Artificial Sequence
  Description of Artificial Sequence: Synthetic peptide
  Seed: GMDPRMCSLMQGSTL
GMDFRMSSPMQSSTL

SEQ ID NO: 72949 - protein, 15 aa, Artificial Sequence
  Description of Artificial Sequence: Synthetic peptide
  Seed: GMDPRMCSLMQGSTL
GMDFRMSSPMQTSTL

SEQ ID NO: 72950 - protein, 15 aa, Artificial Sequence
  Description of Artificial Sequence: Synthetic peptide
  Seed: GMDPRMCSLMQGSTL
GMDFRMSSPMQVSTL

SEQ ID NO: 72951 - protein, 15 aa, Artificial Sequence
  Description of Artificial Sequence: Synthetic peptide
  Seed: GMDPRMCSLMQGSTL
GMDFRMSSSMQASTL

SEQ ID NO: 72952 - protein, 15 aa, Artificial Sequence
  Description of Artificial Sequence: Synthetic peptide
  Seed: GMDPRMCSLMQGSTL
GMDFRMSSSMQGSTL

SEQ ID NO: 72953 - protein, 15 aa, Artificial Sequence
  Description of Artificial Sequence: Synthetic peptide
  Seed: GMDPRMCSLMQGSTL
GMDFRMSSSMQHSTL

SEQ ID NO: 72954 - protein, 15 aa, Artificial Sequence
  Description of Artificial Sequence: Synthetic peptide
  Seed: GMDPRMCSLMQGSTL
GMDFRMSSSMQISTL

SEQ ID NO: 72955 - protein, 15 aa, Artificial Sequence
  Description of Artificial Sequence: Synthetic peptide
  Seed: GMDPRMCSLMQGSTL
GMDFRMSSSMQLSTL

SEQ ID NO: 72956 - protein, 15 aa, Artificial Sequence
  Description of Artificial Sequence: Synthetic peptide
  Seed: GMDPRMCSLMQGSTL
GMDFRMSSSMQMSTL

SEQ ID NO: 72957 - protein, 15 aa, Artificial Sequence
  Description of Artificial Sequence: Synthetic peptide
  Seed: GMDPRMCSLMQGSTL
GMDFRMSSSMQNSTL

SEQ ID NO: 72958 - protein, 15 aa, Artificial Sequence
  Description of Artificial Sequence: Synthetic peptide
  Seed: GMDPRMCSLMQGSTL
GMDFRMSSSMQPSTL

SEQ ID NO: 72959 - protein, 15 aa, Artificial Sequence
  Description of Artificial Sequence: Synthetic peptide
  Seed: GMDPRMCSLMQGSTL
GMDFRMSSSMQQSTL

SEQ ID NO: 72960 - protein, 15 aa, Artificial Sequence
  Description of Artificial Sequence: Synthetic peptide
  Seed: GMDPRMCSLMQGSTL
GMDFRMSSSMQSSTL

SEQ ID NO: 72961 - protein, 15 aa, Artificial Sequence
  Description of Artificial Sequence: Synthetic peptide
  Seed: GMDPRMCSLMQGSTL
GMDFRMSSSMQTSTL

SEQ ID NO: 72962 - protein, 15 aa, Artificial Sequence
  Description of Artificial Sequence: Synthetic peptide
  Seed: GMDPRMCSLMQGSTL
GMDFRMSSSMQVSTL

SEQ ID NO: 72963 - protein, 15 aa, Artificial Sequence
  Description of Artificial Sequence: Synthetic peptide
  Seed: GMDPRMCSLMQGSTL
GMDFRMSSTMQASTL

SEQ ID NO: 72964 - protein, 15 aa, Artificial Sequence
  Description of Artificial Sequence: Synthetic peptide
  Seed: GMDPRMCSLMQGSTL
GMDFRMSSTMQGSTL

SEQ ID NO: 72965 - protein, 15 aa, Artificial Sequence
  Description of Artificial Sequence: Synthetic peptide
  Seed: GMDPRMCSLMQGSTL
GMDFRMSSTMQHSTL

SEQ ID NO: 72966 - protein, 15 aa, Artificial Sequence
  Description of Artificial Sequence: Synthetic peptide
  Seed: GMDPRMCSLMQGSTL
GMDFRMSSTMQISTL

SEQ ID NO: 72967 - protein, 15 aa, Artificial Sequence
  Description of Artificial Sequence: Synthetic peptide
  Seed: GMDPRMCSLMQGSTL
GMDFRMSSTMQLSTL

SEQ ID NO: 72968 - protein, 15 aa, Artificial Sequence
  Description of Artificial Sequence: Synthetic peptide
  Seed: GMDPRMCSLMQGSTL
GMDFRMSSTMQMSTL

SEQ ID NO: 72969 - protein, 15 aa, Artificial Sequence
  Description of Artificial Sequence: Synthetic peptide
  Seed: GMDPRMCSLMQGSTL
GMDFRMSSTMQNSTL

SEQ ID NO: 72970 - protein, 15 aa, Artificial Sequence
  Description of Artificial Sequence: Synthetic peptide
  Seed: GMDPRMCSLMQGSTL
GMDFRMSSTMQPSTL

SEQ ID NO: 72971 - protein, 15 aa, Artificial Sequence
  Description of Artificial Sequence: Synthetic peptide
  Seed: GMDPRMCSLMQGSTL
GMDFRMSSTMQQSTL

SEQ ID NO: 72972 - protein, 15 aa, Artificial Sequence
  Description of Artificial Sequence: Synthetic peptide
  Seed: GMDPRMCSLMQGSTL
GMDFRMSSTMQSSTL

SEQ ID NO: 72973 - protein, 15 aa, Artificial Sequence
  Description of Artificial Sequence: Synthetic peptide
  Seed: GMDPRMCSLMQGSTL
GMDFRMSSTMQTSTL

SEQ ID NO: 72974 - protein, 15 aa, Artificial Sequence
  Description of Artificial Sequence: Synthetic peptide
  Seed: GMDPRMCSLMQGSTL
GMDFRMSSTMQVSTL

SEQ ID NO: 72975 - protein, 15 aa, Artificial Sequence
  Description of Artificial Sequence: Synthetic peptide
  Seed: GMDPRMCSLMQGSTL
GMDFRMSSVMQASTL

SEQ ID NO: 72976 - protein, 15 aa, Artificial Sequence
  Description of Artificial Sequence: Synthetic peptide
  Seed: GMDPRMCSLMQGSTL
GMDFRMSSVMQESTL

SEQ ID NO: 72977 - protein, 15 aa, Artificial Sequence
  Description of Artificial Sequence: Synthetic peptide
  Seed: GMDPRMCSLMQGSTL
GMDFRMSSVMQGSTL

SEQ ID NO: 72978 - protein, 15 aa, Artificial Sequence
  Description of Artificial Sequence: Synthetic peptide
  Seed: GMDPRMCSLMQGSTL
GMDFRMSSVMQHSTL

SEQ ID NO: 72979 - protein, 15 aa, Artificial Sequence
  Description of Artificial Sequence: Synthetic peptide
  Seed: GMDPRMCSLMQGSTL
GMDFRMSSVMQISTL

SEQ ID NO: 72980 - protein, 15 aa, Artificial Sequence
  Description of Artificial Sequence: Synthetic peptide
  Seed: GMDPRMCSLMQGSTL
GMDFRMSSVMQLSTL

SEQ ID NO: 72981 - protein, 15 aa, Artificial Sequence
  Description of Artificial Sequence: Synthetic peptide
  Seed: GMDPRMCSLMQGSTL
GMDFRMSSVMQMSTL

SEQ ID NO: 72982 - protein, 15 aa, Artificial Sequence
  Description of Artificial Sequence: Synthetic peptide
  Seed: GMDPRMCSLMQGSTL
GMDFRMSSVMQNSTL

SEQ ID NO: 72983 - protein, 15 aa, Artificial Sequence
  Description of Artificial Sequence: Synthetic peptide
  Seed: GMDPRMCSLMQGSTL
GMDFRMSSVMQPSTL

SEQ ID NO: 72984 - protein, 15 aa, Artificial Sequence
  Description of Artificial Sequence: Synthetic peptide
  Seed: GMDPRMCSLMQGSTL
GMDFRMSSVMQQSTL

SEQ ID NO: 72985 - protein, 15 aa, Artificial Sequence
  Description of Artificial Sequence: Synthetic peptide
  Seed: GMDPRMCSLMQGSTL
GMDFRMSSVMQSSTL

SEQ ID NO: 72986 - protein, 15 aa, Artificial Sequence
  Description of Artificial Sequence: Synthetic peptide
  Seed: GMDPRMCSLMQGSTL
GMDFRMSSVMQTSTL

SEQ ID NO: 72987 - protein, 15 aa, Artificial Sequence
  Description of Artificial Sequence: Synthetic peptide
  Seed: GMDPRMCSLMQGSTL
GMDFRMSSVMQVSTL

SEQ ID NO: 72988 - protein, 15 aa, Artificial Sequence
  Description of Artificial Sequence: Synthetic peptide
  Seed: GMDPRMCSLMQGSTL
GMDFRMTSAMQASTL

SEQ ID NO: 72989 - protein, 15 aa, Artificial Sequence
  Description of Artificial Sequence: Synthetic peptide
  Seed: GMDPRMCSLMQGSTL
GMDFRMTSAMQCSTL

SEQ ID NO: 72990 - protein, 15 aa, Artificial Sequence
  Description of Artificial Sequence: Synthetic peptide
  Seed: GMDPRMCSLMQGSTL
GMDFRMTSAMQDSTL

SEQ ID NO: 72991 - protein, 15 aa, Artificial Sequence
  Description of Artificial Sequence: Synthetic peptide
  Seed: GMDPRMCSLMQGSTL
GMDFRMTSAMQESTL

SEQ ID NO: 72992 - protein, 15 aa, Artificial Sequence
  Description of Artificial Sequence: Synthetic peptide
  Seed: GMDPRMCSLMQGSTL
GMDFRMTSAMQFSTL

SEQ ID NO: 72993 - protein, 15 aa, Artificial Sequence
  Description of Artificial Sequence: Synthetic peptide
  Seed: GMDPRMCSLMQGSTL
GMDFRMTSAMQGSTL

SEQ ID NO: 72994 - protein, 15 aa, Artificial Sequence
  Description of Artificial Sequence: Synthetic peptide
  Seed: GMDPRMCSLMQGSTL
GMDFRMTSAMQHSTL

SEQ ID NO: 72995 - protein, 15 aa, Artificial Sequence
  Description of Artificial Sequence: Synthetic peptide
  Seed: GMDPRMCSLMQGSTL
GMDFRMTSAMQISTL

SEQ ID NO: 72996 - protein, 15 aa, Artificial Sequence
  Description of Artificial Sequence: Synthetic peptide
  Seed: GMDPRMCSLMQGSTL
GMDFRMTSAMQLSTL

SEQ ID NO: 72997 - protein, 15 aa, Artificial Sequence
  Description of Artificial Sequence: Synthetic peptide
  Seed: GMDPRMCSLMQGSTL
GMDFRMTSAMQMSTL

SEQ ID NO: 72998 - protein, 15 aa, Artificial Sequence
  Description of Artificial Sequence: Synthetic peptide
  Seed: GMDPRMCSLMQGSTL
GMDFRMTSAMQNSTL

SEQ ID NO: 72999 - protein, 15 aa, Artificial Sequence
  Description of Artificial Sequence: Synthetic peptide
  Seed: GMDPRMCSLMQGSTL
GMDFRMTSAMQPSTL

SEQ ID NO: 73000 - protein, 15 aa, Artificial Sequence
  Description of Artificial Sequence: Synthetic peptide
  Seed: GMDPRMCSLMQGSTL
GMDFRMTSAMQQSTL

SEQ ID NO: 73001 - protein, 15 aa, Artificial Sequence
  Description of Artificial Sequence: Synthetic peptide
  Seed: GMDPRMCSLMQGSTL
GMDFRMTSAMQSSTL

SEQ ID NO: 73002 - protein, 15 aa, Artificial Sequence
  Description of Artificial Sequence: Synthetic peptide
  Seed: GMDPRMCSLMQGSTL
GMDFRMTSAMQTSTL

SEQ ID NO: 73003 - protein, 15 aa, Artificial Sequence
  Description of Artificial Sequence: Synthetic peptide
  Seed: GMDPRMCSLMQGSTL
GMDFRMTSAMQVSTL

SEQ ID NO: 73004 - protein, 15 aa, Artificial Sequence
  Description of Artificial Sequence: Synthetic peptide
  Seed: GMDPRMCSLMQGSTL
GMDFRMTSAMQYSTL

SEQ ID NO: 73005 - protein, 15 aa, Artificial Sequence
  Description of Artificial Sequence: Synthetic peptide
  Seed: GMDPRMCSLMQGSTL
GMDFRMTSGMQASTL

SEQ ID NO: 73006 - protein, 15 aa, Artificial Sequence
  Description of Artificial Sequence: Synthetic peptide
  Seed: GMDPRMCSLMQGSTL
GMDFRMTSGMQGSTL

SEQ ID NO: 73007 - protein, 15 aa, Artificial Sequence
  Description of Artificial Sequence: Synthetic peptide
  Seed: GMDPRMCSLMQGSTL
GMDFRMTSGMQHSTL

SEQ ID NO: 73008 - protein, 15 aa, Artificial Sequence
  Description of Artificial Sequence: Synthetic peptide
  Seed: GMDPRMCSLMQGSTL
GMDFRMTSGMQISTL

SEQ ID NO: 73009 - protein, 15 aa, Artificial Sequence
  Description of Artificial Sequence: Synthetic peptide
  Seed: GMDPRMCSLMQGSTL
GMDFRMTSGMQLSTL

SEQ ID NO: 73010 - protein, 15 aa, Artificial Sequence
  Description of Artificial Sequence: Synthetic peptide
  Seed: GMDPRMCSLMQGSTL
GMDFRMTSGMQMSTL

SEQ ID NO: 73011 - protein, 15 aa, Artificial Sequence
  Description of Artificial Sequence: Synthetic peptide
  Seed: GMDPRMCSLMQGSTL
GMDFRMTSGMQNSTL

SEQ ID NO: 73012 - protein, 15 aa, Artificial Sequence
  Description of Artificial Sequence: Synthetic peptide
  Seed: GMDPRMCSLMQGSTL
GMDFRMTSGMQQSTL

SEQ ID NO: 73013 - protein, 15 aa, Artificial Sequence
  Description of Artificial Sequence: Synthetic peptide
  Seed: GMDPRMCSLMQGSTL
GMDFRMTSGMQSSTL

SEQ ID NO: 73014 - protein, 15 aa, Artificial Sequence
  Description of Artificial Sequence: Synthetic peptide
  Seed: GMDPRMCSLMQGSTL
GMDFRMTSGMQTSTL

SEQ ID NO: 73015 - protein, 15 aa, Artificial Sequence
  Description of Artificial Sequence: Synthetic peptide
  Seed: GMDPRMCSLMQGSTL
GMDFRMTSGMQVSTL

SEQ ID NO: 73016 - protein, 15 aa, Artificial Sequence
  Description of Artificial Sequence: Synthetic peptide
  Seed: GMDPRMCSLMQGSTL
GMDFRMTSIMQASTL

SEQ ID NO: 73017 - protein, 15 aa, Artificial Sequence
  Description of Artificial Sequence: Synthetic peptide
  Seed: GMDPRMCSLMQGSTL
GMDFRMTSIMQGSTL

SEQ ID NO: 73018 - protein, 15 aa, Artificial Sequence
  Description of Artificial Sequence: Synthetic peptide
  Seed: GMDPRMCSLMQGSTL
GMDFRMTSIMQHSTL

SEQ ID NO: 73019 - protein, 15 aa, Artificial Sequence
  Description of Artificial Sequence: Synthetic peptide
  Seed: GMDPRMCSLMQGSTL
GMDFRMTSIMQISTL

SEQ ID NO: 73020 - protein, 15 aa, Artificial Sequence
  Description of Artificial Sequence: Synthetic peptide
  Seed: GMDPRMCSLMQGSTL
GMDFRMTSIMQLSTL

SEQ ID NO: 73021 - protein, 15 aa, Artificial Sequence
  Description of Artificial Sequence: Synthetic peptide
  Seed: GMDPRMCSLMQGSTL
GMDFRMTSIMQMSTL

SEQ ID NO: 73022 - protein, 15 aa, Artificial Sequence
  Description of Artificial Sequence: Synthetic peptide
  Seed: GMDPRMCSLMQGSTL
GMDFRMTSIMQNSTL

SEQ ID NO: 73023 - protein, 15 aa, Artificial Sequence
  Description of Artificial Sequence: Synthetic peptide
  Seed: GMDPRMCSLMQGSTL
GMDFRMTSIMQQSTL

SEQ ID NO: 73024 - protein, 15 aa, Artificial Sequence
  Description of Artificial Sequence: Synthetic peptide
  Seed: GMDPRMCSLMQGSTL
GMDFRMTSIMQSSTL

SEQ ID NO: 73025 - protein, 15 aa, Artificial Sequence
  Description of Artificial Sequence: Synthetic peptide
  Seed: GMDPRMCSLMQGSTL
GMDFRMTSIMQTSTL

SEQ ID NO: 73026 - protein, 15 aa, Artificial Sequence
  Description of Artificial Sequence: Synthetic peptide
  Seed: GMDPRMCSLMQGSTL
GMDFRMTSIMQVSTL

SEQ ID NO: 73027 - protein, 15 aa, Artificial Sequence
  Description of Artificial Sequence: Synthetic peptide
  Seed: GMDPRMCSLMQGSTL
GMDFRMTSLMQASTL

SEQ ID NO: 73028 - protein, 15 aa, Artificial Sequence
  Description of Artificial Sequence: Synthetic peptide
  Seed: GMDPRMCSLMQGSTL
GMDFRMTSLMQNSTL

SEQ ID NO: 73029 - protein, 15 aa, Artificial Sequence
  Description of Artificial Sequence: Synthetic peptide
  Seed: GMDPRMCSLMQGSTL
GMDFRMTSLMQSSTL

SEQ ID NO: 73030 - protein, 15 aa, Artificial Sequence
  Description of Artificial Sequence: Synthetic peptide
  Seed: GMDPRMCSLMQGSTL
GMDFRMTSLMQTSTL

SEQ ID NO: 73031 - protein, 15 aa, Artificial Sequence
  Description of Artificial Sequence: Synthetic peptide
  Seed: GMDPRMCSLMQGSTL
GMDFRMTSMMQASTL

SEQ ID NO: 73032 - protein, 15 aa, Artificial Sequence
  Description of Artificial Sequence: Synthetic peptide
  Seed: GMDPRMCSLMQGSTL
GMDFRMTSMMQHSTL

SEQ ID NO: 73033 - protein, 15 aa, Artificial Sequence
  Description of Artificial Sequence: Synthetic peptide
  Seed: GMDPRMCSLMQGSTL
GMDFRMTSMMQLSTL

SEQ ID NO: 73034 - protein, 15 aa, Artificial Sequence
  Description of Artificial Sequence: Synthetic peptide
  Seed: GMDPRMCSLMQGSTL
GMDFRMTSMMQMSTL

SEQ ID NO: 73035 - protein, 15 aa, Artificial Sequence
  Description of Artificial Sequence: Synthetic peptide
  Seed: GMDPRMCSLMQGSTL
GMDFRMTSMMQNSTL

SEQ ID NO: 73036 - protein, 15 aa, Artificial Sequence
  Description of Artificial Sequence: Synthetic peptide
  Seed: GMDPRMCSLMQGSTL
GMDFRMTSMMQSSTL

SEQ ID NO: 73037 - protein, 15 aa, Artificial Sequence
  Description of Artificial Sequence: Synthetic peptide
  Seed: GMDPRMCSLMQGSTL
GMDFRMTSMMQTSTL

SEQ ID NO: 73038 - protein, 15 aa, Artificial Sequence
  Description of Artificial Sequence: Synthetic peptide
  Seed: GMDPRMCSLMQGSTL
GMDFRMTSMMQVSTL

SEQ ID NO: 73039 - protein, 15 aa, Artificial Sequence
  Description of Artificial Sequence: Synthetic peptide
  Seed: GMDPRMCSLMQGSTL
GMDFRMTSNMQASTL

SEQ ID NO: 73040 - protein, 15 aa, Artificial Sequence
  Description of Artificial Sequence: Synthetic peptide
  Seed: GMDPRMCSLMQGSTL
GMDFRMTSNMQGSTL

SEQ ID NO: 73041 - protein, 15 aa, Artificial Sequence
  Description of Artificial Sequence: Synthetic peptide
  Seed: GMDPRMCSLMQGSTL
GMDFRMTSNMQHSTL

SEQ ID NO: 73042 - protein, 15 aa, Artificial Sequence
  Description of Artificial Sequence: Synthetic peptide
  Seed: GMDPRMCSLMQGSTL
GMDFRMTSNMQISTL

SEQ ID NO: 73043 - protein, 15 aa, Artificial Sequence
  Description of Artificial Sequence: Synthetic peptide
  Seed: GMDPRMCSLMQGSTL
GMDFRMTSNMQLSTL

SEQ ID NO: 73044 - protein, 15 aa, Artificial Sequence
  Description of Artificial Sequence: Synthetic peptide
  Seed: GMDPRMCSLMQGSTL
GMDFRMTSNMQMSTL

SEQ ID NO: 73045 - protein, 15 aa, Artificial Sequence
  Description of Artificial Sequence: Synthetic peptide
  Seed: GMDPRMCSLMQGSTL
GMDFRMTSNMQNSTL

SEQ ID NO: 73046 - protein, 15 aa, Artificial Sequence
  Description of Artificial Sequence: Synthetic peptide
  Seed: GMDPRMCSLMQGSTL
GMDFRMTSNMQSSTL

SEQ ID NO: 73047 - protein, 15 aa, Artificial Sequence
  Description of Artificial Sequence: Synthetic peptide
  Seed: GMDPRMCSLMQGSTL
GMDFRMTSNMQTSTL

SEQ ID NO: 73048 - protein, 15 aa, Artificial Sequence
  Description of Artificial Sequence: Synthetic peptide
  Seed: GMDPRMCSLMQGSTL
GMDFRMTSNMQVSTL

SEQ ID NO: 73049 - protein, 15 aa, Artificial Sequence
  Description of Artificial Sequence: Synthetic peptide
  Seed: GMDPRMCSLMQGSTL
GMDFRMTSPMQASTL

SEQ ID NO: 73050 - protein, 15 aa, Artificial Sequence
  Description of Artificial Sequence: Synthetic peptide
  Seed: GMDPRMCSLMQGSTL
GMDFRMTSPMQGSTL

SEQ ID NO: 73051 - protein, 15 aa, Artificial Sequence
  Description of Artificial Sequence: Synthetic peptide
  Seed: GMDPRMCSLMQGSTL
GMDFRMTSPMQHSTL

SEQ ID NO: 73052 - protein, 15 aa, Artificial Sequence
  Description of Artificial Sequence: Synthetic peptide
  Seed: GMDPRMCSLMQGSTL
GMDFRMTSPMQISTL

SEQ ID NO: 73053 - protein, 15 aa, Artificial Sequence
  Description of Artificial Sequence: Synthetic peptide
  Seed: GMDPRMCSLMQGSTL
GMDFRMTSPMQLSTL

SEQ ID NO: 73054 - protein, 15 aa, Artificial Sequence
  Description of Artificial Sequence: Synthetic peptide
  Seed: GMDPRMCSLMQGSTL
GMDFRMTSPMQMSTL

SEQ ID NO: 73055 - protein, 15 aa, Artificial Sequence
  Description of Artificial Sequence: Synthetic peptide
  Seed: GMDPRMCSLMQGSTL
GMDFRMTSPMQNSTL

SEQ ID NO: 73056 - protein, 15 aa, Artificial Sequence
  Description of Artificial Sequence: Synthetic peptide
  Seed: GMDPRMCSLMQGSTL
GMDFRMTSPMQPSTL

SEQ ID NO: 73057 - protein, 15 aa, Artificial Sequence
  Description of Artificial Sequence: Synthetic peptide
  Seed: GMDPRMCSLMQGSTL
GMDFRMTSPMQQSTL

SEQ ID NO: 73058 - protein, 15 aa, Artificial Sequence
  Description of Artificial Sequence: Synthetic peptide
  Seed: GMDPRMCSLMQGSTL
GMDFRMTSPMQSSTL

SEQ ID NO: 73059 - protein, 15 aa, Artificial Sequence
  Description of Artificial Sequence: Synthetic peptide
  Seed: GMDPRMCSLMQGSTL
GMDFRMTSPMQTSTL

SEQ ID NO: 73060 - protein, 15 aa, Artificial Sequence
  Description of Artificial Sequence: Synthetic peptide
  Seed: GMDPRMCSLMQGSTL
GMDFRMTSPMQVSTL

SEQ ID NO: 73061 - protein, 15 aa, Artificial Sequence
  Description of Artificial Sequence: Synthetic peptide
  Seed: GMDPRMCSLMQGSTL
GMDFRMTSSMQASTL

SEQ ID NO: 73062 - protein, 15 aa, Artificial Sequence
  Description of Artificial Sequence: Synthetic peptide
  Seed: GMDPRMCSLMQGSTL
GMDFRMTSSMQGSTL

SEQ ID NO: 73063 - protein, 15 aa, Artificial Sequence
  Description of Artificial Sequence: Synthetic peptide
  Seed: GMDPRMCSLMQGSTL
GMDFRMTSSMQHSTL

SEQ ID NO: 73064 - protein, 15 aa, Artificial Sequence
  Description of Artificial Sequence: Synthetic peptide
  Seed: GMDPRMCSLMQGSTL
GMDFRMTSSMQISTL

SEQ ID NO: 73065 - protein, 15 aa, Artificial Sequence
  Description of Artificial Sequence: Synthetic peptide
  Seed: GMDPRMCSLMQGSTL
GMDFRMTSSMQLSTL

SEQ ID NO: 73066 - protein, 15 aa, Artificial Sequence
  Description of Artificial Sequence: Synthetic peptide
  Seed: GMDPRMCSLMQGSTL
GMDFRMTSSMQMSTL

SEQ ID NO: 73067 - protein, 15 aa, Artificial Sequence
  Description of Artificial Sequence: Synthetic peptide
  Seed: GMDPRMCSLMQGSTL
GMDFRMTSSMQNSTL

SEQ ID NO: 73068 - protein, 15 aa, Artificial Sequence
  Description of Artificial Sequence: Synthetic peptide
  Seed: GMDPRMCSLMQGSTL
GMDFRMTSSMQPSTL

SEQ ID NO: 73069 - protein, 15 aa, Artificial Sequence
  Description of Artificial Sequence: Synthetic peptide
  Seed: GMDPRMCSLMQGSTL
GMDFRMTSSMQQSTL

SEQ ID NO: 73070 - protein, 15 aa, Artificial Sequence
  Description of Artificial Sequence: Synthetic peptide
  Seed: GMDPRMCSLMQGSTL
GMDFRMTSSMQSSTL

SEQ ID NO: 73071 - protein, 15 aa, Artificial Sequence
  Description of Artificial Sequence: Synthetic peptide
  Seed: GMDPRMCSLMQGSTL
GMDFRMTSSMQTSTL

SEQ ID NO: 73072 - protein, 15 aa, Artificial Sequence
  Description of Artificial Sequence: Synthetic peptide
  Seed: GMDPRMCSLMQGSTL
GMDFRMTSSMQVSTL

SEQ ID NO: 73073 - protein, 15 aa, Artificial Sequence
  Description of Artificial Sequence: Synthetic peptide
  Seed: GMDPRMCSLMQGSTL
GMDFRMTSTMQASTL

SEQ ID NO: 73074 - protein, 15 aa, Artificial Sequence
  Description of Artificial Sequence: Synthetic peptide
  Seed: GMDPRMCSLMQGSTL
GMDFRMTSTMQGSTL

SEQ ID NO: 73075 - protein, 15 aa, Artificial Sequence
  Description of Artificial Sequence: Synthetic peptide
  Seed: GMDPRMCSLMQGSTL
GMDFRMTSTMQHSTL

SEQ ID NO: 73076 - protein, 15 aa, Artificial Sequence
  Description of Artificial Sequence: Synthetic peptide
  Seed: GMDPRMCSLMQGSTL
GMDFRMTSTMQISTL

SEQ ID NO: 73077 - protein, 15 aa, Artificial Sequence
  Description of Artificial Sequence: Synthetic peptide
  Seed: GMDPRMCSLMQGSTL
GMDFRMTSTMQLSTL

SEQ ID NO: 73078 - protein, 15 aa, Artificial Sequence
  Description of Artificial Sequence: Synthetic peptide
  Seed: GMDPRMCSLMQGSTL
GMDFRMTSTMQMSTL

SEQ ID NO: 73079 - protein, 15 aa, Artificial Sequence
  Description of Artificial Sequence: Synthetic peptide
  Seed: GMDPRMCSLMQGSTL
GMDFRMTSTMQNSTL

SEQ ID NO: 73080 - protein, 15 aa, Artificial Sequence
  Description of Artificial Sequence: Synthetic peptide
  Seed: GMDPRMCSLMQGSTL
GMDFRMTSTMQQSTL

SEQ ID NO: 73081 - protein, 15 aa, Artificial Sequence
  Description of Artificial Sequence: Synthetic peptide
  Seed: GMDPRMCSLMQGSTL
GMDFRMTSTMQSSTL

SEQ ID NO: 73082 - protein, 15 aa, Artificial Sequence
  Description of Artificial Sequence: Synthetic peptide
  Seed: GMDPRMCSLMQGSTL
GMDFRMTSTMQTSTL

SEQ ID NO: 73083 - protein, 15 aa, Artificial Sequence
  Description of Artificial Sequence: Synthetic peptide
  Seed: GMDPRMCSLMQGSTL
GMDFRMTSTMQVSTL

SEQ ID NO: 73084 - protein, 15 aa, Artificial Sequence
  Description of Artificial Sequence: Synthetic peptide
  Seed: GMDPRMCSLMQGSTL
GMDFRMTSVMQASTL

SEQ ID NO: 73085 - protein, 15 aa, Artificial Sequence
  Description of Artificial Sequence: Synthetic peptide
  Seed: GMDPRMCSLMQGSTL
GMDFRMTSVMQGSTL

SEQ ID NO: 73086 - protein, 15 aa, Artificial Sequence
  Description of Artificial Sequence: Synthetic peptide
  Seed: GMDPRMCSLMQGSTL
GMDFRMTSVMQHSTL

SEQ ID NO: 73087 - protein, 15 aa, Artificial Sequence
  Description of Artificial Sequence: Synthetic peptide
  Seed: GMDPRMCSLMQGSTL
GMDFRMTSVMQISTL

SEQ ID NO: 73088 - protein, 15 aa, Artificial Sequence
  Description of Artificial Sequence: Synthetic peptide
  Seed: GMDPRMCSLMQGSTL
GMDFRMTSVMQLSTL

SEQ ID NO: 73089 - protein, 15 aa, Artificial Sequence
  Description of Artificial Sequence: Synthetic peptide
  Seed: GMDPRMCSLMQGSTL
GMDFRMTSVMQMSTL

SEQ ID NO: 73090 - protein, 15 aa, Artificial Sequence
  Description of Artificial Sequence: Synthetic peptide
  Seed: GMDPRMCSLMQGSTL
GMDFRMTSVMQNSTL

SEQ ID NO: 73091 - protein, 15 aa, Artificial Sequence
  Description of Artificial Sequence: Synthetic peptide
  Seed: GMDPRMCSLMQGSTL
GMDFRMTSVMQQSTL

SEQ ID NO: 73092 - protein, 15 aa, Artificial Sequence
  Description of Artificial Sequence: Synthetic peptide
  Seed: GMDPRMCSLMQGSTL
GMDFRMTSVMQSSTL

SEQ ID NO: 73093 - protein, 15 aa, Artificial Sequence
  Description of Artificial Sequence: Synthetic peptide
  Seed: GMDPRMCSLMQGSTL
GMDFRMTSVMQTSTL

SEQ ID NO: 73094 - protein, 15 aa, Artificial Sequence
  Description of Artificial Sequence: Synthetic peptide
  Seed: GMDPRMCSLMQGSTL
GMDFRMTSVMQVSTL

SEQ ID NO: 73095 - protein, 15 aa, Artificial Sequence
  Description of Artificial Sequence: Synthetic peptide
  Seed: GMDPRMCSLMQGSTL
GMDFRMVSAMQASTL

SEQ ID NO: 73096 - protein, 15 aa, Artificial Sequence
  Description of Artificial Sequence: Synthetic peptide
  Seed: GMDPRMCSLMQGSTL
GMDFRMVSAMQCSTL

SEQ ID NO: 73097 - protein, 15 aa, Artificial Sequence
  Description of Artificial Sequence: Synthetic peptide
  Seed: GMDPRMCSLMQGSTL
GMDFRMVSAMQDSTL

SEQ ID NO: 73098 - protein, 15 aa, Artificial Sequence
  Description of Artificial Sequence: Synthetic peptide
  Seed: GMDPRMCSLMQGSTL
GMDFRMVSAMQESTL

SEQ ID NO: 73099 - protein, 15 aa, Artificial Sequence
  Description of Artificial Sequence: Synthetic peptide
  Seed: GMDPRMCSLMQGSTL
GMDFRMVSAMQFSTL

SEQ ID NO: 73100 - protein, 15 aa, Artificial Sequence
  Description of Artificial Sequence: Synthetic peptide
  Seed: GMDPRMCSLMQGSTL
GMDFRMVSAMQGSTL

SEQ ID NO: 73101 - protein, 15 aa, Artificial Sequence
  Description of Artificial Sequence: Synthetic peptide
  Seed: GMDPRMCSLMQGSTL
GMDFRMVSAMQHSTL

SEQ ID NO: 73102 - protein, 15 aa, Artificial Sequence
  Description of Artificial Sequence: Synthetic peptide
  Seed: GMDPRMCSLMQGSTL
GMDFRMVSAMQISTL

SEQ ID NO: 73103 - protein, 15 aa, Artificial Sequence
  Description of Artificial Sequence: Synthetic peptide
  Seed: GMDPRMCSLMQGSTL
GMDFRMVSAMQKSTL

SEQ ID NO: 73104 - protein, 15 aa, Artificial Sequence
  Description of Artificial Sequence: Synthetic peptide
  Seed: GMDPRMCSLMQGSTL
GMDFRMVSAMQLSTL

SEQ ID NO: 73105 - protein, 15 aa, Artificial Sequence
  Description of Artificial Sequence: Synthetic peptide
  Seed: GMDPRMCSLMQGSTL
GMDFRMVSAMQMSTL

SEQ ID NO: 73106 - protein, 15 aa, Artificial Sequence
  Description of Artificial Sequence: Synthetic peptide
  Seed: GMDPRMCSLMQGSTL
GMDFRMVSAMQNSTL

SEQ ID NO: 73107 - protein, 15 aa, Artificial Sequence
  Description of Artificial Sequence: Synthetic peptide
  Seed: GMDPRMCSLMQGSTL
GMDFRMVSAMQPSTL

SEQ ID NO: 73108 - protein, 15 aa, Artificial Sequence
  Description of Artificial Sequence: Synthetic peptide
  Seed: GMDPRMCSLMQGSTL
GMDFRMVSAMQQSTL

SEQ ID NO: 73109 - protein, 15 aa, Artificial Sequence
  Description of Artificial Sequence: Synthetic peptide
  Seed: GMDPRMCSLMQGSTL
GMDFRMVSAMQRSTL

SEQ ID NO: 73110 - protein, 15 aa, Artificial Sequence
  Description of Artificial Sequence: Synthetic peptide
  Seed: GMDPRMCSLMQGSTL
GMDFRMVSAMQSSTL

SEQ ID NO: 73111 - protein, 15 aa, Artificial Sequence
  Description of Artificial Sequence: Synthetic peptide
  Seed: GMDPRMCSLMQGSTL
GMDFRMVSAMQTSTL

SEQ ID NO: 73112 - protein, 15 aa, Artificial Sequence
  Description of Artificial Sequence: Synthetic peptide
  Seed: GMDPRMCSLMQGSTL
GMDFRMVSAMQVSTL

SEQ ID NO: 73113 - protein, 15 aa, Artificial Sequence
  Description of Artificial Sequence: Synthetic peptide
  Seed: GMDPRMCSLMQGSTL
GMDFRMVSAMQYSTL

SEQ ID NO: 73114 - protein, 15 aa, Artificial Sequence
  Description of Artificial Sequence: Synthetic peptide
  Seed: GMDPRMCSLMQGSTL
GMDFRMVSCMQNSTL

SEQ ID NO: 73115 - protein, 15 aa, Artificial Sequence
  Description of Artificial Sequence: Synthetic peptide
  Seed: GMDPRMCSLMQGSTL
GMDFRMVSGMQASTL

SEQ ID NO: 73116 - protein, 15 aa, Artificial Sequence
  Description of Artificial Sequence: Synthetic peptide
  Seed: GMDPRMCSLMQGSTL
GMDFRMVSGMQDSTL

SEQ ID NO: 73117 - protein, 15 aa, Artificial Sequence
  Description of Artificial Sequence: Synthetic peptide
  Seed: GMDPRMCSLMQGSTL
GMDFRMVSGMQESTL

SEQ ID NO: 73118 - protein, 15 aa, Artificial Sequence
  Description of Artificial Sequence: Synthetic peptide
  Seed: GMDPRMCSLMQGSTL
GMDFRMVSGMQGSTL

SEQ ID NO: 73119 - protein, 15 aa, Artificial Sequence
  Description of Artificial Sequence: Synthetic peptide
  Seed: GMDPRMCSLMQGSTL
GMDFRMVSGMQHSTL

SEQ ID NO: 73120 - protein, 15 aa, Artificial Sequence
  Description of Artificial Sequence: Synthetic peptide
  Seed: GMDPRMCSLMQGSTL
GMDFRMVSGMQISTL

SEQ ID NO: 73121 - protein, 15 aa, Artificial Sequence
  Description of Artificial Sequence: Synthetic peptide
  Seed: GMDPRMCSLMQGSTL
GMDFRMVSGMQLSTL

SEQ ID NO: 73122 - protein, 15 aa, Artificial Sequence
  Description of Artificial Sequence: Synthetic peptide
  Seed: GMDPRMCSLMQGSTL
GMDFRMVSGMQMSTL

SEQ ID NO: 73123 - protein, 15 aa, Artificial Sequence
  Description of Artificial Sequence: Synthetic peptide
  Seed: GMDPRMCSLMQGSTL
GMDFRMVSGMQNSTL

SEQ ID NO: 73124 - protein, 15 aa, Artificial Sequence
  Description of Artificial Sequence: Synthetic peptide
  Seed: GMDPRMCSLMQGSTL
GMDFRMVSGMQPSTL

SEQ ID NO: 73125 - protein, 15 aa, Artificial Sequence
  Description of Artificial Sequence: Synthetic peptide
  Seed: GMDPRMCSLMQGSTL
GMDFRMVSGMQQSTL

SEQ ID NO: 73126 - protein, 15 aa, Artificial Sequence
  Description of Artificial Sequence: Synthetic peptide
  Seed: GMDPRMCSLMQGSTL
GMDFRMVSGMQSSTL

SEQ ID NO: 73127 - protein, 15 aa, Artificial Sequence
  Description of Artificial Sequence: Synthetic peptide
  Seed: GMDPRMCSLMQGSTL
GMDFRMVSGMQTSTL

SEQ ID NO: 73128 - protein, 15 aa, Artificial Sequence
  Description of Artificial Sequence: Synthetic peptide
  Seed: GMDPRMCSLMQGSTL
GMDFRMVSGMQVSTL

SEQ ID NO: 73129 - protein, 15 aa, Artificial Sequence
  Description of Artificial Sequence: Synthetic peptide
  Seed: GMDPRMCSLMQGSTL
GMDFRMVSHMQASTL

SEQ ID NO: 73130 - protein, 15 aa, Artificial Sequence
  Description of Artificial Sequence: Synthetic peptide
  Seed: GMDPRMCSLMQGSTL
GMDFRMVSHMQNSTL

SEQ ID NO: 73131 - protein, 15 aa, Artificial Sequence
  Description of Artificial Sequence: Synthetic peptide
  Seed: GMDPRMCSLMQGSTL
GMDFRMVSHMQSSTL

SEQ ID NO: 73132 - protein, 15 aa, Artificial Sequence
  Description of Artificial Sequence: Synthetic peptide
  Seed: GMDPRMCSLMQGSTL
GMDFRMVSIMQASTL

SEQ ID NO: 73133 - protein, 15 aa, Artificial Sequence
  Description of Artificial Sequence: Synthetic peptide
  Seed: GMDPRMCSLMQGSTL
GMDFRMVSIMQDSTL

SEQ ID NO: 73134 - protein, 15 aa, Artificial Sequence
  Description of Artificial Sequence: Synthetic peptide
  Seed: GMDPRMCSLMQGSTL
GMDFRMVSIMQESTL

SEQ ID NO: 73135 - protein, 15 aa, Artificial Sequence
  Description of Artificial Sequence: Synthetic peptide
  Seed: GMDPRMCSLMQGSTL
GMDFRMVSIMQGSTL

SEQ ID NO: 73136 - protein, 15 aa, Artificial Sequence
  Description of Artificial Sequence: Synthetic peptide
  Seed: GMDPRMCSLMQGSTL
GMDFRMVSIMQHSTL

SEQ ID NO: 73137 - protein, 15 aa, Artificial Sequence
  Description of Artificial Sequence: Synthetic peptide
  Seed: GMDPRMCSLMQGSTL
GMDFRMVSIMQISTL

SEQ ID NO: 73138 - protein, 15 aa, Artificial Sequence
  Description of Artificial Sequence: Synthetic peptide
  Seed: GMDPRMCSLMQGSTL
GMDFRMVSIMQLSTL

SEQ ID NO: 73139 - protein, 15 aa, Artificial Sequence
  Description of Artificial Sequence: Synthetic peptide
  Seed: GMDPRMCSLMQGSTL
GMDFRMVSIMQMSTL

SEQ ID NO: 73140 - protein, 15 aa, Artificial Sequence
  Description of Artificial Sequence: Synthetic peptide
  Seed: GMDPRMCSLMQGSTL
GMDFRMVSIMQNSTL

SEQ ID NO: 73141 - protein, 15 aa, Artificial Sequence
  Description of Artificial Sequence: Synthetic peptide
  Seed: GMDPRMCSLMQGSTL
GMDFRMVSIMQPSTL

SEQ ID NO: 73142 - protein, 15 aa, Artificial Sequence
  Description of Artificial Sequence: Synthetic peptide
  Seed: GMDPRMCSLMQGSTL
GMDFRMVSIMQQSTL

SEQ ID NO: 73143 - protein, 15 aa, Artificial Sequence
  Description of Artificial Sequence: Synthetic peptide
  Seed: GMDPRMCSLMQGSTL
GMDFRMVSIMQSSTL

SEQ ID NO: 73144 - protein, 15 aa, Artificial Sequence
  Description of Artificial Sequence: Synthetic peptide
  Seed: GMDPRMCSLMQGSTL
GMDFRMVSIMQTSTL

SEQ ID NO: 73145 - protein, 15 aa, Artificial Sequence
  Description of Artificial Sequence: Synthetic peptide
  Seed: GMDPRMCSLMQGSTL
GMDFRMVSIMQVSTL

SEQ ID NO: 73146 - protein, 15 aa, Artificial Sequence
  Description of Artificial Sequence: Synthetic peptide
  Seed: GMDPRMCSLMQGSTL
GMDFRMVSLMQASTL

SEQ ID NO: 73147 - protein, 15 aa, Artificial Sequence
  Description of Artificial Sequence: Synthetic peptide
  Seed: GMDPRMCSLMQGSTL
GMDFRMVSLMQGSTL

SEQ ID NO: 73148 - protein, 15 aa, Artificial Sequence
  Description of Artificial Sequence: Synthetic peptide
  Seed: GMDPRMCSLMQGSTL
GMDFRMVSLMQHSTL

SEQ ID NO: 73149 - protein, 15 aa, Artificial Sequence
  Description of Artificial Sequence: Synthetic peptide
  Seed: GMDPRMCSLMQGSTL
GMDFRMVSLMQNSTL

SEQ ID NO: 73150 - protein, 15 aa, Artificial Sequence
  Description of Artificial Sequence: Synthetic peptide
  Seed: GMDPRMCSLMQGSTL
GMDFRMVSLMQPSTL

SEQ ID NO: 73151 - protein, 15 aa, Artificial Sequence
  Description of Artificial Sequence: Synthetic peptide
  Seed: GMDPRMCSLMQGSTL
GMDFRMVSLMQSSTL

SEQ ID NO: 73152 - protein, 15 aa, Artificial Sequence
  Description of Artificial Sequence: Synthetic peptide
  Seed: GMDPRMCSLMQGSTL
GMDFRMVSLMQTSTL

SEQ ID NO: 73153 - protein, 15 aa, Artificial Sequence
  Description of Artificial Sequence: Synthetic peptide
  Seed: GMDPRMCSLMQGSTL
GMDFRMVSMMQASTL

SEQ ID NO: 73154 - protein, 15 aa, Artificial Sequence
  Description of Artificial Sequence: Synthetic peptide
  Seed: GMDPRMCSLMQGSTL
GMDFRMVSMMQGSTL

SEQ ID NO: 73155 - protein, 15 aa, Artificial Sequence
  Description of Artificial Sequence: Synthetic peptide
  Seed: GMDPRMCSLMQGSTL
GMDFRMVSMMQHSTL

SEQ ID NO: 73156 - protein, 15 aa, Artificial Sequence
  Description of Artificial Sequence: Synthetic peptide
  Seed: GMDPRMCSLMQGSTL
GMDFRMVSMMQISTL

SEQ ID NO: 73157 - protein, 15 aa, Artificial Sequence
  Description of Artificial Sequence: Synthetic peptide
  Seed: GMDPRMCSLMQGSTL
GMDFRMVSMMQLSTL

SEQ ID NO: 73158 - protein, 15 aa, Artificial Sequence
  Description of Artificial Sequence: Synthetic peptide
  Seed: GMDPRMCSLMQGSTL
GMDFRMVSMMQMSTL

SEQ ID NO: 73159 - protein, 15 aa, Artificial Sequence
  Description of Artificial Sequence: Synthetic peptide
  Seed: GMDPRMCSLMQGSTL
GMDFRMVSMMQNSTL

SEQ ID NO: 73160 - protein, 15 aa, Artificial Sequence
  Description of Artificial Sequence: Synthetic peptide
  Seed: GMDPRMCSLMQGSTL
GMDFRMVSMMQPSTL

SEQ ID NO: 73161 - protein, 15 aa, Artificial Sequence
  Description of Artificial Sequence: Synthetic peptide
  Seed: GMDPRMCSLMQGSTL
GMDFRMVSMMQQSTL

SEQ ID NO: 73162 - protein, 15 aa, Artificial Sequence
  Description of Artificial Sequence: Synthetic peptide
  Seed: GMDPRMCSLMQGSTL
GMDFRMVSMMQSSTL

SEQ ID NO: 73163 - protein, 15 aa, Artificial Sequence
  Description of Artificial Sequence: Synthetic peptide
  Seed: GMDPRMCSLMQGSTL
GMDFRMVSMMQTSTL

SEQ ID NO: 73164 - protein, 15 aa, Artificial Sequence
  Description of Artificial Sequence: Synthetic peptide
  Seed: GMDPRMCSLMQGSTL
GMDFRMVSMMQVSTL

SEQ ID NO: 73165 - protein, 15 aa, Artificial Sequence
  Description of Artificial Sequence: Synthetic peptide
  Seed: GMDPRMCSLMQGSTL
GMDFRMVSNMQASTL

SEQ ID NO: 73166 - protein, 15 aa, Artificial Sequence
  Description of Artificial Sequence: Synthetic peptide
  Seed: GMDPRMCSLMQGSTL
GMDFRMVSNMQGSTL

SEQ ID NO: 73167 - protein, 15 aa, Artificial Sequence
  Description of Artificial Sequence: Synthetic peptide
  Seed: GMDPRMCSLMQGSTL
GMDFRMVSNMQHSTL

SEQ ID NO: 73168 - protein, 15 aa, Artificial Sequence
  Description of Artificial Sequence: Synthetic peptide
  Seed: GMDPRMCSLMQGSTL
GMDFRMVSNMQISTL

SEQ ID NO: 73169 - protein, 15 aa, Artificial Sequence
  Description of Artificial Sequence: Synthetic peptide
  Seed: GMDPRMCSLMQGSTL
GMDFRMVSNMQLSTL

SEQ ID NO: 73170 - protein, 15 aa, Artificial Sequence
  Description of Artificial Sequence: Synthetic peptide
  Seed: GMDPRMCSLMQGSTL
GMDFRMVSNMQMSTL

SEQ ID NO: 73171 - protein, 15 aa, Artificial Sequence
  Description of Artificial Sequence: Synthetic peptide
  Seed: GMDPRMCSLMQGSTL
GMDFRMVSNMQNSTL

SEQ ID NO: 73172 - protein, 15 aa, Artificial Sequence
  Description of Artificial Sequence: Synthetic peptide
  Seed: GMDPRMCSLMQGSTL
GMDFRMVSNMQPSTL

SEQ ID NO: 73173 - protein, 15 aa, Artificial Sequence
  Description of Artificial Sequence: Synthetic peptide
  Seed: GMDPRMCSLMQGSTL
GMDFRMVSNMQQSTL

SEQ ID NO: 73174 - protein, 15 aa, Artificial Sequence
  Description of Artificial Sequence: Synthetic peptide
  Seed: GMDPRMCSLMQGSTL
GMDFRMVSNMQSSTL

SEQ ID NO: 73175 - protein, 15 aa, Artificial Sequence
  Description of Artificial Sequence: Synthetic peptide
  Seed: GMDPRMCSLMQGSTL
GMDFRMVSNMQTSTL

SEQ ID NO: 73176 - protein, 15 aa, Artificial Sequence
  Description of Artificial Sequence: Synthetic peptide
  Seed: GMDPRMCSLMQGSTL
GMDFRMVSNMQVSTL

SEQ ID NO: 73177 - protein, 15 aa, Artificial Sequence
  Description of Artificial Sequence: Synthetic peptide
  Seed: GMDPRMCSLMQGSTL
GMDFRMVSPMQASTL

SEQ ID NO: 73178 - protein, 15 aa, Artificial Sequence
  Description of Artificial Sequence: Synthetic peptide
  Seed: GMDPRMCSLMQGSTL
GMDFRMVSPMQCSTL

SEQ ID NO: 73179 - protein, 15 aa, Artificial Sequence
  Description of Artificial Sequence: Synthetic peptide
  Seed: GMDPRMCSLMQGSTL
GMDFRMVSPMQDSTL

SEQ ID NO: 73180 - protein, 15 aa, Artificial Sequence
  Description of Artificial Sequence: Synthetic peptide
  Seed: GMDPRMCSLMQGSTL
GMDFRMVSPMQESTL

SEQ ID NO: 73181 - protein, 15 aa, Artificial Sequence
  Description of Artificial Sequence: Synthetic peptide
  Seed: GMDPRMCSLMQGSTL
GMDFRMVSPMQFSTL

SEQ ID NO: 73182 - protein, 15 aa, Artificial Sequence
  Description of Artificial Sequence: Synthetic peptide
  Seed: GMDPRMCSLMQGSTL
GMDFRMVSPMQGSTL

SEQ ID NO: 73183 - protein, 15 aa, Artificial Sequence
  Description of Artificial Sequence: Synthetic peptide
  Seed: GMDPRMCSLMQGSTL
GMDFRMVSPMQHSTL

SEQ ID NO: 73184 - protein, 15 aa, Artificial Sequence
  Description of Artificial Sequence: Synthetic peptide
  Seed: GMDPRMCSLMQGSTL
GMDFRMVSPMQISTL

SEQ ID NO: 73185 - protein, 15 aa, Artificial Sequence
  Description of Artificial Sequence: Synthetic peptide
  Seed: GMDPRMCSLMQGSTL
GMDFRMVSPMQKSTL

SEQ ID NO: 73186 - protein, 15 aa, Artificial Sequence
  Description of Artificial Sequence: Synthetic peptide
  Seed: GMDPRMCSLMQGSTL
GMDFRMVSPMQLSTL

SEQ ID NO: 73187 - protein, 15 aa, Artificial Sequence
  Description of Artificial Sequence: Synthetic peptide
  Seed: GMDPRMCSLMQGSTL
GMDFRMVSPMQMSTL

SEQ ID NO: 73188 - protein, 15 aa, Artificial Sequence
  Description of Artificial Sequence: Synthetic peptide
  Seed: GMDPRMCSLMQGSTL
GMDFRMVSPMQNSTL

SEQ ID NO: 73189 - protein, 15 aa, Artificial Sequence
  Description of Artificial Sequence: Synthetic peptide
  Seed: GMDPRMCSLMQGSTL
GMDFRMVSPMQPSTL

SEQ ID NO: 73190 - protein, 15 aa, Artificial Sequence
  Description of Artificial Sequence: Synthetic peptide
  Seed: GMDPRMCSLMQGSTL
GMDFRMVSPMQQSTL

SEQ ID NO: 73191 - protein, 15 aa, Artificial Sequence
  Description of Artificial Sequence: Synthetic peptide
  Seed: GMDPRMCSLMQGSTL
GMDFRMVSPMQSSTL

SEQ ID NO: 73192 - protein, 15 aa, Artificial Sequence
  Description of Artificial Sequence: Synthetic peptide
  Seed: GMDPRMCSLMQGSTL
GMDFRMVSPMQTSTL

SEQ ID NO: 73193 - protein, 15 aa, Artificial Sequence
  Description of Artificial Sequence: Synthetic peptide
  Seed: GMDPRMCSLMQGSTL
GMDFRMVSPMQVSTL

SEQ ID NO: 73194 - protein, 15 aa, Artificial Sequence
  Description of Artificial Sequence: Synthetic peptide
  Seed: GMDPRMCSLMQGSTL
GMDFRMVSPMQWSTL

SEQ ID NO: 73195 - protein, 15 aa, Artificial Sequence
  Description of Artificial Sequence: Synthetic peptide
  Seed: GMDPRMCSLMQGSTL
GMDFRMVSPMQYSTL

SEQ ID NO: 73196 - protein, 15 aa, Artificial Sequence
  Description of Artificial Sequence: Synthetic peptide
  Seed: GMDPRMCSLMQGSTL
GMDFRMVSQMQASTL

SEQ ID NO: 73197 - protein, 15 aa, Artificial Sequence
  Description of Artificial Sequence: Synthetic peptide
  Seed: GMDPRMCSLMQGSTL
GMDFRMVSQMQNSTL

SEQ ID NO: 73198 - protein, 15 aa, Artificial Sequence
  Description of Artificial Sequence: Synthetic peptide
  Seed: GMDPRMCSLMQGSTL
GMDFRMVSQMQSSTL

SEQ ID NO: 73199 - protein, 15 aa, Artificial Sequence
  Description of Artificial Sequence: Synthetic peptide
  Seed: GMDPRMCSLMQGSTL
GMDFRMVSSMQASTL

SEQ ID NO: 73200 - protein, 15 aa, Artificial Sequence
  Description of Artificial Sequence: Synthetic peptide
  Seed: GMDPRMCSLMQGSTL
GMDFRMVSSMQCSTL

SEQ ID NO: 73201 - protein, 15 aa, Artificial Sequence
  Description of Artificial Sequence: Synthetic peptide
  Seed: GMDPRMCSLMQGSTL
GMDFRMVSSMQDSTL

SEQ ID NO: 73202 - protein, 15 aa, Artificial Sequence
  Description of Artificial Sequence: Synthetic peptide
  Seed: GMDPRMCSLMQGSTL
GMDFRMVSSMQESTL

SEQ ID NO: 73203 - protein, 15 aa, Artificial Sequence
  Description of Artificial Sequence: Synthetic peptide
  Seed: GMDPRMCSLMQGSTL
GMDFRMVSSMQFSTL

SEQ ID NO: 73204 - protein, 15 aa, Artificial Sequence
  Description of Artificial Sequence: Synthetic peptide
  Seed: GMDPRMCSLMQGSTL
GMDFRMVSSMQGSTL

SEQ ID NO: 73205 - protein, 15 aa, Artificial Sequence
  Description of Artificial Sequence: Synthetic peptide
  Seed: GMDPRMCSLMQGSTL
GMDFRMVSSMQHSTL

SEQ ID NO: 73206 - protein, 15 aa, Artificial Sequence
  Description of Artificial Sequence: Synthetic peptide
  Seed: GMDPRMCSLMQGSTL
GMDFRMVSSMQISTL

SEQ ID NO: 73207 - protein, 15 aa, Artificial Sequence
  Description of Artificial Sequence: Synthetic peptide
  Seed: GMDPRMCSLMQGSTL
GMDFRMVSSMQKSTL

SEQ ID NO: 73208 - protein, 15 aa, Artificial Sequence
  Description of Artificial Sequence: Synthetic peptide
  Seed: GMDPRMCSLMQGSTL
GMDFRMVSSMQLSTL

SEQ ID NO: 73209 - protein, 15 aa, Artificial Sequence
  Description of Artificial Sequence: Synthetic peptide
  Seed: GMDPRMCSLMQGSTL
GMDFRMVSSMQMSTL

SEQ ID NO: 73210 - protein, 15 aa, Artificial Sequence
  Description of Artificial Sequence: Synthetic peptide
  Seed: GMDPRMCSLMQGSTL
GMDFRMVSSMQNSTL

SEQ ID NO: 73211 - protein, 15 aa, Artificial Sequence
  Description of Artificial Sequence: Synthetic peptide
  Seed: GMDPRMCSLMQGSTL
GMDFRMVSSMQPSTL

SEQ ID NO: 73212 - protein, 15 aa, Artificial Sequence
  Description of Artificial Sequence: Synthetic peptide
  Seed: GMDPRMCSLMQGSTL
GMDFRMVSSMQQSTL

SEQ ID NO: 73213 - protein, 15 aa, Artificial Sequence
  Description of Artificial Sequence: Synthetic peptide
  Seed: GMDPRMCSLMQGSTL
GMDFRMVSSMQSSTL

SEQ ID NO: 73214 - protein, 15 aa, Artificial Sequence
  Description of Artificial Sequence: Synthetic peptide
  Seed: GMDPRMCSLMQGSTL
GMDFRMVSSMQTSTL

SEQ ID NO: 73215 - protein, 15 aa, Artificial Sequence
  Description of Artificial Sequence: Synthetic peptide
  Seed: GMDPRMCSLMQGSTL
GMDFRMVSSMQVSTL

SEQ ID NO: 73216 - protein, 15 aa, Artificial Sequence
  Description of Artificial Sequence: Synthetic peptide
  Seed: GMDPRMCSLMQGSTL
GMDFRMVSSMQYSTL

SEQ ID NO: 73217 - protein, 15 aa, Artificial Sequence
  Description of Artificial Sequence: Synthetic peptide
  Seed: GMDPRMCSLMQGSTL
GMDFRMVSTMQASTL

SEQ ID NO: 73218 - protein, 15 aa, Artificial Sequence
  Description of Artificial Sequence: Synthetic peptide
  Seed: GMDPRMCSLMQGSTL
GMDFRMVSTMQCSTL

SEQ ID NO: 73219 - protein, 15 aa, Artificial Sequence
  Description of Artificial Sequence: Synthetic peptide
  Seed: GMDPRMCSLMQGSTL
GMDFRMVSTMQDSTL

SEQ ID NO: 73220 - protein, 15 aa, Artificial Sequence
  Description of Artificial Sequence: Synthetic peptide
  Seed: GMDPRMCSLMQGSTL
GMDFRMVSTMQESTL

SEQ ID NO: 73221 - protein, 15 aa, Artificial Sequence
  Description of Artificial Sequence: Synthetic peptide
  Seed: GMDPRMCSLMQGSTL
GMDFRMVSTMQFSTL

SEQ ID NO: 73222 - protein, 15 aa, Artificial Sequence
  Description of Artificial Sequence: Synthetic peptide
  Seed: GMDPRMCSLMQGSTL
GMDFRMVSTMQGSTL

SEQ ID NO: 73223 - protein, 15 aa, Artificial Sequence
  Description of Artificial Sequence: Synthetic peptide
  Seed: GMDPRMCSLMQGSTL
GMDFRMVSTMQHSTL

SEQ ID NO: 73224 - protein, 15 aa, Artificial Sequence
  Description of Artificial Sequence: Synthetic peptide
  Seed: GMDPRMCSLMQGSTL
GMDFRMVSTMQISTL

SEQ ID NO: 73225 - protein, 15 aa, Artificial Sequence
  Description of Artificial Sequence: Synthetic peptide
  Seed: GMDPRMCSLMQGSTL
GMDFRMVSTMQKSTL

SEQ ID NO: 73226 - protein, 15 aa, Artificial Sequence
  Description of Artificial Sequence: Synthetic peptide
  Seed: GMDPRMCSLMQGSTL
GMDFRMVSTMQLSTL

SEQ ID NO: 73227 - protein, 15 aa, Artificial Sequence
  Description of Artificial Sequence: Synthetic peptide
  Seed: GMDPRMCSLMQGSTL
GMDFRMVSTMQMSTL

SEQ ID NO: 73228 - protein, 15 aa, Artificial Sequence
  Description of Artificial Sequence: Synthetic peptide
  Seed: GMDPRMCSLMQGSTL
GMDFRMVSTMQNSTL

SEQ ID NO: 73229 - protein, 15 aa, Artificial Sequence
  Description of Artificial Sequence: Synthetic peptide
  Seed: GMDPRMCSLMQGSTL
GMDFRMVSTMQPSTL

SEQ ID NO: 73230 - protein, 15 aa, Artificial Sequence
  Description of Artificial Sequence: Synthetic peptide
  Seed: GMDPRMCSLMQGSTL
GMDFRMVSTMQQSTL

SEQ ID NO: 73231 - protein, 15 aa, Artificial Sequence
  Description of Artificial Sequence: Synthetic peptide
  Seed: GMDPRMCSLMQGSTL
GMDFRMVSTMQRSTL

SEQ ID NO: 73232 - protein, 15 aa, Artificial Sequence
  Description of Artificial Sequence: Synthetic peptide
  Seed: GMDPRMCSLMQGSTL
GMDFRMVSTMQSSTL

SEQ ID NO: 73233 - protein, 15 aa, Artificial Sequence
  Description of Artificial Sequence: Synthetic peptide
  Seed: GMDPRMCSLMQGSTL
GMDFRMVSTMQTSTL

SEQ ID NO: 73234 - protein, 15 aa, Artificial Sequence
  Description of Artificial Sequence: Synthetic peptide
  Seed: GMDPRMCSLMQGSTL
GMDFRMVSTMQVSTL

SEQ ID NO: 73235 - protein, 15 aa, Artificial Sequence
  Description of Artificial Sequence: Synthetic peptide
  Seed: GMDPRMCSLMQGSTL
GMDFRMVSTMQYSTL

SEQ ID NO: 73236 - protein, 15 aa, Artificial Sequence
  Description of Artificial Sequence: Synthetic peptide
  Seed: GMDPRMCSLMQGSTL
GMDFRMVSVMQASTL

SEQ ID NO: 73237 - protein, 15 aa, Artificial Sequence
  Description of Artificial Sequence: Synthetic peptide
  Seed: GMDPRMCSLMQGSTL
GMDFRMVSVMQDSTL

SEQ ID NO: 73238 - protein, 15 aa, Artificial Sequence
  Description of Artificial Sequence: Synthetic peptide
  Seed: GMDPRMCSLMQGSTL
GMDFRMVSVMQESTL

SEQ ID NO: 73239 - protein, 15 aa, Artificial Sequence
  Description of Artificial Sequence: Synthetic peptide
  Seed: GMDPRMCSLMQGSTL
GMDFRMVSVMQGSTL

SEQ ID NO: 73240 - protein, 15 aa, Artificial Sequence
  Description of Artificial Sequence: Synthetic peptide
  Seed: GMDPRMCSLMQGSTL
GMDFRMVSVMQHSTL

SEQ ID NO: 73241 - protein, 15 aa, Artificial Sequence
  Description of Artificial Sequence: Synthetic peptide
  Seed: GMDPRMCSLMQGSTL
GMDFRMVSVMQISTL

SEQ ID NO: 73242 - protein, 15 aa, Artificial Sequence
  Description of Artificial Sequence: Synthetic peptide
  Seed: GMDPRMCSLMQGSTL
GMDFRMVSVMQKSTL

SEQ ID NO: 73243 - protein, 15 aa, Artificial Sequence
  Description of Artificial Sequence: Synthetic peptide
  Seed: GMDPRMCSLMQGSTL
GMDFRMVSVMQLSTL

SEQ ID NO: 73244 - protein, 15 aa, Artificial Sequence
  Description of Artificial Sequence: Synthetic peptide
  Seed: GMDPRMCSLMQGSTL
GMDFRMVSVMQMSTL

SEQ ID NO: 73245 - protein, 15 aa, Artificial Sequence
  Description of Artificial Sequence: Synthetic peptide
  Seed: GMDPRMCSLMQGSTL
GMDFRMVSVMQNSTL

SEQ ID NO: 73246 - protein, 15 aa, Artificial Sequence
  Description of Artificial Sequence: Synthetic peptide
  Seed: GMDPRMCSLMQGSTL
GMDFRMVSVMQPSTL

SEQ ID NO: 73247 - protein, 15 aa, Artificial Sequence
  Description of Artificial Sequence: Synthetic peptide
  Seed: GMDPRMCSLMQGSTL
GMDFRMVSVMQQSTL

SEQ ID NO: 73248 - protein, 15 aa, Artificial Sequence
  Description of Artificial Sequence: Synthetic peptide
  Seed: GMDPRMCSLMQGSTL
GMDFRMVSVMQSSTL

SEQ ID NO: 73249 - protein, 15 aa, Artificial Sequence
  Description of Artificial Sequence: Synthetic peptide
  Seed: GMDPRMCSLMQGSTL
GMDFRMVSVMQTSTL

SEQ ID NO: 73250 - protein, 15 aa, Artificial Sequence
  Description of Artificial Sequence: Synthetic peptide
  Seed: GMDPRMCSLMQGSTL
GMDFRMVSVMQVSTL

SEQ ID NO: 73251 - protein, 15 aa, Artificial Sequence
  Description of Artificial Sequence: Synthetic peptide
  Seed: GMDPRMCSLMQGSTL
GMDFRMVSWMQASTL

SEQ ID NO: 73252 - protein, 15 aa, Artificial Sequence
  Description of Artificial Sequence: Synthetic peptide
  Seed: GMDPRMCSLMQGSTL
GMDFRMVSWMQNSTL

SEQ ID NO: 73253 - protein, 15 aa, Artificial Sequence
  Description of Artificial Sequence: Synthetic peptide
  Seed: GMDPRMCSLMQGSTL
GMDFRMVSWMQSSTL

SEQ ID NO: 73254 - protein, 15 aa, Artificial Sequence
  Description of Artificial Sequence: Synthetic peptide
  Seed: GMDPRMCSLMQGSTL
GMDFRMVSYMQASTL

SEQ ID NO: 73255 - protein, 15 aa, Artificial Sequence
  Description of Artificial Sequence: Synthetic peptide
  Seed: GMDPRMCSLMQGSTL
GMDFRMWSAMQASTL

SEQ ID NO: 73256 - protein, 15 aa, Artificial Sequence
  Description of Artificial Sequence: Synthetic peptide
  Seed: GMDPRMCSLMQGSTL
GMDFRMWSAMQGSTL

SEQ ID NO: 73257 - protein, 15 aa, Artificial Sequence
  Description of Artificial Sequence: Synthetic peptide
  Seed: GMDPRMCSLMQGSTL
GMDFRMWSAMQHSTL

SEQ ID NO: 73258 - protein, 15 aa, Artificial Sequence
  Description of Artificial Sequence: Synthetic peptide
  Seed: GMDPRMCSLMQGSTL
GMDFRMWSAMQISTL

SEQ ID NO: 73259 - protein, 15 aa, Artificial Sequence
  Description of Artificial Sequence: Synthetic peptide
  Seed: GMDPRMCSLMQGSTL
GMDFRMWSAMQLSTL

SEQ ID NO: 73260 - protein, 15 aa, Artificial Sequence
  Description of Artificial Sequence: Synthetic peptide
  Seed: GMDPRMCSLMQGSTL
GMDFRMWSAMQMSTL

SEQ ID NO: 73261 - protein, 15 aa, Artificial Sequence
  Description of Artificial Sequence: Synthetic peptide
  Seed: GMDPRMCSLMQGSTL
GMDFRMWSAMQNSTL

SEQ ID NO: 73262 - protein, 15 aa, Artificial Sequence
  Description of Artificial Sequence: Synthetic peptide
  Seed: GMDPRMCSLMQGSTL
GMDFRMWSAMQPSTL

SEQ ID NO: 73263 - protein, 15 aa, Artificial Sequence
  Description of Artificial Sequence: Synthetic peptide
  Seed: GMDPRMCSLMQGSTL
GMDFRMWSAMQSSTL

SEQ ID NO: 73264 - protein, 15 aa, Artificial Sequence
  Description of Artificial Sequence: Synthetic peptide
  Seed: GMDPRMCSLMQGSTL
GMDFRMWSAMQTSTL

SEQ ID NO: 73265 - protein, 15 aa, Artificial Sequence
  Description of Artificial Sequence: Synthetic peptide
  Seed: GMDPRMCSLMQGSTL
GMDFRMWSAMQVSTL

SEQ ID NO: 73266 - protein, 15 aa, Artificial Sequence
  Description of Artificial Sequence: Synthetic peptide
  Seed: GMDPRMCSLMQGSTL
GMDFRMWSGMQASTL

SEQ ID NO: 73267 - protein, 15 aa, Artificial Sequence
  Description of Artificial Sequence: Synthetic peptide
  Seed: GMDPRMCSLMQGSTL
GMDFRMWSGMQSSTL

SEQ ID NO: 73268 - protein, 15 aa, Artificial Sequence
  Description of Artificial Sequence: Synthetic peptide
  Seed: GMDPRMCSLMQGSTL
GMDFRMWSHMQASTL

SEQ ID NO: 73269 - protein, 15 aa, Artificial Sequence
  Description of Artificial Sequence: Synthetic peptide
  Seed: GMDPRMCSLMQGSTL
GMDFRMWSIMQASTL

SEQ ID NO: 73270 - protein, 15 aa, Artificial Sequence
  Description of Artificial Sequence: Synthetic peptide
  Seed: GMDPRMCSLMQGSTL
GMDFRMWSIMQGSTL

SEQ ID NO: 73271 - protein, 15 aa, Artificial Sequence
  Description of Artificial Sequence: Synthetic peptide
  Seed: GMDPRMCSLMQGSTL
GMDFRMWSIMQHSTL

SEQ ID NO: 73272 - protein, 15 aa, Artificial Sequence
  Description of Artificial Sequence: Synthetic peptide
  Seed: GMDPRMCSLMQGSTL
GMDFRMWSIMQISTL

SEQ ID NO: 73273 - protein, 15 aa, Artificial Sequence
  Description of Artificial Sequence: Synthetic peptide
  Seed: GMDPRMCSLMQGSTL
GMDFRMWSIMQMSTL

SEQ ID NO: 73274 - protein, 15 aa, Artificial Sequence
  Description of Artificial Sequence: Synthetic peptide
  Seed: GMDPRMCSLMQGSTL
GMDFRMWSIMQNSTL

SEQ ID NO: 73275 - protein, 15 aa, Artificial Sequence
  Description of Artificial Sequence: Synthetic peptide
  Seed: GMDPRMCSLMQGSTL
GMDFRMWSIMQSSTL

SEQ ID NO: 73276 - protein, 15 aa, Artificial Sequence
  Description of Artificial Sequence: Synthetic peptide
  Seed: GMDPRMCSLMQGSTL
GMDFRMWSIMQTSTL

SEQ ID NO: 73277 - protein, 15 aa, Artificial Sequence
  Description of Artificial Sequence: Synthetic peptide
  Seed: GMDPRMCSLMQGSTL
GMDFRMWSIMQVSTL

SEQ ID NO: 73278 - protein, 15 aa, Artificial Sequence
  Description of Artificial Sequence: Synthetic peptide
  Seed: GMDPRMCSLMQGSTL
GMDFRMWSLMQASTL

SEQ ID NO: 73279 - protein, 15 aa, Artificial Sequence
  Description of Artificial Sequence: Synthetic peptide
  Seed: GMDPRMCSLMQGSTL
GMDFRMWSLMQGSTL

SEQ ID NO: 73280 - protein, 15 aa, Artificial Sequence
  Description of Artificial Sequence: Synthetic peptide
  Seed: GMDPRMCSLMQGSTL
GMDFRMWSLMQNSTL

SEQ ID NO: 73281 - protein, 15 aa, Artificial Sequence
  Description of Artificial Sequence: Synthetic peptide
  Seed: GMDPRMCSLMQGSTL
GMDFRMWSLMQSSTL

SEQ ID NO: 73282 - protein, 15 aa, Artificial Sequence
  Description of Artificial Sequence: Synthetic peptide
  Seed: GMDPRMCSLMQGSTL
GMDFRMWSLMQTSTL

SEQ ID NO: 73283 - protein, 15 aa, Artificial Sequence
  Description of Artificial Sequence: Synthetic peptide
  Seed: GMDPRMCSLMQGSTL
GMDFRMWSMMQASTL

SEQ ID NO: 73284 - protein, 15 aa, Artificial Sequence
  Description of Artificial Sequence: Synthetic peptide
  Seed: GMDPRMCSLMQGSTL
GMDFRMWSMMQGSTL

SEQ ID NO: 73285 - protein, 15 aa, Artificial Sequence
  Description of Artificial Sequence: Synthetic peptide
  Seed: GMDPRMCSLMQGSTL
GMDFRMWSMMQNSTL

SEQ ID NO: 73286 - protein, 15 aa, Artificial Sequence
  Description of Artificial Sequence: Synthetic peptide
  Seed: GMDPRMCSLMQGSTL
GMDFRMWSMMQSSTL

SEQ ID NO: 73287 - protein, 15 aa, Artificial Sequence
  Description of Artificial Sequence: Synthetic peptide
  Seed: GMDPRMCSLMQGSTL
GMDFRMWSMMQVSTL

SEQ ID NO: 73288 - protein, 15 aa, Artificial Sequence
  Description of Artificial Sequence: Synthetic peptide
  Seed: GMDPRMCSLMQGSTL
GMDFRMWSNMQASTL

SEQ ID NO: 73289 - protein, 15 aa, Artificial Sequence
  Description of Artificial Sequence: Synthetic peptide
  Seed: GMDPRMCSLMQGSTL
GMDFRMWSNMQSSTL

SEQ ID NO: 73290 - protein, 15 aa, Artificial Sequence
  Description of Artificial Sequence: Synthetic peptide
  Seed: GMDPRMCSLMQGSTL
GMDFRMWSPMQASTL

SEQ ID NO: 73291 - protein, 15 aa, Artificial Sequence
  Description of Artificial Sequence: Synthetic peptide
  Seed: GMDPRMCSLMQGSTL
GMDFRMWSPMQGSTL

SEQ ID NO: 73292 - protein, 15 aa, Artificial Sequence
  Description of Artificial Sequence: Synthetic peptide
  Seed: GMDPRMCSLMQGSTL
GMDFRMWSPMQHSTL

SEQ ID NO: 73293 - protein, 15 aa, Artificial Sequence
  Description of Artificial Sequence: Synthetic peptide
  Seed: GMDPRMCSLMQGSTL
GMDFRMWSPMQISTL

SEQ ID NO: 73294 - protein, 15 aa, Artificial Sequence
  Description of Artificial Sequence: Synthetic peptide
  Seed: GMDPRMCSLMQGSTL
GMDFRMWSPMQLSTL

SEQ ID NO: 73295 - protein, 15 aa, Artificial Sequence
  Description of Artificial Sequence: Synthetic peptide
  Seed: GMDPRMCSLMQGSTL
GMDFRMWSPMQMSTL

SEQ ID NO: 73296 - protein, 15 aa, Artificial Sequence
  Description of Artificial Sequence: Synthetic peptide
  Seed: GMDPRMCSLMQGSTL
GMDFRMWSPMQNSTL

SEQ ID NO: 73297 - protein, 15 aa, Artificial Sequence
  Description of Artificial Sequence: Synthetic peptide
  Seed: GMDPRMCSLMQGSTL
GMDFRMWSPMQSSTL

SEQ ID NO: 73298 - protein, 15 aa, Artificial Sequence
  Description of Artificial Sequence: Synthetic peptide
  Seed: GMDPRMCSLMQGSTL
GMDFRMWSPMQTSTL

SEQ ID NO: 73299 - protein, 15 aa, Artificial Sequence
  Description of Artificial Sequence: Synthetic peptide
  Seed: GMDPRMCSLMQGSTL
GMDFRMWSPMQVSTL

SEQ ID NO: 73300 - protein, 15 aa, Artificial Sequence
  Description of Artificial Sequence: Synthetic peptide
  Seed: GMDPRMCSLMQGSTL
GMDFRMWSSMQASTL

SEQ ID NO: 73301 - protein, 15 aa, Artificial Sequence
  Description of Artificial Sequence: Synthetic peptide
  Seed: GMDPRMCSLMQGSTL
GMDFRMWSSMQGSTL

SEQ ID NO: 73302 - protein, 15 aa, Artificial Sequence
  Description of Artificial Sequence: Synthetic peptide
  Seed: GMDPRMCSLMQGSTL
GMDFRMWSSMQISTL

SEQ ID NO: 73303 - protein, 15 aa, Artificial Sequence
  Description of Artificial Sequence: Synthetic peptide
  Seed: GMDPRMCSLMQGSTL
GMDFRMWSSMQLSTL

SEQ ID NO: 73304 - protein, 15 aa, Artificial Sequence
  Description of Artificial Sequence: Synthetic peptide
  Seed: GMDPRMCSLMQGSTL
GMDFRMWSSMQNSTL

SEQ ID NO: 73305 - protein, 15 aa, Artificial Sequence
  Description of Artificial Sequence: Synthetic peptide
  Seed: GMDPRMCSLMQGSTL
GMDFRMWSSMQSSTL

SEQ ID NO: 73306 - protein, 15 aa, Artificial Sequence
  Description of Artificial Sequence: Synthetic peptide
  Seed: GMDPRMCSLMQGSTL
GMDFRMWSSMQTSTL

SEQ ID NO: 73307 - protein, 15 aa, Artificial Sequence
  Description of Artificial Sequence: Synthetic peptide
  Seed: GMDPRMCSLMQGSTL
GMDFRMWSSMQVSTL

SEQ ID NO: 73308 - protein, 15 aa, Artificial Sequence
  Description of Artificial Sequence: Synthetic peptide
  Seed: GMDPRMCSLMQGSTL
GMDFRMWSTMQASTL

SEQ ID NO: 73309 - protein, 15 aa, Artificial Sequence
  Description of Artificial Sequence: Synthetic peptide
  Seed: GMDPRMCSLMQGSTL
GMDFRMWSTMQHSTL

SEQ ID NO: 73310 - protein, 15 aa, Artificial Sequence
  Description of Artificial Sequence: Synthetic peptide
  Seed: GMDPRMCSLMQGSTL
GMDFRMWSTMQISTL

SEQ ID NO: 73311 - protein, 15 aa, Artificial Sequence
  Description of Artificial Sequence: Synthetic peptide
  Seed: GMDPRMCSLMQGSTL
GMDFRMWSTMQLSTL

SEQ ID NO: 73312 - protein, 15 aa, Artificial Sequence
  Description of Artificial Sequence: Synthetic peptide
  Seed: GMDPRMCSLMQGSTL
GMDFRMWSTMQMSTL

SEQ ID NO: 73313 - protein, 15 aa, Artificial Sequence
  Description of Artificial Sequence: Synthetic peptide
  Seed: GMDPRMCSLMQGSTL
GMDFRMWSTMQNSTL

SEQ ID NO: 73314 - protein, 15 aa, Artificial Sequence
  Description of Artificial Sequence: Synthetic peptide
  Seed: GMDPRMCSLMQGSTL
GMDFRMWSTMQSSTL

SEQ ID NO: 73315 - protein, 15 aa, Artificial Sequence
  Description of Artificial Sequence: Synthetic peptide
  Seed: GMDPRMCSLMQGSTL
GMDFRMWSTMQTSTL

SEQ ID NO: 73316 - protein, 15 aa, Artificial Sequence
  Description of Artificial Sequence: Synthetic peptide
  Seed: GMDPRMCSLMQGSTL
GMDFRMWSTMQVSTL

SEQ ID NO: 73317 - protein, 15 aa, Artificial Sequence
  Description of Artificial Sequence: Synthetic peptide
  Seed: GMDPRMCSLMQGSTL
GMDFRMWSVMQASTL

SEQ ID NO: 73318 - protein, 15 aa, Artificial Sequence
  Description of Artificial Sequence: Synthetic peptide
  Seed: GMDPRMCSLMQGSTL
GMDFRMWSVMQGSTL

SEQ ID NO: 73319 - protein, 15 aa, Artificial Sequence
  Description of Artificial Sequence: Synthetic peptide
  Seed: GMDPRMCSLMQGSTL
GMDFRMWSVMQHSTL

SEQ ID NO: 73320 - protein, 15 aa, Artificial Sequence
  Description of Artificial Sequence: Synthetic peptide
  Seed: GMDPRMCSLMQGSTL
GMDFRMWSVMQISTL

SEQ ID NO: 73321 - protein, 15 aa, Artificial Sequence
  Description of Artificial Sequence: Synthetic peptide
  Seed: GMDPRMCSLMQGSTL
GMDFRMWSVMQLSTL

SEQ ID NO: 73322 - protein, 15 aa, Artificial Sequence
  Description of Artificial Sequence: Synthetic peptide
  Seed: GMDPRMCSLMQGSTL
GMDFRMWSVMQMSTL

SEQ ID NO: 73323 - protein, 15 aa, Artificial Sequence
  Description of Artificial Sequence: Synthetic peptide
  Seed: GMDPRMCSLMQGSTL
GMDFRMWSVMQNSTL

SEQ ID NO: 73324 - protein, 15 aa, Artificial Sequence
  Description of Artificial Sequence: Synthetic peptide
  Seed: GMDPRMCSLMQGSTL
GMDFRMWSVMQPSTL

SEQ ID NO: 73325 - protein, 15 aa, Artificial Sequence
  Description of Artificial Sequence: Synthetic peptide
  Seed: GMDPRMCSLMQGSTL
GMDFRMWSVMQSSTL

SEQ ID NO: 73326 - protein, 15 aa, Artificial Sequence
  Description of Artificial Sequence: Synthetic peptide
  Seed: GMDPRMCSLMQGSTL
GMDFRMWSVMQTSTL

SEQ ID NO: 73327 - protein, 15 aa, Artificial Sequence
  Description of Artificial Sequence: Synthetic peptide
  Seed: GMDPRMCSLMQGSTL
GMDFRMWSVMQVSTL

SEQ ID NO: 73328 - protein, 15 aa, Artificial Sequence
  Description of Artificial Sequence: Synthetic peptide
  Seed: GMDPRMCSLMQGSTL
GMDFRMYSAMQASTL

SEQ ID NO: 73329 - protein, 15 aa, Artificial Sequence
  Description of Artificial Sequence: Synthetic peptide
  Seed: GMDPRMCSLMQGSTL
GMDFRMYSAMQGSTL

SEQ ID NO: 73330 - protein, 15 aa, Artificial Sequence
  Description of Artificial Sequence: Synthetic peptide
  Seed: GMDPRMCSLMQGSTL
GMDFRMYSAMQHSTL

SEQ ID NO: 73331 - protein, 15 aa, Artificial Sequence
  Description of Artificial Sequence: Synthetic peptide
  Seed: GMDPRMCSLMQGSTL
GMDFRMYSAMQISTL

SEQ ID NO: 73332 - protein, 15 aa, Artificial Sequence
  Description of Artificial Sequence: Synthetic peptide
  Seed: GMDPRMCSLMQGSTL
GMDFRMYSAMQLSTL

SEQ ID NO: 73333 - protein, 15 aa, Artificial Sequence
  Description of Artificial Sequence: Synthetic peptide
  Seed: GMDPRMCSLMQGSTL
GMDFRMYSAMQMSTL

SEQ ID NO: 73334 - protein, 15 aa, Artificial Sequence
  Description of Artificial Sequence: Synthetic peptide
  Seed: GMDPRMCSLMQGSTL
GMDFRMYSAMQNSTL

SEQ ID NO: 73335 - protein, 15 aa, Artificial Sequence
  Description of Artificial Sequence: Synthetic peptide
  Seed: GMDPRMCSLMQGSTL
GMDFRMYSAMQQSTL

SEQ ID NO: 73336 - protein, 15 aa, Artificial Sequence
  Description of Artificial Sequence: Synthetic peptide
  Seed: GMDPRMCSLMQGSTL
GMDFRMYSAMQSSTL

SEQ ID NO: 73337 - protein, 15 aa, Artificial Sequence
  Description of Artificial Sequence: Synthetic peptide
  Seed: GMDPRMCSLMQGSTL
GMDFRMYSAMQTSTL

SEQ ID NO: 73338 - protein, 15 aa, Artificial Sequence
  Description of Artificial Sequence: Synthetic peptide
  Seed: GMDPRMCSLMQGSTL
GMDFRMYSAMQVSTL

SEQ ID NO: 73339 - protein, 15 aa, Artificial Sequence
  Description of Artificial Sequence: Synthetic peptide
  Seed: GMDPRMCSLMQGSTL
GMDFRMYSGMQASTL

SEQ ID NO: 73340 - protein, 15 aa, Artificial Sequence
  Description of Artificial Sequence: Synthetic peptide
  Seed: GMDPRMCSLMQGSTL
GMDFRMYSGMQSSTL

SEQ ID NO: 73341 - protein, 15 aa, Artificial Sequence
  Description of Artificial Sequence: Synthetic peptide
  Seed: GMDPRMCSLMQGSTL
GMDFRMYSHMQSSTL

SEQ ID NO: 73342 - protein, 15 aa, Artificial Sequence
  Description of Artificial Sequence: Synthetic peptide
  Seed: GMDPRMCSLMQGSTL
GMDFRMYSIMQASTL

SEQ ID NO: 73343 - protein, 15 aa, Artificial Sequence
  Description of Artificial Sequence: Synthetic peptide
  Seed: GMDPRMCSLMQGSTL
GMDFRMYSIMQGSTL

SEQ ID NO: 73344 - protein, 15 aa, Artificial Sequence
  Description of Artificial Sequence: Synthetic peptide
  Seed: GMDPRMCSLMQGSTL
GMDFRMYSIMQHSTL

SEQ ID NO: 73345 - protein, 15 aa, Artificial Sequence
  Description of Artificial Sequence: Synthetic peptide
  Seed: GMDPRMCSLMQGSTL
GMDFRMYSIMQISTL

SEQ ID NO: 73346 - protein, 15 aa, Artificial Sequence
  Description of Artificial Sequence: Synthetic peptide
  Seed: GMDPRMCSLMQGSTL
GMDFRMYSIMQNSTL

SEQ ID NO: 73347 - protein, 15 aa, Artificial Sequence
  Description of Artificial Sequence: Synthetic peptide
  Seed: GMDPRMCSLMQGSTL
GMDFRMYSIMQSSTL

SEQ ID NO: 73348 - protein, 15 aa, Artificial Sequence
  Description of Artificial Sequence: Synthetic peptide
  Seed: GMDPRMCSLMQGSTL
GMDFRMYSIMQVSTL

SEQ ID NO: 73349 - protein, 15 aa, Artificial Sequence
  Description of Artificial Sequence: Synthetic peptide
  Seed: GMDPRMCSLMQGSTL
GMDFRMYSKMQASTL

SEQ ID NO: 73350 - protein, 15 aa, Artificial Sequence
  Description of Artificial Sequence: Synthetic peptide
  Seed: GMDPRMCSLMQGSTL
GMDFRMYSLMQNSTL

SEQ ID NO: 73351 - protein, 15 aa, Artificial Sequence
  Description of Artificial Sequence: Synthetic peptide
  Seed: GMDPRMCSLMQGSTL
GMDFRMYSMMQLSTL

SEQ ID NO: 73352 - protein, 15 aa, Artificial Sequence
  Description of Artificial Sequence: Synthetic peptide
  Seed: GMDPRMCSLMQGSTL
GMDFRMYSMMQMSTL

SEQ ID NO: 73353 - protein, 15 aa, Artificial Sequence
  Description of Artificial Sequence: Synthetic peptide
  Seed: GMDPRMCSLMQGSTL
GMDFRMYSNMQASTL

SEQ ID NO: 73354 - protein, 15 aa, Artificial Sequence
  Description of Artificial Sequence: Synthetic peptide
  Seed: GMDPRMCSLMQGSTL
GMDFRMYSPMQASTL

SEQ ID NO: 73355 - protein, 15 aa, Artificial Sequence
  Description of Artificial Sequence: Synthetic peptide
  Seed: GMDPRMCSLMQGSTL
GMDFRMYSPMQGSTL

SEQ ID NO: 73356 - protein, 15 aa, Artificial Sequence
  Description of Artificial Sequence: Synthetic peptide
  Seed: GMDPRMCSLMQGSTL
GMDFRMYSPMQISTL

SEQ ID NO: 73357 - protein, 15 aa, Artificial Sequence
  Description of Artificial Sequence: Synthetic peptide
  Seed: GMDPRMCSLMQGSTL
GMDFRMYSPMQNSTL

SEQ ID NO: 73358 - protein, 15 aa, Artificial Sequence
  Description of Artificial Sequence: Synthetic peptide
  Seed: GMDPRMCSLMQGSTL
GMDFRMYSPMQSSTL

SEQ ID NO: 73359 - protein, 15 aa, Artificial Sequence
  Description of Artificial Sequence: Synthetic peptide
  Seed: GMDPRMCSLMQGSTL
GMDFRMYSPMQTSTL

SEQ ID NO: 73360 - protein, 15 aa, Artificial Sequence
  Description of Artificial Sequence: Synthetic peptide
  Seed: GMDPRMCSLMQGSTL
GMDFRMYSPMQVSTL

SEQ ID NO: 73361 - protein, 15 aa, Artificial Sequence
  Description of Artificial Sequence: Synthetic peptide
  Seed: GMDPRMCSLMQGSTL
GMDFRMYSRMQSSTL

SEQ ID NO: 73362 - protein, 15 aa, Artificial Sequence
  Description of Artificial Sequence: Synthetic peptide
  Seed: GMDPRMCSLMQGSTL
GMDFRMYSSMQASTL

SEQ ID NO: 73363 - protein, 15 aa, Artificial Sequence
  Description of Artificial Sequence: Synthetic peptide
  Seed: GMDPRMCSLMQGSTL
GMDFRMYSSMQGSTL

SEQ ID NO: 73364 - protein, 15 aa, Artificial Sequence
  Description of Artificial Sequence: Synthetic peptide
  Seed: GMDPRMCSLMQGSTL
GMDFRMYSSMQISTL

SEQ ID NO: 73365 - protein, 15 aa, Artificial Sequence
  Description of Artificial Sequence: Synthetic peptide
  Seed: GMDPRMCSLMQGSTL
GMDFRMYSSMQNSTL

SEQ ID NO: 73366 - protein, 15 aa, Artificial Sequence
  Description of Artificial Sequence: Synthetic peptide
  Seed: GMDPRMCSLMQGSTL
GMDFRMYSSMQSSTL

SEQ ID NO: 73367 - protein, 15 aa, Artificial Sequence
  Description of Artificial Sequence: Synthetic peptide
  Seed: GMDPRMCSLMQGSTL
GMDFRMYSSMQTSTL

SEQ ID NO: 73368 - protein, 15 aa, Artificial Sequence
  Description of Artificial Sequence: Synthetic peptide
  Seed: GMDPRMCSLMQGSTL
GMDFRMYSSMQVSTL

SEQ ID NO: 73369 - protein, 15 aa, Artificial Sequence
  Description of Artificial Sequence: Synthetic peptide
  Seed: GMDPRMCSLMQGSTL
GMDFRMYSTMQASTL

SEQ ID NO: 73370 - protein, 15 aa, Artificial Sequence
  Description of Artificial Sequence: Synthetic peptide
  Seed: GMDPRMCSLMQGSTL
GMDFRMYSTMQGSTL

SEQ ID NO: 73371 - protein, 15 aa, Artificial Sequence
  Description of Artificial Sequence: Synthetic peptide
  Seed: GMDPRMCSLMQGSTL
GMDFRMYSTMQNSTL

SEQ ID NO: 73372 - protein, 15 aa, Artificial Sequence
  Description of Artificial Sequence: Synthetic peptide
  Seed: GMDPRMCSLMQGSTL
GMDFRMYSTMQSSTL

SEQ ID NO: 73373 - protein, 15 aa, Artificial Sequence
  Description of Artificial Sequence: Synthetic peptide
  Seed: GMDPRMCSLMQGSTL
GMDFRMYSTMQTSTL

SEQ ID NO: 73374 - protein, 15 aa, Artificial Sequence
  Description of Artificial Sequence: Synthetic peptide
  Seed: GMDPRMCSLMQGSTL
GMDFRMYSTMQVSTL

SEQ ID NO: 73375 - protein, 15 aa, Artificial Sequence
  Description of Artificial Sequence: Synthetic peptide
  Seed: GMDPRMCSLMQGSTL
GMDFRMYSVMQASTL

SEQ ID NO: 73376 - protein, 15 aa, Artificial Sequence
  Description of Artificial Sequence: Synthetic peptide
  Seed: GMDPRMCSLMQGSTL
GMDFRMYSVMQGSTL

SEQ ID NO: 73377 - protein, 15 aa, Artificial Sequence
  Description of Artificial Sequence: Synthetic peptide
  Seed: GMDPRMCSLMQGSTL
GMDFRMYSVMQHSTL

SEQ ID NO: 73378 - protein, 15 aa, Artificial Sequence
  Description of Artificial Sequence: Synthetic peptide
  Seed: GMDPRMCSLMQGSTL
GMDFRMYSVMQISTL

SEQ ID NO: 73379 - protein, 15 aa, Artificial Sequence
  Description of Artificial Sequence: Synthetic peptide
  Seed: GMDPRMCSLMQGSTL
GMDFRMYSVMQNSTL

SEQ ID NO: 73380 - protein, 15 aa, Artificial Sequence
  Description of Artificial Sequence: Synthetic peptide
  Seed: GMDPRMCSLMQGSTL
GMDFRMYSVMQSSTL

SEQ ID NO: 73381 - protein, 15 aa, Artificial Sequence
  Description of Artificial Sequence: Synthetic peptide
  Seed: GMDPRMCSLMQGSTL
GMDFRMYSVMQTSTL

SEQ ID NO: 73382 - protein, 15 aa, Artificial Sequence
  Description of Artificial Sequence: Synthetic peptide
  Seed: GMDPRMCSLMQGSTL
GMDFRMYSVMQVSTL

SEQ ID NO: 73383 - protein, 15 aa, Artificial Sequence
  Description of Artificial Sequence: Synthetic peptide
  Seed: GMDPRMCSLMQGSTL
GMDHRMLSAMQASTL

SEQ ID NO: 73384 - protein, 15 aa, Artificial Sequence
  Description of Artificial Sequence: Synthetic peptide
  Seed: GMDPRMCSLMQGSTL
GMDHRMLSIMQASTL

SEQ ID NO: 73385 - protein, 15 aa, Artificial Sequence
  Description of Artificial Sequence: Synthetic peptide
  Seed: GMDPRMCSLMQGSTL
GMDHRMMSAMQASTL

SEQ ID NO: 73386 - protein, 15 aa, Artificial Sequence
  Description of Artificial Sequence: Synthetic peptide
  Seed: GMDPRMCSLMQGSTL
GMDIRMASAMQASTL

SEQ ID NO: 73387 - protein, 15 aa, Artificial Sequence
  Description of Artificial Sequence: Synthetic peptide
  Seed: GMDPRMCSLMQGSTL
GMDIRMASAMQGSTL

SEQ ID NO: 73388 - protein, 15 aa, Artificial Sequence
  Description of Artificial Sequence: Synthetic peptide
  Seed: GMDPRMCSLMQGSTL
GMDIRMASAMQHSTL

SEQ ID NO: 73389 - protein, 15 aa, Artificial Sequence
  Description of Artificial Sequence: Synthetic peptide
  Seed: GMDPRMCSLMQGSTL
GMDIRMASAMQISTL

SEQ ID NO: 73390 - protein, 15 aa, Artificial Sequence
  Description of Artificial Sequence: Synthetic peptide
  Seed: GMDPRMCSLMQGSTL
GMDIRMASAMQLSTL

SEQ ID NO: 73391 - protein, 15 aa, Artificial Sequence
  Description of Artificial Sequence: Synthetic peptide
  Seed: GMDPRMCSLMQGSTL
GMDIRMASAMQMSTL

SEQ ID NO: 73392 - protein, 15 aa, Artificial Sequence
  Description of Artificial Sequence: Synthetic peptide
  Seed: GMDPRMCSLMQGSTL
GMDIRMASAMQNSTL

SEQ ID NO: 73393 - protein, 15 aa, Artificial Sequence
  Description of Artificial Sequence: Synthetic peptide
  Seed: GMDPRMCSLMQGSTL
GMDIRMASAMQQSTL

SEQ ID NO: 73394 - protein, 15 aa, Artificial Sequence
  Description of Artificial Sequence: Synthetic peptide
  Seed: GMDPRMCSLMQGSTL
GMDIRMASAMQSSTL

SEQ ID NO: 73395 - protein, 15 aa, Artificial Sequence
  Description of Artificial Sequence: Synthetic peptide
  Seed: GMDPRMCSLMQGSTL
GMDIRMASAMQTSTL

SEQ ID NO: 73396 - protein, 15 aa, Artificial Sequence
  Description of Artificial Sequence: Synthetic peptide
  Seed: GMDPRMCSLMQGSTL
GMDIRMASAMQVSTL

SEQ ID NO: 73397 - protein, 15 aa, Artificial Sequence
  Description of Artificial Sequence: Synthetic peptide
  Seed: GMDPRMCSLMQGSTL
GMDIRMASGMQASTL

SEQ ID NO: 73398 - protein, 15 aa, Artificial Sequence
  Description of Artificial Sequence: Synthetic peptide
  Seed: GMDPRMCSLMQGSTL
GMDIRMASGMQNSTL

SEQ ID NO: 73399 - protein, 15 aa, Artificial Sequence
  Description of Artificial Sequence: Synthetic peptide
  Seed: GMDPRMCSLMQGSTL
GMDIRMASGMQSSTL

SEQ ID NO: 73400 - protein, 15 aa, Artificial Sequence
  Description of Artificial Sequence: Synthetic peptide
  Seed: GMDPRMCSLMQGSTL
GMDIRMASIMQASTL

SEQ ID NO: 73401 - protein, 15 aa, Artificial Sequence
  Description of Artificial Sequence: Synthetic peptide
  Seed: GMDPRMCSLMQGSTL
GMDIRMASIMQHSTL

SEQ ID NO: 73402 - protein, 15 aa, Artificial Sequence
  Description of Artificial Sequence: Synthetic peptide
  Seed: GMDPRMCSLMQGSTL
GMDIRMASIMQMSTL

SEQ ID NO: 73403 - protein, 15 aa, Artificial Sequence
  Description of Artificial Sequence: Synthetic peptide
  Seed: GMDPRMCSLMQGSTL
GMDIRMASIMQNSTL

SEQ ID NO: 73404 - protein, 15 aa, Artificial Sequence
  Description of Artificial Sequence: Synthetic peptide
  Seed: GMDPRMCSLMQGSTL
GMDIRMASIMQSSTL

SEQ ID NO: 73405 - protein, 15 aa, Artificial Sequence
  Description of Artificial Sequence: Synthetic peptide
  Seed: GMDPRMCSLMQGSTL
GMDIRMASIMQTSTL

SEQ ID NO: 73406 - protein, 15 aa, Artificial Sequence
  Description of Artificial Sequence: Synthetic peptide
  Seed: GMDPRMCSLMQGSTL
GMDIRMASLMQNSTL

SEQ ID NO: 73407 - protein, 15 aa, Artificial Sequence
  Description of Artificial Sequence: Synthetic peptide
  Seed: GMDPRMCSLMQGSTL
GMDIRMASLMQSSTL

SEQ ID NO: 73408 - protein, 15 aa, Artificial Sequence
  Description of Artificial Sequence: Synthetic peptide
  Seed: GMDPRMCSLMQGSTL
GMDIRMASNMQASTL

SEQ ID NO: 73409 - protein, 15 aa, Artificial Sequence
  Description of Artificial Sequence: Synthetic peptide
  Seed: GMDPRMCSLMQGSTL
GMDIRMASNMQNSTL

SEQ ID NO: 73410 - protein, 15 aa, Artificial Sequence
  Description of Artificial Sequence: Synthetic peptide
  Seed: GMDPRMCSLMQGSTL
GMDIRMASNMQSSTL

SEQ ID NO: 73411 - protein, 15 aa, Artificial Sequence
  Description of Artificial Sequence: Synthetic peptide
  Seed: GMDPRMCSLMQGSTL
GMDIRMASPMQASTL

SEQ ID NO: 73412 - protein, 15 aa, Artificial Sequence
  Description of Artificial Sequence: Synthetic peptide
  Seed: GMDPRMCSLMQGSTL
GMDIRMASPMQHSTL

SEQ ID NO: 73413 - protein, 15 aa, Artificial Sequence
  Description of Artificial Sequence: Synthetic peptide
  Seed: GMDPRMCSLMQGSTL
GMDIRMASPMQISTL

SEQ ID NO: 73414 - protein, 15 aa, Artificial Sequence
  Description of Artificial Sequence: Synthetic peptide
  Seed: GMDPRMCSLMQGSTL
GMDIRMASPMQLSTL

SEQ ID NO: 73415 - protein, 15 aa, Artificial Sequence
  Description of Artificial Sequence: Synthetic peptide
  Seed: GMDPRMCSLMQGSTL
GMDIRMASPMQMSTL

SEQ ID NO: 73416 - protein, 15 aa, Artificial Sequence
  Description of Artificial Sequence: Synthetic peptide
  Seed: GMDPRMCSLMQGSTL
GMDIRMASPMQNSTL

SEQ ID NO: 73417 - protein, 15 aa, Artificial Sequence
  Description of Artificial Sequence: Synthetic peptide
  Seed: GMDPRMCSLMQGSTL
GMDIRMASPMQSSTL

SEQ ID NO: 73418 - protein, 15 aa, Artificial Sequence
  Description of Artificial Sequence: Synthetic peptide
  Seed: GMDPRMCSLMQGSTL
GMDIRMASPMQTSTL

SEQ ID NO: 73419 - protein, 15 aa, Artificial Sequence
  Description of Artificial Sequence: Synthetic peptide
  Seed: GMDPRMCSLMQGSTL
GMDIRMASPMQVSTL

SEQ ID NO: 73420 - protein, 15 aa, Artificial Sequence
  Description of Artificial Sequence: Synthetic peptide
  Seed: GMDPRMCSLMQGSTL
GMDIRMASSMQASTL

SEQ ID NO: 73421 - protein, 15 aa, Artificial Sequence
  Description of Artificial Sequence: Synthetic peptide
  Seed: GMDPRMCSLMQGSTL
GMDIRMASSMQHSTL

SEQ ID NO: 73422 - protein, 15 aa, Artificial Sequence
  Description of Artificial Sequence: Synthetic peptide
  Seed: GMDPRMCSLMQGSTL
GMDIRMASSMQISTL

SEQ ID NO: 73423 - protein, 15 aa, Artificial Sequence
  Description of Artificial Sequence: Synthetic peptide
  Seed: GMDPRMCSLMQGSTL
GMDIRMASSMQLSTL

SEQ ID NO: 73424 - protein, 15 aa, Artificial Sequence
  Description of Artificial Sequence: Synthetic peptide
  Seed: GMDPRMCSLMQGSTL
GMDIRMASSMQMSTL

SEQ ID NO: 73425 - protein, 15 aa, Artificial Sequence
  Description of Artificial Sequence: Synthetic peptide
  Seed: GMDPRMCSLMQGSTL
GMDIRMASSMQNSTL

SEQ ID NO: 73426 - protein, 15 aa, Artificial Sequence
  Description of Artificial Sequence: Synthetic peptide
  Seed: GMDPRMCSLMQGSTL
GMDIRMASSMQSSTL

SEQ ID NO: 73427 - protein, 15 aa, Artificial Sequence
  Description of Artificial Sequence: Synthetic peptide
  Seed: GMDPRMCSLMQGSTL
GMDIRMASSMQTSTL

SEQ ID NO: 73428 - protein, 15 aa, Artificial Sequence
  Description of Artificial Sequence: Synthetic peptide
  Seed: GMDPRMCSLMQGSTL
GMDIRMASSMQVSTL

SEQ ID NO: 73429 - protein, 15 aa, Artificial Sequence
  Description of Artificial Sequence: Synthetic peptide
  Seed: GMDPRMCSLMQGSTL
GMDIRMASTMQASTL

SEQ ID NO: 73430 - protein, 15 aa, Artificial Sequence
  Description of Artificial Sequence: Synthetic peptide
  Seed: GMDPRMCSLMQGSTL
GMDIRMASTMQHSTL

SEQ ID NO: 73431 - protein, 15 aa, Artificial Sequence
  Description of Artificial Sequence: Synthetic peptide
  Seed: GMDPRMCSLMQGSTL
GMDIRMASTMQLSTL

SEQ ID NO: 73432 - protein, 15 aa, Artificial Sequence
  Description of Artificial Sequence: Synthetic peptide
  Seed: GMDPRMCSLMQGSTL
GMDIRMASTMQMSTL

SEQ ID NO: 73433 - protein, 15 aa, Artificial Sequence
  Description of Artificial Sequence: Synthetic peptide
  Seed: GMDPRMCSLMQGSTL
GMDIRMASTMQNSTL

SEQ ID NO: 73434 - protein, 15 aa, Artificial Sequence
  Description of Artificial Sequence: Synthetic peptide
  Seed: GMDPRMCSLMQGSTL
GMDIRMASTMQSSTL

SEQ ID NO: 73435 - protein, 15 aa, Artificial Sequence
  Description of Artificial Sequence: Synthetic peptide
  Seed: GMDPRMCSLMQGSTL
GMDIRMASTMQTSTL

SEQ ID NO: 73436 - protein, 15 aa, Artificial Sequence
  Description of Artificial Sequence: Synthetic peptide
  Seed: GMDPRMCSLMQGSTL
GMDIRMASTMQVSTL

SEQ ID NO: 73437 - protein, 15 aa, Artificial Sequence
  Description of Artificial Sequence: Synthetic peptide
  Seed: GMDPRMCSLMQGSTL
GMDIRMASVMQASTL

SEQ ID NO: 73438 - protein, 15 aa, Artificial Sequence
  Description of Artificial Sequence: Synthetic peptide
  Seed: GMDPRMCSLMQGSTL
GMDIRMASVMQHSTL

SEQ ID NO: 73439 - protein, 15 aa, Artificial Sequence
  Description of Artificial Sequence: Synthetic peptide
  Seed: GMDPRMCSLMQGSTL
GMDIRMASVMQMSTL

SEQ ID NO: 73440 - protein, 15 aa, Artificial Sequence
  Description of Artificial Sequence: Synthetic peptide
  Seed: GMDPRMCSLMQGSTL
GMDIRMASVMQNSTL

SEQ ID NO: 73441 - protein, 15 aa, Artificial Sequence
  Description of Artificial Sequence: Synthetic peptide
  Seed: GMDPRMCSLMQGSTL
GMDIRMASVMQSSTL

SEQ ID NO: 73442 - protein, 15 aa, Artificial Sequence
  Description of Artificial Sequence: Synthetic peptide
  Seed: GMDPRMCSLMQGSTL
GMDIRMASVMQTSTL

SEQ ID NO: 73443 - protein, 15 aa, Artificial Sequence
  Description of Artificial Sequence: Synthetic peptide
  Seed: GMDPRMCSLMQGSTL
GMDIRMASVMQVSTL

SEQ ID NO: 73444 - protein, 15 aa, Artificial Sequence
  Description of Artificial Sequence: Synthetic peptide
  Seed: GMDPRMCSLMQGSTL
GMDIRMFSAMQASTL

SEQ ID NO: 73445 - protein, 15 aa, Artificial Sequence
  Description of Artificial Sequence: Synthetic peptide
  Seed: GMDPRMCSLMQGSTL
GMDIRMFSAMQGSTL

SEQ ID NO: 73446 - protein, 15 aa, Artificial Sequence
  Description of Artificial Sequence: Synthetic peptide
  Seed: GMDPRMCSLMQGSTL
GMDIRMFSAMQHSTL

SEQ ID NO: 73447 - protein, 15 aa, Artificial Sequence
  Description of Artificial Sequence: Synthetic peptide
  Seed: GMDPRMCSLMQGSTL
GMDIRMFSAMQISTL

SEQ ID NO: 73448 - protein, 15 aa, Artificial Sequence
  Description of Artificial Sequence: Synthetic peptide
  Seed: GMDPRMCSLMQGSTL
GMDIRMFSAMQLSTL

SEQ ID NO: 73449 - protein, 15 aa, Artificial Sequence
  Description of Artificial Sequence: Synthetic peptide
  Seed: GMDPRMCSLMQGSTL
GMDIRMFSAMQMSTL

SEQ ID NO: 73450 - protein, 15 aa, Artificial Sequence
  Description of Artificial Sequence: Synthetic peptide
  Seed: GMDPRMCSLMQGSTL
GMDIRMFSAMQNSTL

SEQ ID NO: 73451 - protein, 15 aa, Artificial Sequence
  Description of Artificial Sequence: Synthetic peptide
  Seed: GMDPRMCSLMQGSTL
GMDIRMFSAMQSSTL

SEQ ID NO: 73452 - protein, 15 aa, Artificial Sequence
  Description of Artificial Sequence: Synthetic peptide
  Seed: GMDPRMCSLMQGSTL
GMDIRMFSAMQTSTL

SEQ ID NO: 73453 - protein, 15 aa, Artificial Sequence
  Description of Artificial Sequence: Synthetic peptide
  Seed: GMDPRMCSLMQGSTL
GMDIRMFSAMQVSTL

SEQ ID NO: 73454 - protein, 15 aa, Artificial Sequence
  Description of Artificial Sequence: Synthetic peptide
  Seed: GMDPRMCSLMQGSTL
GMDIRMFSGMQASTL

SEQ ID NO: 73455 - protein, 15 aa, Artificial Sequence
  Description of Artificial Sequence: Synthetic peptide
  Seed: GMDPRMCSLMQGSTL
GMDIRMFSGMQSSTL

SEQ ID NO: 73456 - protein, 15 aa, Artificial Sequence
  Description of Artificial Sequence: Synthetic peptide
  Seed: GMDPRMCSLMQGSTL
GMDIRMFSHMQGSTL

SEQ ID NO: 73457 - protein, 15 aa, Artificial Sequence
  Description of Artificial Sequence: Synthetic peptide
  Seed: GMDPRMCSLMQGSTL
GMDIRMFSHMQSSTL

SEQ ID NO: 73458 - protein, 15 aa, Artificial Sequence
  Description of Artificial Sequence: Synthetic peptide
  Seed: GMDPRMCSLMQGSTL
GMDIRMFSIMQASTL

SEQ ID NO: 73459 - protein, 15 aa, Artificial Sequence
  Description of Artificial Sequence: Synthetic peptide
  Seed: GMDPRMCSLMQGSTL
GMDIRMFSIMQGSTL

SEQ ID NO: 73460 - protein, 15 aa, Artificial Sequence
  Description of Artificial Sequence: Synthetic peptide
  Seed: GMDPRMCSLMQGSTL
GMDIRMFSIMQHSTL

SEQ ID NO: 73461 - protein, 15 aa, Artificial Sequence
  Description of Artificial Sequence: Synthetic peptide
  Seed: GMDPRMCSLMQGSTL
GMDIRMFSIMQNSTL

SEQ ID NO: 73462 - protein, 15 aa, Artificial Sequence
  Description of Artificial Sequence: Synthetic peptide
  Seed: GMDPRMCSLMQGSTL
GMDIRMFSIMQSSTL

SEQ ID NO: 73463 - protein, 15 aa, Artificial Sequence
  Description of Artificial Sequence: Synthetic peptide
  Seed: GMDPRMCSLMQGSTL
GMDIRMFSIMQVSTL

SEQ ID NO: 73464 - protein, 15 aa, Artificial Sequence
  Description of Artificial Sequence: Synthetic peptide
  Seed: GMDPRMCSLMQGSTL
GMDIRMFSKMQASTL

SEQ ID NO: 73465 - protein, 15 aa, Artificial Sequence
  Description of Artificial Sequence: Synthetic peptide
  Seed: GMDPRMCSLMQGSTL
GMDIRMFSKMQSSTL

SEQ ID NO: 73466 - protein, 15 aa, Artificial Sequence
  Description of Artificial Sequence: Synthetic peptide
  Seed: GMDPRMCSLMQGSTL
GMDIRMFSLMQNSTL

SEQ ID NO: 73467 - protein, 15 aa, Artificial Sequence
  Description of Artificial Sequence: Synthetic peptide
  Seed: GMDPRMCSLMQGSTL
GMDIRMFSMMQHSTL

SEQ ID NO: 73468 - protein, 15 aa, Artificial Sequence
  Description of Artificial Sequence: Synthetic peptide
  Seed: GMDPRMCSLMQGSTL
GMDIRMFSMMQLSTL

SEQ ID NO: 73469 - protein, 15 aa, Artificial Sequence
  Description of Artificial Sequence: Synthetic peptide
  Seed: GMDPRMCSLMQGSTL
GMDIRMFSMMQMSTL

SEQ ID NO: 73470 - protein, 15 aa, Artificial Sequence
  Description of Artificial Sequence: Synthetic peptide
  Seed: GMDPRMCSLMQGSTL
GMDIRMFSNMQASTL

SEQ ID NO: 73471 - protein, 15 aa, Artificial Sequence
  Description of Artificial Sequence: Synthetic peptide
  Seed: GMDPRMCSLMQGSTL
GMDIRMFSNMQSSTL

SEQ ID NO: 73472 - protein, 15 aa, Artificial Sequence
  Description of Artificial Sequence: Synthetic peptide
  Seed: GMDPRMCSLMQGSTL
GMDIRMFSPMQASTL

SEQ ID NO: 73473 - protein, 15 aa, Artificial Sequence
  Description of Artificial Sequence: Synthetic peptide
  Seed: GMDPRMCSLMQGSTL
GMDIRMFSPMQGSTL

SEQ ID NO: 73474 - protein, 15 aa, Artificial Sequence
  Description of Artificial Sequence: Synthetic peptide
  Seed: GMDPRMCSLMQGSTL
GMDIRMFSPMQISTL

SEQ ID NO: 73475 - protein, 15 aa, Artificial Sequence
  Description of Artificial Sequence: Synthetic peptide
  Seed: GMDPRMCSLMQGSTL
GMDIRMFSPMQNSTL

SEQ ID NO: 73476 - protein, 15 aa, Artificial Sequence
  Description of Artificial Sequence: Synthetic peptide
  Seed: GMDPRMCSLMQGSTL
GMDIRMFSPMQSSTL

SEQ ID NO: 73477 - protein, 15 aa, Artificial Sequence
  Description of Artificial Sequence: Synthetic peptide
  Seed: GMDPRMCSLMQGSTL
GMDIRMFSPMQTSTL

SEQ ID NO: 73478 - protein, 15 aa, Artificial Sequence
  Description of Artificial Sequence: Synthetic peptide
  Seed: GMDPRMCSLMQGSTL
GMDIRMFSPMQVSTL

SEQ ID NO: 73479 - protein, 15 aa, Artificial Sequence
  Description of Artificial Sequence: Synthetic peptide
  Seed: GMDPRMCSLMQGSTL
GMDIRMFSQMQSSTL

SEQ ID NO: 73480 - protein, 15 aa, Artificial Sequence
  Description of Artificial Sequence: Synthetic peptide
  Seed: GMDPRMCSLMQGSTL
GMDIRMFSRMQSSTL

SEQ ID NO: 73481 - protein, 15 aa, Artificial Sequence
  Description of Artificial Sequence: Synthetic peptide
  Seed: GMDPRMCSLMQGSTL
GMDIRMFSSMQASTL

SEQ ID NO: 73482 - protein, 15 aa, Artificial Sequence
  Description of Artificial Sequence: Synthetic peptide
  Seed: GMDPRMCSLMQGSTL
GMDIRMFSSMQGSTL

SEQ ID NO: 73483 - protein, 15 aa, Artificial Sequence
  Description of Artificial Sequence: Synthetic peptide
  Seed: GMDPRMCSLMQGSTL
GMDIRMFSSMQISTL

SEQ ID NO: 73484 - protein, 15 aa, Artificial Sequence
  Description of Artificial Sequence: Synthetic peptide
  Seed: GMDPRMCSLMQGSTL
GMDIRMFSSMQNSTL

SEQ ID NO: 73485 - protein, 15 aa, Artificial Sequence
  Description of Artificial Sequence: Synthetic peptide
  Seed: GMDPRMCSLMQGSTL
GMDIRMFSSMQSSTL

SEQ ID NO: 73486 - protein, 15 aa, Artificial Sequence
  Description of Artificial Sequence: Synthetic peptide
  Seed: GMDPRMCSLMQGSTL
GMDIRMFSSMQTSTL

SEQ ID NO: 73487 - protein, 15 aa, Artificial Sequence
  Description of Artificial Sequence: Synthetic peptide
  Seed: GMDPRMCSLMQGSTL
GMDIRMFSSMQVSTL

SEQ ID NO: 73488 - protein, 15 aa, Artificial Sequence
  Description of Artificial Sequence: Synthetic peptide
  Seed: GMDPRMCSLMQGSTL
GMDIRMFSTMQASTL

SEQ ID NO: 73489 - protein, 15 aa, Artificial Sequence
  Description of Artificial Sequence: Synthetic peptide
  Seed: GMDPRMCSLMQGSTL
GMDIRMFSTMQGSTL

SEQ ID NO: 73490 - protein, 15 aa, Artificial Sequence
  Description of Artificial Sequence: Synthetic peptide
  Seed: GMDPRMCSLMQGSTL
GMDIRMFSTMQNSTL

SEQ ID NO: 73491 - protein, 15 aa, Artificial Sequence
  Description of Artificial Sequence: Synthetic peptide
  Seed: GMDPRMCSLMQGSTL
GMDIRMFSTMQSSTL

SEQ ID NO: 73492 - protein, 15 aa, Artificial Sequence
  Description of Artificial Sequence: Synthetic peptide
  Seed: GMDPRMCSLMQGSTL
GMDIRMFSTMQTSTL

SEQ ID NO: 73493 - protein, 15 aa, Artificial Sequence
  Description of Artificial Sequence: Synthetic peptide
  Seed: GMDPRMCSLMQGSTL
GMDIRMFSTMQVSTL

SEQ ID NO: 73494 - protein, 15 aa, Artificial Sequence
  Description of Artificial Sequence: Synthetic peptide
  Seed: GMDPRMCSLMQGSTL
GMDIRMFSVMQASTL

SEQ ID NO: 73495 - protein, 15 aa, Artificial Sequence
  Description of Artificial Sequence: Synthetic peptide
  Seed: GMDPRMCSLMQGSTL
GMDIRMFSVMQGSTL

SEQ ID NO: 73496 - protein, 15 aa, Artificial Sequence
  Description of Artificial Sequence: Synthetic peptide
  Seed: GMDPRMCSLMQGSTL
GMDIRMFSVMQHSTL

SEQ ID NO: 73497 - protein, 15 aa, Artificial Sequence
  Description of Artificial Sequence: Synthetic peptide
  Seed: GMDPRMCSLMQGSTL
GMDIRMFSVMQNSTL

SEQ ID NO: 73498 - protein, 15 aa, Artificial Sequence
  Description of Artificial Sequence: Synthetic peptide
  Seed: GMDPRMCSLMQGSTL
GMDIRMFSVMQSSTL

SEQ ID NO: 73499 - protein, 15 aa, Artificial Sequence
  Description of Artificial Sequence: Synthetic peptide
  Seed: GMDPRMCSLMQGSTL
GMDIRMFSVMQTSTL

SEQ ID NO: 73500 - protein, 15 aa, Artificial Sequence
  Description of Artificial Sequence: Synthetic peptide
  Seed: GMDPRMCSLMQGSTL
GMDIRMFSVMQVSTL

SEQ ID NO: 73501 - protein, 15 aa, Artificial Sequence
  Description of Artificial Sequence: Synthetic peptide
  Seed: GMDPRMCSLMQGSTL
GMDIRMISAMQASTL

SEQ ID NO: 73502 - protein, 15 aa, Artificial Sequence
  Description of Artificial Sequence: Synthetic peptide
  Seed: GMDPRMCSLMQGSTL
GMDIRMISAMQGSTL

SEQ ID NO: 73503 - protein, 15 aa, Artificial Sequence
  Description of Artificial Sequence: Synthetic peptide
  Seed: GMDPRMCSLMQGSTL
GMDIRMISAMQHSTL

SEQ ID NO: 73504 - protein, 15 aa, Artificial Sequence
  Description of Artificial Sequence: Synthetic peptide
  Seed: GMDPRMCSLMQGSTL
GMDIRMISAMQISTL

SEQ ID NO: 73505 - protein, 15 aa, Artificial Sequence
  Description of Artificial Sequence: Synthetic peptide
  Seed: GMDPRMCSLMQGSTL
GMDIRMISAMQLSTL

SEQ ID NO: 73506 - protein, 15 aa, Artificial Sequence
  Description of Artificial Sequence: Synthetic peptide
  Seed: GMDPRMCSLMQGSTL
GMDIRMISAMQMSTL

SEQ ID NO: 73507 - protein, 15 aa, Artificial Sequence
  Description of Artificial Sequence: Synthetic peptide
  Seed: GMDPRMCSLMQGSTL
GMDIRMISAMQNSTL

SEQ ID NO: 73508 - protein, 15 aa, Artificial Sequence
  Description of Artificial Sequence: Synthetic peptide
  Seed: GMDPRMCSLMQGSTL
GMDIRMISAMQPSTL

SEQ ID NO: 73509 - protein, 15 aa, Artificial Sequence
  Description of Artificial Sequence: Synthetic peptide
  Seed: GMDPRMCSLMQGSTL
GMDIRMISAMQSSTL

SEQ ID NO: 73510 - protein, 15 aa, Artificial Sequence
  Description of Artificial Sequence: Synthetic peptide
  Seed: GMDPRMCSLMQGSTL
GMDIRMISAMQTSTL

SEQ ID NO: 73511 - protein, 15 aa, Artificial Sequence
  Description of Artificial Sequence: Synthetic peptide
  Seed: GMDPRMCSLMQGSTL
GMDIRMISAMQVSTL

SEQ ID NO: 73512 - protein, 15 aa, Artificial Sequence
  Description of Artificial Sequence: Synthetic peptide
  Seed: GMDPRMCSLMQGSTL
GMDIRMISGMQASTL

SEQ ID NO: 73513 - protein, 15 aa, Artificial Sequence
  Description of Artificial Sequence: Synthetic peptide
  Seed: GMDPRMCSLMQGSTL
GMDIRMISGMQNSTL

SEQ ID NO: 73514 - protein, 15 aa, Artificial Sequence
  Description of Artificial Sequence: Synthetic peptide
  Seed: GMDPRMCSLMQGSTL
GMDIRMISGMQSSTL

SEQ ID NO: 73515 - protein, 15 aa, Artificial Sequence
  Description of Artificial Sequence: Synthetic peptide
  Seed: GMDPRMCSLMQGSTL
GMDIRMISGMQTSTL

SEQ ID NO: 73516 - protein, 15 aa, Artificial Sequence
  Description of Artificial Sequence: Synthetic peptide
  Seed: GMDPRMCSLMQGSTL
GMDIRMISIMQASTL

SEQ ID NO: 73517 - protein, 15 aa, Artificial Sequence
  Description of Artificial Sequence: Synthetic peptide
  Seed: GMDPRMCSLMQGSTL
GMDIRMISIMQHSTL

SEQ ID NO: 73518 - protein, 15 aa, Artificial Sequence
  Description of Artificial Sequence: Synthetic peptide
  Seed: GMDPRMCSLMQGSTL
GMDIRMISIMQNSTL

SEQ ID NO: 73519 - protein, 15 aa, Artificial Sequence
  Description of Artificial Sequence: Synthetic peptide
  Seed: GMDPRMCSLMQGSTL
GMDIRMISIMQSSTL

SEQ ID NO: 73520 - protein, 15 aa, Artificial Sequence
  Description of Artificial Sequence: Synthetic peptide
  Seed: GMDPRMCSLMQGSTL
GMDIRMISIMQTSTL

SEQ ID NO: 73521 - protein, 15 aa, Artificial Sequence
  Description of Artificial Sequence: Synthetic peptide
  Seed: GMDPRMCSLMQGSTL
GMDIRMISLMQASTL

SEQ ID NO: 73522 - protein, 15 aa, Artificial Sequence
  Description of Artificial Sequence: Synthetic peptide
  Seed: GMDPRMCSLMQGSTL
GMDIRMISLMQNSTL

SEQ ID NO: 73523 - protein, 15 aa, Artificial Sequence
  Description of Artificial Sequence: Synthetic peptide
  Seed: GMDPRMCSLMQGSTL
GMDIRMISLMQPSTL

SEQ ID NO: 73524 - protein, 15 aa, Artificial Sequence
  Description of Artificial Sequence: Synthetic peptide
  Seed: GMDPRMCSLMQGSTL
GMDIRMISLMQSSTL

SEQ ID NO: 73525 - protein, 15 aa, Artificial Sequence
  Description of Artificial Sequence: Synthetic peptide
  Seed: GMDPRMCSLMQGSTL
GMDIRMISMMQASTL

SEQ ID NO: 73526 - protein, 15 aa, Artificial Sequence
  Description of Artificial Sequence: Synthetic peptide
  Seed: GMDPRMCSLMQGSTL
GMDIRMISMMQNSTL

SEQ ID NO: 73527 - protein, 15 aa, Artificial Sequence
  Description of Artificial Sequence: Synthetic peptide
  Seed: GMDPRMCSLMQGSTL
GMDIRMISMMQSSTL

SEQ ID NO: 73528 - protein, 15 aa, Artificial Sequence
  Description of Artificial Sequence: Synthetic peptide
  Seed: GMDPRMCSLMQGSTL
GMDIRMISNMQASTL

SEQ ID NO: 73529 - protein, 15 aa, Artificial Sequence
  Description of Artificial Sequence: Synthetic peptide
  Seed: GMDPRMCSLMQGSTL
GMDIRMISNMQNSTL

SEQ ID NO: 73530 - protein, 15 aa, Artificial Sequence
  Description of Artificial Sequence: Synthetic peptide
  Seed: GMDPRMCSLMQGSTL
GMDIRMISNMQSSTL

SEQ ID NO: 73531 - protein, 15 aa, Artificial Sequence
  Description of Artificial Sequence: Synthetic peptide
  Seed: GMDPRMCSLMQGSTL
GMDIRMISPMQASTL

SEQ ID NO: 73532 - protein, 15 aa, Artificial Sequence
  Description of Artificial Sequence: Synthetic peptide
  Seed: GMDPRMCSLMQGSTL
GMDIRMISPMQHSTL

SEQ ID NO: 73533 - protein, 15 aa, Artificial Sequence
  Description of Artificial Sequence: Synthetic peptide
  Seed: GMDPRMCSLMQGSTL
GMDIRMISPMQISTL

SEQ ID NO: 73534 - protein, 15 aa, Artificial Sequence
  Description of Artificial Sequence: Synthetic peptide
  Seed: GMDPRMCSLMQGSTL
GMDIRMISPMQLSTL

SEQ ID NO: 73535 - protein, 15 aa, Artificial Sequence
  Description of Artificial Sequence: Synthetic peptide
  Seed: GMDPRMCSLMQGSTL
GMDIRMISPMQMSTL

SEQ ID NO: 73536 - protein, 15 aa, Artificial Sequence
  Description of Artificial Sequence: Synthetic peptide
  Seed: GMDPRMCSLMQGSTL
GMDIRMISPMQNSTL

SEQ ID NO: 73537 - protein, 15 aa, Artificial Sequence
  Description of Artificial Sequence: Synthetic peptide
  Seed: GMDPRMCSLMQGSTL
GMDIRMISPMQSSTL

SEQ ID NO: 73538 - protein, 15 aa, Artificial Sequence
  Description of Artificial Sequence: Synthetic peptide
  Seed: GMDPRMCSLMQGSTL
GMDIRMISPMQTSTL

SEQ ID NO: 73539 - protein, 15 aa, Artificial Sequence
  Description of Artificial Sequence: Synthetic peptide
  Seed: GMDPRMCSLMQGSTL
GMDIRMISPMQVSTL

SEQ ID NO: 73540 - protein, 15 aa, Artificial Sequence
  Description of Artificial Sequence: Synthetic peptide
  Seed: GMDPRMCSLMQGSTL
GMDIRMISSMQASTL

SEQ ID NO: 73541 - protein, 15 aa, Artificial Sequence
  Description of Artificial Sequence: Synthetic peptide
  Seed: GMDPRMCSLMQGSTL
GMDIRMISSMQGSTL

SEQ ID NO: 73542 - protein, 15 aa, Artificial Sequence
  Description of Artificial Sequence: Synthetic peptide
  Seed: GMDPRMCSLMQGSTL
GMDIRMISSMQHSTL

SEQ ID NO: 73543 - protein, 15 aa, Artificial Sequence
  Description of Artificial Sequence: Synthetic peptide
  Seed: GMDPRMCSLMQGSTL
GMDIRMISSMQISTL

SEQ ID NO: 73544 - protein, 15 aa, Artificial Sequence
  Description of Artificial Sequence: Synthetic peptide
  Seed: GMDPRMCSLMQGSTL
GMDIRMISSMQLSTL

SEQ ID NO: 73545 - protein, 15 aa, Artificial Sequence
  Description of Artificial Sequence: Synthetic peptide
  Seed: GMDPRMCSLMQGSTL
GMDIRMISSMQMSTL

SEQ ID NO: 73546 - protein, 15 aa, Artificial Sequence
  Description of Artificial Sequence: Synthetic peptide
  Seed: GMDPRMCSLMQGSTL
GMDIRMISSMQNSTL

SEQ ID NO: 73547 - protein, 15 aa, Artificial Sequence
  Description of Artificial Sequence: Synthetic peptide
  Seed: GMDPRMCSLMQGSTL
GMDIRMISSMQSSTL

SEQ ID NO: 73548 - protein, 15 aa, Artificial Sequence
  Description of Artificial Sequence: Synthetic peptide
  Seed: GMDPRMCSLMQGSTL
GMDIRMISSMQTSTL

SEQ ID NO: 73549 - protein, 15 aa, Artificial Sequence
  Description of Artificial Sequence: Synthetic peptide
  Seed: GMDPRMCSLMQGSTL
GMDIRMISSMQVSTL

SEQ ID NO: 73550 - protein, 15 aa, Artificial Sequence
  Description of Artificial Sequence: Synthetic peptide
  Seed: GMDPRMCSLMQGSTL
GMDIRMISTMQASTL

SEQ ID NO: 73551 - protein, 15 aa, Artificial Sequence
  Description of Artificial Sequence: Synthetic peptide
  Seed: GMDPRMCSLMQGSTL
GMDIRMISTMQHSTL

SEQ ID NO: 73552 - protein, 15 aa, Artificial Sequence
  Description of Artificial Sequence: Synthetic peptide
  Seed: GMDPRMCSLMQGSTL
GMDIRMISTMQMSTL

SEQ ID NO: 73553 - protein, 15 aa, Artificial Sequence
  Description of Artificial Sequence: Synthetic peptide
  Seed: GMDPRMCSLMQGSTL
GMDIRMISTMQNSTL

SEQ ID NO: 73554 - protein, 15 aa, Artificial Sequence
  Description of Artificial Sequence: Synthetic peptide
  Seed: GMDPRMCSLMQGSTL
GMDIRMISTMQSSTL

SEQ ID NO: 73555 - protein, 15 aa, Artificial Sequence
  Description of Artificial Sequence: Synthetic peptide
  Seed: GMDPRMCSLMQGSTL
GMDIRMISTMQTSTL

SEQ ID NO: 73556 - protein, 15 aa, Artificial Sequence
  Description of Artificial Sequence: Synthetic peptide
  Seed: GMDPRMCSLMQGSTL
GMDIRMISTMQVSTL

SEQ ID NO: 73557 - protein, 15 aa, Artificial Sequence
  Description of Artificial Sequence: Synthetic peptide
  Seed: GMDPRMCSLMQGSTL
GMDIRMISVMQASTL

SEQ ID NO: 73558 - protein, 15 aa, Artificial Sequence
  Description of Artificial Sequence: Synthetic peptide
  Seed: GMDPRMCSLMQGSTL
GMDIRMISVMQHSTL

SEQ ID NO: 73559 - protein, 15 aa, Artificial Sequence
  Description of Artificial Sequence: Synthetic peptide
  Seed: GMDPRMCSLMQGSTL
GMDIRMISVMQNSTL

SEQ ID NO: 73560 - protein, 15 aa, Artificial Sequence
  Description of Artificial Sequence: Synthetic peptide
  Seed: GMDPRMCSLMQGSTL
GMDIRMISVMQSSTL

SEQ ID NO: 73561 - protein, 15 aa, Artificial Sequence
  Description of Artificial Sequence: Synthetic peptide
  Seed: GMDPRMCSLMQGSTL
GMDIRMISVMQTSTL

SEQ ID NO: 73562 - protein, 15 aa, Artificial Sequence
  Description of Artificial Sequence: Synthetic peptide
  Seed: GMDPRMCSLMQGSTL
GMDIRMLSAMQASTL

SEQ ID NO: 73563 - protein, 15 aa, Artificial Sequence
  Description of Artificial Sequence: Synthetic peptide
  Seed: GMDPRMCSLMQGSTL
GMDIRMLSAMQDSTL

SEQ ID NO: 73564 - protein, 15 aa, Artificial Sequence
  Description of Artificial Sequence: Synthetic peptide
  Seed: GMDPRMCSLMQGSTL
GMDIRMLSAMQGSTL

SEQ ID NO: 73565 - protein, 15 aa, Artificial Sequence
  Description of Artificial Sequence: Synthetic peptide
  Seed: GMDPRMCSLMQGSTL
GMDIRMLSAMQHSTL

SEQ ID NO: 73566 - protein, 15 aa, Artificial Sequence
  Description of Artificial Sequence: Synthetic peptide
  Seed: GMDPRMCSLMQGSTL
GMDIRMLSAMQISTL

SEQ ID NO: 73567 - protein, 15 aa, Artificial Sequence
  Description of Artificial Sequence: Synthetic peptide
  Seed: GMDPRMCSLMQGSTL
GMDIRMLSAMQLSTL

SEQ ID NO: 73568 - protein, 15 aa, Artificial Sequence
  Description of Artificial Sequence: Synthetic peptide
  Seed: GMDPRMCSLMQGSTL
GMDIRMLSAMQMSTL

SEQ ID NO: 73569 - protein, 15 aa, Artificial Sequence
  Description of Artificial Sequence: Synthetic peptide
  Seed: GMDPRMCSLMQGSTL
GMDIRMLSAMQNSTL

SEQ ID NO: 73570 - protein, 15 aa, Artificial Sequence
  Description of Artificial Sequence: Synthetic peptide
  Seed: GMDPRMCSLMQGSTL
GMDIRMLSAMQPSTL

SEQ ID NO: 73571 - protein, 15 aa, Artificial Sequence
  Description of Artificial Sequence: Synthetic peptide
  Seed: GMDPRMCSLMQGSTL
GMDIRMLSAMQQSTL

SEQ ID NO: 73572 - protein, 15 aa, Artificial Sequence
  Description of Artificial Sequence: Synthetic peptide
  Seed: GMDPRMCSLMQGSTL
GMDIRMLSAMQSSTL

SEQ ID NO: 73573 - protein, 15 aa, Artificial Sequence
  Description of Artificial Sequence: Synthetic peptide
  Seed: GMDPRMCSLMQGSTL
GMDIRMLSAMQTSTL

SEQ ID NO: 73574 - protein, 15 aa, Artificial Sequence
  Description of Artificial Sequence: Synthetic peptide
  Seed: GMDPRMCSLMQGSTL
GMDIRMLSAMQVSTL

SEQ ID NO: 73575 - protein, 15 aa, Artificial Sequence
  Description of Artificial Sequence: Synthetic peptide
  Seed: GMDPRMCSLMQGSTL
GMDIRMLSGMQASTL

SEQ ID NO: 73576 - protein, 15 aa, Artificial Sequence
  Description of Artificial Sequence: Synthetic peptide
  Seed: GMDPRMCSLMQGSTL
GMDIRMLSGMQHSTL

SEQ ID NO: 73577 - protein, 15 aa, Artificial Sequence
  Description of Artificial Sequence: Synthetic peptide
  Seed: GMDPRMCSLMQGSTL
GMDIRMLSGMQISTL

SEQ ID NO: 73578 - protein, 15 aa, Artificial Sequence
  Description of Artificial Sequence: Synthetic peptide
  Seed: GMDPRMCSLMQGSTL
GMDIRMLSGMQLSTL

SEQ ID NO: 73579 - protein, 15 aa, Artificial Sequence
  Description of Artificial Sequence: Synthetic peptide
  Seed: GMDPRMCSLMQGSTL
GMDIRMLSGMQMSTL

SEQ ID NO: 73580 - protein, 15 aa, Artificial Sequence
  Description of Artificial Sequence: Synthetic peptide
  Seed: GMDPRMCSLMQGSTL
GMDIRMLSGMQNSTL

SEQ ID NO: 73581 - protein, 15 aa, Artificial Sequence
  Description of Artificial Sequence: Synthetic peptide
  Seed: GMDPRMCSLMQGSTL
GMDIRMLSGMQSSTL

SEQ ID NO: 73582 - protein, 15 aa, Artificial Sequence
  Description of Artificial Sequence: Synthetic peptide
  Seed: GMDPRMCSLMQGSTL
GMDIRMLSGMQTSTL

SEQ ID NO: 73583 - protein, 15 aa, Artificial Sequence
  Description of Artificial Sequence: Synthetic peptide
  Seed: GMDPRMCSLMQGSTL
GMDIRMLSGMQVSTL

SEQ ID NO: 73584 - protein, 15 aa, Artificial Sequence
  Description of Artificial Sequence: Synthetic peptide
  Seed: GMDPRMCSLMQGSTL
GMDIRMLSIMQASTL

SEQ ID NO: 73585 - protein, 15 aa, Artificial Sequence
  Description of Artificial Sequence: Synthetic peptide
  Seed: GMDPRMCSLMQGSTL
GMDIRMLSIMQGSTL

SEQ ID NO: 73586 - protein, 15 aa, Artificial Sequence
  Description of Artificial Sequence: Synthetic peptide
  Seed: GMDPRMCSLMQGSTL
GMDIRMLSIMQHSTL

SEQ ID NO: 73587 - protein, 15 aa, Artificial Sequence
  Description of Artificial Sequence: Synthetic peptide
  Seed: GMDPRMCSLMQGSTL
GMDIRMLSIMQNSTL

SEQ ID NO: 73588 - protein, 15 aa, Artificial Sequence
  Description of Artificial Sequence: Synthetic peptide
  Seed: GMDPRMCSLMQGSTL
GMDIRMLSIMQSSTL

SEQ ID NO: 73589 - protein, 15 aa, Artificial Sequence
  Description of Artificial Sequence: Synthetic peptide
  Seed: GMDPRMCSLMQGSTL
GMDIRMLSIMQTSTL

SEQ ID NO: 73590 - protein, 15 aa, Artificial Sequence
  Description of Artificial Sequence: Synthetic peptide
  Seed: GMDPRMCSLMQGSTL
GMDIRMLSLMQASTL

SEQ ID NO: 73591 - protein, 15 aa, Artificial Sequence
  Description of Artificial Sequence: Synthetic peptide
  Seed: GMDPRMCSLMQGSTL
GMDIRMLSLMQHSTL

SEQ ID NO: 73592 - protein, 15 aa, Artificial Sequence
  Description of Artificial Sequence: Synthetic peptide
  Seed: GMDPRMCSLMQGSTL
GMDIRMLSLMQNSTL

SEQ ID NO: 73593 - protein, 15 aa, Artificial Sequence
  Description of Artificial Sequence: Synthetic peptide
  Seed: GMDPRMCSLMQGSTL
GMDIRMLSLMQSSTL

SEQ ID NO: 73594 - protein, 15 aa, Artificial Sequence
  Description of Artificial Sequence: Synthetic peptide
  Seed: GMDPRMCSLMQGSTL
GMDIRMLSMMQASTL

SEQ ID NO: 73595 - protein, 15 aa, Artificial Sequence
  Description of Artificial Sequence: Synthetic peptide
  Seed: GMDPRMCSLMQGSTL
GMDIRMLSMMQHSTL

SEQ ID NO: 73596 - protein, 15 aa, Artificial Sequence
  Description of Artificial Sequence: Synthetic peptide
  Seed: GMDPRMCSLMQGSTL
GMDIRMLSMMQNSTL

SEQ ID NO: 73597 - protein, 15 aa, Artificial Sequence
  Description of Artificial Sequence: Synthetic peptide
  Seed: GMDPRMCSLMQGSTL
GMDIRMLSMMQPSTL

SEQ ID NO: 73598 - protein, 15 aa, Artificial Sequence
  Description of Artificial Sequence: Synthetic peptide
  Seed: GMDPRMCSLMQGSTL
GMDIRMLSMMQSSTL

SEQ ID NO: 73599 - protein, 15 aa, Artificial Sequence
  Description of Artificial Sequence: Synthetic peptide
  Seed: GMDPRMCSLMQGSTL
GMDIRMLSMMQTSTL

SEQ ID NO: 73600 - protein, 15 aa, Artificial Sequence
  Description of Artificial Sequence: Synthetic peptide
  Seed: GMDPRMCSLMQGSTL
GMDIRMLSNMQASTL

SEQ ID NO: 73601 - protein, 15 aa, Artificial Sequence
  Description of Artificial Sequence: Synthetic peptide
  Seed: GMDPRMCSLMQGSTL
GMDIRMLSNMQHSTL

SEQ ID NO: 73602 - protein, 15 aa, Artificial Sequence
  Description of Artificial Sequence: Synthetic peptide
  Seed: GMDPRMCSLMQGSTL
GMDIRMLSNMQNSTL

SEQ ID NO: 73603 - protein, 15 aa, Artificial Sequence
  Description of Artificial Sequence: Synthetic peptide
  Seed: GMDPRMCSLMQGSTL
GMDIRMLSNMQSSTL

SEQ ID NO: 73604 - protein, 15 aa, Artificial Sequence
  Description of Artificial Sequence: Synthetic peptide
  Seed: GMDPRMCSLMQGSTL
GMDIRMLSNMQTSTL

SEQ ID NO: 73605 - protein, 15 aa, Artificial Sequence
  Description of Artificial Sequence: Synthetic peptide
  Seed: GMDPRMCSLMQGSTL
GMDIRMLSNMQVSTL

SEQ ID NO: 73606 - protein, 15 aa, Artificial Sequence
  Description of Artificial Sequence: Synthetic peptide
  Seed: GMDPRMCSLMQGSTL
GMDIRMLSPMQASTL

SEQ ID NO: 73607 - protein, 15 aa, Artificial Sequence
  Description of Artificial Sequence: Synthetic peptide
  Seed: GMDPRMCSLMQGSTL
GMDIRMLSPMQGSTL

SEQ ID NO: 73608 - protein, 15 aa, Artificial Sequence
  Description of Artificial Sequence: Synthetic peptide
  Seed: GMDPRMCSLMQGSTL
GMDIRMLSPMQHSTL

SEQ ID NO: 73609 - protein, 15 aa, Artificial Sequence
  Description of Artificial Sequence: Synthetic peptide
  Seed: GMDPRMCSLMQGSTL
GMDIRMLSPMQISTL

SEQ ID NO: 73610 - protein, 15 aa, Artificial Sequence
  Description of Artificial Sequence: Synthetic peptide
  Seed: GMDPRMCSLMQGSTL
GMDIRMLSPMQLSTL

SEQ ID NO: 73611 - protein, 15 aa, Artificial Sequence
  Description of Artificial Sequence: Synthetic peptide
  Seed: GMDPRMCSLMQGSTL
GMDIRMLSPMQMSTL

SEQ ID NO: 73612 - protein, 15 aa, Artificial Sequence
  Description of Artificial Sequence: Synthetic peptide
  Seed: GMDPRMCSLMQGSTL
GMDIRMLSPMQNSTL

SEQ ID NO: 73613 - protein, 15 aa, Artificial Sequence
  Description of Artificial Sequence: Synthetic peptide
  Seed: GMDPRMCSLMQGSTL
GMDIRMLSPMQPSTL

SEQ ID NO: 73614 - protein, 15 aa, Artificial Sequence
  Description of Artificial Sequence: Synthetic peptide
  Seed: GMDPRMCSLMQGSTL
GMDIRMLSPMQQSTL

SEQ ID NO: 73615 - protein, 15 aa, Artificial Sequence
  Description of Artificial Sequence: Synthetic peptide
  Seed: GMDPRMCSLMQGSTL
GMDIRMLSPMQSSTL

SEQ ID NO: 73616 - protein, 15 aa, Artificial Sequence
  Description of Artificial Sequence: Synthetic peptide
  Seed: GMDPRMCSLMQGSTL
GMDIRMLSPMQTSTL

SEQ ID NO: 73617 - protein, 15 aa, Artificial Sequence
  Description of Artificial Sequence: Synthetic peptide
  Seed: GMDPRMCSLMQGSTL
GMDIRMLSPMQVSTL

SEQ ID NO: 73618 - protein, 15 aa, Artificial Sequence
  Description of Artificial Sequence: Synthetic peptide
  Seed: GMDPRMCSLMQGSTL
GMDIRMLSSMQASTL

SEQ ID NO: 73619 - protein, 15 aa, Artificial Sequence
  Description of Artificial Sequence: Synthetic peptide
  Seed: GMDPRMCSLMQGSTL
GMDIRMLSSMQGSTL

SEQ ID NO: 73620 - protein, 15 aa, Artificial Sequence
  Description of Artificial Sequence: Synthetic peptide
  Seed: GMDPRMCSLMQGSTL
GMDIRMLSSMQHSTL

SEQ ID NO: 73621 - protein, 15 aa, Artificial Sequence
  Description of Artificial Sequence: Synthetic peptide
  Seed: GMDPRMCSLMQGSTL
GMDIRMLSSMQISTL

SEQ ID NO: 73622 - protein, 15 aa, Artificial Sequence
  Description of Artificial Sequence: Synthetic peptide
  Seed: GMDPRMCSLMQGSTL
GMDIRMLSSMQLSTL

SEQ ID NO: 73623 - protein, 15 aa, Artificial Sequence
  Description of Artificial Sequence: Synthetic peptide
  Seed: GMDPRMCSLMQGSTL
GMDIRMLSSMQMSTL

SEQ ID NO: 73624 - protein, 15 aa, Artificial Sequence
  Description of Artificial Sequence: Synthetic peptide
  Seed: GMDPRMCSLMQGSTL
GMDIRMLSSMQNSTL

SEQ ID NO: 73625 - protein, 15 aa, Artificial Sequence
  Description of Artificial Sequence: Synthetic peptide
  Seed: GMDPRMCSLMQGSTL
GMDIRMLSSMQPSTL

SEQ ID NO: 73626 - protein, 15 aa, Artificial Sequence
  Description of Artificial Sequence: Synthetic peptide
  Seed: GMDPRMCSLMQGSTL
GMDIRMLSSMQSSTL

SEQ ID NO: 73627 - protein, 15 aa, Artificial Sequence
  Description of Artificial Sequence: Synthetic peptide
  Seed: GMDPRMCSLMQGSTL
GMDIRMLSSMQTSTL

SEQ ID NO: 73628 - protein, 15 aa, Artificial Sequence
  Description of Artificial Sequence: Synthetic peptide
  Seed: GMDPRMCSLMQGSTL
GMDIRMLSSMQVSTL

SEQ ID NO: 73629 - protein, 15 aa, Artificial Sequence
  Description of Artificial Sequence: Synthetic peptide
  Seed: GMDPRMCSLMQGSTL
GMDIRMLSTMQASTL

SEQ ID NO: 73630 - protein, 15 aa, Artificial Sequence
  Description of Artificial Sequence: Synthetic peptide
  Seed: GMDPRMCSLMQGSTL
GMDIRMLSTMQGSTL

SEQ ID NO: 73631 - protein, 15 aa, Artificial Sequence
  Description of Artificial Sequence: Synthetic peptide
  Seed: GMDPRMCSLMQGSTL
GMDIRMLSTMQHSTL

SEQ ID NO: 73632 - protein, 15 aa, Artificial Sequence
  Description of Artificial Sequence: Synthetic peptide
  Seed: GMDPRMCSLMQGSTL
GMDIRMLSTMQISTL

SEQ ID NO: 73633 - protein, 15 aa, Artificial Sequence
  Description of Artificial Sequence: Synthetic peptide
  Seed: GMDPRMCSLMQGSTL
GMDIRMLSTMQLSTL

SEQ ID NO: 73634 - protein, 15 aa, Artificial Sequence
  Description of Artificial Sequence: Synthetic peptide
  Seed: GMDPRMCSLMQGSTL
GMDIRMLSTMQMSTL

SEQ ID NO: 73635 - protein, 15 aa, Artificial Sequence
  Description of Artificial Sequence: Synthetic peptide
  Seed: GMDPRMCSLMQGSTL
GMDIRMLSTMQNSTL

SEQ ID NO: 73636 - protein, 15 aa, Artificial Sequence
  Description of Artificial Sequence: Synthetic peptide
  Seed: GMDPRMCSLMQGSTL
GMDIRMLSTMQSSTL

SEQ ID NO: 73637 - protein, 15 aa, Artificial Sequence
  Description of Artificial Sequence: Synthetic peptide
  Seed: GMDPRMCSLMQGSTL
GMDIRMLSTMQTSTL

SEQ ID NO: 73638 - protein, 15 aa, Artificial Sequence
  Description of Artificial Sequence: Synthetic peptide
  Seed: GMDPRMCSLMQGSTL
GMDIRMLSTMQVSTL

SEQ ID NO: 73639 - protein, 15 aa, Artificial Sequence
  Description of Artificial Sequence: Synthetic peptide
  Seed: GMDPRMCSLMQGSTL
GMDIRMLSVMQASTL

SEQ ID NO: 73640 - protein, 15 aa, Artificial Sequence
  Description of Artificial Sequence: Synthetic peptide
  Seed: GMDPRMCSLMQGSTL
GMDIRMLSVMQGSTL

SEQ ID NO: 73641 - protein, 15 aa, Artificial Sequence
  Description of Artificial Sequence: Synthetic peptide
  Seed: GMDPRMCSLMQGSTL
GMDIRMLSVMQHSTL

SEQ ID NO: 73642 - protein, 15 aa, Artificial Sequence
  Description of Artificial Sequence: Synthetic peptide
  Seed: GMDPRMCSLMQGSTL
GMDIRMLSVMQMSTL

SEQ ID NO: 73643 - protein, 15 aa, Artificial Sequence
  Description of Artificial Sequence: Synthetic peptide
  Seed: GMDPRMCSLMQGSTL
GMDIRMLSVMQNSTL

SEQ ID NO: 73644 - protein, 15 aa, Artificial Sequence
  Description of Artificial Sequence: Synthetic peptide
  Seed: GMDPRMCSLMQGSTL
GMDIRMLSVMQPSTL

SEQ ID NO: 73645 - protein, 15 aa, Artificial Sequence
  Description of Artificial Sequence: Synthetic peptide
  Seed: GMDPRMCSLMQGSTL
GMDIRMLSVMQSSTL

SEQ ID NO: 73646 - protein, 15 aa, Artificial Sequence
  Description of Artificial Sequence: Synthetic peptide
  Seed: GMDPRMCSLMQGSTL
GMDIRMLSVMQTSTL

SEQ ID NO: 73647 - protein, 15 aa, Artificial Sequence
  Description of Artificial Sequence: Synthetic peptide
  Seed: GMDPRMCSLMQGSTL
GMDIRMLSVMQVSTL

SEQ ID NO: 73648 - protein, 15 aa, Artificial Sequence
  Description of Artificial Sequence: Synthetic peptide
  Seed: GMDPRMCSLMQGSTL
GMDIRMMSAMQASTL

SEQ ID NO: 73649 - protein, 15 aa, Artificial Sequence
  Description of Artificial Sequence: Synthetic peptide
  Seed: GMDPRMCSLMQGSTL
GMDIRMMSAMQDSTL

SEQ ID NO: 73650 - protein, 15 aa, Artificial Sequence
  Description of Artificial Sequence: Synthetic peptide
  Seed: GMDPRMCSLMQGSTL
GMDIRMMSAMQESTL

SEQ ID NO: 73651 - protein, 15 aa, Artificial Sequence
  Description of Artificial Sequence: Synthetic peptide
  Seed: GMDPRMCSLMQGSTL
GMDIRMMSAMQGSTL

SEQ ID NO: 73652 - protein, 15 aa, Artificial Sequence
  Description of Artificial Sequence: Synthetic peptide
  Seed: GMDPRMCSLMQGSTL
GMDIRMMSAMQHSTL

SEQ ID NO: 73653 - protein, 15 aa, Artificial Sequence
  Description of Artificial Sequence: Synthetic peptide
  Seed: GMDPRMCSLMQGSTL
GMDIRMMSAMQISTL

SEQ ID NO: 73654 - protein, 15 aa, Artificial Sequence
  Description of Artificial Sequence: Synthetic peptide
  Seed: GMDPRMCSLMQGSTL
GMDIRMMSAMQLSTL

SEQ ID NO: 73655 - protein, 15 aa, Artificial Sequence
  Description of Artificial Sequence: Synthetic peptide
  Seed: GMDPRMCSLMQGSTL
GMDIRMMSAMQMSTL

SEQ ID NO: 73656 - protein, 15 aa, Artificial Sequence
  Description of Artificial Sequence: Synthetic peptide
  Seed: GMDPRMCSLMQGSTL
GMDIRMMSAMQNSTL

SEQ ID NO: 73657 - protein, 15 aa, Artificial Sequence
  Description of Artificial Sequence: Synthetic peptide
  Seed: GMDPRMCSLMQGSTL
GMDIRMMSAMQPSTL

SEQ ID NO: 73658 - protein, 15 aa, Artificial Sequence
  Description of Artificial Sequence: Synthetic peptide
  Seed: GMDPRMCSLMQGSTL
GMDIRMMSAMQQSTL

SEQ ID NO: 73659 - protein, 15 aa, Artificial Sequence
  Description of Artificial Sequence: Synthetic peptide
  Seed: GMDPRMCSLMQGSTL
GMDIRMMSAMQSSTL

SEQ ID NO: 73660 - protein, 15 aa, Artificial Sequence
  Description of Artificial Sequence: Synthetic peptide
  Seed: GMDPRMCSLMQGSTL
GMDIRMMSAMQTSTL

SEQ ID NO: 73661 - protein, 15 aa, Artificial Sequence
  Description of Artificial Sequence: Synthetic peptide
  Seed: GMDPRMCSLMQGSTL
GMDIRMMSAMQVSTL

SEQ ID NO: 73662 - protein, 15 aa, Artificial Sequence
  Description of Artificial Sequence: Synthetic peptide
  Seed: GMDPRMCSLMQGSTL
GMDIRMMSGMQASTL

SEQ ID NO: 73663 - protein, 15 aa, Artificial Sequence
  Description of Artificial Sequence: Synthetic peptide
  Seed: GMDPRMCSLMQGSTL
GMDIRMMSGMQHSTL

SEQ ID NO: 73664 - protein, 15 aa, Artificial Sequence
  Description of Artificial Sequence: Synthetic peptide
  Seed: GMDPRMCSLMQGSTL
GMDIRMMSGMQISTL

SEQ ID NO: 73665 - protein, 15 aa, Artificial Sequence
  Description of Artificial Sequence: Synthetic peptide
  Seed: GMDPRMCSLMQGSTL
GMDIRMMSGMQLSTL

SEQ ID NO: 73666 - protein, 15 aa, Artificial Sequence
  Description of Artificial Sequence: Synthetic peptide
  Seed: GMDPRMCSLMQGSTL
GMDIRMMSGMQMSTL

SEQ ID NO: 73667 - protein, 15 aa, Artificial Sequence
  Description of Artificial Sequence: Synthetic peptide
  Seed: GMDPRMCSLMQGSTL
GMDIRMMSGMQNSTL

SEQ ID NO: 73668 - protein, 15 aa, Artificial Sequence
  Description of Artificial Sequence: Synthetic peptide
  Seed: GMDPRMCSLMQGSTL
GMDIRMMSGMQSSTL

SEQ ID NO: 73669 - protein, 15 aa, Artificial Sequence
  Description of Artificial Sequence: Synthetic peptide
  Seed: GMDPRMCSLMQGSTL
GMDIRMMSGMQTSTL

SEQ ID NO: 73670 - protein, 15 aa, Artificial Sequence
  Description of Artificial Sequence: Synthetic peptide
  Seed: GMDPRMCSLMQGSTL
GMDIRMMSGMQVSTL

SEQ ID NO: 73671 - protein, 15 aa, Artificial Sequence
  Description of Artificial Sequence: Synthetic peptide
  Seed: GMDPRMCSLMQGSTL
GMDIRMMSIMQASTL

SEQ ID NO: 73672 - protein, 15 aa, Artificial Sequence
  Description of Artificial Sequence: Synthetic peptide
  Seed: GMDPRMCSLMQGSTL
GMDIRMMSIMQGSTL

SEQ ID NO: 73673 - protein, 15 aa, Artificial Sequence
  Description of Artificial Sequence: Synthetic peptide
  Seed: GMDPRMCSLMQGSTL
GMDIRMMSIMQHSTL

SEQ ID NO: 73674 - protein, 15 aa, Artificial Sequence
  Description of Artificial Sequence: Synthetic peptide
  Seed: GMDPRMCSLMQGSTL
GMDIRMMSIMQISTL

SEQ ID NO: 73675 - protein, 15 aa, Artificial Sequence
  Description of Artificial Sequence: Synthetic peptide
  Seed: GMDPRMCSLMQGSTL
GMDIRMMSIMQLSTL

SEQ ID NO: 73676 - protein, 15 aa, Artificial Sequence
  Description of Artificial Sequence: Synthetic peptide
  Seed: GMDPRMCSLMQGSTL
GMDIRMMSIMQMSTL

SEQ ID NO: 73677 - protein, 15 aa, Artificial Sequence
  Description of Artificial Sequence: Synthetic peptide
  Seed: GMDPRMCSLMQGSTL
GMDIRMMSIMQNSTL

SEQ ID NO: 73678 - protein, 15 aa, Artificial Sequence
  Description of Artificial Sequence: Synthetic peptide
  Seed: GMDPRMCSLMQGSTL
GMDIRMMSIMQQSTL

SEQ ID NO: 73679 - protein, 15 aa, Artificial Sequence
  Description of Artificial Sequence: Synthetic peptide
  Seed: GMDPRMCSLMQGSTL
GMDIRMMSIMQSSTL

SEQ ID NO: 73680 - protein, 15 aa, Artificial Sequence
  Description of Artificial Sequence: Synthetic peptide
  Seed: GMDPRMCSLMQGSTL
GMDIRMMSIMQTSTL

SEQ ID NO: 73681 - protein, 15 aa, Artificial Sequence
  Description of Artificial Sequence: Synthetic peptide
  Seed: GMDPRMCSLMQGSTL
GMDIRMMSIMQVSTL

SEQ ID NO: 73682 - protein, 15 aa, Artificial Sequence
  Description of Artificial Sequence: Synthetic peptide
  Seed: GMDPRMCSLMQGSTL
GMDIRMMSLMQASTL

SEQ ID NO: 73683 - protein, 15 aa, Artificial Sequence
  Description of Artificial Sequence: Synthetic peptide
  Seed: GMDPRMCSLMQGSTL
GMDIRMMSLMQHSTL

SEQ ID NO: 73684 - protein, 15 aa, Artificial Sequence
  Description of Artificial Sequence: Synthetic peptide
  Seed: GMDPRMCSLMQGSTL
GMDIRMMSLMQNSTL

SEQ ID NO: 73685 - protein, 15 aa, Artificial Sequence
  Description of Artificial Sequence: Synthetic peptide
  Seed: GMDPRMCSLMQGSTL
GMDIRMMSLMQSSTL

SEQ ID NO: 73686 - protein, 15 aa, Artificial Sequence
  Description of Artificial Sequence: Synthetic peptide
  Seed: GMDPRMCSLMQGSTL
GMDIRMMSLMQTSTL

SEQ ID NO: 73687 - protein, 15 aa, Artificial Sequence
  Description of Artificial Sequence: Synthetic peptide
  Seed: GMDPRMCSLMQGSTL
GMDIRMMSMMQASTL

SEQ ID NO: 73688 - protein, 15 aa, Artificial Sequence
  Description of Artificial Sequence: Synthetic peptide
  Seed: GMDPRMCSLMQGSTL
GMDIRMMSMMQHSTL

SEQ ID NO: 73689 - protein, 15 aa, Artificial Sequence
  Description of Artificial Sequence: Synthetic peptide
  Seed: GMDPRMCSLMQGSTL
GMDIRMMSMMQNSTL

SEQ ID NO: 73690 - protein, 15 aa, Artificial Sequence
  Description of Artificial Sequence: Synthetic peptide
  Seed: GMDPRMCSLMQGSTL
GMDIRMMSMMQSSTL

SEQ ID NO: 73691 - protein, 15 aa, Artificial Sequence
  Description of Artificial Sequence: Synthetic peptide
  Seed: GMDPRMCSLMQGSTL
GMDIRMMSMMQTSTL

SEQ ID NO: 73692 - protein, 15 aa, Artificial Sequence
  Description of Artificial Sequence: Synthetic peptide
  Seed: GMDPRMCSLMQGSTL
GMDIRMMSNMQASTL

SEQ ID NO: 73693 - protein, 15 aa, Artificial Sequence
  Description of Artificial Sequence: Synthetic peptide
  Seed: GMDPRMCSLMQGSTL
GMDIRMMSNMQHSTL

SEQ ID NO: 73694 - protein, 15 aa, Artificial Sequence
  Description of Artificial Sequence: Synthetic peptide
  Seed: GMDPRMCSLMQGSTL
GMDIRMMSNMQISTL

SEQ ID NO: 73695 - protein, 15 aa, Artificial Sequence
  Description of Artificial Sequence: Synthetic peptide
  Seed: GMDPRMCSLMQGSTL
GMDIRMMSNMQLSTL

SEQ ID NO: 73696 - protein, 15 aa, Artificial Sequence
  Description of Artificial Sequence: Synthetic peptide
  Seed: GMDPRMCSLMQGSTL
GMDIRMMSNMQMSTL

SEQ ID NO: 73697 - protein, 15 aa, Artificial Sequence
  Description of Artificial Sequence: Synthetic peptide
  Seed: GMDPRMCSLMQGSTL
GMDIRMMSNMQNSTL

SEQ ID NO: 73698 - protein, 15 aa, Artificial Sequence
  Description of Artificial Sequence: Synthetic peptide
  Seed: GMDPRMCSLMQGSTL
GMDIRMMSNMQSSTL

SEQ ID NO: 73699 - protein, 15 aa, Artificial Sequence
  Description of Artificial Sequence: Synthetic peptide
  Seed: GMDPRMCSLMQGSTL
GMDIRMMSNMQTSTL

SEQ ID NO: 73700 - protein, 15 aa, Artificial Sequence
  Description of Artificial Sequence: Synthetic peptide
  Seed: GMDPRMCSLMQGSTL
GMDIRMMSNMQVSTL

SEQ ID NO: 73701 - protein, 15 aa, Artificial Sequence
  Description of Artificial Sequence: Synthetic peptide
  Seed: GMDPRMCSLMQGSTL
GMDIRMMSPMQASTL

SEQ ID NO: 73702 - protein, 15 aa, Artificial Sequence
  Description of Artificial Sequence: Synthetic peptide
  Seed: GMDPRMCSLMQGSTL
GMDIRMMSPMQGSTL

SEQ ID NO: 73703 - protein, 15 aa, Artificial Sequence
  Description of Artificial Sequence: Synthetic peptide
  Seed: GMDPRMCSLMQGSTL
GMDIRMMSPMQHSTL

SEQ ID NO: 73704 - protein, 15 aa, Artificial Sequence
  Description of Artificial Sequence: Synthetic peptide
  Seed: GMDPRMCSLMQGSTL
GMDIRMMSPMQISTL

SEQ ID NO: 73705 - protein, 15 aa, Artificial Sequence
  Description of Artificial Sequence: Synthetic peptide
  Seed: GMDPRMCSLMQGSTL
GMDIRMMSPMQLSTL

SEQ ID NO: 73706 - protein, 15 aa, Artificial Sequence
  Description of Artificial Sequence: Synthetic peptide
  Seed: GMDPRMCSLMQGSTL
GMDIRMMSPMQMSTL

SEQ ID NO: 73707 - protein, 15 aa, Artificial Sequence
  Description of Artificial Sequence: Synthetic peptide
  Seed: GMDPRMCSLMQGSTL
GMDIRMMSPMQNSTL

SEQ ID NO: 73708 - protein, 15 aa, Artificial Sequence
  Description of Artificial Sequence: Synthetic peptide
  Seed: GMDPRMCSLMQGSTL
GMDIRMMSPMQPSTL

SEQ ID NO: 73709 - protein, 15 aa, Artificial Sequence
  Description of Artificial Sequence: Synthetic peptide
  Seed: GMDPRMCSLMQGSTL
GMDIRMMSPMQQSTL

SEQ ID NO: 73710 - protein, 15 aa, Artificial Sequence
  Description of Artificial Sequence: Synthetic peptide
  Seed: GMDPRMCSLMQGSTL
GMDIRMMSPMQSSTL

SEQ ID NO: 73711 - protein, 15 aa, Artificial Sequence
  Description of Artificial Sequence: Synthetic peptide
  Seed: GMDPRMCSLMQGSTL
GMDIRMMSPMQTSTL

SEQ ID NO: 73712 - protein, 15 aa, Artificial Sequence
  Description of Artificial Sequence: Synthetic peptide
  Seed: GMDPRMCSLMQGSTL
GMDIRMMSPMQVSTL

SEQ ID NO: 73713 - protein, 15 aa, Artificial Sequence
  Description of Artificial Sequence: Synthetic peptide
  Seed: GMDPRMCSLMQGSTL
GMDIRMMSSMQASTL

SEQ ID NO: 73714 - protein, 15 aa, Artificial Sequence
  Description of Artificial Sequence: Synthetic peptide
  Seed: GMDPRMCSLMQGSTL
GMDIRMMSSMQGSTL

SEQ ID NO: 73715 - protein, 15 aa, Artificial Sequence
  Description of Artificial Sequence: Synthetic peptide
  Seed: GMDPRMCSLMQGSTL
GMDIRMMSSMQHSTL

SEQ ID NO: 73716 - protein, 15 aa, Artificial Sequence
  Description of Artificial Sequence: Synthetic peptide
  Seed: GMDPRMCSLMQGSTL
GMDIRMMSSMQISTL

SEQ ID NO: 73717 - protein, 15 aa, Artificial Sequence
  Description of Artificial Sequence: Synthetic peptide
  Seed: GMDPRMCSLMQGSTL
GMDIRMMSSMQLSTL

SEQ ID NO: 73718 - protein, 15 aa, Artificial Sequence
  Description of Artificial Sequence: Synthetic peptide
  Seed: GMDPRMCSLMQGSTL
GMDIRMMSSMQMSTL

SEQ ID NO: 73719 - protein, 15 aa, Artificial Sequence
  Description of Artificial Sequence: Synthetic peptide
  Seed: GMDPRMCSLMQGSTL
GMDIRMMSSMQNSTL

SEQ ID NO: 73720 - protein, 15 aa, Artificial Sequence
  Description of Artificial Sequence: Synthetic peptide
  Seed: GMDPRMCSLMQGSTL
GMDIRMMSSMQQSTL

SEQ ID NO: 73721 - protein, 15 aa, Artificial Sequence
  Description of Artificial Sequence: Synthetic peptide
  Seed: GMDPRMCSLMQGSTL
GMDIRMMSSMQSSTL

SEQ ID NO: 73722 - protein, 15 aa, Artificial Sequence
  Description of Artificial Sequence: Synthetic peptide
  Seed: GMDPRMCSLMQGSTL
GMDIRMMSSMQTSTL

SEQ ID NO: 73723 - protein, 15 aa, Artificial Sequence
  Description of Artificial Sequence: Synthetic peptide
  Seed: GMDPRMCSLMQGSTL
GMDIRMMSSMQVSTL

SEQ ID NO: 73724 - protein, 15 aa, Artificial Sequence
  Description of Artificial Sequence: Synthetic peptide
  Seed: GMDPRMCSLMQGSTL
GMDIRMMSTMQASTL

SEQ ID NO: 73725 - protein, 15 aa, Artificial Sequence
  Description of Artificial Sequence: Synthetic peptide
  Seed: GMDPRMCSLMQGSTL
GMDIRMMSTMQGSTL

SEQ ID NO: 73726 - protein, 15 aa, Artificial Sequence
  Description of Artificial Sequence: Synthetic peptide
  Seed: GMDPRMCSLMQGSTL
GMDIRMMSTMQHSTL

SEQ ID NO: 73727 - protein, 15 aa, Artificial Sequence
  Description of Artificial Sequence: Synthetic peptide
  Seed: GMDPRMCSLMQGSTL
GMDIRMMSTMQISTL

SEQ ID NO: 73728 - protein, 15 aa, Artificial Sequence
  Description of Artificial Sequence: Synthetic peptide
  Seed: GMDPRMCSLMQGSTL
GMDIRMMSTMQLSTL

SEQ ID NO: 73729 - protein, 15 aa, Artificial Sequence
  Description of Artificial Sequence: Synthetic peptide
  Seed: GMDPRMCSLMQGSTL
GMDIRMMSTMQMSTL

SEQ ID NO: 73730 - protein, 15 aa, Artificial Sequence
  Description of Artificial Sequence: Synthetic peptide
  Seed: GMDPRMCSLMQGSTL
GMDIRMMSTMQNSTL

SEQ ID NO: 73731 - protein, 15 aa, Artificial Sequence
  Description of Artificial Sequence: Synthetic peptide
  Seed: GMDPRMCSLMQGSTL
GMDIRMMSTMQQSTL

SEQ ID NO: 73732 - protein, 15 aa, Artificial Sequence
  Description of Artificial Sequence: Synthetic peptide
  Seed: GMDPRMCSLMQGSTL
GMDIRMMSTMQSSTL

SEQ ID NO: 73733 - protein, 15 aa, Artificial Sequence
  Description of Artificial Sequence: Synthetic peptide
  Seed: GMDPRMCSLMQGSTL
GMDIRMMSTMQTSTL

SEQ ID NO: 73734 - protein, 15 aa, Artificial Sequence
  Description of Artificial Sequence: Synthetic peptide
  Seed: GMDPRMCSLMQGSTL
GMDIRMMSTMQVSTL

SEQ ID NO: 73735 - protein, 15 aa, Artificial Sequence
  Description of Artificial Sequence: Synthetic peptide
  Seed: GMDPRMCSLMQGSTL
GMDIRMMSVMQASTL

SEQ ID NO: 73736 - protein, 15 aa, Artificial Sequence
  Description of Artificial Sequence: Synthetic peptide
  Seed: GMDPRMCSLMQGSTL
GMDIRMMSVMQGSTL

SEQ ID NO: 73737 - protein, 15 aa, Artificial Sequence
  Description of Artificial Sequence: Synthetic peptide
  Seed: GMDPRMCSLMQGSTL
GMDIRMMSVMQHSTL

SEQ ID NO: 73738 - protein, 15 aa, Artificial Sequence
  Description of Artificial Sequence: Synthetic peptide
  Seed: GMDPRMCSLMQGSTL
GMDIRMMSVMQISTL

SEQ ID NO: 73739 - protein, 15 aa, Artificial Sequence
  Description of Artificial Sequence: Synthetic peptide
  Seed: GMDPRMCSLMQGSTL
GMDIRMMSVMQLSTL

SEQ ID NO: 73740 - protein, 15 aa, Artificial Sequence
  Description of Artificial Sequence: Synthetic peptide
  Seed: GMDPRMCSLMQGSTL
GMDIRMMSVMQMSTL

SEQ ID NO: 73741 - protein, 15 aa, Artificial Sequence
  Description of Artificial Sequence: Synthetic peptide
  Seed: GMDPRMCSLMQGSTL
GMDIRMMSVMQNSTL

SEQ ID NO: 73742 - protein, 15 aa, Artificial Sequence
  Description of Artificial Sequence: Synthetic peptide
  Seed: GMDPRMCSLMQGSTL
GMDIRMMSVMQPSTL

SEQ ID NO: 73743 - protein, 15 aa, Artificial Sequence
  Description of Artificial Sequence: Synthetic peptide
  Seed: GMDPRMCSLMQGSTL
GMDIRMMSVMQQSTL

SEQ ID NO: 73744 - protein, 15 aa, Artificial Sequence
  Description of Artificial Sequence: Synthetic peptide
  Seed: GMDPRMCSLMQGSTL
GMDIRMMSVMQSSTL

SEQ ID NO: 73745 - protein, 15 aa, Artificial Sequence
  Description of Artificial Sequence: Synthetic peptide
  Seed: GMDPRMCSLMQGSTL
GMDIRMMSVMQTSTL

SEQ ID NO: 73746 - protein, 15 aa, Artificial Sequence
  Description of Artificial Sequence: Synthetic peptide
  Seed: GMDPRMCSLMQGSTL
GMDIRMMSVMQVSTL

SEQ ID NO: 73747 - protein, 15 aa, Artificial Sequence
  Description of Artificial Sequence: Synthetic peptide
  Seed: GMDPRMCSLMQGSTL
GMDIRMQSAMQASTL

SEQ ID NO: 73748 - protein, 15 aa, Artificial Sequence
  Description of Artificial Sequence: Synthetic peptide
  Seed: GMDPRMCSLMQGSTL
GMDIRMQSAMQLSTL

SEQ ID NO: 73749 - protein, 15 aa, Artificial Sequence
  Description of Artificial Sequence: Synthetic peptide
  Seed: GMDPRMCSLMQGSTL
GMDIRMQSAMQMSTL

SEQ ID NO: 73750 - protein, 15 aa, Artificial Sequence
  Description of Artificial Sequence: Synthetic peptide
  Seed: GMDPRMCSLMQGSTL
GMDIRMQSAMQNSTL

SEQ ID NO: 73751 - protein, 15 aa, Artificial Sequence
  Description of Artificial Sequence: Synthetic peptide
  Seed: GMDPRMCSLMQGSTL
GMDIRMQSAMQSSTL

SEQ ID NO: 73752 - protein, 15 aa, Artificial Sequence
  Description of Artificial Sequence: Synthetic peptide
  Seed: GMDPRMCSLMQGSTL
GMDIRMQSAMQTSTL

SEQ ID NO: 73753 - protein, 15 aa, Artificial Sequence
  Description of Artificial Sequence: Synthetic peptide
  Seed: GMDPRMCSLMQGSTL
GMDIRMQSIMQASTL

SEQ ID NO: 73754 - protein, 15 aa, Artificial Sequence
  Description of Artificial Sequence: Synthetic peptide
  Seed: GMDPRMCSLMQGSTL
GMDIRMQSIMQNSTL

SEQ ID NO: 73755 - protein, 15 aa, Artificial Sequence
  Description of Artificial Sequence: Synthetic peptide
  Seed: GMDPRMCSLMQGSTL
GMDIRMQSIMQSSTL

SEQ ID NO: 73756 - protein, 15 aa, Artificial Sequence
  Description of Artificial Sequence: Synthetic peptide
  Seed: GMDPRMCSLMQGSTL
GMDIRMQSPMQASTL

SEQ ID NO: 73757 - protein, 15 aa, Artificial Sequence
  Description of Artificial Sequence: Synthetic peptide
  Seed: GMDPRMCSLMQGSTL
GMDIRMQSPMQSSTL

SEQ ID NO: 73758 - protein, 15 aa, Artificial Sequence
  Description of Artificial Sequence: Synthetic peptide
  Seed: GMDPRMCSLMQGSTL
GMDIRMQSSMQASTL

SEQ ID NO: 73759 - protein, 15 aa, Artificial Sequence
  Description of Artificial Sequence: Synthetic peptide
  Seed: GMDPRMCSLMQGSTL
GMDIRMQSSMQSSTL

SEQ ID NO: 73760 - protein, 15 aa, Artificial Sequence
  Description of Artificial Sequence: Synthetic peptide
  Seed: GMDPRMCSLMQGSTL
GMDIRMQSTMQASTL

SEQ ID NO: 73761 - protein, 15 aa, Artificial Sequence
  Description of Artificial Sequence: Synthetic peptide
  Seed: GMDPRMCSLMQGSTL
GMDIRMQSTMQSSTL

SEQ ID NO: 73762 - protein, 15 aa, Artificial Sequence
  Description of Artificial Sequence: Synthetic peptide
  Seed: GMDPRMCSLMQGSTL
GMDIRMQSVMQASTL

SEQ ID NO: 73763 - protein, 15 aa, Artificial Sequence
  Description of Artificial Sequence: Synthetic peptide
  Seed: GMDPRMCSLMQGSTL
GMDIRMQSVMQNSTL

SEQ ID NO: 73764 - protein, 15 aa, Artificial Sequence
  Description of Artificial Sequence: Synthetic peptide
  Seed: GMDPRMCSLMQGSTL
GMDIRMQSVMQSSTL

SEQ ID NO: 73765 - protein, 15 aa, Artificial Sequence
  Description of Artificial Sequence: Synthetic peptide
  Seed: GMDPRMCSLMQGSTL
GMDIRMSSAMQASTL

SEQ ID NO: 73766 - protein, 15 aa, Artificial Sequence
  Description of Artificial Sequence: Synthetic peptide
  Seed: GMDPRMCSLMQGSTL
GMDIRMSSAMQNSTL

SEQ ID NO: 73767 - protein, 15 aa, Artificial Sequence
  Description of Artificial Sequence: Synthetic peptide
  Seed: GMDPRMCSLMQGSTL
GMDIRMSSAMQSSTL

SEQ ID NO: 73768 - protein, 15 aa, Artificial Sequence
  Description of Artificial Sequence: Synthetic peptide
  Seed: GMDPRMCSLMQGSTL
GMDIRMSSVMQASTL

SEQ ID NO: 73769 - protein, 15 aa, Artificial Sequence
  Description of Artificial Sequence: Synthetic peptide
  Seed: GMDPRMCSLMQGSTL
GMDIRMSSVMQSSTL

SEQ ID NO: 73770 - protein, 15 aa, Artificial Sequence
  Description of Artificial Sequence: Synthetic peptide
  Seed: GMDPRMCSLMQGSTL
GMDIRMTSAMQASTL

SEQ ID NO: 73771 - protein, 15 aa, Artificial Sequence
  Description of Artificial Sequence: Synthetic peptide
  Seed: GMDPRMCSLMQGSTL
GMDIRMTSAMQNSTL

SEQ ID NO: 73772 - protein, 15 aa, Artificial Sequence
  Description of Artificial Sequence: Synthetic peptide
  Seed: GMDPRMCSLMQGSTL
GMDIRMTSAMQSSTL

SEQ ID NO: 73773 - protein, 15 aa, Artificial Sequence
  Description of Artificial Sequence: Synthetic peptide
  Seed: GMDPRMCSLMQGSTL
GMDIRMVSAMQASTL

SEQ ID NO: 73774 - protein, 15 aa, Artificial Sequence
  Description of Artificial Sequence: Synthetic peptide
  Seed: GMDPRMCSLMQGSTL
GMDIRMVSAMQHSTL

SEQ ID NO: 73775 - protein, 15 aa, Artificial Sequence
  Description of Artificial Sequence: Synthetic peptide
  Seed: GMDPRMCSLMQGSTL
GMDIRMVSAMQNSTL

SEQ ID NO: 73776 - protein, 15 aa, Artificial Sequence
  Description of Artificial Sequence: Synthetic peptide
  Seed: GMDPRMCSLMQGSTL
GMDIRMVSAMQSSTL

SEQ ID NO: 73777 - protein, 15 aa, Artificial Sequence
  Description of Artificial Sequence: Synthetic peptide
  Seed: GMDPRMCSLMQGSTL
GMDIRMVSAMQTSTL

SEQ ID NO: 73778 - protein, 15 aa, Artificial Sequence
  Description of Artificial Sequence: Synthetic peptide
  Seed: GMDPRMCSLMQGSTL
GMDIRMVSGMQNSTL

SEQ ID NO: 73779 - protein, 15 aa, Artificial Sequence
  Description of Artificial Sequence: Synthetic peptide
  Seed: GMDPRMCSLMQGSTL
GMDIRMVSGMQSSTL

SEQ ID NO: 73780 - protein, 15 aa, Artificial Sequence
  Description of Artificial Sequence: Synthetic peptide
  Seed: GMDPRMCSLMQGSTL
GMDIRMVSMMQASTL

SEQ ID NO: 73781 - protein, 15 aa, Artificial Sequence
  Description of Artificial Sequence: Synthetic peptide
  Seed: GMDPRMCSLMQGSTL
GMDIRMVSPMQASTL

SEQ ID NO: 73782 - protein, 15 aa, Artificial Sequence
  Description of Artificial Sequence: Synthetic peptide
  Seed: GMDPRMCSLMQGSTL
GMDIRMVSPMQNSTL

SEQ ID NO: 73783 - protein, 15 aa, Artificial Sequence
  Description of Artificial Sequence: Synthetic peptide
  Seed: GMDPRMCSLMQGSTL
GMDIRMVSPMQSSTL

SEQ ID NO: 73784 - protein, 15 aa, Artificial Sequence
  Description of Artificial Sequence: Synthetic peptide
  Seed: GMDPRMCSLMQGSTL
GMDIRMVSPMQTSTL

SEQ ID NO: 73785 - protein, 15 aa, Artificial Sequence
  Description of Artificial Sequence: Synthetic peptide
  Seed: GMDPRMCSLMQGSTL
GMDIRMVSSMQASTL

SEQ ID NO: 73786 - protein, 15 aa, Artificial Sequence
  Description of Artificial Sequence: Synthetic peptide
  Seed: GMDPRMCSLMQGSTL
GMDIRMVSSMQNSTL

SEQ ID NO: 73787 - protein, 15 aa, Artificial Sequence
  Description of Artificial Sequence: Synthetic peptide
  Seed: GMDPRMCSLMQGSTL
GMDIRMVSSMQSSTL

SEQ ID NO: 73788 - protein, 15 aa, Artificial Sequence
  Description of Artificial Sequence: Synthetic peptide
  Seed: GMDPRMCSLMQGSTL
GMDIRMVSSMQTSTL

SEQ ID NO: 73789 - protein, 15 aa, Artificial Sequence
  Description of Artificial Sequence: Synthetic peptide
  Seed: GMDPRMCSLMQGSTL
GMDIRMVSTMQASTL

SEQ ID NO: 73790 - protein, 15 aa, Artificial Sequence
  Description of Artificial Sequence: Synthetic peptide
  Seed: GMDPRMCSLMQGSTL
GMDIRMVSTMQNSTL

SEQ ID NO: 73791 - protein, 15 aa, Artificial Sequence
  Description of Artificial Sequence: Synthetic peptide
  Seed: GMDPRMCSLMQGSTL
GMDIRMVSTMQSSTL

SEQ ID NO: 73792 - protein, 15 aa, Artificial Sequence
  Description of Artificial Sequence: Synthetic peptide
  Seed: GMDPRMCSLMQGSTL
GMDIRMVSVMQASTL

SEQ ID NO: 73793 - protein, 15 aa, Artificial Sequence
  Description of Artificial Sequence: Synthetic peptide
  Seed: GMDPRMCSLMQGSTL
GMDIRMVSVMQNSTL

SEQ ID NO: 73794 - protein, 15 aa, Artificial Sequence
  Description of Artificial Sequence: Synthetic peptide
  Seed: GMDPRMCSLMQGSTL
GMDIRMVSVMQSSTL

SEQ ID NO: 73795 - protein, 15 aa, Artificial Sequence
  Description of Artificial Sequence: Synthetic peptide
  Seed: GMDPRMCSLMQGSTL
GMDIRMWSAMQASTL

SEQ ID NO: 73796 - protein, 15 aa, Artificial Sequence
  Description of Artificial Sequence: Synthetic peptide
  Seed: GMDPRMCSLMQGSTL
GMDIRMWSAMQSSTL

SEQ ID NO: 73797 - protein, 15 aa, Artificial Sequence
  Description of Artificial Sequence: Synthetic peptide
  Seed: GMDPRMCSLMQGSTL
GMDIRMWSAMQTSTL

SEQ ID NO: 73798 - protein, 15 aa, Artificial Sequence
  Description of Artificial Sequence: Synthetic peptide
  Seed: GMDPRMCSLMQGSTL
GMDIRMWSIMQASTL

SEQ ID NO: 73799 - protein, 15 aa, Artificial Sequence
  Description of Artificial Sequence: Synthetic peptide
  Seed: GMDPRMCSLMQGSTL
GMDIRMWSIMQSSTL

SEQ ID NO: 73800 - protein, 15 aa, Artificial Sequence
  Description of Artificial Sequence: Synthetic peptide
  Seed: GMDPRMCSLMQGSTL
GMDIRMWSIMQTSTL

SEQ ID NO: 73801 - protein, 15 aa, Artificial Sequence
  Description of Artificial Sequence: Synthetic peptide
  Seed: GMDPRMCSLMQGSTL
GMDIRMWSLMQSSTL

SEQ ID NO: 73802 - protein, 15 aa, Artificial Sequence
  Description of Artificial Sequence: Synthetic peptide
  Seed: GMDPRMCSLMQGSTL
GMDIRMWSMMQSSTL

SEQ ID NO: 73803 - protein, 15 aa, Artificial Sequence
  Description of Artificial Sequence: Synthetic peptide
  Seed: GMDPRMCSLMQGSTL
GMDIRMWSPMQASTL

SEQ ID NO: 73804 - protein, 15 aa, Artificial Sequence
  Description of Artificial Sequence: Synthetic peptide
  Seed: GMDPRMCSLMQGSTL
GMDIRMWSSMQASTL

SEQ ID NO: 73805 - protein, 15 aa, Artificial Sequence
  Description of Artificial Sequence: Synthetic peptide
  Seed: GMDPRMCSLMQGSTL
GMDIRMWSVMQASTL

SEQ ID NO: 73806 - protein, 15 aa, Artificial Sequence
  Description of Artificial Sequence: Synthetic peptide
  Seed: GMDPRMCSLMQGSTL
GMDIRMWSVMQSSTL

SEQ ID NO: 73807 - protein, 15 aa, Artificial Sequence
  Description of Artificial Sequence: Synthetic peptide
  Seed: GMDPRMCSLMQGSTL
GMDIRMYSAMQASTL

SEQ ID NO: 73808 - protein, 15 aa, Artificial Sequence
  Description of Artificial Sequence: Synthetic peptide
  Seed: GMDPRMCSLMQGSTL
GMDIRMYSAMQGSTL

SEQ ID NO: 73809 - protein, 15 aa, Artificial Sequence
  Description of Artificial Sequence: Synthetic peptide
  Seed: GMDPRMCSLMQGSTL
GMDIRMYSAMQISTL

SEQ ID NO: 73810 - protein, 15 aa, Artificial Sequence
  Description of Artificial Sequence: Synthetic peptide
  Seed: GMDPRMCSLMQGSTL
GMDIRMYSAMQNSTL

SEQ ID NO: 73811 - protein, 15 aa, Artificial Sequence
  Description of Artificial Sequence: Synthetic peptide
  Seed: GMDPRMCSLMQGSTL
GMDIRMYSAMQSSTL

SEQ ID NO: 73812 - protein, 15 aa, Artificial Sequence
  Description of Artificial Sequence: Synthetic peptide
  Seed: GMDPRMCSLMQGSTL
GMDIRMYSIMQNSTL

SEQ ID NO: 73813 - protein, 15 aa, Artificial Sequence
  Description of Artificial Sequence: Synthetic peptide
  Seed: GMDPRMCSLMQGSTL
GMDIRMYSPMQASTL

SEQ ID NO: 73814 - protein, 15 aa, Artificial Sequence
  Description of Artificial Sequence: Synthetic peptide
  Seed: GMDPRMCSLMQGSTL
GMDIRMYSSMQSSTL

SEQ ID NO: 73815 - protein, 15 aa, Artificial Sequence
  Description of Artificial Sequence: Synthetic peptide
  Seed: GMDPRMCSLMQGSTL
GMDIRMYSTMQASTL

SEQ ID NO: 73816 - protein, 15 aa, Artificial Sequence
  Description of Artificial Sequence: Synthetic peptide
  Seed: GMDPRMCSLMQGSTL
GMDIRMYSVMQASTL

SEQ ID NO: 73817 - protein, 15 aa, Artificial Sequence
  Description of Artificial Sequence: Synthetic peptide
  Seed: GMDPRMCSLMQGSTL
GMDIRMYSVMQGSTL

SEQ ID NO: 73818 - protein, 15 aa, Artificial Sequence
  Description of Artificial Sequence: Synthetic peptide
  Seed: GMDPRMCSLMQGSTL
GMDIRMYSVMQSSTL

SEQ ID NO: 73819 - protein, 15 aa, Artificial Sequence
  Description of Artificial Sequence: Synthetic peptide
  Seed: GMDPRMCSLMQGSTL
GMDLRMASAMQASTL

SEQ ID NO: 73820 - protein, 15 aa, Artificial Sequence
  Description of Artificial Sequence: Synthetic peptide
  Seed: GMDPRMCSLMQGSTL
GMDLRMASAMQGSTL

SEQ ID NO: 73821 - protein, 15 aa, Artificial Sequence
  Description of Artificial Sequence: Synthetic peptide
  Seed: GMDPRMCSLMQGSTL
GMDLRMASAMQHSTL

SEQ ID NO: 73822 - protein, 15 aa, Artificial Sequence
  Description of Artificial Sequence: Synthetic peptide
  Seed: GMDPRMCSLMQGSTL
GMDLRMASAMQISTL

SEQ ID NO: 73823 - protein, 15 aa, Artificial Sequence
  Description of Artificial Sequence: Synthetic peptide
  Seed: GMDPRMCSLMQGSTL
GMDLRMASAMQLSTL

SEQ ID NO: 73824 - protein, 15 aa, Artificial Sequence
  Description of Artificial Sequence: Synthetic peptide
  Seed: GMDPRMCSLMQGSTL
GMDLRMASAMQMSTL

SEQ ID NO: 73825 - protein, 15 aa, Artificial Sequence
  Description of Artificial Sequence: Synthetic peptide
  Seed: GMDPRMCSLMQGSTL
GMDLRMASAMQNSTL

SEQ ID NO: 73826 - protein, 15 aa, Artificial Sequence
  Description of Artificial Sequence: Synthetic peptide
  Seed: GMDPRMCSLMQGSTL
GMDLRMASAMQQSTL

SEQ ID NO: 73827 - protein, 15 aa, Artificial Sequence
  Description of Artificial Sequence: Synthetic peptide
  Seed: GMDPRMCSLMQGSTL
GMDLRMASAMQSSTL

SEQ ID NO: 73828 - protein, 15 aa, Artificial Sequence
  Description of Artificial Sequence: Synthetic peptide
  Seed: GMDPRMCSLMQGSTL
GMDLRMASAMQTSTL

SEQ ID NO: 73829 - protein, 15 aa, Artificial Sequence
  Description of Artificial Sequence: Synthetic peptide
  Seed: GMDPRMCSLMQGSTL
GMDLRMASAMQVSTL

SEQ ID NO: 73830 - protein, 15 aa, Artificial Sequence
  Description of Artificial Sequence: Synthetic peptide
  Seed: GMDPRMCSLMQGSTL
GMDLRMASGMQASTL

SEQ ID NO: 73831 - protein, 15 aa, Artificial Sequence
  Description of Artificial Sequence: Synthetic peptide
  Seed: GMDPRMCSLMQGSTL
GMDLRMASGMQNSTL

SEQ ID NO: 73832 - protein, 15 aa, Artificial Sequence
  Description of Artificial Sequence: Synthetic peptide
  Seed: GMDPRMCSLMQGSTL
GMDLRMASGMQSSTL

SEQ ID NO: 73833 - protein, 15 aa, Artificial Sequence
  Description of Artificial Sequence: Synthetic peptide
  Seed: GMDPRMCSLMQGSTL
GMDLRMASIMQASTL

SEQ ID NO: 73834 - protein, 15 aa, Artificial Sequence
  Description of Artificial Sequence: Synthetic peptide
  Seed: GMDPRMCSLMQGSTL
GMDLRMASIMQHSTL

SEQ ID NO: 73835 - protein, 15 aa, Artificial Sequence
  Description of Artificial Sequence: Synthetic peptide
  Seed: GMDPRMCSLMQGSTL
GMDLRMASIMQMSTL

SEQ ID NO: 73836 - protein, 15 aa, Artificial Sequence
  Description of Artificial Sequence: Synthetic peptide
  Seed: GMDPRMCSLMQGSTL
GMDLRMASIMQNSTL

SEQ ID NO: 73837 - protein, 15 aa, Artificial Sequence
  Description of Artificial Sequence: Synthetic peptide
  Seed: GMDPRMCSLMQGSTL
GMDLRMASIMQSSTL

SEQ ID NO: 73838 - protein, 15 aa, Artificial Sequence
  Description of Artificial Sequence: Synthetic peptide
  Seed: GMDPRMCSLMQGSTL
GMDLRMASIMQTSTL

SEQ ID NO: 73839 - protein, 15 aa, Artificial Sequence
  Description of Artificial Sequence: Synthetic peptide
  Seed: GMDPRMCSLMQGSTL
GMDLRMASPMQASTL

SEQ ID NO: 73840 - protein, 15 aa, Artificial Sequence
  Description of Artificial Sequence: Synthetic peptide
  Seed: GMDPRMCSLMQGSTL
GMDLRMASPMQHSTL

SEQ ID NO: 73841 - protein, 15 aa, Artificial Sequence
  Description of Artificial Sequence: Synthetic peptide
  Seed: GMDPRMCSLMQGSTL
GMDLRMASPMQISTL

SEQ ID NO: 73842 - protein, 15 aa, Artificial Sequence
  Description of Artificial Sequence: Synthetic peptide
  Seed: GMDPRMCSLMQGSTL
GMDLRMASPMQLSTL

SEQ ID NO: 73843 - protein, 15 aa, Artificial Sequence
  Description of Artificial Sequence: Synthetic peptide
  Seed: GMDPRMCSLMQGSTL
GMDLRMASPMQMSTL

SEQ ID NO: 73844 - protein, 15 aa, Artificial Sequence
  Description of Artificial Sequence: Synthetic peptide
  Seed: GMDPRMCSLMQGSTL
GMDLRMASPMQNSTL

SEQ ID NO: 73845 - protein, 15 aa, Artificial Sequence
  Description of Artificial Sequence: Synthetic peptide
  Seed: GMDPRMCSLMQGSTL
GMDLRMASPMQSSTL

SEQ ID NO: 73846 - protein, 15 aa, Artificial Sequence
  Description of Artificial Sequence: Synthetic peptide
  Seed: GMDPRMCSLMQGSTL
GMDLRMASPMQTSTL

SEQ ID NO: 73847 - protein, 15 aa, Artificial Sequence
  Description of Artificial Sequence: Synthetic peptide
  Seed: GMDPRMCSLMQGSTL
GMDLRMASPMQVSTL

SEQ ID NO: 73848 - protein, 15 aa, Artificial Sequence
  Description of Artificial Sequence: Synthetic peptide
  Seed: GMDPRMCSLMQGSTL
GMDLRMASSMQASTL

SEQ ID NO: 73849 - protein, 15 aa, Artificial Sequence
  Description of Artificial Sequence: Synthetic peptide
  Seed: GMDPRMCSLMQGSTL
GMDLRMASSMQHSTL

SEQ ID NO: 73850 - protein, 15 aa, Artificial Sequence
  Description of Artificial Sequence: Synthetic peptide
  Seed: GMDPRMCSLMQGSTL
GMDLRMASSMQMSTL

SEQ ID NO: 73851 - protein, 15 aa, Artificial Sequence
  Description of Artificial Sequence: Synthetic peptide
  Seed: GMDPRMCSLMQGSTL
GMDLRMASSMQNSTL

SEQ ID NO: 73852 - protein, 15 aa, Artificial Sequence
  Description of Artificial Sequence: Synthetic peptide
  Seed: GMDPRMCSLMQGSTL
GMDLRMASSMQSSTL

SEQ ID NO: 73853 - protein, 15 aa, Artificial Sequence
  Description of Artificial Sequence: Synthetic peptide
  Seed: GMDPRMCSLMQGSTL
GMDLRMASSMQTSTL

SEQ ID NO: 73854 - protein, 15 aa, Artificial Sequence
  Description of Artificial Sequence: Synthetic peptide
  Seed: GMDPRMCSLMQGSTL
GMDLRMASSMQVSTL

SEQ ID NO: 73855 - protein, 15 aa, Artificial Sequence
  Description of Artificial Sequence: Synthetic peptide
  Seed: GMDPRMCSLMQGSTL
GMDLRMASTMQASTL

SEQ ID NO: 73856 - protein, 15 aa, Artificial Sequence
  Description of Artificial Sequence: Synthetic peptide
  Seed: GMDPRMCSLMQGSTL
GMDLRMASTMQHSTL

SEQ ID NO: 73857 - protein, 15 aa, Artificial Sequence
  Description of Artificial Sequence: Synthetic peptide
  Seed: GMDPRMCSLMQGSTL
GMDLRMASTMQMSTL

SEQ ID NO: 73858 - protein, 15 aa, Artificial Sequence
  Description of Artificial Sequence: Synthetic peptide
  Seed: GMDPRMCSLMQGSTL
GMDLRMASTMQNSTL

SEQ ID NO: 73859 - protein, 15 aa, Artificial Sequence
  Description of Artificial Sequence: Synthetic peptide
  Seed: GMDPRMCSLMQGSTL
GMDLRMASTMQSSTL

SEQ ID NO: 73860 - protein, 15 aa, Artificial Sequence
  Description of Artificial Sequence: Synthetic peptide
  Seed: GMDPRMCSLMQGSTL
GMDLRMASTMQTSTL

SEQ ID NO: 73861 - protein, 15 aa, Artificial Sequence
  Description of Artificial Sequence: Synthetic peptide
  Seed: GMDPRMCSLMQGSTL
GMDLRMASTMQVSTL

SEQ ID NO: 73862 - protein, 15 aa, Artificial Sequence
  Description of Artificial Sequence: Synthetic peptide
  Seed: GMDPRMCSLMQGSTL
GMDLRMASVMQASTL

SEQ ID NO: 73863 - protein, 15 aa, Artificial Sequence
  Description of Artificial Sequence: Synthetic peptide
  Seed: GMDPRMCSLMQGSTL
GMDLRMASVMQHSTL

SEQ ID NO: 73864 - protein, 15 aa, Artificial Sequence
  Description of Artificial Sequence: Synthetic peptide
  Seed: GMDPRMCSLMQGSTL
GMDLRMASVMQMSTL

SEQ ID NO: 73865 - protein, 15 aa, Artificial Sequence
  Description of Artificial Sequence: Synthetic peptide
  Seed: GMDPRMCSLMQGSTL
GMDLRMASVMQNSTL

SEQ ID NO: 73866 - protein, 15 aa, Artificial Sequence
  Description of Artificial Sequence: Synthetic peptide
  Seed: GMDPRMCSLMQGSTL
GMDLRMASVMQSSTL

SEQ ID NO: 73867 - protein, 15 aa, Artificial Sequence
  Description of Artificial Sequence: Synthetic peptide
  Seed: GMDPRMCSLMQGSTL
GMDLRMASVMQTSTL

SEQ ID NO: 73868 - protein, 15 aa, Artificial Sequence
  Description of Artificial Sequence: Synthetic peptide
  Seed: GMDPRMCSLMQGSTL
GMDLRMASVMQVSTL

SEQ ID NO: 73869 - protein, 15 aa, Artificial Sequence
  Description of Artificial Sequence: Synthetic peptide
  Seed: GMDPRMCSLMQGSTL
GMDLRMFSAMQASTL

SEQ ID NO: 73870 - protein, 15 aa, Artificial Sequence
  Description of Artificial Sequence: Synthetic peptide
  Seed: GMDPRMCSLMQGSTL
GMDLRMFSAMQGSTL

SEQ ID NO: 73871 - protein, 15 aa, Artificial Sequence
  Description of Artificial Sequence: Synthetic peptide
  Seed: GMDPRMCSLMQGSTL
GMDLRMFSAMQHSTL

SEQ ID NO: 73872 - protein, 15 aa, Artificial Sequence
  Description of Artificial Sequence: Synthetic peptide
  Seed: GMDPRMCSLMQGSTL
GMDLRMFSAMQISTL

SEQ ID NO: 73873 - protein, 15 aa, Artificial Sequence
  Description of Artificial Sequence: Synthetic peptide
  Seed: GMDPRMCSLMQGSTL
GMDLRMFSAMQLSTL

SEQ ID NO: 73874 - protein, 15 aa, Artificial Sequence
  Description of Artificial Sequence: Synthetic peptide
  Seed: GMDPRMCSLMQGSTL
GMDLRMFSAMQMSTL

SEQ ID NO: 73875 - protein, 15 aa, Artificial Sequence
  Description of Artificial Sequence: Synthetic peptide
  Seed: GMDPRMCSLMQGSTL
GMDLRMFSAMQNSTL

SEQ ID NO: 73876 - protein, 15 aa, Artificial Sequence
  Description of Artificial Sequence: Synthetic peptide
  Seed: GMDPRMCSLMQGSTL
GMDLRMFSAMQSSTL

SEQ ID NO: 73877 - protein, 15 aa, Artificial Sequence
  Description of Artificial Sequence: Synthetic peptide
  Seed: GMDPRMCSLMQGSTL
GMDLRMFSAMQTSTL

SEQ ID NO: 73878 - protein, 15 aa, Artificial Sequence
  Description of Artificial Sequence: Synthetic peptide
  Seed: GMDPRMCSLMQGSTL
GMDLRMFSAMQVSTL

SEQ ID NO: 73879 - protein, 15 aa, Artificial Sequence
  Description of Artificial Sequence: Synthetic peptide
  Seed: GMDPRMCSLMQGSTL
GMDLRMFSGMQASTL

SEQ ID NO: 73880 - protein, 15 aa, Artificial Sequence
  Description of Artificial Sequence: Synthetic peptide
  Seed: GMDPRMCSLMQGSTL
GMDLRMFSGMQSSTL

SEQ ID NO: 73881 - protein, 15 aa, Artificial Sequence
  Description of Artificial Sequence: Synthetic peptide
  Seed: GMDPRMCSLMQGSTL
GMDLRMFSIMQASTL

SEQ ID NO: 73882 - protein, 15 aa, Artificial Sequence
  Description of Artificial Sequence: Synthetic peptide
  Seed: GMDPRMCSLMQGSTL
GMDLRMFSIMQGSTL

SEQ ID NO: 73883 - protein, 15 aa, Artificial Sequence
  Description of Artificial Sequence: Synthetic peptide
  Seed: GMDPRMCSLMQGSTL
GMDLRMFSIMQHSTL

SEQ ID NO: 73884 - protein, 15 aa, Artificial Sequence
  Description of Artificial Sequence: Synthetic peptide
  Seed: GMDPRMCSLMQGSTL
GMDLRMFSIMQNSTL

SEQ ID NO: 73885 - protein, 15 aa, Artificial Sequence
  Description of Artificial Sequence: Synthetic peptide
  Seed: GMDPRMCSLMQGSTL
GMDLRMFSIMQSSTL

SEQ ID NO: 73886 - protein, 15 aa, Artificial Sequence
  Description of Artificial Sequence: Synthetic peptide
  Seed: GMDPRMCSLMQGSTL
GMDLRMFSIMQVSTL

SEQ ID NO: 73887 - protein, 15 aa, Artificial Sequence
  Description of Artificial Sequence: Synthetic peptide
  Seed: GMDPRMCSLMQGSTL
GMDLRMFSLMQNSTL

SEQ ID NO: 73888 - protein, 15 aa, Artificial Sequence
  Description of Artificial Sequence: Synthetic peptide
  Seed: GMDPRMCSLMQGSTL
GMDLRMFSNMQASTL

SEQ ID NO: 73889 - protein, 15 aa, Artificial Sequence
  Description of Artificial Sequence: Synthetic peptide
  Seed: GMDPRMCSLMQGSTL
GMDLRMFSNMQSSTL

SEQ ID NO: 73890 - protein, 15 aa, Artificial Sequence
  Description of Artificial Sequence: Synthetic peptide
  Seed: GMDPRMCSLMQGSTL
GMDLRMFSPMQASTL

SEQ ID NO: 73891 - protein, 15 aa, Artificial Sequence
  Description of Artificial Sequence: Synthetic peptide
  Seed: GMDPRMCSLMQGSTL
GMDLRMFSPMQGSTL

SEQ ID NO: 73892 - protein, 15 aa, Artificial Sequence
  Description of Artificial Sequence: Synthetic peptide
  Seed: GMDPRMCSLMQGSTL
GMDLRMFSPMQNSTL

SEQ ID NO: 73893 - protein, 15 aa, Artificial Sequence
  Description of Artificial Sequence: Synthetic peptide
  Seed: GMDPRMCSLMQGSTL
GMDLRMFSPMQSSTL

SEQ ID NO: 73894 - protein, 15 aa, Artificial Sequence
  Description of Artificial Sequence: Synthetic peptide
  Seed: GMDPRMCSLMQGSTL
GMDLRMFSPMQTSTL

SEQ ID NO: 73895 - protein, 15 aa, Artificial Sequence
  Description of Artificial Sequence: Synthetic peptide
  Seed: GMDPRMCSLMQGSTL
GMDLRMFSPMQVSTL

SEQ ID NO: 73896 - protein, 15 aa, Artificial Sequence
  Description of Artificial Sequence: Synthetic peptide
  Seed: GMDPRMCSLMQGSTL
GMDLRMFSSMQASTL

SEQ ID NO: 73897 - protein, 15 aa, Artificial Sequence
  Description of Artificial Sequence: Synthetic peptide
  Seed: GMDPRMCSLMQGSTL
GMDLRMFSSMQGSTL

SEQ ID NO: 73898 - protein, 15 aa, Artificial Sequence
  Description of Artificial Sequence: Synthetic peptide
  Seed: GMDPRMCSLMQGSTL
GMDLRMFSSMQISTL

SEQ ID NO: 73899 - protein, 15 aa, Artificial Sequence
  Description of Artificial Sequence: Synthetic peptide
  Seed: GMDPRMCSLMQGSTL
GMDLRMFSSMQNSTL

SEQ ID NO: 73900 - protein, 15 aa, Artificial Sequence
  Description of Artificial Sequence: Synthetic peptide
  Seed: GMDPRMCSLMQGSTL
GMDLRMFSSMQSSTL

SEQ ID NO: 73901 - protein, 15 aa, Artificial Sequence
  Description of Artificial Sequence: Synthetic peptide
  Seed: GMDPRMCSLMQGSTL
GMDLRMFSSMQTSTL

SEQ ID NO: 73902 - protein, 15 aa, Artificial Sequence
  Description of Artificial Sequence: Synthetic peptide
  Seed: GMDPRMCSLMQGSTL
GMDLRMFSSMQVSTL

SEQ ID NO: 73903 - protein, 15 aa, Artificial Sequence
  Description of Artificial Sequence: Synthetic peptide
  Seed: GMDPRMCSLMQGSTL
GMDLRMFSTMQASTL

SEQ ID NO: 73904 - protein, 15 aa, Artificial Sequence
  Description of Artificial Sequence: Synthetic peptide
  Seed: GMDPRMCSLMQGSTL
GMDLRMFSTMQGSTL

SEQ ID NO: 73905 - protein, 15 aa, Artificial Sequence
  Description of Artificial Sequence: Synthetic peptide
  Seed: GMDPRMCSLMQGSTL
GMDLRMFSTMQNSTL

SEQ ID NO: 73906 - protein, 15 aa, Artificial Sequence
  Description of Artificial Sequence: Synthetic peptide
  Seed: GMDPRMCSLMQGSTL
GMDLRMFSTMQSSTL

SEQ ID NO: 73907 - protein, 15 aa, Artificial Sequence
  Description of Artificial Sequence: Synthetic peptide
  Seed: GMDPRMCSLMQGSTL
GMDLRMFSTMQTSTL

SEQ ID NO: 73908 - protein, 15 aa, Artificial Sequence
  Description of Artificial Sequence: Synthetic peptide
  Seed: GMDPRMCSLMQGSTL
GMDLRMFSTMQVSTL

SEQ ID NO: 73909 - protein, 15 aa, Artificial Sequence
  Description of Artificial Sequence: Synthetic peptide
  Seed: GMDPRMCSLMQGSTL
GMDLRMFSVMQASTL

SEQ ID NO: 73910 - protein, 15 aa, Artificial Sequence
  Description of Artificial Sequence: Synthetic peptide
  Seed: GMDPRMCSLMQGSTL
GMDLRMFSVMQGSTL

SEQ ID NO: 73911 - protein, 15 aa, Artificial Sequence
  Description of Artificial Sequence: Synthetic peptide
  Seed: GMDPRMCSLMQGSTL
GMDLRMFSVMQHSTL

SEQ ID NO: 73912 - protein, 15 aa, Artificial Sequence
  Description of Artificial Sequence: Synthetic peptide
  Seed: GMDPRMCSLMQGSTL
GMDLRMFSVMQNSTL

SEQ ID NO: 73913 - protein, 15 aa, Artificial Sequence
  Description of Artificial Sequence: Synthetic peptide
  Seed: GMDPRMCSLMQGSTL
GMDLRMFSVMQSSTL

SEQ ID NO: 73914 - protein, 15 aa, Artificial Sequence
  Description of Artificial Sequence: Synthetic peptide
  Seed: GMDPRMCSLMQGSTL
GMDLRMFSVMQTSTL

SEQ ID NO: 73915 - protein, 15 aa, Artificial Sequence
  Description of Artificial Sequence: Synthetic peptide
  Seed: GMDPRMCSLMQGSTL
GMDLRMFSVMQVSTL

SEQ ID NO: 73916 - protein, 15 aa, Artificial Sequence
  Description of Artificial Sequence: Synthetic peptide
  Seed: GMDPRMCSLMQGSTL
GMDLRMISAMQASTL

SEQ ID NO: 73917 - protein, 15 aa, Artificial Sequence
  Description of Artificial Sequence: Synthetic peptide
  Seed: GMDPRMCSLMQGSTL
GMDLRMISAMQGSTL

SEQ ID NO: 73918 - protein, 15 aa, Artificial Sequence
  Description of Artificial Sequence: Synthetic peptide
  Seed: GMDPRMCSLMQGSTL
GMDLRMISAMQHSTL

SEQ ID NO: 73919 - protein, 15 aa, Artificial Sequence
  Description of Artificial Sequence: Synthetic peptide
  Seed: GMDPRMCSLMQGSTL
GMDLRMISAMQISTL

SEQ ID NO: 73920 - protein, 15 aa, Artificial Sequence
  Description of Artificial Sequence: Synthetic peptide
  Seed: GMDPRMCSLMQGSTL
GMDLRMISAMQLSTL

SEQ ID NO: 73921 - protein, 15 aa, Artificial Sequence
  Description of Artificial Sequence: Synthetic peptide
  Seed: GMDPRMCSLMQGSTL
GMDLRMISAMQMSTL

SEQ ID NO: 73922 - protein, 15 aa, Artificial Sequence
  Description of Artificial Sequence: Synthetic peptide
  Seed: GMDPRMCSLMQGSTL
GMDLRMISAMQNSTL

SEQ ID NO: 73923 - protein, 15 aa, Artificial Sequence
  Description of Artificial Sequence: Synthetic peptide
  Seed: GMDPRMCSLMQGSTL
GMDLRMISAMQPSTL

SEQ ID NO: 73924 - protein, 15 aa, Artificial Sequence
  Description of Artificial Sequence: Synthetic peptide
  Seed: GMDPRMCSLMQGSTL
GMDLRMISAMQSSTL

SEQ ID NO: 73925 - protein, 15 aa, Artificial Sequence
  Description of Artificial Sequence: Synthetic peptide
  Seed: GMDPRMCSLMQGSTL
GMDLRMISAMQTSTL

SEQ ID NO: 73926 - protein, 15 aa, Artificial Sequence
  Description of Artificial Sequence: Synthetic peptide
  Seed: GMDPRMCSLMQGSTL
GMDLRMISAMQVSTL

SEQ ID NO: 73927 - protein, 15 aa, Artificial Sequence
  Description of Artificial Sequence: Synthetic peptide
  Seed: GMDPRMCSLMQGSTL
GMDLRMISGMQASTL

SEQ ID NO: 73928 - protein, 15 aa, Artificial Sequence
  Description of Artificial Sequence: Synthetic peptide
  Seed: GMDPRMCSLMQGSTL
GMDLRMISGMQNSTL

SEQ ID NO: 73929 - protein, 15 aa, Artificial Sequence
  Description of Artificial Sequence: Synthetic peptide
  Seed: GMDPRMCSLMQGSTL
GMDLRMISGMQSSTL

SEQ ID NO: 73930 - protein, 15 aa, Artificial Sequence
  Description of Artificial Sequence: Synthetic peptide
  Seed: GMDPRMCSLMQGSTL
GMDLRMISGMQTSTL

SEQ ID NO: 73931 - protein, 15 aa, Artificial Sequence
  Description of Artificial Sequence: Synthetic peptide
  Seed: GMDPRMCSLMQGSTL
GMDLRMISIMQASTL

SEQ ID NO: 73932 - protein, 15 aa, Artificial Sequence
  Description of Artificial Sequence: Synthetic peptide
  Seed: GMDPRMCSLMQGSTL
GMDLRMISIMQHSTL

SEQ ID NO: 73933 - protein, 15 aa, Artificial Sequence
  Description of Artificial Sequence: Synthetic peptide
  Seed: GMDPRMCSLMQGSTL
GMDLRMISIMQNSTL

SEQ ID NO: 73934 - protein, 15 aa, Artificial Sequence
  Description of Artificial Sequence: Synthetic peptide
  Seed: GMDPRMCSLMQGSTL
GMDLRMISIMQSSTL

SEQ ID NO: 73935 - protein, 15 aa, Artificial Sequence
  Description of Artificial Sequence: Synthetic peptide
  Seed: GMDPRMCSLMQGSTL
GMDLRMISIMQTSTL

SEQ ID NO: 73936 - protein, 15 aa, Artificial Sequence
  Description of Artificial Sequence: Synthetic peptide
  Seed: GMDPRMCSLMQGSTL
GMDLRMISLMQASTL

SEQ ID NO: 73937 - protein, 15 aa, Artificial Sequence
  Description of Artificial Sequence: Synthetic peptide
  Seed: GMDPRMCSLMQGSTL
GMDLRMISLMQNSTL

SEQ ID NO: 73938 - protein, 15 aa, Artificial Sequence
  Description of Artificial Sequence: Synthetic peptide
  Seed: GMDPRMCSLMQGSTL
GMDLRMISLMQSSTL

SEQ ID NO: 73939 - protein, 15 aa, Artificial Sequence
  Description of Artificial Sequence: Synthetic peptide
  Seed: GMDPRMCSLMQGSTL
GMDLRMISMMQASTL

SEQ ID NO: 73940 - protein, 15 aa, Artificial Sequence
  Description of Artificial Sequence: Synthetic peptide
  Seed: GMDPRMCSLMQGSTL
GMDLRMISMMQNSTL

SEQ ID NO: 73941 - protein, 15 aa, Artificial Sequence
  Description of Artificial Sequence: Synthetic peptide
  Seed: GMDPRMCSLMQGSTL
GMDLRMISMMQSSTL

SEQ ID NO: 73942 - protein, 15 aa, Artificial Sequence
  Description of Artificial Sequence: Synthetic peptide
  Seed: GMDPRMCSLMQGSTL
GMDLRMISNMQASTL

SEQ ID NO: 73943 - protein, 15 aa, Artificial Sequence
  Description of Artificial Sequence: Synthetic peptide
  Seed: GMDPRMCSLMQGSTL
GMDLRMISNMQSSTL

SEQ ID NO: 73944 - protein, 15 aa, Artificial Sequence
  Description of Artificial Sequence: Synthetic peptide
  Seed: GMDPRMCSLMQGSTL
GMDLRMISPMQASTL

SEQ ID NO: 73945 - protein, 15 aa, Artificial Sequence
  Description of Artificial Sequence: Synthetic peptide
  Seed: GMDPRMCSLMQGSTL
GMDLRMISPMQHSTL

SEQ ID NO: 73946 - protein, 15 aa, Artificial Sequence
  Description of Artificial Sequence: Synthetic peptide
  Seed: GMDPRMCSLMQGSTL
GMDLRMISPMQISTL

SEQ ID NO: 73947 - protein, 15 aa, Artificial Sequence
  Description of Artificial Sequence: Synthetic peptide
  Seed: GMDPRMCSLMQGSTL
GMDLRMISPMQLSTL

SEQ ID NO: 73948 - protein, 15 aa, Artificial Sequence
  Description of Artificial Sequence: Synthetic peptide
  Seed: GMDPRMCSLMQGSTL
GMDLRMISPMQMSTL

SEQ ID NO: 73949 - protein, 15 aa, Artificial Sequence
  Description of Artificial Sequence: Synthetic peptide
  Seed: GMDPRMCSLMQGSTL
GMDLRMISPMQNSTL

SEQ ID NO: 73950 - protein, 15 aa, Artificial Sequence
  Description of Artificial Sequence: Synthetic peptide
  Seed: GMDPRMCSLMQGSTL
GMDLRMISPMQSSTL

SEQ ID NO: 73951 - protein, 15 aa, Artificial Sequence
  Description of Artificial Sequence: Synthetic peptide
  Seed: GMDPRMCSLMQGSTL
GMDLRMISPMQTSTL

SEQ ID NO: 73952 - protein, 15 aa, Artificial Sequence
  Description of Artificial Sequence: Synthetic peptide
  Seed: GMDPRMCSLMQGSTL
GMDLRMISPMQVSTL

SEQ ID NO: 73953 - protein, 15 aa, Artificial Sequence
  Description of Artificial Sequence: Synthetic peptide
  Seed: GMDPRMCSLMQGSTL
GMDLRMISSMQASTL

SEQ ID NO: 73954 - protein, 15 aa, Artificial Sequence
  Description of Artificial Sequence: Synthetic peptide
  Seed: GMDPRMCSLMQGSTL
GMDLRMISSMQGSTL

SEQ ID NO: 73955 - protein, 15 aa, Artificial Sequence
  Description of Artificial Sequence: Synthetic peptide
  Seed: GMDPRMCSLMQGSTL
GMDLRMISSMQHSTL

SEQ ID NO: 73956 - protein, 15 aa, Artificial Sequence
  Description of Artificial Sequence: Synthetic peptide
  Seed: GMDPRMCSLMQGSTL
GMDLRMISSMQISTL

SEQ ID NO: 73957 - protein, 15 aa, Artificial Sequence
  Description of Artificial Sequence: Synthetic peptide
  Seed: GMDPRMCSLMQGSTL
GMDLRMISSMQLSTL

SEQ ID NO: 73958 - protein, 15 aa, Artificial Sequence
  Description of Artificial Sequence: Synthetic peptide
  Seed: GMDPRMCSLMQGSTL
GMDLRMISSMQMSTL

SEQ ID NO: 73959 - protein, 15 aa, Artificial Sequence
  Description of Artificial Sequence: Synthetic peptide
  Seed: GMDPRMCSLMQGSTL
GMDLRMISSMQNSTL

SEQ ID NO: 73960 - protein, 15 aa, Artificial Sequence
  Description of Artificial Sequence: Synthetic peptide
  Seed: GMDPRMCSLMQGSTL
GMDLRMISSMQSSTL

SEQ ID NO: 73961 - protein, 15 aa, Artificial Sequence
  Description of Artificial Sequence: Synthetic peptide
  Seed: GMDPRMCSLMQGSTL
GMDLRMISSMQTSTL

SEQ ID NO: 73962 - protein, 15 aa, Artificial Sequence
  Description of Artificial Sequence: Synthetic peptide
  Seed: GMDPRMCSLMQGSTL
GMDLRMISSMQVSTL

SEQ ID NO: 73963 - protein, 15 aa, Artificial Sequence
  Description of Artificial Sequence: Synthetic peptide
  Seed: GMDPRMCSLMQGSTL
GMDLRMISTMQASTL

SEQ ID NO: 73964 - protein, 15 aa, Artificial Sequence
  Description of Artificial Sequence: Synthetic peptide
  Seed: GMDPRMCSLMQGSTL
GMDLRMISTMQHSTL

SEQ ID NO: 73965 - protein, 15 aa, Artificial Sequence
  Description of Artificial Sequence: Synthetic peptide
  Seed: GMDPRMCSLMQGSTL
GMDLRMISTMQMSTL

SEQ ID NO: 73966 - protein, 15 aa, Artificial Sequence
  Description of Artificial Sequence: Synthetic peptide
  Seed: GMDPRMCSLMQGSTL
GMDLRMISTMQNSTL

SEQ ID NO: 73967 - protein, 15 aa, Artificial Sequence
  Description of Artificial Sequence: Synthetic peptide
  Seed: GMDPRMCSLMQGSTL
GMDLRMISTMQSSTL

SEQ ID NO: 73968 - protein, 15 aa, Artificial Sequence
  Description of Artificial Sequence: Synthetic peptide
  Seed: GMDPRMCSLMQGSTL
GMDLRMISTMQTSTL

SEQ ID NO: 73969 - protein, 15 aa, Artificial Sequence
  Description of Artificial Sequence: Synthetic peptide
  Seed: GMDPRMCSLMQGSTL
GMDLRMISTMQVSTL

SEQ ID NO: 73970 - protein, 15 aa, Artificial Sequence
  Description of Artificial Sequence: Synthetic peptide
  Seed: GMDPRMCSLMQGSTL
GMDLRMISVMQASTL

SEQ ID NO: 73971 - protein, 15 aa, Artificial Sequence
  Description of Artificial Sequence: Synthetic peptide
  Seed: GMDPRMCSLMQGSTL
GMDLRMISVMQHSTL

SEQ ID NO: 73972 - protein, 15 aa, Artificial Sequence
  Description of Artificial Sequence: Synthetic peptide
  Seed: GMDPRMCSLMQGSTL
GMDLRMISVMQNSTL

SEQ ID NO: 73973 - protein, 15 aa, Artificial Sequence
  Description of Artificial Sequence: Synthetic peptide
  Seed: GMDPRMCSLMQGSTL
GMDLRMISVMQSSTL

SEQ ID NO: 73974 - protein, 15 aa, Artificial Sequence
  Description of Artificial Sequence: Synthetic peptide
  Seed: GMDPRMCSLMQGSTL
GMDLRMISVMQTSTL

SEQ ID NO: 73975 - protein, 15 aa, Artificial Sequence
  Description of Artificial Sequence: Synthetic peptide
  Seed: GMDPRMCSLMQGSTL
GMDLRMLSAMQASTL

SEQ ID NO: 73976 - protein, 15 aa, Artificial Sequence
  Description of Artificial Sequence: Synthetic peptide
  Seed: GMDPRMCSLMQGSTL
GMDLRMLSAMQDSTL

SEQ ID NO: 73977 - protein, 15 aa, Artificial Sequence
  Description of Artificial Sequence: Synthetic peptide
  Seed: GMDPRMCSLMQGSTL
GMDLRMLSAMQGSTL

SEQ ID NO: 73978 - protein, 15 aa, Artificial Sequence
  Description of Artificial Sequence: Synthetic peptide
  Seed: GMDPRMCSLMQGSTL
GMDLRMLSAMQHSTL

SEQ ID NO: 73979 - protein, 15 aa, Artificial Sequence
  Description of Artificial Sequence: Synthetic peptide
  Seed: GMDPRMCSLMQGSTL
GMDLRMLSAMQISTL

SEQ ID NO: 73980 - protein, 15 aa, Artificial Sequence
  Description of Artificial Sequence: Synthetic peptide
  Seed: GMDPRMCSLMQGSTL
GMDLRMLSAMQLSTL

SEQ ID NO: 73981 - protein, 15 aa, Artificial Sequence
  Description of Artificial Sequence: Synthetic peptide
  Seed: GMDPRMCSLMQGSTL
GMDLRMLSAMQMSTL

SEQ ID NO: 73982 - protein, 15 aa, Artificial Sequence
  Description of Artificial Sequence: Synthetic peptide
  Seed: GMDPRMCSLMQGSTL
GMDLRMLSAMQNSTL

SEQ ID NO: 73983 - protein, 15 aa, Artificial Sequence
  Description of Artificial Sequence: Synthetic peptide
  Seed: GMDPRMCSLMQGSTL
GMDLRMLSAMQPSTL

SEQ ID NO: 73984 - protein, 15 aa, Artificial Sequence
  Description of Artificial Sequence: Synthetic peptide
  Seed: GMDPRMCSLMQGSTL
GMDLRMLSAMQQSTL

SEQ ID NO: 73985 - protein, 15 aa, Artificial Sequence
  Description of Artificial Sequence: Synthetic peptide
  Seed: GMDPRMCSLMQGSTL
GMDLRMLSAMQSSTL

SEQ ID NO: 73986 - protein, 15 aa, Artificial Sequence
  Description of Artificial Sequence: Synthetic peptide
  Seed: GMDPRMCSLMQGSTL
GMDLRMLSAMQTSTL

SEQ ID NO: 73987 - protein, 15 aa, Artificial Sequence
  Description of Artificial Sequence: Synthetic peptide
  Seed: GMDPRMCSLMQGSTL
GMDLRMLSAMQVSTL

SEQ ID NO: 73988 - protein, 15 aa, Artificial Sequence
  Description of Artificial Sequence: Synthetic peptide
  Seed: GMDPRMCSLMQGSTL
GMDLRMLSGMQASTL

SEQ ID NO: 73989 - protein, 15 aa, Artificial Sequence
  Description of Artificial Sequence: Synthetic peptide
  Seed: GMDPRMCSLMQGSTL
GMDLRMLSGMQHSTL

SEQ ID NO: 73990 - protein, 15 aa, Artificial Sequence
  Description of Artificial Sequence: Synthetic peptide
  Seed: GMDPRMCSLMQGSTL
GMDLRMLSGMQISTL

SEQ ID NO: 73991 - protein, 15 aa, Artificial Sequence
  Description of Artificial Sequence: Synthetic peptide
  Seed: GMDPRMCSLMQGSTL
GMDLRMLSGMQLSTL

SEQ ID NO: 73992 - protein, 15 aa, Artificial Sequence
  Description of Artificial Sequence: Synthetic peptide
  Seed: GMDPRMCSLMQGSTL
GMDLRMLSGMQMSTL

SEQ ID NO: 73993 - protein, 15 aa, Artificial Sequence
  Description of Artificial Sequence: Synthetic peptide
  Seed: GMDPRMCSLMQGSTL
GMDLRMLSGMQNSTL

SEQ ID NO: 73994 - protein, 15 aa, Artificial Sequence
  Description of Artificial Sequence: Synthetic peptide
  Seed: GMDPRMCSLMQGSTL
GMDLRMLSGMQSSTL

SEQ ID NO: 73995 - protein, 15 aa, Artificial Sequence
  Description of Artificial Sequence: Synthetic peptide
  Seed: GMDPRMCSLMQGSTL
GMDLRMLSGMQTSTL

SEQ ID NO: 73996 - protein, 15 aa, Artificial Sequence
  Description of Artificial Sequence: Synthetic peptide
  Seed: GMDPRMCSLMQGSTL
GMDLRMLSGMQVSTL

SEQ ID NO: 73997 - protein, 15 aa, Artificial Sequence
  Description of Artificial Sequence: Synthetic peptide
  Seed: GMDPRMCSLMQGSTL
GMDLRMLSIMQASTL

SEQ ID NO: 73998 - protein, 15 aa, Artificial Sequence
  Description of Artificial Sequence: Synthetic peptide
  Seed: GMDPRMCSLMQGSTL
GMDLRMLSIMQGSTL

SEQ ID NO: 73999 - protein, 15 aa, Artificial Sequence
  Description of Artificial Sequence: Synthetic peptide
  Seed: GMDPRMCSLMQGSTL
GMDLRMLSIMQHSTL

SEQ ID NO: 74000 - protein, 15 aa, Artificial Sequence
  Description of Artificial Sequence: Synthetic peptide
  Seed: GMDPRMCSLMQGSTL
GMDLRMLSIMQMSTL

SEQ ID NO: 74001 - protein, 15 aa, Artificial Sequence
  Description of Artificial Sequence: Synthetic peptide
  Seed: GMDPRMCSLMQGSTL
GMDLRMLSIMQNSTL

SEQ ID NO: 74002 - protein, 15 aa, Artificial Sequence
  Description of Artificial Sequence: Synthetic peptide
  Seed: GMDPRMCSLMQGSTL
GMDLRMLSIMQPSTL

SEQ ID NO: 74003 - protein, 15 aa, Artificial Sequence
  Description of Artificial Sequence: Synthetic peptide
  Seed: GMDPRMCSLMQGSTL
GMDLRMLSIMQSSTL

SEQ ID NO: 74004 - protein, 15 aa, Artificial Sequence
  Description of Artificial Sequence: Synthetic peptide
  Seed: GMDPRMCSLMQGSTL
GMDLRMLSIMQTSTL

SEQ ID NO: 74005 - protein, 15 aa, Artificial Sequence
  Description of Artificial Sequence: Synthetic peptide
  Seed: GMDPRMCSLMQGSTL
GMDLRMLSLMQASTL

SEQ ID NO: 74006 - protein, 15 aa, Artificial Sequence
  Description of Artificial Sequence: Synthetic peptide
  Seed: GMDPRMCSLMQGSTL
GMDLRMLSLMQNSTL

SEQ ID NO: 74007 - protein, 15 aa, Artificial Sequence
  Description of Artificial Sequence: Synthetic peptide
  Seed: GMDPRMCSLMQGSTL
GMDLRMLSLMQSSTL

SEQ ID NO: 74008 - protein, 15 aa, Artificial Sequence
  Description of Artificial Sequence: Synthetic peptide
  Seed: GMDPRMCSLMQGSTL
GMDLRMLSLMQTSTL

SEQ ID NO: 74009 - protein, 15 aa, Artificial Sequence
  Description of Artificial Sequence: Synthetic peptide
  Seed: GMDPRMCSLMQGSTL
GMDLRMLSMMQASTL

SEQ ID NO: 74010 - protein, 15 aa, Artificial Sequence
  Description of Artificial Sequence: Synthetic peptide
  Seed: GMDPRMCSLMQGSTL
GMDLRMLSMMQNSTL

SEQ ID NO: 74011 - protein, 15 aa, Artificial Sequence
  Description of Artificial Sequence: Synthetic peptide
  Seed: GMDPRMCSLMQGSTL
GMDLRMLSMMQPSTL

SEQ ID NO: 74012 - protein, 15 aa, Artificial Sequence
  Description of Artificial Sequence: Synthetic peptide
  Seed: GMDPRMCSLMQGSTL
GMDLRMLSMMQSSTL

SEQ ID NO: 74013 - protein, 15 aa, Artificial Sequence
  Description of Artificial Sequence: Synthetic peptide
  Seed: GMDPRMCSLMQGSTL
GMDLRMLSMMQTSTL

SEQ ID NO: 74014 - protein, 15 aa, Artificial Sequence
  Description of Artificial Sequence: Synthetic peptide
  Seed: GMDPRMCSLMQGSTL
GMDLRMLSNMQASTL

SEQ ID NO: 74015 - protein, 15 aa, Artificial Sequence
  Description of Artificial Sequence: Synthetic peptide
  Seed: GMDPRMCSLMQGSTL
GMDLRMLSNMQNSTL

SEQ ID NO: 74016 - protein, 15 aa, Artificial Sequence
  Description of Artificial Sequence: Synthetic peptide
  Seed: GMDPRMCSLMQGSTL
GMDLRMLSNMQSSTL

SEQ ID NO: 74017 - protein, 15 aa, Artificial Sequence
  Description of Artificial Sequence: Synthetic peptide
  Seed: GMDPRMCSLMQGSTL
GMDLRMLSNMQTSTL

SEQ ID NO: 74018 - protein, 15 aa, Artificial Sequence
  Description of Artificial Sequence: Synthetic peptide
  Seed: GMDPRMCSLMQGSTL
GMDLRMLSNMQVSTL

SEQ ID NO: 74019 - protein, 15 aa, Artificial Sequence
  Description of Artificial Sequence: Synthetic peptide
  Seed: GMDPRMCSLMQGSTL
GMDLRMLSPMQASTL

SEQ ID NO: 74020 - protein, 15 aa, Artificial Sequence
  Description of Artificial Sequence: Synthetic peptide
  Seed: GMDPRMCSLMQGSTL
GMDLRMLSPMQGSTL

SEQ ID NO: 74021 - protein, 15 aa, Artificial Sequence
  Description of Artificial Sequence: Synthetic peptide
  Seed: GMDPRMCSLMQGSTL
GMDLRMLSPMQHSTL

SEQ ID NO: 74022 - protein, 15 aa, Artificial Sequence
  Description of Artificial Sequence: Synthetic peptide
  Seed: GMDPRMCSLMQGSTL
GMDLRMLSPMQISTL

SEQ ID NO: 74023 - protein, 15 aa, Artificial Sequence
  Description of Artificial Sequence: Synthetic peptide
  Seed: GMDPRMCSLMQGSTL
GMDLRMLSPMQLSTL

SEQ ID NO: 74024 - protein, 15 aa, Artificial Sequence
  Description of Artificial Sequence: Synthetic peptide
  Seed: GMDPRMCSLMQGSTL
GMDLRMLSPMQMSTL

SEQ ID NO: 74025 - protein, 15 aa, Artificial Sequence
  Description of Artificial Sequence: Synthetic peptide
  Seed: GMDPRMCSLMQGSTL
GMDLRMLSPMQNSTL

SEQ ID NO: 74026 - protein, 15 aa, Artificial Sequence
  Description of Artificial Sequence: Synthetic peptide
  Seed: GMDPRMCSLMQGSTL
GMDLRMLSPMQPSTL

SEQ ID NO: 74027 - protein, 15 aa, Artificial Sequence
  Description of Artificial Sequence: Synthetic peptide
  Seed: GMDPRMCSLMQGSTL
GMDLRMLSPMQQSTL

SEQ ID NO: 74028 - protein, 15 aa, Artificial Sequence
  Description of Artificial Sequence: Synthetic peptide
  Seed: GMDPRMCSLMQGSTL
GMDLRMLSPMQSSTL

SEQ ID NO: 74029 - protein, 15 aa, Artificial Sequence
  Description of Artificial Sequence: Synthetic peptide
  Seed: GMDPRMCSLMQGSTL
GMDLRMLSPMQTSTL

SEQ ID NO: 74030 - protein, 15 aa, Artificial Sequence
  Description of Artificial Sequence: Synthetic peptide
  Seed: GMDPRMCSLMQGSTL
GMDLRMLSPMQVSTL

SEQ ID NO: 74031 - protein, 15 aa, Artificial Sequence
  Description of Artificial Sequence: Synthetic peptide
  Seed: GMDPRMCSLMQGSTL
GMDLRMLSSMQASTL

SEQ ID NO: 74032 - protein, 15 aa, Artificial Sequence
  Description of Artificial Sequence: Synthetic peptide
  Seed: GMDPRMCSLMQGSTL
GMDLRMLSSMQGSTL

SEQ ID NO: 74033 - protein, 15 aa, Artificial Sequence
  Description of Artificial Sequence: Synthetic peptide
  Seed: GMDPRMCSLMQGSTL
GMDLRMLSSMQHSTL

SEQ ID NO: 74034 - protein, 15 aa, Artificial Sequence
  Description of Artificial Sequence: Synthetic peptide
  Seed: GMDPRMCSLMQGSTL
GMDLRMLSSMQISTL

SEQ ID NO: 74035 - protein, 15 aa, Artificial Sequence
  Description of Artificial Sequence: Synthetic peptide
  Seed: GMDPRMCSLMQGSTL
GMDLRMLSSMQLSTL

SEQ ID NO: 74036 - protein, 15 aa, Artificial Sequence
  Description of Artificial Sequence: Synthetic peptide
  Seed: GMDPRMCSLMQGSTL
GMDLRMLSSMQMSTL

SEQ ID NO: 74037 - protein, 15 aa, Artificial Sequence
  Description of Artificial Sequence: Synthetic peptide
  Seed: GMDPRMCSLMQGSTL
GMDLRMLSSMQNSTL

SEQ ID NO: 74038 - protein, 15 aa, Artificial Sequence
  Description of Artificial Sequence: Synthetic peptide
  Seed: GMDPRMCSLMQGSTL
GMDLRMLSSMQPSTL

SEQ ID NO: 74039 - protein, 15 aa, Artificial Sequence
  Description of Artificial Sequence: Synthetic peptide
  Seed: GMDPRMCSLMQGSTL
GMDLRMLSSMQQSTL

SEQ ID NO: 74040 - protein, 15 aa, Artificial Sequence
  Description of Artificial Sequence: Synthetic peptide
  Seed: GMDPRMCSLMQGSTL
GMDLRMLSSMQSSTL

SEQ ID NO: 74041 - protein, 15 aa, Artificial Sequence
  Description of Artificial Sequence: Synthetic peptide
  Seed: GMDPRMCSLMQGSTL
GMDLRMLSSMQTSTL

SEQ ID NO: 74042 - protein, 15 aa, Artificial Sequence
  Description of Artificial Sequence: Synthetic peptide
  Seed: GMDPRMCSLMQGSTL
GMDLRMLSSMQVSTL

SEQ ID NO: 74043 - protein, 15 aa, Artificial Sequence
  Description of Artificial Sequence: Synthetic peptide
  Seed: GMDPRMCSLMQGSTL
GMDLRMLSTMQASTL

SEQ ID NO: 74044 - protein, 15 aa, Artificial Sequence
  Description of Artificial Sequence: Synthetic peptide
  Seed: GMDPRMCSLMQGSTL
GMDLRMLSTMQGSTL

SEQ ID NO: 74045 - protein, 15 aa, Artificial Sequence
  Description of Artificial Sequence: Synthetic peptide
  Seed: GMDPRMCSLMQGSTL
GMDLRMLSTMQHSTL

SEQ ID NO: 74046 - protein, 15 aa, Artificial Sequence
  Description of Artificial Sequence: Synthetic peptide
  Seed: GMDPRMCSLMQGSTL
GMDLRMLSTMQISTL

SEQ ID NO: 74047 - protein, 15 aa, Artificial Sequence
  Description of Artificial Sequence: Synthetic peptide
  Seed: GMDPRMCSLMQGSTL
GMDLRMLSTMQLSTL

SEQ ID NO: 74048 - protein, 15 aa, Artificial Sequence
  Description of Artificial Sequence: Synthetic peptide
  Seed: GMDPRMCSLMQGSTL
GMDLRMLSTMQMSTL

SEQ ID NO: 74049 - protein, 15 aa, Artificial Sequence
  Description of Artificial Sequence: Synthetic peptide
  Seed: GMDPRMCSLMQGSTL
GMDLRMLSTMQNSTL

SEQ ID NO: 74050 - protein, 15 aa, Artificial Sequence
  Description of Artificial Sequence: Synthetic peptide
  Seed: GMDPRMCSLMQGSTL
GMDLRMLSTMQQSTL

SEQ ID NO: 74051 - protein, 15 aa, Artificial Sequence
  Description of Artificial Sequence: Synthetic peptide
  Seed: GMDPRMCSLMQGSTL
GMDLRMLSTMQSSTL

SEQ ID NO: 74052 - protein, 15 aa, Artificial Sequence
  Description of Artificial Sequence: Synthetic peptide
  Seed: GMDPRMCSLMQGSTL
GMDLRMLSTMQTSTL

SEQ ID NO: 74053 - protein, 15 aa, Artificial Sequence
  Description of Artificial Sequence: Synthetic peptide
  Seed: GMDPRMCSLMQGSTL
GMDLRMLSTMQVSTL

SEQ ID NO: 74054 - protein, 15 aa, Artificial Sequence
  Description of Artificial Sequence: Synthetic peptide
  Seed: GMDPRMCSLMQGSTL
GMDLRMLSVMQASTL

SEQ ID NO: 74055 - protein, 15 aa, Artificial Sequence
  Description of Artificial Sequence: Synthetic peptide
  Seed: GMDPRMCSLMQGSTL
GMDLRMLSVMQGSTL

SEQ ID NO: 74056 - protein, 15 aa, Artificial Sequence
  Description of Artificial Sequence: Synthetic peptide
  Seed: GMDPRMCSLMQGSTL
GMDLRMLSVMQHSTL

SEQ ID NO: 74057 - protein, 15 aa, Artificial Sequence
  Description of Artificial Sequence: Synthetic peptide
  Seed: GMDPRMCSLMQGSTL
GMDLRMLSVMQMSTL

SEQ ID NO: 74058 - protein, 15 aa, Artificial Sequence
  Description of Artificial Sequence: Synthetic peptide
  Seed: GMDPRMCSLMQGSTL
GMDLRMLSVMQNSTL

SEQ ID NO: 74059 - protein, 15 aa, Artificial Sequence
  Description of Artificial Sequence: Synthetic peptide
  Seed: GMDPRMCSLMQGSTL
GMDLRMLSVMQPSTL

SEQ ID NO: 74060 - protein, 15 aa, Artificial Sequence
  Description of Artificial Sequence: Synthetic peptide
  Seed: GMDPRMCSLMQGSTL
GMDLRMLSVMQQSTL

SEQ ID NO: 74061 - protein, 15 aa, Artificial Sequence
  Description of Artificial Sequence: Synthetic peptide
  Seed: GMDPRMCSLMQGSTL
GMDLRMLSVMQSSTL

SEQ ID NO: 74062 - protein, 15 aa, Artificial Sequence
  Description of Artificial Sequence: Synthetic peptide
  Seed: GMDPRMCSLMQGSTL
GMDLRMLSVMQTSTL

SEQ ID NO: 74063 - protein, 15 aa, Artificial Sequence
  Description of Artificial Sequence: Synthetic peptide
  Seed: GMDPRMCSLMQGSTL
GMDLRMLSVMQVSTL

SEQ ID NO: 74064 - protein, 15 aa, Artificial Sequence
  Description of Artificial Sequence: Synthetic peptide
  Seed: GMDPRMCSLMQGSTL
GMDLRMMSAMQASTL

SEQ ID NO: 74065 - protein, 15 aa, Artificial Sequence
  Description of Artificial Sequence: Synthetic peptide
  Seed: GMDPRMCSLMQGSTL
GMDLRMMSAMQDSTL

SEQ ID NO: 74066 - protein, 15 aa, Artificial Sequence
  Description of Artificial Sequence: Synthetic peptide
  Seed: GMDPRMCSLMQGSTL
GMDLRMMSAMQGSTL

SEQ ID NO: 74067 - protein, 15 aa, Artificial Sequence
  Description of Artificial Sequence: Synthetic peptide
  Seed: GMDPRMCSLMQGSTL
GMDLRMMSAMQHSTL

SEQ ID NO: 74068 - protein, 15 aa, Artificial Sequence
  Description of Artificial Sequence: Synthetic peptide
  Seed: GMDPRMCSLMQGSTL
GMDLRMMSAMQISTL

SEQ ID NO: 74069 - protein, 15 aa, Artificial Sequence
  Description of Artificial Sequence: Synthetic peptide
  Seed: GMDPRMCSLMQGSTL
GMDLRMMSAMQLSTL

SEQ ID NO: 74070 - protein, 15 aa, Artificial Sequence
  Description of Artificial Sequence: Synthetic peptide
  Seed: GMDPRMCSLMQGSTL
GMDLRMMSAMQMSTL

SEQ ID NO: 74071 - protein, 15 aa, Artificial Sequence
  Description of Artificial Sequence: Synthetic peptide
  Seed: GMDPRMCSLMQGSTL
GMDLRMMSAMQNSTL

SEQ ID NO: 74072 - protein, 15 aa, Artificial Sequence
  Description of Artificial Sequence: Synthetic peptide
  Seed: GMDPRMCSLMQGSTL
GMDLRMMSAMQPSTL

SEQ ID NO: 74073 - protein, 15 aa, Artificial Sequence
  Description of Artificial Sequence: Synthetic peptide
  Seed: GMDPRMCSLMQGSTL
GMDLRMMSAMQQSTL

SEQ ID NO: 74074 - protein, 15 aa, Artificial Sequence
  Description of Artificial Sequence: Synthetic peptide
  Seed: GMDPRMCSLMQGSTL
GMDLRMMSAMQSSTL

SEQ ID NO: 74075 - protein, 15 aa, Artificial Sequence
  Description of Artificial Sequence: Synthetic peptide
  Seed: GMDPRMCSLMQGSTL
GMDLRMMSAMQTSTL

SEQ ID NO: 74076 - protein, 15 aa, Artificial Sequence
  Description of Artificial Sequence: Synthetic peptide
  Seed: GMDPRMCSLMQGSTL
GMDLRMMSAMQVSTL

SEQ ID NO: 74077 - protein, 15 aa, Artificial Sequence
  Description of Artificial Sequence: Synthetic peptide
  Seed: GMDPRMCSLMQGSTL
GMDLRMMSGMQASTL

SEQ ID NO: 74078 - protein, 15 aa, Artificial Sequence
  Description of Artificial Sequence: Synthetic peptide
  Seed: GMDPRMCSLMQGSTL
GMDLRMMSGMQHSTL

SEQ ID NO: 74079 - protein, 15 aa, Artificial Sequence
  Description of Artificial Sequence: Synthetic peptide
  Seed: GMDPRMCSLMQGSTL
GMDLRMMSGMQISTL

SEQ ID NO: 74080 - protein, 15 aa, Artificial Sequence
  Description of Artificial Sequence: Synthetic peptide
  Seed: GMDPRMCSLMQGSTL
GMDLRMMSGMQLSTL

SEQ ID NO: 74081 - protein, 15 aa, Artificial Sequence
  Description of Artificial Sequence: Synthetic peptide
  Seed: GMDPRMCSLMQGSTL
GMDLRMMSGMQMSTL

SEQ ID NO: 74082 - protein, 15 aa, Artificial Sequence
  Description of Artificial Sequence: Synthetic peptide
  Seed: GMDPRMCSLMQGSTL
GMDLRMMSGMQNSTL

SEQ ID NO: 74083 - protein, 15 aa, Artificial Sequence
  Description of Artificial Sequence: Synthetic peptide
  Seed: GMDPRMCSLMQGSTL
GMDLRMMSGMQSSTL

SEQ ID NO: 74084 - protein, 15 aa, Artificial Sequence
  Description of Artificial Sequence: Synthetic peptide
  Seed: GMDPRMCSLMQGSTL
GMDLRMMSGMQTSTL

SEQ ID NO: 74085 - protein, 15 aa, Artificial Sequence
  Description of Artificial Sequence: Synthetic peptide
  Seed: GMDPRMCSLMQGSTL
GMDLRMMSGMQVSTL

SEQ ID NO: 74086 - protein, 15 aa, Artificial Sequence
  Description of Artificial Sequence: Synthetic peptide
  Seed: GMDPRMCSLMQGSTL
GMDLRMMSIMQASTL

SEQ ID NO: 74087 - protein, 15 aa, Artificial Sequence
  Description of Artificial Sequence: Synthetic peptide
  Seed: GMDPRMCSLMQGSTL
GMDLRMMSIMQGSTL

SEQ ID NO: 74088 - protein, 15 aa, Artificial Sequence
  Description of Artificial Sequence: Synthetic peptide
  Seed: GMDPRMCSLMQGSTL
GMDLRMMSIMQHSTL

SEQ ID NO: 74089 - protein, 15 aa, Artificial Sequence
  Description of Artificial Sequence: Synthetic peptide
  Seed: GMDPRMCSLMQGSTL
GMDLRMMSIMQISTL

SEQ ID NO: 74090 - protein, 15 aa, Artificial Sequence
  Description of Artificial Sequence: Synthetic peptide
  Seed: GMDPRMCSLMQGSTL
GMDLRMMSIMQLSTL

SEQ ID NO: 74091 - protein, 15 aa, Artificial Sequence
  Description of Artificial Sequence: Synthetic peptide
  Seed: GMDPRMCSLMQGSTL
GMDLRMMSIMQMSTL

SEQ ID NO: 74092 - protein, 15 aa, Artificial Sequence
  Description of Artificial Sequence: Synthetic peptide
  Seed: GMDPRMCSLMQGSTL
GMDLRMMSIMQNSTL

SEQ ID NO: 74093 - protein, 15 aa, Artificial Sequence
  Description of Artificial Sequence: Synthetic peptide
  Seed: GMDPRMCSLMQGSTL
GMDLRMMSIMQQSTL

SEQ ID NO: 74094 - protein, 15 aa, Artificial Sequence
  Description of Artificial Sequence: Synthetic peptide
  Seed: GMDPRMCSLMQGSTL
GMDLRMMSIMQSSTL

SEQ ID NO: 74095 - protein, 15 aa, Artificial Sequence
  Description of Artificial Sequence: Synthetic peptide
  Seed: GMDPRMCSLMQGSTL
GMDLRMMSIMQTSTL

SEQ ID NO: 74096 - protein, 15 aa, Artificial Sequence
  Description of Artificial Sequence: Synthetic peptide
  Seed: GMDPRMCSLMQGSTL
GMDLRMMSIMQVSTL

SEQ ID NO: 74097 - protein, 15 aa, Artificial Sequence
  Description of Artificial Sequence: Synthetic peptide
  Seed: GMDPRMCSLMQGSTL
GMDLRMMSLMQASTL

SEQ ID NO: 74098 - protein, 15 aa, Artificial Sequence
  Description of Artificial Sequence: Synthetic peptide
  Seed: GMDPRMCSLMQGSTL
GMDLRMMSLMQHSTL

SEQ ID NO: 74099 - protein, 15 aa, Artificial Sequence
  Description of Artificial Sequence: Synthetic peptide
  Seed: GMDPRMCSLMQGSTL
GMDLRMMSLMQNSTL

SEQ ID NO: 74100 - protein, 15 aa, Artificial Sequence
  Description of Artificial Sequence: Synthetic peptide
  Seed: GMDPRMCSLMQGSTL
GMDLRMMSLMQSSTL

SEQ ID NO: 74101 - protein, 15 aa, Artificial Sequence
  Description of Artificial Sequence: Synthetic peptide
  Seed: GMDPRMCSLMQGSTL
GMDLRMMSLMQTSTL

SEQ ID NO: 74102 - protein, 15 aa, Artificial Sequence
  Description of Artificial Sequence: Synthetic peptide
  Seed: GMDPRMCSLMQGSTL
GMDLRMMSMMQASTL

SEQ ID NO: 74103 - protein, 15 aa, Artificial Sequence
  Description of Artificial Sequence: Synthetic peptide
  Seed: GMDPRMCSLMQGSTL
GMDLRMMSMMQHSTL

SEQ ID NO: 74104 - protein, 15 aa, Artificial Sequence
  Description of Artificial Sequence: Synthetic peptide
  Seed: GMDPRMCSLMQGSTL
GMDLRMMSMMQNSTL

SEQ ID NO: 74105 - protein, 15 aa, Artificial Sequence
  Description of Artificial Sequence: Synthetic peptide
  Seed: GMDPRMCSLMQGSTL
GMDLRMMSMMQSSTL

SEQ ID NO: 74106 - protein, 15 aa, Artificial Sequence
  Description of Artificial Sequence: Synthetic peptide
  Seed: GMDPRMCSLMQGSTL
GMDLRMMSMMQTSTL

SEQ ID NO: 74107 - protein, 15 aa, Artificial Sequence
  Description of Artificial Sequence: Synthetic peptide
  Seed: GMDPRMCSLMQGSTL
GMDLRMMSNMQASTL

SEQ ID NO: 74108 - protein, 15 aa, Artificial Sequence
  Description of Artificial Sequence: Synthetic peptide
  Seed: GMDPRMCSLMQGSTL
GMDLRMMSNMQHSTL

SEQ ID NO: 74109 - protein, 15 aa, Artificial Sequence
  Description of Artificial Sequence: Synthetic peptide
  Seed: GMDPRMCSLMQGSTL
GMDLRMMSNMQMSTL

SEQ ID NO: 74110 - protein, 15 aa, Artificial Sequence
  Description of Artificial Sequence: Synthetic peptide
  Seed: GMDPRMCSLMQGSTL
GMDLRMMSNMQNSTL

SEQ ID NO: 74111 - protein, 15 aa, Artificial Sequence
  Description of Artificial Sequence: Synthetic peptide
  Seed: GMDPRMCSLMQGSTL
GMDLRMMSNMQSSTL

SEQ ID NO: 74112 - protein, 15 aa, Artificial Sequence
  Description of Artificial Sequence: Synthetic peptide
  Seed: GMDPRMCSLMQGSTL
GMDLRMMSNMQTSTL

SEQ ID NO: 74113 - protein, 15 aa, Artificial Sequence
  Description of Artificial Sequence: Synthetic peptide
  Seed: GMDPRMCSLMQGSTL
GMDLRMMSNMQVSTL

SEQ ID NO: 74114 - protein, 15 aa, Artificial Sequence
  Description of Artificial Sequence: Synthetic peptide
  Seed: GMDPRMCSLMQGSTL
GMDLRMMSPMQASTL

SEQ ID NO: 74115 - protein, 15 aa, Artificial Sequence
  Description of Artificial Sequence: Synthetic peptide
  Seed: GMDPRMCSLMQGSTL
GMDLRMMSPMQGSTL

SEQ ID NO: 74116 - protein, 15 aa, Artificial Sequence
  Description of Artificial Sequence: Synthetic peptide
  Seed: GMDPRMCSLMQGSTL
GMDLRMMSPMQHSTL

SEQ ID NO: 74117 - protein, 15 aa, Artificial Sequence
  Description of Artificial Sequence: Synthetic peptide
  Seed: GMDPRMCSLMQGSTL
GMDLRMMSPMQISTL

SEQ ID NO: 74118 - protein, 15 aa, Artificial Sequence
  Description of Artificial Sequence: Synthetic peptide
  Seed: GMDPRMCSLMQGSTL
GMDLRMMSPMQLSTL

SEQ ID NO: 74119 - protein, 15 aa, Artificial Sequence
  Description of Artificial Sequence: Synthetic peptide
  Seed: GMDPRMCSLMQGSTL
GMDLRMMSPMQMSTL

SEQ ID NO: 74120 - protein, 15 aa, Artificial Sequence
  Description of Artificial Sequence: Synthetic peptide
  Seed: GMDPRMCSLMQGSTL
GMDLRMMSPMQNSTL

SEQ ID NO: 74121 - protein, 15 aa, Artificial Sequence
  Description of Artificial Sequence: Synthetic peptide
  Seed: GMDPRMCSLMQGSTL
GMDLRMMSPMQPSTL

SEQ ID NO: 74122 - protein, 15 aa, Artificial Sequence
  Description of Artificial Sequence: Synthetic peptide
  Seed: GMDPRMCSLMQGSTL
GMDLRMMSPMQQSTL

SEQ ID NO: 74123 - protein, 15 aa, Artificial Sequence
  Description of Artificial Sequence: Synthetic peptide
  Seed: GMDPRMCSLMQGSTL
GMDLRMMSPMQSSTL

SEQ ID NO: 74124 - protein, 15 aa, Artificial Sequence
  Description of Artificial Sequence: Synthetic peptide
  Seed: GMDPRMCSLMQGSTL
GMDLRMMSPMQTSTL

SEQ ID NO: 74125 - protein, 15 aa, Artificial Sequence
  Description of Artificial Sequence: Synthetic peptide
  Seed: GMDPRMCSLMQGSTL
GMDLRMMSPMQVSTL

SEQ ID NO: 74126 - protein, 15 aa, Artificial Sequence
  Description of Artificial Sequence: Synthetic peptide
  Seed: GMDPRMCSLMQGSTL
GMDLRMMSSMQASTL

SEQ ID NO: 74127 - protein, 15 aa, Artificial Sequence
  Description of Artificial Sequence: Synthetic peptide
  Seed: GMDPRMCSLMQGSTL
GMDLRMMSSMQGSTL

SEQ ID NO: 74128 - protein, 15 aa, Artificial Sequence
  Description of Artificial Sequence: Synthetic peptide
  Seed: GMDPRMCSLMQGSTL
GMDLRMMSSMQHSTL

SEQ ID NO: 74129 - protein, 15 aa, Artificial Sequence
  Description of Artificial Sequence: Synthetic peptide
  Seed: GMDPRMCSLMQGSTL
GMDLRMMSSMQISTL

SEQ ID NO: 74130 - protein, 15 aa, Artificial Sequence
  Description of Artificial Sequence: Synthetic peptide
  Seed: GMDPRMCSLMQGSTL
GMDLRMMSSMQLSTL

SEQ ID NO: 74131 - protein, 15 aa, Artificial Sequence
  Description of Artificial Sequence: Synthetic peptide
  Seed: GMDPRMCSLMQGSTL
GMDLRMMSSMQMSTL

SEQ ID NO: 74132 - protein, 15 aa, Artificial Sequence
  Description of Artificial Sequence: Synthetic peptide
  Seed: GMDPRMCSLMQGSTL
GMDLRMMSSMQNSTL

SEQ ID NO: 74133 - protein, 15 aa, Artificial Sequence
  Description of Artificial Sequence: Synthetic peptide
  Seed: GMDPRMCSLMQGSTL
GMDLRMMSSMQQSTL

SEQ ID NO: 74134 - protein, 15 aa, Artificial Sequence
  Description of Artificial Sequence: Synthetic peptide
  Seed: GMDPRMCSLMQGSTL
GMDLRMMSSMQSSTL

SEQ ID NO: 74135 - protein, 15 aa, Artificial Sequence
  Description of Artificial Sequence: Synthetic peptide
  Seed: GMDPRMCSLMQGSTL
GMDLRMMSSMQTSTL

SEQ ID NO: 74136 - protein, 15 aa, Artificial Sequence
  Description of Artificial Sequence: Synthetic peptide
  Seed: GMDPRMCSLMQGSTL
GMDLRMMSSMQVSTL

SEQ ID NO: 74137 - protein, 15 aa, Artificial Sequence
  Description of Artificial Sequence: Synthetic peptide
  Seed: GMDPRMCSLMQGSTL
GMDLRMMSTMQASTL

SEQ ID NO: 74138 - protein, 15 aa, Artificial Sequence
  Description of Artificial Sequence: Synthetic peptide
  Seed: GMDPRMCSLMQGSTL
GMDLRMMSTMQGSTL

SEQ ID NO: 74139 - protein, 15 aa, Artificial Sequence
  Description of Artificial Sequence: Synthetic peptide
  Seed: GMDPRMCSLMQGSTL
GMDLRMMSTMQHSTL

SEQ ID NO: 74140 - protein, 15 aa, Artificial Sequence
  Description of Artificial Sequence: Synthetic peptide
  Seed: GMDPRMCSLMQGSTL
GMDLRMMSTMQISTL

SEQ ID NO: 74141 - protein, 15 aa, Artificial Sequence
  Description of Artificial Sequence: Synthetic peptide
  Seed: GMDPRMCSLMQGSTL
GMDLRMMSTMQLSTL

SEQ ID NO: 74142 - protein, 15 aa, Artificial Sequence
  Description of Artificial Sequence: Synthetic peptide
  Seed: GMDPRMCSLMQGSTL
GMDLRMMSTMQMSTL

SEQ ID NO: 74143 - protein, 15 aa, Artificial Sequence
  Description of Artificial Sequence: Synthetic peptide
  Seed: GMDPRMCSLMQGSTL
GMDLRMMSTMQNSTL

SEQ ID NO: 74144 - protein, 15 aa, Artificial Sequence
  Description of Artificial Sequence: Synthetic peptide
  Seed: GMDPRMCSLMQGSTL
GMDLRMMSTMQQSTL

SEQ ID NO: 74145 - protein, 15 aa, Artificial Sequence
  Description of Artificial Sequence: Synthetic peptide
  Seed: GMDPRMCSLMQGSTL
GMDLRMMSTMQSSTL

SEQ ID NO: 74146 - protein, 15 aa, Artificial Sequence
  Description of Artificial Sequence: Synthetic peptide
  Seed: GMDPRMCSLMQGSTL
GMDLRMMSTMQTSTL

SEQ ID NO: 74147 - protein, 15 aa, Artificial Sequence
  Description of Artificial Sequence: Synthetic peptide
  Seed: GMDPRMCSLMQGSTL
GMDLRMMSTMQVSTL

SEQ ID NO: 74148 - protein, 15 aa, Artificial Sequence
  Description of Artificial Sequence: Synthetic peptide
  Seed: GMDPRMCSLMQGSTL
GMDLRMMSVMQASTL

SEQ ID NO: 74149 - protein, 15 aa, Artificial Sequence
  Description of Artificial Sequence: Synthetic peptide
  Seed: GMDPRMCSLMQGSTL
GMDLRMMSVMQGSTL

SEQ ID NO: 74150 - protein, 15 aa, Artificial Sequence
  Description of Artificial Sequence: Synthetic peptide
  Seed: GMDPRMCSLMQGSTL
GMDLRMMSVMQHSTL

SEQ ID NO: 74151 - protein, 15 aa, Artificial Sequence
  Description of Artificial Sequence: Synthetic peptide
  Seed: GMDPRMCSLMQGSTL
GMDLRMMSVMQISTL

SEQ ID NO: 74152 - protein, 15 aa, Artificial Sequence
  Description of Artificial Sequence: Synthetic peptide
  Seed: GMDPRMCSLMQGSTL
GMDLRMMSVMQLSTL

SEQ ID NO: 74153 - protein, 15 aa, Artificial Sequence
  Description of Artificial Sequence: Synthetic peptide
  Seed: GMDPRMCSLMQGSTL
GMDLRMMSVMQMSTL

SEQ ID NO: 74154 - protein, 15 aa, Artificial Sequence
  Description of Artificial Sequence: Synthetic peptide
  Seed: GMDPRMCSLMQGSTL
GMDLRMMSVMQNSTL

SEQ ID NO: 74155 - protein, 15 aa, Artificial Sequence
  Description of Artificial Sequence: Synthetic peptide
  Seed: GMDPRMCSLMQGSTL
GMDLRMMSVMQPSTL

SEQ ID NO: 74156 - protein, 15 aa, Artificial Sequence
  Description of Artificial Sequence: Synthetic peptide
  Seed: GMDPRMCSLMQGSTL
GMDLRMMSVMQQSTL

SEQ ID NO: 74157 - protein, 15 aa, Artificial Sequence
  Description of Artificial Sequence: Synthetic peptide
  Seed: GMDPRMCSLMQGSTL
GMDLRMMSVMQSSTL

SEQ ID NO: 74158 - protein, 15 aa, Artificial Sequence
  Description of Artificial Sequence: Synthetic peptide
  Seed: GMDPRMCSLMQGSTL
GMDLRMMSVMQTSTL

SEQ ID NO: 74159 - protein, 15 aa, Artificial Sequence
  Description of Artificial Sequence: Synthetic peptide
  Seed: GMDPRMCSLMQGSTL
GMDLRMMSVMQVSTL

SEQ ID NO: 74160 - protein, 15 aa, Artificial Sequence
  Description of Artificial Sequence: Synthetic peptide
  Seed: GMDPRMCSLMQGSTL
GMDLRMQSAMQASTL

SEQ ID NO: 74161 - protein, 15 aa, Artificial Sequence
  Description of Artificial Sequence: Synthetic peptide
  Seed: GMDPRMCSLMQGSTL
GMDLRMQSAMQMSTL

SEQ ID NO: 74162 - protein, 15 aa, Artificial Sequence
  Description of Artificial Sequence: Synthetic peptide
  Seed: GMDPRMCSLMQGSTL
GMDLRMQSAMQNSTL

SEQ ID NO: 74163 - protein, 15 aa, Artificial Sequence
  Description of Artificial Sequence: Synthetic peptide
  Seed: GMDPRMCSLMQGSTL
GMDLRMQSAMQSSTL

SEQ ID NO: 74164 - protein, 15 aa, Artificial Sequence
  Description of Artificial Sequence: Synthetic peptide
  Seed: GMDPRMCSLMQGSTL
GMDLRMQSAMQTSTL

SEQ ID NO: 74165 - protein, 15 aa, Artificial Sequence
  Description of Artificial Sequence: Synthetic peptide
  Seed: GMDPRMCSLMQGSTL
GMDLRMQSIMQASTL

SEQ ID NO: 74166 - protein, 15 aa, Artificial Sequence
  Description of Artificial Sequence: Synthetic peptide
  Seed: GMDPRMCSLMQGSTL
GMDLRMQSIMQSSTL

SEQ ID NO: 74167 - protein, 15 aa, Artificial Sequence
  Description of Artificial Sequence: Synthetic peptide
  Seed: GMDPRMCSLMQGSTL
GMDLRMQSPMQASTL

SEQ ID NO: 74168 - protein, 15 aa, Artificial Sequence
  Description of Artificial Sequence: Synthetic peptide
  Seed: GMDPRMCSLMQGSTL
GMDLRMQSPMQNSTL

SEQ ID NO: 74169 - protein, 15 aa, Artificial Sequence
  Description of Artificial Sequence: Synthetic peptide
  Seed: GMDPRMCSLMQGSTL
GMDLRMQSPMQSSTL

SEQ ID NO: 74170 - protein, 15 aa, Artificial Sequence
  Description of Artificial Sequence: Synthetic peptide
  Seed: GMDPRMCSLMQGSTL
GMDLRMQSSMQSSTL

SEQ ID NO: 74171 - protein, 15 aa, Artificial Sequence
  Description of Artificial Sequence: Synthetic peptide
  Seed: GMDPRMCSLMQGSTL
GMDLRMQSTMQSSTL

SEQ ID NO: 74172 - protein, 15 aa, Artificial Sequence
  Description of Artificial Sequence: Synthetic peptide
  Seed: GMDPRMCSLMQGSTL
GMDLRMQSVMQASTL

SEQ ID NO: 74173 - protein, 15 aa, Artificial Sequence
  Description of Artificial Sequence: Synthetic peptide
  Seed: GMDPRMCSLMQGSTL
GMDLRMQSVMQNSTL

SEQ ID NO: 74174 - protein, 15 aa, Artificial Sequence
  Description of Artificial Sequence: Synthetic peptide
  Seed: GMDPRMCSLMQGSTL
GMDLRMQSVMQSSTL

SEQ ID NO: 74175 - protein, 15 aa, Artificial Sequence
  Description of Artificial Sequence: Synthetic peptide
  Seed: GMDPRMCSLMQGSTL
GMDLRMSSAMQASTL

SEQ ID NO: 74176 - protein, 15 aa, Artificial Sequence
  Description of Artificial Sequence: Synthetic peptide
  Seed: GMDPRMCSLMQGSTL
GMDLRMSSAMQNSTL

SEQ ID NO: 74177 - protein, 15 aa, Artificial Sequence
  Description of Artificial Sequence: Synthetic peptide
  Seed: GMDPRMCSLMQGSTL
GMDLRMSSAMQSSTL

SEQ ID NO: 74178 - protein, 15 aa, Artificial Sequence
  Description of Artificial Sequence: Synthetic peptide
  Seed: GMDPRMCSLMQGSTL
GMDLRMTSAMQASTL

SEQ ID NO: 74179 - protein, 15 aa, Artificial Sequence
  Description of Artificial Sequence: Synthetic peptide
  Seed: GMDPRMCSLMQGSTL
GMDLRMTSAMQSSTL

SEQ ID NO: 74180 - protein, 15 aa, Artificial Sequence
  Description of Artificial Sequence: Synthetic peptide
  Seed: GMDPRMCSLMQGSTL
GMDLRMVSAMQASTL

SEQ ID NO: 74181 - protein, 15 aa, Artificial Sequence
  Description of Artificial Sequence: Synthetic peptide
  Seed: GMDPRMCSLMQGSTL
GMDLRMVSAMQHSTL

SEQ ID NO: 74182 - protein, 15 aa, Artificial Sequence
  Description of Artificial Sequence: Synthetic peptide
  Seed: GMDPRMCSLMQGSTL
GMDLRMVSAMQNSTL

SEQ ID NO: 74183 - protein, 15 aa, Artificial Sequence
  Description of Artificial Sequence: Synthetic peptide
  Seed: GMDPRMCSLMQGSTL
GMDLRMVSAMQSSTL

SEQ ID NO: 74184 - protein, 15 aa, Artificial Sequence
  Description of Artificial Sequence: Synthetic peptide
  Seed: GMDPRMCSLMQGSTL
GMDLRMVSAMQTSTL

SEQ ID NO: 74185 - protein, 15 aa, Artificial Sequence
  Description of Artificial Sequence: Synthetic peptide
  Seed: GMDPRMCSLMQGSTL
GMDLRMVSIMQASTL

SEQ ID NO: 74186 - protein, 15 aa, Artificial Sequence
  Description of Artificial Sequence: Synthetic peptide
  Seed: GMDPRMCSLMQGSTL
GMDLRMVSIMQSSTL

SEQ ID NO: 74187 - protein, 15 aa, Artificial Sequence
  Description of Artificial Sequence: Synthetic peptide
  Seed: GMDPRMCSLMQGSTL
GMDLRMVSMMQASTL

SEQ ID NO: 74188 - protein, 15 aa, Artificial Sequence
  Description of Artificial Sequence: Synthetic peptide
  Seed: GMDPRMCSLMQGSTL
GMDLRMVSPMQASTL

SEQ ID NO: 74189 - protein, 15 aa, Artificial Sequence
  Description of Artificial Sequence: Synthetic peptide
  Seed: GMDPRMCSLMQGSTL
GMDLRMVSPMQNSTL

SEQ ID NO: 74190 - protein, 15 aa, Artificial Sequence
  Description of Artificial Sequence: Synthetic peptide
  Seed: GMDPRMCSLMQGSTL
GMDLRMVSPMQSSTL

SEQ ID NO: 74191 - protein, 15 aa, Artificial Sequence
  Description of Artificial Sequence: Synthetic peptide
  Seed: GMDPRMCSLMQGSTL
GMDLRMVSSMQASTL

SEQ ID NO: 74192 - protein, 15 aa, Artificial Sequence
  Description of Artificial Sequence: Synthetic peptide
  Seed: GMDPRMCSLMQGSTL
GMDLRMVSSMQNSTL

SEQ ID NO: 74193 - protein, 15 aa, Artificial Sequence
  Description of Artificial Sequence: Synthetic peptide
  Seed: GMDPRMCSLMQGSTL
GMDLRMVSSMQSSTL

SEQ ID NO: 74194 - protein, 15 aa, Artificial Sequence
  Description of Artificial Sequence: Synthetic peptide
  Seed: GMDPRMCSLMQGSTL
GMDLRMVSTMQASTL

SEQ ID NO: 74195 - protein, 15 aa, Artificial Sequence
  Description of Artificial Sequence: Synthetic peptide
  Seed: GMDPRMCSLMQGSTL
GMDLRMVSTMQNSTL

SEQ ID NO: 74196 - protein, 15 aa, Artificial Sequence
  Description of Artificial Sequence: Synthetic peptide
  Seed: GMDPRMCSLMQGSTL
GMDLRMVSTMQSSTL

SEQ ID NO: 74197 - protein, 15 aa, Artificial Sequence
  Description of Artificial Sequence: Synthetic peptide
  Seed: GMDPRMCSLMQGSTL
GMDLRMVSVMQASTL

SEQ ID NO: 74198 - protein, 15 aa, Artificial Sequence
  Description of Artificial Sequence: Synthetic peptide
  Seed: GMDPRMCSLMQGSTL
GMDLRMVSVMQNSTL

SEQ ID NO: 74199 - protein, 15 aa, Artificial Sequence
  Description of Artificial Sequence: Synthetic peptide
  Seed: GMDPRMCSLMQGSTL
GMDLRMVSVMQSSTL

SEQ ID NO: 74200 - protein, 15 aa, Artificial Sequence
  Description of Artificial Sequence: Synthetic peptide
  Seed: GMDPRMCSLMQGSTL
GMDLRMWSAMQASTL

SEQ ID NO: 74201 - protein, 15 aa, Artificial Sequence
  Description of Artificial Sequence: Synthetic peptide
  Seed: GMDPRMCSLMQGSTL
GMDLRMWSAMQSSTL

SEQ ID NO: 74202 - protein, 15 aa, Artificial Sequence
  Description of Artificial Sequence: Synthetic peptide
  Seed: GMDPRMCSLMQGSTL
GMDLRMWSAMQTSTL

SEQ ID NO: 74203 - protein, 15 aa, Artificial Sequence
  Description of Artificial Sequence: Synthetic peptide
  Seed: GMDPRMCSLMQGSTL
GMDLRMWSIMQASTL

SEQ ID NO: 74204 - protein, 15 aa, Artificial Sequence
  Description of Artificial Sequence: Synthetic peptide
  Seed: GMDPRMCSLMQGSTL
GMDLRMWSIMQSSTL

SEQ ID NO: 74205 - protein, 15 aa, Artificial Sequence
  Description of Artificial Sequence: Synthetic peptide
  Seed: GMDPRMCSLMQGSTL
GMDLRMWSIMQTSTL

SEQ ID NO: 74206 - protein, 15 aa, Artificial Sequence
  Description of Artificial Sequence: Synthetic peptide
  Seed: GMDPRMCSLMQGSTL
GMDLRMWSMMQSSTL

SEQ ID NO: 74207 - protein, 15 aa, Artificial Sequence
  Description of Artificial Sequence: Synthetic peptide
  Seed: GMDPRMCSLMQGSTL
GMDLRMWSVMQASTL

SEQ ID NO: 74208 - protein, 15 aa, Artificial Sequence
  Description of Artificial Sequence: Synthetic peptide
  Seed: GMDPRMCSLMQGSTL
GMDLRMWSVMQSSTL

SEQ ID NO: 74209 - protein, 15 aa, Artificial Sequence
  Description of Artificial Sequence: Synthetic peptide
  Seed: GMDPRMCSLMQGSTL
GMDLRMYSAMQGSTL

SEQ ID NO: 74210 - protein, 15 aa, Artificial Sequence
  Description of Artificial Sequence: Synthetic peptide
  Seed: GMDPRMCSLMQGSTL
GMDLRMYSAMQSSTL

SEQ ID NO: 74211 - protein, 15 aa, Artificial Sequence
  Description of Artificial Sequence: Synthetic peptide
  Seed: GMDPRMCSLMQGSTL
GMDLRMYSPMQASTL

SEQ ID NO: 74212 - protein, 15 aa, Artificial Sequence
  Description of Artificial Sequence: Synthetic peptide
  Seed: GMDPRMCSLMQGSTL
GMDLRMYSSMQSSTL

SEQ ID NO: 74213 - protein, 15 aa, Artificial Sequence
  Description of Artificial Sequence: Synthetic peptide
  Seed: GMDPRMCSLMQGSTL
GMDLRMYSTMQASTL

SEQ ID NO: 74214 - protein, 15 aa, Artificial Sequence
  Description of Artificial Sequence: Synthetic peptide
  Seed: GMDPRMCSLMQGSTL
GMDLRMYSVMQGSTL

SEQ ID NO: 74215 - protein, 15 aa, Artificial Sequence
  Description of Artificial Sequence: Synthetic peptide
  Seed: GMDPRMCSLMQGSTL
GMDLRMYSVMQSSTL

SEQ ID NO: 74216 - protein, 15 aa, Artificial Sequence
  Description of Artificial Sequence: Synthetic peptide
  Seed: GMDPRMCSLMQGSTL
GMDMRMASAMQASTL

SEQ ID NO: 74217 - protein, 15 aa, Artificial Sequence
  Description of Artificial Sequence: Synthetic peptide
  Seed: GMDPRMCSLMQGSTL
GMDMRMASAMQHSTL

SEQ ID NO: 74218 - protein, 15 aa, Artificial Sequence
  Description of Artificial Sequence: Synthetic peptide
  Seed: GMDPRMCSLMQGSTL
GMDMRMASAMQISTL

SEQ ID NO: 74219 - protein, 15 aa, Artificial Sequence
  Description of Artificial Sequence: Synthetic peptide
  Seed: GMDPRMCSLMQGSTL
GMDMRMASAMQLSTL

SEQ ID NO: 74220 - protein, 15 aa, Artificial Sequence
  Description of Artificial Sequence: Synthetic peptide
  Seed: GMDPRMCSLMQGSTL
GMDMRMASAMQMSTL

SEQ ID NO: 74221 - protein, 15 aa, Artificial Sequence
  Description of Artificial Sequence: Synthetic peptide
  Seed: GMDPRMCSLMQGSTL
GMDMRMASAMQNSTL

SEQ ID NO: 74222 - protein, 15 aa, Artificial Sequence
  Description of Artificial Sequence: Synthetic peptide
  Seed: GMDPRMCSLMQGSTL
GMDMRMASAMQSSTL

SEQ ID NO: 74223 - protein, 15 aa, Artificial Sequence
  Description of Artificial Sequence: Synthetic peptide
  Seed: GMDPRMCSLMQGSTL
GMDMRMASAMQTSTL

SEQ ID NO: 74224 - protein, 15 aa, Artificial Sequence
  Description of Artificial Sequence: Synthetic peptide
  Seed: GMDPRMCSLMQGSTL
GMDMRMASAMQVSTL

SEQ ID NO: 74225 - protein, 15 aa, Artificial Sequence
  Description of Artificial Sequence: Synthetic peptide
  Seed: GMDPRMCSLMQGSTL
GMDMRMASIMQASTL

SEQ ID NO: 74226 - protein, 15 aa, Artificial Sequence
  Description of Artificial Sequence: Synthetic peptide
  Seed: GMDPRMCSLMQGSTL
GMDMRMASIMQMSTL

SEQ ID NO: 74227 - protein, 15 aa, Artificial Sequence
  Description of Artificial Sequence: Synthetic peptide
  Seed: GMDPRMCSLMQGSTL
GMDMRMASIMQNSTL

SEQ ID NO: 74228 - protein, 15 aa, Artificial Sequence
  Description of Artificial Sequence: Synthetic peptide
  Seed: GMDPRMCSLMQGSTL
GMDMRMASIMQSSTL

SEQ ID NO: 74229 - protein, 15 aa, Artificial Sequence
  Description of Artificial Sequence: Synthetic peptide
  Seed: GMDPRMCSLMQGSTL
GMDMRMASLMQASTL

SEQ ID NO: 74230 - protein, 15 aa, Artificial Sequence
  Description of Artificial Sequence: Synthetic peptide
  Seed: GMDPRMCSLMQGSTL
GMDMRMASPMQASTL

SEQ ID NO: 74231 - protein, 15 aa, Artificial Sequence
  Description of Artificial Sequence: Synthetic peptide
  Seed: GMDPRMCSLMQGSTL
GMDMRMASPMQMSTL

SEQ ID NO: 74232 - protein, 15 aa, Artificial Sequence
  Description of Artificial Sequence: Synthetic peptide
  Seed: GMDPRMCSLMQGSTL
GMDMRMASPMQNSTL

SEQ ID NO: 74233 - protein, 15 aa, Artificial Sequence
  Description of Artificial Sequence: Synthetic peptide
  Seed: GMDPRMCSLMQGSTL
GMDMRMASPMQSSTL

SEQ ID NO: 74234 - protein, 15 aa, Artificial Sequence
  Description of Artificial Sequence: Synthetic peptide
  Seed: GMDPRMCSLMQGSTL
GMDMRMASSMQASTL

SEQ ID NO: 74235 - protein, 15 aa, Artificial Sequence
  Description of Artificial Sequence: Synthetic peptide
  Seed: GMDPRMCSLMQGSTL
GMDMRMASSMQNSTL

SEQ ID NO: 74236 - protein, 15 aa, Artificial Sequence
  Description of Artificial Sequence: Synthetic peptide
  Seed: GMDPRMCSLMQGSTL
GMDMRMASSMQSSTL

SEQ ID NO: 74237 - protein, 15 aa, Artificial Sequence
  Description of Artificial Sequence: Synthetic peptide
  Seed: GMDPRMCSLMQGSTL
GMDMRMASTMQASTL

SEQ ID NO: 74238 - protein, 15 aa, Artificial Sequence
  Description of Artificial Sequence: Synthetic peptide
  Seed: GMDPRMCSLMQGSTL
GMDMRMASTMQMSTL

SEQ ID NO: 74239 - protein, 15 aa, Artificial Sequence
  Description of Artificial Sequence: Synthetic peptide
  Seed: GMDPRMCSLMQGSTL
GMDMRMASTMQNSTL

SEQ ID NO: 74240 - protein, 15 aa, Artificial Sequence
  Description of Artificial Sequence: Synthetic peptide
  Seed: GMDPRMCSLMQGSTL
GMDMRMASTMQSSTL

SEQ ID NO: 74241 - protein, 15 aa, Artificial Sequence
  Description of Artificial Sequence: Synthetic peptide
  Seed: GMDPRMCSLMQGSTL
GMDMRMASVMQASTL

SEQ ID NO: 74242 - protein, 15 aa, Artificial Sequence
  Description of Artificial Sequence: Synthetic peptide
  Seed: GMDPRMCSLMQGSTL
GMDMRMASVMQMSTL

SEQ ID NO: 74243 - protein, 15 aa, Artificial Sequence
  Description of Artificial Sequence: Synthetic peptide
  Seed: GMDPRMCSLMQGSTL
GMDMRMASVMQNSTL

SEQ ID NO: 74244 - protein, 15 aa, Artificial Sequence
  Description of Artificial Sequence: Synthetic peptide
  Seed: GMDPRMCSLMQGSTL
GMDMRMASVMQSSTL

SEQ ID NO: 74245 - protein, 15 aa, Artificial Sequence
  Description of Artificial Sequence: Synthetic peptide
  Seed: GMDPRMCSLMQGSTL
GMDMRMASVMQTSTL

SEQ ID NO: 74246 - protein, 15 aa, Artificial Sequence
  Description of Artificial Sequence: Synthetic peptide
  Seed: GMDPRMCSLMQGSTL
GMDMRMASVMQVSTL

SEQ ID NO: 74247 - protein, 15 aa, Artificial Sequence
  Description of Artificial Sequence: Synthetic peptide
  Seed: GMDPRMCSLMQGSTL
GMDMRMFSAMQASTL

SEQ ID NO: 74248 - protein, 15 aa, Artificial Sequence
  Description of Artificial Sequence: Synthetic peptide
  Seed: GMDPRMCSLMQGSTL
GMDMRMFSAMQGSTL

SEQ ID NO: 74249 - protein, 15 aa, Artificial Sequence
  Description of Artificial Sequence: Synthetic peptide
  Seed: GMDPRMCSLMQGSTL
GMDMRMFSAMQHSTL

SEQ ID NO: 74250 - protein, 15 aa, Artificial Sequence
  Description of Artificial Sequence: Synthetic peptide
  Seed: GMDPRMCSLMQGSTL
GMDMRMFSAMQISTL

SEQ ID NO: 74251 - protein, 15 aa, Artificial Sequence
  Description of Artificial Sequence: Synthetic peptide
  Seed: GMDPRMCSLMQGSTL
GMDMRMFSAMQLSTL

SEQ ID NO: 74252 - protein, 15 aa, Artificial Sequence
  Description of Artificial Sequence: Synthetic peptide
  Seed: GMDPRMCSLMQGSTL
GMDMRMFSAMQMSTL

SEQ ID NO: 74253 - protein, 15 aa, Artificial Sequence
  Description of Artificial Sequence: Synthetic peptide
  Seed: GMDPRMCSLMQGSTL
GMDMRMFSAMQNSTL

SEQ ID NO: 74254 - protein, 15 aa, Artificial Sequence
  Description of Artificial Sequence: Synthetic peptide
  Seed: GMDPRMCSLMQGSTL
GMDMRMFSAMQSSTL

SEQ ID NO: 74255 - protein, 15 aa, Artificial Sequence
  Description of Artificial Sequence: Synthetic peptide
  Seed: GMDPRMCSLMQGSTL
GMDMRMFSAMQTSTL

SEQ ID NO: 74256 - protein, 15 aa, Artificial Sequence
  Description of Artificial Sequence: Synthetic peptide
  Seed: GMDPRMCSLMQGSTL
GMDMRMFSAMQVSTL

SEQ ID NO: 74257 - protein, 15 aa, Artificial Sequence
  Description of Artificial Sequence: Synthetic peptide
  Seed: GMDPRMCSLMQGSTL
GMDMRMFSGMQASTL

SEQ ID NO: 74258 - protein, 15 aa, Artificial Sequence
  Description of Artificial Sequence: Synthetic peptide
  Seed: GMDPRMCSLMQGSTL
GMDMRMFSGMQSSTL

SEQ ID NO: 74259 - protein, 15 aa, Artificial Sequence
  Description of Artificial Sequence: Synthetic peptide
  Seed: GMDPRMCSLMQGSTL
GMDMRMFSIMQASTL

SEQ ID NO: 74260 - protein, 15 aa, Artificial Sequence
  Description of Artificial Sequence: Synthetic peptide
  Seed: GMDPRMCSLMQGSTL
GMDMRMFSIMQGSTL

SEQ ID NO: 74261 - protein, 15 aa, Artificial Sequence
  Description of Artificial Sequence: Synthetic peptide
  Seed: GMDPRMCSLMQGSTL
GMDMRMFSIMQHSTL

SEQ ID NO: 74262 - protein, 15 aa, Artificial Sequence
  Description of Artificial Sequence: Synthetic peptide
  Seed: GMDPRMCSLMQGSTL
GMDMRMFSIMQNSTL

SEQ ID NO: 74263 - protein, 15 aa, Artificial Sequence
  Description of Artificial Sequence: Synthetic peptide
  Seed: GMDPRMCSLMQGSTL
GMDMRMFSIMQSSTL

SEQ ID NO: 74264 - protein, 15 aa, Artificial Sequence
  Description of Artificial Sequence: Synthetic peptide
  Seed: GMDPRMCSLMQGSTL
GMDMRMFSIMQVSTL

SEQ ID NO: 74265 - protein, 15 aa, Artificial Sequence
  Description of Artificial Sequence: Synthetic peptide
  Seed: GMDPRMCSLMQGSTL
GMDMRMFSLMQNSTL

SEQ ID NO: 74266 - protein, 15 aa, Artificial Sequence
  Description of Artificial Sequence: Synthetic peptide
  Seed: GMDPRMCSLMQGSTL
GMDMRMFSMMQLSTL

SEQ ID NO: 74267 - protein, 15 aa, Artificial Sequence
  Description of Artificial Sequence: Synthetic peptide
  Seed: GMDPRMCSLMQGSTL
GMDMRMFSMMQMSTL

SEQ ID NO: 74268 - protein, 15 aa, Artificial Sequence
  Description of Artificial Sequence: Synthetic peptide
  Seed: GMDPRMCSLMQGSTL
GMDMRMFSNMQASTL

SEQ ID NO: 74269 - protein, 15 aa, Artificial Sequence
  Description of Artificial Sequence: Synthetic peptide
  Seed: GMDPRMCSLMQGSTL
GMDMRMFSPMQASTL

SEQ ID NO: 74270 - protein, 15 aa, Artificial Sequence
  Description of Artificial Sequence: Synthetic peptide
  Seed: GMDPRMCSLMQGSTL
GMDMRMFSPMQGSTL

SEQ ID NO: 74271 - protein, 15 aa, Artificial Sequence
  Description of Artificial Sequence: Synthetic peptide
  Seed: GMDPRMCSLMQGSTL
GMDMRMFSPMQNSTL

SEQ ID NO: 74272 - protein, 15 aa, Artificial Sequence
  Description of Artificial Sequence: Synthetic peptide
  Seed: GMDPRMCSLMQGSTL
GMDMRMFSPMQSSTL

SEQ ID NO: 74273 - protein, 15 aa, Artificial Sequence
  Description of Artificial Sequence: Synthetic peptide
  Seed: GMDPRMCSLMQGSTL
GMDMRMFSPMQTSTL

SEQ ID NO: 74274 - protein, 15 aa, Artificial Sequence
  Description of Artificial Sequence: Synthetic peptide
  Seed: GMDPRMCSLMQGSTL
GMDMRMFSPMQVSTL

SEQ ID NO: 74275 - protein, 15 aa, Artificial Sequence
  Description of Artificial Sequence: Synthetic peptide
  Seed: GMDPRMCSLMQGSTL
GMDMRMFSSMQASTL

SEQ ID NO: 74276 - protein, 15 aa, Artificial Sequence
  Description of Artificial Sequence: Synthetic peptide
  Seed: GMDPRMCSLMQGSTL
GMDMRMFSSMQGSTL

SEQ ID NO: 74277 - protein, 15 aa, Artificial Sequence
  Description of Artificial Sequence: Synthetic peptide
  Seed: GMDPRMCSLMQGSTL
GMDMRMFSSMQISTL

SEQ ID NO: 74278 - protein, 15 aa, Artificial Sequence
  Description of Artificial Sequence: Synthetic peptide
  Seed: GMDPRMCSLMQGSTL
GMDMRMFSSMQNSTL

SEQ ID NO: 74279 - protein, 15 aa, Artificial Sequence
  Description of Artificial Sequence: Synthetic peptide
  Seed: GMDPRMCSLMQGSTL
GMDMRMFSSMQSSTL

SEQ ID NO: 74280 - protein, 15 aa, Artificial Sequence
  Description of Artificial Sequence: Synthetic peptide
  Seed: GMDPRMCSLMQGSTL
GMDMRMFSSMQTSTL

SEQ ID NO: 74281 - protein, 15 aa, Artificial Sequence
  Description of Artificial Sequence: Synthetic peptide
  Seed: GMDPRMCSLMQGSTL
GMDMRMFSSMQVSTL

SEQ ID NO: 74282 - protein, 15 aa, Artificial Sequence
  Description of Artificial Sequence: Synthetic peptide
  Seed: GMDPRMCSLMQGSTL
GMDMRMFSTMQASTL

SEQ ID NO: 74283 - protein, 15 aa, Artificial Sequence
  Description of Artificial Sequence: Synthetic peptide
  Seed: GMDPRMCSLMQGSTL
GMDMRMFSTMQGSTL

SEQ ID NO: 74284 - protein, 15 aa, Artificial Sequence
  Description of Artificial Sequence: Synthetic peptide
  Seed: GMDPRMCSLMQGSTL
GMDMRMFSTMQNSTL

SEQ ID NO: 74285 - protein, 15 aa, Artificial Sequence
  Description of Artificial Sequence: Synthetic peptide
  Seed: GMDPRMCSLMQGSTL
GMDMRMFSTMQSSTL

SEQ ID NO: 74286 - protein, 15 aa, Artificial Sequence
  Description of Artificial Sequence: Synthetic peptide
  Seed: GMDPRMCSLMQGSTL
GMDMRMFSTMQTSTL

SEQ ID NO: 74287 - protein, 15 aa, Artificial Sequence
  Description of Artificial Sequence: Synthetic peptide
  Seed: GMDPRMCSLMQGSTL
GMDMRMFSTMQVSTL

SEQ ID NO: 74288 - protein, 15 aa, Artificial Sequence
  Description of Artificial Sequence: Synthetic peptide
  Seed: GMDPRMCSLMQGSTL
GMDMRMFSVMQASTL

SEQ ID NO: 74289 - protein, 15 aa, Artificial Sequence
  Description of Artificial Sequence: Synthetic peptide
  Seed: GMDPRMCSLMQGSTL
GMDMRMFSVMQGSTL

SEQ ID NO: 74290 - protein, 15 aa, Artificial Sequence
  Description of Artificial Sequence: Synthetic peptide
  Seed: GMDPRMCSLMQGSTL
GMDMRMFSVMQHSTL

SEQ ID NO: 74291 - protein, 15 aa, Artificial Sequence
  Description of Artificial Sequence: Synthetic peptide
  Seed: GMDPRMCSLMQGSTL
GMDMRMFSVMQNSTL

SEQ ID NO: 74292 - protein, 15 aa, Artificial Sequence
  Description of Artificial Sequence: Synthetic peptide
  Seed: GMDPRMCSLMQGSTL
GMDMRMFSVMQSSTL

SEQ ID NO: 74293 - protein, 15 aa, Artificial Sequence
  Description of Artificial Sequence: Synthetic peptide
  Seed: GMDPRMCSLMQGSTL
GMDMRMFSVMQTSTL

SEQ ID NO: 74294 - protein, 15 aa, Artificial Sequence
  Description of Artificial Sequence: Synthetic peptide
  Seed: GMDPRMCSLMQGSTL
GMDMRMFSVMQVSTL

SEQ ID NO: 74295 - protein, 15 aa, Artificial Sequence
  Description of Artificial Sequence: Synthetic peptide
  Seed: GMDPRMCSLMQGSTL
GMDMRMISAMQASTL

SEQ ID NO: 74296 - protein, 15 aa, Artificial Sequence
  Description of Artificial Sequence: Synthetic peptide
  Seed: GMDPRMCSLMQGSTL
GMDMRMISAMQGSTL

SEQ ID NO: 74297 - protein, 15 aa, Artificial Sequence
  Description of Artificial Sequence: Synthetic peptide
  Seed: GMDPRMCSLMQGSTL
GMDMRMISAMQHSTL

SEQ ID NO: 74298 - protein, 15 aa, Artificial Sequence
  Description of Artificial Sequence: Synthetic peptide
  Seed: GMDPRMCSLMQGSTL
GMDMRMISAMQISTL

SEQ ID NO: 74299 - protein, 15 aa, Artificial Sequence
  Description of Artificial Sequence: Synthetic peptide
  Seed: GMDPRMCSLMQGSTL
GMDMRMISAMQLSTL

SEQ ID NO: 74300 - protein, 15 aa, Artificial Sequence
  Description of Artificial Sequence: Synthetic peptide
  Seed: GMDPRMCSLMQGSTL
GMDMRMISAMQMSTL

SEQ ID NO: 74301 - protein, 15 aa, Artificial Sequence
  Description of Artificial Sequence: Synthetic peptide
  Seed: GMDPRMCSLMQGSTL
GMDMRMISAMQNSTL

SEQ ID NO: 74302 - protein, 15 aa, Artificial Sequence
  Description of Artificial Sequence: Synthetic peptide
  Seed: GMDPRMCSLMQGSTL
GMDMRMISAMQSSTL

SEQ ID NO: 74303 - protein, 15 aa, Artificial Sequence
  Description of Artificial Sequence: Synthetic peptide
  Seed: GMDPRMCSLMQGSTL
GMDMRMISAMQTSTL

SEQ ID NO: 74304 - protein, 15 aa, Artificial Sequence
  Description of Artificial Sequence: Synthetic peptide
  Seed: GMDPRMCSLMQGSTL
GMDMRMISAMQVSTL

SEQ ID NO: 74305 - protein, 15 aa, Artificial Sequence
  Description of Artificial Sequence: Synthetic peptide
  Seed: GMDPRMCSLMQGSTL
GMDMRMISGMQASTL

SEQ ID NO: 74306 - protein, 15 aa, Artificial Sequence
  Description of Artificial Sequence: Synthetic peptide
  Seed: GMDPRMCSLMQGSTL
GMDMRMISGMQNSTL

SEQ ID NO: 74307 - protein, 15 aa, Artificial Sequence
  Description of Artificial Sequence: Synthetic peptide
  Seed: GMDPRMCSLMQGSTL
GMDMRMISGMQSSTL

SEQ ID NO: 74308 - protein, 15 aa, Artificial Sequence
  Description of Artificial Sequence: Synthetic peptide
  Seed: GMDPRMCSLMQGSTL
GMDMRMISIMQASTL

SEQ ID NO: 74309 - protein, 15 aa, Artificial Sequence
  Description of Artificial Sequence: Synthetic peptide
  Seed: GMDPRMCSLMQGSTL
GMDMRMISIMQHSTL

SEQ ID NO: 74310 - protein, 15 aa, Artificial Sequence
  Description of Artificial Sequence: Synthetic peptide
  Seed: GMDPRMCSLMQGSTL
GMDMRMISIMQNSTL

SEQ ID NO: 74311 - protein, 15 aa, Artificial Sequence
  Description of Artificial Sequence: Synthetic peptide
  Seed: GMDPRMCSLMQGSTL
GMDMRMISIMQSSTL

SEQ ID NO: 74312 - protein, 15 aa, Artificial Sequence
  Description of Artificial Sequence: Synthetic peptide
  Seed: GMDPRMCSLMQGSTL
GMDMRMISIMQTSTL

SEQ ID NO: 74313 - protein, 15 aa, Artificial Sequence
  Description of Artificial Sequence: Synthetic peptide
  Seed: GMDPRMCSLMQGSTL
GMDMRMISLMQASTL

SEQ ID NO: 74314 - protein, 15 aa, Artificial Sequence
  Description of Artificial Sequence: Synthetic peptide
  Seed: GMDPRMCSLMQGSTL
GMDMRMISLMQNSTL

SEQ ID NO: 74315 - protein, 15 aa, Artificial Sequence
  Description of Artificial Sequence: Synthetic peptide
  Seed: GMDPRMCSLMQGSTL
GMDMRMISLMQSSTL

SEQ ID NO: 74316 - protein, 15 aa, Artificial Sequence
  Description of Artificial Sequence: Synthetic peptide
  Seed: GMDPRMCSLMQGSTL
GMDMRMISMMQASTL

SEQ ID NO: 74317 - protein, 15 aa, Artificial Sequence
  Description of Artificial Sequence: Synthetic peptide
  Seed: GMDPRMCSLMQGSTL
GMDMRMISMMQNSTL

SEQ ID NO: 74318 - protein, 15 aa, Artificial Sequence
  Description of Artificial Sequence: Synthetic peptide
  Seed: GMDPRMCSLMQGSTL
GMDMRMISMMQSSTL

SEQ ID NO: 74319 - protein, 15 aa, Artificial Sequence
  Description of Artificial Sequence: Synthetic peptide
  Seed: GMDPRMCSLMQGSTL
GMDMRMISNMQASTL

SEQ ID NO: 74320 - protein, 15 aa, Artificial Sequence
  Description of Artificial Sequence: Synthetic peptide
  Seed: GMDPRMCSLMQGSTL
GMDMRMISPMQASTL

SEQ ID NO: 74321 - protein, 15 aa, Artificial Sequence
  Description of Artificial Sequence: Synthetic peptide
  Seed: GMDPRMCSLMQGSTL
GMDMRMISPMQISTL

SEQ ID NO: 74322 - protein, 15 aa, Artificial Sequence
  Description of Artificial Sequence: Synthetic peptide
  Seed: GMDPRMCSLMQGSTL
GMDMRMISPMQLSTL

SEQ ID NO: 74323 - protein, 15 aa, Artificial Sequence
  Description of Artificial Sequence: Synthetic peptide
  Seed: GMDPRMCSLMQGSTL
GMDMRMISPMQMSTL

SEQ ID NO: 74324 - protein, 15 aa, Artificial Sequence
  Description of Artificial Sequence: Synthetic peptide
  Seed: GMDPRMCSLMQGSTL
GMDMRMISPMQNSTL

SEQ ID NO: 74325 - protein, 15 aa, Artificial Sequence
  Description of Artificial Sequence: Synthetic peptide
  Seed: GMDPRMCSLMQGSTL
GMDMRMISPMQSSTL

SEQ ID NO: 74326 - protein, 15 aa, Artificial Sequence
  Description of Artificial Sequence: Synthetic peptide
  Seed: GMDPRMCSLMQGSTL
GMDMRMISPMQTSTL

SEQ ID NO: 74327 - protein, 15 aa, Artificial Sequence
  Description of Artificial Sequence: Synthetic peptide
  Seed: GMDPRMCSLMQGSTL
GMDMRMISPMQVSTL

SEQ ID NO: 74328 - protein, 15 aa, Artificial Sequence
  Description of Artificial Sequence: Synthetic peptide
  Seed: GMDPRMCSLMQGSTL
GMDMRMISSMQASTL

SEQ ID NO: 74329 - protein, 15 aa, Artificial Sequence
  Description of Artificial Sequence: Synthetic peptide
  Seed: GMDPRMCSLMQGSTL
GMDMRMISSMQHSTL

SEQ ID NO: 74330 - protein, 15 aa, Artificial Sequence
  Description of Artificial Sequence: Synthetic peptide
  Seed: GMDPRMCSLMQGSTL
GMDMRMISSMQNSTL

SEQ ID NO: 74331 - protein, 15 aa, Artificial Sequence
  Description of Artificial Sequence: Synthetic peptide
  Seed: GMDPRMCSLMQGSTL
GMDMRMISSMQSSTL

SEQ ID NO: 74332 - protein, 15 aa, Artificial Sequence
  Description of Artificial Sequence: Synthetic peptide
  Seed: GMDPRMCSLMQGSTL
GMDMRMISSMQTSTL

SEQ ID NO: 74333 - protein, 15 aa, Artificial Sequence
  Description of Artificial Sequence: Synthetic peptide
  Seed: GMDPRMCSLMQGSTL
GMDMRMISSMQVSTL

SEQ ID NO: 74334 - protein, 15 aa, Artificial Sequence
  Description of Artificial Sequence: Synthetic peptide
  Seed: GMDPRMCSLMQGSTL
GMDMRMISTMQASTL

SEQ ID NO: 74335 - protein, 15 aa, Artificial Sequence
  Description of Artificial Sequence: Synthetic peptide
  Seed: GMDPRMCSLMQGSTL
GMDMRMISTMQNSTL

SEQ ID NO: 74336 - protein, 15 aa, Artificial Sequence
  Description of Artificial Sequence: Synthetic peptide
  Seed: GMDPRMCSLMQGSTL
GMDMRMISTMQSSTL

SEQ ID NO: 74337 - protein, 15 aa, Artificial Sequence
  Description of Artificial Sequence: Synthetic peptide
  Seed: GMDPRMCSLMQGSTL
GMDMRMISTMQTSTL

SEQ ID NO: 74338 - protein, 15 aa, Artificial Sequence
  Description of Artificial Sequence: Synthetic peptide
  Seed: GMDPRMCSLMQGSTL
GMDMRMISTMQVSTL

SEQ ID NO: 74339 - protein, 15 aa, Artificial Sequence
  Description of Artificial Sequence: Synthetic peptide
  Seed: GMDPRMCSLMQGSTL
GMDMRMISVMQASTL

SEQ ID NO: 74340 - protein, 15 aa, Artificial Sequence
  Description of Artificial Sequence: Synthetic peptide
  Seed: GMDPRMCSLMQGSTL
GMDMRMISVMQHSTL

SEQ ID NO: 74341 - protein, 15 aa, Artificial Sequence
  Description of Artificial Sequence: Synthetic peptide
  Seed: GMDPRMCSLMQGSTL
GMDMRMISVMQNSTL

SEQ ID NO: 74342 - protein, 15 aa, Artificial Sequence
  Description of Artificial Sequence: Synthetic peptide
  Seed: GMDPRMCSLMQGSTL
GMDMRMISVMQSSTL

SEQ ID NO: 74343 - protein, 15 aa, Artificial Sequence
  Description of Artificial Sequence: Synthetic peptide
  Seed: GMDPRMCSLMQGSTL
GMDMRMISVMQTSTL

SEQ ID NO: 74344 - protein, 15 aa, Artificial Sequence
  Description of Artificial Sequence: Synthetic peptide
  Seed: GMDPRMCSLMQGSTL
GMDMRMLSAMQASTL

SEQ ID NO: 74345 - protein, 15 aa, Artificial Sequence
  Description of Artificial Sequence: Synthetic peptide
  Seed: GMDPRMCSLMQGSTL
GMDMRMLSAMQGSTL

SEQ ID NO: 74346 - protein, 15 aa, Artificial Sequence
  Description of Artificial Sequence: Synthetic peptide
  Seed: GMDPRMCSLMQGSTL
GMDMRMLSAMQHSTL

SEQ ID NO: 74347 - protein, 15 aa, Artificial Sequence
  Description of Artificial Sequence: Synthetic peptide
  Seed: GMDPRMCSLMQGSTL
GMDMRMLSAMQISTL

SEQ ID NO: 74348 - protein, 15 aa, Artificial Sequence
  Description of Artificial Sequence: Synthetic peptide
  Seed: GMDPRMCSLMQGSTL
GMDMRMLSAMQLSTL

SEQ ID NO: 74349 - protein, 15 aa, Artificial Sequence
  Description of Artificial Sequence: Synthetic peptide
  Seed: GMDPRMCSLMQGSTL
GMDMRMLSAMQMSTL

SEQ ID NO: 74350 - protein, 15 aa, Artificial Sequence
  Description of Artificial Sequence: Synthetic peptide
  Seed: GMDPRMCSLMQGSTL
GMDMRMLSAMQNSTL

SEQ ID NO: 74351 - protein, 15 aa, Artificial Sequence
  Description of Artificial Sequence: Synthetic peptide
  Seed: GMDPRMCSLMQGSTL
GMDMRMLSAMQPSTL

SEQ ID NO: 74352 - protein, 15 aa, Artificial Sequence
  Description of Artificial Sequence: Synthetic peptide
  Seed: GMDPRMCSLMQGSTL
GMDMRMLSAMQQSTL

SEQ ID NO: 74353 - protein, 15 aa, Artificial Sequence
  Description of Artificial Sequence: Synthetic peptide
  Seed: GMDPRMCSLMQGSTL
GMDMRMLSAMQSSTL

SEQ ID NO: 74354 - protein, 15 aa, Artificial Sequence
  Description of Artificial Sequence: Synthetic peptide
  Seed: GMDPRMCSLMQGSTL
GMDMRMLSAMQTSTL

SEQ ID NO: 74355 - protein, 15 aa, Artificial Sequence
  Description of Artificial Sequence: Synthetic peptide
  Seed: GMDPRMCSLMQGSTL
GMDMRMLSAMQVSTL

SEQ ID NO: 74356 - protein, 15 aa, Artificial Sequence
  Description of Artificial Sequence: Synthetic peptide
  Seed: GMDPRMCSLMQGSTL
GMDMRMLSFMQASTL

SEQ ID NO: 74357 - protein, 15 aa, Artificial Sequence
  Description of Artificial Sequence: Synthetic peptide
  Seed: GMDPRMCSLMQGSTL
GMDMRMLSGMQASTL

SEQ ID NO: 74358 - protein, 15 aa, Artificial Sequence
  Description of Artificial Sequence: Synthetic peptide
  Seed: GMDPRMCSLMQGSTL
GMDMRMLSGMQISTL

SEQ ID NO: 74359 - protein, 15 aa, Artificial Sequence
  Description of Artificial Sequence: Synthetic peptide
  Seed: GMDPRMCSLMQGSTL
GMDMRMLSGMQLSTL

SEQ ID NO: 74360 - protein, 15 aa, Artificial Sequence
  Description of Artificial Sequence: Synthetic peptide
  Seed: GMDPRMCSLMQGSTL
GMDMRMLSGMQMSTL

SEQ ID NO: 74361 - protein, 15 aa, Artificial Sequence
  Description of Artificial Sequence: Synthetic peptide
  Seed: GMDPRMCSLMQGSTL
GMDMRMLSGMQNSTL

SEQ ID NO: 74362 - protein, 15 aa, Artificial Sequence
  Description of Artificial Sequence: Synthetic peptide
  Seed: GMDPRMCSLMQGSTL
GMDMRMLSGMQSSTL

SEQ ID NO: 74363 - protein, 15 aa, Artificial Sequence
  Description of Artificial Sequence: Synthetic peptide
  Seed: GMDPRMCSLMQGSTL
GMDMRMLSGMQTSTL

SEQ ID NO: 74364 - protein, 15 aa, Artificial Sequence
  Description of Artificial Sequence: Synthetic peptide
  Seed: GMDPRMCSLMQGSTL
GMDMRMLSGMQVSTL

SEQ ID NO: 74365 - protein, 15 aa, Artificial Sequence
  Description of Artificial Sequence: Synthetic peptide
  Seed: GMDPRMCSLMQGSTL
GMDMRMLSIMQASTL

SEQ ID NO: 74366 - protein, 15 aa, Artificial Sequence
  Description of Artificial Sequence: Synthetic peptide
  Seed: GMDPRMCSLMQGSTL
GMDMRMLSIMQGSTL

SEQ ID NO: 74367 - protein, 15 aa, Artificial Sequence
  Description of Artificial Sequence: Synthetic peptide
  Seed: GMDPRMCSLMQGSTL
GMDMRMLSIMQHSTL

SEQ ID NO: 74368 - protein, 15 aa, Artificial Sequence
  Description of Artificial Sequence: Synthetic peptide
  Seed: GMDPRMCSLMQGSTL
GMDMRMLSIMQMSTL

SEQ ID NO: 74369 - protein, 15 aa, Artificial Sequence
  Description of Artificial Sequence: Synthetic peptide
  Seed: GMDPRMCSLMQGSTL
GMDMRMLSIMQNSTL

SEQ ID NO: 74370 - protein, 15 aa, Artificial Sequence
  Description of Artificial Sequence: Synthetic peptide
  Seed: GMDPRMCSLMQGSTL
GMDMRMLSIMQSSTL

SEQ ID NO: 74371 - protein, 15 aa, Artificial Sequence
  Description of Artificial Sequence: Synthetic peptide
  Seed: GMDPRMCSLMQGSTL
GMDMRMLSIMQTSTL

SEQ ID NO: 74372 - protein, 15 aa, Artificial Sequence
  Description of Artificial Sequence: Synthetic peptide
  Seed: GMDPRMCSLMQGSTL
GMDMRMLSIMQVSTL

SEQ ID NO: 74373 - protein, 15 aa, Artificial Sequence
  Description of Artificial Sequence: Synthetic peptide
  Seed: GMDPRMCSLMQGSTL
GMDMRMLSLMQASTL

SEQ ID NO: 74374 - protein, 15 aa, Artificial Sequence
  Description of Artificial Sequence: Synthetic peptide
  Seed: GMDPRMCSLMQGSTL
GMDMRMLSLMQNSTL

SEQ ID NO: 74375 - protein, 15 aa, Artificial Sequence
  Description of Artificial Sequence: Synthetic peptide
  Seed: GMDPRMCSLMQGSTL
GMDMRMLSLMQSSTL

SEQ ID NO: 74376 - protein, 15 aa, Artificial Sequence
  Description of Artificial Sequence: Synthetic peptide
  Seed: GMDPRMCSLMQGSTL
GMDMRMLSLMQTSTL

SEQ ID NO: 74377 - protein, 15 aa, Artificial Sequence
  Description of Artificial Sequence: Synthetic peptide
  Seed: GMDPRMCSLMQGSTL
GMDMRMLSMMQASTL

SEQ ID NO: 74378 - protein, 15 aa, Artificial Sequence
  Description of Artificial Sequence: Synthetic peptide
  Seed: GMDPRMCSLMQGSTL
GMDMRMLSMMQNSTL

SEQ ID NO: 74379 - protein, 15 aa, Artificial Sequence
  Description of Artificial Sequence: Synthetic peptide
  Seed: GMDPRMCSLMQGSTL
GMDMRMLSMMQSSTL

SEQ ID NO: 74380 - protein, 15 aa, Artificial Sequence
  Description of Artificial Sequence: Synthetic peptide
  Seed: GMDPRMCSLMQGSTL
GMDMRMLSMMQTSTL

SEQ ID NO: 74381 - protein, 15 aa, Artificial Sequence
  Description of Artificial Sequence: Synthetic peptide
  Seed: GMDPRMCSLMQGSTL
GMDMRMLSNMQASTL

SEQ ID NO: 74382 - protein, 15 aa, Artificial Sequence
  Description of Artificial Sequence: Synthetic peptide
  Seed: GMDPRMCSLMQGSTL
GMDMRMLSNMQNSTL

SEQ ID NO: 74383 - protein, 15 aa, Artificial Sequence
  Description of Artificial Sequence: Synthetic peptide
  Seed: GMDPRMCSLMQGSTL
GMDMRMLSNMQSSTL

SEQ ID NO: 74384 - protein, 15 aa, Artificial Sequence
  Description of Artificial Sequence: Synthetic peptide
  Seed: GMDPRMCSLMQGSTL
GMDMRMLSNMQTSTL

SEQ ID NO: 74385 - protein, 15 aa, Artificial Sequence
  Description of Artificial Sequence: Synthetic peptide
  Seed: GMDPRMCSLMQGSTL
GMDMRMLSPMQASTL

SEQ ID NO: 74386 - protein, 15 aa, Artificial Sequence
  Description of Artificial Sequence: Synthetic peptide
  Seed: GMDPRMCSLMQGSTL
GMDMRMLSPMQGSTL

SEQ ID NO: 74387 - protein, 15 aa, Artificial Sequence
  Description of Artificial Sequence: Synthetic peptide
  Seed: GMDPRMCSLMQGSTL
GMDMRMLSPMQHSTL

SEQ ID NO: 74388 - protein, 15 aa, Artificial Sequence
  Description of Artificial Sequence: Synthetic peptide
  Seed: GMDPRMCSLMQGSTL
GMDMRMLSPMQISTL

SEQ ID NO: 74389 - protein, 15 aa, Artificial Sequence
  Description of Artificial Sequence: Synthetic peptide
  Seed: GMDPRMCSLMQGSTL
GMDMRMLSPMQLSTL

SEQ ID NO: 74390 - protein, 15 aa, Artificial Sequence
  Description of Artificial Sequence: Synthetic peptide
  Seed: GMDPRMCSLMQGSTL
GMDMRMLSPMQMSTL

SEQ ID NO: 74391 - protein, 15 aa, Artificial Sequence
  Description of Artificial Sequence: Synthetic peptide
  Seed: GMDPRMCSLMQGSTL
GMDMRMLSPMQNSTL

SEQ ID NO: 74392 - protein, 15 aa, Artificial Sequence
  Description of Artificial Sequence: Synthetic peptide
  Seed: GMDPRMCSLMQGSTL
GMDMRMLSPMQPSTL

SEQ ID NO: 74393 - protein, 15 aa, Artificial Sequence
  Description of Artificial Sequence: Synthetic peptide
  Seed: GMDPRMCSLMQGSTL
GMDMRMLSPMQQSTL

SEQ ID NO: 74394 - protein, 15 aa, Artificial Sequence
  Description of Artificial Sequence: Synthetic peptide
  Seed: GMDPRMCSLMQGSTL
GMDMRMLSPMQSSTL

SEQ ID NO: 74395 - protein, 15 aa, Artificial Sequence
  Description of Artificial Sequence: Synthetic peptide
  Seed: GMDPRMCSLMQGSTL
GMDMRMLSPMQTSTL

SEQ ID NO: 74396 - protein, 15 aa, Artificial Sequence
  Description of Artificial Sequence: Synthetic peptide
  Seed: GMDPRMCSLMQGSTL
GMDMRMLSPMQVSTL

SEQ ID NO: 74397 - protein, 15 aa, Artificial Sequence
  Description of Artificial Sequence: Synthetic peptide
  Seed: GMDPRMCSLMQGSTL
GMDMRMLSSMQASTL

SEQ ID NO: 74398 - protein, 15 aa, Artificial Sequence
  Description of Artificial Sequence: Synthetic peptide
  Seed: GMDPRMCSLMQGSTL
GMDMRMLSSMQGSTL

SEQ ID NO: 74399 - protein, 15 aa, Artificial Sequence
  Description of Artificial Sequence: Synthetic peptide
  Seed: GMDPRMCSLMQGSTL
GMDMRMLSSMQHSTL

SEQ ID NO: 74400 - protein, 15 aa, Artificial Sequence
  Description of Artificial Sequence: Synthetic peptide
  Seed: GMDPRMCSLMQGSTL
GMDMRMLSSMQISTL

SEQ ID NO: 74401 - protein, 15 aa, Artificial Sequence
  Description of Artificial Sequence: Synthetic peptide
  Seed: GMDPRMCSLMQGSTL
GMDMRMLSSMQLSTL

SEQ ID NO: 74402 - protein, 15 aa, Artificial Sequence
  Description of Artificial Sequence: Synthetic peptide
  Seed: GMDPRMCSLMQGSTL
GMDMRMLSSMQMSTL

SEQ ID NO: 74403 - protein, 15 aa, Artificial Sequence
  Description of Artificial Sequence: Synthetic peptide
  Seed: GMDPRMCSLMQGSTL
GMDMRMLSSMQNSTL

SEQ ID NO: 74404 - protein, 15 aa, Artificial Sequence
  Description of Artificial Sequence: Synthetic peptide
  Seed: GMDPRMCSLMQGSTL
GMDMRMLSSMQSSTL

SEQ ID NO: 74405 - protein, 15 aa, Artificial Sequence
  Description of Artificial Sequence: Synthetic peptide
  Seed: GMDPRMCSLMQGSTL
GMDMRMLSSMQTSTL

SEQ ID NO: 74406 - protein, 15 aa, Artificial Sequence
  Description of Artificial Sequence: Synthetic peptide
  Seed: GMDPRMCSLMQGSTL
GMDMRMLSSMQVSTL

SEQ ID NO: 74407 - protein, 15 aa, Artificial Sequence
  Description of Artificial Sequence: Synthetic peptide
  Seed: GMDPRMCSLMQGSTL
GMDMRMLSTMQASTL

SEQ ID NO: 74408 - protein, 15 aa, Artificial Sequence
  Description of Artificial Sequence: Synthetic peptide
  Seed: GMDPRMCSLMQGSTL
GMDMRMLSTMQGSTL

SEQ ID NO: 74409 - protein, 15 aa, Artificial Sequence
  Description of Artificial Sequence: Synthetic peptide
  Seed: GMDPRMCSLMQGSTL
GMDMRMLSTMQHSTL

SEQ ID NO: 74410 - protein, 15 aa, Artificial Sequence
  Description of Artificial Sequence: Synthetic peptide
  Seed: GMDPRMCSLMQGSTL
GMDMRMLSTMQISTL

SEQ ID NO: 74411 - protein, 15 aa, Artificial Sequence
  Description of Artificial Sequence: Synthetic peptide
  Seed: GMDPRMCSLMQGSTL
GMDMRMLSTMQLSTL

SEQ ID NO: 74412 - protein, 15 aa, Artificial Sequence
  Description of Artificial Sequence: Synthetic peptide
  Seed: GMDPRMCSLMQGSTL
GMDMRMLSTMQMSTL

SEQ ID NO: 74413 - protein, 15 aa, Artificial Sequence
  Description of Artificial Sequence: Synthetic peptide
  Seed: GMDPRMCSLMQGSTL
GMDMRMLSTMQNSTL

SEQ ID NO: 74414 - protein, 15 aa, Artificial Sequence
  Description of Artificial Sequence: Synthetic peptide
  Seed: GMDPRMCSLMQGSTL
GMDMRMLSTMQSSTL

SEQ ID NO: 74415 - protein, 15 aa, Artificial Sequence
  Description of Artificial Sequence: Synthetic peptide
  Seed: GMDPRMCSLMQGSTL
GMDMRMLSTMQTSTL

SEQ ID NO: 74416 - protein, 15 aa, Artificial Sequence
  Description of Artificial Sequence: Synthetic peptide
  Seed: GMDPRMCSLMQGSTL
GMDMRMLSTMQVSTL

SEQ ID NO: 74417 - protein, 15 aa, Artificial Sequence
  Description of Artificial Sequence: Synthetic peptide
  Seed: GMDPRMCSLMQGSTL
GMDMRMLSVMQASTL

SEQ ID NO: 74418 - protein, 15 aa, Artificial Sequence
  Description of Artificial Sequence: Synthetic peptide
  Seed: GMDPRMCSLMQGSTL
GMDMRMLSVMQGSTL

SEQ ID NO: 74419 - protein, 15 aa, Artificial Sequence
  Description of Artificial Sequence: Synthetic peptide
  Seed: GMDPRMCSLMQGSTL
GMDMRMLSVMQHSTL

SEQ ID NO: 74420 - protein, 15 aa, Artificial Sequence
  Description of Artificial Sequence: Synthetic peptide
  Seed: GMDPRMCSLMQGSTL
GMDMRMLSVMQISTL

SEQ ID NO: 74421 - protein, 15 aa, Artificial Sequence
  Description of Artificial Sequence: Synthetic peptide
  Seed: GMDPRMCSLMQGSTL
GMDMRMLSVMQLSTL

SEQ ID NO: 74422 - protein, 15 aa, Artificial Sequence
  Description of Artificial Sequence: Synthetic peptide
  Seed: GMDPRMCSLMQGSTL
GMDMRMLSVMQMSTL

SEQ ID NO: 74423 - protein, 15 aa, Artificial Sequence
  Description of Artificial Sequence: Synthetic peptide
  Seed: GMDPRMCSLMQGSTL
GMDMRMLSVMQNSTL

SEQ ID NO: 74424 - protein, 15 aa, Artificial Sequence
  Description of Artificial Sequence: Synthetic peptide
  Seed: GMDPRMCSLMQGSTL
GMDMRMLSVMQSSTL

SEQ ID NO: 74425 - protein, 15 aa, Artificial Sequence
  Description of Artificial Sequence: Synthetic peptide
  Seed: GMDPRMCSLMQGSTL
GMDMRMLSVMQTSTL

SEQ ID NO: 74426 - protein, 15 aa, Artificial Sequence
  Description of Artificial Sequence: Synthetic peptide
  Seed: GMDPRMCSLMQGSTL
GMDMRMLSVMQVSTL

SEQ ID NO: 74427 - protein, 15 aa, Artificial Sequence
  Description of Artificial Sequence: Synthetic peptide
  Seed: GMDPRMCSLMQGSTL
GMDMRMMSAMQASTL

SEQ ID NO: 74428 - protein, 15 aa, Artificial Sequence
  Description of Artificial Sequence: Synthetic peptide
  Seed: GMDPRMCSLMQGSTL
GMDMRMMSAMQGSTL

SEQ ID NO: 74429 - protein, 15 aa, Artificial Sequence
  Description of Artificial Sequence: Synthetic peptide
  Seed: GMDPRMCSLMQGSTL
GMDMRMMSAMQHSTL

SEQ ID NO: 74430 - protein, 15 aa, Artificial Sequence
  Description of Artificial Sequence: Synthetic peptide
  Seed: GMDPRMCSLMQGSTL
GMDMRMMSAMQISTL

SEQ ID NO: 74431 - protein, 15 aa, Artificial Sequence
  Description of Artificial Sequence: Synthetic peptide
  Seed: GMDPRMCSLMQGSTL
GMDMRMMSAMQLSTL

SEQ ID NO: 74432 - protein, 15 aa, Artificial Sequence
  Description of Artificial Sequence: Synthetic peptide
  Seed: GMDPRMCSLMQGSTL
GMDMRMMSAMQMSTL

SEQ ID NO: 74433 - protein, 15 aa, Artificial Sequence
  Description of Artificial Sequence: Synthetic peptide
  Seed: GMDPRMCSLMQGSTL
GMDMRMMSAMQNSTL

SEQ ID NO: 74434 - protein, 15 aa, Artificial Sequence
  Description of Artificial Sequence: Synthetic peptide
  Seed: GMDPRMCSLMQGSTL
GMDMRMMSAMQPSTL

SEQ ID NO: 74435 - protein, 15 aa, Artificial Sequence
  Description of Artificial Sequence: Synthetic peptide
  Seed: GMDPRMCSLMQGSTL
GMDMRMMSAMQQSTL

SEQ ID NO: 74436 - protein, 15 aa, Artificial Sequence
  Description of Artificial Sequence: Synthetic peptide
  Seed: GMDPRMCSLMQGSTL
GMDMRMMSAMQSSTL

SEQ ID NO: 74437 - protein, 15 aa, Artificial Sequence
  Description of Artificial Sequence: Synthetic peptide
  Seed: GMDPRMCSLMQGSTL
GMDMRMMSAMQTSTL

SEQ ID NO: 74438 - protein, 15 aa, Artificial Sequence
  Description of Artificial Sequence: Synthetic peptide
  Seed: GMDPRMCSLMQGSTL
GMDMRMMSAMQVSTL

SEQ ID NO: 74439 - protein, 15 aa, Artificial Sequence
  Description of Artificial Sequence: Synthetic peptide
  Seed: GMDPRMCSLMQGSTL
GMDMRMMSFMQASTL

SEQ ID NO: 74440 - protein, 15 aa, Artificial Sequence
  Description of Artificial Sequence: Synthetic peptide
  Seed: GMDPRMCSLMQGSTL
GMDMRMMSGMQASTL

SEQ ID NO: 74441 - protein, 15 aa, Artificial Sequence
  Description of Artificial Sequence: Synthetic peptide
  Seed: GMDPRMCSLMQGSTL
GMDMRMMSGMQHSTL

SEQ ID NO: 74442 - protein, 15 aa, Artificial Sequence
  Description of Artificial Sequence: Synthetic peptide
  Seed: GMDPRMCSLMQGSTL
GMDMRMMSGMQISTL

SEQ ID NO: 74443 - protein, 15 aa, Artificial Sequence
  Description of Artificial Sequence: Synthetic peptide
  Seed: GMDPRMCSLMQGSTL
GMDMRMMSGMQLSTL

SEQ ID NO: 74444 - protein, 15 aa, Artificial Sequence
  Description of Artificial Sequence: Synthetic peptide
  Seed: GMDPRMCSLMQGSTL
GMDMRMMSGMQMSTL

SEQ ID NO: 74445 - protein, 15 aa, Artificial Sequence
  Description of Artificial Sequence: Synthetic peptide
  Seed: GMDPRMCSLMQGSTL
GMDMRMMSGMQNSTL

SEQ ID NO: 74446 - protein, 15 aa, Artificial Sequence
  Description of Artificial Sequence: Synthetic peptide
  Seed: GMDPRMCSLMQGSTL
GMDMRMMSGMQSSTL

SEQ ID NO: 74447 - protein, 15 aa, Artificial Sequence
  Description of Artificial Sequence: Synthetic peptide
  Seed: GMDPRMCSLMQGSTL
GMDMRMMSGMQTSTL

SEQ ID NO: 74448 - protein, 15 aa, Artificial Sequence
  Description of Artificial Sequence: Synthetic peptide
  Seed: GMDPRMCSLMQGSTL
GMDMRMMSGMQVSTL

SEQ ID NO: 74449 - protein, 15 aa, Artificial Sequence
  Description of Artificial Sequence: Synthetic peptide
  Seed: GMDPRMCSLMQGSTL
GMDMRMMSIMQASTL

SEQ ID NO: 74450 - protein, 15 aa, Artificial Sequence
  Description of Artificial Sequence: Synthetic peptide
  Seed: GMDPRMCSLMQGSTL
GMDMRMMSIMQGSTL

SEQ ID NO: 74451 - protein, 15 aa, Artificial Sequence
  Description of Artificial Sequence: Synthetic peptide
  Seed: GMDPRMCSLMQGSTL
GMDMRMMSIMQHSTL

SEQ ID NO: 74452 - protein, 15 aa, Artificial Sequence
  Description of Artificial Sequence: Synthetic peptide
  Seed: GMDPRMCSLMQGSTL
GMDMRMMSIMQISTL

SEQ ID NO: 74453 - protein, 15 aa, Artificial Sequence
  Description of Artificial Sequence: Synthetic peptide
  Seed: GMDPRMCSLMQGSTL
GMDMRMMSIMQLSTL

SEQ ID NO: 74454 - protein, 15 aa, Artificial Sequence
  Description of Artificial Sequence: Synthetic peptide
  Seed: GMDPRMCSLMQGSTL
GMDMRMMSIMQMSTL

SEQ ID NO: 74455 - protein, 15 aa, Artificial Sequence
  Description of Artificial Sequence: Synthetic peptide
  Seed: GMDPRMCSLMQGSTL
GMDMRMMSIMQNSTL

SEQ ID NO: 74456 - protein, 15 aa, Artificial Sequence
  Description of Artificial Sequence: Synthetic peptide
  Seed: GMDPRMCSLMQGSTL
GMDMRMMSIMQQSTL

SEQ ID NO: 74457 - protein, 15 aa, Artificial Sequence
  Description of Artificial Sequence: Synthetic peptide
  Seed: GMDPRMCSLMQGSTL
GMDMRMMSIMQSSTL

SEQ ID NO: 74458 - protein, 15 aa, Artificial Sequence
  Description of Artificial Sequence: Synthetic peptide
  Seed: GMDPRMCSLMQGSTL
GMDMRMMSIMQTSTL

SEQ ID NO: 74459 - protein, 15 aa, Artificial Sequence
  Description of Artificial Sequence: Synthetic peptide
  Seed: GMDPRMCSLMQGSTL
GMDMRMMSIMQVSTL

SEQ ID NO: 74460 - protein, 15 aa, Artificial Sequence
  Description of Artificial Sequence: Synthetic peptide
  Seed: GMDPRMCSLMQGSTL
GMDMRMMSLMQASTL

SEQ ID NO: 74461 - protein, 15 aa, Artificial Sequence
  Description of Artificial Sequence: Synthetic peptide
  Seed: GMDPRMCSLMQGSTL
GMDMRMMSLMQHSTL

SEQ ID NO: 74462 - protein, 15 aa, Artificial Sequence
  Description of Artificial Sequence: Synthetic peptide
  Seed: GMDPRMCSLMQGSTL
GMDMRMMSLMQMSTL

SEQ ID NO: 74463 - protein, 15 aa, Artificial Sequence
  Description of Artificial Sequence: Synthetic peptide
  Seed: GMDPRMCSLMQGSTL
GMDMRMMSLMQNSTL

SEQ ID NO: 74464 - protein, 15 aa, Artificial Sequence
  Description of Artificial Sequence: Synthetic peptide
  Seed: GMDPRMCSLMQGSTL
GMDMRMMSLMQSSTL

SEQ ID NO: 74465 - protein, 15 aa, Artificial Sequence
  Description of Artificial Sequence: Synthetic peptide
  Seed: GMDPRMCSLMQGSTL
GMDMRMMSLMQTSTL

SEQ ID NO: 74466 - protein, 15 aa, Artificial Sequence
  Description of Artificial Sequence: Synthetic peptide
  Seed: GMDPRMCSLMQGSTL
GMDMRMMSLMQVSTL

SEQ ID NO: 74467 - protein, 15 aa, Artificial Sequence
  Description of Artificial Sequence: Synthetic peptide
  Seed: GMDPRMCSLMQGSTL
GMDMRMMSMMQASTL

SEQ ID NO: 74468 - protein, 15 aa, Artificial Sequence
  Description of Artificial Sequence: Synthetic peptide
  Seed: GMDPRMCSLMQGSTL
GMDMRMMSMMQHSTL

SEQ ID NO: 74469 - protein, 15 aa, Artificial Sequence
  Description of Artificial Sequence: Synthetic peptide
  Seed: GMDPRMCSLMQGSTL
GMDMRMMSMMQNSTL

SEQ ID NO: 74470 - protein, 15 aa, Artificial Sequence
  Description of Artificial Sequence: Synthetic peptide
  Seed: GMDPRMCSLMQGSTL
GMDMRMMSMMQSSTL

SEQ ID NO: 74471 - protein, 15 aa, Artificial Sequence
  Description of Artificial Sequence: Synthetic peptide
  Seed: GMDPRMCSLMQGSTL
GMDMRMMSMMQTSTL

SEQ ID NO: 74472 - protein, 15 aa, Artificial Sequence
  Description of Artificial Sequence: Synthetic peptide
  Seed: GMDPRMCSLMQGSTL
GMDMRMMSMMQVSTL

SEQ ID NO: 74473 - protein, 15 aa, Artificial Sequence
  Description of Artificial Sequence: Synthetic peptide
  Seed: GMDPRMCSLMQGSTL
GMDMRMMSNMQASTL

SEQ ID NO: 74474 - protein, 15 aa, Artificial Sequence
  Description of Artificial Sequence: Synthetic peptide
  Seed: GMDPRMCSLMQGSTL
GMDMRMMSNMQNSTL

SEQ ID NO: 74475 - protein, 15 aa, Artificial Sequence
  Description of Artificial Sequence: Synthetic peptide
  Seed: GMDPRMCSLMQGSTL
GMDMRMMSNMQSSTL

SEQ ID NO: 74476 - protein, 15 aa, Artificial Sequence
  Description of Artificial Sequence: Synthetic peptide
  Seed: GMDPRMCSLMQGSTL
GMDMRMMSNMQTSTL

SEQ ID NO: 74477 - protein, 15 aa, Artificial Sequence
  Description of Artificial Sequence: Synthetic peptide
  Seed: GMDPRMCSLMQGSTL
GMDMRMMSPMQASTL

SEQ ID NO: 74478 - protein, 15 aa, Artificial Sequence
  Description of Artificial Sequence: Synthetic peptide
  Seed: GMDPRMCSLMQGSTL
GMDMRMMSPMQGSTL

SEQ ID NO: 74479 - protein, 15 aa, Artificial Sequence
  Description of Artificial Sequence: Synthetic peptide
  Seed: GMDPRMCSLMQGSTL
GMDMRMMSPMQHSTL

SEQ ID NO: 74480 - protein, 15 aa, Artificial Sequence
  Description of Artificial Sequence: Synthetic peptide
  Seed: GMDPRMCSLMQGSTL
GMDMRMMSPMQISTL

SEQ ID NO: 74481 - protein, 15 aa, Artificial Sequence
  Description of Artificial Sequence: Synthetic peptide
  Seed: GMDPRMCSLMQGSTL
GMDMRMMSPMQLSTL

SEQ ID NO: 74482 - protein, 15 aa, Artificial Sequence
  Description of Artificial Sequence: Synthetic peptide
  Seed: GMDPRMCSLMQGSTL
GMDMRMMSPMQMSTL

SEQ ID NO: 74483 - protein, 15 aa, Artificial Sequence
  Description of Artificial Sequence: Synthetic peptide
  Seed: GMDPRMCSLMQGSTL
GMDMRMMSPMQNSTL

SEQ ID NO: 74484 - protein, 15 aa, Artificial Sequence
  Description of Artificial Sequence: Synthetic peptide
  Seed: GMDPRMCSLMQGSTL
GMDMRMMSPMQQSTL

SEQ ID NO: 74485 - protein, 15 aa, Artificial Sequence
  Description of Artificial Sequence: Synthetic peptide
  Seed: GMDPRMCSLMQGSTL
GMDMRMMSPMQSSTL

SEQ ID NO: 74486 - protein, 15 aa, Artificial Sequence
  Description of Artificial Sequence: Synthetic peptide
  Seed: GMDPRMCSLMQGSTL
GMDMRMMSPMQTSTL

SEQ ID NO: 74487 - protein, 15 aa, Artificial Sequence
  Description of Artificial Sequence: Synthetic peptide
  Seed: GMDPRMCSLMQGSTL
GMDMRMMSPMQVSTL

SEQ ID NO: 74488 - protein, 15 aa, Artificial Sequence
  Description of Artificial Sequence: Synthetic peptide
  Seed: GMDPRMCSLMQGSTL
GMDMRMMSSMQASTL

SEQ ID NO: 74489 - protein, 15 aa, Artificial Sequence
  Description of Artificial Sequence: Synthetic peptide
  Seed: GMDPRMCSLMQGSTL
GMDMRMMSSMQGSTL

SEQ ID NO: 74490 - protein, 15 aa, Artificial Sequence
  Description of Artificial Sequence: Synthetic peptide
  Seed: GMDPRMCSLMQGSTL
GMDMRMMSSMQHSTL

SEQ ID NO: 74491 - protein, 15 aa, Artificial Sequence
  Description of Artificial Sequence: Synthetic peptide
  Seed: GMDPRMCSLMQGSTL
GMDMRMMSSMQISTL

SEQ ID NO: 74492 - protein, 15 aa, Artificial Sequence
  Description of Artificial Sequence: Synthetic peptide
  Seed: GMDPRMCSLMQGSTL
GMDMRMMSSMQLSTL

SEQ ID NO: 74493 - protein, 15 aa, Artificial Sequence
  Description of Artificial Sequence: Synthetic peptide
  Seed: GMDPRMCSLMQGSTL
GMDMRMMSSMQMSTL

SEQ ID NO: 74494 - protein, 15 aa, Artificial Sequence
  Description of Artificial Sequence: Synthetic peptide
  Seed: GMDPRMCSLMQGSTL
GMDMRMMSSMQNSTL

SEQ ID NO: 74495 - protein, 15 aa, Artificial Sequence
  Description of Artificial Sequence: Synthetic peptide
  Seed: GMDPRMCSLMQGSTL
GMDMRMMSSMQSSTL

SEQ ID NO: 74496 - protein, 15 aa, Artificial Sequence
  Description of Artificial Sequence: Synthetic peptide
  Seed: GMDPRMCSLMQGSTL
GMDMRMMSSMQTSTL

SEQ ID NO: 74497 - protein, 15 aa, Artificial Sequence
  Description of Artificial Sequence: Synthetic peptide
  Seed: GMDPRMCSLMQGSTL
GMDMRMMSSMQVSTL

SEQ ID NO: 74498 - protein, 15 aa, Artificial Sequence
  Description of Artificial Sequence: Synthetic peptide
  Seed: GMDPRMCSLMQGSTL
GMDMRMMSTMQASTL

SEQ ID NO: 74499 - protein, 15 aa, Artificial Sequence
  Description of Artificial Sequence: Synthetic peptide
  Seed: GMDPRMCSLMQGSTL
GMDMRMMSTMQHSTL

SEQ ID NO: 74500 - protein, 15 aa, Artificial Sequence
  Description of Artificial Sequence: Synthetic peptide
  Seed: GMDPRMCSLMQGSTL
GMDMRMMSTMQISTL

SEQ ID NO: 74501 - protein, 15 aa, Artificial Sequence
  Description of Artificial Sequence: Synthetic peptide
  Seed: GMDPRMCSLMQGSTL
GMDMRMMSTMQLSTL

SEQ ID NO: 74502 - protein, 15 aa, Artificial Sequence
  Description of Artificial Sequence: Synthetic peptide
  Seed: GMDPRMCSLMQGSTL
GMDMRMMSTMQMSTL

SEQ ID NO: 74503 - protein, 15 aa, Artificial Sequence
  Description of Artificial Sequence: Synthetic peptide
  Seed: GMDPRMCSLMQGSTL
GMDMRMMSTMQNSTL

SEQ ID NO: 74504 - protein, 15 aa, Artificial Sequence
  Description of Artificial Sequence: Synthetic peptide
  Seed: GMDPRMCSLMQGSTL
GMDMRMMSTMQSSTL

SEQ ID NO: 74505 - protein, 15 aa, Artificial Sequence
  Description of Artificial Sequence: Synthetic peptide
  Seed: GMDPRMCSLMQGSTL
GMDMRMMSTMQTSTL

SEQ ID NO: 74506 - protein, 15 aa, Artificial Sequence
  Description of Artificial Sequence: Synthetic peptide
  Seed: GMDPRMCSLMQGSTL
GMDMRMMSTMQVSTL

SEQ ID NO: 74507 - protein, 15 aa, Artificial Sequence
  Description of Artificial Sequence: Synthetic peptide
  Seed: GMDPRMCSLMQGSTL
GMDMRMMSVMQASTL

SEQ ID NO: 74508 - protein, 15 aa, Artificial Sequence
  Description of Artificial Sequence: Synthetic peptide
  Seed: GMDPRMCSLMQGSTL
GMDMRMMSVMQGSTL

SEQ ID NO: 74509 - protein, 15 aa, Artificial Sequence
  Description of Artificial Sequence: Synthetic peptide
  Seed: GMDPRMCSLMQGSTL
GMDMRMMSVMQHSTL

SEQ ID NO: 74510 - protein, 15 aa, Artificial Sequence
  Description of Artificial Sequence: Synthetic peptide
  Seed: GMDPRMCSLMQGSTL
GMDMRMMSVMQISTL

SEQ ID NO: 74511 - protein, 15 aa, Artificial Sequence
  Description of Artificial Sequence: Synthetic peptide
  Seed: GMDPRMCSLMQGSTL
GMDMRMMSVMQLSTL

SEQ ID NO: 74512 - protein, 15 aa, Artificial Sequence
  Description of Artificial Sequence: Synthetic peptide
  Seed: GMDPRMCSLMQGSTL
GMDMRMMSVMQMSTL

SEQ ID NO: 74513 - protein, 15 aa, Artificial Sequence
  Description of Artificial Sequence: Synthetic peptide
  Seed: GMDPRMCSLMQGSTL
GMDMRMMSVMQNSTL

SEQ ID NO: 74514 - protein, 15 aa, Artificial Sequence
  Description of Artificial Sequence: Synthetic peptide
  Seed: GMDPRMCSLMQGSTL
GMDMRMMSVMQQSTL

SEQ ID NO: 74515 - protein, 15 aa, Artificial Sequence
  Description of Artificial Sequence: Synthetic peptide
  Seed: GMDPRMCSLMQGSTL
GMDMRMMSVMQSSTL

SEQ ID NO: 74516 - protein, 15 aa, Artificial Sequence
  Description of Artificial Sequence: Synthetic peptide
  Seed: GMDPRMCSLMQGSTL
GMDMRMMSVMQTSTL

SEQ ID NO: 74517 - protein, 15 aa, Artificial Sequence
  Description of Artificial Sequence: Synthetic peptide
  Seed: GMDPRMCSLMQGSTL
GMDMRMMSVMQVSTL

SEQ ID NO: 74518 - protein, 15 aa, Artificial Sequence
  Description of Artificial Sequence: Synthetic peptide
  Seed: GMDPRMCSLMQGSTL
GMDMRMQSAMQASTL

SEQ ID NO: 74519 - protein, 15 aa, Artificial Sequence
  Description of Artificial Sequence: Synthetic peptide
  Seed: GMDPRMCSLMQGSTL
GMDMRMQSAMQNSTL

SEQ ID NO: 74520 - protein, 15 aa, Artificial Sequence
  Description of Artificial Sequence: Synthetic peptide
  Seed: GMDPRMCSLMQGSTL
GMDMRMQSAMQSSTL

SEQ ID NO: 74521 - protein, 15 aa, Artificial Sequence
  Description of Artificial Sequence: Synthetic peptide
  Seed: GMDPRMCSLMQGSTL
GMDMRMQSIMQASTL

SEQ ID NO: 74522 - protein, 15 aa, Artificial Sequence
  Description of Artificial Sequence: Synthetic peptide
  Seed: GMDPRMCSLMQGSTL
GMDMRMQSVMQASTL

SEQ ID NO: 74523 - protein, 15 aa, Artificial Sequence
  Description of Artificial Sequence: Synthetic peptide
  Seed: GMDPRMCSLMQGSTL
GMDMRMQSVMQSSTL

SEQ ID NO: 74524 - protein, 15 aa, Artificial Sequence
  Description of Artificial Sequence: Synthetic peptide
  Seed: GMDPRMCSLMQGSTL
GMDMRMSSAMQSSTL

SEQ ID NO: 74525 - protein, 15 aa, Artificial Sequence
  Description of Artificial Sequence: Synthetic peptide
  Seed: GMDPRMCSLMQGSTL
GMDMRMVSAMQASTL

SEQ ID NO: 74526 - protein, 15 aa, Artificial Sequence
  Description of Artificial Sequence: Synthetic peptide
  Seed: GMDPRMCSLMQGSTL
GMDMRMVSAMQNSTL

SEQ ID NO: 74527 - protein, 15 aa, Artificial Sequence
  Description of Artificial Sequence: Synthetic peptide
  Seed: GMDPRMCSLMQGSTL
GMDMRMVSAMQSSTL

SEQ ID NO: 74528 - protein, 15 aa, Artificial Sequence
  Description of Artificial Sequence: Synthetic peptide
  Seed: GMDPRMCSLMQGSTL
GMDMRMVSIMQASTL

SEQ ID NO: 74529 - protein, 15 aa, Artificial Sequence
  Description of Artificial Sequence: Synthetic peptide
  Seed: GMDPRMCSLMQGSTL
GMDMRMVSIMQSSTL

SEQ ID NO: 74530 - protein, 15 aa, Artificial Sequence
  Description of Artificial Sequence: Synthetic peptide
  Seed: GMDPRMCSLMQGSTL
GMDMRMVSLMQASTL

SEQ ID NO: 74531 - protein, 15 aa, Artificial Sequence
  Description of Artificial Sequence: Synthetic peptide
  Seed: GMDPRMCSLMQGSTL
GMDMRMVSMMQASTL

SEQ ID NO: 74532 - protein, 15 aa, Artificial Sequence
  Description of Artificial Sequence: Synthetic peptide
  Seed: GMDPRMCSLMQGSTL
GMDMRMVSPMQASTL

SEQ ID NO: 74533 - protein, 15 aa, Artificial Sequence
  Description of Artificial Sequence: Synthetic peptide
  Seed: GMDPRMCSLMQGSTL
GMDMRMVSPMQNSTL

SEQ ID NO: 74534 - protein, 15 aa, Artificial Sequence
  Description of Artificial Sequence: Synthetic peptide
  Seed: GMDPRMCSLMQGSTL
GMDMRMVSPMQSSTL

SEQ ID NO: 74535 - protein, 15 aa, Artificial Sequence
  Description of Artificial Sequence: Synthetic peptide
  Seed: GMDPRMCSLMQGSTL
GMDMRMVSSMQASTL

SEQ ID NO: 74536 - protein, 15 aa, Artificial Sequence
  Description of Artificial Sequence: Synthetic peptide
  Seed: GMDPRMCSLMQGSTL
GMDMRMVSSMQNSTL

SEQ ID NO: 74537 - protein, 15 aa, Artificial Sequence
  Description of Artificial Sequence: Synthetic peptide
  Seed: GMDPRMCSLMQGSTL
GMDMRMVSSMQSSTL

SEQ ID NO: 74538 - protein, 15 aa, Artificial Sequence
  Description of Artificial Sequence: Synthetic peptide
  Seed: GMDPRMCSLMQGSTL
GMDMRMVSTMQNSTL

SEQ ID NO: 74539 - protein, 15 aa, Artificial Sequence
  Description of Artificial Sequence: Synthetic peptide
  Seed: GMDPRMCSLMQGSTL
GMDMRMVSVMQASTL

SEQ ID NO: 74540 - protein, 15 aa, Artificial Sequence
  Description of Artificial Sequence: Synthetic peptide
  Seed: GMDPRMCSLMQGSTL
GMDMRMVSVMQNSTL

SEQ ID NO: 74541 - protein, 15 aa, Artificial Sequence
  Description of Artificial Sequence: Synthetic peptide
  Seed: GMDPRMCSLMQGSTL
GMDMRMVSVMQSSTL

SEQ ID NO: 74542 - protein, 15 aa, Artificial Sequence
  Description of Artificial Sequence: Synthetic peptide
  Seed: GMDPRMCSLMQGSTL
GMDMRMWSAMQASTL

SEQ ID NO: 74543 - protein, 15 aa, Artificial Sequence
  Description of Artificial Sequence: Synthetic peptide
  Seed: GMDPRMCSLMQGSTL
GMDMRMWSAMQSSTL

SEQ ID NO: 74544 - protein, 15 aa, Artificial Sequence
  Description of Artificial Sequence: Synthetic peptide
  Seed: GMDPRMCSLMQGSTL
GMDMRMWSAMQTSTL

SEQ ID NO: 74545 - protein, 15 aa, Artificial Sequence
  Description of Artificial Sequence: Synthetic peptide
  Seed: GMDPRMCSLMQGSTL
GMDMRMWSIMQASTL

SEQ ID NO: 74546 - protein, 15 aa, Artificial Sequence
  Description of Artificial Sequence: Synthetic peptide
  Seed: GMDPRMCSLMQGSTL
GMDMRMWSIMQSSTL

SEQ ID NO: 74547 - protein, 15 aa, Artificial Sequence
  Description of Artificial Sequence: Synthetic peptide
  Seed: GMDPRMCSLMQGSTL
GMDMRMWSLMQSSTL

SEQ ID NO: 74548 - protein, 15 aa, Artificial Sequence
  Description of Artificial Sequence: Synthetic peptide
  Seed: GMDPRMCSLMQGSTL
GMDMRMWSVMQASTL

SEQ ID NO: 74549 - protein, 15 aa, Artificial Sequence
  Description of Artificial Sequence: Synthetic peptide
  Seed: GMDPRMCSLMQGSTL
GMDMRMWSVMQSSTL

SEQ ID NO: 74550 - protein, 15 aa, Artificial Sequence
  Description of Artificial Sequence: Synthetic peptide
  Seed: GMDPRMCSLMQGSTL
GMDMRMYSAMQSSTL

SEQ ID NO: 74551 - protein, 15 aa, Artificial Sequence
  Description of Artificial Sequence: Synthetic peptide
  Seed: GMDPRMCSLMQGSTL
GMDMRMYSPMQASTL

SEQ ID NO: 74552 - protein, 15 aa, Artificial Sequence
  Description of Artificial Sequence: Synthetic peptide
  Seed: GMDPRMCSLMQGSTL
GMDMRMYSTMQASTL

SEQ ID NO: 74553 - protein, 15 aa, Artificial Sequence
  Description of Artificial Sequence: Synthetic peptide
  Seed: GMDPRMCSLMQGSTL
GMDMRMYSVMQGSTL

SEQ ID NO: 74554 - protein, 15 aa, Artificial Sequence
  Description of Artificial Sequence: Synthetic peptide
  Seed: GMDPRMCSLMQGSTL
GMDMRMYSVMQNSTL

SEQ ID NO: 74555 - protein, 15 aa, Artificial Sequence
  Description of Artificial Sequence: Synthetic peptide
  Seed: GMDPRMCSLMQGSTL
GMDMRMYSVMQSSTL

SEQ ID NO: 74556 - protein, 15 aa, Artificial Sequence
  Description of Artificial Sequence: Synthetic peptide
  Seed: GMDPRMCSLMQGSTL
GMDMRMYSVMQVSTL

SEQ ID NO: 74557 - protein, 15 aa, Artificial Sequence
  Description of Artificial Sequence: Synthetic peptide
  Seed: GMDPRMCSLMQGSTL
GMDRRMFSAMQMSTL

SEQ ID NO: 74558 - protein, 15 aa, Artificial Sequence
  Description of Artificial Sequence: Synthetic peptide
  Seed: GMDPRMCSLMQGSTL
GMDRRMLSAMQASTL

SEQ ID NO: 74559 - protein, 15 aa, Artificial Sequence
  Description of Artificial Sequence: Synthetic peptide
  Seed: GMDPRMCSLMQGSTL
GMDVRMASAMQASTL

SEQ ID NO: 74560 - protein, 15 aa, Artificial Sequence
  Description of Artificial Sequence: Synthetic peptide
  Seed: GMDPRMCSLMQGSTL
GMDVRMASAMQNSTL

SEQ ID NO: 74561 - protein, 15 aa, Artificial Sequence
  Description of Artificial Sequence: Synthetic peptide
  Seed: GMDPRMCSLMQGSTL
GMDVRMASAMQSSTL

SEQ ID NO: 74562 - protein, 15 aa, Artificial Sequence
  Description of Artificial Sequence: Synthetic peptide
  Seed: GMDPRMCSLMQGSTL
GMDVRMASSMQNSTL

SEQ ID NO: 74563 - protein, 15 aa, Artificial Sequence
  Description of Artificial Sequence: Synthetic peptide
  Seed: GMDPRMCSLMQGSTL
GMDVRMASVMQNSTL

SEQ ID NO: 74564 - protein, 15 aa, Artificial Sequence
  Description of Artificial Sequence: Synthetic peptide
  Seed: GMDPRMCSLMQGSTL
GMDVRMASVMQSSTL

SEQ ID NO: 74565 - protein, 15 aa, Artificial Sequence
  Description of Artificial Sequence: Synthetic peptide
  Seed: GMDPRMCSLMQGSTL
GMDVRMFSAMQASTL

SEQ ID NO: 74566 - protein, 15 aa, Artificial Sequence
  Description of Artificial Sequence: Synthetic peptide
  Seed: GMDPRMCSLMQGSTL
GMDVRMFSAMQGSTL

SEQ ID NO: 74567 - protein, 15 aa, Artificial Sequence
  Description of Artificial Sequence: Synthetic peptide
  Seed: GMDPRMCSLMQGSTL
GMDVRMFSAMQHSTL

SEQ ID NO: 74568 - protein, 15 aa, Artificial Sequence
  Description of Artificial Sequence: Synthetic peptide
  Seed: GMDPRMCSLMQGSTL
GMDVRMFSAMQISTL

SEQ ID NO: 74569 - protein, 15 aa, Artificial Sequence
  Description of Artificial Sequence: Synthetic peptide
  Seed: GMDPRMCSLMQGSTL
GMDVRMFSAMQLSTL

SEQ ID NO: 74570 - protein, 15 aa, Artificial Sequence
  Description of Artificial Sequence: Synthetic peptide
  Seed: GMDPRMCSLMQGSTL
GMDVRMFSAMQMSTL

SEQ ID NO: 74571 - protein, 15 aa, Artificial Sequence
  Description of Artificial Sequence: Synthetic peptide
  Seed: GMDPRMCSLMQGSTL
GMDVRMFSAMQNSTL

SEQ ID NO: 74572 - protein, 15 aa, Artificial Sequence
  Description of Artificial Sequence: Synthetic peptide
  Seed: GMDPRMCSLMQGSTL
GMDVRMFSAMQSSTL

SEQ ID NO: 74573 - protein, 15 aa, Artificial Sequence
  Description of Artificial Sequence: Synthetic peptide
  Seed: GMDPRMCSLMQGSTL
GMDVRMFSAMQVSTL

SEQ ID NO: 74574 - protein, 15 aa, Artificial Sequence
  Description of Artificial Sequence: Synthetic peptide
  Seed: GMDPRMCSLMQGSTL
GMDVRMFSGMQASTL

SEQ ID NO: 74575 - protein, 15 aa, Artificial Sequence
  Description of Artificial Sequence: Synthetic peptide
  Seed: GMDPRMCSLMQGSTL
GMDVRMFSIMQNSTL

SEQ ID NO: 74576 - protein, 15 aa, Artificial Sequence
  Description of Artificial Sequence: Synthetic peptide
  Seed: GMDPRMCSLMQGSTL
GMDVRMFSMMQMSTL

SEQ ID NO: 74577 - protein, 15 aa, Artificial Sequence
  Description of Artificial Sequence: Synthetic peptide
  Seed: GMDPRMCSLMQGSTL
GMDVRMFSNMQASTL

SEQ ID NO: 74578 - protein, 15 aa, Artificial Sequence
  Description of Artificial Sequence: Synthetic peptide
  Seed: GMDPRMCSLMQGSTL
GMDVRMFSPMQASTL

SEQ ID NO: 74579 - protein, 15 aa, Artificial Sequence
  Description of Artificial Sequence: Synthetic peptide
  Seed: GMDPRMCSLMQGSTL
GMDVRMFSPMQNSTL

SEQ ID NO: 74580 - protein, 15 aa, Artificial Sequence
  Description of Artificial Sequence: Synthetic peptide
  Seed: GMDPRMCSLMQGSTL
GMDVRMFSPMQSSTL

SEQ ID NO: 74581 - protein, 15 aa, Artificial Sequence
  Description of Artificial Sequence: Synthetic peptide
  Seed: GMDPRMCSLMQGSTL
GMDVRMFSPMQTSTL

SEQ ID NO: 74582 - protein, 15 aa, Artificial Sequence
  Description of Artificial Sequence: Synthetic peptide
  Seed: GMDPRMCSLMQGSTL
GMDVRMFSPMQVSTL

SEQ ID NO: 74583 - protein, 15 aa, Artificial Sequence
  Description of Artificial Sequence: Synthetic peptide
  Seed: GMDPRMCSLMQGSTL
GMDVRMFSSMQASTL

SEQ ID NO: 74584 - protein, 15 aa, Artificial Sequence
  Description of Artificial Sequence: Synthetic peptide
  Seed: GMDPRMCSLMQGSTL
GMDVRMFSSMQGSTL

SEQ ID NO: 74585 - protein, 15 aa, Artificial Sequence
  Description of Artificial Sequence: Synthetic peptide
  Seed: GMDPRMCSLMQGSTL
GMDVRMFSSMQNSTL

SEQ ID NO: 74586 - protein, 15 aa, Artificial Sequence
  Description of Artificial Sequence: Synthetic peptide
  Seed: GMDPRMCSLMQGSTL
GMDVRMFSSMQSSTL

SEQ ID NO: 74587 - protein, 15 aa, Artificial Sequence
  Description of Artificial Sequence: Synthetic peptide
  Seed: GMDPRMCSLMQGSTL
GMDVRMFSTMQASTL

SEQ ID NO: 74588 - protein, 15 aa, Artificial Sequence
  Description of Artificial Sequence: Synthetic peptide
  Seed: GMDPRMCSLMQGSTL
GMDVRMFSTMQSSTL

SEQ ID NO: 74589 - protein, 15 aa, Artificial Sequence
  Description of Artificial Sequence: Synthetic peptide
  Seed: GMDPRMCSLMQGSTL
GMDVRMFSTMQTSTL

SEQ ID NO: 74590 - protein, 15 aa, Artificial Sequence
  Description of Artificial Sequence: Synthetic peptide
  Seed: GMDPRMCSLMQGSTL
GMDVRMFSVMQASTL

SEQ ID NO: 74591 - protein, 15 aa, Artificial Sequence
  Description of Artificial Sequence: Synthetic peptide
  Seed: GMDPRMCSLMQGSTL
GMDVRMFSVMQGSTL

SEQ ID NO: 74592 - protein, 15 aa, Artificial Sequence
  Description of Artificial Sequence: Synthetic peptide
  Seed: GMDPRMCSLMQGSTL
GMDVRMFSVMQNSTL

SEQ ID NO: 74593 - protein, 15 aa, Artificial Sequence
  Description of Artificial Sequence: Synthetic peptide
  Seed: GMDPRMCSLMQGSTL
GMDVRMFSVMQSSTL

SEQ ID NO: 74594 - protein, 15 aa, Artificial Sequence
  Description of Artificial Sequence: Synthetic peptide
  Seed: GMDPRMCSLMQGSTL
GMDVRMFSVMQVSTL

SEQ ID NO: 74595 - protein, 15 aa, Artificial Sequence
  Description of Artificial Sequence: Synthetic peptide
  Seed: GMDPRMCSLMQGSTL
GMDVRMISAMQASTL

SEQ ID NO: 74596 - protein, 15 aa, Artificial Sequence
  Description of Artificial Sequence: Synthetic peptide
  Seed: GMDPRMCSLMQGSTL
GMDVRMISAMQHSTL

SEQ ID NO: 74597 - protein, 15 aa, Artificial Sequence
  Description of Artificial Sequence: Synthetic peptide
  Seed: GMDPRMCSLMQGSTL
GMDVRMISAMQMSTL

SEQ ID NO: 74598 - protein, 15 aa, Artificial Sequence
  Description of Artificial Sequence: Synthetic peptide
  Seed: GMDPRMCSLMQGSTL
GMDVRMISAMQNSTL

SEQ ID NO: 74599 - protein, 15 aa, Artificial Sequence
  Description of Artificial Sequence: Synthetic peptide
  Seed: GMDPRMCSLMQGSTL
GMDVRMISAMQSSTL

SEQ ID NO: 74600 - protein, 15 aa, Artificial Sequence
  Description of Artificial Sequence: Synthetic peptide
  Seed: GMDPRMCSLMQGSTL
GMDVRMISAMQTSTL

SEQ ID NO: 74601 - protein, 15 aa, Artificial Sequence
  Description of Artificial Sequence: Synthetic peptide
  Seed: GMDPRMCSLMQGSTL
GMDVRMISAMQVSTL

SEQ ID NO: 74602 - protein, 15 aa, Artificial Sequence
  Description of Artificial Sequence: Synthetic peptide
  Seed: GMDPRMCSLMQGSTL
GMDVRMISIMQASTL

SEQ ID NO: 74603 - protein, 15 aa, Artificial Sequence
  Description of Artificial Sequence: Synthetic peptide
  Seed: GMDPRMCSLMQGSTL
GMDVRMISIMQSSTL

SEQ ID NO: 74604 - protein, 15 aa, Artificial Sequence
  Description of Artificial Sequence: Synthetic peptide
  Seed: GMDPRMCSLMQGSTL
GMDVRMISLMQASTL

SEQ ID NO: 74605 - protein, 15 aa, Artificial Sequence
  Description of Artificial Sequence: Synthetic peptide
  Seed: GMDPRMCSLMQGSTL
GMDVRMISMMQASTL

SEQ ID NO: 74606 - protein, 15 aa, Artificial Sequence
  Description of Artificial Sequence: Synthetic peptide
  Seed: GMDPRMCSLMQGSTL
GMDVRMISMMQSSTL

SEQ ID NO: 74607 - protein, 15 aa, Artificial Sequence
  Description of Artificial Sequence: Synthetic peptide
  Seed: GMDPRMCSLMQGSTL
GMDVRMISPMQASTL

SEQ ID NO: 74608 - protein, 15 aa, Artificial Sequence
  Description of Artificial Sequence: Synthetic peptide
  Seed: GMDPRMCSLMQGSTL
GMDVRMISPMQNSTL

SEQ ID NO: 74609 - protein, 15 aa, Artificial Sequence
  Description of Artificial Sequence: Synthetic peptide
  Seed: GMDPRMCSLMQGSTL
GMDVRMISPMQSSTL

SEQ ID NO: 74610 - protein, 15 aa, Artificial Sequence
  Description of Artificial Sequence: Synthetic peptide
  Seed: GMDPRMCSLMQGSTL
GMDVRMISSMQASTL

SEQ ID NO: 74611 - protein, 15 aa, Artificial Sequence
  Description of Artificial Sequence: Synthetic peptide
  Seed: GMDPRMCSLMQGSTL
GMDVRMISSMQNSTL

SEQ ID NO: 74612 - protein, 15 aa, Artificial Sequence
  Description of Artificial Sequence: Synthetic peptide
  Seed: GMDPRMCSLMQGSTL
GMDVRMISSMQSSTL

SEQ ID NO: 74613 - protein, 15 aa, Artificial Sequence
  Description of Artificial Sequence: Synthetic peptide
  Seed: GMDPRMCSLMQGSTL
GMDVRMISTMQASTL

SEQ ID NO: 74614 - protein, 15 aa, Artificial Sequence
  Description of Artificial Sequence: Synthetic peptide
  Seed: GMDPRMCSLMQGSTL
GMDVRMISTMQNSTL

SEQ ID NO: 74615 - protein, 15 aa, Artificial Sequence
  Description of Artificial Sequence: Synthetic peptide
  Seed: GMDPRMCSLMQGSTL
GMDVRMISTMQSSTL

SEQ ID NO: 74616 - protein, 15 aa, Artificial Sequence
  Description of Artificial Sequence: Synthetic peptide
  Seed: GMDPRMCSLMQGSTL
GMDVRMISVMQASTL

SEQ ID NO: 74617 - protein, 15 aa, Artificial Sequence
  Description of Artificial Sequence: Synthetic peptide
  Seed: GMDPRMCSLMQGSTL
GMDVRMISVMQNSTL

SEQ ID NO: 74618 - protein, 15 aa, Artificial Sequence
  Description of Artificial Sequence: Synthetic peptide
  Seed: GMDPRMCSLMQGSTL
GMDVRMISVMQSSTL

SEQ ID NO: 74619 - protein, 15 aa, Artificial Sequence
  Description of Artificial Sequence: Synthetic peptide
  Seed: GMDPRMCSLMQGSTL
GMDVRMLSAMQASTL

SEQ ID NO: 74620 - protein, 15 aa, Artificial Sequence
  Description of Artificial Sequence: Synthetic peptide
  Seed: GMDPRMCSLMQGSTL
GMDVRMLSAMQHSTL

SEQ ID NO: 74621 - protein, 15 aa, Artificial Sequence
  Description of Artificial Sequence: Synthetic peptide
  Seed: GMDPRMCSLMQGSTL
GMDVRMLSAMQISTL

SEQ ID NO: 74622 - protein, 15 aa, Artificial Sequence
  Description of Artificial Sequence: Synthetic peptide
  Seed: GMDPRMCSLMQGSTL
GMDVRMLSAMQLSTL

SEQ ID NO: 74623 - protein, 15 aa, Artificial Sequence
  Description of Artificial Sequence: Synthetic peptide
  Seed: GMDPRMCSLMQGSTL
GMDVRMLSAMQMSTL

SEQ ID NO: 74624 - protein, 15 aa, Artificial Sequence
  Description of Artificial Sequence: Synthetic peptide
  Seed: GMDPRMCSLMQGSTL
GMDVRMLSAMQNSTL

SEQ ID NO: 74625 - protein, 15 aa, Artificial Sequence
  Description of Artificial Sequence: Synthetic peptide
  Seed: GMDPRMCSLMQGSTL
GMDVRMLSAMQSSTL

SEQ ID NO: 74626 - protein, 15 aa, Artificial Sequence
  Description of Artificial Sequence: Synthetic peptide
  Seed: GMDPRMCSLMQGSTL
GMDVRMLSAMQTSTL

SEQ ID NO: 74627 - protein, 15 aa, Artificial Sequence
  Description of Artificial Sequence: Synthetic peptide
  Seed: GMDPRMCSLMQGSTL
GMDVRMLSAMQVSTL

SEQ ID NO: 74628 - protein, 15 aa, Artificial Sequence
  Description of Artificial Sequence: Synthetic peptide
  Seed: GMDPRMCSLMQGSTL
GMDVRMLSGMQASTL

SEQ ID NO: 74629 - protein, 15 aa, Artificial Sequence
  Description of Artificial Sequence: Synthetic peptide
  Seed: GMDPRMCSLMQGSTL
GMDVRMLSGMQNSTL

SEQ ID NO: 74630 - protein, 15 aa, Artificial Sequence
  Description of Artificial Sequence: Synthetic peptide
  Seed: GMDPRMCSLMQGSTL
GMDVRMLSGMQSSTL

SEQ ID NO: 74631 - protein, 15 aa, Artificial Sequence
  Description of Artificial Sequence: Synthetic peptide
  Seed: GMDPRMCSLMQGSTL
GMDVRMLSIMQASTL

SEQ ID NO: 74632 - protein, 15 aa, Artificial Sequence
  Description of Artificial Sequence: Synthetic peptide
  Seed: GMDPRMCSLMQGSTL
GMDVRMLSIMQHSTL

SEQ ID NO: 74633 - protein, 15 aa, Artificial Sequence
  Description of Artificial Sequence: Synthetic peptide
  Seed: GMDPRMCSLMQGSTL
GMDVRMLSIMQNSTL

SEQ ID NO: 74634 - protein, 15 aa, Artificial Sequence
  Description of Artificial Sequence: Synthetic peptide
  Seed: GMDPRMCSLMQGSTL
GMDVRMLSIMQSSTL

SEQ ID NO: 74635 - protein, 15 aa, Artificial Sequence
  Description of Artificial Sequence: Synthetic peptide
  Seed: GMDPRMCSLMQGSTL
GMDVRMLSIMQTSTL

SEQ ID NO: 74636 - protein, 15 aa, Artificial Sequence
  Description of Artificial Sequence: Synthetic peptide
  Seed: GMDPRMCSLMQGSTL
GMDVRMLSLMQASTL

SEQ ID NO: 74637 - protein, 15 aa, Artificial Sequence
  Description of Artificial Sequence: Synthetic peptide
  Seed: GMDPRMCSLMQGSTL
GMDVRMLSLMQSSTL

SEQ ID NO: 74638 - protein, 15 aa, Artificial Sequence
  Description of Artificial Sequence: Synthetic peptide
  Seed: GMDPRMCSLMQGSTL
GMDVRMLSMMQASTL

SEQ ID NO: 74639 - protein, 15 aa, Artificial Sequence
  Description of Artificial Sequence: Synthetic peptide
  Seed: GMDPRMCSLMQGSTL
GMDVRMLSMMQSSTL

SEQ ID NO: 74640 - protein, 15 aa, Artificial Sequence
  Description of Artificial Sequence: Synthetic peptide
  Seed: GMDPRMCSLMQGSTL
GMDVRMLSNMQASTL

SEQ ID NO: 74641 - protein, 15 aa, Artificial Sequence
  Description of Artificial Sequence: Synthetic peptide
  Seed: GMDPRMCSLMQGSTL
GMDVRMLSNMQSSTL

SEQ ID NO: 74642 - protein, 15 aa, Artificial Sequence
  Description of Artificial Sequence: Synthetic peptide
  Seed: GMDPRMCSLMQGSTL
GMDVRMLSPMQASTL

SEQ ID NO: 74643 - protein, 15 aa, Artificial Sequence
  Description of Artificial Sequence: Synthetic peptide
  Seed: GMDPRMCSLMQGSTL
GMDVRMLSPMQHSTL

SEQ ID NO: 74644 - protein, 15 aa, Artificial Sequence
  Description of Artificial Sequence: Synthetic peptide
  Seed: GMDPRMCSLMQGSTL
GMDVRMLSPMQISTL

SEQ ID NO: 74645 - protein, 15 aa, Artificial Sequence
  Description of Artificial Sequence: Synthetic peptide
  Seed: GMDPRMCSLMQGSTL
GMDVRMLSPMQLSTL

SEQ ID NO: 74646 - protein, 15 aa, Artificial Sequence
  Description of Artificial Sequence: Synthetic peptide
  Seed: GMDPRMCSLMQGSTL
GMDVRMLSPMQMSTL

SEQ ID NO: 74647 - protein, 15 aa, Artificial Sequence
  Description of Artificial Sequence: Synthetic peptide
  Seed: GMDPRMCSLMQGSTL
GMDVRMLSPMQNSTL

SEQ ID NO: 74648 - protein, 15 aa, Artificial Sequence
  Description of Artificial Sequence: Synthetic peptide
  Seed: GMDPRMCSLMQGSTL
GMDVRMLSPMQSSTL

SEQ ID NO: 74649 - protein, 15 aa, Artificial Sequence
  Description of Artificial Sequence: Synthetic peptide
  Seed: GMDPRMCSLMQGSTL
GMDVRMLSPMQTSTL

SEQ ID NO: 74650 - protein, 15 aa, Artificial Sequence
  Description of Artificial Sequence: Synthetic peptide
  Seed: GMDPRMCSLMQGSTL
GMDVRMLSPMQVSTL

SEQ ID NO: 74651 - protein, 15 aa, Artificial Sequence
  Description of Artificial Sequence: Synthetic peptide
  Seed: GMDPRMCSLMQGSTL
GMDVRMLSSMQASTL

SEQ ID NO: 74652 - protein, 15 aa, Artificial Sequence
  Description of Artificial Sequence: Synthetic peptide
  Seed: GMDPRMCSLMQGSTL
GMDVRMLSSMQHSTL

SEQ ID NO: 74653 - protein, 15 aa, Artificial Sequence
  Description of Artificial Sequence: Synthetic peptide
  Seed: GMDPRMCSLMQGSTL
GMDVRMLSSMQISTL

SEQ ID NO: 74654 - protein, 15 aa, Artificial Sequence
  Description of Artificial Sequence: Synthetic peptide
  Seed: GMDPRMCSLMQGSTL
GMDVRMLSSMQLSTL

SEQ ID NO: 74655 - protein, 15 aa, Artificial Sequence
  Description of Artificial Sequence: Synthetic peptide
  Seed: GMDPRMCSLMQGSTL
GMDVRMLSSMQMSTL

SEQ ID NO: 74656 - protein, 15 aa, Artificial Sequence
  Description of Artificial Sequence: Synthetic peptide
  Seed: GMDPRMCSLMQGSTL
GMDVRMLSSMQNSTL

SEQ ID NO: 74657 - protein, 15 aa, Artificial Sequence
  Description of Artificial Sequence: Synthetic peptide
  Seed: GMDPRMCSLMQGSTL
GMDVRMLSSMQSSTL

SEQ ID NO: 74658 - protein, 15 aa, Artificial Sequence
  Description of Artificial Sequence: Synthetic peptide
  Seed: GMDPRMCSLMQGSTL
GMDVRMLSSMQTSTL

SEQ ID NO: 74659 - protein, 15 aa, Artificial Sequence
  Description of Artificial Sequence: Synthetic peptide
  Seed: GMDPRMCSLMQGSTL
GMDVRMLSSMQVSTL

SEQ ID NO: 74660 - protein, 15 aa, Artificial Sequence
  Description of Artificial Sequence: Synthetic peptide
  Seed: GMDPRMCSLMQGSTL
GMDVRMLSTMQASTL

SEQ ID NO: 74661 - protein, 15 aa, Artificial Sequence
  Description of Artificial Sequence: Synthetic peptide
  Seed: GMDPRMCSLMQGSTL
GMDVRMLSTMQHSTL

SEQ ID NO: 74662 - protein, 15 aa, Artificial Sequence
  Description of Artificial Sequence: Synthetic peptide
  Seed: GMDPRMCSLMQGSTL
GMDVRMLSTMQMSTL

SEQ ID NO: 74663 - protein, 15 aa, Artificial Sequence
  Description of Artificial Sequence: Synthetic peptide
  Seed: GMDPRMCSLMQGSTL
GMDVRMLSTMQNSTL

SEQ ID NO: 74664 - protein, 15 aa, Artificial Sequence
  Description of Artificial Sequence: Synthetic peptide
  Seed: GMDPRMCSLMQGSTL
GMDVRMLSTMQSSTL

SEQ ID NO: 74665 - protein, 15 aa, Artificial Sequence
  Description of Artificial Sequence: Synthetic peptide
  Seed: GMDPRMCSLMQGSTL
GMDVRMLSTMQTSTL

SEQ ID NO: 74666 - protein, 15 aa, Artificial Sequence
  Description of Artificial Sequence: Synthetic peptide
  Seed: GMDPRMCSLMQGSTL
GMDVRMLSTMQVSTL

SEQ ID NO: 74667 - protein, 15 aa, Artificial Sequence
  Description of Artificial Sequence: Synthetic peptide
  Seed: GMDPRMCSLMQGSTL
GMDVRMLSVMQASTL

SEQ ID NO: 74668 - protein, 15 aa, Artificial Sequence
  Description of Artificial Sequence: Synthetic peptide
  Seed: GMDPRMCSLMQGSTL
GMDVRMLSVMQHSTL

SEQ ID NO: 74669 - protein, 15 aa, Artificial Sequence
  Description of Artificial Sequence: Synthetic peptide
  Seed: GMDPRMCSLMQGSTL
GMDVRMLSVMQNSTL

SEQ ID NO: 74670 - protein, 15 aa, Artificial Sequence
  Description of Artificial Sequence: Synthetic peptide
  Seed: GMDPRMCSLMQGSTL
GMDVRMLSVMQSSTL

SEQ ID NO: 74671 - protein, 15 aa, Artificial Sequence
  Description of Artificial Sequence: Synthetic peptide
  Seed: GMDPRMCSLMQGSTL
GMDVRMLSVMQTSTL

SEQ ID NO: 74672 - protein, 15 aa, Artificial Sequence
  Description of Artificial Sequence: Synthetic peptide
  Seed: GMDPRMCSLMQGSTL
GMDVRMMSAMQASTL

SEQ ID NO: 74673 - protein, 15 aa, Artificial Sequence
  Description of Artificial Sequence: Synthetic peptide
  Seed: GMDPRMCSLMQGSTL
GMDVRMMSAMQHSTL

SEQ ID NO: 74674 - protein, 15 aa, Artificial Sequence
  Description of Artificial Sequence: Synthetic peptide
  Seed: GMDPRMCSLMQGSTL
GMDVRMMSAMQISTL

SEQ ID NO: 74675 - protein, 15 aa, Artificial Sequence
  Description of Artificial Sequence: Synthetic peptide
  Seed: GMDPRMCSLMQGSTL
GMDVRMMSAMQLSTL

SEQ ID NO: 74676 - protein, 15 aa, Artificial Sequence
  Description of Artificial Sequence: Synthetic peptide
  Seed: GMDPRMCSLMQGSTL
GMDVRMMSAMQMSTL

SEQ ID NO: 74677 - protein, 15 aa, Artificial Sequence
  Description of Artificial Sequence: Synthetic peptide
  Seed: GMDPRMCSLMQGSTL
GMDVRMMSAMQNSTL

SEQ ID NO: 74678 - protein, 15 aa, Artificial Sequence
  Description of Artificial Sequence: Synthetic peptide
  Seed: GMDPRMCSLMQGSTL
GMDVRMMSAMQSSTL

SEQ ID NO: 74679 - protein, 15 aa, Artificial Sequence
  Description of Artificial Sequence: Synthetic peptide
  Seed: GMDPRMCSLMQGSTL
GMDVRMMSAMQTSTL

SEQ ID NO: 74680 - protein, 15 aa, Artificial Sequence
  Description of Artificial Sequence: Synthetic peptide
  Seed: GMDPRMCSLMQGSTL
GMDVRMMSAMQVSTL

SEQ ID NO: 74681 - protein, 15 aa, Artificial Sequence
  Description of Artificial Sequence: Synthetic peptide
  Seed: GMDPRMCSLMQGSTL
GMDVRMMSGMQASTL

SEQ ID NO: 74682 - protein, 15 aa, Artificial Sequence
  Description of Artificial Sequence: Synthetic peptide
  Seed: GMDPRMCSLMQGSTL
GMDVRMMSGMQNSTL

SEQ ID NO: 74683 - protein, 15 aa, Artificial Sequence
  Description of Artificial Sequence: Synthetic peptide
  Seed: GMDPRMCSLMQGSTL
GMDVRMMSGMQSSTL

SEQ ID NO: 74684 - protein, 15 aa, Artificial Sequence
  Description of Artificial Sequence: Synthetic peptide
  Seed: GMDPRMCSLMQGSTL
GMDVRMMSIMQASTL

SEQ ID NO: 74685 - protein, 15 aa, Artificial Sequence
  Description of Artificial Sequence: Synthetic peptide
  Seed: GMDPRMCSLMQGSTL
GMDVRMMSIMQHSTL

SEQ ID NO: 74686 - protein, 15 aa, Artificial Sequence
  Description of Artificial Sequence: Synthetic peptide
  Seed: GMDPRMCSLMQGSTL
GMDVRMMSIMQMSTL

SEQ ID NO: 74687 - protein, 15 aa, Artificial Sequence
  Description of Artificial Sequence: Synthetic peptide
  Seed: GMDPRMCSLMQGSTL
GMDVRMMSIMQNSTL

SEQ ID NO: 74688 - protein, 15 aa, Artificial Sequence
  Description of Artificial Sequence: Synthetic peptide
  Seed: GMDPRMCSLMQGSTL
GMDVRMMSIMQSSTL

SEQ ID NO: 74689 - protein, 15 aa, Artificial Sequence
  Description of Artificial Sequence: Synthetic peptide
  Seed: GMDPRMCSLMQGSTL
GMDVRMMSIMQTSTL

SEQ ID NO: 74690 - protein, 15 aa, Artificial Sequence
  Description of Artificial Sequence: Synthetic peptide
  Seed: GMDPRMCSLMQGSTL
GMDVRMMSLMQASTL

SEQ ID NO: 74691 - protein, 15 aa, Artificial Sequence
  Description of Artificial Sequence: Synthetic peptide
  Seed: GMDPRMCSLMQGSTL
GMDVRMMSLMQNSTL

SEQ ID NO: 74692 - protein, 15 aa, Artificial Sequence
  Description of Artificial Sequence: Synthetic peptide
  Seed: GMDPRMCSLMQGSTL
GMDVRMMSLMQSSTL

SEQ ID NO: 74693 - protein, 15 aa, Artificial Sequence
  Description of Artificial Sequence: Synthetic peptide
  Seed: GMDPRMCSLMQGSTL
GMDVRMMSMMQASTL

SEQ ID NO: 74694 - protein, 15 aa, Artificial Sequence
  Description of Artificial Sequence: Synthetic peptide
  Seed: GMDPRMCSLMQGSTL
GMDVRMMSMMQSSTL

SEQ ID NO: 74695 - protein, 15 aa, Artificial Sequence
  Description of Artificial Sequence: Synthetic peptide
  Seed: GMDPRMCSLMQGSTL
GMDVRMMSNMQASTL

SEQ ID NO: 74696 - protein, 15 aa, Artificial Sequence
  Description of Artificial Sequence: Synthetic peptide
  Seed: GMDPRMCSLMQGSTL
GMDVRMMSPMQASTL

SEQ ID NO: 74697 - protein, 15 aa, Artificial Sequence
  Description of Artificial Sequence: Synthetic peptide
  Seed: GMDPRMCSLMQGSTL
GMDVRMMSPMQHSTL

SEQ ID NO: 74698 - protein, 15 aa, Artificial Sequence
  Description of Artificial Sequence: Synthetic peptide
  Seed: GMDPRMCSLMQGSTL
GMDVRMMSPMQISTL

SEQ ID NO: 74699 - protein, 15 aa, Artificial Sequence
  Description of Artificial Sequence: Synthetic peptide
  Seed: GMDPRMCSLMQGSTL
GMDVRMMSPMQLSTL

SEQ ID NO: 74700 - protein, 15 aa, Artificial Sequence
  Description of Artificial Sequence: Synthetic peptide
  Seed: GMDPRMCSLMQGSTL
GMDVRMMSPMQMSTL

SEQ ID NO: 74701 - protein, 15 aa, Artificial Sequence
  Description of Artificial Sequence: Synthetic peptide
  Seed: GMDPRMCSLMQGSTL
GMDVRMMSPMQNSTL

SEQ ID NO: 74702 - protein, 15 aa, Artificial Sequence
  Description of Artificial Sequence: Synthetic peptide
  Seed: GMDPRMCSLMQGSTL
GMDVRMMSPMQSSTL

SEQ ID NO: 74703 - protein, 15 aa, Artificial Sequence
  Description of Artificial Sequence: Synthetic peptide
  Seed: GMDPRMCSLMQGSTL
GMDVRMMSPMQTSTL

SEQ ID NO: 74704 - protein, 15 aa, Artificial Sequence
  Description of Artificial Sequence: Synthetic peptide
  Seed: GMDPRMCSLMQGSTL
GMDVRMMSPMQVSTL

SEQ ID NO: 74705 - protein, 15 aa, Artificial Sequence
  Description of Artificial Sequence: Synthetic peptide
  Seed: GMDPRMCSLMQGSTL
GMDVRMMSSMQASTL

SEQ ID NO: 74706 - protein, 15 aa, Artificial Sequence
  Description of Artificial Sequence: Synthetic peptide
  Seed: GMDPRMCSLMQGSTL
GMDVRMMSSMQHSTL

SEQ ID NO: 74707 - protein, 15 aa, Artificial Sequence
  Description of Artificial Sequence: Synthetic peptide
  Seed: GMDPRMCSLMQGSTL
GMDVRMMSSMQISTL

SEQ ID NO: 74708 - protein, 15 aa, Artificial Sequence
  Description of Artificial Sequence: Synthetic peptide
  Seed: GMDPRMCSLMQGSTL
GMDVRMMSSMQLSTL

SEQ ID NO: 74709 - protein, 15 aa, Artificial Sequence
  Description of Artificial Sequence: Synthetic peptide
  Seed: GMDPRMCSLMQGSTL
GMDVRMMSSMQMSTL

SEQ ID NO: 74710 - protein, 15 aa, Artificial Sequence
  Description of Artificial Sequence: Synthetic peptide
  Seed: GMDPRMCSLMQGSTL
GMDVRMMSSMQNSTL

SEQ ID NO: 74711 - protein, 15 aa, Artificial Sequence
  Description of Artificial Sequence: Synthetic peptide
  Seed: GMDPRMCSLMQGSTL
GMDVRMMSSMQSSTL

SEQ ID NO: 74712 - protein, 15 aa, Artificial Sequence
  Description of Artificial Sequence: Synthetic peptide
  Seed: GMDPRMCSLMQGSTL
GMDVRMMSSMQTSTL

SEQ ID NO: 74713 - protein, 15 aa, Artificial Sequence
  Description of Artificial Sequence: Synthetic peptide
  Seed: GMDPRMCSLMQGSTL
GMDVRMMSSMQVSTL

SEQ ID NO: 74714 - protein, 15 aa, Artificial Sequence
  Description of Artificial Sequence: Synthetic peptide
  Seed: GMDPRMCSLMQGSTL
GMDVRMMSTMQASTL

SEQ ID NO: 74715 - protein, 15 aa, Artificial Sequence
  Description of Artificial Sequence: Synthetic peptide
  Seed: GMDPRMCSLMQGSTL
GMDVRMMSTMQHSTL

SEQ ID NO: 74716 - protein, 15 aa, Artificial Sequence
  Description of Artificial Sequence: Synthetic peptide
  Seed: GMDPRMCSLMQGSTL
GMDVRMMSTMQLSTL

SEQ ID NO: 74717 - protein, 15 aa, Artificial Sequence
  Description of Artificial Sequence: Synthetic peptide
  Seed: GMDPRMCSLMQGSTL
GMDVRMMSTMQMSTL

SEQ ID NO: 74718 - protein, 15 aa, Artificial Sequence
  Description of Artificial Sequence: Synthetic peptide
  Seed: GMDPRMCSLMQGSTL
GMDVRMMSTMQNSTL

SEQ ID NO: 74719 - protein, 15 aa, Artificial Sequence
  Description of Artificial Sequence: Synthetic peptide
  Seed: GMDPRMCSLMQGSTL
GMDVRMMSTMQSSTL

SEQ ID NO: 74720 - protein, 15 aa, Artificial Sequence
  Description of Artificial Sequence: Synthetic peptide
  Seed: GMDPRMCSLMQGSTL
GMDVRMMSTMQTSTL

SEQ ID NO: 74721 - protein, 15 aa, Artificial Sequence
  Description of Artificial Sequence: Synthetic peptide
  Seed: GMDPRMCSLMQGSTL
GMDVRMMSTMQVSTL

SEQ ID NO: 74722 - protein, 15 aa, Artificial Sequence
  Description of Artificial Sequence: Synthetic peptide
  Seed: GMDPRMCSLMQGSTL
GMDVRMMSVMQASTL

SEQ ID NO: 74723 - protein, 15 aa, Artificial Sequence
  Description of Artificial Sequence: Synthetic peptide
  Seed: GMDPRMCSLMQGSTL
GMDVRMMSVMQHSTL

SEQ ID NO: 74724 - protein, 15 aa, Artificial Sequence
  Description of Artificial Sequence: Synthetic peptide
  Seed: GMDPRMCSLMQGSTL
GMDVRMMSVMQMSTL

SEQ ID NO: 74725 - protein, 15 aa, Artificial Sequence
  Description of Artificial Sequence: Synthetic peptide
  Seed: GMDPRMCSLMQGSTL
GMDVRMMSVMQNSTL

SEQ ID NO: 74726 - protein, 15 aa, Artificial Sequence
  Description of Artificial Sequence: Synthetic peptide
  Seed: GMDPRMCSLMQGSTL
GMDVRMMSVMQSSTL

SEQ ID NO: 74727 - protein, 15 aa, Artificial Sequence
  Description of Artificial Sequence: Synthetic peptide
  Seed: GMDPRMCSLMQGSTL
GMDVRMMSVMQTSTL

SEQ ID NO: 74728 - protein, 15 aa, Artificial Sequence
  Description of Artificial Sequence: Synthetic peptide
  Seed: GMDPRMCSLMQGSTL
GMDVRMVSAMQASTL

SEQ ID NO: 74729 - protein, 15 aa, Artificial Sequence
  Description of Artificial Sequence: Synthetic peptide
  Seed: GMDPRMCSLMQGSTL
GMDVRMWSAMQASTL

SEQ ID NO: 74730 - protein, 15 aa, Artificial Sequence
  Description of Artificial Sequence: Synthetic peptide
  Seed: GMDPRMCSLMQGSTL
GMDVRMWSVMQASTL

SEQ ID NO: 74731 - protein, 15 aa, Artificial Sequence
  Description of Artificial Sequence: Synthetic peptide
  Seed: GMDPRMCSLMQGSTL
GMDWRMASAMQASTL

SEQ ID NO: 74732 - protein, 15 aa, Artificial Sequence
  Description of Artificial Sequence: Synthetic peptide
  Seed: GMDPRMCSLMQGSTL
GMDWRMASAMQGSTL

SEQ ID NO: 74733 - protein, 15 aa, Artificial Sequence
  Description of Artificial Sequence: Synthetic peptide
  Seed: GMDPRMCSLMQGSTL
GMDWRMASAMQHSTL

SEQ ID NO: 74734 - protein, 15 aa, Artificial Sequence
  Description of Artificial Sequence: Synthetic peptide
  Seed: GMDPRMCSLMQGSTL
GMDWRMASAMQISTL

SEQ ID NO: 74735 - protein, 15 aa, Artificial Sequence
  Description of Artificial Sequence: Synthetic peptide
  Seed: GMDPRMCSLMQGSTL
GMDWRMASAMQLSTL

SEQ ID NO: 74736 - protein, 15 aa, Artificial Sequence
  Description of Artificial Sequence: Synthetic peptide
  Seed: GMDPRMCSLMQGSTL
GMDWRMASAMQMSTL

SEQ ID NO: 74737 - protein, 15 aa, Artificial Sequence
  Description of Artificial Sequence: Synthetic peptide
  Seed: GMDPRMCSLMQGSTL
GMDWRMASAMQNSTL

SEQ ID NO: 74738 - protein, 15 aa, Artificial Sequence
  Description of Artificial Sequence: Synthetic peptide
  Seed: GMDPRMCSLMQGSTL
GMDWRMASAMQQSTL

SEQ ID NO: 74739 - protein, 15 aa, Artificial Sequence
  Description of Artificial Sequence: Synthetic peptide
  Seed: GMDPRMCSLMQGSTL
GMDWRMASAMQSSTL

SEQ ID NO: 74740 - protein, 15 aa, Artificial Sequence
  Description of Artificial Sequence: Synthetic peptide
  Seed: GMDPRMCSLMQGSTL
GMDWRMASAMQTSTL

SEQ ID NO: 74741 - protein, 15 aa, Artificial Sequence
  Description of Artificial Sequence: Synthetic peptide
  Seed: GMDPRMCSLMQGSTL
GMDWRMASAMQVSTL

SEQ ID NO: 74742 - protein, 15 aa, Artificial Sequence
  Description of Artificial Sequence: Synthetic peptide
  Seed: GMDPRMCSLMQGSTL
GMDWRMASGMQASTL

SEQ ID NO: 74743 - protein, 15 aa, Artificial Sequence
  Description of Artificial Sequence: Synthetic peptide
  Seed: GMDPRMCSLMQGSTL
GMDWRMASGMQMSTL

SEQ ID NO: 74744 - protein, 15 aa, Artificial Sequence
  Description of Artificial Sequence: Synthetic peptide
  Seed: GMDPRMCSLMQGSTL
GMDWRMASGMQNSTL

SEQ ID NO: 74745 - protein, 15 aa, Artificial Sequence
  Description of Artificial Sequence: Synthetic peptide
  Seed: GMDPRMCSLMQGSTL
GMDWRMASGMQSSTL

SEQ ID NO: 74746 - protein, 15 aa, Artificial Sequence
  Description of Artificial Sequence: Synthetic peptide
  Seed: GMDPRMCSLMQGSTL
GMDWRMASIMQASTL

SEQ ID NO: 74747 - protein, 15 aa, Artificial Sequence
  Description of Artificial Sequence: Synthetic peptide
  Seed: GMDPRMCSLMQGSTL
GMDWRMASIMQHSTL

SEQ ID NO: 74748 - protein, 15 aa, Artificial Sequence
  Description of Artificial Sequence: Synthetic peptide
  Seed: GMDPRMCSLMQGSTL
GMDWRMASIMQLSTL

SEQ ID NO: 74749 - protein, 15 aa, Artificial Sequence
  Description of Artificial Sequence: Synthetic peptide
  Seed: GMDPRMCSLMQGSTL
GMDWRMASIMQMSTL

SEQ ID NO: 74750 - protein, 15 aa, Artificial Sequence
  Description of Artificial Sequence: Synthetic peptide
  Seed: GMDPRMCSLMQGSTL
GMDWRMASIMQNSTL

SEQ ID NO: 74751 - protein, 15 aa, Artificial Sequence
  Description of Artificial Sequence: Synthetic peptide
  Seed: GMDPRMCSLMQGSTL
GMDWRMASIMQQSTL

SEQ ID NO: 74752 - protein, 15 aa, Artificial Sequence
  Description of Artificial Sequence: Synthetic peptide
  Seed: GMDPRMCSLMQGSTL
GMDWRMASIMQSSTL

SEQ ID NO: 74753 - protein, 15 aa, Artificial Sequence
  Description of Artificial Sequence: Synthetic peptide
  Seed: GMDPRMCSLMQGSTL
GMDWRMASIMQTSTL

SEQ ID NO: 74754 - protein, 15 aa, Artificial Sequence
  Description of Artificial Sequence: Synthetic peptide
  Seed: GMDPRMCSLMQGSTL
GMDWRMASIMQVSTL

SEQ ID NO: 74755 - protein, 15 aa, Artificial Sequence
  Description of Artificial Sequence: Synthetic peptide
  Seed: GMDPRMCSLMQGSTL
GMDWRMASLMQASTL

SEQ ID NO: 74756 - protein, 15 aa, Artificial Sequence
  Description of Artificial Sequence: Synthetic peptide
  Seed: GMDPRMCSLMQGSTL
GMDWRMASLMQNSTL

SEQ ID NO: 74757 - protein, 15 aa, Artificial Sequence
  Description of Artificial Sequence: Synthetic peptide
  Seed: GMDPRMCSLMQGSTL
GMDWRMASLMQSSTL

SEQ ID NO: 74758 - protein, 15 aa, Artificial Sequence
  Description of Artificial Sequence: Synthetic peptide
  Seed: GMDPRMCSLMQGSTL
GMDWRMASMMQASTL

SEQ ID NO: 74759 - protein, 15 aa, Artificial Sequence
  Description of Artificial Sequence: Synthetic peptide
  Seed: GMDPRMCSLMQGSTL
GMDWRMASMMQNSTL

SEQ ID NO: 74760 - protein, 15 aa, Artificial Sequence
  Description of Artificial Sequence: Synthetic peptide
  Seed: GMDPRMCSLMQGSTL
GMDWRMASNMQASTL

SEQ ID NO: 74761 - protein, 15 aa, Artificial Sequence
  Description of Artificial Sequence: Synthetic peptide
  Seed: GMDPRMCSLMQGSTL
GMDWRMASNMQNSTL

SEQ ID NO: 74762 - protein, 15 aa, Artificial Sequence
  Description of Artificial Sequence: Synthetic peptide
  Seed: GMDPRMCSLMQGSTL
GMDWRMASNMQSSTL

SEQ ID NO: 74763 - protein, 15 aa, Artificial Sequence
  Description of Artificial Sequence: Synthetic peptide
  Seed: GMDPRMCSLMQGSTL
GMDWRMASPMQASTL

SEQ ID NO: 74764 - protein, 15 aa, Artificial Sequence
  Description of Artificial Sequence: Synthetic peptide
  Seed: GMDPRMCSLMQGSTL
GMDWRMASPMQHSTL

SEQ ID NO: 74765 - protein, 15 aa, Artificial Sequence
  Description of Artificial Sequence: Synthetic peptide
  Seed: GMDPRMCSLMQGSTL
GMDWRMASPMQISTL

SEQ ID NO: 74766 - protein, 15 aa, Artificial Sequence
  Description of Artificial Sequence: Synthetic peptide
  Seed: GMDPRMCSLMQGSTL
GMDWRMASPMQLSTL

SEQ ID NO: 74767 - protein, 15 aa, Artificial Sequence
  Description of Artificial Sequence: Synthetic peptide
  Seed: GMDPRMCSLMQGSTL
GMDWRMASPMQMSTL

SEQ ID NO: 74768 - protein, 15 aa, Artificial Sequence
  Description of Artificial Sequence: Synthetic peptide
  Seed: GMDPRMCSLMQGSTL
GMDWRMASPMQNSTL

SEQ ID NO: 74769 - protein, 15 aa, Artificial Sequence
  Description of Artificial Sequence: Synthetic peptide
  Seed: GMDPRMCSLMQGSTL
GMDWRMASPMQQSTL

SEQ ID NO: 74770 - protein, 15 aa, Artificial Sequence
  Description of Artificial Sequence: Synthetic peptide
  Seed: GMDPRMCSLMQGSTL
GMDWRMASPMQSSTL

SEQ ID NO: 74771 - protein, 15 aa, Artificial Sequence
  Description of Artificial Sequence: Synthetic peptide
  Seed: GMDPRMCSLMQGSTL
GMDWRMASPMQTSTL

SEQ ID NO: 74772 - protein, 15 aa, Artificial Sequence
  Description of Artificial Sequence: Synthetic peptide
  Seed: GMDPRMCSLMQGSTL
GMDWRMASPMQVSTL

SEQ ID NO: 74773 - protein, 15 aa, Artificial Sequence
  Description of Artificial Sequence: Synthetic peptide
  Seed: GMDPRMCSLMQGSTL
GMDWRMASSMQASTL

SEQ ID NO: 74774 - protein, 15 aa, Artificial Sequence
  Description of Artificial Sequence: Synthetic peptide
  Seed: GMDPRMCSLMQGSTL
GMDWRMASSMQGSTL

SEQ ID NO: 74775 - protein, 15 aa, Artificial Sequence
  Description of Artificial Sequence: Synthetic peptide
  Seed: GMDPRMCSLMQGSTL
GMDWRMASSMQHSTL

SEQ ID NO: 74776 - protein, 15 aa, Artificial Sequence
  Description of Artificial Sequence: Synthetic peptide
  Seed: GMDPRMCSLMQGSTL
GMDWRMASSMQISTL

SEQ ID NO: 74777 - protein, 15 aa, Artificial Sequence
  Description of Artificial Sequence: Synthetic peptide
  Seed: GMDPRMCSLMQGSTL
GMDWRMASSMQLSTL

SEQ ID NO: 74778 - protein, 15 aa, Artificial Sequence
  Description of Artificial Sequence: Synthetic peptide
  Seed: GMDPRMCSLMQGSTL
GMDWRMASSMQMSTL

SEQ ID NO: 74779 - protein, 15 aa, Artificial Sequence
  Description of Artificial Sequence: Synthetic peptide
  Seed: GMDPRMCSLMQGSTL
GMDWRMASSMQNSTL

SEQ ID NO: 74780 - protein, 15 aa, Artificial Sequence
  Description of Artificial Sequence: Synthetic peptide
  Seed: GMDPRMCSLMQGSTL
GMDWRMASSMQQSTL

SEQ ID NO: 74781 - protein, 15 aa, Artificial Sequence
  Description of Artificial Sequence: Synthetic peptide
  Seed: GMDPRMCSLMQGSTL
GMDWRMASSMQSSTL

SEQ ID NO: 74782 - protein, 15 aa, Artificial Sequence
  Description of Artificial Sequence: Synthetic peptide
  Seed: GMDPRMCSLMQGSTL
GMDWRMASSMQTSTL

SEQ ID NO: 74783 - protein, 15 aa, Artificial Sequence
  Description of Artificial Sequence: Synthetic peptide
  Seed: GMDPRMCSLMQGSTL
GMDWRMASSMQVSTL

SEQ ID NO: 74784 - protein, 15 aa, Artificial Sequence
  Description of Artificial Sequence: Synthetic peptide
  Seed: GMDPRMCSLMQGSTL
GMDWRMASTMQASTL

SEQ ID NO: 74785 - protein, 15 aa, Artificial Sequence
  Description of Artificial Sequence: Synthetic peptide
  Seed: GMDPRMCSLMQGSTL
GMDWRMASTMQHSTL

SEQ ID NO: 74786 - protein, 15 aa, Artificial Sequence
  Description of Artificial Sequence: Synthetic peptide
  Seed: GMDPRMCSLMQGSTL
GMDWRMASTMQISTL

SEQ ID NO: 74787 - protein, 15 aa, Artificial Sequence
  Description of Artificial Sequence: Synthetic peptide
  Seed: GMDPRMCSLMQGSTL
GMDWRMASTMQLSTL

SEQ ID NO: 74788 - protein, 15 aa, Artificial Sequence
  Description of Artificial Sequence: Synthetic peptide
  Seed: GMDPRMCSLMQGSTL
GMDWRMASTMQMSTL

SEQ ID NO: 74789 - protein, 15 aa, Artificial Sequence
  Description of Artificial Sequence: Synthetic peptide
  Seed: GMDPRMCSLMQGSTL
GMDWRMASTMQNSTL

SEQ ID NO: 74790 - protein, 15 aa, Artificial Sequence
  Description of Artificial Sequence: Synthetic peptide
  Seed: GMDPRMCSLMQGSTL
GMDWRMASTMQQSTL

SEQ ID NO: 74791 - protein, 15 aa, Artificial Sequence
  Description of Artificial Sequence: Synthetic peptide
  Seed: GMDPRMCSLMQGSTL
GMDWRMASTMQSSTL

SEQ ID NO: 74792 - protein, 15 aa, Artificial Sequence
  Description of Artificial Sequence: Synthetic peptide
  Seed: GMDPRMCSLMQGSTL
GMDWRMASTMQTSTL

SEQ ID NO: 74793 - protein, 15 aa, Artificial Sequence
  Description of Artificial Sequence: Synthetic peptide
  Seed: GMDPRMCSLMQGSTL
GMDWRMASTMQVSTL

SEQ ID NO: 74794 - protein, 15 aa, Artificial Sequence
  Description of Artificial Sequence: Synthetic peptide
  Seed: GMDPRMCSLMQGSTL
GMDWRMASVMQASTL

SEQ ID NO: 74795 - protein, 15 aa, Artificial Sequence
  Description of Artificial Sequence: Synthetic peptide
  Seed: GMDPRMCSLMQGSTL
GMDWRMASVMQGSTL

SEQ ID NO: 74796 - protein, 15 aa, Artificial Sequence
  Description of Artificial Sequence: Synthetic peptide
  Seed: GMDPRMCSLMQGSTL
GMDWRMASVMQHSTL

SEQ ID NO: 74797 - protein, 15 aa, Artificial Sequence
  Description of Artificial Sequence: Synthetic peptide
  Seed: GMDPRMCSLMQGSTL
GMDWRMASVMQISTL

SEQ ID NO: 74798 - protein, 15 aa, Artificial Sequence
  Description of Artificial Sequence: Synthetic peptide
  Seed: GMDPRMCSLMQGSTL
GMDWRMASVMQLSTL

SEQ ID NO: 74799 - protein, 15 aa, Artificial Sequence
  Description of Artificial Sequence: Synthetic peptide
  Seed: GMDPRMCSLMQGSTL
GMDWRMASVMQMSTL

SEQ ID NO: 74800 - protein, 15 aa, Artificial Sequence
  Description of Artificial Sequence: Synthetic peptide
  Seed: GMDPRMCSLMQGSTL
GMDWRMASVMQNSTL

SEQ ID NO: 74801 - protein, 15 aa, Artificial Sequence
  Description of Artificial Sequence: Synthetic peptide
  Seed: GMDPRMCSLMQGSTL
GMDWRMASVMQQSTL

SEQ ID NO: 74802 - protein, 15 aa, Artificial Sequence
  Description of Artificial Sequence: Synthetic peptide
  Seed: GMDPRMCSLMQGSTL
GMDWRMASVMQSSTL

SEQ ID NO: 74803 - protein, 15 aa, Artificial Sequence
  Description of Artificial Sequence: Synthetic peptide
  Seed: GMDPRMCSLMQGSTL
GMDWRMASVMQTSTL

SEQ ID NO: 74804 - protein, 15 aa, Artificial Sequence
  Description of Artificial Sequence: Synthetic peptide
  Seed: GMDPRMCSLMQGSTL
GMDWRMASVMQVSTL

SEQ ID NO: 74805 - protein, 15 aa, Artificial Sequence
  Description of Artificial Sequence: Synthetic peptide
  Seed: GMDPRMCSLMQGSTL
GMDWRMESAMQASTL

SEQ ID NO: 74806 - protein, 15 aa, Artificial Sequence
  Description of Artificial Sequence: Synthetic peptide
  Seed: GMDPRMCSLMQGSTL
GMDWRMESAMQNSTL

SEQ ID NO: 74807 - protein, 15 aa, Artificial Sequence
  Description of Artificial Sequence: Synthetic peptide
  Seed: GMDPRMCSLMQGSTL
GMDWRMESAMQSSTL

SEQ ID NO: 74808 - protein, 15 aa, Artificial Sequence
  Description of Artificial Sequence: Synthetic peptide
  Seed: GMDPRMCSLMQGSTL
GMDWRMFSAMQASTL

SEQ ID NO: 74809 - protein, 15 aa, Artificial Sequence
  Description of Artificial Sequence: Synthetic peptide
  Seed: GMDPRMCSLMQGSTL
GMDWRMFSAMQGSTL

SEQ ID NO: 74810 - protein, 15 aa, Artificial Sequence
  Description of Artificial Sequence: Synthetic peptide
  Seed: GMDPRMCSLMQGSTL
GMDWRMFSAMQHSTL

SEQ ID NO: 74811 - protein, 15 aa, Artificial Sequence
  Description of Artificial Sequence: Synthetic peptide
  Seed: GMDPRMCSLMQGSTL
GMDWRMFSAMQISTL

SEQ ID NO: 74812 - protein, 15 aa, Artificial Sequence
  Description of Artificial Sequence: Synthetic peptide
  Seed: GMDPRMCSLMQGSTL
GMDWRMFSAMQLSTL

SEQ ID NO: 74813 - protein, 15 aa, Artificial Sequence
  Description of Artificial Sequence: Synthetic peptide
  Seed: GMDPRMCSLMQGSTL
GMDWRMFSAMQMSTL

SEQ ID NO: 74814 - protein, 15 aa, Artificial Sequence
  Description of Artificial Sequence: Synthetic peptide
  Seed: GMDPRMCSLMQGSTL
GMDWRMFSAMQNSTL

SEQ ID NO: 74815 - protein, 15 aa, Artificial Sequence
  Description of Artificial Sequence: Synthetic peptide
  Seed: GMDPRMCSLMQGSTL
GMDWRMFSAMQPSTL

SEQ ID NO: 74816 - protein, 15 aa, Artificial Sequence
  Description of Artificial Sequence: Synthetic peptide
  Seed: GMDPRMCSLMQGSTL
GMDWRMFSAMQQSTL

SEQ ID NO: 74817 - protein, 15 aa, Artificial Sequence
  Description of Artificial Sequence: Synthetic peptide
  Seed: GMDPRMCSLMQGSTL
GMDWRMFSAMQSSTL

SEQ ID NO: 74818 - protein, 15 aa, Artificial Sequence
  Description of Artificial Sequence: Synthetic peptide
  Seed: GMDPRMCSLMQGSTL
GMDWRMFSAMQTSTL

SEQ ID NO: 74819 - protein, 15 aa, Artificial Sequence
  Description of Artificial Sequence: Synthetic peptide
  Seed: GMDPRMCSLMQGSTL
GMDWRMFSAMQVSTL

SEQ ID NO: 74820 - protein, 15 aa, Artificial Sequence
  Description of Artificial Sequence: Synthetic peptide
  Seed: GMDPRMCSLMQGSTL
GMDWRMFSGMQASTL

SEQ ID NO: 74821 - protein, 15 aa, Artificial Sequence
  Description of Artificial Sequence: Synthetic peptide
  Seed: GMDPRMCSLMQGSTL
GMDWRMFSGMQSSTL

SEQ ID NO: 74822 - protein, 15 aa, Artificial Sequence
  Description of Artificial Sequence: Synthetic peptide
  Seed: GMDPRMCSLMQGSTL
GMDWRMFSHMQASTL

SEQ ID NO: 74823 - protein, 15 aa, Artificial Sequence
  Description of Artificial Sequence: Synthetic peptide
  Seed: GMDPRMCSLMQGSTL
GMDWRMFSHMQSSTL

SEQ ID NO: 74824 - protein, 15 aa, Artificial Sequence
  Description of Artificial Sequence: Synthetic peptide
  Seed: GMDPRMCSLMQGSTL
GMDWRMFSHMQTSTL

SEQ ID NO: 74825 - protein, 15 aa, Artificial Sequence
  Description of Artificial Sequence: Synthetic peptide
  Seed: GMDPRMCSLMQGSTL
GMDWRMFSHMQVSTL

SEQ ID NO: 74826 - protein, 15 aa, Artificial Sequence
  Description of Artificial Sequence: Synthetic peptide
  Seed: GMDPRMCSLMQGSTL
GMDWRMFSIMQASTL

SEQ ID NO: 74827 - protein, 15 aa, Artificial Sequence
  Description of Artificial Sequence: Synthetic peptide
  Seed: GMDPRMCSLMQGSTL
GMDWRMFSIMQGSTL

SEQ ID NO: 74828 - protein, 15 aa, Artificial Sequence
  Description of Artificial Sequence: Synthetic peptide
  Seed: GMDPRMCSLMQGSTL
GMDWRMFSIMQHSTL

SEQ ID NO: 74829 - protein, 15 aa, Artificial Sequence
  Description of Artificial Sequence: Synthetic peptide
  Seed: GMDPRMCSLMQGSTL
GMDWRMFSIMQNSTL

SEQ ID NO: 74830 - protein, 15 aa, Artificial Sequence
  Description of Artificial Sequence: Synthetic peptide
  Seed: GMDPRMCSLMQGSTL
GMDWRMFSIMQSSTL

SEQ ID NO: 74831 - protein, 15 aa, Artificial Sequence
  Description of Artificial Sequence: Synthetic peptide
  Seed: GMDPRMCSLMQGSTL
GMDWRMFSIMQTSTL

SEQ ID NO: 74832 - protein, 15 aa, Artificial Sequence
  Description of Artificial Sequence: Synthetic peptide
  Seed: GMDPRMCSLMQGSTL
GMDWRMFSIMQVSTL

SEQ ID NO: 74833 - protein, 15 aa, Artificial Sequence
  Description of Artificial Sequence: Synthetic peptide
  Seed: GMDPRMCSLMQGSTL
GMDWRMFSKMQASTL

SEQ ID NO: 74834 - protein, 15 aa, Artificial Sequence
  Description of Artificial Sequence: Synthetic peptide
  Seed: GMDPRMCSLMQGSTL
GMDWRMFSLMQGSTL

SEQ ID NO: 74835 - protein, 15 aa, Artificial Sequence
  Description of Artificial Sequence: Synthetic peptide
  Seed: GMDPRMCSLMQGSTL
GMDWRMFSLMQNSTL

SEQ ID NO: 74836 - protein, 15 aa, Artificial Sequence
  Description of Artificial Sequence: Synthetic peptide
  Seed: GMDPRMCSLMQGSTL
GMDWRMFSLMQSSTL

SEQ ID NO: 74837 - protein, 15 aa, Artificial Sequence
  Description of Artificial Sequence: Synthetic peptide
  Seed: GMDPRMCSLMQGSTL
GMDWRMFSMMQNSTL

SEQ ID NO: 74838 - protein, 15 aa, Artificial Sequence
  Description of Artificial Sequence: Synthetic peptide
  Seed: GMDPRMCSLMQGSTL
GMDWRMFSNMQASTL

SEQ ID NO: 74839 - protein, 15 aa, Artificial Sequence
  Description of Artificial Sequence: Synthetic peptide
  Seed: GMDPRMCSLMQGSTL
GMDWRMFSNMQSSTL

SEQ ID NO: 74840 - protein, 15 aa, Artificial Sequence
  Description of Artificial Sequence: Synthetic peptide
  Seed: GMDPRMCSLMQGSTL
GMDWRMFSPMQASTL

SEQ ID NO: 74841 - protein, 15 aa, Artificial Sequence
  Description of Artificial Sequence: Synthetic peptide
  Seed: GMDPRMCSLMQGSTL
GMDWRMFSPMQGSTL

SEQ ID NO: 74842 - protein, 15 aa, Artificial Sequence
  Description of Artificial Sequence: Synthetic peptide
  Seed: GMDPRMCSLMQGSTL
GMDWRMFSPMQISTL

SEQ ID NO: 74843 - protein, 15 aa, Artificial Sequence
  Description of Artificial Sequence: Synthetic peptide
  Seed: GMDPRMCSLMQGSTL
GMDWRMFSPMQMSTL

SEQ ID NO: 74844 - protein, 15 aa, Artificial Sequence
  Description of Artificial Sequence: Synthetic peptide
  Seed: GMDPRMCSLMQGSTL
GMDWRMFSPMQNSTL

SEQ ID NO: 74845 - protein, 15 aa, Artificial Sequence
  Description of Artificial Sequence: Synthetic peptide
  Seed: GMDPRMCSLMQGSTL
GMDWRMFSPMQPSTL

SEQ ID NO: 74846 - protein, 15 aa, Artificial Sequence
  Description of Artificial Sequence: Synthetic peptide
  Seed: GMDPRMCSLMQGSTL
GMDWRMFSPMQSSTL

SEQ ID NO: 74847 - protein, 15 aa, Artificial Sequence
  Description of Artificial Sequence: Synthetic peptide
  Seed: GMDPRMCSLMQGSTL
GMDWRMFSPMQTSTL

SEQ ID NO: 74848 - protein, 15 aa, Artificial Sequence
  Description of Artificial Sequence: Synthetic peptide
  Seed: GMDPRMCSLMQGSTL
GMDWRMFSPMQVSTL

SEQ ID NO: 74849 - protein, 15 aa, Artificial Sequence
  Description of Artificial Sequence: Synthetic peptide
  Seed: GMDPRMCSLMQGSTL
GMDWRMFSQMQASTL

SEQ ID NO: 74850 - protein, 15 aa, Artificial Sequence
  Description of Artificial Sequence: Synthetic peptide
  Seed: GMDPRMCSLMQGSTL
GMDWRMFSRMQASTL

SEQ ID NO: 74851 - protein, 15 aa, Artificial Sequence
  Description of Artificial Sequence: Synthetic peptide
  Seed: GMDPRMCSLMQGSTL
GMDWRMFSRMQSSTL

SEQ ID NO: 74852 - protein, 15 aa, Artificial Sequence
  Description of Artificial Sequence: Synthetic peptide
  Seed: GMDPRMCSLMQGSTL
GMDWRMFSRMQTSTL

SEQ ID NO: 74853 - protein, 15 aa, Artificial Sequence
  Description of Artificial Sequence: Synthetic peptide
  Seed: GMDPRMCSLMQGSTL
GMDWRMFSSMQASTL

SEQ ID NO: 74854 - protein, 15 aa, Artificial Sequence
  Description of Artificial Sequence: Synthetic peptide
  Seed: GMDPRMCSLMQGSTL
GMDWRMFSSMQGSTL

SEQ ID NO: 74855 - protein, 15 aa, Artificial Sequence
  Description of Artificial Sequence: Synthetic peptide
  Seed: GMDPRMCSLMQGSTL
GMDWRMFSSMQISTL

SEQ ID NO: 74856 - protein, 15 aa, Artificial Sequence
  Description of Artificial Sequence: Synthetic peptide
  Seed: GMDPRMCSLMQGSTL
GMDWRMFSSMQNSTL

SEQ ID NO: 74857 - protein, 15 aa, Artificial Sequence
  Description of Artificial Sequence: Synthetic peptide
  Seed: GMDPRMCSLMQGSTL
GMDWRMFSSMQSSTL

SEQ ID NO: 74858 - protein, 15 aa, Artificial Sequence
  Description of Artificial Sequence: Synthetic peptide
  Seed: GMDPRMCSLMQGSTL
GMDWRMFSSMQTSTL

SEQ ID NO: 74859 - protein, 15 aa, Artificial Sequence
  Description of Artificial Sequence: Synthetic peptide
  Seed: GMDPRMCSLMQGSTL
GMDWRMFSSMQVSTL

SEQ ID NO: 74860 - protein, 15 aa, Artificial Sequence
  Description of Artificial Sequence: Synthetic peptide
  Seed: GMDPRMCSLMQGSTL
GMDWRMFSTMQASTL

SEQ ID NO: 74861 - protein, 15 aa, Artificial Sequence
  Description of Artificial Sequence: Synthetic peptide
  Seed: GMDPRMCSLMQGSTL
GMDWRMFSTMQGSTL

SEQ ID NO: 74862 - protein, 15 aa, Artificial Sequence
  Description of Artificial Sequence: Synthetic peptide
  Seed: GMDPRMCSLMQGSTL
GMDWRMFSTMQNSTL

SEQ ID NO: 74863 - protein, 15 aa, Artificial Sequence
  Description of Artificial Sequence: Synthetic peptide
  Seed: GMDPRMCSLMQGSTL
GMDWRMFSTMQPSTL

SEQ ID NO: 74864 - protein, 15 aa, Artificial Sequence
  Description of Artificial Sequence: Synthetic peptide
  Seed: GMDPRMCSLMQGSTL
GMDWRMFSTMQSSTL

SEQ ID NO: 74865 - protein, 15 aa, Artificial Sequence
  Description of Artificial Sequence: Synthetic peptide
  Seed: GMDPRMCSLMQGSTL
GMDWRMFSTMQTSTL

SEQ ID NO: 74866 - protein, 15 aa, Artificial Sequence
  Description of Artificial Sequence: Synthetic peptide
  Seed: GMDPRMCSLMQGSTL
GMDWRMFSTMQVSTL

SEQ ID NO: 74867 - protein, 15 aa, Artificial Sequence
  Description of Artificial Sequence: Synthetic peptide
  Seed: GMDPRMCSLMQGSTL
GMDWRMFSVMQASTL

SEQ ID NO: 74868 - protein, 15 aa, Artificial Sequence
  Description of Artificial Sequence: Synthetic peptide
  Seed: GMDPRMCSLMQGSTL
GMDWRMFSVMQGSTL

SEQ ID NO: 74869 - protein, 15 aa, Artificial Sequence
  Description of Artificial Sequence: Synthetic peptide
  Seed: GMDPRMCSLMQGSTL
GMDWRMFSVMQHSTL

SEQ ID NO: 74870 - protein, 15 aa, Artificial Sequence
  Description of Artificial Sequence: Synthetic peptide
  Seed: GMDPRMCSLMQGSTL
GMDWRMFSVMQNSTL

SEQ ID NO: 74871 - protein, 15 aa, Artificial Sequence
  Description of Artificial Sequence: Synthetic peptide
  Seed: GMDPRMCSLMQGSTL
GMDWRMFSVMQPSTL

SEQ ID NO: 74872 - protein, 15 aa, Artificial Sequence
  Description of Artificial Sequence: Synthetic peptide
  Seed: GMDPRMCSLMQGSTL
GMDWRMFSVMQSSTL

SEQ ID NO: 74873 - protein, 15 aa, Artificial Sequence
  Description of Artificial Sequence: Synthetic peptide
  Seed: GMDPRMCSLMQGSTL
GMDWRMFSVMQTSTL

SEQ ID NO: 74874 - protein, 15 aa, Artificial Sequence
  Description of Artificial Sequence: Synthetic peptide
  Seed: GMDPRMCSLMQGSTL
GMDWRMFSVMQVSTL

SEQ ID NO: 74875 - protein, 15 aa, Artificial Sequence
  Description of Artificial Sequence: Synthetic peptide
  Seed: GMDPRMCSLMQGSTL
GMDWRMISAMQASTL

SEQ ID NO: 74876 - protein, 15 aa, Artificial Sequence
  Description of Artificial Sequence: Synthetic peptide
  Seed: GMDPRMCSLMQGSTL
GMDWRMISAMQDSTL

SEQ ID NO: 74877 - protein, 15 aa, Artificial Sequence
  Description of Artificial Sequence: Synthetic peptide
  Seed: GMDPRMCSLMQGSTL
GMDWRMISAMQESTL

SEQ ID NO: 74878 - protein, 15 aa, Artificial Sequence
  Description of Artificial Sequence: Synthetic peptide
  Seed: GMDPRMCSLMQGSTL
GMDWRMISAMQGSTL

SEQ ID NO: 74879 - protein, 15 aa, Artificial Sequence
  Description of Artificial Sequence: Synthetic peptide
  Seed: GMDPRMCSLMQGSTL
GMDWRMISAMQHSTL

SEQ ID NO: 74880 - protein, 15 aa, Artificial Sequence
  Description of Artificial Sequence: Synthetic peptide
  Seed: GMDPRMCSLMQGSTL
GMDWRMISAMQISTL

SEQ ID NO: 74881 - protein, 15 aa, Artificial Sequence
  Description of Artificial Sequence: Synthetic peptide
  Seed: GMDPRMCSLMQGSTL
GMDWRMISAMQLSTL

SEQ ID NO: 74882 - protein, 15 aa, Artificial Sequence
  Description of Artificial Sequence: Synthetic peptide
  Seed: GMDPRMCSLMQGSTL
GMDWRMISAMQMSTL

SEQ ID NO: 74883 - protein, 15 aa, Artificial Sequence
  Description of Artificial Sequence: Synthetic peptide
  Seed: GMDPRMCSLMQGSTL
GMDWRMISAMQNSTL

SEQ ID NO: 74884 - protein, 15 aa, Artificial Sequence
  Description of Artificial Sequence: Synthetic peptide
  Seed: GMDPRMCSLMQGSTL
GMDWRMISAMQPSTL

SEQ ID NO: 74885 - protein, 15 aa, Artificial Sequence
  Description of Artificial Sequence: Synthetic peptide
  Seed: GMDPRMCSLMQGSTL
GMDWRMISAMQQSTL

SEQ ID NO: 74886 - protein, 15 aa, Artificial Sequence
  Description of Artificial Sequence: Synthetic peptide
  Seed: GMDPRMCSLMQGSTL
GMDWRMISAMQSSTL

SEQ ID NO: 74887 - protein, 15 aa, Artificial Sequence
  Description of Artificial Sequence: Synthetic peptide
  Seed: GMDPRMCSLMQGSTL
GMDWRMISAMQTSTL

SEQ ID NO: 74888 - protein, 15 aa, Artificial Sequence
  Description of Artificial Sequence: Synthetic peptide
  Seed: GMDPRMCSLMQGSTL
GMDWRMISAMQVSTL

SEQ ID NO: 74889 - protein, 15 aa, Artificial Sequence
  Description of Artificial Sequence: Synthetic peptide
  Seed: GMDPRMCSLMQGSTL
GMDWRMISGMQASTL

SEQ ID NO: 74890 - protein, 15 aa, Artificial Sequence
  Description of Artificial Sequence: Synthetic peptide
  Seed: GMDPRMCSLMQGSTL
GMDWRMISGMQHSTL

SEQ ID NO: 74891 - protein, 15 aa, Artificial Sequence
  Description of Artificial Sequence: Synthetic peptide
  Seed: GMDPRMCSLMQGSTL
GMDWRMISGMQISTL

SEQ ID NO: 74892 - protein, 15 aa, Artificial Sequence
  Description of Artificial Sequence: Synthetic peptide
  Seed: GMDPRMCSLMQGSTL
GMDWRMISGMQLSTL

SEQ ID NO: 74893 - protein, 15 aa, Artificial Sequence
  Description of Artificial Sequence: Synthetic peptide
  Seed: GMDPRMCSLMQGSTL
GMDWRMISGMQMSTL

SEQ ID NO: 74894 - protein, 15 aa, Artificial Sequence
  Description of Artificial Sequence: Synthetic peptide
  Seed: GMDPRMCSLMQGSTL
GMDWRMISGMQNSTL

SEQ ID NO: 74895 - protein, 15 aa, Artificial Sequence
  Description of Artificial Sequence: Synthetic peptide
  Seed: GMDPRMCSLMQGSTL
GMDWRMISGMQSSTL

SEQ ID NO: 74896 - protein, 15 aa, Artificial Sequence
  Description of Artificial Sequence: Synthetic peptide
  Seed: GMDPRMCSLMQGSTL
GMDWRMISGMQTSTL

SEQ ID NO: 74897 - protein, 15 aa, Artificial Sequence
  Description of Artificial Sequence: Synthetic peptide
  Seed: GMDPRMCSLMQGSTL
GMDWRMISGMQVSTL

SEQ ID NO: 74898 - protein, 15 aa, Artificial Sequence
  Description of Artificial Sequence: Synthetic peptide
  Seed: GMDPRMCSLMQGSTL
GMDWRMISIMQASTL

SEQ ID NO: 74899 - protein, 15 aa, Artificial Sequence
  Description of Artificial Sequence: Synthetic peptide
  Seed: GMDPRMCSLMQGSTL
GMDWRMISIMQGSTL

SEQ ID NO: 74900 - protein, 15 aa, Artificial Sequence
  Description of Artificial Sequence: Synthetic peptide
  Seed: GMDPRMCSLMQGSTL
GMDWRMISIMQHSTL

SEQ ID NO: 74901 - protein, 15 aa, Artificial Sequence
  Description of Artificial Sequence: Synthetic peptide
  Seed: GMDPRMCSLMQGSTL
GMDWRMISIMQNSTL

SEQ ID NO: 74902 - protein, 15 aa, Artificial Sequence
  Description of Artificial Sequence: Synthetic peptide
  Seed: GMDPRMCSLMQGSTL
GMDWRMISIMQPSTL

SEQ ID NO: 74903 - protein, 15 aa, Artificial Sequence
  Description of Artificial Sequence: Synthetic peptide
  Seed: GMDPRMCSLMQGSTL
GMDWRMISIMQSSTL

SEQ ID NO: 74904 - protein, 15 aa, Artificial Sequence
  Description of Artificial Sequence: Synthetic peptide
  Seed: GMDPRMCSLMQGSTL
GMDWRMISIMQTSTL

SEQ ID NO: 74905 - protein, 15 aa, Artificial Sequence
  Description of Artificial Sequence: Synthetic peptide
  Seed: GMDPRMCSLMQGSTL
GMDWRMISLMQASTL

SEQ ID NO: 74906 - protein, 15 aa, Artificial Sequence
  Description of Artificial Sequence: Synthetic peptide
  Seed: GMDPRMCSLMQGSTL
GMDWRMISLMQNSTL

SEQ ID NO: 74907 - protein, 15 aa, Artificial Sequence
  Description of Artificial Sequence: Synthetic peptide
  Seed: GMDPRMCSLMQGSTL
GMDWRMISLMQSSTL

SEQ ID NO: 74908 - protein, 15 aa, Artificial Sequence
  Description of Artificial Sequence: Synthetic peptide
  Seed: GMDPRMCSLMQGSTL
GMDWRMISMMQASTL

SEQ ID NO: 74909 - protein, 15 aa, Artificial Sequence
  Description of Artificial Sequence: Synthetic peptide
  Seed: GMDPRMCSLMQGSTL
GMDWRMISMMQNSTL

SEQ ID NO: 74910 - protein, 15 aa, Artificial Sequence
  Description of Artificial Sequence: Synthetic peptide
  Seed: GMDPRMCSLMQGSTL
GMDWRMISMMQPSTL

SEQ ID NO: 74911 - protein, 15 aa, Artificial Sequence
  Description of Artificial Sequence: Synthetic peptide
  Seed: GMDPRMCSLMQGSTL
GMDWRMISMMQSSTL

SEQ ID NO: 74912 - protein, 15 aa, Artificial Sequence
  Description of Artificial Sequence: Synthetic peptide
  Seed: GMDPRMCSLMQGSTL
GMDWRMISMMQTSTL

SEQ ID NO: 74913 - protein, 15 aa, Artificial Sequence
  Description of Artificial Sequence: Synthetic peptide
  Seed: GMDPRMCSLMQGSTL
GMDWRMISNMQASTL

SEQ ID NO: 74914 - protein, 15 aa, Artificial Sequence
  Description of Artificial Sequence: Synthetic peptide
  Seed: GMDPRMCSLMQGSTL
GMDWRMISNMQNSTL

SEQ ID NO: 74915 - protein, 15 aa, Artificial Sequence
  Description of Artificial Sequence: Synthetic peptide
  Seed: GMDPRMCSLMQGSTL
GMDWRMISNMQSSTL

SEQ ID NO: 74916 - protein, 15 aa, Artificial Sequence
  Description of Artificial Sequence: Synthetic peptide
  Seed: GMDPRMCSLMQGSTL
GMDWRMISNMQTSTL

SEQ ID NO: 74917 - protein, 15 aa, Artificial Sequence
  Description of Artificial Sequence: Synthetic peptide
  Seed: GMDPRMCSLMQGSTL
GMDWRMISNMQVSTL

SEQ ID NO: 74918 - protein, 15 aa, Artificial Sequence
  Description of Artificial Sequence: Synthetic peptide
  Seed: GMDPRMCSLMQGSTL
GMDWRMISPMQASTL

SEQ ID NO: 74919 - protein, 15 aa, Artificial Sequence
  Description of Artificial Sequence: Synthetic peptide
  Seed: GMDPRMCSLMQGSTL
GMDWRMISPMQGSTL

SEQ ID NO: 74920 - protein, 15 aa, Artificial Sequence
  Description of Artificial Sequence: Synthetic peptide
  Seed: GMDPRMCSLMQGSTL
GMDWRMISPMQHSTL

SEQ ID NO: 74921 - protein, 15 aa, Artificial Sequence
  Description of Artificial Sequence: Synthetic peptide
  Seed: GMDPRMCSLMQGSTL
GMDWRMISPMQISTL

SEQ ID NO: 74922 - protein, 15 aa, Artificial Sequence
  Description of Artificial Sequence: Synthetic peptide
  Seed: GMDPRMCSLMQGSTL
GMDWRMISPMQLSTL

SEQ ID NO: 74923 - protein, 15 aa, Artificial Sequence
  Description of Artificial Sequence: Synthetic peptide
  Seed: GMDPRMCSLMQGSTL
GMDWRMISPMQMSTL

SEQ ID NO: 74924 - protein, 15 aa, Artificial Sequence
  Description of Artificial Sequence: Synthetic peptide
  Seed: GMDPRMCSLMQGSTL
GMDWRMISPMQNSTL

SEQ ID NO: 74925 - protein, 15 aa, Artificial Sequence
  Description of Artificial Sequence: Synthetic peptide
  Seed: GMDPRMCSLMQGSTL
GMDWRMISPMQQSTL

SEQ ID NO: 74926 - protein, 15 aa, Artificial Sequence
  Description of Artificial Sequence: Synthetic peptide
  Seed: GMDPRMCSLMQGSTL
GMDWRMISPMQSSTL

SEQ ID NO: 74927 - protein, 15 aa, Artificial Sequence
  Description of Artificial Sequence: Synthetic peptide
  Seed: GMDPRMCSLMQGSTL
GMDWRMISPMQTSTL

SEQ ID NO: 74928 - protein, 15 aa, Artificial Sequence
  Description of Artificial Sequence: Synthetic peptide
  Seed: GMDPRMCSLMQGSTL
GMDWRMISPMQVSTL

SEQ ID NO: 74929 - protein, 15 aa, Artificial Sequence
  Description of Artificial Sequence: Synthetic peptide
  Seed: GMDPRMCSLMQGSTL
GMDWRMISSMQASTL

SEQ ID NO: 74930 - protein, 15 aa, Artificial Sequence
  Description of Artificial Sequence: Synthetic peptide
  Seed: GMDPRMCSLMQGSTL
GMDWRMISSMQGSTL

SEQ ID NO: 74931 - protein, 15 aa, Artificial Sequence
  Description of Artificial Sequence: Synthetic peptide
  Seed: GMDPRMCSLMQGSTL
GMDWRMISSMQHSTL

SEQ ID NO: 74932 - protein, 15 aa, Artificial Sequence
  Description of Artificial Sequence: Synthetic peptide
  Seed: GMDPRMCSLMQGSTL
GMDWRMISSMQISTL

SEQ ID NO: 74933 - protein, 15 aa, Artificial Sequence
  Description of Artificial Sequence: Synthetic peptide
  Seed: GMDPRMCSLMQGSTL
GMDWRMISSMQLSTL

SEQ ID NO: 74934 - protein, 15 aa, Artificial Sequence
  Description of Artificial Sequence: Synthetic peptide
  Seed: GMDPRMCSLMQGSTL
GMDWRMISSMQMSTL

SEQ ID NO: 74935 - protein, 15 aa, Artificial Sequence
  Description of Artificial Sequence: Synthetic peptide
  Seed: GMDPRMCSLMQGSTL
GMDWRMISSMQNSTL

SEQ ID NO: 74936 - protein, 15 aa, Artificial Sequence
  Description of Artificial Sequence: Synthetic peptide
  Seed: GMDPRMCSLMQGSTL
GMDWRMISSMQPSTL

SEQ ID NO: 74937 - protein, 15 aa, Artificial Sequence
  Description of Artificial Sequence: Synthetic peptide
  Seed: GMDPRMCSLMQGSTL
GMDWRMISSMQQSTL

SEQ ID NO: 74938 - protein, 15 aa, Artificial Sequence
  Description of Artificial Sequence: Synthetic peptide
  Seed: GMDPRMCSLMQGSTL
GMDWRMISSMQSSTL

SEQ ID NO: 74939 - protein, 15 aa, Artificial Sequence
  Description of Artificial Sequence: Synthetic peptide
  Seed: GMDPRMCSLMQGSTL
GMDWRMISSMQTSTL

SEQ ID NO: 74940 - protein, 15 aa, Artificial Sequence
  Description of Artificial Sequence: Synthetic peptide
  Seed: GMDPRMCSLMQGSTL
GMDWRMISSMQVSTL

SEQ ID NO: 74941 - protein, 15 aa, Artificial Sequence
  Description of Artificial Sequence: Synthetic peptide
  Seed: GMDPRMCSLMQGSTL
GMDWRMISTMQASTL

SEQ ID NO: 74942 - protein, 15 aa, Artificial Sequence
  Description of Artificial Sequence: Synthetic peptide
  Seed: GMDPRMCSLMQGSTL
GMDWRMISTMQGSTL

SEQ ID NO: 74943 - protein, 15 aa, Artificial Sequence
  Description of Artificial Sequence: Synthetic peptide
  Seed: GMDPRMCSLMQGSTL
GMDWRMISTMQHSTL

SEQ ID NO: 74944 - protein, 15 aa, Artificial Sequence
  Description of Artificial Sequence: Synthetic peptide
  Seed: GMDPRMCSLMQGSTL
GMDWRMISTMQISTL

SEQ ID NO: 74945 - protein, 15 aa, Artificial Sequence
  Description of Artificial Sequence: Synthetic peptide
  Seed: GMDPRMCSLMQGSTL
GMDWRMISTMQLSTL

SEQ ID NO: 74946 - protein, 15 aa, Artificial Sequence
  Description of Artificial Sequence: Synthetic peptide
  Seed: GMDPRMCSLMQGSTL
GMDWRMISTMQMSTL

SEQ ID NO: 74947 - protein, 15 aa, Artificial Sequence
  Description of Artificial Sequence: Synthetic peptide
  Seed: GMDPRMCSLMQGSTL
GMDWRMISTMQNSTL

SEQ ID NO: 74948 - protein, 15 aa, Artificial Sequence
  Description of Artificial Sequence: Synthetic peptide
  Seed: GMDPRMCSLMQGSTL
GMDWRMISTMQPSTL

SEQ ID NO: 74949 - protein, 15 aa, Artificial Sequence
  Description of Artificial Sequence: Synthetic peptide
  Seed: GMDPRMCSLMQGSTL
GMDWRMISTMQQSTL

SEQ ID NO: 74950 - protein, 15 aa, Artificial Sequence
  Description of Artificial Sequence: Synthetic peptide
  Seed: GMDPRMCSLMQGSTL
GMDWRMISTMQSSTL

SEQ ID NO: 74951 - protein, 15 aa, Artificial Sequence
  Description of Artificial Sequence: Synthetic peptide
  Seed: GMDPRMCSLMQGSTL
GMDWRMISTMQTSTL

SEQ ID NO: 74952 - protein, 15 aa, Artificial Sequence
  Description of Artificial Sequence: Synthetic peptide
  Seed: GMDPRMCSLMQGSTL
GMDWRMISTMQVSTL

SEQ ID NO: 74953 - protein, 15 aa, Artificial Sequence
  Description of Artificial Sequence: Synthetic peptide
  Seed: GMDPRMCSLMQGSTL
GMDWRMISVMQASTL

SEQ ID NO: 74954 - protein, 15 aa, Artificial Sequence
  Description of Artificial Sequence: Synthetic peptide
  Seed: GMDPRMCSLMQGSTL
GMDWRMISVMQGSTL

SEQ ID NO: 74955 - protein, 15 aa, Artificial Sequence
  Description of Artificial Sequence: Synthetic peptide
  Seed: GMDPRMCSLMQGSTL
GMDWRMISVMQHSTL

SEQ ID NO: 74956 - protein, 15 aa, Artificial Sequence
  Description of Artificial Sequence: Synthetic peptide
  Seed: GMDPRMCSLMQGSTL
GMDWRMISVMQMSTL

SEQ ID NO: 74957 - protein, 15 aa, Artificial Sequence
  Description of Artificial Sequence: Synthetic peptide
  Seed: GMDPRMCSLMQGSTL
GMDWRMISVMQNSTL

SEQ ID NO: 74958 - protein, 15 aa, Artificial Sequence
  Description of Artificial Sequence: Synthetic peptide
  Seed: GMDPRMCSLMQGSTL
GMDWRMISVMQPSTL

SEQ ID NO: 74959 - protein, 15 aa, Artificial Sequence
  Description of Artificial Sequence: Synthetic peptide
  Seed: GMDPRMCSLMQGSTL
GMDWRMISVMQSSTL

SEQ ID NO: 74960 - protein, 15 aa, Artificial Sequence
  Description of Artificial Sequence: Synthetic peptide
  Seed: GMDPRMCSLMQGSTL
GMDWRMISVMQTSTL

SEQ ID NO: 74961 - protein, 15 aa, Artificial Sequence
  Description of Artificial Sequence: Synthetic peptide
  Seed: GMDPRMCSLMQGSTL
GMDWRMISVMQVSTL

SEQ ID NO: 74962 - protein, 15 aa, Artificial Sequence
  Description of Artificial Sequence: Synthetic peptide
  Seed: GMDPRMCSLMQGSTL
GMDWRMLSAMQASTL

SEQ ID NO: 74963 - protein, 15 aa, Artificial Sequence
  Description of Artificial Sequence: Synthetic peptide
  Seed: GMDPRMCSLMQGSTL
GMDWRMLSAMQDSTL

SEQ ID NO: 74964 - protein, 15 aa, Artificial Sequence
  Description of Artificial Sequence: Synthetic peptide
  Seed: GMDPRMCSLMQGSTL
GMDWRMLSAMQESTL

SEQ ID NO: 74965 - protein, 15 aa, Artificial Sequence
  Description of Artificial Sequence: Synthetic peptide
  Seed: GMDPRMCSLMQGSTL
GMDWRMLSAMQGSTL

SEQ ID NO: 74966 - protein, 15 aa, Artificial Sequence
  Description of Artificial Sequence: Synthetic peptide
  Seed: GMDPRMCSLMQGSTL
GMDWRMLSAMQHSTL

SEQ ID NO: 74967 - protein, 15 aa, Artificial Sequence
  Description of Artificial Sequence: Synthetic peptide
  Seed: GMDPRMCSLMQGSTL
GMDWRMLSAMQISTL

SEQ ID NO: 74968 - protein, 15 aa, Artificial Sequence
  Description of Artificial Sequence: Synthetic peptide
  Seed: GMDPRMCSLMQGSTL
GMDWRMLSAMQLSTL

SEQ ID NO: 74969 - protein, 15 aa, Artificial Sequence
  Description of Artificial Sequence: Synthetic peptide
  Seed: GMDPRMCSLMQGSTL
GMDWRMLSAMQMSTL

SEQ ID NO: 74970 - protein, 15 aa, Artificial Sequence
  Description of Artificial Sequence: Synthetic peptide
  Seed: GMDPRMCSLMQGSTL
GMDWRMLSAMQNSTL

SEQ ID NO: 74971 - protein, 15 aa, Artificial Sequence
  Description of Artificial Sequence: Synthetic peptide
  Seed: GMDPRMCSLMQGSTL
GMDWRMLSAMQPSTL

SEQ ID NO: 74972 - protein, 15 aa, Artificial Sequence
  Description of Artificial Sequence: Synthetic peptide
  Seed: GMDPRMCSLMQGSTL
GMDWRMLSAMQQSTL

SEQ ID NO: 74973 - protein, 15 aa, Artificial Sequence
  Description of Artificial Sequence: Synthetic peptide
  Seed: GMDPRMCSLMQGSTL
GMDWRMLSAMQSSTL

SEQ ID NO: 74974 - protein, 15 aa, Artificial Sequence
  Description of Artificial Sequence: Synthetic peptide
  Seed: GMDPRMCSLMQGSTL
GMDWRMLSAMQTSTL

SEQ ID NO: 74975 - protein, 15 aa, Artificial Sequence
  Description of Artificial Sequence: Synthetic peptide
  Seed: GMDPRMCSLMQGSTL
GMDWRMLSAMQVSTL

SEQ ID NO: 74976 - protein, 15 aa, Artificial Sequence
  Description of Artificial Sequence: Synthetic peptide
  Seed: GMDPRMCSLMQGSTL
GMDWRMLSGMQASTL

SEQ ID NO: 74977 - protein, 15 aa, Artificial Sequence
  Description of Artificial Sequence: Synthetic peptide
  Seed: GMDPRMCSLMQGSTL
GMDWRMLSGMQGSTL

SEQ ID NO: 74978 - protein, 15 aa, Artificial Sequence
  Description of Artificial Sequence: Synthetic peptide
  Seed: GMDPRMCSLMQGSTL
GMDWRMLSGMQHSTL

SEQ ID NO: 74979 - protein, 15 aa, Artificial Sequence
  Description of Artificial Sequence: Synthetic peptide
  Seed: GMDPRMCSLMQGSTL
GMDWRMLSGMQISTL

SEQ ID NO: 74980 - protein, 15 aa, Artificial Sequence
  Description of Artificial Sequence: Synthetic peptide
  Seed: GMDPRMCSLMQGSTL
GMDWRMLSGMQLSTL

SEQ ID NO: 74981 - protein, 15 aa, Artificial Sequence
  Description of Artificial Sequence: Synthetic peptide
  Seed: GMDPRMCSLMQGSTL
GMDWRMLSGMQMSTL

SEQ ID NO: 74982 - protein, 15 aa, Artificial Sequence
  Description of Artificial Sequence: Synthetic peptide
  Seed: GMDPRMCSLMQGSTL
GMDWRMLSGMQNSTL

SEQ ID NO: 74983 - protein, 15 aa, Artificial Sequence
  Description of Artificial Sequence: Synthetic peptide
  Seed: GMDPRMCSLMQGSTL
GMDWRMLSGMQSSTL

SEQ ID NO: 74984 - protein, 15 aa, Artificial Sequence
  Description of Artificial Sequence: Synthetic peptide
  Seed: GMDPRMCSLMQGSTL
GMDWRMLSGMQTSTL

SEQ ID NO: 74985 - protein, 15 aa, Artificial Sequence
  Description of Artificial Sequence: Synthetic peptide
  Seed: GMDPRMCSLMQGSTL
GMDWRMLSGMQVSTL

SEQ ID NO: 74986 - protein, 15 aa, Artificial Sequence
  Description of Artificial Sequence: Synthetic peptide
  Seed: GMDPRMCSLMQGSTL
GMDWRMLSHMQASTL

SEQ ID NO: 74987 - protein, 15 aa, Artificial Sequence
  Description of Artificial Sequence: Synthetic peptide
  Seed: GMDPRMCSLMQGSTL
GMDWRMLSIMQASTL

SEQ ID NO: 74988 - protein, 15 aa, Artificial Sequence
  Description of Artificial Sequence: Synthetic peptide
  Seed: GMDPRMCSLMQGSTL
GMDWRMLSIMQGSTL

SEQ ID NO: 74989 - protein, 15 aa, Artificial Sequence
  Description of Artificial Sequence: Synthetic peptide
  Seed: GMDPRMCSLMQGSTL
GMDWRMLSIMQHSTL

SEQ ID NO: 74990 - protein, 15 aa, Artificial Sequence
  Description of Artificial Sequence: Synthetic peptide
  Seed: GMDPRMCSLMQGSTL
GMDWRMLSIMQMSTL

SEQ ID NO: 74991 - protein, 15 aa, Artificial Sequence
  Description of Artificial Sequence: Synthetic peptide
  Seed: GMDPRMCSLMQGSTL
GMDWRMLSIMQNSTL

SEQ ID NO: 74992 - protein, 15 aa, Artificial Sequence
  Description of Artificial Sequence: Synthetic peptide
  Seed: GMDPRMCSLMQGSTL
GMDWRMLSIMQPSTL

SEQ ID NO: 74993 - protein, 15 aa, Artificial Sequence
  Description of Artificial Sequence: Synthetic peptide
  Seed: GMDPRMCSLMQGSTL
GMDWRMLSIMQSSTL

SEQ ID NO: 74994 - protein, 15 aa, Artificial Sequence
  Description of Artificial Sequence: Synthetic peptide
  Seed: GMDPRMCSLMQGSTL
GMDWRMLSIMQTSTL

SEQ ID NO: 74995 - protein, 15 aa, Artificial Sequence
  Description of Artificial Sequence: Synthetic peptide
  Seed: GMDPRMCSLMQGSTL
GMDWRMLSIMQVSTL

SEQ ID NO: 74996 - protein, 15 aa, Artificial Sequence
  Description of Artificial Sequence: Synthetic peptide
  Seed: GMDPRMCSLMQGSTL
GMDWRMLSLMQASTL

SEQ ID NO: 74997 - protein, 15 aa, Artificial Sequence
  Description of Artificial Sequence: Synthetic peptide
  Seed: GMDPRMCSLMQGSTL
GMDWRMLSLMQNSTL

SEQ ID NO: 74998 - protein, 15 aa, Artificial Sequence
  Description of Artificial Sequence: Synthetic peptide
  Seed: GMDPRMCSLMQGSTL
GMDWRMLSLMQSSTL

SEQ ID NO: 74999 - protein, 15 aa, Artificial Sequence
  Description of Artificial Sequence: Synthetic peptide
  Seed: GMDPRMCSLMQGSTL
GMDWRMLSLMQTSTL

SEQ ID NO: 75000 - protein, 15 aa, Artificial Sequence
  Description of Artificial Sequence: Synthetic peptide
  Seed: GMDPRMCSLMQGSTL
GMDWRMLSMMQASTL

SEQ ID NO: 75001 - protein, 15 aa, Artificial Sequence
  Description of Artificial Sequence: Synthetic peptide
  Seed: GMDPRMCSLMQGSTL
GMDWRMLSMMQHSTL

SEQ ID NO: 75002 - protein, 15 aa, Artificial Sequence
  Description of Artificial Sequence: Synthetic peptide
  Seed: GMDPRMCSLMQGSTL
GMDWRMLSMMQNSTL

SEQ ID NO: 75003 - protein, 15 aa, Artificial Sequence
  Description of Artificial Sequence: Synthetic peptide
  Seed: GMDPRMCSLMQGSTL
GMDWRMLSMMQPSTL

SEQ ID NO: 75004 - protein, 15 aa, Artificial Sequence
  Description of Artificial Sequence: Synthetic peptide
  Seed: GMDPRMCSLMQGSTL
GMDWRMLSMMQSSTL

SEQ ID NO: 75005 - protein, 15 aa, Artificial Sequence
  Description of Artificial Sequence: Synthetic peptide
  Seed: GMDPRMCSLMQGSTL
GMDWRMLSMMQTSTL

SEQ ID NO: 75006 - protein, 15 aa, Artificial Sequence
  Description of Artificial Sequence: Synthetic peptide
  Seed: GMDPRMCSLMQGSTL
GMDWRMLSNMQASTL

SEQ ID NO: 75007 - protein, 15 aa, Artificial Sequence
  Description of Artificial Sequence: Synthetic peptide
  Seed: GMDPRMCSLMQGSTL
GMDWRMLSNMQGSTL

SEQ ID NO: 75008 - protein, 15 aa, Artificial Sequence
  Description of Artificial Sequence: Synthetic peptide
  Seed: GMDPRMCSLMQGSTL
GMDWRMLSNMQHSTL

SEQ ID NO: 75009 - protein, 15 aa, Artificial Sequence
  Description of Artificial Sequence: Synthetic peptide
  Seed: GMDPRMCSLMQGSTL
GMDWRMLSNMQISTL

SEQ ID NO: 75010 - protein, 15 aa, Artificial Sequence
  Description of Artificial Sequence: Synthetic peptide
  Seed: GMDPRMCSLMQGSTL
GMDWRMLSNMQLSTL

SEQ ID NO: 75011 - protein, 15 aa, Artificial Sequence
  Description of Artificial Sequence: Synthetic peptide
  Seed: GMDPRMCSLMQGSTL
GMDWRMLSNMQMSTL

SEQ ID NO: 75012 - protein, 15 aa, Artificial Sequence
  Description of Artificial Sequence: Synthetic peptide
  Seed: GMDPRMCSLMQGSTL
GMDWRMLSNMQNSTL

SEQ ID NO: 75013 - protein, 15 aa, Artificial Sequence
  Description of Artificial Sequence: Synthetic peptide
  Seed: GMDPRMCSLMQGSTL
GMDWRMLSNMQSSTL

SEQ ID NO: 75014 - protein, 15 aa, Artificial Sequence
  Description of Artificial Sequence: Synthetic peptide
  Seed: GMDPRMCSLMQGSTL
GMDWRMLSNMQTSTL

SEQ ID NO: 75015 - protein, 15 aa, Artificial Sequence
  Description of Artificial Sequence: Synthetic peptide
  Seed: GMDPRMCSLMQGSTL
GMDWRMLSNMQVSTL

SEQ ID NO: 75016 - protein, 15 aa, Artificial Sequence
  Description of Artificial Sequence: Synthetic peptide
  Seed: GMDPRMCSLMQGSTL
GMDWRMLSPMQASTL

SEQ ID NO: 75017 - protein, 15 aa, Artificial Sequence
  Description of Artificial Sequence: Synthetic peptide
  Seed: GMDPRMCSLMQGSTL
GMDWRMLSPMQDSTL

SEQ ID NO: 75018 - protein, 15 aa, Artificial Sequence
  Description of Artificial Sequence: Synthetic peptide
  Seed: GMDPRMCSLMQGSTL
GMDWRMLSPMQESTL

SEQ ID NO: 75019 - protein, 15 aa, Artificial Sequence
  Description of Artificial Sequence: Synthetic peptide
  Seed: GMDPRMCSLMQGSTL
GMDWRMLSPMQGSTL

SEQ ID NO: 75020 - protein, 15 aa, Artificial Sequence
  Description of Artificial Sequence: Synthetic peptide
  Seed: GMDPRMCSLMQGSTL
GMDWRMLSPMQHSTL

SEQ ID NO: 75021 - protein, 15 aa, Artificial Sequence
  Description of Artificial Sequence: Synthetic peptide
  Seed: GMDPRMCSLMQGSTL
GMDWRMLSPMQISTL

SEQ ID NO: 75022 - protein, 15 aa, Artificial Sequence
  Description of Artificial Sequence: Synthetic peptide
  Seed: GMDPRMCSLMQGSTL
GMDWRMLSPMQLSTL

SEQ ID NO: 75023 - protein, 15 aa, Artificial Sequence
  Description of Artificial Sequence: Synthetic peptide
  Seed: GMDPRMCSLMQGSTL
GMDWRMLSPMQMSTL

SEQ ID NO: 75024 - protein, 15 aa, Artificial Sequence
  Description of Artificial Sequence: Synthetic peptide
  Seed: GMDPRMCSLMQGSTL
GMDWRMLSPMQNSTL

SEQ ID NO: 75025 - protein, 15 aa, Artificial Sequence
  Description of Artificial Sequence: Synthetic peptide
  Seed: GMDPRMCSLMQGSTL
GMDWRMLSPMQPSTL

SEQ ID NO: 75026 - protein, 15 aa, Artificial Sequence
  Description of Artificial Sequence: Synthetic peptide
  Seed: GMDPRMCSLMQGSTL
GMDWRMLSPMQQSTL

SEQ ID NO: 75027 - protein, 15 aa, Artificial Sequence
  Description of Artificial Sequence: Synthetic peptide
  Seed: GMDPRMCSLMQGSTL
GMDWRMLSPMQSSTL

SEQ ID NO: 75028 - protein, 15 aa, Artificial Sequence
  Description of Artificial Sequence: Synthetic peptide
  Seed: GMDPRMCSLMQGSTL
GMDWRMLSPMQTSTL

SEQ ID NO: 75029 - protein, 15 aa, Artificial Sequence
  Description of Artificial Sequence: Synthetic peptide
  Seed: GMDPRMCSLMQGSTL
GMDWRMLSPMQVSTL

SEQ ID NO: 75030 - protein, 15 aa, Artificial Sequence
  Description of Artificial Sequence: Synthetic peptide
  Seed: GMDPRMCSLMQGSTL
GMDWRMLSSMQASTL

SEQ ID NO: 75031 - protein, 15 aa, Artificial Sequence
  Description of Artificial Sequence: Synthetic peptide
  Seed: GMDPRMCSLMQGSTL
GMDWRMLSSMQDSTL

SEQ ID NO: 75032 - protein, 15 aa, Artificial Sequence
  Description of Artificial Sequence: Synthetic peptide
  Seed: GMDPRMCSLMQGSTL
GMDWRMLSSMQESTL

SEQ ID NO: 75033 - protein, 15 aa, Artificial Sequence
  Description of Artificial Sequence: Synthetic peptide
  Seed: GMDPRMCSLMQGSTL
GMDWRMLSSMQGSTL

SEQ ID NO: 75034 - protein, 15 aa, Artificial Sequence
  Description of Artificial Sequence: Synthetic peptide
  Seed: GMDPRMCSLMQGSTL
GMDWRMLSSMQHSTL

SEQ ID NO: 75035 - protein, 15 aa, Artificial Sequence
  Description of Artificial Sequence: Synthetic peptide
  Seed: GMDPRMCSLMQGSTL
GMDWRMLSSMQISTL

SEQ ID NO: 75036 - protein, 15 aa, Artificial Sequence
  Description of Artificial Sequence: Synthetic peptide
  Seed: GMDPRMCSLMQGSTL
GMDWRMLSSMQLSTL

SEQ ID NO: 75037 - protein, 15 aa, Artificial Sequence
  Description of Artificial Sequence: Synthetic peptide
  Seed: GMDPRMCSLMQGSTL
GMDWRMLSSMQMSTL

SEQ ID NO: 75038 - protein, 15 aa, Artificial Sequence
  Description of Artificial Sequence: Synthetic peptide
  Seed: GMDPRMCSLMQGSTL
GMDWRMLSSMQNSTL

SEQ ID NO: 75039 - protein, 15 aa, Artificial Sequence
  Description of Artificial Sequence: Synthetic peptide
  Seed: GMDPRMCSLMQGSTL
GMDWRMLSSMQPSTL

SEQ ID NO: 75040 - protein, 15 aa, Artificial Sequence
  Description of Artificial Sequence: Synthetic peptide
  Seed: GMDPRMCSLMQGSTL
GMDWRMLSSMQQSTL

SEQ ID NO: 75041 - protein, 15 aa, Artificial Sequence
  Description of Artificial Sequence: Synthetic peptide
  Seed: GMDPRMCSLMQGSTL
GMDWRMLSSMQSSTL

SEQ ID NO: 75042 - protein, 15 aa, Artificial Sequence
  Description of Artificial Sequence: Synthetic peptide
  Seed: GMDPRMCSLMQGSTL
GMDWRMLSSMQTSTL

SEQ ID NO: 75043 - protein, 15 aa, Artificial Sequence
  Description of Artificial Sequence: Synthetic peptide
  Seed: GMDPRMCSLMQGSTL
GMDWRMLSSMQVSTL

SEQ ID NO: 75044 - protein, 15 aa, Artificial Sequence
  Description of Artificial Sequence: Synthetic peptide
  Seed: GMDPRMCSLMQGSTL
GMDWRMLSTMQASTL

SEQ ID NO: 75045 - protein, 15 aa, Artificial Sequence
  Description of Artificial Sequence: Synthetic peptide
  Seed: GMDPRMCSLMQGSTL
GMDWRMLSTMQDSTL

SEQ ID NO: 75046 - protein, 15 aa, Artificial Sequence
  Description of Artificial Sequence: Synthetic peptide
  Seed: GMDPRMCSLMQGSTL
GMDWRMLSTMQESTL

SEQ ID NO: 75047 - protein, 15 aa, Artificial Sequence
  Description of Artificial Sequence: Synthetic peptide
  Seed: GMDPRMCSLMQGSTL
GMDWRMLSTMQGSTL

SEQ ID NO: 75048 - protein, 15 aa, Artificial Sequence
  Description of Artificial Sequence: Synthetic peptide
  Seed: GMDPRMCSLMQGSTL
GMDWRMLSTMQHSTL

SEQ ID NO: 75049 - protein, 15 aa, Artificial Sequence
  Description of Artificial Sequence: Synthetic peptide
  Seed: GMDPRMCSLMQGSTL
GMDWRMLSTMQISTL

SEQ ID NO: 75050 - protein, 15 aa, Artificial Sequence
  Description of Artificial Sequence: Synthetic peptide
  Seed: GMDPRMCSLMQGSTL
GMDWRMLSTMQLSTL

SEQ ID NO: 75051 - protein, 15 aa, Artificial Sequence
  Description of Artificial Sequence: Synthetic peptide
  Seed: GMDPRMCSLMQGSTL
GMDWRMLSTMQMSTL

SEQ ID NO: 75052 - protein, 15 aa, Artificial Sequence
  Description of Artificial Sequence: Synthetic peptide
  Seed: GMDPRMCSLMQGSTL
GMDWRMLSTMQNSTL

SEQ ID NO: 75053 - protein, 15 aa, Artificial Sequence
  Description of Artificial Sequence: Synthetic peptide
  Seed: GMDPRMCSLMQGSTL
GMDWRMLSTMQPSTL

SEQ ID NO: 75054 - protein, 15 aa, Artificial Sequence
  Description of Artificial Sequence: Synthetic peptide
  Seed: GMDPRMCSLMQGSTL
GMDWRMLSTMQQSTL

SEQ ID NO: 75055 - protein, 15 aa, Artificial Sequence
  Description of Artificial Sequence: Synthetic peptide
  Seed: GMDPRMCSLMQGSTL
GMDWRMLSTMQSSTL

SEQ ID NO: 75056 - protein, 15 aa, Artificial Sequence
  Description of Artificial Sequence: Synthetic peptide
  Seed: GMDPRMCSLMQGSTL
GMDWRMLSTMQTSTL

SEQ ID NO: 75057 - protein, 15 aa, Artificial Sequence
  Description of Artificial Sequence: Synthetic peptide
  Seed: GMDPRMCSLMQGSTL
GMDWRMLSTMQVSTL

SEQ ID NO: 75058 - protein, 15 aa, Artificial Sequence
  Description of Artificial Sequence: Synthetic peptide
  Seed: GMDPRMCSLMQGSTL
GMDWRMLSVMQASTL

SEQ ID NO: 75059 - protein, 15 aa, Artificial Sequence
  Description of Artificial Sequence: Synthetic peptide
  Seed: GMDPRMCSLMQGSTL
GMDWRMLSVMQDSTL

SEQ ID NO: 75060 - protein, 15 aa, Artificial Sequence
  Description of Artificial Sequence: Synthetic peptide
  Seed: GMDPRMCSLMQGSTL
GMDWRMLSVMQESTL

SEQ ID NO: 75061 - protein, 15 aa, Artificial Sequence
  Description of Artificial Sequence: Synthetic peptide
  Seed: GMDPRMCSLMQGSTL
GMDWRMLSVMQGSTL

SEQ ID NO: 75062 - protein, 15 aa, Artificial Sequence
  Description of Artificial Sequence: Synthetic peptide
  Seed: GMDPRMCSLMQGSTL
GMDWRMLSVMQHSTL

SEQ ID NO: 75063 - protein, 15 aa, Artificial Sequence
  Description of Artificial Sequence: Synthetic peptide
  Seed: GMDPRMCSLMQGSTL
GMDWRMLSVMQISTL

SEQ ID NO: 75064 - protein, 15 aa, Artificial Sequence
  Description of Artificial Sequence: Synthetic peptide
  Seed: GMDPRMCSLMQGSTL
GMDWRMLSVMQLSTL

SEQ ID NO: 75065 - protein, 15 aa, Artificial Sequence
  Description of Artificial Sequence: Synthetic peptide
  Seed: GMDPRMCSLMQGSTL
GMDWRMLSVMQMSTL

SEQ ID NO: 75066 - protein, 15 aa, Artificial Sequence
  Description of Artificial Sequence: Synthetic peptide
  Seed: GMDPRMCSLMQGSTL
GMDWRMLSVMQNSTL

SEQ ID NO: 75067 - protein, 15 aa, Artificial Sequence
  Description of Artificial Sequence: Synthetic peptide
  Seed: GMDPRMCSLMQGSTL
GMDWRMLSVMQPSTL

SEQ ID NO: 75068 - protein, 15 aa, Artificial Sequence
  Description of Artificial Sequence: Synthetic peptide
  Seed: GMDPRMCSLMQGSTL
GMDWRMLSVMQQSTL

SEQ ID NO: 75069 - protein, 15 aa, Artificial Sequence
  Description of Artificial Sequence: Synthetic peptide
  Seed: GMDPRMCSLMQGSTL
GMDWRMLSVMQSSTL

SEQ ID NO: 75070 - protein, 15 aa, Artificial Sequence
  Description of Artificial Sequence: Synthetic peptide
  Seed: GMDPRMCSLMQGSTL
GMDWRMLSVMQTSTL

SEQ ID NO: 75071 - protein, 15 aa, Artificial Sequence
  Description of Artificial Sequence: Synthetic peptide
  Seed: GMDPRMCSLMQGSTL
GMDWRMLSVMQVSTL

SEQ ID NO: 75072 - protein, 15 aa, Artificial Sequence
  Description of Artificial Sequence: Synthetic peptide
  Seed: GMDPRMCSLMQGSTL
GMDWRMMSAMQASTL

SEQ ID NO: 75073 - protein, 15 aa, Artificial Sequence
  Description of Artificial Sequence: Synthetic peptide
  Seed: GMDPRMCSLMQGSTL
GMDWRMMSAMQDSTL

SEQ ID NO: 75074 - protein, 15 aa, Artificial Sequence
  Description of Artificial Sequence: Synthetic peptide
  Seed: GMDPRMCSLMQGSTL
GMDWRMMSAMQESTL

SEQ ID NO: 75075 - protein, 15 aa, Artificial Sequence
  Description of Artificial Sequence: Synthetic peptide
  Seed: GMDPRMCSLMQGSTL
GMDWRMMSAMQGSTL

SEQ ID NO: 75076 - protein, 15 aa, Artificial Sequence
  Description of Artificial Sequence: Synthetic peptide
  Seed: GMDPRMCSLMQGSTL
GMDWRMMSAMQHSTL

SEQ ID NO: 75077 - protein, 15 aa, Artificial Sequence
  Description of Artificial Sequence: Synthetic peptide
  Seed: GMDPRMCSLMQGSTL
GMDWRMMSAMQISTL

SEQ ID NO: 75078 - protein, 15 aa, Artificial Sequence
  Description of Artificial Sequence: Synthetic peptide
  Seed: GMDPRMCSLMQGSTL
GMDWRMMSAMQKSTL

SEQ ID NO: 75079 - protein, 15 aa, Artificial Sequence
  Description of Artificial Sequence: Synthetic peptide
  Seed: GMDPRMCSLMQGSTL
GMDWRMMSAMQLSTL

SEQ ID NO: 75080 - protein, 15 aa, Artificial Sequence
  Description of Artificial Sequence: Synthetic peptide
  Seed: GMDPRMCSLMQGSTL
GMDWRMMSAMQMSTL

SEQ ID NO: 75081 - protein, 15 aa, Artificial Sequence
  Description of Artificial Sequence: Synthetic peptide
  Seed: GMDPRMCSLMQGSTL
GMDWRMMSAMQNSTL

SEQ ID NO: 75082 - protein, 15 aa, Artificial Sequence
  Description of Artificial Sequence: Synthetic peptide
  Seed: GMDPRMCSLMQGSTL
GMDWRMMSAMQPSTL

SEQ ID NO: 75083 - protein, 15 aa, Artificial Sequence
  Description of Artificial Sequence: Synthetic peptide
  Seed: GMDPRMCSLMQGSTL
GMDWRMMSAMQQSTL

SEQ ID NO: 75084 - protein, 15 aa, Artificial Sequence
  Description of Artificial Sequence: Synthetic peptide
  Seed: GMDPRMCSLMQGSTL
GMDWRMMSAMQSSTL

SEQ ID NO: 75085 - protein, 15 aa, Artificial Sequence
  Description of Artificial Sequence: Synthetic peptide
  Seed: GMDPRMCSLMQGSTL
GMDWRMMSAMQTSTL

SEQ ID NO: 75086 - protein, 15 aa, Artificial Sequence
  Description of Artificial Sequence: Synthetic peptide
  Seed: GMDPRMCSLMQGSTL
GMDWRMMSAMQVSTL

SEQ ID NO: 75087 - protein, 15 aa, Artificial Sequence
  Description of Artificial Sequence: Synthetic peptide
  Seed: GMDPRMCSLMQGSTL
GMDWRMMSGMQASTL

SEQ ID NO: 75088 - protein, 15 aa, Artificial Sequence
  Description of Artificial Sequence: Synthetic peptide
  Seed: GMDPRMCSLMQGSTL
GMDWRMMSGMQHSTL

SEQ ID NO: 75089 - protein, 15 aa, Artificial Sequence
  Description of Artificial Sequence: Synthetic peptide
  Seed: GMDPRMCSLMQGSTL
GMDWRMMSGMQISTL

SEQ ID NO: 75090 - protein, 15 aa, Artificial Sequence
  Description of Artificial Sequence: Synthetic peptide
  Seed: GMDPRMCSLMQGSTL
GMDWRMMSGMQLSTL

SEQ ID NO: 75091 - protein, 15 aa, Artificial Sequence
  Description of Artificial Sequence: Synthetic peptide
  Seed: GMDPRMCSLMQGSTL
GMDWRMMSGMQMSTL

SEQ ID NO: 75092 - protein, 15 aa, Artificial Sequence
  Description of Artificial Sequence: Synthetic peptide
  Seed: GMDPRMCSLMQGSTL
GMDWRMMSGMQNSTL

SEQ ID NO: 75093 - protein, 15 aa, Artificial Sequence
  Description of Artificial Sequence: Synthetic peptide
  Seed: GMDPRMCSLMQGSTL
GMDWRMMSGMQQSTL

SEQ ID NO: 75094 - protein, 15 aa, Artificial Sequence
  Description of Artificial Sequence: Synthetic peptide
  Seed: GMDPRMCSLMQGSTL
GMDWRMMSGMQSSTL

SEQ ID NO: 75095 - protein, 15 aa, Artificial Sequence
  Description of Artificial Sequence: Synthetic peptide
  Seed: GMDPRMCSLMQGSTL
GMDWRMMSGMQTSTL

SEQ ID NO: 75096 - protein, 15 aa, Artificial Sequence
  Description of Artificial Sequence: Synthetic peptide
  Seed: GMDPRMCSLMQGSTL
GMDWRMMSGMQVSTL

SEQ ID NO: 75097 - protein, 15 aa, Artificial Sequence
  Description of Artificial Sequence: Synthetic peptide
  Seed: GMDPRMCSLMQGSTL
GMDWRMMSHMQASTL

SEQ ID NO: 75098 - protein, 15 aa, Artificial Sequence
  Description of Artificial Sequence: Synthetic peptide
  Seed: GMDPRMCSLMQGSTL
GMDWRMMSIMQASTL

SEQ ID NO: 75099 - protein, 15 aa, Artificial Sequence
  Description of Artificial Sequence: Synthetic peptide
  Seed: GMDPRMCSLMQGSTL
GMDWRMMSIMQGSTL

SEQ ID NO: 75100 - protein, 15 aa, Artificial Sequence
  Description of Artificial Sequence: Synthetic peptide
  Seed: GMDPRMCSLMQGSTL
GMDWRMMSIMQHSTL

SEQ ID NO: 75101 - protein, 15 aa, Artificial Sequence
  Description of Artificial Sequence: Synthetic peptide
  Seed: GMDPRMCSLMQGSTL
GMDWRMMSIMQISTL

SEQ ID NO: 75102 - protein, 15 aa, Artificial Sequence
  Description of Artificial Sequence: Synthetic peptide
  Seed: GMDPRMCSLMQGSTL
GMDWRMMSIMQLSTL

SEQ ID NO: 75103 - protein, 15 aa, Artificial Sequence
  Description of Artificial Sequence: Synthetic peptide
  Seed: GMDPRMCSLMQGSTL
GMDWRMMSIMQMSTL

SEQ ID NO: 75104 - protein, 15 aa, Artificial Sequence
  Description of Artificial Sequence: Synthetic peptide
  Seed: GMDPRMCSLMQGSTL
GMDWRMMSIMQNSTL

SEQ ID NO: 75105 - protein, 15 aa, Artificial Sequence
  Description of Artificial Sequence: Synthetic peptide
  Seed: GMDPRMCSLMQGSTL
GMDWRMMSIMQPSTL

SEQ ID NO: 75106 - protein, 15 aa, Artificial Sequence
  Description of Artificial Sequence: Synthetic peptide
  Seed: GMDPRMCSLMQGSTL
GMDWRMMSIMQQSTL

SEQ ID NO: 75107 - protein, 15 aa, Artificial Sequence
  Description of Artificial Sequence: Synthetic peptide
  Seed: GMDPRMCSLMQGSTL
GMDWRMMSIMQSSTL

SEQ ID NO: 75108 - protein, 15 aa, Artificial Sequence
  Description of Artificial Sequence: Synthetic peptide
  Seed: GMDPRMCSLMQGSTL
GMDWRMMSIMQTSTL

SEQ ID NO: 75109 - protein, 15 aa, Artificial Sequence
  Description of Artificial Sequence: Synthetic peptide
  Seed: GMDPRMCSLMQGSTL
GMDWRMMSIMQVSTL

SEQ ID NO: 75110 - protein, 15 aa, Artificial Sequence
  Description of Artificial Sequence: Synthetic peptide
  Seed: GMDPRMCSLMQGSTL
GMDWRMMSLMQASTL

SEQ ID NO: 75111 - protein, 15 aa, Artificial Sequence
  Description of Artificial Sequence: Synthetic peptide
  Seed: GMDPRMCSLMQGSTL
GMDWRMMSLMQHSTL

SEQ ID NO: 75112 - protein, 15 aa, Artificial Sequence
  Description of Artificial Sequence: Synthetic peptide
  Seed: GMDPRMCSLMQGSTL
GMDWRMMSLMQNSTL

SEQ ID NO: 75113 - protein, 15 aa, Artificial Sequence
  Description of Artificial Sequence: Synthetic peptide
  Seed: GMDPRMCSLMQGSTL
GMDWRMMSLMQSSTL

SEQ ID NO: 75114 - protein, 15 aa, Artificial Sequence
  Description of Artificial Sequence: Synthetic peptide
  Seed: GMDPRMCSLMQGSTL
GMDWRMMSLMQTSTL

SEQ ID NO: 75115 - protein, 15 aa, Artificial Sequence
  Description of Artificial Sequence: Synthetic peptide
  Seed: GMDPRMCSLMQGSTL
GMDWRMMSMMQASTL

SEQ ID NO: 75116 - protein, 15 aa, Artificial Sequence
  Description of Artificial Sequence: Synthetic peptide
  Seed: GMDPRMCSLMQGSTL
GMDWRMMSMMQHSTL

SEQ ID NO: 75117 - protein, 15 aa, Artificial Sequence
  Description of Artificial Sequence: Synthetic peptide
  Seed: GMDPRMCSLMQGSTL
GMDWRMMSMMQNSTL

SEQ ID NO: 75118 - protein, 15 aa, Artificial Sequence
  Description of Artificial Sequence: Synthetic peptide
  Seed: GMDPRMCSLMQGSTL
GMDWRMMSMMQSSTL

SEQ ID NO: 75119 - protein, 15 aa, Artificial Sequence
  Description of Artificial Sequence: Synthetic peptide
  Seed: GMDPRMCSLMQGSTL
GMDWRMMSMMQTSTL

SEQ ID NO: 75120 - protein, 15 aa, Artificial Sequence
  Description of Artificial Sequence: Synthetic peptide
  Seed: GMDPRMCSLMQGSTL
GMDWRMMSNMQASTL

SEQ ID NO: 75121 - protein, 15 aa, Artificial Sequence
  Description of Artificial Sequence: Synthetic peptide
  Seed: GMDPRMCSLMQGSTL
GMDWRMMSNMQHSTL

SEQ ID NO: 75122 - protein, 15 aa, Artificial Sequence
  Description of Artificial Sequence: Synthetic peptide
  Seed: GMDPRMCSLMQGSTL
GMDWRMMSNMQISTL

SEQ ID NO: 75123 - protein, 15 aa, Artificial Sequence
  Description of Artificial Sequence: Synthetic peptide
  Seed: GMDPRMCSLMQGSTL
GMDWRMMSNMQLSTL

SEQ ID NO: 75124 - protein, 15 aa, Artificial Sequence
  Description of Artificial Sequence: Synthetic peptide
  Seed: GMDPRMCSLMQGSTL
GMDWRMMSNMQMSTL

SEQ ID NO: 75125 - protein, 15 aa, Artificial Sequence
  Description of Artificial Sequence: Synthetic peptide
  Seed: GMDPRMCSLMQGSTL
GMDWRMMSNMQNSTL

SEQ ID NO: 75126 - protein, 15 aa, Artificial Sequence
  Description of Artificial Sequence: Synthetic peptide
  Seed: GMDPRMCSLMQGSTL
GMDWRMMSNMQSSTL

SEQ ID NO: 75127 - protein, 15 aa, Artificial Sequence
  Description of Artificial Sequence: Synthetic peptide
  Seed: GMDPRMCSLMQGSTL
GMDWRMMSNMQTSTL

SEQ ID NO: 75128 - protein, 15 aa, Artificial Sequence
  Description of Artificial Sequence: Synthetic peptide
  Seed: GMDPRMCSLMQGSTL
GMDWRMMSNMQVSTL

SEQ ID NO: 75129 - protein, 15 aa, Artificial Sequence
  Description of Artificial Sequence: Synthetic peptide
  Seed: GMDPRMCSLMQGSTL
GMDWRMMSPMQASTL

SEQ ID NO: 75130 - protein, 15 aa, Artificial Sequence
  Description of Artificial Sequence: Synthetic peptide
  Seed: GMDPRMCSLMQGSTL
GMDWRMMSPMQDSTL

SEQ ID NO: 75131 - protein, 15 aa, Artificial Sequence
  Description of Artificial Sequence: Synthetic peptide
  Seed: GMDPRMCSLMQGSTL
GMDWRMMSPMQESTL

SEQ ID NO: 75132 - protein, 15 aa, Artificial Sequence
  Description of Artificial Sequence: Synthetic peptide
  Seed: GMDPRMCSLMQGSTL
GMDWRMMSPMQGSTL

SEQ ID NO: 75133 - protein, 15 aa, Artificial Sequence
  Description of Artificial Sequence: Synthetic peptide
  Seed: GMDPRMCSLMQGSTL
GMDWRMMSPMQHSTL

SEQ ID NO: 75134 - protein, 15 aa, Artificial Sequence
  Description of Artificial Sequence: Synthetic peptide
  Seed: GMDPRMCSLMQGSTL
GMDWRMMSPMQISTL

SEQ ID NO: 75135 - protein, 15 aa, Artificial Sequence
  Description of Artificial Sequence: Synthetic peptide
  Seed: GMDPRMCSLMQGSTL
GMDWRMMSPMQLSTL

SEQ ID NO: 75136 - protein, 15 aa, Artificial Sequence
  Description of Artificial Sequence: Synthetic peptide
  Seed: GMDPRMCSLMQGSTL
GMDWRMMSPMQMSTL

SEQ ID NO: 75137 - protein, 15 aa, Artificial Sequence
  Description of Artificial Sequence: Synthetic peptide
  Seed: GMDPRMCSLMQGSTL
GMDWRMMSPMQNSTL

SEQ ID NO: 75138 - protein, 15 aa, Artificial Sequence
  Description of Artificial Sequence: Synthetic peptide
  Seed: GMDPRMCSLMQGSTL
GMDWRMMSPMQPSTL

SEQ ID NO: 75139 - protein, 15 aa, Artificial Sequence
  Description of Artificial Sequence: Synthetic peptide
  Seed: GMDPRMCSLMQGSTL
GMDWRMMSPMQQSTL

SEQ ID NO: 75140 - protein, 15 aa, Artificial Sequence
  Description of Artificial Sequence: Synthetic peptide
  Seed: GMDPRMCSLMQGSTL
GMDWRMMSPMQSSTL

SEQ ID NO: 75141 - protein, 15 aa, Artificial Sequence
  Description of Artificial Sequence: Synthetic peptide
  Seed: GMDPRMCSLMQGSTL
GMDWRMMSPMQTSTL

SEQ ID NO: 75142 - protein, 15 aa, Artificial Sequence
  Description of Artificial Sequence: Synthetic peptide
  Seed: GMDPRMCSLMQGSTL
GMDWRMMSPMQVSTL

SEQ ID NO: 75143 - protein, 15 aa, Artificial Sequence
  Description of Artificial Sequence: Synthetic peptide
  Seed: GMDPRMCSLMQGSTL
GMDWRMMSSMQASTL

SEQ ID NO: 75144 - protein, 15 aa, Artificial Sequence
  Description of Artificial Sequence: Synthetic peptide
  Seed: GMDPRMCSLMQGSTL
GMDWRMMSSMQDSTL

SEQ ID NO: 75145 - protein, 15 aa, Artificial Sequence
  Description of Artificial Sequence: Synthetic peptide
  Seed: GMDPRMCSLMQGSTL
GMDWRMMSSMQESTL

SEQ ID NO: 75146 - protein, 15 aa, Artificial Sequence
  Description of Artificial Sequence: Synthetic peptide
  Seed: GMDPRMCSLMQGSTL
GMDWRMMSSMQGSTL

SEQ ID NO: 75147 - protein, 15 aa, Artificial Sequence
  Description of Artificial Sequence: Synthetic peptide
  Seed: GMDPRMCSLMQGSTL
GMDWRMMSSMQHSTL

SEQ ID NO: 75148 - protein, 15 aa, Artificial Sequence
  Description of Artificial Sequence: Synthetic peptide
  Seed: GMDPRMCSLMQGSTL
GMDWRMMSSMQISTL

SEQ ID NO: 75149 - protein, 15 aa, Artificial Sequence
  Description of Artificial Sequence: Synthetic peptide
  Seed: GMDPRMCSLMQGSTL
GMDWRMMSSMQLSTL

SEQ ID NO: 75150 - protein, 15 aa, Artificial Sequence
  Description of Artificial Sequence: Synthetic peptide
  Seed: GMDPRMCSLMQGSTL
GMDWRMMSSMQMSTL

SEQ ID NO: 75151 - protein, 15 aa, Artificial Sequence
  Description of Artificial Sequence: Synthetic peptide
  Seed: GMDPRMCSLMQGSTL
GMDWRMMSSMQNSTL

SEQ ID NO: 75152 - protein, 15 aa, Artificial Sequence
  Description of Artificial Sequence: Synthetic peptide
  Seed: GMDPRMCSLMQGSTL
GMDWRMMSSMQPSTL

SEQ ID NO: 75153 - protein, 15 aa, Artificial Sequence
  Description of Artificial Sequence: Synthetic peptide
  Seed: GMDPRMCSLMQGSTL
GMDWRMMSSMQQSTL

SEQ ID NO: 75154 - protein, 15 aa, Artificial Sequence
  Description of Artificial Sequence: Synthetic peptide
  Seed: GMDPRMCSLMQGSTL
GMDWRMMSSMQSSTL

SEQ ID NO: 75155 - protein, 15 aa, Artificial Sequence
  Description of Artificial Sequence: Synthetic peptide
  Seed: GMDPRMCSLMQGSTL
GMDWRMMSSMQTSTL

SEQ ID NO: 75156 - protein, 15 aa, Artificial Sequence
  Description of Artificial Sequence: Synthetic peptide
  Seed: GMDPRMCSLMQGSTL
GMDWRMMSSMQVSTL

SEQ ID NO: 75157 - protein, 15 aa, Artificial Sequence
  Description of Artificial Sequence: Synthetic peptide
  Seed: GMDPRMCSLMQGSTL
GMDWRMMSTMQASTL

SEQ ID NO: 75158 - protein, 15 aa, Artificial Sequence
  Description of Artificial Sequence: Synthetic peptide
  Seed: GMDPRMCSLMQGSTL
GMDWRMMSTMQGSTL

SEQ ID NO: 75159 - protein, 15 aa, Artificial Sequence
  Description of Artificial Sequence: Synthetic peptide
  Seed: GMDPRMCSLMQGSTL
GMDWRMMSTMQHSTL

SEQ ID NO: 75160 - protein, 15 aa, Artificial Sequence
  Description of Artificial Sequence: Synthetic peptide
  Seed: GMDPRMCSLMQGSTL
GMDWRMMSTMQISTL

SEQ ID NO: 75161 - protein, 15 aa, Artificial Sequence
  Description of Artificial Sequence: Synthetic peptide
  Seed: GMDPRMCSLMQGSTL
GMDWRMMSTMQLSTL

SEQ ID NO: 75162 - protein, 15 aa, Artificial Sequence
  Description of Artificial Sequence: Synthetic peptide
  Seed: GMDPRMCSLMQGSTL
GMDWRMMSTMQMSTL

SEQ ID NO: 75163 - protein, 15 aa, Artificial Sequence
  Description of Artificial Sequence: Synthetic peptide
  Seed: GMDPRMCSLMQGSTL
GMDWRMMSTMQNSTL

SEQ ID NO: 75164 - protein, 15 aa, Artificial Sequence
  Description of Artificial Sequence: Synthetic peptide
  Seed: GMDPRMCSLMQGSTL
GMDWRMMSTMQPSTL

SEQ ID NO: 75165 - protein, 15 aa, Artificial Sequence
  Description of Artificial Sequence: Synthetic peptide
  Seed: GMDPRMCSLMQGSTL
GMDWRMMSTMQQSTL

SEQ ID NO: 75166 - protein, 15 aa, Artificial Sequence
  Description of Artificial Sequence: Synthetic peptide
  Seed: GMDPRMCSLMQGSTL
GMDWRMMSTMQSSTL

SEQ ID NO: 75167 - protein, 15 aa, Artificial Sequence
  Description of Artificial Sequence: Synthetic peptide
  Seed: GMDPRMCSLMQGSTL
GMDWRMMSTMQTSTL

SEQ ID NO: 75168 - protein, 15 aa, Artificial Sequence
  Description of Artificial Sequence: Synthetic peptide
  Seed: GMDPRMCSLMQGSTL
GMDWRMMSTMQVSTL

SEQ ID NO: 75169 - protein, 15 aa, Artificial Sequence
  Description of Artificial Sequence: Synthetic peptide
  Seed: GMDPRMCSLMQGSTL
GMDWRMMSVMQASTL

SEQ ID NO: 75170 - protein, 15 aa, Artificial Sequence
  Description of Artificial Sequence: Synthetic peptide
  Seed: GMDPRMCSLMQGSTL
GMDWRMMSVMQDSTL

SEQ ID NO: 75171 - protein, 15 aa, Artificial Sequence
  Description of Artificial Sequence: Synthetic peptide
  Seed: GMDPRMCSLMQGSTL
GMDWRMMSVMQESTL

SEQ ID NO: 75172 - protein, 15 aa, Artificial Sequence
  Description of Artificial Sequence: Synthetic peptide
  Seed: GMDPRMCSLMQGSTL
GMDWRMMSVMQGSTL

SEQ ID NO: 75173 - protein, 15 aa, Artificial Sequence
  Description of Artificial Sequence: Synthetic peptide
  Seed: GMDPRMCSLMQGSTL
GMDWRMMSVMQHSTL

SEQ ID NO: 75174 - protein, 15 aa, Artificial Sequence
  Description of Artificial Sequence: Synthetic peptide
  Seed: GMDPRMCSLMQGSTL
GMDWRMMSVMQISTL

SEQ ID NO: 75175 - protein, 15 aa, Artificial Sequence
  Description of Artificial Sequence: Synthetic peptide
  Seed: GMDPRMCSLMQGSTL
GMDWRMMSVMQKSTL

SEQ ID NO: 75176 - protein, 15 aa, Artificial Sequence
  Description of Artificial Sequence: Synthetic peptide
  Seed: GMDPRMCSLMQGSTL
GMDWRMMSVMQLSTL

SEQ ID NO: 75177 - protein, 15 aa, Artificial Sequence
  Description of Artificial Sequence: Synthetic peptide
  Seed: GMDPRMCSLMQGSTL
GMDWRMMSVMQMSTL

SEQ ID NO: 75178 - protein, 15 aa, Artificial Sequence
  Description of Artificial Sequence: Synthetic peptide
  Seed: GMDPRMCSLMQGSTL
GMDWRMMSVMQNSTL

SEQ ID NO: 75179 - protein, 15 aa, Artificial Sequence
  Description of Artificial Sequence: Synthetic peptide
  Seed: GMDPRMCSLMQGSTL
GMDWRMMSVMQPSTL

SEQ ID NO: 75180 - protein, 15 aa, Artificial Sequence
  Description of Artificial Sequence: Synthetic peptide
  Seed: GMDPRMCSLMQGSTL
GMDWRMMSVMQQSTL

SEQ ID NO: 75181 - protein, 15 aa, Artificial Sequence
  Description of Artificial Sequence: Synthetic peptide
  Seed: GMDPRMCSLMQGSTL
GMDWRMMSVMQSSTL

SEQ ID NO: 75182 - protein, 15 aa, Artificial Sequence
  Description of Artificial Sequence: Synthetic peptide
  Seed: GMDPRMCSLMQGSTL
GMDWRMMSVMQTSTL

SEQ ID NO: 75183 - protein, 15 aa, Artificial Sequence
  Description of Artificial Sequence: Synthetic peptide
  Seed: GMDPRMCSLMQGSTL
GMDWRMMSVMQVSTL

SEQ ID NO: 75184 - protein, 15 aa, Artificial Sequence
  Description of Artificial Sequence: Synthetic peptide
  Seed: GMDPRMCSLMQGSTL
GMDWRMQSAMQASTL

SEQ ID NO: 75185 - protein, 15 aa, Artificial Sequence
  Description of Artificial Sequence: Synthetic peptide
  Seed: GMDPRMCSLMQGSTL
GMDWRMQSAMQLSTL

SEQ ID NO: 75186 - protein, 15 aa, Artificial Sequence
  Description of Artificial Sequence: Synthetic peptide
  Seed: GMDPRMCSLMQGSTL
GMDWRMQSAMQMSTL

SEQ ID NO: 75187 - protein, 15 aa, Artificial Sequence
  Description of Artificial Sequence: Synthetic peptide
  Seed: GMDPRMCSLMQGSTL
GMDWRMQSAMQNSTL

SEQ ID NO: 75188 - protein, 15 aa, Artificial Sequence
  Description of Artificial Sequence: Synthetic peptide
  Seed: GMDPRMCSLMQGSTL
GMDWRMQSAMQSSTL

SEQ ID NO: 75189 - protein, 15 aa, Artificial Sequence
  Description of Artificial Sequence: Synthetic peptide
  Seed: GMDPRMCSLMQGSTL
GMDWRMQSAMQTSTL

SEQ ID NO: 75190 - protein, 15 aa, Artificial Sequence
  Description of Artificial Sequence: Synthetic peptide
  Seed: GMDPRMCSLMQGSTL
GMDWRMQSAMQVSTL

SEQ ID NO: 75191 - protein, 15 aa, Artificial Sequence
  Description of Artificial Sequence: Synthetic peptide
  Seed: GMDPRMCSLMQGSTL
GMDWRMQSIMQASTL

SEQ ID NO: 75192 - protein, 15 aa, Artificial Sequence
  Description of Artificial Sequence: Synthetic peptide
  Seed: GMDPRMCSLMQGSTL
GMDWRMQSIMQNSTL

SEQ ID NO: 75193 - protein, 15 aa, Artificial Sequence
  Description of Artificial Sequence: Synthetic peptide
  Seed: GMDPRMCSLMQGSTL
GMDWRMQSIMQSSTL

SEQ ID NO: 75194 - protein, 15 aa, Artificial Sequence
  Description of Artificial Sequence: Synthetic peptide
  Seed: GMDPRMCSLMQGSTL
GMDWRMQSPMQASTL

SEQ ID NO: 75195 - protein, 15 aa, Artificial Sequence
  Description of Artificial Sequence: Synthetic peptide
  Seed: GMDPRMCSLMQGSTL
GMDWRMQSPMQNSTL

SEQ ID NO: 75196 - protein, 15 aa, Artificial Sequence
  Description of Artificial Sequence: Synthetic peptide
  Seed: GMDPRMCSLMQGSTL
GMDWRMQSPMQSSTL

SEQ ID NO: 75197 - protein, 15 aa, Artificial Sequence
  Description of Artificial Sequence: Synthetic peptide
  Seed: GMDPRMCSLMQGSTL
GMDWRMQSSMQASTL

SEQ ID NO: 75198 - protein, 15 aa, Artificial Sequence
  Description of Artificial Sequence: Synthetic peptide
  Seed: GMDPRMCSLMQGSTL
GMDWRMQSSMQNSTL

SEQ ID NO: 75199 - protein, 15 aa, Artificial Sequence
  Description of Artificial Sequence: Synthetic peptide
  Seed: GMDPRMCSLMQGSTL
GMDWRMQSSMQSSTL

SEQ ID NO: 75200 - protein, 15 aa, Artificial Sequence
  Description of Artificial Sequence: Synthetic peptide
  Seed: GMDPRMCSLMQGSTL
GMDWRMQSTMQASTL

SEQ ID NO: 75201 - protein, 15 aa, Artificial Sequence
  Description of Artificial Sequence: Synthetic peptide
  Seed: GMDPRMCSLMQGSTL
GMDWRMQSTMQNSTL

SEQ ID NO: 75202 - protein, 15 aa, Artificial Sequence
  Description of Artificial Sequence: Synthetic peptide
  Seed: GMDPRMCSLMQGSTL
GMDWRMQSTMQSSTL

SEQ ID NO: 75203 - protein, 15 aa, Artificial Sequence
  Description of Artificial Sequence: Synthetic peptide
  Seed: GMDPRMCSLMQGSTL
GMDWRMQSVMQASTL

SEQ ID NO: 75204 - protein, 15 aa, Artificial Sequence
  Description of Artificial Sequence: Synthetic peptide
  Seed: GMDPRMCSLMQGSTL
GMDWRMQSVMQNSTL

SEQ ID NO: 75205 - protein, 15 aa, Artificial Sequence
  Description of Artificial Sequence: Synthetic peptide
  Seed: GMDPRMCSLMQGSTL
GMDWRMQSVMQSSTL

SEQ ID NO: 75206 - protein, 15 aa, Artificial Sequence
  Description of Artificial Sequence: Synthetic peptide
  Seed: GMDPRMCSLMQGSTL
GMDWRMQSVMQTSTL

SEQ ID NO: 75207 - protein, 15 aa, Artificial Sequence
  Description of Artificial Sequence: Synthetic peptide
  Seed: GMDPRMCSLMQGSTL
GMDWRMSSAMQASTL

SEQ ID NO: 75208 - protein, 15 aa, Artificial Sequence
  Description of Artificial Sequence: Synthetic peptide
  Seed: GMDPRMCSLMQGSTL
GMDWRMSSAMQLSTL

SEQ ID NO: 75209 - protein, 15 aa, Artificial Sequence
  Description of Artificial Sequence: Synthetic peptide
  Seed: GMDPRMCSLMQGSTL
GMDWRMSSAMQMSTL

SEQ ID NO: 75210 - protein, 15 aa, Artificial Sequence
  Description of Artificial Sequence: Synthetic peptide
  Seed: GMDPRMCSLMQGSTL
GMDWRMSSAMQNSTL

SEQ ID NO: 75211 - protein, 15 aa, Artificial Sequence
  Description of Artificial Sequence: Synthetic peptide
  Seed: GMDPRMCSLMQGSTL
GMDWRMSSAMQSSTL

SEQ ID NO: 75212 - protein, 15 aa, Artificial Sequence
  Description of Artificial Sequence: Synthetic peptide
  Seed: GMDPRMCSLMQGSTL
GMDWRMSSPMQASTL

SEQ ID NO: 75213 - protein, 15 aa, Artificial Sequence
  Description of Artificial Sequence: Synthetic peptide
  Seed: GMDPRMCSLMQGSTL
GMDWRMSSPMQNSTL

SEQ ID NO: 75214 - protein, 15 aa, Artificial Sequence
  Description of Artificial Sequence: Synthetic peptide
  Seed: GMDPRMCSLMQGSTL
GMDWRMSSPMQSSTL

SEQ ID NO: 75215 - protein, 15 aa, Artificial Sequence
  Description of Artificial Sequence: Synthetic peptide
  Seed: GMDPRMCSLMQGSTL
GMDWRMSSSMQASTL

SEQ ID NO: 75216 - protein, 15 aa, Artificial Sequence
  Description of Artificial Sequence: Synthetic peptide
  Seed: GMDPRMCSLMQGSTL
GMDWRMSSSMQNSTL

SEQ ID NO: 75217 - protein, 15 aa, Artificial Sequence
  Description of Artificial Sequence: Synthetic peptide
  Seed: GMDPRMCSLMQGSTL
GMDWRMSSSMQSSTL

SEQ ID NO: 75218 - protein, 15 aa, Artificial Sequence
  Description of Artificial Sequence: Synthetic peptide
  Seed: GMDPRMCSLMQGSTL
GMDWRMSSTMQNSTL

SEQ ID NO: 75219 - protein, 15 aa, Artificial Sequence
  Description of Artificial Sequence: Synthetic peptide
  Seed: GMDPRMCSLMQGSTL
GMDWRMSSTMQSSTL

SEQ ID NO: 75220 - protein, 15 aa, Artificial Sequence
  Description of Artificial Sequence: Synthetic peptide
  Seed: GMDPRMCSLMQGSTL
GMDWRMSSVMQASTL

SEQ ID NO: 75221 - protein, 15 aa, Artificial Sequence
  Description of Artificial Sequence: Synthetic peptide
  Seed: GMDPRMCSLMQGSTL
GMDWRMSSVMQNSTL

SEQ ID NO: 75222 - protein, 15 aa, Artificial Sequence
  Description of Artificial Sequence: Synthetic peptide
  Seed: GMDPRMCSLMQGSTL
GMDWRMSSVMQSSTL

SEQ ID NO: 75223 - protein, 15 aa, Artificial Sequence
  Description of Artificial Sequence: Synthetic peptide
  Seed: GMDPRMCSLMQGSTL
GMDWRMTSAMQASTL

SEQ ID NO: 75224 - protein, 15 aa, Artificial Sequence
  Description of Artificial Sequence: Synthetic peptide
  Seed: GMDPRMCSLMQGSTL
GMDWRMTSAMQNSTL

SEQ ID NO: 75225 - protein, 15 aa, Artificial Sequence
  Description of Artificial Sequence: Synthetic peptide
  Seed: GMDPRMCSLMQGSTL
GMDWRMTSAMQSSTL

SEQ ID NO: 75226 - protein, 15 aa, Artificial Sequence
  Description of Artificial Sequence: Synthetic peptide
  Seed: GMDPRMCSLMQGSTL
GMDWRMTSSMQSSTL

SEQ ID NO: 75227 - protein, 15 aa, Artificial Sequence
  Description of Artificial Sequence: Synthetic peptide
  Seed: GMDPRMCSLMQGSTL
GMDWRMTSVMQNSTL

SEQ ID NO: 75228 - protein, 15 aa, Artificial Sequence
  Description of Artificial Sequence: Synthetic peptide
  Seed: GMDPRMCSLMQGSTL
GMDWRMTSVMQSSTL

SEQ ID NO: 75229 - protein, 15 aa, Artificial Sequence
  Description of Artificial Sequence: Synthetic peptide
  Seed: GMDPRMCSLMQGSTL
GMDWRMVSAMQASTL

SEQ ID NO: 75230 - protein, 15 aa, Artificial Sequence
  Description of Artificial Sequence: Synthetic peptide
  Seed: GMDPRMCSLMQGSTL
GMDWRMVSAMQGSTL

SEQ ID NO: 75231 - protein, 15 aa, Artificial Sequence
  Description of Artificial Sequence: Synthetic peptide
  Seed: GMDPRMCSLMQGSTL
GMDWRMVSAMQHSTL

SEQ ID NO: 75232 - protein, 15 aa, Artificial Sequence
  Description of Artificial Sequence: Synthetic peptide
  Seed: GMDPRMCSLMQGSTL
GMDWRMVSAMQISTL

SEQ ID NO: 75233 - protein, 15 aa, Artificial Sequence
  Description of Artificial Sequence: Synthetic peptide
  Seed: GMDPRMCSLMQGSTL
GMDWRMVSAMQLSTL

SEQ ID NO: 75234 - protein, 15 aa, Artificial Sequence
  Description of Artificial Sequence: Synthetic peptide
  Seed: GMDPRMCSLMQGSTL
GMDWRMVSAMQMSTL

SEQ ID NO: 75235 - protein, 15 aa, Artificial Sequence
  Description of Artificial Sequence: Synthetic peptide
  Seed: GMDPRMCSLMQGSTL
GMDWRMVSAMQNSTL

SEQ ID NO: 75236 - protein, 15 aa, Artificial Sequence
  Description of Artificial Sequence: Synthetic peptide
  Seed: GMDPRMCSLMQGSTL
GMDWRMVSAMQQSTL

SEQ ID NO: 75237 - protein, 15 aa, Artificial Sequence
  Description of Artificial Sequence: Synthetic peptide
  Seed: GMDPRMCSLMQGSTL
GMDWRMVSAMQSSTL

SEQ ID NO: 75238 - protein, 15 aa, Artificial Sequence
  Description of Artificial Sequence: Synthetic peptide
  Seed: GMDPRMCSLMQGSTL
GMDWRMVSAMQTSTL

SEQ ID NO: 75239 - protein, 15 aa, Artificial Sequence
  Description of Artificial Sequence: Synthetic peptide
  Seed: GMDPRMCSLMQGSTL
GMDWRMVSAMQVSTL

SEQ ID NO: 75240 - protein, 15 aa, Artificial Sequence
  Description of Artificial Sequence: Synthetic peptide
  Seed: GMDPRMCSLMQGSTL
GMDWRMVSGMQASTL

SEQ ID NO: 75241 - protein, 15 aa, Artificial Sequence
  Description of Artificial Sequence: Synthetic peptide
  Seed: GMDPRMCSLMQGSTL
GMDWRMVSGMQNSTL

SEQ ID NO: 75242 - protein, 15 aa, Artificial Sequence
  Description of Artificial Sequence: Synthetic peptide
  Seed: GMDPRMCSLMQGSTL
GMDWRMVSGMQSSTL

SEQ ID NO: 75243 - protein, 15 aa, Artificial Sequence
  Description of Artificial Sequence: Synthetic peptide
  Seed: GMDPRMCSLMQGSTL
GMDWRMVSIMQASTL

SEQ ID NO: 75244 - protein, 15 aa, Artificial Sequence
  Description of Artificial Sequence: Synthetic peptide
  Seed: GMDPRMCSLMQGSTL
GMDWRMVSIMQNSTL

SEQ ID NO: 75245 - protein, 15 aa, Artificial Sequence
  Description of Artificial Sequence: Synthetic peptide
  Seed: GMDPRMCSLMQGSTL
GMDWRMVSIMQSSTL

SEQ ID NO: 75246 - protein, 15 aa, Artificial Sequence
  Description of Artificial Sequence: Synthetic peptide
  Seed: GMDPRMCSLMQGSTL
GMDWRMVSMMQASTL

SEQ ID NO: 75247 - protein, 15 aa, Artificial Sequence
  Description of Artificial Sequence: Synthetic peptide
  Seed: GMDPRMCSLMQGSTL
GMDWRMVSNMQASTL

SEQ ID NO: 75248 - protein, 15 aa, Artificial Sequence
  Description of Artificial Sequence: Synthetic peptide
  Seed: GMDPRMCSLMQGSTL
GMDWRMVSPMQASTL

SEQ ID NO: 75249 - protein, 15 aa, Artificial Sequence
  Description of Artificial Sequence: Synthetic peptide
  Seed: GMDPRMCSLMQGSTL
GMDWRMVSPMQHSTL

SEQ ID NO: 75250 - protein, 15 aa, Artificial Sequence
  Description of Artificial Sequence: Synthetic peptide
  Seed: GMDPRMCSLMQGSTL
GMDWRMVSPMQLSTL

SEQ ID NO: 75251 - protein, 15 aa, Artificial Sequence
  Description of Artificial Sequence: Synthetic peptide
  Seed: GMDPRMCSLMQGSTL
GMDWRMVSPMQMSTL

SEQ ID NO: 75252 - protein, 15 aa, Artificial Sequence
  Description of Artificial Sequence: Synthetic peptide
  Seed: GMDPRMCSLMQGSTL
GMDWRMVSPMQNSTL

SEQ ID NO: 75253 - protein, 15 aa, Artificial Sequence
  Description of Artificial Sequence: Synthetic peptide
  Seed: GMDPRMCSLMQGSTL
GMDWRMVSPMQSSTL

SEQ ID NO: 75254 - protein, 15 aa, Artificial Sequence
  Description of Artificial Sequence: Synthetic peptide
  Seed: GMDPRMCSLMQGSTL
GMDWRMVSPMQTSTL

SEQ ID NO: 75255 - protein, 15 aa, Artificial Sequence
  Description of Artificial Sequence: Synthetic peptide
  Seed: GMDPRMCSLMQGSTL
GMDWRMVSPMQVSTL

SEQ ID NO: 75256 - protein, 15 aa, Artificial Sequence
  Description of Artificial Sequence: Synthetic peptide
  Seed: GMDPRMCSLMQGSTL
GMDWRMVSSMQASTL

SEQ ID NO: 75257 - protein, 15 aa, Artificial Sequence
  Description of Artificial Sequence: Synthetic peptide
  Seed: GMDPRMCSLMQGSTL
GMDWRMVSSMQHSTL

SEQ ID NO: 75258 - protein, 15 aa, Artificial Sequence
  Description of Artificial Sequence: Synthetic peptide
  Seed: GMDPRMCSLMQGSTL
GMDWRMVSSMQNSTL

SEQ ID NO: 75259 - protein, 15 aa, Artificial Sequence
  Description of Artificial Sequence: Synthetic peptide
  Seed: GMDPRMCSLMQGSTL
GMDWRMVSSMQSSTL

SEQ ID NO: 75260 - protein, 15 aa, Artificial Sequence
  Description of Artificial Sequence: Synthetic peptide
  Seed: GMDPRMCSLMQGSTL
GMDWRMVSSMQTSTL

SEQ ID NO: 75261 - protein, 15 aa, Artificial Sequence
  Description of Artificial Sequence: Synthetic peptide
  Seed: GMDPRMCSLMQGSTL
GMDWRMVSSMQVSTL

SEQ ID NO: 75262 - protein, 15 aa, Artificial Sequence
  Description of Artificial Sequence: Synthetic peptide
  Seed: GMDPRMCSLMQGSTL
GMDWRMVSTMQASTL

SEQ ID NO: 75263 - protein, 15 aa, Artificial Sequence
  Description of Artificial Sequence: Synthetic peptide
  Seed: GMDPRMCSLMQGSTL
GMDWRMVSTMQHSTL

SEQ ID NO: 75264 - protein, 15 aa, Artificial Sequence
  Description of Artificial Sequence: Synthetic peptide
  Seed: GMDPRMCSLMQGSTL
GMDWRMVSTMQMSTL

SEQ ID NO: 75265 - protein, 15 aa, Artificial Sequence
  Description of Artificial Sequence: Synthetic peptide
  Seed: GMDPRMCSLMQGSTL
GMDWRMVSTMQNSTL

SEQ ID NO: 75266 - protein, 15 aa, Artificial Sequence
  Description of Artificial Sequence: Synthetic peptide
  Seed: GMDPRMCSLMQGSTL
GMDWRMVSTMQSSTL

SEQ ID NO: 75267 - protein, 15 aa, Artificial Sequence
  Description of Artificial Sequence: Synthetic peptide
  Seed: GMDPRMCSLMQGSTL
GMDWRMVSTMQTSTL

SEQ ID NO: 75268 - protein, 15 aa, Artificial Sequence
  Description of Artificial Sequence: Synthetic peptide
  Seed: GMDPRMCSLMQGSTL
GMDWRMVSTMQVSTL

SEQ ID NO: 75269 - protein, 15 aa, Artificial Sequence
  Description of Artificial Sequence: Synthetic peptide
  Seed: GMDPRMCSLMQGSTL
GMDWRMVSVMQASTL

SEQ ID NO: 75270 - protein, 15 aa, Artificial Sequence
  Description of Artificial Sequence: Synthetic peptide
  Seed: GMDPRMCSLMQGSTL
GMDWRMVSVMQHSTL

SEQ ID NO: 75271 - protein, 15 aa, Artificial Sequence
  Description of Artificial Sequence: Synthetic peptide
  Seed: GMDPRMCSLMQGSTL
GMDWRMVSVMQNSTL

SEQ ID NO: 75272 - protein, 15 aa, Artificial Sequence
  Description of Artificial Sequence: Synthetic peptide
  Seed: GMDPRMCSLMQGSTL
GMDWRMVSVMQSSTL

SEQ ID NO: 75273 - protein, 15 aa, Artificial Sequence
  Description of Artificial Sequence: Synthetic peptide
  Seed: GMDPRMCSLMQGSTL
GMDWRMVSVMQTSTL

SEQ ID NO: 75274 - protein, 15 aa, Artificial Sequence
  Description of Artificial Sequence: Synthetic peptide
  Seed: GMDPRMCSLMQGSTL
GMDWRMWSAMQASTL

SEQ ID NO: 75275 - protein, 15 aa, Artificial Sequence
  Description of Artificial Sequence: Synthetic peptide
  Seed: GMDPRMCSLMQGSTL
GMDWRMWSAMQSSTL

SEQ ID NO: 75276 - protein, 15 aa, Artificial Sequence
  Description of Artificial Sequence: Synthetic peptide
  Seed: GMDPRMCSLMQGSTL
GMDWRMWSIMQASTL

SEQ ID NO: 75277 - protein, 15 aa, Artificial Sequence
  Description of Artificial Sequence: Synthetic peptide
  Seed: GMDPRMCSLMQGSTL
GMDWRMWSIMQSSTL

SEQ ID NO: 75278 - protein, 15 aa, Artificial Sequence
  Description of Artificial Sequence: Synthetic peptide
  Seed: GMDPRMCSLMQGSTL
GMDWRMWSIMQTSTL

SEQ ID NO: 75279 - protein, 15 aa, Artificial Sequence
  Description of Artificial Sequence: Synthetic peptide
  Seed: GMDPRMCSLMQGSTL
GMDWRMWSLMQASTL

SEQ ID NO: 75280 - protein, 15 aa, Artificial Sequence
  Description of Artificial Sequence: Synthetic peptide
  Seed: GMDPRMCSLMQGSTL
GMDWRMWSVMQASTL

SEQ ID NO: 75281 - protein, 15 aa, Artificial Sequence
  Description of Artificial Sequence: Synthetic peptide
  Seed: GMDPRMCSLMQGSTL
GMDWRMWSVMQSSTL

SEQ ID NO: 75282 - protein, 15 aa, Artificial Sequence
  Description of Artificial Sequence: Synthetic peptide
  Seed: GMDPRMCSLMQGSTL
GMDWRMYSAMQASTL

SEQ ID NO: 75283 - protein, 15 aa, Artificial Sequence
  Description of Artificial Sequence: Synthetic peptide
  Seed: GMDPRMCSLMQGSTL
GMDWRMYSAMQGSTL

SEQ ID NO: 75284 - protein, 15 aa, Artificial Sequence
  Description of Artificial Sequence: Synthetic peptide
  Seed: GMDPRMCSLMQGSTL
GMDWRMYSAMQNSTL

SEQ ID NO: 75285 - protein, 15 aa, Artificial Sequence
  Description of Artificial Sequence: Synthetic peptide
  Seed: GMDPRMCSLMQGSTL
GMDWRMYSAMQSSTL

SEQ ID NO: 75286 - protein, 15 aa, Artificial Sequence
  Description of Artificial Sequence: Synthetic peptide
  Seed: GMDPRMCSLMQGSTL
GMDWRMYSAMQTSTL

SEQ ID NO: 75287 - protein, 15 aa, Artificial Sequence
  Description of Artificial Sequence: Synthetic peptide
  Seed: GMDPRMCSLMQGSTL
GMDWRMYSAMQVSTL

SEQ ID NO: 75288 - protein, 15 aa, Artificial Sequence
  Description of Artificial Sequence: Synthetic peptide
  Seed: GMDPRMCSLMQGSTL
GMDWRMYSIMQGSTL

SEQ ID NO: 75289 - protein, 15 aa, Artificial Sequence
  Description of Artificial Sequence: Synthetic peptide
  Seed: GMDPRMCSLMQGSTL
GMDWRMYSIMQNSTL

SEQ ID NO: 75290 - protein, 15 aa, Artificial Sequence
  Description of Artificial Sequence: Synthetic peptide
  Seed: GMDPRMCSLMQGSTL
GMDWRMYSIMQSSTL

SEQ ID NO: 75291 - protein, 15 aa, Artificial Sequence
  Description of Artificial Sequence: Synthetic peptide
  Seed: GMDPRMCSLMQGSTL
GMDWRMYSPMQASTL

SEQ ID NO: 75292 - protein, 15 aa, Artificial Sequence
  Description of Artificial Sequence: Synthetic peptide
  Seed: GMDPRMCSLMQGSTL
GMDWRMYSSMQASTL

SEQ ID NO: 75293 - protein, 15 aa, Artificial Sequence
  Description of Artificial Sequence: Synthetic peptide
  Seed: GMDPRMCSLMQGSTL
GMDWRMYSTMQASTL

SEQ ID NO: 75294 - protein, 15 aa, Artificial Sequence
  Description of Artificial Sequence: Synthetic peptide
  Seed: GMDPRMCSLMQGSTL
GMDWRMYSVMQASTL

SEQ ID NO: 75295 - protein, 15 aa, Artificial Sequence
  Description of Artificial Sequence: Synthetic peptide
  Seed: GMDPRMCSLMQGSTL
GMDWRMYSVMQNSTL

SEQ ID NO: 75296 - protein, 15 aa, Artificial Sequence
  Description of Artificial Sequence: Synthetic peptide
  Seed: GMDPRMCSLMQGSTL
GMDWRMYSVMQSSTL

SEQ ID NO: 75297 - protein, 15 aa, Artificial Sequence
  Description of Artificial Sequence: Synthetic peptide
  Seed: GMDPRMCSLMQGSTL
GMDWRMYSVMQTSTL

SEQ ID NO: 75298 - protein, 15 aa, Artificial Sequence
  Description of Artificial Sequence: Synthetic peptide
  Seed: GMDPRMCSLMQGSTL
GMDYRMASAMQASTL

SEQ ID NO: 75299 - protein, 15 aa, Artificial Sequence
  Description of Artificial Sequence: Synthetic peptide
  Seed: GMDPRMCSLMQGSTL
GMDYRMASAMQCSTL

SEQ ID NO: 75300 - protein, 15 aa, Artificial Sequence
  Description of Artificial Sequence: Synthetic peptide
  Seed: GMDPRMCSLMQGSTL
GMDYRMASAMQDSTL

SEQ ID NO: 75301 - protein, 15 aa, Artificial Sequence
  Description of Artificial Sequence: Synthetic peptide
  Seed: GMDPRMCSLMQGSTL
GMDYRMASAMQESTL

SEQ ID NO: 75302 - protein, 15 aa, Artificial Sequence
  Description of Artificial Sequence: Synthetic peptide
  Seed: GMDPRMCSLMQGSTL
GMDYRMASAMQFSTL

SEQ ID NO: 75303 - protein, 15 aa, Artificial Sequence
  Description of Artificial Sequence: Synthetic peptide
  Seed: GMDPRMCSLMQGSTL
GMDYRMASAMQGSTL

SEQ ID NO: 75304 - protein, 15 aa, Artificial Sequence
  Description of Artificial Sequence: Synthetic peptide
  Seed: GMDPRMCSLMQGSTL
GMDYRMASAMQHSTL

SEQ ID NO: 75305 - protein, 15 aa, Artificial Sequence
  Description of Artificial Sequence: Synthetic peptide
  Seed: GMDPRMCSLMQGSTL
GMDYRMASAMQISTL

SEQ ID NO: 75306 - protein, 15 aa, Artificial Sequence
  Description of Artificial Sequence: Synthetic peptide
  Seed: GMDPRMCSLMQGSTL
GMDYRMASAMQKSTL

SEQ ID NO: 75307 - protein, 15 aa, Artificial Sequence
  Description of Artificial Sequence: Synthetic peptide
  Seed: GMDPRMCSLMQGSTL
GMDYRMASAMQLSTL

SEQ ID NO: 75308 - protein, 15 aa, Artificial Sequence
  Description of Artificial Sequence: Synthetic peptide
  Seed: GMDPRMCSLMQGSTL
GMDYRMASAMQMSTL

SEQ ID NO: 75309 - protein, 15 aa, Artificial Sequence
  Description of Artificial Sequence: Synthetic peptide
  Seed: GMDPRMCSLMQGSTL
GMDYRMASAMQNSTL

SEQ ID NO: 75310 - protein, 15 aa, Artificial Sequence
  Description of Artificial Sequence: Synthetic peptide
  Seed: GMDPRMCSLMQGSTL
GMDYRMASAMQPSTL

SEQ ID NO: 75311 - protein, 15 aa, Artificial Sequence
  Description of Artificial Sequence: Synthetic peptide
  Seed: GMDPRMCSLMQGSTL
GMDYRMASAMQQSTL

SEQ ID NO: 75312 - protein, 15 aa, Artificial Sequence
  Description of Artificial Sequence: Synthetic peptide
  Seed: GMDPRMCSLMQGSTL
GMDYRMASAMQRSTL

SEQ ID NO: 75313 - protein, 15 aa, Artificial Sequence
  Description of Artificial Sequence: Synthetic peptide
  Seed: GMDPRMCSLMQGSTL
GMDYRMASAMQSSTL

SEQ ID NO: 75314 - protein, 15 aa, Artificial Sequence
  Description of Artificial Sequence: Synthetic peptide
  Seed: GMDPRMCSLMQGSTL
GMDYRMASAMQTSTL

SEQ ID NO: 75315 - protein, 15 aa, Artificial Sequence
  Description of Artificial Sequence: Synthetic peptide
  Seed: GMDPRMCSLMQGSTL
GMDYRMASAMQVSTL

SEQ ID NO: 75316 - protein, 15 aa, Artificial Sequence
  Description of Artificial Sequence: Synthetic peptide
  Seed: GMDPRMCSLMQGSTL
GMDYRMASAMQWSTL

SEQ ID NO: 75317 - protein, 15 aa, Artificial Sequence
  Description of Artificial Sequence: Synthetic peptide
  Seed: GMDPRMCSLMQGSTL
GMDYRMASAMQYSTL

SEQ ID NO: 75318 - protein, 15 aa, Artificial Sequence
  Description of Artificial Sequence: Synthetic peptide
  Seed: GMDPRMCSLMQGSTL
GMDYRMASCMQNSTL

SEQ ID NO: 75319 - protein, 15 aa, Artificial Sequence
  Description of Artificial Sequence: Synthetic peptide
  Seed: GMDPRMCSLMQGSTL
GMDYRMASFMQASTL

SEQ ID NO: 75320 - protein, 15 aa, Artificial Sequence
  Description of Artificial Sequence: Synthetic peptide
  Seed: GMDPRMCSLMQGSTL
GMDYRMASGMQASTL

SEQ ID NO: 75321 - protein, 15 aa, Artificial Sequence
  Description of Artificial Sequence: Synthetic peptide
  Seed: GMDPRMCSLMQGSTL
GMDYRMASGMQESTL

SEQ ID NO: 75322 - protein, 15 aa, Artificial Sequence
  Description of Artificial Sequence: Synthetic peptide
  Seed: GMDPRMCSLMQGSTL
GMDYRMASGMQGSTL

SEQ ID NO: 75323 - protein, 15 aa, Artificial Sequence
  Description of Artificial Sequence: Synthetic peptide
  Seed: GMDPRMCSLMQGSTL
GMDYRMASGMQHSTL

SEQ ID NO: 75324 - protein, 15 aa, Artificial Sequence
  Description of Artificial Sequence: Synthetic peptide
  Seed: GMDPRMCSLMQGSTL
GMDYRMASGMQISTL

SEQ ID NO: 75325 - protein, 15 aa, Artificial Sequence
  Description of Artificial Sequence: Synthetic peptide
  Seed: GMDPRMCSLMQGSTL
GMDYRMASGMQLSTL

SEQ ID NO: 75326 - protein, 15 aa, Artificial Sequence
  Description of Artificial Sequence: Synthetic peptide
  Seed: GMDPRMCSLMQGSTL
GMDYRMASGMQMSTL

SEQ ID NO: 75327 - protein, 15 aa, Artificial Sequence
  Description of Artificial Sequence: Synthetic peptide
  Seed: GMDPRMCSLMQGSTL
GMDYRMASGMQNSTL

SEQ ID NO: 75328 - protein, 15 aa, Artificial Sequence
  Description of Artificial Sequence: Synthetic peptide
  Seed: GMDPRMCSLMQGSTL
GMDYRMASGMQPSTL

SEQ ID NO: 75329 - protein, 15 aa, Artificial Sequence
  Description of Artificial Sequence: Synthetic peptide
  Seed: GMDPRMCSLMQGSTL
GMDYRMASGMQQSTL

SEQ ID NO: 75330 - protein, 15 aa, Artificial Sequence
  Description of Artificial Sequence: Synthetic peptide
  Seed: GMDPRMCSLMQGSTL
GMDYRMASGMQSSTL

SEQ ID NO: 75331 - protein, 15 aa, Artificial Sequence
  Description of Artificial Sequence: Synthetic peptide
  Seed: GMDPRMCSLMQGSTL
GMDYRMASGMQTSTL

SEQ ID NO: 75332 - protein, 15 aa, Artificial Sequence
  Description of Artificial Sequence: Synthetic peptide
  Seed: GMDPRMCSLMQGSTL
GMDYRMASGMQVSTL

SEQ ID NO: 75333 - protein, 15 aa, Artificial Sequence
  Description of Artificial Sequence: Synthetic peptide
  Seed: GMDPRMCSLMQGSTL
GMDYRMASHMQASTL

SEQ ID NO: 75334 - protein, 15 aa, Artificial Sequence
  Description of Artificial Sequence: Synthetic peptide
  Seed: GMDPRMCSLMQGSTL
GMDYRMASHMQNSTL

SEQ ID NO: 75335 - protein, 15 aa, Artificial Sequence
  Description of Artificial Sequence: Synthetic peptide
  Seed: GMDPRMCSLMQGSTL
GMDYRMASHMQSSTL

SEQ ID NO: 75336 - protein, 15 aa, Artificial Sequence
  Description of Artificial Sequence: Synthetic peptide
  Seed: GMDPRMCSLMQGSTL
GMDYRMASIMQASTL

SEQ ID NO: 75337 - protein, 15 aa, Artificial Sequence
  Description of Artificial Sequence: Synthetic peptide
  Seed: GMDPRMCSLMQGSTL
GMDYRMASIMQDSTL

SEQ ID NO: 75338 - protein, 15 aa, Artificial Sequence
  Description of Artificial Sequence: Synthetic peptide
  Seed: GMDPRMCSLMQGSTL
GMDYRMASIMQESTL

SEQ ID NO: 75339 - protein, 15 aa, Artificial Sequence
  Description of Artificial Sequence: Synthetic peptide
  Seed: GMDPRMCSLMQGSTL
GMDYRMASIMQGSTL

SEQ ID NO: 75340 - protein, 15 aa, Artificial Sequence
  Description of Artificial Sequence: Synthetic peptide
  Seed: GMDPRMCSLMQGSTL
GMDYRMASIMQHSTL

SEQ ID NO: 75341 - protein, 15 aa, Artificial Sequence
  Description of Artificial Sequence: Synthetic peptide
  Seed: GMDPRMCSLMQGSTL
GMDYRMASIMQISTL

SEQ ID NO: 75342 - protein, 15 aa, Artificial Sequence
  Description of Artificial Sequence: Synthetic peptide
  Seed: GMDPRMCSLMQGSTL
GMDYRMASIMQKSTL

SEQ ID NO: 75343 - protein, 15 aa, Artificial Sequence
  Description of Artificial Sequence: Synthetic peptide
  Seed: GMDPRMCSLMQGSTL
GMDYRMASIMQLSTL

SEQ ID NO: 75344 - protein, 15 aa, Artificial Sequence
  Description of Artificial Sequence: Synthetic peptide
  Seed: GMDPRMCSLMQGSTL
GMDYRMASIMQMSTL

SEQ ID NO: 75345 - protein, 15 aa, Artificial Sequence
  Description of Artificial Sequence: Synthetic peptide
  Seed: GMDPRMCSLMQGSTL
GMDYRMASIMQNSTL

SEQ ID NO: 75346 - protein, 15 aa, Artificial Sequence
  Description of Artificial Sequence: Synthetic peptide
  Seed: GMDPRMCSLMQGSTL
GMDYRMASIMQPSTL

SEQ ID NO: 75347 - protein, 15 aa, Artificial Sequence
  Description of Artificial Sequence: Synthetic peptide
  Seed: GMDPRMCSLMQGSTL
GMDYRMASIMQQSTL

SEQ ID NO: 75348 - protein, 15 aa, Artificial Sequence
  Description of Artificial Sequence: Synthetic peptide
  Seed: GMDPRMCSLMQGSTL
GMDYRMASIMQSSTL

SEQ ID NO: 75349 - protein, 15 aa, Artificial Sequence
  Description of Artificial Sequence: Synthetic peptide
  Seed: GMDPRMCSLMQGSTL
GMDYRMASIMQTSTL

SEQ ID NO: 75350 - protein, 15 aa, Artificial Sequence
  Description of Artificial Sequence: Synthetic peptide
  Seed: GMDPRMCSLMQGSTL
GMDYRMASIMQVSTL

SEQ ID NO: 75351 - protein, 15 aa, Artificial Sequence
  Description of Artificial Sequence: Synthetic peptide
  Seed: GMDPRMCSLMQGSTL
GMDYRMASIMQYSTL

SEQ ID NO: 75352 - protein, 15 aa, Artificial Sequence
  Description of Artificial Sequence: Synthetic peptide
  Seed: GMDPRMCSLMQGSTL
GMDYRMASLMQASTL

SEQ ID NO: 75353 - protein, 15 aa, Artificial Sequence
  Description of Artificial Sequence: Synthetic peptide
  Seed: GMDPRMCSLMQGSTL
GMDYRMASLMQGSTL

SEQ ID NO: 75354 - protein, 15 aa, Artificial Sequence
  Description of Artificial Sequence: Synthetic peptide
  Seed: GMDPRMCSLMQGSTL
GMDYRMASLMQHSTL

SEQ ID NO: 75355 - protein, 15 aa, Artificial Sequence
  Description of Artificial Sequence: Synthetic peptide
  Seed: GMDPRMCSLMQGSTL
GMDYRMASLMQISTL

SEQ ID NO: 75356 - protein, 15 aa, Artificial Sequence
  Description of Artificial Sequence: Synthetic peptide
  Seed: GMDPRMCSLMQGSTL
GMDYRMASLMQLSTL

SEQ ID NO: 75357 - protein, 15 aa, Artificial Sequence
  Description of Artificial Sequence: Synthetic peptide
  Seed: GMDPRMCSLMQGSTL
GMDYRMASLMQMSTL

SEQ ID NO: 75358 - protein, 15 aa, Artificial Sequence
  Description of Artificial Sequence: Synthetic peptide
  Seed: GMDPRMCSLMQGSTL
GMDYRMASLMQNSTL

SEQ ID NO: 75359 - protein, 15 aa, Artificial Sequence
  Description of Artificial Sequence: Synthetic peptide
  Seed: GMDPRMCSLMQGSTL
GMDYRMASLMQPSTL

SEQ ID NO: 75360 - protein, 15 aa, Artificial Sequence
  Description of Artificial Sequence: Synthetic peptide
  Seed: GMDPRMCSLMQGSTL
GMDYRMASLMQQSTL

SEQ ID NO: 75361 - protein, 15 aa, Artificial Sequence
  Description of Artificial Sequence: Synthetic peptide
  Seed: GMDPRMCSLMQGSTL
GMDYRMASLMQSSTL

SEQ ID NO: 75362 - protein, 15 aa, Artificial Sequence
  Description of Artificial Sequence: Synthetic peptide
  Seed: GMDPRMCSLMQGSTL
GMDYRMASLMQTSTL

SEQ ID NO: 75363 - protein, 15 aa, Artificial Sequence
  Description of Artificial Sequence: Synthetic peptide
  Seed: GMDPRMCSLMQGSTL
GMDYRMASLMQVSTL

SEQ ID NO: 75364 - protein, 15 aa, Artificial Sequence
  Description of Artificial Sequence: Synthetic peptide
  Seed: GMDPRMCSLMQGSTL
GMDYRMASMMQASTL

SEQ ID NO: 75365 - protein, 15 aa, Artificial Sequence
  Description of Artificial Sequence: Synthetic peptide
  Seed: GMDPRMCSLMQGSTL
GMDYRMASMMQGSTL

SEQ ID NO: 75366 - protein, 15 aa, Artificial Sequence
  Description of Artificial Sequence: Synthetic peptide
  Seed: GMDPRMCSLMQGSTL
GMDYRMASMMQHSTL

SEQ ID NO: 75367 - protein, 15 aa, Artificial Sequence
  Description of Artificial Sequence: Synthetic peptide
  Seed: GMDPRMCSLMQGSTL
GMDYRMASMMQISTL

SEQ ID NO: 75368 - protein, 15 aa, Artificial Sequence
  Description of Artificial Sequence: Synthetic peptide
  Seed: GMDPRMCSLMQGSTL
GMDYRMASMMQLSTL

SEQ ID NO: 75369 - protein, 15 aa, Artificial Sequence
  Description of Artificial Sequence: Synthetic peptide
  Seed: GMDPRMCSLMQGSTL
GMDYRMASMMQMSTL

SEQ ID NO: 75370 - protein, 15 aa, Artificial Sequence
  Description of Artificial Sequence: Synthetic peptide
  Seed: GMDPRMCSLMQGSTL
GMDYRMASMMQNSTL

SEQ ID NO: 75371 - protein, 15 aa, Artificial Sequence
  Description of Artificial Sequence: Synthetic peptide
  Seed: GMDPRMCSLMQGSTL
GMDYRMASMMQQSTL

SEQ ID NO: 75372 - protein, 15 aa, Artificial Sequence
  Description of Artificial Sequence: Synthetic peptide
  Seed: GMDPRMCSLMQGSTL
GMDYRMASMMQSSTL

SEQ ID NO: 75373 - protein, 15 aa, Artificial Sequence
  Description of Artificial Sequence: Synthetic peptide
  Seed: GMDPRMCSLMQGSTL
GMDYRMASMMQTSTL

SEQ ID NO: 75374 - protein, 15 aa, Artificial Sequence
  Description of Artificial Sequence: Synthetic peptide
  Seed: GMDPRMCSLMQGSTL
GMDYRMASMMQVSTL

SEQ ID NO: 75375 - protein, 15 aa, Artificial Sequence
  Description of Artificial Sequence: Synthetic peptide
  Seed: GMDPRMCSLMQGSTL
GMDYRMASNMQASTL

SEQ ID NO: 75376 - protein, 15 aa, Artificial Sequence
  Description of Artificial Sequence: Synthetic peptide
  Seed: GMDPRMCSLMQGSTL
GMDYRMASNMQGSTL

SEQ ID NO: 75377 - protein, 15 aa, Artificial Sequence
  Description of Artificial Sequence: Synthetic peptide
  Seed: GMDPRMCSLMQGSTL
GMDYRMASNMQHSTL

SEQ ID NO: 75378 - protein, 15 aa, Artificial Sequence
  Description of Artificial Sequence: Synthetic peptide
  Seed: GMDPRMCSLMQGSTL
GMDYRMASNMQISTL

SEQ ID NO: 75379 - protein, 15 aa, Artificial Sequence
  Description of Artificial Sequence: Synthetic peptide
  Seed: GMDPRMCSLMQGSTL
GMDYRMASNMQLSTL

SEQ ID NO: 75380 - protein, 15 aa, Artificial Sequence
  Description of Artificial Sequence: Synthetic peptide
  Seed: GMDPRMCSLMQGSTL
GMDYRMASNMQMSTL

SEQ ID NO: 75381 - protein, 15 aa, Artificial Sequence
  Description of Artificial Sequence: Synthetic peptide
  Seed: GMDPRMCSLMQGSTL
GMDYRMASNMQNSTL

SEQ ID NO: 75382 - protein, 15 aa, Artificial Sequence
  Description of Artificial Sequence: Synthetic peptide
  Seed: GMDPRMCSLMQGSTL
GMDYRMASNMQQSTL

SEQ ID NO: 75383 - protein, 15 aa, Artificial Sequence
  Description of Artificial Sequence: Synthetic peptide
  Seed: GMDPRMCSLMQGSTL
GMDYRMASNMQSSTL

SEQ ID NO: 75384 - protein, 15 aa, Artificial Sequence
  Description of Artificial Sequence: Synthetic peptide
  Seed: GMDPRMCSLMQGSTL
GMDYRMASNMQTSTL

SEQ ID NO: 75385 - protein, 15 aa, Artificial Sequence
  Description of Artificial Sequence: Synthetic peptide
  Seed: GMDPRMCSLMQGSTL
GMDYRMASNMQVSTL

SEQ ID NO: 75386 - protein, 15 aa, Artificial Sequence
  Description of Artificial Sequence: Synthetic peptide
  Seed: GMDPRMCSLMQGSTL
GMDYRMASPMQASTL

SEQ ID NO: 75387 - protein, 15 aa, Artificial Sequence
  Description of Artificial Sequence: Synthetic peptide
  Seed: GMDPRMCSLMQGSTL
GMDYRMASPMQCSTL

SEQ ID NO: 75388 - protein, 15 aa, Artificial Sequence
  Description of Artificial Sequence: Synthetic peptide
  Seed: GMDPRMCSLMQGSTL
GMDYRMASPMQDSTL

SEQ ID NO: 75389 - protein, 15 aa, Artificial Sequence
  Description of Artificial Sequence: Synthetic peptide
  Seed: GMDPRMCSLMQGSTL
GMDYRMASPMQESTL

SEQ ID NO: 75390 - protein, 15 aa, Artificial Sequence
  Description of Artificial Sequence: Synthetic peptide
  Seed: GMDPRMCSLMQGSTL
GMDYRMASPMQFSTL

SEQ ID NO: 75391 - protein, 15 aa, Artificial Sequence
  Description of Artificial Sequence: Synthetic peptide
  Seed: GMDPRMCSLMQGSTL
GMDYRMASPMQGSTL

SEQ ID NO: 75392 - protein, 15 aa, Artificial Sequence
  Description of Artificial Sequence: Synthetic peptide
  Seed: GMDPRMCSLMQGSTL
GMDYRMASPMQHSTL

SEQ ID NO: 75393 - protein, 15 aa, Artificial Sequence
  Description of Artificial Sequence: Synthetic peptide
  Seed: GMDPRMCSLMQGSTL
GMDYRMASPMQISTL

SEQ ID NO: 75394 - protein, 15 aa, Artificial Sequence
  Description of Artificial Sequence: Synthetic peptide
  Seed: GMDPRMCSLMQGSTL
GMDYRMASPMQLSTL

SEQ ID NO: 75395 - protein, 15 aa, Artificial Sequence
  Description of Artificial Sequence: Synthetic peptide
  Seed: GMDPRMCSLMQGSTL
GMDYRMASPMQMSTL

SEQ ID NO: 75396 - protein, 15 aa, Artificial Sequence
  Description of Artificial Sequence: Synthetic peptide
  Seed: GMDPRMCSLMQGSTL
GMDYRMASPMQNSTL

SEQ ID NO: 75397 - protein, 15 aa, Artificial Sequence
  Description of Artificial Sequence: Synthetic peptide
  Seed: GMDPRMCSLMQGSTL
GMDYRMASPMQPSTL

SEQ ID NO: 75398 - protein, 15 aa, Artificial Sequence
  Description of Artificial Sequence: Synthetic peptide
  Seed: GMDPRMCSLMQGSTL
GMDYRMASPMQQSTL

SEQ ID NO: 75399 - protein, 15 aa, Artificial Sequence
  Description of Artificial Sequence: Synthetic peptide
  Seed: GMDPRMCSLMQGSTL
GMDYRMASPMQSSTL

SEQ ID NO: 75400 - protein, 15 aa, Artificial Sequence
  Description of Artificial Sequence: Synthetic peptide
  Seed: GMDPRMCSLMQGSTL
GMDYRMASPMQTSTL

SEQ ID NO: 75401 - protein, 15 aa, Artificial Sequence
  Description of Artificial Sequence: Synthetic peptide
  Seed: GMDPRMCSLMQGSTL
GMDYRMASPMQVSTL

SEQ ID NO: 75402 - protein, 15 aa, Artificial Sequence
  Description of Artificial Sequence: Synthetic peptide
  Seed: GMDPRMCSLMQGSTL
GMDYRMASPMQWSTL

SEQ ID NO: 75403 - protein, 15 aa, Artificial Sequence
  Description of Artificial Sequence: Synthetic peptide
  Seed: GMDPRMCSLMQGSTL
GMDYRMASPMQYSTL

SEQ ID NO: 75404 - protein, 15 aa, Artificial Sequence
  Description of Artificial Sequence: Synthetic peptide
  Seed: GMDPRMCSLMQGSTL
GMDYRMASQMQASTL

SEQ ID NO: 75405 - protein, 15 aa, Artificial Sequence
  Description of Artificial Sequence: Synthetic peptide
  Seed: GMDPRMCSLMQGSTL
GMDYRMASQMQNSTL

SEQ ID NO: 75406 - protein, 15 aa, Artificial Sequence
  Description of Artificial Sequence: Synthetic peptide
  Seed: GMDPRMCSLMQGSTL
GMDYRMASQMQSSTL

SEQ ID NO: 75407 - protein, 15 aa, Artificial Sequence
  Description of Artificial Sequence: Synthetic peptide
  Seed: GMDPRMCSLMQGSTL
GMDYRMASQMQTSTL

SEQ ID NO: 75408 - protein, 15 aa, Artificial Sequence
  Description of Artificial Sequence: Synthetic peptide
  Seed: GMDPRMCSLMQGSTL
GMDYRMASSMQASTL

SEQ ID NO: 75409 - protein, 15 aa, Artificial Sequence
  Description of Artificial Sequence: Synthetic peptide
  Seed: GMDPRMCSLMQGSTL
GMDYRMASSMQCSTL

SEQ ID NO: 75410 - protein, 15 aa, Artificial Sequence
  Description of Artificial Sequence: Synthetic peptide
  Seed: GMDPRMCSLMQGSTL
GMDYRMASSMQDSTL

SEQ ID NO: 75411 - protein, 15 aa, Artificial Sequence
  Description of Artificial Sequence: Synthetic peptide
  Seed: GMDPRMCSLMQGSTL
GMDYRMASSMQESTL

SEQ ID NO: 75412 - protein, 15 aa, Artificial Sequence
  Description of Artificial Sequence: Synthetic peptide
  Seed: GMDPRMCSLMQGSTL
GMDYRMASSMQFSTL

SEQ ID NO: 75413 - protein, 15 aa, Artificial Sequence
  Description of Artificial Sequence: Synthetic peptide
  Seed: GMDPRMCSLMQGSTL
GMDYRMASSMQGSTL

SEQ ID NO: 75414 - protein, 15 aa, Artificial Sequence
  Description of Artificial Sequence: Synthetic peptide
  Seed: GMDPRMCSLMQGSTL
GMDYRMASSMQHSTL

SEQ ID NO: 75415 - protein, 15 aa, Artificial Sequence
  Description of Artificial Sequence: Synthetic peptide
  Seed: GMDPRMCSLMQGSTL
GMDYRMASSMQISTL

SEQ ID NO: 75416 - protein, 15 aa, Artificial Sequence
  Description of Artificial Sequence: Synthetic peptide
  Seed: GMDPRMCSLMQGSTL
GMDYRMASSMQLSTL

SEQ ID NO: 75417 - protein, 15 aa, Artificial Sequence
  Description of Artificial Sequence: Synthetic peptide
  Seed: GMDPRMCSLMQGSTL
GMDYRMASSMQMSTL

SEQ ID NO: 75418 - protein, 15 aa, Artificial Sequence
  Description of Artificial Sequence: Synthetic peptide
  Seed: GMDPRMCSLMQGSTL
GMDYRMASSMQNSTL

SEQ ID NO: 75419 - protein, 15 aa, Artificial Sequence
  Description of Artificial Sequence: Synthetic peptide
  Seed: GMDPRMCSLMQGSTL
GMDYRMASSMQPSTL

SEQ ID NO: 75420 - protein, 15 aa, Artificial Sequence
  Description of Artificial Sequence: Synthetic peptide
  Seed: GMDPRMCSLMQGSTL
GMDYRMASSMQQSTL

SEQ ID NO: 75421 - protein, 15 aa, Artificial Sequence
  Description of Artificial Sequence: Synthetic peptide
  Seed: GMDPRMCSLMQGSTL
GMDYRMASSMQSSTL

SEQ ID NO: 75422 - protein, 15 aa, Artificial Sequence
  Description of Artificial Sequence: Synthetic peptide
  Seed: GMDPRMCSLMQGSTL
GMDYRMASSMQTSTL

SEQ ID NO: 75423 - protein, 15 aa, Artificial Sequence
  Description of Artificial Sequence: Synthetic peptide
  Seed: GMDPRMCSLMQGSTL
GMDYRMASSMQVSTL

SEQ ID NO: 75424 - protein, 15 aa, Artificial Sequence
  Description of Artificial Sequence: Synthetic peptide
  Seed: GMDPRMCSLMQGSTL
GMDYRMASSMQYSTL

SEQ ID NO: 75425 - protein, 15 aa, Artificial Sequence
  Description of Artificial Sequence: Synthetic peptide
  Seed: GMDPRMCSLMQGSTL
GMDYRMASTMQASTL

SEQ ID NO: 75426 - protein, 15 aa, Artificial Sequence
  Description of Artificial Sequence: Synthetic peptide
  Seed: GMDPRMCSLMQGSTL
GMDYRMASTMQCSTL

SEQ ID NO: 75427 - protein, 15 aa, Artificial Sequence
  Description of Artificial Sequence: Synthetic peptide
  Seed: GMDPRMCSLMQGSTL
GMDYRMASTMQDSTL

SEQ ID NO: 75428 - protein, 15 aa, Artificial Sequence
  Description of Artificial Sequence: Synthetic peptide
  Seed: GMDPRMCSLMQGSTL
GMDYRMASTMQESTL

SEQ ID NO: 75429 - protein, 15 aa, Artificial Sequence
  Description of Artificial Sequence: Synthetic peptide
  Seed: GMDPRMCSLMQGSTL
GMDYRMASTMQFSTL

SEQ ID NO: 75430 - protein, 15 aa, Artificial Sequence
  Description of Artificial Sequence: Synthetic peptide
  Seed: GMDPRMCSLMQGSTL
GMDYRMASTMQGSTL

SEQ ID NO: 75431 - protein, 15 aa, Artificial Sequence
  Description of Artificial Sequence: Synthetic peptide
  Seed: GMDPRMCSLMQGSTL
GMDYRMASTMQHSTL

SEQ ID NO: 75432 - protein, 15 aa, Artificial Sequence
  Description of Artificial Sequence: Synthetic peptide
  Seed: GMDPRMCSLMQGSTL
GMDYRMASTMQISTL

SEQ ID NO: 75433 - protein, 15 aa, Artificial Sequence
  Description of Artificial Sequence: Synthetic peptide
  Seed: GMDPRMCSLMQGSTL
GMDYRMASTMQLSTL

SEQ ID NO: 75434 - protein, 15 aa, Artificial Sequence
  Description of Artificial Sequence: Synthetic peptide
  Seed: GMDPRMCSLMQGSTL
GMDYRMASTMQMSTL

SEQ ID NO: 75435 - protein, 15 aa, Artificial Sequence
  Description of Artificial Sequence: Synthetic peptide
  Seed: GMDPRMCSLMQGSTL
GMDYRMASTMQNSTL

SEQ ID NO: 75436 - protein, 15 aa, Artificial Sequence
  Description of Artificial Sequence: Synthetic peptide
  Seed: GMDPRMCSLMQGSTL
GMDYRMASTMQPSTL

SEQ ID NO: 75437 - protein, 15 aa, Artificial Sequence
  Description of Artificial Sequence: Synthetic peptide
  Seed: GMDPRMCSLMQGSTL
GMDYRMASTMQQSTL

SEQ ID NO: 75438 - protein, 15 aa, Artificial Sequence
  Description of Artificial Sequence: Synthetic peptide
  Seed: GMDPRMCSLMQGSTL
GMDYRMASTMQSSTL

SEQ ID NO: 75439 - protein, 15 aa, Artificial Sequence
  Description of Artificial Sequence: Synthetic peptide
  Seed: GMDPRMCSLMQGSTL
GMDYRMASTMQTSTL

SEQ ID NO: 75440 - protein, 15 aa, Artificial Sequence
  Description of Artificial Sequence: Synthetic peptide
  Seed: GMDPRMCSLMQGSTL
GMDYRMASTMQVSTL

SEQ ID NO: 75441 - protein, 15 aa, Artificial Sequence
  Description of Artificial Sequence: Synthetic peptide
  Seed: GMDPRMCSLMQGSTL
GMDYRMASTMQYSTL

SEQ ID NO: 75442 - protein, 15 aa, Artificial Sequence
  Description of Artificial Sequence: Synthetic peptide
  Seed: GMDPRMCSLMQGSTL
GMDYRMASVMQASTL

SEQ ID NO: 75443 - protein, 15 aa, Artificial Sequence
  Description of Artificial Sequence: Synthetic peptide
  Seed: GMDPRMCSLMQGSTL
GMDYRMASVMQCSTL

SEQ ID NO: 75444 - protein, 15 aa, Artificial Sequence
  Description of Artificial Sequence: Synthetic peptide
  Seed: GMDPRMCSLMQGSTL
GMDYRMASVMQDSTL

SEQ ID NO: 75445 - protein, 15 aa, Artificial Sequence
  Description of Artificial Sequence: Synthetic peptide
  Seed: GMDPRMCSLMQGSTL
GMDYRMASVMQESTL

SEQ ID NO: 75446 - protein, 15 aa, Artificial Sequence
  Description of Artificial Sequence: Synthetic peptide
  Seed: GMDPRMCSLMQGSTL
GMDYRMASVMQFSTL

SEQ ID NO: 75447 - protein, 15 aa, Artificial Sequence
  Description of Artificial Sequence: Synthetic peptide
  Seed: GMDPRMCSLMQGSTL
GMDYRMASVMQGSTL

SEQ ID NO: 75448 - protein, 15 aa, Artificial Sequence
  Description of Artificial Sequence: Synthetic peptide
  Seed: GMDPRMCSLMQGSTL
GMDYRMASVMQHSTL

SEQ ID NO: 75449 - protein, 15 aa, Artificial Sequence
  Description of Artificial Sequence: Synthetic peptide
  Seed: GMDPRMCSLMQGSTL
GMDYRMASVMQISTL

SEQ ID NO: 75450 - protein, 15 aa, Artificial Sequence
  Description of Artificial Sequence: Synthetic peptide
  Seed: GMDPRMCSLMQGSTL
GMDYRMASVMQKSTL

SEQ ID NO: 75451 - protein, 15 aa, Artificial Sequence
  Description of Artificial Sequence: Synthetic peptide
  Seed: GMDPRMCSLMQGSTL
GMDYRMASVMQLSTL

SEQ ID NO: 75452 - protein, 15 aa, Artificial Sequence
  Description of Artificial Sequence: Synthetic peptide
  Seed: GMDPRMCSLMQGSTL
GMDYRMASVMQMSTL

SEQ ID NO: 75453 - protein, 15 aa, Artificial Sequence
  Description of Artificial Sequence: Synthetic peptide
  Seed: GMDPRMCSLMQGSTL
GMDYRMASVMQNSTL

SEQ ID NO: 75454 - protein, 15 aa, Artificial Sequence
  Description of Artificial Sequence: Synthetic peptide
  Seed: GMDPRMCSLMQGSTL
GMDYRMASVMQPSTL

SEQ ID NO: 75455 - protein, 15 aa, Artificial Sequence
  Description of Artificial Sequence: Synthetic peptide
  Seed: GMDPRMCSLMQGSTL
GMDYRMASVMQQSTL

SEQ ID NO: 75456 - protein, 15 aa, Artificial Sequence
  Description of Artificial Sequence: Synthetic peptide
  Seed: GMDPRMCSLMQGSTL
GMDYRMASVMQRSTL

SEQ ID NO: 75457 - protein, 15 aa, Artificial Sequence
  Description of Artificial Sequence: Synthetic peptide
  Seed: GMDPRMCSLMQGSTL
GMDYRMASVMQSSTL

SEQ ID NO: 75458 - protein, 15 aa, Artificial Sequence
  Description of Artificial Sequence: Synthetic peptide
  Seed: GMDPRMCSLMQGSTL
GMDYRMASVMQTSTL

SEQ ID NO: 75459 - protein, 15 aa, Artificial Sequence
  Description of Artificial Sequence: Synthetic peptide
  Seed: GMDPRMCSLMQGSTL
GMDYRMASVMQVSTL

SEQ ID NO: 75460 - protein, 15 aa, Artificial Sequence
  Description of Artificial Sequence: Synthetic peptide
  Seed: GMDPRMCSLMQGSTL
GMDYRMASVMQYSTL

SEQ ID NO: 75461 - protein, 15 aa, Artificial Sequence
  Description of Artificial Sequence: Synthetic peptide
  Seed: GMDPRMCSLMQGSTL
GMDYRMCSAMQASTL

SEQ ID NO: 75462 - protein, 15 aa, Artificial Sequence
  Description of Artificial Sequence: Synthetic peptide
  Seed: GMDPRMCSLMQGSTL
GMDYRMCSAMQNSTL

SEQ ID NO: 75463 - protein, 15 aa, Artificial Sequence
  Description of Artificial Sequence: Synthetic peptide
  Seed: GMDPRMCSLMQGSTL
GMDYRMCSAMQSSTL

SEQ ID NO: 75464 - protein, 15 aa, Artificial Sequence
  Description of Artificial Sequence: Synthetic peptide
  Seed: GMDPRMCSLMQGSTL
GMDYRMCSSMQASTL

SEQ ID NO: 75465 - protein, 15 aa, Artificial Sequence
  Description of Artificial Sequence: Synthetic peptide
  Seed: GMDPRMCSLMQGSTL
GMDYRMCSSMQSSTL

SEQ ID NO: 75466 - protein, 15 aa, Artificial Sequence
  Description of Artificial Sequence: Synthetic peptide
  Seed: GMDPRMCSLMQGSTL
GMDYRMCSVMQASTL

SEQ ID NO: 75467 - protein, 15 aa, Artificial Sequence
  Description of Artificial Sequence: Synthetic peptide
  Seed: GMDPRMCSLMQGSTL
GMDYRMCSVMQNSTL

SEQ ID NO: 75468 - protein, 15 aa, Artificial Sequence
  Description of Artificial Sequence: Synthetic peptide
  Seed: GMDPRMCSLMQGSTL
GMDYRMCSVMQSSTL

SEQ ID NO: 75469 - protein, 15 aa, Artificial Sequence
  Description of Artificial Sequence: Synthetic peptide
  Seed: GMDPRMCSLMQGSTL
GMDYRMESAMQASTL

SEQ ID NO: 75470 - protein, 15 aa, Artificial Sequence
  Description of Artificial Sequence: Synthetic peptide
  Seed: GMDPRMCSLMQGSTL
GMDYRMESAMQGSTL

SEQ ID NO: 75471 - protein, 15 aa, Artificial Sequence
  Description of Artificial Sequence: Synthetic peptide
  Seed: GMDPRMCSLMQGSTL
GMDYRMESAMQHSTL

SEQ ID NO: 75472 - protein, 15 aa, Artificial Sequence
  Description of Artificial Sequence: Synthetic peptide
  Seed: GMDPRMCSLMQGSTL
GMDYRMESAMQISTL

SEQ ID NO: 75473 - protein, 15 aa, Artificial Sequence
  Description of Artificial Sequence: Synthetic peptide
  Seed: GMDPRMCSLMQGSTL
GMDYRMESAMQLSTL

SEQ ID NO: 75474 - protein, 15 aa, Artificial Sequence
  Description of Artificial Sequence: Synthetic peptide
  Seed: GMDPRMCSLMQGSTL
GMDYRMESAMQMSTL

SEQ ID NO: 75475 - protein, 15 aa, Artificial Sequence
  Description of Artificial Sequence: Synthetic peptide
  Seed: GMDPRMCSLMQGSTL
GMDYRMESAMQNSTL

SEQ ID NO: 75476 - protein, 15 aa, Artificial Sequence
  Description of Artificial Sequence: Synthetic peptide
  Seed: GMDPRMCSLMQGSTL
GMDYRMESAMQQSTL

SEQ ID NO: 75477 - protein, 15 aa, Artificial Sequence
  Description of Artificial Sequence: Synthetic peptide
  Seed: GMDPRMCSLMQGSTL
GMDYRMESAMQSSTL

SEQ ID NO: 75478 - protein, 15 aa, Artificial Sequence
  Description of Artificial Sequence: Synthetic peptide
  Seed: GMDPRMCSLMQGSTL
GMDYRMESAMQTSTL

SEQ ID NO: 75479 - protein, 15 aa, Artificial Sequence
  Description of Artificial Sequence: Synthetic peptide
  Seed: GMDPRMCSLMQGSTL
GMDYRMESAMQVSTL

SEQ ID NO: 75480 - protein, 15 aa, Artificial Sequence
  Description of Artificial Sequence: Synthetic peptide
  Seed: GMDPRMCSLMQGSTL
GMDYRMESGMQASTL

SEQ ID NO: 75481 - protein, 15 aa, Artificial Sequence
  Description of Artificial Sequence: Synthetic peptide
  Seed: GMDPRMCSLMQGSTL
GMDYRMESGMQNSTL

SEQ ID NO: 75482 - protein, 15 aa, Artificial Sequence
  Description of Artificial Sequence: Synthetic peptide
  Seed: GMDPRMCSLMQGSTL
GMDYRMESGMQSSTL

SEQ ID NO: 75483 - protein, 15 aa, Artificial Sequence
  Description of Artificial Sequence: Synthetic peptide
  Seed: GMDPRMCSLMQGSTL
GMDYRMESIMQASTL

SEQ ID NO: 75484 - protein, 15 aa, Artificial Sequence
  Description of Artificial Sequence: Synthetic peptide
  Seed: GMDPRMCSLMQGSTL
GMDYRMESIMQLSTL

SEQ ID NO: 75485 - protein, 15 aa, Artificial Sequence
  Description of Artificial Sequence: Synthetic peptide
  Seed: GMDPRMCSLMQGSTL
GMDYRMESIMQNSTL

SEQ ID NO: 75486 - protein, 15 aa, Artificial Sequence
  Description of Artificial Sequence: Synthetic peptide
  Seed: GMDPRMCSLMQGSTL
GMDYRMESIMQSSTL

SEQ ID NO: 75487 - protein, 15 aa, Artificial Sequence
  Description of Artificial Sequence: Synthetic peptide
  Seed: GMDPRMCSLMQGSTL
GMDYRMESIMQTSTL

SEQ ID NO: 75488 - protein, 15 aa, Artificial Sequence
  Description of Artificial Sequence: Synthetic peptide
  Seed: GMDPRMCSLMQGSTL
GMDYRMESIMQVSTL

SEQ ID NO: 75489 - protein, 15 aa, Artificial Sequence
  Description of Artificial Sequence: Synthetic peptide
  Seed: GMDPRMCSLMQGSTL
GMDYRMESLMQASTL

SEQ ID NO: 75490 - protein, 15 aa, Artificial Sequence
  Description of Artificial Sequence: Synthetic peptide
  Seed: GMDPRMCSLMQGSTL
GMDYRMESPMQASTL

SEQ ID NO: 75491 - protein, 15 aa, Artificial Sequence
  Description of Artificial Sequence: Synthetic peptide
  Seed: GMDPRMCSLMQGSTL
GMDYRMESPMQLSTL

SEQ ID NO: 75492 - protein, 15 aa, Artificial Sequence
  Description of Artificial Sequence: Synthetic peptide
  Seed: GMDPRMCSLMQGSTL
GMDYRMESPMQMSTL

SEQ ID NO: 75493 - protein, 15 aa, Artificial Sequence
  Description of Artificial Sequence: Synthetic peptide
  Seed: GMDPRMCSLMQGSTL
GMDYRMESPMQNSTL

SEQ ID NO: 75494 - protein, 15 aa, Artificial Sequence
  Description of Artificial Sequence: Synthetic peptide
  Seed: GMDPRMCSLMQGSTL
GMDYRMESPMQSSTL

SEQ ID NO: 75495 - protein, 15 aa, Artificial Sequence
  Description of Artificial Sequence: Synthetic peptide
  Seed: GMDPRMCSLMQGSTL
GMDYRMESPMQTSTL

SEQ ID NO: 75496 - protein, 15 aa, Artificial Sequence
  Description of Artificial Sequence: Synthetic peptide
  Seed: GMDPRMCSLMQGSTL
GMDYRMESSMQASTL

SEQ ID NO: 75497 - protein, 15 aa, Artificial Sequence
  Description of Artificial Sequence: Synthetic peptide
  Seed: GMDPRMCSLMQGSTL
GMDYRMESSMQLSTL

SEQ ID NO: 75498 - protein, 15 aa, Artificial Sequence
  Description of Artificial Sequence: Synthetic peptide
  Seed: GMDPRMCSLMQGSTL
GMDYRMESSMQNSTL

SEQ ID NO: 75499 - protein, 15 aa, Artificial Sequence
  Description of Artificial Sequence: Synthetic peptide
  Seed: GMDPRMCSLMQGSTL
GMDYRMESSMQSSTL

SEQ ID NO: 75500 - protein, 15 aa, Artificial Sequence
  Description of Artificial Sequence: Synthetic peptide
  Seed: GMDPRMCSLMQGSTL
GMDYRMESSMQTSTL

SEQ ID NO: 75501 - protein, 15 aa, Artificial Sequence
  Description of Artificial Sequence: Synthetic peptide
  Seed: GMDPRMCSLMQGSTL
GMDYRMESSMQVSTL

SEQ ID NO: 75502 - protein, 15 aa, Artificial Sequence
  Description of Artificial Sequence: Synthetic peptide
  Seed: GMDPRMCSLMQGSTL
GMDYRMESTMQASTL

SEQ ID NO: 75503 - protein, 15 aa, Artificial Sequence
  Description of Artificial Sequence: Synthetic peptide
  Seed: GMDPRMCSLMQGSTL
GMDYRMESTMQNSTL

SEQ ID NO: 75504 - protein, 15 aa, Artificial Sequence
  Description of Artificial Sequence: Synthetic peptide
  Seed: GMDPRMCSLMQGSTL
GMDYRMESTMQSSTL

SEQ ID NO: 75505 - protein, 15 aa, Artificial Sequence
  Description of Artificial Sequence: Synthetic peptide
  Seed: GMDPRMCSLMQGSTL
GMDYRMESTMQTSTL

SEQ ID NO: 75506 - protein, 15 aa, Artificial Sequence
  Description of Artificial Sequence: Synthetic peptide
  Seed: GMDPRMCSLMQGSTL
GMDYRMESVMQASTL

SEQ ID NO: 75507 - protein, 15 aa, Artificial Sequence
  Description of Artificial Sequence: Synthetic peptide
  Seed: GMDPRMCSLMQGSTL
GMDYRMESVMQHSTL

SEQ ID NO: 75508 - protein, 15 aa, Artificial Sequence
  Description of Artificial Sequence: Synthetic peptide
  Seed: GMDPRMCSLMQGSTL
GMDYRMESVMQISTL

SEQ ID NO: 75509 - protein, 15 aa, Artificial Sequence
  Description of Artificial Sequence: Synthetic peptide
  Seed: GMDPRMCSLMQGSTL
GMDYRMESVMQLSTL

SEQ ID NO: 75510 - protein, 15 aa, Artificial Sequence
  Description of Artificial Sequence: Synthetic peptide
  Seed: GMDPRMCSLMQGSTL
GMDYRMESVMQMSTL

SEQ ID NO: 75511 - protein, 15 aa, Artificial Sequence
  Description of Artificial Sequence: Synthetic peptide
  Seed: GMDPRMCSLMQGSTL
GMDYRMESVMQNSTL

SEQ ID NO: 75512 - protein, 15 aa, Artificial Sequence
  Description of Artificial Sequence: Synthetic peptide
  Seed: GMDPRMCSLMQGSTL
GMDYRMESVMQSSTL

SEQ ID NO: 75513 - protein, 15 aa, Artificial Sequence
  Description of Artificial Sequence: Synthetic peptide
  Seed: GMDPRMCSLMQGSTL
GMDYRMESVMQTSTL

SEQ ID NO: 75514 - protein, 15 aa, Artificial Sequence
  Description of Artificial Sequence: Synthetic peptide
  Seed: GMDPRMCSLMQGSTL
GMDYRMESVMQVSTL

SEQ ID NO: 75515 - protein, 15 aa, Artificial Sequence
  Description of Artificial Sequence: Synthetic peptide
  Seed: GMDPRMCSLMQGSTL
GMDYRMFSAMQASTL

SEQ ID NO: 75516 - protein, 15 aa, Artificial Sequence
  Description of Artificial Sequence: Synthetic peptide
  Seed: GMDPRMCSLMQGSTL
GMDYRMFSAMQCSTL

SEQ ID NO: 75517 - protein, 15 aa, Artificial Sequence
  Description of Artificial Sequence: Synthetic peptide
  Seed: GMDPRMCSLMQGSTL
GMDYRMFSAMQDSTL

SEQ ID NO: 75518 - protein, 15 aa, Artificial Sequence
  Description of Artificial Sequence: Synthetic peptide
  Seed: GMDPRMCSLMQGSTL
GMDYRMFSAMQESTL

SEQ ID NO: 75519 - protein, 15 aa, Artificial Sequence
  Description of Artificial Sequence: Synthetic peptide
  Seed: GMDPRMCSLMQGSTL
GMDYRMFSAMQFSTL

SEQ ID NO: 75520 - protein, 15 aa, Artificial Sequence
  Description of Artificial Sequence: Synthetic peptide
  Seed: GMDPRMCSLMQGSTL
GMDYRMFSAMQGSTL

SEQ ID NO: 75521 - protein, 15 aa, Artificial Sequence
  Description of Artificial Sequence: Synthetic peptide
  Seed: GMDPRMCSLMQGSTL
GMDYRMFSAMQHSTL

SEQ ID NO: 75522 - protein, 15 aa, Artificial Sequence
  Description of Artificial Sequence: Synthetic peptide
  Seed: GMDPRMCSLMQGSTL
GMDYRMFSAMQISTL

SEQ ID NO: 75523 - protein, 15 aa, Artificial Sequence
  Description of Artificial Sequence: Synthetic peptide
  Seed: GMDPRMCSLMQGSTL
GMDYRMFSAMQKSTL

SEQ ID NO: 75524 - protein, 15 aa, Artificial Sequence
  Description of Artificial Sequence: Synthetic peptide
  Seed: GMDPRMCSLMQGSTL
GMDYRMFSAMQLSTL

SEQ ID NO: 75525 - protein, 15 aa, Artificial Sequence
  Description of Artificial Sequence: Synthetic peptide
  Seed: GMDPRMCSLMQGSTL
GMDYRMFSAMQMSTL

SEQ ID NO: 75526 - protein, 15 aa, Artificial Sequence
  Description of Artificial Sequence: Synthetic peptide
  Seed: GMDPRMCSLMQGSTL
GMDYRMFSAMQNSTL

SEQ ID NO: 75527 - protein, 15 aa, Artificial Sequence
  Description of Artificial Sequence: Synthetic peptide
  Seed: GMDPRMCSLMQGSTL
GMDYRMFSAMQPSTL

SEQ ID NO: 75528 - protein, 15 aa, Artificial Sequence
  Description of Artificial Sequence: Synthetic peptide
  Seed: GMDPRMCSLMQGSTL
GMDYRMFSAMQQSTL

SEQ ID NO: 75529 - protein, 15 aa, Artificial Sequence
  Description of Artificial Sequence: Synthetic peptide
  Seed: GMDPRMCSLMQGSTL
GMDYRMFSAMQRSTL

SEQ ID NO: 75530 - protein, 15 aa, Artificial Sequence
  Description of Artificial Sequence: Synthetic peptide
  Seed: GMDPRMCSLMQGSTL
GMDYRMFSAMQSSTL

SEQ ID NO: 75531 - protein, 15 aa, Artificial Sequence
  Description of Artificial Sequence: Synthetic peptide
  Seed: GMDPRMCSLMQGSTL
GMDYRMFSAMQTSTL

SEQ ID NO: 75532 - protein, 15 aa, Artificial Sequence
  Description of Artificial Sequence: Synthetic peptide
  Seed: GMDPRMCSLMQGSTL
GMDYRMFSAMQVSTL

SEQ ID NO: 75533 - protein, 15 aa, Artificial Sequence
  Description of Artificial Sequence: Synthetic peptide
  Seed: GMDPRMCSLMQGSTL
GMDYRMFSAMQYSTL

SEQ ID NO: 75534 - protein, 15 aa, Artificial Sequence
  Description of Artificial Sequence: Synthetic peptide
  Seed: GMDPRMCSLMQGSTL
GMDYRMFSCMQASTL

SEQ ID NO: 75535 - protein, 15 aa, Artificial Sequence
  Description of Artificial Sequence: Synthetic peptide
  Seed: GMDPRMCSLMQGSTL
GMDYRMFSCMQSSTL

SEQ ID NO: 75536 - protein, 15 aa, Artificial Sequence
  Description of Artificial Sequence: Synthetic peptide
  Seed: GMDPRMCSLMQGSTL
GMDYRMFSEMQASTL

SEQ ID NO: 75537 - protein, 15 aa, Artificial Sequence
  Description of Artificial Sequence: Synthetic peptide
  Seed: GMDPRMCSLMQGSTL
GMDYRMFSGMQASTL

SEQ ID NO: 75538 - protein, 15 aa, Artificial Sequence
  Description of Artificial Sequence: Synthetic peptide
  Seed: GMDPRMCSLMQGSTL
GMDYRMFSGMQGSTL

SEQ ID NO: 75539 - protein, 15 aa, Artificial Sequence
  Description of Artificial Sequence: Synthetic peptide
  Seed: GMDPRMCSLMQGSTL
GMDYRMFSGMQHSTL

SEQ ID NO: 75540 - protein, 15 aa, Artificial Sequence
  Description of Artificial Sequence: Synthetic peptide
  Seed: GMDPRMCSLMQGSTL
GMDYRMFSGMQISTL

SEQ ID NO: 75541 - protein, 15 aa, Artificial Sequence
  Description of Artificial Sequence: Synthetic peptide
  Seed: GMDPRMCSLMQGSTL
GMDYRMFSGMQLSTL

SEQ ID NO: 75542 - protein, 15 aa, Artificial Sequence
  Description of Artificial Sequence: Synthetic peptide
  Seed: GMDPRMCSLMQGSTL
GMDYRMFSGMQMSTL

SEQ ID NO: 75543 - protein, 15 aa, Artificial Sequence
  Description of Artificial Sequence: Synthetic peptide
  Seed: GMDPRMCSLMQGSTL
GMDYRMFSGMQNSTL

SEQ ID NO: 75544 - protein, 15 aa, Artificial Sequence
  Description of Artificial Sequence: Synthetic peptide
  Seed: GMDPRMCSLMQGSTL
GMDYRMFSGMQPSTL

SEQ ID NO: 75545 - protein, 15 aa, Artificial Sequence
  Description of Artificial Sequence: Synthetic peptide
  Seed: GMDPRMCSLMQGSTL
GMDYRMFSGMQSSTL

SEQ ID NO: 75546 - protein, 15 aa, Artificial Sequence
  Description of Artificial Sequence: Synthetic peptide
  Seed: GMDPRMCSLMQGSTL
GMDYRMFSGMQTSTL

SEQ ID NO: 75547 - protein, 15 aa, Artificial Sequence
  Description of Artificial Sequence: Synthetic peptide
  Seed: GMDPRMCSLMQGSTL
GMDYRMFSGMQVSTL

SEQ ID NO: 75548 - protein, 15 aa, Artificial Sequence
  Description of Artificial Sequence: Synthetic peptide
  Seed: GMDPRMCSLMQGSTL
GMDYRMFSHMQASTL

SEQ ID NO: 75549 - protein, 15 aa, Artificial Sequence
  Description of Artificial Sequence: Synthetic peptide
  Seed: GMDPRMCSLMQGSTL
GMDYRMFSHMQGSTL

SEQ ID NO: 75550 - protein, 15 aa, Artificial Sequence
  Description of Artificial Sequence: Synthetic peptide
  Seed: GMDPRMCSLMQGSTL
GMDYRMFSHMQISTL

SEQ ID NO: 75551 - protein, 15 aa, Artificial Sequence
  Description of Artificial Sequence: Synthetic peptide
  Seed: GMDPRMCSLMQGSTL
GMDYRMFSHMQNSTL

SEQ ID NO: 75552 - protein, 15 aa, Artificial Sequence
  Description of Artificial Sequence: Synthetic peptide
  Seed: GMDPRMCSLMQGSTL
GMDYRMFSHMQSSTL

SEQ ID NO: 75553 - protein, 15 aa, Artificial Sequence
  Description of Artificial Sequence: Synthetic peptide
  Seed: GMDPRMCSLMQGSTL
GMDYRMFSHMQTSTL

SEQ ID NO: 75554 - protein, 15 aa, Artificial Sequence
  Description of Artificial Sequence: Synthetic peptide
  Seed: GMDPRMCSLMQGSTL
GMDYRMFSHMQVSTL

SEQ ID NO: 75555 - protein, 15 aa, Artificial Sequence
  Description of Artificial Sequence: Synthetic peptide
  Seed: GMDPRMCSLMQGSTL
GMDYRMFSIMQASTL

SEQ ID NO: 75556 - protein, 15 aa, Artificial Sequence
  Description of Artificial Sequence: Synthetic peptide
  Seed: GMDPRMCSLMQGSTL
GMDYRMFSIMQGSTL

SEQ ID NO: 75557 - protein, 15 aa, Artificial Sequence
  Description of Artificial Sequence: Synthetic peptide
  Seed: GMDPRMCSLMQGSTL
GMDYRMFSIMQHSTL

SEQ ID NO: 75558 - protein, 15 aa, Artificial Sequence
  Description of Artificial Sequence: Synthetic peptide
  Seed: GMDPRMCSLMQGSTL
GMDYRMFSIMQISTL

SEQ ID NO: 75559 - protein, 15 aa, Artificial Sequence
  Description of Artificial Sequence: Synthetic peptide
  Seed: GMDPRMCSLMQGSTL
GMDYRMFSIMQLSTL

SEQ ID NO: 75560 - protein, 15 aa, Artificial Sequence
  Description of Artificial Sequence: Synthetic peptide
  Seed: GMDPRMCSLMQGSTL
GMDYRMFSIMQMSTL

SEQ ID NO: 75561 - protein, 15 aa, Artificial Sequence
  Description of Artificial Sequence: Synthetic peptide
  Seed: GMDPRMCSLMQGSTL
GMDYRMFSIMQNSTL

SEQ ID NO: 75562 - protein, 15 aa, Artificial Sequence
  Description of Artificial Sequence: Synthetic peptide
  Seed: GMDPRMCSLMQGSTL
GMDYRMFSIMQQSTL

SEQ ID NO: 75563 - protein, 15 aa, Artificial Sequence
  Description of Artificial Sequence: Synthetic peptide
  Seed: GMDPRMCSLMQGSTL
GMDYRMFSIMQSSTL

SEQ ID NO: 75564 - protein, 15 aa, Artificial Sequence
  Description of Artificial Sequence: Synthetic peptide
  Seed: GMDPRMCSLMQGSTL
GMDYRMFSIMQTSTL

SEQ ID NO: 75565 - protein, 15 aa, Artificial Sequence
  Description of Artificial Sequence: Synthetic peptide
  Seed: GMDPRMCSLMQGSTL
GMDYRMFSIMQVSTL

SEQ ID NO: 75566 - protein, 15 aa, Artificial Sequence
  Description of Artificial Sequence: Synthetic peptide
  Seed: GMDPRMCSLMQGSTL
GMDYRMFSKMQASTL

SEQ ID NO: 75567 - protein, 15 aa, Artificial Sequence
  Description of Artificial Sequence: Synthetic peptide
  Seed: GMDPRMCSLMQGSTL
GMDYRMFSKMQSSTL

SEQ ID NO: 75568 - protein, 15 aa, Artificial Sequence
  Description of Artificial Sequence: Synthetic peptide
  Seed: GMDPRMCSLMQGSTL
GMDYRMFSKMQTSTL

SEQ ID NO: 75569 - protein, 15 aa, Artificial Sequence
  Description of Artificial Sequence: Synthetic peptide
  Seed: GMDPRMCSLMQGSTL
GMDYRMFSKMQVSTL

SEQ ID NO: 75570 - protein, 15 aa, Artificial Sequence
  Description of Artificial Sequence: Synthetic peptide
  Seed: GMDPRMCSLMQGSTL
GMDYRMFSLMQASTL

SEQ ID NO: 75571 - protein, 15 aa, Artificial Sequence
  Description of Artificial Sequence: Synthetic peptide
  Seed: GMDPRMCSLMQGSTL
GMDYRMFSLMQGSTL

SEQ ID NO: 75572 - protein, 15 aa, Artificial Sequence
  Description of Artificial Sequence: Synthetic peptide
  Seed: GMDPRMCSLMQGSTL
GMDYRMFSLMQHSTL

SEQ ID NO: 75573 - protein, 15 aa, Artificial Sequence
  Description of Artificial Sequence: Synthetic peptide
  Seed: GMDPRMCSLMQGSTL
GMDYRMFSLMQISTL

SEQ ID NO: 75574 - protein, 15 aa, Artificial Sequence
  Description of Artificial Sequence: Synthetic peptide
  Seed: GMDPRMCSLMQGSTL
GMDYRMFSLMQLSTL

SEQ ID NO: 75575 - protein, 15 aa, Artificial Sequence
  Description of Artificial Sequence: Synthetic peptide
  Seed: GMDPRMCSLMQGSTL
GMDYRMFSLMQMSTL

SEQ ID NO: 75576 - protein, 15 aa, Artificial Sequence
  Description of Artificial Sequence: Synthetic peptide
  Seed: GMDPRMCSLMQGSTL
GMDYRMFSLMQNSTL

SEQ ID NO: 75577 - protein, 15 aa, Artificial Sequence
  Description of Artificial Sequence: Synthetic peptide
  Seed: GMDPRMCSLMQGSTL
GMDYRMFSLMQSSTL

SEQ ID NO: 75578 - protein, 15 aa, Artificial Sequence
  Description of Artificial Sequence: Synthetic peptide
  Seed: GMDPRMCSLMQGSTL
GMDYRMFSLMQTSTL

SEQ ID NO: 75579 - protein, 15 aa, Artificial Sequence
  Description of Artificial Sequence: Synthetic peptide
  Seed: GMDPRMCSLMQGSTL
GMDYRMFSLMQVSTL

SEQ ID NO: 75580 - protein, 15 aa, Artificial Sequence
  Description of Artificial Sequence: Synthetic peptide
  Seed: GMDPRMCSLMQGSTL
GMDYRMFSMMQASTL

SEQ ID NO: 75581 - protein, 15 aa, Artificial Sequence
  Description of Artificial Sequence: Synthetic peptide
  Seed: GMDPRMCSLMQGSTL
GMDYRMFSMMQGSTL

SEQ ID NO: 75582 - protein, 15 aa, Artificial Sequence
  Description of Artificial Sequence: Synthetic peptide
  Seed: GMDPRMCSLMQGSTL
GMDYRMFSMMQHSTL

SEQ ID NO: 75583 - protein, 15 aa, Artificial Sequence
  Description of Artificial Sequence: Synthetic peptide
  Seed: GMDPRMCSLMQGSTL
GMDYRMFSMMQISTL

SEQ ID NO: 75584 - protein, 15 aa, Artificial Sequence
  Description of Artificial Sequence: Synthetic peptide
  Seed: GMDPRMCSLMQGSTL
GMDYRMFSMMQLSTL

SEQ ID NO: 75585 - protein, 15 aa, Artificial Sequence
  Description of Artificial Sequence: Synthetic peptide
  Seed: GMDPRMCSLMQGSTL
GMDYRMFSMMQMSTL

SEQ ID NO: 75586 - protein, 15 aa, Artificial Sequence
  Description of Artificial Sequence: Synthetic peptide
  Seed: GMDPRMCSLMQGSTL
GMDYRMFSMMQNSTL

SEQ ID NO: 75587 - protein, 15 aa, Artificial Sequence
  Description of Artificial Sequence: Synthetic peptide
  Seed: GMDPRMCSLMQGSTL
GMDYRMFSMMQQSTL

SEQ ID NO: 75588 - protein, 15 aa, Artificial Sequence
  Description of Artificial Sequence: Synthetic peptide
  Seed: GMDPRMCSLMQGSTL
GMDYRMFSMMQSSTL

SEQ ID NO: 75589 - protein, 15 aa, Artificial Sequence
  Description of Artificial Sequence: Synthetic peptide
  Seed: GMDPRMCSLMQGSTL
GMDYRMFSMMQVSTL

SEQ ID NO: 75590 - protein, 15 aa, Artificial Sequence
  Description of Artificial Sequence: Synthetic peptide
  Seed: GMDPRMCSLMQGSTL
GMDYRMFSNMQASTL

SEQ ID NO: 75591 - protein, 15 aa, Artificial Sequence
  Description of Artificial Sequence: Synthetic peptide
  Seed: GMDPRMCSLMQGSTL
GMDYRMFSNMQGSTL

SEQ ID NO: 75592 - protein, 15 aa, Artificial Sequence
  Description of Artificial Sequence: Synthetic peptide
  Seed: GMDPRMCSLMQGSTL
GMDYRMFSNMQHSTL

SEQ ID NO: 75593 - protein, 15 aa, Artificial Sequence
  Description of Artificial Sequence: Synthetic peptide
  Seed: GMDPRMCSLMQGSTL
GMDYRMFSNMQISTL

SEQ ID NO: 75594 - protein, 15 aa, Artificial Sequence
  Description of Artificial Sequence: Synthetic peptide
  Seed: GMDPRMCSLMQGSTL
GMDYRMFSNMQLSTL

SEQ ID NO: 75595 - protein, 15 aa, Artificial Sequence
  Description of Artificial Sequence: Synthetic peptide
  Seed: GMDPRMCSLMQGSTL
GMDYRMFSNMQMSTL

SEQ ID NO: 75596 - protein, 15 aa, Artificial Sequence
  Description of Artificial Sequence: Synthetic peptide
  Seed: GMDPRMCSLMQGSTL
GMDYRMFSNMQNSTL

SEQ ID NO: 75597 - protein, 15 aa, Artificial Sequence
  Description of Artificial Sequence: Synthetic peptide
  Seed: GMDPRMCSLMQGSTL
GMDYRMFSNMQPSTL

SEQ ID NO: 75598 - protein, 15 aa, Artificial Sequence
  Description of Artificial Sequence: Synthetic peptide
  Seed: GMDPRMCSLMQGSTL
GMDYRMFSNMQSSTL

SEQ ID NO: 75599 - protein, 15 aa, Artificial Sequence
  Description of Artificial Sequence: Synthetic peptide
  Seed: GMDPRMCSLMQGSTL
GMDYRMFSNMQTSTL

SEQ ID NO: 75600 - protein, 15 aa, Artificial Sequence
  Description of Artificial Sequence: Synthetic peptide
  Seed: GMDPRMCSLMQGSTL
GMDYRMFSNMQVSTL

SEQ ID NO: 75601 - protein, 15 aa, Artificial Sequence
  Description of Artificial Sequence: Synthetic peptide
  Seed: GMDPRMCSLMQGSTL
GMDYRMFSPMQASTL

SEQ ID NO: 75602 - protein, 15 aa, Artificial Sequence
  Description of Artificial Sequence: Synthetic peptide
  Seed: GMDPRMCSLMQGSTL
GMDYRMFSPMQGSTL

SEQ ID NO: 75603 - protein, 15 aa, Artificial Sequence
  Description of Artificial Sequence: Synthetic peptide
  Seed: GMDPRMCSLMQGSTL
GMDYRMFSPMQHSTL

SEQ ID NO: 75604 - protein, 15 aa, Artificial Sequence
  Description of Artificial Sequence: Synthetic peptide
  Seed: GMDPRMCSLMQGSTL
GMDYRMFSPMQISTL

SEQ ID NO: 75605 - protein, 15 aa, Artificial Sequence
  Description of Artificial Sequence: Synthetic peptide
  Seed: GMDPRMCSLMQGSTL
GMDYRMFSPMQLSTL

SEQ ID NO: 75606 - protein, 15 aa, Artificial Sequence
  Description of Artificial Sequence: Synthetic peptide
  Seed: GMDPRMCSLMQGSTL
GMDYRMFSPMQMSTL

SEQ ID NO: 75607 - protein, 15 aa, Artificial Sequence
  Description of Artificial Sequence: Synthetic peptide
  Seed: GMDPRMCSLMQGSTL
GMDYRMFSPMQNSTL

SEQ ID NO: 75608 - protein, 15 aa, Artificial Sequence
  Description of Artificial Sequence: Synthetic peptide
  Seed: GMDPRMCSLMQGSTL
GMDYRMFSPMQPSTL

SEQ ID NO: 75609 - protein, 15 aa, Artificial Sequence
  Description of Artificial Sequence: Synthetic peptide
  Seed: GMDPRMCSLMQGSTL
GMDYRMFSPMQQSTL

SEQ ID NO: 75610 - protein, 15 aa, Artificial Sequence
  Description of Artificial Sequence: Synthetic peptide
  Seed: GMDPRMCSLMQGSTL
GMDYRMFSPMQSSTL

SEQ ID NO: 75611 - protein, 15 aa, Artificial Sequence
  Description of Artificial Sequence: Synthetic peptide
  Seed: GMDPRMCSLMQGSTL
GMDYRMFSPMQTSTL

SEQ ID NO: 75612 - protein, 15 aa, Artificial Sequence
  Description of Artificial Sequence: Synthetic peptide
  Seed: GMDPRMCSLMQGSTL
GMDYRMFSPMQVSTL

SEQ ID NO: 75613 - protein, 15 aa, Artificial Sequence
  Description of Artificial Sequence: Synthetic peptide
  Seed: GMDPRMCSLMQGSTL
GMDYRMFSQMQASTL

SEQ ID NO: 75614 - protein, 15 aa, Artificial Sequence
  Description of Artificial Sequence: Synthetic peptide
  Seed: GMDPRMCSLMQGSTL
GMDYRMFSQMQGSTL

SEQ ID NO: 75615 - protein, 15 aa, Artificial Sequence
  Description of Artificial Sequence: Synthetic peptide
  Seed: GMDPRMCSLMQGSTL
GMDYRMFSQMQSSTL

SEQ ID NO: 75616 - protein, 15 aa, Artificial Sequence
  Description of Artificial Sequence: Synthetic peptide
  Seed: GMDPRMCSLMQGSTL
GMDYRMFSQMQTSTL

SEQ ID NO: 75617 - protein, 15 aa, Artificial Sequence
  Description of Artificial Sequence: Synthetic peptide
  Seed: GMDPRMCSLMQGSTL
GMDYRMFSQMQVSTL

SEQ ID NO: 75618 - protein, 15 aa, Artificial Sequence
  Description of Artificial Sequence: Synthetic peptide
  Seed: GMDPRMCSLMQGSTL
GMDYRMFSRMQASTL

SEQ ID NO: 75619 - protein, 15 aa, Artificial Sequence
  Description of Artificial Sequence: Synthetic peptide
  Seed: GMDPRMCSLMQGSTL
GMDYRMFSRMQGSTL

SEQ ID NO: 75620 - protein, 15 aa, Artificial Sequence
  Description of Artificial Sequence: Synthetic peptide
  Seed: GMDPRMCSLMQGSTL
GMDYRMFSRMQSSTL

SEQ ID NO: 75621 - protein, 15 aa, Artificial Sequence
  Description of Artificial Sequence: Synthetic peptide
  Seed: GMDPRMCSLMQGSTL
GMDYRMFSRMQTSTL

SEQ ID NO: 75622 - protein, 15 aa, Artificial Sequence
  Description of Artificial Sequence: Synthetic peptide
  Seed: GMDPRMCSLMQGSTL
GMDYRMFSRMQVSTL

SEQ ID NO: 75623 - protein, 15 aa, Artificial Sequence
  Description of Artificial Sequence: Synthetic peptide
  Seed: GMDPRMCSLMQGSTL
GMDYRMFSSMQASTL

SEQ ID NO: 75624 - protein, 15 aa, Artificial Sequence
  Description of Artificial Sequence: Synthetic peptide
  Seed: GMDPRMCSLMQGSTL
GMDYRMFSSMQGSTL

SEQ ID NO: 75625 - protein, 15 aa, Artificial Sequence
  Description of Artificial Sequence: Synthetic peptide
  Seed: GMDPRMCSLMQGSTL
GMDYRMFSSMQHSTL

SEQ ID NO: 75626 - protein, 15 aa, Artificial Sequence
  Description of Artificial Sequence: Synthetic peptide
  Seed: GMDPRMCSLMQGSTL
GMDYRMFSSMQISTL

SEQ ID NO: 75627 - protein, 15 aa, Artificial Sequence
  Description of Artificial Sequence: Synthetic peptide
  Seed: GMDPRMCSLMQGSTL
GMDYRMFSSMQLSTL

SEQ ID NO: 75628 - protein, 15 aa, Artificial Sequence
  Description of Artificial Sequence: Synthetic peptide
  Seed: GMDPRMCSLMQGSTL
GMDYRMFSSMQMSTL

SEQ ID NO: 75629 - protein, 15 aa, Artificial Sequence
  Description of Artificial Sequence: Synthetic peptide
  Seed: GMDPRMCSLMQGSTL
GMDYRMFSSMQNSTL

SEQ ID NO: 75630 - protein, 15 aa, Artificial Sequence
  Description of Artificial Sequence: Synthetic peptide
  Seed: GMDPRMCSLMQGSTL
GMDYRMFSSMQPSTL

SEQ ID NO: 75631 - protein, 15 aa, Artificial Sequence
  Description of Artificial Sequence: Synthetic peptide
  Seed: GMDPRMCSLMQGSTL
GMDYRMFSSMQQSTL

SEQ ID NO: 75632 - protein, 15 aa, Artificial Sequence
  Description of Artificial Sequence: Synthetic peptide
  Seed: GMDPRMCSLMQGSTL
GMDYRMFSSMQSSTL

SEQ ID NO: 75633 - protein, 15 aa, Artificial Sequence
  Description of Artificial Sequence: Synthetic peptide
  Seed: GMDPRMCSLMQGSTL
GMDYRMFSSMQTSTL

SEQ ID NO: 75634 - protein, 15 aa, Artificial Sequence
  Description of Artificial Sequence: Synthetic peptide
  Seed: GMDPRMCSLMQGSTL
GMDYRMFSSMQVSTL

SEQ ID NO: 75635 - protein, 15 aa, Artificial Sequence
  Description of Artificial Sequence: Synthetic peptide
  Seed: GMDPRMCSLMQGSTL
GMDYRMFSTMQASTL

SEQ ID NO: 75636 - protein, 15 aa, Artificial Sequence
  Description of Artificial Sequence: Synthetic peptide
  Seed: GMDPRMCSLMQGSTL
GMDYRMFSTMQGSTL

SEQ ID NO: 75637 - protein, 15 aa, Artificial Sequence
  Description of Artificial Sequence: Synthetic peptide
  Seed: GMDPRMCSLMQGSTL
GMDYRMFSTMQHSTL

SEQ ID NO: 75638 - protein, 15 aa, Artificial Sequence
  Description of Artificial Sequence: Synthetic peptide
  Seed: GMDPRMCSLMQGSTL
GMDYRMFSTMQISTL

SEQ ID NO: 75639 - protein, 15 aa, Artificial Sequence
  Description of Artificial Sequence: Synthetic peptide
  Seed: GMDPRMCSLMQGSTL
GMDYRMFSTMQLSTL

SEQ ID NO: 75640 - protein, 15 aa, Artificial Sequence
  Description of Artificial Sequence: Synthetic peptide
  Seed: GMDPRMCSLMQGSTL
GMDYRMFSTMQMSTL

SEQ ID NO: 75641 - protein, 15 aa, Artificial Sequence
  Description of Artificial Sequence: Synthetic peptide
  Seed: GMDPRMCSLMQGSTL
GMDYRMFSTMQNSTL

SEQ ID NO: 75642 - protein, 15 aa, Artificial Sequence
  Description of Artificial Sequence: Synthetic peptide
  Seed: GMDPRMCSLMQGSTL
GMDYRMFSTMQPSTL

SEQ ID NO: 75643 - protein, 15 aa, Artificial Sequence
  Description of Artificial Sequence: Synthetic peptide
  Seed: GMDPRMCSLMQGSTL
GMDYRMFSTMQQSTL

SEQ ID NO: 75644 - protein, 15 aa, Artificial Sequence
  Description of Artificial Sequence: Synthetic peptide
  Seed: GMDPRMCSLMQGSTL
GMDYRMFSTMQSSTL

SEQ ID NO: 75645 - protein, 15 aa, Artificial Sequence
  Description of Artificial Sequence: Synthetic peptide
  Seed: GMDPRMCSLMQGSTL
GMDYRMFSTMQTSTL

SEQ ID NO: 75646 - protein, 15 aa, Artificial Sequence
  Description of Artificial Sequence: Synthetic peptide
  Seed: GMDPRMCSLMQGSTL
GMDYRMFSTMQVSTL

SEQ ID NO: 75647 - protein, 15 aa, Artificial Sequence
  Description of Artificial Sequence: Synthetic peptide
  Seed: GMDPRMCSLMQGSTL
GMDYRMFSVMQASTL

SEQ ID NO: 75648 - protein, 15 aa, Artificial Sequence
  Description of Artificial Sequence: Synthetic peptide
  Seed: GMDPRMCSLMQGSTL
GMDYRMFSVMQDSTL

SEQ ID NO: 75649 - protein, 15 aa, Artificial Sequence
  Description of Artificial Sequence: Synthetic peptide
  Seed: GMDPRMCSLMQGSTL
GMDYRMFSVMQESTL

SEQ ID NO: 75650 - protein, 15 aa, Artificial Sequence
  Description of Artificial Sequence: Synthetic peptide
  Seed: GMDPRMCSLMQGSTL
GMDYRMFSVMQGSTL

SEQ ID NO: 75651 - protein, 15 aa, Artificial Sequence
  Description of Artificial Sequence: Synthetic peptide
  Seed: GMDPRMCSLMQGSTL
GMDYRMFSVMQHSTL

SEQ ID NO: 75652 - protein, 15 aa, Artificial Sequence
  Description of Artificial Sequence: Synthetic peptide
  Seed: GMDPRMCSLMQGSTL
GMDYRMFSVMQISTL

SEQ ID NO: 75653 - protein, 15 aa, Artificial Sequence
  Description of Artificial Sequence: Synthetic peptide
  Seed: GMDPRMCSLMQGSTL
GMDYRMFSVMQLSTL

SEQ ID NO: 75654 - protein, 15 aa, Artificial Sequence
  Description of Artificial Sequence: Synthetic peptide
  Seed: GMDPRMCSLMQGSTL
GMDYRMFSVMQMSTL

SEQ ID NO: 75655 - protein, 15 aa, Artificial Sequence
  Description of Artificial Sequence: Synthetic peptide
  Seed: GMDPRMCSLMQGSTL
GMDYRMFSVMQNSTL

SEQ ID NO: 75656 - protein, 15 aa, Artificial Sequence
  Description of Artificial Sequence: Synthetic peptide
  Seed: GMDPRMCSLMQGSTL
GMDYRMFSVMQPSTL

SEQ ID NO: 75657 - protein, 15 aa, Artificial Sequence
  Description of Artificial Sequence: Synthetic peptide
  Seed: GMDPRMCSLMQGSTL
GMDYRMFSVMQQSTL

SEQ ID NO: 75658 - protein, 15 aa, Artificial Sequence
  Description of Artificial Sequence: Synthetic peptide
  Seed: GMDPRMCSLMQGSTL
GMDYRMFSVMQSSTL

SEQ ID NO: 75659 - protein, 15 aa, Artificial Sequence
  Description of Artificial Sequence: Synthetic peptide
  Seed: GMDPRMCSLMQGSTL
GMDYRMFSVMQTSTL

SEQ ID NO: 75660 - protein, 15 aa, Artificial Sequence
  Description of Artificial Sequence: Synthetic peptide
  Seed: GMDPRMCSLMQGSTL
GMDYRMFSVMQVSTL

SEQ ID NO: 75661 - protein, 15 aa, Artificial Sequence
  Description of Artificial Sequence: Synthetic peptide
  Seed: GMDPRMCSLMQGSTL
GMDYRMGSAMQASTL

SEQ ID NO: 75662 - protein, 15 aa, Artificial Sequence
  Description of Artificial Sequence: Synthetic peptide
  Seed: GMDPRMCSLMQGSTL
GMDYRMGSAMQISTL

SEQ ID NO: 75663 - protein, 15 aa, Artificial Sequence
  Description of Artificial Sequence: Synthetic peptide
  Seed: GMDPRMCSLMQGSTL
GMDYRMGSAMQLSTL

SEQ ID NO: 75664 - protein, 15 aa, Artificial Sequence
  Description of Artificial Sequence: Synthetic peptide
  Seed: GMDPRMCSLMQGSTL
GMDYRMGSAMQMSTL

SEQ ID NO: 75665 - protein, 15 aa, Artificial Sequence
  Description of Artificial Sequence: Synthetic peptide
  Seed: GMDPRMCSLMQGSTL
GMDYRMGSAMQNSTL

SEQ ID NO: 75666 - protein, 15 aa, Artificial Sequence
  Description of Artificial Sequence: Synthetic peptide
  Seed: GMDPRMCSLMQGSTL
GMDYRMGSAMQSSTL

SEQ ID NO: 75667 - protein, 15 aa, Artificial Sequence
  Description of Artificial Sequence: Synthetic peptide
  Seed: GMDPRMCSLMQGSTL
GMDYRMGSAMQVSTL

SEQ ID NO: 75668 - protein, 15 aa, Artificial Sequence
  Description of Artificial Sequence: Synthetic peptide
  Seed: GMDPRMCSLMQGSTL
GMDYRMGSIMQASTL

SEQ ID NO: 75669 - protein, 15 aa, Artificial Sequence
  Description of Artificial Sequence: Synthetic peptide
  Seed: GMDPRMCSLMQGSTL
GMDYRMGSIMQLSTL

SEQ ID NO: 75670 - protein, 15 aa, Artificial Sequence
  Description of Artificial Sequence: Synthetic peptide
  Seed: GMDPRMCSLMQGSTL
GMDYRMGSIMQMSTL

SEQ ID NO: 75671 - protein, 15 aa, Artificial Sequence
  Description of Artificial Sequence: Synthetic peptide
  Seed: GMDPRMCSLMQGSTL
GMDYRMGSIMQNSTL

SEQ ID NO: 75672 - protein, 15 aa, Artificial Sequence
  Description of Artificial Sequence: Synthetic peptide
  Seed: GMDPRMCSLMQGSTL
GMDYRMGSIMQSSTL

SEQ ID NO: 75673 - protein, 15 aa, Artificial Sequence
  Description of Artificial Sequence: Synthetic peptide
  Seed: GMDPRMCSLMQGSTL
GMDYRMGSSMQASTL

SEQ ID NO: 75674 - protein, 15 aa, Artificial Sequence
  Description of Artificial Sequence: Synthetic peptide
  Seed: GMDPRMCSLMQGSTL
GMDYRMGSSMQLSTL

SEQ ID NO: 75675 - protein, 15 aa, Artificial Sequence
  Description of Artificial Sequence: Synthetic peptide
  Seed: GMDPRMCSLMQGSTL
GMDYRMGSSMQNSTL

SEQ ID NO: 75676 - protein, 15 aa, Artificial Sequence
  Description of Artificial Sequence: Synthetic peptide
  Seed: GMDPRMCSLMQGSTL
GMDYRMGSSMQSSTL

SEQ ID NO: 75677 - protein, 15 aa, Artificial Sequence
  Description of Artificial Sequence: Synthetic peptide
  Seed: GMDPRMCSLMQGSTL
GMDYRMGSTMQLSTL

SEQ ID NO: 75678 - protein, 15 aa, Artificial Sequence
  Description of Artificial Sequence: Synthetic peptide
  Seed: GMDPRMCSLMQGSTL
GMDYRMGSTMQNSTL

SEQ ID NO: 75679 - protein, 15 aa, Artificial Sequence
  Description of Artificial Sequence: Synthetic peptide
  Seed: GMDPRMCSLMQGSTL
GMDYRMGSVMQASTL

SEQ ID NO: 75680 - protein, 15 aa, Artificial Sequence
  Description of Artificial Sequence: Synthetic peptide
  Seed: GMDPRMCSLMQGSTL
GMDYRMGSVMQISTL

SEQ ID NO: 75681 - protein, 15 aa, Artificial Sequence
  Description of Artificial Sequence: Synthetic peptide
  Seed: GMDPRMCSLMQGSTL
GMDYRMGSVMQLSTL

SEQ ID NO: 75682 - protein, 15 aa, Artificial Sequence
  Description of Artificial Sequence: Synthetic peptide
  Seed: GMDPRMCSLMQGSTL
GMDYRMGSVMQMSTL

SEQ ID NO: 75683 - protein, 15 aa, Artificial Sequence
  Description of Artificial Sequence: Synthetic peptide
  Seed: GMDPRMCSLMQGSTL
GMDYRMGSVMQNSTL

SEQ ID NO: 75684 - protein, 15 aa, Artificial Sequence
  Description of Artificial Sequence: Synthetic peptide
  Seed: GMDPRMCSLMQGSTL
GMDYRMGSVMQSSTL

SEQ ID NO: 75685 - protein, 15 aa, Artificial Sequence
  Description of Artificial Sequence: Synthetic peptide
  Seed: GMDPRMCSLMQGSTL
GMDYRMGSVMQVSTL

SEQ ID NO: 75686 - protein, 15 aa, Artificial Sequence
  Description of Artificial Sequence: Synthetic peptide
  Seed: GMDPRMCSLMQGSTL
GMDYRMHSAMQASTL

SEQ ID NO: 75687 - protein, 15 aa, Artificial Sequence
  Description of Artificial Sequence: Synthetic peptide
  Seed: GMDPRMCSLMQGSTL
GMDYRMHSAMQNSTL

SEQ ID NO: 75688 - protein, 15 aa, Artificial Sequence
  Description of Artificial Sequence: Synthetic peptide
  Seed: GMDPRMCSLMQGSTL
GMDYRMHSAMQSSTL

SEQ ID NO: 75689 - protein, 15 aa, Artificial Sequence
  Description of Artificial Sequence: Synthetic peptide
  Seed: GMDPRMCSLMQGSTL
GMDYRMHSVMQNSTL

SEQ ID NO: 75690 - protein, 15 aa, Artificial Sequence
  Description of Artificial Sequence: Synthetic peptide
  Seed: GMDPRMCSLMQGSTL
GMDYRMISAMQASTL

SEQ ID NO: 75691 - protein, 15 aa, Artificial Sequence
  Description of Artificial Sequence: Synthetic peptide
  Seed: GMDPRMCSLMQGSTL
GMDYRMISAMQCSTL

SEQ ID NO: 75692 - protein, 15 aa, Artificial Sequence
  Description of Artificial Sequence: Synthetic peptide
  Seed: GMDPRMCSLMQGSTL
GMDYRMISAMQDSTL

SEQ ID NO: 75693 - protein, 15 aa, Artificial Sequence
  Description of Artificial Sequence: Synthetic peptide
  Seed: GMDPRMCSLMQGSTL
GMDYRMISAMQESTL

SEQ ID NO: 75694 - protein, 15 aa, Artificial Sequence
  Description of Artificial Sequence: Synthetic peptide
  Seed: GMDPRMCSLMQGSTL
GMDYRMISAMQFSTL

SEQ ID NO: 75695 - protein, 15 aa, Artificial Sequence
  Description of Artificial Sequence: Synthetic peptide
  Seed: GMDPRMCSLMQGSTL
GMDYRMISAMQGSTL

SEQ ID NO: 75696 - protein, 15 aa, Artificial Sequence
  Description of Artificial Sequence: Synthetic peptide
  Seed: GMDPRMCSLMQGSTL
GMDYRMISAMQHSTL

SEQ ID NO: 75697 - protein, 15 aa, Artificial Sequence
  Description of Artificial Sequence: Synthetic peptide
  Seed: GMDPRMCSLMQGSTL
GMDYRMISAMQISTL

SEQ ID NO: 75698 - protein, 15 aa, Artificial Sequence
  Description of Artificial Sequence: Synthetic peptide
  Seed: GMDPRMCSLMQGSTL
GMDYRMISAMQKSTL

SEQ ID NO: 75699 - protein, 15 aa, Artificial Sequence
  Description of Artificial Sequence: Synthetic peptide
  Seed: GMDPRMCSLMQGSTL
GMDYRMISAMQLSTL

SEQ ID NO: 75700 - protein, 15 aa, Artificial Sequence
  Description of Artificial Sequence: Synthetic peptide
  Seed: GMDPRMCSLMQGSTL
GMDYRMISAMQMSTL

SEQ ID NO: 75701 - protein, 15 aa, Artificial Sequence
  Description of Artificial Sequence: Synthetic peptide
  Seed: GMDPRMCSLMQGSTL
GMDYRMISAMQNSTL

SEQ ID NO: 75702 - protein, 15 aa, Artificial Sequence
  Description of Artificial Sequence: Synthetic peptide
  Seed: GMDPRMCSLMQGSTL
GMDYRMISAMQPSTL

SEQ ID NO: 75703 - protein, 15 aa, Artificial Sequence
  Description of Artificial Sequence: Synthetic peptide
  Seed: GMDPRMCSLMQGSTL
GMDYRMISAMQQSTL

SEQ ID NO: 75704 - protein, 15 aa, Artificial Sequence
  Description of Artificial Sequence: Synthetic peptide
  Seed: GMDPRMCSLMQGSTL
GMDYRMISAMQRSTL

SEQ ID NO: 75705 - protein, 15 aa, Artificial Sequence
  Description of Artificial Sequence: Synthetic peptide
  Seed: GMDPRMCSLMQGSTL
GMDYRMISAMQSSTL

SEQ ID NO: 75706 - protein, 15 aa, Artificial Sequence
  Description of Artificial Sequence: Synthetic peptide
  Seed: GMDPRMCSLMQGSTL
GMDYRMISAMQTSTL

SEQ ID NO: 75707 - protein, 15 aa, Artificial Sequence
  Description of Artificial Sequence: Synthetic peptide
  Seed: GMDPRMCSLMQGSTL
GMDYRMISAMQVSTL

SEQ ID NO: 75708 - protein, 15 aa, Artificial Sequence
  Description of Artificial Sequence: Synthetic peptide
  Seed: GMDPRMCSLMQGSTL
GMDYRMISAMQWSTL

SEQ ID NO: 75709 - protein, 15 aa, Artificial Sequence
  Description of Artificial Sequence: Synthetic peptide
  Seed: GMDPRMCSLMQGSTL
GMDYRMISAMQYSTL

SEQ ID NO: 75710 - protein, 15 aa, Artificial Sequence
  Description of Artificial Sequence: Synthetic peptide
  Seed: GMDPRMCSLMQGSTL
GMDYRMISCMQNSTL

SEQ ID NO: 75711 - protein, 15 aa, Artificial Sequence
  Description of Artificial Sequence: Synthetic peptide
  Seed: GMDPRMCSLMQGSTL
GMDYRMISEMQASTL

SEQ ID NO: 75712 - protein, 15 aa, Artificial Sequence
  Description of Artificial Sequence: Synthetic peptide
  Seed: GMDPRMCSLMQGSTL
GMDYRMISFMQASTL

SEQ ID NO: 75713 - protein, 15 aa, Artificial Sequence
  Description of Artificial Sequence: Synthetic peptide
  Seed: GMDPRMCSLMQGSTL
GMDYRMISFMQNSTL

SEQ ID NO: 75714 - protein, 15 aa, Artificial Sequence
  Description of Artificial Sequence: Synthetic peptide
  Seed: GMDPRMCSLMQGSTL
GMDYRMISFMQSSTL

SEQ ID NO: 75715 - protein, 15 aa, Artificial Sequence
  Description of Artificial Sequence: Synthetic peptide
  Seed: GMDPRMCSLMQGSTL
GMDYRMISGMQASTL

SEQ ID NO: 75716 - protein, 15 aa, Artificial Sequence
  Description of Artificial Sequence: Synthetic peptide
  Seed: GMDPRMCSLMQGSTL
GMDYRMISGMQCSTL

SEQ ID NO: 75717 - protein, 15 aa, Artificial Sequence
  Description of Artificial Sequence: Synthetic peptide
  Seed: GMDPRMCSLMQGSTL
GMDYRMISGMQDSTL

SEQ ID NO: 75718 - protein, 15 aa, Artificial Sequence
  Description of Artificial Sequence: Synthetic peptide
  Seed: GMDPRMCSLMQGSTL
GMDYRMISGMQESTL

SEQ ID NO: 75719 - protein, 15 aa, Artificial Sequence
  Description of Artificial Sequence: Synthetic peptide
  Seed: GMDPRMCSLMQGSTL
GMDYRMISGMQGSTL

SEQ ID NO: 75720 - protein, 15 aa, Artificial Sequence
  Description of Artificial Sequence: Synthetic peptide
  Seed: GMDPRMCSLMQGSTL
GMDYRMISGMQHSTL

SEQ ID NO: 75721 - protein, 15 aa, Artificial Sequence
  Description of Artificial Sequence: Synthetic peptide
  Seed: GMDPRMCSLMQGSTL
GMDYRMISGMQISTL

SEQ ID NO: 75722 - protein, 15 aa, Artificial Sequence
  Description of Artificial Sequence: Synthetic peptide
  Seed: GMDPRMCSLMQGSTL
GMDYRMISGMQLSTL

SEQ ID NO: 75723 - protein, 15 aa, Artificial Sequence
  Description of Artificial Sequence: Synthetic peptide
  Seed: GMDPRMCSLMQGSTL
GMDYRMISGMQMSTL

SEQ ID NO: 75724 - protein, 15 aa, Artificial Sequence
  Description of Artificial Sequence: Synthetic peptide
  Seed: GMDPRMCSLMQGSTL
GMDYRMISGMQNSTL

SEQ ID NO: 75725 - protein, 15 aa, Artificial Sequence
  Description of Artificial Sequence: Synthetic peptide
  Seed: GMDPRMCSLMQGSTL
GMDYRMISGMQPSTL

SEQ ID NO: 75726 - protein, 15 aa, Artificial Sequence
  Description of Artificial Sequence: Synthetic peptide
  Seed: GMDPRMCSLMQGSTL
GMDYRMISGMQQSTL

SEQ ID NO: 75727 - protein, 15 aa, Artificial Sequence
  Description of Artificial Sequence: Synthetic peptide
  Seed: GMDPRMCSLMQGSTL
GMDYRMISGMQSSTL

SEQ ID NO: 75728 - protein, 15 aa, Artificial Sequence
  Description of Artificial Sequence: Synthetic peptide
  Seed: GMDPRMCSLMQGSTL
GMDYRMISGMQTSTL

SEQ ID NO: 75729 - protein, 15 aa, Artificial Sequence
  Description of Artificial Sequence: Synthetic peptide
  Seed: GMDPRMCSLMQGSTL
GMDYRMISGMQVSTL

SEQ ID NO: 75730 - protein, 15 aa, Artificial Sequence
  Description of Artificial Sequence: Synthetic peptide
  Seed: GMDPRMCSLMQGSTL
GMDYRMISHMQASTL

SEQ ID NO: 75731 - protein, 15 aa, Artificial Sequence
  Description of Artificial Sequence: Synthetic peptide
  Seed: GMDPRMCSLMQGSTL
GMDYRMISHMQLSTL

SEQ ID NO: 75732 - protein, 15 aa, Artificial Sequence
  Description of Artificial Sequence: Synthetic peptide
  Seed: GMDPRMCSLMQGSTL
GMDYRMISHMQNSTL

SEQ ID NO: 75733 - protein, 15 aa, Artificial Sequence
  Description of Artificial Sequence: Synthetic peptide
  Seed: GMDPRMCSLMQGSTL
GMDYRMISHMQSSTL

SEQ ID NO: 75734 - protein, 15 aa, Artificial Sequence
  Description of Artificial Sequence: Synthetic peptide
  Seed: GMDPRMCSLMQGSTL
GMDYRMISHMQTSTL

SEQ ID NO: 75735 - protein, 15 aa, Artificial Sequence
  Description of Artificial Sequence: Synthetic peptide
  Seed: GMDPRMCSLMQGSTL
GMDYRMISHMQVSTL

SEQ ID NO: 75736 - protein, 15 aa, Artificial Sequence
  Description of Artificial Sequence: Synthetic peptide
  Seed: GMDPRMCSLMQGSTL
GMDYRMISIMQASTL

SEQ ID NO: 75737 - protein, 15 aa, Artificial Sequence
  Description of Artificial Sequence: Synthetic peptide
  Seed: GMDPRMCSLMQGSTL
GMDYRMISIMQDSTL

SEQ ID NO: 75738 - protein, 15 aa, Artificial Sequence
  Description of Artificial Sequence: Synthetic peptide
  Seed: GMDPRMCSLMQGSTL
GMDYRMISIMQESTL

SEQ ID NO: 75739 - protein, 15 aa, Artificial Sequence
  Description of Artificial Sequence: Synthetic peptide
  Seed: GMDPRMCSLMQGSTL
GMDYRMISIMQGSTL

SEQ ID NO: 75740 - protein, 15 aa, Artificial Sequence
  Description of Artificial Sequence: Synthetic peptide
  Seed: GMDPRMCSLMQGSTL
GMDYRMISIMQHSTL

SEQ ID NO: 75741 - protein, 15 aa, Artificial Sequence
  Description of Artificial Sequence: Synthetic peptide
  Seed: GMDPRMCSLMQGSTL
GMDYRMISIMQISTL

SEQ ID NO: 75742 - protein, 15 aa, Artificial Sequence
  Description of Artificial Sequence: Synthetic peptide
  Seed: GMDPRMCSLMQGSTL
GMDYRMISIMQKSTL

SEQ ID NO: 75743 - protein, 15 aa, Artificial Sequence
  Description of Artificial Sequence: Synthetic peptide
  Seed: GMDPRMCSLMQGSTL
GMDYRMISIMQLSTL

SEQ ID NO: 75744 - protein, 15 aa, Artificial Sequence
  Description of Artificial Sequence: Synthetic peptide
  Seed: GMDPRMCSLMQGSTL
GMDYRMISIMQMSTL

SEQ ID NO: 75745 - protein, 15 aa, Artificial Sequence
  Description of Artificial Sequence: Synthetic peptide
  Seed: GMDPRMCSLMQGSTL
GMDYRMISIMQNSTL

SEQ ID NO: 75746 - protein, 15 aa, Artificial Sequence
  Description of Artificial Sequence: Synthetic peptide
  Seed: GMDPRMCSLMQGSTL
GMDYRMISIMQPSTL

SEQ ID NO: 75747 - protein, 15 aa, Artificial Sequence
  Description of Artificial Sequence: Synthetic peptide
  Seed: GMDPRMCSLMQGSTL
GMDYRMISIMQQSTL

SEQ ID NO: 75748 - protein, 15 aa, Artificial Sequence
  Description of Artificial Sequence: Synthetic peptide
  Seed: GMDPRMCSLMQGSTL
GMDYRMISIMQRSTL

SEQ ID NO: 75749 - protein, 15 aa, Artificial Sequence
  Description of Artificial Sequence: Synthetic peptide
  Seed: GMDPRMCSLMQGSTL
GMDYRMISIMQSSTL

SEQ ID NO: 75750 - protein, 15 aa, Artificial Sequence
  Description of Artificial Sequence: Synthetic peptide
  Seed: GMDPRMCSLMQGSTL
GMDYRMISIMQTSTL

SEQ ID NO: 75751 - protein, 15 aa, Artificial Sequence
  Description of Artificial Sequence: Synthetic peptide
  Seed: GMDPRMCSLMQGSTL
GMDYRMISIMQVSTL

SEQ ID NO: 75752 - protein, 15 aa, Artificial Sequence
  Description of Artificial Sequence: Synthetic peptide
  Seed: GMDPRMCSLMQGSTL
GMDYRMISLMQASTL

SEQ ID NO: 75753 - protein, 15 aa, Artificial Sequence
  Description of Artificial Sequence: Synthetic peptide
  Seed: GMDPRMCSLMQGSTL
GMDYRMISLMQGSTL

SEQ ID NO: 75754 - protein, 15 aa, Artificial Sequence
  Description of Artificial Sequence: Synthetic peptide
  Seed: GMDPRMCSLMQGSTL
GMDYRMISLMQHSTL

SEQ ID NO: 75755 - protein, 15 aa, Artificial Sequence
  Description of Artificial Sequence: Synthetic peptide
  Seed: GMDPRMCSLMQGSTL
GMDYRMISLMQISTL

SEQ ID NO: 75756 - protein, 15 aa, Artificial Sequence
  Description of Artificial Sequence: Synthetic peptide
  Seed: GMDPRMCSLMQGSTL
GMDYRMISLMQLSTL

SEQ ID NO: 75757 - protein, 15 aa, Artificial Sequence
  Description of Artificial Sequence: Synthetic peptide
  Seed: GMDPRMCSLMQGSTL
GMDYRMISLMQMSTL

SEQ ID NO: 75758 - protein, 15 aa, Artificial Sequence
  Description of Artificial Sequence: Synthetic peptide
  Seed: GMDPRMCSLMQGSTL
GMDYRMISLMQNSTL

SEQ ID NO: 75759 - protein, 15 aa, Artificial Sequence
  Description of Artificial Sequence: Synthetic peptide
  Seed: GMDPRMCSLMQGSTL
GMDYRMISLMQPSTL

SEQ ID NO: 75760 - protein, 15 aa, Artificial Sequence
  Description of Artificial Sequence: Synthetic peptide
  Seed: GMDPRMCSLMQGSTL
GMDYRMISLMQQSTL

SEQ ID NO: 75761 - protein, 15 aa, Artificial Sequence
  Description of Artificial Sequence: Synthetic peptide
  Seed: GMDPRMCSLMQGSTL
GMDYRMISLMQSSTL

SEQ ID NO: 75762 - protein, 15 aa, Artificial Sequence
  Description of Artificial Sequence: Synthetic peptide
  Seed: GMDPRMCSLMQGSTL
GMDYRMISLMQTSTL

SEQ ID NO: 75763 - protein, 15 aa, Artificial Sequence
  Description of Artificial Sequence: Synthetic peptide
  Seed: GMDPRMCSLMQGSTL
GMDYRMISLMQVSTL

SEQ ID NO: 75764 - protein, 15 aa, Artificial Sequence
  Description of Artificial Sequence: Synthetic peptide
  Seed: GMDPRMCSLMQGSTL
GMDYRMISMMQASTL

SEQ ID NO: 75765 - protein, 15 aa, Artificial Sequence
  Description of Artificial Sequence: Synthetic peptide
  Seed: GMDPRMCSLMQGSTL
GMDYRMISMMQGSTL

SEQ ID NO: 75766 - protein, 15 aa, Artificial Sequence
  Description of Artificial Sequence: Synthetic peptide
  Seed: GMDPRMCSLMQGSTL
GMDYRMISMMQHSTL

SEQ ID NO: 75767 - protein, 15 aa, Artificial Sequence
  Description of Artificial Sequence: Synthetic peptide
  Seed: GMDPRMCSLMQGSTL
GMDYRMISMMQISTL

SEQ ID NO: 75768 - protein, 15 aa, Artificial Sequence
  Description of Artificial Sequence: Synthetic peptide
  Seed: GMDPRMCSLMQGSTL
GMDYRMISMMQLSTL

SEQ ID NO: 75769 - protein, 15 aa, Artificial Sequence
  Description of Artificial Sequence: Synthetic peptide
  Seed: GMDPRMCSLMQGSTL
GMDYRMISMMQMSTL

SEQ ID NO: 75770 - protein, 15 aa, Artificial Sequence
  Description of Artificial Sequence: Synthetic peptide
  Seed: GMDPRMCSLMQGSTL
GMDYRMISMMQNSTL

SEQ ID NO: 75771 - protein, 15 aa, Artificial Sequence
  Description of Artificial Sequence: Synthetic peptide
  Seed: GMDPRMCSLMQGSTL
GMDYRMISMMQPSTL

SEQ ID NO: 75772 - protein, 15 aa, Artificial Sequence
  Description of Artificial Sequence: Synthetic peptide
  Seed: GMDPRMCSLMQGSTL
GMDYRMISMMQQSTL

SEQ ID NO: 75773 - protein, 15 aa, Artificial Sequence
  Description of Artificial Sequence: Synthetic peptide
  Seed: GMDPRMCSLMQGSTL
GMDYRMISMMQSSTL

SEQ ID NO: 75774 - protein, 15 aa, Artificial Sequence
  Description of Artificial Sequence: Synthetic peptide
  Seed: GMDPRMCSLMQGSTL
GMDYRMISMMQTSTL

SEQ ID NO: 75775 - protein, 15 aa, Artificial Sequence
  Description of Artificial Sequence: Synthetic peptide
  Seed: GMDPRMCSLMQGSTL
GMDYRMISMMQVSTL

SEQ ID NO: 75776 - protein, 15 aa, Artificial Sequence
  Description of Artificial Sequence: Synthetic peptide
  Seed: GMDPRMCSLMQGSTL
GMDYRMISNMQASTL

SEQ ID NO: 75777 - protein, 15 aa, Artificial Sequence
  Description of Artificial Sequence: Synthetic peptide
  Seed: GMDPRMCSLMQGSTL
GMDYRMISNMQGSTL

SEQ ID NO: 75778 - protein, 15 aa, Artificial Sequence
  Description of Artificial Sequence: Synthetic peptide
  Seed: GMDPRMCSLMQGSTL
GMDYRMISNMQHSTL

SEQ ID NO: 75779 - protein, 15 aa, Artificial Sequence
  Description of Artificial Sequence: Synthetic peptide
  Seed: GMDPRMCSLMQGSTL
GMDYRMISNMQISTL

SEQ ID NO: 75780 - protein, 15 aa, Artificial Sequence
  Description of Artificial Sequence: Synthetic peptide
  Seed: GMDPRMCSLMQGSTL
GMDYRMISNMQLSTL

SEQ ID NO: 75781 - protein, 15 aa, Artificial Sequence
  Description of Artificial Sequence: Synthetic peptide
  Seed: GMDPRMCSLMQGSTL
GMDYRMISNMQMSTL

SEQ ID NO: 75782 - protein, 15 aa, Artificial Sequence
  Description of Artificial Sequence: Synthetic peptide
  Seed: GMDPRMCSLMQGSTL
GMDYRMISNMQNSTL

SEQ ID NO: 75783 - protein, 15 aa, Artificial Sequence
  Description of Artificial Sequence: Synthetic peptide
  Seed: GMDPRMCSLMQGSTL
GMDYRMISNMQPSTL

SEQ ID NO: 75784 - protein, 15 aa, Artificial Sequence
  Description of Artificial Sequence: Synthetic peptide
  Seed: GMDPRMCSLMQGSTL
GMDYRMISNMQQSTL

SEQ ID NO: 75785 - protein, 15 aa, Artificial Sequence
  Description of Artificial Sequence: Synthetic peptide
  Seed: GMDPRMCSLMQGSTL
GMDYRMISNMQSSTL

SEQ ID NO: 75786 - protein, 15 aa, Artificial Sequence
  Description of Artificial Sequence: Synthetic peptide
  Seed: GMDPRMCSLMQGSTL
GMDYRMISNMQTSTL

SEQ ID NO: 75787 - protein, 15 aa, Artificial Sequence
  Description of Artificial Sequence: Synthetic peptide
  Seed: GMDPRMCSLMQGSTL
GMDYRMISNMQVSTL

SEQ ID NO: 75788 - protein, 15 aa, Artificial Sequence
  Description of Artificial Sequence: Synthetic peptide
  Seed: GMDPRMCSLMQGSTL
GMDYRMISPMQASTL

SEQ ID NO: 75789 - protein, 15 aa, Artificial Sequence
  Description of Artificial Sequence: Synthetic peptide
  Seed: GMDPRMCSLMQGSTL
GMDYRMISPMQCSTL

SEQ ID NO: 75790 - protein, 15 aa, Artificial Sequence
  Description of Artificial Sequence: Synthetic peptide
  Seed: GMDPRMCSLMQGSTL
GMDYRMISPMQDSTL

SEQ ID NO: 75791 - protein, 15 aa, Artificial Sequence
  Description of Artificial Sequence: Synthetic peptide
  Seed: GMDPRMCSLMQGSTL
GMDYRMISPMQESTL

SEQ ID NO: 75792 - protein, 15 aa, Artificial Sequence
  Description of Artificial Sequence: Synthetic peptide
  Seed: GMDPRMCSLMQGSTL
GMDYRMISPMQFSTL

SEQ ID NO: 75793 - protein, 15 aa, Artificial Sequence
  Description of Artificial Sequence: Synthetic peptide
  Seed: GMDPRMCSLMQGSTL
GMDYRMISPMQGSTL

SEQ ID NO: 75794 - protein, 15 aa, Artificial Sequence
  Description of Artificial Sequence: Synthetic peptide
  Seed: GMDPRMCSLMQGSTL
GMDYRMISPMQHSTL

SEQ ID NO: 75795 - protein, 15 aa, Artificial Sequence
  Description of Artificial Sequence: Synthetic peptide
  Seed: GMDPRMCSLMQGSTL
GMDYRMISPMQISTL

SEQ ID NO: 75796 - protein, 15 aa, Artificial Sequence
  Description of Artificial Sequence: Synthetic peptide
  Seed: GMDPRMCSLMQGSTL
GMDYRMISPMQKSTL

SEQ ID NO: 75797 - protein, 15 aa, Artificial Sequence
  Description of Artificial Sequence: Synthetic peptide
  Seed: GMDPRMCSLMQGSTL
GMDYRMISPMQLSTL

SEQ ID NO: 75798 - protein, 15 aa, Artificial Sequence
  Description of Artificial Sequence: Synthetic peptide
  Seed: GMDPRMCSLMQGSTL
GMDYRMISPMQMSTL

SEQ ID NO: 75799 - protein, 15 aa, Artificial Sequence
  Description of Artificial Sequence: Synthetic peptide
  Seed: GMDPRMCSLMQGSTL
GMDYRMISPMQNSTL

SEQ ID NO: 75800 - protein, 15 aa, Artificial Sequence
  Description of Artificial Sequence: Synthetic peptide
  Seed: GMDPRMCSLMQGSTL
GMDYRMISPMQPSTL

SEQ ID NO: 75801 - protein, 15 aa, Artificial Sequence
  Description of Artificial Sequence: Synthetic peptide
  Seed: GMDPRMCSLMQGSTL
GMDYRMISPMQQSTL

SEQ ID NO: 75802 - protein, 15 aa, Artificial Sequence
  Description of Artificial Sequence: Synthetic peptide
  Seed: GMDPRMCSLMQGSTL
GMDYRMISPMQSSTL

SEQ ID NO: 75803 - protein, 15 aa, Artificial Sequence
  Description of Artificial Sequence: Synthetic peptide
  Seed: GMDPRMCSLMQGSTL
GMDYRMISPMQTSTL

SEQ ID NO: 75804 - protein, 15 aa, Artificial Sequence
  Description of Artificial Sequence: Synthetic peptide
  Seed: GMDPRMCSLMQGSTL
GMDYRMISPMQVSTL

SEQ ID NO: 75805 - protein, 15 aa, Artificial Sequence
  Description of Artificial Sequence: Synthetic peptide
  Seed: GMDPRMCSLMQGSTL
GMDYRMISPMQWSTL

SEQ ID NO: 75806 - protein, 15 aa, Artificial Sequence
  Description of Artificial Sequence: Synthetic peptide
  Seed: GMDPRMCSLMQGSTL
GMDYRMISPMQYSTL

SEQ ID NO: 75807 - protein, 15 aa, Artificial Sequence
  Description of Artificial Sequence: Synthetic peptide
  Seed: GMDPRMCSLMQGSTL
GMDYRMISQMQASTL

SEQ ID NO: 75808 - protein, 15 aa, Artificial Sequence
  Description of Artificial Sequence: Synthetic peptide
  Seed: GMDPRMCSLMQGSTL
GMDYRMISQMQNSTL

SEQ ID NO: 75809 - protein, 15 aa, Artificial Sequence
  Description of Artificial Sequence: Synthetic peptide
  Seed: GMDPRMCSLMQGSTL
GMDYRMISQMQSSTL

SEQ ID NO: 75810 - protein, 15 aa, Artificial Sequence
  Description of Artificial Sequence: Synthetic peptide
  Seed: GMDPRMCSLMQGSTL
GMDYRMISQMQTSTL

SEQ ID NO: 75811 - protein, 15 aa, Artificial Sequence
  Description of Artificial Sequence: Synthetic peptide
  Seed: GMDPRMCSLMQGSTL
GMDYRMISSMQASTL

SEQ ID NO: 75812 - protein, 15 aa, Artificial Sequence
  Description of Artificial Sequence: Synthetic peptide
  Seed: GMDPRMCSLMQGSTL
GMDYRMISSMQCSTL

SEQ ID NO: 75813 - protein, 15 aa, Artificial Sequence
  Description of Artificial Sequence: Synthetic peptide
  Seed: GMDPRMCSLMQGSTL
GMDYRMISSMQDSTL

SEQ ID NO: 75814 - protein, 15 aa, Artificial Sequence
  Description of Artificial Sequence: Synthetic peptide
  Seed: GMDPRMCSLMQGSTL
GMDYRMISSMQESTL

SEQ ID NO: 75815 - protein, 15 aa, Artificial Sequence
  Description of Artificial Sequence: Synthetic peptide
  Seed: GMDPRMCSLMQGSTL
GMDYRMISSMQFSTL

SEQ ID NO: 75816 - protein, 15 aa, Artificial Sequence
  Description of Artificial Sequence: Synthetic peptide
  Seed: GMDPRMCSLMQGSTL
GMDYRMISSMQGSTL

SEQ ID NO: 75817 - protein, 15 aa, Artificial Sequence
  Description of Artificial Sequence: Synthetic peptide
  Seed: GMDPRMCSLMQGSTL
GMDYRMISSMQHSTL

SEQ ID NO: 75818 - protein, 15 aa, Artificial Sequence
  Description of Artificial Sequence: Synthetic peptide
  Seed: GMDPRMCSLMQGSTL
GMDYRMISSMQISTL

SEQ ID NO: 75819 - protein, 15 aa, Artificial Sequence
  Description of Artificial Sequence: Synthetic peptide
  Seed: GMDPRMCSLMQGSTL
GMDYRMISSMQKSTL

SEQ ID NO: 75820 - protein, 15 aa, Artificial Sequence
  Description of Artificial Sequence: Synthetic peptide
  Seed: GMDPRMCSLMQGSTL
GMDYRMISSMQLSTL

SEQ ID NO: 75821 - protein, 15 aa, Artificial Sequence
  Description of Artificial Sequence: Synthetic peptide
  Seed: GMDPRMCSLMQGSTL
GMDYRMISSMQMSTL

SEQ ID NO: 75822 - protein, 15 aa, Artificial Sequence
  Description of Artificial Sequence: Synthetic peptide
  Seed: GMDPRMCSLMQGSTL
GMDYRMISSMQNSTL

SEQ ID NO: 75823 - protein, 15 aa, Artificial Sequence
  Description of Artificial Sequence: Synthetic peptide
  Seed: GMDPRMCSLMQGSTL
GMDYRMISSMQPSTL

SEQ ID NO: 75824 - protein, 15 aa, Artificial Sequence
  Description of Artificial Sequence: Synthetic peptide
  Seed: GMDPRMCSLMQGSTL
GMDYRMISSMQQSTL

SEQ ID NO: 75825 - protein, 15 aa, Artificial Sequence
  Description of Artificial Sequence: Synthetic peptide
  Seed: GMDPRMCSLMQGSTL
GMDYRMISSMQRSTL

SEQ ID NO: 75826 - protein, 15 aa, Artificial Sequence
  Description of Artificial Sequence: Synthetic peptide
  Seed: GMDPRMCSLMQGSTL
GMDYRMISSMQSSTL

SEQ ID NO: 75827 - protein, 15 aa, Artificial Sequence
  Description of Artificial Sequence: Synthetic peptide
  Seed: GMDPRMCSLMQGSTL
GMDYRMISSMQTSTL

SEQ ID NO: 75828 - protein, 15 aa, Artificial Sequence
  Description of Artificial Sequence: Synthetic peptide
  Seed: GMDPRMCSLMQGSTL
GMDYRMISSMQVSTL

SEQ ID NO: 75829 - protein, 15 aa, Artificial Sequence
  Description of Artificial Sequence: Synthetic peptide
  Seed: GMDPRMCSLMQGSTL
GMDYRMISSMQYSTL

SEQ ID NO: 75830 - protein, 15 aa, Artificial Sequence
  Description of Artificial Sequence: Synthetic peptide
  Seed: GMDPRMCSLMQGSTL
GMDYRMISTMQASTL

SEQ ID NO: 75831 - protein, 15 aa, Artificial Sequence
  Description of Artificial Sequence: Synthetic peptide
  Seed: GMDPRMCSLMQGSTL
GMDYRMISTMQCSTL

SEQ ID NO: 75832 - protein, 15 aa, Artificial Sequence
  Description of Artificial Sequence: Synthetic peptide
  Seed: GMDPRMCSLMQGSTL
GMDYRMISTMQDSTL

SEQ ID NO: 75833 - protein, 15 aa, Artificial Sequence
  Description of Artificial Sequence: Synthetic peptide
  Seed: GMDPRMCSLMQGSTL
GMDYRMISTMQESTL

SEQ ID NO: 75834 - protein, 15 aa, Artificial Sequence
  Description of Artificial Sequence: Synthetic peptide
  Seed: GMDPRMCSLMQGSTL
GMDYRMISTMQFSTL

SEQ ID NO: 75835 - protein, 15 aa, Artificial Sequence
  Description of Artificial Sequence: Synthetic peptide
  Seed: GMDPRMCSLMQGSTL
GMDYRMISTMQGSTL

SEQ ID NO: 75836 - protein, 15 aa, Artificial Sequence
  Description of Artificial Sequence: Synthetic peptide
  Seed: GMDPRMCSLMQGSTL
GMDYRMISTMQHSTL

SEQ ID NO: 75837 - protein, 15 aa, Artificial Sequence
  Description of Artificial Sequence: Synthetic peptide
  Seed: GMDPRMCSLMQGSTL
GMDYRMISTMQISTL

SEQ ID NO: 75838 - protein, 15 aa, Artificial Sequence
  Description of Artificial Sequence: Synthetic peptide
  Seed: GMDPRMCSLMQGSTL
GMDYRMISTMQKSTL

SEQ ID NO: 75839 - protein, 15 aa, Artificial Sequence
  Description of Artificial Sequence: Synthetic peptide
  Seed: GMDPRMCSLMQGSTL
GMDYRMISTMQLSTL

SEQ ID NO: 75840 - protein, 15 aa, Artificial Sequence
  Description of Artificial Sequence: Synthetic peptide
  Seed: GMDPRMCSLMQGSTL
GMDYRMISTMQMSTL

SEQ ID NO: 75841 - protein, 15 aa, Artificial Sequence
  Description of Artificial Sequence: Synthetic peptide
  Seed: GMDPRMCSLMQGSTL
GMDYRMISTMQNSTL

SEQ ID NO: 75842 - protein, 15 aa, Artificial Sequence
  Description of Artificial Sequence: Synthetic peptide
  Seed: GMDPRMCSLMQGSTL
GMDYRMISTMQPSTL

SEQ ID NO: 75843 - protein, 15 aa, Artificial Sequence
  Description of Artificial Sequence: Synthetic peptide
  Seed: GMDPRMCSLMQGSTL
GMDYRMISTMQQSTL

SEQ ID NO: 75844 - protein, 15 aa, Artificial Sequence
  Description of Artificial Sequence: Synthetic peptide
  Seed: GMDPRMCSLMQGSTL
GMDYRMISTMQRSTL

SEQ ID NO: 75845 - protein, 15 aa, Artificial Sequence
  Description of Artificial Sequence: Synthetic peptide
  Seed: GMDPRMCSLMQGSTL
GMDYRMISTMQSSTL

SEQ ID NO: 75846 - protein, 15 aa, Artificial Sequence
  Description of Artificial Sequence: Synthetic peptide
  Seed: GMDPRMCSLMQGSTL
GMDYRMISTMQTSTL

SEQ ID NO: 75847 - protein, 15 aa, Artificial Sequence
  Description of Artificial Sequence: Synthetic peptide
  Seed: GMDPRMCSLMQGSTL
GMDYRMISTMQVSTL

SEQ ID NO: 75848 - protein, 15 aa, Artificial Sequence
  Description of Artificial Sequence: Synthetic peptide
  Seed: GMDPRMCSLMQGSTL
GMDYRMISTMQYSTL

SEQ ID NO: 75849 - protein, 15 aa, Artificial Sequence
  Description of Artificial Sequence: Synthetic peptide
  Seed: GMDPRMCSLMQGSTL
GMDYRMISVMQASTL

SEQ ID NO: 75850 - protein, 15 aa, Artificial Sequence
  Description of Artificial Sequence: Synthetic peptide
  Seed: GMDPRMCSLMQGSTL
GMDYRMISVMQDSTL

SEQ ID NO: 75851 - protein, 15 aa, Artificial Sequence
  Description of Artificial Sequence: Synthetic peptide
  Seed: GMDPRMCSLMQGSTL
GMDYRMISVMQESTL

SEQ ID NO: 75852 - protein, 15 aa, Artificial Sequence
  Description of Artificial Sequence: Synthetic peptide
  Seed: GMDPRMCSLMQGSTL
GMDYRMISVMQGSTL

SEQ ID NO: 75853 - protein, 15 aa, Artificial Sequence
  Description of Artificial Sequence: Synthetic peptide
  Seed: GMDPRMCSLMQGSTL
GMDYRMISVMQHSTL

SEQ ID NO: 75854 - protein, 15 aa, Artificial Sequence
  Description of Artificial Sequence: Synthetic peptide
  Seed: GMDPRMCSLMQGSTL
GMDYRMISVMQISTL

SEQ ID NO: 75855 - protein, 15 aa, Artificial Sequence
  Description of Artificial Sequence: Synthetic peptide
  Seed: GMDPRMCSLMQGSTL
GMDYRMISVMQKSTL

SEQ ID NO: 75856 - protein, 15 aa, Artificial Sequence
  Description of Artificial Sequence: Synthetic peptide
  Seed: GMDPRMCSLMQGSTL
GMDYRMISVMQLSTL

SEQ ID NO: 75857 - protein, 15 aa, Artificial Sequence
  Description of Artificial Sequence: Synthetic peptide
  Seed: GMDPRMCSLMQGSTL
GMDYRMISVMQMSTL

SEQ ID NO: 75858 - protein, 15 aa, Artificial Sequence
  Description of Artificial Sequence: Synthetic peptide
  Seed: GMDPRMCSLMQGSTL
GMDYRMISVMQNSTL

SEQ ID NO: 75859 - protein, 15 aa, Artificial Sequence
  Description of Artificial Sequence: Synthetic peptide
  Seed: GMDPRMCSLMQGSTL
GMDYRMISVMQPSTL

SEQ ID NO: 75860 - protein, 15 aa, Artificial Sequence
  Description of Artificial Sequence: Synthetic peptide
  Seed: GMDPRMCSLMQGSTL
GMDYRMISVMQQSTL

SEQ ID NO: 75861 - protein, 15 aa, Artificial Sequence
  Description of Artificial Sequence: Synthetic peptide
  Seed: GMDPRMCSLMQGSTL
GMDYRMISVMQRSTL

SEQ ID NO: 75862 - protein, 15 aa, Artificial Sequence
  Description of Artificial Sequence: Synthetic peptide
  Seed: GMDPRMCSLMQGSTL
GMDYRMISVMQSSTL

SEQ ID NO: 75863 - protein, 15 aa, Artificial Sequence
  Description of Artificial Sequence: Synthetic peptide
  Seed: GMDPRMCSLMQGSTL
GMDYRMISVMQTSTL

SEQ ID NO: 75864 - protein, 15 aa, Artificial Sequence
  Description of Artificial Sequence: Synthetic peptide
  Seed: GMDPRMCSLMQGSTL
GMDYRMISVMQVSTL

SEQ ID NO: 75865 - protein, 15 aa, Artificial Sequence
  Description of Artificial Sequence: Synthetic peptide
  Seed: GMDPRMCSLMQGSTL
GMDYRMISVMQYSTL

SEQ ID NO: 75866 - protein, 15 aa, Artificial Sequence
  Description of Artificial Sequence: Synthetic peptide
  Seed: GMDPRMCSLMQGSTL
GMDYRMISWMQASTL

SEQ ID NO: 75867 - protein, 15 aa, Artificial Sequence
  Description of Artificial Sequence: Synthetic peptide
  Seed: GMDPRMCSLMQGSTL
GMDYRMISWMQNSTL

SEQ ID NO: 75868 - protein, 15 aa, Artificial Sequence
  Description of Artificial Sequence: Synthetic peptide
  Seed: GMDPRMCSLMQGSTL
GMDYRMISWMQSSTL

SEQ ID NO: 75869 - protein, 15 aa, Artificial Sequence
  Description of Artificial Sequence: Synthetic peptide
  Seed: GMDPRMCSLMQGSTL
GMDYRMISYMQASTL

SEQ ID NO: 75870 - protein, 15 aa, Artificial Sequence
  Description of Artificial Sequence: Synthetic peptide
  Seed: GMDPRMCSLMQGSTL
GMDYRMISYMQNSTL

SEQ ID NO: 75871 - protein, 15 aa, Artificial Sequence
  Description of Artificial Sequence: Synthetic peptide
  Seed: GMDPRMCSLMQGSTL
GMDYRMISYMQSSTL

SEQ ID NO: 75872 - protein, 15 aa, Artificial Sequence
  Description of Artificial Sequence: Synthetic peptide
  Seed: GMDPRMCSLMQGSTL
GMDYRMLSAMQASTL

SEQ ID NO: 75873 - protein, 15 aa, Artificial Sequence
  Description of Artificial Sequence: Synthetic peptide
  Seed: GMDPRMCSLMQGSTL
GMDYRMLSAMQCSTL

SEQ ID NO: 75874 - protein, 15 aa, Artificial Sequence
  Description of Artificial Sequence: Synthetic peptide
  Seed: GMDPRMCSLMQGSTL
GMDYRMLSAMQDSTL

SEQ ID NO: 75875 - protein, 15 aa, Artificial Sequence
  Description of Artificial Sequence: Synthetic peptide
  Seed: GMDPRMCSLMQGSTL
GMDYRMLSAMQESTL

SEQ ID NO: 75876 - protein, 15 aa, Artificial Sequence
  Description of Artificial Sequence: Synthetic peptide
  Seed: GMDPRMCSLMQGSTL
GMDYRMLSAMQFSTL

SEQ ID NO: 75877 - protein, 15 aa, Artificial Sequence
  Description of Artificial Sequence: Synthetic peptide
  Seed: GMDPRMCSLMQGSTL
GMDYRMLSAMQGSTL

SEQ ID NO: 75878 - protein, 15 aa, Artificial Sequence
  Description of Artificial Sequence: Synthetic peptide
  Seed: GMDPRMCSLMQGSTL
GMDYRMLSAMQHSTL

SEQ ID NO: 75879 - protein, 15 aa, Artificial Sequence
  Description of Artificial Sequence: Synthetic peptide
  Seed: GMDPRMCSLMQGSTL
GMDYRMLSAMQISTL

SEQ ID NO: 75880 - protein, 15 aa, Artificial Sequence
  Description of Artificial Sequence: Synthetic peptide
  Seed: GMDPRMCSLMQGSTL
GMDYRMLSAMQKSTL

SEQ ID NO: 75881 - protein, 15 aa, Artificial Sequence
  Description of Artificial Sequence: Synthetic peptide
  Seed: GMDPRMCSLMQGSTL
GMDYRMLSAMQLSTL

SEQ ID NO: 75882 - protein, 15 aa, Artificial Sequence
  Description of Artificial Sequence: Synthetic peptide
  Seed: GMDPRMCSLMQGSTL
GMDYRMLSAMQMSTL

SEQ ID NO: 75883 - protein, 15 aa, Artificial Sequence
  Description of Artificial Sequence: Synthetic peptide
  Seed: GMDPRMCSLMQGSTL
GMDYRMLSAMQNSTL

SEQ ID NO: 75884 - protein, 15 aa, Artificial Sequence
  Description of Artificial Sequence: Synthetic peptide
  Seed: GMDPRMCSLMQGSTL
GMDYRMLSAMQPSTL

SEQ ID NO: 75885 - protein, 15 aa, Artificial Sequence
  Description of Artificial Sequence: Synthetic peptide
  Seed: GMDPRMCSLMQGSTL
GMDYRMLSAMQQSTL

SEQ ID NO: 75886 - protein, 15 aa, Artificial Sequence
  Description of Artificial Sequence: Synthetic peptide
  Seed: GMDPRMCSLMQGSTL
GMDYRMLSAMQRSTL

SEQ ID NO: 75887 - protein, 15 aa, Artificial Sequence
  Description of Artificial Sequence: Synthetic peptide
  Seed: GMDPRMCSLMQGSTL
GMDYRMLSAMQSSTL

SEQ ID NO: 75888 - protein, 15 aa, Artificial Sequence
  Description of Artificial Sequence: Synthetic peptide
  Seed: GMDPRMCSLMQGSTL
GMDYRMLSAMQTSTL

SEQ ID NO: 75889 - protein, 15 aa, Artificial Sequence
  Description of Artificial Sequence: Synthetic peptide
  Seed: GMDPRMCSLMQGSTL
GMDYRMLSAMQVSTL

SEQ ID NO: 75890 - protein, 15 aa, Artificial Sequence
  Description of Artificial Sequence: Synthetic peptide
  Seed: GMDPRMCSLMQGSTL
GMDYRMLSAMQWSTL

SEQ ID NO: 75891 - protein, 15 aa, Artificial Sequence
  Description of Artificial Sequence: Synthetic peptide
  Seed: GMDPRMCSLMQGSTL
GMDYRMLSAMQYSTL

SEQ ID NO: 75892 - protein, 15 aa, Artificial Sequence
  Description of Artificial Sequence: Synthetic peptide
  Seed: GMDPRMCSLMQGSTL
GMDYRMLSCMQASTL

SEQ ID NO: 75893 - protein, 15 aa, Artificial Sequence
  Description of Artificial Sequence: Synthetic peptide
  Seed: GMDPRMCSLMQGSTL
GMDYRMLSCMQNSTL

SEQ ID NO: 75894 - protein, 15 aa, Artificial Sequence
  Description of Artificial Sequence: Synthetic peptide
  Seed: GMDPRMCSLMQGSTL
GMDYRMLSCMQSSTL

SEQ ID NO: 75895 - protein, 15 aa, Artificial Sequence
  Description of Artificial Sequence: Synthetic peptide
  Seed: GMDPRMCSLMQGSTL
GMDYRMLSDMQASTL

SEQ ID NO: 75896 - protein, 15 aa, Artificial Sequence
  Description of Artificial Sequence: Synthetic peptide
  Seed: GMDPRMCSLMQGSTL
GMDYRMLSEMQASTL

SEQ ID NO: 75897 - protein, 15 aa, Artificial Sequence
  Description of Artificial Sequence: Synthetic peptide
  Seed: GMDPRMCSLMQGSTL
GMDYRMLSEMQNSTL

SEQ ID NO: 75898 - protein, 15 aa, Artificial Sequence
  Description of Artificial Sequence: Synthetic peptide
  Seed: GMDPRMCSLMQGSTL
GMDYRMLSEMQSSTL

SEQ ID NO: 75899 - protein, 15 aa, Artificial Sequence
  Description of Artificial Sequence: Synthetic peptide
  Seed: GMDPRMCSLMQGSTL
GMDYRMLSFMQASTL

SEQ ID NO: 75900 - protein, 15 aa, Artificial Sequence
  Description of Artificial Sequence: Synthetic peptide
  Seed: GMDPRMCSLMQGSTL
GMDYRMLSFMQHSTL

SEQ ID NO: 75901 - protein, 15 aa, Artificial Sequence
  Description of Artificial Sequence: Synthetic peptide
  Seed: GMDPRMCSLMQGSTL
GMDYRMLSFMQNSTL

SEQ ID NO: 75902 - protein, 15 aa, Artificial Sequence
  Description of Artificial Sequence: Synthetic peptide
  Seed: GMDPRMCSLMQGSTL
GMDYRMLSFMQSSTL

SEQ ID NO: 75903 - protein, 15 aa, Artificial Sequence
  Description of Artificial Sequence: Synthetic peptide
  Seed: GMDPRMCSLMQGSTL
GMDYRMLSFMQTSTL

SEQ ID NO: 75904 - protein, 15 aa, Artificial Sequence
  Description of Artificial Sequence: Synthetic peptide
  Seed: GMDPRMCSLMQGSTL
GMDYRMLSGMQASTL

SEQ ID NO: 75905 - protein, 15 aa, Artificial Sequence
  Description of Artificial Sequence: Synthetic peptide
  Seed: GMDPRMCSLMQGSTL
GMDYRMLSGMQCSTL

SEQ ID NO: 75906 - protein, 15 aa, Artificial Sequence
  Description of Artificial Sequence: Synthetic peptide
  Seed: GMDPRMCSLMQGSTL
GMDYRMLSGMQDSTL

SEQ ID NO: 75907 - protein, 15 aa, Artificial Sequence
  Description of Artificial Sequence: Synthetic peptide
  Seed: GMDPRMCSLMQGSTL
GMDYRMLSGMQESTL

SEQ ID NO: 75908 - protein, 15 aa, Artificial Sequence
  Description of Artificial Sequence: Synthetic peptide
  Seed: GMDPRMCSLMQGSTL
GMDYRMLSGMQFSTL

SEQ ID NO: 75909 - protein, 15 aa, Artificial Sequence
  Description of Artificial Sequence: Synthetic peptide
  Seed: GMDPRMCSLMQGSTL
GMDYRMLSGMQGSTL

SEQ ID NO: 75910 - protein, 15 aa, Artificial Sequence
  Description of Artificial Sequence: Synthetic peptide
  Seed: GMDPRMCSLMQGSTL
GMDYRMLSGMQHSTL

SEQ ID NO: 75911 - protein, 15 aa, Artificial Sequence
  Description of Artificial Sequence: Synthetic peptide
  Seed: GMDPRMCSLMQGSTL
GMDYRMLSGMQISTL

SEQ ID NO: 75912 - protein, 15 aa, Artificial Sequence
  Description of Artificial Sequence: Synthetic peptide
  Seed: GMDPRMCSLMQGSTL
GMDYRMLSGMQLSTL

SEQ ID NO: 75913 - protein, 15 aa, Artificial Sequence
  Description of Artificial Sequence: Synthetic peptide
  Seed: GMDPRMCSLMQGSTL
GMDYRMLSGMQMSTL

SEQ ID NO: 75914 - protein, 15 aa, Artificial Sequence
  Description of Artificial Sequence: Synthetic peptide
  Seed: GMDPRMCSLMQGSTL
GMDYRMLSGMQNSTL

SEQ ID NO: 75915 - protein, 15 aa, Artificial Sequence
  Description of Artificial Sequence: Synthetic peptide
  Seed: GMDPRMCSLMQGSTL
GMDYRMLSGMQPSTL

SEQ ID NO: 75916 - protein, 15 aa, Artificial Sequence
  Description of Artificial Sequence: Synthetic peptide
  Seed: GMDPRMCSLMQGSTL
GMDYRMLSGMQQSTL

SEQ ID NO: 75917 - protein, 15 aa, Artificial Sequence
  Description of Artificial Sequence: Synthetic peptide
  Seed: GMDPRMCSLMQGSTL
GMDYRMLSGMQSSTL

SEQ ID NO: 75918 - protein, 15 aa, Artificial Sequence
  Description of Artificial Sequence: Synthetic peptide
  Seed: GMDPRMCSLMQGSTL
GMDYRMLSGMQTSTL

SEQ ID NO: 75919 - protein, 15 aa, Artificial Sequence
  Description of Artificial Sequence: Synthetic peptide
  Seed: GMDPRMCSLMQGSTL
GMDYRMLSGMQVSTL

SEQ ID NO: 75920 - protein, 15 aa, Artificial Sequence
  Description of Artificial Sequence: Synthetic peptide
  Seed: GMDPRMCSLMQGSTL
GMDYRMLSGMQYSTL

SEQ ID NO: 75921 - protein, 15 aa, Artificial Sequence
  Description of Artificial Sequence: Synthetic peptide
  Seed: GMDPRMCSLMQGSTL
GMDYRMLSHMQASTL

SEQ ID NO: 75922 - protein, 15 aa, Artificial Sequence
  Description of Artificial Sequence: Synthetic peptide
  Seed: GMDPRMCSLMQGSTL
GMDYRMLSHMQISTL

SEQ ID NO: 75923 - protein, 15 aa, Artificial Sequence
  Description of Artificial Sequence: Synthetic peptide
  Seed: GMDPRMCSLMQGSTL
GMDYRMLSHMQLSTL

SEQ ID NO: 75924 - protein, 15 aa, Artificial Sequence
  Description of Artificial Sequence: Synthetic peptide
  Seed: GMDPRMCSLMQGSTL
GMDYRMLSHMQMSTL

SEQ ID NO: 75925 - protein, 15 aa, Artificial Sequence
  Description of Artificial Sequence: Synthetic peptide
  Seed: GMDPRMCSLMQGSTL
GMDYRMLSHMQNSTL

SEQ ID NO: 75926 - protein, 15 aa, Artificial Sequence
  Description of Artificial Sequence: Synthetic peptide
  Seed: GMDPRMCSLMQGSTL
GMDYRMLSHMQSSTL

SEQ ID NO: 75927 - protein, 15 aa, Artificial Sequence
  Description of Artificial Sequence: Synthetic peptide
  Seed: GMDPRMCSLMQGSTL
GMDYRMLSHMQTSTL

SEQ ID NO: 75928 - protein, 15 aa, Artificial Sequence
  Description of Artificial Sequence: Synthetic peptide
  Seed: GMDPRMCSLMQGSTL
GMDYRMLSHMQVSTL

SEQ ID NO: 75929 - protein, 15 aa, Artificial Sequence
  Description of Artificial Sequence: Synthetic peptide
  Seed: GMDPRMCSLMQGSTL
GMDYRMLSIMQASTL

SEQ ID NO: 75930 - protein, 15 aa, Artificial Sequence
  Description of Artificial Sequence: Synthetic peptide
  Seed: GMDPRMCSLMQGSTL
GMDYRMLSIMQCSTL

SEQ ID NO: 75931 - protein, 15 aa, Artificial Sequence
  Description of Artificial Sequence: Synthetic peptide
  Seed: GMDPRMCSLMQGSTL
GMDYRMLSIMQDSTL

SEQ ID NO: 75932 - protein, 15 aa, Artificial Sequence
  Description of Artificial Sequence: Synthetic peptide
  Seed: GMDPRMCSLMQGSTL
GMDYRMLSIMQESTL

SEQ ID NO: 75933 - protein, 15 aa, Artificial Sequence
  Description of Artificial Sequence: Synthetic peptide
  Seed: GMDPRMCSLMQGSTL
GMDYRMLSIMQGSTL

SEQ ID NO: 75934 - protein, 15 aa, Artificial Sequence
  Description of Artificial Sequence: Synthetic peptide
  Seed: GMDPRMCSLMQGSTL
GMDYRMLSIMQHSTL

SEQ ID NO: 75935 - protein, 15 aa, Artificial Sequence
  Description of Artificial Sequence: Synthetic peptide
  Seed: GMDPRMCSLMQGSTL
GMDYRMLSIMQISTL

SEQ ID NO: 75936 - protein, 15 aa, Artificial Sequence
  Description of Artificial Sequence: Synthetic peptide
  Seed: GMDPRMCSLMQGSTL
GMDYRMLSIMQKSTL

SEQ ID NO: 75937 - protein, 15 aa, Artificial Sequence
  Description of Artificial Sequence: Synthetic peptide
  Seed: GMDPRMCSLMQGSTL
GMDYRMLSIMQLSTL

SEQ ID NO: 75938 - protein, 15 aa, Artificial Sequence
  Description of Artificial Sequence: Synthetic peptide
  Seed: GMDPRMCSLMQGSTL
GMDYRMLSIMQMSTL

SEQ ID NO: 75939 - protein, 15 aa, Artificial Sequence
  Description of Artificial Sequence: Synthetic peptide
  Seed: GMDPRMCSLMQGSTL
GMDYRMLSIMQNSTL

SEQ ID NO: 75940 - protein, 15 aa, Artificial Sequence
  Description of Artificial Sequence: Synthetic peptide
  Seed: GMDPRMCSLMQGSTL
GMDYRMLSIMQPSTL

SEQ ID NO: 75941 - protein, 15 aa, Artificial Sequence
  Description of Artificial Sequence: Synthetic peptide
  Seed: GMDPRMCSLMQGSTL
GMDYRMLSIMQQSTL

SEQ ID NO: 75942 - protein, 15 aa, Artificial Sequence
  Description of Artificial Sequence: Synthetic peptide
  Seed: GMDPRMCSLMQGSTL
GMDYRMLSIMQRSTL

SEQ ID NO: 75943 - protein, 15 aa, Artificial Sequence
  Description of Artificial Sequence: Synthetic peptide
  Seed: GMDPRMCSLMQGSTL
GMDYRMLSIMQSSTL

SEQ ID NO: 75944 - protein, 15 aa, Artificial Sequence
  Description of Artificial Sequence: Synthetic peptide
  Seed: GMDPRMCSLMQGSTL
GMDYRMLSIMQTSTL

SEQ ID NO: 75945 - protein, 15 aa, Artificial Sequence
  Description of Artificial Sequence: Synthetic peptide
  Seed: GMDPRMCSLMQGSTL
GMDYRMLSIMQVSTL

SEQ ID NO: 75946 - protein, 15 aa, Artificial Sequence
  Description of Artificial Sequence: Synthetic peptide
  Seed: GMDPRMCSLMQGSTL
GMDYRMLSIMQYSTL

SEQ ID NO: 75947 - protein, 15 aa, Artificial Sequence
  Description of Artificial Sequence: Synthetic peptide
  Seed: GMDPRMCSLMQGSTL
GMDYRMLSLMQASTL

SEQ ID NO: 75948 - protein, 15 aa, Artificial Sequence
  Description of Artificial Sequence: Synthetic peptide
  Seed: GMDPRMCSLMQGSTL
GMDYRMLSLMQDSTL

SEQ ID NO: 75949 - protein, 15 aa, Artificial Sequence
  Description of Artificial Sequence: Synthetic peptide
  Seed: GMDPRMCSLMQGSTL
GMDYRMLSLMQESTL

SEQ ID NO: 75950 - protein, 15 aa, Artificial Sequence
  Description of Artificial Sequence: Synthetic peptide
  Seed: GMDPRMCSLMQGSTL
GMDYRMLSLMQGSTL

SEQ ID NO: 75951 - protein, 15 aa, Artificial Sequence
  Description of Artificial Sequence: Synthetic peptide
  Seed: GMDPRMCSLMQGSTL
GMDYRMLSLMQHSTL

SEQ ID NO: 75952 - protein, 15 aa, Artificial Sequence
  Description of Artificial Sequence: Synthetic peptide
  Seed: GMDPRMCSLMQGSTL
GMDYRMLSLMQISTL

SEQ ID NO: 75953 - protein, 15 aa, Artificial Sequence
  Description of Artificial Sequence: Synthetic peptide
  Seed: GMDPRMCSLMQGSTL
GMDYRMLSLMQKSTL

SEQ ID NO: 75954 - protein, 15 aa, Artificial Sequence
  Description of Artificial Sequence: Synthetic peptide
  Seed: GMDPRMCSLMQGSTL
GMDYRMLSLMQLSTL

SEQ ID NO: 75955 - protein, 15 aa, Artificial Sequence
  Description of Artificial Sequence: Synthetic peptide
  Seed: GMDPRMCSLMQGSTL
GMDYRMLSLMQMSTL

SEQ ID NO: 75956 - protein, 15 aa, Artificial Sequence
  Description of Artificial Sequence: Synthetic peptide
  Seed: GMDPRMCSLMQGSTL
GMDYRMLSLMQNSTL

SEQ ID NO: 75957 - protein, 15 aa, Artificial Sequence
  Description of Artificial Sequence: Synthetic peptide
  Seed: GMDPRMCSLMQGSTL
GMDYRMLSLMQPSTL

SEQ ID NO: 75958 - protein, 15 aa, Artificial Sequence
  Description of Artificial Sequence: Synthetic peptide
  Seed: GMDPRMCSLMQGSTL
GMDYRMLSLMQQSTL

SEQ ID NO: 75959 - protein, 15 aa, Artificial Sequence
  Description of Artificial Sequence: Synthetic peptide
  Seed: GMDPRMCSLMQGSTL
GMDYRMLSLMQSSTL

SEQ ID NO: 75960 - protein, 15 aa, Artificial Sequence
  Description of Artificial Sequence: Synthetic peptide
  Seed: GMDPRMCSLMQGSTL
GMDYRMLSLMQTSTL

SEQ ID NO: 75961 - protein, 15 aa, Artificial Sequence
  Description of Artificial Sequence: Synthetic peptide
  Seed: GMDPRMCSLMQGSTL
GMDYRMLSLMQVSTL

SEQ ID NO: 75962 - protein, 15 aa, Artificial Sequence
  Description of Artificial Sequence: Synthetic peptide
  Seed: GMDPRMCSLMQGSTL
GMDYRMLSMMQASTL

SEQ ID NO: 75963 - protein, 15 aa, Artificial Sequence
  Description of Artificial Sequence: Synthetic peptide
  Seed: GMDPRMCSLMQGSTL
GMDYRMLSMMQDSTL

SEQ ID NO: 75964 - protein, 15 aa, Artificial Sequence
  Description of Artificial Sequence: Synthetic peptide
  Seed: GMDPRMCSLMQGSTL
GMDYRMLSMMQESTL

SEQ ID NO: 75965 - protein, 15 aa, Artificial Sequence
  Description of Artificial Sequence: Synthetic peptide
  Seed: GMDPRMCSLMQGSTL
GMDYRMLSMMQGSTL

SEQ ID NO: 75966 - protein, 15 aa, Artificial Sequence
  Description of Artificial Sequence: Synthetic peptide
  Seed: GMDPRMCSLMQGSTL
GMDYRMLSMMQHSTL

SEQ ID NO: 75967 - protein, 15 aa, Artificial Sequence
  Description of Artificial Sequence: Synthetic peptide
  Seed: GMDPRMCSLMQGSTL
GMDYRMLSMMQISTL

SEQ ID NO: 75968 - protein, 15 aa, Artificial Sequence
  Description of Artificial Sequence: Synthetic peptide
  Seed: GMDPRMCSLMQGSTL
GMDYRMLSMMQKSTL

SEQ ID NO: 75969 - protein, 15 aa, Artificial Sequence
  Description of Artificial Sequence: Synthetic peptide
  Seed: GMDPRMCSLMQGSTL
GMDYRMLSMMQLSTL

SEQ ID NO: 75970 - protein, 15 aa, Artificial Sequence
  Description of Artificial Sequence: Synthetic peptide
  Seed: GMDPRMCSLMQGSTL
GMDYRMLSMMQMSTL

SEQ ID NO: 75971 - protein, 15 aa, Artificial Sequence
  Description of Artificial Sequence: Synthetic peptide
  Seed: GMDPRMCSLMQGSTL
GMDYRMLSMMQNSTL

SEQ ID NO: 75972 - protein, 15 aa, Artificial Sequence
  Description of Artificial Sequence: Synthetic peptide
  Seed: GMDPRMCSLMQGSTL
GMDYRMLSMMQPSTL

SEQ ID NO: 75973 - protein, 15 aa, Artificial Sequence
  Description of Artificial Sequence: Synthetic peptide
  Seed: GMDPRMCSLMQGSTL
GMDYRMLSMMQQSTL

SEQ ID NO: 75974 - protein, 15 aa, Artificial Sequence
  Description of Artificial Sequence: Synthetic peptide
  Seed: GMDPRMCSLMQGSTL
GMDYRMLSMMQRSTL

SEQ ID NO: 75975 - protein, 15 aa, Artificial Sequence
  Description of Artificial Sequence: Synthetic peptide
  Seed: GMDPRMCSLMQGSTL
GMDYRMLSMMQSSTL

SEQ ID NO: 75976 - protein, 15 aa, Artificial Sequence
  Description of Artificial Sequence: Synthetic peptide
  Seed: GMDPRMCSLMQGSTL
GMDYRMLSMMQTSTL

SEQ ID NO: 75977 - protein, 15 aa, Artificial Sequence
  Description of Artificial Sequence: Synthetic peptide
  Seed: GMDPRMCSLMQGSTL
GMDYRMLSMMQVSTL

SEQ ID NO: 75978 - protein, 15 aa, Artificial Sequence
  Description of Artificial Sequence: Synthetic peptide
  Seed: GMDPRMCSLMQGSTL
GMDYRMLSNMQASTL

SEQ ID NO: 75979 - protein, 15 aa, Artificial Sequence
  Description of Artificial Sequence: Synthetic peptide
  Seed: GMDPRMCSLMQGSTL
GMDYRMLSNMQCSTL

SEQ ID NO: 75980 - protein, 15 aa, Artificial Sequence
  Description of Artificial Sequence: Synthetic peptide
  Seed: GMDPRMCSLMQGSTL
GMDYRMLSNMQDSTL

SEQ ID NO: 75981 - protein, 15 aa, Artificial Sequence
  Description of Artificial Sequence: Synthetic peptide
  Seed: GMDPRMCSLMQGSTL
GMDYRMLSNMQESTL

SEQ ID NO: 75982 - protein, 15 aa, Artificial Sequence
  Description of Artificial Sequence: Synthetic peptide
  Seed: GMDPRMCSLMQGSTL
GMDYRMLSNMQFSTL

SEQ ID NO: 75983 - protein, 15 aa, Artificial Sequence
  Description of Artificial Sequence: Synthetic peptide
  Seed: GMDPRMCSLMQGSTL
GMDYRMLSNMQGSTL

SEQ ID NO: 75984 - protein, 15 aa, Artificial Sequence
  Description of Artificial Sequence: Synthetic peptide
  Seed: GMDPRMCSLMQGSTL
GMDYRMLSNMQHSTL

SEQ ID NO: 75985 - protein, 15 aa, Artificial Sequence
  Description of Artificial Sequence: Synthetic peptide
  Seed: GMDPRMCSLMQGSTL
GMDYRMLSNMQISTL

SEQ ID NO: 75986 - protein, 15 aa, Artificial Sequence
  Description of Artificial Sequence: Synthetic peptide
  Seed: GMDPRMCSLMQGSTL
GMDYRMLSNMQLSTL

SEQ ID NO: 75987 - protein, 15 aa, Artificial Sequence
  Description of Artificial Sequence: Synthetic peptide
  Seed: GMDPRMCSLMQGSTL
GMDYRMLSNMQMSTL

SEQ ID NO: 75988 - protein, 15 aa, Artificial Sequence
  Description of Artificial Sequence: Synthetic peptide
  Seed: GMDPRMCSLMQGSTL
GMDYRMLSNMQNSTL

SEQ ID NO: 75989 - protein, 15 aa, Artificial Sequence
  Description of Artificial Sequence: Synthetic peptide
  Seed: GMDPRMCSLMQGSTL
GMDYRMLSNMQPSTL

SEQ ID NO: 75990 - protein, 15 aa, Artificial Sequence
  Description of Artificial Sequence: Synthetic peptide
  Seed: GMDPRMCSLMQGSTL
GMDYRMLSNMQQSTL

SEQ ID NO: 75991 - protein, 15 aa, Artificial Sequence
  Description of Artificial Sequence: Synthetic peptide
  Seed: GMDPRMCSLMQGSTL
GMDYRMLSNMQSSTL

SEQ ID NO: 75992 - protein, 15 aa, Artificial Sequence
  Description of Artificial Sequence: Synthetic peptide
  Seed: GMDPRMCSLMQGSTL
GMDYRMLSNMQTSTL

SEQ ID NO: 75993 - protein, 15 aa, Artificial Sequence
  Description of Artificial Sequence: Synthetic peptide
  Seed: GMDPRMCSLMQGSTL
GMDYRMLSNMQVSTL

SEQ ID NO: 75994 - protein, 15 aa, Artificial Sequence
  Description of Artificial Sequence: Synthetic peptide
  Seed: GMDPRMCSLMQGSTL
GMDYRMLSPMQASTL

SEQ ID NO: 75995 - protein, 15 aa, Artificial Sequence
  Description of Artificial Sequence: Synthetic peptide
  Seed: GMDPRMCSLMQGSTL
GMDYRMLSPMQCSTL

SEQ ID NO: 75996 - protein, 15 aa, Artificial Sequence
  Description of Artificial Sequence: Synthetic peptide
  Seed: GMDPRMCSLMQGSTL
GMDYRMLSPMQDSTL

SEQ ID NO: 75997 - protein, 15 aa, Artificial Sequence
  Description of Artificial Sequence: Synthetic peptide
  Seed: GMDPRMCSLMQGSTL
GMDYRMLSPMQESTL

SEQ ID NO: 75998 - protein, 15 aa, Artificial Sequence
  Description of Artificial Sequence: Synthetic peptide
  Seed: GMDPRMCSLMQGSTL
GMDYRMLSPMQFSTL

SEQ ID NO: 75999 - protein, 15 aa, Artificial Sequence
  Description of Artificial Sequence: Synthetic peptide
  Seed: GMDPRMCSLMQGSTL
GMDYRMLSPMQGSTL

SEQ ID NO: 76000 - protein, 15 aa, Artificial Sequence
  Description of Artificial Sequence: Synthetic peptide
  Seed: GMDPRMCSLMQGSTL
GMDYRMLSPMQHSTL

SEQ ID NO: 76001 - protein, 15 aa, Artificial Sequence
  Description of Artificial Sequence: Synthetic peptide
  Seed: GMDPRMCSLMQGSTL
GMDYRMLSPMQISTL

SEQ ID NO: 76002 - protein, 15 aa, Artificial Sequence
  Description of Artificial Sequence: Synthetic peptide
  Seed: GMDPRMCSLMQGSTL
GMDYRMLSPMQKSTL

SEQ ID NO: 76003 - protein, 15 aa, Artificial Sequence
  Description of Artificial Sequence: Synthetic peptide
  Seed: GMDPRMCSLMQGSTL
GMDYRMLSPMQLSTL

SEQ ID NO: 76004 - protein, 15 aa, Artificial Sequence
  Description of Artificial Sequence: Synthetic peptide
  Seed: GMDPRMCSLMQGSTL
GMDYRMLSPMQMSTL

SEQ ID NO: 76005 - protein, 15 aa, Artificial Sequence
  Description of Artificial Sequence: Synthetic peptide
  Seed: GMDPRMCSLMQGSTL
GMDYRMLSPMQNSTL

SEQ ID NO: 76006 - protein, 15 aa, Artificial Sequence
  Description of Artificial Sequence: Synthetic peptide
  Seed: GMDPRMCSLMQGSTL
GMDYRMLSPMQPSTL

SEQ ID NO: 76007 - protein, 15 aa, Artificial Sequence
  Description of Artificial Sequence: Synthetic peptide
  Seed: GMDPRMCSLMQGSTL
GMDYRMLSPMQQSTL

SEQ ID NO: 76008 - protein, 15 aa, Artificial Sequence
  Description of Artificial Sequence: Synthetic peptide
  Seed: GMDPRMCSLMQGSTL
GMDYRMLSPMQRSTL

SEQ ID NO: 76009 - protein, 15 aa, Artificial Sequence
  Description of Artificial Sequence: Synthetic peptide
  Seed: GMDPRMCSLMQGSTL
GMDYRMLSPMQSSTL

SEQ ID NO: 76010 - protein, 15 aa, Artificial Sequence
  Description of Artificial Sequence: Synthetic peptide
  Seed: GMDPRMCSLMQGSTL
GMDYRMLSPMQTSTL

SEQ ID NO: 76011 - protein, 15 aa, Artificial Sequence
  Description of Artificial Sequence: Synthetic peptide
  Seed: GMDPRMCSLMQGSTL
GMDYRMLSPMQVSTL

SEQ ID NO: 76012 - protein, 15 aa, Artificial Sequence
  Description of Artificial Sequence: Synthetic peptide
  Seed: GMDPRMCSLMQGSTL
GMDYRMLSPMQWSTL

SEQ ID NO: 76013 - protein, 15 aa, Artificial Sequence
  Description of Artificial Sequence: Synthetic peptide
  Seed: GMDPRMCSLMQGSTL
GMDYRMLSPMQYSTL

SEQ ID NO: 76014 - protein, 15 aa, Artificial Sequence
  Description of Artificial Sequence: Synthetic peptide
  Seed: GMDPRMCSLMQGSTL
GMDYRMLSQMQASTL

SEQ ID NO: 76015 - protein, 15 aa, Artificial Sequence
  Description of Artificial Sequence: Synthetic peptide
  Seed: GMDPRMCSLMQGSTL
GMDYRMLSQMQISTL

SEQ ID NO: 76016 - protein, 15 aa, Artificial Sequence
  Description of Artificial Sequence: Synthetic peptide
  Seed: GMDPRMCSLMQGSTL
GMDYRMLSQMQLSTL

SEQ ID NO: 76017 - protein, 15 aa, Artificial Sequence
  Description of Artificial Sequence: Synthetic peptide
  Seed: GMDPRMCSLMQGSTL
GMDYRMLSQMQMSTL

SEQ ID NO: 76018 - protein, 15 aa, Artificial Sequence
  Description of Artificial Sequence: Synthetic peptide
  Seed: GMDPRMCSLMQGSTL
GMDYRMLSQMQNSTL

SEQ ID NO: 76019 - protein, 15 aa, Artificial Sequence
  Description of Artificial Sequence: Synthetic peptide
  Seed: GMDPRMCSLMQGSTL
GMDYRMLSQMQSSTL

SEQ ID NO: 76020 - protein, 15 aa, Artificial Sequence
  Description of Artificial Sequence: Synthetic peptide
  Seed: GMDPRMCSLMQGSTL
GMDYRMLSQMQTSTL

SEQ ID NO: 76021 - protein, 15 aa, Artificial Sequence
  Description of Artificial Sequence: Synthetic peptide
  Seed: GMDPRMCSLMQGSTL
GMDYRMLSQMQVSTL

SEQ ID NO: 76022 - protein, 15 aa, Artificial Sequence
  Description of Artificial Sequence: Synthetic peptide
  Seed: GMDPRMCSLMQGSTL
GMDYRMLSSMQASTL

SEQ ID NO: 76023 - protein, 15 aa, Artificial Sequence
  Description of Artificial Sequence: Synthetic peptide
  Seed: GMDPRMCSLMQGSTL
GMDYRMLSSMQCSTL

SEQ ID NO: 76024 - protein, 15 aa, Artificial Sequence
  Description of Artificial Sequence: Synthetic peptide
  Seed: GMDPRMCSLMQGSTL
GMDYRMLSSMQDSTL

SEQ ID NO: 76025 - protein, 15 aa, Artificial Sequence
  Description of Artificial Sequence: Synthetic peptide
  Seed: GMDPRMCSLMQGSTL
GMDYRMLSSMQESTL

SEQ ID NO: 76026 - protein, 15 aa, Artificial Sequence
  Description of Artificial Sequence: Synthetic peptide
  Seed: GMDPRMCSLMQGSTL
GMDYRMLSSMQFSTL

SEQ ID NO: 76027 - protein, 15 aa, Artificial Sequence
  Description of Artificial Sequence: Synthetic peptide
  Seed: GMDPRMCSLMQGSTL
GMDYRMLSSMQGSTL

SEQ ID NO: 76028 - protein, 15 aa, Artificial Sequence
  Description of Artificial Sequence: Synthetic peptide
  Seed: GMDPRMCSLMQGSTL
GMDYRMLSSMQHSTL

SEQ ID NO: 76029 - protein, 15 aa, Artificial Sequence
  Description of Artificial Sequence: Synthetic peptide
  Seed: GMDPRMCSLMQGSTL
GMDYRMLSSMQISTL

SEQ ID NO: 76030 - protein, 15 aa, Artificial Sequence
  Description of Artificial Sequence: Synthetic peptide
  Seed: GMDPRMCSLMQGSTL
GMDYRMLSSMQKSTL

SEQ ID NO: 76031 - protein, 15 aa, Artificial Sequence
  Description of Artificial Sequence: Synthetic peptide
  Seed: GMDPRMCSLMQGSTL
GMDYRMLSSMQLSTL

SEQ ID NO: 76032 - protein, 15 aa, Artificial Sequence
  Description of Artificial Sequence: Synthetic peptide
  Seed: GMDPRMCSLMQGSTL
GMDYRMLSSMQMSTL

SEQ ID NO: 76033 - protein, 15 aa, Artificial Sequence
  Description of Artificial Sequence: Synthetic peptide
  Seed: GMDPRMCSLMQGSTL
GMDYRMLSSMQNSTL

SEQ ID NO: 76034 - protein, 15 aa, Artificial Sequence
  Description of Artificial Sequence: Synthetic peptide
  Seed: GMDPRMCSLMQGSTL
GMDYRMLSSMQPSTL

SEQ ID NO: 76035 - protein, 15 aa, Artificial Sequence
  Description of Artificial Sequence: Synthetic peptide
  Seed: GMDPRMCSLMQGSTL
GMDYRMLSSMQQSTL

SEQ ID NO: 76036 - protein, 15 aa, Artificial Sequence
  Description of Artificial Sequence: Synthetic peptide
  Seed: GMDPRMCSLMQGSTL
GMDYRMLSSMQRSTL

SEQ ID NO: 76037 - protein, 15 aa, Artificial Sequence
  Description of Artificial Sequence: Synthetic peptide
  Seed: GMDPRMCSLMQGSTL
GMDYRMLSSMQSSTL

SEQ ID NO: 76038 - protein, 15 aa, Artificial Sequence
  Description of Artificial Sequence: Synthetic peptide
  Seed: GMDPRMCSLMQGSTL
GMDYRMLSSMQTSTL

SEQ ID NO: 76039 - protein, 15 aa, Artificial Sequence
  Description of Artificial Sequence: Synthetic peptide
  Seed: GMDPRMCSLMQGSTL
GMDYRMLSSMQVSTL

SEQ ID NO: 76040 - protein, 15 aa, Artificial Sequence
  Description of Artificial Sequence: Synthetic peptide
  Seed: GMDPRMCSLMQGSTL
GMDYRMLSSMQWSTL

SEQ ID NO: 76041 - protein, 15 aa, Artificial Sequence
  Description of Artificial Sequence: Synthetic peptide
  Seed: GMDPRMCSLMQGSTL
GMDYRMLSSMQYSTL

SEQ ID NO: 76042 - protein, 15 aa, Artificial Sequence
  Description of Artificial Sequence: Synthetic peptide
  Seed: GMDPRMCSLMQGSTL
GMDYRMLSTMQASTL

SEQ ID NO: 76043 - protein, 15 aa, Artificial Sequence
  Description of Artificial Sequence: Synthetic peptide
  Seed: GMDPRMCSLMQGSTL
GMDYRMLSTMQCSTL

SEQ ID NO: 76044 - protein, 15 aa, Artificial Sequence
  Description of Artificial Sequence: Synthetic peptide
  Seed: GMDPRMCSLMQGSTL
GMDYRMLSTMQDSTL

SEQ ID NO: 76045 - protein, 15 aa, Artificial Sequence
  Description of Artificial Sequence: Synthetic peptide
  Seed: GMDPRMCSLMQGSTL
GMDYRMLSTMQESTL

SEQ ID NO: 76046 - protein, 15 aa, Artificial Sequence
  Description of Artificial Sequence: Synthetic peptide
  Seed: GMDPRMCSLMQGSTL
GMDYRMLSTMQFSTL

SEQ ID NO: 76047 - protein, 15 aa, Artificial Sequence
  Description of Artificial Sequence: Synthetic peptide
  Seed: GMDPRMCSLMQGSTL
GMDYRMLSTMQGSTL

SEQ ID NO: 76048 - protein, 15 aa, Artificial Sequence
  Description of Artificial Sequence: Synthetic peptide
  Seed: GMDPRMCSLMQGSTL
GMDYRMLSTMQHSTL

SEQ ID NO: 76049 - protein, 15 aa, Artificial Sequence
  Description of Artificial Sequence: Synthetic peptide
  Seed: GMDPRMCSLMQGSTL
GMDYRMLSTMQISTL

SEQ ID NO: 76050 - protein, 15 aa, Artificial Sequence
  Description of Artificial Sequence: Synthetic peptide
  Seed: GMDPRMCSLMQGSTL
GMDYRMLSTMQKSTL

SEQ ID NO: 76051 - protein, 15 aa, Artificial Sequence
  Description of Artificial Sequence: Synthetic peptide
  Seed: GMDPRMCSLMQGSTL
GMDYRMLSTMQLSTL

SEQ ID NO: 76052 - protein, 15 aa, Artificial Sequence
  Description of Artificial Sequence: Synthetic peptide
  Seed: GMDPRMCSLMQGSTL
GMDYRMLSTMQMSTL

SEQ ID NO: 76053 - protein, 15 aa, Artificial Sequence
  Description of Artificial Sequence: Synthetic peptide
  Seed: GMDPRMCSLMQGSTL
GMDYRMLSTMQNSTL

SEQ ID NO: 76054 - protein, 15 aa, Artificial Sequence
  Description of Artificial Sequence: Synthetic peptide
  Seed: GMDPRMCSLMQGSTL
GMDYRMLSTMQPSTL

SEQ ID NO: 76055 - protein, 15 aa, Artificial Sequence
  Description of Artificial Sequence: Synthetic peptide
  Seed: GMDPRMCSLMQGSTL
GMDYRMLSTMQQSTL

SEQ ID NO: 76056 - protein, 15 aa, Artificial Sequence
  Description of Artificial Sequence: Synthetic peptide
  Seed: GMDPRMCSLMQGSTL
GMDYRMLSTMQRSTL

SEQ ID NO: 76057 - protein, 15 aa, Artificial Sequence
  Description of Artificial Sequence: Synthetic peptide
  Seed: GMDPRMCSLMQGSTL
GMDYRMLSTMQSSTL

SEQ ID NO: 76058 - protein, 15 aa, Artificial Sequence
  Description of Artificial Sequence: Synthetic peptide
  Seed: GMDPRMCSLMQGSTL
GMDYRMLSTMQTSTL

SEQ ID NO: 76059 - protein, 15 aa, Artificial Sequence
  Description of Artificial Sequence: Synthetic peptide
  Seed: GMDPRMCSLMQGSTL
GMDYRMLSTMQVSTL

SEQ ID NO: 76060 - protein, 15 aa, Artificial Sequence
  Description of Artificial Sequence: Synthetic peptide
  Seed: GMDPRMCSLMQGSTL
GMDYRMLSTMQYSTL

SEQ ID NO: 76061 - protein, 15 aa, Artificial Sequence
  Description of Artificial Sequence: Synthetic peptide
  Seed: GMDPRMCSLMQGSTL
GMDYRMLSVMQASTL

SEQ ID NO: 76062 - protein, 15 aa, Artificial Sequence
  Description of Artificial Sequence: Synthetic peptide
  Seed: GMDPRMCSLMQGSTL
GMDYRMLSVMQCSTL

SEQ ID NO: 76063 - protein, 15 aa, Artificial Sequence
  Description of Artificial Sequence: Synthetic peptide
  Seed: GMDPRMCSLMQGSTL
GMDYRMLSVMQDSTL

SEQ ID NO: 76064 - protein, 15 aa, Artificial Sequence
  Description of Artificial Sequence: Synthetic peptide
  Seed: GMDPRMCSLMQGSTL
GMDYRMLSVMQESTL

SEQ ID NO: 76065 - protein, 15 aa, Artificial Sequence
  Description of Artificial Sequence: Synthetic peptide
  Seed: GMDPRMCSLMQGSTL
GMDYRMLSVMQFSTL

SEQ ID NO: 76066 - protein, 15 aa, Artificial Sequence
  Description of Artificial Sequence: Synthetic peptide
  Seed: GMDPRMCSLMQGSTL
GMDYRMLSVMQGSTL

SEQ ID NO: 76067 - protein, 15 aa, Artificial Sequence
  Description of Artificial Sequence: Synthetic peptide
  Seed: GMDPRMCSLMQGSTL
GMDYRMLSVMQHSTL

SEQ ID NO: 76068 - protein, 15 aa, Artificial Sequence
  Description of Artificial Sequence: Synthetic peptide
  Seed: GMDPRMCSLMQGSTL
GMDYRMLSVMQISTL

SEQ ID NO: 76069 - protein, 15 aa, Artificial Sequence
  Description of Artificial Sequence: Synthetic peptide
  Seed: GMDPRMCSLMQGSTL
GMDYRMLSVMQKSTL

SEQ ID NO: 76070 - protein, 15 aa, Artificial Sequence
  Description of Artificial Sequence: Synthetic peptide
  Seed: GMDPRMCSLMQGSTL
GMDYRMLSVMQLSTL

SEQ ID NO: 76071 - protein, 15 aa, Artificial Sequence
  Description of Artificial Sequence: Synthetic peptide
  Seed: GMDPRMCSLMQGSTL
GMDYRMLSVMQMSTL

SEQ ID NO: 76072 - protein, 15 aa, Artificial Sequence
  Description of Artificial Sequence: Synthetic peptide
  Seed: GMDPRMCSLMQGSTL
GMDYRMLSVMQNSTL

SEQ ID NO: 76073 - protein, 15 aa, Artificial Sequence
  Description of Artificial Sequence: Synthetic peptide
  Seed: GMDPRMCSLMQGSTL
GMDYRMLSVMQPSTL

SEQ ID NO: 76074 - protein, 15 aa, Artificial Sequence
  Description of Artificial Sequence: Synthetic peptide
  Seed: GMDPRMCSLMQGSTL
GMDYRMLSVMQQSTL

SEQ ID NO: 76075 - protein, 15 aa, Artificial Sequence
  Description of Artificial Sequence: Synthetic peptide
  Seed: GMDPRMCSLMQGSTL
GMDYRMLSVMQRSTL

SEQ ID NO: 76076 - protein, 15 aa, Artificial Sequence
  Description of Artificial Sequence: Synthetic peptide
  Seed: GMDPRMCSLMQGSTL
GMDYRMLSVMQSSTL

SEQ ID NO: 76077 - protein, 15 aa, Artificial Sequence
  Description of Artificial Sequence: Synthetic peptide
  Seed: GMDPRMCSLMQGSTL
GMDYRMLSVMQTSTL

SEQ ID NO: 76078 - protein, 15 aa, Artificial Sequence
  Description of Artificial Sequence: Synthetic peptide
  Seed: GMDPRMCSLMQGSTL
GMDYRMLSVMQVSTL

SEQ ID NO: 76079 - protein, 15 aa, Artificial Sequence
  Description of Artificial Sequence: Synthetic peptide
  Seed: GMDPRMCSLMQGSTL
GMDYRMLSVMQYSTL

SEQ ID NO: 76080 - protein, 15 aa, Artificial Sequence
  Description of Artificial Sequence: Synthetic peptide
  Seed: GMDPRMCSLMQGSTL
GMDYRMLSWMQASTL

SEQ ID NO: 76081 - protein, 15 aa, Artificial Sequence
  Description of Artificial Sequence: Synthetic peptide
  Seed: GMDPRMCSLMQGSTL
GMDYRMLSWMQNSTL

SEQ ID NO: 76082 - protein, 15 aa, Artificial Sequence
  Description of Artificial Sequence: Synthetic peptide
  Seed: GMDPRMCSLMQGSTL
GMDYRMLSWMQSSTL

SEQ ID NO: 76083 - protein, 15 aa, Artificial Sequence
  Description of Artificial Sequence: Synthetic peptide
  Seed: GMDPRMCSLMQGSTL
GMDYRMLSWMQTSTL

SEQ ID NO: 76084 - protein, 15 aa, Artificial Sequence
  Description of Artificial Sequence: Synthetic peptide
  Seed: GMDPRMCSLMQGSTL
GMDYRMLSWMQVSTL

SEQ ID NO: 76085 - protein, 15 aa, Artificial Sequence
  Description of Artificial Sequence: Synthetic peptide
  Seed: GMDPRMCSLMQGSTL
GMDYRMLSYMQASTL

SEQ ID NO: 76086 - protein, 15 aa, Artificial Sequence
  Description of Artificial Sequence: Synthetic peptide
  Seed: GMDPRMCSLMQGSTL
GMDYRMLSYMQNSTL

SEQ ID NO: 76087 - protein, 15 aa, Artificial Sequence
  Description of Artificial Sequence: Synthetic peptide
  Seed: GMDPRMCSLMQGSTL
GMDYRMLSYMQSSTL

SEQ ID NO: 76088 - protein, 15 aa, Artificial Sequence
  Description of Artificial Sequence: Synthetic peptide
  Seed: GMDPRMCSLMQGSTL
GMDYRMLSYMQTSTL

SEQ ID NO: 76089 - protein, 15 aa, Artificial Sequence
  Description of Artificial Sequence: Synthetic peptide
  Seed: GMDPRMCSLMQGSTL
GMDYRMMSAMQASTL

SEQ ID NO: 76090 - protein, 15 aa, Artificial Sequence
  Description of Artificial Sequence: Synthetic peptide
  Seed: GMDPRMCSLMQGSTL
GMDYRMMSAMQCSTL

SEQ ID NO: 76091 - protein, 15 aa, Artificial Sequence
  Description of Artificial Sequence: Synthetic peptide
  Seed: GMDPRMCSLMQGSTL
GMDYRMMSAMQDSTL

SEQ ID NO: 76092 - protein, 15 aa, Artificial Sequence
  Description of Artificial Sequence: Synthetic peptide
  Seed: GMDPRMCSLMQGSTL
GMDYRMMSAMQESTL

SEQ ID NO: 76093 - protein, 15 aa, Artificial Sequence
  Description of Artificial Sequence: Synthetic peptide
  Seed: GMDPRMCSLMQGSTL
GMDYRMMSAMQFSTL

SEQ ID NO: 76094 - protein, 15 aa, Artificial Sequence
  Description of Artificial Sequence: Synthetic peptide
  Seed: GMDPRMCSLMQGSTL
GMDYRMMSAMQGSTL

SEQ ID NO: 76095 - protein, 15 aa, Artificial Sequence
  Description of Artificial Sequence: Synthetic peptide
  Seed: GMDPRMCSLMQGSTL
GMDYRMMSAMQHSTL

SEQ ID NO: 76096 - protein, 15 aa, Artificial Sequence
  Description of Artificial Sequence: Synthetic peptide
  Seed: GMDPRMCSLMQGSTL
GMDYRMMSAMQISTL

SEQ ID NO: 76097 - protein, 15 aa, Artificial Sequence
  Description of Artificial Sequence: Synthetic peptide
  Seed: GMDPRMCSLMQGSTL
GMDYRMMSAMQKSTL

SEQ ID NO: 76098 - protein, 15 aa, Artificial Sequence
  Description of Artificial Sequence: Synthetic peptide
  Seed: GMDPRMCSLMQGSTL
GMDYRMMSAMQLSTL

SEQ ID NO: 76099 - protein, 15 aa, Artificial Sequence
  Description of Artificial Sequence: Synthetic peptide
  Seed: GMDPRMCSLMQGSTL
GMDYRMMSAMQMSTL

SEQ ID NO: 76100 - protein, 15 aa, Artificial Sequence
  Description of Artificial Sequence: Synthetic peptide
  Seed: GMDPRMCSLMQGSTL
GMDYRMMSAMQNSTL

SEQ ID NO: 76101 - protein, 15 aa, Artificial Sequence
  Description of Artificial Sequence: Synthetic peptide
  Seed: GMDPRMCSLMQGSTL
GMDYRMMSAMQPSTL

SEQ ID NO: 76102 - protein, 15 aa, Artificial Sequence
  Description of Artificial Sequence: Synthetic peptide
  Seed: GMDPRMCSLMQGSTL
GMDYRMMSAMQQSTL

SEQ ID NO: 76103 - protein, 15 aa, Artificial Sequence
  Description of Artificial Sequence: Synthetic peptide
  Seed: GMDPRMCSLMQGSTL
GMDYRMMSAMQRSTL

SEQ ID NO: 76104 - protein, 15 aa, Artificial Sequence
  Description of Artificial Sequence: Synthetic peptide
  Seed: GMDPRMCSLMQGSTL
GMDYRMMSAMQSSTL

SEQ ID NO: 76105 - protein, 15 aa, Artificial Sequence
  Description of Artificial Sequence: Synthetic peptide
  Seed: GMDPRMCSLMQGSTL
GMDYRMMSAMQTSTL

SEQ ID NO: 76106 - protein, 15 aa, Artificial Sequence
  Description of Artificial Sequence: Synthetic peptide
  Seed: GMDPRMCSLMQGSTL
GMDYRMMSAMQVSTL

SEQ ID NO: 76107 - protein, 15 aa, Artificial Sequence
  Description of Artificial Sequence: Synthetic peptide
  Seed: GMDPRMCSLMQGSTL
GMDYRMMSAMQWSTL

SEQ ID NO: 76108 - protein, 15 aa, Artificial Sequence
  Description of Artificial Sequence: Synthetic peptide
  Seed: GMDPRMCSLMQGSTL
GMDYRMMSAMQYSTL

SEQ ID NO: 76109 - protein, 15 aa, Artificial Sequence
  Description of Artificial Sequence: Synthetic peptide
  Seed: GMDPRMCSLMQGSTL
GMDYRMMSCMQASTL

SEQ ID NO: 76110 - protein, 15 aa, Artificial Sequence
  Description of Artificial Sequence: Synthetic peptide
  Seed: GMDPRMCSLMQGSTL
GMDYRMMSCMQNSTL

SEQ ID NO: 76111 - protein, 15 aa, Artificial Sequence
  Description of Artificial Sequence: Synthetic peptide
  Seed: GMDPRMCSLMQGSTL
GMDYRMMSCMQSSTL

SEQ ID NO: 76112 - protein, 15 aa, Artificial Sequence
  Description of Artificial Sequence: Synthetic peptide
  Seed: GMDPRMCSLMQGSTL
GMDYRMMSDMQASTL

SEQ ID NO: 76113 - protein, 15 aa, Artificial Sequence
  Description of Artificial Sequence: Synthetic peptide
  Seed: GMDPRMCSLMQGSTL
GMDYRMMSEMQASTL

SEQ ID NO: 76114 - protein, 15 aa, Artificial Sequence
  Description of Artificial Sequence: Synthetic peptide
  Seed: GMDPRMCSLMQGSTL
GMDYRMMSEMQLSTL

SEQ ID NO: 76115 - protein, 15 aa, Artificial Sequence
  Description of Artificial Sequence: Synthetic peptide
  Seed: GMDPRMCSLMQGSTL
GMDYRMMSEMQNSTL

SEQ ID NO: 76116 - protein, 15 aa, Artificial Sequence
  Description of Artificial Sequence: Synthetic peptide
  Seed: GMDPRMCSLMQGSTL
GMDYRMMSEMQSSTL

SEQ ID NO: 76117 - protein, 15 aa, Artificial Sequence
  Description of Artificial Sequence: Synthetic peptide
  Seed: GMDPRMCSLMQGSTL
GMDYRMMSEMQTSTL

SEQ ID NO: 76118 - protein, 15 aa, Artificial Sequence
  Description of Artificial Sequence: Synthetic peptide
  Seed: GMDPRMCSLMQGSTL
GMDYRMMSFMQASTL

SEQ ID NO: 76119 - protein, 15 aa, Artificial Sequence
  Description of Artificial Sequence: Synthetic peptide
  Seed: GMDPRMCSLMQGSTL
GMDYRMMSFMQHSTL

SEQ ID NO: 76120 - protein, 15 aa, Artificial Sequence
  Description of Artificial Sequence: Synthetic peptide
  Seed: GMDPRMCSLMQGSTL
GMDYRMMSFMQLSTL

SEQ ID NO: 76121 - protein, 15 aa, Artificial Sequence
  Description of Artificial Sequence: Synthetic peptide
  Seed: GMDPRMCSLMQGSTL
GMDYRMMSFMQNSTL

SEQ ID NO: 76122 - protein, 15 aa, Artificial Sequence
  Description of Artificial Sequence: Synthetic peptide
  Seed: GMDPRMCSLMQGSTL
GMDYRMMSFMQSSTL

SEQ ID NO: 76123 - protein, 15 aa, Artificial Sequence
  Description of Artificial Sequence: Synthetic peptide
  Seed: GMDPRMCSLMQGSTL
GMDYRMMSFMQTSTL

SEQ ID NO: 76124 - protein, 15 aa, Artificial Sequence
  Description of Artificial Sequence: Synthetic peptide
  Seed: GMDPRMCSLMQGSTL
GMDYRMMSFMQVSTL

SEQ ID NO: 76125 - protein, 15 aa, Artificial Sequence
  Description of Artificial Sequence: Synthetic peptide
  Seed: GMDPRMCSLMQGSTL
GMDYRMMSGMQASTL

SEQ ID NO: 76126 - protein, 15 aa, Artificial Sequence
  Description of Artificial Sequence: Synthetic peptide
  Seed: GMDPRMCSLMQGSTL
GMDYRMMSGMQCSTL

SEQ ID NO: 76127 - protein, 15 aa, Artificial Sequence
  Description of Artificial Sequence: Synthetic peptide
  Seed: GMDPRMCSLMQGSTL
GMDYRMMSGMQDSTL

SEQ ID NO: 76128 - protein, 15 aa, Artificial Sequence
  Description of Artificial Sequence: Synthetic peptide
  Seed: GMDPRMCSLMQGSTL
GMDYRMMSGMQESTL

SEQ ID NO: 76129 - protein, 15 aa, Artificial Sequence
  Description of Artificial Sequence: Synthetic peptide
  Seed: GMDPRMCSLMQGSTL
GMDYRMMSGMQFSTL

SEQ ID NO: 76130 - protein, 15 aa, Artificial Sequence
  Description of Artificial Sequence: Synthetic peptide
  Seed: GMDPRMCSLMQGSTL
GMDYRMMSGMQGSTL

SEQ ID NO: 76131 - protein, 15 aa, Artificial Sequence
  Description of Artificial Sequence: Synthetic peptide
  Seed: GMDPRMCSLMQGSTL
GMDYRMMSGMQHSTL

SEQ ID NO: 76132 - protein, 15 aa, Artificial Sequence
  Description of Artificial Sequence: Synthetic peptide
  Seed: GMDPRMCSLMQGSTL
GMDYRMMSGMQISTL

SEQ ID NO: 76133 - protein, 15 aa, Artificial Sequence
  Description of Artificial Sequence: Synthetic peptide
  Seed: GMDPRMCSLMQGSTL
GMDYRMMSGMQLSTL

SEQ ID NO: 76134 - protein, 15 aa, Artificial Sequence
  Description of Artificial Sequence: Synthetic peptide
  Seed: GMDPRMCSLMQGSTL
GMDYRMMSGMQMSTL

SEQ ID NO: 76135 - protein, 15 aa, Artificial Sequence
  Description of Artificial Sequence: Synthetic peptide
  Seed: GMDPRMCSLMQGSTL
GMDYRMMSGMQNSTL

SEQ ID NO: 76136 - protein, 15 aa, Artificial Sequence
  Description of Artificial Sequence: Synthetic peptide
  Seed: GMDPRMCSLMQGSTL
GMDYRMMSGMQPSTL

SEQ ID NO: 76137 - protein, 15 aa, Artificial Sequence
  Description of Artificial Sequence: Synthetic peptide
  Seed: GMDPRMCSLMQGSTL
GMDYRMMSGMQQSTL

SEQ ID NO: 76138 - protein, 15 aa, Artificial Sequence
  Description of Artificial Sequence: Synthetic peptide
  Seed: GMDPRMCSLMQGSTL
GMDYRMMSGMQSSTL

SEQ ID NO: 76139 - protein, 15 aa, Artificial Sequence
  Description of Artificial Sequence: Synthetic peptide
  Seed: GMDPRMCSLMQGSTL
GMDYRMMSGMQTSTL

SEQ ID NO: 76140 - protein, 15 aa, Artificial Sequence
  Description of Artificial Sequence: Synthetic peptide
  Seed: GMDPRMCSLMQGSTL
GMDYRMMSGMQVSTL

SEQ ID NO: 76141 - protein, 15 aa, Artificial Sequence
  Description of Artificial Sequence: Synthetic peptide
  Seed: GMDPRMCSLMQGSTL
GMDYRMMSGMQYSTL

SEQ ID NO: 76142 - protein, 15 aa, Artificial Sequence
  Description of Artificial Sequence: Synthetic peptide
  Seed: GMDPRMCSLMQGSTL
GMDYRMMSHMQASTL

SEQ ID NO: 76143 - protein, 15 aa, Artificial Sequence
  Description of Artificial Sequence: Synthetic peptide
  Seed: GMDPRMCSLMQGSTL
GMDYRMMSHMQISTL

SEQ ID NO: 76144 - protein, 15 aa, Artificial Sequence
  Description of Artificial Sequence: Synthetic peptide
  Seed: GMDPRMCSLMQGSTL
GMDYRMMSHMQLSTL

SEQ ID NO: 76145 - protein, 15 aa, Artificial Sequence
  Description of Artificial Sequence: Synthetic peptide
  Seed: GMDPRMCSLMQGSTL
GMDYRMMSHMQMSTL

SEQ ID NO: 76146 - protein, 15 aa, Artificial Sequence
  Description of Artificial Sequence: Synthetic peptide
  Seed: GMDPRMCSLMQGSTL
GMDYRMMSHMQNSTL

SEQ ID NO: 76147 - protein, 15 aa, Artificial Sequence
  Description of Artificial Sequence: Synthetic peptide
  Seed: GMDPRMCSLMQGSTL
GMDYRMMSHMQSSTL

SEQ ID NO: 76148 - protein, 15 aa, Artificial Sequence
  Description of Artificial Sequence: Synthetic peptide
  Seed: GMDPRMCSLMQGSTL
GMDYRMMSHMQTSTL

SEQ ID NO: 76149 - protein, 15 aa, Artificial Sequence
  Description of Artificial Sequence: Synthetic peptide
  Seed: GMDPRMCSLMQGSTL
GMDYRMMSHMQVSTL

SEQ ID NO: 76150 - protein, 15 aa, Artificial Sequence
  Description of Artificial Sequence: Synthetic peptide
  Seed: GMDPRMCSLMQGSTL
GMDYRMMSIMQASTL

SEQ ID NO: 76151 - protein, 15 aa, Artificial Sequence
  Description of Artificial Sequence: Synthetic peptide
  Seed: GMDPRMCSLMQGSTL
GMDYRMMSIMQCSTL

SEQ ID NO: 76152 - protein, 15 aa, Artificial Sequence
  Description of Artificial Sequence: Synthetic peptide
  Seed: GMDPRMCSLMQGSTL
GMDYRMMSIMQDSTL

SEQ ID NO: 76153 - protein, 15 aa, Artificial Sequence
  Description of Artificial Sequence: Synthetic peptide
  Seed: GMDPRMCSLMQGSTL
GMDYRMMSIMQESTL

SEQ ID NO: 76154 - protein, 15 aa, Artificial Sequence
  Description of Artificial Sequence: Synthetic peptide
  Seed: GMDPRMCSLMQGSTL
GMDYRMMSIMQFSTL

SEQ ID NO: 76155 - protein, 15 aa, Artificial Sequence
  Description of Artificial Sequence: Synthetic peptide
  Seed: GMDPRMCSLMQGSTL
GMDYRMMSIMQGSTL

SEQ ID NO: 76156 - protein, 15 aa, Artificial Sequence
  Description of Artificial Sequence: Synthetic peptide
  Seed: GMDPRMCSLMQGSTL
GMDYRMMSIMQHSTL

SEQ ID NO: 76157 - protein, 15 aa, Artificial Sequence
  Description of Artificial Sequence: Synthetic peptide
  Seed: GMDPRMCSLMQGSTL
GMDYRMMSIMQISTL

SEQ ID NO: 76158 - protein, 15 aa, Artificial Sequence
  Description of Artificial Sequence: Synthetic peptide
  Seed: GMDPRMCSLMQGSTL
GMDYRMMSIMQKSTL

SEQ ID NO: 76159 - protein, 15 aa, Artificial Sequence
  Description of Artificial Sequence: Synthetic peptide
  Seed: GMDPRMCSLMQGSTL
GMDYRMMSIMQLSTL

SEQ ID NO: 76160 - protein, 15 aa, Artificial Sequence
  Description of Artificial Sequence: Synthetic peptide
  Seed: GMDPRMCSLMQGSTL
GMDYRMMSIMQMSTL

SEQ ID NO: 76161 - protein, 15 aa, Artificial Sequence
  Description of Artificial Sequence: Synthetic peptide
  Seed: GMDPRMCSLMQGSTL
GMDYRMMSIMQNSTL

SEQ ID NO: 76162 - protein, 15 aa, Artificial Sequence
  Description of Artificial Sequence: Synthetic peptide
  Seed: GMDPRMCSLMQGSTL
GMDYRMMSIMQPSTL

SEQ ID NO: 76163 - protein, 15 aa, Artificial Sequence
  Description of Artificial Sequence: Synthetic peptide
  Seed: GMDPRMCSLMQGSTL
GMDYRMMSIMQQSTL

SEQ ID NO: 76164 - protein, 15 aa, Artificial Sequence
  Description of Artificial Sequence: Synthetic peptide
  Seed: GMDPRMCSLMQGSTL
GMDYRMMSIMQRSTL

SEQ ID NO: 76165 - protein, 15 aa, Artificial Sequence
  Description of Artificial Sequence: Synthetic peptide
  Seed: GMDPRMCSLMQGSTL
GMDYRMMSIMQSSTL

SEQ ID NO: 76166 - protein, 15 aa, Artificial Sequence
  Description of Artificial Sequence: Synthetic peptide
  Seed: GMDPRMCSLMQGSTL
GMDYRMMSIMQTSTL

SEQ ID NO: 76167 - protein, 15 aa, Artificial Sequence
  Description of Artificial Sequence: Synthetic peptide
  Seed: GMDPRMCSLMQGSTL
GMDYRMMSIMQVSTL

SEQ ID NO: 76168 - protein, 15 aa, Artificial Sequence
  Description of Artificial Sequence: Synthetic peptide
  Seed: GMDPRMCSLMQGSTL
GMDYRMMSIMQYSTL

SEQ ID NO: 76169 - protein, 15 aa, Artificial Sequence
  Description of Artificial Sequence: Synthetic peptide
  Seed: GMDPRMCSLMQGSTL
GMDYRMMSLMQASTL

SEQ ID NO: 76170 - protein, 15 aa, Artificial Sequence
  Description of Artificial Sequence: Synthetic peptide
  Seed: GMDPRMCSLMQGSTL
GMDYRMMSLMQDSTL

SEQ ID NO: 76171 - protein, 15 aa, Artificial Sequence
  Description of Artificial Sequence: Synthetic peptide
  Seed: GMDPRMCSLMQGSTL
GMDYRMMSLMQESTL

SEQ ID NO: 76172 - protein, 15 aa, Artificial Sequence
  Description of Artificial Sequence: Synthetic peptide
  Seed: GMDPRMCSLMQGSTL
GMDYRMMSLMQGSTL

SEQ ID NO: 76173 - protein, 15 aa, Artificial Sequence
  Description of Artificial Sequence: Synthetic peptide
  Seed: GMDPRMCSLMQGSTL
GMDYRMMSLMQHSTL

SEQ ID NO: 76174 - protein, 15 aa, Artificial Sequence
  Description of Artificial Sequence: Synthetic peptide
  Seed: GMDPRMCSLMQGSTL
GMDYRMMSLMQISTL

SEQ ID NO: 76175 - protein, 15 aa, Artificial Sequence
  Description of Artificial Sequence: Synthetic peptide
  Seed: GMDPRMCSLMQGSTL
GMDYRMMSLMQKSTL

SEQ ID NO: 76176 - protein, 15 aa, Artificial Sequence
  Description of Artificial Sequence: Synthetic peptide
  Seed: GMDPRMCSLMQGSTL
GMDYRMMSLMQLSTL

SEQ ID NO: 76177 - protein, 15 aa, Artificial Sequence
  Description of Artificial Sequence: Synthetic peptide
  Seed: GMDPRMCSLMQGSTL
GMDYRMMSLMQMSTL

SEQ ID NO: 76178 - protein, 15 aa, Artificial Sequence
  Description of Artificial Sequence: Synthetic peptide
  Seed: GMDPRMCSLMQGSTL
GMDYRMMSLMQNSTL

SEQ ID NO: 76179 - protein, 15 aa, Artificial Sequence
  Description of Artificial Sequence: Synthetic peptide
  Seed: GMDPRMCSLMQGSTL
GMDYRMMSLMQPSTL

SEQ ID NO: 76180 - protein, 15 aa, Artificial Sequence
  Description of Artificial Sequence: Synthetic peptide
  Seed: GMDPRMCSLMQGSTL
GMDYRMMSLMQQSTL

SEQ ID NO: 76181 - protein, 15 aa, Artificial Sequence
  Description of Artificial Sequence: Synthetic peptide
  Seed: GMDPRMCSLMQGSTL
GMDYRMMSLMQRSTL

SEQ ID NO: 76182 - protein, 15 aa, Artificial Sequence
  Description of Artificial Sequence: Synthetic peptide
  Seed: GMDPRMCSLMQGSTL
GMDYRMMSLMQSSTL

SEQ ID NO: 76183 - protein, 15 aa, Artificial Sequence
  Description of Artificial Sequence: Synthetic peptide
  Seed: GMDPRMCSLMQGSTL
GMDYRMMSLMQTSTL

SEQ ID NO: 76184 - protein, 15 aa, Artificial Sequence
  Description of Artificial Sequence: Synthetic peptide
  Seed: GMDPRMCSLMQGSTL
GMDYRMMSLMQVSTL

SEQ ID NO: 76185 - protein, 15 aa, Artificial Sequence
  Description of Artificial Sequence: Synthetic peptide
  Seed: GMDPRMCSLMQGSTL
GMDYRMMSMMQASTL

SEQ ID NO: 76186 - protein, 15 aa, Artificial Sequence
  Description of Artificial Sequence: Synthetic peptide
  Seed: GMDPRMCSLMQGSTL
GMDYRMMSMMQDSTL

SEQ ID NO: 76187 - protein, 15 aa, Artificial Sequence
  Description of Artificial Sequence: Synthetic peptide
  Seed: GMDPRMCSLMQGSTL
GMDYRMMSMMQESTL

SEQ ID NO: 76188 - protein, 15 aa, Artificial Sequence
  Description of Artificial Sequence: Synthetic peptide
  Seed: GMDPRMCSLMQGSTL
GMDYRMMSMMQGSTL

SEQ ID NO: 76189 - protein, 15 aa, Artificial Sequence
  Description of Artificial Sequence: Synthetic peptide
  Seed: GMDPRMCSLMQGSTL
GMDYRMMSMMQHSTL

SEQ ID NO: 76190 - protein, 15 aa, Artificial Sequence
  Description of Artificial Sequence: Synthetic peptide
  Seed: GMDPRMCSLMQGSTL
GMDYRMMSMMQISTL

SEQ ID NO: 76191 - protein, 15 aa, Artificial Sequence
  Description of Artificial Sequence: Synthetic peptide
  Seed: GMDPRMCSLMQGSTL
GMDYRMMSMMQKSTL

SEQ ID NO: 76192 - protein, 15 aa, Artificial Sequence
  Description of Artificial Sequence: Synthetic peptide
  Seed: GMDPRMCSLMQGSTL
GMDYRMMSMMQLSTL

SEQ ID NO: 76193 - protein, 15 aa, Artificial Sequence
  Description of Artificial Sequence: Synthetic peptide
  Seed: GMDPRMCSLMQGSTL
GMDYRMMSMMQMSTL

SEQ ID NO: 76194 - protein, 15 aa, Artificial Sequence
  Description of Artificial Sequence: Synthetic peptide
  Seed: GMDPRMCSLMQGSTL
GMDYRMMSMMQNSTL

SEQ ID NO: 76195 - protein, 15 aa, Artificial Sequence
  Description of Artificial Sequence: Synthetic peptide
  Seed: GMDPRMCSLMQGSTL
GMDYRMMSMMQPSTL

SEQ ID NO: 76196 - protein, 15 aa, Artificial Sequence
  Description of Artificial Sequence: Synthetic peptide
  Seed: GMDPRMCSLMQGSTL
GMDYRMMSMMQQSTL

SEQ ID NO: 76197 - protein, 15 aa, Artificial Sequence
  Description of Artificial Sequence: Synthetic peptide
  Seed: GMDPRMCSLMQGSTL
GMDYRMMSMMQRSTL

SEQ ID NO: 76198 - protein, 15 aa, Artificial Sequence
  Description of Artificial Sequence: Synthetic peptide
  Seed: GMDPRMCSLMQGSTL
GMDYRMMSMMQSSTL

SEQ ID NO: 76199 - protein, 15 aa, Artificial Sequence
  Description of Artificial Sequence: Synthetic peptide
  Seed: GMDPRMCSLMQGSTL
GMDYRMMSMMQTSTL

SEQ ID NO: 76200 - protein, 15 aa, Artificial Sequence
  Description of Artificial Sequence: Synthetic peptide
  Seed: GMDPRMCSLMQGSTL
GMDYRMMSMMQVSTL

SEQ ID NO: 76201 - protein, 15 aa, Artificial Sequence
  Description of Artificial Sequence: Synthetic peptide
  Seed: GMDPRMCSLMQGSTL
GMDYRMMSNMQASTL

SEQ ID NO: 76202 - protein, 15 aa, Artificial Sequence
  Description of Artificial Sequence: Synthetic peptide
  Seed: GMDPRMCSLMQGSTL
GMDYRMMSNMQCSTL

SEQ ID NO: 76203 - protein, 15 aa, Artificial Sequence
  Description of Artificial Sequence: Synthetic peptide
  Seed: GMDPRMCSLMQGSTL
GMDYRMMSNMQDSTL

SEQ ID NO: 76204 - protein, 15 aa, Artificial Sequence
  Description of Artificial Sequence: Synthetic peptide
  Seed: GMDPRMCSLMQGSTL
GMDYRMMSNMQESTL

SEQ ID NO: 76205 - protein, 15 aa, Artificial Sequence
  Description of Artificial Sequence: Synthetic peptide
  Seed: GMDPRMCSLMQGSTL
GMDYRMMSNMQFSTL

SEQ ID NO: 76206 - protein, 15 aa, Artificial Sequence
  Description of Artificial Sequence: Synthetic peptide
  Seed: GMDPRMCSLMQGSTL
GMDYRMMSNMQGSTL

SEQ ID NO: 76207 - protein, 15 aa, Artificial Sequence
  Description of Artificial Sequence: Synthetic peptide
  Seed: GMDPRMCSLMQGSTL
GMDYRMMSNMQHSTL

SEQ ID NO: 76208 - protein, 15 aa, Artificial Sequence
  Description of Artificial Sequence: Synthetic peptide
  Seed: GMDPRMCSLMQGSTL
GMDYRMMSNMQISTL

SEQ ID NO: 76209 - protein, 15 aa, Artificial Sequence
  Description of Artificial Sequence: Synthetic peptide
  Seed: GMDPRMCSLMQGSTL
GMDYRMMSNMQLSTL

SEQ ID NO: 76210 - protein, 15 aa, Artificial Sequence
  Description of Artificial Sequence: Synthetic peptide
  Seed: GMDPRMCSLMQGSTL
GMDYRMMSNMQMSTL

SEQ ID NO: 76211 - protein, 15 aa, Artificial Sequence
  Description of Artificial Sequence: Synthetic peptide
  Seed: GMDPRMCSLMQGSTL
GMDYRMMSNMQNSTL

SEQ ID NO: 76212 - protein, 15 aa, Artificial Sequence
  Description of Artificial Sequence: Synthetic peptide
  Seed: GMDPRMCSLMQGSTL
GMDYRMMSNMQPSTL

SEQ ID NO: 76213 - protein, 15 aa, Artificial Sequence
  Description of Artificial Sequence: Synthetic peptide
  Seed: GMDPRMCSLMQGSTL
GMDYRMMSNMQQSTL

SEQ ID NO: 76214 - protein, 15 aa, Artificial Sequence
  Description of Artificial Sequence: Synthetic peptide
  Seed: GMDPRMCSLMQGSTL
GMDYRMMSNMQSSTL

SEQ ID NO: 76215 - protein, 15 aa, Artificial Sequence
  Description of Artificial Sequence: Synthetic peptide
  Seed: GMDPRMCSLMQGSTL
GMDYRMMSNMQTSTL

SEQ ID NO: 76216 - protein, 15 aa, Artificial Sequence
  Description of Artificial Sequence: Synthetic peptide
  Seed: GMDPRMCSLMQGSTL
GMDYRMMSNMQVSTL

SEQ ID NO: 76217 - protein, 15 aa, Artificial Sequence
  Description of Artificial Sequence: Synthetic peptide
  Seed: GMDPRMCSLMQGSTL
GMDYRMMSPMQASTL

SEQ ID NO: 76218 - protein, 15 aa, Artificial Sequence
  Description of Artificial Sequence: Synthetic peptide
  Seed: GMDPRMCSLMQGSTL
GMDYRMMSPMQCSTL

SEQ ID NO: 76219 - protein, 15 aa, Artificial Sequence
  Description of Artificial Sequence: Synthetic peptide
  Seed: GMDPRMCSLMQGSTL
GMDYRMMSPMQDSTL

SEQ ID NO: 76220 - protein, 15 aa, Artificial Sequence
  Description of Artificial Sequence: Synthetic peptide
  Seed: GMDPRMCSLMQGSTL
GMDYRMMSPMQESTL

SEQ ID NO: 76221 - protein, 15 aa, Artificial Sequence
  Description of Artificial Sequence: Synthetic peptide
  Seed: GMDPRMCSLMQGSTL
GMDYRMMSPMQFSTL

SEQ ID NO: 76222 - protein, 15 aa, Artificial Sequence
  Description of Artificial Sequence: Synthetic peptide
  Seed: GMDPRMCSLMQGSTL
GMDYRMMSPMQGSTL

SEQ ID NO: 76223 - protein, 15 aa, Artificial Sequence
  Description of Artificial Sequence: Synthetic peptide
  Seed: GMDPRMCSLMQGSTL
GMDYRMMSPMQHSTL

SEQ ID NO: 76224 - protein, 15 aa, Artificial Sequence
  Description of Artificial Sequence: Synthetic peptide
  Seed: GMDPRMCSLMQGSTL
GMDYRMMSPMQISTL

SEQ ID NO: 76225 - protein, 15 aa, Artificial Sequence
  Description of Artificial Sequence: Synthetic peptide
  Seed: GMDPRMCSLMQGSTL
GMDYRMMSPMQKSTL

SEQ ID NO: 76226 - protein, 15 aa, Artificial Sequence
  Description of Artificial Sequence: Synthetic peptide
  Seed: GMDPRMCSLMQGSTL
GMDYRMMSPMQLSTL

SEQ ID NO: 76227 - protein, 15 aa, Artificial Sequence
  Description of Artificial Sequence: Synthetic peptide
  Seed: GMDPRMCSLMQGSTL
GMDYRMMSPMQMSTL

SEQ ID NO: 76228 - protein, 15 aa, Artificial Sequence
  Description of Artificial Sequence: Synthetic peptide
  Seed: GMDPRMCSLMQGSTL
GMDYRMMSPMQNSTL

SEQ ID NO: 76229 - protein, 15 aa, Artificial Sequence
  Description of Artificial Sequence: Synthetic peptide
  Seed: GMDPRMCSLMQGSTL
GMDYRMMSPMQPSTL

SEQ ID NO: 76230 - protein, 15 aa, Artificial Sequence
  Description of Artificial Sequence: Synthetic peptide
  Seed: GMDPRMCSLMQGSTL
GMDYRMMSPMQQSTL

SEQ ID NO: 76231 - protein, 15 aa, Artificial Sequence
  Description of Artificial Sequence: Synthetic peptide
  Seed: GMDPRMCSLMQGSTL
GMDYRMMSPMQRSTL

SEQ ID NO: 76232 - protein, 15 aa, Artificial Sequence
  Description of Artificial Sequence: Synthetic peptide
  Seed: GMDPRMCSLMQGSTL
GMDYRMMSPMQSSTL

SEQ ID NO: 76233 - protein, 15 aa, Artificial Sequence
  Description of Artificial Sequence: Synthetic peptide
  Seed: GMDPRMCSLMQGSTL
GMDYRMMSPMQTSTL

SEQ ID NO: 76234 - protein, 15 aa, Artificial Sequence
  Description of Artificial Sequence: Synthetic peptide
  Seed: GMDPRMCSLMQGSTL
GMDYRMMSPMQVSTL

SEQ ID NO: 76235 - protein, 15 aa, Artificial Sequence
  Description of Artificial Sequence: Synthetic peptide
  Seed: GMDPRMCSLMQGSTL
GMDYRMMSPMQWSTL

SEQ ID NO: 76236 - protein, 15 aa, Artificial Sequence
  Description of Artificial Sequence: Synthetic peptide
  Seed: GMDPRMCSLMQGSTL
GMDYRMMSPMQYSTL

SEQ ID NO: 76237 - protein, 15 aa, Artificial Sequence
  Description of Artificial Sequence: Synthetic peptide
  Seed: GMDPRMCSLMQGSTL
GMDYRMMSQMQASTL

SEQ ID NO: 76238 - protein, 15 aa, Artificial Sequence
  Description of Artificial Sequence: Synthetic peptide
  Seed: GMDPRMCSLMQGSTL
GMDYRMMSQMQISTL

SEQ ID NO: 76239 - protein, 15 aa, Artificial Sequence
  Description of Artificial Sequence: Synthetic peptide
  Seed: GMDPRMCSLMQGSTL
GMDYRMMSQMQLSTL

SEQ ID NO: 76240 - protein, 15 aa, Artificial Sequence
  Description of Artificial Sequence: Synthetic peptide
  Seed: GMDPRMCSLMQGSTL
GMDYRMMSQMQMSTL

SEQ ID NO: 76241 - protein, 15 aa, Artificial Sequence
  Description of Artificial Sequence: Synthetic peptide
  Seed: GMDPRMCSLMQGSTL
GMDYRMMSQMQNSTL

SEQ ID NO: 76242 - protein, 15 aa, Artificial Sequence
  Description of Artificial Sequence: Synthetic peptide
  Seed: GMDPRMCSLMQGSTL
GMDYRMMSQMQSSTL

SEQ ID NO: 76243 - protein, 15 aa, Artificial Sequence
  Description of Artificial Sequence: Synthetic peptide
  Seed: GMDPRMCSLMQGSTL
GMDYRMMSQMQTSTL

SEQ ID NO: 76244 - protein, 15 aa, Artificial Sequence
  Description of Artificial Sequence: Synthetic peptide
  Seed: GMDPRMCSLMQGSTL
GMDYRMMSQMQVSTL

SEQ ID NO: 76245 - protein, 15 aa, Artificial Sequence
  Description of Artificial Sequence: Synthetic peptide
  Seed: GMDPRMCSLMQGSTL
GMDYRMMSSMQASTL

SEQ ID NO: 76246 - protein, 15 aa, Artificial Sequence
  Description of Artificial Sequence: Synthetic peptide
  Seed: GMDPRMCSLMQGSTL
GMDYRMMSSMQCSTL

SEQ ID NO: 76247 - protein, 15 aa, Artificial Sequence
  Description of Artificial Sequence: Synthetic peptide
  Seed: GMDPRMCSLMQGSTL
GMDYRMMSSMQDSTL

SEQ ID NO: 76248 - protein, 15 aa, Artificial Sequence
  Description of Artificial Sequence: Synthetic peptide
  Seed: GMDPRMCSLMQGSTL
GMDYRMMSSMQESTL

SEQ ID NO: 76249 - protein, 15 aa, Artificial Sequence
  Description of Artificial Sequence: Synthetic peptide
  Seed: GMDPRMCSLMQGSTL
GMDYRMMSSMQFSTL

SEQ ID NO: 76250 - protein, 15 aa, Artificial Sequence
  Description of Artificial Sequence: Synthetic peptide
  Seed: GMDPRMCSLMQGSTL
GMDYRMMSSMQGSTL

SEQ ID NO: 76251 - protein, 15 aa, Artificial Sequence
  Description of Artificial Sequence: Synthetic peptide
  Seed: GMDPRMCSLMQGSTL
GMDYRMMSSMQHSTL

SEQ ID NO: 76252 - protein, 15 aa, Artificial Sequence
  Description of Artificial Sequence: Synthetic peptide
  Seed: GMDPRMCSLMQGSTL
GMDYRMMSSMQISTL

SEQ ID NO: 76253 - protein, 15 aa, Artificial Sequence
  Description of Artificial Sequence: Synthetic peptide
  Seed: GMDPRMCSLMQGSTL
GMDYRMMSSMQKSTL

SEQ ID NO: 76254 - protein, 15 aa, Artificial Sequence
  Description of Artificial Sequence: Synthetic peptide
  Seed: GMDPRMCSLMQGSTL
GMDYRMMSSMQLSTL

SEQ ID NO: 76255 - protein, 15 aa, Artificial Sequence
  Description of Artificial Sequence: Synthetic peptide
  Seed: GMDPRMCSLMQGSTL
GMDYRMMSSMQMSTL

SEQ ID NO: 76256 - protein, 15 aa, Artificial Sequence
  Description of Artificial Sequence: Synthetic peptide
  Seed: GMDPRMCSLMQGSTL
GMDYRMMSSMQNSTL

SEQ ID NO: 76257 - protein, 15 aa, Artificial Sequence
  Description of Artificial Sequence: Synthetic peptide
  Seed: GMDPRMCSLMQGSTL
GMDYRMMSSMQPSTL

SEQ ID NO: 76258 - protein, 15 aa, Artificial Sequence
  Description of Artificial Sequence: Synthetic peptide
  Seed: GMDPRMCSLMQGSTL
GMDYRMMSSMQQSTL

SEQ ID NO: 76259 - protein, 15 aa, Artificial Sequence
  Description of Artificial Sequence: Synthetic peptide
  Seed: GMDPRMCSLMQGSTL
GMDYRMMSSMQRSTL

SEQ ID NO: 76260 - protein, 15 aa, Artificial Sequence
  Description of Artificial Sequence: Synthetic peptide
  Seed: GMDPRMCSLMQGSTL
GMDYRMMSSMQSSTL

SEQ ID NO: 76261 - protein, 15 aa, Artificial Sequence
  Description of Artificial Sequence: Synthetic peptide
  Seed: GMDPRMCSLMQGSTL
GMDYRMMSSMQTSTL

SEQ ID NO: 76262 - protein, 15 aa, Artificial Sequence
  Description of Artificial Sequence: Synthetic peptide
  Seed: GMDPRMCSLMQGSTL
GMDYRMMSSMQVSTL

SEQ ID NO: 76263 - protein, 15 aa, Artificial Sequence
  Description of Artificial Sequence: Synthetic peptide
  Seed: GMDPRMCSLMQGSTL
GMDYRMMSSMQWSTL

SEQ ID NO: 76264 - protein, 15 aa, Artificial Sequence
  Description of Artificial Sequence: Synthetic peptide
  Seed: GMDPRMCSLMQGSTL
GMDYRMMSSMQYSTL

SEQ ID NO: 76265 - protein, 15 aa, Artificial Sequence
  Description of Artificial Sequence: Synthetic peptide
  Seed: GMDPRMCSLMQGSTL
GMDYRMMSTMQASTL

SEQ ID NO: 76266 - protein, 15 aa, Artificial Sequence
  Description of Artificial Sequence: Synthetic peptide
  Seed: GMDPRMCSLMQGSTL
GMDYRMMSTMQCSTL

SEQ ID NO: 76267 - protein, 15 aa, Artificial Sequence
  Description of Artificial Sequence: Synthetic peptide
  Seed: GMDPRMCSLMQGSTL
GMDYRMMSTMQDSTL

SEQ ID NO: 76268 - protein, 15 aa, Artificial Sequence
  Description of Artificial Sequence: Synthetic peptide
  Seed: GMDPRMCSLMQGSTL
GMDYRMMSTMQESTL

SEQ ID NO: 76269 - protein, 15 aa, Artificial Sequence
  Description of Artificial Sequence: Synthetic peptide
  Seed: GMDPRMCSLMQGSTL
GMDYRMMSTMQFSTL

SEQ ID NO: 76270 - protein, 15 aa, Artificial Sequence
  Description of Artificial Sequence: Synthetic peptide
  Seed: GMDPRMCSLMQGSTL
GMDYRMMSTMQGSTL

SEQ ID NO: 76271 - protein, 15 aa, Artificial Sequence
  Description of Artificial Sequence: Synthetic peptide
  Seed: GMDPRMCSLMQGSTL
GMDYRMMSTMQHSTL

SEQ ID NO: 76272 - protein, 15 aa, Artificial Sequence
  Description of Artificial Sequence: Synthetic peptide
  Seed: GMDPRMCSLMQGSTL
GMDYRMMSTMQISTL

SEQ ID NO: 76273 - protein, 15 aa, Artificial Sequence
  Description of Artificial Sequence: Synthetic peptide
  Seed: GMDPRMCSLMQGSTL
GMDYRMMSTMQKSTL

SEQ ID NO: 76274 - protein, 15 aa, Artificial Sequence
  Description of Artificial Sequence: Synthetic peptide
  Seed: GMDPRMCSLMQGSTL
GMDYRMMSTMQLSTL

SEQ ID NO: 76275 - protein, 15 aa, Artificial Sequence
  Description of Artificial Sequence: Synthetic peptide
  Seed: GMDPRMCSLMQGSTL
GMDYRMMSTMQMSTL

SEQ ID NO: 76276 - protein, 15 aa, Artificial Sequence
  Description of Artificial Sequence: Synthetic peptide
  Seed: GMDPRMCSLMQGSTL
GMDYRMMSTMQNSTL

SEQ ID NO: 76277 - protein, 15 aa, Artificial Sequence
  Description of Artificial Sequence: Synthetic peptide
  Seed: GMDPRMCSLMQGSTL
GMDYRMMSTMQPSTL

SEQ ID NO: 76278 - protein, 15 aa, Artificial Sequence
  Description of Artificial Sequence: Synthetic peptide
  Seed: GMDPRMCSLMQGSTL
GMDYRMMSTMQQSTL

SEQ ID NO: 76279 - protein, 15 aa, Artificial Sequence
  Description of Artificial Sequence: Synthetic peptide
  Seed: GMDPRMCSLMQGSTL
GMDYRMMSTMQRSTL

SEQ ID NO: 76280 - protein, 15 aa, Artificial Sequence
  Description of Artificial Sequence: Synthetic peptide
  Seed: GMDPRMCSLMQGSTL
GMDYRMMSTMQSSTL

SEQ ID NO: 76281 - protein, 15 aa, Artificial Sequence
  Description of Artificial Sequence: Synthetic peptide
  Seed: GMDPRMCSLMQGSTL
GMDYRMMSTMQTSTL

SEQ ID NO: 76282 - protein, 15 aa, Artificial Sequence
  Description of Artificial Sequence: Synthetic peptide
  Seed: GMDPRMCSLMQGSTL
GMDYRMMSTMQVSTL

SEQ ID NO: 76283 - protein, 15 aa, Artificial Sequence
  Description of Artificial Sequence: Synthetic peptide
  Seed: GMDPRMCSLMQGSTL
GMDYRMMSTMQWSTL

SEQ ID NO: 76284 - protein, 15 aa, Artificial Sequence
  Description of Artificial Sequence: Synthetic peptide
  Seed: GMDPRMCSLMQGSTL
GMDYRMMSTMQYSTL

SEQ ID NO: 76285 - protein, 15 aa, Artificial Sequence
  Description of Artificial Sequence: Synthetic peptide
  Seed: GMDPRMCSLMQGSTL
GMDYRMMSVMQASTL

SEQ ID NO: 76286 - protein, 15 aa, Artificial Sequence
  Description of Artificial Sequence: Synthetic peptide
  Seed: GMDPRMCSLMQGSTL
GMDYRMMSVMQCSTL

SEQ ID NO: 76287 - protein, 15 aa, Artificial Sequence
  Description of Artificial Sequence: Synthetic peptide
  Seed: GMDPRMCSLMQGSTL
GMDYRMMSVMQDSTL

SEQ ID NO: 76288 - protein, 15 aa, Artificial Sequence
  Description of Artificial Sequence: Synthetic peptide
  Seed: GMDPRMCSLMQGSTL
GMDYRMMSVMQESTL

SEQ ID NO: 76289 - protein, 15 aa, Artificial Sequence
  Description of Artificial Sequence: Synthetic peptide
  Seed: GMDPRMCSLMQGSTL
GMDYRMMSVMQFSTL

SEQ ID NO: 76290 - protein, 15 aa, Artificial Sequence
  Description of Artificial Sequence: Synthetic peptide
  Seed: GMDPRMCSLMQGSTL
GMDYRMMSVMQGSTL

SEQ ID NO: 76291 - protein, 15 aa, Artificial Sequence
  Description of Artificial Sequence: Synthetic peptide
  Seed: GMDPRMCSLMQGSTL
GMDYRMMSVMQHSTL

SEQ ID NO: 76292 - protein, 15 aa, Artificial Sequence
  Description of Artificial Sequence: Synthetic peptide
  Seed: GMDPRMCSLMQGSTL
GMDYRMMSVMQISTL

SEQ ID NO: 76293 - protein, 15 aa, Artificial Sequence
  Description of Artificial Sequence: Synthetic peptide
  Seed: GMDPRMCSLMQGSTL
GMDYRMMSVMQKSTL

SEQ ID NO: 76294 - protein, 15 aa, Artificial Sequence
  Description of Artificial Sequence: Synthetic peptide
  Seed: GMDPRMCSLMQGSTL
GMDYRMMSVMQLSTL

SEQ ID NO: 76295 - protein, 15 aa, Artificial Sequence
  Description of Artificial Sequence: Synthetic peptide
  Seed: GMDPRMCSLMQGSTL
GMDYRMMSVMQMSTL

SEQ ID NO: 76296 - protein, 15 aa, Artificial Sequence
  Description of Artificial Sequence: Synthetic peptide
  Seed: GMDPRMCSLMQGSTL
GMDYRMMSVMQNSTL

SEQ ID NO: 76297 - protein, 15 aa, Artificial Sequence
  Description of Artificial Sequence: Synthetic peptide
  Seed: GMDPRMCSLMQGSTL
GMDYRMMSVMQPSTL

SEQ ID NO: 76298 - protein, 15 aa, Artificial Sequence
  Description of Artificial Sequence: Synthetic peptide
  Seed: GMDPRMCSLMQGSTL
GMDYRMMSVMQQSTL

SEQ ID NO: 76299 - protein, 15 aa, Artificial Sequence
  Description of Artificial Sequence: Synthetic peptide
  Seed: GMDPRMCSLMQGSTL
GMDYRMMSVMQRSTL

SEQ ID NO: 76300 - protein, 15 aa, Artificial Sequence
  Description of Artificial Sequence: Synthetic peptide
  Seed: GMDPRMCSLMQGSTL
GMDYRMMSVMQSSTL

SEQ ID NO: 76301 - protein, 15 aa, Artificial Sequence
  Description of Artificial Sequence: Synthetic peptide
  Seed: GMDPRMCSLMQGSTL
GMDYRMMSVMQTSTL

SEQ ID NO: 76302 - protein, 15 aa, Artificial Sequence
  Description of Artificial Sequence: Synthetic peptide
  Seed: GMDPRMCSLMQGSTL
GMDYRMMSVMQVSTL

SEQ ID NO: 76303 - protein, 15 aa, Artificial Sequence
  Description of Artificial Sequence: Synthetic peptide
  Seed: GMDPRMCSLMQGSTL
GMDYRMMSVMQYSTL

SEQ ID NO: 76304 - protein, 15 aa, Artificial Sequence
  Description of Artificial Sequence: Synthetic peptide
  Seed: GMDPRMCSLMQGSTL
GMDYRMMSWMQASTL

SEQ ID NO: 76305 - protein, 15 aa, Artificial Sequence
  Description of Artificial Sequence: Synthetic peptide
  Seed: GMDPRMCSLMQGSTL
GMDYRMMSWMQNSTL

SEQ ID NO: 76306 - protein, 15 aa, Artificial Sequence
  Description of Artificial Sequence: Synthetic peptide
  Seed: GMDPRMCSLMQGSTL
GMDYRMMSWMQSSTL

SEQ ID NO: 76307 - protein, 15 aa, Artificial Sequence
  Description of Artificial Sequence: Synthetic peptide
  Seed: GMDPRMCSLMQGSTL
GMDYRMMSWMQTSTL

SEQ ID NO: 76308 - protein, 15 aa, Artificial Sequence
  Description of Artificial Sequence: Synthetic peptide
  Seed: GMDPRMCSLMQGSTL
GMDYRMMSWMQVSTL

SEQ ID NO: 76309 - protein, 15 aa, Artificial Sequence
  Description of Artificial Sequence: Synthetic peptide
  Seed: GMDPRMCSLMQGSTL
GMDYRMMSYMQASTL

SEQ ID NO: 76310 - protein, 15 aa, Artificial Sequence
  Description of Artificial Sequence: Synthetic peptide
  Seed: GMDPRMCSLMQGSTL
GMDYRMMSYMQNSTL

SEQ ID NO: 76311 - protein, 15 aa, Artificial Sequence
  Description of Artificial Sequence: Synthetic peptide
  Seed: GMDPRMCSLMQGSTL
GMDYRMMSYMQSSTL

SEQ ID NO: 76312 - protein, 15 aa, Artificial Sequence
  Description of Artificial Sequence: Synthetic peptide
  Seed: GMDPRMCSLMQGSTL
GMDYRMMSYMQTSTL

SEQ ID NO: 76313 - protein, 15 aa, Artificial Sequence
  Description of Artificial Sequence: Synthetic peptide
  Seed: GMDPRMCSLMQGSTL
GMDYRMMSYMQVSTL

SEQ ID NO: 76314 - protein, 15 aa, Artificial Sequence
  Description of Artificial Sequence: Synthetic peptide
  Seed: GMDPRMCSLMQGSTL
GMDYRMNSAMQASTL

SEQ ID NO: 76315 - protein, 15 aa, Artificial Sequence
  Description of Artificial Sequence: Synthetic peptide
  Seed: GMDPRMCSLMQGSTL
GMDYRMNSAMQNSTL

SEQ ID NO: 76316 - protein, 15 aa, Artificial Sequence
  Description of Artificial Sequence: Synthetic peptide
  Seed: GMDPRMCSLMQGSTL
GMDYRMNSAMQSSTL

SEQ ID NO: 76317 - protein, 15 aa, Artificial Sequence
  Description of Artificial Sequence: Synthetic peptide
  Seed: GMDPRMCSLMQGSTL
GMDYRMNSIMQNSTL

SEQ ID NO: 76318 - protein, 15 aa, Artificial Sequence
  Description of Artificial Sequence: Synthetic peptide
  Seed: GMDPRMCSLMQGSTL
GMDYRMNSVMQASTL

SEQ ID NO: 76319 - protein, 15 aa, Artificial Sequence
  Description of Artificial Sequence: Synthetic peptide
  Seed: GMDPRMCSLMQGSTL
GMDYRMNSVMQNSTL

SEQ ID NO: 76320 - protein, 15 aa, Artificial Sequence
  Description of Artificial Sequence: Synthetic peptide
  Seed: GMDPRMCSLMQGSTL
GMDYRMNSVMQSSTL

SEQ ID NO: 76321 - protein, 15 aa, Artificial Sequence
  Description of Artificial Sequence: Synthetic peptide
  Seed: GMDPRMCSLMQGSTL
GMDYRMQSAMQASTL

SEQ ID NO: 76322 - protein, 15 aa, Artificial Sequence
  Description of Artificial Sequence: Synthetic peptide
  Seed: GMDPRMCSLMQGSTL
GMDYRMQSAMQDSTL

SEQ ID NO: 76323 - protein, 15 aa, Artificial Sequence
  Description of Artificial Sequence: Synthetic peptide
  Seed: GMDPRMCSLMQGSTL
GMDYRMQSAMQESTL

SEQ ID NO: 76324 - protein, 15 aa, Artificial Sequence
  Description of Artificial Sequence: Synthetic peptide
  Seed: GMDPRMCSLMQGSTL
GMDYRMQSAMQFSTL

SEQ ID NO: 76325 - protein, 15 aa, Artificial Sequence
  Description of Artificial Sequence: Synthetic peptide
  Seed: GMDPRMCSLMQGSTL
GMDYRMQSAMQGSTL

SEQ ID NO: 76326 - protein, 15 aa, Artificial Sequence
  Description of Artificial Sequence: Synthetic peptide
  Seed: GMDPRMCSLMQGSTL
GMDYRMQSAMQHSTL

SEQ ID NO: 76327 - protein, 15 aa, Artificial Sequence
  Description of Artificial Sequence: Synthetic peptide
  Seed: GMDPRMCSLMQGSTL
GMDYRMQSAMQISTL

SEQ ID NO: 76328 - protein, 15 aa, Artificial Sequence
  Description of Artificial Sequence: Synthetic peptide
  Seed: GMDPRMCSLMQGSTL
GMDYRMQSAMQLSTL

SEQ ID NO: 76329 - protein, 15 aa, Artificial Sequence
  Description of Artificial Sequence: Synthetic peptide
  Seed: GMDPRMCSLMQGSTL
GMDYRMQSAMQMSTL

SEQ ID NO: 76330 - protein, 15 aa, Artificial Sequence
  Description of Artificial Sequence: Synthetic peptide
  Seed: GMDPRMCSLMQGSTL
GMDYRMQSAMQNSTL

SEQ ID NO: 76331 - protein, 15 aa, Artificial Sequence
  Description of Artificial Sequence: Synthetic peptide
  Seed: GMDPRMCSLMQGSTL
GMDYRMQSAMQPSTL

SEQ ID NO: 76332 - protein, 15 aa, Artificial Sequence
  Description of Artificial Sequence: Synthetic peptide
  Seed: GMDPRMCSLMQGSTL
GMDYRMQSAMQQSTL

SEQ ID NO: 76333 - protein, 15 aa, Artificial Sequence
  Description of Artificial Sequence: Synthetic peptide
  Seed: GMDPRMCSLMQGSTL
GMDYRMQSAMQSSTL

SEQ ID NO: 76334 - protein, 15 aa, Artificial Sequence
  Description of Artificial Sequence: Synthetic peptide
  Seed: GMDPRMCSLMQGSTL
GMDYRMQSAMQTSTL

SEQ ID NO: 76335 - protein, 15 aa, Artificial Sequence
  Description of Artificial Sequence: Synthetic peptide
  Seed: GMDPRMCSLMQGSTL
GMDYRMQSAMQVSTL

SEQ ID NO: 76336 - protein, 15 aa, Artificial Sequence
  Description of Artificial Sequence: Synthetic peptide
  Seed: GMDPRMCSLMQGSTL
GMDYRMQSGMQASTL

SEQ ID NO: 76337 - protein, 15 aa, Artificial Sequence
  Description of Artificial Sequence: Synthetic peptide
  Seed: GMDPRMCSLMQGSTL
GMDYRMQSGMQISTL

SEQ ID NO: 76338 - protein, 15 aa, Artificial Sequence
  Description of Artificial Sequence: Synthetic peptide
  Seed: GMDPRMCSLMQGSTL
GMDYRMQSGMQLSTL

SEQ ID NO: 76339 - protein, 15 aa, Artificial Sequence
  Description of Artificial Sequence: Synthetic peptide
  Seed: GMDPRMCSLMQGSTL
GMDYRMQSGMQMSTL

SEQ ID NO: 76340 - protein, 15 aa, Artificial Sequence
  Description of Artificial Sequence: Synthetic peptide
  Seed: GMDPRMCSLMQGSTL
GMDYRMQSGMQNSTL

SEQ ID NO: 76341 - protein, 15 aa, Artificial Sequence
  Description of Artificial Sequence: Synthetic peptide
  Seed: GMDPRMCSLMQGSTL
GMDYRMQSGMQSSTL

SEQ ID NO: 76342 - protein, 15 aa, Artificial Sequence
  Description of Artificial Sequence: Synthetic peptide
  Seed: GMDPRMCSLMQGSTL
GMDYRMQSGMQTSTL

SEQ ID NO: 76343 - protein, 15 aa, Artificial Sequence
  Description of Artificial Sequence: Synthetic peptide
  Seed: GMDPRMCSLMQGSTL
GMDYRMQSGMQVSTL

SEQ ID NO: 76344 - protein, 15 aa, Artificial Sequence
  Description of Artificial Sequence: Synthetic peptide
  Seed: GMDPRMCSLMQGSTL
GMDYRMQSIMQASTL

SEQ ID NO: 76345 - protein, 15 aa, Artificial Sequence
  Description of Artificial Sequence: Synthetic peptide
  Seed: GMDPRMCSLMQGSTL
GMDYRMQSIMQGSTL

SEQ ID NO: 76346 - protein, 15 aa, Artificial Sequence
  Description of Artificial Sequence: Synthetic peptide
  Seed: GMDPRMCSLMQGSTL
GMDYRMQSIMQHSTL

SEQ ID NO: 76347 - protein, 15 aa, Artificial Sequence
  Description of Artificial Sequence: Synthetic peptide
  Seed: GMDPRMCSLMQGSTL
GMDYRMQSIMQISTL

SEQ ID NO: 76348 - protein, 15 aa, Artificial Sequence
  Description of Artificial Sequence: Synthetic peptide
  Seed: GMDPRMCSLMQGSTL
GMDYRMQSIMQLSTL

SEQ ID NO: 76349 - protein, 15 aa, Artificial Sequence
  Description of Artificial Sequence: Synthetic peptide
  Seed: GMDPRMCSLMQGSTL
GMDYRMQSIMQMSTL

SEQ ID NO: 76350 - protein, 15 aa, Artificial Sequence
  Description of Artificial Sequence: Synthetic peptide
  Seed: GMDPRMCSLMQGSTL
GMDYRMQSIMQNSTL

SEQ ID NO: 76351 - protein, 15 aa, Artificial Sequence
  Description of Artificial Sequence: Synthetic peptide
  Seed: GMDPRMCSLMQGSTL
GMDYRMQSIMQQSTL

SEQ ID NO: 76352 - protein, 15 aa, Artificial Sequence
  Description of Artificial Sequence: Synthetic peptide
  Seed: GMDPRMCSLMQGSTL
GMDYRMQSIMQSSTL

SEQ ID NO: 76353 - protein, 15 aa, Artificial Sequence
  Description of Artificial Sequence: Synthetic peptide
  Seed: GMDPRMCSLMQGSTL
GMDYRMQSIMQTSTL

SEQ ID NO: 76354 - protein, 15 aa, Artificial Sequence
  Description of Artificial Sequence: Synthetic peptide
  Seed: GMDPRMCSLMQGSTL
GMDYRMQSIMQVSTL

SEQ ID NO: 76355 - protein, 15 aa, Artificial Sequence
  Description of Artificial Sequence: Synthetic peptide
  Seed: GMDPRMCSLMQGSTL
GMDYRMQSLMQASTL

SEQ ID NO: 76356 - protein, 15 aa, Artificial Sequence
  Description of Artificial Sequence: Synthetic peptide
  Seed: GMDPRMCSLMQGSTL
GMDYRMQSLMQISTL

SEQ ID NO: 76357 - protein, 15 aa, Artificial Sequence
  Description of Artificial Sequence: Synthetic peptide
  Seed: GMDPRMCSLMQGSTL
GMDYRMQSLMQLSTL

SEQ ID NO: 76358 - protein, 15 aa, Artificial Sequence
  Description of Artificial Sequence: Synthetic peptide
  Seed: GMDPRMCSLMQGSTL
GMDYRMQSLMQMSTL

SEQ ID NO: 76359 - protein, 15 aa, Artificial Sequence
  Description of Artificial Sequence: Synthetic peptide
  Seed: GMDPRMCSLMQGSTL
GMDYRMQSLMQNSTL

SEQ ID NO: 76360 - protein, 15 aa, Artificial Sequence
  Description of Artificial Sequence: Synthetic peptide
  Seed: GMDPRMCSLMQGSTL
GMDYRMQSLMQSSTL

SEQ ID NO: 76361 - protein, 15 aa, Artificial Sequence
  Description of Artificial Sequence: Synthetic peptide
  Seed: GMDPRMCSLMQGSTL
GMDYRMQSLMQTSTL

SEQ ID NO: 76362 - protein, 15 aa, Artificial Sequence
  Description of Artificial Sequence: Synthetic peptide
  Seed: GMDPRMCSLMQGSTL
GMDYRMQSLMQVSTL

SEQ ID NO: 76363 - protein, 15 aa, Artificial Sequence
  Description of Artificial Sequence: Synthetic peptide
  Seed: GMDPRMCSLMQGSTL
GMDYRMQSMMQASTL

SEQ ID NO: 76364 - protein, 15 aa, Artificial Sequence
  Description of Artificial Sequence: Synthetic peptide
  Seed: GMDPRMCSLMQGSTL
GMDYRMQSMMQLSTL

SEQ ID NO: 76365 - protein, 15 aa, Artificial Sequence
  Description of Artificial Sequence: Synthetic peptide
  Seed: GMDPRMCSLMQGSTL
GMDYRMQSMMQNSTL

SEQ ID NO: 76366 - protein, 15 aa, Artificial Sequence
  Description of Artificial Sequence: Synthetic peptide
  Seed: GMDPRMCSLMQGSTL
GMDYRMQSMMQSSTL

SEQ ID NO: 76367 - protein, 15 aa, Artificial Sequence
  Description of Artificial Sequence: Synthetic peptide
  Seed: GMDPRMCSLMQGSTL
GMDYRMQSMMQTSTL

SEQ ID NO: 76368 - protein, 15 aa, Artificial Sequence
  Description of Artificial Sequence: Synthetic peptide
  Seed: GMDPRMCSLMQGSTL
GMDYRMQSMMQVSTL

SEQ ID NO: 76369 - protein, 15 aa, Artificial Sequence
  Description of Artificial Sequence: Synthetic peptide
  Seed: GMDPRMCSLMQGSTL
GMDYRMQSNMQASTL

SEQ ID NO: 76370 - protein, 15 aa, Artificial Sequence
  Description of Artificial Sequence: Synthetic peptide
  Seed: GMDPRMCSLMQGSTL
GMDYRMQSNMQISTL

SEQ ID NO: 76371 - protein, 15 aa, Artificial Sequence
  Description of Artificial Sequence: Synthetic peptide
  Seed: GMDPRMCSLMQGSTL
GMDYRMQSNMQLSTL

SEQ ID NO: 76372 - protein, 15 aa, Artificial Sequence
  Description of Artificial Sequence: Synthetic peptide
  Seed: GMDPRMCSLMQGSTL
GMDYRMQSNMQMSTL

SEQ ID NO: 76373 - protein, 15 aa, Artificial Sequence
  Description of Artificial Sequence: Synthetic peptide
  Seed: GMDPRMCSLMQGSTL
GMDYRMQSNMQNSTL

SEQ ID NO: 76374 - protein, 15 aa, Artificial Sequence
  Description of Artificial Sequence: Synthetic peptide
  Seed: GMDPRMCSLMQGSTL
GMDYRMQSNMQSSTL

SEQ ID NO: 76375 - protein, 15 aa, Artificial Sequence
  Description of Artificial Sequence: Synthetic peptide
  Seed: GMDPRMCSLMQGSTL
GMDYRMQSNMQTSTL

SEQ ID NO: 76376 - protein, 15 aa, Artificial Sequence
  Description of Artificial Sequence: Synthetic peptide
  Seed: GMDPRMCSLMQGSTL
GMDYRMQSNMQVSTL

SEQ ID NO: 76377 - protein, 15 aa, Artificial Sequence
  Description of Artificial Sequence: Synthetic peptide
  Seed: GMDPRMCSLMQGSTL
GMDYRMQSPMQASTL

SEQ ID NO: 76378 - protein, 15 aa, Artificial Sequence
  Description of Artificial Sequence: Synthetic peptide
  Seed: GMDPRMCSLMQGSTL
GMDYRMQSPMQGSTL

SEQ ID NO: 76379 - protein, 15 aa, Artificial Sequence
  Description of Artificial Sequence: Synthetic peptide
  Seed: GMDPRMCSLMQGSTL
GMDYRMQSPMQHSTL

SEQ ID NO: 76380 - protein, 15 aa, Artificial Sequence
  Description of Artificial Sequence: Synthetic peptide
  Seed: GMDPRMCSLMQGSTL
GMDYRMQSPMQISTL

SEQ ID NO: 76381 - protein, 15 aa, Artificial Sequence
  Description of Artificial Sequence: Synthetic peptide
  Seed: GMDPRMCSLMQGSTL
GMDYRMQSPMQLSTL

SEQ ID NO: 76382 - protein, 15 aa, Artificial Sequence
  Description of Artificial Sequence: Synthetic peptide
  Seed: GMDPRMCSLMQGSTL
GMDYRMQSPMQMSTL

SEQ ID NO: 76383 - protein, 15 aa, Artificial Sequence
  Description of Artificial Sequence: Synthetic peptide
  Seed: GMDPRMCSLMQGSTL
GMDYRMQSPMQNSTL

SEQ ID NO: 76384 - protein, 15 aa, Artificial Sequence
  Description of Artificial Sequence: Synthetic peptide
  Seed: GMDPRMCSLMQGSTL
GMDYRMQSPMQPSTL

SEQ ID NO: 76385 - protein, 15 aa, Artificial Sequence
  Description of Artificial Sequence: Synthetic peptide
  Seed: GMDPRMCSLMQGSTL
GMDYRMQSPMQQSTL

SEQ ID NO: 76386 - protein, 15 aa, Artificial Sequence
  Description of Artificial Sequence: Synthetic peptide
  Seed: GMDPRMCSLMQGSTL
GMDYRMQSPMQSSTL

SEQ ID NO: 76387 - protein, 15 aa, Artificial Sequence
  Description of Artificial Sequence: Synthetic peptide
  Seed: GMDPRMCSLMQGSTL
GMDYRMQSPMQTSTL

SEQ ID NO: 76388 - protein, 15 aa, Artificial Sequence
  Description of Artificial Sequence: Synthetic peptide
  Seed: GMDPRMCSLMQGSTL
GMDYRMQSPMQVSTL

SEQ ID NO: 76389 - protein, 15 aa, Artificial Sequence
  Description of Artificial Sequence: Synthetic peptide
  Seed: GMDPRMCSLMQGSTL
GMDYRMQSSMQASTL

SEQ ID NO: 76390 - protein, 15 aa, Artificial Sequence
  Description of Artificial Sequence: Synthetic peptide
  Seed: GMDPRMCSLMQGSTL
GMDYRMQSSMQGSTL

SEQ ID NO: 76391 - protein, 15 aa, Artificial Sequence
  Description of Artificial Sequence: Synthetic peptide
  Seed: GMDPRMCSLMQGSTL
GMDYRMQSSMQHSTL

SEQ ID NO: 76392 - protein, 15 aa, Artificial Sequence
  Description of Artificial Sequence: Synthetic peptide
  Seed: GMDPRMCSLMQGSTL
GMDYRMQSSMQISTL

SEQ ID NO: 76393 - protein, 15 aa, Artificial Sequence
  Description of Artificial Sequence: Synthetic peptide
  Seed: GMDPRMCSLMQGSTL
GMDYRMQSSMQLSTL

SEQ ID NO: 76394 - protein, 15 aa, Artificial Sequence
  Description of Artificial Sequence: Synthetic peptide
  Seed: GMDPRMCSLMQGSTL
GMDYRMQSSMQMSTL

SEQ ID NO: 76395 - protein, 15 aa, Artificial Sequence
  Description of Artificial Sequence: Synthetic peptide
  Seed: GMDPRMCSLMQGSTL
GMDYRMQSSMQNSTL

SEQ ID NO: 76396 - protein, 15 aa, Artificial Sequence
  Description of Artificial Sequence: Synthetic peptide
  Seed: GMDPRMCSLMQGSTL
GMDYRMQSSMQQSTL

SEQ ID NO: 76397 - protein, 15 aa, Artificial Sequence
  Description of Artificial Sequence: Synthetic peptide
  Seed: GMDPRMCSLMQGSTL
GMDYRMQSSMQSSTL

SEQ ID NO: 76398 - protein, 15 aa, Artificial Sequence
  Description of Artificial Sequence: Synthetic peptide
  Seed: GMDPRMCSLMQGSTL
GMDYRMQSSMQTSTL

SEQ ID NO: 76399 - protein, 15 aa, Artificial Sequence
  Description of Artificial Sequence: Synthetic peptide
  Seed: GMDPRMCSLMQGSTL
GMDYRMQSSMQVSTL

SEQ ID NO: 76400 - protein, 15 aa, Artificial Sequence
  Description of Artificial Sequence: Synthetic peptide
  Seed: GMDPRMCSLMQGSTL
GMDYRMQSTMQASTL

SEQ ID NO: 76401 - protein, 15 aa, Artificial Sequence
  Description of Artificial Sequence: Synthetic peptide
  Seed: GMDPRMCSLMQGSTL
GMDYRMQSTMQGSTL

SEQ ID NO: 76402 - protein, 15 aa, Artificial Sequence
  Description of Artificial Sequence: Synthetic peptide
  Seed: GMDPRMCSLMQGSTL
GMDYRMQSTMQHSTL

SEQ ID NO: 76403 - protein, 15 aa, Artificial Sequence
  Description of Artificial Sequence: Synthetic peptide
  Seed: GMDPRMCSLMQGSTL
GMDYRMQSTMQISTL

SEQ ID NO: 76404 - protein, 15 aa, Artificial Sequence
  Description of Artificial Sequence: Synthetic peptide
  Seed: GMDPRMCSLMQGSTL
GMDYRMQSTMQLSTL

SEQ ID NO: 76405 - protein, 15 aa, Artificial Sequence
  Description of Artificial Sequence: Synthetic peptide
  Seed: GMDPRMCSLMQGSTL
GMDYRMQSTMQMSTL

SEQ ID NO: 76406 - protein, 15 aa, Artificial Sequence
  Description of Artificial Sequence: Synthetic peptide
  Seed: GMDPRMCSLMQGSTL
GMDYRMQSTMQNSTL

SEQ ID NO: 76407 - protein, 15 aa, Artificial Sequence
  Description of Artificial Sequence: Synthetic peptide
  Seed: GMDPRMCSLMQGSTL
GMDYRMQSTMQQSTL

SEQ ID NO: 76408 - protein, 15 aa, Artificial Sequence
  Description of Artificial Sequence: Synthetic peptide
  Seed: GMDPRMCSLMQGSTL
GMDYRMQSTMQSSTL

SEQ ID NO: 76409 - protein, 15 aa, Artificial Sequence
  Description of Artificial Sequence: Synthetic peptide
  Seed: GMDPRMCSLMQGSTL
GMDYRMQSTMQTSTL

SEQ ID NO: 76410 - protein, 15 aa, Artificial Sequence
  Description of Artificial Sequence: Synthetic peptide
  Seed: GMDPRMCSLMQGSTL
GMDYRMQSTMQVSTL

SEQ ID NO: 76411 - protein, 15 aa, Artificial Sequence
  Description of Artificial Sequence: Synthetic peptide
  Seed: GMDPRMCSLMQGSTL
GMDYRMQSVMQASTL

SEQ ID NO: 76412 - protein, 15 aa, Artificial Sequence
  Description of Artificial Sequence: Synthetic peptide
  Seed: GMDPRMCSLMQGSTL
GMDYRMQSVMQGSTL

SEQ ID NO: 76413 - protein, 15 aa, Artificial Sequence
  Description of Artificial Sequence: Synthetic peptide
  Seed: GMDPRMCSLMQGSTL
GMDYRMQSVMQHSTL

SEQ ID NO: 76414 - protein, 15 aa, Artificial Sequence
  Description of Artificial Sequence: Synthetic peptide
  Seed: GMDPRMCSLMQGSTL
GMDYRMQSVMQISTL

SEQ ID NO: 76415 - protein, 15 aa, Artificial Sequence
  Description of Artificial Sequence: Synthetic peptide
  Seed: GMDPRMCSLMQGSTL
GMDYRMQSVMQLSTL

SEQ ID NO: 76416 - protein, 15 aa, Artificial Sequence
  Description of Artificial Sequence: Synthetic peptide
  Seed: GMDPRMCSLMQGSTL
GMDYRMQSVMQMSTL

SEQ ID NO: 76417 - protein, 15 aa, Artificial Sequence
  Description of Artificial Sequence: Synthetic peptide
  Seed: GMDPRMCSLMQGSTL
GMDYRMQSVMQNSTL

SEQ ID NO: 76418 - protein, 15 aa, Artificial Sequence
  Description of Artificial Sequence: Synthetic peptide
  Seed: GMDPRMCSLMQGSTL
GMDYRMQSVMQPSTL

SEQ ID NO: 76419 - protein, 15 aa, Artificial Sequence
  Description of Artificial Sequence: Synthetic peptide
  Seed: GMDPRMCSLMQGSTL
GMDYRMQSVMQQSTL

SEQ ID NO: 76420 - protein, 15 aa, Artificial Sequence
  Description of Artificial Sequence: Synthetic peptide
  Seed: GMDPRMCSLMQGSTL
GMDYRMQSVMQSSTL

SEQ ID NO: 76421 - protein, 15 aa, Artificial Sequence
  Description of Artificial Sequence: Synthetic peptide
  Seed: GMDPRMCSLMQGSTL
GMDYRMQSVMQTSTL

SEQ ID NO: 76422 - protein, 15 aa, Artificial Sequence
  Description of Artificial Sequence: Synthetic peptide
  Seed: GMDPRMCSLMQGSTL
GMDYRMQSVMQVSTL

SEQ ID NO: 76423 - protein, 15 aa, Artificial Sequence
  Description of Artificial Sequence: Synthetic peptide
  Seed: GMDPRMCSLMQGSTL
GMDYRMSSAMQASTL

SEQ ID NO: 76424 - protein, 15 aa, Artificial Sequence
  Description of Artificial Sequence: Synthetic peptide
  Seed: GMDPRMCSLMQGSTL
GMDYRMSSAMQESTL

SEQ ID NO: 76425 - protein, 15 aa, Artificial Sequence
  Description of Artificial Sequence: Synthetic peptide
  Seed: GMDPRMCSLMQGSTL
GMDYRMSSAMQFSTL

SEQ ID NO: 76426 - protein, 15 aa, Artificial Sequence
  Description of Artificial Sequence: Synthetic peptide
  Seed: GMDPRMCSLMQGSTL
GMDYRMSSAMQGSTL

SEQ ID NO: 76427 - protein, 15 aa, Artificial Sequence
  Description of Artificial Sequence: Synthetic peptide
  Seed: GMDPRMCSLMQGSTL
GMDYRMSSAMQHSTL

SEQ ID NO: 76428 - protein, 15 aa, Artificial Sequence
  Description of Artificial Sequence: Synthetic peptide
  Seed: GMDPRMCSLMQGSTL
GMDYRMSSAMQISTL

SEQ ID NO: 76429 - protein, 15 aa, Artificial Sequence
  Description of Artificial Sequence: Synthetic peptide
  Seed: GMDPRMCSLMQGSTL
GMDYRMSSAMQLSTL

SEQ ID NO: 76430 - protein, 15 aa, Artificial Sequence
  Description of Artificial Sequence: Synthetic peptide
  Seed: GMDPRMCSLMQGSTL
GMDYRMSSAMQMSTL

SEQ ID NO: 76431 - protein, 15 aa, Artificial Sequence
  Description of Artificial Sequence: Synthetic peptide
  Seed: GMDPRMCSLMQGSTL
GMDYRMSSAMQNSTL

SEQ ID NO: 76432 - protein, 15 aa, Artificial Sequence
  Description of Artificial Sequence: Synthetic peptide
  Seed: GMDPRMCSLMQGSTL
GMDYRMSSAMQPSTL

SEQ ID NO: 76433 - protein, 15 aa, Artificial Sequence
  Description of Artificial Sequence: Synthetic peptide
  Seed: GMDPRMCSLMQGSTL
GMDYRMSSAMQQSTL

SEQ ID NO: 76434 - protein, 15 aa, Artificial Sequence
  Description of Artificial Sequence: Synthetic peptide
  Seed: GMDPRMCSLMQGSTL
GMDYRMSSAMQSSTL

SEQ ID NO: 76435 - protein, 15 aa, Artificial Sequence
  Description of Artificial Sequence: Synthetic peptide
  Seed: GMDPRMCSLMQGSTL
GMDYRMSSAMQTSTL

SEQ ID NO: 76436 - protein, 15 aa, Artificial Sequence
  Description of Artificial Sequence: Synthetic peptide
  Seed: GMDPRMCSLMQGSTL
GMDYRMSSAMQVSTL

SEQ ID NO: 76437 - protein, 15 aa, Artificial Sequence
  Description of Artificial Sequence: Synthetic peptide
  Seed: GMDPRMCSLMQGSTL
GMDYRMSSGMQASTL

SEQ ID NO: 76438 - protein, 15 aa, Artificial Sequence
  Description of Artificial Sequence: Synthetic peptide
  Seed: GMDPRMCSLMQGSTL
GMDYRMSSGMQISTL

SEQ ID NO: 76439 - protein, 15 aa, Artificial Sequence
  Description of Artificial Sequence: Synthetic peptide
  Seed: GMDPRMCSLMQGSTL
GMDYRMSSGMQLSTL

SEQ ID NO: 76440 - protein, 15 aa, Artificial Sequence
  Description of Artificial Sequence: Synthetic peptide
  Seed: GMDPRMCSLMQGSTL
GMDYRMSSGMQMSTL

SEQ ID NO: 76441 - protein, 15 aa, Artificial Sequence
  Description of Artificial Sequence: Synthetic peptide
  Seed: GMDPRMCSLMQGSTL
GMDYRMSSGMQNSTL

SEQ ID NO: 76442 - protein, 15 aa, Artificial Sequence
  Description of Artificial Sequence: Synthetic peptide
  Seed: GMDPRMCSLMQGSTL
GMDYRMSSGMQSSTL

SEQ ID NO: 76443 - protein, 15 aa, Artificial Sequence
  Description of Artificial Sequence: Synthetic peptide
  Seed: GMDPRMCSLMQGSTL
GMDYRMSSGMQTSTL

SEQ ID NO: 76444 - protein, 15 aa, Artificial Sequence
  Description of Artificial Sequence: Synthetic peptide
  Seed: GMDPRMCSLMQGSTL
GMDYRMSSGMQVSTL

SEQ ID NO: 76445 - protein, 15 aa, Artificial Sequence
  Description of Artificial Sequence: Synthetic peptide
  Seed: GMDPRMCSLMQGSTL
GMDYRMSSIMQASTL

SEQ ID NO: 76446 - protein, 15 aa, Artificial Sequence
  Description of Artificial Sequence: Synthetic peptide
  Seed: GMDPRMCSLMQGSTL
GMDYRMSSIMQGSTL

SEQ ID NO: 76447 - protein, 15 aa, Artificial Sequence
  Description of Artificial Sequence: Synthetic peptide
  Seed: GMDPRMCSLMQGSTL
GMDYRMSSIMQHSTL

SEQ ID NO: 76448 - protein, 15 aa, Artificial Sequence
  Description of Artificial Sequence: Synthetic peptide
  Seed: GMDPRMCSLMQGSTL
GMDYRMSSIMQISTL

SEQ ID NO: 76449 - protein, 15 aa, Artificial Sequence
  Description of Artificial Sequence: Synthetic peptide
  Seed: GMDPRMCSLMQGSTL
GMDYRMSSIMQLSTL

SEQ ID NO: 76450 - protein, 15 aa, Artificial Sequence
  Description of Artificial Sequence: Synthetic peptide
  Seed: GMDPRMCSLMQGSTL
GMDYRMSSIMQMSTL

SEQ ID NO: 76451 - protein, 15 aa, Artificial Sequence
  Description of Artificial Sequence: Synthetic peptide
  Seed: GMDPRMCSLMQGSTL
GMDYRMSSIMQNSTL

SEQ ID NO: 76452 - protein, 15 aa, Artificial Sequence
  Description of Artificial Sequence: Synthetic peptide
  Seed: GMDPRMCSLMQGSTL
GMDYRMSSIMQQSTL

SEQ ID NO: 76453 - protein, 15 aa, Artificial Sequence
  Description of Artificial Sequence: Synthetic peptide
  Seed: GMDPRMCSLMQGSTL
GMDYRMSSIMQSSTL

SEQ ID NO: 76454 - protein, 15 aa, Artificial Sequence
  Description of Artificial Sequence: Synthetic peptide
  Seed: GMDPRMCSLMQGSTL
GMDYRMSSIMQTSTL

SEQ ID NO: 76455 - protein, 15 aa, Artificial Sequence
  Description of Artificial Sequence: Synthetic peptide
  Seed: GMDPRMCSLMQGSTL
GMDYRMSSIMQVSTL

SEQ ID NO: 76456 - protein, 15 aa, Artificial Sequence
  Description of Artificial Sequence: Synthetic peptide
  Seed: GMDPRMCSLMQGSTL
GMDYRMSSLMQASTL

SEQ ID NO: 76457 - protein, 15 aa, Artificial Sequence
  Description of Artificial Sequence: Synthetic peptide
  Seed: GMDPRMCSLMQGSTL
GMDYRMSSLMQNSTL

SEQ ID NO: 76458 - protein, 15 aa, Artificial Sequence
  Description of Artificial Sequence: Synthetic peptide
  Seed: GMDPRMCSLMQGSTL
GMDYRMSSLMQSSTL

SEQ ID NO: 76459 - protein, 15 aa, Artificial Sequence
  Description of Artificial Sequence: Synthetic peptide
  Seed: GMDPRMCSLMQGSTL
GMDYRMSSMMQASTL

SEQ ID NO: 76460 - protein, 15 aa, Artificial Sequence
  Description of Artificial Sequence: Synthetic peptide
  Seed: GMDPRMCSLMQGSTL
GMDYRMSSMMQNSTL

SEQ ID NO: 76461 - protein, 15 aa, Artificial Sequence
  Description of Artificial Sequence: Synthetic peptide
  Seed: GMDPRMCSLMQGSTL
GMDYRMSSMMQSSTL

SEQ ID NO: 76462 - protein, 15 aa, Artificial Sequence
  Description of Artificial Sequence: Synthetic peptide
  Seed: GMDPRMCSLMQGSTL
GMDYRMSSNMQASTL

SEQ ID NO: 76463 - protein, 15 aa, Artificial Sequence
  Description of Artificial Sequence: Synthetic peptide
  Seed: GMDPRMCSLMQGSTL
GMDYRMSSNMQLSTL

SEQ ID NO: 76464 - protein, 15 aa, Artificial Sequence
  Description of Artificial Sequence: Synthetic peptide
  Seed: GMDPRMCSLMQGSTL
GMDYRMSSNMQNSTL

SEQ ID NO: 76465 - protein, 15 aa, Artificial Sequence
  Description of Artificial Sequence: Synthetic peptide
  Seed: GMDPRMCSLMQGSTL
GMDYRMSSNMQSSTL

SEQ ID NO: 76466 - protein, 15 aa, Artificial Sequence
  Description of Artificial Sequence: Synthetic peptide
  Seed: GMDPRMCSLMQGSTL
GMDYRMSSNMQTSTL

SEQ ID NO: 76467 - protein, 15 aa, Artificial Sequence
  Description of Artificial Sequence: Synthetic peptide
  Seed: GMDPRMCSLMQGSTL
GMDYRMSSNMQVSTL

SEQ ID NO: 76468 - protein, 15 aa, Artificial Sequence
  Description of Artificial Sequence: Synthetic peptide
  Seed: GMDPRMCSLMQGSTL
GMDYRMSSPMQASTL

SEQ ID NO: 76469 - protein, 15 aa, Artificial Sequence
  Description of Artificial Sequence: Synthetic peptide
  Seed: GMDPRMCSLMQGSTL
GMDYRMSSPMQGSTL

SEQ ID NO: 76470 - protein, 15 aa, Artificial Sequence
  Description of Artificial Sequence: Synthetic peptide
  Seed: GMDPRMCSLMQGSTL
GMDYRMSSPMQHSTL

SEQ ID NO: 76471 - protein, 15 aa, Artificial Sequence
  Description of Artificial Sequence: Synthetic peptide
  Seed: GMDPRMCSLMQGSTL
GMDYRMSSPMQISTL

SEQ ID NO: 76472 - protein, 15 aa, Artificial Sequence
  Description of Artificial Sequence: Synthetic peptide
  Seed: GMDPRMCSLMQGSTL
GMDYRMSSPMQLSTL

SEQ ID NO: 76473 - protein, 15 aa, Artificial Sequence
  Description of Artificial Sequence: Synthetic peptide
  Seed: GMDPRMCSLMQGSTL
GMDYRMSSPMQMSTL

SEQ ID NO: 76474 - protein, 15 aa, Artificial Sequence
  Description of Artificial Sequence: Synthetic peptide
  Seed: GMDPRMCSLMQGSTL
GMDYRMSSPMQNSTL

SEQ ID NO: 76475 - protein, 15 aa, Artificial Sequence
  Description of Artificial Sequence: Synthetic peptide
  Seed: GMDPRMCSLMQGSTL
GMDYRMSSPMQQSTL

SEQ ID NO: 76476 - protein, 15 aa, Artificial Sequence
  Description of Artificial Sequence: Synthetic peptide
  Seed: GMDPRMCSLMQGSTL
GMDYRMSSPMQSSTL

SEQ ID NO: 76477 - protein, 15 aa, Artificial Sequence
  Description of Artificial Sequence: Synthetic peptide
  Seed: GMDPRMCSLMQGSTL
GMDYRMSSPMQTSTL

SEQ ID NO: 76478 - protein, 15 aa, Artificial Sequence
  Description of Artificial Sequence: Synthetic peptide
  Seed: GMDPRMCSLMQGSTL
GMDYRMSSPMQVSTL

SEQ ID NO: 76479 - protein, 15 aa, Artificial Sequence
  Description of Artificial Sequence: Synthetic peptide
  Seed: GMDPRMCSLMQGSTL
GMDYRMSSSMQASTL

SEQ ID NO: 76480 - protein, 15 aa, Artificial Sequence
  Description of Artificial Sequence: Synthetic peptide
  Seed: GMDPRMCSLMQGSTL
GMDYRMSSSMQGSTL

SEQ ID NO: 76481 - protein, 15 aa, Artificial Sequence
  Description of Artificial Sequence: Synthetic peptide
  Seed: GMDPRMCSLMQGSTL
GMDYRMSSSMQHSTL

SEQ ID NO: 76482 - protein, 15 aa, Artificial Sequence
  Description of Artificial Sequence: Synthetic peptide
  Seed: GMDPRMCSLMQGSTL
GMDYRMSSSMQISTL

SEQ ID NO: 76483 - protein, 15 aa, Artificial Sequence
  Description of Artificial Sequence: Synthetic peptide
  Seed: GMDPRMCSLMQGSTL
GMDYRMSSSMQLSTL

SEQ ID NO: 76484 - protein, 15 aa, Artificial Sequence
  Description of Artificial Sequence: Synthetic peptide
  Seed: GMDPRMCSLMQGSTL
GMDYRMSSSMQMSTL

SEQ ID NO: 76485 - protein, 15 aa, Artificial Sequence
  Description of Artificial Sequence: Synthetic peptide
  Seed: GMDPRMCSLMQGSTL
GMDYRMSSSMQNSTL

SEQ ID NO: 76486 - protein, 15 aa, Artificial Sequence
  Description of Artificial Sequence: Synthetic peptide
  Seed: GMDPRMCSLMQGSTL
GMDYRMSSSMQQSTL

SEQ ID NO: 76487 - protein, 15 aa, Artificial Sequence
  Description of Artificial Sequence: Synthetic peptide
  Seed: GMDPRMCSLMQGSTL
GMDYRMSSSMQSSTL

SEQ ID NO: 76488 - protein, 15 aa, Artificial Sequence
  Description of Artificial Sequence: Synthetic peptide
  Seed: GMDPRMCSLMQGSTL
GMDYRMSSSMQTSTL

SEQ ID NO: 76489 - protein, 15 aa, Artificial Sequence
  Description of Artificial Sequence: Synthetic peptide
  Seed: GMDPRMCSLMQGSTL
GMDYRMSSSMQVSTL

SEQ ID NO: 76490 - protein, 15 aa, Artificial Sequence
  Description of Artificial Sequence: Synthetic peptide
  Seed: GMDPRMCSLMQGSTL
GMDYRMSSTMQASTL

SEQ ID NO: 76491 - protein, 15 aa, Artificial Sequence
  Description of Artificial Sequence: Synthetic peptide
  Seed: GMDPRMCSLMQGSTL
GMDYRMSSTMQGSTL

SEQ ID NO: 76492 - protein, 15 aa, Artificial Sequence
  Description of Artificial Sequence: Synthetic peptide
  Seed: GMDPRMCSLMQGSTL
GMDYRMSSTMQHSTL

SEQ ID NO: 76493 - protein, 15 aa, Artificial Sequence
  Description of Artificial Sequence: Synthetic peptide
  Seed: GMDPRMCSLMQGSTL
GMDYRMSSTMQISTL

SEQ ID NO: 76494 - protein, 15 aa, Artificial Sequence
  Description of Artificial Sequence: Synthetic peptide
  Seed: GMDPRMCSLMQGSTL
GMDYRMSSTMQLSTL

SEQ ID NO: 76495 - protein, 15 aa, Artificial Sequence
  Description of Artificial Sequence: Synthetic peptide
  Seed: GMDPRMCSLMQGSTL
GMDYRMSSTMQMSTL

SEQ ID NO: 76496 - protein, 15 aa, Artificial Sequence
  Description of Artificial Sequence: Synthetic peptide
  Seed: GMDPRMCSLMQGSTL
GMDYRMSSTMQNSTL

SEQ ID NO: 76497 - protein, 15 aa, Artificial Sequence
  Description of Artificial Sequence: Synthetic peptide
  Seed: GMDPRMCSLMQGSTL
GMDYRMSSTMQQSTL

SEQ ID NO: 76498 - protein, 15 aa, Artificial Sequence
  Description of Artificial Sequence: Synthetic peptide
  Seed: GMDPRMCSLMQGSTL
GMDYRMSSTMQSSTL

SEQ ID NO: 76499 - protein, 15 aa, Artificial Sequence
  Description of Artificial Sequence: Synthetic peptide
  Seed: GMDPRMCSLMQGSTL
GMDYRMSSTMQTSTL

SEQ ID NO: 76500 - protein, 15 aa, Artificial Sequence
  Description of Artificial Sequence: Synthetic peptide
  Seed: GMDPRMCSLMQGSTL
GMDYRMSSTMQVSTL

SEQ ID NO: 76501 - protein, 15 aa, Artificial Sequence
  Description of Artificial Sequence: Synthetic peptide
  Seed: GMDPRMCSLMQGSTL
GMDYRMSSVMQASTL

SEQ ID NO: 76502 - protein, 15 aa, Artificial Sequence
  Description of Artificial Sequence: Synthetic peptide
  Seed: GMDPRMCSLMQGSTL
GMDYRMSSVMQGSTL

SEQ ID NO: 76503 - protein, 15 aa, Artificial Sequence
  Description of Artificial Sequence: Synthetic peptide
  Seed: GMDPRMCSLMQGSTL
GMDYRMSSVMQHSTL

SEQ ID NO: 76504 - protein, 15 aa, Artificial Sequence
  Description of Artificial Sequence: Synthetic peptide
  Seed: GMDPRMCSLMQGSTL
GMDYRMSSVMQISTL

SEQ ID NO: 76505 - protein, 15 aa, Artificial Sequence
  Description of Artificial Sequence: Synthetic peptide
  Seed: GMDPRMCSLMQGSTL
GMDYRMSSVMQLSTL

SEQ ID NO: 76506 - protein, 15 aa, Artificial Sequence
  Description of Artificial Sequence: Synthetic peptide
  Seed: GMDPRMCSLMQGSTL
GMDYRMSSVMQMSTL

SEQ ID NO: 76507 - protein, 15 aa, Artificial Sequence
  Description of Artificial Sequence: Synthetic peptide
  Seed: GMDPRMCSLMQGSTL
GMDYRMSSVMQNSTL

SEQ ID NO: 76508 - protein, 15 aa, Artificial Sequence
  Description of Artificial Sequence: Synthetic peptide
  Seed: GMDPRMCSLMQGSTL
GMDYRMSSVMQQSTL

SEQ ID NO: 76509 - protein, 15 aa, Artificial Sequence
  Description of Artificial Sequence: Synthetic peptide
  Seed: GMDPRMCSLMQGSTL
GMDYRMSSVMQSSTL

SEQ ID NO: 76510 - protein, 15 aa, Artificial Sequence
  Description of Artificial Sequence: Synthetic peptide
  Seed: GMDPRMCSLMQGSTL
GMDYRMSSVMQTSTL

SEQ ID NO: 76511 - protein, 15 aa, Artificial Sequence
  Description of Artificial Sequence: Synthetic peptide
  Seed: GMDPRMCSLMQGSTL
GMDYRMSSVMQVSTL

SEQ ID NO: 76512 - protein, 15 aa, Artificial Sequence
  Description of Artificial Sequence: Synthetic peptide
  Seed: GMDPRMCSLMQGSTL
GMDYRMTSAMQASTL

SEQ ID NO: 76513 - protein, 15 aa, Artificial Sequence
  Description of Artificial Sequence: Synthetic peptide
  Seed: GMDPRMCSLMQGSTL
GMDYRMTSAMQGSTL

SEQ ID NO: 76514 - protein, 15 aa, Artificial Sequence
  Description of Artificial Sequence: Synthetic peptide
  Seed: GMDPRMCSLMQGSTL
GMDYRMTSAMQHSTL

SEQ ID NO: 76515 - protein, 15 aa, Artificial Sequence
  Description of Artificial Sequence: Synthetic peptide
  Seed: GMDPRMCSLMQGSTL
GMDYRMTSAMQISTL

SEQ ID NO: 76516 - protein, 15 aa, Artificial Sequence
  Description of Artificial Sequence: Synthetic peptide
  Seed: GMDPRMCSLMQGSTL
GMDYRMTSAMQLSTL

SEQ ID NO: 76517 - protein, 15 aa, Artificial Sequence
  Description of Artificial Sequence: Synthetic peptide
  Seed: GMDPRMCSLMQGSTL
GMDYRMTSAMQMSTL

SEQ ID NO: 76518 - protein, 15 aa, Artificial Sequence
  Description of Artificial Sequence: Synthetic peptide
  Seed: GMDPRMCSLMQGSTL
GMDYRMTSAMQNSTL

SEQ ID NO: 76519 - protein, 15 aa, Artificial Sequence
  Description of Artificial Sequence: Synthetic peptide
  Seed: GMDPRMCSLMQGSTL
GMDYRMTSAMQPSTL

SEQ ID NO: 76520 - protein, 15 aa, Artificial Sequence
  Description of Artificial Sequence: Synthetic peptide
  Seed: GMDPRMCSLMQGSTL
GMDYRMTSAMQQSTL

SEQ ID NO: 76521 - protein, 15 aa, Artificial Sequence
  Description of Artificial Sequence: Synthetic peptide
  Seed: GMDPRMCSLMQGSTL
GMDYRMTSAMQSSTL

SEQ ID NO: 76522 - protein, 15 aa, Artificial Sequence
  Description of Artificial Sequence: Synthetic peptide
  Seed: GMDPRMCSLMQGSTL
GMDYRMTSAMQTSTL

SEQ ID NO: 76523 - protein, 15 aa, Artificial Sequence
  Description of Artificial Sequence: Synthetic peptide
  Seed: GMDPRMCSLMQGSTL
GMDYRMTSAMQVSTL

SEQ ID NO: 76524 - protein, 15 aa, Artificial Sequence
  Description of Artificial Sequence: Synthetic peptide
  Seed: GMDPRMCSLMQGSTL
GMDYRMTSGMQASTL

SEQ ID NO: 76525 - protein, 15 aa, Artificial Sequence
  Description of Artificial Sequence: Synthetic peptide
  Seed: GMDPRMCSLMQGSTL
GMDYRMTSGMQISTL

SEQ ID NO: 76526 - protein, 15 aa, Artificial Sequence
  Description of Artificial Sequence: Synthetic peptide
  Seed: GMDPRMCSLMQGSTL
GMDYRMTSGMQLSTL

SEQ ID NO: 76527 - protein, 15 aa, Artificial Sequence
  Description of Artificial Sequence: Synthetic peptide
  Seed: GMDPRMCSLMQGSTL
GMDYRMTSGMQMSTL

SEQ ID NO: 76528 - protein, 15 aa, Artificial Sequence
  Description of Artificial Sequence: Synthetic peptide
  Seed: GMDPRMCSLMQGSTL
GMDYRMTSGMQNSTL

SEQ ID NO: 76529 - protein, 15 aa, Artificial Sequence
  Description of Artificial Sequence: Synthetic peptide
  Seed: GMDPRMCSLMQGSTL
GMDYRMTSGMQSSTL

SEQ ID NO: 76530 - protein, 15 aa, Artificial Sequence
  Description of Artificial Sequence: Synthetic peptide
  Seed: GMDPRMCSLMQGSTL
GMDYRMTSGMQTSTL

SEQ ID NO: 76531 - protein, 15 aa, Artificial Sequence
  Description of Artificial Sequence: Synthetic peptide
  Seed: GMDPRMCSLMQGSTL
GMDYRMTSGMQVSTL

SEQ ID NO: 76532 - protein, 15 aa, Artificial Sequence
  Description of Artificial Sequence: Synthetic peptide
  Seed: GMDPRMCSLMQGSTL
GMDYRMTSIMQASTL

SEQ ID NO: 76533 - protein, 15 aa, Artificial Sequence
  Description of Artificial Sequence: Synthetic peptide
  Seed: GMDPRMCSLMQGSTL
GMDYRMTSIMQGSTL

SEQ ID NO: 76534 - protein, 15 aa, Artificial Sequence
  Description of Artificial Sequence: Synthetic peptide
  Seed: GMDPRMCSLMQGSTL
GMDYRMTSIMQHSTL

SEQ ID NO: 76535 - protein, 15 aa, Artificial Sequence
  Description of Artificial Sequence: Synthetic peptide
  Seed: GMDPRMCSLMQGSTL
GMDYRMTSIMQISTL

SEQ ID NO: 76536 - protein, 15 aa, Artificial Sequence
  Description of Artificial Sequence: Synthetic peptide
  Seed: GMDPRMCSLMQGSTL
GMDYRMTSIMQLSTL

SEQ ID NO: 76537 - protein, 15 aa, Artificial Sequence
  Description of Artificial Sequence: Synthetic peptide
  Seed: GMDPRMCSLMQGSTL
GMDYRMTSIMQMSTL

SEQ ID NO: 76538 - protein, 15 aa, Artificial Sequence
  Description of Artificial Sequence: Synthetic peptide
  Seed: GMDPRMCSLMQGSTL
GMDYRMTSIMQNSTL

SEQ ID NO: 76539 - protein, 15 aa, Artificial Sequence
  Description of Artificial Sequence: Synthetic peptide
  Seed: GMDPRMCSLMQGSTL
GMDYRMTSIMQSSTL

SEQ ID NO: 76540 - protein, 15 aa, Artificial Sequence
  Description of Artificial Sequence: Synthetic peptide
  Seed: GMDPRMCSLMQGSTL
GMDYRMTSIMQTSTL

SEQ ID NO: 76541 - protein, 15 aa, Artificial Sequence
  Description of Artificial Sequence: Synthetic peptide
  Seed: GMDPRMCSLMQGSTL
GMDYRMTSIMQVSTL

SEQ ID NO: 76542 - protein, 15 aa, Artificial Sequence
  Description of Artificial Sequence: Synthetic peptide
  Seed: GMDPRMCSLMQGSTL
GMDYRMTSLMQASTL

SEQ ID NO: 76543 - protein, 15 aa, Artificial Sequence
  Description of Artificial Sequence: Synthetic peptide
  Seed: GMDPRMCSLMQGSTL
GMDYRMTSLMQNSTL

SEQ ID NO: 76544 - protein, 15 aa, Artificial Sequence
  Description of Artificial Sequence: Synthetic peptide
  Seed: GMDPRMCSLMQGSTL
GMDYRMTSLMQSSTL

SEQ ID NO: 76545 - protein, 15 aa, Artificial Sequence
  Description of Artificial Sequence: Synthetic peptide
  Seed: GMDPRMCSLMQGSTL
GMDYRMTSMMQASTL

SEQ ID NO: 76546 - protein, 15 aa, Artificial Sequence
  Description of Artificial Sequence: Synthetic peptide
  Seed: GMDPRMCSLMQGSTL
GMDYRMTSMMQLSTL

SEQ ID NO: 76547 - protein, 15 aa, Artificial Sequence
  Description of Artificial Sequence: Synthetic peptide
  Seed: GMDPRMCSLMQGSTL
GMDYRMTSMMQNSTL

SEQ ID NO: 76548 - protein, 15 aa, Artificial Sequence
  Description of Artificial Sequence: Synthetic peptide
  Seed: GMDPRMCSLMQGSTL
GMDYRMTSMMQSSTL

SEQ ID NO: 76549 - protein, 15 aa, Artificial Sequence
  Description of Artificial Sequence: Synthetic peptide
  Seed: GMDPRMCSLMQGSTL
GMDYRMTSNMQASTL

SEQ ID NO: 76550 - protein, 15 aa, Artificial Sequence
  Description of Artificial Sequence: Synthetic peptide
  Seed: GMDPRMCSLMQGSTL
GMDYRMTSNMQNSTL

SEQ ID NO: 76551 - protein, 15 aa, Artificial Sequence
  Description of Artificial Sequence: Synthetic peptide
  Seed: GMDPRMCSLMQGSTL
GMDYRMTSNMQSSTL

SEQ ID NO: 76552 - protein, 15 aa, Artificial Sequence
  Description of Artificial Sequence: Synthetic peptide
  Seed: GMDPRMCSLMQGSTL
GMDYRMTSPMQASTL

SEQ ID NO: 76553 - protein, 15 aa, Artificial Sequence
  Description of Artificial Sequence: Synthetic peptide
  Seed: GMDPRMCSLMQGSTL
GMDYRMTSPMQHSTL

SEQ ID NO: 76554 - protein, 15 aa, Artificial Sequence
  Description of Artificial Sequence: Synthetic peptide
  Seed: GMDPRMCSLMQGSTL
GMDYRMTSPMQISTL

SEQ ID NO: 76555 - protein, 15 aa, Artificial Sequence
  Description of Artificial Sequence: Synthetic peptide
  Seed: GMDPRMCSLMQGSTL
GMDYRMTSPMQLSTL

SEQ ID NO: 76556 - protein, 15 aa, Artificial Sequence
  Description of Artificial Sequence: Synthetic peptide
  Seed: GMDPRMCSLMQGSTL
GMDYRMTSPMQMSTL

SEQ ID NO: 76557 - protein, 15 aa, Artificial Sequence
  Description of Artificial Sequence: Synthetic peptide
  Seed: GMDPRMCSLMQGSTL
GMDYRMTSPMQNSTL

SEQ ID NO: 76558 - protein, 15 aa, Artificial Sequence
  Description of Artificial Sequence: Synthetic peptide
  Seed: GMDPRMCSLMQGSTL
GMDYRMTSPMQQSTL

SEQ ID NO: 76559 - protein, 15 aa, Artificial Sequence
  Description of Artificial Sequence: Synthetic peptide
  Seed: GMDPRMCSLMQGSTL
GMDYRMTSPMQSSTL

SEQ ID NO: 76560 - protein, 15 aa, Artificial Sequence
  Description of Artificial Sequence: Synthetic peptide
  Seed: GMDPRMCSLMQGSTL
GMDYRMTSPMQTSTL

SEQ ID NO: 76561 - protein, 15 aa, Artificial Sequence
  Description of Artificial Sequence: Synthetic peptide
  Seed: GMDPRMCSLMQGSTL
GMDYRMTSPMQVSTL

SEQ ID NO: 76562 - protein, 15 aa, Artificial Sequence
  Description of Artificial Sequence: Synthetic peptide
  Seed: GMDPRMCSLMQGSTL
GMDYRMTSSMQASTL

SEQ ID NO: 76563 - protein, 15 aa, Artificial Sequence
  Description of Artificial Sequence: Synthetic peptide
  Seed: GMDPRMCSLMQGSTL
GMDYRMTSSMQGSTL

SEQ ID NO: 76564 - protein, 15 aa, Artificial Sequence
  Description of Artificial Sequence: Synthetic peptide
  Seed: GMDPRMCSLMQGSTL
GMDYRMTSSMQHSTL

SEQ ID NO: 76565 - protein, 15 aa, Artificial Sequence
  Description of Artificial Sequence: Synthetic peptide
  Seed: GMDPRMCSLMQGSTL
GMDYRMTSSMQISTL

SEQ ID NO: 76566 - protein, 15 aa, Artificial Sequence
  Description of Artificial Sequence: Synthetic peptide
  Seed: GMDPRMCSLMQGSTL
GMDYRMTSSMQLSTL

SEQ ID NO: 76567 - protein, 15 aa, Artificial Sequence
  Description of Artificial Sequence: Synthetic peptide
  Seed: GMDPRMCSLMQGSTL
GMDYRMTSSMQMSTL

SEQ ID NO: 76568 - protein, 15 aa, Artificial Sequence
  Description of Artificial Sequence: Synthetic peptide
  Seed: GMDPRMCSLMQGSTL
GMDYRMTSSMQNSTL

SEQ ID NO: 76569 - protein, 15 aa, Artificial Sequence
  Description of Artificial Sequence: Synthetic peptide
  Seed: GMDPRMCSLMQGSTL
GMDYRMTSSMQSSTL

SEQ ID NO: 76570 - protein, 15 aa, Artificial Sequence
  Description of Artificial Sequence: Synthetic peptide
  Seed: GMDPRMCSLMQGSTL
GMDYRMTSSMQTSTL

SEQ ID NO: 76571 - protein, 15 aa, Artificial Sequence
  Description of Artificial Sequence: Synthetic peptide
  Seed: GMDPRMCSLMQGSTL
GMDYRMTSSMQVSTL

SEQ ID NO: 76572 - protein, 15 aa, Artificial Sequence
  Description of Artificial Sequence: Synthetic peptide
  Seed: GMDPRMCSLMQGSTL
GMDYRMTSTMQASTL

SEQ ID NO: 76573 - protein, 15 aa, Artificial Sequence
  Description of Artificial Sequence: Synthetic peptide
  Seed: GMDPRMCSLMQGSTL
GMDYRMTSTMQHSTL

SEQ ID NO: 76574 - protein, 15 aa, Artificial Sequence
  Description of Artificial Sequence: Synthetic peptide
  Seed: GMDPRMCSLMQGSTL
GMDYRMTSTMQISTL

SEQ ID NO: 76575 - protein, 15 aa, Artificial Sequence
  Description of Artificial Sequence: Synthetic peptide
  Seed: GMDPRMCSLMQGSTL
GMDYRMTSTMQLSTL

SEQ ID NO: 76576 - protein, 15 aa, Artificial Sequence
  Description of Artificial Sequence: Synthetic peptide
  Seed: GMDPRMCSLMQGSTL
GMDYRMTSTMQMSTL

SEQ ID NO: 76577 - protein, 15 aa, Artificial Sequence
  Description of Artificial Sequence: Synthetic peptide
  Seed: GMDPRMCSLMQGSTL
GMDYRMTSTMQNSTL

SEQ ID NO: 76578 - protein, 15 aa, Artificial Sequence
  Description of Artificial Sequence: Synthetic peptide
  Seed: GMDPRMCSLMQGSTL
GMDYRMTSTMQSSTL

SEQ ID NO: 76579 - protein, 15 aa, Artificial Sequence
  Description of Artificial Sequence: Synthetic peptide
  Seed: GMDPRMCSLMQGSTL
GMDYRMTSTMQTSTL

SEQ ID NO: 76580 - protein, 15 aa, Artificial Sequence
  Description of Artificial Sequence: Synthetic peptide
  Seed: GMDPRMCSLMQGSTL
GMDYRMTSTMQVSTL

SEQ ID NO: 76581 - protein, 15 aa, Artificial Sequence
  Description of Artificial Sequence: Synthetic peptide
  Seed: GMDPRMCSLMQGSTL
GMDYRMTSVMQASTL

SEQ ID NO: 76582 - protein, 15 aa, Artificial Sequence
  Description of Artificial Sequence: Synthetic peptide
  Seed: GMDPRMCSLMQGSTL
GMDYRMTSVMQGSTL

SEQ ID NO: 76583 - protein, 15 aa, Artificial Sequence
  Description of Artificial Sequence: Synthetic peptide
  Seed: GMDPRMCSLMQGSTL
GMDYRMTSVMQHSTL

SEQ ID NO: 76584 - protein, 15 aa, Artificial Sequence
  Description of Artificial Sequence: Synthetic peptide
  Seed: GMDPRMCSLMQGSTL
GMDYRMTSVMQISTL

SEQ ID NO: 76585 - protein, 15 aa, Artificial Sequence
  Description of Artificial Sequence: Synthetic peptide
  Seed: GMDPRMCSLMQGSTL
GMDYRMTSVMQLSTL

SEQ ID NO: 76586 - protein, 15 aa, Artificial Sequence
  Description of Artificial Sequence: Synthetic peptide
  Seed: GMDPRMCSLMQGSTL
GMDYRMTSVMQMSTL

SEQ ID NO: 76587 - protein, 15 aa, Artificial Sequence
  Description of Artificial Sequence: Synthetic peptide
  Seed: GMDPRMCSLMQGSTL
GMDYRMTSVMQNSTL

SEQ ID NO: 76588 - protein, 15 aa, Artificial Sequence
  Description of Artificial Sequence: Synthetic peptide
  Seed: GMDPRMCSLMQGSTL
GMDYRMTSVMQSSTL

SEQ ID NO: 76589 - protein, 15 aa, Artificial Sequence
  Description of Artificial Sequence: Synthetic peptide
  Seed: GMDPRMCSLMQGSTL
GMDYRMTSVMQTSTL

SEQ ID NO: 76590 - protein, 15 aa, Artificial Sequence
  Description of Artificial Sequence: Synthetic peptide
  Seed: GMDPRMCSLMQGSTL
GMDYRMTSVMQVSTL

SEQ ID NO: 76591 - protein, 15 aa, Artificial Sequence
  Description of Artificial Sequence: Synthetic peptide
  Seed: GMDPRMCSLMQGSTL
GMDYRMVSAMQASTL

SEQ ID NO: 76592 - protein, 15 aa, Artificial Sequence
  Description of Artificial Sequence: Synthetic peptide
  Seed: GMDPRMCSLMQGSTL
GMDYRMVSAMQCSTL

SEQ ID NO: 76593 - protein, 15 aa, Artificial Sequence
  Description of Artificial Sequence: Synthetic peptide
  Seed: GMDPRMCSLMQGSTL
GMDYRMVSAMQDSTL

SEQ ID NO: 76594 - protein, 15 aa, Artificial Sequence
  Description of Artificial Sequence: Synthetic peptide
  Seed: GMDPRMCSLMQGSTL
GMDYRMVSAMQESTL

SEQ ID NO: 76595 - protein, 15 aa, Artificial Sequence
  Description of Artificial Sequence: Synthetic peptide
  Seed: GMDPRMCSLMQGSTL
GMDYRMVSAMQFSTL

SEQ ID NO: 76596 - protein, 15 aa, Artificial Sequence
  Description of Artificial Sequence: Synthetic peptide
  Seed: GMDPRMCSLMQGSTL
GMDYRMVSAMQGSTL

SEQ ID NO: 76597 - protein, 15 aa, Artificial Sequence
  Description of Artificial Sequence: Synthetic peptide
  Seed: GMDPRMCSLMQGSTL
GMDYRMVSAMQHSTL

SEQ ID NO: 76598 - protein, 15 aa, Artificial Sequence
  Description of Artificial Sequence: Synthetic peptide
  Seed: GMDPRMCSLMQGSTL
GMDYRMVSAMQISTL

SEQ ID NO: 76599 - protein, 15 aa, Artificial Sequence
  Description of Artificial Sequence: Synthetic peptide
  Seed: GMDPRMCSLMQGSTL
GMDYRMVSAMQKSTL

SEQ ID NO: 76600 - protein, 15 aa, Artificial Sequence
  Description of Artificial Sequence: Synthetic peptide
  Seed: GMDPRMCSLMQGSTL
GMDYRMVSAMQLSTL

SEQ ID NO: 76601 - protein, 15 aa, Artificial Sequence
  Description of Artificial Sequence: Synthetic peptide
  Seed: GMDPRMCSLMQGSTL
GMDYRMVSAMQMSTL

SEQ ID NO: 76602 - protein, 15 aa, Artificial Sequence
  Description of Artificial Sequence: Synthetic peptide
  Seed: GMDPRMCSLMQGSTL
GMDYRMVSAMQNSTL

SEQ ID NO: 76603 - protein, 15 aa, Artificial Sequence
  Description of Artificial Sequence: Synthetic peptide
  Seed: GMDPRMCSLMQGSTL
GMDYRMVSAMQPSTL

SEQ ID NO: 76604 - protein, 15 aa, Artificial Sequence
  Description of Artificial Sequence: Synthetic peptide
  Seed: GMDPRMCSLMQGSTL
GMDYRMVSAMQQSTL

SEQ ID NO: 76605 - protein, 15 aa, Artificial Sequence
  Description of Artificial Sequence: Synthetic peptide
  Seed: GMDPRMCSLMQGSTL
GMDYRMVSAMQRSTL

SEQ ID NO: 76606 - protein, 15 aa, Artificial Sequence
  Description of Artificial Sequence: Synthetic peptide
  Seed: GMDPRMCSLMQGSTL
GMDYRMVSAMQSSTL

SEQ ID NO: 76607 - protein, 15 aa, Artificial Sequence
  Description of Artificial Sequence: Synthetic peptide
  Seed: GMDPRMCSLMQGSTL
GMDYRMVSAMQTSTL

SEQ ID NO: 76608 - protein, 15 aa, Artificial Sequence
  Description of Artificial Sequence: Synthetic peptide
  Seed: GMDPRMCSLMQGSTL
GMDYRMVSAMQVSTL

SEQ ID NO: 76609 - protein, 15 aa, Artificial Sequence
  Description of Artificial Sequence: Synthetic peptide
  Seed: GMDPRMCSLMQGSTL
GMDYRMVSAMQYSTL

SEQ ID NO: 76610 - protein, 15 aa, Artificial Sequence
  Description of Artificial Sequence: Synthetic peptide
  Seed: GMDPRMCSLMQGSTL
GMDYRMVSGMQASTL

SEQ ID NO: 76611 - protein, 15 aa, Artificial Sequence
  Description of Artificial Sequence: Synthetic peptide
  Seed: GMDPRMCSLMQGSTL
GMDYRMVSGMQGSTL

SEQ ID NO: 76612 - protein, 15 aa, Artificial Sequence
  Description of Artificial Sequence: Synthetic peptide
  Seed: GMDPRMCSLMQGSTL
GMDYRMVSGMQHSTL

SEQ ID NO: 76613 - protein, 15 aa, Artificial Sequence
  Description of Artificial Sequence: Synthetic peptide
  Seed: GMDPRMCSLMQGSTL
GMDYRMVSGMQISTL

SEQ ID NO: 76614 - protein, 15 aa, Artificial Sequence
  Description of Artificial Sequence: Synthetic peptide
  Seed: GMDPRMCSLMQGSTL
GMDYRMVSGMQLSTL

SEQ ID NO: 76615 - protein, 15 aa, Artificial Sequence
  Description of Artificial Sequence: Synthetic peptide
  Seed: GMDPRMCSLMQGSTL
GMDYRMVSGMQMSTL

SEQ ID NO: 76616 - protein, 15 aa, Artificial Sequence
  Description of Artificial Sequence: Synthetic peptide
  Seed: GMDPRMCSLMQGSTL
GMDYRMVSGMQNSTL

SEQ ID NO: 76617 - protein, 15 aa, Artificial Sequence
  Description of Artificial Sequence: Synthetic peptide
  Seed: GMDPRMCSLMQGSTL
GMDYRMVSGMQPSTL

SEQ ID NO: 76618 - protein, 15 aa, Artificial Sequence
  Description of Artificial Sequence: Synthetic peptide
  Seed: GMDPRMCSLMQGSTL
GMDYRMVSGMQQSTL

SEQ ID NO: 76619 - protein, 15 aa, Artificial Sequence
  Description of Artificial Sequence: Synthetic peptide
  Seed: GMDPRMCSLMQGSTL
GMDYRMVSGMQSSTL

SEQ ID NO: 76620 - protein, 15 aa, Artificial Sequence
  Description of Artificial Sequence: Synthetic peptide
  Seed: GMDPRMCSLMQGSTL
GMDYRMVSGMQTSTL

SEQ ID NO: 76621 - protein, 15 aa, Artificial Sequence
  Description of Artificial Sequence: Synthetic peptide
  Seed: GMDPRMCSLMQGSTL
GMDYRMVSGMQVSTL

SEQ ID NO: 76622 - protein, 15 aa, Artificial Sequence
  Description of Artificial Sequence: Synthetic peptide
  Seed: GMDPRMCSLMQGSTL
GMDYRMVSHMQASTL

SEQ ID NO: 76623 - protein, 15 aa, Artificial Sequence
  Description of Artificial Sequence: Synthetic peptide
  Seed: GMDPRMCSLMQGSTL
GMDYRMVSIMQASTL

SEQ ID NO: 76624 - protein, 15 aa, Artificial Sequence
  Description of Artificial Sequence: Synthetic peptide
  Seed: GMDPRMCSLMQGSTL
GMDYRMVSIMQGSTL

SEQ ID NO: 76625 - protein, 15 aa, Artificial Sequence
  Description of Artificial Sequence: Synthetic peptide
  Seed: GMDPRMCSLMQGSTL
GMDYRMVSIMQHSTL

SEQ ID NO: 76626 - protein, 15 aa, Artificial Sequence
  Description of Artificial Sequence: Synthetic peptide
  Seed: GMDPRMCSLMQGSTL
GMDYRMVSIMQISTL

SEQ ID NO: 76627 - protein, 15 aa, Artificial Sequence
  Description of Artificial Sequence: Synthetic peptide
  Seed: GMDPRMCSLMQGSTL
GMDYRMVSIMQLSTL

SEQ ID NO: 76628 - protein, 15 aa, Artificial Sequence
  Description of Artificial Sequence: Synthetic peptide
  Seed: GMDPRMCSLMQGSTL
GMDYRMVSIMQMSTL

SEQ ID NO: 76629 - protein, 15 aa, Artificial Sequence
  Description of Artificial Sequence: Synthetic peptide
  Seed: GMDPRMCSLMQGSTL
GMDYRMVSIMQNSTL

SEQ ID NO: 76630 - protein, 15 aa, Artificial Sequence
  Description of Artificial Sequence: Synthetic peptide
  Seed: GMDPRMCSLMQGSTL
GMDYRMVSIMQPSTL

SEQ ID NO: 76631 - protein, 15 aa, Artificial Sequence
  Description of Artificial Sequence: Synthetic peptide
  Seed: GMDPRMCSLMQGSTL
GMDYRMVSIMQQSTL

SEQ ID NO: 76632 - protein, 15 aa, Artificial Sequence
  Description of Artificial Sequence: Synthetic peptide
  Seed: GMDPRMCSLMQGSTL
GMDYRMVSIMQSSTL

SEQ ID NO: 76633 - protein, 15 aa, Artificial Sequence
  Description of Artificial Sequence: Synthetic peptide
  Seed: GMDPRMCSLMQGSTL
GMDYRMVSIMQTSTL

SEQ ID NO: 76634 - protein, 15 aa, Artificial Sequence
  Description of Artificial Sequence: Synthetic peptide
  Seed: GMDPRMCSLMQGSTL
GMDYRMVSIMQVSTL

SEQ ID NO: 76635 - protein, 15 aa, Artificial Sequence
  Description of Artificial Sequence: Synthetic peptide
  Seed: GMDPRMCSLMQGSTL
GMDYRMVSLMQASTL

SEQ ID NO: 76636 - protein, 15 aa, Artificial Sequence
  Description of Artificial Sequence: Synthetic peptide
  Seed: GMDPRMCSLMQGSTL
GMDYRMVSLMQGSTL

SEQ ID NO: 76637 - protein, 15 aa, Artificial Sequence
  Description of Artificial Sequence: Synthetic peptide
  Seed: GMDPRMCSLMQGSTL
GMDYRMVSLMQHSTL

SEQ ID NO: 76638 - protein, 15 aa, Artificial Sequence
  Description of Artificial Sequence: Synthetic peptide
  Seed: GMDPRMCSLMQGSTL
GMDYRMVSLMQNSTL

SEQ ID NO: 76639 - protein, 15 aa, Artificial Sequence
  Description of Artificial Sequence: Synthetic peptide
  Seed: GMDPRMCSLMQGSTL
GMDYRMVSLMQPSTL

SEQ ID NO: 76640 - protein, 15 aa, Artificial Sequence
  Description of Artificial Sequence: Synthetic peptide
  Seed: GMDPRMCSLMQGSTL
GMDYRMVSLMQSSTL

SEQ ID NO: 76641 - protein, 15 aa, Artificial Sequence
  Description of Artificial Sequence: Synthetic peptide
  Seed: GMDPRMCSLMQGSTL
GMDYRMVSLMQTSTL

SEQ ID NO: 76642 - protein, 15 aa, Artificial Sequence
  Description of Artificial Sequence: Synthetic peptide
  Seed: GMDPRMCSLMQGSTL
GMDYRMVSLMQVSTL

SEQ ID NO: 76643 - protein, 15 aa, Artificial Sequence
  Description of Artificial Sequence: Synthetic peptide
  Seed: GMDPRMCSLMQGSTL
GMDYRMVSMMQASTL

SEQ ID NO: 76644 - protein, 15 aa, Artificial Sequence
  Description of Artificial Sequence: Synthetic peptide
  Seed: GMDPRMCSLMQGSTL
GMDYRMVSMMQGSTL

SEQ ID NO: 76645 - protein, 15 aa, Artificial Sequence
  Description of Artificial Sequence: Synthetic peptide
  Seed: GMDPRMCSLMQGSTL
GMDYRMVSMMQHSTL

SEQ ID NO: 76646 - protein, 15 aa, Artificial Sequence
  Description of Artificial Sequence: Synthetic peptide
  Seed: GMDPRMCSLMQGSTL
GMDYRMVSMMQISTL

SEQ ID NO: 76647 - protein, 15 aa, Artificial Sequence
  Description of Artificial Sequence: Synthetic peptide
  Seed: GMDPRMCSLMQGSTL
GMDYRMVSMMQLSTL

SEQ ID NO: 76648 - protein, 15 aa, Artificial Sequence
  Description of Artificial Sequence: Synthetic peptide
  Seed: GMDPRMCSLMQGSTL
GMDYRMVSMMQMSTL

SEQ ID NO: 76649 - protein, 15 aa, Artificial Sequence
  Description of Artificial Sequence: Synthetic peptide
  Seed: GMDPRMCSLMQGSTL
GMDYRMVSMMQNSTL

SEQ ID NO: 76650 - protein, 15 aa, Artificial Sequence
  Description of Artificial Sequence: Synthetic peptide
  Seed: GMDPRMCSLMQGSTL
GMDYRMVSMMQPSTL

SEQ ID NO: 76651 - protein, 15 aa, Artificial Sequence
  Description of Artificial Sequence: Synthetic peptide
  Seed: GMDPRMCSLMQGSTL
GMDYRMVSMMQSSTL

SEQ ID NO: 76652 - protein, 15 aa, Artificial Sequence
  Description of Artificial Sequence: Synthetic peptide
  Seed: GMDPRMCSLMQGSTL
GMDYRMVSMMQTSTL

SEQ ID NO: 76653 - protein, 15 aa, Artificial Sequence
  Description of Artificial Sequence: Synthetic peptide
  Seed: GMDPRMCSLMQGSTL
GMDYRMVSMMQVSTL

SEQ ID NO: 76654 - protein, 15 aa, Artificial Sequence
  Description of Artificial Sequence: Synthetic peptide
  Seed: GMDPRMCSLMQGSTL
GMDYRMVSNMQASTL

SEQ ID NO: 76655 - protein, 15 aa, Artificial Sequence
  Description of Artificial Sequence: Synthetic peptide
  Seed: GMDPRMCSLMQGSTL
GMDYRMVSNMQGSTL

SEQ ID NO: 76656 - protein, 15 aa, Artificial Sequence
  Description of Artificial Sequence: Synthetic peptide
  Seed: GMDPRMCSLMQGSTL
GMDYRMVSNMQHSTL

SEQ ID NO: 76657 - protein, 15 aa, Artificial Sequence
  Description of Artificial Sequence: Synthetic peptide
  Seed: GMDPRMCSLMQGSTL
GMDYRMVSNMQISTL

SEQ ID NO: 76658 - protein, 15 aa, Artificial Sequence
  Description of Artificial Sequence: Synthetic peptide
  Seed: GMDPRMCSLMQGSTL
GMDYRMVSNMQLSTL

SEQ ID NO: 76659 - protein, 15 aa, Artificial Sequence
  Description of Artificial Sequence: Synthetic peptide
  Seed: GMDPRMCSLMQGSTL
GMDYRMVSNMQMSTL

SEQ ID NO: 76660 - protein, 15 aa, Artificial Sequence
  Description of Artificial Sequence: Synthetic peptide
  Seed: GMDPRMCSLMQGSTL
GMDYRMVSNMQNSTL

SEQ ID NO: 76661 - protein, 15 aa, Artificial Sequence
  Description of Artificial Sequence: Synthetic peptide
  Seed: GMDPRMCSLMQGSTL
GMDYRMVSNMQSSTL

SEQ ID NO: 76662 - protein, 15 aa, Artificial Sequence
  Description of Artificial Sequence: Synthetic peptide
  Seed: GMDPRMCSLMQGSTL
GMDYRMVSNMQTSTL

SEQ ID NO: 76663 - protein, 15 aa, Artificial Sequence
  Description of Artificial Sequence: Synthetic peptide
  Seed: GMDPRMCSLMQGSTL
GMDYRMVSNMQVSTL

SEQ ID NO: 76664 - protein, 15 aa, Artificial Sequence
  Description of Artificial Sequence: Synthetic peptide
  Seed: GMDPRMCSLMQGSTL
GMDYRMVSPMQASTL

SEQ ID NO: 76665 - protein, 15 aa, Artificial Sequence
  Description of Artificial Sequence: Synthetic peptide
  Seed: GMDPRMCSLMQGSTL
GMDYRMVSPMQCSTL

SEQ ID NO: 76666 - protein, 15 aa, Artificial Sequence
  Description of Artificial Sequence: Synthetic peptide
  Seed: GMDPRMCSLMQGSTL
GMDYRMVSPMQDSTL

SEQ ID NO: 76667 - protein, 15 aa, Artificial Sequence
  Description of Artificial Sequence: Synthetic peptide
  Seed: GMDPRMCSLMQGSTL
GMDYRMVSPMQESTL

SEQ ID NO: 76668 - protein, 15 aa, Artificial Sequence
  Description of Artificial Sequence: Synthetic peptide
  Seed: GMDPRMCSLMQGSTL
GMDYRMVSPMQFSTL

SEQ ID NO: 76669 - protein, 15 aa, Artificial Sequence
  Description of Artificial Sequence: Synthetic peptide
  Seed: GMDPRMCSLMQGSTL
GMDYRMVSPMQGSTL

SEQ ID NO: 76670 - protein, 15 aa, Artificial Sequence
  Description of Artificial Sequence: Synthetic peptide
  Seed: GMDPRMCSLMQGSTL
GMDYRMVSPMQHSTL

SEQ ID NO: 76671 - protein, 15 aa, Artificial Sequence
  Description of Artificial Sequence: Synthetic peptide
  Seed: GMDPRMCSLMQGSTL
GMDYRMVSPMQISTL

SEQ ID NO: 76672 - protein, 15 aa, Artificial Sequence
  Description of Artificial Sequence: Synthetic peptide
  Seed: GMDPRMCSLMQGSTL
GMDYRMVSPMQLSTL

SEQ ID NO: 76673 - protein, 15 aa, Artificial Sequence
  Description of Artificial Sequence: Synthetic peptide
  Seed: GMDPRMCSLMQGSTL
GMDYRMVSPMQMSTL

SEQ ID NO: 76674 - protein, 15 aa, Artificial Sequence
  Description of Artificial Sequence: Synthetic peptide
  Seed: GMDPRMCSLMQGSTL
GMDYRMVSPMQNSTL

SEQ ID NO: 76675 - protein, 15 aa, Artificial Sequence
  Description of Artificial Sequence: Synthetic peptide
  Seed: GMDPRMCSLMQGSTL
GMDYRMVSPMQPSTL

SEQ ID NO: 76676 - protein, 15 aa, Artificial Sequence
  Description of Artificial Sequence: Synthetic peptide
  Seed: GMDPRMCSLMQGSTL
GMDYRMVSPMQQSTL

SEQ ID NO: 76677 - protein, 15 aa, Artificial Sequence
  Description of Artificial Sequence: Synthetic peptide
  Seed: GMDPRMCSLMQGSTL
GMDYRMVSPMQSSTL

SEQ ID NO: 76678 - protein, 15 aa, Artificial Sequence
  Description of Artificial Sequence: Synthetic peptide
  Seed: GMDPRMCSLMQGSTL
GMDYRMVSPMQTSTL

SEQ ID NO: 76679 - protein, 15 aa, Artificial Sequence
  Description of Artificial Sequence: Synthetic peptide
  Seed: GMDPRMCSLMQGSTL
GMDYRMVSPMQVSTL

SEQ ID NO: 76680 - protein, 15 aa, Artificial Sequence
  Description of Artificial Sequence: Synthetic peptide
  Seed: GMDPRMCSLMQGSTL
GMDYRMVSQMQASTL

SEQ ID NO: 76681 - protein, 15 aa, Artificial Sequence
  Description of Artificial Sequence: Synthetic peptide
  Seed: GMDPRMCSLMQGSTL
GMDYRMVSSMQASTL

SEQ ID NO: 76682 - protein, 15 aa, Artificial Sequence
  Description of Artificial Sequence: Synthetic peptide
  Seed: GMDPRMCSLMQGSTL
GMDYRMVSSMQGSTL

SEQ ID NO: 76683 - protein, 15 aa, Artificial Sequence
  Description of Artificial Sequence: Synthetic peptide
  Seed: GMDPRMCSLMQGSTL
GMDYRMVSSMQHSTL

SEQ ID NO: 76684 - protein, 15 aa, Artificial Sequence
  Description of Artificial Sequence: Synthetic peptide
  Seed: GMDPRMCSLMQGSTL
GMDYRMVSSMQISTL

SEQ ID NO: 76685 - protein, 15 aa, Artificial Sequence
  Description of Artificial Sequence: Synthetic peptide
  Seed: GMDPRMCSLMQGSTL
GMDYRMVSSMQLSTL

SEQ ID NO: 76686 - protein, 15 aa, Artificial Sequence
  Description of Artificial Sequence: Synthetic peptide
  Seed: GMDPRMCSLMQGSTL
GMDYRMVSSMQMSTL

SEQ ID NO: 76687 - protein, 15 aa, Artificial Sequence
  Description of Artificial Sequence: Synthetic peptide
  Seed: GMDPRMCSLMQGSTL
GMDYRMVSSMQNSTL

SEQ ID NO: 76688 - protein, 15 aa, Artificial Sequence
  Description of Artificial Sequence: Synthetic peptide
  Seed: GMDPRMCSLMQGSTL
GMDYRMVSSMQPSTL

SEQ ID NO: 76689 - protein, 15 aa, Artificial Sequence
  Description of Artificial Sequence: Synthetic peptide
  Seed: GMDPRMCSLMQGSTL
GMDYRMVSSMQQSTL

SEQ ID NO: 76690 - protein, 15 aa, Artificial Sequence
  Description of Artificial Sequence: Synthetic peptide
  Seed: GMDPRMCSLMQGSTL
GMDYRMVSSMQSSTL

SEQ ID NO: 76691 - protein, 15 aa, Artificial Sequence
  Description of Artificial Sequence: Synthetic peptide
  Seed: GMDPRMCSLMQGSTL
GMDYRMVSSMQTSTL

SEQ ID NO: 76692 - protein, 15 aa, Artificial Sequence
  Description of Artificial Sequence: Synthetic peptide
  Seed: GMDPRMCSLMQGSTL
GMDYRMVSSMQVSTL

SEQ ID NO: 76693 - protein, 15 aa, Artificial Sequence
  Description of Artificial Sequence: Synthetic peptide
  Seed: GMDPRMCSLMQGSTL
GMDYRMVSTMQASTL

SEQ ID NO: 76694 - protein, 15 aa, Artificial Sequence
  Description of Artificial Sequence: Synthetic peptide
  Seed: GMDPRMCSLMQGSTL
GMDYRMVSTMQGSTL

SEQ ID NO: 76695 - protein, 15 aa, Artificial Sequence
  Description of Artificial Sequence: Synthetic peptide
  Seed: GMDPRMCSLMQGSTL
GMDYRMVSTMQHSTL

SEQ ID NO: 76696 - protein, 15 aa, Artificial Sequence
  Description of Artificial Sequence: Synthetic peptide
  Seed: GMDPRMCSLMQGSTL
GMDYRMVSTMQISTL

SEQ ID NO: 76697 - protein, 15 aa, Artificial Sequence
  Description of Artificial Sequence: Synthetic peptide
  Seed: GMDPRMCSLMQGSTL
GMDYRMVSTMQLSTL

SEQ ID NO: 76698 - protein, 15 aa, Artificial Sequence
  Description of Artificial Sequence: Synthetic peptide
  Seed: GMDPRMCSLMQGSTL
GMDYRMVSTMQMSTL

SEQ ID NO: 76699 - protein, 15 aa, Artificial Sequence
  Description of Artificial Sequence: Synthetic peptide
  Seed: GMDPRMCSLMQGSTL
GMDYRMVSTMQNSTL

SEQ ID NO: 76700 - protein, 15 aa, Artificial Sequence
  Description of Artificial Sequence: Synthetic peptide
  Seed: GMDPRMCSLMQGSTL
GMDYRMVSTMQPSTL

SEQ ID NO: 76701 - protein, 15 aa, Artificial Sequence
  Description of Artificial Sequence: Synthetic peptide
  Seed: GMDPRMCSLMQGSTL
GMDYRMVSTMQQSTL

SEQ ID NO: 76702 - protein, 15 aa, Artificial Sequence
  Description of Artificial Sequence: Synthetic peptide
  Seed: GMDPRMCSLMQGSTL
GMDYRMVSTMQSSTL

SEQ ID NO: 76703 - protein, 15 aa, Artificial Sequence
  Description of Artificial Sequence: Synthetic peptide
  Seed: GMDPRMCSLMQGSTL
GMDYRMVSTMQTSTL

SEQ ID NO: 76704 - protein, 15 aa, Artificial Sequence
  Description of Artificial Sequence: Synthetic peptide
  Seed: GMDPRMCSLMQGSTL
GMDYRMVSTMQVSTL

SEQ ID NO: 76705 - protein, 15 aa, Artificial Sequence
  Description of Artificial Sequence: Synthetic peptide
  Seed: GMDPRMCSLMQGSTL
GMDYRMVSVMQASTL

SEQ ID NO: 76706 - protein, 15 aa, Artificial Sequence
  Description of Artificial Sequence: Synthetic peptide
  Seed: GMDPRMCSLMQGSTL
GMDYRMVSVMQGSTL

SEQ ID NO: 76707 - protein, 15 aa, Artificial Sequence
  Description of Artificial Sequence: Synthetic peptide
  Seed: GMDPRMCSLMQGSTL
GMDYRMVSVMQHSTL

SEQ ID NO: 76708 - protein, 15 aa, Artificial Sequence
  Description of Artificial Sequence: Synthetic peptide
  Seed: GMDPRMCSLMQGSTL
GMDYRMVSVMQISTL

SEQ ID NO: 76709 - protein, 15 aa, Artificial Sequence
  Description of Artificial Sequence: Synthetic peptide
  Seed: GMDPRMCSLMQGSTL
GMDYRMVSVMQLSTL

SEQ ID NO: 76710 - protein, 15 aa, Artificial Sequence
  Description of Artificial Sequence: Synthetic peptide
  Seed: GMDPRMCSLMQGSTL
GMDYRMVSVMQMSTL

SEQ ID NO: 76711 - protein, 15 aa, Artificial Sequence
  Description of Artificial Sequence: Synthetic peptide
  Seed: GMDPRMCSLMQGSTL
GMDYRMVSVMQNSTL

SEQ ID NO: 76712 - protein, 15 aa, Artificial Sequence
  Description of Artificial Sequence: Synthetic peptide
  Seed: GMDPRMCSLMQGSTL
GMDYRMVSVMQPSTL

SEQ ID NO: 76713 - protein, 15 aa, Artificial Sequence
  Description of Artificial Sequence: Synthetic peptide
  Seed: GMDPRMCSLMQGSTL
GMDYRMVSVMQQSTL

SEQ ID NO: 76714 - protein, 15 aa, Artificial Sequence
  Description of Artificial Sequence: Synthetic peptide
  Seed: GMDPRMCSLMQGSTL
GMDYRMVSVMQSSTL

SEQ ID NO: 76715 - protein, 15 aa, Artificial Sequence
  Description of Artificial Sequence: Synthetic peptide
  Seed: GMDPRMCSLMQGSTL
GMDYRMVSVMQTSTL

SEQ ID NO: 76716 - protein, 15 aa, Artificial Sequence
  Description of Artificial Sequence: Synthetic peptide
  Seed: GMDPRMCSLMQGSTL
GMDYRMVSVMQVSTL

SEQ ID NO: 76717 - protein, 15 aa, Artificial Sequence
  Description of Artificial Sequence: Synthetic peptide
  Seed: GMDPRMCSLMQGSTL
GMDYRMWSAMQASTL

SEQ ID NO: 76718 - protein, 15 aa, Artificial Sequence
  Description of Artificial Sequence: Synthetic peptide
  Seed: GMDPRMCSLMQGSTL
GMDYRMWSAMQGSTL

SEQ ID NO: 76719 - protein, 15 aa, Artificial Sequence
  Description of Artificial Sequence: Synthetic peptide
  Seed: GMDPRMCSLMQGSTL
GMDYRMWSAMQHSTL

SEQ ID NO: 76720 - protein, 15 aa, Artificial Sequence
  Description of Artificial Sequence: Synthetic peptide
  Seed: GMDPRMCSLMQGSTL
GMDYRMWSAMQISTL

SEQ ID NO: 76721 - protein, 15 aa, Artificial Sequence
  Description of Artificial Sequence: Synthetic peptide
  Seed: GMDPRMCSLMQGSTL
GMDYRMWSAMQLSTL

SEQ ID NO: 76722 - protein, 15 aa, Artificial Sequence
  Description of Artificial Sequence: Synthetic peptide
  Seed: GMDPRMCSLMQGSTL
GMDYRMWSAMQMSTL

SEQ ID NO: 76723 - protein, 15 aa, Artificial Sequence
  Description of Artificial Sequence: Synthetic peptide
  Seed: GMDPRMCSLMQGSTL
GMDYRMWSAMQNSTL

SEQ ID NO: 76724 - protein, 15 aa, Artificial Sequence
  Description of Artificial Sequence: Synthetic peptide
  Seed: GMDPRMCSLMQGSTL
GMDYRMWSAMQPSTL

SEQ ID NO: 76725 - protein, 15 aa, Artificial Sequence
  Description of Artificial Sequence: Synthetic peptide
  Seed: GMDPRMCSLMQGSTL
GMDYRMWSAMQSSTL

SEQ ID NO: 76726 - protein, 15 aa, Artificial Sequence
  Description of Artificial Sequence: Synthetic peptide
  Seed: GMDPRMCSLMQGSTL
GMDYRMWSAMQTSTL

SEQ ID NO: 76727 - protein, 15 aa, Artificial Sequence
  Description of Artificial Sequence: Synthetic peptide
  Seed: GMDPRMCSLMQGSTL
GMDYRMWSAMQVSTL

SEQ ID NO: 76728 - protein, 15 aa, Artificial Sequence
  Description of Artificial Sequence: Synthetic peptide
  Seed: GMDPRMCSLMQGSTL
GMDYRMWSHMQASTL

SEQ ID NO: 76729 - protein, 15 aa, Artificial Sequence
  Description of Artificial Sequence: Synthetic peptide
  Seed: GMDPRMCSLMQGSTL
GMDYRMWSIMQASTL

SEQ ID NO: 76730 - protein, 15 aa, Artificial Sequence
  Description of Artificial Sequence: Synthetic peptide
  Seed: GMDPRMCSLMQGSTL
GMDYRMWSIMQGSTL

SEQ ID NO: 76731 - protein, 15 aa, Artificial Sequence
  Description of Artificial Sequence: Synthetic peptide
  Seed: GMDPRMCSLMQGSTL
GMDYRMWSIMQNSTL

SEQ ID NO: 76732 - protein, 15 aa, Artificial Sequence
  Description of Artificial Sequence: Synthetic peptide
  Seed: GMDPRMCSLMQGSTL
GMDYRMWSIMQSSTL

SEQ ID NO: 76733 - protein, 15 aa, Artificial Sequence
  Description of Artificial Sequence: Synthetic peptide
  Seed: GMDPRMCSLMQGSTL
GMDYRMWSIMQTSTL

SEQ ID NO: 76734 - protein, 15 aa, Artificial Sequence
  Description of Artificial Sequence: Synthetic peptide
  Seed: GMDPRMCSLMQGSTL
GMDYRMWSIMQVSTL

SEQ ID NO: 76735 - protein, 15 aa, Artificial Sequence
  Description of Artificial Sequence: Synthetic peptide
  Seed: GMDPRMCSLMQGSTL
GMDYRMWSLMQASTL

SEQ ID NO: 76736 - protein, 15 aa, Artificial Sequence
  Description of Artificial Sequence: Synthetic peptide
  Seed: GMDPRMCSLMQGSTL
GMDYRMWSLMQNSTL

SEQ ID NO: 76737 - protein, 15 aa, Artificial Sequence
  Description of Artificial Sequence: Synthetic peptide
  Seed: GMDPRMCSLMQGSTL
GMDYRMWSLMQSSTL

SEQ ID NO: 76738 - protein, 15 aa, Artificial Sequence
  Description of Artificial Sequence: Synthetic peptide
  Seed: GMDPRMCSLMQGSTL
GMDYRMWSLMQTSTL

SEQ ID NO: 76739 - protein, 15 aa, Artificial Sequence
  Description of Artificial Sequence: Synthetic peptide
  Seed: GMDPRMCSLMQGSTL
GMDYRMWSMMQASTL

SEQ ID NO: 76740 - protein, 15 aa, Artificial Sequence
  Description of Artificial Sequence: Synthetic peptide
  Seed: GMDPRMCSLMQGSTL
GMDYRMWSMMQGSTL

SEQ ID NO: 76741 - protein, 15 aa, Artificial Sequence
  Description of Artificial Sequence: Synthetic peptide
  Seed: GMDPRMCSLMQGSTL
GMDYRMWSMMQNSTL

SEQ ID NO: 76742 - protein, 15 aa, Artificial Sequence
  Description of Artificial Sequence: Synthetic peptide
  Seed: GMDPRMCSLMQGSTL
GMDYRMWSMMQSSTL

SEQ ID NO: 76743 - protein, 15 aa, Artificial Sequence
  Description of Artificial Sequence: Synthetic peptide
  Seed: GMDPRMCSLMQGSTL
GMDYRMWSMMQVSTL

SEQ ID NO: 76744 - protein, 15 aa, Artificial Sequence
  Description of Artificial Sequence: Synthetic peptide
  Seed: GMDPRMCSLMQGSTL
GMDYRMWSPMQASTL

SEQ ID NO: 76745 - protein, 15 aa, Artificial Sequence
  Description of Artificial Sequence: Synthetic peptide
  Seed: GMDPRMCSLMQGSTL
GMDYRMWSPMQMSTL

SEQ ID NO: 76746 - protein, 15 aa, Artificial Sequence
  Description of Artificial Sequence: Synthetic peptide
  Seed: GMDPRMCSLMQGSTL
GMDYRMWSPMQNSTL

SEQ ID NO: 76747 - protein, 15 aa, Artificial Sequence
  Description of Artificial Sequence: Synthetic peptide
  Seed: GMDPRMCSLMQGSTL
GMDYRMWSPMQSSTL

SEQ ID NO: 76748 - protein, 15 aa, Artificial Sequence
  Description of Artificial Sequence: Synthetic peptide
  Seed: GMDPRMCSLMQGSTL
GMDYRMWSPMQTSTL

SEQ ID NO: 76749 - protein, 15 aa, Artificial Sequence
  Description of Artificial Sequence: Synthetic peptide
  Seed: GMDPRMCSLMQGSTL
GMDYRMWSPMQVSTL

SEQ ID NO: 76750 - protein, 15 aa, Artificial Sequence
  Description of Artificial Sequence: Synthetic peptide
  Seed: GMDPRMCSLMQGSTL
GMDYRMWSSMQASTL

SEQ ID NO: 76751 - protein, 15 aa, Artificial Sequence
  Description of Artificial Sequence: Synthetic peptide
  Seed: GMDPRMCSLMQGSTL
GMDYRMWSSMQNSTL

SEQ ID NO: 76752 - protein, 15 aa, Artificial Sequence
  Description of Artificial Sequence: Synthetic peptide
  Seed: GMDPRMCSLMQGSTL
GMDYRMWSSMQSSTL

SEQ ID NO: 76753 - protein, 15 aa, Artificial Sequence
  Description of Artificial Sequence: Synthetic peptide
  Seed: GMDPRMCSLMQGSTL
GMDYRMWSSMQTSTL

SEQ ID NO: 76754 - protein, 15 aa, Artificial Sequence
  Description of Artificial Sequence: Synthetic peptide
  Seed: GMDPRMCSLMQGSTL
GMDYRMWSSMQVSTL

SEQ ID NO: 76755 - protein, 15 aa, Artificial Sequence
  Description of Artificial Sequence: Synthetic peptide
  Seed: GMDPRMCSLMQGSTL
GMDYRMWSTMQASTL

SEQ ID NO: 76756 - protein, 15 aa, Artificial Sequence
  Description of Artificial Sequence: Synthetic peptide
  Seed: GMDPRMCSLMQGSTL
GMDYRMWSTMQNSTL

SEQ ID NO: 76757 - protein, 15 aa, Artificial Sequence
  Description of Artificial Sequence: Synthetic peptide
  Seed: GMDPRMCSLMQGSTL
GMDYRMWSTMQSSTL

SEQ ID NO: 76758 - protein, 15 aa, Artificial Sequence
  Description of Artificial Sequence: Synthetic peptide
  Seed: GMDPRMCSLMQGSTL
GMDYRMWSTMQTSTL

SEQ ID NO: 76759 - protein, 15 aa, Artificial Sequence
  Description of Artificial Sequence: Synthetic peptide
  Seed: GMDPRMCSLMQGSTL
GMDYRMWSTMQVSTL

SEQ ID NO: 76760 - protein, 15 aa, Artificial Sequence
  Description of Artificial Sequence: Synthetic peptide
  Seed: GMDPRMCSLMQGSTL
GMDYRMWSVMQASTL

SEQ ID NO: 76761 - protein, 15 aa, Artificial Sequence
  Description of Artificial Sequence: Synthetic peptide
  Seed: GMDPRMCSLMQGSTL
GMDYRMWSVMQGSTL

SEQ ID NO: 76762 - protein, 15 aa, Artificial Sequence
  Description of Artificial Sequence: Synthetic peptide
  Seed: GMDPRMCSLMQGSTL
GMDYRMWSVMQMSTL

SEQ ID NO: 76763 - protein, 15 aa, Artificial Sequence
  Description of Artificial Sequence: Synthetic peptide
  Seed: GMDPRMCSLMQGSTL
GMDYRMWSVMQNSTL

SEQ ID NO: 76764 - protein, 15 aa, Artificial Sequence
  Description of Artificial Sequence: Synthetic peptide
  Seed: GMDPRMCSLMQGSTL
GMDYRMWSVMQPSTL

SEQ ID NO: 76765 - protein, 15 aa, Artificial Sequence
  Description of Artificial Sequence: Synthetic peptide
  Seed: GMDPRMCSLMQGSTL
GMDYRMWSVMQSSTL

SEQ ID NO: 76766 - protein, 15 aa, Artificial Sequence
  Description of Artificial Sequence: Synthetic peptide
  Seed: GMDPRMCSLMQGSTL
GMDYRMWSVMQTSTL

SEQ ID NO: 76767 - protein, 15 aa, Artificial Sequence
  Description of Artificial Sequence: Synthetic peptide
  Seed: GMDPRMCSLMQGSTL
GMDYRMWSVMQVSTL

SEQ ID NO: 76768 - protein, 15 aa, Artificial Sequence
  Description of Artificial Sequence: Synthetic peptide
  Seed: GMDPRMCSLMQGSTL
GMDYRMYSAMQASTL

SEQ ID NO: 76769 - protein, 15 aa, Artificial Sequence
  Description of Artificial Sequence: Synthetic peptide
  Seed: GMDPRMCSLMQGSTL
GMDYRMYSAMQGSTL

SEQ ID NO: 76770 - protein, 15 aa, Artificial Sequence
  Description of Artificial Sequence: Synthetic peptide
  Seed: GMDPRMCSLMQGSTL
GMDYRMYSAMQHSTL

SEQ ID NO: 76771 - protein, 15 aa, Artificial Sequence
  Description of Artificial Sequence: Synthetic peptide
  Seed: GMDPRMCSLMQGSTL
GMDYRMYSAMQISTL

SEQ ID NO: 76772 - protein, 15 aa, Artificial Sequence
  Description of Artificial Sequence: Synthetic peptide
  Seed: GMDPRMCSLMQGSTL
GMDYRMYSAMQLSTL

SEQ ID NO: 76773 - protein, 15 aa, Artificial Sequence
  Description of Artificial Sequence: Synthetic peptide
  Seed: GMDPRMCSLMQGSTL
GMDYRMYSAMQMSTL

SEQ ID NO: 76774 - protein, 15 aa, Artificial Sequence
  Description of Artificial Sequence: Synthetic peptide
  Seed: GMDPRMCSLMQGSTL
GMDYRMYSAMQNSTL

SEQ ID NO: 76775 - protein, 15 aa, Artificial Sequence
  Description of Artificial Sequence: Synthetic peptide
  Seed: GMDPRMCSLMQGSTL
GMDYRMYSAMQSSTL

SEQ ID NO: 76776 - protein, 15 aa, Artificial Sequence
  Description of Artificial Sequence: Synthetic peptide
  Seed: GMDPRMCSLMQGSTL
GMDYRMYSAMQTSTL

SEQ ID NO: 76777 - protein, 15 aa, Artificial Sequence
  Description of Artificial Sequence: Synthetic peptide
  Seed: GMDPRMCSLMQGSTL
GMDYRMYSAMQVSTL

SEQ ID NO: 76778 - protein, 15 aa, Artificial Sequence
  Description of Artificial Sequence: Synthetic peptide
  Seed: GMDPRMCSLMQGSTL
GMDYRMYSGMQASTL

SEQ ID NO: 76779 - protein, 15 aa, Artificial Sequence
  Description of Artificial Sequence: Synthetic peptide
  Seed: GMDPRMCSLMQGSTL
GMDYRMYSHMQSSTL

SEQ ID NO: 76780 - protein, 15 aa, Artificial Sequence
  Description of Artificial Sequence: Synthetic peptide
  Seed: GMDPRMCSLMQGSTL
GMDYRMYSIMQASTL

SEQ ID NO: 76781 - protein, 15 aa, Artificial Sequence
  Description of Artificial Sequence: Synthetic peptide
  Seed: GMDPRMCSLMQGSTL
GMDYRMYSIMQGSTL

SEQ ID NO: 76782 - protein, 15 aa, Artificial Sequence
  Description of Artificial Sequence: Synthetic peptide
  Seed: GMDPRMCSLMQGSTL
GMDYRMYSIMQISTL

SEQ ID NO: 76783 - protein, 15 aa, Artificial Sequence
  Description of Artificial Sequence: Synthetic peptide
  Seed: GMDPRMCSLMQGSTL
GMDYRMYSIMQNSTL

SEQ ID NO: 76784 - protein, 15 aa, Artificial Sequence
  Description of Artificial Sequence: Synthetic peptide
  Seed: GMDPRMCSLMQGSTL
GMDYRMYSIMQSSTL

SEQ ID NO: 76785 - protein, 15 aa, Artificial Sequence
  Description of Artificial Sequence: Synthetic peptide
  Seed: GMDPRMCSLMQGSTL
GMDYRMYSIMQVSTL

SEQ ID NO: 76786 - protein, 15 aa, Artificial Sequence
  Description of Artificial Sequence: Synthetic peptide
  Seed: GMDPRMCSLMQGSTL
GMDYRMYSKMQASTL

SEQ ID NO: 76787 - protein, 15 aa, Artificial Sequence
  Description of Artificial Sequence: Synthetic peptide
  Seed: GMDPRMCSLMQGSTL
GMDYRMYSLMQGSTL

SEQ ID NO: 76788 - protein, 15 aa, Artificial Sequence
  Description of Artificial Sequence: Synthetic peptide
  Seed: GMDPRMCSLMQGSTL
GMDYRMYSLMQNSTL

SEQ ID NO: 76789 - protein, 15 aa, Artificial Sequence
  Description of Artificial Sequence: Synthetic peptide
  Seed: GMDPRMCSLMQGSTL
GMDYRMYSMMQLSTL

SEQ ID NO: 76790 - protein, 15 aa, Artificial Sequence
  Description of Artificial Sequence: Synthetic peptide
  Seed: GMDPRMCSLMQGSTL
GMDYRMYSMMQMSTL

SEQ ID NO: 76791 - protein, 15 aa, Artificial Sequence
  Description of Artificial Sequence: Synthetic peptide
  Seed: GMDPRMCSLMQGSTL
GMDYRMYSNMQASTL

SEQ ID NO: 76792 - protein, 15 aa, Artificial Sequence
  Description of Artificial Sequence: Synthetic peptide
  Seed: GMDPRMCSLMQGSTL
GMDYRMYSPMQASTL

SEQ ID NO: 76793 - protein, 15 aa, Artificial Sequence
  Description of Artificial Sequence: Synthetic peptide
  Seed: GMDPRMCSLMQGSTL
GMDYRMYSPMQNSTL

SEQ ID NO: 76794 - protein, 15 aa, Artificial Sequence
  Description of Artificial Sequence: Synthetic peptide
  Seed: GMDPRMCSLMQGSTL
GMDYRMYSPMQSSTL

SEQ ID NO: 76795 - protein, 15 aa, Artificial Sequence
  Description of Artificial Sequence: Synthetic peptide
  Seed: GMDPRMCSLMQGSTL
GMDYRMYSPMQTSTL

SEQ ID NO: 76796 - protein, 15 aa, Artificial Sequence
  Description of Artificial Sequence: Synthetic peptide
  Seed: GMDPRMCSLMQGSTL
GMDYRMYSPMQVSTL

SEQ ID NO: 76797 - protein, 15 aa, Artificial Sequence
  Description of Artificial Sequence: Synthetic peptide
  Seed: GMDPRMCSLMQGSTL
GMDYRMYSQMQASTL

SEQ ID NO: 76798 - protein, 15 aa, Artificial Sequence
  Description of Artificial Sequence: Synthetic peptide
  Seed: GMDPRMCSLMQGSTL
GMDYRMYSSMQASTL

SEQ ID NO: 76799 - protein, 15 aa, Artificial Sequence
  Description of Artificial Sequence: Synthetic peptide
  Seed: GMDPRMCSLMQGSTL
GMDYRMYSSMQGSTL

SEQ ID NO: 76800 - protein, 15 aa, Artificial Sequence
  Description of Artificial Sequence: Synthetic peptide
  Seed: GMDPRMCSLMQGSTL
GMDYRMYSSMQISTL

SEQ ID NO: 76801 - protein, 15 aa, Artificial Sequence
  Description of Artificial Sequence: Synthetic peptide
  Seed: GMDPRMCSLMQGSTL
GMDYRMYSSMQNSTL

SEQ ID NO: 76802 - protein, 15 aa, Artificial Sequence
  Description of Artificial Sequence: Synthetic peptide
  Seed: GMDPRMCSLMQGSTL
GMDYRMYSSMQSSTL

SEQ ID NO: 76803 - protein, 15 aa, Artificial Sequence
  Description of Artificial Sequence: Synthetic peptide
  Seed: GMDPRMCSLMQGSTL
GMDYRMYSSMQTSTL

SEQ ID NO: 76804 - protein, 15 aa, Artificial Sequence
  Description of Artificial Sequence: Synthetic peptide
  Seed: GMDPRMCSLMQGSTL
GMDYRMYSSMQVSTL

SEQ ID NO: 76805 - protein, 15 aa, Artificial Sequence
  Description of Artificial Sequence: Synthetic peptide
  Seed: GMDPRMCSLMQGSTL
GMDYRMYSTMQASTL

SEQ ID NO: 76806 - protein, 15 aa, Artificial Sequence
  Description of Artificial Sequence: Synthetic peptide
  Seed: GMDPRMCSLMQGSTL
GMDYRMYSTMQNSTL

SEQ ID NO: 76807 - protein, 15 aa, Artificial Sequence
  Description of Artificial Sequence: Synthetic peptide
  Seed: GMDPRMCSLMQGSTL
GMDYRMYSTMQSSTL

SEQ ID NO: 76808 - protein, 15 aa, Artificial Sequence
  Description of Artificial Sequence: Synthetic peptide
  Seed: GMDPRMCSLMQGSTL
GMDYRMYSTMQTSTL

SEQ ID NO: 76809 - protein, 15 aa, Artificial Sequence
  Description of Artificial Sequence: Synthetic peptide
  Seed: GMDPRMCSLMQGSTL
GMDYRMYSTMQVSTL

SEQ ID NO: 76810 - protein, 15 aa, Artificial Sequence
  Description of Artificial Sequence: Synthetic peptide
  Seed: GMDPRMCSLMQGSTL
GMDYRMYSVMQASTL

SEQ ID NO: 76811 - protein, 15 aa, Artificial Sequence
  Description of Artificial Sequence: Synthetic peptide
  Seed: GMDPRMCSLMQGSTL
GMDYRMYSVMQGSTL

SEQ ID NO: 76812 - protein, 15 aa, Artificial Sequence
  Description of Artificial Sequence: Synthetic peptide
  Seed: GMDPRMCSLMQGSTL
GMDYRMYSVMQISTL

SEQ ID NO: 76813 - protein, 15 aa, Artificial Sequence
  Description of Artificial Sequence: Synthetic peptide
  Seed: GMDPRMCSLMQGSTL
GMDYRMYSVMQNSTL

SEQ ID NO: 76814 - protein, 15 aa, Artificial Sequence
  Description of Artificial Sequence: Synthetic peptide
  Seed: GMDPRMCSLMQGSTL
GMDYRMYSVMQSSTL

SEQ ID NO: 76815 - protein, 15 aa, Artificial Sequence
  Description of Artificial Sequence: Synthetic peptide
  Seed: GMDPRMCSLMQGSTL
GMDYRMYSVMQTSTL

SEQ ID NO: 76816 - protein, 15 aa, Artificial Sequence
  Description of Artificial Sequence: Synthetic peptide
  Seed: GMDPRMCSLMQGSTL
GMDYRMYSVMQVSTL

SEQ ID NO: 76817 - protein, 16 aa, Artificial Sequence
  Description of Artificial Sequence: Synthetic peptide
  Seed: GMDPRMCSLMQGSTLP
GMDPRMFSLAQASTAP

SEQ ID NO: 76818 - protein, 16 aa, Artificial Sequence
  Description of Artificial Sequence: Synthetic peptide
  Seed: GMDPRMCSLMQGSTLP
GMDPRMFSLAQASTIP

SEQ ID NO: 76819 - protein, 16 aa, Artificial Sequence
  Description of Artificial Sequence: Synthetic peptide
  Seed: GMDPRMCSLMQGSTLP
GMDPRMFSLAQASTLP

SEQ ID NO: 76820 - protein, 16 aa, Artificial Sequence
  Description of Artificial Sequence: Synthetic peptide
  Seed: GMDPRMCSLMQGSTLP
GMDPRMFSLAQASTMP

SEQ ID NO: 76821 - protein, 16 aa, Artificial Sequence
  Description of Artificial Sequence: Synthetic peptide
  Seed: GMDPRMCSLMQGSTLP
GMDPRMFSLAQASTNP

SEQ ID NO: 76822 - protein, 16 aa, Artificial Sequence
  Description of Artificial Sequence: Synthetic peptide
  Seed: GMDPRMCSLMQGSTLP
GMDPRMFSLAQASTSP

SEQ ID NO: 76823 - protein, 16 aa, Artificial Sequence
  Description of Artificial Sequence: Synthetic peptide
  Seed: GMDPRMCSLMQGSTLP
GMDPRMFSLAQASTTP

SEQ ID NO: 76824 - protein, 16 aa, Artificial Sequence
  Description of Artificial Sequence: Synthetic peptide
  Seed: GMDPRMCSLMQGSTLP
GMDPRMFSLAQASTVP

SEQ ID NO: 76825 - protein, 16 aa, Artificial Sequence
  Description of Artificial Sequence: Synthetic peptide
  Seed: GMDPRMCSLMQGSTLP
GMDPRMFSLAQGSTAP

SEQ ID NO: 76826 - protein, 16 aa, Artificial Sequence
  Description of Artificial Sequence: Synthetic peptide
  Seed: GMDPRMCSLMQGSTLP
GMDPRMFSLAQGSTIP

SEQ ID NO: 76827 - protein, 16 aa, Artificial Sequence
  Description of Artificial Sequence: Synthetic peptide
  Seed: GMDPRMCSLMQGSTLP
GMDPRMFSLAQGSTLP

SEQ ID NO: 76828 - protein, 16 aa, Artificial Sequence
  Description of Artificial Sequence: Synthetic peptide
  Seed: GMDPRMCSLMQGSTLP
GMDPRMFSLAQGSTVP

SEQ ID NO: 76829 - protein, 16 aa, Artificial Sequence
  Description of Artificial Sequence: Synthetic peptide
  Seed: GMDPRMCSLMQGSTLP
GMDPRMFSLAQPSTAP

SEQ ID NO: 76830 - protein, 16 aa, Artificial Sequence
  Description of Artificial Sequence: Synthetic peptide
  Seed: GMDPRMCSLMQGSTLP
GMDPRMFSLAQPSTIP

SEQ ID NO: 76831 - protein, 16 aa, Artificial Sequence
  Description of Artificial Sequence: Synthetic peptide
  Seed: GMDPRMCSLMQGSTLP
GMDPRMFSLAQPSTLP

SEQ ID NO: 76832 - protein, 16 aa, Artificial Sequence
  Description of Artificial Sequence: Synthetic peptide
  Seed: GMDPRMCSLMQGSTLP
GMDPRMFSLAQSSTAP

SEQ ID NO: 76833 - protein, 16 aa, Artificial Sequence
  Description of Artificial Sequence: Synthetic peptide
  Seed: GMDPRMCSLMQGSTLP
GMDPRMFSLAQSSTIP

SEQ ID NO: 76834 - protein, 16 aa, Artificial Sequence
  Description of Artificial Sequence: Synthetic peptide
  Seed: GMDPRMCSLMQGSTLP
GMDPRMFSLAQSSTLP

SEQ ID NO: 76835 - protein, 16 aa, Artificial Sequence
  Description of Artificial Sequence: Synthetic peptide
  Seed: GMDPRMCSLMQGSTLP
GMDPRMFSLAQSSTSP

SEQ ID NO: 76836 - protein, 16 aa, Artificial Sequence
  Description of Artificial Sequence: Synthetic peptide
  Seed: GMDPRMCSLMQGSTLP
GMDPRMFSLAQSSTVP

SEQ ID NO: 76837 - protein, 16 aa, Artificial Sequence
  Description of Artificial Sequence: Synthetic peptide
  Seed: GMDPRMCSLMQGSTLP
GMDPRMFSLAQTSTAP

SEQ ID NO: 76838 - protein, 16 aa, Artificial Sequence
  Description of Artificial Sequence: Synthetic peptide
  Seed: GMDPRMCSLMQGSTLP
GMDPRMFSLAQVSTAP

SEQ ID NO: 76839 - protein, 16 aa, Artificial Sequence
  Description of Artificial Sequence: Synthetic peptide
  Seed: GMDPRMCSLMQGSTLP
GMDPRMFSLAQVSTSP

SEQ ID NO: 76840 - protein, 16 aa, Artificial Sequence
  Description of Artificial Sequence: Synthetic peptide
  Seed: GMDPRMCSLMQGSTLP
GMDPRMFSLIQASTAP

SEQ ID NO: 76841 - protein, 16 aa, Artificial Sequence
  Description of Artificial Sequence: Synthetic peptide
  Seed: GMDPRMCSLMQGSTLP
GMDPRMFSLIQASTGP

SEQ ID NO: 76842 - protein, 16 aa, Artificial Sequence
  Description of Artificial Sequence: Synthetic peptide
  Seed: GMDPRMCSLMQGSTLP
GMDPRMFSLIQASTHP

SEQ ID NO: 76843 - protein, 16 aa, Artificial Sequence
  Description of Artificial Sequence: Synthetic peptide
  Seed: GMDPRMCSLMQGSTLP
GMDPRMFSLIQASTIP

SEQ ID NO: 76844 - protein, 16 aa, Artificial Sequence
  Description of Artificial Sequence: Synthetic peptide
  Seed: GMDPRMCSLMQGSTLP
GMDPRMFSLIQASTLP

SEQ ID NO: 76845 - protein, 16 aa, Artificial Sequence
  Description of Artificial Sequence: Synthetic peptide
  Seed: GMDPRMCSLMQGSTLP
GMDPRMFSLIQASTMP

SEQ ID NO: 76846 - protein, 16 aa, Artificial Sequence
  Description of Artificial Sequence: Synthetic peptide
  Seed: GMDPRMCSLMQGSTLP
GMDPRMFSLIQASTNP

SEQ ID NO: 76847 - protein, 16 aa, Artificial Sequence
  Description of Artificial Sequence: Synthetic peptide
  Seed: GMDPRMCSLMQGSTLP
GMDPRMFSLIQASTQP

SEQ ID NO: 76848 - protein, 16 aa, Artificial Sequence
  Description of Artificial Sequence: Synthetic peptide
  Seed: GMDPRMCSLMQGSTLP
GMDPRMFSLIQASTSP

SEQ ID NO: 76849 - protein, 16 aa, Artificial Sequence
  Description of Artificial Sequence: Synthetic peptide
  Seed: GMDPRMCSLMQGSTLP
GMDPRMFSLIQASTTP

SEQ ID NO: 76850 - protein, 16 aa, Artificial Sequence
  Description of Artificial Sequence: Synthetic peptide
  Seed: GMDPRMCSLMQGSTLP
GMDPRMFSLIQASTVP

SEQ ID NO: 76851 - protein, 16 aa, Artificial Sequence
  Description of Artificial Sequence: Synthetic peptide
  Seed: GMDPRMCSLMQGSTLP
GMDPRMFSLIQGSTAP

SEQ ID NO: 76852 - protein, 16 aa, Artificial Sequence
  Description of Artificial Sequence: Synthetic peptide
  Seed: GMDPRMCSLMQGSTLP
GMDPRMFSLIQGSTIP

SEQ ID NO: 76853 - protein, 16 aa, Artificial Sequence
  Description of Artificial Sequence: Synthetic peptide
  Seed: GMDPRMCSLMQGSTLP
GMDPRMFSLIQGSTLP

SEQ ID NO: 76854 - protein, 16 aa, Artificial Sequence
  Description of Artificial Sequence: Synthetic peptide
  Seed: GMDPRMCSLMQGSTLP
GMDPRMFSLIQGSTMP

SEQ ID NO: 76855 - protein, 16 aa, Artificial Sequence
  Description of Artificial Sequence: Synthetic peptide
  Seed: GMDPRMCSLMQGSTLP
GMDPRMFSLIQGSTNP

SEQ ID NO: 76856 - protein, 16 aa, Artificial Sequence
  Description of Artificial Sequence: Synthetic peptide
  Seed: GMDPRMCSLMQGSTLP
GMDPRMFSLIQGSTSP

SEQ ID NO: 76857 - protein, 16 aa, Artificial Sequence
  Description of Artificial Sequence: Synthetic peptide
  Seed: GMDPRMCSLMQGSTLP
GMDPRMFSLIQGSTTP

SEQ ID NO: 76858 - protein, 16 aa, Artificial Sequence
  Description of Artificial Sequence: Synthetic peptide
  Seed: GMDPRMCSLMQGSTLP
GMDPRMFSLIQGSTVP

SEQ ID NO: 76859 - protein, 16 aa, Artificial Sequence
  Description of Artificial Sequence: Synthetic peptide
  Seed: GMDPRMCSLMQGSTLP
GMDPRMFSLIQISTAP

SEQ ID NO: 76860 - protein, 16 aa, Artificial Sequence
  Description of Artificial Sequence: Synthetic peptide
  Seed: GMDPRMCSLMQGSTLP
GMDPRMFSLIQISTNP

SEQ ID NO: 76861 - protein, 16 aa, Artificial Sequence
  Description of Artificial Sequence: Synthetic peptide
  Seed: GMDPRMCSLMQGSTLP
GMDPRMFSLIQISTSP

SEQ ID NO: 76862 - protein, 16 aa, Artificial Sequence
  Description of Artificial Sequence: Synthetic peptide
  Seed: GMDPRMCSLMQGSTLP
GMDPRMFSLIQNSTAP

SEQ ID NO: 76863 - protein, 16 aa, Artificial Sequence
  Description of Artificial Sequence: Synthetic peptide
  Seed: GMDPRMCSLMQGSTLP
GMDPRMFSLIQNSTLP

SEQ ID NO: 76864 - protein, 16 aa, Artificial Sequence
  Description of Artificial Sequence: Synthetic peptide
  Seed: GMDPRMCSLMQGSTLP
GMDPRMFSLIQNSTSP

SEQ ID NO: 76865 - protein, 16 aa, Artificial Sequence
  Description of Artificial Sequence: Synthetic peptide
  Seed: GMDPRMCSLMQGSTLP
GMDPRMFSLIQNSTVP

SEQ ID NO: 76866 - protein, 16 aa, Artificial Sequence
  Description of Artificial Sequence: Synthetic peptide
  Seed: GMDPRMCSLMQGSTLP
GMDPRMFSLIQPSTAP

SEQ ID NO: 76867 - protein, 16 aa, Artificial Sequence
  Description of Artificial Sequence: Synthetic peptide
  Seed: GMDPRMCSLMQGSTLP
GMDPRMFSLIQPSTIP

SEQ ID NO: 76868 - protein, 16 aa, Artificial Sequence
  Description of Artificial Sequence: Synthetic peptide
  Seed: GMDPRMCSLMQGSTLP
GMDPRMFSLIQPSTLP

SEQ ID NO: 76869 - protein, 16 aa, Artificial Sequence
  Description of Artificial Sequence: Synthetic peptide
  Seed: GMDPRMCSLMQGSTLP
GMDPRMFSLIQPSTMP

SEQ ID NO: 76870 - protein, 16 aa, Artificial Sequence
  Description of Artificial Sequence: Synthetic peptide
  Seed: GMDPRMCSLMQGSTLP
GMDPRMFSLIQPSTNP

SEQ ID NO: 76871 - protein, 16 aa, Artificial Sequence
  Description of Artificial Sequence: Synthetic peptide
  Seed: GMDPRMCSLMQGSTLP
GMDPRMFSLIQPSTSP

SEQ ID NO: 76872 - protein, 16 aa, Artificial Sequence
  Description of Artificial Sequence: Synthetic peptide
  Seed: GMDPRMCSLMQGSTLP
GMDPRMFSLIQPSTTP

SEQ ID NO: 76873 - protein, 16 aa, Artificial Sequence
  Description of Artificial Sequence: Synthetic peptide
  Seed: GMDPRMCSLMQGSTLP
GMDPRMFSLIQPSTVP

SEQ ID NO: 76874 - protein, 16 aa, Artificial Sequence
  Description of Artificial Sequence: Synthetic peptide
  Seed: GMDPRMCSLMQGSTLP
GMDPRMFSLIQSSTAP

SEQ ID NO: 76875 - protein, 16 aa, Artificial Sequence
  Description of Artificial Sequence: Synthetic peptide
  Seed: GMDPRMCSLMQGSTLP
GMDPRMFSLIQSSTIP

SEQ ID NO: 76876 - protein, 16 aa, Artificial Sequence
  Description of Artificial Sequence: Synthetic peptide
  Seed: GMDPRMCSLMQGSTLP
GMDPRMFSLIQSSTLP

SEQ ID NO: 76877 - protein, 16 aa, Artificial Sequence
  Description of Artificial Sequence: Synthetic peptide
  Seed: GMDPRMCSLMQGSTLP
GMDPRMFSLIQSSTMP

SEQ ID NO: 76878 - protein, 16 aa, Artificial Sequence
  Description of Artificial Sequence: Synthetic peptide
  Seed: GMDPRMCSLMQGSTLP
GMDPRMFSLIQSSTNP

SEQ ID NO: 76879 - protein, 16 aa, Artificial Sequence
  Description of Artificial Sequence: Synthetic peptide
  Seed: GMDPRMCSLMQGSTLP
GMDPRMFSLIQSSTSP

SEQ ID NO: 76880 - protein, 16 aa, Artificial Sequence
  Description of Artificial Sequence: Synthetic peptide
  Seed: GMDPRMCSLMQGSTLP
GMDPRMFSLIQSSTTP

SEQ ID NO: 76881 - protein, 16 aa, Artificial Sequence
  Description of Artificial Sequence: Synthetic peptide
  Seed: GMDPRMCSLMQGSTLP
GMDPRMFSLIQSSTVP

SEQ ID NO: 76882 - protein, 16 aa, Artificial Sequence
  Description of Artificial Sequence: Synthetic peptide
  Seed: GMDPRMCSLMQGSTLP
GMDPRMFSLIQTSTAP

SEQ ID NO: 76883 - protein, 16 aa, Artificial Sequence
  Description of Artificial Sequence: Synthetic peptide
  Seed: GMDPRMCSLMQGSTLP
GMDPRMFSLIQTSTIP

SEQ ID NO: 76884 - protein, 16 aa, Artificial Sequence
  Description of Artificial Sequence: Synthetic peptide
  Seed: GMDPRMCSLMQGSTLP
GMDPRMFSLIQTSTLP

SEQ ID NO: 76885 - protein, 16 aa, Artificial Sequence
  Description of Artificial Sequence: Synthetic peptide
  Seed: GMDPRMCSLMQGSTLP
GMDPRMFSLIQTSTNP

SEQ ID NO: 76886 - protein, 16 aa, Artificial Sequence
  Description of Artificial Sequence: Synthetic peptide
  Seed: GMDPRMCSLMQGSTLP
GMDPRMFSLIQTSTSP

SEQ ID NO: 76887 - protein, 16 aa, Artificial Sequence
  Description of Artificial Sequence: Synthetic peptide
  Seed: GMDPRMCSLMQGSTLP
GMDPRMFSLIQTSTTP

SEQ ID NO: 76888 - protein, 16 aa, Artificial Sequence
  Description of Artificial Sequence: Synthetic peptide
  Seed: GMDPRMCSLMQGSTLP
GMDPRMFSLIQTSTVP

SEQ ID NO: 76889 - protein, 16 aa, Artificial Sequence
  Description of Artificial Sequence: Synthetic peptide
  Seed: GMDPRMCSLMQGSTLP
GMDPRMFSLIQVSTAP

SEQ ID NO: 76890 - protein, 16 aa, Artificial Sequence
  Description of Artificial Sequence: Synthetic peptide
  Seed: GMDPRMCSLMQGSTLP
GMDPRMFSLIQVSTNP

SEQ ID NO: 76891 - protein, 16 aa, Artificial Sequence
  Description of Artificial Sequence: Synthetic peptide
  Seed: GMDPRMCSLMQGSTLP
GMDPRMFSLIQVSTSP

SEQ ID NO: 76892 - protein, 16 aa, Artificial Sequence
  Description of Artificial Sequence: Synthetic peptide
  Seed: GMDPRMCSLMQGSTLP
GMDPRMFSLIQVSTTP

SEQ ID NO: 76893 - protein, 16 aa, Artificial Sequence
  Description of Artificial Sequence: Synthetic peptide
  Seed: GMDPRMCSLMQGSTLP
GMDPRMFSLIQVSTVP

SEQ ID NO: 76894 - protein, 16 aa, Artificial Sequence
  Description of Artificial Sequence: Synthetic peptide
  Seed: GMDPRMCSLMQGSTLP
GMDPRMFSLLQASTAP

SEQ ID NO: 76895 - protein, 16 aa, Artificial Sequence
  Description of Artificial Sequence: Synthetic peptide
  Seed: GMDPRMCSLMQGSTLP
GMDPRMFSLLQASTFP

SEQ ID NO: 76896 - protein, 16 aa, Artificial Sequence
  Description of Artificial Sequence: Synthetic peptide
  Seed: GMDPRMCSLMQGSTLP
GMDPRMFSLLQASTGP

SEQ ID NO: 76897 - protein, 16 aa, Artificial Sequence
  Description of Artificial Sequence: Synthetic peptide
  Seed: GMDPRMCSLMQGSTLP
GMDPRMFSLLQASTHP

SEQ ID NO: 76898 - protein, 16 aa, Artificial Sequence
  Description of Artificial Sequence: Synthetic peptide
  Seed: GMDPRMCSLMQGSTLP
GMDPRMFSLLQASTIP

SEQ ID NO: 76899 - protein, 16 aa, Artificial Sequence
  Description of Artificial Sequence: Synthetic peptide
  Seed: GMDPRMCSLMQGSTLP
GMDPRMFSLLQASTLP

SEQ ID NO: 76900 - protein, 16 aa, Artificial Sequence
  Description of Artificial Sequence: Synthetic peptide
  Seed: GMDPRMCSLMQGSTLP
GMDPRMFSLLQASTMP

SEQ ID NO: 76901 - protein, 16 aa, Artificial Sequence
  Description of Artificial Sequence: Synthetic peptide
  Seed: GMDPRMCSLMQGSTLP
GMDPRMFSLLQASTNP

SEQ ID NO: 76902 - protein, 16 aa, Artificial Sequence
  Description of Artificial Sequence: Synthetic peptide
  Seed: GMDPRMCSLMQGSTLP
GMDPRMFSLLQASTQP

SEQ ID NO: 76903 - protein, 16 aa, Artificial Sequence
  Description of Artificial Sequence: Synthetic peptide
  Seed: GMDPRMCSLMQGSTLP
GMDPRMFSLLQASTSP

SEQ ID NO: 76904 - protein, 16 aa, Artificial Sequence
  Description of Artificial Sequence: Synthetic peptide
  Seed: GMDPRMCSLMQGSTLP
GMDPRMFSLLQASTTP

SEQ ID NO: 76905 - protein, 16 aa, Artificial Sequence
  Description of Artificial Sequence: Synthetic peptide
  Seed: GMDPRMCSLMQGSTLP
GMDPRMFSLLQASTVP

SEQ ID NO: 76906 - protein, 16 aa, Artificial Sequence
  Description of Artificial Sequence: Synthetic peptide
  Seed: GMDPRMCSLMQGSTLP
GMDPRMFSLLQGSTAP

SEQ ID NO: 76907 - protein, 16 aa, Artificial Sequence
  Description of Artificial Sequence: Synthetic peptide
  Seed: GMDPRMCSLMQGSTLP
GMDPRMFSLLQGSTGP

SEQ ID NO: 76908 - protein, 16 aa, Artificial Sequence
  Description of Artificial Sequence: Synthetic peptide
  Seed: GMDPRMCSLMQGSTLP
GMDPRMFSLLQGSTIP

SEQ ID NO: 76909 - protein, 16 aa, Artificial Sequence
  Description of Artificial Sequence: Synthetic peptide
  Seed: GMDPRMCSLMQGSTLP
GMDPRMFSLLQGSTLP

SEQ ID NO: 76910 - protein, 16 aa, Artificial Sequence
  Description of Artificial Sequence: Synthetic peptide
  Seed: GMDPRMCSLMQGSTLP
GMDPRMFSLLQGSTMP

SEQ ID NO: 76911 - protein, 16 aa, Artificial Sequence
  Description of Artificial Sequence: Synthetic peptide
  Seed: GMDPRMCSLMQGSTLP
GMDPRMFSLLQGSTNP

SEQ ID NO: 76912 - protein, 16 aa, Artificial Sequence
  Description of Artificial Sequence: Synthetic peptide
  Seed: GMDPRMCSLMQGSTLP
GMDPRMFSLLQGSTSP

SEQ ID NO: 76913 - protein, 16 aa, Artificial Sequence
  Description of Artificial Sequence: Synthetic peptide
  Seed: GMDPRMCSLMQGSTLP
GMDPRMFSLLQGSTTP

SEQ ID NO: 76914 - protein, 16 aa, Artificial Sequence
  Description of Artificial Sequence: Synthetic peptide
  Seed: GMDPRMCSLMQGSTLP
GMDPRMFSLLQGSTVP

SEQ ID NO: 76915 - protein, 16 aa, Artificial Sequence
  Description of Artificial Sequence: Synthetic peptide
  Seed: GMDPRMCSLMQGSTLP
GMDPRMFSLLQISTAP

SEQ ID NO: 76916 - protein, 16 aa, Artificial Sequence
  Description of Artificial Sequence: Synthetic peptide
  Seed: GMDPRMCSLMQGSTLP
GMDPRMFSLLQISTNP

SEQ ID NO: 76917 - protein, 16 aa, Artificial Sequence
  Description of Artificial Sequence: Synthetic peptide
  Seed: GMDPRMCSLMQGSTLP
GMDPRMFSLLQISTSP

SEQ ID NO: 76918 - protein, 16 aa, Artificial Sequence
  Description of Artificial Sequence: Synthetic peptide
  Seed: GMDPRMCSLMQGSTLP
GMDPRMFSLLQISTTP

SEQ ID NO: 76919 - protein, 16 aa, Artificial Sequence
  Description of Artificial Sequence: Synthetic peptide
  Seed: GMDPRMCSLMQGSTLP
GMDPRMFSLLQISTVP

SEQ ID NO: 76920 - protein, 16 aa, Artificial Sequence
  Description of Artificial Sequence: Synthetic peptide
  Seed: GMDPRMCSLMQGSTLP
GMDPRMFSLLQNSTAP

SEQ ID NO: 76921 - protein, 16 aa, Artificial Sequence
  Description of Artificial Sequence: Synthetic peptide
  Seed: GMDPRMCSLMQGSTLP
GMDPRMFSLLQNSTIP

SEQ ID NO: 76922 - protein, 16 aa, Artificial Sequence
  Description of Artificial Sequence: Synthetic peptide
  Seed: GMDPRMCSLMQGSTLP
GMDPRMFSLLQNSTLP

SEQ ID NO: 76923 - protein, 16 aa, Artificial Sequence
  Description of Artificial Sequence: Synthetic peptide
  Seed: GMDPRMCSLMQGSTLP
GMDPRMFSLLQNSTMP

SEQ ID NO: 76924 - protein, 16 aa, Artificial Sequence
  Description of Artificial Sequence: Synthetic peptide
  Seed: GMDPRMCSLMQGSTLP
GMDPRMFSLLQNSTNP

SEQ ID NO: 76925 - protein, 16 aa, Artificial Sequence
  Description of Artificial Sequence: Synthetic peptide
  Seed: GMDPRMCSLMQGSTLP
GMDPRMFSLLQNSTSP

SEQ ID NO: 76926 - protein, 16 aa, Artificial Sequence
  Description of Artificial Sequence: Synthetic peptide
  Seed: GMDPRMCSLMQGSTLP
GMDPRMFSLLQNSTTP

SEQ ID NO: 76927 - protein, 16 aa, Artificial Sequence
  Description of Artificial Sequence: Synthetic peptide
  Seed: GMDPRMCSLMQGSTLP
GMDPRMFSLLQNSTVP

SEQ ID NO: 76928 - protein, 16 aa, Artificial Sequence
  Description of Artificial Sequence: Synthetic peptide
  Seed: GMDPRMCSLMQGSTLP
GMDPRMFSLLQPSTAP

SEQ ID NO: 76929 - protein, 16 aa, Artificial Sequence
  Description of Artificial Sequence: Synthetic peptide
  Seed: GMDPRMCSLMQGSTLP
GMDPRMFSLLQPSTGP

SEQ ID NO: 76930 - protein, 16 aa, Artificial Sequence
  Description of Artificial Sequence: Synthetic peptide
  Seed: GMDPRMCSLMQGSTLP
GMDPRMFSLLQPSTHP

SEQ ID NO: 76931 - protein, 16 aa, Artificial Sequence
  Description of Artificial Sequence: Synthetic peptide
  Seed: GMDPRMCSLMQGSTLP
GMDPRMFSLLQPSTIP

SEQ ID NO: 76932 - protein, 16 aa, Artificial Sequence
  Description of Artificial Sequence: Synthetic peptide
  Seed: GMDPRMCSLMQGSTLP
GMDPRMFSLLQPSTLP

SEQ ID NO: 76933 - protein, 16 aa, Artificial Sequence
  Description of Artificial Sequence: Synthetic peptide
  Seed: GMDPRMCSLMQGSTLP
GMDPRMFSLLQPSTMP

SEQ ID NO: 76934 - protein, 16 aa, Artificial Sequence
  Description of Artificial Sequence: Synthetic peptide
  Seed: GMDPRMCSLMQGSTLP
GMDPRMFSLLQPSTNP

SEQ ID NO: 76935 - protein, 16 aa, Artificial Sequence
  Description of Artificial Sequence: Synthetic peptide
  Seed: GMDPRMCSLMQGSTLP
GMDPRMFSLLQPSTQP

SEQ ID NO: 76936 - protein, 16 aa, Artificial Sequence
  Description of Artificial Sequence: Synthetic peptide
  Seed: GMDPRMCSLMQGSTLP
GMDPRMFSLLQPSTSP

SEQ ID NO: 76937 - protein, 16 aa, Artificial Sequence
  Description of Artificial Sequence: Synthetic peptide
  Seed: GMDPRMCSLMQGSTLP
GMDPRMFSLLQPSTTP

SEQ ID NO: 76938 - protein, 16 aa, Artificial Sequence
  Description of Artificial Sequence: Synthetic peptide
  Seed: GMDPRMCSLMQGSTLP
GMDPRMFSLLQPSTVP

SEQ ID NO: 76939 - protein, 16 aa, Artificial Sequence
  Description of Artificial Sequence: Synthetic peptide
  Seed: GMDPRMCSLMQGSTLP
GMDPRMFSLLQSSTAP

SEQ ID NO: 76940 - protein, 16 aa, Artificial Sequence
  Description of Artificial Sequence: Synthetic peptide
  Seed: GMDPRMCSLMQGSTLP
GMDPRMFSLLQSSTGP

SEQ ID NO: 76941 - protein, 16 aa, Artificial Sequence
  Description of Artificial Sequence: Synthetic peptide
  Seed: GMDPRMCSLMQGSTLP
GMDPRMFSLLQSSTHP

SEQ ID NO: 76942 - protein, 16 aa, Artificial Sequence
  Description of Artificial Sequence: Synthetic peptide
  Seed: GMDPRMCSLMQGSTLP
GMDPRMFSLLQSSTIP

SEQ ID NO: 76943 - protein, 16 aa, Artificial Sequence
  Description of Artificial Sequence: Synthetic peptide
  Seed: GMDPRMCSLMQGSTLP
GMDPRMFSLLQSSTLP

SEQ ID NO: 76944 - protein, 16 aa, Artificial Sequence
  Description of Artificial Sequence: Synthetic peptide
  Seed: GMDPRMCSLMQGSTLP
GMDPRMFSLLQSSTMP

SEQ ID NO: 76945 - protein, 16 aa, Artificial Sequence
  Description of Artificial Sequence: Synthetic peptide
  Seed: GMDPRMCSLMQGSTLP
GMDPRMFSLLQSSTNP

SEQ ID NO: 76946 - protein, 16 aa, Artificial Sequence
  Description of Artificial Sequence: Synthetic peptide
  Seed: GMDPRMCSLMQGSTLP
GMDPRMFSLLQSSTSP

SEQ ID NO: 76947 - protein, 16 aa, Artificial Sequence
  Description of Artificial Sequence: Synthetic peptide
  Seed: GMDPRMCSLMQGSTLP
GMDPRMFSLLQSSTTP

SEQ ID NO: 76948 - protein, 16 aa, Artificial Sequence
  Description of Artificial Sequence: Synthetic peptide
  Seed: GMDPRMCSLMQGSTLP
GMDPRMFSLLQSSTVP

SEQ ID NO: 76949 - protein, 16 aa, Artificial Sequence
  Description of Artificial Sequence: Synthetic peptide
  Seed: GMDPRMCSLMQGSTLP
GMDPRMFSLLQTSTAP

SEQ ID NO: 76950 - protein, 16 aa, Artificial Sequence
  Description of Artificial Sequence: Synthetic peptide
  Seed: GMDPRMCSLMQGSTLP
GMDPRMFSLLQTSTGP

SEQ ID NO: 76951 - protein, 16 aa, Artificial Sequence
  Description of Artificial Sequence: Synthetic peptide
  Seed: GMDPRMCSLMQGSTLP
GMDPRMFSLLQTSTHP

SEQ ID NO: 76952 - protein, 16 aa, Artificial Sequence
  Description of Artificial Sequence: Synthetic peptide
  Seed: GMDPRMCSLMQGSTLP
GMDPRMFSLLQTSTIP

SEQ ID NO: 76953 - protein, 16 aa, Artificial Sequence
  Description of Artificial Sequence: Synthetic peptide
  Seed: GMDPRMCSLMQGSTLP
GMDPRMFSLLQTSTLP

SEQ ID NO: 76954 - protein, 16 aa, Artificial Sequence
  Description of Artificial Sequence: Synthetic peptide
  Seed: GMDPRMCSLMQGSTLP
GMDPRMFSLLQTSTMP

SEQ ID NO: 76955 - protein, 16 aa, Artificial Sequence
  Description of Artificial Sequence: Synthetic peptide
  Seed: GMDPRMCSLMQGSTLP
GMDPRMFSLLQTSTNP

SEQ ID NO: 76956 - protein, 16 aa, Artificial Sequence
  Description of Artificial Sequence: Synthetic peptide
  Seed: GMDPRMCSLMQGSTLP
GMDPRMFSLLQTSTSP

SEQ ID NO: 76957 - protein, 16 aa, Artificial Sequence
  Description of Artificial Sequence: Synthetic peptide
  Seed: GMDPRMCSLMQGSTLP
GMDPRMFSLLQTSTTP

SEQ ID NO: 76958 - protein, 16 aa, Artificial Sequence
  Description of Artificial Sequence: Synthetic peptide
  Seed: GMDPRMCSLMQGSTLP
GMDPRMFSLLQTSTVP

SEQ ID NO: 76959 - protein, 16 aa, Artificial Sequence
  Description of Artificial Sequence: Synthetic peptide
  Seed: GMDPRMCSLMQGSTLP
GMDPRMFSLLQVSTAP

SEQ ID NO: 76960 - protein, 16 aa, Artificial Sequence
  Description of Artificial Sequence: Synthetic peptide
  Seed: GMDPRMCSLMQGSTLP
GMDPRMFSLLQVSTGP

SEQ ID NO: 76961 - protein, 16 aa, Artificial Sequence
  Description of Artificial Sequence: Synthetic peptide
  Seed: GMDPRMCSLMQGSTLP
GMDPRMFSLLQVSTHP

SEQ ID NO: 76962 - protein, 16 aa, Artificial Sequence
  Description of Artificial Sequence: Synthetic peptide
  Seed: GMDPRMCSLMQGSTLP
GMDPRMFSLLQVSTIP

SEQ ID NO: 76963 - protein, 16 aa, Artificial Sequence
  Description of Artificial Sequence: Synthetic peptide
  Seed: GMDPRMCSLMQGSTLP
GMDPRMFSLLQVSTLP

SEQ ID NO: 76964 - protein, 16 aa, Artificial Sequence
  Description of Artificial Sequence: Synthetic peptide
  Seed: GMDPRMCSLMQGSTLP
GMDPRMFSLLQVSTMP

SEQ ID NO: 76965 - protein, 16 aa, Artificial Sequence
  Description of Artificial Sequence: Synthetic peptide
  Seed: GMDPRMCSLMQGSTLP
GMDPRMFSLLQVSTNP

SEQ ID NO: 76966 - protein, 16 aa, Artificial Sequence
  Description of Artificial Sequence: Synthetic peptide
  Seed: GMDPRMCSLMQGSTLP
GMDPRMFSLLQVSTSP

SEQ ID NO: 76967 - protein, 16 aa, Artificial Sequence
  Description of Artificial Sequence: Synthetic peptide
  Seed: GMDPRMCSLMQGSTLP
GMDPRMFSLLQVSTTP

SEQ ID NO: 76968 - protein, 16 aa, Artificial Sequence
  Description of Artificial Sequence: Synthetic peptide
  Seed: GMDPRMCSLMQGSTLP
GMDPRMFSLLQVSTVP

SEQ ID NO: 76969 - protein, 16 aa, Artificial Sequence
  Description of Artificial Sequence: Synthetic peptide
  Seed: GMDPRMCSLMQGSTLP
GMDPRMFSLMQASTAP

SEQ ID NO: 76970 - protein, 16 aa, Artificial Sequence
  Description of Artificial Sequence: Synthetic peptide
  Seed: GMDPRMCSLMQGSTLP
GMDPRMFSLMQASTGP

SEQ ID NO: 76971 - protein, 16 aa, Artificial Sequence
  Description of Artificial Sequence: Synthetic peptide
  Seed: GMDPRMCSLMQGSTLP
GMDPRMFSLMQASTHP

SEQ ID NO: 76972 - protein, 16 aa, Artificial Sequence
  Description of Artificial Sequence: Synthetic peptide
  Seed: GMDPRMCSLMQGSTLP
GMDPRMFSLMQASTIP

SEQ ID NO: 76973 - protein, 16 aa, Artificial Sequence
  Description of Artificial Sequence: Synthetic peptide
  Seed: GMDPRMCSLMQGSTLP
GMDPRMFSLMQASTLP

SEQ ID NO: 76974 - protein, 16 aa, Artificial Sequence
  Description of Artificial Sequence: Synthetic peptide
  Seed: GMDPRMCSLMQGSTLP
GMDPRMFSLMQASTMP

SEQ ID NO: 76975 - protein, 16 aa, Artificial Sequence
  Description of Artificial Sequence: Synthetic peptide
  Seed: GMDPRMCSLMQGSTLP
GMDPRMFSLMQASTNP

SEQ ID NO: 76976 - protein, 16 aa, Artificial Sequence
  Description of Artificial Sequence: Synthetic peptide
  Seed: GMDPRMCSLMQGSTLP
GMDPRMFSLMQASTQP

SEQ ID NO: 76977 - protein, 16 aa, Artificial Sequence
  Description of Artificial Sequence: Synthetic peptide
  Seed: GMDPRMCSLMQGSTLP
GMDPRMFSLMQASTSP

SEQ ID NO: 76978 - protein, 16 aa, Artificial Sequence
  Description of Artificial Sequence: Synthetic peptide
  Seed: GMDPRMCSLMQGSTLP
GMDPRMFSLMQASTTP

SEQ ID NO: 76979 - protein, 16 aa, Artificial Sequence
  Description of Artificial Sequence: Synthetic peptide
  Seed: GMDPRMCSLMQGSTLP
GMDPRMFSLMQASTVP

SEQ ID NO: 76980 - protein, 16 aa, Artificial Sequence
  Description of Artificial Sequence: Synthetic peptide
  Seed: GMDPRMCSLMQGSTLP
GMDPRMFSLMQGSTAP

SEQ ID NO: 76981 - protein, 16 aa, Artificial Sequence
  Description of Artificial Sequence: Synthetic peptide
  Seed: GMDPRMCSLMQGSTLP
GMDPRMFSLMQGSTGP

SEQ ID NO: 76982 - protein, 16 aa, Artificial Sequence
  Description of Artificial Sequence: Synthetic peptide
  Seed: GMDPRMCSLMQGSTLP
GMDPRMFSLMQGSTIP

SEQ ID NO: 76983 - protein, 16 aa, Artificial Sequence
  Description of Artificial Sequence: Synthetic peptide
  Seed: GMDPRMCSLMQGSTLP
GMDPRMFSLMQGSTLP

SEQ ID NO: 76984 - protein, 16 aa, Artificial Sequence
  Description of Artificial Sequence: Synthetic peptide
  Seed: GMDPRMCSLMQGSTLP
GMDPRMFSLMQGSTMP

SEQ ID NO: 76985 - protein, 16 aa, Artificial Sequence
  Description of Artificial Sequence: Synthetic peptide
  Seed: GMDPRMCSLMQGSTLP
GMDPRMFSLMQGSTNP

SEQ ID NO: 76986 - protein, 16 aa, Artificial Sequence
  Description of Artificial Sequence: Synthetic peptide
  Seed: GMDPRMCSLMQGSTLP
GMDPRMFSLMQGSTSP

SEQ ID NO: 76987 - protein, 16 aa, Artificial Sequence
  Description of Artificial Sequence: Synthetic peptide
  Seed: GMDPRMCSLMQGSTLP
GMDPRMFSLMQGSTTP

SEQ ID NO: 76988 - protein, 16 aa, Artificial Sequence
  Description of Artificial Sequence: Synthetic peptide
  Seed: GMDPRMCSLMQGSTLP
GMDPRMFSLMQGSTVP

SEQ ID NO: 76989 - protein, 16 aa, Artificial Sequence
  Description of Artificial Sequence: Synthetic peptide
  Seed: GMDPRMCSLMQGSTLP
GMDPRMFSLMQISTAP

SEQ ID NO: 76990 - protein, 16 aa, Artificial Sequence
  Description of Artificial Sequence: Synthetic peptide
  Seed: GMDPRMCSLMQGSTLP
GMDPRMFSLMQISTIP

SEQ ID NO: 76991 - protein, 16 aa, Artificial Sequence
  Description of Artificial Sequence: Synthetic peptide
  Seed: GMDPRMCSLMQGSTLP
GMDPRMFSLMQISTLP

SEQ ID NO: 76992 - protein, 16 aa, Artificial Sequence
  Description of Artificial Sequence: Synthetic peptide
  Seed: GMDPRMCSLMQGSTLP
GMDPRMFSLMQISTMP

SEQ ID NO: 76993 - protein, 16 aa, Artificial Sequence
  Description of Artificial Sequence: Synthetic peptide
  Seed: GMDPRMCSLMQGSTLP
GMDPRMFSLMQISTNP

SEQ ID NO: 76994 - protein, 16 aa, Artificial Sequence
  Description of Artificial Sequence: Synthetic peptide
  Seed: GMDPRMCSLMQGSTLP
GMDPRMFSLMQISTSP

SEQ ID NO: 76995 - protein, 16 aa, Artificial Sequence
  Description of Artificial Sequence: Synthetic peptide
  Seed: GMDPRMCSLMQGSTLP
GMDPRMFSLMQISTTP

SEQ ID NO: 76996 - protein, 16 aa, Artificial Sequence
  Description of Artificial Sequence: Synthetic peptide
  Seed: GMDPRMCSLMQGSTLP
GMDPRMFSLMQISTVP

SEQ ID NO: 76997 - protein, 16 aa, Artificial Sequence
  Description of Artificial Sequence: Synthetic peptide
  Seed: GMDPRMCSLMQGSTLP
GMDPRMFSLMQLSTAP

SEQ ID NO: 76998 - protein, 16 aa, Artificial Sequence
  Description of Artificial Sequence: Synthetic peptide
  Seed: GMDPRMCSLMQGSTLP
GMDPRMFSLMQNSTAP

SEQ ID NO: 76999 - protein, 16 aa, Artificial Sequence
  Description of Artificial Sequence: Synthetic peptide
  Seed: GMDPRMCSLMQGSTLP
GMDPRMFSLMQNSTIP

SEQ ID NO: 77000 - protein, 16 aa, Artificial Sequence
  Description of Artificial Sequence: Synthetic peptide
  Seed: GMDPRMCSLMQGSTLP
GMDPRMFSLMQNSTLP

SEQ ID NO: 77001 - protein, 16 aa, Artificial Sequence
  Description of Artificial Sequence: Synthetic peptide
  Seed: GMDPRMCSLMQGSTLP
GMDPRMFSLMQNSTMP

SEQ ID NO: 77002 - protein, 16 aa, Artificial Sequence
  Description of Artificial Sequence: Synthetic peptide
  Seed: GMDPRMCSLMQGSTLP
GMDPRMFSLMQNSTNP

SEQ ID NO: 77003 - protein, 16 aa, Artificial Sequence
  Description of Artificial Sequence: Synthetic peptide
  Seed: GMDPRMCSLMQGSTLP
GMDPRMFSLMQNSTSP

SEQ ID NO: 77004 - protein, 16 aa, Artificial Sequence
  Description of Artificial Sequence: Synthetic peptide
  Seed: GMDPRMCSLMQGSTLP
GMDPRMFSLMQNSTTP

SEQ ID NO: 77005 - protein, 16 aa, Artificial Sequence
  Description of Artificial Sequence: Synthetic peptide
  Seed: GMDPRMCSLMQGSTLP
GMDPRMFSLMQNSTVP

SEQ ID NO: 77006 - protein, 16 aa, Artificial Sequence
  Description of Artificial Sequence: Synthetic peptide
  Seed: GMDPRMCSLMQGSTLP
GMDPRMFSLMQPSTAP

SEQ ID NO: 77007 - protein, 16 aa, Artificial Sequence
  Description of Artificial Sequence: Synthetic peptide
  Seed: GMDPRMCSLMQGSTLP
GMDPRMFSLMQPSTGP

SEQ ID NO: 77008 - protein, 16 aa, Artificial Sequence
  Description of Artificial Sequence: Synthetic peptide
  Seed: GMDPRMCSLMQGSTLP
GMDPRMFSLMQPSTHP

SEQ ID NO: 77009 - protein, 16 aa, Artificial Sequence
  Description of Artificial Sequence: Synthetic peptide
  Seed: GMDPRMCSLMQGSTLP
GMDPRMFSLMQPSTIP

SEQ ID NO: 77010 - protein, 16 aa, Artificial Sequence
  Description of Artificial Sequence: Synthetic peptide
  Seed: GMDPRMCSLMQGSTLP
GMDPRMFSLMQPSTLP

SEQ ID NO: 77011 - protein, 16 aa, Artificial Sequence
  Description of Artificial Sequence: Synthetic peptide
  Seed: GMDPRMCSLMQGSTLP
GMDPRMFSLMQPSTMP

SEQ ID NO: 77012 - protein, 16 aa, Artificial Sequence
  Description of Artificial Sequence: Synthetic peptide
  Seed: GMDPRMCSLMQGSTLP
GMDPRMFSLMQPSTNP

SEQ ID NO: 77013 - protein, 16 aa, Artificial Sequence
  Description of Artificial Sequence: Synthetic peptide
  Seed: GMDPRMCSLMQGSTLP
GMDPRMFSLMQPSTQP

SEQ ID NO: 77014 - protein, 16 aa, Artificial Sequence
  Description of Artificial Sequence: Synthetic peptide
  Seed: GMDPRMCSLMQGSTLP
GMDPRMFSLMQPSTSP

SEQ ID NO: 77015 - protein, 16 aa, Artificial Sequence
  Description of Artificial Sequence: Synthetic peptide
  Seed: GMDPRMCSLMQGSTLP
GMDPRMFSLMQPSTTP

SEQ ID NO: 77016 - protein, 16 aa, Artificial Sequence
  Description of Artificial Sequence: Synthetic peptide
  Seed: GMDPRMCSLMQGSTLP
GMDPRMFSLMQPSTVP

SEQ ID NO: 77017 - protein, 16 aa, Artificial Sequence
  Description of Artificial Sequence: Synthetic peptide
  Seed: GMDPRMCSLMQGSTLP
GMDPRMFSLMQSSTAP

SEQ ID NO: 77018 - protein, 16 aa, Artificial Sequence
  Description of Artificial Sequence: Synthetic peptide
  Seed: GMDPRMCSLMQGSTLP
GMDPRMFSLMQSSTGP

SEQ ID NO: 77019 - protein, 16 aa, Artificial Sequence
  Description of Artificial Sequence: Synthetic peptide
  Seed: GMDPRMCSLMQGSTLP
GMDPRMFSLMQSSTHP

SEQ ID NO: 77020 - protein, 16 aa, Artificial Sequence
  Description of Artificial Sequence: Synthetic peptide
  Seed: GMDPRMCSLMQGSTLP
GMDPRMFSLMQSSTIP

SEQ ID NO: 77021 - protein, 16 aa, Artificial Sequence
  Description of Artificial Sequence: Synthetic peptide
  Seed: GMDPRMCSLMQGSTLP
GMDPRMFSLMQSSTLP

SEQ ID NO: 77022 - protein, 16 aa, Artificial Sequence
  Description of Artificial Sequence: Synthetic peptide
  Seed: GMDPRMCSLMQGSTLP
GMDPRMFSLMQSSTMP

SEQ ID NO: 77023 - protein, 16 aa, Artificial Sequence
  Description of Artificial Sequence: Synthetic peptide
  Seed: GMDPRMCSLMQGSTLP
GMDPRMFSLMQSSTNP

SEQ ID NO: 77024 - protein, 16 aa, Artificial Sequence
  Description of Artificial Sequence: Synthetic peptide
  Seed: GMDPRMCSLMQGSTLP
GMDPRMFSLMQSSTSP

SEQ ID NO: 77025 - protein, 16 aa, Artificial Sequence
  Description of Artificial Sequence: Synthetic peptide
  Seed: GMDPRMCSLMQGSTLP
GMDPRMFSLMQSSTTP

SEQ ID NO: 77026 - protein, 16 aa, Artificial Sequence
  Description of Artificial Sequence: Synthetic peptide
  Seed: GMDPRMCSLMQGSTLP
GMDPRMFSLMQSSTVP

SEQ ID NO: 77027 - protein, 16 aa, Artificial Sequence
  Description of Artificial Sequence: Synthetic peptide
  Seed: GMDPRMCSLMQGSTLP
GMDPRMFSLMQTSTAP

SEQ ID NO: 77028 - protein, 16 aa, Artificial Sequence
  Description of Artificial Sequence: Synthetic peptide
  Seed: GMDPRMCSLMQGSTLP
GMDPRMFSLMQTSTHP

SEQ ID NO: 77029 - protein, 16 aa, Artificial Sequence
  Description of Artificial Sequence: Synthetic peptide
  Seed: GMDPRMCSLMQGSTLP
GMDPRMFSLMQTSTIP

SEQ ID NO: 77030 - protein, 16 aa, Artificial Sequence
  Description of Artificial Sequence: Synthetic peptide
  Seed: GMDPRMCSLMQGSTLP
GMDPRMFSLMQTSTLP

SEQ ID NO: 77031 - protein, 16 aa, Artificial Sequence
  Description of Artificial Sequence: Synthetic peptide
  Seed: GMDPRMCSLMQGSTLP
GMDPRMFSLMQTSTMP

SEQ ID NO: 77032 - protein, 16 aa, Artificial Sequence
  Description of Artificial Sequence: Synthetic peptide
  Seed: GMDPRMCSLMQGSTLP
GMDPRMFSLMQTSTNP

SEQ ID NO: 77033 - protein, 16 aa, Artificial Sequence
  Description of Artificial Sequence: Synthetic peptide
  Seed: GMDPRMCSLMQGSTLP
GMDPRMFSLMQTSTSP

SEQ ID NO: 77034 - protein, 16 aa, Artificial Sequence
  Description of Artificial Sequence: Synthetic peptide
  Seed: GMDPRMCSLMQGSTLP
GMDPRMFSLMQTSTTP

SEQ ID NO: 77035 - protein, 16 aa, Artificial Sequence
  Description of Artificial Sequence: Synthetic peptide
  Seed: GMDPRMCSLMQGSTLP
GMDPRMFSLMQTSTVP

SEQ ID NO: 77036 - protein, 16 aa, Artificial Sequence
  Description of Artificial Sequence: Synthetic peptide
  Seed: GMDPRMCSLMQGSTLP
GMDPRMFSLMQVSTAP

SEQ ID NO: 77037 - protein, 16 aa, Artificial Sequence
  Description of Artificial Sequence: Synthetic peptide
  Seed: GMDPRMCSLMQGSTLP
GMDPRMFSLMQVSTGP

SEQ ID NO: 77038 - protein, 16 aa, Artificial Sequence
  Description of Artificial Sequence: Synthetic peptide
  Seed: GMDPRMCSLMQGSTLP
GMDPRMFSLMQVSTHP

SEQ ID NO: 77039 - protein, 16 aa, Artificial Sequence
  Description of Artificial Sequence: Synthetic peptide
  Seed: GMDPRMCSLMQGSTLP
GMDPRMFSLMQVSTIP

SEQ ID NO: 77040 - protein, 16 aa, Artificial Sequence
  Description of Artificial Sequence: Synthetic peptide
  Seed: GMDPRMCSLMQGSTLP
GMDPRMFSLMQVSTLP

SEQ ID NO: 77041 - protein, 16 aa, Artificial Sequence
  Description of Artificial Sequence: Synthetic peptide
  Seed: GMDPRMCSLMQGSTLP
GMDPRMFSLMQVSTMP

SEQ ID NO: 77042 - protein, 16 aa, Artificial Sequence
  Description of Artificial Sequence: Synthetic peptide
  Seed: GMDPRMCSLMQGSTLP
GMDPRMFSLMQVSTNP

SEQ ID NO: 77043 - protein, 16 aa, Artificial Sequence
  Description of Artificial Sequence: Synthetic peptide
  Seed: GMDPRMCSLMQGSTLP
GMDPRMFSLMQVSTSP

SEQ ID NO: 77044 - protein, 16 aa, Artificial Sequence
  Description of Artificial Sequence: Synthetic peptide
  Seed: GMDPRMCSLMQGSTLP
GMDPRMFSLMQVSTTP

SEQ ID NO: 77045 - protein, 16 aa, Artificial Sequence
  Description of Artificial Sequence: Synthetic peptide
  Seed: GMDPRMCSLMQGSTLP
GMDPRMFSLMQVSTVP

SEQ ID NO: 77046 - protein, 16 aa, Artificial Sequence
  Description of Artificial Sequence: Synthetic peptide
  Seed: GMDPRMCSLMQGSTLP
GMDPRMFSLQQASTAP

SEQ ID NO: 77047 - protein, 16 aa, Artificial Sequence
  Description of Artificial Sequence: Synthetic peptide
  Seed: GMDPRMCSLMQGSTLP
GMDPRMFSLQQASTIP

SEQ ID NO: 77048 - protein, 16 aa, Artificial Sequence
  Description of Artificial Sequence: Synthetic peptide
  Seed: GMDPRMCSLMQGSTLP
GMDPRMFSLQQASTLP

SEQ ID NO: 77049 - protein, 16 aa, Artificial Sequence
  Description of Artificial Sequence: Synthetic peptide
  Seed: GMDPRMCSLMQGSTLP
GMDPRMFSLQQASTVP

SEQ ID NO: 77050 - protein, 16 aa, Artificial Sequence
  Description of Artificial Sequence: Synthetic peptide
  Seed: GMDPRMCSLMQGSTLP
GMDPRMFSLQQGSTAP

SEQ ID NO: 77051 - protein, 16 aa, Artificial Sequence
  Description of Artificial Sequence: Synthetic peptide
  Seed: GMDPRMCSLMQGSTLP
GMDPRMFSLQQGSTIP

SEQ ID NO: 77052 - protein, 16 aa, Artificial Sequence
  Description of Artificial Sequence: Synthetic peptide
  Seed: GMDPRMCSLMQGSTLP
GMDPRMFSLQQGSTLP

SEQ ID NO: 77053 - protein, 16 aa, Artificial Sequence
  Description of Artificial Sequence: Synthetic peptide
  Seed: GMDPRMCSLMQGSTLP
GMDPRMFSLQQGSTVP

SEQ ID NO: 77054 - protein, 16 aa, Artificial Sequence
  Description of Artificial Sequence: Synthetic peptide
  Seed: GMDPRMCSLMQGSTLP
GMDPRMFSLQQSSTIP

SEQ ID NO: 77055 - protein, 16 aa, Artificial Sequence
  Description of Artificial Sequence: Synthetic peptide
  Seed: GMDPRMCSLMQGSTLP
GMDPRMFSLQQSSTLP

SEQ ID NO: 77056 - protein, 16 aa, Artificial Sequence
  Description of Artificial Sequence: Synthetic peptide
  Seed: GMDPRMCSLMQGSTLP
GMDPRMFSLQQSSTVP

SEQ ID NO: 77057 - protein, 16 aa, Artificial Sequence
  Description of Artificial Sequence: Synthetic peptide
  Seed: GMDPRMCSLMQGSTLP
GMDPRMFSLSQASTLP

SEQ ID NO: 77058 - protein, 16 aa, Artificial Sequence
  Description of Artificial Sequence: Synthetic peptide
  Seed: GMDPRMCSLMQGSTLP
GMDPRMFSLVQASTAP

SEQ ID NO: 77059 - protein, 16 aa, Artificial Sequence
  Description of Artificial Sequence: Synthetic peptide
  Seed: GMDPRMCSLMQGSTLP
GMDPRMFSLVQASTIP

SEQ ID NO: 77060 - protein, 16 aa, Artificial Sequence
  Description of Artificial Sequence: Synthetic peptide
  Seed: GMDPRMCSLMQGSTLP
GMDPRMFSLVQASTLP

SEQ ID NO: 77061 - protein, 16 aa, Artificial Sequence
  Description of Artificial Sequence: Synthetic peptide
  Seed: GMDPRMCSLMQGSTLP
GMDPRMFSLVQASTNP

SEQ ID NO: 77062 - protein, 16 aa, Artificial Sequence
  Description of Artificial Sequence: Synthetic peptide
  Seed: GMDPRMCSLMQGSTLP
GMDPRMFSLVQASTSP

SEQ ID NO: 77063 - protein, 16 aa, Artificial Sequence
  Description of Artificial Sequence: Synthetic peptide
  Seed: GMDPRMCSLMQGSTLP
GMDPRMFSLVQASTTP

SEQ ID NO: 77064 - protein, 16 aa, Artificial Sequence
  Description of Artificial Sequence: Synthetic peptide
  Seed: GMDPRMCSLMQGSTLP
GMDPRMFSLVQASTVP

SEQ ID NO: 77065 - protein, 16 aa, Artificial Sequence
  Description of Artificial Sequence: Synthetic peptide
  Seed: GMDPRMCSLMQGSTLP
GMDPRMFSLVQGSTAP

SEQ ID NO: 77066 - protein, 16 aa, Artificial Sequence
  Description of Artificial Sequence: Synthetic peptide
  Seed: GMDPRMCSLMQGSTLP
GMDPRMFSLVQGSTIP

SEQ ID NO: 77067 - protein, 16 aa, Artificial Sequence
  Description of Artificial Sequence: Synthetic peptide
  Seed: GMDPRMCSLMQGSTLP
GMDPRMFSLVQGSTLP

SEQ ID NO: 77068 - protein, 16 aa, Artificial Sequence
  Description of Artificial Sequence: Synthetic peptide
  Seed: GMDPRMCSLMQGSTLP
GMDPRMFSLVQGSTVP

SEQ ID NO: 77069 - protein, 16 aa, Artificial Sequence
  Description of Artificial Sequence: Synthetic peptide
  Seed: GMDPRMCSLMQGSTLP
GMDPRMFSLVQPSTAP

SEQ ID NO: 77070 - protein, 16 aa, Artificial Sequence
  Description of Artificial Sequence: Synthetic peptide
  Seed: GMDPRMCSLMQGSTLP
GMDPRMFSLVQPSTSP

SEQ ID NO: 77071 - protein, 16 aa, Artificial Sequence
  Description of Artificial Sequence: Synthetic peptide
  Seed: GMDPRMCSLMQGSTLP
GMDPRMFSLVQSSTAP

SEQ ID NO: 77072 - protein, 16 aa, Artificial Sequence
  Description of Artificial Sequence: Synthetic peptide
  Seed: GMDPRMCSLMQGSTLP
GMDPRMFSLVQSSTIP

SEQ ID NO: 77073 - protein, 16 aa, Artificial Sequence
  Description of Artificial Sequence: Synthetic peptide
  Seed: GMDPRMCSLMQGSTLP
GMDPRMFSLVQSSTLP

SEQ ID NO: 77074 - protein, 16 aa, Artificial Sequence
  Description of Artificial Sequence: Synthetic peptide
  Seed: GMDPRMCSLMQGSTLP
GMDPRMFSLVQSSTSP

SEQ ID NO: 77075 - protein, 16 aa, Artificial Sequence
  Description of Artificial Sequence: Synthetic peptide
  Seed: GMDPRMCSLMQGSTLP
GMDPRMFSLVQSSTVP

SEQ ID NO: 77076 - protein, 16 aa, Artificial Sequence
  Description of Artificial Sequence: Synthetic peptide
  Seed: GMDPRMCSLMQGSTLP
GMDPRMFSLVQTSTAP

SEQ ID NO: 77077 - protein, 16 aa, Artificial Sequence
  Description of Artificial Sequence: Synthetic peptide
  Seed: GMDPRMCSLMQGSTLP
GMDPRMFSLVQVSTAP

SEQ ID NO: 77078 - protein, 16 aa, Artificial Sequence
  Description of Artificial Sequence: Synthetic peptide
  Seed: GMDPRMCSLMQGSTLP
GMDPRMISLLQASTAP

SEQ ID NO: 77079 - protein, 16 aa, Artificial Sequence
  Description of Artificial Sequence: Synthetic peptide
  Seed: GMDPRMCSLMQGSTLP
GMDPRMISLLQASTIP

SEQ ID NO: 77080 - protein, 16 aa, Artificial Sequence
  Description of Artificial Sequence: Synthetic peptide
  Seed: GMDPRMCSLMQGSTLP
GMDPRMISLLQASTLP

SEQ ID NO: 77081 - protein, 16 aa, Artificial Sequence
  Description of Artificial Sequence: Synthetic peptide
  Seed: GMDPRMCSLMQGSTLP
GMDPRMISLLQASTTP

SEQ ID NO: 77082 - protein, 16 aa, Artificial Sequence
  Description of Artificial Sequence: Synthetic peptide
  Seed: GMDPRMCSLMQGSTLP
GMDPRMISLLQASTVP

SEQ ID NO: 77083 - protein, 16 aa, Artificial Sequence
  Description of Artificial Sequence: Synthetic peptide
  Seed: GMDPRMCSLMQGSTLP
GMDPRMISLLQGSTAP

SEQ ID NO: 77084 - protein, 16 aa, Artificial Sequence
  Description of Artificial Sequence: Synthetic peptide
  Seed: GMDPRMCSLMQGSTLP
GMDPRMISLLQGSTIP

SEQ ID NO: 77085 - protein, 16 aa, Artificial Sequence
  Description of Artificial Sequence: Synthetic peptide
  Seed: GMDPRMCSLMQGSTLP
GMDPRMISLLQGSTLP

SEQ ID NO: 77086 - protein, 16 aa, Artificial Sequence
  Description of Artificial Sequence: Synthetic peptide
  Seed: GMDPRMCSLMQGSTLP
GMDPRMISLLQGSTTP

SEQ ID NO: 77087 - protein, 16 aa, Artificial Sequence
  Description of Artificial Sequence: Synthetic peptide
  Seed: GMDPRMCSLMQGSTLP
GMDPRMISLLQGSTVP

SEQ ID NO: 77088 - protein, 16 aa, Artificial Sequence
  Description of Artificial Sequence: Synthetic peptide
  Seed: GMDPRMCSLMQGSTLP
GMDPRMISLLQPSTLP

SEQ ID NO: 77089 - protein, 16 aa, Artificial Sequence
  Description of Artificial Sequence: Synthetic peptide
  Seed: GMDPRMCSLMQGSTLP
GMDPRMISLLQPSTVP

SEQ ID NO: 77090 - protein, 16 aa, Artificial Sequence
  Description of Artificial Sequence: Synthetic peptide
  Seed: GMDPRMCSLMQGSTLP
GMDPRMISLLQSSTAP

SEQ ID NO: 77091 - protein, 16 aa, Artificial Sequence
  Description of Artificial Sequence: Synthetic peptide
  Seed: GMDPRMCSLMQGSTLP
GMDPRMISLLQSSTIP

SEQ ID NO: 77092 - protein, 16 aa, Artificial Sequence
  Description of Artificial Sequence: Synthetic peptide
  Seed: GMDPRMCSLMQGSTLP
GMDPRMISLLQSSTLP

SEQ ID NO: 77093 - protein, 16 aa, Artificial Sequence
  Description of Artificial Sequence: Synthetic peptide
  Seed: GMDPRMCSLMQGSTLP
GMDPRMISLLQSSTVP

SEQ ID NO: 77094 - protein, 16 aa, Artificial Sequence
  Description of Artificial Sequence: Synthetic peptide
  Seed: GMDPRMCSLMQGSTLP
GMDPRMISLMQASTAP

SEQ ID NO: 77095 - protein, 16 aa, Artificial Sequence
  Description of Artificial Sequence: Synthetic peptide
  Seed: GMDPRMCSLMQGSTLP
GMDPRMISLMQASTIP

SEQ ID NO: 77096 - protein, 16 aa, Artificial Sequence
  Description of Artificial Sequence: Synthetic peptide
  Seed: GMDPRMCSLMQGSTLP
GMDPRMISLMQASTLP

SEQ ID NO: 77097 - protein, 16 aa, Artificial Sequence
  Description of Artificial Sequence: Synthetic peptide
  Seed: GMDPRMCSLMQGSTLP
GMDPRMISLMQASTVP

SEQ ID NO: 77098 - protein, 16 aa, Artificial Sequence
  Description of Artificial Sequence: Synthetic peptide
  Seed: GMDPRMCSLMQGSTLP
GMDPRMISLMQGSTAP

SEQ ID NO: 77099 - protein, 16 aa, Artificial Sequence
  Description of Artificial Sequence: Synthetic peptide
  Seed: GMDPRMCSLMQGSTLP
GMDPRMISLMQGSTIP

SEQ ID NO: 77100 - protein, 16 aa, Artificial Sequence
  Description of Artificial Sequence: Synthetic peptide
  Seed: GMDPRMCSLMQGSTLP
GMDPRMISLMQGSTLP

SEQ ID NO: 77101 - protein, 16 aa, Artificial Sequence
  Description of Artificial Sequence: Synthetic peptide
  Seed: GMDPRMCSLMQGSTLP
GMDPRMISLMQGSTVP

SEQ ID NO: 77102 - protein, 16 aa, Artificial Sequence
  Description of Artificial Sequence: Synthetic peptide
  Seed: GMDPRMCSLMQGSTLP
GMDPRMISLMQSSTIP

SEQ ID NO: 77103 - protein, 16 aa, Artificial Sequence
  Description of Artificial Sequence: Synthetic peptide
  Seed: GMDPRMCSLMQGSTLP
GMDPRMISLMQSSTLP

SEQ ID NO: 77104 - protein, 16 aa, Artificial Sequence
  Description of Artificial Sequence: Synthetic peptide
  Seed: GMDPRMCSLMQGSTLP
GMDPRMISLMQSSTVP

SEQ ID NO: 77105 - protein, 16 aa, Artificial Sequence
  Description of Artificial Sequence: Synthetic peptide
  Seed: GMDPRMCSLMQGSTLP
GMDPRMLSLLQASTAP

SEQ ID NO: 77106 - protein, 16 aa, Artificial Sequence
  Description of Artificial Sequence: Synthetic peptide
  Seed: GMDPRMCSLMQGSTLP
GMDPRMLSLLQASTIP

SEQ ID NO: 77107 - protein, 16 aa, Artificial Sequence
  Description of Artificial Sequence: Synthetic peptide
  Seed: GMDPRMCSLMQGSTLP
GMDPRMLSLLQASTLP

SEQ ID NO: 77108 - protein, 16 aa, Artificial Sequence
  Description of Artificial Sequence: Synthetic peptide
  Seed: GMDPRMCSLMQGSTLP
GMDPRMLSLLQASTVP

SEQ ID NO: 77109 - protein, 16 aa, Artificial Sequence
  Description of Artificial Sequence: Synthetic peptide
  Seed: GMDPRMCSLMQGSTLP
GMDPRMLSLLQGSTAP

SEQ ID NO: 77110 - protein, 16 aa, Artificial Sequence
  Description of Artificial Sequence: Synthetic peptide
  Seed: GMDPRMCSLMQGSTLP
GMDPRMLSLLQGSTIP

SEQ ID NO: 77111 - protein, 16 aa, Artificial Sequence
  Description of Artificial Sequence: Synthetic peptide
  Seed: GMDPRMCSLMQGSTLP
GMDPRMLSLLQGSTLP

SEQ ID NO: 77112 - protein, 16 aa, Artificial Sequence
  Description of Artificial Sequence: Synthetic peptide
  Seed: GMDPRMCSLMQGSTLP
GMDPRMLSLLQGSTVP

SEQ ID NO: 77113 - protein, 16 aa, Artificial Sequence
  Description of Artificial Sequence: Synthetic peptide
  Seed: GMDPRMCSLMQGSTLP
GMDPRMLSLLQSSTVP

SEQ ID NO: 77114 - protein, 16 aa, Artificial Sequence
  Description of Artificial Sequence: Synthetic peptide
  Seed: GMDPRMCSLMQGSTLP
GMDPRMLSLMQASTAP

SEQ ID NO: 77115 - protein, 16 aa, Artificial Sequence
  Description of Artificial Sequence: Synthetic peptide
  Seed: GMDPRMCSLMQGSTLP
GMDPRMLSLMQASTIP

SEQ ID NO: 77116 - protein, 16 aa, Artificial Sequence
  Description of Artificial Sequence: Synthetic peptide
  Seed: GMDPRMCSLMQGSTLP
GMDPRMLSLMQASTLP

SEQ ID NO: 77117 - protein, 16 aa, Artificial Sequence
  Description of Artificial Sequence: Synthetic peptide
  Seed: GMDPRMCSLMQGSTLP
GMDPRMLSLMQASTVP

SEQ ID NO: 77118 - protein, 16 aa, Artificial Sequence
  Description of Artificial Sequence: Synthetic peptide
  Seed: GMDPRMCSLMQGSTLP
GMDPRMLSLMQGSTAP

SEQ ID NO: 77119 - protein, 16 aa, Artificial Sequence
  Description of Artificial Sequence: Synthetic peptide
  Seed: GMDPRMCSLMQGSTLP
GMDPRMLSLMQGSTIP

SEQ ID NO: 77120 - protein, 16 aa, Artificial Sequence
  Description of Artificial Sequence: Synthetic peptide
  Seed: GMDPRMCSLMQGSTLP
GMDPRMLSLMQGSTLP

SEQ ID NO: 77121 - protein, 16 aa, Artificial Sequence
  Description of Artificial Sequence: Synthetic peptide
  Seed: GMDPRMCSLMQGSTLP
GMDPRMLSLMQGSTVP

SEQ ID NO: 77122 - protein, 16 aa, Artificial Sequence
  Description of Artificial Sequence: Synthetic peptide
  Seed: GMDPRMCSLMQGSTLP
GMDPRMLSLMQSSTVP

SEQ ID NO: 77123 - protein, 16 aa, Artificial Sequence
  Description of Artificial Sequence: Synthetic peptide
  Seed: GMDPRMCSLMQGSTLP
GMDPRMWSLIQASTAP

SEQ ID NO: 77124 - protein, 16 aa, Artificial Sequence
  Description of Artificial Sequence: Synthetic peptide
  Seed: GMDPRMCSLMQGSTLP
GMDPRMWSLIQASTLP

SEQ ID NO: 77125 - protein, 16 aa, Artificial Sequence
  Description of Artificial Sequence: Synthetic peptide
  Seed: GMDPRMCSLMQGSTLP
GMDPRMWSLIQASTVP

SEQ ID NO: 77126 - protein, 16 aa, Artificial Sequence
  Description of Artificial Sequence: Synthetic peptide
  Seed: GMDPRMCSLMQGSTLP
GMDPRMWSLLQASTAP

SEQ ID NO: 77127 - protein, 16 aa, Artificial Sequence
  Description of Artificial Sequence: Synthetic peptide
  Seed: GMDPRMCSLMQGSTLP
GMDPRMWSLLQASTIP

SEQ ID NO: 77128 - protein, 16 aa, Artificial Sequence
  Description of Artificial Sequence: Synthetic peptide
  Seed: GMDPRMCSLMQGSTLP
GMDPRMWSLLQASTLP

SEQ ID NO: 77129 - protein, 16 aa, Artificial Sequence
  Description of Artificial Sequence: Synthetic peptide
  Seed: GMDPRMCSLMQGSTLP
GMDPRMWSLLQASTSP

SEQ ID NO: 77130 - protein, 16 aa, Artificial Sequence
  Description of Artificial Sequence: Synthetic peptide
  Seed: GMDPRMCSLMQGSTLP
GMDPRMWSLLQASTTP

SEQ ID NO: 77131 - protein, 16 aa, Artificial Sequence
  Description of Artificial Sequence: Synthetic peptide
  Seed: GMDPRMCSLMQGSTLP
GMDPRMWSLLQASTVP

SEQ ID NO: 77132 - protein, 16 aa, Artificial Sequence
  Description of Artificial Sequence: Synthetic peptide
  Seed: GMDPRMCSLMQGSTLP
GMDPRMWSLLQGSTAP

SEQ ID NO: 77133 - protein, 16 aa, Artificial Sequence
  Description of Artificial Sequence: Synthetic peptide
  Seed: GMDPRMCSLMQGSTLP
GMDPRMWSLLQGSTIP

SEQ ID NO: 77134 - protein, 16 aa, Artificial Sequence
  Description of Artificial Sequence: Synthetic peptide
  Seed: GMDPRMCSLMQGSTLP
GMDPRMWSLLQGSTLP

SEQ ID NO: 77135 - protein, 16 aa, Artificial Sequence
  Description of Artificial Sequence: Synthetic peptide
  Seed: GMDPRMCSLMQGSTLP
GMDPRMWSLLQGSTTP

SEQ ID NO: 77136 - protein, 16 aa, Artificial Sequence
  Description of Artificial Sequence: Synthetic peptide
  Seed: GMDPRMCSLMQGSTLP
GMDPRMWSLLQGSTVP

SEQ ID NO: 77137 - protein, 16 aa, Artificial Sequence
  Description of Artificial Sequence: Synthetic peptide
  Seed: GMDPRMCSLMQGSTLP
GMDPRMWSLLQPSTAP

SEQ ID NO: 77138 - protein, 16 aa, Artificial Sequence
  Description of Artificial Sequence: Synthetic peptide
  Seed: GMDPRMCSLMQGSTLP
GMDPRMWSLLQPSTLP

SEQ ID NO: 77139 - protein, 16 aa, Artificial Sequence
  Description of Artificial Sequence: Synthetic peptide
  Seed: GMDPRMCSLMQGSTLP
GMDPRMWSLLQPSTVP

SEQ ID NO: 77140 - protein, 16 aa, Artificial Sequence
  Description of Artificial Sequence: Synthetic peptide
  Seed: GMDPRMCSLMQGSTLP
GMDPRMWSLLQSSTAP

SEQ ID NO: 77141 - protein, 16 aa, Artificial Sequence
  Description of Artificial Sequence: Synthetic peptide
  Seed: GMDPRMCSLMQGSTLP
GMDPRMWSLLQSSTIP

SEQ ID NO: 77142 - protein, 16 aa, Artificial Sequence
  Description of Artificial Sequence: Synthetic peptide
  Seed: GMDPRMCSLMQGSTLP
GMDPRMWSLLQSSTLP

SEQ ID NO: 77143 - protein, 16 aa, Artificial Sequence
  Description of Artificial Sequence: Synthetic peptide
  Seed: GMDPRMCSLMQGSTLP
GMDPRMWSLLQSSTVP

SEQ ID NO: 77144 - protein, 16 aa, Artificial Sequence
  Description of Artificial Sequence: Synthetic peptide
  Seed: GMDPRMCSLMQGSTLP
GMDPRMWSLLQTSTAP

SEQ ID NO: 77145 - protein, 16 aa, Artificial Sequence
  Description of Artificial Sequence: Synthetic peptide
  Seed: GMDPRMCSLMQGSTLP
GMDPRMWSLMQASTAP

SEQ ID NO: 77146 - protein, 16 aa, Artificial Sequence
  Description of Artificial Sequence: Synthetic peptide
  Seed: GMDPRMCSLMQGSTLP
GMDPRMWSLMQASTIP

SEQ ID NO: 77147 - protein, 16 aa, Artificial Sequence
  Description of Artificial Sequence: Synthetic peptide
  Seed: GMDPRMCSLMQGSTLP
GMDPRMWSLMQASTLP

SEQ ID NO: 77148 - protein, 16 aa, Artificial Sequence
  Description of Artificial Sequence: Synthetic peptide
  Seed: GMDPRMCSLMQGSTLP
GMDPRMWSLMQASTSP

SEQ ID NO: 77149 - protein, 16 aa, Artificial Sequence
  Description of Artificial Sequence: Synthetic peptide
  Seed: GMDPRMCSLMQGSTLP
GMDPRMWSLMQASTTP

SEQ ID NO: 77150 - protein, 16 aa, Artificial Sequence
  Description of Artificial Sequence: Synthetic peptide
  Seed: GMDPRMCSLMQGSTLP
GMDPRMWSLMQASTVP

SEQ ID NO: 77151 - protein, 16 aa, Artificial Sequence
  Description of Artificial Sequence: Synthetic peptide
  Seed: GMDPRMCSLMQGSTLP
GMDPRMWSLMQGSTAP

SEQ ID NO: 77152 - protein, 16 aa, Artificial Sequence
  Description of Artificial Sequence: Synthetic peptide
  Seed: GMDPRMCSLMQGSTLP
GMDPRMWSLMQGSTIP

SEQ ID NO: 77153 - protein, 16 aa, Artificial Sequence
  Description of Artificial Sequence: Synthetic peptide
  Seed: GMDPRMCSLMQGSTLP
GMDPRMWSLMQGSTLP

SEQ ID NO: 77154 - protein, 16 aa, Artificial Sequence
  Description of Artificial Sequence: Synthetic peptide
  Seed: GMDPRMCSLMQGSTLP
GMDPRMWSLMQGSTVP

SEQ ID NO: 77155 - protein, 16 aa, Artificial Sequence
  Description of Artificial Sequence: Synthetic peptide
  Seed: GMDPRMCSLMQGSTLP
GMDPRMWSLMQPSTAP

SEQ ID NO: 77156 - protein, 16 aa, Artificial Sequence
  Description of Artificial Sequence: Synthetic peptide
  Seed: GMDPRMCSLMQGSTLP
GMDPRMWSLMQPSTLP

SEQ ID NO: 77157 - protein, 16 aa, Artificial Sequence
  Description of Artificial Sequence: Synthetic peptide
  Seed: GMDPRMCSLMQGSTLP
GMDPRMWSLMQPSTVP

SEQ ID NO: 77158 - protein, 16 aa, Artificial Sequence
  Description of Artificial Sequence: Synthetic peptide
  Seed: GMDPRMCSLMQGSTLP
GMDPRMWSLMQSSTAP

SEQ ID NO: 77159 - protein, 16 aa, Artificial Sequence
  Description of Artificial Sequence: Synthetic peptide
  Seed: GMDPRMCSLMQGSTLP
GMDPRMWSLMQSSTIP

SEQ ID NO: 77160 - protein, 16 aa, Artificial Sequence
  Description of Artificial Sequence: Synthetic peptide
  Seed: GMDPRMCSLMQGSTLP
GMDPRMWSLMQSSTLP

SEQ ID NO: 77161 - protein, 16 aa, Artificial Sequence
  Description of Artificial Sequence: Synthetic peptide
  Seed: GMDPRMCSLMQGSTLP
GMDPRMWSLMQSSTVP

SEQ ID NO: 77162 - protein, 16 aa, Artificial Sequence
  Description of Artificial Sequence: Synthetic peptide
  Seed: GMDPRMCSLMQGSTLP
GMDPRMWSLMQTSTAP

SEQ ID NO: 77163 - protein, 16 aa, Artificial Sequence
  Description of Artificial Sequence: Synthetic peptide
  Seed: GMDPRMCSLMQGSTLP
GMDPRMYSLAQASTAP

SEQ ID NO: 77164 - protein, 16 aa, Artificial Sequence
  Description of Artificial Sequence: Synthetic peptide
  Seed: GMDPRMCSLMQGSTLP
GMDPRMYSLAQASTIP

SEQ ID NO: 77165 - protein, 16 aa, Artificial Sequence
  Description of Artificial Sequence: Synthetic peptide
  Seed: GMDPRMCSLMQGSTLP
GMDPRMYSLAQASTLP

SEQ ID NO: 77166 - protein, 16 aa, Artificial Sequence
  Description of Artificial Sequence: Synthetic peptide
  Seed: GMDPRMCSLMQGSTLP
GMDPRMYSLAQASTVP

SEQ ID NO: 77167 - protein, 16 aa, Artificial Sequence
  Description of Artificial Sequence: Synthetic peptide
  Seed: GMDPRMCSLMQGSTLP
GMDPRMYSLAQGSTIP

SEQ ID NO: 77168 - protein, 16 aa, Artificial Sequence
  Description of Artificial Sequence: Synthetic peptide
  Seed: GMDPRMCSLMQGSTLP
GMDPRMYSLAQGSTLP

SEQ ID NO: 77169 - protein, 16 aa, Artificial Sequence
  Description of Artificial Sequence: Synthetic peptide
  Seed: GMDPRMCSLMQGSTLP
GMDPRMYSLAQGSTVP

SEQ ID NO: 77170 - protein, 16 aa, Artificial Sequence
  Description of Artificial Sequence: Synthetic peptide
  Seed: GMDPRMCSLMQGSTLP
GMDPRMYSLAQSSTLP

SEQ ID NO: 77171 - protein, 16 aa, Artificial Sequence
  Description of Artificial Sequence: Synthetic peptide
  Seed: GMDPRMCSLMQGSTLP
GMDPRMYSLAQSSTVP

SEQ ID NO: 77172 - protein, 16 aa, Artificial Sequence
  Description of Artificial Sequence: Synthetic peptide
  Seed: GMDPRMCSLMQGSTLP
GMDPRMYSLIQASTAP

SEQ ID NO: 77173 - protein, 16 aa, Artificial Sequence
  Description of Artificial Sequence: Synthetic peptide
  Seed: GMDPRMCSLMQGSTLP
GMDPRMYSLIQASTIP

SEQ ID NO: 77174 - protein, 16 aa, Artificial Sequence
  Description of Artificial Sequence: Synthetic peptide
  Seed: GMDPRMCSLMQGSTLP
GMDPRMYSLIQASTLP

SEQ ID NO: 77175 - protein, 16 aa, Artificial Sequence
  Description of Artificial Sequence: Synthetic peptide
  Seed: GMDPRMCSLMQGSTLP
GMDPRMYSLIQASTMP

SEQ ID NO: 77176 - protein, 16 aa, Artificial Sequence
  Description of Artificial Sequence: Synthetic peptide
  Seed: GMDPRMCSLMQGSTLP
GMDPRMYSLIQASTNP

SEQ ID NO: 77177 - protein, 16 aa, Artificial Sequence
  Description of Artificial Sequence: Synthetic peptide
  Seed: GMDPRMCSLMQGSTLP
GMDPRMYSLIQASTSP

SEQ ID NO: 77178 - protein, 16 aa, Artificial Sequence
  Description of Artificial Sequence: Synthetic peptide
  Seed: GMDPRMCSLMQGSTLP
GMDPRMYSLIQASTTP

SEQ ID NO: 77179 - protein, 16 aa, Artificial Sequence
  Description of Artificial Sequence: Synthetic peptide
  Seed: GMDPRMCSLMQGSTLP
GMDPRMYSLIQASTVP

SEQ ID NO: 77180 - protein, 16 aa, Artificial Sequence
  Description of Artificial Sequence: Synthetic peptide
  Seed: GMDPRMCSLMQGSTLP
GMDPRMYSLIQGSTAP

SEQ ID NO: 77181 - protein, 16 aa, Artificial Sequence
  Description of Artificial Sequence: Synthetic peptide
  Seed: GMDPRMCSLMQGSTLP
GMDPRMYSLIQGSTIP

SEQ ID NO: 77182 - protein, 16 aa, Artificial Sequence
  Description of Artificial Sequence: Synthetic peptide
  Seed: GMDPRMCSLMQGSTLP
GMDPRMYSLIQGSTLP

SEQ ID NO: 77183 - protein, 16 aa, Artificial Sequence
  Description of Artificial Sequence: Synthetic peptide
  Seed: GMDPRMCSLMQGSTLP
GMDPRMYSLIQGSTVP

SEQ ID NO: 77184 - protein, 16 aa, Artificial Sequence
  Description of Artificial Sequence: Synthetic peptide
  Seed: GMDPRMCSLMQGSTLP
GMDPRMYSLIQISTAP

SEQ ID NO: 77185 - protein, 16 aa, Artificial Sequence
  Description of Artificial Sequence: Synthetic peptide
  Seed: GMDPRMCSLMQGSTLP
GMDPRMYSLIQPSTAP

SEQ ID NO: 77186 - protein, 16 aa, Artificial Sequence
  Description of Artificial Sequence: Synthetic peptide
  Seed: GMDPRMCSLMQGSTLP
GMDPRMYSLIQPSTIP

SEQ ID NO: 77187 - protein, 16 aa, Artificial Sequence
  Description of Artificial Sequence: Synthetic peptide
  Seed: GMDPRMCSLMQGSTLP
GMDPRMYSLIQPSTLP

SEQ ID NO: 77188 - protein, 16 aa, Artificial Sequence
  Description of Artificial Sequence: Synthetic peptide
  Seed: GMDPRMCSLMQGSTLP
GMDPRMYSLIQPSTNP

SEQ ID NO: 77189 - protein, 16 aa, Artificial Sequence
  Description of Artificial Sequence: Synthetic peptide
  Seed: GMDPRMCSLMQGSTLP
GMDPRMYSLIQPSTSP

SEQ ID NO: 77190 - protein, 16 aa, Artificial Sequence
  Description of Artificial Sequence: Synthetic peptide
  Seed: GMDPRMCSLMQGSTLP
GMDPRMYSLIQPSTTP

SEQ ID NO: 77191 - protein, 16 aa, Artificial Sequence
  Description of Artificial Sequence: Synthetic peptide
  Seed: GMDPRMCSLMQGSTLP
GMDPRMYSLIQPSTVP

SEQ ID NO: 77192 - protein, 16 aa, Artificial Sequence
  Description of Artificial Sequence: Synthetic peptide
  Seed: GMDPRMCSLMQGSTLP
GMDPRMYSLIQSSTAP

SEQ ID NO: 77193 - protein, 16 aa, Artificial Sequence
  Description of Artificial Sequence: Synthetic peptide
  Seed: GMDPRMCSLMQGSTLP
GMDPRMYSLIQSSTIP

SEQ ID NO: 77194 - protein, 16 aa, Artificial Sequence
  Description of Artificial Sequence: Synthetic peptide
  Seed: GMDPRMCSLMQGSTLP
GMDPRMYSLIQSSTLP

SEQ ID NO: 77195 - protein, 16 aa, Artificial Sequence
  Description of Artificial Sequence: Synthetic peptide
  Seed: GMDPRMCSLMQGSTLP
GMDPRMYSLIQSSTSP

SEQ ID NO: 77196 - protein, 16 aa, Artificial Sequence
  Description of Artificial Sequence: Synthetic peptide
  Seed: GMDPRMCSLMQGSTLP
GMDPRMYSLIQSSTTP

SEQ ID NO: 77197 - protein, 16 aa, Artificial Sequence
  Description of Artificial Sequence: Synthetic peptide
  Seed: GMDPRMCSLMQGSTLP
GMDPRMYSLIQSSTVP

SEQ ID NO: 77198 - protein, 16 aa, Artificial Sequence
  Description of Artificial Sequence: Synthetic peptide
  Seed: GMDPRMCSLMQGSTLP
GMDPRMYSLIQTSTAP

SEQ ID NO: 77199 - protein, 16 aa, Artificial Sequence
  Description of Artificial Sequence: Synthetic peptide
  Seed: GMDPRMCSLMQGSTLP
GMDPRMYSLIQTSTSP

SEQ ID NO: 77200 - protein, 16 aa, Artificial Sequence
  Description of Artificial Sequence: Synthetic peptide
  Seed: GMDPRMCSLMQGSTLP
GMDPRMYSLIQTSTVP

SEQ ID NO: 77201 - protein, 16 aa, Artificial Sequence
  Description of Artificial Sequence: Synthetic peptide
  Seed: GMDPRMCSLMQGSTLP
GMDPRMYSLIQVSTAP

SEQ ID NO: 77202 - protein, 16 aa, Artificial Sequence
  Description of Artificial Sequence: Synthetic peptide
  Seed: GMDPRMCSLMQGSTLP
GMDPRMYSLIQVSTNP

SEQ ID NO: 77203 - protein, 16 aa, Artificial Sequence
  Description of Artificial Sequence: Synthetic peptide
  Seed: GMDPRMCSLMQGSTLP
GMDPRMYSLIQVSTSP

SEQ ID NO: 77204 - protein, 16 aa, Artificial Sequence
  Description of Artificial Sequence: Synthetic peptide
  Seed: GMDPRMCSLMQGSTLP
GMDPRMYSLIQVSTTP

SEQ ID NO: 77205 - protein, 16 aa, Artificial Sequence
  Description of Artificial Sequence: Synthetic peptide
  Seed: GMDPRMCSLMQGSTLP
GMDPRMYSLLQASTAP

SEQ ID NO: 77206 - protein, 16 aa, Artificial Sequence
  Description of Artificial Sequence: Synthetic peptide
  Seed: GMDPRMCSLMQGSTLP
GMDPRMYSLLQASTGP

SEQ ID NO: 77207 - protein, 16 aa, Artificial Sequence
  Description of Artificial Sequence: Synthetic peptide
  Seed: GMDPRMCSLMQGSTLP
GMDPRMYSLLQASTIP

SEQ ID NO: 77208 - protein, 16 aa, Artificial Sequence
  Description of Artificial Sequence: Synthetic peptide
  Seed: GMDPRMCSLMQGSTLP
GMDPRMYSLLQASTLP

SEQ ID NO: 77209 - protein, 16 aa, Artificial Sequence
  Description of Artificial Sequence: Synthetic peptide
  Seed: GMDPRMCSLMQGSTLP
GMDPRMYSLLQASTMP

SEQ ID NO: 77210 - protein, 16 aa, Artificial Sequence
  Description of Artificial Sequence: Synthetic peptide
  Seed: GMDPRMCSLMQGSTLP
GMDPRMYSLLQASTNP

SEQ ID NO: 77211 - protein, 16 aa, Artificial Sequence
  Description of Artificial Sequence: Synthetic peptide
  Seed: GMDPRMCSLMQGSTLP
GMDPRMYSLLQASTSP

SEQ ID NO: 77212 - protein, 16 aa, Artificial Sequence
  Description of Artificial Sequence: Synthetic peptide
  Seed: GMDPRMCSLMQGSTLP
GMDPRMYSLLQASTTP

SEQ ID NO: 77213 - protein, 16 aa, Artificial Sequence
  Description of Artificial Sequence: Synthetic peptide
  Seed: GMDPRMCSLMQGSTLP
GMDPRMYSLLQASTVP

SEQ ID NO: 77214 - protein, 16 aa, Artificial Sequence
  Description of Artificial Sequence: Synthetic peptide
  Seed: GMDPRMCSLMQGSTLP
GMDPRMYSLLQGSTAP

SEQ ID NO: 77215 - protein, 16 aa, Artificial Sequence
  Description of Artificial Sequence: Synthetic peptide
  Seed: GMDPRMCSLMQGSTLP
GMDPRMYSLLQGSTIP

SEQ ID NO: 77216 - protein, 16 aa, Artificial Sequence
  Description of Artificial Sequence: Synthetic peptide
  Seed: GMDPRMCSLMQGSTLP
GMDPRMYSLLQGSTLP

SEQ ID NO: 77217 - protein, 16 aa, Artificial Sequence
  Description of Artificial Sequence: Synthetic peptide
  Seed: GMDPRMCSLMQGSTLP
GMDPRMYSLLQGSTMP

SEQ ID NO: 77218 - protein, 16 aa, Artificial Sequence
  Description of Artificial Sequence: Synthetic peptide
  Seed: GMDPRMCSLMQGSTLP
GMDPRMYSLLQGSTSP

SEQ ID NO: 77219 - protein, 16 aa, Artificial Sequence
  Description of Artificial Sequence: Synthetic peptide
  Seed: GMDPRMCSLMQGSTLP
GMDPRMYSLLQGSTTP

SEQ ID NO: 77220 - protein, 16 aa, Artificial Sequence
  Description of Artificial Sequence: Synthetic peptide
  Seed: GMDPRMCSLMQGSTLP
GMDPRMYSLLQGSTVP

SEQ ID NO: 77221 - protein, 16 aa, Artificial Sequence
  Description of Artificial Sequence: Synthetic peptide
  Seed: GMDPRMCSLMQGSTLP
GMDPRMYSLLQISTAP

SEQ ID NO: 77222 - protein, 16 aa, Artificial Sequence
  Description of Artificial Sequence: Synthetic peptide
  Seed: GMDPRMCSLMQGSTLP
GMDPRMYSLLQISTNP

SEQ ID NO: 77223 - protein, 16 aa, Artificial Sequence
  Description of Artificial Sequence: Synthetic peptide
  Seed: GMDPRMCSLMQGSTLP
GMDPRMYSLLQISTSP

SEQ ID NO: 77224 - protein, 16 aa, Artificial Sequence
  Description of Artificial Sequence: Synthetic peptide
  Seed: GMDPRMCSLMQGSTLP
GMDPRMYSLLQISTTP

SEQ ID NO: 77225 - protein, 16 aa, Artificial Sequence
  Description of Artificial Sequence: Synthetic peptide
  Seed: GMDPRMCSLMQGSTLP
GMDPRMYSLLQNSTAP

SEQ ID NO: 77226 - protein, 16 aa, Artificial Sequence
  Description of Artificial Sequence: Synthetic peptide
  Seed: GMDPRMCSLMQGSTLP
GMDPRMYSLLQNSTIP

SEQ ID NO: 77227 - protein, 16 aa, Artificial Sequence
  Description of Artificial Sequence: Synthetic peptide
  Seed: GMDPRMCSLMQGSTLP
GMDPRMYSLLQNSTLP

SEQ ID NO: 77228 - protein, 16 aa, Artificial Sequence
  Description of Artificial Sequence: Synthetic peptide
  Seed: GMDPRMCSLMQGSTLP
GMDPRMYSLLQNSTVP

SEQ ID NO: 77229 - protein, 16 aa, Artificial Sequence
  Description of Artificial Sequence: Synthetic peptide
  Seed: GMDPRMCSLMQGSTLP
GMDPRMYSLLQPSTAP

SEQ ID NO: 77230 - protein, 16 aa, Artificial Sequence
  Description of Artificial Sequence: Synthetic peptide
  Seed: GMDPRMCSLMQGSTLP
GMDPRMYSLLQPSTIP

SEQ ID NO: 77231 - protein, 16 aa, Artificial Sequence
  Description of Artificial Sequence: Synthetic peptide
  Seed: GMDPRMCSLMQGSTLP
GMDPRMYSLLQPSTLP

SEQ ID NO: 77232 - protein, 16 aa, Artificial Sequence
  Description of Artificial Sequence: Synthetic peptide
  Seed: GMDPRMCSLMQGSTLP
GMDPRMYSLLQPSTMP

SEQ ID NO: 77233 - protein, 16 aa, Artificial Sequence
  Description of Artificial Sequence: Synthetic peptide
  Seed: GMDPRMCSLMQGSTLP
GMDPRMYSLLQPSTNP

SEQ ID NO: 77234 - protein, 16 aa, Artificial Sequence
  Description of Artificial Sequence: Synthetic peptide
  Seed: GMDPRMCSLMQGSTLP
GMDPRMYSLLQPSTSP

SEQ ID NO: 77235 - protein, 16 aa, Artificial Sequence
  Description of Artificial Sequence: Synthetic peptide
  Seed: GMDPRMCSLMQGSTLP
GMDPRMYSLLQPSTTP

SEQ ID NO: 77236 - protein, 16 aa, Artificial Sequence
  Description of Artificial Sequence: Synthetic peptide
  Seed: GMDPRMCSLMQGSTLP
GMDPRMYSLLQPSTVP

SEQ ID NO: 77237 - protein, 16 aa, Artificial Sequence
  Description of Artificial Sequence: Synthetic peptide
  Seed: GMDPRMCSLMQGSTLP
GMDPRMYSLLQSSTAP

SEQ ID NO: 77238 - protein, 16 aa, Artificial Sequence
  Description of Artificial Sequence: Synthetic peptide
  Seed: GMDPRMCSLMQGSTLP
GMDPRMYSLLQSSTIP

SEQ ID NO: 77239 - protein, 16 aa, Artificial Sequence
  Description of Artificial Sequence: Synthetic peptide
  Seed: GMDPRMCSLMQGSTLP
GMDPRMYSLLQSSTLP

SEQ ID NO: 77240 - protein, 16 aa, Artificial Sequence
  Description of Artificial Sequence: Synthetic peptide
  Seed: GMDPRMCSLMQGSTLP
GMDPRMYSLLQSSTMP

SEQ ID NO: 77241 - protein, 16 aa, Artificial Sequence
  Description of Artificial Sequence: Synthetic peptide
  Seed: GMDPRMCSLMQGSTLP
GMDPRMYSLLQSSTNP

SEQ ID NO: 77242 - protein, 16 aa, Artificial Sequence
  Description of Artificial Sequence: Synthetic peptide
  Seed: GMDPRMCSLMQGSTLP
GMDPRMYSLLQSSTSP

SEQ ID NO: 77243 - protein, 16 aa, Artificial Sequence
  Description of Artificial Sequence: Synthetic peptide
  Seed: GMDPRMCSLMQGSTLP
GMDPRMYSLLQSSTTP

SEQ ID NO: 77244 - protein, 16 aa, Artificial Sequence
  Description of Artificial Sequence: Synthetic peptide
  Seed: GMDPRMCSLMQGSTLP
GMDPRMYSLLQSSTVP

SEQ ID NO: 77245 - protein, 16 aa, Artificial Sequence
  Description of Artificial Sequence: Synthetic peptide
  Seed: GMDPRMCSLMQGSTLP
GMDPRMYSLLQTSTAP

SEQ ID NO: 77246 - protein, 16 aa, Artificial Sequence
  Description of Artificial Sequence: Synthetic peptide
  Seed: GMDPRMCSLMQGSTLP
GMDPRMYSLLQTSTIP

SEQ ID NO: 77247 - protein, 16 aa, Artificial Sequence
  Description of Artificial Sequence: Synthetic peptide
  Seed: GMDPRMCSLMQGSTLP
GMDPRMYSLLQTSTLP

SEQ ID NO: 77248 - protein, 16 aa, Artificial Sequence
  Description of Artificial Sequence: Synthetic peptide
  Seed: GMDPRMCSLMQGSTLP
GMDPRMYSLLQTSTNP

SEQ ID NO: 77249 - protein, 16 aa, Artificial Sequence
  Description of Artificial Sequence: Synthetic peptide
  Seed: GMDPRMCSLMQGSTLP
GMDPRMYSLLQTSTSP

SEQ ID NO: 77250 - protein, 16 aa, Artificial Sequence
  Description of Artificial Sequence: Synthetic peptide
  Seed: GMDPRMCSLMQGSTLP
GMDPRMYSLLQTSTTP

SEQ ID NO: 77251 - protein, 16 aa, Artificial Sequence
  Description of Artificial Sequence: Synthetic peptide
  Seed: GMDPRMCSLMQGSTLP
GMDPRMYSLLQTSTVP

SEQ ID NO: 77252 - protein, 16 aa, Artificial Sequence
  Description of Artificial Sequence: Synthetic peptide
  Seed: GMDPRMCSLMQGSTLP
GMDPRMYSLLQVSTAP

SEQ ID NO: 77253 - protein, 16 aa, Artificial Sequence
  Description of Artificial Sequence: Synthetic peptide
  Seed: GMDPRMCSLMQGSTLP
GMDPRMYSLLQVSTIP

SEQ ID NO: 77254 - protein, 16 aa, Artificial Sequence
  Description of Artificial Sequence: Synthetic peptide
  Seed: GMDPRMCSLMQGSTLP
GMDPRMYSLLQVSTLP

SEQ ID NO: 77255 - protein, 16 aa, Artificial Sequence
  Description of Artificial Sequence: Synthetic peptide
  Seed: GMDPRMCSLMQGSTLP
GMDPRMYSLLQVSTNP

SEQ ID NO: 77256 - protein, 16 aa, Artificial Sequence
  Description of Artificial Sequence: Synthetic peptide
  Seed: GMDPRMCSLMQGSTLP
GMDPRMYSLLQVSTSP

SEQ ID NO: 77257 - protein, 16 aa, Artificial Sequence
  Description of Artificial Sequence: Synthetic peptide
  Seed: GMDPRMCSLMQGSTLP
GMDPRMYSLLQVSTTP

SEQ ID NO: 77258 - protein, 16 aa, Artificial Sequence
  Description of Artificial Sequence: Synthetic peptide
  Seed: GMDPRMCSLMQGSTLP
GMDPRMYSLLQVSTVP

SEQ ID NO: 77259 - protein, 16 aa, Artificial Sequence
  Description of Artificial Sequence: Synthetic peptide
  Seed: GMDPRMCSLMQGSTLP
GMDPRMYSLMQASTAP

SEQ ID NO: 77260 - protein, 16 aa, Artificial Sequence
  Description of Artificial Sequence: Synthetic peptide
  Seed: GMDPRMCSLMQGSTLP
GMDPRMYSLMQASTIP

SEQ ID NO: 77261 - protein, 16 aa, Artificial Sequence
  Description of Artificial Sequence: Synthetic peptide
  Seed: GMDPRMCSLMQGSTLP
GMDPRMYSLMQASTLP

SEQ ID NO: 77262 - protein, 16 aa, Artificial Sequence
  Description of Artificial Sequence: Synthetic peptide
  Seed: GMDPRMCSLMQGSTLP
GMDPRMYSLMQASTMP

SEQ ID NO: 77263 - protein, 16 aa, Artificial Sequence
  Description of Artificial Sequence: Synthetic peptide
  Seed: GMDPRMCSLMQGSTLP
GMDPRMYSLMQASTNP

SEQ ID NO: 77264 - protein, 16 aa, Artificial Sequence
  Description of Artificial Sequence: Synthetic peptide
  Seed: GMDPRMCSLMQGSTLP
GMDPRMYSLMQASTSP

SEQ ID NO: 77265 - protein, 16 aa, Artificial Sequence
  Description of Artificial Sequence: Synthetic peptide
  Seed: GMDPRMCSLMQGSTLP
GMDPRMYSLMQASTTP

SEQ ID NO: 77266 - protein, 16 aa, Artificial Sequence
  Description of Artificial Sequence: Synthetic peptide
  Seed: GMDPRMCSLMQGSTLP
GMDPRMYSLMQASTVP

SEQ ID NO: 77267 - protein, 16 aa, Artificial Sequence
  Description of Artificial Sequence: Synthetic peptide
  Seed: GMDPRMCSLMQGSTLP
GMDPRMYSLMQGSTAP

SEQ ID NO: 77268 - protein, 16 aa, Artificial Sequence
  Description of Artificial Sequence: Synthetic peptide
  Seed: GMDPRMCSLMQGSTLP
GMDPRMYSLMQGSTIP

SEQ ID NO: 77269 - protein, 16 aa, Artificial Sequence
  Description of Artificial Sequence: Synthetic peptide
  Seed: GMDPRMCSLMQGSTLP
GMDPRMYSLMQGSTLP

SEQ ID NO: 77270 - protein, 16 aa, Artificial Sequence
  Description of Artificial Sequence: Synthetic peptide
  Seed: GMDPRMCSLMQGSTLP
GMDPRMYSLMQGSTMP

SEQ ID NO: 77271 - protein, 16 aa, Artificial Sequence
  Description of Artificial Sequence: Synthetic peptide
  Seed: GMDPRMCSLMQGSTLP
GMDPRMYSLMQGSTSP

SEQ ID NO: 77272 - protein, 16 aa, Artificial Sequence
  Description of Artificial Sequence: Synthetic peptide
  Seed: GMDPRMCSLMQGSTLP
GMDPRMYSLMQGSTTP

SEQ ID NO: 77273 - protein, 16 aa, Artificial Sequence
  Description of Artificial Sequence: Synthetic peptide
  Seed: GMDPRMCSLMQGSTLP
GMDPRMYSLMQGSTVP

SEQ ID NO: 77274 - protein, 16 aa, Artificial Sequence
  Description of Artificial Sequence: Synthetic peptide
  Seed: GMDPRMCSLMQGSTLP
GMDPRMYSLMQISTAP

SEQ ID NO: 77275 - protein, 16 aa, Artificial Sequence
  Description of Artificial Sequence: Synthetic peptide
  Seed: GMDPRMCSLMQGSTLP
GMDPRMYSLMQISTNP

SEQ ID NO: 77276 - protein, 16 aa, Artificial Sequence
  Description of Artificial Sequence: Synthetic peptide
  Seed: GMDPRMCSLMQGSTLP
GMDPRMYSLMQISTSP

SEQ ID NO: 77277 - protein, 16 aa, Artificial Sequence
  Description of Artificial Sequence: Synthetic peptide
  Seed: GMDPRMCSLMQGSTLP
GMDPRMYSLMQISTTP

SEQ ID NO: 77278 - protein, 16 aa, Artificial Sequence
  Description of Artificial Sequence: Synthetic peptide
  Seed: GMDPRMCSLMQGSTLP
GMDPRMYSLMQISTVP

SEQ ID NO: 77279 - protein, 16 aa, Artificial Sequence
  Description of Artificial Sequence: Synthetic peptide
  Seed: GMDPRMCSLMQGSTLP
GMDPRMYSLMQNSTAP

SEQ ID NO: 77280 - protein, 16 aa, Artificial Sequence
  Description of Artificial Sequence: Synthetic peptide
  Seed: GMDPRMCSLMQGSTLP
GMDPRMYSLMQNSTIP

SEQ ID NO: 77281 - protein, 16 aa, Artificial Sequence
  Description of Artificial Sequence: Synthetic peptide
  Seed: GMDPRMCSLMQGSTLP
GMDPRMYSLMQNSTLP

SEQ ID NO: 77282 - protein, 16 aa, Artificial Sequence
  Description of Artificial Sequence: Synthetic peptide
  Seed: GMDPRMCSLMQGSTLP
GMDPRMYSLMQNSTVP

SEQ ID NO: 77283 - protein, 16 aa, Artificial Sequence
  Description of Artificial Sequence: Synthetic peptide
  Seed: GMDPRMCSLMQGSTLP
GMDPRMYSLMQPSTAP

SEQ ID NO: 77284 - protein, 16 aa, Artificial Sequence
  Description of Artificial Sequence: Synthetic peptide
  Seed: GMDPRMCSLMQGSTLP
GMDPRMYSLMQPSTIP

SEQ ID NO: 77285 - protein, 16 aa, Artificial Sequence
  Description of Artificial Sequence: Synthetic peptide
  Seed: GMDPRMCSLMQGSTLP
GMDPRMYSLMQPSTLP

SEQ ID NO: 77286 - protein, 16 aa, Artificial Sequence
  Description of Artificial Sequence: Synthetic peptide
  Seed: GMDPRMCSLMQGSTLP
GMDPRMYSLMQPSTMP

SEQ ID NO: 77287 - protein, 16 aa, Artificial Sequence
  Description of Artificial Sequence: Synthetic peptide
  Seed: GMDPRMCSLMQGSTLP
GMDPRMYSLMQPSTNP

SEQ ID NO: 77288 - protein, 16 aa, Artificial Sequence
  Description of Artificial Sequence: Synthetic peptide
  Seed: GMDPRMCSLMQGSTLP
GMDPRMYSLMQPSTSP

SEQ ID NO: 77289 - protein, 16 aa, Artificial Sequence
  Description of Artificial Sequence: Synthetic peptide
  Seed: GMDPRMCSLMQGSTLP
GMDPRMYSLMQPSTTP

SEQ ID NO: 77290 - protein, 16 aa, Artificial Sequence
  Description of Artificial Sequence: Synthetic peptide
  Seed: GMDPRMCSLMQGSTLP
GMDPRMYSLMQPSTVP

SEQ ID NO: 77291 - protein, 16 aa, Artificial Sequence
  Description of Artificial Sequence: Synthetic peptide
  Seed: GMDPRMCSLMQGSTLP
GMDPRMYSLMQSSTAP

SEQ ID NO: 77292 - protein, 16 aa, Artificial Sequence
  Description of Artificial Sequence: Synthetic peptide
  Seed: GMDPRMCSLMQGSTLP
GMDPRMYSLMQSSTIP

SEQ ID NO: 77293 - protein, 16 aa, Artificial Sequence
  Description of Artificial Sequence: Synthetic peptide
  Seed: GMDPRMCSLMQGSTLP
GMDPRMYSLMQSSTLP

SEQ ID NO: 77294 - protein, 16 aa, Artificial Sequence
  Description of Artificial Sequence: Synthetic peptide
  Seed: GMDPRMCSLMQGSTLP
GMDPRMYSLMQSSTMP

SEQ ID NO: 77295 - protein, 16 aa, Artificial Sequence
  Description of Artificial Sequence: Synthetic peptide
  Seed: GMDPRMCSLMQGSTLP
GMDPRMYSLMQSSTNP

SEQ ID NO: 77296 - protein, 16 aa, Artificial Sequence
  Description of Artificial Sequence: Synthetic peptide
  Seed: GMDPRMCSLMQGSTLP
GMDPRMYSLMQSSTSP

SEQ ID NO: 77297 - protein, 16 aa, Artificial Sequence
  Description of Artificial Sequence: Synthetic peptide
  Seed: GMDPRMCSLMQGSTLP
GMDPRMYSLMQSSTTP

SEQ ID NO: 77298 - protein, 16 aa, Artificial Sequence
  Description of Artificial Sequence: Synthetic peptide
  Seed: GMDPRMCSLMQGSTLP
GMDPRMYSLMQSSTVP

SEQ ID NO: 77299 - protein, 16 aa, Artificial Sequence
  Description of Artificial Sequence: Synthetic peptide
  Seed: GMDPRMCSLMQGSTLP
GMDPRMYSLMQTSTAP

SEQ ID NO: 77300 - protein, 16 aa, Artificial Sequence
  Description of Artificial Sequence: Synthetic peptide
  Seed: GMDPRMCSLMQGSTLP
GMDPRMYSLMQTSTIP

SEQ ID NO: 77301 - protein, 16 aa, Artificial Sequence
  Description of Artificial Sequence: Synthetic peptide
  Seed: GMDPRMCSLMQGSTLP
GMDPRMYSLMQTSTLP

SEQ ID NO: 77302 - protein, 16 aa, Artificial Sequence
  Description of Artificial Sequence: Synthetic peptide
  Seed: GMDPRMCSLMQGSTLP
GMDPRMYSLMQTSTMP

SEQ ID NO: 77303 - protein, 16 aa, Artificial Sequence
  Description of Artificial Sequence: Synthetic peptide
  Seed: GMDPRMCSLMQGSTLP
GMDPRMYSLMQTSTNP

SEQ ID NO: 77304 - protein, 16 aa, Artificial Sequence
  Description of Artificial Sequence: Synthetic peptide
  Seed: GMDPRMCSLMQGSTLP
GMDPRMYSLMQTSTSP

SEQ ID NO: 77305 - protein, 16 aa, Artificial Sequence
  Description of Artificial Sequence: Synthetic peptide
  Seed: GMDPRMCSLMQGSTLP
GMDPRMYSLMQTSTTP

SEQ ID NO: 77306 - protein, 16 aa, Artificial Sequence
  Description of Artificial Sequence: Synthetic peptide
  Seed: GMDPRMCSLMQGSTLP
GMDPRMYSLMQTSTVP

SEQ ID NO: 77307 - protein, 16 aa, Artificial Sequence
  Description of Artificial Sequence: Synthetic peptide
  Seed: GMDPRMCSLMQGSTLP
GMDPRMYSLMQVSTAP

SEQ ID NO: 77308 - protein, 16 aa, Artificial Sequence
  Description of Artificial Sequence: Synthetic peptide
  Seed: GMDPRMCSLMQGSTLP
GMDPRMYSLMQVSTIP

SEQ ID NO: 77309 - protein, 16 aa, Artificial Sequence
  Description of Artificial Sequence: Synthetic peptide
  Seed: GMDPRMCSLMQGSTLP
GMDPRMYSLMQVSTLP

SEQ ID NO: 77310 - protein, 16 aa, Artificial Sequence
  Description of Artificial Sequence: Synthetic peptide
  Seed: GMDPRMCSLMQGSTLP
GMDPRMYSLMQVSTNP

SEQ ID NO: 77311 - protein, 16 aa, Artificial Sequence
  Description of Artificial Sequence: Synthetic peptide
  Seed: GMDPRMCSLMQGSTLP
GMDPRMYSLMQVSTSP

SEQ ID NO: 77312 - protein, 16 aa, Artificial Sequence
  Description of Artificial Sequence: Synthetic peptide
  Seed: GMDPRMCSLMQGSTLP
GMDPRMYSLMQVSTTP

SEQ ID NO: 77313 - protein, 16 aa, Artificial Sequence
  Description of Artificial Sequence: Synthetic peptide
  Seed: GMDPRMCSLMQGSTLP
GMDPRMYSLMQVSTVP

SEQ ID NO: 77314 - protein, 16 aa, Artificial Sequence
  Description of Artificial Sequence: Synthetic peptide
  Seed: GMDPRMCSLMQGSTLP
GMDPRMYSLQQASTIP

SEQ ID NO: 77315 - protein, 16 aa, Artificial Sequence
  Description of Artificial Sequence: Synthetic peptide
  Seed: GMDPRMCSLMQGSTLP
GMDPRMYSLQQASTLP

SEQ ID NO: 77316 - protein, 16 aa, Artificial Sequence
  Description of Artificial Sequence: Synthetic peptide
  Seed: GMDPRMCSLMQGSTLP
GMDPRMYSLQQASTVP

SEQ ID NO: 77317 - protein, 16 aa, Artificial Sequence
  Description of Artificial Sequence: Synthetic peptide
  Seed: GMDPRMCSLMQGSTLP
GMDPRMYSLQQGSTLP

SEQ ID NO: 77318 - protein, 16 aa, Artificial Sequence
  Description of Artificial Sequence: Synthetic peptide
  Seed: GMDPRMCSLMQGSTLP
GMDPRMYSLVQASTAP

SEQ ID NO: 77319 - protein, 16 aa, Artificial Sequence
  Description of Artificial Sequence: Synthetic peptide
  Seed: GMDPRMCSLMQGSTLP
GMDPRMYSLVQASTIP

SEQ ID NO: 77320 - protein, 16 aa, Artificial Sequence
  Description of Artificial Sequence: Synthetic peptide
  Seed: GMDPRMCSLMQGSTLP
GMDPRMYSLVQASTLP

SEQ ID NO: 77321 - protein, 16 aa, Artificial Sequence
  Description of Artificial Sequence: Synthetic peptide
  Seed: GMDPRMCSLMQGSTLP
GMDPRMYSLVQASTSP

SEQ ID NO: 77322 - protein, 16 aa, Artificial Sequence
  Description of Artificial Sequence: Synthetic peptide
  Seed: GMDPRMCSLMQGSTLP
GMDPRMYSLVQASTVP

SEQ ID NO: 77323 - protein, 16 aa, Artificial Sequence
  Description of Artificial Sequence: Synthetic peptide
  Seed: GMDPRMCSLMQGSTLP
GMDPRMYSLVQGSTLP

SEQ ID NO: 77324 - protein, 16 aa, Artificial Sequence
  Description of Artificial Sequence: Synthetic peptide
  Seed: GMDPRMCSLMQGSTLP
GMDPRMYSLVQGSTVP

SEQ ID NO: 77325 - protein, 17 aa, Artificial Sequence
  Description of Artificial Sequence: Synthetic peptide
  Seed: GMDPRMCSLMQGSTLPR
GMDPRMFSLAQASTAPR

SEQ ID NO: 77326 - protein, 17 aa, Artificial Sequence
  Description of Artificial Sequence: Synthetic peptide
  Seed: GMDPRMCSLMQGSTLPR
GMDPRMFSLAQASTFPR

SEQ ID NO: 77327 - protein, 17 aa, Artificial Sequence
  Description of Artificial Sequence: Synthetic peptide
  Seed: GMDPRMCSLMQGSTLPR
GMDPRMFSLAQASTGPR

SEQ ID NO: 77328 - protein, 17 aa, Artificial Sequence
  Description of Artificial Sequence: Synthetic peptide
  Seed: GMDPRMCSLMQGSTLPR
GMDPRMFSLAQASTHPR

SEQ ID NO: 77329 - protein, 17 aa, Artificial Sequence
  Description of Artificial Sequence: Synthetic peptide
  Seed: GMDPRMCSLMQGSTLPR
GMDPRMFSLAQASTIPR

SEQ ID NO: 77330 - protein, 17 aa, Artificial Sequence
  Description of Artificial Sequence: Synthetic peptide
  Seed: GMDPRMCSLMQGSTLPR
GMDPRMFSLAQASTLPR

SEQ ID NO: 77331 - protein, 17 aa, Artificial Sequence
  Description of Artificial Sequence: Synthetic peptide
  Seed: GMDPRMCSLMQGSTLPR
GMDPRMFSLAQASTMPR

SEQ ID NO: 77332 - protein, 17 aa, Artificial Sequence
  Description of Artificial Sequence: Synthetic peptide
  Seed: GMDPRMCSLMQGSTLPR
GMDPRMFSLAQASTNPR

SEQ ID NO: 77333 - protein, 17 aa, Artificial Sequence
  Description of Artificial Sequence: Synthetic peptide
  Seed: GMDPRMCSLMQGSTLPR
GMDPRMFSLAQASTQPR

SEQ ID NO: 77334 - protein, 17 aa, Artificial Sequence
  Description of Artificial Sequence: Synthetic peptide
  Seed: GMDPRMCSLMQGSTLPR
GMDPRMFSLAQASTSPR

SEQ ID NO: 77335 - protein, 17 aa, Artificial Sequence
  Description of Artificial Sequence: Synthetic peptide
  Seed: GMDPRMCSLMQGSTLPR
GMDPRMFSLAQASTTPR

SEQ ID NO: 77336 - protein, 17 aa, Artificial Sequence
  Description of Artificial Sequence: Synthetic peptide
  Seed: GMDPRMCSLMQGSTLPR
GMDPRMFSLAQASTVPR

SEQ ID NO: 77337 - protein, 17 aa, Artificial Sequence
  Description of Artificial Sequence: Synthetic peptide
  Seed: GMDPRMCSLMQGSTLPR
GMDPRMFSLAQGSTAPR

SEQ ID NO: 77338 - protein, 17 aa, Artificial Sequence
  Description of Artificial Sequence: Synthetic peptide
  Seed: GMDPRMCSLMQGSTLPR
GMDPRMFSLAQGSTIPR

SEQ ID NO: 77339 - protein, 17 aa, Artificial Sequence
  Description of Artificial Sequence: Synthetic peptide
  Seed: GMDPRMCSLMQGSTLPR
GMDPRMFSLAQGSTLPR

SEQ ID NO: 77340 - protein, 17 aa, Artificial Sequence
  Description of Artificial Sequence: Synthetic peptide
  Seed: GMDPRMCSLMQGSTLPR
GMDPRMFSLAQGSTMPR

SEQ ID NO: 77341 - protein, 17 aa, Artificial Sequence
  Description of Artificial Sequence: Synthetic peptide
  Seed: GMDPRMCSLMQGSTLPR
GMDPRMFSLAQGSTSPR

SEQ ID NO: 77342 - protein, 17 aa, Artificial Sequence
  Description of Artificial Sequence: Synthetic peptide
  Seed: GMDPRMCSLMQGSTLPR
GMDPRMFSLAQGSTTPR

SEQ ID NO: 77343 - protein, 17 aa, Artificial Sequence
  Description of Artificial Sequence: Synthetic peptide
  Seed: GMDPRMCSLMQGSTLPR
GMDPRMFSLAQGSTVPR

SEQ ID NO: 77344 - protein, 17 aa, Artificial Sequence
  Description of Artificial Sequence: Synthetic peptide
  Seed: GMDPRMCSLMQGSTLPR
GMDPRMFSLAQISTAPR

SEQ ID NO: 77345 - protein, 17 aa, Artificial Sequence
  Description of Artificial Sequence: Synthetic peptide
  Seed: GMDPRMCSLMQGSTLPR
GMDPRMFSLAQISTIPR

SEQ ID NO: 77346 - protein, 17 aa, Artificial Sequence
  Description of Artificial Sequence: Synthetic peptide
  Seed: GMDPRMCSLMQGSTLPR
GMDPRMFSLAQISTLPR

SEQ ID NO: 77347 - protein, 17 aa, Artificial Sequence
  Description of Artificial Sequence: Synthetic peptide
  Seed: GMDPRMCSLMQGSTLPR
GMDPRMFSLAQISTMPR

SEQ ID NO: 77348 - protein, 17 aa, Artificial Sequence
  Description of Artificial Sequence: Synthetic peptide
  Seed: GMDPRMCSLMQGSTLPR
GMDPRMFSLAQISTNPR

SEQ ID NO: 77349 - protein, 17 aa, Artificial Sequence
  Description of Artificial Sequence: Synthetic peptide
  Seed: GMDPRMCSLMQGSTLPR
GMDPRMFSLAQISTSPR

SEQ ID NO: 77350 - protein, 17 aa, Artificial Sequence
  Description of Artificial Sequence: Synthetic peptide
  Seed: GMDPRMCSLMQGSTLPR
GMDPRMFSLAQISTTPR

SEQ ID NO: 77351 - protein, 17 aa, Artificial Sequence
  Description of Artificial Sequence: Synthetic peptide
  Seed: GMDPRMCSLMQGSTLPR
GMDPRMFSLAQISTVPR

SEQ ID NO: 77352 - protein, 17 aa, Artificial Sequence
  Description of Artificial Sequence: Synthetic peptide
  Seed: GMDPRMCSLMQGSTLPR
GMDPRMFSLAQLSTAPR

SEQ ID NO: 77353 - protein, 17 aa, Artificial Sequence
  Description of Artificial Sequence: Synthetic peptide
  Seed: GMDPRMCSLMQGSTLPR
GMDPRMFSLAQLSTNPR

SEQ ID NO: 77354 - protein, 17 aa, Artificial Sequence
  Description of Artificial Sequence: Synthetic peptide
  Seed: GMDPRMCSLMQGSTLPR
GMDPRMFSLAQLSTSPR

SEQ ID NO: 77355 - protein, 17 aa, Artificial Sequence
  Description of Artificial Sequence: Synthetic peptide
  Seed: GMDPRMCSLMQGSTLPR
GMDPRMFSLAQMSTAPR

SEQ ID NO: 77356 - protein, 17 aa, Artificial Sequence
  Description of Artificial Sequence: Synthetic peptide
  Seed: GMDPRMCSLMQGSTLPR
GMDPRMFSLAQNSTAPR

SEQ ID NO: 77357 - protein, 17 aa, Artificial Sequence
  Description of Artificial Sequence: Synthetic peptide
  Seed: GMDPRMCSLMQGSTLPR
GMDPRMFSLAQNSTIPR

SEQ ID NO: 77358 - protein, 17 aa, Artificial Sequence
  Description of Artificial Sequence: Synthetic peptide
  Seed: GMDPRMCSLMQGSTLPR
GMDPRMFSLAQNSTLPR

SEQ ID NO: 77359 - protein, 17 aa, Artificial Sequence
  Description of Artificial Sequence: Synthetic peptide
  Seed: GMDPRMCSLMQGSTLPR
GMDPRMFSLAQNSTSPR

SEQ ID NO: 77360 - protein, 17 aa, Artificial Sequence
  Description of Artificial Sequence: Synthetic peptide
  Seed: GMDPRMCSLMQGSTLPR
GMDPRMFSLAQNSTVPR

SEQ ID NO: 77361 - protein, 17 aa, Artificial Sequence
  Description of Artificial Sequence: Synthetic peptide
  Seed: GMDPRMCSLMQGSTLPR
GMDPRMFSLAQPSTAPR

SEQ ID NO: 77362 - protein, 17 aa, Artificial Sequence
  Description of Artificial Sequence: Synthetic peptide
  Seed: GMDPRMCSLMQGSTLPR
GMDPRMFSLAQPSTIPR

SEQ ID NO: 77363 - protein, 17 aa, Artificial Sequence
  Description of Artificial Sequence: Synthetic peptide
  Seed: GMDPRMCSLMQGSTLPR
GMDPRMFSLAQPSTLPR

SEQ ID NO: 77364 - protein, 17 aa, Artificial Sequence
  Description of Artificial Sequence: Synthetic peptide
  Seed: GMDPRMCSLMQGSTLPR
GMDPRMFSLAQPSTMPR

SEQ ID NO: 77365 - protein, 17 aa, Artificial Sequence
  Description of Artificial Sequence: Synthetic peptide
  Seed: GMDPRMCSLMQGSTLPR
GMDPRMFSLAQPSTNPR

SEQ ID NO: 77366 - protein, 17 aa, Artificial Sequence
  Description of Artificial Sequence: Synthetic peptide
  Seed: GMDPRMCSLMQGSTLPR
GMDPRMFSLAQPSTSPR

SEQ ID NO: 77367 - protein, 17 aa, Artificial Sequence
  Description of Artificial Sequence: Synthetic peptide
  Seed: GMDPRMCSLMQGSTLPR
GMDPRMFSLAQPSTTPR

SEQ ID NO: 77368 - protein, 17 aa, Artificial Sequence
  Description of Artificial Sequence: Synthetic peptide
  Seed: GMDPRMCSLMQGSTLPR
GMDPRMFSLAQPSTVPR

SEQ ID NO: 77369 - protein, 17 aa, Artificial Sequence
  Description of Artificial Sequence: Synthetic peptide
  Seed: GMDPRMCSLMQGSTLPR
GMDPRMFSLAQSSTAPR

SEQ ID NO: 77370 - protein, 17 aa, Artificial Sequence
  Description of Artificial Sequence: Synthetic peptide
  Seed: GMDPRMCSLMQGSTLPR
GMDPRMFSLAQSSTIPR

SEQ ID NO: 77371 - protein, 17 aa, Artificial Sequence
  Description of Artificial Sequence: Synthetic peptide
  Seed: GMDPRMCSLMQGSTLPR
GMDPRMFSLAQSSTLPR

SEQ ID NO: 77372 - protein, 17 aa, Artificial Sequence
  Description of Artificial Sequence: Synthetic peptide
  Seed: GMDPRMCSLMQGSTLPR
GMDPRMFSLAQSSTMPR

SEQ ID NO: 77373 - protein, 17 aa, Artificial Sequence
  Description of Artificial Sequence: Synthetic peptide
  Seed: GMDPRMCSLMQGSTLPR
GMDPRMFSLAQSSTNPR

SEQ ID NO: 77374 - protein, 17 aa, Artificial Sequence
  Description of Artificial Sequence: Synthetic peptide
  Seed: GMDPRMCSLMQGSTLPR
GMDPRMFSLAQSSTSPR

SEQ ID NO: 77375 - protein, 17 aa, Artificial Sequence
  Description of Artificial Sequence: Synthetic peptide
  Seed: GMDPRMCSLMQGSTLPR
GMDPRMFSLAQSSTTPR

SEQ ID NO: 77376 - protein, 17 aa, Artificial Sequence
  Description of Artificial Sequence: Synthetic peptide
  Seed: GMDPRMCSLMQGSTLPR
GMDPRMFSLAQSSTVPR

SEQ ID NO: 77377 - protein, 17 aa, Artificial Sequence
  Description of Artificial Sequence: Synthetic peptide
  Seed: GMDPRMCSLMQGSTLPR
GMDPRMFSLAQTSTAPR

SEQ ID NO: 77378 - protein, 17 aa, Artificial Sequence
  Description of Artificial Sequence: Synthetic peptide
  Seed: GMDPRMCSLMQGSTLPR
GMDPRMFSLAQTSTIPR

SEQ ID NO: 77379 - protein, 17 aa, Artificial Sequence
  Description of Artificial Sequence: Synthetic peptide
  Seed: GMDPRMCSLMQGSTLPR
GMDPRMFSLAQTSTLPR

SEQ ID NO: 77380 - protein, 17 aa, Artificial Sequence
  Description of Artificial Sequence: Synthetic peptide
  Seed: GMDPRMCSLMQGSTLPR
GMDPRMFSLAQTSTMPR

SEQ ID NO: 77381 - protein, 17 aa, Artificial Sequence
  Description of Artificial Sequence: Synthetic peptide
  Seed: GMDPRMCSLMQGSTLPR
GMDPRMFSLAQTSTNPR

SEQ ID NO: 77382 - protein, 17 aa, Artificial Sequence
  Description of Artificial Sequence: Synthetic peptide
  Seed: GMDPRMCSLMQGSTLPR
GMDPRMFSLAQTSTSPR

SEQ ID NO: 77383 - protein, 17 aa, Artificial Sequence
  Description of Artificial Sequence: Synthetic peptide
  Seed: GMDPRMCSLMQGSTLPR
GMDPRMFSLAQTSTTPR

SEQ ID NO: 77384 - protein, 17 aa, Artificial Sequence
  Description of Artificial Sequence: Synthetic peptide
  Seed: GMDPRMCSLMQGSTLPR
GMDPRMFSLAQTSTVPR

SEQ ID NO: 77385 - protein, 17 aa, Artificial Sequence
  Description of Artificial Sequence: Synthetic peptide
  Seed: GMDPRMCSLMQGSTLPR
GMDPRMFSLAQVSTAPR

SEQ ID NO: 77386 - protein, 17 aa, Artificial Sequence
  Description of Artificial Sequence: Synthetic peptide
  Seed: GMDPRMCSLMQGSTLPR
GMDPRMFSLAQVSTGPR

SEQ ID NO: 77387 - protein, 17 aa, Artificial Sequence
  Description of Artificial Sequence: Synthetic peptide
  Seed: GMDPRMCSLMQGSTLPR
GMDPRMFSLAQVSTHPR

SEQ ID NO: 77388 - protein, 17 aa, Artificial Sequence
  Description of Artificial Sequence: Synthetic peptide
  Seed: GMDPRMCSLMQGSTLPR
GMDPRMFSLAQVSTIPR

SEQ ID NO: 77389 - protein, 17 aa, Artificial Sequence
  Description of Artificial Sequence: Synthetic peptide
  Seed: GMDPRMCSLMQGSTLPR
GMDPRMFSLAQVSTLPR

SEQ ID NO: 77390 - protein, 17 aa, Artificial Sequence
  Description of Artificial Sequence: Synthetic peptide
  Seed: GMDPRMCSLMQGSTLPR
GMDPRMFSLAQVSTMPR

SEQ ID NO: 77391 - protein, 17 aa, Artificial Sequence
  Description of Artificial Sequence: Synthetic peptide
  Seed: GMDPRMCSLMQGSTLPR
GMDPRMFSLAQVSTNPR

SEQ ID NO: 77392 - protein, 17 aa, Artificial Sequence
  Description of Artificial Sequence: Synthetic peptide
  Seed: GMDPRMCSLMQGSTLPR
GMDPRMFSLAQVSTSPR

SEQ ID NO: 77393 - protein, 17 aa, Artificial Sequence
  Description of Artificial Sequence: Synthetic peptide
  Seed: GMDPRMCSLMQGSTLPR
GMDPRMFSLAQVSTTPR

SEQ ID NO: 77394 - protein, 17 aa, Artificial Sequence
  Description of Artificial Sequence: Synthetic peptide
  Seed: GMDPRMCSLMQGSTLPR
GMDPRMFSLAQVSTVPR

SEQ ID NO: 77395 - protein, 17 aa, Artificial Sequence
  Description of Artificial Sequence: Synthetic peptide
  Seed: GMDPRMCSLMQGSTLPR
GMDPRMFSLCQASTLPR

SEQ ID NO: 77396 - protein, 17 aa, Artificial Sequence
  Description of Artificial Sequence: Synthetic peptide
  Seed: GMDPRMCSLMQGSTLPR
GMDPRMFSLEQASTAPR

SEQ ID NO: 77397 - protein, 17 aa, Artificial Sequence
  Description of Artificial Sequence: Synthetic peptide
  Seed: GMDPRMCSLMQGSTLPR
GMDPRMFSLEQASTIPR

SEQ ID NO: 77398 - protein, 17 aa, Artificial Sequence
  Description of Artificial Sequence: Synthetic peptide
  Seed: GMDPRMCSLMQGSTLPR
GMDPRMFSLEQASTLPR

SEQ ID NO: 77399 - protein, 17 aa, Artificial Sequence
  Description of Artificial Sequence: Synthetic peptide
  Seed: GMDPRMCSLMQGSTLPR
GMDPRMFSLEQASTVPR

SEQ ID NO: 77400 - protein, 17 aa, Artificial Sequence
  Description of Artificial Sequence: Synthetic peptide
  Seed: GMDPRMCSLMQGSTLPR
GMDPRMFSLEQGSTLPR

SEQ ID NO: 77401 - protein, 17 aa, Artificial Sequence
  Description of Artificial Sequence: Synthetic peptide
  Seed: GMDPRMCSLMQGSTLPR
GMDPRMFSLFQASTAPR

SEQ ID NO: 77402 - protein, 17 aa, Artificial Sequence
  Description of Artificial Sequence: Synthetic peptide
  Seed: GMDPRMCSLMQGSTLPR
GMDPRMFSLFQASTIPR

SEQ ID NO: 77403 - protein, 17 aa, Artificial Sequence
  Description of Artificial Sequence: Synthetic peptide
  Seed: GMDPRMCSLMQGSTLPR
GMDPRMFSLFQASTLPR

SEQ ID NO: 77404 - protein, 17 aa, Artificial Sequence
  Description of Artificial Sequence: Synthetic peptide
  Seed: GMDPRMCSLMQGSTLPR
GMDPRMFSLFQASTNPR

SEQ ID NO: 77405 - protein, 17 aa, Artificial Sequence
  Description of Artificial Sequence: Synthetic peptide
  Seed: GMDPRMCSLMQGSTLPR
GMDPRMFSLFQASTSPR

SEQ ID NO: 77406 - protein, 17 aa, Artificial Sequence
  Description of Artificial Sequence: Synthetic peptide
  Seed: GMDPRMCSLMQGSTLPR
GMDPRMFSLFQASTVPR

SEQ ID NO: 77407 - protein, 17 aa, Artificial Sequence
  Description of Artificial Sequence: Synthetic peptide
  Seed: GMDPRMCSLMQGSTLPR
GMDPRMFSLFQGSTAPR

SEQ ID NO: 77408 - protein, 17 aa, Artificial Sequence
  Description of Artificial Sequence: Synthetic peptide
  Seed: GMDPRMCSLMQGSTLPR
GMDPRMFSLFQGSTLPR

SEQ ID NO: 77409 - protein, 17 aa, Artificial Sequence
  Description of Artificial Sequence: Synthetic peptide
  Seed: GMDPRMCSLMQGSTLPR
GMDPRMFSLFQGSTVPR

SEQ ID NO: 77410 - protein, 17 aa, Artificial Sequence
  Description of Artificial Sequence: Synthetic peptide
  Seed: GMDPRMCSLMQGSTLPR
GMDPRMFSLFQPSTAPR

SEQ ID NO: 77411 - protein, 17 aa, Artificial Sequence
  Description of Artificial Sequence: Synthetic peptide
  Seed: GMDPRMCSLMQGSTLPR
GMDPRMFSLFQPSTSPR

SEQ ID NO: 77412 - protein, 17 aa, Artificial Sequence
  Description of Artificial Sequence: Synthetic peptide
  Seed: GMDPRMCSLMQGSTLPR
GMDPRMFSLFQSSTAPR

SEQ ID NO: 77413 - protein, 17 aa, Artificial Sequence
  Description of Artificial Sequence: Synthetic peptide
  Seed: GMDPRMCSLMQGSTLPR
GMDPRMFSLFQTSTAPR

SEQ ID NO: 77414 - protein, 17 aa, Artificial Sequence
  Description of Artificial Sequence: Synthetic peptide
  Seed: GMDPRMCSLMQGSTLPR
GMDPRMFSLFQVSTAPR

SEQ ID NO: 77415 - protein, 17 aa, Artificial Sequence
  Description of Artificial Sequence: Synthetic peptide
  Seed: GMDPRMCSLMQGSTLPR
GMDPRMFSLGQASTIPR

SEQ ID NO: 77416 - protein, 17 aa, Artificial Sequence
  Description of Artificial Sequence: Synthetic peptide
  Seed: GMDPRMCSLMQGSTLPR
GMDPRMFSLGQASTLPR

SEQ ID NO: 77417 - protein, 17 aa, Artificial Sequence
  Description of Artificial Sequence: Synthetic peptide
  Seed: GMDPRMCSLMQGSTLPR
GMDPRMFSLGQASTVPR

SEQ ID NO: 77418 - protein, 17 aa, Artificial Sequence
  Description of Artificial Sequence: Synthetic peptide
  Seed: GMDPRMCSLMQGSTLPR
GMDPRMFSLGQGSTLPR

SEQ ID NO: 77419 - protein, 17 aa, Artificial Sequence
  Description of Artificial Sequence: Synthetic peptide
  Seed: GMDPRMCSLMQGSTLPR
GMDPRMFSLGQSSTLPR

SEQ ID NO: 77420 - protein, 17 aa, Artificial Sequence
  Description of Artificial Sequence: Synthetic peptide
  Seed: GMDPRMCSLMQGSTLPR
GMDPRMFSLIQASTAPR

SEQ ID NO: 77421 - protein, 17 aa, Artificial Sequence
  Description of Artificial Sequence: Synthetic peptide
  Seed: GMDPRMCSLMQGSTLPR
GMDPRMFSLIQASTCPR

SEQ ID NO: 77422 - protein, 17 aa, Artificial Sequence
  Description of Artificial Sequence: Synthetic peptide
  Seed: GMDPRMCSLMQGSTLPR
GMDPRMFSLIQASTDPR

SEQ ID NO: 77423 - protein, 17 aa, Artificial Sequence
  Description of Artificial Sequence: Synthetic peptide
  Seed: GMDPRMCSLMQGSTLPR
GMDPRMFSLIQASTEPR

SEQ ID NO: 77424 - protein, 17 aa, Artificial Sequence
  Description of Artificial Sequence: Synthetic peptide
  Seed: GMDPRMCSLMQGSTLPR
GMDPRMFSLIQASTFPR

SEQ ID NO: 77425 - protein, 17 aa, Artificial Sequence
  Description of Artificial Sequence: Synthetic peptide
  Seed: GMDPRMCSLMQGSTLPR
GMDPRMFSLIQASTGPR

SEQ ID NO: 77426 - protein, 17 aa, Artificial Sequence
  Description of Artificial Sequence: Synthetic peptide
  Seed: GMDPRMCSLMQGSTLPR
GMDPRMFSLIQASTHPR

SEQ ID NO: 77427 - protein, 17 aa, Artificial Sequence
  Description of Artificial Sequence: Synthetic peptide
  Seed: GMDPRMCSLMQGSTLPR
GMDPRMFSLIQASTIPR

SEQ ID NO: 77428 - protein, 17 aa, Artificial Sequence
  Description of Artificial Sequence: Synthetic peptide
  Seed: GMDPRMCSLMQGSTLPR
GMDPRMFSLIQASTLPR

SEQ ID NO: 77429 - protein, 17 aa, Artificial Sequence
  Description of Artificial Sequence: Synthetic peptide
  Seed: GMDPRMCSLMQGSTLPR
GMDPRMFSLIQASTMPR

SEQ ID NO: 77430 - protein, 17 aa, Artificial Sequence
  Description of Artificial Sequence: Synthetic peptide
  Seed: GMDPRMCSLMQGSTLPR
GMDPRMFSLIQASTNPR

SEQ ID NO: 77431 - protein, 17 aa, Artificial Sequence
  Description of Artificial Sequence: Synthetic peptide
  Seed: GMDPRMCSLMQGSTLPR
GMDPRMFSLIQASTPPR

SEQ ID NO: 77432 - protein, 17 aa, Artificial Sequence
  Description of Artificial Sequence: Synthetic peptide
  Seed: GMDPRMCSLMQGSTLPR
GMDPRMFSLIQASTQPR

SEQ ID NO: 77433 - protein, 17 aa, Artificial Sequence
  Description of Artificial Sequence: Synthetic peptide
  Seed: GMDPRMCSLMQGSTLPR
GMDPRMFSLIQASTSPR

SEQ ID NO: 77434 - protein, 17 aa, Artificial Sequence
  Description of Artificial Sequence: Synthetic peptide
  Seed: GMDPRMCSLMQGSTLPR
GMDPRMFSLIQASTTPR

SEQ ID NO: 77435 - protein, 17 aa, Artificial Sequence
  Description of Artificial Sequence: Synthetic peptide
  Seed: GMDPRMCSLMQGSTLPR
GMDPRMFSLIQASTVPR

SEQ ID NO: 77436 - protein, 17 aa, Artificial Sequence
  Description of Artificial Sequence: Synthetic peptide
  Seed: GMDPRMCSLMQGSTLPR
GMDPRMFSLIQGSTAPR

SEQ ID NO: 77437 - protein, 17 aa, Artificial Sequence
  Description of Artificial Sequence: Synthetic peptide
  Seed: GMDPRMCSLMQGSTLPR
GMDPRMFSLIQGSTGPR

SEQ ID NO: 77438 - protein, 17 aa, Artificial Sequence
  Description of Artificial Sequence: Synthetic peptide
  Seed: GMDPRMCSLMQGSTLPR
GMDPRMFSLIQGSTIPR

SEQ ID NO: 77439 - protein, 17 aa, Artificial Sequence
  Description of Artificial Sequence: Synthetic peptide
  Seed: GMDPRMCSLMQGSTLPR
GMDPRMFSLIQGSTLPR

SEQ ID NO: 77440 - protein, 17 aa, Artificial Sequence
  Description of Artificial Sequence: Synthetic peptide
  Seed: GMDPRMCSLMQGSTLPR
GMDPRMFSLIQGSTMPR

SEQ ID NO: 77441 - protein, 17 aa, Artificial Sequence
  Description of Artificial Sequence: Synthetic peptide
  Seed: GMDPRMCSLMQGSTLPR
GMDPRMFSLIQGSTNPR

SEQ ID NO: 77442 - protein, 17 aa, Artificial Sequence
  Description of Artificial Sequence: Synthetic peptide
  Seed: GMDPRMCSLMQGSTLPR
GMDPRMFSLIQGSTSPR

SEQ ID NO: 77443 - protein, 17 aa, Artificial Sequence
  Description of Artificial Sequence: Synthetic peptide
  Seed: GMDPRMCSLMQGSTLPR
GMDPRMFSLIQGSTTPR

SEQ ID NO: 77444 - protein, 17 aa, Artificial Sequence
  Description of Artificial Sequence: Synthetic peptide
  Seed: GMDPRMCSLMQGSTLPR
GMDPRMFSLIQGSTVPR

SEQ ID NO: 77445 - protein, 17 aa, Artificial Sequence
  Description of Artificial Sequence: Synthetic peptide
  Seed: GMDPRMCSLMQGSTLPR
GMDPRMFSLIQISTAPR

SEQ ID NO: 77446 - protein, 17 aa, Artificial Sequence
  Description of Artificial Sequence: Synthetic peptide
  Seed: GMDPRMCSLMQGSTLPR
GMDPRMFSLIQISTGPR

SEQ ID NO: 77447 - protein, 17 aa, Artificial Sequence
  Description of Artificial Sequence: Synthetic peptide
  Seed: GMDPRMCSLMQGSTLPR
GMDPRMFSLIQISTHPR

SEQ ID NO: 77448 - protein, 17 aa, Artificial Sequence
  Description of Artificial Sequence: Synthetic peptide
  Seed: GMDPRMCSLMQGSTLPR
GMDPRMFSLIQISTIPR

SEQ ID NO: 77449 - protein, 17 aa, Artificial Sequence
  Description of Artificial Sequence: Synthetic peptide
  Seed: GMDPRMCSLMQGSTLPR
GMDPRMFSLIQISTLPR

SEQ ID NO: 77450 - protein, 17 aa, Artificial Sequence
  Description of Artificial Sequence: Synthetic peptide
  Seed: GMDPRMCSLMQGSTLPR
GMDPRMFSLIQISTMPR

SEQ ID NO: 77451 - protein, 17 aa, Artificial Sequence
  Description of Artificial Sequence: Synthetic peptide
  Seed: GMDPRMCSLMQGSTLPR
GMDPRMFSLIQISTNPR

SEQ ID NO: 77452 - protein, 17 aa, Artificial Sequence
  Description of Artificial Sequence: Synthetic peptide
  Seed: GMDPRMCSLMQGSTLPR
GMDPRMFSLIQISTSPR

SEQ ID NO: 77453 - protein, 17 aa, Artificial Sequence
  Description of Artificial Sequence: Synthetic peptide
  Seed: GMDPRMCSLMQGSTLPR
GMDPRMFSLIQISTTPR

SEQ ID NO: 77454 - protein, 17 aa, Artificial Sequence
  Description of Artificial Sequence: Synthetic peptide
  Seed: GMDPRMCSLMQGSTLPR
GMDPRMFSLIQISTVPR

SEQ ID NO: 77455 - protein, 17 aa, Artificial Sequence
  Description of Artificial Sequence: Synthetic peptide
  Seed: GMDPRMCSLMQGSTLPR
GMDPRMFSLIQLSTAPR

SEQ ID NO: 77456 - protein, 17 aa, Artificial Sequence
  Description of Artificial Sequence: Synthetic peptide
  Seed: GMDPRMCSLMQGSTLPR
GMDPRMFSLIQLSTNPR

SEQ ID NO: 77457 - protein, 17 aa, Artificial Sequence
  Description of Artificial Sequence: Synthetic peptide
  Seed: GMDPRMCSLMQGSTLPR
GMDPRMFSLIQLSTSPR

SEQ ID NO: 77458 - protein, 17 aa, Artificial Sequence
  Description of Artificial Sequence: Synthetic peptide
  Seed: GMDPRMCSLMQGSTLPR
GMDPRMFSLIQMSTAPR

SEQ ID NO: 77459 - protein, 17 aa, Artificial Sequence
  Description of Artificial Sequence: Synthetic peptide
  Seed: GMDPRMCSLMQGSTLPR
GMDPRMFSLIQMSTNPR

SEQ ID NO: 77460 - protein, 17 aa, Artificial Sequence
  Description of Artificial Sequence: Synthetic peptide
  Seed: GMDPRMCSLMQGSTLPR
GMDPRMFSLIQMSTSPR

SEQ ID NO: 77461 - protein, 17 aa, Artificial Sequence
  Description of Artificial Sequence: Synthetic peptide
  Seed: GMDPRMCSLMQGSTLPR
GMDPRMFSLIQNSTAPR

SEQ ID NO: 77462 - protein, 17 aa, Artificial Sequence
  Description of Artificial Sequence: Synthetic peptide
  Seed: GMDPRMCSLMQGSTLPR
GMDPRMFSLIQNSTIPR

SEQ ID NO: 77463 - protein, 17 aa, Artificial Sequence
  Description of Artificial Sequence: Synthetic peptide
  Seed: GMDPRMCSLMQGSTLPR
GMDPRMFSLIQNSTLPR

SEQ ID NO: 77464 - protein, 17 aa, Artificial Sequence
  Description of Artificial Sequence: Synthetic peptide
  Seed: GMDPRMCSLMQGSTLPR
GMDPRMFSLIQNSTMPR

SEQ ID NO: 77465 - protein, 17 aa, Artificial Sequence
  Description of Artificial Sequence: Synthetic peptide
  Seed: GMDPRMCSLMQGSTLPR
GMDPRMFSLIQNSTNPR

SEQ ID NO: 77466 - protein, 17 aa, Artificial Sequence
  Description of Artificial Sequence: Synthetic peptide
  Seed: GMDPRMCSLMQGSTLPR
GMDPRMFSLIQNSTSPR

SEQ ID NO: 77467 - protein, 17 aa, Artificial Sequence
  Description of Artificial Sequence: Synthetic peptide
  Seed: GMDPRMCSLMQGSTLPR
GMDPRMFSLIQNSTTPR

SEQ ID NO: 77468 - protein, 17 aa, Artificial Sequence
  Description of Artificial Sequence: Synthetic peptide
  Seed: GMDPRMCSLMQGSTLPR
GMDPRMFSLIQNSTVPR

SEQ ID NO: 77469 - protein, 17 aa, Artificial Sequence
  Description of Artificial Sequence: Synthetic peptide
  Seed: GMDPRMCSLMQGSTLPR
GMDPRMFSLIQPSTAPR

SEQ ID NO: 77470 - protein, 17 aa, Artificial Sequence
  Description of Artificial Sequence: Synthetic peptide
  Seed: GMDPRMCSLMQGSTLPR
GMDPRMFSLIQPSTGPR

SEQ ID NO: 77471 - protein, 17 aa, Artificial Sequence
  Description of Artificial Sequence: Synthetic peptide
  Seed: GMDPRMCSLMQGSTLPR
GMDPRMFSLIQPSTHPR

SEQ ID NO: 77472 - protein, 17 aa, Artificial Sequence
  Description of Artificial Sequence: Synthetic peptide
  Seed: GMDPRMCSLMQGSTLPR
GMDPRMFSLIQPSTIPR

SEQ ID NO: 77473 - protein, 17 aa, Artificial Sequence
  Description of Artificial Sequence: Synthetic peptide
  Seed: GMDPRMCSLMQGSTLPR
GMDPRMFSLIQPSTLPR

SEQ ID NO: 77474 - protein, 17 aa, Artificial Sequence
  Description of Artificial Sequence: Synthetic peptide
  Seed: GMDPRMCSLMQGSTLPR
GMDPRMFSLIQPSTMPR

SEQ ID NO: 77475 - protein, 17 aa, Artificial Sequence
  Description of Artificial Sequence: Synthetic peptide
  Seed: GMDPRMCSLMQGSTLPR
GMDPRMFSLIQPSTNPR

SEQ ID NO: 77476 - protein, 17 aa, Artificial Sequence
  Description of Artificial Sequence: Synthetic peptide
  Seed: GMDPRMCSLMQGSTLPR
GMDPRMFSLIQPSTPPR

SEQ ID NO: 77477 - protein, 17 aa, Artificial Sequence
  Description of Artificial Sequence: Synthetic peptide
  Seed: GMDPRMCSLMQGSTLPR
GMDPRMFSLIQPSTQPR

SEQ ID NO: 77478 - protein, 17 aa, Artificial Sequence
  Description of Artificial Sequence: Synthetic peptide
  Seed: GMDPRMCSLMQGSTLPR
GMDPRMFSLIQPSTSPR

SEQ ID NO: 77479 - protein, 17 aa, Artificial Sequence
  Description of Artificial Sequence: Synthetic peptide
  Seed: GMDPRMCSLMQGSTLPR
GMDPRMFSLIQPSTTPR

SEQ ID NO: 77480 - protein, 17 aa, Artificial Sequence
  Description of Artificial Sequence: Synthetic peptide
  Seed: GMDPRMCSLMQGSTLPR
GMDPRMFSLIQPSTVPR

SEQ ID NO: 77481 - protein, 17 aa, Artificial Sequence
  Description of Artificial Sequence: Synthetic peptide
  Seed: GMDPRMCSLMQGSTLPR
GMDPRMFSLIQSSTAPR

SEQ ID NO: 77482 - protein, 17 aa, Artificial Sequence
  Description of Artificial Sequence: Synthetic peptide
  Seed: GMDPRMCSLMQGSTLPR
GMDPRMFSLIQSSTGPR

SEQ ID NO: 77483 - protein, 17 aa, Artificial Sequence
  Description of Artificial Sequence: Synthetic peptide
  Seed: GMDPRMCSLMQGSTLPR
GMDPRMFSLIQSSTHPR

SEQ ID NO: 77484 - protein, 17 aa, Artificial Sequence
  Description of Artificial Sequence: Synthetic peptide
  Seed: GMDPRMCSLMQGSTLPR
GMDPRMFSLIQSSTIPR

SEQ ID NO: 77485 - protein, 17 aa, Artificial Sequence
  Description of Artificial Sequence: Synthetic peptide
  Seed: GMDPRMCSLMQGSTLPR
GMDPRMFSLIQSSTLPR

SEQ ID NO: 77486 - protein, 17 aa, Artificial Sequence
  Description of Artificial Sequence: Synthetic peptide
  Seed: GMDPRMCSLMQGSTLPR
GMDPRMFSLIQSSTMPR

SEQ ID NO: 77487 - protein, 17 aa, Artificial Sequence
  Description of Artificial Sequence: Synthetic peptide
  Seed: GMDPRMCSLMQGSTLPR
GMDPRMFSLIQSSTNPR

SEQ ID NO: 77488 - protein, 17 aa, Artificial Sequence
  Description of Artificial Sequence: Synthetic peptide
  Seed: GMDPRMCSLMQGSTLPR
GMDPRMFSLIQSSTQPR

SEQ ID NO: 77489 - protein, 17 aa, Artificial Sequence
  Description of Artificial Sequence: Synthetic peptide
  Seed: GMDPRMCSLMQGSTLPR
GMDPRMFSLIQSSTSPR

SEQ ID NO: 77490 - protein, 17 aa, Artificial Sequence
  Description of Artificial Sequence: Synthetic peptide
  Seed: GMDPRMCSLMQGSTLPR
GMDPRMFSLIQSSTTPR

SEQ ID NO: 77491 - protein, 17 aa, Artificial Sequence
  Description of Artificial Sequence: Synthetic peptide
  Seed: GMDPRMCSLMQGSTLPR
GMDPRMFSLIQSSTVPR

SEQ ID NO: 77492 - protein, 17 aa, Artificial Sequence
  Description of Artificial Sequence: Synthetic peptide
  Seed: GMDPRMCSLMQGSTLPR
GMDPRMFSLIQTSTAPR

SEQ ID NO: 77493 - protein, 17 aa, Artificial Sequence
  Description of Artificial Sequence: Synthetic peptide
  Seed: GMDPRMCSLMQGSTLPR
GMDPRMFSLIQTSTGPR

SEQ ID NO: 77494 - protein, 17 aa, Artificial Sequence
  Description of Artificial Sequence: Synthetic peptide
  Seed: GMDPRMCSLMQGSTLPR
GMDPRMFSLIQTSTHPR

SEQ ID NO: 77495 - protein, 17 aa, Artificial Sequence
  Description of Artificial Sequence: Synthetic peptide
  Seed: GMDPRMCSLMQGSTLPR
GMDPRMFSLIQTSTIPR

SEQ ID NO: 77496 - protein, 17 aa, Artificial Sequence
  Description of Artificial Sequence: Synthetic peptide
  Seed: GMDPRMCSLMQGSTLPR
GMDPRMFSLIQTSTLPR

SEQ ID NO: 77497 - protein, 17 aa, Artificial Sequence
  Description of Artificial Sequence: Synthetic peptide
  Seed: GMDPRMCSLMQGSTLPR
GMDPRMFSLIQTSTMPR

SEQ ID NO: 77498 - protein, 17 aa, Artificial Sequence
  Description of Artificial Sequence: Synthetic peptide
  Seed: GMDPRMCSLMQGSTLPR
GMDPRMFSLIQTSTNPR

SEQ ID NO: 77499 - protein, 17 aa, Artificial Sequence
  Description of Artificial Sequence: Synthetic peptide
  Seed: GMDPRMCSLMQGSTLPR
GMDPRMFSLIQTSTQPR

SEQ ID NO: 77500 - protein, 17 aa, Artificial Sequence
  Description of Artificial Sequence: Synthetic peptide
  Seed: GMDPRMCSLMQGSTLPR
GMDPRMFSLIQTSTSPR

SEQ ID NO: 77501 - protein, 17 aa, Artificial Sequence
  Description of Artificial Sequence: Synthetic peptide
  Seed: GMDPRMCSLMQGSTLPR
GMDPRMFSLIQTSTTPR

SEQ ID NO: 77502 - protein, 17 aa, Artificial Sequence
  Description of Artificial Sequence: Synthetic peptide
  Seed: GMDPRMCSLMQGSTLPR
GMDPRMFSLIQTSTVPR

SEQ ID NO: 77503 - protein, 17 aa, Artificial Sequence
  Description of Artificial Sequence: Synthetic peptide
  Seed: GMDPRMCSLMQGSTLPR
GMDPRMFSLIQVSTAPR

SEQ ID NO: 77504 - protein, 17 aa, Artificial Sequence
  Description of Artificial Sequence: Synthetic peptide
  Seed: GMDPRMCSLMQGSTLPR
GMDPRMFSLIQVSTGPR

SEQ ID NO: 77505 - protein, 17 aa, Artificial Sequence
  Description of Artificial Sequence: Synthetic peptide
  Seed: GMDPRMCSLMQGSTLPR
GMDPRMFSLIQVSTHPR

SEQ ID NO: 77506 - protein, 17 aa, Artificial Sequence
  Description of Artificial Sequence: Synthetic peptide
  Seed: GMDPRMCSLMQGSTLPR
GMDPRMFSLIQVSTIPR

SEQ ID NO: 77507 - protein, 17 aa, Artificial Sequence
  Description of Artificial Sequence: Synthetic peptide
  Seed: GMDPRMCSLMQGSTLPR
GMDPRMFSLIQVSTLPR

SEQ ID NO: 77508 - protein, 17 aa, Artificial Sequence
  Description of Artificial Sequence: Synthetic peptide
  Seed: GMDPRMCSLMQGSTLPR
GMDPRMFSLIQVSTMPR

SEQ ID NO: 77509 - protein, 17 aa, Artificial Sequence
  Description of Artificial Sequence: Synthetic peptide
  Seed: GMDPRMCSLMQGSTLPR
GMDPRMFSLIQVSTNPR

SEQ ID NO: 77510 - protein, 17 aa, Artificial Sequence
  Description of Artificial Sequence: Synthetic peptide
  Seed: GMDPRMCSLMQGSTLPR
GMDPRMFSLIQVSTQPR

SEQ ID NO: 77511 - protein, 17 aa, Artificial Sequence
  Description of Artificial Sequence: Synthetic peptide
  Seed: GMDPRMCSLMQGSTLPR
GMDPRMFSLIQVSTSPR

SEQ ID NO: 77512 - protein, 17 aa, Artificial Sequence
  Description of Artificial Sequence: Synthetic peptide
  Seed: GMDPRMCSLMQGSTLPR
GMDPRMFSLIQVSTTPR

SEQ ID NO: 77513 - protein, 17 aa, Artificial Sequence
  Description of Artificial Sequence: Synthetic peptide
  Seed: GMDPRMCSLMQGSTLPR
GMDPRMFSLIQVSTVPR

SEQ ID NO: 77514 - protein, 17 aa, Artificial Sequence
  Description of Artificial Sequence: Synthetic peptide
  Seed: GMDPRMCSLMQGSTLPR
GMDPRMFSLLQASTAPR

SEQ ID NO: 77515 - protein, 17 aa, Artificial Sequence
  Description of Artificial Sequence: Synthetic peptide
  Seed: GMDPRMCSLMQGSTLPR
GMDPRMFSLLQASTCPR

SEQ ID NO: 77516 - protein, 17 aa, Artificial Sequence
  Description of Artificial Sequence: Synthetic peptide
  Seed: GMDPRMCSLMQGSTLPR
GMDPRMFSLLQASTDPR

SEQ ID NO: 77517 - protein, 17 aa, Artificial Sequence
  Description of Artificial Sequence: Synthetic peptide
  Seed: GMDPRMCSLMQGSTLPR
GMDPRMFSLLQASTEPR

SEQ ID NO: 77518 - protein, 17 aa, Artificial Sequence
  Description of Artificial Sequence: Synthetic peptide
  Seed: GMDPRMCSLMQGSTLPR
GMDPRMFSLLQASTFPR

SEQ ID NO: 77519 - protein, 17 aa, Artificial Sequence
  Description of Artificial Sequence: Synthetic peptide
  Seed: GMDPRMCSLMQGSTLPR
GMDPRMFSLLQASTGPR

SEQ ID NO: 77520 - protein, 17 aa, Artificial Sequence
  Description of Artificial Sequence: Synthetic peptide
  Seed: GMDPRMCSLMQGSTLPR
GMDPRMFSLLQASTHPR

SEQ ID NO: 77521 - protein, 17 aa, Artificial Sequence
  Description of Artificial Sequence: Synthetic peptide
  Seed: GMDPRMCSLMQGSTLPR
GMDPRMFSLLQASTIPR

SEQ ID NO: 77522 - protein, 17 aa, Artificial Sequence
  Description of Artificial Sequence: Synthetic peptide
  Seed: GMDPRMCSLMQGSTLPR
GMDPRMFSLLQASTLPR

SEQ ID NO: 77523 - protein, 17 aa, Artificial Sequence
  Description of Artificial Sequence: Synthetic peptide
  Seed: GMDPRMCSLMQGSTLPR
GMDPRMFSLLQASTMPR

SEQ ID NO: 77524 - protein, 17 aa, Artificial Sequence
  Description of Artificial Sequence: Synthetic peptide
  Seed: GMDPRMCSLMQGSTLPR
GMDPRMFSLLQASTNPR

SEQ ID NO: 77525 - protein, 17 aa, Artificial Sequence
  Description of Artificial Sequence: Synthetic peptide
  Seed: GMDPRMCSLMQGSTLPR
GMDPRMFSLLQASTPPR

SEQ ID NO: 77526 - protein, 17 aa, Artificial Sequence
  Description of Artificial Sequence: Synthetic peptide
  Seed: GMDPRMCSLMQGSTLPR
GMDPRMFSLLQASTQPR

SEQ ID NO: 77527 - protein, 17 aa, Artificial Sequence
  Description of Artificial Sequence: Synthetic peptide
  Seed: GMDPRMCSLMQGSTLPR
GMDPRMFSLLQASTSPR

SEQ ID NO: 77528 - protein, 17 aa, Artificial Sequence
  Description of Artificial Sequence: Synthetic peptide
  Seed: GMDPRMCSLMQGSTLPR
GMDPRMFSLLQASTTPR

SEQ ID NO: 77529 - protein, 17 aa, Artificial Sequence
  Description of Artificial Sequence: Synthetic peptide
  Seed: GMDPRMCSLMQGSTLPR
GMDPRMFSLLQASTVPR

SEQ ID NO: 77530 - protein, 17 aa, Artificial Sequence
  Description of Artificial Sequence: Synthetic peptide
  Seed: GMDPRMCSLMQGSTLPR
GMDPRMFSLLQASTWPR

SEQ ID NO: 77531 - protein, 17 aa, Artificial Sequence
  Description of Artificial Sequence: Synthetic peptide
  Seed: GMDPRMCSLMQGSTLPR
GMDPRMFSLLQASTYPR

SEQ ID NO: 77532 - protein, 17 aa, Artificial Sequence
  Description of Artificial Sequence: Synthetic peptide
  Seed: GMDPRMCSLMQGSTLPR
GMDPRMFSLLQGSTAPR

SEQ ID NO: 77533 - protein, 17 aa, Artificial Sequence
  Description of Artificial Sequence: Synthetic peptide
  Seed: GMDPRMCSLMQGSTLPR
GMDPRMFSLLQGSTCPR

SEQ ID NO: 77534 - protein, 17 aa, Artificial Sequence
  Description of Artificial Sequence: Synthetic peptide
  Seed: GMDPRMCSLMQGSTLPR
GMDPRMFSLLQGSTFPR

SEQ ID NO: 77535 - protein, 17 aa, Artificial Sequence
  Description of Artificial Sequence: Synthetic peptide
  Seed: GMDPRMCSLMQGSTLPR
GMDPRMFSLLQGSTGPR

SEQ ID NO: 77536 - protein, 17 aa, Artificial Sequence
  Description of Artificial Sequence: Synthetic peptide
  Seed: GMDPRMCSLMQGSTLPR
GMDPRMFSLLQGSTHPR

SEQ ID NO: 77537 - protein, 17 aa, Artificial Sequence
  Description of Artificial Sequence: Synthetic peptide
  Seed: GMDPRMCSLMQGSTLPR
GMDPRMFSLLQGSTIPR

SEQ ID NO: 77538 - protein, 17 aa, Artificial Sequence
  Description of Artificial Sequence: Synthetic peptide
  Seed: GMDPRMCSLMQGSTLPR
GMDPRMFSLLQGSTLPR

SEQ ID NO: 77539 - protein, 17 aa, Artificial Sequence
  Description of Artificial Sequence: Synthetic peptide
  Seed: GMDPRMCSLMQGSTLPR
GMDPRMFSLLQGSTMPR

SEQ ID NO: 77540 - protein, 17 aa, Artificial Sequence
  Description of Artificial Sequence: Synthetic peptide
  Seed: GMDPRMCSLMQGSTLPR
GMDPRMFSLLQGSTNPR

SEQ ID NO: 77541 - protein, 17 aa, Artificial Sequence
  Description of Artificial Sequence: Synthetic peptide
  Seed: GMDPRMCSLMQGSTLPR
GMDPRMFSLLQGSTQPR

SEQ ID NO: 77542 - protein, 17 aa, Artificial Sequence
  Description of Artificial Sequence: Synthetic peptide
  Seed: GMDPRMCSLMQGSTLPR
GMDPRMFSLLQGSTSPR

SEQ ID NO: 77543 - protein, 17 aa, Artificial Sequence
  Description of Artificial Sequence: Synthetic peptide
  Seed: GMDPRMCSLMQGSTLPR
GMDPRMFSLLQGSTTPR

SEQ ID NO: 77544 - protein, 17 aa, Artificial Sequence
  Description of Artificial Sequence: Synthetic peptide
  Seed: GMDPRMCSLMQGSTLPR
GMDPRMFSLLQGSTVPR

SEQ ID NO: 77545 - protein, 17 aa, Artificial Sequence
  Description of Artificial Sequence: Synthetic peptide
  Seed: GMDPRMCSLMQGSTLPR
GMDPRMFSLLQISTAPR

SEQ ID NO: 77546 - protein, 17 aa, Artificial Sequence
  Description of Artificial Sequence: Synthetic peptide
  Seed: GMDPRMCSLMQGSTLPR
GMDPRMFSLLQISTGPR

SEQ ID NO: 77547 - protein, 17 aa, Artificial Sequence
  Description of Artificial Sequence: Synthetic peptide
  Seed: GMDPRMCSLMQGSTLPR
GMDPRMFSLLQISTHPR

SEQ ID NO: 77548 - protein, 17 aa, Artificial Sequence
  Description of Artificial Sequence: Synthetic peptide
  Seed: GMDPRMCSLMQGSTLPR
GMDPRMFSLLQISTIPR

SEQ ID NO: 77549 - protein, 17 aa, Artificial Sequence
  Description of Artificial Sequence: Synthetic peptide
  Seed: GMDPRMCSLMQGSTLPR
GMDPRMFSLLQISTLPR

SEQ ID NO: 77550 - protein, 17 aa, Artificial Sequence
  Description of Artificial Sequence: Synthetic peptide
  Seed: GMDPRMCSLMQGSTLPR
GMDPRMFSLLQISTMPR

SEQ ID NO: 77551 - protein, 17 aa, Artificial Sequence
  Description of Artificial Sequence: Synthetic peptide
  Seed: GMDPRMCSLMQGSTLPR
GMDPRMFSLLQISTNPR

SEQ ID NO: 77552 - protein, 17 aa, Artificial Sequence
  Description of Artificial Sequence: Synthetic peptide
  Seed: GMDPRMCSLMQGSTLPR
GMDPRMFSLLQISTQPR

SEQ ID NO: 77553 - protein, 17 aa, Artificial Sequence
  Description of Artificial Sequence: Synthetic peptide
  Seed: GMDPRMCSLMQGSTLPR
GMDPRMFSLLQISTSPR

SEQ ID NO: 77554 - protein, 17 aa, Artificial Sequence
  Description of Artificial Sequence: Synthetic peptide
  Seed: GMDPRMCSLMQGSTLPR
GMDPRMFSLLQISTTPR

SEQ ID NO: 77555 - protein, 17 aa, Artificial Sequence
  Description of Artificial Sequence: Synthetic peptide
  Seed: GMDPRMCSLMQGSTLPR
GMDPRMFSLLQISTVPR

SEQ ID NO: 77556 - protein, 17 aa, Artificial Sequence
  Description of Artificial Sequence: Synthetic peptide
  Seed: GMDPRMCSLMQGSTLPR
GMDPRMFSLLQLSTAPR

SEQ ID NO: 77557 - protein, 17 aa, Artificial Sequence
  Description of Artificial Sequence: Synthetic peptide
  Seed: GMDPRMCSLMQGSTLPR
GMDPRMFSLLQLSTLPR

SEQ ID NO: 77558 - protein, 17 aa, Artificial Sequence
  Description of Artificial Sequence: Synthetic peptide
  Seed: GMDPRMCSLMQGSTLPR
GMDPRMFSLLQLSTNPR

SEQ ID NO: 77559 - protein, 17 aa, Artificial Sequence
  Description of Artificial Sequence: Synthetic peptide
  Seed: GMDPRMCSLMQGSTLPR
GMDPRMFSLLQLSTSPR

SEQ ID NO: 77560 - protein, 17 aa, Artificial Sequence
  Description of Artificial Sequence: Synthetic peptide
  Seed: GMDPRMCSLMQGSTLPR
GMDPRMFSLLQLSTTPR

SEQ ID NO: 77561 - protein, 17 aa, Artificial Sequence
  Description of Artificial Sequence: Synthetic peptide
  Seed: GMDPRMCSLMQGSTLPR
GMDPRMFSLLQLSTVPR

SEQ ID NO: 77562 - protein, 17 aa, Artificial Sequence
  Description of Artificial Sequence: Synthetic peptide
  Seed: GMDPRMCSLMQGSTLPR
GMDPRMFSLLQMSTAPR

SEQ ID NO: 77563 - protein, 17 aa, Artificial Sequence
  Description of Artificial Sequence: Synthetic peptide
  Seed: GMDPRMCSLMQGSTLPR
GMDPRMFSLLQMSTNPR

SEQ ID NO: 77564 - protein, 17 aa, Artificial Sequence
  Description of Artificial Sequence: Synthetic peptide
  Seed: GMDPRMCSLMQGSTLPR
GMDPRMFSLLQMSTSPR

SEQ ID NO: 77565 - protein, 17 aa, Artificial Sequence
  Description of Artificial Sequence: Synthetic peptide
  Seed: GMDPRMCSLMQGSTLPR
GMDPRMFSLLQMSTTPR

SEQ ID NO: 77566 - protein, 17 aa, Artificial Sequence
  Description of Artificial Sequence: Synthetic peptide
  Seed: GMDPRMCSLMQGSTLPR
GMDPRMFSLLQMSTVPR

SEQ ID NO: 77567 - protein, 17 aa, Artificial Sequence
  Description of Artificial Sequence: Synthetic peptide
  Seed: GMDPRMCSLMQGSTLPR
GMDPRMFSLLQNSTAPR

SEQ ID NO: 77568 - protein, 17 aa, Artificial Sequence
  Description of Artificial Sequence: Synthetic peptide
  Seed: GMDPRMCSLMQGSTLPR
GMDPRMFSLLQNSTGPR

SEQ ID NO: 77569 - protein, 17 aa, Artificial Sequence
  Description of Artificial Sequence: Synthetic peptide
  Seed: GMDPRMCSLMQGSTLPR
GMDPRMFSLLQNSTIPR

SEQ ID NO: 77570 - protein, 17 aa, Artificial Sequence
  Description of Artificial Sequence: Synthetic peptide
  Seed: GMDPRMCSLMQGSTLPR
GMDPRMFSLLQNSTLPR

SEQ ID NO: 77571 - protein, 17 aa, Artificial Sequence
  Description of Artificial Sequence: Synthetic peptide
  Seed: GMDPRMCSLMQGSTLPR
GMDPRMFSLLQNSTMPR

SEQ ID NO: 77572 - protein, 17 aa, Artificial Sequence
  Description of Artificial Sequence: Synthetic peptide
  Seed: GMDPRMCSLMQGSTLPR
GMDPRMFSLLQNSTNPR

SEQ ID NO: 77573 - protein, 17 aa, Artificial Sequence
  Description of Artificial Sequence: Synthetic peptide
  Seed: GMDPRMCSLMQGSTLPR
GMDPRMFSLLQNSTSPR

SEQ ID NO: 77574 - protein, 17 aa, Artificial Sequence
  Description of Artificial Sequence: Synthetic peptide
  Seed: GMDPRMCSLMQGSTLPR
GMDPRMFSLLQNSTTPR

SEQ ID NO: 77575 - protein, 17 aa, Artificial Sequence
  Description of Artificial Sequence: Synthetic peptide
  Seed: GMDPRMCSLMQGSTLPR
GMDPRMFSLLQNSTVPR

SEQ ID NO: 77576 - protein, 17 aa, Artificial Sequence
  Description of Artificial Sequence: Synthetic peptide
  Seed: GMDPRMCSLMQGSTLPR
GMDPRMFSLLQPSTAPR

SEQ ID NO: 77577 - protein, 17 aa, Artificial Sequence
  Description of Artificial Sequence: Synthetic peptide
  Seed: GMDPRMCSLMQGSTLPR
GMDPRMFSLLQPSTCPR

SEQ ID NO: 77578 - protein, 17 aa, Artificial Sequence
  Description of Artificial Sequence: Synthetic peptide
  Seed: GMDPRMCSLMQGSTLPR
GMDPRMFSLLQPSTDPR

SEQ ID NO: 77579 - protein, 17 aa, Artificial Sequence
  Description of Artificial Sequence: Synthetic peptide
  Seed: GMDPRMCSLMQGSTLPR
GMDPRMFSLLQPSTEPR

SEQ ID NO: 77580 - protein, 17 aa, Artificial Sequence
  Description of Artificial Sequence: Synthetic peptide
  Seed: GMDPRMCSLMQGSTLPR
GMDPRMFSLLQPSTFPR

SEQ ID NO: 77581 - protein, 17 aa, Artificial Sequence
  Description of Artificial Sequence: Synthetic peptide
  Seed: GMDPRMCSLMQGSTLPR
GMDPRMFSLLQPSTGPR

SEQ ID NO: 77582 - protein, 17 aa, Artificial Sequence
  Description of Artificial Sequence: Synthetic peptide
  Seed: GMDPRMCSLMQGSTLPR
GMDPRMFSLLQPSTHPR

SEQ ID NO: 77583 - protein, 17 aa, Artificial Sequence
  Description of Artificial Sequence: Synthetic peptide
  Seed: GMDPRMCSLMQGSTLPR
GMDPRMFSLLQPSTIPR

SEQ ID NO: 77584 - protein, 17 aa, Artificial Sequence
  Description of Artificial Sequence: Synthetic peptide
  Seed: GMDPRMCSLMQGSTLPR
GMDPRMFSLLQPSTLPR

SEQ ID NO: 77585 - protein, 17 aa, Artificial Sequence
  Description of Artificial Sequence: Synthetic peptide
  Seed: GMDPRMCSLMQGSTLPR
GMDPRMFSLLQPSTMPR

SEQ ID NO: 77586 - protein, 17 aa, Artificial Sequence
  Description of Artificial Sequence: Synthetic peptide
  Seed: GMDPRMCSLMQGSTLPR
GMDPRMFSLLQPSTNPR

SEQ ID NO: 77587 - protein, 17 aa, Artificial Sequence
  Description of Artificial Sequence: Synthetic peptide
  Seed: GMDPRMCSLMQGSTLPR
GMDPRMFSLLQPSTPPR

SEQ ID NO: 77588 - protein, 17 aa, Artificial Sequence
  Description of Artificial Sequence: Synthetic peptide
  Seed: GMDPRMCSLMQGSTLPR
GMDPRMFSLLQPSTQPR

SEQ ID NO: 77589 - protein, 17 aa, Artificial Sequence
  Description of Artificial Sequence: Synthetic peptide
  Seed: GMDPRMCSLMQGSTLPR
GMDPRMFSLLQPSTSPR

SEQ ID NO: 77590 - protein, 17 aa, Artificial Sequence
  Description of Artificial Sequence: Synthetic peptide
  Seed: GMDPRMCSLMQGSTLPR
GMDPRMFSLLQPSTTPR

SEQ ID NO: 77591 - protein, 17 aa, Artificial Sequence
  Description of Artificial Sequence: Synthetic peptide
  Seed: GMDPRMCSLMQGSTLPR
GMDPRMFSLLQPSTVPR

SEQ ID NO: 77592 - protein, 17 aa, Artificial Sequence
  Description of Artificial Sequence: Synthetic peptide
  Seed: GMDPRMCSLMQGSTLPR
GMDPRMFSLLQSSTAPR

SEQ ID NO: 77593 - protein, 17 aa, Artificial Sequence
  Description of Artificial Sequence: Synthetic peptide
  Seed: GMDPRMCSLMQGSTLPR
GMDPRMFSLLQSSTCPR

SEQ ID NO: 77594 - protein, 17 aa, Artificial Sequence
  Description of Artificial Sequence: Synthetic peptide
  Seed: GMDPRMCSLMQGSTLPR
GMDPRMFSLLQSSTFPR

SEQ ID NO: 77595 - protein, 17 aa, Artificial Sequence
  Description of Artificial Sequence: Synthetic peptide
  Seed: GMDPRMCSLMQGSTLPR
GMDPRMFSLLQSSTGPR

SEQ ID NO: 77596 - protein, 17 aa, Artificial Sequence
  Description of Artificial Sequence: Synthetic peptide
  Seed: GMDPRMCSLMQGSTLPR
GMDPRMFSLLQSSTHPR

SEQ ID NO: 77597 - protein, 17 aa, Artificial Sequence
  Description of Artificial Sequence: Synthetic peptide
  Seed: GMDPRMCSLMQGSTLPR
GMDPRMFSLLQSSTIPR

SEQ ID NO: 77598 - protein, 17 aa, Artificial Sequence
  Description of Artificial Sequence: Synthetic peptide
  Seed: GMDPRMCSLMQGSTLPR
GMDPRMFSLLQSSTLPR

SEQ ID NO: 77599 - protein, 17 aa, Artificial Sequence
  Description of Artificial Sequence: Synthetic peptide
  Seed: GMDPRMCSLMQGSTLPR
GMDPRMFSLLQSSTMPR

SEQ ID NO: 77600 - protein, 17 aa, Artificial Sequence
  Description of Artificial Sequence: Synthetic peptide
  Seed: GMDPRMCSLMQGSTLPR
GMDPRMFSLLQSSTNPR

SEQ ID NO: 77601 - protein, 17 aa, Artificial Sequence
  Description of Artificial Sequence: Synthetic peptide
  Seed: GMDPRMCSLMQGSTLPR
GMDPRMFSLLQSSTPPR

SEQ ID NO: 77602 - protein, 17 aa, Artificial Sequence
  Description of Artificial Sequence: Synthetic peptide
  Seed: GMDPRMCSLMQGSTLPR
GMDPRMFSLLQSSTQPR

SEQ ID NO: 77603 - protein, 17 aa, Artificial Sequence
  Description of Artificial Sequence: Synthetic peptide
  Seed: GMDPRMCSLMQGSTLPR
GMDPRMFSLLQSSTSPR

SEQ ID NO: 77604 - protein, 17 aa, Artificial Sequence
  Description of Artificial Sequence: Synthetic peptide
  Seed: GMDPRMCSLMQGSTLPR
GMDPRMFSLLQSSTTPR

SEQ ID NO: 77605 - protein, 17 aa, Artificial Sequence
  Description of Artificial Sequence: Synthetic peptide
  Seed: GMDPRMCSLMQGSTLPR
GMDPRMFSLLQSSTVPR

SEQ ID NO: 77606 - protein, 17 aa, Artificial Sequence
  Description of Artificial Sequence: Synthetic peptide
  Seed: GMDPRMCSLMQGSTLPR
GMDPRMFSLLQTSTAPR

SEQ ID NO: 77607 - protein, 17 aa, Artificial Sequence
  Description of Artificial Sequence: Synthetic peptide
  Seed: GMDPRMCSLMQGSTLPR
GMDPRMFSLLQTSTGPR

SEQ ID NO: 77608 - protein, 17 aa, Artificial Sequence
  Description of Artificial Sequence: Synthetic peptide
  Seed: GMDPRMCSLMQGSTLPR
GMDPRMFSLLQTSTHPR

SEQ ID NO: 77609 - protein, 17 aa, Artificial Sequence
  Description of Artificial Sequence: Synthetic peptide
  Seed: GMDPRMCSLMQGSTLPR
GMDPRMFSLLQTSTIPR

SEQ ID NO: 77610 - protein, 17 aa, Artificial Sequence
  Description of Artificial Sequence: Synthetic peptide
  Seed: GMDPRMCSLMQGSTLPR
GMDPRMFSLLQTSTLPR

SEQ ID NO: 77611 - protein, 17 aa, Artificial Sequence
  Description of Artificial Sequence: Synthetic peptide
  Seed: GMDPRMCSLMQGSTLPR
GMDPRMFSLLQTSTMPR

SEQ ID NO: 77612 - protein, 17 aa, Artificial Sequence
  Description of Artificial Sequence: Synthetic peptide
  Seed: GMDPRMCSLMQGSTLPR
GMDPRMFSLLQTSTNPR

SEQ ID NO: 77613 - protein, 17 aa, Artificial Sequence
  Description of Artificial Sequence: Synthetic peptide
  Seed: GMDPRMCSLMQGSTLPR
GMDPRMFSLLQTSTPPR

SEQ ID NO: 77614 - protein, 17 aa, Artificial Sequence
  Description of Artificial Sequence: Synthetic peptide
  Seed: GMDPRMCSLMQGSTLPR
GMDPRMFSLLQTSTQPR

SEQ ID NO: 77615 - protein, 17 aa, Artificial Sequence
  Description of Artificial Sequence: Synthetic peptide
  Seed: GMDPRMCSLMQGSTLPR
GMDPRMFSLLQTSTSPR

SEQ ID NO: 77616 - protein, 17 aa, Artificial Sequence
  Description of Artificial Sequence: Synthetic peptide
  Seed: GMDPRMCSLMQGSTLPR
GMDPRMFSLLQTSTTPR

SEQ ID NO: 77617 - protein, 17 aa, Artificial Sequence
  Description of Artificial Sequence: Synthetic peptide
  Seed: GMDPRMCSLMQGSTLPR
GMDPRMFSLLQTSTVPR

SEQ ID NO: 77618 - protein, 17 aa, Artificial Sequence
  Description of Artificial Sequence: Synthetic peptide
  Seed: GMDPRMCSLMQGSTLPR
GMDPRMFSLLQVSTAPR

SEQ ID NO: 77619 - protein, 17 aa, Artificial Sequence
  Description of Artificial Sequence: Synthetic peptide
  Seed: GMDPRMCSLMQGSTLPR
GMDPRMFSLLQVSTDPR

SEQ ID NO: 77620 - protein, 17 aa, Artificial Sequence
  Description of Artificial Sequence: Synthetic peptide
  Seed: GMDPRMCSLMQGSTLPR
GMDPRMFSLLQVSTGPR

SEQ ID NO: 77621 - protein, 17 aa, Artificial Sequence
  Description of Artificial Sequence: Synthetic peptide
  Seed: GMDPRMCSLMQGSTLPR
GMDPRMFSLLQVSTHPR

SEQ ID NO: 77622 - protein, 17 aa, Artificial Sequence
  Description of Artificial Sequence: Synthetic peptide
  Seed: GMDPRMCSLMQGSTLPR
GMDPRMFSLLQVSTIPR

SEQ ID NO: 77623 - protein, 17 aa, Artificial Sequence
  Description of Artificial Sequence: Synthetic peptide
  Seed: GMDPRMCSLMQGSTLPR
GMDPRMFSLLQVSTLPR

SEQ ID NO: 77624 - protein, 17 aa, Artificial Sequence
  Description of Artificial Sequence: Synthetic peptide
  Seed: GMDPRMCSLMQGSTLPR
GMDPRMFSLLQVSTMPR

SEQ ID NO: 77625 - protein, 17 aa, Artificial Sequence
  Description of Artificial Sequence: Synthetic peptide
  Seed: GMDPRMCSLMQGSTLPR
GMDPRMFSLLQVSTNPR

SEQ ID NO: 77626 - protein, 17 aa, Artificial Sequence
  Description of Artificial Sequence: Synthetic peptide
  Seed: GMDPRMCSLMQGSTLPR
GMDPRMFSLLQVSTPPR

SEQ ID NO: 77627 - protein, 17 aa, Artificial Sequence
  Description of Artificial Sequence: Synthetic peptide
  Seed: GMDPRMCSLMQGSTLPR
GMDPRMFSLLQVSTQPR

SEQ ID NO: 77628 - protein, 17 aa, Artificial Sequence
  Description of Artificial Sequence: Synthetic peptide
  Seed: GMDPRMCSLMQGSTLPR
GMDPRMFSLLQVSTSPR

SEQ ID NO: 77629 - protein, 17 aa, Artificial Sequence
  Description of Artificial Sequence: Synthetic peptide
  Seed: GMDPRMCSLMQGSTLPR
GMDPRMFSLLQVSTTPR

SEQ ID NO: 77630 - protein, 17 aa, Artificial Sequence
  Description of Artificial Sequence: Synthetic peptide
  Seed: GMDPRMCSLMQGSTLPR
GMDPRMFSLLQVSTVPR

SEQ ID NO: 77631 - protein, 17 aa, Artificial Sequence
  Description of Artificial Sequence: Synthetic peptide
  Seed: GMDPRMCSLMQGSTLPR
GMDPRMFSLMQASTAPR

SEQ ID NO: 77632 - protein, 17 aa, Artificial Sequence
  Description of Artificial Sequence: Synthetic peptide
  Seed: GMDPRMCSLMQGSTLPR
GMDPRMFSLMQASTCPR

SEQ ID NO: 77633 - protein, 17 aa, Artificial Sequence
  Description of Artificial Sequence: Synthetic peptide
  Seed: GMDPRMCSLMQGSTLPR
GMDPRMFSLMQASTDPR

SEQ ID NO: 77634 - protein, 17 aa, Artificial Sequence
  Description of Artificial Sequence: Synthetic peptide
  Seed: GMDPRMCSLMQGSTLPR
GMDPRMFSLMQASTEPR

SEQ ID NO: 77635 - protein, 17 aa, Artificial Sequence
  Description of Artificial Sequence: Synthetic peptide
  Seed: GMDPRMCSLMQGSTLPR
GMDPRMFSLMQASTFPR

SEQ ID NO: 77636 - protein, 17 aa, Artificial Sequence
  Description of Artificial Sequence: Synthetic peptide
  Seed: GMDPRMCSLMQGSTLPR
GMDPRMFSLMQASTGPR

SEQ ID NO: 77637 - protein, 17 aa, Artificial Sequence
  Description of Artificial Sequence: Synthetic peptide
  Seed: GMDPRMCSLMQGSTLPR
GMDPRMFSLMQASTHPR

SEQ ID NO: 77638 - protein, 17 aa, Artificial Sequence
  Description of Artificial Sequence: Synthetic peptide
  Seed: GMDPRMCSLMQGSTLPR
GMDPRMFSLMQASTIPR

SEQ ID NO: 77639 - protein, 17 aa, Artificial Sequence
  Description of Artificial Sequence: Synthetic peptide
  Seed: GMDPRMCSLMQGSTLPR
GMDPRMFSLMQASTKPR

SEQ ID NO: 77640 - protein, 17 aa, Artificial Sequence
  Description of Artificial Sequence: Synthetic peptide
  Seed: GMDPRMCSLMQGSTLPR
GMDPRMFSLMQASTLPR

SEQ ID NO: 77641 - protein, 17 aa, Artificial Sequence
  Description of Artificial Sequence: Synthetic peptide
  Seed: GMDPRMCSLMQGSTLPR
GMDPRMFSLMQASTMPR

SEQ ID NO: 77642 - protein, 17 aa, Artificial Sequence
  Description of Artificial Sequence: Synthetic peptide
  Seed: GMDPRMCSLMQGSTLPR
GMDPRMFSLMQASTNPR

SEQ ID NO: 77643 - protein, 17 aa, Artificial Sequence
  Description of Artificial Sequence: Synthetic peptide
  Seed: GMDPRMCSLMQGSTLPR
GMDPRMFSLMQASTPPR

SEQ ID NO: 77644 - protein, 17 aa, Artificial Sequence
  Description of Artificial Sequence: Synthetic peptide
  Seed: GMDPRMCSLMQGSTLPR
GMDPRMFSLMQASTQPR

SEQ ID NO: 77645 - protein, 17 aa, Artificial Sequence
  Description of Artificial Sequence: Synthetic peptide
  Seed: GMDPRMCSLMQGSTLPR
GMDPRMFSLMQASTRPR

SEQ ID NO: 77646 - protein, 17 aa, Artificial Sequence
  Description of Artificial Sequence: Synthetic peptide
  Seed: GMDPRMCSLMQGSTLPR
GMDPRMFSLMQASTSPR

SEQ ID NO: 77647 - protein, 17 aa, Artificial Sequence
  Description of Artificial Sequence: Synthetic peptide
  Seed: GMDPRMCSLMQGSTLPR
GMDPRMFSLMQASTTPR

SEQ ID NO: 77648 - protein, 17 aa, Artificial Sequence
  Description of Artificial Sequence: Synthetic peptide
  Seed: GMDPRMCSLMQGSTLPR
GMDPRMFSLMQASTVPR

SEQ ID NO: 77649 - protein, 17 aa, Artificial Sequence
  Description of Artificial Sequence: Synthetic peptide
  Seed: GMDPRMCSLMQGSTLPR
GMDPRMFSLMQASTWPR

SEQ ID NO: 77650 - protein, 17 aa, Artificial Sequence
  Description of Artificial Sequence: Synthetic peptide
  Seed: GMDPRMCSLMQGSTLPR
GMDPRMFSLMQASTYPR

SEQ ID NO: 77651 - protein, 17 aa, Artificial Sequence
  Description of Artificial Sequence: Synthetic peptide
  Seed: GMDPRMCSLMQGSTLPR
GMDPRMFSLMQGSTAPR

SEQ ID NO: 77652 - protein, 17 aa, Artificial Sequence
  Description of Artificial Sequence: Synthetic peptide
  Seed: GMDPRMCSLMQGSTLPR
GMDPRMFSLMQGSTCPR

SEQ ID NO: 77653 - protein, 17 aa, Artificial Sequence
  Description of Artificial Sequence: Synthetic peptide
  Seed: GMDPRMCSLMQGSTLPR
GMDPRMFSLMQGSTFPR

SEQ ID NO: 77654 - protein, 17 aa, Artificial Sequence
  Description of Artificial Sequence: Synthetic peptide
  Seed: GMDPRMCSLMQGSTLPR
GMDPRMFSLMQGSTGPR

SEQ ID NO: 77655 - protein, 17 aa, Artificial Sequence
  Description of Artificial Sequence: Synthetic peptide
  Seed: GMDPRMCSLMQGSTLPR
GMDPRMFSLMQGSTHPR

SEQ ID NO: 77656 - protein, 17 aa, Artificial Sequence
  Description of Artificial Sequence: Synthetic peptide
  Seed: GMDPRMCSLMQGSTLPR
GMDPRMFSLMQGSTIPR

SEQ ID NO: 77657 - protein, 17 aa, Artificial Sequence
  Description of Artificial Sequence: Synthetic peptide
  Seed: GMDPRMCSLMQGSTLPR
GMDPRMFSLMQGSTLPR

SEQ ID NO: 77658 - protein, 17 aa, Artificial Sequence
  Description of Artificial Sequence: Synthetic peptide
  Seed: GMDPRMCSLMQGSTLPR
GMDPRMFSLMQGSTMPR

SEQ ID NO: 77659 - protein, 17 aa, Artificial Sequence
  Description of Artificial Sequence: Synthetic peptide
  Seed: GMDPRMCSLMQGSTLPR
GMDPRMFSLMQGSTNPR

SEQ ID NO: 77660 - protein, 17 aa, Artificial Sequence
  Description of Artificial Sequence: Synthetic peptide
  Seed: GMDPRMCSLMQGSTLPR
GMDPRMFSLMQGSTQPR

SEQ ID NO: 77661 - protein, 17 aa, Artificial Sequence
  Description of Artificial Sequence: Synthetic peptide
  Seed: GMDPRMCSLMQGSTLPR
GMDPRMFSLMQGSTSPR

SEQ ID NO: 77662 - protein, 17 aa, Artificial Sequence
  Description of Artificial Sequence: Synthetic peptide
  Seed: GMDPRMCSLMQGSTLPR
GMDPRMFSLMQGSTTPR

SEQ ID NO: 77663 - protein, 17 aa, Artificial Sequence
  Description of Artificial Sequence: Synthetic peptide
  Seed: GMDPRMCSLMQGSTLPR
GMDPRMFSLMQGSTVPR

SEQ ID NO: 77664 - protein, 17 aa, Artificial Sequence
  Description of Artificial Sequence: Synthetic peptide
  Seed: GMDPRMCSLMQGSTLPR
GMDPRMFSLMQHSTLPR

SEQ ID NO: 77665 - protein, 17 aa, Artificial Sequence
  Description of Artificial Sequence: Synthetic peptide
  Seed: GMDPRMCSLMQGSTLPR
GMDPRMFSLMQHSTVPR

SEQ ID NO: 77666 - protein, 17 aa, Artificial Sequence
  Description of Artificial Sequence: Synthetic peptide
  Seed: GMDPRMCSLMQGSTLPR
GMDPRMFSLMQISTAPR

SEQ ID NO: 77667 - protein, 17 aa, Artificial Sequence
  Description of Artificial Sequence: Synthetic peptide
  Seed: GMDPRMCSLMQGSTLPR
GMDPRMFSLMQISTGPR

SEQ ID NO: 77668 - protein, 17 aa, Artificial Sequence
  Description of Artificial Sequence: Synthetic peptide
  Seed: GMDPRMCSLMQGSTLPR
GMDPRMFSLMQISTHPR

SEQ ID NO: 77669 - protein, 17 aa, Artificial Sequence
  Description of Artificial Sequence: Synthetic peptide
  Seed: GMDPRMCSLMQGSTLPR
GMDPRMFSLMQISTIPR

SEQ ID NO: 77670 - protein, 17 aa, Artificial Sequence
  Description of Artificial Sequence: Synthetic peptide
  Seed: GMDPRMCSLMQGSTLPR
GMDPRMFSLMQISTLPR

SEQ ID NO: 77671 - protein, 17 aa, Artificial Sequence
  Description of Artificial Sequence: Synthetic peptide
  Seed: GMDPRMCSLMQGSTLPR
GMDPRMFSLMQISTMPR

SEQ ID NO: 77672 - protein, 17 aa, Artificial Sequence
  Description of Artificial Sequence: Synthetic peptide
  Seed: GMDPRMCSLMQGSTLPR
GMDPRMFSLMQISTNPR

SEQ ID NO: 77673 - protein, 17 aa, Artificial Sequence
  Description of Artificial Sequence: Synthetic peptide
  Seed: GMDPRMCSLMQGSTLPR
GMDPRMFSLMQISTQPR

SEQ ID NO: 77674 - protein, 17 aa, Artificial Sequence
  Description of Artificial Sequence: Synthetic peptide
  Seed: GMDPRMCSLMQGSTLPR
GMDPRMFSLMQISTSPR

SEQ ID NO: 77675 - protein, 17 aa, Artificial Sequence
  Description of Artificial Sequence: Synthetic peptide
  Seed: GMDPRMCSLMQGSTLPR
GMDPRMFSLMQISTTPR

SEQ ID NO: 77676 - protein, 17 aa, Artificial Sequence
  Description of Artificial Sequence: Synthetic peptide
  Seed: GMDPRMCSLMQGSTLPR
GMDPRMFSLMQISTVPR

SEQ ID NO: 77677 - protein, 17 aa, Artificial Sequence
  Description of Artificial Sequence: Synthetic peptide
  Seed: GMDPRMCSLMQGSTLPR
GMDPRMFSLMQLSTAPR

SEQ ID NO: 77678 - protein, 17 aa, Artificial Sequence
  Description of Artificial Sequence: Synthetic peptide
  Seed: GMDPRMCSLMQGSTLPR
GMDPRMFSLMQLSTIPR

SEQ ID NO: 77679 - protein, 17 aa, Artificial Sequence
  Description of Artificial Sequence: Synthetic peptide
  Seed: GMDPRMCSLMQGSTLPR
GMDPRMFSLMQLSTLPR

SEQ ID NO: 77680 - protein, 17 aa, Artificial Sequence
  Description of Artificial Sequence: Synthetic peptide
  Seed: GMDPRMCSLMQGSTLPR
GMDPRMFSLMQLSTMPR

SEQ ID NO: 77681 - protein, 17 aa, Artificial Sequence
  Description of Artificial Sequence: Synthetic peptide
  Seed: GMDPRMCSLMQGSTLPR
GMDPRMFSLMQLSTNPR

SEQ ID NO: 77682 - protein, 17 aa, Artificial Sequence
  Description of Artificial Sequence: Synthetic peptide
  Seed: GMDPRMCSLMQGSTLPR
GMDPRMFSLMQLSTSPR

SEQ ID NO: 77683 - protein, 17 aa, Artificial Sequence
  Description of Artificial Sequence: Synthetic peptide
  Seed: GMDPRMCSLMQGSTLPR
GMDPRMFSLMQLSTTPR

SEQ ID NO: 77684 - protein, 17 aa, Artificial Sequence
  Description of Artificial Sequence: Synthetic peptide
  Seed: GMDPRMCSLMQGSTLPR
GMDPRMFSLMQLSTVPR

SEQ ID NO: 77685 - protein, 17 aa, Artificial Sequence
  Description of Artificial Sequence: Synthetic peptide
  Seed: GMDPRMCSLMQGSTLPR
GMDPRMFSLMQMSTAPR

SEQ ID NO: 77686 - protein, 17 aa, Artificial Sequence
  Description of Artificial Sequence: Synthetic peptide
  Seed: GMDPRMCSLMQGSTLPR
GMDPRMFSLMQMSTHPR

SEQ ID NO: 77687 - protein, 17 aa, Artificial Sequence
  Description of Artificial Sequence: Synthetic peptide
  Seed: GMDPRMCSLMQGSTLPR
GMDPRMFSLMQMSTIPR

SEQ ID NO: 77688 - protein, 17 aa, Artificial Sequence
  Description of Artificial Sequence: Synthetic peptide
  Seed: GMDPRMCSLMQGSTLPR
GMDPRMFSLMQMSTLPR

SEQ ID NO: 77689 - protein, 17 aa, Artificial Sequence
  Description of Artificial Sequence: Synthetic peptide
  Seed: GMDPRMCSLMQGSTLPR
GMDPRMFSLMQMSTMPR

SEQ ID NO: 77690 - protein, 17 aa, Artificial Sequence
  Description of Artificial Sequence: Synthetic peptide
  Seed: GMDPRMCSLMQGSTLPR
GMDPRMFSLMQMSTNPR

SEQ ID NO: 77691 - protein, 17 aa, Artificial Sequence
  Description of Artificial Sequence: Synthetic peptide
  Seed: GMDPRMCSLMQGSTLPR
GMDPRMFSLMQMSTSPR

SEQ ID NO: 77692 - protein, 17 aa, Artificial Sequence
  Description of Artificial Sequence: Synthetic peptide
  Seed: GMDPRMCSLMQGSTLPR
GMDPRMFSLMQMSTTPR

SEQ ID NO: 77693 - protein, 17 aa, Artificial Sequence
  Description of Artificial Sequence: Synthetic peptide
  Seed: GMDPRMCSLMQGSTLPR
GMDPRMFSLMQMSTVPR

SEQ ID NO: 77694 - protein, 17 aa, Artificial Sequence
  Description of Artificial Sequence: Synthetic peptide
  Seed: GMDPRMCSLMQGSTLPR
GMDPRMFSLMQNSTAPR

SEQ ID NO: 77695 - protein, 17 aa, Artificial Sequence
  Description of Artificial Sequence: Synthetic peptide
  Seed: GMDPRMCSLMQGSTLPR
GMDPRMFSLMQNSTGPR

SEQ ID NO: 77696 - protein, 17 aa, Artificial Sequence
  Description of Artificial Sequence: Synthetic peptide
  Seed: GMDPRMCSLMQGSTLPR
GMDPRMFSLMQNSTHPR

SEQ ID NO: 77697 - protein, 17 aa, Artificial Sequence
  Description of Artificial Sequence: Synthetic peptide
  Seed: GMDPRMCSLMQGSTLPR
GMDPRMFSLMQNSTIPR

SEQ ID NO: 77698 - protein, 17 aa, Artificial Sequence
  Description of Artificial Sequence: Synthetic peptide
  Seed: GMDPRMCSLMQGSTLPR
GMDPRMFSLMQNSTLPR

SEQ ID NO: 77699 - protein, 17 aa, Artificial Sequence
  Description of Artificial Sequence: Synthetic peptide
  Seed: GMDPRMCSLMQGSTLPR
GMDPRMFSLMQNSTMPR

SEQ ID NO: 77700 - protein, 17 aa, Artificial Sequence
  Description of Artificial Sequence: Synthetic peptide
  Seed: GMDPRMCSLMQGSTLPR
GMDPRMFSLMQNSTNPR

SEQ ID NO: 77701 - protein, 17 aa, Artificial Sequence
  Description of Artificial Sequence: Synthetic peptide
  Seed: GMDPRMCSLMQGSTLPR
GMDPRMFSLMQNSTSPR

SEQ ID NO: 77702 - protein, 17 aa, Artificial Sequence
  Description of Artificial Sequence: Synthetic peptide
  Seed: GMDPRMCSLMQGSTLPR
GMDPRMFSLMQNSTTPR

SEQ ID NO: 77703 - protein, 17 aa, Artificial Sequence
  Description of Artificial Sequence: Synthetic peptide
  Seed: GMDPRMCSLMQGSTLPR
GMDPRMFSLMQNSTVPR

SEQ ID NO: 77704 - protein, 17 aa, Artificial Sequence
  Description of Artificial Sequence: Synthetic peptide
  Seed: GMDPRMCSLMQGSTLPR
GMDPRMFSLMQPSTAPR

SEQ ID NO: 77705 - protein, 17 aa, Artificial Sequence
  Description of Artificial Sequence: Synthetic peptide
  Seed: GMDPRMCSLMQGSTLPR
GMDPRMFSLMQPSTCPR

SEQ ID NO: 77706 - protein, 17 aa, Artificial Sequence
  Description of Artificial Sequence: Synthetic peptide
  Seed: GMDPRMCSLMQGSTLPR
GMDPRMFSLMQPSTEPR

SEQ ID NO: 77707 - protein, 17 aa, Artificial Sequence
  Description of Artificial Sequence: Synthetic peptide
  Seed: GMDPRMCSLMQGSTLPR
GMDPRMFSLMQPSTFPR

SEQ ID NO: 77708 - protein, 17 aa, Artificial Sequence
  Description of Artificial Sequence: Synthetic peptide
  Seed: GMDPRMCSLMQGSTLPR
GMDPRMFSLMQPSTGPR

SEQ ID NO: 77709 - protein, 17 aa, Artificial Sequence
  Description of Artificial Sequence: Synthetic peptide
  Seed: GMDPRMCSLMQGSTLPR
GMDPRMFSLMQPSTHPR

SEQ ID NO: 77710 - protein, 17 aa, Artificial Sequence
  Description of Artificial Sequence: Synthetic peptide
  Seed: GMDPRMCSLMQGSTLPR
GMDPRMFSLMQPSTIPR

SEQ ID NO: 77711 - protein, 17 aa, Artificial Sequence
  Description of Artificial Sequence: Synthetic peptide
  Seed: GMDPRMCSLMQGSTLPR
GMDPRMFSLMQPSTLPR

SEQ ID NO: 77712 - protein, 17 aa, Artificial Sequence
  Description of Artificial Sequence: Synthetic peptide
  Seed: GMDPRMCSLMQGSTLPR
GMDPRMFSLMQPSTMPR

SEQ ID NO: 77713 - protein, 17 aa, Artificial Sequence
  Description of Artificial Sequence: Synthetic peptide
  Seed: GMDPRMCSLMQGSTLPR
GMDPRMFSLMQPSTNPR

SEQ ID NO: 77714 - protein, 17 aa, Artificial Sequence
  Description of Artificial Sequence: Synthetic peptide
  Seed: GMDPRMCSLMQGSTLPR
GMDPRMFSLMQPSTPPR

SEQ ID NO: 77715 - protein, 17 aa, Artificial Sequence
  Description of Artificial Sequence: Synthetic peptide
  Seed: GMDPRMCSLMQGSTLPR
GMDPRMFSLMQPSTQPR

SEQ ID NO: 77716 - protein, 17 aa, Artificial Sequence
  Description of Artificial Sequence: Synthetic peptide
  Seed: GMDPRMCSLMQGSTLPR
GMDPRMFSLMQPSTSPR

SEQ ID NO: 77717 - protein, 17 aa, Artificial Sequence
  Description of Artificial Sequence: Synthetic peptide
  Seed: GMDPRMCSLMQGSTLPR
GMDPRMFSLMQPSTTPR

SEQ ID NO: 77718 - protein, 17 aa, Artificial Sequence
  Description of Artificial Sequence: Synthetic peptide
  Seed: GMDPRMCSLMQGSTLPR
GMDPRMFSLMQPSTVPR

SEQ ID NO: 77719 - protein, 17 aa, Artificial Sequence
  Description of Artificial Sequence: Synthetic peptide
  Seed: GMDPRMCSLMQGSTLPR
GMDPRMFSLMQPSTWPR

SEQ ID NO: 77720 - protein, 17 aa, Artificial Sequence
  Description of Artificial Sequence: Synthetic peptide
  Seed: GMDPRMCSLMQGSTLPR
GMDPRMFSLMQSSTAPR

SEQ ID NO: 77721 - protein, 17 aa, Artificial Sequence
  Description of Artificial Sequence: Synthetic peptide
  Seed: GMDPRMCSLMQGSTLPR
GMDPRMFSLMQSSTCPR

SEQ ID NO: 77722 - protein, 17 aa, Artificial Sequence
  Description of Artificial Sequence: Synthetic peptide
  Seed: GMDPRMCSLMQGSTLPR
GMDPRMFSLMQSSTFPR

SEQ ID NO: 77723 - protein, 17 aa, Artificial Sequence
  Description of Artificial Sequence: Synthetic peptide
  Seed: GMDPRMCSLMQGSTLPR
GMDPRMFSLMQSSTGPR

SEQ ID NO: 77724 - protein, 17 aa, Artificial Sequence
  Description of Artificial Sequence: Synthetic peptide
  Seed: GMDPRMCSLMQGSTLPR
GMDPRMFSLMQSSTHPR

SEQ ID NO: 77725 - protein, 17 aa, Artificial Sequence
  Description of Artificial Sequence: Synthetic peptide
  Seed: GMDPRMCSLMQGSTLPR
GMDPRMFSLMQSSTIPR

SEQ ID NO: 77726 - protein, 17 aa, Artificial Sequence
  Description of Artificial Sequence: Synthetic peptide
  Seed: GMDPRMCSLMQGSTLPR
GMDPRMFSLMQSSTLPR

SEQ ID NO: 77727 - protein, 17 aa, Artificial Sequence
  Description of Artificial Sequence: Synthetic peptide
  Seed: GMDPRMCSLMQGSTLPR
GMDPRMFSLMQSSTMPR

SEQ ID NO: 77728 - protein, 17 aa, Artificial Sequence
  Description of Artificial Sequence: Synthetic peptide
  Seed: GMDPRMCSLMQGSTLPR
GMDPRMFSLMQSSTNPR

SEQ ID NO: 77729 - protein, 17 aa, Artificial Sequence
  Description of Artificial Sequence: Synthetic peptide
  Seed: GMDPRMCSLMQGSTLPR
GMDPRMFSLMQSSTPPR

SEQ ID NO: 77730 - protein, 17 aa, Artificial Sequence
  Description of Artificial Sequence: Synthetic peptide
  Seed: GMDPRMCSLMQGSTLPR
GMDPRMFSLMQSSTQPR

SEQ ID NO: 77731 - protein, 17 aa, Artificial Sequence
  Description of Artificial Sequence: Synthetic peptide
  Seed: GMDPRMCSLMQGSTLPR
GMDPRMFSLMQSSTSPR

SEQ ID NO: 77732 - protein, 17 aa, Artificial Sequence
  Description of Artificial Sequence: Synthetic peptide
  Seed: GMDPRMCSLMQGSTLPR
GMDPRMFSLMQSSTTPR

SEQ ID NO: 77733 - protein, 17 aa, Artificial Sequence
  Description of Artificial Sequence: Synthetic peptide
  Seed: GMDPRMCSLMQGSTLPR
GMDPRMFSLMQSSTVPR

SEQ ID NO: 77734 - protein, 17 aa, Artificial Sequence
  Description of Artificial Sequence: Synthetic peptide
  Seed: GMDPRMCSLMQGSTLPR
GMDPRMFSLMQTSTAPR

SEQ ID NO: 77735 - protein, 17 aa, Artificial Sequence
  Description of Artificial Sequence: Synthetic peptide
  Seed: GMDPRMCSLMQGSTLPR
GMDPRMFSLMQTSTGPR

SEQ ID NO: 77736 - protein, 17 aa, Artificial Sequence
  Description of Artificial Sequence: Synthetic peptide
  Seed: GMDPRMCSLMQGSTLPR
GMDPRMFSLMQTSTHPR

SEQ ID NO: 77737 - protein, 17 aa, Artificial Sequence
  Description of Artificial Sequence: Synthetic peptide
  Seed: GMDPRMCSLMQGSTLPR
GMDPRMFSLMQTSTIPR

SEQ ID NO: 77738 - protein, 17 aa, Artificial Sequence
  Description of Artificial Sequence: Synthetic peptide
  Seed: GMDPRMCSLMQGSTLPR
GMDPRMFSLMQTSTLPR

SEQ ID NO: 77739 - protein, 17 aa, Artificial Sequence
  Description of Artificial Sequence: Synthetic peptide
  Seed: GMDPRMCSLMQGSTLPR
GMDPRMFSLMQTSTMPR

SEQ ID NO: 77740 - protein, 17 aa, Artificial Sequence
  Description of Artificial Sequence: Synthetic peptide
  Seed: GMDPRMCSLMQGSTLPR
GMDPRMFSLMQTSTNPR

SEQ ID NO: 77741 - protein, 17 aa, Artificial Sequence
  Description of Artificial Sequence: Synthetic peptide
  Seed: GMDPRMCSLMQGSTLPR
GMDPRMFSLMQTSTPPR

SEQ ID NO: 77742 - protein, 17 aa, Artificial Sequence
  Description of Artificial Sequence: Synthetic peptide
  Seed: GMDPRMCSLMQGSTLPR
GMDPRMFSLMQTSTQPR

SEQ ID NO: 77743 - protein, 17 aa, Artificial Sequence
  Description of Artificial Sequence: Synthetic peptide
  Seed: GMDPRMCSLMQGSTLPR
GMDPRMFSLMQTSTSPR

SEQ ID NO: 77744 - protein, 17 aa, Artificial Sequence
  Description of Artificial Sequence: Synthetic peptide
  Seed: GMDPRMCSLMQGSTLPR
GMDPRMFSLMQTSTTPR

SEQ ID NO: 77745 - protein, 17 aa, Artificial Sequence
  Description of Artificial Sequence: Synthetic peptide
  Seed: GMDPRMCSLMQGSTLPR
GMDPRMFSLMQTSTVPR

SEQ ID NO: 77746 - protein, 17 aa, Artificial Sequence
  Description of Artificial Sequence: Synthetic peptide
  Seed: GMDPRMCSLMQGSTLPR
GMDPRMFSLMQVSTAPR

SEQ ID NO: 77747 - protein, 17 aa, Artificial Sequence
  Description of Artificial Sequence: Synthetic peptide
  Seed: GMDPRMCSLMQGSTLPR
GMDPRMFSLMQVSTCPR

SEQ ID NO: 77748 - protein, 17 aa, Artificial Sequence
  Description of Artificial Sequence: Synthetic peptide
  Seed: GMDPRMCSLMQGSTLPR
GMDPRMFSLMQVSTDPR

SEQ ID NO: 77749 - protein, 17 aa, Artificial Sequence
  Description of Artificial Sequence: Synthetic peptide
  Seed: GMDPRMCSLMQGSTLPR
GMDPRMFSLMQVSTEPR

SEQ ID NO: 77750 - protein, 17 aa, Artificial Sequence
  Description of Artificial Sequence: Synthetic peptide
  Seed: GMDPRMCSLMQGSTLPR
GMDPRMFSLMQVSTGPR

SEQ ID NO: 77751 - protein, 17 aa, Artificial Sequence
  Description of Artificial Sequence: Synthetic peptide
  Seed: GMDPRMCSLMQGSTLPR
GMDPRMFSLMQVSTHPR

SEQ ID NO: 77752 - protein, 17 aa, Artificial Sequence
  Description of Artificial Sequence: Synthetic peptide
  Seed: GMDPRMCSLMQGSTLPR
GMDPRMFSLMQVSTIPR

SEQ ID NO: 77753 - protein, 17 aa, Artificial Sequence
  Description of Artificial Sequence: Synthetic peptide
  Seed: GMDPRMCSLMQGSTLPR
GMDPRMFSLMQVSTLPR

SEQ ID NO: 77754 - protein, 17 aa, Artificial Sequence
  Description of Artificial Sequence: Synthetic peptide
  Seed: GMDPRMCSLMQGSTLPR
GMDPRMFSLMQVSTMPR

SEQ ID NO: 77755 - protein, 17 aa, Artificial Sequence
  Description of Artificial Sequence: Synthetic peptide
  Seed: GMDPRMCSLMQGSTLPR
GMDPRMFSLMQVSTNPR

SEQ ID NO: 77756 - protein, 17 aa, Artificial Sequence
  Description of Artificial Sequence: Synthetic peptide
  Seed: GMDPRMCSLMQGSTLPR
GMDPRMFSLMQVSTPPR

SEQ ID NO: 77757 - protein, 17 aa, Artificial Sequence
  Description of Artificial Sequence: Synthetic peptide
  Seed: GMDPRMCSLMQGSTLPR
GMDPRMFSLMQVSTQPR

SEQ ID NO: 77758 - protein, 17 aa, Artificial Sequence
  Description of Artificial Sequence: Synthetic peptide
  Seed: GMDPRMCSLMQGSTLPR
GMDPRMFSLMQVSTSPR

SEQ ID NO: 77759 - protein, 17 aa, Artificial Sequence
  Description of Artificial Sequence: Synthetic peptide
  Seed: GMDPRMCSLMQGSTLPR
GMDPRMFSLMQVSTTPR

SEQ ID NO: 77760 - protein, 17 aa, Artificial Sequence
  Description of Artificial Sequence: Synthetic peptide
  Seed: GMDPRMCSLMQGSTLPR
GMDPRMFSLMQVSTVPR

SEQ ID NO: 77761 - protein, 17 aa, Artificial Sequence
  Description of Artificial Sequence: Synthetic peptide
  Seed: GMDPRMCSLMQGSTLPR
GMDPRMFSLNQASTIPR

SEQ ID NO: 77762 - protein, 17 aa, Artificial Sequence
  Description of Artificial Sequence: Synthetic peptide
  Seed: GMDPRMCSLMQGSTLPR
GMDPRMFSLNQASTLPR

SEQ ID NO: 77763 - protein, 17 aa, Artificial Sequence
  Description of Artificial Sequence: Synthetic peptide
  Seed: GMDPRMCSLMQGSTLPR
GMDPRMFSLNQASTVPR

SEQ ID NO: 77764 - protein, 17 aa, Artificial Sequence
  Description of Artificial Sequence: Synthetic peptide
  Seed: GMDPRMCSLMQGSTLPR
GMDPRMFSLQQASTAPR

SEQ ID NO: 77765 - protein, 17 aa, Artificial Sequence
  Description of Artificial Sequence: Synthetic peptide
  Seed: GMDPRMCSLMQGSTLPR
GMDPRMFSLQQASTIPR

SEQ ID NO: 77766 - protein, 17 aa, Artificial Sequence
  Description of Artificial Sequence: Synthetic peptide
  Seed: GMDPRMCSLMQGSTLPR
GMDPRMFSLQQASTLPR

SEQ ID NO: 77767 - protein, 17 aa, Artificial Sequence
  Description of Artificial Sequence: Synthetic peptide
  Seed: GMDPRMCSLMQGSTLPR
GMDPRMFSLQQASTMPR

SEQ ID NO: 77768 - protein, 17 aa, Artificial Sequence
  Description of Artificial Sequence: Synthetic peptide
  Seed: GMDPRMCSLMQGSTLPR
GMDPRMFSLQQASTNPR

SEQ ID NO: 77769 - protein, 17 aa, Artificial Sequence
  Description of Artificial Sequence: Synthetic peptide
  Seed: GMDPRMCSLMQGSTLPR
GMDPRMFSLQQASTSPR

SEQ ID NO: 77770 - protein, 17 aa, Artificial Sequence
  Description of Artificial Sequence: Synthetic peptide
  Seed: GMDPRMCSLMQGSTLPR
GMDPRMFSLQQASTTPR

SEQ ID NO: 77771 - protein, 17 aa, Artificial Sequence
  Description of Artificial Sequence: Synthetic peptide
  Seed: GMDPRMCSLMQGSTLPR
GMDPRMFSLQQASTVPR

SEQ ID NO: 77772 - protein, 17 aa, Artificial Sequence
  Description of Artificial Sequence: Synthetic peptide
  Seed: GMDPRMCSLMQGSTLPR
GMDPRMFSLQQGSTAPR

SEQ ID NO: 77773 - protein, 17 aa, Artificial Sequence
  Description of Artificial Sequence: Synthetic peptide
  Seed: GMDPRMCSLMQGSTLPR
GMDPRMFSLQQGSTIPR

SEQ ID NO: 77774 - protein, 17 aa, Artificial Sequence
  Description of Artificial Sequence: Synthetic peptide
  Seed: GMDPRMCSLMQGSTLPR
GMDPRMFSLQQGSTLPR

SEQ ID NO: 77775 - protein, 17 aa, Artificial Sequence
  Description of Artificial Sequence: Synthetic peptide
  Seed: GMDPRMCSLMQGSTLPR
GMDPRMFSLQQGSTMPR

SEQ ID NO: 77776 - protein, 17 aa, Artificial Sequence
  Description of Artificial Sequence: Synthetic peptide
  Seed: GMDPRMCSLMQGSTLPR
GMDPRMFSLQQGSTTPR

SEQ ID NO: 77777 - protein, 17 aa, Artificial Sequence
  Description of Artificial Sequence: Synthetic peptide
  Seed: GMDPRMCSLMQGSTLPR
GMDPRMFSLQQGSTVPR

SEQ ID NO: 77778 - protein, 17 aa, Artificial Sequence
  Description of Artificial Sequence: Synthetic peptide
  Seed: GMDPRMCSLMQGSTLPR
GMDPRMFSLQQISTAPR

SEQ ID NO: 77779 - protein, 17 aa, Artificial Sequence
  Description of Artificial Sequence: Synthetic peptide
  Seed: GMDPRMCSLMQGSTLPR
GMDPRMFSLQQNSTLPR

SEQ ID NO: 77780 - protein, 17 aa, Artificial Sequence
  Description of Artificial Sequence: Synthetic peptide
  Seed: GMDPRMCSLMQGSTLPR
GMDPRMFSLQQNSTVPR

SEQ ID NO: 77781 - protein, 17 aa, Artificial Sequence
  Description of Artificial Sequence: Synthetic peptide
  Seed: GMDPRMCSLMQGSTLPR
GMDPRMFSLQQPSTAPR

SEQ ID NO: 77782 - protein, 17 aa, Artificial Sequence
  Description of Artificial Sequence: Synthetic peptide
  Seed: GMDPRMCSLMQGSTLPR
GMDPRMFSLQQPSTIPR

SEQ ID NO: 77783 - protein, 17 aa, Artificial Sequence
  Description of Artificial Sequence: Synthetic peptide
  Seed: GMDPRMCSLMQGSTLPR
GMDPRMFSLQQPSTLPR

SEQ ID NO: 77784 - protein, 17 aa, Artificial Sequence
  Description of Artificial Sequence: Synthetic peptide
  Seed: GMDPRMCSLMQGSTLPR
GMDPRMFSLQQPSTSPR

SEQ ID NO: 77785 - protein, 17 aa, Artificial Sequence
  Description of Artificial Sequence: Synthetic peptide
  Seed: GMDPRMCSLMQGSTLPR
GMDPRMFSLQQPSTVPR

SEQ ID NO: 77786 - protein, 17 aa, Artificial Sequence
  Description of Artificial Sequence: Synthetic peptide
  Seed: GMDPRMCSLMQGSTLPR
GMDPRMFSLQQSSTAPR

SEQ ID NO: 77787 - protein, 17 aa, Artificial Sequence
  Description of Artificial Sequence: Synthetic peptide
  Seed: GMDPRMCSLMQGSTLPR
GMDPRMFSLQQSSTIPR

SEQ ID NO: 77788 - protein, 17 aa, Artificial Sequence
  Description of Artificial Sequence: Synthetic peptide
  Seed: GMDPRMCSLMQGSTLPR
GMDPRMFSLQQSSTLPR

SEQ ID NO: 77789 - protein, 17 aa, Artificial Sequence
  Description of Artificial Sequence: Synthetic peptide
  Seed: GMDPRMCSLMQGSTLPR
GMDPRMFSLQQSSTMPR

SEQ ID NO: 77790 - protein, 17 aa, Artificial Sequence
  Description of Artificial Sequence: Synthetic peptide
  Seed: GMDPRMCSLMQGSTLPR
GMDPRMFSLQQSSTSPR

SEQ ID NO: 77791 - protein, 17 aa, Artificial Sequence
  Description of Artificial Sequence: Synthetic peptide
  Seed: GMDPRMCSLMQGSTLPR
GMDPRMFSLQQSSTTPR

SEQ ID NO: 77792 - protein, 17 aa, Artificial Sequence
  Description of Artificial Sequence: Synthetic peptide
  Seed: GMDPRMCSLMQGSTLPR
GMDPRMFSLQQSSTVPR

SEQ ID NO: 77793 - protein, 17 aa, Artificial Sequence
  Description of Artificial Sequence: Synthetic peptide
  Seed: GMDPRMCSLMQGSTLPR
GMDPRMFSLQQTSTAPR

SEQ ID NO: 77794 - protein, 17 aa, Artificial Sequence
  Description of Artificial Sequence: Synthetic peptide
  Seed: GMDPRMCSLMQGSTLPR
GMDPRMFSLQQTSTLPR

SEQ ID NO: 77795 - protein, 17 aa, Artificial Sequence
  Description of Artificial Sequence: Synthetic peptide
  Seed: GMDPRMCSLMQGSTLPR
GMDPRMFSLQQTSTVPR

SEQ ID NO: 77796 - protein, 17 aa, Artificial Sequence
  Description of Artificial Sequence: Synthetic peptide
  Seed: GMDPRMCSLMQGSTLPR
GMDPRMFSLQQVSTAPR

SEQ ID NO: 77797 - protein, 17 aa, Artificial Sequence
  Description of Artificial Sequence: Synthetic peptide
  Seed: GMDPRMCSLMQGSTLPR
GMDPRMFSLQQVSTNPR

SEQ ID NO: 77798 - protein, 17 aa, Artificial Sequence
  Description of Artificial Sequence: Synthetic peptide
  Seed: GMDPRMCSLMQGSTLPR
GMDPRMFSLQQVSTSPR

SEQ ID NO: 77799 - protein, 17 aa, Artificial Sequence
  Description of Artificial Sequence: Synthetic peptide
  Seed: GMDPRMCSLMQGSTLPR
GMDPRMFSLSQASTAPR

SEQ ID NO: 77800 - protein, 17 aa, Artificial Sequence
  Description of Artificial Sequence: Synthetic peptide
  Seed: GMDPRMCSLMQGSTLPR
GMDPRMFSLSQASTIPR

SEQ ID NO: 77801 - protein, 17 aa, Artificial Sequence
  Description of Artificial Sequence: Synthetic peptide
  Seed: GMDPRMCSLMQGSTLPR
GMDPRMFSLSQASTLPR

SEQ ID NO: 77802 - protein, 17 aa, Artificial Sequence
  Description of Artificial Sequence: Synthetic peptide
  Seed: GMDPRMCSLMQGSTLPR
GMDPRMFSLSQASTMPR

SEQ ID NO: 77803 - protein, 17 aa, Artificial Sequence
  Description of Artificial Sequence: Synthetic peptide
  Seed: GMDPRMCSLMQGSTLPR
GMDPRMFSLSQASTNPR

SEQ ID NO: 77804 - protein, 17 aa, Artificial Sequence
  Description of Artificial Sequence: Synthetic peptide
  Seed: GMDPRMCSLMQGSTLPR
GMDPRMFSLSQASTSPR

SEQ ID NO: 77805 - protein, 17 aa, Artificial Sequence
  Description of Artificial Sequence: Synthetic peptide
  Seed: GMDPRMCSLMQGSTLPR
GMDPRMFSLSQASTVPR

SEQ ID NO: 77806 - protein, 17 aa, Artificial Sequence
  Description of Artificial Sequence: Synthetic peptide
  Seed: GMDPRMCSLMQGSTLPR
GMDPRMFSLSQGSTIPR

SEQ ID NO: 77807 - protein, 17 aa, Artificial Sequence
  Description of Artificial Sequence: Synthetic peptide
  Seed: GMDPRMCSLMQGSTLPR
GMDPRMFSLSQGSTLPR

SEQ ID NO: 77808 - protein, 17 aa, Artificial Sequence
  Description of Artificial Sequence: Synthetic peptide
  Seed: GMDPRMCSLMQGSTLPR
GMDPRMFSLSQGSTVPR

SEQ ID NO: 77809 - protein, 17 aa, Artificial Sequence
  Description of Artificial Sequence: Synthetic peptide
  Seed: GMDPRMCSLMQGSTLPR
GMDPRMFSLSQSSTIPR

SEQ ID NO: 77810 - protein, 17 aa, Artificial Sequence
  Description of Artificial Sequence: Synthetic peptide
  Seed: GMDPRMCSLMQGSTLPR
GMDPRMFSLSQSSTLPR

SEQ ID NO: 77811 - protein, 17 aa, Artificial Sequence
  Description of Artificial Sequence: Synthetic peptide
  Seed: GMDPRMCSLMQGSTLPR
GMDPRMFSLSQSSTVPR

SEQ ID NO: 77812 - protein, 17 aa, Artificial Sequence
  Description of Artificial Sequence: Synthetic peptide
  Seed: GMDPRMCSLMQGSTLPR
GMDPRMFSLTQASTAPR

SEQ ID NO: 77813 - protein, 17 aa, Artificial Sequence
  Description of Artificial Sequence: Synthetic peptide
  Seed: GMDPRMCSLMQGSTLPR
GMDPRMFSLTQASTIPR

SEQ ID NO: 77814 - protein, 17 aa, Artificial Sequence
  Description of Artificial Sequence: Synthetic peptide
  Seed: GMDPRMCSLMQGSTLPR
GMDPRMFSLTQASTLPR

SEQ ID NO: 77815 - protein, 17 aa, Artificial Sequence
  Description of Artificial Sequence: Synthetic peptide
  Seed: GMDPRMCSLMQGSTLPR
GMDPRMFSLTQASTSPR

SEQ ID NO: 77816 - protein, 17 aa, Artificial Sequence
  Description of Artificial Sequence: Synthetic peptide
  Seed: GMDPRMCSLMQGSTLPR
GMDPRMFSLTQASTVPR

SEQ ID NO: 77817 - protein, 17 aa, Artificial Sequence
  Description of Artificial Sequence: Synthetic peptide
  Seed: GMDPRMCSLMQGSTLPR
GMDPRMFSLVQASTAPR

SEQ ID NO: 77818 - protein, 17 aa, Artificial Sequence
  Description of Artificial Sequence: Synthetic peptide
  Seed: GMDPRMCSLMQGSTLPR
GMDPRMFSLVQASTGPR

SEQ ID NO: 77819 - protein, 17 aa, Artificial Sequence
  Description of Artificial Sequence: Synthetic peptide
  Seed: GMDPRMCSLMQGSTLPR
GMDPRMFSLVQASTHPR

SEQ ID NO: 77820 - protein, 17 aa, Artificial Sequence
  Description of Artificial Sequence: Synthetic peptide
  Seed: GMDPRMCSLMQGSTLPR
GMDPRMFSLVQASTIPR

SEQ ID NO: 77821 - protein, 17 aa, Artificial Sequence
  Description of Artificial Sequence: Synthetic peptide
  Seed: GMDPRMCSLMQGSTLPR
GMDPRMFSLVQASTLPR

SEQ ID NO: 77822 - protein, 17 aa, Artificial Sequence
  Description of Artificial Sequence: Synthetic peptide
  Seed: GMDPRMCSLMQGSTLPR
GMDPRMFSLVQASTMPR

SEQ ID NO: 77823 - protein, 17 aa, Artificial Sequence
  Description of Artificial Sequence: Synthetic peptide
  Seed: GMDPRMCSLMQGSTLPR
GMDPRMFSLVQASTNPR

SEQ ID NO: 77824 - protein, 17 aa, Artificial Sequence
  Description of Artificial Sequence: Synthetic peptide
  Seed: GMDPRMCSLMQGSTLPR
GMDPRMFSLVQASTQPR

SEQ ID NO: 77825 - protein, 17 aa, Artificial Sequence
  Description of Artificial Sequence: Synthetic peptide
  Seed: GMDPRMCSLMQGSTLPR
GMDPRMFSLVQASTSPR

SEQ ID NO: 77826 - protein, 17 aa, Artificial Sequence
  Description of Artificial Sequence: Synthetic peptide
  Seed: GMDPRMCSLMQGSTLPR
GMDPRMFSLVQASTTPR

SEQ ID NO: 77827 - protein, 17 aa, Artificial Sequence
  Description of Artificial Sequence: Synthetic peptide
  Seed: GMDPRMCSLMQGSTLPR
GMDPRMFSLVQASTVPR

SEQ ID NO: 77828 - protein, 17 aa, Artificial Sequence
  Description of Artificial Sequence: Synthetic peptide
  Seed: GMDPRMCSLMQGSTLPR
GMDPRMFSLVQGSTAPR

SEQ ID NO: 77829 - protein, 17 aa, Artificial Sequence
  Description of Artificial Sequence: Synthetic peptide
  Seed: GMDPRMCSLMQGSTLPR
GMDPRMFSLVQGSTIPR

SEQ ID NO: 77830 - protein, 17 aa, Artificial Sequence
  Description of Artificial Sequence: Synthetic peptide
  Seed: GMDPRMCSLMQGSTLPR
GMDPRMFSLVQGSTLPR

SEQ ID NO: 77831 - protein, 17 aa, Artificial Sequence
  Description of Artificial Sequence: Synthetic peptide
  Seed: GMDPRMCSLMQGSTLPR
GMDPRMFSLVQGSTMPR

SEQ ID NO: 77832 - protein, 17 aa, Artificial Sequence
  Description of Artificial Sequence: Synthetic peptide
  Seed: GMDPRMCSLMQGSTLPR
GMDPRMFSLVQGSTNPR

SEQ ID NO: 77833 - protein, 17 aa, Artificial Sequence
  Description of Artificial Sequence: Synthetic peptide
  Seed: GMDPRMCSLMQGSTLPR
GMDPRMFSLVQGSTSPR

SEQ ID NO: 77834 - protein, 17 aa, Artificial Sequence
  Description of Artificial Sequence: Synthetic peptide
  Seed: GMDPRMCSLMQGSTLPR
GMDPRMFSLVQGSTTPR

SEQ ID NO: 77835 - protein, 17 aa, Artificial Sequence
  Description of Artificial Sequence: Synthetic peptide
  Seed: GMDPRMCSLMQGSTLPR
GMDPRMFSLVQGSTVPR

SEQ ID NO: 77836 - protein, 17 aa, Artificial Sequence
  Description of Artificial Sequence: Synthetic peptide
  Seed: GMDPRMCSLMQGSTLPR
GMDPRMFSLVQISTAPR

SEQ ID NO: 77837 - protein, 17 aa, Artificial Sequence
  Description of Artificial Sequence: Synthetic peptide
  Seed: GMDPRMCSLMQGSTLPR
GMDPRMFSLVQISTNPR

SEQ ID NO: 77838 - protein, 17 aa, Artificial Sequence
  Description of Artificial Sequence: Synthetic peptide
  Seed: GMDPRMCSLMQGSTLPR
GMDPRMFSLVQISTSPR

SEQ ID NO: 77839 - protein, 17 aa, Artificial Sequence
  Description of Artificial Sequence: Synthetic peptide
  Seed: GMDPRMCSLMQGSTLPR
GMDPRMFSLVQISTTPR

SEQ ID NO: 77840 - protein, 17 aa, Artificial Sequence
  Description of Artificial Sequence: Synthetic peptide
  Seed: GMDPRMCSLMQGSTLPR
GMDPRMFSLVQISTVPR

SEQ ID NO: 77841 - protein, 17 aa, Artificial Sequence
  Description of Artificial Sequence: Synthetic peptide
  Seed: GMDPRMCSLMQGSTLPR
GMDPRMFSLVQNSTAPR

SEQ ID NO: 77842 - protein, 17 aa, Artificial Sequence
  Description of Artificial Sequence: Synthetic peptide
  Seed: GMDPRMCSLMQGSTLPR
GMDPRMFSLVQNSTIPR

SEQ ID NO: 77843 - protein, 17 aa, Artificial Sequence
  Description of Artificial Sequence: Synthetic peptide
  Seed: GMDPRMCSLMQGSTLPR
GMDPRMFSLVQNSTLPR

SEQ ID NO: 77844 - protein, 17 aa, Artificial Sequence
  Description of Artificial Sequence: Synthetic peptide
  Seed: GMDPRMCSLMQGSTLPR
GMDPRMFSLVQNSTSPR

SEQ ID NO: 77845 - protein, 17 aa, Artificial Sequence
  Description of Artificial Sequence: Synthetic peptide
  Seed: GMDPRMCSLMQGSTLPR
GMDPRMFSLVQNSTVPR

SEQ ID NO: 77846 - protein, 17 aa, Artificial Sequence
  Description of Artificial Sequence: Synthetic peptide
  Seed: GMDPRMCSLMQGSTLPR
GMDPRMFSLVQPSTAPR

SEQ ID NO: 77847 - protein, 17 aa, Artificial Sequence
  Description of Artificial Sequence: Synthetic peptide
  Seed: GMDPRMCSLMQGSTLPR
GMDPRMFSLVQPSTGPR

SEQ ID NO: 77848 - protein, 17 aa, Artificial Sequence
  Description of Artificial Sequence: Synthetic peptide
  Seed: GMDPRMCSLMQGSTLPR
GMDPRMFSLVQPSTIPR

SEQ ID NO: 77849 - protein, 17 aa, Artificial Sequence
  Description of Artificial Sequence: Synthetic peptide
  Seed: GMDPRMCSLMQGSTLPR
GMDPRMFSLVQPSTLPR

SEQ ID NO: 77850 - protein, 17 aa, Artificial Sequence
  Description of Artificial Sequence: Synthetic peptide
  Seed: GMDPRMCSLMQGSTLPR
GMDPRMFSLVQPSTMPR

SEQ ID NO: 77851 - protein, 17 aa, Artificial Sequence
  Description of Artificial Sequence: Synthetic peptide
  Seed: GMDPRMCSLMQGSTLPR
GMDPRMFSLVQPSTNPR

SEQ ID NO: 77852 - protein, 17 aa, Artificial Sequence
  Description of Artificial Sequence: Synthetic peptide
  Seed: GMDPRMCSLMQGSTLPR
GMDPRMFSLVQPSTSPR

SEQ ID NO: 77853 - protein, 17 aa, Artificial Sequence
  Description of Artificial Sequence: Synthetic peptide
  Seed: GMDPRMCSLMQGSTLPR
GMDPRMFSLVQPSTTPR

SEQ ID NO: 77854 - protein, 17 aa, Artificial Sequence
  Description of Artificial Sequence: Synthetic peptide
  Seed: GMDPRMCSLMQGSTLPR
GMDPRMFSLVQPSTVPR

SEQ ID NO: 77855 - protein, 17 aa, Artificial Sequence
  Description of Artificial Sequence: Synthetic peptide
  Seed: GMDPRMCSLMQGSTLPR
GMDPRMFSLVQSSTAPR

SEQ ID NO: 77856 - protein, 17 aa, Artificial Sequence
  Description of Artificial Sequence: Synthetic peptide
  Seed: GMDPRMCSLMQGSTLPR
GMDPRMFSLVQSSTIPR

SEQ ID NO: 77857 - protein, 17 aa, Artificial Sequence
  Description of Artificial Sequence: Synthetic peptide
  Seed: GMDPRMCSLMQGSTLPR
GMDPRMFSLVQSSTLPR

SEQ ID NO: 77858 - protein, 17 aa, Artificial Sequence
  Description of Artificial Sequence: Synthetic peptide
  Seed: GMDPRMCSLMQGSTLPR
GMDPRMFSLVQSSTMPR

SEQ ID NO: 77859 - protein, 17 aa, Artificial Sequence
  Description of Artificial Sequence: Synthetic peptide
  Seed: GMDPRMCSLMQGSTLPR
GMDPRMFSLVQSSTNPR

SEQ ID NO: 77860 - protein, 17 aa, Artificial Sequence
  Description of Artificial Sequence: Synthetic peptide
  Seed: GMDPRMCSLMQGSTLPR
GMDPRMFSLVQSSTSPR

SEQ ID NO: 77861 - protein, 17 aa, Artificial Sequence
  Description of Artificial Sequence: Synthetic peptide
  Seed: GMDPRMCSLMQGSTLPR
GMDPRMFSLVQSSTTPR

SEQ ID NO: 77862 - protein, 17 aa, Artificial Sequence
  Description of Artificial Sequence: Synthetic peptide
  Seed: GMDPRMCSLMQGSTLPR
GMDPRMFSLVQSSTVPR

SEQ ID NO: 77863 - protein, 17 aa, Artificial Sequence
  Description of Artificial Sequence: Synthetic peptide
  Seed: GMDPRMCSLMQGSTLPR
GMDPRMFSLVQTSTAPR

SEQ ID NO: 77864 - protein, 17 aa, Artificial Sequence
  Description of Artificial Sequence: Synthetic peptide
  Seed: GMDPRMCSLMQGSTLPR
GMDPRMFSLVQTSTIPR

SEQ ID NO: 77865 - protein, 17 aa, Artificial Sequence
  Description of Artificial Sequence: Synthetic peptide
  Seed: GMDPRMCSLMQGSTLPR
GMDPRMFSLVQTSTLPR

SEQ ID NO: 77866 - protein, 17 aa, Artificial Sequence
  Description of Artificial Sequence: Synthetic peptide
  Seed: GMDPRMCSLMQGSTLPR
GMDPRMFSLVQTSTMPR

SEQ ID NO: 77867 - protein, 17 aa, Artificial Sequence
  Description of Artificial Sequence: Synthetic peptide
  Seed: GMDPRMCSLMQGSTLPR
GMDPRMFSLVQTSTNPR

SEQ ID NO: 77868 - protein, 17 aa, Artificial Sequence
  Description of Artificial Sequence: Synthetic peptide
  Seed: GMDPRMCSLMQGSTLPR
GMDPRMFSLVQTSTSPR

SEQ ID NO: 77869 - protein, 17 aa, Artificial Sequence
  Description of Artificial Sequence: Synthetic peptide
  Seed: GMDPRMCSLMQGSTLPR
GMDPRMFSLVQTSTTPR

SEQ ID NO: 77870 - protein, 17 aa, Artificial Sequence
  Description of Artificial Sequence: Synthetic peptide
  Seed: GMDPRMCSLMQGSTLPR
GMDPRMFSLVQTSTVPR

SEQ ID NO: 77871 - protein, 17 aa, Artificial Sequence
  Description of Artificial Sequence: Synthetic peptide
  Seed: GMDPRMCSLMQGSTLPR
GMDPRMFSLVQVSTAPR

SEQ ID NO: 77872 - protein, 17 aa, Artificial Sequence
  Description of Artificial Sequence: Synthetic peptide
  Seed: GMDPRMCSLMQGSTLPR
GMDPRMFSLVQVSTIPR

SEQ ID NO: 77873 - protein, 17 aa, Artificial Sequence
  Description of Artificial Sequence: Synthetic peptide
  Seed: GMDPRMCSLMQGSTLPR
GMDPRMFSLVQVSTLPR

SEQ ID NO: 77874 - protein, 17 aa, Artificial Sequence
  Description of Artificial Sequence: Synthetic peptide
  Seed: GMDPRMCSLMQGSTLPR
GMDPRMFSLVQVSTMPR

SEQ ID NO: 77875 - protein, 17 aa, Artificial Sequence
  Description of Artificial Sequence: Synthetic peptide
  Seed: GMDPRMCSLMQGSTLPR
GMDPRMFSLVQVSTNPR

SEQ ID NO: 77876 - protein, 17 aa, Artificial Sequence
  Description of Artificial Sequence: Synthetic peptide
  Seed: GMDPRMCSLMQGSTLPR
GMDPRMFSLVQVSTSPR

SEQ ID NO: 77877 - protein, 17 aa, Artificial Sequence
  Description of Artificial Sequence: Synthetic peptide
  Seed: GMDPRMCSLMQGSTLPR
GMDPRMFSLVQVSTTPR

SEQ ID NO: 77878 - protein, 17 aa, Artificial Sequence
  Description of Artificial Sequence: Synthetic peptide
  Seed: GMDPRMCSLMQGSTLPR
GMDPRMFSLVQVSTVPR

SEQ ID NO: 77879 - protein, 17 aa, Artificial Sequence
  Description of Artificial Sequence: Synthetic peptide
  Seed: GMDPRMCSLMQGSTLPR
GMDPRMISLAQASTIPR

SEQ ID NO: 77880 - protein, 17 aa, Artificial Sequence
  Description of Artificial Sequence: Synthetic peptide
  Seed: GMDPRMCSLMQGSTLPR
GMDPRMISLAQASTLPR

SEQ ID NO: 77881 - protein, 17 aa, Artificial Sequence
  Description of Artificial Sequence: Synthetic peptide
  Seed: GMDPRMCSLMQGSTLPR
GMDPRMISLAQASTVPR

SEQ ID NO: 77882 - protein, 17 aa, Artificial Sequence
  Description of Artificial Sequence: Synthetic peptide
  Seed: GMDPRMCSLMQGSTLPR
GMDPRMISLAQGSTLPR

SEQ ID NO: 77883 - protein, 17 aa, Artificial Sequence
  Description of Artificial Sequence: Synthetic peptide
  Seed: GMDPRMCSLMQGSTLPR
GMDPRMISLIQASTAPR

SEQ ID NO: 77884 - protein, 17 aa, Artificial Sequence
  Description of Artificial Sequence: Synthetic peptide
  Seed: GMDPRMCSLMQGSTLPR
GMDPRMISLIQASTIPR

SEQ ID NO: 77885 - protein, 17 aa, Artificial Sequence
  Description of Artificial Sequence: Synthetic peptide
  Seed: GMDPRMCSLMQGSTLPR
GMDPRMISLIQASTLPR

SEQ ID NO: 77886 - protein, 17 aa, Artificial Sequence
  Description of Artificial Sequence: Synthetic peptide
  Seed: GMDPRMCSLMQGSTLPR
GMDPRMISLIQASTNPR

SEQ ID NO: 77887 - protein, 17 aa, Artificial Sequence
  Description of Artificial Sequence: Synthetic peptide
  Seed: GMDPRMCSLMQGSTLPR
GMDPRMISLIQASTSPR

SEQ ID NO: 77888 - protein, 17 aa, Artificial Sequence
  Description of Artificial Sequence: Synthetic peptide
  Seed: GMDPRMCSLMQGSTLPR
GMDPRMISLIQASTVPR

SEQ ID NO: 77889 - protein, 17 aa, Artificial Sequence
  Description of Artificial Sequence: Synthetic peptide
  Seed: GMDPRMCSLMQGSTLPR
GMDPRMISLIQGSTAPR

SEQ ID NO: 77890 - protein, 17 aa, Artificial Sequence
  Description of Artificial Sequence: Synthetic peptide
  Seed: GMDPRMCSLMQGSTLPR
GMDPRMISLIQGSTIPR

SEQ ID NO: 77891 - protein, 17 aa, Artificial Sequence
  Description of Artificial Sequence: Synthetic peptide
  Seed: GMDPRMCSLMQGSTLPR
GMDPRMISLIQGSTLPR

SEQ ID NO: 77892 - protein, 17 aa, Artificial Sequence
  Description of Artificial Sequence: Synthetic peptide
  Seed: GMDPRMCSLMQGSTLPR
GMDPRMISLIQGSTVPR

SEQ ID NO: 77893 - protein, 17 aa, Artificial Sequence
  Description of Artificial Sequence: Synthetic peptide
  Seed: GMDPRMCSLMQGSTLPR
GMDPRMISLIQSSTIPR

SEQ ID NO: 77894 - protein, 17 aa, Artificial Sequence
  Description of Artificial Sequence: Synthetic peptide
  Seed: GMDPRMCSLMQGSTLPR
GMDPRMISLIQSSTLPR

SEQ ID NO: 77895 - protein, 17 aa, Artificial Sequence
  Description of Artificial Sequence: Synthetic peptide
  Seed: GMDPRMCSLMQGSTLPR
GMDPRMISLIQSSTVPR

SEQ ID NO: 77896 - protein, 17 aa, Artificial Sequence
  Description of Artificial Sequence: Synthetic peptide
  Seed: GMDPRMCSLMQGSTLPR
GMDPRMISLLQASTAPR

SEQ ID NO: 77897 - protein, 17 aa, Artificial Sequence
  Description of Artificial Sequence: Synthetic peptide
  Seed: GMDPRMCSLMQGSTLPR
GMDPRMISLLQASTIPR

SEQ ID NO: 77898 - protein, 17 aa, Artificial Sequence
  Description of Artificial Sequence: Synthetic peptide
  Seed: GMDPRMCSLMQGSTLPR
GMDPRMISLLQASTLPR

SEQ ID NO: 77899 - protein, 17 aa, Artificial Sequence
  Description of Artificial Sequence: Synthetic peptide
  Seed: GMDPRMCSLMQGSTLPR
GMDPRMISLLQASTMPR

SEQ ID NO: 77900 - protein, 17 aa, Artificial Sequence
  Description of Artificial Sequence: Synthetic peptide
  Seed: GMDPRMCSLMQGSTLPR
GMDPRMISLLQASTNPR

SEQ ID NO: 77901 - protein, 17 aa, Artificial Sequence
  Description of Artificial Sequence: Synthetic peptide
  Seed: GMDPRMCSLMQGSTLPR
GMDPRMISLLQASTSPR

SEQ ID NO: 77902 - protein, 17 aa, Artificial Sequence
  Description of Artificial Sequence: Synthetic peptide
  Seed: GMDPRMCSLMQGSTLPR
GMDPRMISLLQASTTPR

SEQ ID NO: 77903 - protein, 17 aa, Artificial Sequence
  Description of Artificial Sequence: Synthetic peptide
  Seed: GMDPRMCSLMQGSTLPR
GMDPRMISLLQASTVPR

SEQ ID NO: 77904 - protein, 17 aa, Artificial Sequence
  Description of Artificial Sequence: Synthetic peptide
  Seed: GMDPRMCSLMQGSTLPR
GMDPRMISLLQGSTAPR

SEQ ID NO: 77905 - protein, 17 aa, Artificial Sequence
  Description of Artificial Sequence: Synthetic peptide
  Seed: GMDPRMCSLMQGSTLPR
GMDPRMISLLQGSTIPR

SEQ ID NO: 77906 - protein, 17 aa, Artificial Sequence
  Description of Artificial Sequence: Synthetic peptide
  Seed: GMDPRMCSLMQGSTLPR
GMDPRMISLLQGSTLPR

SEQ ID NO: 77907 - protein, 17 aa, Artificial Sequence
  Description of Artificial Sequence: Synthetic peptide
  Seed: GMDPRMCSLMQGSTLPR
GMDPRMISLLQGSTMPR

SEQ ID NO: 77908 - protein, 17 aa, Artificial Sequence
  Description of Artificial Sequence: Synthetic peptide
  Seed: GMDPRMCSLMQGSTLPR
GMDPRMISLLQGSTSPR

SEQ ID NO: 77909 - protein, 17 aa, Artificial Sequence
  Description of Artificial Sequence: Synthetic peptide
  Seed: GMDPRMCSLMQGSTLPR
GMDPRMISLLQGSTTPR

SEQ ID NO: 77910 - protein, 17 aa, Artificial Sequence
  Description of Artificial Sequence: Synthetic peptide
  Seed: GMDPRMCSLMQGSTLPR
GMDPRMISLLQGSTVPR

SEQ ID NO: 77911 - protein, 17 aa, Artificial Sequence
  Description of Artificial Sequence: Synthetic peptide
  Seed: GMDPRMCSLMQGSTLPR
GMDPRMISLLQISTAPR

SEQ ID NO: 77912 - protein, 17 aa, Artificial Sequence
  Description of Artificial Sequence: Synthetic peptide
  Seed: GMDPRMCSLMQGSTLPR
GMDPRMISLLQNSTAPR

SEQ ID NO: 77913 - protein, 17 aa, Artificial Sequence
  Description of Artificial Sequence: Synthetic peptide
  Seed: GMDPRMCSLMQGSTLPR
GMDPRMISLLQNSTIPR

SEQ ID NO: 77914 - protein, 17 aa, Artificial Sequence
  Description of Artificial Sequence: Synthetic peptide
  Seed: GMDPRMCSLMQGSTLPR
GMDPRMISLLQNSTLPR

SEQ ID NO: 77915 - protein, 17 aa, Artificial Sequence
  Description of Artificial Sequence: Synthetic peptide
  Seed: GMDPRMCSLMQGSTLPR
GMDPRMISLLQNSTVPR

SEQ ID NO: 77916 - protein, 17 aa, Artificial Sequence
  Description of Artificial Sequence: Synthetic peptide
  Seed: GMDPRMCSLMQGSTLPR
GMDPRMISLLQPSTAPR

SEQ ID NO: 77917 - protein, 17 aa, Artificial Sequence
  Description of Artificial Sequence: Synthetic peptide
  Seed: GMDPRMCSLMQGSTLPR
GMDPRMISLLQPSTIPR

SEQ ID NO: 77918 - protein, 17 aa, Artificial Sequence
  Description of Artificial Sequence: Synthetic peptide
  Seed: GMDPRMCSLMQGSTLPR
GMDPRMISLLQPSTLPR

SEQ ID NO: 77919 - protein, 17 aa, Artificial Sequence
  Description of Artificial Sequence: Synthetic peptide
  Seed: GMDPRMCSLMQGSTLPR
GMDPRMISLLQPSTMPR

SEQ ID NO: 77920 - protein, 17 aa, Artificial Sequence
  Description of Artificial Sequence: Synthetic peptide
  Seed: GMDPRMCSLMQGSTLPR
GMDPRMISLLQPSTNPR

SEQ ID NO: 77921 - protein, 17 aa, Artificial Sequence
  Description of Artificial Sequence: Synthetic peptide
  Seed: GMDPRMCSLMQGSTLPR
GMDPRMISLLQPSTSPR

SEQ ID NO: 77922 - protein, 17 aa, Artificial Sequence
  Description of Artificial Sequence: Synthetic peptide
  Seed: GMDPRMCSLMQGSTLPR
GMDPRMISLLQPSTTPR

SEQ ID NO: 77923 - protein, 17 aa, Artificial Sequence
  Description of Artificial Sequence: Synthetic peptide
  Seed: GMDPRMCSLMQGSTLPR
GMDPRMISLLQPSTVPR

SEQ ID NO: 77924 - protein, 17 aa, Artificial Sequence
  Description of Artificial Sequence: Synthetic peptide
  Seed: GMDPRMCSLMQGSTLPR
GMDPRMISLLQSSTAPR

SEQ ID NO: 77925 - protein, 17 aa, Artificial Sequence
  Description of Artificial Sequence: Synthetic peptide
  Seed: GMDPRMCSLMQGSTLPR
GMDPRMISLLQSSTIPR

SEQ ID NO: 77926 - protein, 17 aa, Artificial Sequence
  Description of Artificial Sequence: Synthetic peptide
  Seed: GMDPRMCSLMQGSTLPR
GMDPRMISLLQSSTLPR

SEQ ID NO: 77927 - protein, 17 aa, Artificial Sequence
  Description of Artificial Sequence: Synthetic peptide
  Seed: GMDPRMCSLMQGSTLPR
GMDPRMISLLQSSTMPR

SEQ ID NO: 77928 - protein, 17 aa, Artificial Sequence
  Description of Artificial Sequence: Synthetic peptide
  Seed: GMDPRMCSLMQGSTLPR
GMDPRMISLLQSSTNPR

SEQ ID NO: 77929 - protein, 17 aa, Artificial Sequence
  Description of Artificial Sequence: Synthetic peptide
  Seed: GMDPRMCSLMQGSTLPR
GMDPRMISLLQSSTSPR

SEQ ID NO: 77930 - protein, 17 aa, Artificial Sequence
  Description of Artificial Sequence: Synthetic peptide
  Seed: GMDPRMCSLMQGSTLPR
GMDPRMISLLQSSTTPR

SEQ ID NO: 77931 - protein, 17 aa, Artificial Sequence
  Description of Artificial Sequence: Synthetic peptide
  Seed: GMDPRMCSLMQGSTLPR
GMDPRMISLLQSSTVPR

SEQ ID NO: 77932 - protein, 17 aa, Artificial Sequence
  Description of Artificial Sequence: Synthetic peptide
  Seed: GMDPRMCSLMQGSTLPR
GMDPRMISLLQTSTAPR

SEQ ID NO: 77933 - protein, 17 aa, Artificial Sequence
  Description of Artificial Sequence: Synthetic peptide
  Seed: GMDPRMCSLMQGSTLPR
GMDPRMISLLQTSTIPR

SEQ ID NO: 77934 - protein, 17 aa, Artificial Sequence
  Description of Artificial Sequence: Synthetic peptide
  Seed: GMDPRMCSLMQGSTLPR
GMDPRMISLLQTSTLPR

SEQ ID NO: 77935 - protein, 17 aa, Artificial Sequence
  Description of Artificial Sequence: Synthetic peptide
  Seed: GMDPRMCSLMQGSTLPR
GMDPRMISLLQTSTNPR

SEQ ID NO: 77936 - protein, 17 aa, Artificial Sequence
  Description of Artificial Sequence: Synthetic peptide
  Seed: GMDPRMCSLMQGSTLPR
GMDPRMISLLQTSTSPR

SEQ ID NO: 77937 - protein, 17 aa, Artificial Sequence
  Description of Artificial Sequence: Synthetic peptide
  Seed: GMDPRMCSLMQGSTLPR
GMDPRMISLLQTSTVPR

SEQ ID NO: 77938 - protein, 17 aa, Artificial Sequence
  Description of Artificial Sequence: Synthetic peptide
  Seed: GMDPRMCSLMQGSTLPR
GMDPRMISLLQVSTAPR

SEQ ID NO: 77939 - protein, 17 aa, Artificial Sequence
  Description of Artificial Sequence: Synthetic peptide
  Seed: GMDPRMCSLMQGSTLPR
GMDPRMISLLQVSTNPR

SEQ ID NO: 77940 - protein, 17 aa, Artificial Sequence
  Description of Artificial Sequence: Synthetic peptide
  Seed: GMDPRMCSLMQGSTLPR
GMDPRMISLLQVSTSPR

SEQ ID NO: 77941 - protein, 17 aa, Artificial Sequence
  Description of Artificial Sequence: Synthetic peptide
  Seed: GMDPRMCSLMQGSTLPR
GMDPRMISLMQASTAPR

SEQ ID NO: 77942 - protein, 17 aa, Artificial Sequence
  Description of Artificial Sequence: Synthetic peptide
  Seed: GMDPRMCSLMQGSTLPR
GMDPRMISLMQASTIPR

SEQ ID NO: 77943 - protein, 17 aa, Artificial Sequence
  Description of Artificial Sequence: Synthetic peptide
  Seed: GMDPRMCSLMQGSTLPR
GMDPRMISLMQASTLPR

SEQ ID NO: 77944 - protein, 17 aa, Artificial Sequence
  Description of Artificial Sequence: Synthetic peptide
  Seed: GMDPRMCSLMQGSTLPR
GMDPRMISLMQASTMPR

SEQ ID NO: 77945 - protein, 17 aa, Artificial Sequence
  Description of Artificial Sequence: Synthetic peptide
  Seed: GMDPRMCSLMQGSTLPR
GMDPRMISLMQASTNPR

SEQ ID NO: 77946 - protein, 17 aa, Artificial Sequence
  Description of Artificial Sequence: Synthetic peptide
  Seed: GMDPRMCSLMQGSTLPR
GMDPRMISLMQASTSPR

SEQ ID NO: 77947 - protein, 17 aa, Artificial Sequence
  Description of Artificial Sequence: Synthetic peptide
  Seed: GMDPRMCSLMQGSTLPR
GMDPRMISLMQASTTPR

SEQ ID NO: 77948 - protein, 17 aa, Artificial Sequence
  Description of Artificial Sequence: Synthetic peptide
  Seed: GMDPRMCSLMQGSTLPR
GMDPRMISLMQASTVPR

SEQ ID NO: 77949 - protein, 17 aa, Artificial Sequence
  Description of Artificial Sequence: Synthetic peptide
  Seed: GMDPRMCSLMQGSTLPR
GMDPRMISLMQGSTAPR

SEQ ID NO: 77950 - protein, 17 aa, Artificial Sequence
  Description of Artificial Sequence: Synthetic peptide
  Seed: GMDPRMCSLMQGSTLPR
GMDPRMISLMQGSTIPR

SEQ ID NO: 77951 - protein, 17 aa, Artificial Sequence
  Description of Artificial Sequence: Synthetic peptide
  Seed: GMDPRMCSLMQGSTLPR
GMDPRMISLMQGSTLPR

SEQ ID NO: 77952 - protein, 17 aa, Artificial Sequence
  Description of Artificial Sequence: Synthetic peptide
  Seed: GMDPRMCSLMQGSTLPR
GMDPRMISLMQGSTMPR

SEQ ID NO: 77953 - protein, 17 aa, Artificial Sequence
  Description of Artificial Sequence: Synthetic peptide
  Seed: GMDPRMCSLMQGSTLPR
GMDPRMISLMQGSTSPR

SEQ ID NO: 77954 - protein, 17 aa, Artificial Sequence
  Description of Artificial Sequence: Synthetic peptide
  Seed: GMDPRMCSLMQGSTLPR
GMDPRMISLMQGSTTPR

SEQ ID NO: 77955 - protein, 17 aa, Artificial Sequence
  Description of Artificial Sequence: Synthetic peptide
  Seed: GMDPRMCSLMQGSTLPR
GMDPRMISLMQGSTVPR

SEQ ID NO: 77956 - protein, 17 aa, Artificial Sequence
  Description of Artificial Sequence: Synthetic peptide
  Seed: GMDPRMCSLMQGSTLPR
GMDPRMISLMQISTAPR

SEQ ID NO: 77957 - protein, 17 aa, Artificial Sequence
  Description of Artificial Sequence: Synthetic peptide
  Seed: GMDPRMCSLMQGSTLPR
GMDPRMISLMQISTSPR

SEQ ID NO: 77958 - protein, 17 aa, Artificial Sequence
  Description of Artificial Sequence: Synthetic peptide
  Seed: GMDPRMCSLMQGSTLPR
GMDPRMISLMQNSTIPR

SEQ ID NO: 77959 - protein, 17 aa, Artificial Sequence
  Description of Artificial Sequence: Synthetic peptide
  Seed: GMDPRMCSLMQGSTLPR
GMDPRMISLMQNSTLPR

SEQ ID NO: 77960 - protein, 17 aa, Artificial Sequence
  Description of Artificial Sequence: Synthetic peptide
  Seed: GMDPRMCSLMQGSTLPR
GMDPRMISLMQNSTVPR

SEQ ID NO: 77961 - protein, 17 aa, Artificial Sequence
  Description of Artificial Sequence: Synthetic peptide
  Seed: GMDPRMCSLMQGSTLPR
GMDPRMISLMQPSTAPR

SEQ ID NO: 77962 - protein, 17 aa, Artificial Sequence
  Description of Artificial Sequence: Synthetic peptide
  Seed: GMDPRMCSLMQGSTLPR
GMDPRMISLMQPSTIPR

SEQ ID NO: 77963 - protein, 17 aa, Artificial Sequence
  Description of Artificial Sequence: Synthetic peptide
  Seed: GMDPRMCSLMQGSTLPR
GMDPRMISLMQPSTLPR

SEQ ID NO: 77964 - protein, 17 aa, Artificial Sequence
  Description of Artificial Sequence: Synthetic peptide
  Seed: GMDPRMCSLMQGSTLPR
GMDPRMISLMQPSTMPR

SEQ ID NO: 77965 - protein, 17 aa, Artificial Sequence
  Description of Artificial Sequence: Synthetic peptide
  Seed: GMDPRMCSLMQGSTLPR
GMDPRMISLMQPSTNPR

SEQ ID NO: 77966 - protein, 17 aa, Artificial Sequence
  Description of Artificial Sequence: Synthetic peptide
  Seed: GMDPRMCSLMQGSTLPR
GMDPRMISLMQPSTSPR

SEQ ID NO: 77967 - protein, 17 aa, Artificial Sequence
  Description of Artificial Sequence: Synthetic peptide
  Seed: GMDPRMCSLMQGSTLPR
GMDPRMISLMQPSTVPR

SEQ ID NO: 77968 - protein, 17 aa, Artificial Sequence
  Description of Artificial Sequence: Synthetic peptide
  Seed: GMDPRMCSLMQGSTLPR
GMDPRMISLMQSSTAPR

SEQ ID NO: 77969 - protein, 17 aa, Artificial Sequence
  Description of Artificial Sequence: Synthetic peptide
  Seed: GMDPRMCSLMQGSTLPR
GMDPRMISLMQSSTIPR

SEQ ID NO: 77970 - protein, 17 aa, Artificial Sequence
  Description of Artificial Sequence: Synthetic peptide
  Seed: GMDPRMCSLMQGSTLPR
GMDPRMISLMQSSTLPR

SEQ ID NO: 77971 - protein, 17 aa, Artificial Sequence
  Description of Artificial Sequence: Synthetic peptide
  Seed: GMDPRMCSLMQGSTLPR
GMDPRMISLMQSSTMPR

SEQ ID NO: 77972 - protein, 17 aa, Artificial Sequence
  Description of Artificial Sequence: Synthetic peptide
  Seed: GMDPRMCSLMQGSTLPR
GMDPRMISLMQSSTSPR

SEQ ID NO: 77973 - protein, 17 aa, Artificial Sequence
  Description of Artificial Sequence: Synthetic peptide
  Seed: GMDPRMCSLMQGSTLPR
GMDPRMISLMQSSTTPR

SEQ ID NO: 77974 - protein, 17 aa, Artificial Sequence
  Description of Artificial Sequence: Synthetic peptide
  Seed: GMDPRMCSLMQGSTLPR
GMDPRMISLMQSSTVPR

SEQ ID NO: 77975 - protein, 17 aa, Artificial Sequence
  Description of Artificial Sequence: Synthetic peptide
  Seed: GMDPRMCSLMQGSTLPR
GMDPRMISLMQTSTAPR

SEQ ID NO: 77976 - protein, 17 aa, Artificial Sequence
  Description of Artificial Sequence: Synthetic peptide
  Seed: GMDPRMCSLMQGSTLPR
GMDPRMISLMQTSTIPR

SEQ ID NO: 77977 - protein, 17 aa, Artificial Sequence
  Description of Artificial Sequence: Synthetic peptide
  Seed: GMDPRMCSLMQGSTLPR
GMDPRMISLMQTSTLPR

SEQ ID NO: 77978 - protein, 17 aa, Artificial Sequence
  Description of Artificial Sequence: Synthetic peptide
  Seed: GMDPRMCSLMQGSTLPR
GMDPRMISLMQTSTSPR

SEQ ID NO: 77979 - protein, 17 aa, Artificial Sequence
  Description of Artificial Sequence: Synthetic peptide
  Seed: GMDPRMCSLMQGSTLPR
GMDPRMISLMQTSTVPR

SEQ ID NO: 77980 - protein, 17 aa, Artificial Sequence
  Description of Artificial Sequence: Synthetic peptide
  Seed: GMDPRMCSLMQGSTLPR
GMDPRMISLMQVSTAPR

SEQ ID NO: 77981 - protein, 17 aa, Artificial Sequence
  Description of Artificial Sequence: Synthetic peptide
  Seed: GMDPRMCSLMQGSTLPR
GMDPRMISLMQVSTNPR

SEQ ID NO: 77982 - protein, 17 aa, Artificial Sequence
  Description of Artificial Sequence: Synthetic peptide
  Seed: GMDPRMCSLMQGSTLPR
GMDPRMISLMQVSTSPR

SEQ ID NO: 77983 - protein, 17 aa, Artificial Sequence
  Description of Artificial Sequence: Synthetic peptide
  Seed: GMDPRMCSLMQGSTLPR
GMDPRMISLQQASTIPR

SEQ ID NO: 77984 - protein, 17 aa, Artificial Sequence
  Description of Artificial Sequence: Synthetic peptide
  Seed: GMDPRMCSLMQGSTLPR
GMDPRMISLQQASTLPR

SEQ ID NO: 77985 - protein, 17 aa, Artificial Sequence
  Description of Artificial Sequence: Synthetic peptide
  Seed: GMDPRMCSLMQGSTLPR
GMDPRMISLQQASTVPR

SEQ ID NO: 77986 - protein, 17 aa, Artificial Sequence
  Description of Artificial Sequence: Synthetic peptide
  Seed: GMDPRMCSLMQGSTLPR
GMDPRMISLVQASTLPR

SEQ ID NO: 77987 - protein, 17 aa, Artificial Sequence
  Description of Artificial Sequence: Synthetic peptide
  Seed: GMDPRMCSLMQGSTLPR
GMDPRMLSLAQASTLPR

SEQ ID NO: 77988 - protein, 17 aa, Artificial Sequence
  Description of Artificial Sequence: Synthetic peptide
  Seed: GMDPRMCSLMQGSTLPR
GMDPRMLSLAQASTVPR

SEQ ID NO: 77989 - protein, 17 aa, Artificial Sequence
  Description of Artificial Sequence: Synthetic peptide
  Seed: GMDPRMCSLMQGSTLPR
GMDPRMLSLIQASTAPR

SEQ ID NO: 77990 - protein, 17 aa, Artificial Sequence
  Description of Artificial Sequence: Synthetic peptide
  Seed: GMDPRMCSLMQGSTLPR
GMDPRMLSLIQASTIPR

SEQ ID NO: 77991 - protein, 17 aa, Artificial Sequence
  Description of Artificial Sequence: Synthetic peptide
  Seed: GMDPRMCSLMQGSTLPR
GMDPRMLSLIQASTLPR

SEQ ID NO: 77992 - protein, 17 aa, Artificial Sequence
  Description of Artificial Sequence: Synthetic peptide
  Seed: GMDPRMCSLMQGSTLPR
GMDPRMLSLIQASTNPR

SEQ ID NO: 77993 - protein, 17 aa, Artificial Sequence
  Description of Artificial Sequence: Synthetic peptide
  Seed: GMDPRMCSLMQGSTLPR
GMDPRMLSLIQASTSPR

SEQ ID NO: 77994 - protein, 17 aa, Artificial Sequence
  Description of Artificial Sequence: Synthetic peptide
  Seed: GMDPRMCSLMQGSTLPR
GMDPRMLSLIQASTVPR

SEQ ID NO: 77995 - protein, 17 aa, Artificial Sequence
  Description of Artificial Sequence: Synthetic peptide
  Seed: GMDPRMCSLMQGSTLPR
GMDPRMLSLIQGSTAPR

SEQ ID NO: 77996 - protein, 17 aa, Artificial Sequence
  Description of Artificial Sequence: Synthetic peptide
  Seed: GMDPRMCSLMQGSTLPR
GMDPRMLSLIQGSTIPR

SEQ ID NO: 77997 - protein, 17 aa, Artificial Sequence
  Description of Artificial Sequence: Synthetic peptide
  Seed: GMDPRMCSLMQGSTLPR
GMDPRMLSLIQGSTLPR

SEQ ID NO: 77998 - protein, 17 aa, Artificial Sequence
  Description of Artificial Sequence: Synthetic peptide
  Seed: GMDPRMCSLMQGSTLPR
GMDPRMLSLIQGSTVPR

SEQ ID NO: 77999 - protein, 17 aa, Artificial Sequence
  Description of Artificial Sequence: Synthetic peptide
  Seed: GMDPRMCSLMQGSTLPR
GMDPRMLSLLQASTAPR

SEQ ID NO: 78000 - protein, 17 aa, Artificial Sequence
  Description of Artificial Sequence: Synthetic peptide
  Seed: GMDPRMCSLMQGSTLPR
GMDPRMLSLLQASTIPR

SEQ ID NO: 78001 - protein, 17 aa, Artificial Sequence
  Description of Artificial Sequence: Synthetic peptide
  Seed: GMDPRMCSLMQGSTLPR
GMDPRMLSLLQASTLPR

SEQ ID NO: 78002 - protein, 17 aa, Artificial Sequence
  Description of Artificial Sequence: Synthetic peptide
  Seed: GMDPRMCSLMQGSTLPR
GMDPRMLSLLQASTMPR

SEQ ID NO: 78003 - protein, 17 aa, Artificial Sequence
  Description of Artificial Sequence: Synthetic peptide
  Seed: GMDPRMCSLMQGSTLPR
GMDPRMLSLLQASTNPR

SEQ ID NO: 78004 - protein, 17 aa, Artificial Sequence
  Description of Artificial Sequence: Synthetic peptide
  Seed: GMDPRMCSLMQGSTLPR
GMDPRMLSLLQASTSPR

SEQ ID NO: 78005 - protein, 17 aa, Artificial Sequence
  Description of Artificial Sequence: Synthetic peptide
  Seed: GMDPRMCSLMQGSTLPR
GMDPRMLSLLQASTTPR

SEQ ID NO: 78006 - protein, 17 aa, Artificial Sequence
  Description of Artificial Sequence: Synthetic peptide
  Seed: GMDPRMCSLMQGSTLPR
GMDPRMLSLLQASTVPR

SEQ ID NO: 78007 - protein, 17 aa, Artificial Sequence
  Description of Artificial Sequence: Synthetic peptide
  Seed: GMDPRMCSLMQGSTLPR
GMDPRMLSLLQGSTAPR

SEQ ID NO: 78008 - protein, 17 aa, Artificial Sequence
  Description of Artificial Sequence: Synthetic peptide
  Seed: GMDPRMCSLMQGSTLPR
GMDPRMLSLLQGSTIPR

SEQ ID NO: 78009 - protein, 17 aa, Artificial Sequence
  Description of Artificial Sequence: Synthetic peptide
  Seed: GMDPRMCSLMQGSTLPR
GMDPRMLSLLQGSTLPR

SEQ ID NO: 78010 - protein, 17 aa, Artificial Sequence
  Description of Artificial Sequence: Synthetic peptide
  Seed: GMDPRMCSLMQGSTLPR
GMDPRMLSLLQGSTMPR

SEQ ID NO: 78011 - protein, 17 aa, Artificial Sequence
  Description of Artificial Sequence: Synthetic peptide
  Seed: GMDPRMCSLMQGSTLPR
GMDPRMLSLLQGSTSPR

SEQ ID NO: 78012 - protein, 17 aa, Artificial Sequence
  Description of Artificial Sequence: Synthetic peptide
  Seed: GMDPRMCSLMQGSTLPR
GMDPRMLSLLQGSTTPR

SEQ ID NO: 78013 - protein, 17 aa, Artificial Sequence
  Description of Artificial Sequence: Synthetic peptide
  Seed: GMDPRMCSLMQGSTLPR
GMDPRMLSLLQGSTVPR

SEQ ID NO: 78014 - protein, 17 aa, Artificial Sequence
  Description of Artificial Sequence: Synthetic peptide
  Seed: GMDPRMCSLMQGSTLPR
GMDPRMLSLLQPSTAPR

SEQ ID NO: 78015 - protein, 17 aa, Artificial Sequence
  Description of Artificial Sequence: Synthetic peptide
  Seed: GMDPRMCSLMQGSTLPR
GMDPRMLSLLQPSTIPR

SEQ ID NO: 78016 - protein, 17 aa, Artificial Sequence
  Description of Artificial Sequence: Synthetic peptide
  Seed: GMDPRMCSLMQGSTLPR
GMDPRMLSLLQPSTLPR

SEQ ID NO: 78017 - protein, 17 aa, Artificial Sequence
  Description of Artificial Sequence: Synthetic peptide
  Seed: GMDPRMCSLMQGSTLPR
GMDPRMLSLLQPSTNPR

SEQ ID NO: 78018 - protein, 17 aa, Artificial Sequence
  Description of Artificial Sequence: Synthetic peptide
  Seed: GMDPRMCSLMQGSTLPR
GMDPRMLSLLQPSTSPR

SEQ ID NO: 78019 - protein, 17 aa, Artificial Sequence
  Description of Artificial Sequence: Synthetic peptide
  Seed: GMDPRMCSLMQGSTLPR
GMDPRMLSLLQPSTTPR

SEQ ID NO: 78020 - protein, 17 aa, Artificial Sequence
  Description of Artificial Sequence: Synthetic peptide
  Seed: GMDPRMCSLMQGSTLPR
GMDPRMLSLLQPSTVPR

SEQ ID NO: 78021 - protein, 17 aa, Artificial Sequence
  Description of Artificial Sequence: Synthetic peptide
  Seed: GMDPRMCSLMQGSTLPR
GMDPRMLSLLQSSTAPR

SEQ ID NO: 78022 - protein, 17 aa, Artificial Sequence
  Description of Artificial Sequence: Synthetic peptide
  Seed: GMDPRMCSLMQGSTLPR
GMDPRMLSLLQSSTIPR

SEQ ID NO: 78023 - protein, 17 aa, Artificial Sequence
  Description of Artificial Sequence: Synthetic peptide
  Seed: GMDPRMCSLMQGSTLPR
GMDPRMLSLLQSSTLPR

SEQ ID NO: 78024 - protein, 17 aa, Artificial Sequence
  Description of Artificial Sequence: Synthetic peptide
  Seed: GMDPRMCSLMQGSTLPR
GMDPRMLSLLQSSTMPR

SEQ ID NO: 78025 - protein, 17 aa, Artificial Sequence
  Description of Artificial Sequence: Synthetic peptide
  Seed: GMDPRMCSLMQGSTLPR
GMDPRMLSLLQSSTNPR

SEQ ID NO: 78026 - protein, 17 aa, Artificial Sequence
  Description of Artificial Sequence: Synthetic peptide
  Seed: GMDPRMCSLMQGSTLPR
GMDPRMLSLLQSSTSPR

SEQ ID NO: 78027 - protein, 17 aa, Artificial Sequence
  Description of Artificial Sequence: Synthetic peptide
  Seed: GMDPRMCSLMQGSTLPR
GMDPRMLSLLQSSTTPR

SEQ ID NO: 78028 - protein, 17 aa, Artificial Sequence
  Description of Artificial Sequence: Synthetic peptide
  Seed: GMDPRMCSLMQGSTLPR
GMDPRMLSLLQSSTVPR

SEQ ID NO: 78029 - protein, 17 aa, Artificial Sequence
  Description of Artificial Sequence: Synthetic peptide
  Seed: GMDPRMCSLMQGSTLPR
GMDPRMLSLLQTSTAPR

SEQ ID NO: 78030 - protein, 17 aa, Artificial Sequence
  Description of Artificial Sequence: Synthetic peptide
  Seed: GMDPRMCSLMQGSTLPR
GMDPRMLSLLQTSTLPR

SEQ ID NO: 78031 - protein, 17 aa, Artificial Sequence
  Description of Artificial Sequence: Synthetic peptide
  Seed: GMDPRMCSLMQGSTLPR
GMDPRMLSLLQTSTNPR

SEQ ID NO: 78032 - protein, 17 aa, Artificial Sequence
  Description of Artificial Sequence: Synthetic peptide
  Seed: GMDPRMCSLMQGSTLPR
GMDPRMLSLLQTSTSPR

SEQ ID NO: 78033 - protein, 17 aa, Artificial Sequence
  Description of Artificial Sequence: Synthetic peptide
  Seed: GMDPRMCSLMQGSTLPR
GMDPRMLSLLQTSTVPR

SEQ ID NO: 78034 - protein, 17 aa, Artificial Sequence
  Description of Artificial Sequence: Synthetic peptide
  Seed: GMDPRMCSLMQGSTLPR
GMDPRMLSLLQVSTAPR

SEQ ID NO: 78035 - protein, 17 aa, Artificial Sequence
  Description of Artificial Sequence: Synthetic peptide
  Seed: GMDPRMCSLMQGSTLPR
GMDPRMLSLLQVSTNPR

SEQ ID NO: 78036 - protein, 17 aa, Artificial Sequence
  Description of Artificial Sequence: Synthetic peptide
  Seed: GMDPRMCSLMQGSTLPR
GMDPRMLSLLQVSTSPR

SEQ ID NO: 78037 - protein, 17 aa, Artificial Sequence
  Description of Artificial Sequence: Synthetic peptide
  Seed: GMDPRMCSLMQGSTLPR
GMDPRMLSLMQASTAPR

SEQ ID NO: 78038 - protein, 17 aa, Artificial Sequence
  Description of Artificial Sequence: Synthetic peptide
  Seed: GMDPRMCSLMQGSTLPR
GMDPRMLSLMQASTIPR

SEQ ID NO: 78039 - protein, 17 aa, Artificial Sequence
  Description of Artificial Sequence: Synthetic peptide
  Seed: GMDPRMCSLMQGSTLPR
GMDPRMLSLMQASTLPR

SEQ ID NO: 78040 - protein, 17 aa, Artificial Sequence
  Description of Artificial Sequence: Synthetic peptide
  Seed: GMDPRMCSLMQGSTLPR
GMDPRMLSLMQASTMPR

SEQ ID NO: 78041 - protein, 17 aa, Artificial Sequence
  Description of Artificial Sequence: Synthetic peptide
  Seed: GMDPRMCSLMQGSTLPR
GMDPRMLSLMQASTNPR

SEQ ID NO: 78042 - protein, 17 aa, Artificial Sequence
  Description of Artificial Sequence: Synthetic peptide
  Seed: GMDPRMCSLMQGSTLPR
GMDPRMLSLMQASTSPR

SEQ ID NO: 78043 - protein, 17 aa, Artificial Sequence
  Description of Artificial Sequence: Synthetic peptide
  Seed: GMDPRMCSLMQGSTLPR
GMDPRMLSLMQASTTPR

SEQ ID NO: 78044 - protein, 17 aa, Artificial Sequence
  Description of Artificial Sequence: Synthetic peptide
  Seed: GMDPRMCSLMQGSTLPR
GMDPRMLSLMQASTVPR

SEQ ID NO: 78045 - protein, 17 aa, Artificial Sequence
  Description of Artificial Sequence: Synthetic peptide
  Seed: GMDPRMCSLMQGSTLPR
GMDPRMLSLMQGSTAPR

SEQ ID NO: 78046 - protein, 17 aa, Artificial Sequence
  Description of Artificial Sequence: Synthetic peptide
  Seed: GMDPRMCSLMQGSTLPR
GMDPRMLSLMQGSTIPR

SEQ ID NO: 78047 - protein, 17 aa, Artificial Sequence
  Description of Artificial Sequence: Synthetic peptide
  Seed: GMDPRMCSLMQGSTLPR
GMDPRMLSLMQGSTLPR

SEQ ID NO: 78048 - protein, 17 aa, Artificial Sequence
  Description of Artificial Sequence: Synthetic peptide
  Seed: GMDPRMCSLMQGSTLPR
GMDPRMLSLMQGSTMPR

SEQ ID NO: 78049 - protein, 17 aa, Artificial Sequence
  Description of Artificial Sequence: Synthetic peptide
  Seed: GMDPRMCSLMQGSTLPR
GMDPRMLSLMQGSTSPR

SEQ ID NO: 78050 - protein, 17 aa, Artificial Sequence
  Description of Artificial Sequence: Synthetic peptide
  Seed: GMDPRMCSLMQGSTLPR
GMDPRMLSLMQGSTTPR

SEQ ID NO: 78051 - protein, 17 aa, Artificial Sequence
  Description of Artificial Sequence: Synthetic peptide
  Seed: GMDPRMCSLMQGSTLPR
GMDPRMLSLMQGSTVPR

SEQ ID NO: 78052 - protein, 17 aa, Artificial Sequence
  Description of Artificial Sequence: Synthetic peptide
  Seed: GMDPRMCSLMQGSTLPR
GMDPRMLSLMQISTAPR

SEQ ID NO: 78053 - protein, 17 aa, Artificial Sequence
  Description of Artificial Sequence: Synthetic peptide
  Seed: GMDPRMCSLMQGSTLPR
GMDPRMLSLMQISTSPR

SEQ ID NO: 78054 - protein, 17 aa, Artificial Sequence
  Description of Artificial Sequence: Synthetic peptide
  Seed: GMDPRMCSLMQGSTLPR
GMDPRMLSLMQPSTAPR

SEQ ID NO: 78055 - protein, 17 aa, Artificial Sequence
  Description of Artificial Sequence: Synthetic peptide
  Seed: GMDPRMCSLMQGSTLPR
GMDPRMLSLMQPSTIPR

SEQ ID NO: 78056 - protein, 17 aa, Artificial Sequence
  Description of Artificial Sequence: Synthetic peptide
  Seed: GMDPRMCSLMQGSTLPR
GMDPRMLSLMQPSTLPR

SEQ ID NO: 78057 - protein, 17 aa, Artificial Sequence
  Description of Artificial Sequence: Synthetic peptide
  Seed: GMDPRMCSLMQGSTLPR
GMDPRMLSLMQPSTNPR

SEQ ID NO: 78058 - protein, 17 aa, Artificial Sequence
  Description of Artificial Sequence: Synthetic peptide
  Seed: GMDPRMCSLMQGSTLPR
GMDPRMLSLMQPSTSPR

SEQ ID NO: 78059 - protein, 17 aa, Artificial Sequence
  Description of Artificial Sequence: Synthetic peptide
  Seed: GMDPRMCSLMQGSTLPR
GMDPRMLSLMQPSTVPR

SEQ ID NO: 78060 - protein, 17 aa, Artificial Sequence
  Description of Artificial Sequence: Synthetic peptide
  Seed: GMDPRMCSLMQGSTLPR
GMDPRMLSLMQSSTAPR

SEQ ID NO: 78061 - protein, 17 aa, Artificial Sequence
  Description of Artificial Sequence: Synthetic peptide
  Seed: GMDPRMCSLMQGSTLPR
GMDPRMLSLMQSSTIPR

SEQ ID NO: 78062 - protein, 17 aa, Artificial Sequence
  Description of Artificial Sequence: Synthetic peptide
  Seed: GMDPRMCSLMQGSTLPR
GMDPRMLSLMQSSTLPR

SEQ ID NO: 78063 - protein, 17 aa, Artificial Sequence
  Description of Artificial Sequence: Synthetic peptide
  Seed: GMDPRMCSLMQGSTLPR
GMDPRMLSLMQSSTMPR

SEQ ID NO: 78064 - protein, 17 aa, Artificial Sequence
  Description of Artificial Sequence: Synthetic peptide
  Seed: GMDPRMCSLMQGSTLPR
GMDPRMLSLMQSSTNPR

SEQ ID NO: 78065 - protein, 17 aa, Artificial Sequence
  Description of Artificial Sequence: Synthetic peptide
  Seed: GMDPRMCSLMQGSTLPR
GMDPRMLSLMQSSTSPR

SEQ ID NO: 78066 - protein, 17 aa, Artificial Sequence
  Description of Artificial Sequence: Synthetic peptide
  Seed: GMDPRMCSLMQGSTLPR
GMDPRMLSLMQSSTTPR

SEQ ID NO: 78067 - protein, 17 aa, Artificial Sequence
  Description of Artificial Sequence: Synthetic peptide
  Seed: GMDPRMCSLMQGSTLPR
GMDPRMLSLMQSSTVPR

SEQ ID NO: 78068 - protein, 17 aa, Artificial Sequence
  Description of Artificial Sequence: Synthetic peptide
  Seed: GMDPRMCSLMQGSTLPR
GMDPRMLSLMQTSTAPR

SEQ ID NO: 78069 - protein, 17 aa, Artificial Sequence
  Description of Artificial Sequence: Synthetic peptide
  Seed: GMDPRMCSLMQGSTLPR
GMDPRMLSLMQTSTSPR

SEQ ID NO: 78070 - protein, 17 aa, Artificial Sequence
  Description of Artificial Sequence: Synthetic peptide
  Seed: GMDPRMCSLMQGSTLPR
GMDPRMLSLMQVSTAPR

SEQ ID NO: 78071 - protein, 17 aa, Artificial Sequence
  Description of Artificial Sequence: Synthetic peptide
  Seed: GMDPRMCSLMQGSTLPR
GMDPRMLSLMQVSTNPR

SEQ ID NO: 78072 - protein, 17 aa, Artificial Sequence
  Description of Artificial Sequence: Synthetic peptide
  Seed: GMDPRMCSLMQGSTLPR
GMDPRMLSLMQVSTSPR

SEQ ID NO: 78073 - protein, 17 aa, Artificial Sequence
  Description of Artificial Sequence: Synthetic peptide
  Seed: GMDPRMCSLMQGSTLPR
GMDPRMLSLQQASTLPR

SEQ ID NO: 78074 - protein, 17 aa, Artificial Sequence
  Description of Artificial Sequence: Synthetic peptide
  Seed: GMDPRMCSLMQGSTLPR
GMDPRMMSLIQASTAPR

SEQ ID NO: 78075 - protein, 17 aa, Artificial Sequence
  Description of Artificial Sequence: Synthetic peptide
  Seed: GMDPRMCSLMQGSTLPR
GMDPRMMSLLQASTAPR

SEQ ID NO: 78076 - protein, 17 aa, Artificial Sequence
  Description of Artificial Sequence: Synthetic peptide
  Seed: GMDPRMCSLMQGSTLPR
GMDPRMMSLLQASTIPR

SEQ ID NO: 78077 - protein, 17 aa, Artificial Sequence
  Description of Artificial Sequence: Synthetic peptide
  Seed: GMDPRMCSLMQGSTLPR
GMDPRMMSLLQASTLPR

SEQ ID NO: 78078 - protein, 17 aa, Artificial Sequence
  Description of Artificial Sequence: Synthetic peptide
  Seed: GMDPRMCSLMQGSTLPR
GMDPRMMSLLQASTMPR

SEQ ID NO: 78079 - protein, 17 aa, Artificial Sequence
  Description of Artificial Sequence: Synthetic peptide
  Seed: GMDPRMCSLMQGSTLPR
GMDPRMMSLLQASTNPR

SEQ ID NO: 78080 - protein, 17 aa, Artificial Sequence
  Description of Artificial Sequence: Synthetic peptide
  Seed: GMDPRMCSLMQGSTLPR
GMDPRMMSLLQASTSPR

SEQ ID NO: 78081 - protein, 17 aa, Artificial Sequence
  Description of Artificial Sequence: Synthetic peptide
  Seed: GMDPRMCSLMQGSTLPR
GMDPRMMSLLQASTTPR

SEQ ID NO: 78082 - protein, 17 aa, Artificial Sequence
  Description of Artificial Sequence: Synthetic peptide
  Seed: GMDPRMCSLMQGSTLPR
GMDPRMMSLLQASTVPR

SEQ ID NO: 78083 - protein, 17 aa, Artificial Sequence
  Description of Artificial Sequence: Synthetic peptide
  Seed: GMDPRMCSLMQGSTLPR
GMDPRMMSLLQGSTAPR

SEQ ID NO: 78084 - protein, 17 aa, Artificial Sequence
  Description of Artificial Sequence: Synthetic peptide
  Seed: GMDPRMCSLMQGSTLPR
GMDPRMMSLLQGSTIPR

SEQ ID NO: 78085 - protein, 17 aa, Artificial Sequence
  Description of Artificial Sequence: Synthetic peptide
  Seed: GMDPRMCSLMQGSTLPR
GMDPRMMSLLQGSTLPR

SEQ ID NO: 78086 - protein, 17 aa, Artificial Sequence
  Description of Artificial Sequence: Synthetic peptide
  Seed: GMDPRMCSLMQGSTLPR
GMDPRMMSLLQGSTVPR

SEQ ID NO: 78087 - protein, 17 aa, Artificial Sequence
  Description of Artificial Sequence: Synthetic peptide
  Seed: GMDPRMCSLMQGSTLPR
GMDPRMMSLLQPSTAPR

SEQ ID NO: 78088 - protein, 17 aa, Artificial Sequence
  Description of Artificial Sequence: Synthetic peptide
  Seed: GMDPRMCSLMQGSTLPR
GMDPRMMSLLQPSTLPR

SEQ ID NO: 78089 - protein, 17 aa, Artificial Sequence
  Description of Artificial Sequence: Synthetic peptide
  Seed: GMDPRMCSLMQGSTLPR
GMDPRMMSLLQPSTVPR

SEQ ID NO: 78090 - protein, 17 aa, Artificial Sequence
  Description of Artificial Sequence: Synthetic peptide
  Seed: GMDPRMCSLMQGSTLPR
GMDPRMMSLLQSSTAPR

SEQ ID NO: 78091 - protein, 17 aa, Artificial Sequence
  Description of Artificial Sequence: Synthetic peptide
  Seed: GMDPRMCSLMQGSTLPR
GMDPRMMSLLQSSTIPR

SEQ ID NO: 78092 - protein, 17 aa, Artificial Sequence
  Description of Artificial Sequence: Synthetic peptide
  Seed: GMDPRMCSLMQGSTLPR
GMDPRMMSLLQSSTLPR

SEQ ID NO: 78093 - protein, 17 aa, Artificial Sequence
  Description of Artificial Sequence: Synthetic peptide
  Seed: GMDPRMCSLMQGSTLPR
GMDPRMMSLLQSSTVPR

SEQ ID NO: 78094 - protein, 17 aa, Artificial Sequence
  Description of Artificial Sequence: Synthetic peptide
  Seed: GMDPRMCSLMQGSTLPR
GMDPRMMSLLQVSTAPR

SEQ ID NO: 78095 - protein, 17 aa, Artificial Sequence
  Description of Artificial Sequence: Synthetic peptide
  Seed: GMDPRMCSLMQGSTLPR
GMDPRMMSLMQASTAPR

SEQ ID NO: 78096 - protein, 17 aa, Artificial Sequence
  Description of Artificial Sequence: Synthetic peptide
  Seed: GMDPRMCSLMQGSTLPR
GMDPRMMSLMQASTIPR

SEQ ID NO: 78097 - protein, 17 aa, Artificial Sequence
  Description of Artificial Sequence: Synthetic peptide
  Seed: GMDPRMCSLMQGSTLPR
GMDPRMMSLMQASTLPR

SEQ ID NO: 78098 - protein, 17 aa, Artificial Sequence
  Description of Artificial Sequence: Synthetic peptide
  Seed: GMDPRMCSLMQGSTLPR
GMDPRMMSLMQASTMPR

SEQ ID NO: 78099 - protein, 17 aa, Artificial Sequence
  Description of Artificial Sequence: Synthetic peptide
  Seed: GMDPRMCSLMQGSTLPR
GMDPRMMSLMQASTNPR

SEQ ID NO: 78100 - protein, 17 aa, Artificial Sequence
  Description of Artificial Sequence: Synthetic peptide
  Seed: GMDPRMCSLMQGSTLPR
GMDPRMMSLMQASTSPR

SEQ ID NO: 78101 - protein, 17 aa, Artificial Sequence
  Description of Artificial Sequence: Synthetic peptide
  Seed: GMDPRMCSLMQGSTLPR
GMDPRMMSLMQASTVPR

SEQ ID NO: 78102 - protein, 17 aa, Artificial Sequence
  Description of Artificial Sequence: Synthetic peptide
  Seed: GMDPRMCSLMQGSTLPR
GMDPRMMSLMQGSTAPR

SEQ ID NO: 78103 - protein, 17 aa, Artificial Sequence
  Description of Artificial Sequence: Synthetic peptide
  Seed: GMDPRMCSLMQGSTLPR
GMDPRMMSLMQGSTIPR

SEQ ID NO: 78104 - protein, 17 aa, Artificial Sequence
  Description of Artificial Sequence: Synthetic peptide
  Seed: GMDPRMCSLMQGSTLPR
GMDPRMMSLMQGSTLPR

SEQ ID NO: 78105 - protein, 17 aa, Artificial Sequence
  Description of Artificial Sequence: Synthetic peptide
  Seed: GMDPRMCSLMQGSTLPR
GMDPRMMSLMQGSTVPR

SEQ ID NO: 78106 - protein, 17 aa, Artificial Sequence
  Description of Artificial Sequence: Synthetic peptide
  Seed: GMDPRMCSLMQGSTLPR
GMDPRMMSLMQISTAPR

SEQ ID NO: 78107 - protein, 17 aa, Artificial Sequence
  Description of Artificial Sequence: Synthetic peptide
  Seed: GMDPRMCSLMQGSTLPR
GMDPRMMSLMQPSTAPR

SEQ ID NO: 78108 - protein, 17 aa, Artificial Sequence
  Description of Artificial Sequence: Synthetic peptide
  Seed: GMDPRMCSLMQGSTLPR
GMDPRMMSLMQSSTAPR

SEQ ID NO: 78109 - protein, 17 aa, Artificial Sequence
  Description of Artificial Sequence: Synthetic peptide
  Seed: GMDPRMCSLMQGSTLPR
GMDPRMMSLMQSSTIPR

SEQ ID NO: 78110 - protein, 17 aa, Artificial Sequence
  Description of Artificial Sequence: Synthetic peptide
  Seed: GMDPRMCSLMQGSTLPR
GMDPRMMSLMQSSTLPR

SEQ ID NO: 78111 - protein, 17 aa, Artificial Sequence
  Description of Artificial Sequence: Synthetic peptide
  Seed: GMDPRMCSLMQGSTLPR
GMDPRMMSLMQSSTVPR

SEQ ID NO: 78112 - protein, 17 aa, Artificial Sequence
  Description of Artificial Sequence: Synthetic peptide
  Seed: GMDPRMCSLMQGSTLPR
GMDPRMMSLMQVSTAPR

SEQ ID NO: 78113 - protein, 17 aa, Artificial Sequence
  Description of Artificial Sequence: Synthetic peptide
  Seed: GMDPRMCSLMQGSTLPR
GMDPRMVSLLQASTAPR

SEQ ID NO: 78114 - protein, 17 aa, Artificial Sequence
  Description of Artificial Sequence: Synthetic peptide
  Seed: GMDPRMCSLMQGSTLPR
GMDPRMVSLLQASTIPR

SEQ ID NO: 78115 - protein, 17 aa, Artificial Sequence
  Description of Artificial Sequence: Synthetic peptide
  Seed: GMDPRMCSLMQGSTLPR
GMDPRMVSLLQASTLPR

SEQ ID NO: 78116 - protein, 17 aa, Artificial Sequence
  Description of Artificial Sequence: Synthetic peptide
  Seed: GMDPRMCSLMQGSTLPR
GMDPRMVSLLQASTVPR

SEQ ID NO: 78117 - protein, 17 aa, Artificial Sequence
  Description of Artificial Sequence: Synthetic peptide
  Seed: GMDPRMCSLMQGSTLPR
GMDPRMVSLLQGSTAPR

SEQ ID NO: 78118 - protein, 17 aa, Artificial Sequence
  Description of Artificial Sequence: Synthetic peptide
  Seed: GMDPRMCSLMQGSTLPR
GMDPRMVSLLQGSTIPR

SEQ ID NO: 78119 - protein, 17 aa, Artificial Sequence
  Description of Artificial Sequence: Synthetic peptide
  Seed: GMDPRMCSLMQGSTLPR
GMDPRMVSLLQGSTLPR

SEQ ID NO: 78120 - protein, 17 aa, Artificial Sequence
  Description of Artificial Sequence: Synthetic peptide
  Seed: GMDPRMCSLMQGSTLPR
GMDPRMVSLLQGSTVPR

SEQ ID NO: 78121 - protein, 17 aa, Artificial Sequence
  Description of Artificial Sequence: Synthetic peptide
  Seed: GMDPRMCSLMQGSTLPR
GMDPRMVSLLQPSTLPR

SEQ ID NO: 78122 - protein, 17 aa, Artificial Sequence
  Description of Artificial Sequence: Synthetic peptide
  Seed: GMDPRMCSLMQGSTLPR
GMDPRMVSLLQPSTVPR

SEQ ID NO: 78123 - protein, 17 aa, Artificial Sequence
  Description of Artificial Sequence: Synthetic peptide
  Seed: GMDPRMCSLMQGSTLPR
GMDPRMVSLLQSSTAPR

SEQ ID NO: 78124 - protein, 17 aa, Artificial Sequence
  Description of Artificial Sequence: Synthetic peptide
  Seed: GMDPRMCSLMQGSTLPR
GMDPRMVSLLQSSTIPR

SEQ ID NO: 78125 - protein, 17 aa, Artificial Sequence
  Description of Artificial Sequence: Synthetic peptide
  Seed: GMDPRMCSLMQGSTLPR
GMDPRMVSLLQSSTLPR

SEQ ID NO: 78126 - protein, 17 aa, Artificial Sequence
  Description of Artificial Sequence: Synthetic peptide
  Seed: GMDPRMCSLMQGSTLPR
GMDPRMVSLLQSSTVPR

SEQ ID NO: 78127 - protein, 17 aa, Artificial Sequence
  Description of Artificial Sequence: Synthetic peptide
  Seed: GMDPRMCSLMQGSTLPR
GMDPRMVSLMQASTAPR

SEQ ID NO: 78128 - protein, 17 aa, Artificial Sequence
  Description of Artificial Sequence: Synthetic peptide
  Seed: GMDPRMCSLMQGSTLPR
GMDPRMVSLMQASTIPR

SEQ ID NO: 78129 - protein, 17 aa, Artificial Sequence
  Description of Artificial Sequence: Synthetic peptide
  Seed: GMDPRMCSLMQGSTLPR
GMDPRMVSLMQASTLPR

SEQ ID NO: 78130 - protein, 17 aa, Artificial Sequence
  Description of Artificial Sequence: Synthetic peptide
  Seed: GMDPRMCSLMQGSTLPR
GMDPRMVSLMQASTVPR

SEQ ID NO: 78131 - protein, 17 aa, Artificial Sequence
  Description of Artificial Sequence: Synthetic peptide
  Seed: GMDPRMCSLMQGSTLPR
GMDPRMVSLMQGSTAPR

SEQ ID NO: 78132 - protein, 17 aa, Artificial Sequence
  Description of Artificial Sequence: Synthetic peptide
  Seed: GMDPRMCSLMQGSTLPR
GMDPRMVSLMQGSTIPR

SEQ ID NO: 78133 - protein, 17 aa, Artificial Sequence
  Description of Artificial Sequence: Synthetic peptide
  Seed: GMDPRMCSLMQGSTLPR
GMDPRMVSLMQGSTLPR

SEQ ID NO: 78134 - protein, 17 aa, Artificial Sequence
  Description of Artificial Sequence: Synthetic peptide
  Seed: GMDPRMCSLMQGSTLPR
GMDPRMVSLMQGSTVPR

SEQ ID NO: 78135 - protein, 17 aa, Artificial Sequence
  Description of Artificial Sequence: Synthetic peptide
  Seed: GMDPRMCSLMQGSTLPR
GMDPRMVSLMQSSTIPR

SEQ ID NO: 78136 - protein, 17 aa, Artificial Sequence
  Description of Artificial Sequence: Synthetic peptide
  Seed: GMDPRMCSLMQGSTLPR
GMDPRMVSLMQSSTLPR

SEQ ID NO: 78137 - protein, 17 aa, Artificial Sequence
  Description of Artificial Sequence: Synthetic peptide
  Seed: GMDPRMCSLMQGSTLPR
GMDPRMVSLMQSSTVPR

SEQ ID NO: 78138 - protein, 17 aa, Artificial Sequence
  Description of Artificial Sequence: Synthetic peptide
  Seed: GMDPRMCSLMQGSTLPR
GMDPRMWSLAQASTAPR

SEQ ID NO: 78139 - protein, 17 aa, Artificial Sequence
  Description of Artificial Sequence: Synthetic peptide
  Seed: GMDPRMCSLMQGSTLPR
GMDPRMWSLAQASTIPR

SEQ ID NO: 78140 - protein, 17 aa, Artificial Sequence
  Description of Artificial Sequence: Synthetic peptide
  Seed: GMDPRMCSLMQGSTLPR
GMDPRMWSLAQASTLPR

SEQ ID NO: 78141 - protein, 17 aa, Artificial Sequence
  Description of Artificial Sequence: Synthetic peptide
  Seed: GMDPRMCSLMQGSTLPR
GMDPRMWSLAQASTSPR

SEQ ID NO: 78142 - protein, 17 aa, Artificial Sequence
  Description of Artificial Sequence: Synthetic peptide
  Seed: GMDPRMCSLMQGSTLPR
GMDPRMWSLAQASTVPR

SEQ ID NO: 78143 - protein, 17 aa, Artificial Sequence
  Description of Artificial Sequence: Synthetic peptide
  Seed: GMDPRMCSLMQGSTLPR
GMDPRMWSLAQGSTAPR

SEQ ID NO: 78144 - protein, 17 aa, Artificial Sequence
  Description of Artificial Sequence: Synthetic peptide
  Seed: GMDPRMCSLMQGSTLPR
GMDPRMWSLAQGSTIPR

SEQ ID NO: 78145 - protein, 17 aa, Artificial Sequence
  Description of Artificial Sequence: Synthetic peptide
  Seed: GMDPRMCSLMQGSTLPR
GMDPRMWSLAQGSTLPR

SEQ ID NO: 78146 - protein, 17 aa, Artificial Sequence
  Description of Artificial Sequence: Synthetic peptide
  Seed: GMDPRMCSLMQGSTLPR
GMDPRMWSLAQGSTVPR

SEQ ID NO: 78147 - protein, 17 aa, Artificial Sequence
  Description of Artificial Sequence: Synthetic peptide
  Seed: GMDPRMCSLMQGSTLPR
GMDPRMWSLAQSSTIPR

SEQ ID NO: 78148 - protein, 17 aa, Artificial Sequence
  Description of Artificial Sequence: Synthetic peptide
  Seed: GMDPRMCSLMQGSTLPR
GMDPRMWSLAQSSTLPR

SEQ ID NO: 78149 - protein, 17 aa, Artificial Sequence
  Description of Artificial Sequence: Synthetic peptide
  Seed: GMDPRMCSLMQGSTLPR
GMDPRMWSLAQSSTVPR

SEQ ID NO: 78150 - protein, 17 aa, Artificial Sequence
  Description of Artificial Sequence: Synthetic peptide
  Seed: GMDPRMCSLMQGSTLPR
GMDPRMWSLAQVSTAPR

SEQ ID NO: 78151 - protein, 17 aa, Artificial Sequence
  Description of Artificial Sequence: Synthetic peptide
  Seed: GMDPRMCSLMQGSTLPR
GMDPRMWSLIQASTAPR

SEQ ID NO: 78152 - protein, 17 aa, Artificial Sequence
  Description of Artificial Sequence: Synthetic peptide
  Seed: GMDPRMCSLMQGSTLPR
GMDPRMWSLIQASTIPR

SEQ ID NO: 78153 - protein, 17 aa, Artificial Sequence
  Description of Artificial Sequence: Synthetic peptide
  Seed: GMDPRMCSLMQGSTLPR
GMDPRMWSLIQASTLPR

SEQ ID NO: 78154 - protein, 17 aa, Artificial Sequence
  Description of Artificial Sequence: Synthetic peptide
  Seed: GMDPRMCSLMQGSTLPR
GMDPRMWSLIQASTMPR

SEQ ID NO: 78155 - protein, 17 aa, Artificial Sequence
  Description of Artificial Sequence: Synthetic peptide
  Seed: GMDPRMCSLMQGSTLPR
GMDPRMWSLIQASTNPR

SEQ ID NO: 78156 - protein, 17 aa, Artificial Sequence
  Description of Artificial Sequence: Synthetic peptide
  Seed: GMDPRMCSLMQGSTLPR
GMDPRMWSLIQASTSPR

SEQ ID NO: 78157 - protein, 17 aa, Artificial Sequence
  Description of Artificial Sequence: Synthetic peptide
  Seed: GMDPRMCSLMQGSTLPR
GMDPRMWSLIQASTTPR

SEQ ID NO: 78158 - protein, 17 aa, Artificial Sequence
  Description of Artificial Sequence: Synthetic peptide
  Seed: GMDPRMCSLMQGSTLPR
GMDPRMWSLIQASTVPR

SEQ ID NO: 78159 - protein, 17 aa, Artificial Sequence
  Description of Artificial Sequence: Synthetic peptide
  Seed: GMDPRMCSLMQGSTLPR
GMDPRMWSLIQGSTAPR

SEQ ID NO: 78160 - protein, 17 aa, Artificial Sequence
  Description of Artificial Sequence: Synthetic peptide
  Seed: GMDPRMCSLMQGSTLPR
GMDPRMWSLIQGSTIPR

SEQ ID NO: 78161 - protein, 17 aa, Artificial Sequence
  Description of Artificial Sequence: Synthetic peptide
  Seed: GMDPRMCSLMQGSTLPR
GMDPRMWSLIQGSTLPR

SEQ ID NO: 78162 - protein, 17 aa, Artificial Sequence
  Description of Artificial Sequence: Synthetic peptide
  Seed: GMDPRMCSLMQGSTLPR
GMDPRMWSLIQGSTTPR

SEQ ID NO: 78163 - protein, 17 aa, Artificial Sequence
  Description of Artificial Sequence: Synthetic peptide
  Seed: GMDPRMCSLMQGSTLPR
GMDPRMWSLIQGSTVPR

SEQ ID NO: 78164 - protein, 17 aa, Artificial Sequence
  Description of Artificial Sequence: Synthetic peptide
  Seed: GMDPRMCSLMQGSTLPR
GMDPRMWSLIQISTAPR

SEQ ID NO: 78165 - protein, 17 aa, Artificial Sequence
  Description of Artificial Sequence: Synthetic peptide
  Seed: GMDPRMCSLMQGSTLPR
GMDPRMWSLIQPSTAPR

SEQ ID NO: 78166 - protein, 17 aa, Artificial Sequence
  Description of Artificial Sequence: Synthetic peptide
  Seed: GMDPRMCSLMQGSTLPR
GMDPRMWSLIQPSTIPR

SEQ ID NO: 78167 - protein, 17 aa, Artificial Sequence
  Description of Artificial Sequence: Synthetic peptide
  Seed: GMDPRMCSLMQGSTLPR
GMDPRMWSLIQPSTLPR

SEQ ID NO: 78168 - protein, 17 aa, Artificial Sequence
  Description of Artificial Sequence: Synthetic peptide
  Seed: GMDPRMCSLMQGSTLPR
GMDPRMWSLIQPSTNPR

SEQ ID NO: 78169 - protein, 17 aa, Artificial Sequence
  Description of Artificial Sequence: Synthetic peptide
  Seed: GMDPRMCSLMQGSTLPR
GMDPRMWSLIQPSTSPR

SEQ ID NO: 78170 - protein, 17 aa, Artificial Sequence
  Description of Artificial Sequence: Synthetic peptide
  Seed: GMDPRMCSLMQGSTLPR
GMDPRMWSLIQPSTTPR

SEQ ID NO: 78171 - protein, 17 aa, Artificial Sequence
  Description of Artificial Sequence: Synthetic peptide
  Seed: GMDPRMCSLMQGSTLPR
GMDPRMWSLIQPSTVPR

SEQ ID NO: 78172 - protein, 17 aa, Artificial Sequence
  Description of Artificial Sequence: Synthetic peptide
  Seed: GMDPRMCSLMQGSTLPR
GMDPRMWSLIQSSTAPR

SEQ ID NO: 78173 - protein, 17 aa, Artificial Sequence
  Description of Artificial Sequence: Synthetic peptide
  Seed: GMDPRMCSLMQGSTLPR
GMDPRMWSLIQSSTIPR

SEQ ID NO: 78174 - protein, 17 aa, Artificial Sequence
  Description of Artificial Sequence: Synthetic peptide
  Seed: GMDPRMCSLMQGSTLPR
GMDPRMWSLIQSSTLPR

SEQ ID NO: 78175 - protein, 17 aa, Artificial Sequence
  Description of Artificial Sequence: Synthetic peptide
  Seed: GMDPRMCSLMQGSTLPR
GMDPRMWSLIQSSTNPR

SEQ ID NO: 78176 - protein, 17 aa, Artificial Sequence
  Description of Artificial Sequence: Synthetic peptide
  Seed: GMDPRMCSLMQGSTLPR
GMDPRMWSLIQSSTSPR

SEQ ID NO: 78177 - protein, 17 aa, Artificial Sequence
  Description of Artificial Sequence: Synthetic peptide
  Seed: GMDPRMCSLMQGSTLPR
GMDPRMWSLIQSSTVPR

SEQ ID NO: 78178 - protein, 17 aa, Artificial Sequence
  Description of Artificial Sequence: Synthetic peptide
  Seed: GMDPRMCSLMQGSTLPR
GMDPRMWSLIQTSTAPR

SEQ ID NO: 78179 - protein, 17 aa, Artificial Sequence
  Description of Artificial Sequence: Synthetic peptide
  Seed: GMDPRMCSLMQGSTLPR
GMDPRMWSLIQTSTNPR

SEQ ID NO: 78180 - protein, 17 aa, Artificial Sequence
  Description of Artificial Sequence: Synthetic peptide
  Seed: GMDPRMCSLMQGSTLPR
GMDPRMWSLIQTSTSPR

SEQ ID NO: 78181 - protein, 17 aa, Artificial Sequence
  Description of Artificial Sequence: Synthetic peptide
  Seed: GMDPRMCSLMQGSTLPR
GMDPRMWSLIQTSTTPR

SEQ ID NO: 78182 - protein, 17 aa, Artificial Sequence
  Description of Artificial Sequence: Synthetic peptide
  Seed: GMDPRMCSLMQGSTLPR
GMDPRMWSLIQVSTAPR

SEQ ID NO: 78183 - protein, 17 aa, Artificial Sequence
  Description of Artificial Sequence: Synthetic peptide
  Seed: GMDPRMCSLMQGSTLPR
GMDPRMWSLIQVSTNPR

SEQ ID NO: 78184 - protein, 17 aa, Artificial Sequence
  Description of Artificial Sequence: Synthetic peptide
  Seed: GMDPRMCSLMQGSTLPR
GMDPRMWSLIQVSTSPR

SEQ ID NO: 78185 - protein, 17 aa, Artificial Sequence
  Description of Artificial Sequence: Synthetic peptide
  Seed: GMDPRMCSLMQGSTLPR
GMDPRMWSLLQASTAPR

SEQ ID NO: 78186 - protein, 17 aa, Artificial Sequence
  Description of Artificial Sequence: Synthetic peptide
  Seed: GMDPRMCSLMQGSTLPR
GMDPRMWSLLQASTGPR

SEQ ID NO: 78187 - protein, 17 aa, Artificial Sequence
  Description of Artificial Sequence: Synthetic peptide
  Seed: GMDPRMCSLMQGSTLPR
GMDPRMWSLLQASTIPR

SEQ ID NO: 78188 - protein, 17 aa, Artificial Sequence
  Description of Artificial Sequence: Synthetic peptide
  Seed: GMDPRMCSLMQGSTLPR
GMDPRMWSLLQASTLPR

SEQ ID NO: 78189 - protein, 17 aa, Artificial Sequence
  Description of Artificial Sequence: Synthetic peptide
  Seed: GMDPRMCSLMQGSTLPR
GMDPRMWSLLQASTMPR

SEQ ID NO: 78190 - protein, 17 aa, Artificial Sequence
  Description of Artificial Sequence: Synthetic peptide
  Seed: GMDPRMCSLMQGSTLPR
GMDPRMWSLLQASTNPR

SEQ ID NO: 78191 - protein, 17 aa, Artificial Sequence
  Description of Artificial Sequence: Synthetic peptide
  Seed: GMDPRMCSLMQGSTLPR
GMDPRMWSLLQASTSPR

SEQ ID NO: 78192 - protein, 17 aa, Artificial Sequence
  Description of Artificial Sequence: Synthetic peptide
  Seed: GMDPRMCSLMQGSTLPR
GMDPRMWSLLQASTTPR

SEQ ID NO: 78193 - protein, 17 aa, Artificial Sequence
  Description of Artificial Sequence: Synthetic peptide
  Seed: GMDPRMCSLMQGSTLPR
GMDPRMWSLLQASTVPR

SEQ ID NO: 78194 - protein, 17 aa, Artificial Sequence
  Description of Artificial Sequence: Synthetic peptide
  Seed: GMDPRMCSLMQGSTLPR
GMDPRMWSLLQGSTAPR

SEQ ID NO: 78195 - protein, 17 aa, Artificial Sequence
  Description of Artificial Sequence: Synthetic peptide
  Seed: GMDPRMCSLMQGSTLPR
GMDPRMWSLLQGSTGPR

SEQ ID NO: 78196 - protein, 17 aa, Artificial Sequence
  Description of Artificial Sequence: Synthetic peptide
  Seed: GMDPRMCSLMQGSTLPR
GMDPRMWSLLQGSTIPR

SEQ ID NO: 78197 - protein, 17 aa, Artificial Sequence
  Description of Artificial Sequence: Synthetic peptide
  Seed: GMDPRMCSLMQGSTLPR
GMDPRMWSLLQGSTLPR

SEQ ID NO: 78198 - protein, 17 aa, Artificial Sequence
  Description of Artificial Sequence: Synthetic peptide
  Seed: GMDPRMCSLMQGSTLPR
GMDPRMWSLLQGSTMPR

SEQ ID NO: 78199 - protein, 17 aa, Artificial Sequence
  Description of Artificial Sequence: Synthetic peptide
  Seed: GMDPRMCSLMQGSTLPR
GMDPRMWSLLQGSTSPR

SEQ ID NO: 78200 - protein, 17 aa, Artificial Sequence
  Description of Artificial Sequence: Synthetic peptide
  Seed: GMDPRMCSLMQGSTLPR
GMDPRMWSLLQGSTTPR

SEQ ID NO: 78201 - protein, 17 aa, Artificial Sequence
  Description of Artificial Sequence: Synthetic peptide
  Seed: GMDPRMCSLMQGSTLPR
GMDPRMWSLLQGSTVPR

SEQ ID NO: 78202 - protein, 17 aa, Artificial Sequence
  Description of Artificial Sequence: Synthetic peptide
  Seed: GMDPRMCSLMQGSTLPR
GMDPRMWSLLQISTAPR

SEQ ID NO: 78203 - protein, 17 aa, Artificial Sequence
  Description of Artificial Sequence: Synthetic peptide
  Seed: GMDPRMCSLMQGSTLPR
GMDPRMWSLLQISTNPR

SEQ ID NO: 78204 - protein, 17 aa, Artificial Sequence
  Description of Artificial Sequence: Synthetic peptide
  Seed: GMDPRMCSLMQGSTLPR
GMDPRMWSLLQISTSPR

SEQ ID NO: 78205 - protein, 17 aa, Artificial Sequence
  Description of Artificial Sequence: Synthetic peptide
  Seed: GMDPRMCSLMQGSTLPR
GMDPRMWSLLQNSTAPR

SEQ ID NO: 78206 - protein, 17 aa, Artificial Sequence
  Description of Artificial Sequence: Synthetic peptide
  Seed: GMDPRMCSLMQGSTLPR
GMDPRMWSLLQNSTIPR

SEQ ID NO: 78207 - protein, 17 aa, Artificial Sequence
  Description of Artificial Sequence: Synthetic peptide
  Seed: GMDPRMCSLMQGSTLPR
GMDPRMWSLLQNSTLPR

SEQ ID NO: 78208 - protein, 17 aa, Artificial Sequence
  Description of Artificial Sequence: Synthetic peptide
  Seed: GMDPRMCSLMQGSTLPR
GMDPRMWSLLQNSTSPR

SEQ ID NO: 78209 - protein, 17 aa, Artificial Sequence
  Description of Artificial Sequence: Synthetic peptide
  Seed: GMDPRMCSLMQGSTLPR
GMDPRMWSLLQNSTVPR

SEQ ID NO: 78210 - protein, 17 aa, Artificial Sequence
  Description of Artificial Sequence: Synthetic peptide
  Seed: GMDPRMCSLMQGSTLPR
GMDPRMWSLLQPSTAPR

SEQ ID NO: 78211 - protein, 17 aa, Artificial Sequence
  Description of Artificial Sequence: Synthetic peptide
  Seed: GMDPRMCSLMQGSTLPR
GMDPRMWSLLQPSTIPR

SEQ ID NO: 78212 - protein, 17 aa, Artificial Sequence
  Description of Artificial Sequence: Synthetic peptide
  Seed: GMDPRMCSLMQGSTLPR
GMDPRMWSLLQPSTLPR

SEQ ID NO: 78213 - protein, 17 aa, Artificial Sequence
  Description of Artificial Sequence: Synthetic peptide
  Seed: GMDPRMCSLMQGSTLPR
GMDPRMWSLLQPSTMPR

SEQ ID NO: 78214 - protein, 17 aa, Artificial Sequence
  Description of Artificial Sequence: Synthetic peptide
  Seed: GMDPRMCSLMQGSTLPR
GMDPRMWSLLQPSTNPR

SEQ ID NO: 78215 - protein, 17 aa, Artificial Sequence
  Description of Artificial Sequence: Synthetic peptide
  Seed: GMDPRMCSLMQGSTLPR
GMDPRMWSLLQPSTSPR

SEQ ID NO: 78216 - protein, 17 aa, Artificial Sequence
  Description of Artificial Sequence: Synthetic peptide
  Seed: GMDPRMCSLMQGSTLPR
GMDPRMWSLLQPSTTPR

SEQ ID NO: 78217 - protein, 17 aa, Artificial Sequence
  Description of Artificial Sequence: Synthetic peptide
  Seed: GMDPRMCSLMQGSTLPR
GMDPRMWSLLQPSTVPR

SEQ ID NO: 78218 - protein, 17 aa, Artificial Sequence
  Description of Artificial Sequence: Synthetic peptide
  Seed: GMDPRMCSLMQGSTLPR
GMDPRMWSLLQSSTAPR

SEQ ID NO: 78219 - protein, 17 aa, Artificial Sequence
  Description of Artificial Sequence: Synthetic peptide
  Seed: GMDPRMCSLMQGSTLPR
GMDPRMWSLLQSSTIPR

SEQ ID NO: 78220 - protein, 17 aa, Artificial Sequence
  Description of Artificial Sequence: Synthetic peptide
  Seed: GMDPRMCSLMQGSTLPR
GMDPRMWSLLQSSTLPR

SEQ ID NO: 78221 - protein, 17 aa, Artificial Sequence
  Description of Artificial Sequence: Synthetic peptide
  Seed: GMDPRMCSLMQGSTLPR
GMDPRMWSLLQSSTMPR

SEQ ID NO: 78222 - protein, 17 aa, Artificial Sequence
  Description of Artificial Sequence: Synthetic peptide
  Seed: GMDPRMCSLMQGSTLPR
GMDPRMWSLLQSSTNPR

SEQ ID NO: 78223 - protein, 17 aa, Artificial Sequence
  Description of Artificial Sequence: Synthetic peptide
  Seed: GMDPRMCSLMQGSTLPR
GMDPRMWSLLQSSTSPR

SEQ ID NO: 78224 - protein, 17 aa, Artificial Sequence
  Description of Artificial Sequence: Synthetic peptide
  Seed: GMDPRMCSLMQGSTLPR
GMDPRMWSLLQSSTTPR

SEQ ID NO: 78225 - protein, 17 aa, Artificial Sequence
  Description of Artificial Sequence: Synthetic peptide
  Seed: GMDPRMCSLMQGSTLPR
GMDPRMWSLLQSSTVPR

SEQ ID NO: 78226 - protein, 17 aa, Artificial Sequence
  Description of Artificial Sequence: Synthetic peptide
  Seed: GMDPRMCSLMQGSTLPR
GMDPRMWSLLQTSTAPR

SEQ ID NO: 78227 - protein, 17 aa, Artificial Sequence
  Description of Artificial Sequence: Synthetic peptide
  Seed: GMDPRMCSLMQGSTLPR
GMDPRMWSLLQTSTIPR

SEQ ID NO: 78228 - protein, 17 aa, Artificial Sequence
  Description of Artificial Sequence: Synthetic peptide
  Seed: GMDPRMCSLMQGSTLPR
GMDPRMWSLLQTSTLPR

SEQ ID NO: 78229 - protein, 17 aa, Artificial Sequence
  Description of Artificial Sequence: Synthetic peptide
  Seed: GMDPRMCSLMQGSTLPR
GMDPRMWSLLQTSTNPR

SEQ ID NO: 78230 - protein, 17 aa, Artificial Sequence
  Description of Artificial Sequence: Synthetic peptide
  Seed: GMDPRMCSLMQGSTLPR
GMDPRMWSLLQTSTSPR

SEQ ID NO: 78231 - protein, 17 aa, Artificial Sequence
  Description of Artificial Sequence: Synthetic peptide
  Seed: GMDPRMCSLMQGSTLPR
GMDPRMWSLLQTSTTPR

SEQ ID NO: 78232 - protein, 17 aa, Artificial Sequence
  Description of Artificial Sequence: Synthetic peptide
  Seed: GMDPRMCSLMQGSTLPR
GMDPRMWSLLQTSTVPR

SEQ ID NO: 78233 - protein, 17 aa, Artificial Sequence
  Description of Artificial Sequence: Synthetic peptide
  Seed: GMDPRMCSLMQGSTLPR
GMDPRMWSLLQVSTAPR

SEQ ID NO: 78234 - protein, 17 aa, Artificial Sequence
  Description of Artificial Sequence: Synthetic peptide
  Seed: GMDPRMCSLMQGSTLPR
GMDPRMWSLLQVSTNPR

SEQ ID NO: 78235 - protein, 17 aa, Artificial Sequence
  Description of Artificial Sequence: Synthetic peptide
  Seed: GMDPRMCSLMQGSTLPR
GMDPRMWSLLQVSTSPR

SEQ ID NO: 78236 - protein, 17 aa, Artificial Sequence
  Description of Artificial Sequence: Synthetic peptide
  Seed: GMDPRMCSLMQGSTLPR
GMDPRMWSLLQVSTTPR

SEQ ID NO: 78237 - protein, 17 aa, Artificial Sequence
  Description of Artificial Sequence: Synthetic peptide
  Seed: GMDPRMCSLMQGSTLPR
GMDPRMWSLMQASTAPR

SEQ ID NO: 78238 - protein, 17 aa, Artificial Sequence
  Description of Artificial Sequence: Synthetic peptide
  Seed: GMDPRMCSLMQGSTLPR
GMDPRMWSLMQASTGPR

SEQ ID NO: 78239 - protein, 17 aa, Artificial Sequence
  Description of Artificial Sequence: Synthetic peptide
  Seed: GMDPRMCSLMQGSTLPR
GMDPRMWSLMQASTHPR

SEQ ID NO: 78240 - protein, 17 aa, Artificial Sequence
  Description of Artificial Sequence: Synthetic peptide
  Seed: GMDPRMCSLMQGSTLPR
GMDPRMWSLMQASTIPR

SEQ ID NO: 78241 - protein, 17 aa, Artificial Sequence
  Description of Artificial Sequence: Synthetic peptide
  Seed: GMDPRMCSLMQGSTLPR
GMDPRMWSLMQASTLPR

SEQ ID NO: 78242 - protein, 17 aa, Artificial Sequence
  Description of Artificial Sequence: Synthetic peptide
  Seed: GMDPRMCSLMQGSTLPR
GMDPRMWSLMQASTMPR

SEQ ID NO: 78243 - protein, 17 aa, Artificial Sequence
  Description of Artificial Sequence: Synthetic peptide
  Seed: GMDPRMCSLMQGSTLPR
GMDPRMWSLMQASTNPR

SEQ ID NO: 78244 - protein, 17 aa, Artificial Sequence
  Description of Artificial Sequence: Synthetic peptide
  Seed: GMDPRMCSLMQGSTLPR
GMDPRMWSLMQASTSPR

SEQ ID NO: 78245 - protein, 17 aa, Artificial Sequence
  Description of Artificial Sequence: Synthetic peptide
  Seed: GMDPRMCSLMQGSTLPR
GMDPRMWSLMQASTTPR

SEQ ID NO: 78246 - protein, 17 aa, Artificial Sequence
  Description of Artificial Sequence: Synthetic peptide
  Seed: GMDPRMCSLMQGSTLPR
GMDPRMWSLMQASTVPR

SEQ ID NO: 78247 - protein, 17 aa, Artificial Sequence
  Description of Artificial Sequence: Synthetic peptide
  Seed: GMDPRMCSLMQGSTLPR
GMDPRMWSLMQGSTAPR

SEQ ID NO: 78248 - protein, 17 aa, Artificial Sequence
  Description of Artificial Sequence: Synthetic peptide
  Seed: GMDPRMCSLMQGSTLPR
GMDPRMWSLMQGSTIPR

SEQ ID NO: 78249 - protein, 17 aa, Artificial Sequence
  Description of Artificial Sequence: Synthetic peptide
  Seed: GMDPRMCSLMQGSTLPR
GMDPRMWSLMQGSTLPR

SEQ ID NO: 78250 - protein, 17 aa, Artificial Sequence
  Description of Artificial Sequence: Synthetic peptide
  Seed: GMDPRMCSLMQGSTLPR
GMDPRMWSLMQGSTMPR

SEQ ID NO: 78251 - protein, 17 aa, Artificial Sequence
  Description of Artificial Sequence: Synthetic peptide
  Seed: GMDPRMCSLMQGSTLPR
GMDPRMWSLMQGSTSPR

SEQ ID NO: 78252 - protein, 17 aa, Artificial Sequence
  Description of Artificial Sequence: Synthetic peptide
  Seed: GMDPRMCSLMQGSTLPR
GMDPRMWSLMQGSTTPR

SEQ ID NO: 78253 - protein, 17 aa, Artificial Sequence
  Description of Artificial Sequence: Synthetic peptide
  Seed: GMDPRMCSLMQGSTLPR
GMDPRMWSLMQGSTVPR

SEQ ID NO: 78254 - protein, 17 aa, Artificial Sequence
  Description of Artificial Sequence: Synthetic peptide
  Seed: GMDPRMCSLMQGSTLPR
GMDPRMWSLMQISTAPR

SEQ ID NO: 78255 - protein, 17 aa, Artificial Sequence
  Description of Artificial Sequence: Synthetic peptide
  Seed: GMDPRMCSLMQGSTLPR
GMDPRMWSLMQISTNPR

SEQ ID NO: 78256 - protein, 17 aa, Artificial Sequence
  Description of Artificial Sequence: Synthetic peptide
  Seed: GMDPRMCSLMQGSTLPR
GMDPRMWSLMQISTSPR

SEQ ID NO: 78257 - protein, 17 aa, Artificial Sequence
  Description of Artificial Sequence: Synthetic peptide
  Seed: GMDPRMCSLMQGSTLPR
GMDPRMWSLMQISTTPR

SEQ ID NO: 78258 - protein, 17 aa, Artificial Sequence
  Description of Artificial Sequence: Synthetic peptide
  Seed: GMDPRMCSLMQGSTLPR
GMDPRMWSLMQNSTAPR

SEQ ID NO: 78259 - protein, 17 aa, Artificial Sequence
  Description of Artificial Sequence: Synthetic peptide
  Seed: GMDPRMCSLMQGSTLPR
GMDPRMWSLMQNSTIPR

SEQ ID NO: 78260 - protein, 17 aa, Artificial Sequence
  Description of Artificial Sequence: Synthetic peptide
  Seed: GMDPRMCSLMQGSTLPR
GMDPRMWSLMQNSTLPR

SEQ ID NO: 78261 - protein, 17 aa, Artificial Sequence
  Description of Artificial Sequence: Synthetic peptide
  Seed: GMDPRMCSLMQGSTLPR
GMDPRMWSLMQNSTSPR

SEQ ID NO: 78262 - protein, 17 aa, Artificial Sequence
  Description of Artificial Sequence: Synthetic peptide
  Seed: GMDPRMCSLMQGSTLPR
GMDPRMWSLMQNSTVPR

SEQ ID NO: 78263 - protein, 17 aa, Artificial Sequence
  Description of Artificial Sequence: Synthetic peptide
  Seed: GMDPRMCSLMQGSTLPR
GMDPRMWSLMQPSTAPR

SEQ ID NO: 78264 - protein, 17 aa, Artificial Sequence
  Description of Artificial Sequence: Synthetic peptide
  Seed: GMDPRMCSLMQGSTLPR
GMDPRMWSLMQPSTIPR

SEQ ID NO: 78265 - protein, 17 aa, Artificial Sequence
  Description of Artificial Sequence: Synthetic peptide
  Seed: GMDPRMCSLMQGSTLPR
GMDPRMWSLMQPSTLPR

SEQ ID NO: 78266 - protein, 17 aa, Artificial Sequence
  Description of Artificial Sequence: Synthetic peptide
  Seed: GMDPRMCSLMQGSTLPR
GMDPRMWSLMQPSTMPR

SEQ ID NO: 78267 - protein, 17 aa, Artificial Sequence
  Description of Artificial Sequence: Synthetic peptide
  Seed: GMDPRMCSLMQGSTLPR
GMDPRMWSLMQPSTNPR

SEQ ID NO: 78268 - protein, 17 aa, Artificial Sequence
  Description of Artificial Sequence: Synthetic peptide
  Seed: GMDPRMCSLMQGSTLPR
GMDPRMWSLMQPSTSPR

SEQ ID NO: 78269 - protein, 17 aa, Artificial Sequence
  Description of Artificial Sequence: Synthetic peptide
  Seed: GMDPRMCSLMQGSTLPR
GMDPRMWSLMQPSTTPR

SEQ ID NO: 78270 - protein, 17 aa, Artificial Sequence
  Description of Artificial Sequence: Synthetic peptide
  Seed: GMDPRMCSLMQGSTLPR
GMDPRMWSLMQPSTVPR

SEQ ID NO: 78271 - protein, 17 aa, Artificial Sequence
  Description of Artificial Sequence: Synthetic peptide
  Seed: GMDPRMCSLMQGSTLPR
GMDPRMWSLMQSSTAPR

SEQ ID NO: 78272 - protein, 17 aa, Artificial Sequence
  Description of Artificial Sequence: Synthetic peptide
  Seed: GMDPRMCSLMQGSTLPR
GMDPRMWSLMQSSTIPR

SEQ ID NO: 78273 - protein, 17 aa, Artificial Sequence
  Description of Artificial Sequence: Synthetic peptide
  Seed: GMDPRMCSLMQGSTLPR
GMDPRMWSLMQSSTLPR

SEQ ID NO: 78274 - protein, 17 aa, Artificial Sequence
  Description of Artificial Sequence: Synthetic peptide
  Seed: GMDPRMCSLMQGSTLPR
GMDPRMWSLMQSSTMPR

SEQ ID NO: 78275 - protein, 17 aa, Artificial Sequence
  Description of Artificial Sequence: Synthetic peptide
  Seed: GMDPRMCSLMQGSTLPR
GMDPRMWSLMQSSTNPR

SEQ ID NO: 78276 - protein, 17 aa, Artificial Sequence
  Description of Artificial Sequence: Synthetic peptide
  Seed: GMDPRMCSLMQGSTLPR
GMDPRMWSLMQSSTSPR

SEQ ID NO: 78277 - protein, 17 aa, Artificial Sequence
  Description of Artificial Sequence: Synthetic peptide
  Seed: GMDPRMCSLMQGSTLPR
GMDPRMWSLMQSSTTPR

SEQ ID NO: 78278 - protein, 17 aa, Artificial Sequence
  Description of Artificial Sequence: Synthetic peptide
  Seed: GMDPRMCSLMQGSTLPR
GMDPRMWSLMQSSTVPR

SEQ ID NO: 78279 - protein, 17 aa, Artificial Sequence
  Description of Artificial Sequence: Synthetic peptide
  Seed: GMDPRMCSLMQGSTLPR
GMDPRMWSLMQTSTAPR

SEQ ID NO: 78280 - protein, 17 aa, Artificial Sequence
  Description of Artificial Sequence: Synthetic peptide
  Seed: GMDPRMCSLMQGSTLPR
GMDPRMWSLMQTSTIPR

SEQ ID NO: 78281 - protein, 17 aa, Artificial Sequence
  Description of Artificial Sequence: Synthetic peptide
  Seed: GMDPRMCSLMQGSTLPR
GMDPRMWSLMQTSTLPR

SEQ ID NO: 78282 - protein, 17 aa, Artificial Sequence
  Description of Artificial Sequence: Synthetic peptide
  Seed: GMDPRMCSLMQGSTLPR
GMDPRMWSLMQTSTMPR

SEQ ID NO: 78283 - protein, 17 aa, Artificial Sequence
  Description of Artificial Sequence: Synthetic peptide
  Seed: GMDPRMCSLMQGSTLPR
GMDPRMWSLMQTSTNPR

SEQ ID NO: 78284 - protein, 17 aa, Artificial Sequence
  Description of Artificial Sequence: Synthetic peptide
  Seed: GMDPRMCSLMQGSTLPR
GMDPRMWSLMQTSTSPR

SEQ ID NO: 78285 - protein, 17 aa, Artificial Sequence
  Description of Artificial Sequence: Synthetic peptide
  Seed: GMDPRMCSLMQGSTLPR
GMDPRMWSLMQTSTTPR

SEQ ID NO: 78286 - protein, 17 aa, Artificial Sequence
  Description of Artificial Sequence: Synthetic peptide
  Seed: GMDPRMCSLMQGSTLPR
GMDPRMWSLMQTSTVPR

SEQ ID NO: 78287 - protein, 17 aa, Artificial Sequence
  Description of Artificial Sequence: Synthetic peptide
  Seed: GMDPRMCSLMQGSTLPR
GMDPRMWSLMQVSTAPR

SEQ ID NO: 78288 - protein, 17 aa, Artificial Sequence
  Description of Artificial Sequence: Synthetic peptide
  Seed: GMDPRMCSLMQGSTLPR
GMDPRMWSLMQVSTNPR

SEQ ID NO: 78289 - protein, 17 aa, Artificial Sequence
  Description of Artificial Sequence: Synthetic peptide
  Seed: GMDPRMCSLMQGSTLPR
GMDPRMWSLMQVSTSPR

SEQ ID NO: 78290 - protein, 17 aa, Artificial Sequence
  Description of Artificial Sequence: Synthetic peptide
  Seed: GMDPRMCSLMQGSTLPR
GMDPRMWSLMQVSTTPR

SEQ ID NO: 78291 - protein, 17 aa, Artificial Sequence
  Description of Artificial Sequence: Synthetic peptide
  Seed: GMDPRMCSLMQGSTLPR
GMDPRMWSLMQVSTVPR

SEQ ID NO: 78292 - protein, 17 aa, Artificial Sequence
  Description of Artificial Sequence: Synthetic peptide
  Seed: GMDPRMCSLMQGSTLPR
GMDPRMWSLQQASTAPR

SEQ ID NO: 78293 - protein, 17 aa, Artificial Sequence
  Description of Artificial Sequence: Synthetic peptide
  Seed: GMDPRMCSLMQGSTLPR
GMDPRMWSLQQASTIPR

SEQ ID NO: 78294 - protein, 17 aa, Artificial Sequence
  Description of Artificial Sequence: Synthetic peptide
  Seed: GMDPRMCSLMQGSTLPR
GMDPRMWSLQQASTLPR

SEQ ID NO: 78295 - protein, 17 aa, Artificial Sequence
  Description of Artificial Sequence: Synthetic peptide
  Seed: GMDPRMCSLMQGSTLPR
GMDPRMWSLQQASTVPR

SEQ ID NO: 78296 - protein, 17 aa, Artificial Sequence
  Description of Artificial Sequence: Synthetic peptide
  Seed: GMDPRMCSLMQGSTLPR
GMDPRMWSLQQGSTLPR

SEQ ID NO: 78297 - protein, 17 aa, Artificial Sequence
  Description of Artificial Sequence: Synthetic peptide
  Seed: GMDPRMCSLMQGSTLPR
GMDPRMWSLQQGSTVPR

SEQ ID NO: 78298 - protein, 17 aa, Artificial Sequence
  Description of Artificial Sequence: Synthetic peptide
  Seed: GMDPRMCSLMQGSTLPR
GMDPRMWSLVQASTAPR

SEQ ID NO: 78299 - protein, 17 aa, Artificial Sequence
  Description of Artificial Sequence: Synthetic peptide
  Seed: GMDPRMCSLMQGSTLPR
GMDPRMWSLVQASTIPR

SEQ ID NO: 78300 - protein, 17 aa, Artificial Sequence
  Description of Artificial Sequence: Synthetic peptide
  Seed: GMDPRMCSLMQGSTLPR
GMDPRMWSLVQASTLPR

SEQ ID NO: 78301 - protein, 17 aa, Artificial Sequence
  Description of Artificial Sequence: Synthetic peptide
  Seed: GMDPRMCSLMQGSTLPR
GMDPRMWSLVQASTSPR

SEQ ID NO: 78302 - protein, 17 aa, Artificial Sequence
  Description of Artificial Sequence: Synthetic peptide
  Seed: GMDPRMCSLMQGSTLPR
GMDPRMWSLVQASTVPR

SEQ ID NO: 78303 - protein, 17 aa, Artificial Sequence
  Description of Artificial Sequence: Synthetic peptide
  Seed: GMDPRMCSLMQGSTLPR
GMDPRMWSLVQGSTLPR

SEQ ID NO: 78304 - protein, 17 aa, Artificial Sequence
  Description of Artificial Sequence: Synthetic peptide
  Seed: GMDPRMCSLMQGSTLPR
GMDPRMWSLVQGSTVPR

SEQ ID NO: 78305 - protein, 17 aa, Artificial Sequence
  Description of Artificial Sequence: Synthetic peptide
  Seed: GMDPRMCSLMQGSTLPR
GMDPRMYSLAQASTAPR

SEQ ID NO: 78306 - protein, 17 aa, Artificial Sequence
  Description of Artificial Sequence: Synthetic peptide
  Seed: GMDPRMCSLMQGSTLPR
GMDPRMYSLAQASTIPR

SEQ ID NO: 78307 - protein, 17 aa, Artificial Sequence
  Description of Artificial Sequence: Synthetic peptide
  Seed: GMDPRMCSLMQGSTLPR
GMDPRMYSLAQASTLPR

SEQ ID NO: 78308 - protein, 17 aa, Artificial Sequence
  Description of Artificial Sequence: Synthetic peptide
  Seed: GMDPRMCSLMQGSTLPR
GMDPRMYSLAQASTMPR

SEQ ID NO: 78309 - protein, 17 aa, Artificial Sequence
  Description of Artificial Sequence: Synthetic peptide
  Seed: GMDPRMCSLMQGSTLPR
GMDPRMYSLAQASTNPR

SEQ ID NO: 78310 - protein, 17 aa, Artificial Sequence
  Description of Artificial Sequence: Synthetic peptide
  Seed: GMDPRMCSLMQGSTLPR
GMDPRMYSLAQASTSPR

SEQ ID NO: 78311 - protein, 17 aa, Artificial Sequence
  Description of Artificial Sequence: Synthetic peptide
  Seed: GMDPRMCSLMQGSTLPR
GMDPRMYSLAQASTTPR

SEQ ID NO: 78312 - protein, 17 aa, Artificial Sequence
  Description of Artificial Sequence: Synthetic peptide
  Seed: GMDPRMCSLMQGSTLPR
GMDPRMYSLAQASTVPR

SEQ ID NO: 78313 - protein, 17 aa, Artificial Sequence
  Description of Artificial Sequence: Synthetic peptide
  Seed: GMDPRMCSLMQGSTLPR
GMDPRMYSLAQGSTAPR

SEQ ID NO: 78314 - protein, 17 aa, Artificial Sequence
  Description of Artificial Sequence: Synthetic peptide
  Seed: GMDPRMCSLMQGSTLPR
GMDPRMYSLAQGSTIPR

SEQ ID NO: 78315 - protein, 17 aa, Artificial Sequence
  Description of Artificial Sequence: Synthetic peptide
  Seed: GMDPRMCSLMQGSTLPR
GMDPRMYSLAQGSTLPR

SEQ ID NO: 78316 - protein, 17 aa, Artificial Sequence
  Description of Artificial Sequence: Synthetic peptide
  Seed: GMDPRMCSLMQGSTLPR
GMDPRMYSLAQGSTMPR

SEQ ID NO: 78317 - protein, 17 aa, Artificial Sequence
  Description of Artificial Sequence: Synthetic peptide
  Seed: GMDPRMCSLMQGSTLPR
GMDPRMYSLAQGSTVPR

SEQ ID NO: 78318 - protein, 17 aa, Artificial Sequence
  Description of Artificial Sequence: Synthetic peptide
  Seed: GMDPRMCSLMQGSTLPR
GMDPRMYSLAQISTAPR

SEQ ID NO: 78319 - protein, 17 aa, Artificial Sequence
  Description of Artificial Sequence: Synthetic peptide
  Seed: GMDPRMCSLMQGSTLPR
GMDPRMYSLAQISTIPR

SEQ ID NO: 78320 - protein, 17 aa, Artificial Sequence
  Description of Artificial Sequence: Synthetic peptide
  Seed: GMDPRMCSLMQGSTLPR
GMDPRMYSLAQISTLPR

SEQ ID NO: 78321 - protein, 17 aa, Artificial Sequence
  Description of Artificial Sequence: Synthetic peptide
  Seed: GMDPRMCSLMQGSTLPR
GMDPRMYSLAQISTNPR

SEQ ID NO: 78322 - protein, 17 aa, Artificial Sequence
  Description of Artificial Sequence: Synthetic peptide
  Seed: GMDPRMCSLMQGSTLPR
GMDPRMYSLAQISTSPR

SEQ ID NO: 78323 - protein, 17 aa, Artificial Sequence
  Description of Artificial Sequence: Synthetic peptide
  Seed: GMDPRMCSLMQGSTLPR
GMDPRMYSLAQISTVPR

SEQ ID NO: 78324 - protein, 17 aa, Artificial Sequence
  Description of Artificial Sequence: Synthetic peptide
  Seed: GMDPRMCSLMQGSTLPR
GMDPRMYSLAQNSTLPR

SEQ ID NO: 78325 - protein, 17 aa, Artificial Sequence
  Description of Artificial Sequence: Synthetic peptide
  Seed: GMDPRMCSLMQGSTLPR
GMDPRMYSLAQNSTVPR

SEQ ID NO: 78326 - protein, 17 aa, Artificial Sequence
  Description of Artificial Sequence: Synthetic peptide
  Seed: GMDPRMCSLMQGSTLPR
GMDPRMYSLAQPSTAPR

SEQ ID NO: 78327 - protein, 17 aa, Artificial Sequence
  Description of Artificial Sequence: Synthetic peptide
  Seed: GMDPRMCSLMQGSTLPR
GMDPRMYSLAQPSTIPR

SEQ ID NO: 78328 - protein, 17 aa, Artificial Sequence
  Description of Artificial Sequence: Synthetic peptide
  Seed: GMDPRMCSLMQGSTLPR
GMDPRMYSLAQPSTLPR

SEQ ID NO: 78329 - protein, 17 aa, Artificial Sequence
  Description of Artificial Sequence: Synthetic peptide
  Seed: GMDPRMCSLMQGSTLPR
GMDPRMYSLAQPSTSPR

SEQ ID NO: 78330 - protein, 17 aa, Artificial Sequence
  Description of Artificial Sequence: Synthetic peptide
  Seed: GMDPRMCSLMQGSTLPR
GMDPRMYSLAQPSTVPR

SEQ ID NO: 78331 - protein, 17 aa, Artificial Sequence
  Description of Artificial Sequence: Synthetic peptide
  Seed: GMDPRMCSLMQGSTLPR
GMDPRMYSLAQSSTAPR

SEQ ID NO: 78332 - protein, 17 aa, Artificial Sequence
  Description of Artificial Sequence: Synthetic peptide
  Seed: GMDPRMCSLMQGSTLPR
GMDPRMYSLAQSSTIPR

SEQ ID NO: 78333 - protein, 17 aa, Artificial Sequence
  Description of Artificial Sequence: Synthetic peptide
  Seed: GMDPRMCSLMQGSTLPR
GMDPRMYSLAQSSTLPR

SEQ ID NO: 78334 - protein, 17 aa, Artificial Sequence
  Description of Artificial Sequence: Synthetic peptide
  Seed: GMDPRMCSLMQGSTLPR
GMDPRMYSLAQSSTMPR

SEQ ID NO: 78335 - protein, 17 aa, Artificial Sequence
  Description of Artificial Sequence: Synthetic peptide
  Seed: GMDPRMCSLMQGSTLPR
GMDPRMYSLAQSSTNPR

SEQ ID NO: 78336 - protein, 17 aa, Artificial Sequence
  Description of Artificial Sequence: Synthetic peptide
  Seed: GMDPRMCSLMQGSTLPR
GMDPRMYSLAQSSTSPR

SEQ ID NO: 78337 - protein, 17 aa, Artificial Sequence
  Description of Artificial Sequence: Synthetic peptide
  Seed: GMDPRMCSLMQGSTLPR
GMDPRMYSLAQSSTVPR

SEQ ID NO: 78338 - protein, 17 aa, Artificial Sequence
  Description of Artificial Sequence: Synthetic peptide
  Seed: GMDPRMCSLMQGSTLPR
GMDPRMYSLAQTSTAPR

SEQ ID NO: 78339 - protein, 17 aa, Artificial Sequence
  Description of Artificial Sequence: Synthetic peptide
  Seed: GMDPRMCSLMQGSTLPR
GMDPRMYSLAQTSTIPR

SEQ ID NO: 78340 - protein, 17 aa, Artificial Sequence
  Description of Artificial Sequence: Synthetic peptide
  Seed: GMDPRMCSLMQGSTLPR
GMDPRMYSLAQTSTLPR

SEQ ID NO: 78341 - protein, 17 aa, Artificial Sequence
  Description of Artificial Sequence: Synthetic peptide
  Seed: GMDPRMCSLMQGSTLPR
GMDPRMYSLAQTSTSPR

SEQ ID NO: 78342 - protein, 17 aa, Artificial Sequence
  Description of Artificial Sequence: Synthetic peptide
  Seed: GMDPRMCSLMQGSTLPR
GMDPRMYSLAQTSTVPR

SEQ ID NO: 78343 - protein, 17 aa, Artificial Sequence
  Description of Artificial Sequence: Synthetic peptide
  Seed: GMDPRMCSLMQGSTLPR
GMDPRMYSLAQVSTAPR

SEQ ID NO: 78344 - protein, 17 aa, Artificial Sequence
  Description of Artificial Sequence: Synthetic peptide
  Seed: GMDPRMCSLMQGSTLPR
GMDPRMYSLAQVSTIPR

SEQ ID NO: 78345 - protein, 17 aa, Artificial Sequence
  Description of Artificial Sequence: Synthetic peptide
  Seed: GMDPRMCSLMQGSTLPR
GMDPRMYSLAQVSTLPR

SEQ ID NO: 78346 - protein, 17 aa, Artificial Sequence
  Description of Artificial Sequence: Synthetic peptide
  Seed: GMDPRMCSLMQGSTLPR
GMDPRMYSLAQVSTMPR

SEQ ID NO: 78347 - protein, 17 aa, Artificial Sequence
  Description of Artificial Sequence: Synthetic peptide
  Seed: GMDPRMCSLMQGSTLPR
GMDPRMYSLAQVSTNPR

SEQ ID NO: 78348 - protein, 17 aa, Artificial Sequence
  Description of Artificial Sequence: Synthetic peptide
  Seed: GMDPRMCSLMQGSTLPR
GMDPRMYSLAQVSTSPR

SEQ ID NO: 78349 - protein, 17 aa, Artificial Sequence
  Description of Artificial Sequence: Synthetic peptide
  Seed: GMDPRMCSLMQGSTLPR
GMDPRMYSLAQVSTTPR

SEQ ID NO: 78350 - protein, 17 aa, Artificial Sequence
  Description of Artificial Sequence: Synthetic peptide
  Seed: GMDPRMCSLMQGSTLPR
GMDPRMYSLAQVSTVPR

SEQ ID NO: 78351 - protein, 17 aa, Artificial Sequence
  Description of Artificial Sequence: Synthetic peptide
  Seed: GMDPRMCSLMQGSTLPR
GMDPRMYSLEQASTLPR

SEQ ID NO: 78352 - protein, 17 aa, Artificial Sequence
  Description of Artificial Sequence: Synthetic peptide
  Seed: GMDPRMCSLMQGSTLPR
GMDPRMYSLFQASTAPR

SEQ ID NO: 78353 - protein, 17 aa, Artificial Sequence
  Description of Artificial Sequence: Synthetic peptide
  Seed: GMDPRMCSLMQGSTLPR
GMDPRMYSLFQASTIPR

SEQ ID NO: 78354 - protein, 17 aa, Artificial Sequence
  Description of Artificial Sequence: Synthetic peptide
  Seed: GMDPRMCSLMQGSTLPR
GMDPRMYSLFQASTLPR

SEQ ID NO: 78355 - protein, 17 aa, Artificial Sequence
  Description of Artificial Sequence: Synthetic peptide
  Seed: GMDPRMCSLMQGSTLPR
GMDPRMYSLFQASTVPR

SEQ ID NO: 78356 - protein, 17 aa, Artificial Sequence
  Description of Artificial Sequence: Synthetic peptide
  Seed: GMDPRMCSLMQGSTLPR
GMDPRMYSLFQPSTAPR

SEQ ID NO: 78357 - protein, 17 aa, Artificial Sequence
  Description of Artificial Sequence: Synthetic peptide
  Seed: GMDPRMCSLMQGSTLPR
GMDPRMYSLGQASTLPR

SEQ ID NO: 78358 - protein, 17 aa, Artificial Sequence
  Description of Artificial Sequence: Synthetic peptide
  Seed: GMDPRMCSLMQGSTLPR
GMDPRMYSLIQASTAPR

SEQ ID NO: 78359 - protein, 17 aa, Artificial Sequence
  Description of Artificial Sequence: Synthetic peptide
  Seed: GMDPRMCSLMQGSTLPR
GMDPRMYSLIQASTGPR

SEQ ID NO: 78360 - protein, 17 aa, Artificial Sequence
  Description of Artificial Sequence: Synthetic peptide
  Seed: GMDPRMCSLMQGSTLPR
GMDPRMYSLIQASTHPR

SEQ ID NO: 78361 - protein, 17 aa, Artificial Sequence
  Description of Artificial Sequence: Synthetic peptide
  Seed: GMDPRMCSLMQGSTLPR
GMDPRMYSLIQASTIPR

SEQ ID NO: 78362 - protein, 17 aa, Artificial Sequence
  Description of Artificial Sequence: Synthetic peptide
  Seed: GMDPRMCSLMQGSTLPR
GMDPRMYSLIQASTLPR

SEQ ID NO: 78363 - protein, 17 aa, Artificial Sequence
  Description of Artificial Sequence: Synthetic peptide
  Seed: GMDPRMCSLMQGSTLPR
GMDPRMYSLIQASTMPR

SEQ ID NO: 78364 - protein, 17 aa, Artificial Sequence
  Description of Artificial Sequence: Synthetic peptide
  Seed: GMDPRMCSLMQGSTLPR
GMDPRMYSLIQASTNPR

SEQ ID NO: 78365 - protein, 17 aa, Artificial Sequence
  Description of Artificial Sequence: Synthetic peptide
  Seed: GMDPRMCSLMQGSTLPR
GMDPRMYSLIQASTQPR

SEQ ID NO: 78366 - protein, 17 aa, Artificial Sequence
  Description of Artificial Sequence: Synthetic peptide
  Seed: GMDPRMCSLMQGSTLPR
GMDPRMYSLIQASTSPR

SEQ ID NO: 78367 - protein, 17 aa, Artificial Sequence
  Description of Artificial Sequence: Synthetic peptide
  Seed: GMDPRMCSLMQGSTLPR
GMDPRMYSLIQASTTPR

SEQ ID NO: 78368 - protein, 17 aa, Artificial Sequence
  Description of Artificial Sequence: Synthetic peptide
  Seed: GMDPRMCSLMQGSTLPR
GMDPRMYSLIQASTVPR

SEQ ID NO: 78369 - protein, 17 aa, Artificial Sequence
  Description of Artificial Sequence: Synthetic peptide
  Seed: GMDPRMCSLMQGSTLPR
GMDPRMYSLIQGSTAPR

SEQ ID NO: 78370 - protein, 17 aa, Artificial Sequence
  Description of Artificial Sequence: Synthetic peptide
  Seed: GMDPRMCSLMQGSTLPR
GMDPRMYSLIQGSTIPR

SEQ ID NO: 78371 - protein, 17 aa, Artificial Sequence
  Description of Artificial Sequence: Synthetic peptide
  Seed: GMDPRMCSLMQGSTLPR
GMDPRMYSLIQGSTLPR

SEQ ID NO: 78372 - protein, 17 aa, Artificial Sequence
  Description of Artificial Sequence: Synthetic peptide
  Seed: GMDPRMCSLMQGSTLPR
GMDPRMYSLIQGSTMPR

SEQ ID NO: 78373 - protein, 17 aa, Artificial Sequence
  Description of Artificial Sequence: Synthetic peptide
  Seed: GMDPRMCSLMQGSTLPR
GMDPRMYSLIQGSTNPR

SEQ ID NO: 78374 - protein, 17 aa, Artificial Sequence
  Description of Artificial Sequence: Synthetic peptide
  Seed: GMDPRMCSLMQGSTLPR
GMDPRMYSLIQGSTSPR

SEQ ID NO: 78375 - protein, 17 aa, Artificial Sequence
  Description of Artificial Sequence: Synthetic peptide
  Seed: GMDPRMCSLMQGSTLPR
GMDPRMYSLIQGSTTPR

SEQ ID NO: 78376 - protein, 17 aa, Artificial Sequence
  Description of Artificial Sequence: Synthetic peptide
  Seed: GMDPRMCSLMQGSTLPR
GMDPRMYSLIQGSTVPR

SEQ ID NO: 78377 - protein, 17 aa, Artificial Sequence
  Description of Artificial Sequence: Synthetic peptide
  Seed: GMDPRMCSLMQGSTLPR
GMDPRMYSLIQISTAPR

SEQ ID NO: 78378 - protein, 17 aa, Artificial Sequence
  Description of Artificial Sequence: Synthetic peptide
  Seed: GMDPRMCSLMQGSTLPR
GMDPRMYSLIQISTIPR

SEQ ID NO: 78379 - protein, 17 aa, Artificial Sequence
  Description of Artificial Sequence: Synthetic peptide
  Seed: GMDPRMCSLMQGSTLPR
GMDPRMYSLIQISTLPR

SEQ ID NO: 78380 - protein, 17 aa, Artificial Sequence
  Description of Artificial Sequence: Synthetic peptide
  Seed: GMDPRMCSLMQGSTLPR
GMDPRMYSLIQISTMPR

SEQ ID NO: 78381 - protein, 17 aa, Artificial Sequence
  Description of Artificial Sequence: Synthetic peptide
  Seed: GMDPRMCSLMQGSTLPR
GMDPRMYSLIQISTNPR

SEQ ID NO: 78382 - protein, 17 aa, Artificial Sequence
  Description of Artificial Sequence: Synthetic peptide
  Seed: GMDPRMCSLMQGSTLPR
GMDPRMYSLIQISTSPR

SEQ ID NO: 78383 - protein, 17 aa, Artificial Sequence
  Description of Artificial Sequence: Synthetic peptide
  Seed: GMDPRMCSLMQGSTLPR
GMDPRMYSLIQISTTPR

SEQ ID NO: 78384 - protein, 17 aa, Artificial Sequence
  Description of Artificial Sequence: Synthetic peptide
  Seed: GMDPRMCSLMQGSTLPR
GMDPRMYSLIQISTVPR

SEQ ID NO: 78385 - protein, 17 aa, Artificial Sequence
  Description of Artificial Sequence: Synthetic peptide
  Seed: GMDPRMCSLMQGSTLPR
GMDPRMYSLIQLSTAPR

SEQ ID NO: 78386 - protein, 17 aa, Artificial Sequence
  Description of Artificial Sequence: Synthetic peptide
  Seed: GMDPRMCSLMQGSTLPR
GMDPRMYSLIQMSTAPR

SEQ ID NO: 78387 - protein, 17 aa, Artificial Sequence
  Description of Artificial Sequence: Synthetic peptide
  Seed: GMDPRMCSLMQGSTLPR
GMDPRMYSLIQNSTAPR

SEQ ID NO: 78388 - protein, 17 aa, Artificial Sequence
  Description of Artificial Sequence: Synthetic peptide
  Seed: GMDPRMCSLMQGSTLPR
GMDPRMYSLIQNSTIPR

SEQ ID NO: 78389 - protein, 17 aa, Artificial Sequence
  Description of Artificial Sequence: Synthetic peptide
  Seed: GMDPRMCSLMQGSTLPR
GMDPRMYSLIQNSTLPR

SEQ ID NO: 78390 - protein, 17 aa, Artificial Sequence
  Description of Artificial Sequence: Synthetic peptide
  Seed: GMDPRMCSLMQGSTLPR
GMDPRMYSLIQNSTSPR

SEQ ID NO: 78391 - protein, 17 aa, Artificial Sequence
  Description of Artificial Sequence: Synthetic peptide
  Seed: GMDPRMCSLMQGSTLPR
GMDPRMYSLIQNSTVPR

SEQ ID NO: 78392 - protein, 17 aa, Artificial Sequence
  Description of Artificial Sequence: Synthetic peptide
  Seed: GMDPRMCSLMQGSTLPR
GMDPRMYSLIQPSTAPR

SEQ ID NO: 78393 - protein, 17 aa, Artificial Sequence
  Description of Artificial Sequence: Synthetic peptide
  Seed: GMDPRMCSLMQGSTLPR
GMDPRMYSLIQPSTGPR

SEQ ID NO: 78394 - protein, 17 aa, Artificial Sequence
  Description of Artificial Sequence: Synthetic peptide
  Seed: GMDPRMCSLMQGSTLPR
GMDPRMYSLIQPSTHPR

SEQ ID NO: 78395 - protein, 17 aa, Artificial Sequence
  Description of Artificial Sequence: Synthetic peptide
  Seed: GMDPRMCSLMQGSTLPR
GMDPRMYSLIQPSTIPR

SEQ ID NO: 78396 - protein, 17 aa, Artificial Sequence
  Description of Artificial Sequence: Synthetic peptide
  Seed: GMDPRMCSLMQGSTLPR
GMDPRMYSLIQPSTLPR

SEQ ID NO: 78397 - protein, 17 aa, Artificial Sequence
  Description of Artificial Sequence: Synthetic peptide
  Seed: GMDPRMCSLMQGSTLPR
GMDPRMYSLIQPSTMPR

SEQ ID NO: 78398 - protein, 17 aa, Artificial Sequence
  Description of Artificial Sequence: Synthetic peptide
  Seed: GMDPRMCSLMQGSTLPR
GMDPRMYSLIQPSTNPR

SEQ ID NO: 78399 - protein, 17 aa, Artificial Sequence
  Description of Artificial Sequence: Synthetic peptide
  Seed: GMDPRMCSLMQGSTLPR
GMDPRMYSLIQPSTSPR

SEQ ID NO: 78400 - protein, 17 aa, Artificial Sequence
  Description of Artificial Sequence: Synthetic peptide
  Seed: GMDPRMCSLMQGSTLPR
GMDPRMYSLIQPSTTPR

SEQ ID NO: 78401 - protein, 17 aa, Artificial Sequence
  Description of Artificial Sequence: Synthetic peptide
  Seed: GMDPRMCSLMQGSTLPR
GMDPRMYSLIQPSTVPR

SEQ ID NO: 78402 - protein, 17 aa, Artificial Sequence
  Description of Artificial Sequence: Synthetic peptide
  Seed: GMDPRMCSLMQGSTLPR
GMDPRMYSLIQSSTAPR

SEQ ID NO: 78403 - protein, 17 aa, Artificial Sequence
  Description of Artificial Sequence: Synthetic peptide
  Seed: GMDPRMCSLMQGSTLPR
GMDPRMYSLIQSSTGPR

SEQ ID NO: 78404 - protein, 17 aa, Artificial Sequence
  Description of Artificial Sequence: Synthetic peptide
  Seed: GMDPRMCSLMQGSTLPR
GMDPRMYSLIQSSTIPR

SEQ ID NO: 78405 - protein, 17 aa, Artificial Sequence
  Description of Artificial Sequence: Synthetic peptide
  Seed: GMDPRMCSLMQGSTLPR
GMDPRMYSLIQSSTLPR

SEQ ID NO: 78406 - protein, 17 aa, Artificial Sequence
  Description of Artificial Sequence: Synthetic peptide
  Seed: GMDPRMCSLMQGSTLPR
GMDPRMYSLIQSSTMPR

SEQ ID NO: 78407 - protein, 17 aa, Artificial Sequence
  Description of Artificial Sequence: Synthetic peptide
  Seed: GMDPRMCSLMQGSTLPR
GMDPRMYSLIQSSTNPR

SEQ ID NO: 78408 - protein, 17 aa, Artificial Sequence
  Description of Artificial Sequence: Synthetic peptide
  Seed: GMDPRMCSLMQGSTLPR
GMDPRMYSLIQSSTSPR

SEQ ID NO: 78409 - protein, 17 aa, Artificial Sequence
  Description of Artificial Sequence: Synthetic peptide
  Seed: GMDPRMCSLMQGSTLPR
GMDPRMYSLIQSSTTPR

SEQ ID NO: 78410 - protein, 17 aa, Artificial Sequence
  Description of Artificial Sequence: Synthetic peptide
  Seed: GMDPRMCSLMQGSTLPR
GMDPRMYSLIQSSTVPR

SEQ ID NO: 78411 - protein, 17 aa, Artificial Sequence
  Description of Artificial Sequence: Synthetic peptide
  Seed: GMDPRMCSLMQGSTLPR
GMDPRMYSLIQTSTAPR

SEQ ID NO: 78412 - protein, 17 aa, Artificial Sequence
  Description of Artificial Sequence: Synthetic peptide
  Seed: GMDPRMCSLMQGSTLPR
GMDPRMYSLIQTSTIPR

SEQ ID NO: 78413 - protein, 17 aa, Artificial Sequence
  Description of Artificial Sequence: Synthetic peptide
  Seed: GMDPRMCSLMQGSTLPR
GMDPRMYSLIQTSTLPR

SEQ ID NO: 78414 - protein, 17 aa, Artificial Sequence
  Description of Artificial Sequence: Synthetic peptide
  Seed: GMDPRMCSLMQGSTLPR
GMDPRMYSLIQTSTMPR

SEQ ID NO: 78415 - protein, 17 aa, Artificial Sequence
  Description of Artificial Sequence: Synthetic peptide
  Seed: GMDPRMCSLMQGSTLPR
GMDPRMYSLIQTSTNPR

SEQ ID NO: 78416 - protein, 17 aa, Artificial Sequence
  Description of Artificial Sequence: Synthetic peptide
  Seed: GMDPRMCSLMQGSTLPR
GMDPRMYSLIQTSTSPR

SEQ ID NO: 78417 - protein, 17 aa, Artificial Sequence
  Description of Artificial Sequence: Synthetic peptide
  Seed: GMDPRMCSLMQGSTLPR
GMDPRMYSLIQTSTTPR

SEQ ID NO: 78418 - protein, 17 aa, Artificial Sequence
  Description of Artificial Sequence: Synthetic peptide
  Seed: GMDPRMCSLMQGSTLPR
GMDPRMYSLIQTSTVPR

SEQ ID NO: 78419 - protein, 17 aa, Artificial Sequence
  Description of Artificial Sequence: Synthetic peptide
  Seed: GMDPRMCSLMQGSTLPR
GMDPRMYSLIQVSTAPR

SEQ ID NO: 78420 - protein, 17 aa, Artificial Sequence
  Description of Artificial Sequence: Synthetic peptide
  Seed: GMDPRMCSLMQGSTLPR
GMDPRMYSLIQVSTGPR

SEQ ID NO: 78421 - protein, 17 aa, Artificial Sequence
  Description of Artificial Sequence: Synthetic peptide
  Seed: GMDPRMCSLMQGSTLPR
GMDPRMYSLIQVSTHPR

SEQ ID NO: 78422 - protein, 17 aa, Artificial Sequence
  Description of Artificial Sequence: Synthetic peptide
  Seed: GMDPRMCSLMQGSTLPR
GMDPRMYSLIQVSTIPR

SEQ ID NO: 78423 - protein, 17 aa, Artificial Sequence
  Description of Artificial Sequence: Synthetic peptide
  Seed: GMDPRMCSLMQGSTLPR
GMDPRMYSLIQVSTLPR

SEQ ID NO: 78424 - protein, 17 aa, Artificial Sequence
  Description of Artificial Sequence: Synthetic peptide
  Seed: GMDPRMCSLMQGSTLPR
GMDPRMYSLIQVSTMPR

SEQ ID NO: 78425 - protein, 17 aa, Artificial Sequence
  Description of Artificial Sequence: Synthetic peptide
  Seed: GMDPRMCSLMQGSTLPR
GMDPRMYSLIQVSTNPR

SEQ ID NO: 78426 - protein, 17 aa, Artificial Sequence
  Description of Artificial Sequence: Synthetic peptide
  Seed: GMDPRMCSLMQGSTLPR
GMDPRMYSLIQVSTSPR

SEQ ID NO: 78427 - protein, 17 aa, Artificial Sequence
  Description of Artificial Sequence: Synthetic peptide
  Seed: GMDPRMCSLMQGSTLPR
GMDPRMYSLIQVSTTPR

SEQ ID NO: 78428 - protein, 17 aa, Artificial Sequence
  Description of Artificial Sequence: Synthetic peptide
  Seed: GMDPRMCSLMQGSTLPR
GMDPRMYSLIQVSTVPR

SEQ ID NO: 78429 - protein, 17 aa, Artificial Sequence
  Description of Artificial Sequence: Synthetic peptide
  Seed: GMDPRMCSLMQGSTLPR
GMDPRMYSLLQASTAPR

SEQ ID NO: 78430 - protein, 17 aa, Artificial Sequence
  Description of Artificial Sequence: Synthetic peptide
  Seed: GMDPRMCSLMQGSTLPR
GMDPRMYSLLQASTCPR

SEQ ID NO: 78431 - protein, 17 aa, Artificial Sequence
  Description of Artificial Sequence: Synthetic peptide
  Seed: GMDPRMCSLMQGSTLPR
GMDPRMYSLLQASTFPR

SEQ ID NO: 78432 - protein, 17 aa, Artificial Sequence
  Description of Artificial Sequence: Synthetic peptide
  Seed: GMDPRMCSLMQGSTLPR
GMDPRMYSLLQASTGPR

SEQ ID NO: 78433 - protein, 17 aa, Artificial Sequence
  Description of Artificial Sequence: Synthetic peptide
  Seed: GMDPRMCSLMQGSTLPR
GMDPRMYSLLQASTHPR

SEQ ID NO: 78434 - protein, 17 aa, Artificial Sequence
  Description of Artificial Sequence: Synthetic peptide
  Seed: GMDPRMCSLMQGSTLPR
GMDPRMYSLLQASTIPR

SEQ ID NO: 78435 - protein, 17 aa, Artificial Sequence
  Description of Artificial Sequence: Synthetic peptide
  Seed: GMDPRMCSLMQGSTLPR
GMDPRMYSLLQASTLPR

SEQ ID NO: 78436 - protein, 17 aa, Artificial Sequence
  Description of Artificial Sequence: Synthetic peptide
  Seed: GMDPRMCSLMQGSTLPR
GMDPRMYSLLQASTMPR

SEQ ID NO: 78437 - protein, 17 aa, Artificial Sequence
  Description of Artificial Sequence: Synthetic peptide
  Seed: GMDPRMCSLMQGSTLPR
GMDPRMYSLLQASTNPR

SEQ ID NO: 78438 - protein, 17 aa, Artificial Sequence
  Description of Artificial Sequence: Synthetic peptide
  Seed: GMDPRMCSLMQGSTLPR
GMDPRMYSLLQASTPPR

SEQ ID NO: 78439 - protein, 17 aa, Artificial Sequence
  Description of Artificial Sequence: Synthetic peptide
  Seed: GMDPRMCSLMQGSTLPR
GMDPRMYSLLQASTQPR

SEQ ID NO: 78440 - protein, 17 aa, Artificial Sequence
  Description of Artificial Sequence: Synthetic peptide
  Seed: GMDPRMCSLMQGSTLPR
GMDPRMYSLLQASTSPR

SEQ ID NO: 78441 - protein, 17 aa, Artificial Sequence
  Description of Artificial Sequence: Synthetic peptide
  Seed: GMDPRMCSLMQGSTLPR
GMDPRMYSLLQASTTPR

SEQ ID NO: 78442 - protein, 17 aa, Artificial Sequence
  Description of Artificial Sequence: Synthetic peptide
  Seed: GMDPRMCSLMQGSTLPR
GMDPRMYSLLQASTVPR

SEQ ID NO: 78443 - protein, 17 aa, Artificial Sequence
  Description of Artificial Sequence: Synthetic peptide
  Seed: GMDPRMCSLMQGSTLPR
GMDPRMYSLLQGSTAPR

SEQ ID NO: 78444 - protein, 17 aa, Artificial Sequence
  Description of Artificial Sequence: Synthetic peptide
  Seed: GMDPRMCSLMQGSTLPR
GMDPRMYSLLQGSTCPR

SEQ ID NO: 78445 - protein, 17 aa, Artificial Sequence
  Description of Artificial Sequence: Synthetic peptide
  Seed: GMDPRMCSLMQGSTLPR
GMDPRMYSLLQGSTFPR

SEQ ID NO: 78446 - protein, 17 aa, Artificial Sequence
  Description of Artificial Sequence: Synthetic peptide
  Seed: GMDPRMCSLMQGSTLPR
GMDPRMYSLLQGSTGPR

SEQ ID NO: 78447 - protein, 17 aa, Artificial Sequence
  Description of Artificial Sequence: Synthetic peptide
  Seed: GMDPRMCSLMQGSTLPR
GMDPRMYSLLQGSTIPR

SEQ ID NO: 78448 - protein, 17 aa, Artificial Sequence
  Description of Artificial Sequence: Synthetic peptide
  Seed: GMDPRMCSLMQGSTLPR
GMDPRMYSLLQGSTLPR

SEQ ID NO: 78449 - protein, 17 aa, Artificial Sequence
  Description of Artificial Sequence: Synthetic peptide
  Seed: GMDPRMCSLMQGSTLPR
GMDPRMYSLLQGSTMPR

SEQ ID NO: 78450 - protein, 17 aa, Artificial Sequence
  Description of Artificial Sequence: Synthetic peptide
  Seed: GMDPRMCSLMQGSTLPR
GMDPRMYSLLQGSTNPR

SEQ ID NO: 78451 - protein, 17 aa, Artificial Sequence
  Description of Artificial Sequence: Synthetic peptide
  Seed: GMDPRMCSLMQGSTLPR
GMDPRMYSLLQGSTSPR

SEQ ID NO: 78452 - protein, 17 aa, Artificial Sequence
  Description of Artificial Sequence: Synthetic peptide
  Seed: GMDPRMCSLMQGSTLPR
GMDPRMYSLLQGSTTPR

SEQ ID NO: 78453 - protein, 17 aa, Artificial Sequence
  Description of Artificial Sequence: Synthetic peptide
  Seed: GMDPRMCSLMQGSTLPR
GMDPRMYSLLQGSTVPR

SEQ ID NO: 78454 - protein, 17 aa, Artificial Sequence
  Description of Artificial Sequence: Synthetic peptide
  Seed: GMDPRMCSLMQGSTLPR
GMDPRMYSLLQISTAPR

SEQ ID NO: 78455 - protein, 17 aa, Artificial Sequence
  Description of Artificial Sequence: Synthetic peptide
  Seed: GMDPRMCSLMQGSTLPR
GMDPRMYSLLQISTGPR

SEQ ID NO: 78456 - protein, 17 aa, Artificial Sequence
  Description of Artificial Sequence: Synthetic peptide
  Seed: GMDPRMCSLMQGSTLPR
GMDPRMYSLLQISTHPR

SEQ ID NO: 78457 - protein, 17 aa, Artificial Sequence
  Description of Artificial Sequence: Synthetic peptide
  Seed: GMDPRMCSLMQGSTLPR
GMDPRMYSLLQISTIPR

SEQ ID NO: 78458 - protein, 17 aa, Artificial Sequence
  Description of Artificial Sequence: Synthetic peptide
  Seed: GMDPRMCSLMQGSTLPR
GMDPRMYSLLQISTLPR

SEQ ID NO: 78459 - protein, 17 aa, Artificial Sequence
  Description of Artificial Sequence: Synthetic peptide
  Seed: GMDPRMCSLMQGSTLPR
GMDPRMYSLLQISTMPR

SEQ ID NO: 78460 - protein, 17 aa, Artificial Sequence
  Description of Artificial Sequence: Synthetic peptide
  Seed: GMDPRMCSLMQGSTLPR
GMDPRMYSLLQISTNPR

SEQ ID NO: 78461 - protein, 17 aa, Artificial Sequence
  Description of Artificial Sequence: Synthetic peptide
  Seed: GMDPRMCSLMQGSTLPR
GMDPRMYSLLQISTSPR

SEQ ID NO: 78462 - protein, 17 aa, Artificial Sequence
  Description of Artificial Sequence: Synthetic peptide
  Seed: GMDPRMCSLMQGSTLPR
GMDPRMYSLLQISTTPR

SEQ ID NO: 78463 - protein, 17 aa, Artificial Sequence
  Description of Artificial Sequence: Synthetic peptide
  Seed: GMDPRMCSLMQGSTLPR
GMDPRMYSLLQISTVPR

SEQ ID NO: 78464 - protein, 17 aa, Artificial Sequence
  Description of Artificial Sequence: Synthetic peptide
  Seed: GMDPRMCSLMQGSTLPR
GMDPRMYSLLQLSTAPR

SEQ ID NO: 78465 - protein, 17 aa, Artificial Sequence
  Description of Artificial Sequence: Synthetic peptide
  Seed: GMDPRMCSLMQGSTLPR
GMDPRMYSLLQLSTNPR

SEQ ID NO: 78466 - protein, 17 aa, Artificial Sequence
  Description of Artificial Sequence: Synthetic peptide
  Seed: GMDPRMCSLMQGSTLPR
GMDPRMYSLLQLSTSPR

SEQ ID NO: 78467 - protein, 17 aa, Artificial Sequence
  Description of Artificial Sequence: Synthetic peptide
  Seed: GMDPRMCSLMQGSTLPR
GMDPRMYSLLQLSTVPR

SEQ ID NO: 78468 - protein, 17 aa, Artificial Sequence
  Description of Artificial Sequence: Synthetic peptide
  Seed: GMDPRMCSLMQGSTLPR
GMDPRMYSLLQMSTAPR

SEQ ID NO: 78469 - protein, 17 aa, Artificial Sequence
  Description of Artificial Sequence: Synthetic peptide
  Seed: GMDPRMCSLMQGSTLPR
GMDPRMYSLLQMSTNPR

SEQ ID NO: 78470 - protein, 17 aa, Artificial Sequence
  Description of Artificial Sequence: Synthetic peptide
  Seed: GMDPRMCSLMQGSTLPR
GMDPRMYSLLQMSTSPR

SEQ ID NO: 78471 - protein, 17 aa, Artificial Sequence
  Description of Artificial Sequence: Synthetic peptide
  Seed: GMDPRMCSLMQGSTLPR
GMDPRMYSLLQNSTAPR

SEQ ID NO: 78472 - protein, 17 aa, Artificial Sequence
  Description of Artificial Sequence: Synthetic peptide
  Seed: GMDPRMCSLMQGSTLPR
GMDPRMYSLLQNSTIPR

SEQ ID NO: 78473 - protein, 17 aa, Artificial Sequence
  Description of Artificial Sequence: Synthetic peptide
  Seed: GMDPRMCSLMQGSTLPR
GMDPRMYSLLQNSTLPR

SEQ ID NO: 78474 - protein, 17 aa, Artificial Sequence
  Description of Artificial Sequence: Synthetic peptide
  Seed: GMDPRMCSLMQGSTLPR
GMDPRMYSLLQNSTMPR

SEQ ID NO: 78475 - protein, 17 aa, Artificial Sequence
  Description of Artificial Sequence: Synthetic peptide
  Seed: GMDPRMCSLMQGSTLPR
GMDPRMYSLLQNSTNPR

SEQ ID NO: 78476 - protein, 17 aa, Artificial Sequence
  Description of Artificial Sequence: Synthetic peptide
  Seed: GMDPRMCSLMQGSTLPR
GMDPRMYSLLQNSTSPR

SEQ ID NO: 78477 - protein, 17 aa, Artificial Sequence
  Description of Artificial Sequence: Synthetic peptide
  Seed: GMDPRMCSLMQGSTLPR
GMDPRMYSLLQNSTTPR

SEQ ID NO: 78478 - protein, 17 aa, Artificial Sequence
  Description of Artificial Sequence: Synthetic peptide
  Seed: GMDPRMCSLMQGSTLPR
GMDPRMYSLLQNSTVPR

SEQ ID NO: 78479 - protein, 17 aa, Artificial Sequence
  Description of Artificial Sequence: Synthetic peptide
  Seed: GMDPRMCSLMQGSTLPR
GMDPRMYSLLQPSTAPR

SEQ ID NO: 78480 - protein, 17 aa, Artificial Sequence
  Description of Artificial Sequence: Synthetic peptide
  Seed: GMDPRMCSLMQGSTLPR
GMDPRMYSLLQPSTGPR

SEQ ID NO: 78481 - protein, 17 aa, Artificial Sequence
  Description of Artificial Sequence: Synthetic peptide
  Seed: GMDPRMCSLMQGSTLPR
GMDPRMYSLLQPSTHPR

SEQ ID NO: 78482 - protein, 17 aa, Artificial Sequence
  Description of Artificial Sequence: Synthetic peptide
  Seed: GMDPRMCSLMQGSTLPR
GMDPRMYSLLQPSTIPR

SEQ ID NO: 78483 - protein, 17 aa, Artificial Sequence
  Description of Artificial Sequence: Synthetic peptide
  Seed: GMDPRMCSLMQGSTLPR
GMDPRMYSLLQPSTLPR

SEQ ID NO: 78484 - protein, 17 aa, Artificial Sequence
  Description of Artificial Sequence: Synthetic peptide
  Seed: GMDPRMCSLMQGSTLPR
GMDPRMYSLLQPSTMPR

SEQ ID NO: 78485 - protein, 17 aa, Artificial Sequence
  Description of Artificial Sequence: Synthetic peptide
  Seed: GMDPRMCSLMQGSTLPR
GMDPRMYSLLQPSTNPR

SEQ ID NO: 78486 - protein, 17 aa, Artificial Sequence
  Description of Artificial Sequence: Synthetic peptide
  Seed: GMDPRMCSLMQGSTLPR
GMDPRMYSLLQPSTPPR

SEQ ID NO: 78487 - protein, 17 aa, Artificial Sequence
  Description of Artificial Sequence: Synthetic peptide
  Seed: GMDPRMCSLMQGSTLPR
GMDPRMYSLLQPSTQPR

SEQ ID NO: 78488 - protein, 17 aa, Artificial Sequence
  Description of Artificial Sequence: Synthetic peptide
  Seed: GMDPRMCSLMQGSTLPR
GMDPRMYSLLQPSTSPR

SEQ ID NO: 78489 - protein, 17 aa, Artificial Sequence
  Description of Artificial Sequence: Synthetic peptide
  Seed: GMDPRMCSLMQGSTLPR
GMDPRMYSLLQPSTTPR

SEQ ID NO: 78490 - protein, 17 aa, Artificial Sequence
  Description of Artificial Sequence: Synthetic peptide
  Seed: GMDPRMCSLMQGSTLPR
GMDPRMYSLLQPSTVPR

SEQ ID NO: 78491 - protein, 17 aa, Artificial Sequence
  Description of Artificial Sequence: Synthetic peptide
  Seed: GMDPRMCSLMQGSTLPR
GMDPRMYSLLQSSTAPR

SEQ ID NO: 78492 - protein, 17 aa, Artificial Sequence
  Description of Artificial Sequence: Synthetic peptide
  Seed: GMDPRMCSLMQGSTLPR
GMDPRMYSLLQSSTCPR

SEQ ID NO: 78493 - protein, 17 aa, Artificial Sequence
  Description of Artificial Sequence: Synthetic peptide
  Seed: GMDPRMCSLMQGSTLPR
GMDPRMYSLLQSSTGPR

SEQ ID NO: 78494 - protein, 17 aa, Artificial Sequence
  Description of Artificial Sequence: Synthetic peptide
  Seed: GMDPRMCSLMQGSTLPR
GMDPRMYSLLQSSTHPR

SEQ ID NO: 78495 - protein, 17 aa, Artificial Sequence
  Description of Artificial Sequence: Synthetic peptide
  Seed: GMDPRMCSLMQGSTLPR
GMDPRMYSLLQSSTIPR

SEQ ID NO: 78496 - protein, 17 aa, Artificial Sequence
  Description of Artificial Sequence: Synthetic peptide
  Seed: GMDPRMCSLMQGSTLPR
GMDPRMYSLLQSSTLPR

SEQ ID NO: 78497 - protein, 17 aa, Artificial Sequence
  Description of Artificial Sequence: Synthetic peptide
  Seed: GMDPRMCSLMQGSTLPR
GMDPRMYSLLQSSTMPR

SEQ ID NO: 78498 - protein, 17 aa, Artificial Sequence
  Description of Artificial Sequence: Synthetic peptide
  Seed: GMDPRMCSLMQGSTLPR
GMDPRMYSLLQSSTNPR

SEQ ID NO: 78499 - protein, 17 aa, Artificial Sequence
  Description of Artificial Sequence: Synthetic peptide
  Seed: GMDPRMCSLMQGSTLPR
GMDPRMYSLLQSSTSPR

SEQ ID NO: 78500 - protein, 17 aa, Artificial Sequence
  Description of Artificial Sequence: Synthetic peptide
  Seed: GMDPRMCSLMQGSTLPR
GMDPRMYSLLQSSTTPR

SEQ ID NO: 78501 - protein, 17 aa, Artificial Sequence
  Description of Artificial Sequence: Synthetic peptide
  Seed: GMDPRMCSLMQGSTLPR
GMDPRMYSLLQSSTVPR

SEQ ID NO: 78502 - protein, 17 aa, Artificial Sequence
  Description of Artificial Sequence: Synthetic peptide
  Seed: GMDPRMCSLMQGSTLPR
GMDPRMYSLLQTSTAPR

SEQ ID NO: 78503 - protein, 17 aa, Artificial Sequence
  Description of Artificial Sequence: Synthetic peptide
  Seed: GMDPRMCSLMQGSTLPR
GMDPRMYSLLQTSTGPR

SEQ ID NO: 78504 - protein, 17 aa, Artificial Sequence
  Description of Artificial Sequence: Synthetic peptide
  Seed: GMDPRMCSLMQGSTLPR
GMDPRMYSLLQTSTHPR

SEQ ID NO: 78505 - protein, 17 aa, Artificial Sequence
  Description of Artificial Sequence: Synthetic peptide
  Seed: GMDPRMCSLMQGSTLPR
GMDPRMYSLLQTSTIPR

SEQ ID NO: 78506 - protein, 17 aa, Artificial Sequence
  Description of Artificial Sequence: Synthetic peptide
  Seed: GMDPRMCSLMQGSTLPR
GMDPRMYSLLQTSTLPR

SEQ ID NO: 78507 - protein, 17 aa, Artificial Sequence
  Description of Artificial Sequence: Synthetic peptide
  Seed: GMDPRMCSLMQGSTLPR
GMDPRMYSLLQTSTMPR

SEQ ID NO: 78508 - protein, 17 aa, Artificial Sequence
  Description of Artificial Sequence: Synthetic peptide
  Seed: GMDPRMCSLMQGSTLPR
GMDPRMYSLLQTSTNPR

SEQ ID NO: 78509 - protein, 17 aa, Artificial Sequence
  Description of Artificial Sequence: Synthetic peptide
  Seed: GMDPRMCSLMQGSTLPR
GMDPRMYSLLQTSTSPR

SEQ ID NO: 78510 - protein, 17 aa, Artificial Sequence
  Description of Artificial Sequence: Synthetic peptide
  Seed: GMDPRMCSLMQGSTLPR
GMDPRMYSLLQTSTTPR

SEQ ID NO: 78511 - protein, 17 aa, Artificial Sequence
  Description of Artificial Sequence: Synthetic peptide
  Seed: GMDPRMCSLMQGSTLPR
GMDPRMYSLLQTSTVPR

SEQ ID NO: 78512 - protein, 17 aa, Artificial Sequence
  Description of Artificial Sequence: Synthetic peptide
  Seed: GMDPRMCSLMQGSTLPR
GMDPRMYSLLQVSTAPR

SEQ ID NO: 78513 - protein, 17 aa, Artificial Sequence
  Description of Artificial Sequence: Synthetic peptide
  Seed: GMDPRMCSLMQGSTLPR
GMDPRMYSLLQVSTGPR

SEQ ID NO: 78514 - protein, 17 aa, Artificial Sequence
  Description of Artificial Sequence: Synthetic peptide
  Seed: GMDPRMCSLMQGSTLPR
GMDPRMYSLLQVSTHPR

SEQ ID NO: 78515 - protein, 17 aa, Artificial Sequence
  Description of Artificial Sequence: Synthetic peptide
  Seed: GMDPRMCSLMQGSTLPR
GMDPRMYSLLQVSTIPR

SEQ ID NO: 78516 - protein, 17 aa, Artificial Sequence
  Description of Artificial Sequence: Synthetic peptide
  Seed: GMDPRMCSLMQGSTLPR
GMDPRMYSLLQVSTLPR

SEQ ID NO: 78517 - protein, 17 aa, Artificial Sequence
  Description of Artificial Sequence: Synthetic peptide
  Seed: GMDPRMCSLMQGSTLPR
GMDPRMYSLLQVSTMPR

SEQ ID NO: 78518 - protein, 17 aa, Artificial Sequence
  Description of Artificial Sequence: Synthetic peptide
  Seed: GMDPRMCSLMQGSTLPR
GMDPRMYSLLQVSTNPR

SEQ ID NO: 78519 - protein, 17 aa, Artificial Sequence
  Description of Artificial Sequence: Synthetic peptide
  Seed: GMDPRMCSLMQGSTLPR
GMDPRMYSLLQVSTQPR

SEQ ID NO: 78520 - protein, 17 aa, Artificial Sequence
  Description of Artificial Sequence: Synthetic peptide
  Seed: GMDPRMCSLMQGSTLPR
GMDPRMYSLLQVSTSPR

SEQ ID NO: 78521 - protein, 17 aa, Artificial Sequence
  Description of Artificial Sequence: Synthetic peptide
  Seed: GMDPRMCSLMQGSTLPR
GMDPRMYSLLQVSTTPR

SEQ ID NO: 78522 - protein, 17 aa, Artificial Sequence
  Description of Artificial Sequence: Synthetic peptide
  Seed: GMDPRMCSLMQGSTLPR
GMDPRMYSLLQVSTVPR

SEQ ID NO: 78523 - protein, 17 aa, Artificial Sequence
  Description of Artificial Sequence: Synthetic peptide
  Seed: GMDPRMCSLMQGSTLPR
GMDPRMYSLMQASTAPR

SEQ ID NO: 78524 - protein, 17 aa, Artificial Sequence
  Description of Artificial Sequence: Synthetic peptide
  Seed: GMDPRMCSLMQGSTLPR
GMDPRMYSLMQASTCPR

SEQ ID NO: 78525 - protein, 17 aa, Artificial Sequence
  Description of Artificial Sequence: Synthetic peptide
  Seed: GMDPRMCSLMQGSTLPR
GMDPRMYSLMQASTFPR

SEQ ID NO: 78526 - protein, 17 aa, Artificial Sequence
  Description of Artificial Sequence: Synthetic peptide
  Seed: GMDPRMCSLMQGSTLPR
GMDPRMYSLMQASTGPR

SEQ ID NO: 78527 - protein, 17 aa, Artificial Sequence
  Description of Artificial Sequence: Synthetic peptide
  Seed: GMDPRMCSLMQGSTLPR
GMDPRMYSLMQASTHPR

SEQ ID NO: 78528 - protein, 17 aa, Artificial Sequence
  Description of Artificial Sequence: Synthetic peptide
  Seed: GMDPRMCSLMQGSTLPR
GMDPRMYSLMQASTIPR

SEQ ID NO: 78529 - protein, 17 aa, Artificial Sequence
  Description of Artificial Sequence: Synthetic peptide
  Seed: GMDPRMCSLMQGSTLPR
GMDPRMYSLMQASTLPR

SEQ ID NO: 78530 - protein, 17 aa, Artificial Sequence
  Description of Artificial Sequence: Synthetic peptide
  Seed: GMDPRMCSLMQGSTLPR
GMDPRMYSLMQASTMPR

SEQ ID NO: 78531 - protein, 17 aa, Artificial Sequence
  Description of Artificial Sequence: Synthetic peptide
  Seed: GMDPRMCSLMQGSTLPR
GMDPRMYSLMQASTNPR

SEQ ID NO: 78532 - protein, 17 aa, Artificial Sequence
  Description of Artificial Sequence: Synthetic peptide
  Seed: GMDPRMCSLMQGSTLPR
GMDPRMYSLMQASTPPR

SEQ ID NO: 78533 - protein, 17 aa, Artificial Sequence
  Description of Artificial Sequence: Synthetic peptide
  Seed: GMDPRMCSLMQGSTLPR
GMDPRMYSLMQASTQPR

SEQ ID NO: 78534 - protein, 17 aa, Artificial Sequence
  Description of Artificial Sequence: Synthetic peptide
  Seed: GMDPRMCSLMQGSTLPR
GMDPRMYSLMQASTSPR

SEQ ID NO: 78535 - protein, 17 aa, Artificial Sequence
  Description of Artificial Sequence: Synthetic peptide
  Seed: GMDPRMCSLMQGSTLPR
GMDPRMYSLMQASTTPR

SEQ ID NO: 78536 - protein, 17 aa, Artificial Sequence
  Description of Artificial Sequence: Synthetic peptide
  Seed: GMDPRMCSLMQGSTLPR
GMDPRMYSLMQASTVPR

SEQ ID NO: 78537 - protein, 17 aa, Artificial Sequence
  Description of Artificial Sequence: Synthetic peptide
  Seed: GMDPRMCSLMQGSTLPR
GMDPRMYSLMQGSTAPR

SEQ ID NO: 78538 - protein, 17 aa, Artificial Sequence
  Description of Artificial Sequence: Synthetic peptide
  Seed: GMDPRMCSLMQGSTLPR
GMDPRMYSLMQGSTFPR

SEQ ID NO: 78539 - protein, 17 aa, Artificial Sequence
  Description of Artificial Sequence: Synthetic peptide
  Seed: GMDPRMCSLMQGSTLPR
GMDPRMYSLMQGSTGPR

SEQ ID NO: 78540 - protein, 17 aa, Artificial Sequence
  Description of Artificial Sequence: Synthetic peptide
  Seed: GMDPRMCSLMQGSTLPR
GMDPRMYSLMQGSTIPR

SEQ ID NO: 78541 - protein, 17 aa, Artificial Sequence
  Description of Artificial Sequence: Synthetic peptide
  Seed: GMDPRMCSLMQGSTLPR
GMDPRMYSLMQGSTLPR

SEQ ID NO: 78542 - protein, 17 aa, Artificial Sequence
  Description of Artificial Sequence: Synthetic peptide
  Seed: GMDPRMCSLMQGSTLPR
GMDPRMYSLMQGSTMPR

SEQ ID NO: 78543 - protein, 17 aa, Artificial Sequence
  Description of Artificial Sequence: Synthetic peptide
  Seed: GMDPRMCSLMQGSTLPR
GMDPRMYSLMQGSTNPR

SEQ ID NO: 78544 - protein, 17 aa, Artificial Sequence
  Description of Artificial Sequence: Synthetic peptide
  Seed: GMDPRMCSLMQGSTLPR
GMDPRMYSLMQGSTSPR

SEQ ID NO: 78545 - protein, 17 aa, Artificial Sequence
  Description of Artificial Sequence: Synthetic peptide
  Seed: GMDPRMCSLMQGSTLPR
GMDPRMYSLMQGSTTPR

SEQ ID NO: 78546 - protein, 17 aa, Artificial Sequence
  Description of Artificial Sequence: Synthetic peptide
  Seed: GMDPRMCSLMQGSTLPR
GMDPRMYSLMQGSTVPR

SEQ ID NO: 78547 - protein, 17 aa, Artificial Sequence
  Description of Artificial Sequence: Synthetic peptide
  Seed: GMDPRMCSLMQGSTLPR
GMDPRMYSLMQISTAPR

SEQ ID NO: 78548 - protein, 17 aa, Artificial Sequence
  Description of Artificial Sequence: Synthetic peptide
  Seed: GMDPRMCSLMQGSTLPR
GMDPRMYSLMQISTGPR

SEQ ID NO: 78549 - protein, 17 aa, Artificial Sequence
  Description of Artificial Sequence: Synthetic peptide
  Seed: GMDPRMCSLMQGSTLPR
GMDPRMYSLMQISTHPR

SEQ ID NO: 78550 - protein, 17 aa, Artificial Sequence
  Description of Artificial Sequence: Synthetic peptide
  Seed: GMDPRMCSLMQGSTLPR
GMDPRMYSLMQISTIPR

SEQ ID NO: 78551 - protein, 17 aa, Artificial Sequence
  Description of Artificial Sequence: Synthetic peptide
  Seed: GMDPRMCSLMQGSTLPR
GMDPRMYSLMQISTLPR

SEQ ID NO: 78552 - protein, 17 aa, Artificial Sequence
  Description of Artificial Sequence: Synthetic peptide
  Seed: GMDPRMCSLMQGSTLPR
GMDPRMYSLMQISTMPR

SEQ ID NO: 78553 - protein, 17 aa, Artificial Sequence
  Description of Artificial Sequence: Synthetic peptide
  Seed: GMDPRMCSLMQGSTLPR
GMDPRMYSLMQISTNPR

SEQ ID NO: 78554 - protein, 17 aa, Artificial Sequence
  Description of Artificial Sequence: Synthetic peptide
  Seed: GMDPRMCSLMQGSTLPR
GMDPRMYSLMQISTSPR

SEQ ID NO: 78555 - protein, 17 aa, Artificial Sequence
  Description of Artificial Sequence: Synthetic peptide
  Seed: GMDPRMCSLMQGSTLPR
GMDPRMYSLMQISTTPR

SEQ ID NO: 78556 - protein, 17 aa, Artificial Sequence
  Description of Artificial Sequence: Synthetic peptide
  Seed: GMDPRMCSLMQGSTLPR
GMDPRMYSLMQISTVPR

SEQ ID NO: 78557 - protein, 17 aa, Artificial Sequence
  Description of Artificial Sequence: Synthetic peptide
  Seed: GMDPRMCSLMQGSTLPR
GMDPRMYSLMQLSTAPR

SEQ ID NO: 78558 - protein, 17 aa, Artificial Sequence
  Description of Artificial Sequence: Synthetic peptide
  Seed: GMDPRMCSLMQGSTLPR
GMDPRMYSLMQLSTLPR

SEQ ID NO: 78559 - protein, 17 aa, Artificial Sequence
  Description of Artificial Sequence: Synthetic peptide
  Seed: GMDPRMCSLMQGSTLPR
GMDPRMYSLMQLSTNPR

SEQ ID NO: 78560 - protein, 17 aa, Artificial Sequence
  Description of Artificial Sequence: Synthetic peptide
  Seed: GMDPRMCSLMQGSTLPR
GMDPRMYSLMQLSTSPR

SEQ ID NO: 78561 - protein, 17 aa, Artificial Sequence
  Description of Artificial Sequence: Synthetic peptide
  Seed: GMDPRMCSLMQGSTLPR
GMDPRMYSLMQLSTTPR

SEQ ID NO: 78562 - protein, 17 aa, Artificial Sequence
  Description of Artificial Sequence: Synthetic peptide
  Seed: GMDPRMCSLMQGSTLPR
GMDPRMYSLMQLSTVPR

SEQ ID NO: 78563 - protein, 17 aa, Artificial Sequence
  Description of Artificial Sequence: Synthetic peptide
  Seed: GMDPRMCSLMQGSTLPR
GMDPRMYSLMQMSTAPR

SEQ ID NO: 78564 - protein, 17 aa, Artificial Sequence
  Description of Artificial Sequence: Synthetic peptide
  Seed: GMDPRMCSLMQGSTLPR
GMDPRMYSLMQMSTNPR

SEQ ID NO: 78565 - protein, 17 aa, Artificial Sequence
  Description of Artificial Sequence: Synthetic peptide
  Seed: GMDPRMCSLMQGSTLPR
GMDPRMYSLMQMSTSPR

SEQ ID NO: 78566 - protein, 17 aa, Artificial Sequence
  Description of Artificial Sequence: Synthetic peptide
  Seed: GMDPRMCSLMQGSTLPR
GMDPRMYSLMQMSTVPR

SEQ ID NO: 78567 - protein, 17 aa, Artificial Sequence
  Description of Artificial Sequence: Synthetic peptide
  Seed: GMDPRMCSLMQGSTLPR
GMDPRMYSLMQNSTAPR

SEQ ID NO: 78568 - protein, 17 aa, Artificial Sequence
  Description of Artificial Sequence: Synthetic peptide
  Seed: GMDPRMCSLMQGSTLPR
GMDPRMYSLMQNSTIPR

SEQ ID NO: 78569 - protein, 17 aa, Artificial Sequence
  Description of Artificial Sequence: Synthetic peptide
  Seed: GMDPRMCSLMQGSTLPR
GMDPRMYSLMQNSTLPR

SEQ ID NO: 78570 - protein, 17 aa, Artificial Sequence
  Description of Artificial Sequence: Synthetic peptide
  Seed: GMDPRMCSLMQGSTLPR
GMDPRMYSLMQNSTMPR

SEQ ID NO: 78571 - protein, 17 aa, Artificial Sequence
  Description of Artificial Sequence: Synthetic peptide
  Seed: GMDPRMCSLMQGSTLPR
GMDPRMYSLMQNSTNPR

SEQ ID NO: 78572 - protein, 17 aa, Artificial Sequence
  Description of Artificial Sequence: Synthetic peptide
  Seed: GMDPRMCSLMQGSTLPR
GMDPRMYSLMQNSTSPR

SEQ ID NO: 78573 - protein, 17 aa, Artificial Sequence
  Description of Artificial Sequence: Synthetic peptide
  Seed: GMDPRMCSLMQGSTLPR
GMDPRMYSLMQNSTTPR

SEQ ID NO: 78574 - protein, 17 aa, Artificial Sequence
  Description of Artificial Sequence: Synthetic peptide
  Seed: GMDPRMCSLMQGSTLPR
GMDPRMYSLMQNSTVPR

SEQ ID NO: 78575 - protein, 17 aa, Artificial Sequence
  Description of Artificial Sequence: Synthetic peptide
  Seed: GMDPRMCSLMQGSTLPR
GMDPRMYSLMQPSTAPR

SEQ ID NO: 78576 - protein, 17 aa, Artificial Sequence
  Description of Artificial Sequence: Synthetic peptide
  Seed: GMDPRMCSLMQGSTLPR
GMDPRMYSLMQPSTGPR

SEQ ID NO: 78577 - protein, 17 aa, Artificial Sequence
  Description of Artificial Sequence: Synthetic peptide
  Seed: GMDPRMCSLMQGSTLPR
GMDPRMYSLMQPSTHPR

SEQ ID NO: 78578 - protein, 17 aa, Artificial Sequence
  Description of Artificial Sequence: Synthetic peptide
  Seed: GMDPRMCSLMQGSTLPR
GMDPRMYSLMQPSTIPR

SEQ ID NO: 78579 - protein, 17 aa, Artificial Sequence
  Description of Artificial Sequence: Synthetic peptide
  Seed: GMDPRMCSLMQGSTLPR
GMDPRMYSLMQPSTLPR

SEQ ID NO: 78580 - protein, 17 aa, Artificial Sequence
  Description of Artificial Sequence: Synthetic peptide
  Seed: GMDPRMCSLMQGSTLPR
GMDPRMYSLMQPSTMPR

SEQ ID NO: 78581 - protein, 17 aa, Artificial Sequence
  Description of Artificial Sequence: Synthetic peptide
  Seed: GMDPRMCSLMQGSTLPR
GMDPRMYSLMQPSTNPR

SEQ ID NO: 78582 - protein, 17 aa, Artificial Sequence
  Description of Artificial Sequence: Synthetic peptide
  Seed: GMDPRMCSLMQGSTLPR
GMDPRMYSLMQPSTPPR

SEQ ID NO: 78583 - protein, 17 aa, Artificial Sequence
  Description of Artificial Sequence: Synthetic peptide
  Seed: GMDPRMCSLMQGSTLPR
GMDPRMYSLMQPSTQPR

SEQ ID NO: 78584 - protein, 17 aa, Artificial Sequence
  Description of Artificial Sequence: Synthetic peptide
  Seed: GMDPRMCSLMQGSTLPR
GMDPRMYSLMQPSTSPR

SEQ ID NO: 78585 - protein, 17 aa, Artificial Sequence
  Description of Artificial Sequence: Synthetic peptide
  Seed: GMDPRMCSLMQGSTLPR
GMDPRMYSLMQPSTTPR

SEQ ID NO: 78586 - protein, 17 aa, Artificial Sequence
  Description of Artificial Sequence: Synthetic peptide
  Seed: GMDPRMCSLMQGSTLPR
GMDPRMYSLMQPSTVPR

SEQ ID NO: 78587 - protein, 17 aa, Artificial Sequence
  Description of Artificial Sequence: Synthetic peptide
  Seed: GMDPRMCSLMQGSTLPR
GMDPRMYSLMQSSTAPR

SEQ ID NO: 78588 - protein, 17 aa, Artificial Sequence
  Description of Artificial Sequence: Synthetic peptide
  Seed: GMDPRMCSLMQGSTLPR
GMDPRMYSLMQSSTGPR

SEQ ID NO: 78589 - protein, 17 aa, Artificial Sequence
  Description of Artificial Sequence: Synthetic peptide
  Seed: GMDPRMCSLMQGSTLPR
GMDPRMYSLMQSSTHPR

SEQ ID NO: 78590 - protein, 17 aa, Artificial Sequence
  Description of Artificial Sequence: Synthetic peptide
  Seed: GMDPRMCSLMQGSTLPR
GMDPRMYSLMQSSTIPR

SEQ ID NO: 78591 - protein, 17 aa, Artificial Sequence
  Description of Artificial Sequence: Synthetic peptide
  Seed: GMDPRMCSLMQGSTLPR
GMDPRMYSLMQSSTLPR

SEQ ID NO: 78592 - protein, 17 aa, Artificial Sequence
  Description of Artificial Sequence: Synthetic peptide
  Seed: GMDPRMCSLMQGSTLPR
GMDPRMYSLMQSSTMPR

SEQ ID NO: 78593 - protein, 17 aa, Artificial Sequence
  Description of Artificial Sequence: Synthetic peptide
  Seed: GMDPRMCSLMQGSTLPR
GMDPRMYSLMQSSTNPR

SEQ ID NO: 78594 - protein, 17 aa, Artificial Sequence
  Description of Artificial Sequence: Synthetic peptide
  Seed: GMDPRMCSLMQGSTLPR
GMDPRMYSLMQSSTQPR

SEQ ID NO: 78595 - protein, 17 aa, Artificial Sequence
  Description of Artificial Sequence: Synthetic peptide
  Seed: GMDPRMCSLMQGSTLPR
GMDPRMYSLMQSSTSPR

SEQ ID NO: 78596 - protein, 17 aa, Artificial Sequence
  Description of Artificial Sequence: Synthetic peptide
  Seed: GMDPRMCSLMQGSTLPR
GMDPRMYSLMQSSTTPR

SEQ ID NO: 78597 - protein, 17 aa, Artificial Sequence
  Description of Artificial Sequence: Synthetic peptide
  Seed: GMDPRMCSLMQGSTLPR
GMDPRMYSLMQSSTVPR

SEQ ID NO: 78598 - protein, 17 aa, Artificial Sequence
  Description of Artificial Sequence: Synthetic peptide
  Seed: GMDPRMCSLMQGSTLPR
GMDPRMYSLMQTSTAPR

SEQ ID NO: 78599 - protein, 17 aa, Artificial Sequence
  Description of Artificial Sequence: Synthetic peptide
  Seed: GMDPRMCSLMQGSTLPR
GMDPRMYSLMQTSTHPR

SEQ ID NO: 78600 - protein, 17 aa, Artificial Sequence
  Description of Artificial Sequence: Synthetic peptide
  Seed: GMDPRMCSLMQGSTLPR
GMDPRMYSLMQTSTIPR

SEQ ID NO: 78601 - protein, 17 aa, Artificial Sequence
  Description of Artificial Sequence: Synthetic peptide
  Seed: GMDPRMCSLMQGSTLPR
GMDPRMYSLMQTSTLPR

SEQ ID NO: 78602 - protein, 17 aa, Artificial Sequence
  Description of Artificial Sequence: Synthetic peptide
  Seed: GMDPRMCSLMQGSTLPR
GMDPRMYSLMQTSTMPR

SEQ ID NO: 78603 - protein, 17 aa, Artificial Sequence
  Description of Artificial Sequence: Synthetic peptide
  Seed: GMDPRMCSLMQGSTLPR
GMDPRMYSLMQTSTNPR

SEQ ID NO: 78604 - protein, 17 aa, Artificial Sequence
  Description of Artificial Sequence: Synthetic peptide
  Seed: GMDPRMCSLMQGSTLPR
GMDPRMYSLMQTSTSPR

SEQ ID NO: 78605 - protein, 17 aa, Artificial Sequence
  Description of Artificial Sequence: Synthetic peptide
  Seed: GMDPRMCSLMQGSTLPR
GMDPRMYSLMQTSTTPR

SEQ ID NO: 78606 - protein, 17 aa, Artificial Sequence
  Description of Artificial Sequence: Synthetic peptide
  Seed: GMDPRMCSLMQGSTLPR
GMDPRMYSLMQTSTVPR

SEQ ID NO: 78607 - protein, 17 aa, Artificial Sequence
  Description of Artificial Sequence: Synthetic peptide
  Seed: GMDPRMCSLMQGSTLPR
GMDPRMYSLMQVSTAPR

SEQ ID NO: 78608 - protein, 17 aa, Artificial Sequence
  Description of Artificial Sequence: Synthetic peptide
  Seed: GMDPRMCSLMQGSTLPR
GMDPRMYSLMQVSTGPR

SEQ ID NO: 78609 - protein, 17 aa, Artificial Sequence
  Description of Artificial Sequence: Synthetic peptide
  Seed: GMDPRMCSLMQGSTLPR
GMDPRMYSLMQVSTHPR

SEQ ID NO: 78610 - protein, 17 aa, Artificial Sequence
  Description of Artificial Sequence: Synthetic peptide
  Seed: GMDPRMCSLMQGSTLPR
GMDPRMYSLMQVSTIPR

SEQ ID NO: 78611 - protein, 17 aa, Artificial Sequence
  Description of Artificial Sequence: Synthetic peptide
  Seed: GMDPRMCSLMQGSTLPR
GMDPRMYSLMQVSTLPR

SEQ ID NO: 78612 - protein, 17 aa, Artificial Sequence
  Description of Artificial Sequence: Synthetic peptide
  Seed: GMDPRMCSLMQGSTLPR
GMDPRMYSLMQVSTMPR

SEQ ID NO: 78613 - protein, 17 aa, Artificial Sequence
  Description of Artificial Sequence: Synthetic peptide
  Seed: GMDPRMCSLMQGSTLPR
GMDPRMYSLMQVSTNPR

SEQ ID NO: 78614 - protein, 17 aa, Artificial Sequence
  Description of Artificial Sequence: Synthetic peptide
  Seed: GMDPRMCSLMQGSTLPR
GMDPRMYSLMQVSTQPR

SEQ ID NO: 78615 - protein, 17 aa, Artificial Sequence
  Description of Artificial Sequence: Synthetic peptide
  Seed: GMDPRMCSLMQGSTLPR
GMDPRMYSLMQVSTSPR

SEQ ID NO: 78616 - protein, 17 aa, Artificial Sequence
  Description of Artificial Sequence: Synthetic peptide
  Seed: GMDPRMCSLMQGSTLPR
GMDPRMYSLMQVSTTPR

SEQ ID NO: 78617 - protein, 17 aa, Artificial Sequence
  Description of Artificial Sequence: Synthetic peptide
  Seed: GMDPRMCSLMQGSTLPR
GMDPRMYSLMQVSTVPR

SEQ ID NO: 78618 - protein, 17 aa, Artificial Sequence
  Description of Artificial Sequence: Synthetic peptide
  Seed: GMDPRMCSLMQGSTLPR
GMDPRMYSLQQASTAPR

SEQ ID NO: 78619 - protein, 17 aa, Artificial Sequence
  Description of Artificial Sequence: Synthetic peptide
  Seed: GMDPRMCSLMQGSTLPR
GMDPRMYSLQQASTIPR

SEQ ID NO: 78620 - protein, 17 aa, Artificial Sequence
  Description of Artificial Sequence: Synthetic peptide
  Seed: GMDPRMCSLMQGSTLPR
GMDPRMYSLQQASTLPR

SEQ ID NO: 78621 - protein, 17 aa, Artificial Sequence
  Description of Artificial Sequence: Synthetic peptide
  Seed: GMDPRMCSLMQGSTLPR
GMDPRMYSLQQASTMPR

SEQ ID NO: 78622 - protein, 17 aa, Artificial Sequence
  Description of Artificial Sequence: Synthetic peptide
  Seed: GMDPRMCSLMQGSTLPR
GMDPRMYSLQQASTTPR

SEQ ID NO: 78623 - protein, 17 aa, Artificial Sequence
  Description of Artificial Sequence: Synthetic peptide
  Seed: GMDPRMCSLMQGSTLPR
GMDPRMYSLQQASTVPR

SEQ ID NO: 78624 - protein, 17 aa, Artificial Sequence
  Description of Artificial Sequence: Synthetic peptide
  Seed: GMDPRMCSLMQGSTLPR
GMDPRMYSLQQGSTAPR

SEQ ID NO: 78625 - protein, 17 aa, Artificial Sequence
  Description of Artificial Sequence: Synthetic peptide
  Seed: GMDPRMCSLMQGSTLPR
GMDPRMYSLQQGSTIPR

SEQ ID NO: 78626 - protein, 17 aa, Artificial Sequence
  Description of Artificial Sequence: Synthetic peptide
  Seed: GMDPRMCSLMQGSTLPR
GMDPRMYSLQQGSTLPR

SEQ ID NO: 78627 - protein, 17 aa, Artificial Sequence
  Description of Artificial Sequence: Synthetic peptide
  Seed: GMDPRMCSLMQGSTLPR
GMDPRMYSLQQGSTVPR

SEQ ID NO: 78628 - protein, 17 aa, Artificial Sequence
  Description of Artificial Sequence: Synthetic peptide
  Seed: GMDPRMCSLMQGSTLPR
GMDPRMYSLQQPSTIPR

SEQ ID NO: 78629 - protein, 17 aa, Artificial Sequence
  Description of Artificial Sequence: Synthetic peptide
  Seed: GMDPRMCSLMQGSTLPR
GMDPRMYSLQQPSTLPR

SEQ ID NO: 78630 - protein, 17 aa, Artificial Sequence
  Description of Artificial Sequence: Synthetic peptide
  Seed: GMDPRMCSLMQGSTLPR
GMDPRMYSLQQPSTVPR

SEQ ID NO: 78631 - protein, 17 aa, Artificial Sequence
  Description of Artificial Sequence: Synthetic peptide
  Seed: GMDPRMCSLMQGSTLPR
GMDPRMYSLQQSSTAPR

SEQ ID NO: 78632 - protein, 17 aa, Artificial Sequence
  Description of Artificial Sequence: Synthetic peptide
  Seed: GMDPRMCSLMQGSTLPR
GMDPRMYSLQQSSTIPR

SEQ ID NO: 78633 - protein, 17 aa, Artificial Sequence
  Description of Artificial Sequence: Synthetic peptide
  Seed: GMDPRMCSLMQGSTLPR
GMDPRMYSLQQSSTLPR

SEQ ID NO: 78634 - protein, 17 aa, Artificial Sequence
  Description of Artificial Sequence: Synthetic peptide
  Seed: GMDPRMCSLMQGSTLPR
GMDPRMYSLQQSSTVPR

SEQ ID NO: 78635 - protein, 17 aa, Artificial Sequence
  Description of Artificial Sequence: Synthetic peptide
  Seed: GMDPRMCSLMQGSTLPR
GMDPRMYSLQQVSTAPR

SEQ ID NO: 78636 - protein, 17 aa, Artificial Sequence
  Description of Artificial Sequence: Synthetic peptide
  Seed: GMDPRMCSLMQGSTLPR
GMDPRMYSLSQASTAPR

SEQ ID NO: 78637 - protein, 17 aa, Artificial Sequence
  Description of Artificial Sequence: Synthetic peptide
  Seed: GMDPRMCSLMQGSTLPR
GMDPRMYSLSQASTIPR

SEQ ID NO: 78638 - protein, 17 aa, Artificial Sequence
  Description of Artificial Sequence: Synthetic peptide
  Seed: GMDPRMCSLMQGSTLPR
GMDPRMYSLSQASTLPR

SEQ ID NO: 78639 - protein, 17 aa, Artificial Sequence
  Description of Artificial Sequence: Synthetic peptide
  Seed: GMDPRMCSLMQGSTLPR
GMDPRMYSLSQASTVPR

SEQ ID NO: 78640 - protein, 17 aa, Artificial Sequence
  Description of Artificial Sequence: Synthetic peptide
  Seed: GMDPRMCSLMQGSTLPR
GMDPRMYSLVQASTAPR

SEQ ID NO: 78641 - protein, 17 aa, Artificial Sequence
  Description of Artificial Sequence: Synthetic peptide
  Seed: GMDPRMCSLMQGSTLPR
GMDPRMYSLVQASTIPR

SEQ ID NO: 78642 - protein, 17 aa, Artificial Sequence
  Description of Artificial Sequence: Synthetic peptide
  Seed: GMDPRMCSLMQGSTLPR
GMDPRMYSLVQASTLPR

SEQ ID NO: 78643 - protein, 17 aa, Artificial Sequence
  Description of Artificial Sequence: Synthetic peptide
  Seed: GMDPRMCSLMQGSTLPR
GMDPRMYSLVQASTMPR

SEQ ID NO: 78644 - protein, 17 aa, Artificial Sequence
  Description of Artificial Sequence: Synthetic peptide
  Seed: GMDPRMCSLMQGSTLPR
GMDPRMYSLVQASTNPR

SEQ ID NO: 78645 - protein, 17 aa, Artificial Sequence
  Description of Artificial Sequence: Synthetic peptide
  Seed: GMDPRMCSLMQGSTLPR
GMDPRMYSLVQASTSPR

SEQ ID NO: 78646 - protein, 17 aa, Artificial Sequence
  Description of Artificial Sequence: Synthetic peptide
  Seed: GMDPRMCSLMQGSTLPR
GMDPRMYSLVQASTTPR

SEQ ID NO: 78647 - protein, 17 aa, Artificial Sequence
  Description of Artificial Sequence: Synthetic peptide
  Seed: GMDPRMCSLMQGSTLPR
GMDPRMYSLVQASTVPR

SEQ ID NO: 78648 - protein, 17 aa, Artificial Sequence
  Description of Artificial Sequence: Synthetic peptide
  Seed: GMDPRMCSLMQGSTLPR
GMDPRMYSLVQGSTAPR

SEQ ID NO: 78649 - protein, 17 aa, Artificial Sequence
  Description of Artificial Sequence: Synthetic peptide
  Seed: GMDPRMCSLMQGSTLPR
GMDPRMYSLVQGSTIPR

SEQ ID NO: 78650 - protein, 17 aa, Artificial Sequence
  Description of Artificial Sequence: Synthetic peptide
  Seed: GMDPRMCSLMQGSTLPR
GMDPRMYSLVQGSTLPR

SEQ ID NO: 78651 - protein, 17 aa, Artificial Sequence
  Description of Artificial Sequence: Synthetic peptide
  Seed: GMDPRMCSLMQGSTLPR
GMDPRMYSLVQGSTMPR

SEQ ID NO: 78652 - protein, 17 aa, Artificial Sequence
  Description of Artificial Sequence: Synthetic peptide
  Seed: GMDPRMCSLMQGSTLPR
GMDPRMYSLVQGSTVPR

SEQ ID NO: 78653 - protein, 17 aa, Artificial Sequence
  Description of Artificial Sequence: Synthetic peptide
  Seed: GMDPRMCSLMQGSTLPR
GMDPRMYSLVQISTAPR

SEQ ID NO: 78654 - protein, 17 aa, Artificial Sequence
  Description of Artificial Sequence: Synthetic peptide
  Seed: GMDPRMCSLMQGSTLPR
GMDPRMYSLVQISTSPR

SEQ ID NO: 78655 - protein, 17 aa, Artificial Sequence
  Description of Artificial Sequence: Synthetic peptide
  Seed: GMDPRMCSLMQGSTLPR
GMDPRMYSLVQPSTAPR

SEQ ID NO: 78656 - protein, 17 aa, Artificial Sequence
  Description of Artificial Sequence: Synthetic peptide
  Seed: GMDPRMCSLMQGSTLPR
GMDPRMYSLVQPSTIPR

SEQ ID NO: 78657 - protein, 17 aa, Artificial Sequence
  Description of Artificial Sequence: Synthetic peptide
  Seed: GMDPRMCSLMQGSTLPR
GMDPRMYSLVQPSTLPR

SEQ ID NO: 78658 - protein, 17 aa, Artificial Sequence
  Description of Artificial Sequence: Synthetic peptide
  Seed: GMDPRMCSLMQGSTLPR
GMDPRMYSLVQPSTNPR

SEQ ID NO: 78659 - protein, 17 aa, Artificial Sequence
  Description of Artificial Sequence: Synthetic peptide
  Seed: GMDPRMCSLMQGSTLPR
GMDPRMYSLVQPSTSPR

SEQ ID NO: 78660 - protein, 17 aa, Artificial Sequence
  Description of Artificial Sequence: Synthetic peptide
  Seed: GMDPRMCSLMQGSTLPR
GMDPRMYSLVQPSTTPR

SEQ ID NO: 78661 - protein, 17 aa, Artificial Sequence
  Description of Artificial Sequence: Synthetic peptide
  Seed: GMDPRMCSLMQGSTLPR
GMDPRMYSLVQPSTVPR

SEQ ID NO: 78662 - protein, 17 aa, Artificial Sequence
  Description of Artificial Sequence: Synthetic peptide
  Seed: GMDPRMCSLMQGSTLPR
GMDPRMYSLVQSSTAPR

SEQ ID NO: 78663 - protein, 17 aa, Artificial Sequence
  Description of Artificial Sequence: Synthetic peptide
  Seed: GMDPRMCSLMQGSTLPR
GMDPRMYSLVQSSTIPR

SEQ ID NO: 78664 - protein, 17 aa, Artificial Sequence
  Description of Artificial Sequence: Synthetic peptide
  Seed: GMDPRMCSLMQGSTLPR
GMDPRMYSLVQSSTLPR

SEQ ID NO: 78665 - protein, 17 aa, Artificial Sequence
  Description of Artificial Sequence: Synthetic peptide
  Seed: GMDPRMCSLMQGSTLPR
GMDPRMYSLVQSSTNPR

SEQ ID NO: 78666 - protein, 17 aa, Artificial Sequence
  Description of Artificial Sequence: Synthetic peptide
  Seed: GMDPRMCSLMQGSTLPR
GMDPRMYSLVQSSTSPR

SEQ ID NO: 78667 - protein, 17 aa, Artificial Sequence
  Description of Artificial Sequence: Synthetic peptide
  Seed: GMDPRMCSLMQGSTLPR
GMDPRMYSLVQSSTTPR

SEQ ID NO: 78668 - protein, 17 aa, Artificial Sequence
  Description of Artificial Sequence: Synthetic peptide
  Seed: GMDPRMCSLMQGSTLPR
GMDPRMYSLVQSSTVPR

SEQ ID NO: 78669 - protein, 17 aa, Artificial Sequence
  Description of Artificial Sequence: Synthetic peptide
  Seed: GMDPRMCSLMQGSTLPR
GMDPRMYSLVQTSTAPR

SEQ ID NO: 78670 - protein, 17 aa, Artificial Sequence
  Description of Artificial Sequence: Synthetic peptide
  Seed: GMDPRMCSLMQGSTLPR
GMDPRMYSLVQTSTNPR

SEQ ID NO: 78671 - protein, 17 aa, Artificial Sequence
  Description of Artificial Sequence: Synthetic peptide
  Seed: GMDPRMCSLMQGSTLPR
GMDPRMYSLVQTSTSPR

SEQ ID NO: 78672 - protein, 17 aa, Artificial Sequence
  Description of Artificial Sequence: Synthetic peptide
  Seed: GMDPRMCSLMQGSTLPR
GMDPRMYSLVQTSTVPR

SEQ ID NO: 78673 - protein, 17 aa, Artificial Sequence
  Description of Artificial Sequence: Synthetic peptide
  Seed: GMDPRMCSLMQGSTLPR
GMDPRMYSLVQVSTAPR

SEQ ID NO: 78674 - protein, 17 aa, Artificial Sequence
  Description of Artificial Sequence: Synthetic peptide
  Seed: GMDPRMCSLMQGSTLPR
GMDPRMYSLVQVSTNPR

SEQ ID NO: 78675 - protein, 17 aa, Artificial Sequence
  Description of Artificial Sequence: Synthetic peptide
  Seed: GMDPRMCSLMQGSTLPR
GMDPRMYSLVQVSTSPR

SEQ ID NO: 78676 - protein, 17 aa, Artificial Sequence
  Description of Artificial Sequence: Synthetic peptide
  Seed: GMDPRMCSLMQGSTLPR
GMDPRMYSLVQVSTTPR

SEQ ID NO: 78677 - protein, 17 aa, Artificial Sequence
  Description of Artificial Sequence: Synthetic peptide
  Seed: GMDPRMCSLMQGSTLPR
GMDPRMYSLVQVSTVPR

SEQ ID NO: 78678 - protein, 18 aa, Artificial Sequence
  Description of Artificial Sequence: Synthetic peptide
  Seed: GMDPRMCSLMQGSTLPRR
GMDPRMFSLAQASTIPRR

SEQ ID NO: 78679 - protein, 18 aa, Artificial Sequence
  Description of Artificial Sequence: Synthetic peptide
  Seed: GMDPRMCSLMQGSTLPRR
GMDPRMFSLAQASTLPRR

SEQ ID NO: 78680 - protein, 18 aa, Artificial Sequence
  Description of Artificial Sequence: Synthetic peptide
  Seed: GMDPRMCSLMQGSTLPRR
GMDPRMFSLAQASTVPRR

SEQ ID NO: 78681 - protein, 18 aa, Artificial Sequence
  Description of Artificial Sequence: Synthetic peptide
  Seed: GMDPRMCSLMQGSTLPRR
GMDPRMFSLAQGSTLPRR

SEQ ID NO: 78682 - protein, 18 aa, Artificial Sequence
  Description of Artificial Sequence: Synthetic peptide
  Seed: GMDPRMCSLMQGSTLPRR
GMDPRMFSLAQSSTLPRR

SEQ ID NO: 78683 - protein, 18 aa, Artificial Sequence
  Description of Artificial Sequence: Synthetic peptide
  Seed: GMDPRMCSLMQGSTLPRR
GMDPRMFSLIQASTAPRR

SEQ ID NO: 78684 - protein, 18 aa, Artificial Sequence
  Description of Artificial Sequence: Synthetic peptide
  Seed: GMDPRMCSLMQGSTLPRR
GMDPRMFSLIQASTIPRR

SEQ ID NO: 78685 - protein, 18 aa, Artificial Sequence
  Description of Artificial Sequence: Synthetic peptide
  Seed: GMDPRMCSLMQGSTLPRR
GMDPRMFSLIQASTLPRR

SEQ ID NO: 78686 - protein, 18 aa, Artificial Sequence
  Description of Artificial Sequence: Synthetic peptide
  Seed: GMDPRMCSLMQGSTLPRR
GMDPRMFSLIQASTVPRR

SEQ ID NO: 78687 - protein, 18 aa, Artificial Sequence
  Description of Artificial Sequence: Synthetic peptide
  Seed: GMDPRMCSLMQGSTLPRR
GMDPRMFSLIQGSTAPRR

SEQ ID NO: 78688 - protein, 18 aa, Artificial Sequence
  Description of Artificial Sequence: Synthetic peptide
  Seed: GMDPRMCSLMQGSTLPRR
GMDPRMFSLIQGSTIPRR

SEQ ID NO: 78689 - protein, 18 aa, Artificial Sequence
  Description of Artificial Sequence: Synthetic peptide
  Seed: GMDPRMCSLMQGSTLPRR
GMDPRMFSLIQGSTLPRR

SEQ ID NO: 78690 - protein, 18 aa, Artificial Sequence
  Description of Artificial Sequence: Synthetic peptide
  Seed: GMDPRMCSLMQGSTLPRR
GMDPRMFSLIQGSTVPRR

SEQ ID NO: 78691 - protein, 18 aa, Artificial Sequence
  Description of Artificial Sequence: Synthetic peptide
  Seed: GMDPRMCSLMQGSTLPRR
GMDPRMFSLIQPSTLPRR

SEQ ID NO: 78692 - protein, 18 aa, Artificial Sequence
  Description of Artificial Sequence: Synthetic peptide
  Seed: GMDPRMCSLMQGSTLPRR
GMDPRMFSLIQPSTVPRR

SEQ ID NO: 78693 - protein, 18 aa, Artificial Sequence
  Description of Artificial Sequence: Synthetic peptide
  Seed: GMDPRMCSLMQGSTLPRR
GMDPRMFSLIQSSTAPRR

SEQ ID NO: 78694 - protein, 18 aa, Artificial Sequence
  Description of Artificial Sequence: Synthetic peptide
  Seed: GMDPRMCSLMQGSTLPRR
GMDPRMFSLIQSSTIPRR

SEQ ID NO: 78695 - protein, 18 aa, Artificial Sequence
  Description of Artificial Sequence: Synthetic peptide
  Seed: GMDPRMCSLMQGSTLPRR
GMDPRMFSLIQSSTLPRR

SEQ ID NO: 78696 - protein, 18 aa, Artificial Sequence
  Description of Artificial Sequence: Synthetic peptide
  Seed: GMDPRMCSLMQGSTLPRR
GMDPRMFSLIQSSTVPRR

SEQ ID NO: 78697 - protein, 18 aa, Artificial Sequence
  Description of Artificial Sequence: Synthetic peptide
  Seed: GMDPRMCSLMQGSTLPRR
GMDPRMFSLLQASTAPRR

SEQ ID NO: 78698 - protein, 18 aa, Artificial Sequence
  Description of Artificial Sequence: Synthetic peptide
  Seed: GMDPRMCSLMQGSTLPRR
GMDPRMFSLLQASTIPRR

SEQ ID NO: 78699 - protein, 18 aa, Artificial Sequence
  Description of Artificial Sequence: Synthetic peptide
  Seed: GMDPRMCSLMQGSTLPRR
GMDPRMFSLLQASTLPRR

SEQ ID NO: 78700 - protein, 18 aa, Artificial Sequence
  Description of Artificial Sequence: Synthetic peptide
  Seed: GMDPRMCSLMQGSTLPRR
GMDPRMFSLLQASTMPRR

SEQ ID NO: 78701 - protein, 18 aa, Artificial Sequence
  Description of Artificial Sequence: Synthetic peptide
  Seed: GMDPRMCSLMQGSTLPRR
GMDPRMFSLLQASTSPRR

SEQ ID NO: 78702 - protein, 18 aa, Artificial Sequence
  Description of Artificial Sequence: Synthetic peptide
  Seed: GMDPRMCSLMQGSTLPRR
GMDPRMFSLLQASTTPRR

SEQ ID NO: 78703 - protein, 18 aa, Artificial Sequence
  Description of Artificial Sequence: Synthetic peptide
  Seed: GMDPRMCSLMQGSTLPRR
GMDPRMFSLLQASTVPRR

SEQ ID NO: 78704 - protein, 18 aa, Artificial Sequence
  Description of Artificial Sequence: Synthetic peptide
  Seed: GMDPRMCSLMQGSTLPRR
GMDPRMFSLLQGSTAPRR

SEQ ID NO: 78705 - protein, 18 aa, Artificial Sequence
  Description of Artificial Sequence: Synthetic peptide
  Seed: GMDPRMCSLMQGSTLPRR
GMDPRMFSLLQGSTIPRR

SEQ ID NO: 78706 - protein, 18 aa, Artificial Sequence
  Description of Artificial Sequence: Synthetic peptide
  Seed: GMDPRMCSLMQGSTLPRR
GMDPRMFSLLQGSTLPRR

SEQ ID NO: 78707 - protein, 18 aa, Artificial Sequence
  Description of Artificial Sequence: Synthetic peptide
  Seed: GMDPRMCSLMQGSTLPRR
GMDPRMFSLLQGSTMPRR

SEQ ID NO: 78708 - protein, 18 aa, Artificial Sequence
  Description of Artificial Sequence: Synthetic peptide
  Seed: GMDPRMCSLMQGSTLPRR
GMDPRMFSLLQGSTSPRR

SEQ ID NO: 78709 - protein, 18 aa, Artificial Sequence
  Description of Artificial Sequence: Synthetic peptide
  Seed: GMDPRMCSLMQGSTLPRR
GMDPRMFSLLQGSTTPRR

SEQ ID NO: 78710 - protein, 18 aa, Artificial Sequence
  Description of Artificial Sequence: Synthetic peptide
  Seed: GMDPRMCSLMQGSTLPRR
GMDPRMFSLLQGSTVPRR

SEQ ID NO: 78711 - protein, 18 aa, Artificial Sequence
  Description of Artificial Sequence: Synthetic peptide
  Seed: GMDPRMCSLMQGSTLPRR
GMDPRMFSLLQNSTAPRR

SEQ ID NO: 78712 - protein, 18 aa, Artificial Sequence
  Description of Artificial Sequence: Synthetic peptide
  Seed: GMDPRMCSLMQGSTLPRR
GMDPRMFSLLQNSTIPRR

SEQ ID NO: 78713 - protein, 18 aa, Artificial Sequence
  Description of Artificial Sequence: Synthetic peptide
  Seed: GMDPRMCSLMQGSTLPRR
GMDPRMFSLLQNSTLPRR

SEQ ID NO: 78714 - protein, 18 aa, Artificial Sequence
  Description of Artificial Sequence: Synthetic peptide
  Seed: GMDPRMCSLMQGSTLPRR
GMDPRMFSLLQNSTVPRR

SEQ ID NO: 78715 - protein, 18 aa, Artificial Sequence
  Description of Artificial Sequence: Synthetic peptide
  Seed: GMDPRMCSLMQGSTLPRR
GMDPRMFSLLQPSTAPRR

SEQ ID NO: 78716 - protein, 18 aa, Artificial Sequence
  Description of Artificial Sequence: Synthetic peptide
  Seed: GMDPRMCSLMQGSTLPRR
GMDPRMFSLLQPSTIPRR

SEQ ID NO: 78717 - protein, 18 aa, Artificial Sequence
  Description of Artificial Sequence: Synthetic peptide
  Seed: GMDPRMCSLMQGSTLPRR
GMDPRMFSLLQPSTLPRR

SEQ ID NO: 78718 - protein, 18 aa, Artificial Sequence
  Description of Artificial Sequence: Synthetic peptide
  Seed: GMDPRMCSLMQGSTLPRR
GMDPRMFSLLQPSTMPRR

SEQ ID NO: 78719 - protein, 18 aa, Artificial Sequence
  Description of Artificial Sequence: Synthetic peptide
  Seed: GMDPRMCSLMQGSTLPRR
GMDPRMFSLLQPSTVPRR

SEQ ID NO: 78720 - protein, 18 aa, Artificial Sequence
  Description of Artificial Sequence: Synthetic peptide
  Seed: GMDPRMCSLMQGSTLPRR
GMDPRMFSLLQSSTAPRR

SEQ ID NO: 78721 - protein, 18 aa, Artificial Sequence
  Description of Artificial Sequence: Synthetic peptide
  Seed: GMDPRMCSLMQGSTLPRR
GMDPRMFSLLQSSTIPRR

SEQ ID NO: 78722 - protein, 18 aa, Artificial Sequence
  Description of Artificial Sequence: Synthetic peptide
  Seed: GMDPRMCSLMQGSTLPRR
GMDPRMFSLLQSSTLPRR

SEQ ID NO: 78723 - protein, 18 aa, Artificial Sequence
  Description of Artificial Sequence: Synthetic peptide
  Seed: GMDPRMCSLMQGSTLPRR
GMDPRMFSLLQSSTMPRR

SEQ ID NO: 78724 - protein, 18 aa, Artificial Sequence
  Description of Artificial Sequence: Synthetic peptide
  Seed: GMDPRMCSLMQGSTLPRR
GMDPRMFSLLQSSTSPRR

SEQ ID NO: 78725 - protein, 18 aa, Artificial Sequence
  Description of Artificial Sequence: Synthetic peptide
  Seed: GMDPRMCSLMQGSTLPRR
GMDPRMFSLLQSSTTPRR

SEQ ID NO: 78726 - protein, 18 aa, Artificial Sequence
  Description of Artificial Sequence: Synthetic peptide
  Seed: GMDPRMCSLMQGSTLPRR
GMDPRMFSLLQSSTVPRR

SEQ ID NO: 78727 - protein, 18 aa, Artificial Sequence
  Description of Artificial Sequence: Synthetic peptide
  Seed: GMDPRMCSLMQGSTLPRR
GMDPRMFSLLQTSTAPRR

SEQ ID NO: 78728 - protein, 18 aa, Artificial Sequence
  Description of Artificial Sequence: Synthetic peptide
  Seed: GMDPRMCSLMQGSTLPRR
GMDPRMFSLLQTSTIPRR

SEQ ID NO: 78729 - protein, 18 aa, Artificial Sequence
  Description of Artificial Sequence: Synthetic peptide
  Seed: GMDPRMCSLMQGSTLPRR
GMDPRMFSLLQTSTLPRR

SEQ ID NO: 78730 - protein, 18 aa, Artificial Sequence
  Description of Artificial Sequence: Synthetic peptide
  Seed: GMDPRMCSLMQGSTLPRR
GMDPRMFSLLQTSTVPRR

SEQ ID NO: 78731 - protein, 18 aa, Artificial Sequence
  Description of Artificial Sequence: Synthetic peptide
  Seed: GMDPRMCSLMQGSTLPRR
GMDPRMFSLMQASTAPRR

SEQ ID NO: 78732 - protein, 18 aa, Artificial Sequence
  Description of Artificial Sequence: Synthetic peptide
  Seed: GMDPRMCSLMQGSTLPRR
GMDPRMFSLMQASTIPRR

SEQ ID NO: 78733 - protein, 18 aa, Artificial Sequence
  Description of Artificial Sequence: Synthetic peptide
  Seed: GMDPRMCSLMQGSTLPRR
GMDPRMFSLMQASTLPRR

SEQ ID NO: 78734 - protein, 18 aa, Artificial Sequence
  Description of Artificial Sequence: Synthetic peptide
  Seed: GMDPRMCSLMQGSTLPRR
GMDPRMFSLMQASTMPRR

SEQ ID NO: 78735 - protein, 18 aa, Artificial Sequence
  Description of Artificial Sequence: Synthetic peptide
  Seed: GMDPRMCSLMQGSTLPRR
GMDPRMFSLMQASTSPRR

SEQ ID NO: 78736 - protein, 18 aa, Artificial Sequence
  Description of Artificial Sequence: Synthetic peptide
  Seed: GMDPRMCSLMQGSTLPRR
GMDPRMFSLMQASTTPRR

SEQ ID NO: 78737 - protein, 18 aa, Artificial Sequence
  Description of Artificial Sequence: Synthetic peptide
  Seed: GMDPRMCSLMQGSTLPRR
GMDPRMFSLMQASTVPRR

SEQ ID NO: 78738 - protein, 18 aa, Artificial Sequence
  Description of Artificial Sequence: Synthetic peptide
  Seed: GMDPRMCSLMQGSTLPRR
GMDPRMFSLMQGSTAPRR

SEQ ID NO: 78739 - protein, 18 aa, Artificial Sequence
  Description of Artificial Sequence: Synthetic peptide
  Seed: GMDPRMCSLMQGSTLPRR
GMDPRMFSLMQGSTIPRR

SEQ ID NO: 78740 - protein, 18 aa, Artificial Sequence
  Description of Artificial Sequence: Synthetic peptide
  Seed: GMDPRMCSLMQGSTLPRR
GMDPRMFSLMQGSTLPRR

SEQ ID NO: 78741 - protein, 18 aa, Artificial Sequence
  Description of Artificial Sequence: Synthetic peptide
  Seed: GMDPRMCSLMQGSTLPRR
GMDPRMFSLMQGSTMPRR

SEQ ID NO: 78742 - protein, 18 aa, Artificial Sequence
  Description of Artificial Sequence: Synthetic peptide
  Seed: GMDPRMCSLMQGSTLPRR
GMDPRMFSLMQGSTSPRR

SEQ ID NO: 78743 - protein, 18 aa, Artificial Sequence
  Description of Artificial Sequence: Synthetic peptide
  Seed: GMDPRMCSLMQGSTLPRR
GMDPRMFSLMQGSTTPRR

SEQ ID NO: 78744 - protein, 18 aa, Artificial Sequence
  Description of Artificial Sequence: Synthetic peptide
  Seed: GMDPRMCSLMQGSTLPRR
GMDPRMFSLMQGSTVPRR

SEQ ID NO: 78745 - protein, 18 aa, Artificial Sequence
  Description of Artificial Sequence: Synthetic peptide
  Seed: GMDPRMCSLMQGSTLPRR
GMDPRMFSLMQNSTIPRR

SEQ ID NO: 78746 - protein, 18 aa, Artificial Sequence
  Description of Artificial Sequence: Synthetic peptide
  Seed: GMDPRMCSLMQGSTLPRR
GMDPRMFSLMQNSTLPRR

SEQ ID NO: 78747 - protein, 18 aa, Artificial Sequence
  Description of Artificial Sequence: Synthetic peptide
  Seed: GMDPRMCSLMQGSTLPRR
GMDPRMFSLMQNSTVPRR

SEQ ID NO: 78748 - protein, 18 aa, Artificial Sequence
  Description of Artificial Sequence: Synthetic peptide
  Seed: GMDPRMCSLMQGSTLPRR
GMDPRMFSLMQPSTAPRR

SEQ ID NO: 78749 - protein, 18 aa, Artificial Sequence
  Description of Artificial Sequence: Synthetic peptide
  Seed: GMDPRMCSLMQGSTLPRR
GMDPRMFSLMQPSTIPRR

SEQ ID NO: 78750 - protein, 18 aa, Artificial Sequence
  Description of Artificial Sequence: Synthetic peptide
  Seed: GMDPRMCSLMQGSTLPRR
GMDPRMFSLMQPSTLPRR

SEQ ID NO: 78751 - protein, 18 aa, Artificial Sequence
  Description of Artificial Sequence: Synthetic peptide
  Seed: GMDPRMCSLMQGSTLPRR
GMDPRMFSLMQPSTVPRR

SEQ ID NO: 78752 - protein, 18 aa, Artificial Sequence
  Description of Artificial Sequence: Synthetic peptide
  Seed: GMDPRMCSLMQGSTLPRR
GMDPRMFSLMQSSTAPRR

SEQ ID NO: 78753 - protein, 18 aa, Artificial Sequence
  Description of Artificial Sequence: Synthetic peptide
  Seed: GMDPRMCSLMQGSTLPRR
GMDPRMFSLMQSSTIPRR

SEQ ID NO: 78754 - protein, 18 aa, Artificial Sequence
  Description of Artificial Sequence: Synthetic peptide
  Seed: GMDPRMCSLMQGSTLPRR
GMDPRMFSLMQSSTLPRR

SEQ ID NO: 78755 - protein, 18 aa, Artificial Sequence
  Description of Artificial Sequence: Synthetic peptide
  Seed: GMDPRMCSLMQGSTLPRR
GMDPRMFSLMQSSTMPRR

SEQ ID NO: 78756 - protein, 18 aa, Artificial Sequence
  Description of Artificial Sequence: Synthetic peptide
  Seed: GMDPRMCSLMQGSTLPRR
GMDPRMFSLMQSSTTPRR

SEQ ID NO: 78757 - protein, 18 aa, Artificial Sequence
  Description of Artificial Sequence: Synthetic peptide
  Seed: GMDPRMCSLMQGSTLPRR
GMDPRMFSLMQSSTVPRR

SEQ ID NO: 78758 - protein, 18 aa, Artificial Sequence
  Description of Artificial Sequence: Synthetic peptide
  Seed: GMDPRMCSLMQGSTLPRR
GMDPRMFSLMQTSTAPRR

SEQ ID NO: 78759 - protein, 18 aa, Artificial Sequence
  Description of Artificial Sequence: Synthetic peptide
  Seed: GMDPRMCSLMQGSTLPRR
GMDPRMFSLMQTSTIPRR

SEQ ID NO: 78760 - protein, 18 aa, Artificial Sequence
  Description of Artificial Sequence: Synthetic peptide
  Seed: GMDPRMCSLMQGSTLPRR
GMDPRMFSLMQTSTLPRR

SEQ ID NO: 78761 - protein, 18 aa, Artificial Sequence
  Description of Artificial Sequence: Synthetic peptide
  Seed: GMDPRMCSLMQGSTLPRR
GMDPRMFSLMQTSTVPRR

SEQ ID NO: 78762 - protein, 18 aa, Artificial Sequence
  Description of Artificial Sequence: Synthetic peptide
  Seed: GMDPRMCSLMQGSTLPRR
GMDPRMFSLQQASTLPRR

SEQ ID NO: 78763 - protein, 18 aa, Artificial Sequence
  Description of Artificial Sequence: Synthetic peptide
  Seed: GMDPRMCSLMQGSTLPRR
GMDPRMFSLQQASTVPRR

SEQ ID NO: 78764 - protein, 18 aa, Artificial Sequence
  Description of Artificial Sequence: Synthetic peptide
  Seed: GMDPRMCSLMQGSTLPRR
GMDPRMFSLVQASTLPRR

SEQ ID NO: 78765 - protein, 18 aa, Artificial Sequence
  Description of Artificial Sequence: Synthetic peptide
  Seed: GMDPRMCSLMQGSTLPRR
GMDPRMFSLVQASTVPRR

SEQ ID NO: 78766 - protein, 18 aa, Artificial Sequence
  Description of Artificial Sequence: Synthetic peptide
  Seed: GMDPRMCSLMQGSTLPRR
GMDPRMISLLQASTLPRR

SEQ ID NO: 78767 - protein, 18 aa, Artificial Sequence
  Description of Artificial Sequence: Synthetic peptide
  Seed: GMDPRMCSLMQGSTLPRR
GMDPRMISLLQGSTLPRR

SEQ ID NO: 78768 - protein, 18 aa, Artificial Sequence
  Description of Artificial Sequence: Synthetic peptide
  Seed: GMDPRMCSLMQGSTLPRR
GMDPRMISLMQASTLPRR

SEQ ID NO: 78769 - protein, 18 aa, Artificial Sequence
  Description of Artificial Sequence: Synthetic peptide
  Seed: GMDPRMCSLMQGSTLPRR
GMDPRMWSLLQASTLPRR

SEQ ID NO: 78770 - protein, 18 aa, Artificial Sequence
  Description of Artificial Sequence: Synthetic peptide
  Seed: GMDPRMCSLMQGSTLPRR
GMDPRMWSLLQASTVPRR

SEQ ID NO: 78771 - protein, 18 aa, Artificial Sequence
  Description of Artificial Sequence: Synthetic peptide
  Seed: GMDPRMCSLMQGSTLPRR
GMDPRMWSLLQGSTAPRR

SEQ ID NO: 78772 - protein, 18 aa, Artificial Sequence
  Description of Artificial Sequence: Synthetic peptide
  Seed: GMDPRMCSLMQGSTLPRR
GMDPRMWSLLQGSTIPRR

SEQ ID NO: 78773 - protein, 18 aa, Artificial Sequence
  Description of Artificial Sequence: Synthetic peptide
  Seed: GMDPRMCSLMQGSTLPRR
GMDPRMWSLLQGSTLPRR

SEQ ID NO: 78774 - protein, 18 aa, Artificial Sequence
  Description of Artificial Sequence: Synthetic peptide
  Seed: GMDPRMCSLMQGSTLPRR
GMDPRMWSLLQGSTVPRR

SEQ ID NO: 78775 - protein, 18 aa, Artificial Sequence
  Description of Artificial Sequence: Synthetic peptide
  Seed: GMDPRMCSLMQGSTLPRR
GMDPRMWSLLQSSTLPRR

SEQ ID NO: 78776 - protein, 18 aa, Artificial Sequence
  Description of Artificial Sequence: Synthetic peptide
  Seed: GMDPRMCSLMQGSTLPRR
GMDPRMWSLLQSSTVPRR

SEQ ID NO: 78777 - protein, 18 aa, Artificial Sequence
  Description of Artificial Sequence: Synthetic peptide
  Seed: GMDPRMCSLMQGSTLPRR
GMDPRMWSLMQASTAPRR

SEQ ID NO: 78778 - protein, 18 aa, Artificial Sequence
  Description of Artificial Sequence: Synthetic peptide
  Seed: GMDPRMCSLMQGSTLPRR
GMDPRMWSLMQASTLPRR

SEQ ID NO: 78779 - protein, 18 aa, Artificial Sequence
  Description of Artificial Sequence: Synthetic peptide
  Seed: GMDPRMCSLMQGSTLPRR
GMDPRMWSLMQASTVPRR

SEQ ID NO: 78780 - protein, 18 aa, Artificial Sequence
  Description of Artificial Sequence: Synthetic peptide
  Seed: GMDPRMCSLMQGSTLPRR
GMDPRMWSLMQGSTAPRR

SEQ ID NO: 78781 - protein, 18 aa, Artificial Sequence
  Description of Artificial Sequence: Synthetic peptide
  Seed: GMDPRMCSLMQGSTLPRR
GMDPRMWSLMQGSTIPRR

SEQ ID NO: 78782 - protein, 18 aa, Artificial Sequence
  Description of Artificial Sequence: Synthetic peptide
  Seed: GMDPRMCSLMQGSTLPRR
GMDPRMWSLMQGSTLPRR

SEQ ID NO: 78783 - protein, 18 aa, Artificial Sequence
  Description of Artificial Sequence: Synthetic peptide
  Seed: GMDPRMCSLMQGSTLPRR
GMDPRMWSLMQGSTVPRR

SEQ ID NO: 78784 - protein, 18 aa, Artificial Sequence
  Description of Artificial Sequence: Synthetic peptide
  Seed: GMDPRMCSLMQGSTLPRR
GMDPRMWSLMQSSTLPRR

SEQ ID NO: 78785 - protein, 18 aa, Artificial Sequence
  Description of Artificial Sequence: Synthetic peptide
  Seed: GMDPRMCSLMQGSTLPRR
GMDPRMWSLMQSSTVPRR

SEQ ID NO: 78786 - protein, 18 aa, Artificial Sequence
  Description of Artificial Sequence: Synthetic peptide
  Seed: GMDPRMCSLMQGSTLPRR
GMDPRMYSLIQASTAPRR

SEQ ID NO: 78787 - protein, 18 aa, Artificial Sequence
  Description of Artificial Sequence: Synthetic peptide
  Seed: GMDPRMCSLMQGSTLPRR
GMDPRMYSLIQASTIPRR

SEQ ID NO: 78788 - protein, 18 aa, Artificial Sequence
  Description of Artificial Sequence: Synthetic peptide
  Seed: GMDPRMCSLMQGSTLPRR
GMDPRMYSLIQASTLPRR

SEQ ID NO: 78789 - protein, 18 aa, Artificial Sequence
  Description of Artificial Sequence: Synthetic peptide
  Seed: GMDPRMCSLMQGSTLPRR
GMDPRMYSLIQASTVPRR

SEQ ID NO: 78790 - protein, 18 aa, Artificial Sequence
  Description of Artificial Sequence: Synthetic peptide
  Seed: GMDPRMCSLMQGSTLPRR
GMDPRMYSLIQGSTLPRR

SEQ ID NO: 78791 - protein, 18 aa, Artificial Sequence
  Description of Artificial Sequence: Synthetic peptide
  Seed: GMDPRMCSLMQGSTLPRR
GMDPRMYSLIQGSTVPRR

SEQ ID NO: 78792 - protein, 18 aa, Artificial Sequence
  Description of Artificial Sequence: Synthetic peptide
  Seed: GMDPRMCSLMQGSTLPRR
GMDPRMYSLLQASTAPRR

SEQ ID NO: 78793 - protein, 18 aa, Artificial Sequence
  Description of Artificial Sequence: Synthetic peptide
  Seed: GMDPRMCSLMQGSTLPRR
GMDPRMYSLLQASTIPRR

SEQ ID NO: 78794 - protein, 18 aa, Artificial Sequence
  Description of Artificial Sequence: Synthetic peptide
  Seed: GMDPRMCSLMQGSTLPRR
GMDPRMYSLLQASTLPRR

SEQ ID NO: 78795 - protein, 18 aa, Artificial Sequence
  Description of Artificial Sequence: Synthetic peptide
  Seed: GMDPRMCSLMQGSTLPRR
GMDPRMYSLLQASTMPRR

SEQ ID NO: 78796 - protein, 18 aa, Artificial Sequence
  Description of Artificial Sequence: Synthetic peptide
  Seed: GMDPRMCSLMQGSTLPRR
GMDPRMYSLLQASTTPRR

SEQ ID NO: 78797 - protein, 18 aa, Artificial Sequence
  Description of Artificial Sequence: Synthetic peptide
  Seed: GMDPRMCSLMQGSTLPRR
GMDPRMYSLLQASTVPRR

SEQ ID NO: 78798 - protein, 18 aa, Artificial Sequence
  Description of Artificial Sequence: Synthetic peptide
  Seed: GMDPRMCSLMQGSTLPRR
GMDPRMYSLLQGSTAPRR

SEQ ID NO: 78799 - protein, 18 aa, Artificial Sequence
  Description of Artificial Sequence: Synthetic peptide
  Seed: GMDPRMCSLMQGSTLPRR
GMDPRMYSLLQGSTIPRR

SEQ ID NO: 78800 - protein, 18 aa, Artificial Sequence
  Description of Artificial Sequence: Synthetic peptide
  Seed: GMDPRMCSLMQGSTLPRR
GMDPRMYSLLQGSTLPRR

SEQ ID NO: 78801 - protein, 18 aa, Artificial Sequence
  Description of Artificial Sequence: Synthetic peptide
  Seed: GMDPRMCSLMQGSTLPRR
GMDPRMYSLLQGSTMPRR

SEQ ID NO: 78802 - protein, 18 aa, Artificial Sequence
  Description of Artificial Sequence: Synthetic peptide
  Seed: GMDPRMCSLMQGSTLPRR
GMDPRMYSLLQGSTVPRR

SEQ ID NO: 78803 - protein, 18 aa, Artificial Sequence
  Description of Artificial Sequence: Synthetic peptide
  Seed: GMDPRMCSLMQGSTLPRR
GMDPRMYSLLQPSTIPRR

SEQ ID NO: 78804 - protein, 18 aa, Artificial Sequence
  Description of Artificial Sequence: Synthetic peptide
  Seed: GMDPRMCSLMQGSTLPRR
GMDPRMYSLLQPSTLPRR

SEQ ID NO: 78805 - protein, 18 aa, Artificial Sequence
  Description of Artificial Sequence: Synthetic peptide
  Seed: GMDPRMCSLMQGSTLPRR
GMDPRMYSLLQPSTVPRR

SEQ ID NO: 78806 - protein, 18 aa, Artificial Sequence
  Description of Artificial Sequence: Synthetic peptide
  Seed: GMDPRMCSLMQGSTLPRR
GMDPRMYSLLQSSTAPRR

SEQ ID NO: 78807 - protein, 18 aa, Artificial Sequence
  Description of Artificial Sequence: Synthetic peptide
  Seed: GMDPRMCSLMQGSTLPRR
GMDPRMYSLLQSSTIPRR

SEQ ID NO: 78808 - protein, 18 aa, Artificial Sequence
  Description of Artificial Sequence: Synthetic peptide
  Seed: GMDPRMCSLMQGSTLPRR
GMDPRMYSLLQSSTLPRR

SEQ ID NO: 78809 - protein, 18 aa, Artificial Sequence
  Description of Artificial Sequence: Synthetic peptide
  Seed: GMDPRMCSLMQGSTLPRR
GMDPRMYSLLQSSTVPRR

SEQ ID NO: 78810 - protein, 18 aa, Artificial Sequence
  Description of Artificial Sequence: Synthetic peptide
  Seed: GMDPRMCSLMQGSTLPRR
GMDPRMYSLMQASTAPRR

SEQ ID NO: 78811 - protein, 18 aa, Artificial Sequence
  Description of Artificial Sequence: Synthetic peptide
  Seed: GMDPRMCSLMQGSTLPRR
GMDPRMYSLMQASTIPRR

SEQ ID NO: 78812 - protein, 18 aa, Artificial Sequence
  Description of Artificial Sequence: Synthetic peptide
  Seed: GMDPRMCSLMQGSTLPRR
GMDPRMYSLMQASTLPRR

SEQ ID NO: 78813 - protein, 18 aa, Artificial Sequence
  Description of Artificial Sequence: Synthetic peptide
  Seed: GMDPRMCSLMQGSTLPRR
GMDPRMYSLMQASTMPRR

SEQ ID NO: 78814 - protein, 18 aa, Artificial Sequence
  Description of Artificial Sequence: Synthetic peptide
  Seed: GMDPRMCSLMQGSTLPRR
GMDPRMYSLMQASTVPRR

SEQ ID NO: 78815 - protein, 18 aa, Artificial Sequence
  Description of Artificial Sequence: Synthetic peptide
  Seed: GMDPRMCSLMQGSTLPRR
GMDPRMYSLMQGSTAPRR

SEQ ID NO: 78816 - protein, 18 aa, Artificial Sequence
  Description of Artificial Sequence: Synthetic peptide
  Seed: GMDPRMCSLMQGSTLPRR
GMDPRMYSLMQGSTIPRR

SEQ ID NO: 78817 - protein, 18 aa, Artificial Sequence
  Description of Artificial Sequence: Synthetic peptide
  Seed: GMDPRMCSLMQGSTLPRR
GMDPRMYSLMQGSTLPRR

SEQ ID NO: 78818 - protein, 18 aa, Artificial Sequence
  Description of Artificial Sequence: Synthetic peptide
  Seed: GMDPRMCSLMQGSTLPRR
GMDPRMYSLMQGSTMPRR

SEQ ID NO: 78819 - protein, 18 aa, Artificial Sequence
  Description of Artificial Sequence: Synthetic peptide
  Seed: GMDPRMCSLMQGSTLPRR
GMDPRMYSLMQGSTVPRR

SEQ ID NO: 78820 - protein, 18 aa, Artificial Sequence
  Description of Artificial Sequence: Synthetic peptide
  Seed: GMDPRMCSLMQGSTLPRR
GMDPRMYSLMQPSTIPRR

SEQ ID NO: 78821 - protein, 18 aa, Artificial Sequence
  Description of Artificial Sequence: Synthetic peptide
  Seed: GMDPRMCSLMQGSTLPRR
GMDPRMYSLMQPSTLPRR

SEQ ID NO: 78822 - protein, 18 aa, Artificial Sequence
  Description of Artificial Sequence: Synthetic peptide
  Seed: GMDPRMCSLMQGSTLPRR
GMDPRMYSLMQPSTVPRR

SEQ ID NO: 78823 - protein, 18 aa, Artificial Sequence
  Description of Artificial Sequence: Synthetic peptide
  Seed: GMDPRMCSLMQGSTLPRR
GMDPRMYSLMQSSTAPRR

SEQ ID NO: 78824 - protein, 18 aa, Artificial Sequence
  Description of Artificial Sequence: Synthetic peptide
  Seed: GMDPRMCSLMQGSTLPRR
GMDPRMYSLMQSSTIPRR

SEQ ID NO: 78825 - protein, 18 aa, Artificial Sequence
  Description of Artificial Sequence: Synthetic peptide
  Seed: GMDPRMCSLMQGSTLPRR
GMDPRMYSLMQSSTLPRR

SEQ ID NO: 78826 - protein, 18 aa, Artificial Sequence
  Description of Artificial Sequence: Synthetic peptide
  Seed: GMDPRMCSLMQGSTLPRR
GMDPRMYSLMQSSTVPRR

SEQ ID NO: 78827 - protein, 19 aa, Artificial Sequence
  Description of Artificial Sequence: Synthetic peptide
  Seed: GMDPRMCSLMQGSTLPRRS
GMDPRMFSLAQASTAPRRS

SEQ ID NO: 78828 - protein, 19 aa, Artificial Sequence
  Description of Artificial Sequence: Synthetic peptide
  Seed: GMDPRMCSLMQGSTLPRRS
GMDPRMFSLAQASTFPRRS

SEQ ID NO: 78829 - protein, 19 aa, Artificial Sequence
  Description of Artificial Sequence: Synthetic peptide
  Seed: GMDPRMCSLMQGSTLPRRS
GMDPRMFSLAQASTGPRRS

SEQ ID NO: 78830 - protein, 19 aa, Artificial Sequence
  Description of Artificial Sequence: Synthetic peptide
  Seed: GMDPRMCSLMQGSTLPRRS
GMDPRMFSLAQASTHPRRS

SEQ ID NO: 78831 - protein, 19 aa, Artificial Sequence
  Description of Artificial Sequence: Synthetic peptide
  Seed: GMDPRMCSLMQGSTLPRRS
GMDPRMFSLAQASTIPRRS

SEQ ID NO: 78832 - protein, 19 aa, Artificial Sequence
  Description of Artificial Sequence: Synthetic peptide
  Seed: GMDPRMCSLMQGSTLPRRS
GMDPRMFSLAQASTLPRRS

SEQ ID NO: 78833 - protein, 19 aa, Artificial Sequence
  Description of Artificial Sequence: Synthetic peptide
  Seed: GMDPRMCSLMQGSTLPRRS
GMDPRMFSLAQASTMPRRS

SEQ ID NO: 78834 - protein, 19 aa, Artificial Sequence
  Description of Artificial Sequence: Synthetic peptide
  Seed: GMDPRMCSLMQGSTLPRRS
GMDPRMFSLAQASTNPRRS

SEQ ID NO: 78835 - protein, 19 aa, Artificial Sequence
  Description of Artificial Sequence: Synthetic peptide
  Seed: GMDPRMCSLMQGSTLPRRS
GMDPRMFSLAQASTQPRRS

SEQ ID NO: 78836 - protein, 19 aa, Artificial Sequence
  Description of Artificial Sequence: Synthetic peptide
  Seed: GMDPRMCSLMQGSTLPRRS
GMDPRMFSLAQASTSPRRS

SEQ ID NO: 78837 - protein, 19 aa, Artificial Sequence
  Description of Artificial Sequence: Synthetic peptide
  Seed: GMDPRMCSLMQGSTLPRRS
GMDPRMFSLAQASTTPRRS

SEQ ID NO: 78838 - protein, 19 aa, Artificial Sequence
  Description of Artificial Sequence: Synthetic peptide
  Seed: GMDPRMCSLMQGSTLPRRS
GMDPRMFSLAQASTVPRRS

SEQ ID NO: 78839 - protein, 19 aa, Artificial Sequence
  Description of Artificial Sequence: Synthetic peptide
  Seed: GMDPRMCSLMQGSTLPRRS
GMDPRMFSLAQGSTAPRRS

SEQ ID NO: 78840 - protein, 19 aa, Artificial Sequence
  Description of Artificial Sequence: Synthetic peptide
  Seed: GMDPRMCSLMQGSTLPRRS
GMDPRMFSLAQGSTIPRRS

SEQ ID NO: 78841 - protein, 19 aa, Artificial Sequence
  Description of Artificial Sequence: Synthetic peptide
  Seed: GMDPRMCSLMQGSTLPRRS
GMDPRMFSLAQGSTLPRRS

SEQ ID NO: 78842 - protein, 19 aa, Artificial Sequence
  Description of Artificial Sequence: Synthetic peptide
  Seed: GMDPRMCSLMQGSTLPRRS
GMDPRMFSLAQGSTMPRRS

SEQ ID NO: 78843 - protein, 19 aa, Artificial Sequence
  Description of Artificial Sequence: Synthetic peptide
  Seed: GMDPRMCSLMQGSTLPRRS
GMDPRMFSLAQGSTNPRRS

SEQ ID NO: 78844 - protein, 19 aa, Artificial Sequence
  Description of Artificial Sequence: Synthetic peptide
  Seed: GMDPRMCSLMQGSTLPRRS
GMDPRMFSLAQGSTSPRRS

SEQ ID NO: 78845 - protein, 19 aa, Artificial Sequence
  Description of Artificial Sequence: Synthetic peptide
  Seed: GMDPRMCSLMQGSTLPRRS
GMDPRMFSLAQGSTTPRRS

SEQ ID NO: 78846 - protein, 19 aa, Artificial Sequence
  Description of Artificial Sequence: Synthetic peptide
  Seed: GMDPRMCSLMQGSTLPRRS
GMDPRMFSLAQGSTVPRRS

SEQ ID NO: 78847 - protein, 19 aa, Artificial Sequence
  Description of Artificial Sequence: Synthetic peptide
  Seed: GMDPRMCSLMQGSTLPRRS
GMDPRMFSLAQISTAPRRS

SEQ ID NO: 78848 - protein, 19 aa, Artificial Sequence
  Description of Artificial Sequence: Synthetic peptide
  Seed: GMDPRMCSLMQGSTLPRRS
GMDPRMFSLAQISTIPRRS

SEQ ID NO: 78849 - protein, 19 aa, Artificial Sequence
  Description of Artificial Sequence: Synthetic peptide
  Seed: GMDPRMCSLMQGSTLPRRS
GMDPRMFSLAQISTLPRRS

SEQ ID NO: 78850 - protein, 19 aa, Artificial Sequence
  Description of Artificial Sequence: Synthetic peptide
  Seed: GMDPRMCSLMQGSTLPRRS
GMDPRMFSLAQISTMPRRS

SEQ ID NO: 78851 - protein, 19 aa, Artificial Sequence
  Description of Artificial Sequence: Synthetic peptide
  Seed: GMDPRMCSLMQGSTLPRRS
GMDPRMFSLAQISTNPRRS

SEQ ID NO: 78852 - protein, 19 aa, Artificial Sequence
  Description of Artificial Sequence: Synthetic peptide
  Seed: GMDPRMCSLMQGSTLPRRS
GMDPRMFSLAQISTSPRRS

SEQ ID NO: 78853 - protein, 19 aa, Artificial Sequence
  Description of Artificial Sequence: Synthetic peptide
  Seed: GMDPRMCSLMQGSTLPRRS
GMDPRMFSLAQISTTPRRS

SEQ ID NO: 78854 - protein, 19 aa, Artificial Sequence
  Description of Artificial Sequence: Synthetic peptide
  Seed: GMDPRMCSLMQGSTLPRRS
GMDPRMFSLAQISTVPRRS

SEQ ID NO: 78855 - protein, 19 aa, Artificial Sequence
  Description of Artificial Sequence: Synthetic peptide
  Seed: GMDPRMCSLMQGSTLPRRS
GMDPRMFSLAQLSTAPRRS

SEQ ID NO: 78856 - protein, 19 aa, Artificial Sequence
  Description of Artificial Sequence: Synthetic peptide
  Seed: GMDPRMCSLMQGSTLPRRS
GMDPRMFSLAQMSTAPRRS

SEQ ID NO: 78857 - protein, 19 aa, Artificial Sequence
  Description of Artificial Sequence: Synthetic peptide
  Seed: GMDPRMCSLMQGSTLPRRS
GMDPRMFSLAQNSTAPRRS

SEQ ID NO: 78858 - protein, 19 aa, Artificial Sequence
  Description of Artificial Sequence: Synthetic peptide
  Seed: GMDPRMCSLMQGSTLPRRS
GMDPRMFSLAQNSTIPRRS

SEQ ID NO: 78859 - protein, 19 aa, Artificial Sequence
  Description of Artificial Sequence: Synthetic peptide
  Seed: GMDPRMCSLMQGSTLPRRS
GMDPRMFSLAQNSTLPRRS

SEQ ID NO: 78860 - protein, 19 aa, Artificial Sequence
  Description of Artificial Sequence: Synthetic peptide
  Seed: GMDPRMCSLMQGSTLPRRS
GMDPRMFSLAQNSTNPRRS

SEQ ID NO: 78861 - protein, 19 aa, Artificial Sequence
  Description of Artificial Sequence: Synthetic peptide
  Seed: GMDPRMCSLMQGSTLPRRS
GMDPRMFSLAQNSTSPRRS

SEQ ID NO: 78862 - protein, 19 aa, Artificial Sequence
  Description of Artificial Sequence: Synthetic peptide
  Seed: GMDPRMCSLMQGSTLPRRS
GMDPRMFSLAQNSTVPRRS

SEQ ID NO: 78863 - protein, 19 aa, Artificial Sequence
  Description of Artificial Sequence: Synthetic peptide
  Seed: GMDPRMCSLMQGSTLPRRS
GMDPRMFSLAQPSTAPRRS

SEQ ID NO: 78864 - protein, 19 aa, Artificial Sequence
  Description of Artificial Sequence: Synthetic peptide
  Seed: GMDPRMCSLMQGSTLPRRS
GMDPRMFSLAQPSTIPRRS

SEQ ID NO: 78865 - protein, 19 aa, Artificial Sequence
  Description of Artificial Sequence: Synthetic peptide
  Seed: GMDPRMCSLMQGSTLPRRS
GMDPRMFSLAQPSTLPRRS

SEQ ID NO: 78866 - protein, 19 aa, Artificial Sequence
  Description of Artificial Sequence: Synthetic peptide
  Seed: GMDPRMCSLMQGSTLPRRS
GMDPRMFSLAQPSTMPRRS

SEQ ID NO: 78867 - protein, 19 aa, Artificial Sequence
  Description of Artificial Sequence: Synthetic peptide
  Seed: GMDPRMCSLMQGSTLPRRS
GMDPRMFSLAQPSTNPRRS

SEQ ID NO: 78868 - protein, 19 aa, Artificial Sequence
  Description of Artificial Sequence: Synthetic peptide
  Seed: GMDPRMCSLMQGSTLPRRS
GMDPRMFSLAQPSTQPRRS

SEQ ID NO: 78869 - protein, 19 aa, Artificial Sequence
  Description of Artificial Sequence: Synthetic peptide
  Seed: GMDPRMCSLMQGSTLPRRS
GMDPRMFSLAQPSTSPRRS

SEQ ID NO: 78870 - protein, 19 aa, Artificial Sequence
  Description of Artificial Sequence: Synthetic peptide
  Seed: GMDPRMCSLMQGSTLPRRS
GMDPRMFSLAQPSTTPRRS

SEQ ID NO: 78871 - protein, 19 aa, Artificial Sequence
  Description of Artificial Sequence: Synthetic peptide
  Seed: GMDPRMCSLMQGSTLPRRS
GMDPRMFSLAQPSTVPRRS

SEQ ID NO: 78872 - protein, 19 aa, Artificial Sequence
  Description of Artificial Sequence: Synthetic peptide
  Seed: GMDPRMCSLMQGSTLPRRS
GMDPRMFSLAQSSTAPRRS

SEQ ID NO: 78873 - protein, 19 aa, Artificial Sequence
  Description of Artificial Sequence: Synthetic peptide
  Seed: GMDPRMCSLMQGSTLPRRS
GMDPRMFSLAQSSTIPRRS

SEQ ID NO: 78874 - protein, 19 aa, Artificial Sequence
  Description of Artificial Sequence: Synthetic peptide
  Seed: GMDPRMCSLMQGSTLPRRS
GMDPRMFSLAQSSTLPRRS

SEQ ID NO: 78875 - protein, 19 aa, Artificial Sequence
  Description of Artificial Sequence: Synthetic peptide
  Seed: GMDPRMCSLMQGSTLPRRS
GMDPRMFSLAQSSTMPRRS

SEQ ID NO: 78876 - protein, 19 aa, Artificial Sequence
  Description of Artificial Sequence: Synthetic peptide
  Seed: GMDPRMCSLMQGSTLPRRS
GMDPRMFSLAQSSTNPRRS

SEQ ID NO: 78877 - protein, 19 aa, Artificial Sequence
  Description of Artificial Sequence: Synthetic peptide
  Seed: GMDPRMCSLMQGSTLPRRS
GMDPRMFSLAQSSTSPRRS

SEQ ID NO: 78878 - protein, 19 aa, Artificial Sequence
  Description of Artificial Sequence: Synthetic peptide
  Seed: GMDPRMCSLMQGSTLPRRS
GMDPRMFSLAQSSTTPRRS

SEQ ID NO: 78879 - protein, 19 aa, Artificial Sequence
  Description of Artificial Sequence: Synthetic peptide
  Seed: GMDPRMCSLMQGSTLPRRS
GMDPRMFSLAQSSTVPRRS

SEQ ID NO: 78880 - protein, 19 aa, Artificial Sequence
  Description of Artificial Sequence: Synthetic peptide
  Seed: GMDPRMCSLMQGSTLPRRS
GMDPRMFSLAQTSTAPRRS

SEQ ID NO: 78881 - protein, 19 aa, Artificial Sequence
  Description of Artificial Sequence: Synthetic peptide
  Seed: GMDPRMCSLMQGSTLPRRS
GMDPRMFSLAQTSTIPRRS

SEQ ID NO: 78882 - protein, 19 aa, Artificial Sequence
  Description of Artificial Sequence: Synthetic peptide
  Seed: GMDPRMCSLMQGSTLPRRS
GMDPRMFSLAQTSTLPRRS

SEQ ID NO: 78883 - protein, 19 aa, Artificial Sequence
  Description of Artificial Sequence: Synthetic peptide
  Seed: GMDPRMCSLMQGSTLPRRS
GMDPRMFSLAQTSTMPRRS

SEQ ID NO: 78884 - protein, 19 aa, Artificial Sequence
  Description of Artificial Sequence: Synthetic peptide
  Seed: GMDPRMCSLMQGSTLPRRS
GMDPRMFSLAQTSTNPRRS

SEQ ID NO: 78885 - protein, 19 aa, Artificial Sequence
  Description of Artificial Sequence: Synthetic peptide
  Seed: GMDPRMCSLMQGSTLPRRS
GMDPRMFSLAQTSTSPRRS

SEQ ID NO: 78886 - protein, 19 aa, Artificial Sequence
  Description of Artificial Sequence: Synthetic peptide
  Seed: GMDPRMCSLMQGSTLPRRS
GMDPRMFSLAQTSTTPRRS

SEQ ID NO: 78887 - protein, 19 aa, Artificial Sequence
  Description of Artificial Sequence: Synthetic peptide
  Seed: GMDPRMCSLMQGSTLPRRS
GMDPRMFSLAQTSTVPRRS

SEQ ID NO: 78888 - protein, 19 aa, Artificial Sequence
  Description of Artificial Sequence: Synthetic peptide
  Seed: GMDPRMCSLMQGSTLPRRS
GMDPRMFSLAQVSTAPRRS

SEQ ID NO: 78889 - protein, 19 aa, Artificial Sequence
  Description of Artificial Sequence: Synthetic peptide
  Seed: GMDPRMCSLMQGSTLPRRS
GMDPRMFSLAQVSTGPRRS

SEQ ID NO: 78890 - protein, 19 aa, Artificial Sequence
  Description of Artificial Sequence: Synthetic peptide
  Seed: GMDPRMCSLMQGSTLPRRS
GMDPRMFSLAQVSTHPRRS

SEQ ID NO: 78891 - protein, 19 aa, Artificial Sequence
  Description of Artificial Sequence: Synthetic peptide
  Seed: GMDPRMCSLMQGSTLPRRS
GMDPRMFSLAQVSTIPRRS

SEQ ID NO: 78892 - protein, 19 aa, Artificial Sequence
  Description of Artificial Sequence: Synthetic peptide
  Seed: GMDPRMCSLMQGSTLPRRS
GMDPRMFSLAQVSTLPRRS

SEQ ID NO: 78893 - protein, 19 aa, Artificial Sequence
  Description of Artificial Sequence: Synthetic peptide
  Seed: GMDPRMCSLMQGSTLPRRS
GMDPRMFSLAQVSTMPRRS

SEQ ID NO: 78894 - protein, 19 aa, Artificial Sequence
  Description of Artificial Sequence: Synthetic peptide
  Seed: GMDPRMCSLMQGSTLPRRS
GMDPRMFSLAQVSTNPRRS

SEQ ID NO: 78895 - protein, 19 aa, Artificial Sequence
  Description of Artificial Sequence: Synthetic peptide
  Seed: GMDPRMCSLMQGSTLPRRS
GMDPRMFSLAQVSTSPRRS

SEQ ID NO: 78896 - protein, 19 aa, Artificial Sequence
  Description of Artificial Sequence: Synthetic peptide
  Seed: GMDPRMCSLMQGSTLPRRS
GMDPRMFSLAQVSTTPRRS

SEQ ID NO: 78897 - protein, 19 aa, Artificial Sequence
  Description of Artificial Sequence: Synthetic peptide
  Seed: GMDPRMCSLMQGSTLPRRS
GMDPRMFSLAQVSTVPRRS

SEQ ID NO: 78898 - protein, 19 aa, Artificial Sequence
  Description of Artificial Sequence: Synthetic peptide
  Seed: GMDPRMCSLMQGSTLPRRS
GMDPRMFSLCQASTIPRRS

SEQ ID NO: 78899 - protein, 19 aa, Artificial Sequence
  Description of Artificial Sequence: Synthetic peptide
  Seed: GMDPRMCSLMQGSTLPRRS
GMDPRMFSLCQASTLPRRS

SEQ ID NO: 78900 - protein, 19 aa, Artificial Sequence
  Description of Artificial Sequence: Synthetic peptide
  Seed: GMDPRMCSLMQGSTLPRRS
GMDPRMFSLCQASTVPRRS

SEQ ID NO: 78901 - protein, 19 aa, Artificial Sequence
  Description of Artificial Sequence: Synthetic peptide
  Seed: GMDPRMCSLMQGSTLPRRS
GMDPRMFSLEQASTAPRRS

SEQ ID NO: 78902 - protein, 19 aa, Artificial Sequence
  Description of Artificial Sequence: Synthetic peptide
  Seed: GMDPRMCSLMQGSTLPRRS
GMDPRMFSLEQASTIPRRS

SEQ ID NO: 78903 - protein, 19 aa, Artificial Sequence
  Description of Artificial Sequence: Synthetic peptide
  Seed: GMDPRMCSLMQGSTLPRRS
GMDPRMFSLEQASTLPRRS

SEQ ID NO: 78904 - protein, 19 aa, Artificial Sequence
  Description of Artificial Sequence: Synthetic peptide
  Seed: GMDPRMCSLMQGSTLPRRS
GMDPRMFSLEQASTVPRRS

SEQ ID NO: 78905 - protein, 19 aa, Artificial Sequence
  Description of Artificial Sequence: Synthetic peptide
  Seed: GMDPRMCSLMQGSTLPRRS
GMDPRMFSLEQGSTAPRRS

SEQ ID NO: 78906 - protein, 19 aa, Artificial Sequence
  Description of Artificial Sequence: Synthetic peptide
  Seed: GMDPRMCSLMQGSTLPRRS
GMDPRMFSLEQGSTIPRRS

SEQ ID NO: 78907 - protein, 19 aa, Artificial Sequence
  Description of Artificial Sequence: Synthetic peptide
  Seed: GMDPRMCSLMQGSTLPRRS
GMDPRMFSLEQGSTLPRRS

SEQ ID NO: 78908 - protein, 19 aa, Artificial Sequence
  Description of Artificial Sequence: Synthetic peptide
  Seed: GMDPRMCSLMQGSTLPRRS
GMDPRMFSLEQGSTVPRRS

SEQ ID NO: 78909 - protein, 19 aa, Artificial Sequence
  Description of Artificial Sequence: Synthetic peptide
  Seed: GMDPRMCSLMQGSTLPRRS
GMDPRMFSLEQSSTIPRRS

SEQ ID NO: 78910 - protein, 19 aa, Artificial Sequence
  Description of Artificial Sequence: Synthetic peptide
  Seed: GMDPRMCSLMQGSTLPRRS
GMDPRMFSLEQSSTLPRRS

SEQ ID NO: 78911 - protein, 19 aa, Artificial Sequence
  Description of Artificial Sequence: Synthetic peptide
  Seed: GMDPRMCSLMQGSTLPRRS
GMDPRMFSLEQSSTVPRRS

SEQ ID NO: 78912 - protein, 19 aa, Artificial Sequence
  Description of Artificial Sequence: Synthetic peptide
  Seed: GMDPRMCSLMQGSTLPRRS
GMDPRMFSLFQASTAPRRS

SEQ ID NO: 78913 - protein, 19 aa, Artificial Sequence
  Description of Artificial Sequence: Synthetic peptide
  Seed: GMDPRMCSLMQGSTLPRRS
GMDPRMFSLFQASTIPRRS

SEQ ID NO: 78914 - protein, 19 aa, Artificial Sequence
  Description of Artificial Sequence: Synthetic peptide
  Seed: GMDPRMCSLMQGSTLPRRS
GMDPRMFSLFQASTLPRRS

SEQ ID NO: 78915 - protein, 19 aa, Artificial Sequence
  Description of Artificial Sequence: Synthetic peptide
  Seed: GMDPRMCSLMQGSTLPRRS
GMDPRMFSLFQASTNPRRS

SEQ ID NO: 78916 - protein, 19 aa, Artificial Sequence
  Description of Artificial Sequence: Synthetic peptide
  Seed: GMDPRMCSLMQGSTLPRRS
GMDPRMFSLFQASTSPRRS

SEQ ID NO: 78917 - protein, 19 aa, Artificial Sequence
  Description of Artificial Sequence: Synthetic peptide
  Seed: GMDPRMCSLMQGSTLPRRS
GMDPRMFSLFQASTTPRRS

SEQ ID NO: 78918 - protein, 19 aa, Artificial Sequence
  Description of Artificial Sequence: Synthetic peptide
  Seed: GMDPRMCSLMQGSTLPRRS
GMDPRMFSLFQASTVPRRS

SEQ ID NO: 78919 - protein, 19 aa, Artificial Sequence
  Description of Artificial Sequence: Synthetic peptide
  Seed: GMDPRMCSLMQGSTLPRRS
GMDPRMFSLFQGSTAPRRS

SEQ ID NO: 78920 - protein, 19 aa, Artificial Sequence
  Description of Artificial Sequence: Synthetic peptide
  Seed: GMDPRMCSLMQGSTLPRRS
GMDPRMFSLFQGSTIPRRS

SEQ ID NO: 78921 - protein, 19 aa, Artificial Sequence
  Description of Artificial Sequence: Synthetic peptide
  Seed: GMDPRMCSLMQGSTLPRRS
GMDPRMFSLFQGSTLPRRS

SEQ ID NO: 78922 - protein, 19 aa, Artificial Sequence
  Description of Artificial Sequence: Synthetic peptide
  Seed: GMDPRMCSLMQGSTLPRRS
GMDPRMFSLFQGSTVPRRS

SEQ ID NO: 78923 - protein, 19 aa, Artificial Sequence
  Description of Artificial Sequence: Synthetic peptide
  Seed: GMDPRMCSLMQGSTLPRRS
GMDPRMFSLFQPSTAPRRS

SEQ ID NO: 78924 - protein, 19 aa, Artificial Sequence
  Description of Artificial Sequence: Synthetic peptide
  Seed: GMDPRMCSLMQGSTLPRRS
GMDPRMFSLFQPSTNPRRS

SEQ ID NO: 78925 - protein, 19 aa, Artificial Sequence
  Description of Artificial Sequence: Synthetic peptide
  Seed: GMDPRMCSLMQGSTLPRRS
GMDPRMFSLFQPSTSPRRS

SEQ ID NO: 78926 - protein, 19 aa, Artificial Sequence
  Description of Artificial Sequence: Synthetic peptide
  Seed: GMDPRMCSLMQGSTLPRRS
GMDPRMFSLFQSSTAPRRS

SEQ ID NO: 78927 - protein, 19 aa, Artificial Sequence
  Description of Artificial Sequence: Synthetic peptide
  Seed: GMDPRMCSLMQGSTLPRRS
GMDPRMFSLFQSSTIPRRS

SEQ ID NO: 78928 - protein, 19 aa, Artificial Sequence
  Description of Artificial Sequence: Synthetic peptide
  Seed: GMDPRMCSLMQGSTLPRRS
GMDPRMFSLFQSSTLPRRS

SEQ ID NO: 78929 - protein, 19 aa, Artificial Sequence
  Description of Artificial Sequence: Synthetic peptide
  Seed: GMDPRMCSLMQGSTLPRRS
GMDPRMFSLFQSSTVPRRS

SEQ ID NO: 78930 - protein, 19 aa, Artificial Sequence
  Description of Artificial Sequence: Synthetic peptide
  Seed: GMDPRMCSLMQGSTLPRRS
GMDPRMFSLFQTSTAPRRS

SEQ ID NO: 78931 - protein, 19 aa, Artificial Sequence
  Description of Artificial Sequence: Synthetic peptide
  Seed: GMDPRMCSLMQGSTLPRRS
GMDPRMFSLFQTSTSPRRS

SEQ ID NO: 78932 - protein, 19 aa, Artificial Sequence
  Description of Artificial Sequence: Synthetic peptide
  Seed: GMDPRMCSLMQGSTLPRRS
GMDPRMFSLFQVSTAPRRS

SEQ ID NO: 78933 - protein, 19 aa, Artificial Sequence
  Description of Artificial Sequence: Synthetic peptide
  Seed: GMDPRMCSLMQGSTLPRRS
GMDPRMFSLFQVSTNPRRS

SEQ ID NO: 78934 - protein, 19 aa, Artificial Sequence
  Description of Artificial Sequence: Synthetic peptide
  Seed: GMDPRMCSLMQGSTLPRRS
GMDPRMFSLFQVSTSPRRS

SEQ ID NO: 78935 - protein, 19 aa, Artificial Sequence
  Description of Artificial Sequence: Synthetic peptide
  Seed: GMDPRMCSLMQGSTLPRRS
GMDPRMFSLGQASTAPRRS

SEQ ID NO: 78936 - protein, 19 aa, Artificial Sequence
  Description of Artificial Sequence: Synthetic peptide
  Seed: GMDPRMCSLMQGSTLPRRS
GMDPRMFSLGQASTIPRRS

SEQ ID NO: 78937 - protein, 19 aa, Artificial Sequence
  Description of Artificial Sequence: Synthetic peptide
  Seed: GMDPRMCSLMQGSTLPRRS
GMDPRMFSLGQASTLPRRS

SEQ ID NO: 78938 - protein, 19 aa, Artificial Sequence
  Description of Artificial Sequence: Synthetic peptide
  Seed: GMDPRMCSLMQGSTLPRRS
GMDPRMFSLGQASTVPRRS

SEQ ID NO: 78939 - protein, 19 aa, Artificial Sequence
  Description of Artificial Sequence: Synthetic peptide
  Seed: GMDPRMCSLMQGSTLPRRS
GMDPRMFSLGQGSTLPRRS

SEQ ID NO: 78940 - protein, 19 aa, Artificial Sequence
  Description of Artificial Sequence: Synthetic peptide
  Seed: GMDPRMCSLMQGSTLPRRS
GMDPRMFSLGQSSTIPRRS

SEQ ID NO: 78941 - protein, 19 aa, Artificial Sequence
  Description of Artificial Sequence: Synthetic peptide
  Seed: GMDPRMCSLMQGSTLPRRS
GMDPRMFSLGQSSTLPRRS

SEQ ID NO: 78942 - protein, 19 aa, Artificial Sequence
  Description of Artificial Sequence: Synthetic peptide
  Seed: GMDPRMCSLMQGSTLPRRS
GMDPRMFSLGQSSTVPRRS

SEQ ID NO: 78943 - protein, 19 aa, Artificial Sequence
  Description of Artificial Sequence: Synthetic peptide
  Seed: GMDPRMCSLMQGSTLPRRS
GMDPRMFSLHQASTLPRRS

SEQ ID NO: 78944 - protein, 19 aa, Artificial Sequence
  Description of Artificial Sequence: Synthetic peptide
  Seed: GMDPRMCSLMQGSTLPRRS
GMDPRMFSLIQASTAPRRS

SEQ ID NO: 78945 - protein, 19 aa, Artificial Sequence
  Description of Artificial Sequence: Synthetic peptide
  Seed: GMDPRMCSLMQGSTLPRRS
GMDPRMFSLIQASTCPRRS

SEQ ID NO: 78946 - protein, 19 aa, Artificial Sequence
  Description of Artificial Sequence: Synthetic peptide
  Seed: GMDPRMCSLMQGSTLPRRS
GMDPRMFSLIQASTDPRRS

SEQ ID NO: 78947 - protein, 19 aa, Artificial Sequence
  Description of Artificial Sequence: Synthetic peptide
  Seed: GMDPRMCSLMQGSTLPRRS
GMDPRMFSLIQASTEPRRS

SEQ ID NO: 78948 - protein, 19 aa, Artificial Sequence
  Description of Artificial Sequence: Synthetic peptide
  Seed: GMDPRMCSLMQGSTLPRRS
GMDPRMFSLIQASTFPRRS

SEQ ID NO: 78949 - protein, 19 aa, Artificial Sequence
  Description of Artificial Sequence: Synthetic peptide
  Seed: GMDPRMCSLMQGSTLPRRS
GMDPRMFSLIQASTGPRRS

SEQ ID NO: 78950 - protein, 19 aa, Artificial Sequence
  Description of Artificial Sequence: Synthetic peptide
  Seed: GMDPRMCSLMQGSTLPRRS
GMDPRMFSLIQASTHPRRS

SEQ ID NO: 78951 - protein, 19 aa, Artificial Sequence
  Description of Artificial Sequence: Synthetic peptide
  Seed: GMDPRMCSLMQGSTLPRRS
GMDPRMFSLIQASTIPRRS

SEQ ID NO: 78952 - protein, 19 aa, Artificial Sequence
  Description of Artificial Sequence: Synthetic peptide
  Seed: GMDPRMCSLMQGSTLPRRS
GMDPRMFSLIQASTLPRRS

SEQ ID NO: 78953 - protein, 19 aa, Artificial Sequence
  Description of Artificial Sequence: Synthetic peptide
  Seed: GMDPRMCSLMQGSTLPRRS
GMDPRMFSLIQASTMPRRS

SEQ ID NO: 78954 - protein, 19 aa, Artificial Sequence
  Description of Artificial Sequence: Synthetic peptide
  Seed: GMDPRMCSLMQGSTLPRRS
GMDPRMFSLIQASTNPRRS

SEQ ID NO: 78955 - protein, 19 aa, Artificial Sequence
  Description of Artificial Sequence: Synthetic peptide
  Seed: GMDPRMCSLMQGSTLPRRS
GMDPRMFSLIQASTPPRRS

SEQ ID NO: 78956 - protein, 19 aa, Artificial Sequence
  Description of Artificial Sequence: Synthetic peptide
  Seed: GMDPRMCSLMQGSTLPRRS
GMDPRMFSLIQASTQPRRS

SEQ ID NO: 78957 - protein, 19 aa, Artificial Sequence
  Description of Artificial Sequence: Synthetic peptide
  Seed: GMDPRMCSLMQGSTLPRRS
GMDPRMFSLIQASTSPRRS

SEQ ID NO: 78958 - protein, 19 aa, Artificial Sequence
  Description of Artificial Sequence: Synthetic peptide
  Seed: GMDPRMCSLMQGSTLPRRS
GMDPRMFSLIQASTTPRRS

SEQ ID NO: 78959 - protein, 19 aa, Artificial Sequence
  Description of Artificial Sequence: Synthetic peptide
  Seed: GMDPRMCSLMQGSTLPRRS
GMDPRMFSLIQASTVPRRS

SEQ ID NO: 78960 - protein, 19 aa, Artificial Sequence
  Description of Artificial Sequence: Synthetic peptide
  Seed: GMDPRMCSLMQGSTLPRRS
GMDPRMFSLIQGSTAPRRS

SEQ ID NO: 78961 - protein, 19 aa, Artificial Sequence
  Description of Artificial Sequence: Synthetic peptide
  Seed: GMDPRMCSLMQGSTLPRRS
GMDPRMFSLIQGSTCPRRS

SEQ ID NO: 78962 - protein, 19 aa, Artificial Sequence
  Description of Artificial Sequence: Synthetic peptide
  Seed: GMDPRMCSLMQGSTLPRRS
GMDPRMFSLIQGSTGPRRS

SEQ ID NO: 78963 - protein, 19 aa, Artificial Sequence
  Description of Artificial Sequence: Synthetic peptide
  Seed: GMDPRMCSLMQGSTLPRRS
GMDPRMFSLIQGSTIPRRS

SEQ ID NO: 78964 - protein, 19 aa, Artificial Sequence
  Description of Artificial Sequence: Synthetic peptide
  Seed: GMDPRMCSLMQGSTLPRRS
GMDPRMFSLIQGSTLPRRS

SEQ ID NO: 78965 - protein, 19 aa, Artificial Sequence
  Description of Artificial Sequence: Synthetic peptide
  Seed: GMDPRMCSLMQGSTLPRRS
GMDPRMFSLIQGSTMPRRS

SEQ ID NO: 78966 - protein, 19 aa, Artificial Sequence
  Description of Artificial Sequence: Synthetic peptide
  Seed: GMDPRMCSLMQGSTLPRRS
GMDPRMFSLIQGSTNPRRS

SEQ ID NO: 78967 - protein, 19 aa, Artificial Sequence
  Description of Artificial Sequence: Synthetic peptide
  Seed: GMDPRMCSLMQGSTLPRRS
GMDPRMFSLIQGSTSPRRS

SEQ ID NO: 78968 - protein, 19 aa, Artificial Sequence
  Description of Artificial Sequence: Synthetic peptide
  Seed: GMDPRMCSLMQGSTLPRRS
GMDPRMFSLIQGSTTPRRS

SEQ ID NO: 78969 - protein, 19 aa, Artificial Sequence
  Description of Artificial Sequence: Synthetic peptide
  Seed: GMDPRMCSLMQGSTLPRRS
GMDPRMFSLIQGSTVPRRS

SEQ ID NO: 78970 - protein, 19 aa, Artificial Sequence
  Description of Artificial Sequence: Synthetic peptide
  Seed: GMDPRMCSLMQGSTLPRRS
GMDPRMFSLIQISTAPRRS

SEQ ID NO: 78971 - protein, 19 aa, Artificial Sequence
  Description of Artificial Sequence: Synthetic peptide
  Seed: GMDPRMCSLMQGSTLPRRS
GMDPRMFSLIQISTGPRRS

SEQ ID NO: 78972 - protein, 19 aa, Artificial Sequence
  Description of Artificial Sequence: Synthetic peptide
  Seed: GMDPRMCSLMQGSTLPRRS
GMDPRMFSLIQISTIPRRS

SEQ ID NO: 78973 - protein, 19 aa, Artificial Sequence
  Description of Artificial Sequence: Synthetic peptide
  Seed: GMDPRMCSLMQGSTLPRRS
GMDPRMFSLIQISTLPRRS

SEQ ID NO: 78974 - protein, 19 aa, Artificial Sequence
  Description of Artificial Sequence: Synthetic peptide
  Seed: GMDPRMCSLMQGSTLPRRS
GMDPRMFSLIQISTMPRRS

SEQ ID NO: 78975 - protein, 19 aa, Artificial Sequence
  Description of Artificial Sequence: Synthetic peptide
  Seed: GMDPRMCSLMQGSTLPRRS
GMDPRMFSLIQISTNPRRS

SEQ ID NO: 78976 - protein, 19 aa, Artificial Sequence
  Description of Artificial Sequence: Synthetic peptide
  Seed: GMDPRMCSLMQGSTLPRRS
GMDPRMFSLIQISTSPRRS

SEQ ID NO: 78977 - protein, 19 aa, Artificial Sequence
  Description of Artificial Sequence: Synthetic peptide
  Seed: GMDPRMCSLMQGSTLPRRS
GMDPRMFSLIQISTTPRRS

SEQ ID NO: 78978 - protein, 19 aa, Artificial Sequence
  Description of Artificial Sequence: Synthetic peptide
  Seed: GMDPRMCSLMQGSTLPRRS
GMDPRMFSLIQISTVPRRS

SEQ ID NO: 78979 - protein, 19 aa, Artificial Sequence
  Description of Artificial Sequence: Synthetic peptide
  Seed: GMDPRMCSLMQGSTLPRRS
GMDPRMFSLIQLSTAPRRS

SEQ ID NO: 78980 - protein, 19 aa, Artificial Sequence
  Description of Artificial Sequence: Synthetic peptide
  Seed: GMDPRMCSLMQGSTLPRRS
GMDPRMFSLIQLSTNPRRS

SEQ ID NO: 78981 - protein, 19 aa, Artificial Sequence
  Description of Artificial Sequence: Synthetic peptide
  Seed: GMDPRMCSLMQGSTLPRRS
GMDPRMFSLIQLSTSPRRS

SEQ ID NO: 78982 - protein, 19 aa, Artificial Sequence
  Description of Artificial Sequence: Synthetic peptide
  Seed: GMDPRMCSLMQGSTLPRRS
GMDPRMFSLIQMSTAPRRS

SEQ ID NO: 78983 - protein, 19 aa, Artificial Sequence
  Description of Artificial Sequence: Synthetic peptide
  Seed: GMDPRMCSLMQGSTLPRRS
GMDPRMFSLIQMSTNPRRS

SEQ ID NO: 78984 - protein, 19 aa, Artificial Sequence
  Description of Artificial Sequence: Synthetic peptide
  Seed: GMDPRMCSLMQGSTLPRRS
GMDPRMFSLIQMSTSPRRS

SEQ ID NO: 78985 - protein, 19 aa, Artificial Sequence
  Description of Artificial Sequence: Synthetic peptide
  Seed: GMDPRMCSLMQGSTLPRRS
GMDPRMFSLIQNSTAPRRS

SEQ ID NO: 78986 - protein, 19 aa, Artificial Sequence
  Description of Artificial Sequence: Synthetic peptide
  Seed: GMDPRMCSLMQGSTLPRRS
GMDPRMFSLIQNSTGPRRS

SEQ ID NO: 78987 - protein, 19 aa, Artificial Sequence
  Description of Artificial Sequence: Synthetic peptide
  Seed: GMDPRMCSLMQGSTLPRRS
GMDPRMFSLIQNSTIPRRS

SEQ ID NO: 78988 - protein, 19 aa, Artificial Sequence
  Description of Artificial Sequence: Synthetic peptide
  Seed: GMDPRMCSLMQGSTLPRRS
GMDPRMFSLIQNSTLPRRS

SEQ ID NO: 78989 - protein, 19 aa, Artificial Sequence
  Description of Artificial Sequence: Synthetic peptide
  Seed: GMDPRMCSLMQGSTLPRRS
GMDPRMFSLIQNSTMPRRS

SEQ ID NO: 78990 - protein, 19 aa, Artificial Sequence
  Description of Artificial Sequence: Synthetic peptide
  Seed: GMDPRMCSLMQGSTLPRRS
GMDPRMFSLIQNSTNPRRS

SEQ ID NO: 78991 - protein, 19 aa, Artificial Sequence
  Description of Artificial Sequence: Synthetic peptide
  Seed: GMDPRMCSLMQGSTLPRRS
GMDPRMFSLIQNSTSPRRS

SEQ ID NO: 78992 - protein, 19 aa, Artificial Sequence
  Description of Artificial Sequence: Synthetic peptide
  Seed: GMDPRMCSLMQGSTLPRRS
GMDPRMFSLIQNSTTPRRS

SEQ ID NO: 78993 - protein, 19 aa, Artificial Sequence
  Description of Artificial Sequence: Synthetic peptide
  Seed: GMDPRMCSLMQGSTLPRRS
GMDPRMFSLIQNSTVPRRS

SEQ ID NO: 78994 - protein, 19 aa, Artificial Sequence
  Description of Artificial Sequence: Synthetic peptide
  Seed: GMDPRMCSLMQGSTLPRRS
GMDPRMFSLIQPSTAPRRS

SEQ ID NO: 78995 - protein, 19 aa, Artificial Sequence
  Description of Artificial Sequence: Synthetic peptide
  Seed: GMDPRMCSLMQGSTLPRRS
GMDPRMFSLIQPSTGPRRS

SEQ ID NO: 78996 - protein, 19 aa, Artificial Sequence
  Description of Artificial Sequence: Synthetic peptide
  Seed: GMDPRMCSLMQGSTLPRRS
GMDPRMFSLIQPSTHPRRS

SEQ ID NO: 78997 - protein, 19 aa, Artificial Sequence
  Description of Artificial Sequence: Synthetic peptide
  Seed: GMDPRMCSLMQGSTLPRRS
GMDPRMFSLIQPSTIPRRS

SEQ ID NO: 78998 - protein, 19 aa, Artificial Sequence
  Description of Artificial Sequence: Synthetic peptide
  Seed: GMDPRMCSLMQGSTLPRRS
GMDPRMFSLIQPSTLPRRS

SEQ ID NO: 78999 - protein, 19 aa, Artificial Sequence
  Description of Artificial Sequence: Synthetic peptide
  Seed: GMDPRMCSLMQGSTLPRRS
GMDPRMFSLIQPSTMPRRS

SEQ ID NO: 79000 - protein, 19 aa, Artificial Sequence
  Description of Artificial Sequence: Synthetic peptide
  Seed: GMDPRMCSLMQGSTLPRRS
GMDPRMFSLIQPSTNPRRS

SEQ ID NO: 79001 - protein, 19 aa, Artificial Sequence
  Description of Artificial Sequence: Synthetic peptide
  Seed: GMDPRMCSLMQGSTLPRRS
GMDPRMFSLIQPSTPPRRS

SEQ ID NO: 79002 - protein, 19 aa, Artificial Sequence
  Description of Artificial Sequence: Synthetic peptide
  Seed: GMDPRMCSLMQGSTLPRRS
GMDPRMFSLIQPSTQPRRS

SEQ ID NO: 79003 - protein, 19 aa, Artificial Sequence
  Description of Artificial Sequence: Synthetic peptide
  Seed: GMDPRMCSLMQGSTLPRRS
GMDPRMFSLIQPSTSPRRS

SEQ ID NO: 79004 - protein, 19 aa, Artificial Sequence
  Description of Artificial Sequence: Synthetic peptide
  Seed: GMDPRMCSLMQGSTLPRRS
GMDPRMFSLIQPSTTPRRS

SEQ ID NO: 79005 - protein, 19 aa, Artificial Sequence
  Description of Artificial Sequence: Synthetic peptide
  Seed: GMDPRMCSLMQGSTLPRRS
GMDPRMFSLIQPSTVPRRS

SEQ ID NO: 79006 - protein, 19 aa, Artificial Sequence
  Description of Artificial Sequence: Synthetic peptide
  Seed: GMDPRMCSLMQGSTLPRRS
GMDPRMFSLIQSSTAPRRS

SEQ ID NO: 79007 - protein, 19 aa, Artificial Sequence
  Description of Artificial Sequence: Synthetic peptide
  Seed: GMDPRMCSLMQGSTLPRRS
GMDPRMFSLIQSSTGPRRS

SEQ ID NO: 79008 - protein, 19 aa, Artificial Sequence
  Description of Artificial Sequence: Synthetic peptide
  Seed: GMDPRMCSLMQGSTLPRRS
GMDPRMFSLIQSSTHPRRS

SEQ ID NO: 79009 - protein, 19 aa, Artificial Sequence
  Description of Artificial Sequence: Synthetic peptide
  Seed: GMDPRMCSLMQGSTLPRRS
GMDPRMFSLIQSSTIPRRS

SEQ ID NO: 79010 - protein, 19 aa, Artificial Sequence
  Description of Artificial Sequence: Synthetic peptide
  Seed: GMDPRMCSLMQGSTLPRRS
GMDPRMFSLIQSSTLPRRS

SEQ ID NO: 79011 - protein, 19 aa, Artificial Sequence
  Description of Artificial Sequence: Synthetic peptide
  Seed: GMDPRMCSLMQGSTLPRRS
GMDPRMFSLIQSSTMPRRS

SEQ ID NO: 79012 - protein, 19 aa, Artificial Sequence
  Description of Artificial Sequence: Synthetic peptide
  Seed: GMDPRMCSLMQGSTLPRRS
GMDPRMFSLIQSSTNPRRS

SEQ ID NO: 79013 - protein, 19 aa, Artificial Sequence
  Description of Artificial Sequence: Synthetic peptide
  Seed: GMDPRMCSLMQGSTLPRRS
GMDPRMFSLIQSSTQPRRS

SEQ ID NO: 79014 - protein, 19 aa, Artificial Sequence
  Description of Artificial Sequence: Synthetic peptide
  Seed: GMDPRMCSLMQGSTLPRRS
GMDPRMFSLIQSSTSPRRS

SEQ ID NO: 79015 - protein, 19 aa, Artificial Sequence
  Description of Artificial Sequence: Synthetic peptide
  Seed: GMDPRMCSLMQGSTLPRRS
GMDPRMFSLIQSSTTPRRS

SEQ ID NO: 79016 - protein, 19 aa, Artificial Sequence
  Description of Artificial Sequence: Synthetic peptide
  Seed: GMDPRMCSLMQGSTLPRRS
GMDPRMFSLIQSSTVPRRS

SEQ ID NO: 79017 - protein, 19 aa, Artificial Sequence
  Description of Artificial Sequence: Synthetic peptide
  Seed: GMDPRMCSLMQGSTLPRRS
GMDPRMFSLIQTSTAPRRS

SEQ ID NO: 79018 - protein, 19 aa, Artificial Sequence
  Description of Artificial Sequence: Synthetic peptide
  Seed: GMDPRMCSLMQGSTLPRRS
GMDPRMFSLIQTSTGPRRS

SEQ ID NO: 79019 - protein, 19 aa, Artificial Sequence
  Description of Artificial Sequence: Synthetic peptide
  Seed: GMDPRMCSLMQGSTLPRRS
GMDPRMFSLIQTSTHPRRS

SEQ ID NO: 79020 - protein, 19 aa, Artificial Sequence
  Description of Artificial Sequence: Synthetic peptide
  Seed: GMDPRMCSLMQGSTLPRRS
GMDPRMFSLIQTSTIPRRS

SEQ ID NO: 79021 - protein, 19 aa, Artificial Sequence
  Description of Artificial Sequence: Synthetic peptide
  Seed: GMDPRMCSLMQGSTLPRRS
GMDPRMFSLIQTSTLPRRS

SEQ ID NO: 79022 - protein, 19 aa, Artificial Sequence
  Description of Artificial Sequence: Synthetic peptide
  Seed: GMDPRMCSLMQGSTLPRRS
GMDPRMFSLIQTSTMPRRS

SEQ ID NO: 79023 - protein, 19 aa, Artificial Sequence
  Description of Artificial Sequence: Synthetic peptide
  Seed: GMDPRMCSLMQGSTLPRRS
GMDPRMFSLIQTSTNPRRS

SEQ ID NO: 79024 - protein, 19 aa, Artificial Sequence
  Description of Artificial Sequence: Synthetic peptide
  Seed: GMDPRMCSLMQGSTLPRRS
GMDPRMFSLIQTSTQPRRS

SEQ ID NO: 79025 - protein, 19 aa, Artificial Sequence
  Description of Artificial Sequence: Synthetic peptide
  Seed: GMDPRMCSLMQGSTLPRRS
GMDPRMFSLIQTSTSPRRS

SEQ ID NO: 79026 - protein, 19 aa, Artificial Sequence
  Description of Artificial Sequence: Synthetic peptide
  Seed: GMDPRMCSLMQGSTLPRRS
GMDPRMFSLIQTSTTPRRS

SEQ ID NO: 79027 - protein, 19 aa, Artificial Sequence
  Description of Artificial Sequence: Synthetic peptide
  Seed: GMDPRMCSLMQGSTLPRRS
GMDPRMFSLIQTSTVPRRS

SEQ ID NO: 79028 - protein, 19 aa, Artificial Sequence
  Description of Artificial Sequence: Synthetic peptide
  Seed: GMDPRMCSLMQGSTLPRRS
GMDPRMFSLIQVSTAPRRS

SEQ ID NO: 79029 - protein, 19 aa, Artificial Sequence
  Description of Artificial Sequence: Synthetic peptide
  Seed: GMDPRMCSLMQGSTLPRRS
GMDPRMFSLIQVSTGPRRS

SEQ ID NO: 79030 - protein, 19 aa, Artificial Sequence
  Description of Artificial Sequence: Synthetic peptide
  Seed: GMDPRMCSLMQGSTLPRRS
GMDPRMFSLIQVSTHPRRS

SEQ ID NO: 79031 - protein, 19 aa, Artificial Sequence
  Description of Artificial Sequence: Synthetic peptide
  Seed: GMDPRMCSLMQGSTLPRRS
GMDPRMFSLIQVSTIPRRS

SEQ ID NO: 79032 - protein, 19 aa, Artificial Sequence
  Description of Artificial Sequence: Synthetic peptide
  Seed: GMDPRMCSLMQGSTLPRRS
GMDPRMFSLIQVSTLPRRS

SEQ ID NO: 79033 - protein, 19 aa, Artificial Sequence
  Description of Artificial Sequence: Synthetic peptide
  Seed: GMDPRMCSLMQGSTLPRRS
GMDPRMFSLIQVSTMPRRS

SEQ ID NO: 79034 - protein, 19 aa, Artificial Sequence
  Description of Artificial Sequence: Synthetic peptide
  Seed: GMDPRMCSLMQGSTLPRRS
GMDPRMFSLIQVSTNPRRS

SEQ ID NO: 79035 - protein, 19 aa, Artificial Sequence
  Description of Artificial Sequence: Synthetic peptide
  Seed: GMDPRMCSLMQGSTLPRRS
GMDPRMFSLIQVSTQPRRS

SEQ ID NO: 79036 - protein, 19 aa, Artificial Sequence
  Description of Artificial Sequence: Synthetic peptide
  Seed: GMDPRMCSLMQGSTLPRRS
GMDPRMFSLIQVSTSPRRS

SEQ ID NO: 79037 - protein, 19 aa, Artificial Sequence
  Description of Artificial Sequence: Synthetic peptide
  Seed: GMDPRMCSLMQGSTLPRRS
GMDPRMFSLIQVSTTPRRS

SEQ ID NO: 79038 - protein, 19 aa, Artificial Sequence
  Description of Artificial Sequence: Synthetic peptide
  Seed: GMDPRMCSLMQGSTLPRRS
GMDPRMFSLIQVSTVPRRS

SEQ ID NO: 79039 - protein, 19 aa, Artificial Sequence
  Description of Artificial Sequence: Synthetic peptide
  Seed: GMDPRMCSLMQGSTLPRRS
GMDPRMFSLLQASTAPRRS

SEQ ID NO: 79040 - protein, 19 aa, Artificial Sequence
  Description of Artificial Sequence: Synthetic peptide
  Seed: GMDPRMCSLMQGSTLPRRS
GMDPRMFSLLQASTCPRRS

SEQ ID NO: 79041 - protein, 19 aa, Artificial Sequence
  Description of Artificial Sequence: Synthetic peptide
  Seed: GMDPRMCSLMQGSTLPRRS
GMDPRMFSLLQASTDPRRS

SEQ ID NO: 79042 - protein, 19 aa, Artificial Sequence
  Description of Artificial Sequence: Synthetic peptide
  Seed: GMDPRMCSLMQGSTLPRRS
GMDPRMFSLLQASTEPRRS

SEQ ID NO: 79043 - protein, 19 aa, Artificial Sequence
  Description of Artificial Sequence: Synthetic peptide
  Seed: GMDPRMCSLMQGSTLPRRS
GMDPRMFSLLQASTFPRRS

SEQ ID NO: 79044 - protein, 19 aa, Artificial Sequence
  Description of Artificial Sequence: Synthetic peptide
  Seed: GMDPRMCSLMQGSTLPRRS
GMDPRMFSLLQASTGPRRS

SEQ ID NO: 79045 - protein, 19 aa, Artificial Sequence
  Description of Artificial Sequence: Synthetic peptide
  Seed: GMDPRMCSLMQGSTLPRRS
GMDPRMFSLLQASTHPRRS

SEQ ID NO: 79046 - protein, 19 aa, Artificial Sequence
  Description of Artificial Sequence: Synthetic peptide
  Seed: GMDPRMCSLMQGSTLPRRS
GMDPRMFSLLQASTIPRRS

SEQ ID NO: 79047 - protein, 19 aa, Artificial Sequence
  Description of Artificial Sequence: Synthetic peptide
  Seed: GMDPRMCSLMQGSTLPRRS
GMDPRMFSLLQASTLPRRS

SEQ ID NO: 79048 - protein, 19 aa, Artificial Sequence
  Description of Artificial Sequence: Synthetic peptide
  Seed: GMDPRMCSLMQGSTLPRRS
GMDPRMFSLLQASTMPRRS

SEQ ID NO: 79049 - protein, 19 aa, Artificial Sequence
  Description of Artificial Sequence: Synthetic peptide
  Seed: GMDPRMCSLMQGSTLPRRS
GMDPRMFSLLQASTNPRRS

SEQ ID NO: 79050 - protein, 19 aa, Artificial Sequence
  Description of Artificial Sequence: Synthetic peptide
  Seed: GMDPRMCSLMQGSTLPRRS
GMDPRMFSLLQASTPPRRS

SEQ ID NO: 79051 - protein, 19 aa, Artificial Sequence
  Description of Artificial Sequence: Synthetic peptide
  Seed: GMDPRMCSLMQGSTLPRRS
GMDPRMFSLLQASTQPRRS

SEQ ID NO: 79052 - protein, 19 aa, Artificial Sequence
  Description of Artificial Sequence: Synthetic peptide
  Seed: GMDPRMCSLMQGSTLPRRS
GMDPRMFSLLQASTSPRRS

SEQ ID NO: 79053 - protein, 19 aa, Artificial Sequence
  Description of Artificial Sequence: Synthetic peptide
  Seed: GMDPRMCSLMQGSTLPRRS
GMDPRMFSLLQASTTPRRS

SEQ ID NO: 79054 - protein, 19 aa, Artificial Sequence
  Description of Artificial Sequence: Synthetic peptide
  Seed: GMDPRMCSLMQGSTLPRRS
GMDPRMFSLLQASTVPRRS

SEQ ID NO: 79055 - protein, 19 aa, Artificial Sequence
  Description of Artificial Sequence: Synthetic peptide
  Seed: GMDPRMCSLMQGSTLPRRS
GMDPRMFSLLQASTYPRRS

SEQ ID NO: 79056 - protein, 19 aa, Artificial Sequence
  Description of Artificial Sequence: Synthetic peptide
  Seed: GMDPRMCSLMQGSTLPRRS
GMDPRMFSLLQGSTAPRRS

SEQ ID NO: 79057 - protein, 19 aa, Artificial Sequence
  Description of Artificial Sequence: Synthetic peptide
  Seed: GMDPRMCSLMQGSTLPRRS
GMDPRMFSLLQGSTCPRRS

SEQ ID NO: 79058 - protein, 19 aa, Artificial Sequence
  Description of Artificial Sequence: Synthetic peptide
  Seed: GMDPRMCSLMQGSTLPRRS
GMDPRMFSLLQGSTFPRRS

SEQ ID NO: 79059 - protein, 19 aa, Artificial Sequence
  Description of Artificial Sequence: Synthetic peptide
  Seed: GMDPRMCSLMQGSTLPRRS
GMDPRMFSLLQGSTGPRRS

SEQ ID NO: 79060 - protein, 19 aa, Artificial Sequence
  Description of Artificial Sequence: Synthetic peptide
  Seed: GMDPRMCSLMQGSTLPRRS
GMDPRMFSLLQGSTIPRRS

SEQ ID NO: 79061 - protein, 19 aa, Artificial Sequence
  Description of Artificial Sequence: Synthetic peptide
  Seed: GMDPRMCSLMQGSTLPRRS
GMDPRMFSLLQGSTLPRRS

SEQ ID NO: 79062 - protein, 19 aa, Artificial Sequence
  Description of Artificial Sequence: Synthetic peptide
  Seed: GMDPRMCSLMQGSTLPRRS
GMDPRMFSLLQGSTMPRRS

SEQ ID NO: 79063 - protein, 19 aa, Artificial Sequence
  Description of Artificial Sequence: Synthetic peptide
  Seed: GMDPRMCSLMQGSTLPRRS
GMDPRMFSLLQGSTNPRRS

SEQ ID NO: 79064 - protein, 19 aa, Artificial Sequence
  Description of Artificial Sequence: Synthetic peptide
  Seed: GMDPRMCSLMQGSTLPRRS
GMDPRMFSLLQGSTPPRRS

SEQ ID NO: 79065 - protein, 19 aa, Artificial Sequence
  Description of Artificial Sequence: Synthetic peptide
  Seed: GMDPRMCSLMQGSTLPRRS
GMDPRMFSLLQGSTSPRRS

SEQ ID NO: 79066 - protein, 19 aa, Artificial Sequence
  Description of Artificial Sequence: Synthetic peptide
  Seed: GMDPRMCSLMQGSTLPRRS
GMDPRMFSLLQGSTTPRRS

SEQ ID NO: 79067 - protein, 19 aa, Artificial Sequence
  Description of Artificial Sequence: Synthetic peptide
  Seed: GMDPRMCSLMQGSTLPRRS
GMDPRMFSLLQGSTVPRRS

SEQ ID NO: 79068 - protein, 19 aa, Artificial Sequence
  Description of Artificial Sequence: Synthetic peptide
  Seed: GMDPRMCSLMQGSTLPRRS
GMDPRMFSLLQISTAPRRS

SEQ ID NO: 79069 - protein, 19 aa, Artificial Sequence
  Description of Artificial Sequence: Synthetic peptide
  Seed: GMDPRMCSLMQGSTLPRRS
GMDPRMFSLLQISTGPRRS

SEQ ID NO: 79070 - protein, 19 aa, Artificial Sequence
  Description of Artificial Sequence: Synthetic peptide
  Seed: GMDPRMCSLMQGSTLPRRS
GMDPRMFSLLQISTHPRRS

SEQ ID NO: 79071 - protein, 19 aa, Artificial Sequence
  Description of Artificial Sequence: Synthetic peptide
  Seed: GMDPRMCSLMQGSTLPRRS
GMDPRMFSLLQISTIPRRS

SEQ ID NO: 79072 - protein, 19 aa, Artificial Sequence
  Description of Artificial Sequence: Synthetic peptide
  Seed: GMDPRMCSLMQGSTLPRRS
GMDPRMFSLLQISTLPRRS

SEQ ID NO: 79073 - protein, 19 aa, Artificial Sequence
  Description of Artificial Sequence: Synthetic peptide
  Seed: GMDPRMCSLMQGSTLPRRS
GMDPRMFSLLQISTMPRRS

SEQ ID NO: 79074 - protein, 19 aa, Artificial Sequence
  Description of Artificial Sequence: Synthetic peptide
  Seed: GMDPRMCSLMQGSTLPRRS
GMDPRMFSLLQISTNPRRS

SEQ ID NO: 79075 - protein, 19 aa, Artificial Sequence
  Description of Artificial Sequence: Synthetic peptide
  Seed: GMDPRMCSLMQGSTLPRRS
GMDPRMFSLLQISTQPRRS

SEQ ID NO: 79076 - protein, 19 aa, Artificial Sequence
  Description of Artificial Sequence: Synthetic peptide
  Seed: GMDPRMCSLMQGSTLPRRS
GMDPRMFSLLQISTSPRRS

SEQ ID NO: 79077 - protein, 19 aa, Artificial Sequence
  Description of Artificial Sequence: Synthetic peptide
  Seed: GMDPRMCSLMQGSTLPRRS
GMDPRMFSLLQISTTPRRS

SEQ ID NO: 79078 - protein, 19 aa, Artificial Sequence
  Description of Artificial Sequence: Synthetic peptide
  Seed: GMDPRMCSLMQGSTLPRRS
GMDPRMFSLLQISTVPRRS

SEQ ID NO: 79079 - protein, 19 aa, Artificial Sequence
  Description of Artificial Sequence: Synthetic peptide
  Seed: GMDPRMCSLMQGSTLPRRS
GMDPRMFSLLQLSTAPRRS

SEQ ID NO: 79080 - protein, 19 aa, Artificial Sequence
  Description of Artificial Sequence: Synthetic peptide
  Seed: GMDPRMCSLMQGSTLPRRS
GMDPRMFSLLQLSTNPRRS

SEQ ID NO: 79081 - protein, 19 aa, Artificial Sequence
  Description of Artificial Sequence: Synthetic peptide
  Seed: GMDPRMCSLMQGSTLPRRS
GMDPRMFSLLQLSTSPRRS

SEQ ID NO: 79082 - protein, 19 aa, Artificial Sequence
  Description of Artificial Sequence: Synthetic peptide
  Seed: GMDPRMCSLMQGSTLPRRS
GMDPRMFSLLQLSTTPRRS

SEQ ID NO: 79083 - protein, 19 aa, Artificial Sequence
  Description of Artificial Sequence: Synthetic peptide
  Seed: GMDPRMCSLMQGSTLPRRS
GMDPRMFSLLQLSTVPRRS

SEQ ID NO: 79084 - protein, 19 aa, Artificial Sequence
  Description of Artificial Sequence: Synthetic peptide
  Seed: GMDPRMCSLMQGSTLPRRS
GMDPRMFSLLQMSTAPRRS

SEQ ID NO: 79085 - protein, 19 aa, Artificial Sequence
  Description of Artificial Sequence: Synthetic peptide
  Seed: GMDPRMCSLMQGSTLPRRS
GMDPRMFSLLQMSTNPRRS

SEQ ID NO: 79086 - protein, 19 aa, Artificial Sequence
  Description of Artificial Sequence: Synthetic peptide
  Seed: GMDPRMCSLMQGSTLPRRS
GMDPRMFSLLQMSTSPRRS

SEQ ID NO: 79087 - protein, 19 aa, Artificial Sequence
  Description of Artificial Sequence: Synthetic peptide
  Seed: GMDPRMCSLMQGSTLPRRS
GMDPRMFSLLQMSTTPRRS

SEQ ID NO: 79088 - protein, 19 aa, Artificial Sequence
  Description of Artificial Sequence: Synthetic peptide
  Seed: GMDPRMCSLMQGSTLPRRS
GMDPRMFSLLQMSTVPRRS

SEQ ID NO: 79089 - protein, 19 aa, Artificial Sequence
  Description of Artificial Sequence: Synthetic peptide
  Seed: GMDPRMCSLMQGSTLPRRS
GMDPRMFSLLQNSTAPRRS

SEQ ID NO: 79090 - protein, 19 aa, Artificial Sequence
  Description of Artificial Sequence: Synthetic peptide
  Seed: GMDPRMCSLMQGSTLPRRS
GMDPRMFSLLQNSTGPRRS

SEQ ID NO: 79091 - protein, 19 aa, Artificial Sequence
  Description of Artificial Sequence: Synthetic peptide
  Seed: GMDPRMCSLMQGSTLPRRS
GMDPRMFSLLQNSTIPRRS

SEQ ID NO: 79092 - protein, 19 aa, Artificial Sequence
  Description of Artificial Sequence: Synthetic peptide
  Seed: GMDPRMCSLMQGSTLPRRS
GMDPRMFSLLQNSTLPRRS

SEQ ID NO: 79093 - protein, 19 aa, Artificial Sequence
  Description of Artificial Sequence: Synthetic peptide
  Seed: GMDPRMCSLMQGSTLPRRS
GMDPRMFSLLQNSTMPRRS

SEQ ID NO: 79094 - protein, 19 aa, Artificial Sequence
  Description of Artificial Sequence: Synthetic peptide
  Seed: GMDPRMCSLMQGSTLPRRS
GMDPRMFSLLQNSTNPRRS

SEQ ID NO: 79095 - protein, 19 aa, Artificial Sequence
  Description of Artificial Sequence: Synthetic peptide
  Seed: GMDPRMCSLMQGSTLPRRS
GMDPRMFSLLQNSTSPRRS

SEQ ID NO: 79096 - protein, 19 aa, Artificial Sequence
  Description of Artificial Sequence: Synthetic peptide
  Seed: GMDPRMCSLMQGSTLPRRS
GMDPRMFSLLQNSTTPRRS

SEQ ID NO: 79097 - protein, 19 aa, Artificial Sequence
  Description of Artificial Sequence: Synthetic peptide
  Seed: GMDPRMCSLMQGSTLPRRS
GMDPRMFSLLQNSTVPRRS

SEQ ID NO: 79098 - protein, 19 aa, Artificial Sequence
  Description of Artificial Sequence: Synthetic peptide
  Seed: GMDPRMCSLMQGSTLPRRS
GMDPRMFSLLQPSTAPRRS

SEQ ID NO: 79099 - protein, 19 aa, Artificial Sequence
  Description of Artificial Sequence: Synthetic peptide
  Seed: GMDPRMCSLMQGSTLPRRS
GMDPRMFSLLQPSTCPRRS

SEQ ID NO: 79100 - protein, 19 aa, Artificial Sequence
  Description of Artificial Sequence: Synthetic peptide
  Seed: GMDPRMCSLMQGSTLPRRS
GMDPRMFSLLQPSTDPRRS

SEQ ID NO: 79101 - protein, 19 aa, Artificial Sequence
  Description of Artificial Sequence: Synthetic peptide
  Seed: GMDPRMCSLMQGSTLPRRS
GMDPRMFSLLQPSTEPRRS

SEQ ID NO: 79102 - protein, 19 aa, Artificial Sequence
  Description of Artificial Sequence: Synthetic peptide
  Seed: GMDPRMCSLMQGSTLPRRS
GMDPRMFSLLQPSTFPRRS

SEQ ID NO: 79103 - protein, 19 aa, Artificial Sequence
  Description of Artificial Sequence: Synthetic peptide
  Seed: GMDPRMCSLMQGSTLPRRS
GMDPRMFSLLQPSTGPRRS

SEQ ID NO: 79104 - protein, 19 aa, Artificial Sequence
  Description of Artificial Sequence: Synthetic peptide
  Seed: GMDPRMCSLMQGSTLPRRS
GMDPRMFSLLQPSTHPRRS

SEQ ID NO: 79105 - protein, 19 aa, Artificial Sequence
  Description of Artificial Sequence: Synthetic peptide
  Seed: GMDPRMCSLMQGSTLPRRS
GMDPRMFSLLQPSTIPRRS

SEQ ID NO: 79106 - protein, 19 aa, Artificial Sequence
  Description of Artificial Sequence: Synthetic peptide
  Seed: GMDPRMCSLMQGSTLPRRS
GMDPRMFSLLQPSTLPRRS

SEQ ID NO: 79107 - protein, 19 aa, Artificial Sequence
  Description of Artificial Sequence: Synthetic peptide
  Seed: GMDPRMCSLMQGSTLPRRS
GMDPRMFSLLQPSTMPRRS

SEQ ID NO: 79108 - protein, 19 aa, Artificial Sequence
  Description of Artificial Sequence: Synthetic peptide
  Seed: GMDPRMCSLMQGSTLPRRS
GMDPRMFSLLQPSTNPRRS

SEQ ID NO: 79109 - protein, 19 aa, Artificial Sequence
  Description of Artificial Sequence: Synthetic peptide
  Seed: GMDPRMCSLMQGSTLPRRS
GMDPRMFSLLQPSTPPRRS

SEQ ID NO: 79110 - protein, 19 aa, Artificial Sequence
  Description of Artificial Sequence: Synthetic peptide
  Seed: GMDPRMCSLMQGSTLPRRS
GMDPRMFSLLQPSTQPRRS

SEQ ID NO: 79111 - protein, 19 aa, Artificial Sequence
  Description of Artificial Sequence: Synthetic peptide
  Seed: GMDPRMCSLMQGSTLPRRS
GMDPRMFSLLQPSTSPRRS

SEQ ID NO: 79112 - protein, 19 aa, Artificial Sequence
  Description of Artificial Sequence: Synthetic peptide
  Seed: GMDPRMCSLMQGSTLPRRS
GMDPRMFSLLQPSTTPRRS

SEQ ID NO: 79113 - protein, 19 aa, Artificial Sequence
  Description of Artificial Sequence: Synthetic peptide
  Seed: GMDPRMCSLMQGSTLPRRS
GMDPRMFSLLQPSTVPRRS

SEQ ID NO: 79114 - protein, 19 aa, Artificial Sequence
  Description of Artificial Sequence: Synthetic peptide
  Seed: GMDPRMCSLMQGSTLPRRS
GMDPRMFSLLQSSTAPRRS

SEQ ID NO: 79115 - protein, 19 aa, Artificial Sequence
  Description of Artificial Sequence: Synthetic peptide
  Seed: GMDPRMCSLMQGSTLPRRS
GMDPRMFSLLQSSTCPRRS

SEQ ID NO: 79116 - protein, 19 aa, Artificial Sequence
  Description of Artificial Sequence: Synthetic peptide
  Seed: GMDPRMCSLMQGSTLPRRS
GMDPRMFSLLQSSTFPRRS

SEQ ID NO: 79117 - protein, 19 aa, Artificial Sequence
  Description of Artificial Sequence: Synthetic peptide
  Seed: GMDPRMCSLMQGSTLPRRS
GMDPRMFSLLQSSTGPRRS

SEQ ID NO: 79118 - protein, 19 aa, Artificial Sequence
  Description of Artificial Sequence: Synthetic peptide
  Seed: GMDPRMCSLMQGSTLPRRS
GMDPRMFSLLQSSTHPRRS

SEQ ID NO: 79119 - protein, 19 aa, Artificial Sequence
  Description of Artificial Sequence: Synthetic peptide
  Seed: GMDPRMCSLMQGSTLPRRS
GMDPRMFSLLQSSTIPRRS

SEQ ID NO: 79120 - protein, 19 aa, Artificial Sequence
  Description of Artificial Sequence: Synthetic peptide
  Seed: GMDPRMCSLMQGSTLPRRS
GMDPRMFSLLQSSTLPRRS

SEQ ID NO: 79121 - protein, 19 aa, Artificial Sequence
  Description of Artificial Sequence: Synthetic peptide
  Seed: GMDPRMCSLMQGSTLPRRS
GMDPRMFSLLQSSTMPRRS

SEQ ID NO: 79122 - protein, 19 aa, Artificial Sequence
  Description of Artificial Sequence: Synthetic peptide
  Seed: GMDPRMCSLMQGSTLPRRS
GMDPRMFSLLQSSTNPRRS

SEQ ID NO: 79123 - protein, 19 aa, Artificial Sequence
  Description of Artificial Sequence: Synthetic peptide
  Seed: GMDPRMCSLMQGSTLPRRS
GMDPRMFSLLQSSTPPRRS

SEQ ID NO: 79124 - protein, 19 aa, Artificial Sequence
  Description of Artificial Sequence: Synthetic peptide
  Seed: GMDPRMCSLMQGSTLPRRS
GMDPRMFSLLQSSTQPRRS

SEQ ID NO: 79125 - protein, 19 aa, Artificial Sequence
  Description of Artificial Sequence: Synthetic peptide
  Seed: GMDPRMCSLMQGSTLPRRS
GMDPRMFSLLQSSTSPRRS

SEQ ID NO: 79126 - protein, 19 aa, Artificial Sequence
  Description of Artificial Sequence: Synthetic peptide
  Seed: GMDPRMCSLMQGSTLPRRS
GMDPRMFSLLQSSTTPRRS

SEQ ID NO: 79127 - protein, 19 aa, Artificial Sequence
  Description of Artificial Sequence: Synthetic peptide
  Seed: GMDPRMCSLMQGSTLPRRS
GMDPRMFSLLQSSTVPRRS

SEQ ID NO: 79128 - protein, 19 aa, Artificial Sequence
  Description of Artificial Sequence: Synthetic peptide
  Seed: GMDPRMCSLMQGSTLPRRS
GMDPRMFSLLQTSTAPRRS

SEQ ID NO: 79129 - protein, 19 aa, Artificial Sequence
  Description of Artificial Sequence: Synthetic peptide
  Seed: GMDPRMCSLMQGSTLPRRS
GMDPRMFSLLQTSTGPRRS

SEQ ID NO: 79130 - protein, 19 aa, Artificial Sequence
  Description of Artificial Sequence: Synthetic peptide
  Seed: GMDPRMCSLMQGSTLPRRS
GMDPRMFSLLQTSTHPRRS

SEQ ID NO: 79131 - protein, 19 aa, Artificial Sequence
  Description of Artificial Sequence: Synthetic peptide
  Seed: GMDPRMCSLMQGSTLPRRS
GMDPRMFSLLQTSTIPRRS

SEQ ID NO: 79132 - protein, 19 aa, Artificial Sequence
  Description of Artificial Sequence: Synthetic peptide
  Seed: GMDPRMCSLMQGSTLPRRS
GMDPRMFSLLQTSTLPRRS

SEQ ID NO: 79133 - protein, 19 aa, Artificial Sequence
  Description of Artificial Sequence: Synthetic peptide
  Seed: GMDPRMCSLMQGSTLPRRS
GMDPRMFSLLQTSTMPRRS

SEQ ID NO: 79134 - protein, 19 aa, Artificial Sequence
  Description of Artificial Sequence: Synthetic peptide
  Seed: GMDPRMCSLMQGSTLPRRS
GMDPRMFSLLQTSTNPRRS

SEQ ID NO: 79135 - protein, 19 aa, Artificial Sequence
  Description of Artificial Sequence: Synthetic peptide
  Seed: GMDPRMCSLMQGSTLPRRS
GMDPRMFSLLQTSTPPRRS

SEQ ID NO: 79136 - protein, 19 aa, Artificial Sequence
  Description of Artificial Sequence: Synthetic peptide
  Seed: GMDPRMCSLMQGSTLPRRS
GMDPRMFSLLQTSTQPRRS

SEQ ID NO: 79137 - protein, 19 aa, Artificial Sequence
  Description of Artificial Sequence: Synthetic peptide
  Seed: GMDPRMCSLMQGSTLPRRS
GMDPRMFSLLQTSTSPRRS

SEQ ID NO: 79138 - protein, 19 aa, Artificial Sequence
  Description of Artificial Sequence: Synthetic peptide
  Seed: GMDPRMCSLMQGSTLPRRS
GMDPRMFSLLQTSTTPRRS

SEQ ID NO: 79139 - protein, 19 aa, Artificial Sequence
  Description of Artificial Sequence: Synthetic peptide
  Seed: GMDPRMCSLMQGSTLPRRS
GMDPRMFSLLQTSTVPRRS

SEQ ID NO: 79140 - protein, 19 aa, Artificial Sequence
  Description of Artificial Sequence: Synthetic peptide
  Seed: GMDPRMCSLMQGSTLPRRS
GMDPRMFSLLQVSTAPRRS

SEQ ID NO: 79141 - protein, 19 aa, Artificial Sequence
  Description of Artificial Sequence: Synthetic peptide
  Seed: GMDPRMCSLMQGSTLPRRS
GMDPRMFSLLQVSTDPRRS

SEQ ID NO: 79142 - protein, 19 aa, Artificial Sequence
  Description of Artificial Sequence: Synthetic peptide
  Seed: GMDPRMCSLMQGSTLPRRS
GMDPRMFSLLQVSTGPRRS

SEQ ID NO: 79143 - protein, 19 aa, Artificial Sequence
  Description of Artificial Sequence: Synthetic peptide
  Seed: GMDPRMCSLMQGSTLPRRS
GMDPRMFSLLQVSTHPRRS

SEQ ID NO: 79144 - protein, 19 aa, Artificial Sequence
  Description of Artificial Sequence: Synthetic peptide
  Seed: GMDPRMCSLMQGSTLPRRS
GMDPRMFSLLQVSTIPRRS

SEQ ID NO: 79145 - protein, 19 aa, Artificial Sequence
  Description of Artificial Sequence: Synthetic peptide
  Seed: GMDPRMCSLMQGSTLPRRS
GMDPRMFSLLQVSTLPRRS

SEQ ID NO: 79146 - protein, 19 aa, Artificial Sequence
  Description of Artificial Sequence: Synthetic peptide
  Seed: GMDPRMCSLMQGSTLPRRS
GMDPRMFSLLQVSTMPRRS

SEQ ID NO: 79147 - protein, 19 aa, Artificial Sequence
  Description of Artificial Sequence: Synthetic peptide
  Seed: GMDPRMCSLMQGSTLPRRS
GMDPRMFSLLQVSTNPRRS

SEQ ID NO: 79148 - protein, 19 aa, Artificial Sequence
  Description of Artificial Sequence: Synthetic peptide
  Seed: GMDPRMCSLMQGSTLPRRS
GMDPRMFSLLQVSTPPRRS

SEQ ID NO: 79149 - protein, 19 aa, Artificial Sequence
  Description of Artificial Sequence: Synthetic peptide
  Seed: GMDPRMCSLMQGSTLPRRS
GMDPRMFSLLQVSTQPRRS

SEQ ID NO: 79150 - protein, 19 aa, Artificial Sequence
  Description of Artificial Sequence: Synthetic peptide
  Seed: GMDPRMCSLMQGSTLPRRS
GMDPRMFSLLQVSTSPRRS

SEQ ID NO: 79151 - protein, 19 aa, Artificial Sequence
  Description of Artificial Sequence: Synthetic peptide
  Seed: GMDPRMCSLMQGSTLPRRS
GMDPRMFSLLQVSTTPRRS

SEQ ID NO: 79152 - protein, 19 aa, Artificial Sequence
  Description of Artificial Sequence: Synthetic peptide
  Seed: GMDPRMCSLMQGSTLPRRS
GMDPRMFSLLQVSTVPRRS

SEQ ID NO: 79153 - protein, 19 aa, Artificial Sequence
  Description of Artificial Sequence: Synthetic peptide
  Seed: GMDPRMCSLMQGSTLPRRS
GMDPRMFSLMQASTAPRRS

SEQ ID NO: 79154 - protein, 19 aa, Artificial Sequence
  Description of Artificial Sequence: Synthetic peptide
  Seed: GMDPRMCSLMQGSTLPRRS
GMDPRMFSLMQASTCPRRS

SEQ ID NO: 79155 - protein, 19 aa, Artificial Sequence
  Description of Artificial Sequence: Synthetic peptide
  Seed: GMDPRMCSLMQGSTLPRRS
GMDPRMFSLMQASTDPRRS

SEQ ID NO: 79156 - protein, 19 aa, Artificial Sequence
  Description of Artificial Sequence: Synthetic peptide
  Seed: GMDPRMCSLMQGSTLPRRS
GMDPRMFSLMQASTEPRRS

SEQ ID NO: 79157 - protein, 19 aa, Artificial Sequence
  Description of Artificial Sequence: Synthetic peptide
  Seed: GMDPRMCSLMQGSTLPRRS
GMDPRMFSLMQASTFPRRS

SEQ ID NO: 79158 - protein, 19 aa, Artificial Sequence
  Description of Artificial Sequence: Synthetic peptide
  Seed: GMDPRMCSLMQGSTLPRRS
GMDPRMFSLMQASTGPRRS

SEQ ID NO: 79159 - protein, 19 aa, Artificial Sequence
  Description of Artificial Sequence: Synthetic peptide
  Seed: GMDPRMCSLMQGSTLPRRS
GMDPRMFSLMQASTHPRRS

SEQ ID NO: 79160 - protein, 19 aa, Artificial Sequence
  Description of Artificial Sequence: Synthetic peptide
  Seed: GMDPRMCSLMQGSTLPRRS
GMDPRMFSLMQASTIPRRS

SEQ ID NO: 79161 - protein, 19 aa, Artificial Sequence
  Description of Artificial Sequence: Synthetic peptide
  Seed: GMDPRMCSLMQGSTLPRRS
GMDPRMFSLMQASTLPRRS

SEQ ID NO: 79162 - protein, 19 aa, Artificial Sequence
  Description of Artificial Sequence: Synthetic peptide
  Seed: GMDPRMCSLMQGSTLPRRS
GMDPRMFSLMQASTMPRRS

SEQ ID NO: 79163 - protein, 19 aa, Artificial Sequence
  Description of Artificial Sequence: Synthetic peptide
  Seed: GMDPRMCSLMQGSTLPRRS
GMDPRMFSLMQASTNPRRS

SEQ ID NO: 79164 - protein, 19 aa, Artificial Sequence
  Description of Artificial Sequence: Synthetic peptide
  Seed: GMDPRMCSLMQGSTLPRRS
GMDPRMFSLMQASTPPRRS

SEQ ID NO: 79165 - protein, 19 aa, Artificial Sequence
  Description of Artificial Sequence: Synthetic peptide
  Seed: GMDPRMCSLMQGSTLPRRS
GMDPRMFSLMQASTQPRRS

SEQ ID NO: 79166 - protein, 19 aa, Artificial Sequence
  Description of Artificial Sequence: Synthetic peptide
  Seed: GMDPRMCSLMQGSTLPRRS
GMDPRMFSLMQASTSPRRS

SEQ ID NO: 79167 - protein, 19 aa, Artificial Sequence
  Description of Artificial Sequence: Synthetic peptide
  Seed: GMDPRMCSLMQGSTLPRRS
GMDPRMFSLMQASTTPRRS

SEQ ID NO: 79168 - protein, 19 aa, Artificial Sequence
  Description of Artificial Sequence: Synthetic peptide
  Seed: GMDPRMCSLMQGSTLPRRS
GMDPRMFSLMQASTVPRRS

SEQ ID NO: 79169 - protein, 19 aa, Artificial Sequence
  Description of Artificial Sequence: Synthetic peptide
  Seed: GMDPRMCSLMQGSTLPRRS
GMDPRMFSLMQASTWPRRS

SEQ ID NO: 79170 - protein, 19 aa, Artificial Sequence
  Description of Artificial Sequence: Synthetic peptide
  Seed: GMDPRMCSLMQGSTLPRRS
GMDPRMFSLMQASTYPRRS

SEQ ID NO: 79171 - protein, 19 aa, Artificial Sequence
  Description of Artificial Sequence: Synthetic peptide
  Seed: GMDPRMCSLMQGSTLPRRS
GMDPRMFSLMQGSTAPRRS

SEQ ID NO: 79172 - protein, 19 aa, Artificial Sequence
  Description of Artificial Sequence: Synthetic peptide
  Seed: GMDPRMCSLMQGSTLPRRS
GMDPRMFSLMQGSTCPRRS

SEQ ID NO: 79173 - protein, 19 aa, Artificial Sequence
  Description of Artificial Sequence: Synthetic peptide
  Seed: GMDPRMCSLMQGSTLPRRS
GMDPRMFSLMQGSTFPRRS

SEQ ID NO: 79174 - protein, 19 aa, Artificial Sequence
  Description of Artificial Sequence: Synthetic peptide
  Seed: GMDPRMCSLMQGSTLPRRS
GMDPRMFSLMQGSTGPRRS

SEQ ID NO: 79175 - protein, 19 aa, Artificial Sequence
  Description of Artificial Sequence: Synthetic peptide
  Seed: GMDPRMCSLMQGSTLPRRS
GMDPRMFSLMQGSTHPRRS

SEQ ID NO: 79176 - protein, 19 aa, Artificial Sequence
  Description of Artificial Sequence: Synthetic peptide
  Seed: GMDPRMCSLMQGSTLPRRS
GMDPRMFSLMQGSTIPRRS

SEQ ID NO: 79177 - protein, 19 aa, Artificial Sequence
  Description of Artificial Sequence: Synthetic peptide
  Seed: GMDPRMCSLMQGSTLPRRS
GMDPRMFSLMQGSTLPRRS

SEQ ID NO: 79178 - protein, 19 aa, Artificial Sequence
  Description of Artificial Sequence: Synthetic peptide
  Seed: GMDPRMCSLMQGSTLPRRS
GMDPRMFSLMQGSTMPRRS

SEQ ID NO: 79179 - protein, 19 aa, Artificial Sequence
  Description of Artificial Sequence: Synthetic peptide
  Seed: GMDPRMCSLMQGSTLPRRS
GMDPRMFSLMQGSTNPRRS

SEQ ID NO: 79180 - protein, 19 aa, Artificial Sequence
  Description of Artificial Sequence: Synthetic peptide
  Seed: GMDPRMCSLMQGSTLPRRS
GMDPRMFSLMQGSTQPRRS

SEQ ID NO: 79181 - protein, 19 aa, Artificial Sequence
  Description of Artificial Sequence: Synthetic peptide
  Seed: GMDPRMCSLMQGSTLPRRS
GMDPRMFSLMQGSTSPRRS

SEQ ID NO: 79182 - protein, 19 aa, Artificial Sequence
  Description of Artificial Sequence: Synthetic peptide
  Seed: GMDPRMCSLMQGSTLPRRS
GMDPRMFSLMQGSTTPRRS

SEQ ID NO: 79183 - protein, 19 aa, Artificial Sequence
  Description of Artificial Sequence: Synthetic peptide
  Seed: GMDPRMCSLMQGSTLPRRS
GMDPRMFSLMQGSTVPRRS

SEQ ID NO: 79184 - protein, 19 aa, Artificial Sequence
  Description of Artificial Sequence: Synthetic peptide
  Seed: GMDPRMCSLMQGSTLPRRS
GMDPRMFSLMQHSTIPRRS

SEQ ID NO: 79185 - protein, 19 aa, Artificial Sequence
  Description of Artificial Sequence: Synthetic peptide
  Seed: GMDPRMCSLMQGSTLPRRS
GMDPRMFSLMQHSTLPRRS

SEQ ID NO: 79186 - protein, 19 aa, Artificial Sequence
  Description of Artificial Sequence: Synthetic peptide
  Seed: GMDPRMCSLMQGSTLPRRS
GMDPRMFSLMQHSTVPRRS

SEQ ID NO: 79187 - protein, 19 aa, Artificial Sequence
  Description of Artificial Sequence: Synthetic peptide
  Seed: GMDPRMCSLMQGSTLPRRS
GMDPRMFSLMQISTAPRRS

SEQ ID NO: 79188 - protein, 19 aa, Artificial Sequence
  Description of Artificial Sequence: Synthetic peptide
  Seed: GMDPRMCSLMQGSTLPRRS
GMDPRMFSLMQISTDPRRS

SEQ ID NO: 79189 - protein, 19 aa, Artificial Sequence
  Description of Artificial Sequence: Synthetic peptide
  Seed: GMDPRMCSLMQGSTLPRRS
GMDPRMFSLMQISTGPRRS

SEQ ID NO: 79190 - protein, 19 aa, Artificial Sequence
  Description of Artificial Sequence: Synthetic peptide
  Seed: GMDPRMCSLMQGSTLPRRS
GMDPRMFSLMQISTHPRRS

SEQ ID NO: 79191 - protein, 19 aa, Artificial Sequence
  Description of Artificial Sequence: Synthetic peptide
  Seed: GMDPRMCSLMQGSTLPRRS
GMDPRMFSLMQISTIPRRS

SEQ ID NO: 79192 - protein, 19 aa, Artificial Sequence
  Description of Artificial Sequence: Synthetic peptide
  Seed: GMDPRMCSLMQGSTLPRRS
GMDPRMFSLMQISTLPRRS

SEQ ID NO: 79193 - protein, 19 aa, Artificial Sequence
  Description of Artificial Sequence: Synthetic peptide
  Seed: GMDPRMCSLMQGSTLPRRS
GMDPRMFSLMQISTMPRRS

SEQ ID NO: 79194 - protein, 19 aa, Artificial Sequence
  Description of Artificial Sequence: Synthetic peptide
  Seed: GMDPRMCSLMQGSTLPRRS
GMDPRMFSLMQISTNPRRS

SEQ ID NO: 79195 - protein, 19 aa, Artificial Sequence
  Description of Artificial Sequence: Synthetic peptide
  Seed: GMDPRMCSLMQGSTLPRRS
GMDPRMFSLMQISTQPRRS

SEQ ID NO: 79196 - protein, 19 aa, Artificial Sequence
  Description of Artificial Sequence: Synthetic peptide
  Seed: GMDPRMCSLMQGSTLPRRS
GMDPRMFSLMQISTSPRRS

SEQ ID NO: 79197 - protein, 19 aa, Artificial Sequence
  Description of Artificial Sequence: Synthetic peptide
  Seed: GMDPRMCSLMQGSTLPRRS
GMDPRMFSLMQISTTPRRS

SEQ ID NO: 79198 - protein, 19 aa, Artificial Sequence
  Description of Artificial Sequence: Synthetic peptide
  Seed: GMDPRMCSLMQGSTLPRRS
GMDPRMFSLMQISTVPRRS

SEQ ID NO: 79199 - protein, 19 aa, Artificial Sequence
  Description of Artificial Sequence: Synthetic peptide
  Seed: GMDPRMCSLMQGSTLPRRS
GMDPRMFSLMQLSTAPRRS

SEQ ID NO: 79200 - protein, 19 aa, Artificial Sequence
  Description of Artificial Sequence: Synthetic peptide
  Seed: GMDPRMCSLMQGSTLPRRS
GMDPRMFSLMQLSTIPRRS

SEQ ID NO: 79201 - protein, 19 aa, Artificial Sequence
  Description of Artificial Sequence: Synthetic peptide
  Seed: GMDPRMCSLMQGSTLPRRS
GMDPRMFSLMQLSTLPRRS

SEQ ID NO: 79202 - protein, 19 aa, Artificial Sequence
  Description of Artificial Sequence: Synthetic peptide
  Seed: GMDPRMCSLMQGSTLPRRS
GMDPRMFSLMQLSTMPRRS

SEQ ID NO: 79203 - protein, 19 aa, Artificial Sequence
  Description of Artificial Sequence: Synthetic peptide
  Seed: GMDPRMCSLMQGSTLPRRS
GMDPRMFSLMQLSTNPRRS

SEQ ID NO: 79204 - protein, 19 aa, Artificial Sequence
  Description of Artificial Sequence: Synthetic peptide
  Seed: GMDPRMCSLMQGSTLPRRS
GMDPRMFSLMQLSTSPRRS

SEQ ID NO: 79205 - protein, 19 aa, Artificial Sequence
  Description of Artificial Sequence: Synthetic peptide
  Seed: GMDPRMCSLMQGSTLPRRS
GMDPRMFSLMQLSTTPRRS

SEQ ID NO: 79206 - protein, 19 aa, Artificial Sequence
  Description of Artificial Sequence: Synthetic peptide
  Seed: GMDPRMCSLMQGSTLPRRS
GMDPRMFSLMQLSTVPRRS

SEQ ID NO: 79207 - protein, 19 aa, Artificial Sequence
  Description of Artificial Sequence: Synthetic peptide
  Seed: GMDPRMCSLMQGSTLPRRS
GMDPRMFSLMQMSTAPRRS

SEQ ID NO: 79208 - protein, 19 aa, Artificial Sequence
  Description of Artificial Sequence: Synthetic peptide
  Seed: GMDPRMCSLMQGSTLPRRS
GMDPRMFSLMQMSTIPRRS

SEQ ID NO: 79209 - protein, 19 aa, Artificial Sequence
  Description of Artificial Sequence: Synthetic peptide
  Seed: GMDPRMCSLMQGSTLPRRS
GMDPRMFSLMQMSTLPRRS

SEQ ID NO: 79210 - protein, 19 aa, Artificial Sequence
  Description of Artificial Sequence: Synthetic peptide
  Seed: GMDPRMCSLMQGSTLPRRS
GMDPRMFSLMQMSTMPRRS

SEQ ID NO: 79211 - protein, 19 aa, Artificial Sequence
  Description of Artificial Sequence: Synthetic peptide
  Seed: GMDPRMCSLMQGSTLPRRS
GMDPRMFSLMQMSTNPRRS

SEQ ID NO: 79212 - protein, 19 aa, Artificial Sequence
  Description of Artificial Sequence: Synthetic peptide
  Seed: GMDPRMCSLMQGSTLPRRS
GMDPRMFSLMQMSTSPRRS

SEQ ID NO: 79213 - protein, 19 aa, Artificial Sequence
  Description of Artificial Sequence: Synthetic peptide
  Seed: GMDPRMCSLMQGSTLPRRS
GMDPRMFSLMQMSTTPRRS

SEQ ID NO: 79214 - protein, 19 aa, Artificial Sequence
  Description of Artificial Sequence: Synthetic peptide
  Seed: GMDPRMCSLMQGSTLPRRS
GMDPRMFSLMQMSTVPRRS

SEQ ID NO: 79215 - protein, 19 aa, Artificial Sequence
  Description of Artificial Sequence: Synthetic peptide
  Seed: GMDPRMCSLMQGSTLPRRS
GMDPRMFSLMQNSTAPRRS

SEQ ID NO: 79216 - protein, 19 aa, Artificial Sequence
  Description of Artificial Sequence: Synthetic peptide
  Seed: GMDPRMCSLMQGSTLPRRS
GMDPRMFSLMQNSTGPRRS

SEQ ID NO: 79217 - protein, 19 aa, Artificial Sequence
  Description of Artificial Sequence: Synthetic peptide
  Seed: GMDPRMCSLMQGSTLPRRS
GMDPRMFSLMQNSTIPRRS

SEQ ID NO: 79218 - protein, 19 aa, Artificial Sequence
  Description of Artificial Sequence: Synthetic peptide
  Seed: GMDPRMCSLMQGSTLPRRS
GMDPRMFSLMQNSTLPRRS

SEQ ID NO: 79219 - protein, 19 aa, Artificial Sequence
  Description of Artificial Sequence: Synthetic peptide
  Seed: GMDPRMCSLMQGSTLPRRS
GMDPRMFSLMQNSTMPRRS

SEQ ID NO: 79220 - protein, 19 aa, Artificial Sequence
  Description of Artificial Sequence: Synthetic peptide
  Seed: GMDPRMCSLMQGSTLPRRS
GMDPRMFSLMQNSTNPRRS

SEQ ID NO: 79221 - protein, 19 aa, Artificial Sequence
  Description of Artificial Sequence: Synthetic peptide
  Seed: GMDPRMCSLMQGSTLPRRS
GMDPRMFSLMQNSTSPRRS

SEQ ID NO: 79222 - protein, 19 aa, Artificial Sequence
  Description of Artificial Sequence: Synthetic peptide
  Seed: GMDPRMCSLMQGSTLPRRS
GMDPRMFSLMQNSTTPRRS

SEQ ID NO: 79223 - protein, 19 aa, Artificial Sequence
  Description of Artificial Sequence: Synthetic peptide
  Seed: GMDPRMCSLMQGSTLPRRS
GMDPRMFSLMQNSTVPRRS

SEQ ID NO: 79224 - protein, 19 aa, Artificial Sequence
  Description of Artificial Sequence: Synthetic peptide
  Seed: GMDPRMCSLMQGSTLPRRS
GMDPRMFSLMQPSTAPRRS

SEQ ID NO: 79225 - protein, 19 aa, Artificial Sequence
  Description of Artificial Sequence: Synthetic peptide
  Seed: GMDPRMCSLMQGSTLPRRS
GMDPRMFSLMQPSTDPRRS

SEQ ID NO: 79226 - protein, 19 aa, Artificial Sequence
  Description of Artificial Sequence: Synthetic peptide
  Seed: GMDPRMCSLMQGSTLPRRS
GMDPRMFSLMQPSTEPRRS

SEQ ID NO: 79227 - protein, 19 aa, Artificial Sequence
  Description of Artificial Sequence: Synthetic peptide
  Seed: GMDPRMCSLMQGSTLPRRS
GMDPRMFSLMQPSTFPRRS

SEQ ID NO: 79228 - protein, 19 aa, Artificial Sequence
  Description of Artificial Sequence: Synthetic peptide
  Seed: GMDPRMCSLMQGSTLPRRS
GMDPRMFSLMQPSTGPRRS

SEQ ID NO: 79229 - protein, 19 aa, Artificial Sequence
  Description of Artificial Sequence: Synthetic peptide
  Seed: GMDPRMCSLMQGSTLPRRS
GMDPRMFSLMQPSTHPRRS

SEQ ID NO: 79230 - protein, 19 aa, Artificial Sequence
  Description of Artificial Sequence: Synthetic peptide
  Seed: GMDPRMCSLMQGSTLPRRS
GMDPRMFSLMQPSTIPRRS

SEQ ID NO: 79231 - protein, 19 aa, Artificial Sequence
  Description of Artificial Sequence: Synthetic peptide
  Seed: GMDPRMCSLMQGSTLPRRS
GMDPRMFSLMQPSTLPRRS

SEQ ID NO: 79232 - protein, 19 aa, Artificial Sequence
  Description of Artificial Sequence: Synthetic peptide
  Seed: GMDPRMCSLMQGSTLPRRS
GMDPRMFSLMQPSTMPRRS

SEQ ID NO: 79233 - protein, 19 aa, Artificial Sequence
  Description of Artificial Sequence: Synthetic peptide
  Seed: GMDPRMCSLMQGSTLPRRS
GMDPRMFSLMQPSTNPRRS

SEQ ID NO: 79234 - protein, 19 aa, Artificial Sequence
  Description of Artificial Sequence: Synthetic peptide
  Seed: GMDPRMCSLMQGSTLPRRS
GMDPRMFSLMQPSTPPRRS

SEQ ID NO: 79235 - protein, 19 aa, Artificial Sequence
  Description of Artificial Sequence: Synthetic peptide
  Seed: GMDPRMCSLMQGSTLPRRS
GMDPRMFSLMQPSTQPRRS

SEQ ID NO: 79236 - protein, 19 aa, Artificial Sequence
  Description of Artificial Sequence: Synthetic peptide
  Seed: GMDPRMCSLMQGSTLPRRS
GMDPRMFSLMQPSTSPRRS

SEQ ID NO: 79237 - protein, 19 aa, Artificial Sequence
  Description of Artificial Sequence: Synthetic peptide
  Seed: GMDPRMCSLMQGSTLPRRS
GMDPRMFSLMQPSTTPRRS

SEQ ID NO: 79238 - protein, 19 aa, Artificial Sequence
  Description of Artificial Sequence: Synthetic peptide
  Seed: GMDPRMCSLMQGSTLPRRS
GMDPRMFSLMQPSTVPRRS

SEQ ID NO: 79239 - protein, 19 aa, Artificial Sequence
  Description of Artificial Sequence: Synthetic peptide
  Seed: GMDPRMCSLMQGSTLPRRS
GMDPRMFSLMQPSTWPRRS

SEQ ID NO: 79240 - protein, 19 aa, Artificial Sequence
  Description of Artificial Sequence: Synthetic peptide
  Seed: GMDPRMCSLMQGSTLPRRS
GMDPRMFSLMQSSTAPRRS

SEQ ID NO: 79241 - protein, 19 aa, Artificial Sequence
  Description of Artificial Sequence: Synthetic peptide
  Seed: GMDPRMCSLMQGSTLPRRS
GMDPRMFSLMQSSTCPRRS

SEQ ID NO: 79242 - protein, 19 aa, Artificial Sequence
  Description of Artificial Sequence: Synthetic peptide
  Seed: GMDPRMCSLMQGSTLPRRS
GMDPRMFSLMQSSTDPRRS

SEQ ID NO: 79243 - protein, 19 aa, Artificial Sequence
  Description of Artificial Sequence: Synthetic peptide
  Seed: GMDPRMCSLMQGSTLPRRS
GMDPRMFSLMQSSTFPRRS

SEQ ID NO: 79244 - protein, 19 aa, Artificial Sequence
  Description of Artificial Sequence: Synthetic peptide
  Seed: GMDPRMCSLMQGSTLPRRS
GMDPRMFSLMQSSTGPRRS

SEQ ID NO: 79245 - protein, 19 aa, Artificial Sequence
  Description of Artificial Sequence: Synthetic peptide
  Seed: GMDPRMCSLMQGSTLPRRS
GMDPRMFSLMQSSTHPRRS

SEQ ID NO: 79246 - protein, 19 aa, Artificial Sequence
  Description of Artificial Sequence: Synthetic peptide
  Seed: GMDPRMCSLMQGSTLPRRS
GMDPRMFSLMQSSTIPRRS

SEQ ID NO: 79247 - protein, 19 aa, Artificial Sequence
  Description of Artificial Sequence: Synthetic peptide
  Seed: GMDPRMCSLMQGSTLPRRS
GMDPRMFSLMQSSTLPRRS

SEQ ID NO: 79248 - protein, 19 aa, Artificial Sequence
  Description of Artificial Sequence: Synthetic peptide
  Seed: GMDPRMCSLMQGSTLPRRS
GMDPRMFSLMQSSTMPRRS

SEQ ID NO: 79249 - protein, 19 aa, Artificial Sequence
  Description of Artificial Sequence: Synthetic peptide
  Seed: GMDPRMCSLMQGSTLPRRS
GMDPRMFSLMQSSTNPRRS

SEQ ID NO: 79250 - protein, 19 aa, Artificial Sequence
  Description of Artificial Sequence: Synthetic peptide
  Seed: GMDPRMCSLMQGSTLPRRS
GMDPRMFSLMQSSTPPRRS

SEQ ID NO: 79251 - protein, 19 aa, Artificial Sequence
  Description of Artificial Sequence: Synthetic peptide
  Seed: GMDPRMCSLMQGSTLPRRS
GMDPRMFSLMQSSTQPRRS

SEQ ID NO: 79252 - protein, 19 aa, Artificial Sequence
  Description of Artificial Sequence: Synthetic peptide
  Seed: GMDPRMCSLMQGSTLPRRS
GMDPRMFSLMQSSTSPRRS

SEQ ID NO: 79253 - protein, 19 aa, Artificial Sequence
  Description of Artificial Sequence: Synthetic peptide
  Seed: GMDPRMCSLMQGSTLPRRS
GMDPRMFSLMQSSTTPRRS

SEQ ID NO: 79254 - protein, 19 aa, Artificial Sequence
  Description of Artificial Sequence: Synthetic peptide
  Seed: GMDPRMCSLMQGSTLPRRS
GMDPRMFSLMQSSTVPRRS

SEQ ID NO: 79255 - protein, 19 aa, Artificial Sequence
  Description of Artificial Sequence: Synthetic peptide
  Seed: GMDPRMCSLMQGSTLPRRS
GMDPRMFSLMQTSTAPRRS

SEQ ID NO: 79256 - protein, 19 aa, Artificial Sequence
  Description of Artificial Sequence: Synthetic peptide
  Seed: GMDPRMCSLMQGSTLPRRS
GMDPRMFSLMQTSTGPRRS

SEQ ID NO: 79257 - protein, 19 aa, Artificial Sequence
  Description of Artificial Sequence: Synthetic peptide
  Seed: GMDPRMCSLMQGSTLPRRS
GMDPRMFSLMQTSTHPRRS

SEQ ID NO: 79258 - protein, 19 aa, Artificial Sequence
  Description of Artificial Sequence: Synthetic peptide
  Seed: GMDPRMCSLMQGSTLPRRS
GMDPRMFSLMQTSTIPRRS

SEQ ID NO: 79259 - protein, 19 aa, Artificial Sequence
  Description of Artificial Sequence: Synthetic peptide
  Seed: GMDPRMCSLMQGSTLPRRS
GMDPRMFSLMQTSTLPRRS

SEQ ID NO: 79260 - protein, 19 aa, Artificial Sequence
  Description of Artificial Sequence: Synthetic peptide
  Seed: GMDPRMCSLMQGSTLPRRS
GMDPRMFSLMQTSTMPRRS

SEQ ID NO: 79261 - protein, 19 aa, Artificial Sequence
  Description of Artificial Sequence: Synthetic peptide
  Seed: GMDPRMCSLMQGSTLPRRS
GMDPRMFSLMQTSTNPRRS

SEQ ID NO: 79262 - protein, 19 aa, Artificial Sequence
  Description of Artificial Sequence: Synthetic peptide
  Seed: GMDPRMCSLMQGSTLPRRS
GMDPRMFSLMQTSTPPRRS

SEQ ID NO: 79263 - protein, 19 aa, Artificial Sequence
  Description of Artificial Sequence: Synthetic peptide
  Seed: GMDPRMCSLMQGSTLPRRS
GMDPRMFSLMQTSTQPRRS

SEQ ID NO: 79264 - protein, 19 aa, Artificial Sequence
  Description of Artificial Sequence: Synthetic peptide
  Seed: GMDPRMCSLMQGSTLPRRS
GMDPRMFSLMQTSTSPRRS

SEQ ID NO: 79265 - protein, 19 aa, Artificial Sequence
  Description of Artificial Sequence: Synthetic peptide
  Seed: GMDPRMCSLMQGSTLPRRS
GMDPRMFSLMQTSTTPRRS

SEQ ID NO: 79266 - protein, 19 aa, Artificial Sequence
  Description of Artificial Sequence: Synthetic peptide
  Seed: GMDPRMCSLMQGSTLPRRS
GMDPRMFSLMQTSTVPRRS

SEQ ID NO: 79267 - protein, 19 aa, Artificial Sequence
  Description of Artificial Sequence: Synthetic peptide
  Seed: GMDPRMCSLMQGSTLPRRS
GMDPRMFSLMQVSTAPRRS

SEQ ID NO: 79268 - protein, 19 aa, Artificial Sequence
  Description of Artificial Sequence: Synthetic peptide
  Seed: GMDPRMCSLMQGSTLPRRS
GMDPRMFSLMQVSTCPRRS

SEQ ID NO: 79269 - protein, 19 aa, Artificial Sequence
  Description of Artificial Sequence: Synthetic peptide
  Seed: GMDPRMCSLMQGSTLPRRS
GMDPRMFSLMQVSTDPRRS

SEQ ID NO: 79270 - protein, 19 aa, Artificial Sequence
  Description of Artificial Sequence: Synthetic peptide
  Seed: GMDPRMCSLMQGSTLPRRS
GMDPRMFSLMQVSTEPRRS

SEQ ID NO: 79271 - protein, 19 aa, Artificial Sequence
  Description of Artificial Sequence: Synthetic peptide
  Seed: GMDPRMCSLMQGSTLPRRS
GMDPRMFSLMQVSTGPRRS

SEQ ID NO: 79272 - protein, 19 aa, Artificial Sequence
  Description of Artificial Sequence: Synthetic peptide
  Seed: GMDPRMCSLMQGSTLPRRS
GMDPRMFSLMQVSTHPRRS

SEQ ID NO: 79273 - protein, 19 aa, Artificial Sequence
  Description of Artificial Sequence: Synthetic peptide
  Seed: GMDPRMCSLMQGSTLPRRS
GMDPRMFSLMQVSTIPRRS

SEQ ID NO: 79274 - protein, 19 aa, Artificial Sequence
  Description of Artificial Sequence: Synthetic peptide
  Seed: GMDPRMCSLMQGSTLPRRS
GMDPRMFSLMQVSTLPRRS

SEQ ID NO: 79275 - protein, 19 aa, Artificial Sequence
  Description of Artificial Sequence: Synthetic peptide
  Seed: GMDPRMCSLMQGSTLPRRS
GMDPRMFSLMQVSTMPRRS

SEQ ID NO: 79276 - protein, 19 aa, Artificial Sequence
  Description of Artificial Sequence: Synthetic peptide
  Seed: GMDPRMCSLMQGSTLPRRS
GMDPRMFSLMQVSTNPRRS

SEQ ID NO: 79277 - protein, 19 aa, Artificial Sequence
  Description of Artificial Sequence: Synthetic peptide
  Seed: GMDPRMCSLMQGSTLPRRS
GMDPRMFSLMQVSTPPRRS

SEQ ID NO: 79278 - protein, 19 aa, Artificial Sequence
  Description of Artificial Sequence: Synthetic peptide
  Seed: GMDPRMCSLMQGSTLPRRS
GMDPRMFSLMQVSTQPRRS

SEQ ID NO: 79279 - protein, 19 aa, Artificial Sequence
  Description of Artificial Sequence: Synthetic peptide
  Seed: GMDPRMCSLMQGSTLPRRS
GMDPRMFSLMQVSTSPRRS

SEQ ID NO: 79280 - protein, 19 aa, Artificial Sequence
  Description of Artificial Sequence: Synthetic peptide
  Seed: GMDPRMCSLMQGSTLPRRS
GMDPRMFSLMQVSTTPRRS

SEQ ID NO: 79281 - protein, 19 aa, Artificial Sequence
  Description of Artificial Sequence: Synthetic peptide
  Seed: GMDPRMCSLMQGSTLPRRS
GMDPRMFSLMQVSTVPRRS

SEQ ID NO: 79282 - protein, 19 aa, Artificial Sequence
  Description of Artificial Sequence: Synthetic peptide
  Seed: GMDPRMCSLMQGSTLPRRS
GMDPRMFSLNQASTIPRRS

SEQ ID NO: 79283 - protein, 19 aa, Artificial Sequence
  Description of Artificial Sequence: Synthetic peptide
  Seed: GMDPRMCSLMQGSTLPRRS
GMDPRMFSLNQASTLPRRS

SEQ ID NO: 79284 - protein, 19 aa, Artificial Sequence
  Description of Artificial Sequence: Synthetic peptide
  Seed: GMDPRMCSLMQGSTLPRRS
GMDPRMFSLNQASTVPRRS

SEQ ID NO: 79285 - protein, 19 aa, Artificial Sequence
  Description of Artificial Sequence: Synthetic peptide
  Seed: GMDPRMCSLMQGSTLPRRS
GMDPRMFSLQQASTAPRRS

SEQ ID NO: 79286 - protein, 19 aa, Artificial Sequence
  Description of Artificial Sequence: Synthetic peptide
  Seed: GMDPRMCSLMQGSTLPRRS
GMDPRMFSLQQASTIPRRS

SEQ ID NO: 79287 - protein, 19 aa, Artificial Sequence
  Description of Artificial Sequence: Synthetic peptide
  Seed: GMDPRMCSLMQGSTLPRRS
GMDPRMFSLQQASTLPRRS

SEQ ID NO: 79288 - protein, 19 aa, Artificial Sequence
  Description of Artificial Sequence: Synthetic peptide
  Seed: GMDPRMCSLMQGSTLPRRS
GMDPRMFSLQQASTMPRRS

SEQ ID NO: 79289 - protein, 19 aa, Artificial Sequence
  Description of Artificial Sequence: Synthetic peptide
  Seed: GMDPRMCSLMQGSTLPRRS
GMDPRMFSLQQASTNPRRS

SEQ ID NO: 79290 - protein, 19 aa, Artificial Sequence
  Description of Artificial Sequence: Synthetic peptide
  Seed: GMDPRMCSLMQGSTLPRRS
GMDPRMFSLQQASTSPRRS

SEQ ID NO: 79291 - protein, 19 aa, Artificial Sequence
  Description of Artificial Sequence: Synthetic peptide
  Seed: GMDPRMCSLMQGSTLPRRS
GMDPRMFSLQQASTTPRRS

SEQ ID NO: 79292 - protein, 19 aa, Artificial Sequence
  Description of Artificial Sequence: Synthetic peptide
  Seed: GMDPRMCSLMQGSTLPRRS
GMDPRMFSLQQASTVPRRS

SEQ ID NO: 79293 - protein, 19 aa, Artificial Sequence
  Description of Artificial Sequence: Synthetic peptide
  Seed: GMDPRMCSLMQGSTLPRRS
GMDPRMFSLQQGSTAPRRS

SEQ ID NO: 79294 - protein, 19 aa, Artificial Sequence
  Description of Artificial Sequence: Synthetic peptide
  Seed: GMDPRMCSLMQGSTLPRRS
GMDPRMFSLQQGSTIPRRS

SEQ ID NO: 79295 - protein, 19 aa, Artificial Sequence
  Description of Artificial Sequence: Synthetic peptide
  Seed: GMDPRMCSLMQGSTLPRRS
GMDPRMFSLQQGSTLPRRS

SEQ ID NO: 79296 - protein, 19 aa, Artificial Sequence
  Description of Artificial Sequence: Synthetic peptide
  Seed: GMDPRMCSLMQGSTLPRRS
GMDPRMFSLQQGSTMPRRS

SEQ ID NO: 79297 - protein, 19 aa, Artificial Sequence
  Description of Artificial Sequence: Synthetic peptide
  Seed: GMDPRMCSLMQGSTLPRRS
GMDPRMFSLQQGSTTPRRS

SEQ ID NO: 79298 - protein, 19 aa, Artificial Sequence
  Description of Artificial Sequence: Synthetic peptide
  Seed: GMDPRMCSLMQGSTLPRRS
GMDPRMFSLQQGSTVPRRS

SEQ ID NO: 79299 - protein, 19 aa, Artificial Sequence
  Description of Artificial Sequence: Synthetic peptide
  Seed: GMDPRMCSLMQGSTLPRRS
GMDPRMFSLQQISTAPRRS

SEQ ID NO: 79300 - protein, 19 aa, Artificial Sequence
  Description of Artificial Sequence: Synthetic peptide
  Seed: GMDPRMCSLMQGSTLPRRS
GMDPRMFSLQQISTNPRRS

SEQ ID NO: 79301 - protein, 19 aa, Artificial Sequence
  Description of Artificial Sequence: Synthetic peptide
  Seed: GMDPRMCSLMQGSTLPRRS
GMDPRMFSLQQISTSPRRS

SEQ ID NO: 79302 - protein, 19 aa, Artificial Sequence
  Description of Artificial Sequence: Synthetic peptide
  Seed: GMDPRMCSLMQGSTLPRRS
GMDPRMFSLQQNSTIPRRS

SEQ ID NO: 79303 - protein, 19 aa, Artificial Sequence
  Description of Artificial Sequence: Synthetic peptide
  Seed: GMDPRMCSLMQGSTLPRRS
GMDPRMFSLQQNSTLPRRS

SEQ ID NO: 79304 - protein, 19 aa, Artificial Sequence
  Description of Artificial Sequence: Synthetic peptide
  Seed: GMDPRMCSLMQGSTLPRRS
GMDPRMFSLQQNSTVPRRS

SEQ ID NO: 79305 - protein, 19 aa, Artificial Sequence
  Description of Artificial Sequence: Synthetic peptide
  Seed: GMDPRMCSLMQGSTLPRRS
GMDPRMFSLQQPSTAPRRS

SEQ ID NO: 79306 - protein, 19 aa, Artificial Sequence
  Description of Artificial Sequence: Synthetic peptide
  Seed: GMDPRMCSLMQGSTLPRRS
GMDPRMFSLQQPSTIPRRS

SEQ ID NO: 79307 - protein, 19 aa, Artificial Sequence
  Description of Artificial Sequence: Synthetic peptide
  Seed: GMDPRMCSLMQGSTLPRRS
GMDPRMFSLQQPSTLPRRS

SEQ ID NO: 79308 - protein, 19 aa, Artificial Sequence
  Description of Artificial Sequence: Synthetic peptide
  Seed: GMDPRMCSLMQGSTLPRRS
GMDPRMFSLQQPSTSPRRS

SEQ ID NO: 79309 - protein, 19 aa, Artificial Sequence
  Description of Artificial Sequence: Synthetic peptide
  Seed: GMDPRMCSLMQGSTLPRRS
GMDPRMFSLQQPSTVPRRS

SEQ ID NO: 79310 - protein, 19 aa, Artificial Sequence
  Description of Artificial Sequence: Synthetic peptide
  Seed: GMDPRMCSLMQGSTLPRRS
GMDPRMFSLQQSSTAPRRS

SEQ ID NO: 79311 - protein, 19 aa, Artificial Sequence
  Description of Artificial Sequence: Synthetic peptide
  Seed: GMDPRMCSLMQGSTLPRRS
GMDPRMFSLQQSSTIPRRS

SEQ ID NO: 79312 - protein, 19 aa, Artificial Sequence
  Description of Artificial Sequence: Synthetic peptide
  Seed: GMDPRMCSLMQGSTLPRRS
GMDPRMFSLQQSSTLPRRS

SEQ ID NO: 79313 - protein, 19 aa, Artificial Sequence
  Description of Artificial Sequence: Synthetic peptide
  Seed: GMDPRMCSLMQGSTLPRRS
GMDPRMFSLQQSSTMPRRS

SEQ ID NO: 79314 - protein, 19 aa, Artificial Sequence
  Description of Artificial Sequence: Synthetic peptide
  Seed: GMDPRMCSLMQGSTLPRRS
GMDPRMFSLQQSSTNPRRS

SEQ ID NO: 79315 - protein, 19 aa, Artificial Sequence
  Description of Artificial Sequence: Synthetic peptide
  Seed: GMDPRMCSLMQGSTLPRRS
GMDPRMFSLQQSSTSPRRS

SEQ ID NO: 79316 - protein, 19 aa, Artificial Sequence
  Description of Artificial Sequence: Synthetic peptide
  Seed: GMDPRMCSLMQGSTLPRRS
GMDPRMFSLQQSSTTPRRS

SEQ ID NO: 79317 - protein, 19 aa, Artificial Sequence
  Description of Artificial Sequence: Synthetic peptide
  Seed: GMDPRMCSLMQGSTLPRRS
GMDPRMFSLQQSSTVPRRS

SEQ ID NO: 79318 - protein, 19 aa, Artificial Sequence
  Description of Artificial Sequence: Synthetic peptide
  Seed: GMDPRMCSLMQGSTLPRRS
GMDPRMFSLQQTSTAPRRS

SEQ ID NO: 79319 - protein, 19 aa, Artificial Sequence
  Description of Artificial Sequence: Synthetic peptide
  Seed: GMDPRMCSLMQGSTLPRRS
GMDPRMFSLQQTSTIPRRS

SEQ ID NO: 79320 - protein, 19 aa, Artificial Sequence
  Description of Artificial Sequence: Synthetic peptide
  Seed: GMDPRMCSLMQGSTLPRRS
GMDPRMFSLQQTSTLPRRS

SEQ ID NO: 79321 - protein, 19 aa, Artificial Sequence
  Description of Artificial Sequence: Synthetic peptide
  Seed: GMDPRMCSLMQGSTLPRRS
GMDPRMFSLQQTSTNPRRS

SEQ ID NO: 79322 - protein, 19 aa, Artificial Sequence
  Description of Artificial Sequence: Synthetic peptide
  Seed: GMDPRMCSLMQGSTLPRRS
GMDPRMFSLQQTSTSPRRS

SEQ ID NO: 79323 - protein, 19 aa, Artificial Sequence
  Description of Artificial Sequence: Synthetic peptide
  Seed: GMDPRMCSLMQGSTLPRRS
GMDPRMFSLQQTSTVPRRS

SEQ ID NO: 79324 - protein, 19 aa, Artificial Sequence
  Description of Artificial Sequence: Synthetic peptide
  Seed: GMDPRMCSLMQGSTLPRRS
GMDPRMFSLQQVSTAPRRS

SEQ ID NO: 79325 - protein, 19 aa, Artificial Sequence
  Description of Artificial Sequence: Synthetic peptide
  Seed: GMDPRMCSLMQGSTLPRRS
GMDPRMFSLQQVSTNPRRS

SEQ ID NO: 79326 - protein, 19 aa, Artificial Sequence
  Description of Artificial Sequence: Synthetic peptide
  Seed: GMDPRMCSLMQGSTLPRRS
GMDPRMFSLQQVSTSPRRS

SEQ ID NO: 79327 - protein, 19 aa, Artificial Sequence
  Description of Artificial Sequence: Synthetic peptide
  Seed: GMDPRMCSLMQGSTLPRRS
GMDPRMFSLQQVSTTPRRS

SEQ ID NO: 79328 - protein, 19 aa, Artificial Sequence
  Description of Artificial Sequence: Synthetic peptide
  Seed: GMDPRMCSLMQGSTLPRRS
GMDPRMFSLQQVSTVPRRS

SEQ ID NO: 79329 - protein, 19 aa, Artificial Sequence
  Description of Artificial Sequence: Synthetic peptide
  Seed: GMDPRMCSLMQGSTLPRRS
GMDPRMFSLSQASTAPRRS

SEQ ID NO: 79330 - protein, 19 aa, Artificial Sequence
  Description of Artificial Sequence: Synthetic peptide
  Seed: GMDPRMCSLMQGSTLPRRS
GMDPRMFSLSQASTIPRRS

SEQ ID NO: 79331 - protein, 19 aa, Artificial Sequence
  Description of Artificial Sequence: Synthetic peptide
  Seed: GMDPRMCSLMQGSTLPRRS
GMDPRMFSLSQASTLPRRS

SEQ ID NO: 79332 - protein, 19 aa, Artificial Sequence
  Description of Artificial Sequence: Synthetic peptide
  Seed: GMDPRMCSLMQGSTLPRRS
GMDPRMFSLSQASTMPRRS

SEQ ID NO: 79333 - protein, 19 aa, Artificial Sequence
  Description of Artificial Sequence: Synthetic peptide
  Seed: GMDPRMCSLMQGSTLPRRS
GMDPRMFSLSQASTNPRRS

SEQ ID NO: 79334 - protein, 19 aa, Artificial Sequence
  Description of Artificial Sequence: Synthetic peptide
  Seed: GMDPRMCSLMQGSTLPRRS
GMDPRMFSLSQASTSPRRS

SEQ ID NO: 79335 - protein, 19 aa, Artificial Sequence
  Description of Artificial Sequence: Synthetic peptide
  Seed: GMDPRMCSLMQGSTLPRRS
GMDPRMFSLSQASTVPRRS

SEQ ID NO: 79336 - protein, 19 aa, Artificial Sequence
  Description of Artificial Sequence: Synthetic peptide
  Seed: GMDPRMCSLMQGSTLPRRS
GMDPRMFSLSQGSTIPRRS

SEQ ID NO: 79337 - protein, 19 aa, Artificial Sequence
  Description of Artificial Sequence: Synthetic peptide
  Seed: GMDPRMCSLMQGSTLPRRS
GMDPRMFSLSQGSTLPRRS

SEQ ID NO: 79338 - protein, 19 aa, Artificial Sequence
  Description of Artificial Sequence: Synthetic peptide
  Seed: GMDPRMCSLMQGSTLPRRS
GMDPRMFSLSQGSTVPRRS

SEQ ID NO: 79339 - protein, 19 aa, Artificial Sequence
  Description of Artificial Sequence: Synthetic peptide
  Seed: GMDPRMCSLMQGSTLPRRS
GMDPRMFSLSQPSTIPRRS

SEQ ID NO: 79340 - protein, 19 aa, Artificial Sequence
  Description of Artificial Sequence: Synthetic peptide
  Seed: GMDPRMCSLMQGSTLPRRS
GMDPRMFSLSQPSTLPRRS

SEQ ID NO: 79341 - protein, 19 aa, Artificial Sequence
  Description of Artificial Sequence: Synthetic peptide
  Seed: GMDPRMCSLMQGSTLPRRS
GMDPRMFSLSQPSTVPRRS

SEQ ID NO: 79342 - protein, 19 aa, Artificial Sequence
  Description of Artificial Sequence: Synthetic peptide
  Seed: GMDPRMCSLMQGSTLPRRS
GMDPRMFSLSQSSTIPRRS

SEQ ID NO: 79343 - protein, 19 aa, Artificial Sequence
  Description of Artificial Sequence: Synthetic peptide
  Seed: GMDPRMCSLMQGSTLPRRS
GMDPRMFSLSQSSTLPRRS

SEQ ID NO: 79344 - protein, 19 aa, Artificial Sequence
  Description of Artificial Sequence: Synthetic peptide
  Seed: GMDPRMCSLMQGSTLPRRS
GMDPRMFSLSQSSTVPRRS

SEQ ID NO: 79345 - protein, 19 aa, Artificial Sequence
  Description of Artificial Sequence: Synthetic peptide
  Seed: GMDPRMCSLMQGSTLPRRS
GMDPRMFSLTQASTAPRRS

SEQ ID NO: 79346 - protein, 19 aa, Artificial Sequence
  Description of Artificial Sequence: Synthetic peptide
  Seed: GMDPRMCSLMQGSTLPRRS
GMDPRMFSLTQASTIPRRS

SEQ ID NO: 79347 - protein, 19 aa, Artificial Sequence
  Description of Artificial Sequence: Synthetic peptide
  Seed: GMDPRMCSLMQGSTLPRRS
GMDPRMFSLTQASTLPRRS

SEQ ID NO: 79348 - protein, 19 aa, Artificial Sequence
  Description of Artificial Sequence: Synthetic peptide
  Seed: GMDPRMCSLMQGSTLPRRS
GMDPRMFSLTQASTSPRRS

SEQ ID NO: 79349 - protein, 19 aa, Artificial Sequence
  Description of Artificial Sequence: Synthetic peptide
  Seed: GMDPRMCSLMQGSTLPRRS
GMDPRMFSLTQASTVPRRS

SEQ ID NO: 79350 - protein, 19 aa, Artificial Sequence
  Description of Artificial Sequence: Synthetic peptide
  Seed: GMDPRMCSLMQGSTLPRRS
GMDPRMFSLTQGSTLPRRS

SEQ ID NO: 79351 - protein, 19 aa, Artificial Sequence
  Description of Artificial Sequence: Synthetic peptide
  Seed: GMDPRMCSLMQGSTLPRRS
GMDPRMFSLVQASTAPRRS

SEQ ID NO: 79352 - protein, 19 aa, Artificial Sequence
  Description of Artificial Sequence: Synthetic peptide
  Seed: GMDPRMCSLMQGSTLPRRS
GMDPRMFSLVQASTGPRRS

SEQ ID NO: 79353 - protein, 19 aa, Artificial Sequence
  Description of Artificial Sequence: Synthetic peptide
  Seed: GMDPRMCSLMQGSTLPRRS
GMDPRMFSLVQASTHPRRS

SEQ ID NO: 79354 - protein, 19 aa, Artificial Sequence
  Description of Artificial Sequence: Synthetic peptide
  Seed: GMDPRMCSLMQGSTLPRRS
GMDPRMFSLVQASTIPRRS

SEQ ID NO: 79355 - protein, 19 aa, Artificial Sequence
  Description of Artificial Sequence: Synthetic peptide
  Seed: GMDPRMCSLMQGSTLPRRS
GMDPRMFSLVQASTLPRRS

SEQ ID NO: 79356 - protein, 19 aa, Artificial Sequence
  Description of Artificial Sequence: Synthetic peptide
  Seed: GMDPRMCSLMQGSTLPRRS
GMDPRMFSLVQASTMPRRS

SEQ ID NO: 79357 - protein, 19 aa, Artificial Sequence
  Description of Artificial Sequence: Synthetic peptide
  Seed: GMDPRMCSLMQGSTLPRRS
GMDPRMFSLVQASTNPRRS

SEQ ID NO: 79358 - protein, 19 aa, Artificial Sequence
  Description of Artificial Sequence: Synthetic peptide
  Seed: GMDPRMCSLMQGSTLPRRS
GMDPRMFSLVQASTQPRRS

SEQ ID NO: 79359 - protein, 19 aa, Artificial Sequence
  Description of Artificial Sequence: Synthetic peptide
  Seed: GMDPRMCSLMQGSTLPRRS
GMDPRMFSLVQASTSPRRS

SEQ ID NO: 79360 - protein, 19 aa, Artificial Sequence
  Description of Artificial Sequence: Synthetic peptide
  Seed: GMDPRMCSLMQGSTLPRRS
GMDPRMFSLVQASTTPRRS

SEQ ID NO: 79361 - protein, 19 aa, Artificial Sequence
  Description of Artificial Sequence: Synthetic peptide
  Seed: GMDPRMCSLMQGSTLPRRS
GMDPRMFSLVQASTVPRRS

SEQ ID NO: 79362 - protein, 19 aa, Artificial Sequence
  Description of Artificial Sequence: Synthetic peptide
  Seed: GMDPRMCSLMQGSTLPRRS
GMDPRMFSLVQGSTAPRRS

SEQ ID NO: 79363 - protein, 19 aa, Artificial Sequence
  Description of Artificial Sequence: Synthetic peptide
  Seed: GMDPRMCSLMQGSTLPRRS
GMDPRMFSLVQGSTIPRRS

SEQ ID NO: 79364 - protein, 19 aa, Artificial Sequence
  Description of Artificial Sequence: Synthetic peptide
  Seed: GMDPRMCSLMQGSTLPRRS
GMDPRMFSLVQGSTLPRRS

SEQ ID NO: 79365 - protein, 19 aa, Artificial Sequence
  Description of Artificial Sequence: Synthetic peptide
  Seed: GMDPRMCSLMQGSTLPRRS
GMDPRMFSLVQGSTMPRRS

SEQ ID NO: 79366 - protein, 19 aa, Artificial Sequence
  Description of Artificial Sequence: Synthetic peptide
  Seed: GMDPRMCSLMQGSTLPRRS
GMDPRMFSLVQGSTNPRRS

SEQ ID NO: 79367 - protein, 19 aa, Artificial Sequence
  Description of Artificial Sequence: Synthetic peptide
  Seed: GMDPRMCSLMQGSTLPRRS
GMDPRMFSLVQGSTSPRRS

SEQ ID NO: 79368 - protein, 19 aa, Artificial Sequence
  Description of Artificial Sequence: Synthetic peptide
  Seed: GMDPRMCSLMQGSTLPRRS
GMDPRMFSLVQGSTTPRRS

SEQ ID NO: 79369 - protein, 19 aa, Artificial Sequence
  Description of Artificial Sequence: Synthetic peptide
  Seed: GMDPRMCSLMQGSTLPRRS
GMDPRMFSLVQGSTVPRRS

SEQ ID NO: 79370 - protein, 19 aa, Artificial Sequence
  Description of Artificial Sequence: Synthetic peptide
  Seed: GMDPRMCSLMQGSTLPRRS
GMDPRMFSLVQISTAPRRS

SEQ ID NO: 79371 - protein, 19 aa, Artificial Sequence
  Description of Artificial Sequence: Synthetic peptide
  Seed: GMDPRMCSLMQGSTLPRRS
GMDPRMFSLVQISTNPRRS

SEQ ID NO: 79372 - protein, 19 aa, Artificial Sequence
  Description of Artificial Sequence: Synthetic peptide
  Seed: GMDPRMCSLMQGSTLPRRS
GMDPRMFSLVQISTSPRRS

SEQ ID NO: 79373 - protein, 19 aa, Artificial Sequence
  Description of Artificial Sequence: Synthetic peptide
  Seed: GMDPRMCSLMQGSTLPRRS
GMDPRMFSLVQISTTPRRS

SEQ ID NO: 79374 - protein, 19 aa, Artificial Sequence
  Description of Artificial Sequence: Synthetic peptide
  Seed: GMDPRMCSLMQGSTLPRRS
GMDPRMFSLVQISTVPRRS

SEQ ID NO: 79375 - protein, 19 aa, Artificial Sequence
  Description of Artificial Sequence: Synthetic peptide
  Seed: GMDPRMCSLMQGSTLPRRS
GMDPRMFSLVQNSTAPRRS

SEQ ID NO: 79376 - protein, 19 aa, Artificial Sequence
  Description of Artificial Sequence: Synthetic peptide
  Seed: GMDPRMCSLMQGSTLPRRS
GMDPRMFSLVQNSTIPRRS

SEQ ID NO: 79377 - protein, 19 aa, Artificial Sequence
  Description of Artificial Sequence: Synthetic peptide
  Seed: GMDPRMCSLMQGSTLPRRS
GMDPRMFSLVQNSTLPRRS

SEQ ID NO: 79378 - protein, 19 aa, Artificial Sequence
  Description of Artificial Sequence: Synthetic peptide
  Seed: GMDPRMCSLMQGSTLPRRS
GMDPRMFSLVQNSTSPRRS

SEQ ID NO: 79379 - protein, 19 aa, Artificial Sequence
  Description of Artificial Sequence: Synthetic peptide
  Seed: GMDPRMCSLMQGSTLPRRS
GMDPRMFSLVQNSTVPRRS

SEQ ID NO: 79380 - protein, 19 aa, Artificial Sequence
  Description of Artificial Sequence: Synthetic peptide
  Seed: GMDPRMCSLMQGSTLPRRS
GMDPRMFSLVQPSTAPRRS

SEQ ID NO: 79381 - protein, 19 aa, Artificial Sequence
  Description of Artificial Sequence: Synthetic peptide
  Seed: GMDPRMCSLMQGSTLPRRS
GMDPRMFSLVQPSTGPRRS

SEQ ID NO: 79382 - protein, 19 aa, Artificial Sequence
  Description of Artificial Sequence: Synthetic peptide
  Seed: GMDPRMCSLMQGSTLPRRS
GMDPRMFSLVQPSTIPRRS

SEQ ID NO: 79383 - protein, 19 aa, Artificial Sequence
  Description of Artificial Sequence: Synthetic peptide
  Seed: GMDPRMCSLMQGSTLPRRS
GMDPRMFSLVQPSTLPRRS

SEQ ID NO: 79384 - protein, 19 aa, Artificial Sequence
  Description of Artificial Sequence: Synthetic peptide
  Seed: GMDPRMCSLMQGSTLPRRS
GMDPRMFSLVQPSTMPRRS

SEQ ID NO: 79385 - protein, 19 aa, Artificial Sequence
  Description of Artificial Sequence: Synthetic peptide
  Seed: GMDPRMCSLMQGSTLPRRS
GMDPRMFSLVQPSTNPRRS

SEQ ID NO: 79386 - protein, 19 aa, Artificial Sequence
  Description of Artificial Sequence: Synthetic peptide
  Seed: GMDPRMCSLMQGSTLPRRS
GMDPRMFSLVQPSTSPRRS

SEQ ID NO: 79387 - protein, 19 aa, Artificial Sequence
  Description of Artificial Sequence: Synthetic peptide
  Seed: GMDPRMCSLMQGSTLPRRS
GMDPRMFSLVQPSTTPRRS

SEQ ID NO: 79388 - protein, 19 aa, Artificial Sequence
  Description of Artificial Sequence: Synthetic peptide
  Seed: GMDPRMCSLMQGSTLPRRS
GMDPRMFSLVQPSTVPRRS

SEQ ID NO: 79389 - protein, 19 aa, Artificial Sequence
  Description of Artificial Sequence: Synthetic peptide
  Seed: GMDPRMCSLMQGSTLPRRS
GMDPRMFSLVQSSTAPRRS

SEQ ID NO: 79390 - protein, 19 aa, Artificial Sequence
  Description of Artificial Sequence: Synthetic peptide
  Seed: GMDPRMCSLMQGSTLPRRS
GMDPRMFSLVQSSTGPRRS

SEQ ID NO: 79391 - protein, 19 aa, Artificial Sequence
  Description of Artificial Sequence: Synthetic peptide
  Seed: GMDPRMCSLMQGSTLPRRS
GMDPRMFSLVQSSTIPRRS

SEQ ID NO: 79392 - protein, 19 aa, Artificial Sequence
  Description of Artificial Sequence: Synthetic peptide
  Seed: GMDPRMCSLMQGSTLPRRS
GMDPRMFSLVQSSTLPRRS

SEQ ID NO: 79393 - protein, 19 aa, Artificial Sequence
  Description of Artificial Sequence: Synthetic peptide
  Seed: GMDPRMCSLMQGSTLPRRS
GMDPRMFSLVQSSTMPRRS

SEQ ID NO: 79394 - protein, 19 aa, Artificial Sequence
  Description of Artificial Sequence: Synthetic peptide
  Seed: GMDPRMCSLMQGSTLPRRS
GMDPRMFSLVQSSTNPRRS

SEQ ID NO: 79395 - protein, 19 aa, Artificial Sequence
  Description of Artificial Sequence: Synthetic peptide
  Seed: GMDPRMCSLMQGSTLPRRS
GMDPRMFSLVQSSTSPRRS

SEQ ID NO: 79396 - protein, 19 aa, Artificial Sequence
  Description of Artificial Sequence: Synthetic peptide
  Seed: GMDPRMCSLMQGSTLPRRS
GMDPRMFSLVQSSTTPRRS

SEQ ID NO: 79397 - protein, 19 aa, Artificial Sequence
  Description of Artificial Sequence: Synthetic peptide
  Seed: GMDPRMCSLMQGSTLPRRS
GMDPRMFSLVQSSTVPRRS

SEQ ID NO: 79398 - protein, 19 aa, Artificial Sequence
  Description of Artificial Sequence: Synthetic peptide
  Seed: GMDPRMCSLMQGSTLPRRS
GMDPRMFSLVQTSTAPRRS

SEQ ID NO: 79399 - protein, 19 aa, Artificial Sequence
  Description of Artificial Sequence: Synthetic peptide
  Seed: GMDPRMCSLMQGSTLPRRS
GMDPRMFSLVQTSTIPRRS

SEQ ID NO: 79400 - protein, 19 aa, Artificial Sequence
  Description of Artificial Sequence: Synthetic peptide
  Seed: GMDPRMCSLMQGSTLPRRS
GMDPRMFSLVQTSTLPRRS

SEQ ID NO: 79401 - protein, 19 aa, Artificial Sequence
  Description of Artificial Sequence: Synthetic peptide
  Seed: GMDPRMCSLMQGSTLPRRS
GMDPRMFSLVQTSTMPRRS

SEQ ID NO: 79402 - protein, 19 aa, Artificial Sequence
  Description of Artificial Sequence: Synthetic peptide
  Seed: GMDPRMCSLMQGSTLPRRS
GMDPRMFSLVQTSTNPRRS

SEQ ID NO: 79403 - protein, 19 aa, Artificial Sequence
  Description of Artificial Sequence: Synthetic peptide
  Seed: GMDPRMCSLMQGSTLPRRS
GMDPRMFSLVQTSTSPRRS

SEQ ID NO: 79404 - protein, 19 aa, Artificial Sequence
  Description of Artificial Sequence: Synthetic peptide
  Seed: GMDPRMCSLMQGSTLPRRS
GMDPRMFSLVQTSTTPRRS

SEQ ID NO: 79405 - protein, 19 aa, Artificial Sequence
  Description of Artificial Sequence: Synthetic peptide
  Seed: GMDPRMCSLMQGSTLPRRS
GMDPRMFSLVQTSTVPRRS

SEQ ID NO: 79406 - protein, 19 aa, Artificial Sequence
  Description of Artificial Sequence: Synthetic peptide
  Seed: GMDPRMCSLMQGSTLPRRS
GMDPRMFSLVQVSTAPRRS

SEQ ID NO: 79407 - protein, 19 aa, Artificial Sequence
  Description of Artificial Sequence: Synthetic peptide
  Seed: GMDPRMCSLMQGSTLPRRS
GMDPRMFSLVQVSTGPRRS

SEQ ID NO: 79408 - protein, 19 aa, Artificial Sequence
  Description of Artificial Sequence: Synthetic peptide
  Seed: GMDPRMCSLMQGSTLPRRS
GMDPRMFSLVQVSTIPRRS

SEQ ID NO: 79409 - protein, 19 aa, Artificial Sequence
  Description of Artificial Sequence: Synthetic peptide
  Seed: GMDPRMCSLMQGSTLPRRS
GMDPRMFSLVQVSTLPRRS

SEQ ID NO: 79410 - protein, 19 aa, Artificial Sequence
  Description of Artificial Sequence: Synthetic peptide
  Seed: GMDPRMCSLMQGSTLPRRS
GMDPRMFSLVQVSTMPRRS

SEQ ID NO: 79411 - protein, 19 aa, Artificial Sequence
  Description of Artificial Sequence: Synthetic peptide
  Seed: GMDPRMCSLMQGSTLPRRS
GMDPRMFSLVQVSTNPRRS

SEQ ID NO: 79412 - protein, 19 aa, Artificial Sequence
  Description of Artificial Sequence: Synthetic peptide
  Seed: GMDPRMCSLMQGSTLPRRS
GMDPRMFSLVQVSTSPRRS

SEQ ID NO: 79413 - protein, 19 aa, Artificial Sequence
  Description of Artificial Sequence: Synthetic peptide
  Seed: GMDPRMCSLMQGSTLPRRS
GMDPRMFSLVQVSTTPRRS

SEQ ID NO: 79414 - protein, 19 aa, Artificial Sequence
  Description of Artificial Sequence: Synthetic peptide
  Seed: GMDPRMCSLMQGSTLPRRS
GMDPRMFSLVQVSTVPRRS

SEQ ID NO: 79415 - protein, 19 aa, Artificial Sequence
  Description of Artificial Sequence: Synthetic peptide
  Seed: GMDPRMCSLMQGSTLPRRS
GMDPRMISLAQASTAPRRS

SEQ ID NO: 79416 - protein, 19 aa, Artificial Sequence
  Description of Artificial Sequence: Synthetic peptide
  Seed: GMDPRMCSLMQGSTLPRRS
GMDPRMISLAQASTIPRRS

SEQ ID NO: 79417 - protein, 19 aa, Artificial Sequence
  Description of Artificial Sequence: Synthetic peptide
  Seed: GMDPRMCSLMQGSTLPRRS
GMDPRMISLAQASTLPRRS

SEQ ID NO: 79418 - protein, 19 aa, Artificial Sequence
  Description of Artificial Sequence: Synthetic peptide
  Seed: GMDPRMCSLMQGSTLPRRS
GMDPRMISLAQASTVPRRS

SEQ ID NO: 79419 - protein, 19 aa, Artificial Sequence
  Description of Artificial Sequence: Synthetic peptide
  Seed: GMDPRMCSLMQGSTLPRRS
GMDPRMISLAQGSTIPRRS

SEQ ID NO: 79420 - protein, 19 aa, Artificial Sequence
  Description of Artificial Sequence: Synthetic peptide
  Seed: GMDPRMCSLMQGSTLPRRS
GMDPRMISLAQGSTLPRRS

SEQ ID NO: 79421 - protein, 19 aa, Artificial Sequence
  Description of Artificial Sequence: Synthetic peptide
  Seed: GMDPRMCSLMQGSTLPRRS
GMDPRMISLAQGSTVPRRS

SEQ ID NO: 79422 - protein, 19 aa, Artificial Sequence
  Description of Artificial Sequence: Synthetic peptide
  Seed: GMDPRMCSLMQGSTLPRRS
GMDPRMISLIQASTAPRRS

SEQ ID NO: 79423 - protein, 19 aa, Artificial Sequence
  Description of Artificial Sequence: Synthetic peptide
  Seed: GMDPRMCSLMQGSTLPRRS
GMDPRMISLIQASTIPRRS

SEQ ID NO: 79424 - protein, 19 aa, Artificial Sequence
  Description of Artificial Sequence: Synthetic peptide
  Seed: GMDPRMCSLMQGSTLPRRS
GMDPRMISLIQASTLPRRS

SEQ ID NO: 79425 - protein, 19 aa, Artificial Sequence
  Description of Artificial Sequence: Synthetic peptide
  Seed: GMDPRMCSLMQGSTLPRRS
GMDPRMISLIQASTSPRRS

SEQ ID NO: 79426 - protein, 19 aa, Artificial Sequence
  Description of Artificial Sequence: Synthetic peptide
  Seed: GMDPRMCSLMQGSTLPRRS
GMDPRMISLIQASTVPRRS

SEQ ID NO: 79427 - protein, 19 aa, Artificial Sequence
  Description of Artificial Sequence: Synthetic peptide
  Seed: GMDPRMCSLMQGSTLPRRS
GMDPRMISLIQGSTAPRRS

SEQ ID NO: 79428 - protein, 19 aa, Artificial Sequence
  Description of Artificial Sequence: Synthetic peptide
  Seed: GMDPRMCSLMQGSTLPRRS
GMDPRMISLIQGSTIPRRS

SEQ ID NO: 79429 - protein, 19 aa, Artificial Sequence
  Description of Artificial Sequence: Synthetic peptide
  Seed: GMDPRMCSLMQGSTLPRRS
GMDPRMISLIQGSTLPRRS

SEQ ID NO: 79430 - protein, 19 aa, Artificial Sequence
  Description of Artificial Sequence: Synthetic peptide
  Seed: GMDPRMCSLMQGSTLPRRS
GMDPRMISLIQGSTVPRRS

SEQ ID NO: 79431 - protein, 19 aa, Artificial Sequence
  Description of Artificial Sequence: Synthetic peptide
  Seed: GMDPRMCSLMQGSTLPRRS
GMDPRMISLIQPSTVPRRS

SEQ ID NO: 79432 - protein, 19 aa, Artificial Sequence
  Description of Artificial Sequence: Synthetic peptide
  Seed: GMDPRMCSLMQGSTLPRRS
GMDPRMISLIQSSTAPRRS

SEQ ID NO: 79433 - protein, 19 aa, Artificial Sequence
  Description of Artificial Sequence: Synthetic peptide
  Seed: GMDPRMCSLMQGSTLPRRS
GMDPRMISLIQSSTIPRRS

SEQ ID NO: 79434 - protein, 19 aa, Artificial Sequence
  Description of Artificial Sequence: Synthetic peptide
  Seed: GMDPRMCSLMQGSTLPRRS
GMDPRMISLIQSSTLPRRS

SEQ ID NO: 79435 - protein, 19 aa, Artificial Sequence
  Description of Artificial Sequence: Synthetic peptide
  Seed: GMDPRMCSLMQGSTLPRRS
GMDPRMISLIQSSTVPRRS

SEQ ID NO: 79436 - protein, 19 aa, Artificial Sequence
  Description of Artificial Sequence: Synthetic peptide
  Seed: GMDPRMCSLMQGSTLPRRS
GMDPRMISLLQASTAPRRS

SEQ ID NO: 79437 - protein, 19 aa, Artificial Sequence
  Description of Artificial Sequence: Synthetic peptide
  Seed: GMDPRMCSLMQGSTLPRRS
GMDPRMISLLQASTIPRRS

SEQ ID NO: 79438 - protein, 19 aa, Artificial Sequence
  Description of Artificial Sequence: Synthetic peptide
  Seed: GMDPRMCSLMQGSTLPRRS
GMDPRMISLLQASTLPRRS

SEQ ID NO: 79439 - protein, 19 aa, Artificial Sequence
  Description of Artificial Sequence: Synthetic peptide
  Seed: GMDPRMCSLMQGSTLPRRS
GMDPRMISLLQASTMPRRS

SEQ ID NO: 79440 - protein, 19 aa, Artificial Sequence
  Description of Artificial Sequence: Synthetic peptide
  Seed: GMDPRMCSLMQGSTLPRRS
GMDPRMISLLQASTNPRRS

SEQ ID NO: 79441 - protein, 19 aa, Artificial Sequence
  Description of Artificial Sequence: Synthetic peptide
  Seed: GMDPRMCSLMQGSTLPRRS
GMDPRMISLLQASTSPRRS

SEQ ID NO: 79442 - protein, 19 aa, Artificial Sequence
  Description of Artificial Sequence: Synthetic peptide
  Seed: GMDPRMCSLMQGSTLPRRS
GMDPRMISLLQASTTPRRS

SEQ ID NO: 79443 - protein, 19 aa, Artificial Sequence
  Description of Artificial Sequence: Synthetic peptide
  Seed: GMDPRMCSLMQGSTLPRRS
GMDPRMISLLQASTVPRRS

SEQ ID NO: 79444 - protein, 19 aa, Artificial Sequence
  Description of Artificial Sequence: Synthetic peptide
  Seed: GMDPRMCSLMQGSTLPRRS
GMDPRMISLLQGSTAPRRS

SEQ ID NO: 79445 - protein, 19 aa, Artificial Sequence
  Description of Artificial Sequence: Synthetic peptide
  Seed: GMDPRMCSLMQGSTLPRRS
GMDPRMISLLQGSTIPRRS

SEQ ID NO: 79446 - protein, 19 aa, Artificial Sequence
  Description of Artificial Sequence: Synthetic peptide
  Seed: GMDPRMCSLMQGSTLPRRS
GMDPRMISLLQGSTLPRRS

SEQ ID NO: 79447 - protein, 19 aa, Artificial Sequence
  Description of Artificial Sequence: Synthetic peptide
  Seed: GMDPRMCSLMQGSTLPRRS
GMDPRMISLLQGSTMPRRS

SEQ ID NO: 79448 - protein, 19 aa, Artificial Sequence
  Description of Artificial Sequence: Synthetic peptide
  Seed: GMDPRMCSLMQGSTLPRRS
GMDPRMISLLQGSTSPRRS

SEQ ID NO: 79449 - protein, 19 aa, Artificial Sequence
  Description of Artificial Sequence: Synthetic peptide
  Seed: GMDPRMCSLMQGSTLPRRS
GMDPRMISLLQGSTTPRRS

SEQ ID NO: 79450 - protein, 19 aa, Artificial Sequence
  Description of Artificial Sequence: Synthetic peptide
  Seed: GMDPRMCSLMQGSTLPRRS
GMDPRMISLLQGSTVPRRS

SEQ ID NO: 79451 - protein, 19 aa, Artificial Sequence
  Description of Artificial Sequence: Synthetic peptide
  Seed: GMDPRMCSLMQGSTLPRRS
GMDPRMISLLQNSTIPRRS

SEQ ID NO: 79452 - protein, 19 aa, Artificial Sequence
  Description of Artificial Sequence: Synthetic peptide
  Seed: GMDPRMCSLMQGSTLPRRS
GMDPRMISLLQNSTLPRRS

SEQ ID NO: 79453 - protein, 19 aa, Artificial Sequence
  Description of Artificial Sequence: Synthetic peptide
  Seed: GMDPRMCSLMQGSTLPRRS
GMDPRMISLLQNSTVPRRS

SEQ ID NO: 79454 - protein, 19 aa, Artificial Sequence
  Description of Artificial Sequence: Synthetic peptide
  Seed: GMDPRMCSLMQGSTLPRRS
GMDPRMISLLQPSTAPRRS

SEQ ID NO: 79455 - protein, 19 aa, Artificial Sequence
  Description of Artificial Sequence: Synthetic peptide
  Seed: GMDPRMCSLMQGSTLPRRS
GMDPRMISLLQPSTIPRRS

SEQ ID NO: 79456 - protein, 19 aa, Artificial Sequence
  Description of Artificial Sequence: Synthetic peptide
  Seed: GMDPRMCSLMQGSTLPRRS
GMDPRMISLLQPSTLPRRS

SEQ ID NO: 79457 - protein, 19 aa, Artificial Sequence
  Description of Artificial Sequence: Synthetic peptide
  Seed: GMDPRMCSLMQGSTLPRRS
GMDPRMISLLQPSTMPRRS

SEQ ID NO: 79458 - protein, 19 aa, Artificial Sequence
  Description of Artificial Sequence: Synthetic peptide
  Seed: GMDPRMCSLMQGSTLPRRS
GMDPRMISLLQPSTNPRRS

SEQ ID NO: 79459 - protein, 19 aa, Artificial Sequence
  Description of Artificial Sequence: Synthetic peptide
  Seed: GMDPRMCSLMQGSTLPRRS
GMDPRMISLLQPSTSPRRS

SEQ ID NO: 79460 - protein, 19 aa, Artificial Sequence
  Description of Artificial Sequence: Synthetic peptide
  Seed: GMDPRMCSLMQGSTLPRRS
GMDPRMISLLQPSTTPRRS

SEQ ID NO: 79461 - protein, 19 aa, Artificial Sequence
  Description of Artificial Sequence: Synthetic peptide
  Seed: GMDPRMCSLMQGSTLPRRS
GMDPRMISLLQPSTVPRRS

SEQ ID NO: 79462 - protein, 19 aa, Artificial Sequence
  Description of Artificial Sequence: Synthetic peptide
  Seed: GMDPRMCSLMQGSTLPRRS
GMDPRMISLLQSSTAPRRS

SEQ ID NO: 79463 - protein, 19 aa, Artificial Sequence
  Description of Artificial Sequence: Synthetic peptide
  Seed: GMDPRMCSLMQGSTLPRRS
GMDPRMISLLQSSTIPRRS

SEQ ID NO: 79464 - protein, 19 aa, Artificial Sequence
  Description of Artificial Sequence: Synthetic peptide
  Seed: GMDPRMCSLMQGSTLPRRS
GMDPRMISLLQSSTLPRRS

SEQ ID NO: 79465 - protein, 19 aa, Artificial Sequence
  Description of Artificial Sequence: Synthetic peptide
  Seed: GMDPRMCSLMQGSTLPRRS
GMDPRMISLLQSSTMPRRS

SEQ ID NO: 79466 - protein, 19 aa, Artificial Sequence
  Description of Artificial Sequence: Synthetic peptide
  Seed: GMDPRMCSLMQGSTLPRRS
GMDPRMISLLQSSTSPRRS

SEQ ID NO: 79467 - protein, 19 aa, Artificial Sequence
  Description of Artificial Sequence: Synthetic peptide
  Seed: GMDPRMCSLMQGSTLPRRS
GMDPRMISLLQSSTTPRRS

SEQ ID NO: 79468 - protein, 19 aa, Artificial Sequence
  Description of Artificial Sequence: Synthetic peptide
  Seed: GMDPRMCSLMQGSTLPRRS
GMDPRMISLLQSSTVPRRS

SEQ ID NO: 79469 - protein, 19 aa, Artificial Sequence
  Description of Artificial Sequence: Synthetic peptide
  Seed: GMDPRMCSLMQGSTLPRRS
GMDPRMISLLQTSTAPRRS

SEQ ID NO: 79470 - protein, 19 aa, Artificial Sequence
  Description of Artificial Sequence: Synthetic peptide
  Seed: GMDPRMCSLMQGSTLPRRS
GMDPRMISLLQTSTIPRRS

SEQ ID NO: 79471 - protein, 19 aa, Artificial Sequence
  Description of Artificial Sequence: Synthetic peptide
  Seed: GMDPRMCSLMQGSTLPRRS
GMDPRMISLLQTSTLPRRS

SEQ ID NO: 79472 - protein, 19 aa, Artificial Sequence
  Description of Artificial Sequence: Synthetic peptide
  Seed: GMDPRMCSLMQGSTLPRRS
GMDPRMISLLQTSTVPRRS

SEQ ID NO: 79473 - protein, 19 aa, Artificial Sequence
  Description of Artificial Sequence: Synthetic peptide
  Seed: GMDPRMCSLMQGSTLPRRS
GMDPRMISLLQVSTAPRRS

SEQ ID NO: 79474 - protein, 19 aa, Artificial Sequence
  Description of Artificial Sequence: Synthetic peptide
  Seed: GMDPRMCSLMQGSTLPRRS
GMDPRMISLLQVSTNPRRS

SEQ ID NO: 79475 - protein, 19 aa, Artificial Sequence
  Description of Artificial Sequence: Synthetic peptide
  Seed: GMDPRMCSLMQGSTLPRRS
GMDPRMISLLQVSTSPRRS

SEQ ID NO: 79476 - protein, 19 aa, Artificial Sequence
  Description of Artificial Sequence: Synthetic peptide
  Seed: GMDPRMCSLMQGSTLPRRS
GMDPRMISLMQASTAPRRS

SEQ ID NO: 79477 - protein, 19 aa, Artificial Sequence
  Description of Artificial Sequence: Synthetic peptide
  Seed: GMDPRMCSLMQGSTLPRRS
GMDPRMISLMQASTIPRRS

SEQ ID NO: 79478 - protein, 19 aa, Artificial Sequence
  Description of Artificial Sequence: Synthetic peptide
  Seed: GMDPRMCSLMQGSTLPRRS
GMDPRMISLMQASTLPRRS

SEQ ID NO: 79479 - protein, 19 aa, Artificial Sequence
  Description of Artificial Sequence: Synthetic peptide
  Seed: GMDPRMCSLMQGSTLPRRS
GMDPRMISLMQASTMPRRS

SEQ ID NO: 79480 - protein, 19 aa, Artificial Sequence
  Description of Artificial Sequence: Synthetic peptide
  Seed: GMDPRMCSLMQGSTLPRRS
GMDPRMISLMQASTNPRRS

SEQ ID NO: 79481 - protein, 19 aa, Artificial Sequence
  Description of Artificial Sequence: Synthetic peptide
  Seed: GMDPRMCSLMQGSTLPRRS
GMDPRMISLMQASTSPRRS

SEQ ID NO: 79482 - protein, 19 aa, Artificial Sequence
  Description of Artificial Sequence: Synthetic peptide
  Seed: GMDPRMCSLMQGSTLPRRS
GMDPRMISLMQASTTPRRS

SEQ ID NO: 79483 - protein, 19 aa, Artificial Sequence
  Description of Artificial Sequence: Synthetic peptide
  Seed: GMDPRMCSLMQGSTLPRRS
GMDPRMISLMQASTVPRRS

SEQ ID NO: 79484 - protein, 19 aa, Artificial Sequence
  Description of Artificial Sequence: Synthetic peptide
  Seed: GMDPRMCSLMQGSTLPRRS
GMDPRMISLMQGSTAPRRS

SEQ ID NO: 79485 - protein, 19 aa, Artificial Sequence
  Description of Artificial Sequence: Synthetic peptide
  Seed: GMDPRMCSLMQGSTLPRRS
GMDPRMISLMQGSTIPRRS

SEQ ID NO: 79486 - protein, 19 aa, Artificial Sequence
  Description of Artificial Sequence: Synthetic peptide
  Seed: GMDPRMCSLMQGSTLPRRS
GMDPRMISLMQGSTLPRRS

SEQ ID NO: 79487 - protein, 19 aa, Artificial Sequence
  Description of Artificial Sequence: Synthetic peptide
  Seed: GMDPRMCSLMQGSTLPRRS
GMDPRMISLMQGSTMPRRS

SEQ ID NO: 79488 - protein, 19 aa, Artificial Sequence
  Description of Artificial Sequence: Synthetic peptide
  Seed: GMDPRMCSLMQGSTLPRRS
GMDPRMISLMQGSTSPRRS

SEQ ID NO: 79489 - protein, 19 aa, Artificial Sequence
  Description of Artificial Sequence: Synthetic peptide
  Seed: GMDPRMCSLMQGSTLPRRS
GMDPRMISLMQGSTTPRRS

SEQ ID NO: 79490 - protein, 19 aa, Artificial Sequence
  Description of Artificial Sequence: Synthetic peptide
  Seed: GMDPRMCSLMQGSTLPRRS
GMDPRMISLMQGSTVPRRS

SEQ ID NO: 79491 - protein, 19 aa, Artificial Sequence
  Description of Artificial Sequence: Synthetic peptide
  Seed: GMDPRMCSLMQGSTLPRRS
GMDPRMISLMQISTAPRRS

SEQ ID NO: 79492 - protein, 19 aa, Artificial Sequence
  Description of Artificial Sequence: Synthetic peptide
  Seed: GMDPRMCSLMQGSTLPRRS
GMDPRMISLMQNSTIPRRS

SEQ ID NO: 79493 - protein, 19 aa, Artificial Sequence
  Description of Artificial Sequence: Synthetic peptide
  Seed: GMDPRMCSLMQGSTLPRRS
GMDPRMISLMQNSTLPRRS

SEQ ID NO: 79494 - protein, 19 aa, Artificial Sequence
  Description of Artificial Sequence: Synthetic peptide
  Seed: GMDPRMCSLMQGSTLPRRS
GMDPRMISLMQNSTVPRRS

SEQ ID NO: 79495 - protein, 19 aa, Artificial Sequence
  Description of Artificial Sequence: Synthetic peptide
  Seed: GMDPRMCSLMQGSTLPRRS
GMDPRMISLMQPSTAPRRS

SEQ ID NO: 79496 - protein, 19 aa, Artificial Sequence
  Description of Artificial Sequence: Synthetic peptide
  Seed: GMDPRMCSLMQGSTLPRRS
GMDPRMISLMQPSTIPRRS

SEQ ID NO: 79497 - protein, 19 aa, Artificial Sequence
  Description of Artificial Sequence: Synthetic peptide
  Seed: GMDPRMCSLMQGSTLPRRS
GMDPRMISLMQPSTLPRRS

SEQ ID NO: 79498 - protein, 19 aa, Artificial Sequence
  Description of Artificial Sequence: Synthetic peptide
  Seed: GMDPRMCSLMQGSTLPRRS
GMDPRMISLMQPSTMPRRS

SEQ ID NO: 79499 - protein, 19 aa, Artificial Sequence
  Description of Artificial Sequence: Synthetic peptide
  Seed: GMDPRMCSLMQGSTLPRRS
GMDPRMISLMQPSTNPRRS

SEQ ID NO: 79500 - protein, 19 aa, Artificial Sequence
  Description of Artificial Sequence: Synthetic peptide
  Seed: GMDPRMCSLMQGSTLPRRS
GMDPRMISLMQPSTSPRRS

SEQ ID NO: 79501 - protein, 19 aa, Artificial Sequence
  Description of Artificial Sequence: Synthetic peptide
  Seed: GMDPRMCSLMQGSTLPRRS
GMDPRMISLMQPSTVPRRS

SEQ ID NO: 79502 - protein, 19 aa, Artificial Sequence
  Description of Artificial Sequence: Synthetic peptide
  Seed: GMDPRMCSLMQGSTLPRRS
GMDPRMISLMQSSTAPRRS

SEQ ID NO: 79503 - protein, 19 aa, Artificial Sequence
  Description of Artificial Sequence: Synthetic peptide
  Seed: GMDPRMCSLMQGSTLPRRS
GMDPRMISLMQSSTIPRRS

SEQ ID NO: 79504 - protein, 19 aa, Artificial Sequence
  Description of Artificial Sequence: Synthetic peptide
  Seed: GMDPRMCSLMQGSTLPRRS
GMDPRMISLMQSSTLPRRS

SEQ ID NO: 79505 - protein, 19 aa, Artificial Sequence
  Description of Artificial Sequence: Synthetic peptide
  Seed: GMDPRMCSLMQGSTLPRRS
GMDPRMISLMQSSTMPRRS

SEQ ID NO: 79506 - protein, 19 aa, Artificial Sequence
  Description of Artificial Sequence: Synthetic peptide
  Seed: GMDPRMCSLMQGSTLPRRS
GMDPRMISLMQSSTSPRRS

SEQ ID NO: 79507 - protein, 19 aa, Artificial Sequence
  Description of Artificial Sequence: Synthetic peptide
  Seed: GMDPRMCSLMQGSTLPRRS
GMDPRMISLMQSSTTPRRS

SEQ ID NO: 79508 - protein, 19 aa, Artificial Sequence
  Description of Artificial Sequence: Synthetic peptide
  Seed: GMDPRMCSLMQGSTLPRRS
GMDPRMISLMQSSTVPRRS

SEQ ID NO: 79509 - protein, 19 aa, Artificial Sequence
  Description of Artificial Sequence: Synthetic peptide
  Seed: GMDPRMCSLMQGSTLPRRS
GMDPRMISLMQTSTAPRRS

SEQ ID NO: 79510 - protein, 19 aa, Artificial Sequence
  Description of Artificial Sequence: Synthetic peptide
  Seed: GMDPRMCSLMQGSTLPRRS
GMDPRMISLMQTSTIPRRS

SEQ ID NO: 79511 - protein, 19 aa, Artificial Sequence
  Description of Artificial Sequence: Synthetic peptide
  Seed: GMDPRMCSLMQGSTLPRRS
GMDPRMISLMQTSTLPRRS

SEQ ID NO: 79512 - protein, 19 aa, Artificial Sequence
  Description of Artificial Sequence: Synthetic peptide
  Seed: GMDPRMCSLMQGSTLPRRS
GMDPRMISLMQTSTVPRRS

SEQ ID NO: 79513 - protein, 19 aa, Artificial Sequence
  Description of Artificial Sequence: Synthetic peptide
  Seed: GMDPRMCSLMQGSTLPRRS
GMDPRMISLMQVSTAPRRS

SEQ ID NO: 79514 - protein, 19 aa, Artificial Sequence
  Description of Artificial Sequence: Synthetic peptide
  Seed: GMDPRMCSLMQGSTLPRRS
GMDPRMISLMQVSTNPRRS

SEQ ID NO: 79515 - protein, 19 aa, Artificial Sequence
  Description of Artificial Sequence: Synthetic peptide
  Seed: GMDPRMCSLMQGSTLPRRS
GMDPRMISLMQVSTSPRRS

SEQ ID NO: 79516 - protein, 19 aa, Artificial Sequence
  Description of Artificial Sequence: Synthetic peptide
  Seed: GMDPRMCSLMQGSTLPRRS
GMDPRMISLQQASTIPRRS

SEQ ID NO: 79517 - protein, 19 aa, Artificial Sequence
  Description of Artificial Sequence: Synthetic peptide
  Seed: GMDPRMCSLMQGSTLPRRS
GMDPRMISLQQASTLPRRS

SEQ ID NO: 79518 - protein, 19 aa, Artificial Sequence
  Description of Artificial Sequence: Synthetic peptide
  Seed: GMDPRMCSLMQGSTLPRRS
GMDPRMISLQQASTVPRRS

SEQ ID NO: 79519 - protein, 19 aa, Artificial Sequence
  Description of Artificial Sequence: Synthetic peptide
  Seed: GMDPRMCSLMQGSTLPRRS
GMDPRMISLQQGSTLPRRS

SEQ ID NO: 79520 - protein, 19 aa, Artificial Sequence
  Description of Artificial Sequence: Synthetic peptide
  Seed: GMDPRMCSLMQGSTLPRRS
GMDPRMISLQQGSTVPRRS

SEQ ID NO: 79521 - protein, 19 aa, Artificial Sequence
  Description of Artificial Sequence: Synthetic peptide
  Seed: GMDPRMCSLMQGSTLPRRS
GMDPRMISLVQASTLPRRS

SEQ ID NO: 79522 - protein, 19 aa, Artificial Sequence
  Description of Artificial Sequence: Synthetic peptide
  Seed: GMDPRMCSLMQGSTLPRRS
GMDPRMISLVQASTVPRRS

SEQ ID NO: 79523 - protein, 19 aa, Artificial Sequence
  Description of Artificial Sequence: Synthetic peptide
  Seed: GMDPRMCSLMQGSTLPRRS
GMDPRMLSLAQASTIPRRS

SEQ ID NO: 79524 - protein, 19 aa, Artificial Sequence
  Description of Artificial Sequence: Synthetic peptide
  Seed: GMDPRMCSLMQGSTLPRRS
GMDPRMLSLAQASTLPRRS

SEQ ID NO: 79525 - protein, 19 aa, Artificial Sequence
  Description of Artificial Sequence: Synthetic peptide
  Seed: GMDPRMCSLMQGSTLPRRS
GMDPRMLSLAQASTVPRRS

SEQ ID NO: 79526 - protein, 19 aa, Artificial Sequence
  Description of Artificial Sequence: Synthetic peptide
  Seed: GMDPRMCSLMQGSTLPRRS
GMDPRMLSLIQASTAPRRS

SEQ ID NO: 79527 - protein, 19 aa, Artificial Sequence
  Description of Artificial Sequence: Synthetic peptide
  Seed: GMDPRMCSLMQGSTLPRRS
GMDPRMLSLIQASTIPRRS

SEQ ID NO: 79528 - protein, 19 aa, Artificial Sequence
  Description of Artificial Sequence: Synthetic peptide
  Seed: GMDPRMCSLMQGSTLPRRS
GMDPRMLSLIQASTLPRRS

SEQ ID NO: 79529 - protein, 19 aa, Artificial Sequence
  Description of Artificial Sequence: Synthetic peptide
  Seed: GMDPRMCSLMQGSTLPRRS
GMDPRMLSLIQASTSPRRS

SEQ ID NO: 79530 - protein, 19 aa, Artificial Sequence
  Description of Artificial Sequence: Synthetic peptide
  Seed: GMDPRMCSLMQGSTLPRRS
GMDPRMLSLIQASTVPRRS

SEQ ID NO: 79531 - protein, 19 aa, Artificial Sequence
  Description of Artificial Sequence: Synthetic peptide
  Seed: GMDPRMCSLMQGSTLPRRS
GMDPRMLSLIQGSTAPRRS

SEQ ID NO: 79532 - protein, 19 aa, Artificial Sequence
  Description of Artificial Sequence: Synthetic peptide
  Seed: GMDPRMCSLMQGSTLPRRS
GMDPRMLSLIQGSTIPRRS

SEQ ID NO: 79533 - protein, 19 aa, Artificial Sequence
  Description of Artificial Sequence: Synthetic peptide
  Seed: GMDPRMCSLMQGSTLPRRS
GMDPRMLSLIQGSTLPRRS

SEQ ID NO: 79534 - protein, 19 aa, Artificial Sequence
  Description of Artificial Sequence: Synthetic peptide
  Seed: GMDPRMCSLMQGSTLPRRS
GMDPRMLSLIQGSTVPRRS

SEQ ID NO: 79535 - protein, 19 aa, Artificial Sequence
  Description of Artificial Sequence: Synthetic peptide
  Seed: GMDPRMCSLMQGSTLPRRS
GMDPRMLSLIQSSTVPRRS

SEQ ID NO: 79536 - protein, 19 aa, Artificial Sequence
  Description of Artificial Sequence: Synthetic peptide
  Seed: GMDPRMCSLMQGSTLPRRS
GMDPRMLSLLQASTAPRRS

SEQ ID NO: 79537 - protein, 19 aa, Artificial Sequence
  Description of Artificial Sequence: Synthetic peptide
  Seed: GMDPRMCSLMQGSTLPRRS
GMDPRMLSLLQASTIPRRS

SEQ ID NO: 79538 - protein, 19 aa, Artificial Sequence
  Description of Artificial Sequence: Synthetic peptide
  Seed: GMDPRMCSLMQGSTLPRRS
GMDPRMLSLLQASTLPRRS

SEQ ID NO: 79539 - protein, 19 aa, Artificial Sequence
  Description of Artificial Sequence: Synthetic peptide
  Seed: GMDPRMCSLMQGSTLPRRS
GMDPRMLSLLQASTMPRRS

SEQ ID NO: 79540 - protein, 19 aa, Artificial Sequence
  Description of Artificial Sequence: Synthetic peptide
  Seed: GMDPRMCSLMQGSTLPRRS
GMDPRMLSLLQASTNPRRS

SEQ ID NO: 79541 - protein, 19 aa, Artificial Sequence
  Description of Artificial Sequence: Synthetic peptide
  Seed: GMDPRMCSLMQGSTLPRRS
GMDPRMLSLLQASTSPRRS

SEQ ID NO: 79542 - protein, 19 aa, Artificial Sequence
  Description of Artificial Sequence: Synthetic peptide
  Seed: GMDPRMCSLMQGSTLPRRS
GMDPRMLSLLQASTTPRRS

SEQ ID NO: 79543 - protein, 19 aa, Artificial Sequence
  Description of Artificial Sequence: Synthetic peptide
  Seed: GMDPRMCSLMQGSTLPRRS
GMDPRMLSLLQASTVPRRS

SEQ ID NO: 79544 - protein, 19 aa, Artificial Sequence
  Description of Artificial Sequence: Synthetic peptide
  Seed: GMDPRMCSLMQGSTLPRRS
GMDPRMLSLLQGSTAPRRS

SEQ ID NO: 79545 - protein, 19 aa, Artificial Sequence
  Description of Artificial Sequence: Synthetic peptide
  Seed: GMDPRMCSLMQGSTLPRRS
GMDPRMLSLLQGSTIPRRS

SEQ ID NO: 79546 - protein, 19 aa, Artificial Sequence
  Description of Artificial Sequence: Synthetic peptide
  Seed: GMDPRMCSLMQGSTLPRRS
GMDPRMLSLLQGSTLPRRS

SEQ ID NO: 79547 - protein, 19 aa, Artificial Sequence
  Description of Artificial Sequence: Synthetic peptide
  Seed: GMDPRMCSLMQGSTLPRRS
GMDPRMLSLLQGSTMPRRS

SEQ ID NO: 79548 - protein, 19 aa, Artificial Sequence
  Description of Artificial Sequence: Synthetic peptide
  Seed: GMDPRMCSLMQGSTLPRRS
GMDPRMLSLLQGSTSPRRS

SEQ ID NO: 79549 - protein, 19 aa, Artificial Sequence
  Description of Artificial Sequence: Synthetic peptide
  Seed: GMDPRMCSLMQGSTLPRRS
GMDPRMLSLLQGSTTPRRS

SEQ ID NO: 79550 - protein, 19 aa, Artificial Sequence
  Description of Artificial Sequence: Synthetic peptide
  Seed: GMDPRMCSLMQGSTLPRRS
GMDPRMLSLLQGSTVPRRS

SEQ ID NO: 79551 - protein, 19 aa, Artificial Sequence
  Description of Artificial Sequence: Synthetic peptide
  Seed: GMDPRMCSLMQGSTLPRRS
GMDPRMLSLLQNSTVPRRS

SEQ ID NO: 79552 - protein, 19 aa, Artificial Sequence
  Description of Artificial Sequence: Synthetic peptide
  Seed: GMDPRMCSLMQGSTLPRRS
GMDPRMLSLLQPSTAPRRS

SEQ ID NO: 79553 - protein, 19 aa, Artificial Sequence
  Description of Artificial Sequence: Synthetic peptide
  Seed: GMDPRMCSLMQGSTLPRRS
GMDPRMLSLLQPSTIPRRS

SEQ ID NO: 79554 - protein, 19 aa, Artificial Sequence
  Description of Artificial Sequence: Synthetic peptide
  Seed: GMDPRMCSLMQGSTLPRRS
GMDPRMLSLLQPSTLPRRS

SEQ ID NO: 79555 - protein, 19 aa, Artificial Sequence
  Description of Artificial Sequence: Synthetic peptide
  Seed: GMDPRMCSLMQGSTLPRRS
GMDPRMLSLLQPSTNPRRS

SEQ ID NO: 79556 - protein, 19 aa, Artificial Sequence
  Description of Artificial Sequence: Synthetic peptide
  Seed: GMDPRMCSLMQGSTLPRRS
GMDPRMLSLLQPSTSPRRS

SEQ ID NO: 79557 - protein, 19 aa, Artificial Sequence
  Description of Artificial Sequence: Synthetic peptide
  Seed: GMDPRMCSLMQGSTLPRRS
GMDPRMLSLLQPSTVPRRS

SEQ ID NO: 79558 - protein, 19 aa, Artificial Sequence
  Description of Artificial Sequence: Synthetic peptide
  Seed: GMDPRMCSLMQGSTLPRRS
GMDPRMLSLLQSSTAPRRS

SEQ ID NO: 79559 - protein, 19 aa, Artificial Sequence
  Description of Artificial Sequence: Synthetic peptide
  Seed: GMDPRMCSLMQGSTLPRRS
GMDPRMLSLLQSSTIPRRS

SEQ ID NO: 79560 - protein, 19 aa, Artificial Sequence
  Description of Artificial Sequence: Synthetic peptide
  Seed: GMDPRMCSLMQGSTLPRRS
GMDPRMLSLLQSSTLPRRS

SEQ ID NO: 79561 - protein, 19 aa, Artificial Sequence
  Description of Artificial Sequence: Synthetic peptide
  Seed: GMDPRMCSLMQGSTLPRRS
GMDPRMLSLLQSSTMPRRS

SEQ ID NO: 79562 - protein, 19 aa, Artificial Sequence
  Description of Artificial Sequence: Synthetic peptide
  Seed: GMDPRMCSLMQGSTLPRRS
GMDPRMLSLLQSSTSPRRS

SEQ ID NO: 79563 - protein, 19 aa, Artificial Sequence
  Description of Artificial Sequence: Synthetic peptide
  Seed: GMDPRMCSLMQGSTLPRRS
GMDPRMLSLLQSSTTPRRS

SEQ ID NO: 79564 - protein, 19 aa, Artificial Sequence
  Description of Artificial Sequence: Synthetic peptide
  Seed: GMDPRMCSLMQGSTLPRRS
GMDPRMLSLLQSSTVPRRS

SEQ ID NO: 79565 - protein, 19 aa, Artificial Sequence
  Description of Artificial Sequence: Synthetic peptide
  Seed: GMDPRMCSLMQGSTLPRRS
GMDPRMLSLLQTSTAPRRS

SEQ ID NO: 79566 - protein, 19 aa, Artificial Sequence
  Description of Artificial Sequence: Synthetic peptide
  Seed: GMDPRMCSLMQGSTLPRRS
GMDPRMLSLLQTSTLPRRS

SEQ ID NO: 79567 - protein, 19 aa, Artificial Sequence
  Description of Artificial Sequence: Synthetic peptide
  Seed: GMDPRMCSLMQGSTLPRRS
GMDPRMLSLLQTSTSPRRS

SEQ ID NO: 79568 - protein, 19 aa, Artificial Sequence
  Description of Artificial Sequence: Synthetic peptide
  Seed: GMDPRMCSLMQGSTLPRRS
GMDPRMLSLLQTSTVPRRS

SEQ ID NO: 79569 - protein, 19 aa, Artificial Sequence
  Description of Artificial Sequence: Synthetic peptide
  Seed: GMDPRMCSLMQGSTLPRRS
GMDPRMLSLLQVSTAPRRS

SEQ ID NO: 79570 - protein, 19 aa, Artificial Sequence
  Description of Artificial Sequence: Synthetic peptide
  Seed: GMDPRMCSLMQGSTLPRRS
GMDPRMLSLLQVSTNPRRS

SEQ ID NO: 79571 - protein, 19 aa, Artificial Sequence
  Description of Artificial Sequence: Synthetic peptide
  Seed: GMDPRMCSLMQGSTLPRRS
GMDPRMLSLLQVSTSPRRS

SEQ ID NO: 79572 - protein, 19 aa, Artificial Sequence
  Description of Artificial Sequence: Synthetic peptide
  Seed: GMDPRMCSLMQGSTLPRRS
GMDPRMLSLMQASTAPRRS

SEQ ID NO: 79573 - protein, 19 aa, Artificial Sequence
  Description of Artificial Sequence: Synthetic peptide
  Seed: GMDPRMCSLMQGSTLPRRS
GMDPRMLSLMQASTIPRRS

SEQ ID NO: 79574 - protein, 19 aa, Artificial Sequence
  Description of Artificial Sequence: Synthetic peptide
  Seed: GMDPRMCSLMQGSTLPRRS
GMDPRMLSLMQASTLPRRS

SEQ ID NO: 79575 - protein, 19 aa, Artificial Sequence
  Description of Artificial Sequence: Synthetic peptide
  Seed: GMDPRMCSLMQGSTLPRRS
GMDPRMLSLMQASTMPRRS

SEQ ID NO: 79576 - protein, 19 aa, Artificial Sequence
  Description of Artificial Sequence: Synthetic peptide
  Seed: GMDPRMCSLMQGSTLPRRS
GMDPRMLSLMQASTNPRRS

SEQ ID NO: 79577 - protein, 19 aa, Artificial Sequence
  Description of Artificial Sequence: Synthetic peptide
  Seed: GMDPRMCSLMQGSTLPRRS
GMDPRMLSLMQASTSPRRS

SEQ ID NO: 79578 - protein, 19 aa, Artificial Sequence
  Description of Artificial Sequence: Synthetic peptide
  Seed: GMDPRMCSLMQGSTLPRRS
GMDPRMLSLMQASTTPRRS

SEQ ID NO: 79579 - protein, 19 aa, Artificial Sequence
  Description of Artificial Sequence: Synthetic peptide
  Seed: GMDPRMCSLMQGSTLPRRS
GMDPRMLSLMQASTVPRRS

SEQ ID NO: 79580 - protein, 19 aa, Artificial Sequence
  Description of Artificial Sequence: Synthetic peptide
  Seed: GMDPRMCSLMQGSTLPRRS
GMDPRMLSLMQGSTAPRRS

SEQ ID NO: 79581 - protein, 19 aa, Artificial Sequence
  Description of Artificial Sequence: Synthetic peptide
  Seed: GMDPRMCSLMQGSTLPRRS
GMDPRMLSLMQGSTIPRRS

SEQ ID NO: 79582 - protein, 19 aa, Artificial Sequence
  Description of Artificial Sequence: Synthetic peptide
  Seed: GMDPRMCSLMQGSTLPRRS
GMDPRMLSLMQGSTLPRRS

SEQ ID NO: 79583 - protein, 19 aa, Artificial Sequence
  Description of Artificial Sequence: Synthetic peptide
  Seed: GMDPRMCSLMQGSTLPRRS
GMDPRMLSLMQGSTMPRRS

SEQ ID NO: 79584 - protein, 19 aa, Artificial Sequence
  Description of Artificial Sequence: Synthetic peptide
  Seed: GMDPRMCSLMQGSTLPRRS
GMDPRMLSLMQGSTSPRRS

SEQ ID NO: 79585 - protein, 19 aa, Artificial Sequence
  Description of Artificial Sequence: Synthetic peptide
  Seed: GMDPRMCSLMQGSTLPRRS
GMDPRMLSLMQGSTTPRRS

SEQ ID NO: 79586 - protein, 19 aa, Artificial Sequence
  Description of Artificial Sequence: Synthetic peptide
  Seed: GMDPRMCSLMQGSTLPRRS
GMDPRMLSLMQGSTVPRRS

SEQ ID NO: 79587 - protein, 19 aa, Artificial Sequence
  Description of Artificial Sequence: Synthetic peptide
  Seed: GMDPRMCSLMQGSTLPRRS
GMDPRMLSLMQISTAPRRS

SEQ ID NO: 79588 - protein, 19 aa, Artificial Sequence
  Description of Artificial Sequence: Synthetic peptide
  Seed: GMDPRMCSLMQGSTLPRRS
GMDPRMLSLMQISTSPRRS

SEQ ID NO: 79589 - protein, 19 aa, Artificial Sequence
  Description of Artificial Sequence: Synthetic peptide
  Seed: GMDPRMCSLMQGSTLPRRS
GMDPRMLSLMQNSTVPRRS

SEQ ID NO: 79590 - protein, 19 aa, Artificial Sequence
  Description of Artificial Sequence: Synthetic peptide
  Seed: GMDPRMCSLMQGSTLPRRS
GMDPRMLSLMQPSTAPRRS

SEQ ID NO: 79591 - protein, 19 aa, Artificial Sequence
  Description of Artificial Sequence: Synthetic peptide
  Seed: GMDPRMCSLMQGSTLPRRS
GMDPRMLSLMQPSTIPRRS

SEQ ID NO: 79592 - protein, 19 aa, Artificial Sequence
  Description of Artificial Sequence: Synthetic peptide
  Seed: GMDPRMCSLMQGSTLPRRS
GMDPRMLSLMQPSTLPRRS

SEQ ID NO: 79593 - protein, 19 aa, Artificial Sequence
  Description of Artificial Sequence: Synthetic peptide
  Seed: GMDPRMCSLMQGSTLPRRS
GMDPRMLSLMQPSTNPRRS

SEQ ID NO: 79594 - protein, 19 aa, Artificial Sequence
  Description of Artificial Sequence: Synthetic peptide
  Seed: GMDPRMCSLMQGSTLPRRS
GMDPRMLSLMQPSTSPRRS

SEQ ID NO: 79595 - protein, 19 aa, Artificial Sequence
  Description of Artificial Sequence: Synthetic peptide
  Seed: GMDPRMCSLMQGSTLPRRS
GMDPRMLSLMQPSTVPRRS

SEQ ID NO: 79596 - protein, 19 aa, Artificial Sequence
  Description of Artificial Sequence: Synthetic peptide
  Seed: GMDPRMCSLMQGSTLPRRS
GMDPRMLSLMQSSTAPRRS

SEQ ID NO: 79597 - protein, 19 aa, Artificial Sequence
  Description of Artificial Sequence: Synthetic peptide
  Seed: GMDPRMCSLMQGSTLPRRS
GMDPRMLSLMQSSTIPRRS

SEQ ID NO: 79598 - protein, 19 aa, Artificial Sequence
  Description of Artificial Sequence: Synthetic peptide
  Seed: GMDPRMCSLMQGSTLPRRS
GMDPRMLSLMQSSTLPRRS

SEQ ID NO: 79599 - protein, 19 aa, Artificial Sequence
  Description of Artificial Sequence: Synthetic peptide
  Seed: GMDPRMCSLMQGSTLPRRS
GMDPRMLSLMQSSTMPRRS

SEQ ID NO: 79600 - protein, 19 aa, Artificial Sequence
  Description of Artificial Sequence: Synthetic peptide
  Seed: GMDPRMCSLMQGSTLPRRS
GMDPRMLSLMQSSTNPRRS

SEQ ID NO: 79601 - protein, 19 aa, Artificial Sequence
  Description of Artificial Sequence: Synthetic peptide
  Seed: GMDPRMCSLMQGSTLPRRS
GMDPRMLSLMQSSTSPRRS

SEQ ID NO: 79602 - protein, 19 aa, Artificial Sequence
  Description of Artificial Sequence: Synthetic peptide
  Seed: GMDPRMCSLMQGSTLPRRS
GMDPRMLSLMQSSTTPRRS

SEQ ID NO: 79603 - protein, 19 aa, Artificial Sequence
  Description of Artificial Sequence: Synthetic peptide
  Seed: GMDPRMCSLMQGSTLPRRS
GMDPRMLSLMQSSTVPRRS

SEQ ID NO: 79604 - protein, 19 aa, Artificial Sequence
  Description of Artificial Sequence: Synthetic peptide
  Seed: GMDPRMCSLMQGSTLPRRS
GMDPRMLSLMQTSTAPRRS

SEQ ID NO: 79605 - protein, 19 aa, Artificial Sequence
  Description of Artificial Sequence: Synthetic peptide
  Seed: GMDPRMCSLMQGSTLPRRS
GMDPRMLSLMQTSTVPRRS

SEQ ID NO: 79606 - protein, 19 aa, Artificial Sequence
  Description of Artificial Sequence: Synthetic peptide
  Seed: GMDPRMCSLMQGSTLPRRS
GMDPRMLSLMQVSTAPRRS

SEQ ID NO: 79607 - protein, 19 aa, Artificial Sequence
  Description of Artificial Sequence: Synthetic peptide
  Seed: GMDPRMCSLMQGSTLPRRS
GMDPRMLSLMQVSTNPRRS

SEQ ID NO: 79608 - protein, 19 aa, Artificial Sequence
  Description of Artificial Sequence: Synthetic peptide
  Seed: GMDPRMCSLMQGSTLPRRS
GMDPRMLSLMQVSTSPRRS

SEQ ID NO: 79609 - protein, 19 aa, Artificial Sequence
  Description of Artificial Sequence: Synthetic peptide
  Seed: GMDPRMCSLMQGSTLPRRS
GMDPRMLSLQQASTLPRRS

SEQ ID NO: 79610 - protein, 19 aa, Artificial Sequence
  Description of Artificial Sequence: Synthetic peptide
  Seed: GMDPRMCSLMQGSTLPRRS
GMDPRMLSLQQASTVPRRS

SEQ ID NO: 79611 - protein, 19 aa, Artificial Sequence
  Description of Artificial Sequence: Synthetic peptide
  Seed: GMDPRMCSLMQGSTLPRRS
GMDPRMMSLLQASTAPRRS

SEQ ID NO: 79612 - protein, 19 aa, Artificial Sequence
  Description of Artificial Sequence: Synthetic peptide
  Seed: GMDPRMCSLMQGSTLPRRS
GMDPRMMSLLQASTIPRRS

SEQ ID NO: 79613 - protein, 19 aa, Artificial Sequence
  Description of Artificial Sequence: Synthetic peptide
  Seed: GMDPRMCSLMQGSTLPRRS
GMDPRMMSLLQASTLPRRS

SEQ ID NO: 79614 - protein, 19 aa, Artificial Sequence
  Description of Artificial Sequence: Synthetic peptide
  Seed: GMDPRMCSLMQGSTLPRRS
GMDPRMMSLLQASTMPRRS

SEQ ID NO: 79615 - protein, 19 aa, Artificial Sequence
  Description of Artificial Sequence: Synthetic peptide
  Seed: GMDPRMCSLMQGSTLPRRS
GMDPRMMSLLQASTSPRRS

SEQ ID NO: 79616 - protein, 19 aa, Artificial Sequence
  Description of Artificial Sequence: Synthetic peptide
  Seed: GMDPRMCSLMQGSTLPRRS
GMDPRMMSLLQASTVPRRS

SEQ ID NO: 79617 - protein, 19 aa, Artificial Sequence
  Description of Artificial Sequence: Synthetic peptide
  Seed: GMDPRMCSLMQGSTLPRRS
GMDPRMMSLLQGSTAPRRS

SEQ ID NO: 79618 - protein, 19 aa, Artificial Sequence
  Description of Artificial Sequence: Synthetic peptide
  Seed: GMDPRMCSLMQGSTLPRRS
GMDPRMMSLLQGSTIPRRS

SEQ ID NO: 79619 - protein, 19 aa, Artificial Sequence
  Description of Artificial Sequence: Synthetic peptide
  Seed: GMDPRMCSLMQGSTLPRRS
GMDPRMMSLLQGSTLPRRS

SEQ ID NO: 79620 - protein, 19 aa, Artificial Sequence
  Description of Artificial Sequence: Synthetic peptide
  Seed: GMDPRMCSLMQGSTLPRRS
GMDPRMMSLLQGSTVPRRS

SEQ ID NO: 79621 - protein, 19 aa, Artificial Sequence
  Description of Artificial Sequence: Synthetic peptide
  Seed: GMDPRMCSLMQGSTLPRRS
GMDPRMMSLLQPSTAPRRS

SEQ ID NO: 79622 - protein, 19 aa, Artificial Sequence
  Description of Artificial Sequence: Synthetic peptide
  Seed: GMDPRMCSLMQGSTLPRRS
GMDPRMMSLLQPSTIPRRS

SEQ ID NO: 79623 - protein, 19 aa, Artificial Sequence
  Description of Artificial Sequence: Synthetic peptide
  Seed: GMDPRMCSLMQGSTLPRRS
GMDPRMMSLLQPSTLPRRS

SEQ ID NO: 79624 - protein, 19 aa, Artificial Sequence
  Description of Artificial Sequence: Synthetic peptide
  Seed: GMDPRMCSLMQGSTLPRRS
GMDPRMMSLLQPSTVPRRS

SEQ ID NO: 79625 - protein, 19 aa, Artificial Sequence
  Description of Artificial Sequence: Synthetic peptide
  Seed: GMDPRMCSLMQGSTLPRRS
GMDPRMMSLLQSSTAPRRS

SEQ ID NO: 79626 - protein, 19 aa, Artificial Sequence
  Description of Artificial Sequence: Synthetic peptide
  Seed: GMDPRMCSLMQGSTLPRRS
GMDPRMMSLLQSSTIPRRS

SEQ ID NO: 79627 - protein, 19 aa, Artificial Sequence
  Description of Artificial Sequence: Synthetic peptide
  Seed: GMDPRMCSLMQGSTLPRRS
GMDPRMMSLLQSSTLPRRS

SEQ ID NO: 79628 - protein, 19 aa, Artificial Sequence
  Description of Artificial Sequence: Synthetic peptide
  Seed: GMDPRMCSLMQGSTLPRRS
GMDPRMMSLLQSSTVPRRS

SEQ ID NO: 79629 - protein, 19 aa, Artificial Sequence
  Description of Artificial Sequence: Synthetic peptide
  Seed: GMDPRMCSLMQGSTLPRRS
GMDPRMMSLMQASTAPRRS

SEQ ID NO: 79630 - protein, 19 aa, Artificial Sequence
  Description of Artificial Sequence: Synthetic peptide
  Seed: GMDPRMCSLMQGSTLPRRS
GMDPRMMSLMQASTIPRRS

SEQ ID NO: 79631 - protein, 19 aa, Artificial Sequence
  Description of Artificial Sequence: Synthetic peptide
  Seed: GMDPRMCSLMQGSTLPRRS
GMDPRMMSLMQASTLPRRS

SEQ ID NO: 79632 - protein, 19 aa, Artificial Sequence
  Description of Artificial Sequence: Synthetic peptide
  Seed: GMDPRMCSLMQGSTLPRRS
GMDPRMMSLMQASTMPRRS

SEQ ID NO: 79633 - protein, 19 aa, Artificial Sequence
  Description of Artificial Sequence: Synthetic peptide
  Seed: GMDPRMCSLMQGSTLPRRS
GMDPRMMSLMQASTNPRRS

SEQ ID NO: 79634 - protein, 19 aa, Artificial Sequence
  Description of Artificial Sequence: Synthetic peptide
  Seed: GMDPRMCSLMQGSTLPRRS
GMDPRMMSLMQASTSPRRS

SEQ ID NO: 79635 - protein, 19 aa, Artificial Sequence
  Description of Artificial Sequence: Synthetic peptide
  Seed: GMDPRMCSLMQGSTLPRRS
GMDPRMMSLMQASTVPRRS

SEQ ID NO: 79636 - protein, 19 aa, Artificial Sequence
  Description of Artificial Sequence: Synthetic peptide
  Seed: GMDPRMCSLMQGSTLPRRS
GMDPRMMSLMQGSTAPRRS

SEQ ID NO: 79637 - protein, 19 aa, Artificial Sequence
  Description of Artificial Sequence: Synthetic peptide
  Seed: GMDPRMCSLMQGSTLPRRS
GMDPRMMSLMQGSTIPRRS

SEQ ID NO: 79638 - protein, 19 aa, Artificial Sequence
  Description of Artificial Sequence: Synthetic peptide
  Seed: GMDPRMCSLMQGSTLPRRS
GMDPRMMSLMQGSTLPRRS

SEQ ID NO: 79639 - protein, 19 aa, Artificial Sequence
  Description of Artificial Sequence: Synthetic peptide
  Seed: GMDPRMCSLMQGSTLPRRS
GMDPRMMSLMQGSTVPRRS

SEQ ID NO: 79640 - protein, 19 aa, Artificial Sequence
  Description of Artificial Sequence: Synthetic peptide
  Seed: GMDPRMCSLMQGSTLPRRS
GMDPRMMSLMQPSTAPRRS

SEQ ID NO: 79641 - protein, 19 aa, Artificial Sequence
  Description of Artificial Sequence: Synthetic peptide
  Seed: GMDPRMCSLMQGSTLPRRS
GMDPRMMSLMQPSTLPRRS

SEQ ID NO: 79642 - protein, 19 aa, Artificial Sequence
  Description of Artificial Sequence: Synthetic peptide
  Seed: GMDPRMCSLMQGSTLPRRS
GMDPRMMSLMQPSTVPRRS

SEQ ID NO: 79643 - protein, 19 aa, Artificial Sequence
  Description of Artificial Sequence: Synthetic peptide
  Seed: GMDPRMCSLMQGSTLPRRS
GMDPRMMSLMQSSTAPRRS

SEQ ID NO: 79644 - protein, 19 aa, Artificial Sequence
  Description of Artificial Sequence: Synthetic peptide
  Seed: GMDPRMCSLMQGSTLPRRS
GMDPRMMSLMQSSTIPRRS

SEQ ID NO: 79645 - protein, 19 aa, Artificial Sequence
  Description of Artificial Sequence: Synthetic peptide
  Seed: GMDPRMCSLMQGSTLPRRS
GMDPRMMSLMQSSTLPRRS

SEQ ID NO: 79646 - protein, 19 aa, Artificial Sequence
  Description of Artificial Sequence: Synthetic peptide
  Seed: GMDPRMCSLMQGSTLPRRS
GMDPRMMSLMQSSTVPRRS

SEQ ID NO: 79647 - protein, 19 aa, Artificial Sequence
  Description of Artificial Sequence: Synthetic peptide
  Seed: GMDPRMCSLMQGSTLPRRS
GMDPRMMSLMQVSTAPRRS

SEQ ID NO: 79648 - protein, 19 aa, Artificial Sequence
  Description of Artificial Sequence: Synthetic peptide
  Seed: GMDPRMCSLMQGSTLPRRS
GMDPRMVSLLQASTAPRRS

SEQ ID NO: 79649 - protein, 19 aa, Artificial Sequence
  Description of Artificial Sequence: Synthetic peptide
  Seed: GMDPRMCSLMQGSTLPRRS
GMDPRMVSLLQASTIPRRS

SEQ ID NO: 79650 - protein, 19 aa, Artificial Sequence
  Description of Artificial Sequence: Synthetic peptide
  Seed: GMDPRMCSLMQGSTLPRRS
GMDPRMVSLLQASTLPRRS

SEQ ID NO: 79651 - protein, 19 aa, Artificial Sequence
  Description of Artificial Sequence: Synthetic peptide
  Seed: GMDPRMCSLMQGSTLPRRS
GMDPRMVSLLQASTVPRRS

SEQ ID NO: 79652 - protein, 19 aa, Artificial Sequence
  Description of Artificial Sequence: Synthetic peptide
  Seed: GMDPRMCSLMQGSTLPRRS
GMDPRMVSLLQGSTAPRRS

SEQ ID NO: 79653 - protein, 19 aa, Artificial Sequence
  Description of Artificial Sequence: Synthetic peptide
  Seed: GMDPRMCSLMQGSTLPRRS
GMDPRMVSLLQGSTIPRRS

SEQ ID NO: 79654 - protein, 19 aa, Artificial Sequence
  Description of Artificial Sequence: Synthetic peptide
  Seed: GMDPRMCSLMQGSTLPRRS
GMDPRMVSLLQGSTLPRRS

SEQ ID NO: 79655 - protein, 19 aa, Artificial Sequence
  Description of Artificial Sequence: Synthetic peptide
  Seed: GMDPRMCSLMQGSTLPRRS
GMDPRMVSLLQGSTVPRRS

SEQ ID NO: 79656 - protein, 19 aa, Artificial Sequence
  Description of Artificial Sequence: Synthetic peptide
  Seed: GMDPRMCSLMQGSTLPRRS
GMDPRMVSLLQPSTIPRRS

SEQ ID NO: 79657 - protein, 19 aa, Artificial Sequence
  Description of Artificial Sequence: Synthetic peptide
  Seed: GMDPRMCSLMQGSTLPRRS
GMDPRMVSLLQPSTLPRRS

SEQ ID NO: 79658 - protein, 19 aa, Artificial Sequence
  Description of Artificial Sequence: Synthetic peptide
  Seed: GMDPRMCSLMQGSTLPRRS
GMDPRMVSLLQPSTVPRRS

SEQ ID NO: 79659 - protein, 19 aa, Artificial Sequence
  Description of Artificial Sequence: Synthetic peptide
  Seed: GMDPRMCSLMQGSTLPRRS
GMDPRMVSLLQSSTAPRRS

SEQ ID NO: 79660 - protein, 19 aa, Artificial Sequence
  Description of Artificial Sequence: Synthetic peptide
  Seed: GMDPRMCSLMQGSTLPRRS
GMDPRMVSLLQSSTIPRRS

SEQ ID NO: 79661 - protein, 19 aa, Artificial Sequence
  Description of Artificial Sequence: Synthetic peptide
  Seed: GMDPRMCSLMQGSTLPRRS
GMDPRMVSLLQSSTLPRRS

SEQ ID NO: 79662 - protein, 19 aa, Artificial Sequence
  Description of Artificial Sequence: Synthetic peptide
  Seed: GMDPRMCSLMQGSTLPRRS
GMDPRMVSLLQSSTVPRRS

SEQ ID NO: 79663 - protein, 19 aa, Artificial Sequence
  Description of Artificial Sequence: Synthetic peptide
  Seed: GMDPRMCSLMQGSTLPRRS
GMDPRMVSLMQASTAPRRS

SEQ ID NO: 79664 - protein, 19 aa, Artificial Sequence
  Description of Artificial Sequence: Synthetic peptide
  Seed: GMDPRMCSLMQGSTLPRRS
GMDPRMVSLMQASTIPRRS

SEQ ID NO: 79665 - protein, 19 aa, Artificial Sequence
  Description of Artificial Sequence: Synthetic peptide
  Seed: GMDPRMCSLMQGSTLPRRS
GMDPRMVSLMQASTLPRRS

SEQ ID NO: 79666 - protein, 19 aa, Artificial Sequence
  Description of Artificial Sequence: Synthetic peptide
  Seed: GMDPRMCSLMQGSTLPRRS
GMDPRMVSLMQASTVPRRS

SEQ ID NO: 79667 - protein, 19 aa, Artificial Sequence
  Description of Artificial Sequence: Synthetic peptide
  Seed: GMDPRMCSLMQGSTLPRRS
GMDPRMVSLMQGSTAPRRS

SEQ ID NO: 79668 - protein, 19 aa, Artificial Sequence
  Description of Artificial Sequence: Synthetic peptide
  Seed: GMDPRMCSLMQGSTLPRRS
GMDPRMVSLMQGSTIPRRS

SEQ ID NO: 79669 - protein, 19 aa, Artificial Sequence
  Description of Artificial Sequence: Synthetic peptide
  Seed: GMDPRMCSLMQGSTLPRRS
GMDPRMVSLMQGSTLPRRS

SEQ ID NO: 79670 - protein, 19 aa, Artificial Sequence
  Description of Artificial Sequence: Synthetic peptide
  Seed: GMDPRMCSLMQGSTLPRRS
GMDPRMVSLMQGSTVPRRS

SEQ ID NO: 79671 - protein, 19 aa, Artificial Sequence
  Description of Artificial Sequence: Synthetic peptide
  Seed: GMDPRMCSLMQGSTLPRRS
GMDPRMVSLMQPSTVPRRS

SEQ ID NO: 79672 - protein, 19 aa, Artificial Sequence
  Description of Artificial Sequence: Synthetic peptide
  Seed: GMDPRMCSLMQGSTLPRRS
GMDPRMVSLMQSSTIPRRS

SEQ ID NO: 79673 - protein, 19 aa, Artificial Sequence
  Description of Artificial Sequence: Synthetic peptide
  Seed: GMDPRMCSLMQGSTLPRRS
GMDPRMVSLMQSSTLPRRS

SEQ ID NO: 79674 - protein, 19 aa, Artificial Sequence
  Description of Artificial Sequence: Synthetic peptide
  Seed: GMDPRMCSLMQGSTLPRRS
GMDPRMVSLMQSSTVPRRS

SEQ ID NO: 79675 - protein, 19 aa, Artificial Sequence
  Description of Artificial Sequence: Synthetic peptide
  Seed: GMDPRMCSLMQGSTLPRRS
GMDPRMWSLAQASTAPRRS

SEQ ID NO: 79676 - protein, 19 aa, Artificial Sequence
  Description of Artificial Sequence: Synthetic peptide
  Seed: GMDPRMCSLMQGSTLPRRS
GMDPRMWSLAQASTIPRRS

SEQ ID NO: 79677 - protein, 19 aa, Artificial Sequence
  Description of Artificial Sequence: Synthetic peptide
  Seed: GMDPRMCSLMQGSTLPRRS
GMDPRMWSLAQASTLPRRS

SEQ ID NO: 79678 - protein, 19 aa, Artificial Sequence
  Description of Artificial Sequence: Synthetic peptide
  Seed: GMDPRMCSLMQGSTLPRRS
GMDPRMWSLAQASTMPRRS

SEQ ID NO: 79679 - protein, 19 aa, Artificial Sequence
  Description of Artificial Sequence: Synthetic peptide
  Seed: GMDPRMCSLMQGSTLPRRS
GMDPRMWSLAQASTSPRRS

SEQ ID NO: 79680 - protein, 19 aa, Artificial Sequence
  Description of Artificial Sequence: Synthetic peptide
  Seed: GMDPRMCSLMQGSTLPRRS
GMDPRMWSLAQASTVPRRS

SEQ ID NO: 79681 - protein, 19 aa, Artificial Sequence
  Description of Artificial Sequence: Synthetic peptide
  Seed: GMDPRMCSLMQGSTLPRRS
GMDPRMWSLAQGSTAPRRS

SEQ ID NO: 79682 - protein, 19 aa, Artificial Sequence
  Description of Artificial Sequence: Synthetic peptide
  Seed: GMDPRMCSLMQGSTLPRRS
GMDPRMWSLAQGSTIPRRS

SEQ ID NO: 79683 - protein, 19 aa, Artificial Sequence
  Description of Artificial Sequence: Synthetic peptide
  Seed: GMDPRMCSLMQGSTLPRRS
GMDPRMWSLAQGSTLPRRS

SEQ ID NO: 79684 - protein, 19 aa, Artificial Sequence
  Description of Artificial Sequence: Synthetic peptide
  Seed: GMDPRMCSLMQGSTLPRRS
GMDPRMWSLAQGSTVPRRS

SEQ ID NO: 79685 - protein, 19 aa, Artificial Sequence
  Description of Artificial Sequence: Synthetic peptide
  Seed: GMDPRMCSLMQGSTLPRRS
GMDPRMWSLAQSSTAPRRS

SEQ ID NO: 79686 - protein, 19 aa, Artificial Sequence
  Description of Artificial Sequence: Synthetic peptide
  Seed: GMDPRMCSLMQGSTLPRRS
GMDPRMWSLAQSSTIPRRS

SEQ ID NO: 79687 - protein, 19 aa, Artificial Sequence
  Description of Artificial Sequence: Synthetic peptide
  Seed: GMDPRMCSLMQGSTLPRRS
GMDPRMWSLAQSSTLPRRS

SEQ ID NO: 79688 - protein, 19 aa, Artificial Sequence
  Description of Artificial Sequence: Synthetic peptide
  Seed: GMDPRMCSLMQGSTLPRRS
GMDPRMWSLAQSSTVPRRS

SEQ ID NO: 79689 - protein, 19 aa, Artificial Sequence
  Description of Artificial Sequence: Synthetic peptide
  Seed: GMDPRMCSLMQGSTLPRRS
GMDPRMWSLAQVSTAPRRS

SEQ ID NO: 79690 - protein, 19 aa, Artificial Sequence
  Description of Artificial Sequence: Synthetic peptide
  Seed: GMDPRMCSLMQGSTLPRRS
GMDPRMWSLIQASTAPRRS

SEQ ID NO: 79691 - protein, 19 aa, Artificial Sequence
  Description of Artificial Sequence: Synthetic peptide
  Seed: GMDPRMCSLMQGSTLPRRS
GMDPRMWSLIQASTIPRRS

SEQ ID NO: 79692 - protein, 19 aa, Artificial Sequence
  Description of Artificial Sequence: Synthetic peptide
  Seed: GMDPRMCSLMQGSTLPRRS
GMDPRMWSLIQASTLPRRS

SEQ ID NO: 79693 - protein, 19 aa, Artificial Sequence
  Description of Artificial Sequence: Synthetic peptide
  Seed: GMDPRMCSLMQGSTLPRRS
GMDPRMWSLIQASTMPRRS

SEQ ID NO: 79694 - protein, 19 aa, Artificial Sequence
  Description of Artificial Sequence: Synthetic peptide
  Seed: GMDPRMCSLMQGSTLPRRS
GMDPRMWSLIQASTNPRRS

SEQ ID NO: 79695 - protein, 19 aa, Artificial Sequence
  Description of Artificial Sequence: Synthetic peptide
  Seed: GMDPRMCSLMQGSTLPRRS
GMDPRMWSLIQASTSPRRS

SEQ ID NO: 79696 - protein, 19 aa, Artificial Sequence
  Description of Artificial Sequence: Synthetic peptide
  Seed: GMDPRMCSLMQGSTLPRRS
GMDPRMWSLIQASTTPRRS

SEQ ID NO: 79697 - protein, 19 aa, Artificial Sequence
  Description of Artificial Sequence: Synthetic peptide
  Seed: GMDPRMCSLMQGSTLPRRS
GMDPRMWSLIQASTVPRRS

SEQ ID NO: 79698 - protein, 19 aa, Artificial Sequence
  Description of Artificial Sequence: Synthetic peptide
  Seed: GMDPRMCSLMQGSTLPRRS
GMDPRMWSLIQGSTAPRRS

SEQ ID NO: 79699 - protein, 19 aa, Artificial Sequence
  Description of Artificial Sequence: Synthetic peptide
  Seed: GMDPRMCSLMQGSTLPRRS
GMDPRMWSLIQGSTIPRRS

SEQ ID NO: 79700 - protein, 19 aa, Artificial Sequence
  Description of Artificial Sequence: Synthetic peptide
  Seed: GMDPRMCSLMQGSTLPRRS
GMDPRMWSLIQGSTLPRRS

SEQ ID NO: 79701 - protein, 19 aa, Artificial Sequence
  Description of Artificial Sequence: Synthetic peptide
  Seed: GMDPRMCSLMQGSTLPRRS
GMDPRMWSLIQGSTMPRRS

SEQ ID NO: 79702 - protein, 19 aa, Artificial Sequence
  Description of Artificial Sequence: Synthetic peptide
  Seed: GMDPRMCSLMQGSTLPRRS
GMDPRMWSLIQGSTTPRRS

SEQ ID NO: 79703 - protein, 19 aa, Artificial Sequence
  Description of Artificial Sequence: Synthetic peptide
  Seed: GMDPRMCSLMQGSTLPRRS
GMDPRMWSLIQGSTVPRRS

SEQ ID NO: 79704 - protein, 19 aa, Artificial Sequence
  Description of Artificial Sequence: Synthetic peptide
  Seed: GMDPRMCSLMQGSTLPRRS
GMDPRMWSLIQISTAPRRS

SEQ ID NO: 79705 - protein, 19 aa, Artificial Sequence
  Description of Artificial Sequence: Synthetic peptide
  Seed: GMDPRMCSLMQGSTLPRRS
GMDPRMWSLIQISTSPRRS

SEQ ID NO: 79706 - protein, 19 aa, Artificial Sequence
  Description of Artificial Sequence: Synthetic peptide
  Seed: GMDPRMCSLMQGSTLPRRS
GMDPRMWSLIQPSTAPRRS

SEQ ID NO: 79707 - protein, 19 aa, Artificial Sequence
  Description of Artificial Sequence: Synthetic peptide
  Seed: GMDPRMCSLMQGSTLPRRS
GMDPRMWSLIQPSTIPRRS

SEQ ID NO: 79708 - protein, 19 aa, Artificial Sequence
  Description of Artificial Sequence: Synthetic peptide
  Seed: GMDPRMCSLMQGSTLPRRS
GMDPRMWSLIQPSTLPRRS

SEQ ID NO: 79709 - protein, 19 aa, Artificial Sequence
  Description of Artificial Sequence: Synthetic peptide
  Seed: GMDPRMCSLMQGSTLPRRS
GMDPRMWSLIQPSTNPRRS

SEQ ID NO: 79710 - protein, 19 aa, Artificial Sequence
  Description of Artificial Sequence: Synthetic peptide
  Seed: GMDPRMCSLMQGSTLPRRS
GMDPRMWSLIQPSTSPRRS

SEQ ID NO: 79711 - protein, 19 aa, Artificial Sequence
  Description of Artificial Sequence: Synthetic peptide
  Seed: GMDPRMCSLMQGSTLPRRS
GMDPRMWSLIQPSTTPRRS

SEQ ID NO: 79712 - protein, 19 aa, Artificial Sequence
  Description of Artificial Sequence: Synthetic peptide
  Seed: GMDPRMCSLMQGSTLPRRS
GMDPRMWSLIQPSTVPRRS

SEQ ID NO: 79713 - protein, 19 aa, Artificial Sequence
  Description of Artificial Sequence: Synthetic peptide
  Seed: GMDPRMCSLMQGSTLPRRS
GMDPRMWSLIQSSTAPRRS

SEQ ID NO: 79714 - protein, 19 aa, Artificial Sequence
  Description of Artificial Sequence: Synthetic peptide
  Seed: GMDPRMCSLMQGSTLPRRS
GMDPRMWSLIQSSTIPRRS

SEQ ID NO: 79715 - protein, 19 aa, Artificial Sequence
  Description of Artificial Sequence: Synthetic peptide
  Seed: GMDPRMCSLMQGSTLPRRS
GMDPRMWSLIQSSTLPRRS

SEQ ID NO: 79716 - protein, 19 aa, Artificial Sequence
  Description of Artificial Sequence: Synthetic peptide
  Seed: GMDPRMCSLMQGSTLPRRS
GMDPRMWSLIQSSTNPRRS

SEQ ID NO: 79717 - protein, 19 aa, Artificial Sequence
  Description of Artificial Sequence: Synthetic peptide
  Seed: GMDPRMCSLMQGSTLPRRS
GMDPRMWSLIQSSTSPRRS

SEQ ID NO: 79718 - protein, 19 aa, Artificial Sequence
  Description of Artificial Sequence: Synthetic peptide
  Seed: GMDPRMCSLMQGSTLPRRS
GMDPRMWSLIQSSTTPRRS

SEQ ID NO: 79719 - protein, 19 aa, Artificial Sequence
  Description of Artificial Sequence: Synthetic peptide
  Seed: GMDPRMCSLMQGSTLPRRS
GMDPRMWSLIQSSTVPRRS

SEQ ID NO: 79720 - protein, 19 aa, Artificial Sequence
  Description of Artificial Sequence: Synthetic peptide
  Seed: GMDPRMCSLMQGSTLPRRS
GMDPRMWSLIQTSTAPRRS

SEQ ID NO: 79721 - protein, 19 aa, Artificial Sequence
  Description of Artificial Sequence: Synthetic peptide
  Seed: GMDPRMCSLMQGSTLPRRS
GMDPRMWSLIQTSTNPRRS

SEQ ID NO: 79722 - protein, 19 aa, Artificial Sequence
  Description of Artificial Sequence: Synthetic peptide
  Seed: GMDPRMCSLMQGSTLPRRS
GMDPRMWSLIQTSTSPRRS

SEQ ID NO: 79723 - protein, 19 aa, Artificial Sequence
  Description of Artificial Sequence: Synthetic peptide
  Seed: GMDPRMCSLMQGSTLPRRS
GMDPRMWSLIQTSTTPRRS

SEQ ID NO: 79724 - protein, 19 aa, Artificial Sequence
  Description of Artificial Sequence: Synthetic peptide
  Seed: GMDPRMCSLMQGSTLPRRS
GMDPRMWSLIQVSTAPRRS

SEQ ID NO: 79725 - protein, 19 aa, Artificial Sequence
  Description of Artificial Sequence: Synthetic peptide
  Seed: GMDPRMCSLMQGSTLPRRS
GMDPRMWSLIQVSTNPRRS

SEQ ID NO: 79726 - protein, 19 aa, Artificial Sequence
  Description of Artificial Sequence: Synthetic peptide
  Seed: GMDPRMCSLMQGSTLPRRS
GMDPRMWSLIQVSTSPRRS

SEQ ID NO: 79727 - protein, 19 aa, Artificial Sequence
  Description of Artificial Sequence: Synthetic peptide
  Seed: GMDPRMCSLMQGSTLPRRS
GMDPRMWSLLQASTAPRRS

SEQ ID NO: 79728 - protein, 19 aa, Artificial Sequence
  Description of Artificial Sequence: Synthetic peptide
  Seed: GMDPRMCSLMQGSTLPRRS
GMDPRMWSLLQASTGPRRS

SEQ ID NO: 79729 - protein, 19 aa, Artificial Sequence
  Description of Artificial Sequence: Synthetic peptide
  Seed: GMDPRMCSLMQGSTLPRRS
GMDPRMWSLLQASTIPRRS

SEQ ID NO: 79730 - protein, 19 aa, Artificial Sequence
  Description of Artificial Sequence: Synthetic peptide
  Seed: GMDPRMCSLMQGSTLPRRS
GMDPRMWSLLQASTLPRRS

SEQ ID NO: 79731 - protein, 19 aa, Artificial Sequence
  Description of Artificial Sequence: Synthetic peptide
  Seed: GMDPRMCSLMQGSTLPRRS
GMDPRMWSLLQASTMPRRS

SEQ ID NO: 79732 - protein, 19 aa, Artificial Sequence
  Description of Artificial Sequence: Synthetic peptide
  Seed: GMDPRMCSLMQGSTLPRRS
GMDPRMWSLLQASTNPRRS

SEQ ID NO: 79733 - protein, 19 aa, Artificial Sequence
  Description of Artificial Sequence: Synthetic peptide
  Seed: GMDPRMCSLMQGSTLPRRS
GMDPRMWSLLQASTSPRRS

SEQ ID NO: 79734 - protein, 19 aa, Artificial Sequence
  Description of Artificial Sequence: Synthetic peptide
  Seed: GMDPRMCSLMQGSTLPRRS
GMDPRMWSLLQASTTPRRS

SEQ ID NO: 79735 - protein, 19 aa, Artificial Sequence
  Description of Artificial Sequence: Synthetic peptide
  Seed: GMDPRMCSLMQGSTLPRRS
GMDPRMWSLLQASTVPRRS

SEQ ID NO: 79736 - protein, 19 aa, Artificial Sequence
  Description of Artificial Sequence: Synthetic peptide
  Seed: GMDPRMCSLMQGSTLPRRS
GMDPRMWSLLQGSTAPRRS

SEQ ID NO: 79737 - protein, 19 aa, Artificial Sequence
  Description of Artificial Sequence: Synthetic peptide
  Seed: GMDPRMCSLMQGSTLPRRS
GMDPRMWSLLQGSTGPRRS

SEQ ID NO: 79738 - protein, 19 aa, Artificial Sequence
  Description of Artificial Sequence: Synthetic peptide
  Seed: GMDPRMCSLMQGSTLPRRS
GMDPRMWSLLQGSTIPRRS

SEQ ID NO: 79739 - protein, 19 aa, Artificial Sequence
  Description of Artificial Sequence: Synthetic peptide
  Seed: GMDPRMCSLMQGSTLPRRS
GMDPRMWSLLQGSTLPRRS

SEQ ID NO: 79740 - protein, 19 aa, Artificial Sequence
  Description of Artificial Sequence: Synthetic peptide
  Seed: GMDPRMCSLMQGSTLPRRS
GMDPRMWSLLQGSTMPRRS

SEQ ID NO: 79741 - protein, 19 aa, Artificial Sequence
  Description of Artificial Sequence: Synthetic peptide
  Seed: GMDPRMCSLMQGSTLPRRS
GMDPRMWSLLQGSTSPRRS

SEQ ID NO: 79742 - protein, 19 aa, Artificial Sequence
  Description of Artificial Sequence: Synthetic peptide
  Seed: GMDPRMCSLMQGSTLPRRS
GMDPRMWSLLQGSTTPRRS

SEQ ID NO: 79743 - protein, 19 aa, Artificial Sequence
  Description of Artificial Sequence: Synthetic peptide
  Seed: GMDPRMCSLMQGSTLPRRS
GMDPRMWSLLQGSTVPRRS

SEQ ID NO: 79744 - protein, 19 aa, Artificial Sequence
  Description of Artificial Sequence: Synthetic peptide
  Seed: GMDPRMCSLMQGSTLPRRS
GMDPRMWSLLQISTAPRRS

SEQ ID NO: 79745 - protein, 19 aa, Artificial Sequence
  Description of Artificial Sequence: Synthetic peptide
  Seed: GMDPRMCSLMQGSTLPRRS
GMDPRMWSLLQISTNPRRS

SEQ ID NO: 79746 - protein, 19 aa, Artificial Sequence
  Description of Artificial Sequence: Synthetic peptide
  Seed: GMDPRMCSLMQGSTLPRRS
GMDPRMWSLLQISTSPRRS

SEQ ID NO: 79747 - protein, 19 aa, Artificial Sequence
  Description of Artificial Sequence: Synthetic peptide
  Seed: GMDPRMCSLMQGSTLPRRS
GMDPRMWSLLQNSTAPRRS

SEQ ID NO: 79748 - protein, 19 aa, Artificial Sequence
  Description of Artificial Sequence: Synthetic peptide
  Seed: GMDPRMCSLMQGSTLPRRS
GMDPRMWSLLQNSTIPRRS

SEQ ID NO: 79749 - protein, 19 aa, Artificial Sequence
  Description of Artificial Sequence: Synthetic peptide
  Seed: GMDPRMCSLMQGSTLPRRS
GMDPRMWSLLQNSTLPRRS

SEQ ID NO: 79750 - protein, 19 aa, Artificial Sequence
  Description of Artificial Sequence: Synthetic peptide
  Seed: GMDPRMCSLMQGSTLPRRS
GMDPRMWSLLQNSTVPRRS

SEQ ID NO: 79751 - protein, 19 aa, Artificial Sequence
  Description of Artificial Sequence: Synthetic peptide
  Seed: GMDPRMCSLMQGSTLPRRS
GMDPRMWSLLQPSTAPRRS

SEQ ID NO: 79752 - protein, 19 aa, Artificial Sequence
  Description of Artificial Sequence: Synthetic peptide
  Seed: GMDPRMCSLMQGSTLPRRS
GMDPRMWSLLQPSTIPRRS

SEQ ID NO: 79753 - protein, 19 aa, Artificial Sequence
  Description of Artificial Sequence: Synthetic peptide
  Seed: GMDPRMCSLMQGSTLPRRS
GMDPRMWSLLQPSTLPRRS

SEQ ID NO: 79754 - protein, 19 aa, Artificial Sequence
  Description of Artificial Sequence: Synthetic peptide
  Seed: GMDPRMCSLMQGSTLPRRS
GMDPRMWSLLQPSTMPRRS

SEQ ID NO: 79755 - protein, 19 aa, Artificial Sequence
  Description of Artificial Sequence: Synthetic peptide
  Seed: GMDPRMCSLMQGSTLPRRS
GMDPRMWSLLQPSTNPRRS

SEQ ID NO: 79756 - protein, 19 aa, Artificial Sequence
  Description of Artificial Sequence: Synthetic peptide
  Seed: GMDPRMCSLMQGSTLPRRS
GMDPRMWSLLQPSTSPRRS

SEQ ID NO: 79757 - protein, 19 aa, Artificial Sequence
  Description of Artificial Sequence: Synthetic peptide
  Seed: GMDPRMCSLMQGSTLPRRS
GMDPRMWSLLQPSTTPRRS

SEQ ID NO: 79758 - protein, 19 aa, Artificial Sequence
  Description of Artificial Sequence: Synthetic peptide
  Seed: GMDPRMCSLMQGSTLPRRS
GMDPRMWSLLQPSTVPRRS

SEQ ID NO: 79759 - protein, 19 aa, Artificial Sequence
  Description of Artificial Sequence: Synthetic peptide
  Seed: GMDPRMCSLMQGSTLPRRS
GMDPRMWSLLQSSTAPRRS

SEQ ID NO: 79760 - protein, 19 aa, Artificial Sequence
  Description of Artificial Sequence: Synthetic peptide
  Seed: GMDPRMCSLMQGSTLPRRS
GMDPRMWSLLQSSTIPRRS

SEQ ID NO: 79761 - protein, 19 aa, Artificial Sequence
  Description of Artificial Sequence: Synthetic peptide
  Seed: GMDPRMCSLMQGSTLPRRS
GMDPRMWSLLQSSTLPRRS

SEQ ID NO: 79762 - protein, 19 aa, Artificial Sequence
  Description of Artificial Sequence: Synthetic peptide
  Seed: GMDPRMCSLMQGSTLPRRS
GMDPRMWSLLQSSTMPRRS

SEQ ID NO: 79763 - protein, 19 aa, Artificial Sequence
  Description of Artificial Sequence: Synthetic peptide
  Seed: GMDPRMCSLMQGSTLPRRS
GMDPRMWSLLQSSTNPRRS

SEQ ID NO: 79764 - protein, 19 aa, Artificial Sequence
  Description of Artificial Sequence: Synthetic peptide
  Seed: GMDPRMCSLMQGSTLPRRS
GMDPRMWSLLQSSTSPRRS

SEQ ID NO: 79765 - protein, 19 aa, Artificial Sequence
  Description of Artificial Sequence: Synthetic peptide
  Seed: GMDPRMCSLMQGSTLPRRS
GMDPRMWSLLQSSTTPRRS

SEQ ID NO: 79766 - protein, 19 aa, Artificial Sequence
  Description of Artificial Sequence: Synthetic peptide
  Seed: GMDPRMCSLMQGSTLPRRS
GMDPRMWSLLQSSTVPRRS

SEQ ID NO: 79767 - protein, 19 aa, Artificial Sequence
  Description of Artificial Sequence: Synthetic peptide
  Seed: GMDPRMCSLMQGSTLPRRS
GMDPRMWSLLQTSTAPRRS

SEQ ID NO: 79768 - protein, 19 aa, Artificial Sequence
  Description of Artificial Sequence: Synthetic peptide
  Seed: GMDPRMCSLMQGSTLPRRS
GMDPRMWSLLQTSTIPRRS

SEQ ID NO: 79769 - protein, 19 aa, Artificial Sequence
  Description of Artificial Sequence: Synthetic peptide
  Seed: GMDPRMCSLMQGSTLPRRS
GMDPRMWSLLQTSTLPRRS

SEQ ID NO: 79770 - protein, 19 aa, Artificial Sequence
  Description of Artificial Sequence: Synthetic peptide
  Seed: GMDPRMCSLMQGSTLPRRS
GMDPRMWSLLQTSTNPRRS

SEQ ID NO: 79771 - protein, 19 aa, Artificial Sequence
  Description of Artificial Sequence: Synthetic peptide
  Seed: GMDPRMCSLMQGSTLPRRS
GMDPRMWSLLQTSTSPRRS

SEQ ID NO: 79772 - protein, 19 aa, Artificial Sequence
  Description of Artificial Sequence: Synthetic peptide
  Seed: GMDPRMCSLMQGSTLPRRS
GMDPRMWSLLQTSTTPRRS

SEQ ID NO: 79773 - protein, 19 aa, Artificial Sequence
  Description of Artificial Sequence: Synthetic peptide
  Seed: GMDPRMCSLMQGSTLPRRS
GMDPRMWSLLQTSTVPRRS

SEQ ID NO: 79774 - protein, 19 aa, Artificial Sequence
  Description of Artificial Sequence: Synthetic peptide
  Seed: GMDPRMCSLMQGSTLPRRS
GMDPRMWSLLQVSTAPRRS

SEQ ID NO: 79775 - protein, 19 aa, Artificial Sequence
  Description of Artificial Sequence: Synthetic peptide
  Seed: GMDPRMCSLMQGSTLPRRS
GMDPRMWSLLQVSTNPRRS

SEQ ID NO: 79776 - protein, 19 aa, Artificial Sequence
  Description of Artificial Sequence: Synthetic peptide
  Seed: GMDPRMCSLMQGSTLPRRS
GMDPRMWSLLQVSTSPRRS

SEQ ID NO: 79777 - protein, 19 aa, Artificial Sequence
  Description of Artificial Sequence: Synthetic peptide
  Seed: GMDPRMCSLMQGSTLPRRS
GMDPRMWSLLQVSTTPRRS

SEQ ID NO: 79778 - protein, 19 aa, Artificial Sequence
  Description of Artificial Sequence: Synthetic peptide
  Seed: GMDPRMCSLMQGSTLPRRS
GMDPRMWSLLQVSTVPRRS

SEQ ID NO: 79779 - protein, 19 aa, Artificial Sequence
  Description of Artificial Sequence: Synthetic peptide
  Seed: GMDPRMCSLMQGSTLPRRS
GMDPRMWSLMQASTAPRRS

SEQ ID NO: 79780 - protein, 19 aa, Artificial Sequence
  Description of Artificial Sequence: Synthetic peptide
  Seed: GMDPRMCSLMQGSTLPRRS
GMDPRMWSLMQASTGPRRS

SEQ ID NO: 79781 - protein, 19 aa, Artificial Sequence
  Description of Artificial Sequence: Synthetic peptide
  Seed: GMDPRMCSLMQGSTLPRRS
GMDPRMWSLMQASTIPRRS

SEQ ID NO: 79782 - protein, 19 aa, Artificial Sequence
  Description of Artificial Sequence: Synthetic peptide
  Seed: GMDPRMCSLMQGSTLPRRS
GMDPRMWSLMQASTLPRRS

SEQ ID NO: 79783 - protein, 19 aa, Artificial Sequence
  Description of Artificial Sequence: Synthetic peptide
  Seed: GMDPRMCSLMQGSTLPRRS
GMDPRMWSLMQASTMPRRS

SEQ ID NO: 79784 - protein, 19 aa, Artificial Sequence
  Description of Artificial Sequence: Synthetic peptide
  Seed: GMDPRMCSLMQGSTLPRRS
GMDPRMWSLMQASTNPRRS

SEQ ID NO: 79785 - protein, 19 aa, Artificial Sequence
  Description of Artificial Sequence: Synthetic peptide
  Seed: GMDPRMCSLMQGSTLPRRS
GMDPRMWSLMQASTQPRRS

SEQ ID NO: 79786 - protein, 19 aa, Artificial Sequence
  Description of Artificial Sequence: Synthetic peptide
  Seed: GMDPRMCSLMQGSTLPRRS
GMDPRMWSLMQASTSPRRS

SEQ ID NO: 79787 - protein, 19 aa, Artificial Sequence
  Description of Artificial Sequence: Synthetic peptide
  Seed: GMDPRMCSLMQGSTLPRRS
GMDPRMWSLMQASTTPRRS

SEQ ID NO: 79788 - protein, 19 aa, Artificial Sequence
  Description of Artificial Sequence: Synthetic peptide
  Seed: GMDPRMCSLMQGSTLPRRS
GMDPRMWSLMQASTVPRRS

SEQ ID NO: 79789 - protein, 19 aa, Artificial Sequence
  Description of Artificial Sequence: Synthetic peptide
  Seed: GMDPRMCSLMQGSTLPRRS
GMDPRMWSLMQGSTAPRRS

SEQ ID NO: 79790 - protein, 19 aa, Artificial Sequence
  Description of Artificial Sequence: Synthetic peptide
  Seed: GMDPRMCSLMQGSTLPRRS
GMDPRMWSLMQGSTIPRRS

SEQ ID NO: 79791 - protein, 19 aa, Artificial Sequence
  Description of Artificial Sequence: Synthetic peptide
  Seed: GMDPRMCSLMQGSTLPRRS
GMDPRMWSLMQGSTLPRRS

SEQ ID NO: 79792 - protein, 19 aa, Artificial Sequence
  Description of Artificial Sequence: Synthetic peptide
  Seed: GMDPRMCSLMQGSTLPRRS
GMDPRMWSLMQGSTMPRRS

SEQ ID NO: 79793 - protein, 19 aa, Artificial Sequence
  Description of Artificial Sequence: Synthetic peptide
  Seed: GMDPRMCSLMQGSTLPRRS
GMDPRMWSLMQGSTSPRRS

SEQ ID NO: 79794 - protein, 19 aa, Artificial Sequence
  Description of Artificial Sequence: Synthetic peptide
  Seed: GMDPRMCSLMQGSTLPRRS
GMDPRMWSLMQGSTTPRRS

SEQ ID NO: 79795 - protein, 19 aa, Artificial Sequence
  Description of Artificial Sequence: Synthetic peptide
  Seed: GMDPRMCSLMQGSTLPRRS
GMDPRMWSLMQGSTVPRRS

SEQ ID NO: 79796 - protein, 19 aa, Artificial Sequence
  Description of Artificial Sequence: Synthetic peptide
  Seed: GMDPRMCSLMQGSTLPRRS
GMDPRMWSLMQISTAPRRS

SEQ ID NO: 79797 - protein, 19 aa, Artificial Sequence
  Description of Artificial Sequence: Synthetic peptide
  Seed: GMDPRMCSLMQGSTLPRRS
GMDPRMWSLMQISTNPRRS

SEQ ID NO: 79798 - protein, 19 aa, Artificial Sequence
  Description of Artificial Sequence: Synthetic peptide
  Seed: GMDPRMCSLMQGSTLPRRS
GMDPRMWSLMQISTSPRRS

SEQ ID NO: 79799 - protein, 19 aa, Artificial Sequence
  Description of Artificial Sequence: Synthetic peptide
  Seed: GMDPRMCSLMQGSTLPRRS
GMDPRMWSLMQISTTPRRS

SEQ ID NO: 79800 - protein, 19 aa, Artificial Sequence
  Description of Artificial Sequence: Synthetic peptide
  Seed: GMDPRMCSLMQGSTLPRRS
GMDPRMWSLMQNSTAPRRS

SEQ ID NO: 79801 - protein, 19 aa, Artificial Sequence
  Description of Artificial Sequence: Synthetic peptide
  Seed: GMDPRMCSLMQGSTLPRRS
GMDPRMWSLMQNSTIPRRS

SEQ ID NO: 79802 - protein, 19 aa, Artificial Sequence
  Description of Artificial Sequence: Synthetic peptide
  Seed: GMDPRMCSLMQGSTLPRRS
GMDPRMWSLMQNSTLPRRS

SEQ ID NO: 79803 - protein, 19 aa, Artificial Sequence
  Description of Artificial Sequence: Synthetic peptide
  Seed: GMDPRMCSLMQGSTLPRRS
GMDPRMWSLMQNSTVPRRS

SEQ ID NO: 79804 - protein, 19 aa, Artificial Sequence
  Description of Artificial Sequence: Synthetic peptide
  Seed: GMDPRMCSLMQGSTLPRRS
GMDPRMWSLMQPSTAPRRS

SEQ ID NO: 79805 - protein, 19 aa, Artificial Sequence
  Description of Artificial Sequence: Synthetic peptide
  Seed: GMDPRMCSLMQGSTLPRRS
GMDPRMWSLMQPSTIPRRS

SEQ ID NO: 79806 - protein, 19 aa, Artificial Sequence
  Description of Artificial Sequence: Synthetic peptide
  Seed: GMDPRMCSLMQGSTLPRRS
GMDPRMWSLMQPSTLPRRS

SEQ ID NO: 79807 - protein, 19 aa, Artificial Sequence
  Description of Artificial Sequence: Synthetic peptide
  Seed: GMDPRMCSLMQGSTLPRRS
GMDPRMWSLMQPSTMPRRS

SEQ ID NO: 79808 - protein, 19 aa, Artificial Sequence
  Description of Artificial Sequence: Synthetic peptide
  Seed: GMDPRMCSLMQGSTLPRRS
GMDPRMWSLMQPSTNPRRS

SEQ ID NO: 79809 - protein, 19 aa, Artificial Sequence
  Description of Artificial Sequence: Synthetic peptide
  Seed: GMDPRMCSLMQGSTLPRRS
GMDPRMWSLMQPSTSPRRS

SEQ ID NO: 79810 - protein, 19 aa, Artificial Sequence
  Description of Artificial Sequence: Synthetic peptide
  Seed: GMDPRMCSLMQGSTLPRRS
GMDPRMWSLMQPSTTPRRS

SEQ ID NO: 79811 - protein, 19 aa, Artificial Sequence
  Description of Artificial Sequence: Synthetic peptide
  Seed: GMDPRMCSLMQGSTLPRRS
GMDPRMWSLMQPSTVPRRS

SEQ ID NO: 79812 - protein, 19 aa, Artificial Sequence
  Description of Artificial Sequence: Synthetic peptide
  Seed: GMDPRMCSLMQGSTLPRRS
GMDPRMWSLMQSSTAPRRS

SEQ ID NO: 79813 - protein, 19 aa, Artificial Sequence
  Description of Artificial Sequence: Synthetic peptide
  Seed: GMDPRMCSLMQGSTLPRRS
GMDPRMWSLMQSSTIPRRS

SEQ ID NO: 79814 - protein, 19 aa, Artificial Sequence
  Description of Artificial Sequence: Synthetic peptide
  Seed: GMDPRMCSLMQGSTLPRRS
GMDPRMWSLMQSSTLPRRS

SEQ ID NO: 79815 - protein, 19 aa, Artificial Sequence
  Description of Artificial Sequence: Synthetic peptide
  Seed: GMDPRMCSLMQGSTLPRRS
GMDPRMWSLMQSSTMPRRS

SEQ ID NO: 79816 - protein, 19 aa, Artificial Sequence
  Description of Artificial Sequence: Synthetic peptide
  Seed: GMDPRMCSLMQGSTLPRRS
GMDPRMWSLMQSSTNPRRS

SEQ ID NO: 79817 - protein, 19 aa, Artificial Sequence
  Description of Artificial Sequence: Synthetic peptide
  Seed: GMDPRMCSLMQGSTLPRRS
GMDPRMWSLMQSSTSPRRS

SEQ ID NO: 79818 - protein, 19 aa, Artificial Sequence
  Description of Artificial Sequence: Synthetic peptide
  Seed: GMDPRMCSLMQGSTLPRRS
GMDPRMWSLMQSSTTPRRS

SEQ ID NO: 79819 - protein, 19 aa, Artificial Sequence
  Description of Artificial Sequence: Synthetic peptide
  Seed: GMDPRMCSLMQGSTLPRRS
GMDPRMWSLMQSSTVPRRS

SEQ ID NO: 79820 - protein, 19 aa, Artificial Sequence
  Description of Artificial Sequence: Synthetic peptide
  Seed: GMDPRMCSLMQGSTLPRRS
GMDPRMWSLMQTSTAPRRS

SEQ ID NO: 79821 - protein, 19 aa, Artificial Sequence
  Description of Artificial Sequence: Synthetic peptide
  Seed: GMDPRMCSLMQGSTLPRRS
GMDPRMWSLMQTSTIPRRS

SEQ ID NO: 79822 - protein, 19 aa, Artificial Sequence
  Description of Artificial Sequence: Synthetic peptide
  Seed: GMDPRMCSLMQGSTLPRRS
GMDPRMWSLMQTSTLPRRS

SEQ ID NO: 79823 - protein, 19 aa, Artificial Sequence
  Description of Artificial Sequence: Synthetic peptide
  Seed: GMDPRMCSLMQGSTLPRRS
GMDPRMWSLMQTSTMPRRS

SEQ ID NO: 79824 - protein, 19 aa, Artificial Sequence
  Description of Artificial Sequence: Synthetic peptide
  Seed: GMDPRMCSLMQGSTLPRRS
GMDPRMWSLMQTSTNPRRS

SEQ ID NO: 79825 - protein, 19 aa, Artificial Sequence
  Description of Artificial Sequence: Synthetic peptide
  Seed: GMDPRMCSLMQGSTLPRRS
GMDPRMWSLMQTSTSPRRS

SEQ ID NO: 79826 - protein, 19 aa, Artificial Sequence
  Description of Artificial Sequence: Synthetic peptide
  Seed: GMDPRMCSLMQGSTLPRRS
GMDPRMWSLMQTSTTPRRS

SEQ ID NO: 79827 - protein, 19 aa, Artificial Sequence
  Description of Artificial Sequence: Synthetic peptide
  Seed: GMDPRMCSLMQGSTLPRRS
GMDPRMWSLMQTSTVPRRS

SEQ ID NO: 79828 - protein, 19 aa, Artificial Sequence
  Description of Artificial Sequence: Synthetic peptide
  Seed: GMDPRMCSLMQGSTLPRRS
GMDPRMWSLMQVSTAPRRS

SEQ ID NO: 79829 - protein, 19 aa, Artificial Sequence
  Description of Artificial Sequence: Synthetic peptide
  Seed: GMDPRMCSLMQGSTLPRRS
GMDPRMWSLMQVSTLPRRS

SEQ ID NO: 79830 - protein, 19 aa, Artificial Sequence
  Description of Artificial Sequence: Synthetic peptide
  Seed: GMDPRMCSLMQGSTLPRRS
GMDPRMWSLMQVSTNPRRS

SEQ ID NO: 79831 - protein, 19 aa, Artificial Sequence
  Description of Artificial Sequence: Synthetic peptide
  Seed: GMDPRMCSLMQGSTLPRRS
GMDPRMWSLMQVSTSPRRS

SEQ ID NO: 79832 - protein, 19 aa, Artificial Sequence
  Description of Artificial Sequence: Synthetic peptide
  Seed: GMDPRMCSLMQGSTLPRRS
GMDPRMWSLMQVSTTPRRS

SEQ ID NO: 79833 - protein, 19 aa, Artificial Sequence
  Description of Artificial Sequence: Synthetic peptide
  Seed: GMDPRMCSLMQGSTLPRRS
GMDPRMWSLMQVSTVPRRS

SEQ ID NO: 79834 - protein, 19 aa, Artificial Sequence
  Description of Artificial Sequence: Synthetic peptide
  Seed: GMDPRMCSLMQGSTLPRRS
GMDPRMWSLQQASTAPRRS

SEQ ID NO: 79835 - protein, 19 aa, Artificial Sequence
  Description of Artificial Sequence: Synthetic peptide
  Seed: GMDPRMCSLMQGSTLPRRS
GMDPRMWSLQQASTIPRRS

SEQ ID NO: 79836 - protein, 19 aa, Artificial Sequence
  Description of Artificial Sequence: Synthetic peptide
  Seed: GMDPRMCSLMQGSTLPRRS
GMDPRMWSLQQASTLPRRS

SEQ ID NO: 79837 - protein, 19 aa, Artificial Sequence
  Description of Artificial Sequence: Synthetic peptide
  Seed: GMDPRMCSLMQGSTLPRRS
GMDPRMWSLQQASTVPRRS

SEQ ID NO: 79838 - protein, 19 aa, Artificial Sequence
  Description of Artificial Sequence: Synthetic peptide
  Seed: GMDPRMCSLMQGSTLPRRS
GMDPRMWSLQQGSTIPRRS

SEQ ID NO: 79839 - protein, 19 aa, Artificial Sequence
  Description of Artificial Sequence: Synthetic peptide
  Seed: GMDPRMCSLMQGSTLPRRS
GMDPRMWSLQQGSTLPRRS

SEQ ID NO: 79840 - protein, 19 aa, Artificial Sequence
  Description of Artificial Sequence: Synthetic peptide
  Seed: GMDPRMCSLMQGSTLPRRS
GMDPRMWSLQQGSTVPRRS

SEQ ID NO: 79841 - protein, 19 aa, Artificial Sequence
  Description of Artificial Sequence: Synthetic peptide
  Seed: GMDPRMCSLMQGSTLPRRS
GMDPRMWSLQQSSTLPRRS

SEQ ID NO: 79842 - protein, 19 aa, Artificial Sequence
  Description of Artificial Sequence: Synthetic peptide
  Seed: GMDPRMCSLMQGSTLPRRS
GMDPRMWSLQQSSTVPRRS

SEQ ID NO: 79843 - protein, 19 aa, Artificial Sequence
  Description of Artificial Sequence: Synthetic peptide
  Seed: GMDPRMCSLMQGSTLPRRS
GMDPRMWSLVQASTAPRRS

SEQ ID NO: 79844 - protein, 19 aa, Artificial Sequence
  Description of Artificial Sequence: Synthetic peptide
  Seed: GMDPRMCSLMQGSTLPRRS
GMDPRMWSLVQASTIPRRS

SEQ ID NO: 79845 - protein, 19 aa, Artificial Sequence
  Description of Artificial Sequence: Synthetic peptide
  Seed: GMDPRMCSLMQGSTLPRRS
GMDPRMWSLVQASTLPRRS

SEQ ID NO: 79846 - protein, 19 aa, Artificial Sequence
  Description of Artificial Sequence: Synthetic peptide
  Seed: GMDPRMCSLMQGSTLPRRS
GMDPRMWSLVQASTSPRRS

SEQ ID NO: 79847 - protein, 19 aa, Artificial Sequence
  Description of Artificial Sequence: Synthetic peptide
  Seed: GMDPRMCSLMQGSTLPRRS
GMDPRMWSLVQASTVPRRS

SEQ ID NO: 79848 - protein, 19 aa, Artificial Sequence
  Description of Artificial Sequence: Synthetic peptide
  Seed: GMDPRMCSLMQGSTLPRRS
GMDPRMWSLVQGSTAPRRS

SEQ ID NO: 79849 - protein, 19 aa, Artificial Sequence
  Description of Artificial Sequence: Synthetic peptide
  Seed: GMDPRMCSLMQGSTLPRRS
GMDPRMWSLVQGSTIPRRS

SEQ ID NO: 79850 - protein, 19 aa, Artificial Sequence
  Description of Artificial Sequence: Synthetic peptide
  Seed: GMDPRMCSLMQGSTLPRRS
GMDPRMWSLVQGSTLPRRS

SEQ ID NO: 79851 - protein, 19 aa, Artificial Sequence
  Description of Artificial Sequence: Synthetic peptide
  Seed: GMDPRMCSLMQGSTLPRRS
GMDPRMWSLVQGSTVPRRS

SEQ ID NO: 79852 - protein, 19 aa, Artificial Sequence
  Description of Artificial Sequence: Synthetic peptide
  Seed: GMDPRMCSLMQGSTLPRRS
GMDPRMWSLVQSSTVPRRS

SEQ ID NO: 79853 - protein, 19 aa, Artificial Sequence
  Description of Artificial Sequence: Synthetic peptide
  Seed: GMDPRMCSLMQGSTLPRRS
GMDPRMYSLAQASTAPRRS

SEQ ID NO: 79854 - protein, 19 aa, Artificial Sequence
  Description of Artificial Sequence: Synthetic peptide
  Seed: GMDPRMCSLMQGSTLPRRS
GMDPRMYSLAQASTIPRRS

SEQ ID NO: 79855 - protein, 19 aa, Artificial Sequence
  Description of Artificial Sequence: Synthetic peptide
  Seed: GMDPRMCSLMQGSTLPRRS
GMDPRMYSLAQASTLPRRS

SEQ ID NO: 79856 - protein, 19 aa, Artificial Sequence
  Description of Artificial Sequence: Synthetic peptide
  Seed: GMDPRMCSLMQGSTLPRRS
GMDPRMYSLAQASTMPRRS

SEQ ID NO: 79857 - protein, 19 aa, Artificial Sequence
  Description of Artificial Sequence: Synthetic peptide
  Seed: GMDPRMCSLMQGSTLPRRS
GMDPRMYSLAQASTNPRRS

SEQ ID NO: 79858 - protein, 19 aa, Artificial Sequence
  Description of Artificial Sequence: Synthetic peptide
  Seed: GMDPRMCSLMQGSTLPRRS
GMDPRMYSLAQASTSPRRS

SEQ ID NO: 79859 - protein, 19 aa, Artificial Sequence
  Description of Artificial Sequence: Synthetic peptide
  Seed: GMDPRMCSLMQGSTLPRRS
GMDPRMYSLAQASTTPRRS

SEQ ID NO: 79860 - protein, 19 aa, Artificial Sequence
  Description of Artificial Sequence: Synthetic peptide
  Seed: GMDPRMCSLMQGSTLPRRS
GMDPRMYSLAQASTVPRRS

SEQ ID NO: 79861 - protein, 19 aa, Artificial Sequence
  Description of Artificial Sequence: Synthetic peptide
  Seed: GMDPRMCSLMQGSTLPRRS
GMDPRMYSLAQGSTAPRRS

SEQ ID NO: 79862 - protein, 19 aa, Artificial Sequence
  Description of Artificial Sequence: Synthetic peptide
  Seed: GMDPRMCSLMQGSTLPRRS
GMDPRMYSLAQGSTIPRRS

SEQ ID NO: 79863 - protein, 19 aa, Artificial Sequence
  Description of Artificial Sequence: Synthetic peptide
  Seed: GMDPRMCSLMQGSTLPRRS
GMDPRMYSLAQGSTLPRRS

SEQ ID NO: 79864 - protein, 19 aa, Artificial Sequence
  Description of Artificial Sequence: Synthetic peptide
  Seed: GMDPRMCSLMQGSTLPRRS
GMDPRMYSLAQGSTMPRRS

SEQ ID NO: 79865 - protein, 19 aa, Artificial Sequence
  Description of Artificial Sequence: Synthetic peptide
  Seed: GMDPRMCSLMQGSTLPRRS
GMDPRMYSLAQGSTTPRRS

SEQ ID NO: 79866 - protein, 19 aa, Artificial Sequence
  Description of Artificial Sequence: Synthetic peptide
  Seed: GMDPRMCSLMQGSTLPRRS
GMDPRMYSLAQGSTVPRRS

SEQ ID NO: 79867 - protein, 19 aa, Artificial Sequence
  Description of Artificial Sequence: Synthetic peptide
  Seed: GMDPRMCSLMQGSTLPRRS
GMDPRMYSLAQISTAPRRS

SEQ ID NO: 79868 - protein, 19 aa, Artificial Sequence
  Description of Artificial Sequence: Synthetic peptide
  Seed: GMDPRMCSLMQGSTLPRRS
GMDPRMYSLAQISTIPRRS

SEQ ID NO: 79869 - protein, 19 aa, Artificial Sequence
  Description of Artificial Sequence: Synthetic peptide
  Seed: GMDPRMCSLMQGSTLPRRS
GMDPRMYSLAQISTLPRRS

SEQ ID NO: 79870 - protein, 19 aa, Artificial Sequence
  Description of Artificial Sequence: Synthetic peptide
  Seed: GMDPRMCSLMQGSTLPRRS
GMDPRMYSLAQISTNPRRS

SEQ ID NO: 79871 - protein, 19 aa, Artificial Sequence
  Description of Artificial Sequence: Synthetic peptide
  Seed: GMDPRMCSLMQGSTLPRRS
GMDPRMYSLAQISTSPRRS

SEQ ID NO: 79872 - protein, 19 aa, Artificial Sequence
  Description of Artificial Sequence: Synthetic peptide
  Seed: GMDPRMCSLMQGSTLPRRS
GMDPRMYSLAQISTTPRRS

SEQ ID NO: 79873 - protein, 19 aa, Artificial Sequence
  Description of Artificial Sequence: Synthetic peptide
  Seed: GMDPRMCSLMQGSTLPRRS
GMDPRMYSLAQISTVPRRS

SEQ ID NO: 79874 - protein, 19 aa, Artificial Sequence
  Description of Artificial Sequence: Synthetic peptide
  Seed: GMDPRMCSLMQGSTLPRRS
GMDPRMYSLAQNSTAPRRS

SEQ ID NO: 79875 - protein, 19 aa, Artificial Sequence
  Description of Artificial Sequence: Synthetic peptide
  Seed: GMDPRMCSLMQGSTLPRRS
GMDPRMYSLAQNSTIPRRS

SEQ ID NO: 79876 - protein, 19 aa, Artificial Sequence
  Description of Artificial Sequence: Synthetic peptide
  Seed: GMDPRMCSLMQGSTLPRRS
GMDPRMYSLAQNSTLPRRS

SEQ ID NO: 79877 - protein, 19 aa, Artificial Sequence
  Description of Artificial Sequence: Synthetic peptide
  Seed: GMDPRMCSLMQGSTLPRRS
GMDPRMYSLAQNSTVPRRS

SEQ ID NO: 79878 - protein, 19 aa, Artificial Sequence
  Description of Artificial Sequence: Synthetic peptide
  Seed: GMDPRMCSLMQGSTLPRRS
GMDPRMYSLAQPSTAPRRS

SEQ ID NO: 79879 - protein, 19 aa, Artificial Sequence
  Description of Artificial Sequence: Synthetic peptide
  Seed: GMDPRMCSLMQGSTLPRRS
GMDPRMYSLAQPSTIPRRS

SEQ ID NO: 79880 - protein, 19 aa, Artificial Sequence
  Description of Artificial Sequence: Synthetic peptide
  Seed: GMDPRMCSLMQGSTLPRRS
GMDPRMYSLAQPSTLPRRS

SEQ ID NO: 79881 - protein, 19 aa, Artificial Sequence
  Description of Artificial Sequence: Synthetic peptide
  Seed: GMDPRMCSLMQGSTLPRRS
GMDPRMYSLAQPSTMPRRS

SEQ ID NO: 79882 - protein, 19 aa, Artificial Sequence
  Description of Artificial Sequence: Synthetic peptide
  Seed: GMDPRMCSLMQGSTLPRRS
GMDPRMYSLAQPSTNPRRS

SEQ ID NO: 79883 - protein, 19 aa, Artificial Sequence
  Description of Artificial Sequence: Synthetic peptide
  Seed: GMDPRMCSLMQGSTLPRRS
GMDPRMYSLAQPSTSPRRS

SEQ ID NO: 79884 - protein, 19 aa, Artificial Sequence
  Description of Artificial Sequence: Synthetic peptide
  Seed: GMDPRMCSLMQGSTLPRRS
GMDPRMYSLAQPSTVPRRS

SEQ ID NO: 79885 - protein, 19 aa, Artificial Sequence
  Description of Artificial Sequence: Synthetic peptide
  Seed: GMDPRMCSLMQGSTLPRRS
GMDPRMYSLAQSSTAPRRS

SEQ ID NO: 79886 - protein, 19 aa, Artificial Sequence
  Description of Artificial Sequence: Synthetic peptide
  Seed: GMDPRMCSLMQGSTLPRRS
GMDPRMYSLAQSSTIPRRS

SEQ ID NO: 79887 - protein, 19 aa, Artificial Sequence
  Description of Artificial Sequence: Synthetic peptide
  Seed: GMDPRMCSLMQGSTLPRRS
GMDPRMYSLAQSSTLPRRS

SEQ ID NO: 79888 - protein, 19 aa, Artificial Sequence
  Description of Artificial Sequence: Synthetic peptide
  Seed: GMDPRMCSLMQGSTLPRRS
GMDPRMYSLAQSSTMPRRS

SEQ ID NO: 79889 - protein, 19 aa, Artificial Sequence
  Description of Artificial Sequence: Synthetic peptide
  Seed: GMDPRMCSLMQGSTLPRRS
GMDPRMYSLAQSSTNPRRS

SEQ ID NO: 79890 - protein, 19 aa, Artificial Sequence
  Description of Artificial Sequence: Synthetic peptide
  Seed: GMDPRMCSLMQGSTLPRRS
GMDPRMYSLAQSSTSPRRS

SEQ ID NO: 79891 - protein, 19 aa, Artificial Sequence
  Description of Artificial Sequence: Synthetic peptide
  Seed: GMDPRMCSLMQGSTLPRRS
GMDPRMYSLAQSSTTPRRS

SEQ ID NO: 79892 - protein, 19 aa, Artificial Sequence
  Description of Artificial Sequence: Synthetic peptide
  Seed: GMDPRMCSLMQGSTLPRRS
GMDPRMYSLAQSSTVPRRS

SEQ ID NO: 79893 - protein, 19 aa, Artificial Sequence
  Description of Artificial Sequence: Synthetic peptide
  Seed: GMDPRMCSLMQGSTLPRRS
GMDPRMYSLAQTSTAPRRS

SEQ ID NO: 79894 - protein, 19 aa, Artificial Sequence
  Description of Artificial Sequence: Synthetic peptide
  Seed: GMDPRMCSLMQGSTLPRRS
GMDPRMYSLAQTSTIPRRS

SEQ ID NO: 79895 - protein, 19 aa, Artificial Sequence
  Description of Artificial Sequence: Synthetic peptide
  Seed: GMDPRMCSLMQGSTLPRRS
GMDPRMYSLAQTSTLPRRS

SEQ ID NO: 79896 - protein, 19 aa, Artificial Sequence
  Description of Artificial Sequence: Synthetic peptide
  Seed: GMDPRMCSLMQGSTLPRRS
GMDPRMYSLAQTSTMPRRS

SEQ ID NO: 79897 - protein, 19 aa, Artificial Sequence
  Description of Artificial Sequence: Synthetic peptide
  Seed: GMDPRMCSLMQGSTLPRRS
GMDPRMYSLAQTSTNPRRS

SEQ ID NO: 79898 - protein, 19 aa, Artificial Sequence
  Description of Artificial Sequence: Synthetic peptide
  Seed: GMDPRMCSLMQGSTLPRRS
GMDPRMYSLAQTSTSPRRS

SEQ ID NO: 79899 - protein, 19 aa, Artificial Sequence
  Description of Artificial Sequence: Synthetic peptide
  Seed: GMDPRMCSLMQGSTLPRRS
GMDPRMYSLAQTSTVPRRS

SEQ ID NO: 79900 - protein, 19 aa, Artificial Sequence
  Description of Artificial Sequence: Synthetic peptide
  Seed: GMDPRMCSLMQGSTLPRRS
GMDPRMYSLAQVSTAPRRS

SEQ ID NO: 79901 - protein, 19 aa, Artificial Sequence
  Description of Artificial Sequence: Synthetic peptide
  Seed: GMDPRMCSLMQGSTLPRRS
GMDPRMYSLAQVSTIPRRS

SEQ ID NO: 79902 - protein, 19 aa, Artificial Sequence
  Description of Artificial Sequence: Synthetic peptide
  Seed: GMDPRMCSLMQGSTLPRRS
GMDPRMYSLAQVSTLPRRS

SEQ ID NO: 79903 - protein, 19 aa, Artificial Sequence
  Description of Artificial Sequence: Synthetic peptide
  Seed: GMDPRMCSLMQGSTLPRRS
GMDPRMYSLAQVSTMPRRS

SEQ ID NO: 79904 - protein, 19 aa, Artificial Sequence
  Description of Artificial Sequence: Synthetic peptide
  Seed: GMDPRMCSLMQGSTLPRRS
GMDPRMYSLAQVSTNPRRS

SEQ ID NO: 79905 - protein, 19 aa, Artificial Sequence
  Description of Artificial Sequence: Synthetic peptide
  Seed: GMDPRMCSLMQGSTLPRRS
GMDPRMYSLAQVSTSPRRS

SEQ ID NO: 79906 - protein, 19 aa, Artificial Sequence
  Description of Artificial Sequence: Synthetic peptide
  Seed: GMDPRMCSLMQGSTLPRRS
GMDPRMYSLAQVSTTPRRS

SEQ ID NO: 79907 - protein, 19 aa, Artificial Sequence
  Description of Artificial Sequence: Synthetic peptide
  Seed: GMDPRMCSLMQGSTLPRRS
GMDPRMYSLAQVSTVPRRS

SEQ ID NO: 79908 - protein, 19 aa, Artificial Sequence
  Description of Artificial Sequence: Synthetic peptide
  Seed: GMDPRMCSLMQGSTLPRRS
GMDPRMYSLEQASTIPRRS

SEQ ID NO: 79909 - protein, 19 aa, Artificial Sequence
  Description of Artificial Sequence: Synthetic peptide
  Seed: GMDPRMCSLMQGSTLPRRS
GMDPRMYSLEQASTLPRRS

SEQ ID NO: 79910 - protein, 19 aa, Artificial Sequence
  Description of Artificial Sequence: Synthetic peptide
  Seed: GMDPRMCSLMQGSTLPRRS
GMDPRMYSLEQASTVPRRS

SEQ ID NO: 79911 - protein, 19 aa, Artificial Sequence
  Description of Artificial Sequence: Synthetic peptide
  Seed: GMDPRMCSLMQGSTLPRRS
GMDPRMYSLFQASTAPRRS

SEQ ID NO: 79912 - protein, 19 aa, Artificial Sequence
  Description of Artificial Sequence: Synthetic peptide
  Seed: GMDPRMCSLMQGSTLPRRS
GMDPRMYSLFQASTIPRRS

SEQ ID NO: 79913 - protein, 19 aa, Artificial Sequence
  Description of Artificial Sequence: Synthetic peptide
  Seed: GMDPRMCSLMQGSTLPRRS
GMDPRMYSLFQASTLPRRS

SEQ ID NO: 79914 - protein, 19 aa, Artificial Sequence
  Description of Artificial Sequence: Synthetic peptide
  Seed: GMDPRMCSLMQGSTLPRRS
GMDPRMYSLFQASTSPRRS

SEQ ID NO: 79915 - protein, 19 aa, Artificial Sequence
  Description of Artificial Sequence: Synthetic peptide
  Seed: GMDPRMCSLMQGSTLPRRS
GMDPRMYSLFQASTVPRRS

SEQ ID NO: 79916 - protein, 19 aa, Artificial Sequence
  Description of Artificial Sequence: Synthetic peptide
  Seed: GMDPRMCSLMQGSTLPRRS
GMDPRMYSLFQGSTVPRRS

SEQ ID NO: 79917 - protein, 19 aa, Artificial Sequence
  Description of Artificial Sequence: Synthetic peptide
  Seed: GMDPRMCSLMQGSTLPRRS
GMDPRMYSLFQPSTAPRRS

SEQ ID NO: 79918 - protein, 19 aa, Artificial Sequence
  Description of Artificial Sequence: Synthetic peptide
  Seed: GMDPRMCSLMQGSTLPRRS
GMDPRMYSLFQVSTAPRRS

SEQ ID NO: 79919 - protein, 19 aa, Artificial Sequence
  Description of Artificial Sequence: Synthetic peptide
  Seed: GMDPRMCSLMQGSTLPRRS
GMDPRMYSLGQASTIPRRS

SEQ ID NO: 79920 - protein, 19 aa, Artificial Sequence
  Description of Artificial Sequence: Synthetic peptide
  Seed: GMDPRMCSLMQGSTLPRRS
GMDPRMYSLGQASTLPRRS

SEQ ID NO: 79921 - protein, 19 aa, Artificial Sequence
  Description of Artificial Sequence: Synthetic peptide
  Seed: GMDPRMCSLMQGSTLPRRS
GMDPRMYSLGQASTVPRRS

SEQ ID NO: 79922 - protein, 19 aa, Artificial Sequence
  Description of Artificial Sequence: Synthetic peptide
  Seed: GMDPRMCSLMQGSTLPRRS
GMDPRMYSLIQASTAPRRS

SEQ ID NO: 79923 - protein, 19 aa, Artificial Sequence
  Description of Artificial Sequence: Synthetic peptide
  Seed: GMDPRMCSLMQGSTLPRRS
GMDPRMYSLIQASTGPRRS

SEQ ID NO: 79924 - protein, 19 aa, Artificial Sequence
  Description of Artificial Sequence: Synthetic peptide
  Seed: GMDPRMCSLMQGSTLPRRS
GMDPRMYSLIQASTHPRRS

SEQ ID NO: 79925 - protein, 19 aa, Artificial Sequence
  Description of Artificial Sequence: Synthetic peptide
  Seed: GMDPRMCSLMQGSTLPRRS
GMDPRMYSLIQASTIPRRS

SEQ ID NO: 79926 - protein, 19 aa, Artificial Sequence
  Description of Artificial Sequence: Synthetic peptide
  Seed: GMDPRMCSLMQGSTLPRRS
GMDPRMYSLIQASTLPRRS

SEQ ID NO: 79927 - protein, 19 aa, Artificial Sequence
  Description of Artificial Sequence: Synthetic peptide
  Seed: GMDPRMCSLMQGSTLPRRS
GMDPRMYSLIQASTMPRRS

SEQ ID NO: 79928 - protein, 19 aa, Artificial Sequence
  Description of Artificial Sequence: Synthetic peptide
  Seed: GMDPRMCSLMQGSTLPRRS
GMDPRMYSLIQASTNPRRS

SEQ ID NO: 79929 - protein, 19 aa, Artificial Sequence
  Description of Artificial Sequence: Synthetic peptide
  Seed: GMDPRMCSLMQGSTLPRRS
GMDPRMYSLIQASTPPRRS

SEQ ID NO: 79930 - protein, 19 aa, Artificial Sequence
  Description of Artificial Sequence: Synthetic peptide
  Seed: GMDPRMCSLMQGSTLPRRS
GMDPRMYSLIQASTQPRRS

SEQ ID NO: 79931 - protein, 19 aa, Artificial Sequence
  Description of Artificial Sequence: Synthetic peptide
  Seed: GMDPRMCSLMQGSTLPRRS
GMDPRMYSLIQASTSPRRS

SEQ ID NO: 79932 - protein, 19 aa, Artificial Sequence
  Description of Artificial Sequence: Synthetic peptide
  Seed: GMDPRMCSLMQGSTLPRRS
GMDPRMYSLIQASTTPRRS

SEQ ID NO: 79933 - protein, 19 aa, Artificial Sequence
  Description of Artificial Sequence: Synthetic peptide
  Seed: GMDPRMCSLMQGSTLPRRS
GMDPRMYSLIQASTVPRRS

SEQ ID NO: 79934 - protein, 19 aa, Artificial Sequence
  Description of Artificial Sequence: Synthetic peptide
  Seed: GMDPRMCSLMQGSTLPRRS
GMDPRMYSLIQGSTAPRRS

SEQ ID NO: 79935 - protein, 19 aa, Artificial Sequence
  Description of Artificial Sequence: Synthetic peptide
  Seed: GMDPRMCSLMQGSTLPRRS
GMDPRMYSLIQGSTIPRRS

SEQ ID NO: 79936 - protein, 19 aa, Artificial Sequence
  Description of Artificial Sequence: Synthetic peptide
  Seed: GMDPRMCSLMQGSTLPRRS
GMDPRMYSLIQGSTLPRRS

SEQ ID NO: 79937 - protein, 19 aa, Artificial Sequence
  Description of Artificial Sequence: Synthetic peptide
  Seed: GMDPRMCSLMQGSTLPRRS
GMDPRMYSLIQGSTMPRRS

SEQ ID NO: 79938 - protein, 19 aa, Artificial Sequence
  Description of Artificial Sequence: Synthetic peptide
  Seed: GMDPRMCSLMQGSTLPRRS
GMDPRMYSLIQGSTNPRRS

SEQ ID NO: 79939 - protein, 19 aa, Artificial Sequence
  Description of Artificial Sequence: Synthetic peptide
  Seed: GMDPRMCSLMQGSTLPRRS
GMDPRMYSLIQGSTSPRRS

SEQ ID NO: 79940 - protein, 19 aa, Artificial Sequence
  Description of Artificial Sequence: Synthetic peptide
  Seed: GMDPRMCSLMQGSTLPRRS
GMDPRMYSLIQGSTTPRRS

SEQ ID NO: 79941 - protein, 19 aa, Artificial Sequence
  Description of Artificial Sequence: Synthetic peptide
  Seed: GMDPRMCSLMQGSTLPRRS
GMDPRMYSLIQGSTVPRRS

SEQ ID NO: 79942 - protein, 19 aa, Artificial Sequence
  Description of Artificial Sequence: Synthetic peptide
  Seed: GMDPRMCSLMQGSTLPRRS
GMDPRMYSLIQISTAPRRS

SEQ ID NO: 79943 - protein, 19 aa, Artificial Sequence
  Description of Artificial Sequence: Synthetic peptide
  Seed: GMDPRMCSLMQGSTLPRRS
GMDPRMYSLIQISTGPRRS

SEQ ID NO: 79944 - protein, 19 aa, Artificial Sequence
  Description of Artificial Sequence: Synthetic peptide
  Seed: GMDPRMCSLMQGSTLPRRS
GMDPRMYSLIQISTIPRRS

SEQ ID NO: 79945 - protein, 19 aa, Artificial Sequence
  Description of Artificial Sequence: Synthetic peptide
  Seed: GMDPRMCSLMQGSTLPRRS
GMDPRMYSLIQISTLPRRS

SEQ ID NO: 79946 - protein, 19 aa, Artificial Sequence
  Description of Artificial Sequence: Synthetic peptide
  Seed: GMDPRMCSLMQGSTLPRRS
GMDPRMYSLIQISTMPRRS

SEQ ID NO: 79947 - protein, 19 aa, Artificial Sequence
  Description of Artificial Sequence: Synthetic peptide
  Seed: GMDPRMCSLMQGSTLPRRS
GMDPRMYSLIQISTNPRRS

SEQ ID NO: 79948 - protein, 19 aa, Artificial Sequence
  Description of Artificial Sequence: Synthetic peptide
  Seed: GMDPRMCSLMQGSTLPRRS
GMDPRMYSLIQISTSPRRS

SEQ ID NO: 79949 - protein, 19 aa, Artificial Sequence
  Description of Artificial Sequence: Synthetic peptide
  Seed: GMDPRMCSLMQGSTLPRRS
GMDPRMYSLIQISTTPRRS

SEQ ID NO: 79950 - protein, 19 aa, Artificial Sequence
  Description of Artificial Sequence: Synthetic peptide
  Seed: GMDPRMCSLMQGSTLPRRS
GMDPRMYSLIQISTVPRRS

SEQ ID NO: 79951 - protein, 19 aa, Artificial Sequence
  Description of Artificial Sequence: Synthetic peptide
  Seed: GMDPRMCSLMQGSTLPRRS
GMDPRMYSLIQLSTAPRRS

SEQ ID NO: 79952 - protein, 19 aa, Artificial Sequence
  Description of Artificial Sequence: Synthetic peptide
  Seed: GMDPRMCSLMQGSTLPRRS
GMDPRMYSLIQLSTSPRRS

SEQ ID NO: 79953 - protein, 19 aa, Artificial Sequence
  Description of Artificial Sequence: Synthetic peptide
  Seed: GMDPRMCSLMQGSTLPRRS
GMDPRMYSLIQMSTAPRRS

SEQ ID NO: 79954 - protein, 19 aa, Artificial Sequence
  Description of Artificial Sequence: Synthetic peptide
  Seed: GMDPRMCSLMQGSTLPRRS
GMDPRMYSLIQNSTAPRRS

SEQ ID NO: 79955 - protein, 19 aa, Artificial Sequence
  Description of Artificial Sequence: Synthetic peptide
  Seed: GMDPRMCSLMQGSTLPRRS
GMDPRMYSLIQNSTIPRRS

SEQ ID NO: 79956 - protein, 19 aa, Artificial Sequence
  Description of Artificial Sequence: Synthetic peptide
  Seed: GMDPRMCSLMQGSTLPRRS
GMDPRMYSLIQNSTLPRRS

SEQ ID NO: 79957 - protein, 19 aa, Artificial Sequence
  Description of Artificial Sequence: Synthetic peptide
  Seed: GMDPRMCSLMQGSTLPRRS
GMDPRMYSLIQNSTNPRRS

SEQ ID NO: 79958 - protein, 19 aa, Artificial Sequence
  Description of Artificial Sequence: Synthetic peptide
  Seed: GMDPRMCSLMQGSTLPRRS
GMDPRMYSLIQNSTSPRRS

SEQ ID NO: 79959 - protein, 19 aa, Artificial Sequence
  Description of Artificial Sequence: Synthetic peptide
  Seed: GMDPRMCSLMQGSTLPRRS
GMDPRMYSLIQNSTTPRRS

SEQ ID NO: 79960 - protein, 19 aa, Artificial Sequence
  Description of Artificial Sequence: Synthetic peptide
  Seed: GMDPRMCSLMQGSTLPRRS
GMDPRMYSLIQNSTVPRRS

SEQ ID NO: 79961 - protein, 19 aa, Artificial Sequence
  Description of Artificial Sequence: Synthetic peptide
  Seed: GMDPRMCSLMQGSTLPRRS
GMDPRMYSLIQPSTAPRRS

SEQ ID NO: 79962 - protein, 19 aa, Artificial Sequence
  Description of Artificial Sequence: Synthetic peptide
  Seed: GMDPRMCSLMQGSTLPRRS
GMDPRMYSLIQPSTGPRRS

SEQ ID NO: 79963 - protein, 19 aa, Artificial Sequence
  Description of Artificial Sequence: Synthetic peptide
  Seed: GMDPRMCSLMQGSTLPRRS
GMDPRMYSLIQPSTHPRRS

SEQ ID NO: 79964 - protein, 19 aa, Artificial Sequence
  Description of Artificial Sequence: Synthetic peptide
  Seed: GMDPRMCSLMQGSTLPRRS
GMDPRMYSLIQPSTIPRRS

SEQ ID NO: 79965 - protein, 19 aa, Artificial Sequence
  Description of Artificial Sequence: Synthetic peptide
  Seed: GMDPRMCSLMQGSTLPRRS
GMDPRMYSLIQPSTLPRRS

SEQ ID NO: 79966 - protein, 19 aa, Artificial Sequence
  Description of Artificial Sequence: Synthetic peptide
  Seed: GMDPRMCSLMQGSTLPRRS
GMDPRMYSLIQPSTMPRRS

SEQ ID NO: 79967 - protein, 19 aa, Artificial Sequence
  Description of Artificial Sequence: Synthetic peptide
  Seed: GMDPRMCSLMQGSTLPRRS
GMDPRMYSLIQPSTNPRRS

SEQ ID NO: 79968 - protein, 19 aa, Artificial Sequence
  Description of Artificial Sequence: Synthetic peptide
  Seed: GMDPRMCSLMQGSTLPRRS
GMDPRMYSLIQPSTQPRRS

SEQ ID NO: 79969 - protein, 19 aa, Artificial Sequence
  Description of Artificial Sequence: Synthetic peptide
  Seed: GMDPRMCSLMQGSTLPRRS
GMDPRMYSLIQPSTSPRRS

SEQ ID NO: 79970 - protein, 19 aa, Artificial Sequence
  Description of Artificial Sequence: Synthetic peptide
  Seed: GMDPRMCSLMQGSTLPRRS
GMDPRMYSLIQPSTTPRRS

SEQ ID NO: 79971 - protein, 19 aa, Artificial Sequence
  Description of Artificial Sequence: Synthetic peptide
  Seed: GMDPRMCSLMQGSTLPRRS
GMDPRMYSLIQPSTVPRRS

SEQ ID NO: 79972 - protein, 19 aa, Artificial Sequence
  Description of Artificial Sequence: Synthetic peptide
  Seed: GMDPRMCSLMQGSTLPRRS
GMDPRMYSLIQSSTAPRRS

SEQ ID NO: 79973 - protein, 19 aa, Artificial Sequence
  Description of Artificial Sequence: Synthetic peptide
  Seed: GMDPRMCSLMQGSTLPRRS
GMDPRMYSLIQSSTGPRRS

SEQ ID NO: 79974 - protein, 19 aa, Artificial Sequence
  Description of Artificial Sequence: Synthetic peptide
  Seed: GMDPRMCSLMQGSTLPRRS
GMDPRMYSLIQSSTIPRRS

SEQ ID NO: 79975 - protein, 19 aa, Artificial Sequence
  Description of Artificial Sequence: Synthetic peptide
  Seed: GMDPRMCSLMQGSTLPRRS
GMDPRMYSLIQSSTLPRRS

SEQ ID NO: 79976 - protein, 19 aa, Artificial Sequence
  Description of Artificial Sequence: Synthetic peptide
  Seed: GMDPRMCSLMQGSTLPRRS
GMDPRMYSLIQSSTMPRRS

SEQ ID NO: 79977 - protein, 19 aa, Artificial Sequence
  Description of Artificial Sequence: Synthetic peptide
  Seed: GMDPRMCSLMQGSTLPRRS
GMDPRMYSLIQSSTNPRRS

SEQ ID NO: 79978 - protein, 19 aa, Artificial Sequence
  Description of Artificial Sequence: Synthetic peptide
  Seed: GMDPRMCSLMQGSTLPRRS
GMDPRMYSLIQSSTSPRRS

SEQ ID NO: 79979 - protein, 19 aa, Artificial Sequence
  Description of Artificial Sequence: Synthetic peptide
  Seed: GMDPRMCSLMQGSTLPRRS
GMDPRMYSLIQSSTTPRRS

SEQ ID NO: 79980 - protein, 19 aa, Artificial Sequence
  Description of Artificial Sequence: Synthetic peptide
  Seed: GMDPRMCSLMQGSTLPRRS
GMDPRMYSLIQSSTVPRRS

SEQ ID NO: 79981 - protein, 19 aa, Artificial Sequence
  Description of Artificial Sequence: Synthetic peptide
  Seed: GMDPRMCSLMQGSTLPRRS
GMDPRMYSLIQTSTAPRRS

SEQ ID NO: 79982 - protein, 19 aa, Artificial Sequence
  Description of Artificial Sequence: Synthetic peptide
  Seed: GMDPRMCSLMQGSTLPRRS
GMDPRMYSLIQTSTIPRRS

SEQ ID NO: 79983 - protein, 19 aa, Artificial Sequence
  Description of Artificial Sequence: Synthetic peptide
  Seed: GMDPRMCSLMQGSTLPRRS
GMDPRMYSLIQTSTLPRRS

SEQ ID NO: 79984 - protein, 19 aa, Artificial Sequence
  Description of Artificial Sequence: Synthetic peptide
  Seed: GMDPRMCSLMQGSTLPRRS
GMDPRMYSLIQTSTMPRRS

SEQ ID NO: 79985 - protein, 19 aa, Artificial Sequence
  Description of Artificial Sequence: Synthetic peptide
  Seed: GMDPRMCSLMQGSTLPRRS
GMDPRMYSLIQTSTNPRRS

SEQ ID NO: 79986 - protein, 19 aa, Artificial Sequence
  Description of Artificial Sequence: Synthetic peptide
  Seed: GMDPRMCSLMQGSTLPRRS
GMDPRMYSLIQTSTSPRRS

SEQ ID NO: 79987 - protein, 19 aa, Artificial Sequence
  Description of Artificial Sequence: Synthetic peptide
  Seed: GMDPRMCSLMQGSTLPRRS
GMDPRMYSLIQTSTTPRRS

SEQ ID NO: 79988 - protein, 19 aa, Artificial Sequence
  Description of Artificial Sequence: Synthetic peptide
  Seed: GMDPRMCSLMQGSTLPRRS
GMDPRMYSLIQTSTVPRRS

SEQ ID NO: 79989 - protein, 19 aa, Artificial Sequence
  Description of Artificial Sequence: Synthetic peptide
  Seed: GMDPRMCSLMQGSTLPRRS
GMDPRMYSLIQVSTAPRRS

SEQ ID NO: 79990 - protein, 19 aa, Artificial Sequence
  Description of Artificial Sequence: Synthetic peptide
  Seed: GMDPRMCSLMQGSTLPRRS
GMDPRMYSLIQVSTGPRRS

SEQ ID NO: 79991 - protein, 19 aa, Artificial Sequence
  Description of Artificial Sequence: Synthetic peptide
  Seed: GMDPRMCSLMQGSTLPRRS
GMDPRMYSLIQVSTHPRRS

SEQ ID NO: 79992 - protein, 19 aa, Artificial Sequence
  Description of Artificial Sequence: Synthetic peptide
  Seed: GMDPRMCSLMQGSTLPRRS
GMDPRMYSLIQVSTIPRRS

SEQ ID NO: 79993 - protein, 19 aa, Artificial Sequence
  Description of Artificial Sequence: Synthetic peptide
  Seed: GMDPRMCSLMQGSTLPRRS
GMDPRMYSLIQVSTLPRRS

SEQ ID NO: 79994 - protein, 19 aa, Artificial Sequence
  Description of Artificial Sequence: Synthetic peptide
  Seed: GMDPRMCSLMQGSTLPRRS
GMDPRMYSLIQVSTMPRRS

SEQ ID NO: 79995 - protein, 19 aa, Artificial Sequence
  Description of Artificial Sequence: Synthetic peptide
  Seed: GMDPRMCSLMQGSTLPRRS
GMDPRMYSLIQVSTNPRRS

SEQ ID NO: 79996 - protein, 19 aa, Artificial Sequence
  Description of Artificial Sequence: Synthetic peptide
  Seed: GMDPRMCSLMQGSTLPRRS
GMDPRMYSLIQVSTSPRRS

SEQ ID NO: 79997 - protein, 19 aa, Artificial Sequence
  Description of Artificial Sequence: Synthetic peptide
  Seed: GMDPRMCSLMQGSTLPRRS
GMDPRMYSLIQVSTTPRRS

SEQ ID NO: 79998 - protein, 19 aa, Artificial Sequence
  Description of Artificial Sequence: Synthetic peptide
  Seed: GMDPRMCSLMQGSTLPRRS
GMDPRMYSLIQVSTVPRRS

SEQ ID NO: 79999 - protein, 19 aa, Artificial Sequence
  Description of Artificial Sequence: Synthetic peptide
  Seed: GMDPRMCSLMQGSTLPRRS
GMDPRMYSLLQASTAPRRS

SEQ ID NO: 80000 - protein, 19 aa, Artificial Sequence
  Description of Artificial Sequence: Synthetic peptide
  Seed: GMDPRMCSLMQGSTLPRRS
GMDPRMYSLLQASTCPRRS

SEQ ID NO: 80001 - protein, 19 aa, Artificial Sequence
  Description of Artificial Sequence: Synthetic peptide
  Seed: GMDPRMCSLMQGSTLPRRS
GMDPRMYSLLQASTFPRRS

SEQ ID NO: 80002 - protein, 19 aa, Artificial Sequence
  Description of Artificial Sequence: Synthetic peptide
  Seed: GMDPRMCSLMQGSTLPRRS
GMDPRMYSLLQASTGPRRS

SEQ ID NO: 80003 - protein, 19 aa, Artificial Sequence
  Description of Artificial Sequence: Synthetic peptide
  Seed: GMDPRMCSLMQGSTLPRRS
GMDPRMYSLLQASTHPRRS

SEQ ID NO: 80004 - protein, 19 aa, Artificial Sequence
  Description of Artificial Sequence: Synthetic peptide
  Seed: GMDPRMCSLMQGSTLPRRS
GMDPRMYSLLQASTIPRRS

SEQ ID NO: 80005 - protein, 19 aa, Artificial Sequence
  Description of Artificial Sequence: Synthetic peptide
  Seed: GMDPRMCSLMQGSTLPRRS
GMDPRMYSLLQASTLPRRS

SEQ ID NO: 80006 - protein, 19 aa, Artificial Sequence
  Description of Artificial Sequence: Synthetic peptide
  Seed: GMDPRMCSLMQGSTLPRRS
GMDPRMYSLLQASTMPRRS

SEQ ID NO: 80007 - protein, 19 aa, Artificial Sequence
  Description of Artificial Sequence: Synthetic peptide
  Seed: GMDPRMCSLMQGSTLPRRS
GMDPRMYSLLQASTNPRRS

SEQ ID NO: 80008 - protein, 19 aa, Artificial Sequence
  Description of Artificial Sequence: Synthetic peptide
  Seed: GMDPRMCSLMQGSTLPRRS
GMDPRMYSLLQASTPPRRS

SEQ ID NO: 80009 - protein, 19 aa, Artificial Sequence
  Description of Artificial Sequence: Synthetic peptide
  Seed: GMDPRMCSLMQGSTLPRRS
GMDPRMYSLLQASTQPRRS

SEQ ID NO: 80010 - protein, 19 aa, Artificial Sequence
  Description of Artificial Sequence: Synthetic peptide
  Seed: GMDPRMCSLMQGSTLPRRS
GMDPRMYSLLQASTSPRRS

SEQ ID NO: 80011 - protein, 19 aa, Artificial Sequence
  Description of Artificial Sequence: Synthetic peptide
  Seed: GMDPRMCSLMQGSTLPRRS
GMDPRMYSLLQASTTPRRS

SEQ ID NO: 80012 - protein, 19 aa, Artificial Sequence
  Description of Artificial Sequence: Synthetic peptide
  Seed: GMDPRMCSLMQGSTLPRRS
GMDPRMYSLLQASTVPRRS

SEQ ID NO: 80013 - protein, 19 aa, Artificial Sequence
  Description of Artificial Sequence: Synthetic peptide
  Seed: GMDPRMCSLMQGSTLPRRS
GMDPRMYSLLQGSTAPRRS

SEQ ID NO: 80014 - protein, 19 aa, Artificial Sequence
  Description of Artificial Sequence: Synthetic peptide
  Seed: GMDPRMCSLMQGSTLPRRS
GMDPRMYSLLQGSTCPRRS

SEQ ID NO: 80015 - protein, 19 aa, Artificial Sequence
  Description of Artificial Sequence: Synthetic peptide
  Seed: GMDPRMCSLMQGSTLPRRS
GMDPRMYSLLQGSTFPRRS

SEQ ID NO: 80016 - protein, 19 aa, Artificial Sequence
  Description of Artificial Sequence: Synthetic peptide
  Seed: GMDPRMCSLMQGSTLPRRS
GMDPRMYSLLQGSTGPRRS

SEQ ID NO: 80017 - protein, 19 aa, Artificial Sequence
  Description of Artificial Sequence: Synthetic peptide
  Seed: GMDPRMCSLMQGSTLPRRS
GMDPRMYSLLQGSTIPRRS

SEQ ID NO: 80018 - protein, 19 aa, Artificial Sequence
  Description of Artificial Sequence: Synthetic peptide
  Seed: GMDPRMCSLMQGSTLPRRS
GMDPRMYSLLQGSTLPRRS

SEQ ID NO: 80019 - protein, 19 aa, Artificial Sequence
  Description of Artificial Sequence: Synthetic peptide
  Seed: GMDPRMCSLMQGSTLPRRS
GMDPRMYSLLQGSTMPRRS

SEQ ID NO: 80020 - protein, 19 aa, Artificial Sequence
  Description of Artificial Sequence: Synthetic peptide
  Seed: GMDPRMCSLMQGSTLPRRS
GMDPRMYSLLQGSTNPRRS

SEQ ID NO: 80021 - protein, 19 aa, Artificial Sequence
  Description of Artificial Sequence: Synthetic peptide
  Seed: GMDPRMCSLMQGSTLPRRS
GMDPRMYSLLQGSTSPRRS

SEQ ID NO: 80022 - protein, 19 aa, Artificial Sequence
  Description of Artificial Sequence: Synthetic peptide
  Seed: GMDPRMCSLMQGSTLPRRS
GMDPRMYSLLQGSTTPRRS

SEQ ID NO: 80023 - protein, 19 aa, Artificial Sequence
  Description of Artificial Sequence: Synthetic peptide
  Seed: GMDPRMCSLMQGSTLPRRS
GMDPRMYSLLQGSTVPRRS

SEQ ID NO: 80024 - protein, 19 aa, Artificial Sequence
  Description of Artificial Sequence: Synthetic peptide
  Seed: GMDPRMCSLMQGSTLPRRS
GMDPRMYSLLQISTAPRRS

SEQ ID NO: 80025 - protein, 19 aa, Artificial Sequence
  Description of Artificial Sequence: Synthetic peptide
  Seed: GMDPRMCSLMQGSTLPRRS
GMDPRMYSLLQISTGPRRS

SEQ ID NO: 80026 - protein, 19 aa, Artificial Sequence
  Description of Artificial Sequence: Synthetic peptide
  Seed: GMDPRMCSLMQGSTLPRRS
GMDPRMYSLLQISTHPRRS

SEQ ID NO: 80027 - protein, 19 aa, Artificial Sequence
  Description of Artificial Sequence: Synthetic peptide
  Seed: GMDPRMCSLMQGSTLPRRS
GMDPRMYSLLQISTIPRRS

SEQ ID NO: 80028 - protein, 19 aa, Artificial Sequence
  Description of Artificial Sequence: Synthetic peptide
  Seed: GMDPRMCSLMQGSTLPRRS
GMDPRMYSLLQISTLPRRS

SEQ ID NO: 80029 - protein, 19 aa, Artificial Sequence
  Description of Artificial Sequence: Synthetic peptide
  Seed: GMDPRMCSLMQGSTLPRRS
GMDPRMYSLLQISTMPRRS

SEQ ID NO: 80030 - protein, 19 aa, Artificial Sequence
  Description of Artificial Sequence: Synthetic peptide
  Seed: GMDPRMCSLMQGSTLPRRS
GMDPRMYSLLQISTNPRRS

SEQ ID NO: 80031 - protein, 19 aa, Artificial Sequence
  Description of Artificial Sequence: Synthetic peptide
  Seed: GMDPRMCSLMQGSTLPRRS
GMDPRMYSLLQISTSPRRS

SEQ ID NO: 80032 - protein, 19 aa, Artificial Sequence
  Description of Artificial Sequence: Synthetic peptide
  Seed: GMDPRMCSLMQGSTLPRRS
GMDPRMYSLLQISTTPRRS

SEQ ID NO: 80033 - protein, 19 aa, Artificial Sequence
  Description of Artificial Sequence: Synthetic peptide
  Seed: GMDPRMCSLMQGSTLPRRS
GMDPRMYSLLQISTVPRRS

SEQ ID NO: 80034 - protein, 19 aa, Artificial Sequence
  Description of Artificial Sequence: Synthetic peptide
  Seed: GMDPRMCSLMQGSTLPRRS
GMDPRMYSLLQLSTAPRRS

SEQ ID NO: 80035 - protein, 19 aa, Artificial Sequence
  Description of Artificial Sequence: Synthetic peptide
  Seed: GMDPRMCSLMQGSTLPRRS
GMDPRMYSLLQLSTNPRRS

SEQ ID NO: 80036 - protein, 19 aa, Artificial Sequence
  Description of Artificial Sequence: Synthetic peptide
  Seed: GMDPRMCSLMQGSTLPRRS
GMDPRMYSLLQLSTSPRRS

SEQ ID NO: 80037 - protein, 19 aa, Artificial Sequence
  Description of Artificial Sequence: Synthetic peptide
  Seed: GMDPRMCSLMQGSTLPRRS
GMDPRMYSLLQLSTTPRRS

SEQ ID NO: 80038 - protein, 19 aa, Artificial Sequence
  Description of Artificial Sequence: Synthetic peptide
  Seed: GMDPRMCSLMQGSTLPRRS
GMDPRMYSLLQLSTVPRRS

SEQ ID NO: 80039 - protein, 19 aa, Artificial Sequence
  Description of Artificial Sequence: Synthetic peptide
  Seed: GMDPRMCSLMQGSTLPRRS
GMDPRMYSLLQMSTAPRRS

SEQ ID NO: 80040 - protein, 19 aa, Artificial Sequence
  Description of Artificial Sequence: Synthetic peptide
  Seed: GMDPRMCSLMQGSTLPRRS
GMDPRMYSLLQMSTSPRRS

SEQ ID NO: 80041 - protein, 19 aa, Artificial Sequence
  Description of Artificial Sequence: Synthetic peptide
  Seed: GMDPRMCSLMQGSTLPRRS
GMDPRMYSLLQNSTAPRRS

SEQ ID NO: 80042 - protein, 19 aa, Artificial Sequence
  Description of Artificial Sequence: Synthetic peptide
  Seed: GMDPRMCSLMQGSTLPRRS
GMDPRMYSLLQNSTIPRRS

SEQ ID NO: 80043 - protein, 19 aa, Artificial Sequence
  Description of Artificial Sequence: Synthetic peptide
  Seed: GMDPRMCSLMQGSTLPRRS
GMDPRMYSLLQNSTLPRRS

SEQ ID NO: 80044 - protein, 19 aa, Artificial Sequence
  Description of Artificial Sequence: Synthetic peptide
  Seed: GMDPRMCSLMQGSTLPRRS
GMDPRMYSLLQNSTMPRRS

SEQ ID NO: 80045 - protein, 19 aa, Artificial Sequence
  Description of Artificial Sequence: Synthetic peptide
  Seed: GMDPRMCSLMQGSTLPRRS
GMDPRMYSLLQNSTNPRRS

SEQ ID NO: 80046 - protein, 19 aa, Artificial Sequence
  Description of Artificial Sequence: Synthetic peptide
  Seed: GMDPRMCSLMQGSTLPRRS
GMDPRMYSLLQNSTSPRRS

SEQ ID NO: 80047 - protein, 19 aa, Artificial Sequence
  Description of Artificial Sequence: Synthetic peptide
  Seed: GMDPRMCSLMQGSTLPRRS
GMDPRMYSLLQNSTTPRRS

SEQ ID NO: 80048 - protein, 19 aa, Artificial Sequence
  Description of Artificial Sequence: Synthetic peptide
  Seed: GMDPRMCSLMQGSTLPRRS
GMDPRMYSLLQNSTVPRRS

SEQ ID NO: 80049 - protein, 19 aa, Artificial Sequence
  Description of Artificial Sequence: Synthetic peptide
  Seed: GMDPRMCSLMQGSTLPRRS
GMDPRMYSLLQPSTAPRRS

SEQ ID NO: 80050 - protein, 19 aa, Artificial Sequence
  Description of Artificial Sequence: Synthetic peptide
  Seed: GMDPRMCSLMQGSTLPRRS
GMDPRMYSLLQPSTGPRRS

SEQ ID NO: 80051 - protein, 19 aa, Artificial Sequence
  Description of Artificial Sequence: Synthetic peptide
  Seed: GMDPRMCSLMQGSTLPRRS
GMDPRMYSLLQPSTHPRRS

SEQ ID NO: 80052 - protein, 19 aa, Artificial Sequence
  Description of Artificial Sequence: Synthetic peptide
  Seed: GMDPRMCSLMQGSTLPRRS
GMDPRMYSLLQPSTIPRRS

SEQ ID NO: 80053 - protein, 19 aa, Artificial Sequence
  Description of Artificial Sequence: Synthetic peptide
  Seed: GMDPRMCSLMQGSTLPRRS
GMDPRMYSLLQPSTLPRRS

SEQ ID NO: 80054 - protein, 19 aa, Artificial Sequence
  Description of Artificial Sequence: Synthetic peptide
  Seed: GMDPRMCSLMQGSTLPRRS
GMDPRMYSLLQPSTMPRRS

SEQ ID NO: 80055 - protein, 19 aa, Artificial Sequence
  Description of Artificial Sequence: Synthetic peptide
  Seed: GMDPRMCSLMQGSTLPRRS
GMDPRMYSLLQPSTNPRRS

SEQ ID NO: 80056 - protein, 19 aa, Artificial Sequence
  Description of Artificial Sequence: Synthetic peptide
  Seed: GMDPRMCSLMQGSTLPRRS
GMDPRMYSLLQPSTPPRRS

SEQ ID NO: 80057 - protein, 19 aa, Artificial Sequence
  Description of Artificial Sequence: Synthetic peptide
  Seed: GMDPRMCSLMQGSTLPRRS
GMDPRMYSLLQPSTQPRRS

SEQ ID NO: 80058 - protein, 19 aa, Artificial Sequence
  Description of Artificial Sequence: Synthetic peptide
  Seed: GMDPRMCSLMQGSTLPRRS
GMDPRMYSLLQPSTSPRRS

SEQ ID NO: 80059 - protein, 19 aa, Artificial Sequence
  Description of Artificial Sequence: Synthetic peptide
  Seed: GMDPRMCSLMQGSTLPRRS
GMDPRMYSLLQPSTTPRRS

SEQ ID NO: 80060 - protein, 19 aa, Artificial Sequence
  Description of Artificial Sequence: Synthetic peptide
  Seed: GMDPRMCSLMQGSTLPRRS
GMDPRMYSLLQPSTVPRRS

SEQ ID NO: 80061 - protein, 19 aa, Artificial Sequence
  Description of Artificial Sequence: Synthetic peptide
  Seed: GMDPRMCSLMQGSTLPRRS
GMDPRMYSLLQSSTAPRRS

SEQ ID NO: 80062 - protein, 19 aa, Artificial Sequence
  Description of Artificial Sequence: Synthetic peptide
  Seed: GMDPRMCSLMQGSTLPRRS
GMDPRMYSLLQSSTCPRRS

SEQ ID NO: 80063 - protein, 19 aa, Artificial Sequence
  Description of Artificial Sequence: Synthetic peptide
  Seed: GMDPRMCSLMQGSTLPRRS
GMDPRMYSLLQSSTGPRRS

SEQ ID NO: 80064 - protein, 19 aa, Artificial Sequence
  Description of Artificial Sequence: Synthetic peptide
  Seed: GMDPRMCSLMQGSTLPRRS
GMDPRMYSLLQSSTHPRRS

SEQ ID NO: 80065 - protein, 19 aa, Artificial Sequence
  Description of Artificial Sequence: Synthetic peptide
  Seed: GMDPRMCSLMQGSTLPRRS
GMDPRMYSLLQSSTIPRRS

SEQ ID NO: 80066 - protein, 19 aa, Artificial Sequence
  Description of Artificial Sequence: Synthetic peptide
  Seed: GMDPRMCSLMQGSTLPRRS
GMDPRMYSLLQSSTLPRRS

SEQ ID NO: 80067 - protein, 19 aa, Artificial Sequence
  Description of Artificial Sequence: Synthetic peptide
  Seed: GMDPRMCSLMQGSTLPRRS
GMDPRMYSLLQSSTMPRRS

SEQ ID NO: 80068 - protein, 19 aa, Artificial Sequence
  Description of Artificial Sequence: Synthetic peptide
  Seed: GMDPRMCSLMQGSTLPRRS
GMDPRMYSLLQSSTNPRRS

SEQ ID NO: 80069 - protein, 19 aa, Artificial Sequence
  Description of Artificial Sequence: Synthetic peptide
  Seed: GMDPRMCSLMQGSTLPRRS
GMDPRMYSLLQSSTSPRRS

SEQ ID NO: 80070 - protein, 19 aa, Artificial Sequence
  Description of Artificial Sequence: Synthetic peptide
  Seed: GMDPRMCSLMQGSTLPRRS
GMDPRMYSLLQSSTTPRRS

SEQ ID NO: 80071 - protein, 19 aa, Artificial Sequence
  Description of Artificial Sequence: Synthetic peptide
  Seed: GMDPRMCSLMQGSTLPRRS
GMDPRMYSLLQSSTVPRRS

SEQ ID NO: 80072 - protein, 19 aa, Artificial Sequence
  Description of Artificial Sequence: Synthetic peptide
  Seed: GMDPRMCSLMQGSTLPRRS
GMDPRMYSLLQTSTAPRRS

SEQ ID NO: 80073 - protein, 19 aa, Artificial Sequence
  Description of Artificial Sequence: Synthetic peptide
  Seed: GMDPRMCSLMQGSTLPRRS
GMDPRMYSLLQTSTGPRRS

SEQ ID NO: 80074 - protein, 19 aa, Artificial Sequence
  Description of Artificial Sequence: Synthetic peptide
  Seed: GMDPRMCSLMQGSTLPRRS
GMDPRMYSLLQTSTHPRRS

SEQ ID NO: 80075 - protein, 19 aa, Artificial Sequence
  Description of Artificial Sequence: Synthetic peptide
  Seed: GMDPRMCSLMQGSTLPRRS
GMDPRMYSLLQTSTIPRRS

SEQ ID NO: 80076 - protein, 19 aa, Artificial Sequence
  Description of Artificial Sequence: Synthetic peptide
  Seed: GMDPRMCSLMQGSTLPRRS
GMDPRMYSLLQTSTLPRRS

SEQ ID NO: 80077 - protein, 19 aa, Artificial Sequence
  Description of Artificial Sequence: Synthetic peptide
  Seed: GMDPRMCSLMQGSTLPRRS
GMDPRMYSLLQTSTMPRRS

SEQ ID NO: 80078 - protein, 19 aa, Artificial Sequence
  Description of Artificial Sequence: Synthetic peptide
  Seed: GMDPRMCSLMQGSTLPRRS
GMDPRMYSLLQTSTNPRRS

SEQ ID NO: 80079 - protein, 19 aa, Artificial Sequence
  Description of Artificial Sequence: Synthetic peptide
  Seed: GMDPRMCSLMQGSTLPRRS
GMDPRMYSLLQTSTSPRRS

SEQ ID NO: 80080 - protein, 19 aa, Artificial Sequence
  Description of Artificial Sequence: Synthetic peptide
  Seed: GMDPRMCSLMQGSTLPRRS
GMDPRMYSLLQTSTTPRRS

SEQ ID NO: 80081 - protein, 19 aa, Artificial Sequence
  Description of Artificial Sequence: Synthetic peptide
  Seed: GMDPRMCSLMQGSTLPRRS
GMDPRMYSLLQTSTVPRRS

SEQ ID NO: 80082 - protein, 19 aa, Artificial Sequence
  Description of Artificial Sequence: Synthetic peptide
  Seed: GMDPRMCSLMQGSTLPRRS
GMDPRMYSLLQVSTAPRRS

SEQ ID NO: 80083 - protein, 19 aa, Artificial Sequence
  Description of Artificial Sequence: Synthetic peptide
  Seed: GMDPRMCSLMQGSTLPRRS
GMDPRMYSLLQVSTGPRRS

SEQ ID NO: 80084 - protein, 19 aa, Artificial Sequence
  Description of Artificial Sequence: Synthetic peptide
  Seed: GMDPRMCSLMQGSTLPRRS
GMDPRMYSLLQVSTHPRRS

SEQ ID NO: 80085 - protein, 19 aa, Artificial Sequence
  Description of Artificial Sequence: Synthetic peptide
  Seed: GMDPRMCSLMQGSTLPRRS
GMDPRMYSLLQVSTIPRRS

SEQ ID NO: 80086 - protein, 19 aa, Artificial Sequence
  Description of Artificial Sequence: Synthetic peptide
  Seed: GMDPRMCSLMQGSTLPRRS
GMDPRMYSLLQVSTLPRRS

SEQ ID NO: 80087 - protein, 19 aa, Artificial Sequence
  Description of Artificial Sequence: Synthetic peptide
  Seed: GMDPRMCSLMQGSTLPRRS
GMDPRMYSLLQVSTMPRRS

SEQ ID NO: 80088 - protein, 19 aa, Artificial Sequence
  Description of Artificial Sequence: Synthetic peptide
  Seed: GMDPRMCSLMQGSTLPRRS
GMDPRMYSLLQVSTNPRRS

SEQ ID NO: 80089 - protein, 19 aa, Artificial Sequence
  Description of Artificial Sequence: Synthetic peptide
  Seed: GMDPRMCSLMQGSTLPRRS
GMDPRMYSLLQVSTPPRRS

SEQ ID NO: 80090 - protein, 19 aa, Artificial Sequence
  Description of Artificial Sequence: Synthetic peptide
  Seed: GMDPRMCSLMQGSTLPRRS
GMDPRMYSLLQVSTQPRRS

SEQ ID NO: 80091 - protein, 19 aa, Artificial Sequence
  Description of Artificial Sequence: Synthetic peptide
  Seed: GMDPRMCSLMQGSTLPRRS
GMDPRMYSLLQVSTSPRRS

SEQ ID NO: 80092 - protein, 19 aa, Artificial Sequence
  Description of Artificial Sequence: Synthetic peptide
  Seed: GMDPRMCSLMQGSTLPRRS
GMDPRMYSLLQVSTTPRRS

SEQ ID NO: 80093 - protein, 19 aa, Artificial Sequence
  Description of Artificial Sequence: Synthetic peptide
  Seed: GMDPRMCSLMQGSTLPRRS
GMDPRMYSLLQVSTVPRRS

SEQ ID NO: 80094 - protein, 19 aa, Artificial Sequence
  Description of Artificial Sequence: Synthetic peptide
  Seed: GMDPRMCSLMQGSTLPRRS
GMDPRMYSLMQASTAPRRS

SEQ ID NO: 80095 - protein, 19 aa, Artificial Sequence
  Description of Artificial Sequence: Synthetic peptide
  Seed: GMDPRMCSLMQGSTLPRRS
GMDPRMYSLMQASTCPRRS

SEQ ID NO: 80096 - protein, 19 aa, Artificial Sequence
  Description of Artificial Sequence: Synthetic peptide
  Seed: GMDPRMCSLMQGSTLPRRS
GMDPRMYSLMQASTFPRRS

SEQ ID NO: 80097 - protein, 19 aa, Artificial Sequence
  Description of Artificial Sequence: Synthetic peptide
  Seed: GMDPRMCSLMQGSTLPRRS
GMDPRMYSLMQASTGPRRS

SEQ ID NO: 80098 - protein, 19 aa, Artificial Sequence
  Description of Artificial Sequence: Synthetic peptide
  Seed: GMDPRMCSLMQGSTLPRRS
GMDPRMYSLMQASTHPRRS

SEQ ID NO: 80099 - protein, 19 aa, Artificial Sequence
  Description of Artificial Sequence: Synthetic peptide
  Seed: GMDPRMCSLMQGSTLPRRS
GMDPRMYSLMQASTIPRRS

SEQ ID NO: 80100 - protein, 19 aa, Artificial Sequence
  Description of Artificial Sequence: Synthetic peptide
  Seed: GMDPRMCSLMQGSTLPRRS
GMDPRMYSLMQASTLPRRS

SEQ ID NO: 80101 - protein, 19 aa, Artificial Sequence
  Description of Artificial Sequence: Synthetic peptide
  Seed: GMDPRMCSLMQGSTLPRRS
GMDPRMYSLMQASTMPRRS

SEQ ID NO: 80102 - protein, 19 aa, Artificial Sequence
  Description of Artificial Sequence: Synthetic peptide
  Seed: GMDPRMCSLMQGSTLPRRS
GMDPRMYSLMQASTNPRRS

SEQ ID NO: 80103 - protein, 19 aa, Artificial Sequence
  Description of Artificial Sequence: Synthetic peptide
  Seed: GMDPRMCSLMQGSTLPRRS
GMDPRMYSLMQASTPPRRS

SEQ ID NO: 80104 - protein, 19 aa, Artificial Sequence
  Description of Artificial Sequence: Synthetic peptide
  Seed: GMDPRMCSLMQGSTLPRRS
GMDPRMYSLMQASTQPRRS

SEQ ID NO: 80105 - protein, 19 aa, Artificial Sequence
  Description of Artificial Sequence: Synthetic peptide
  Seed: GMDPRMCSLMQGSTLPRRS
GMDPRMYSLMQASTSPRRS

SEQ ID NO: 80106 - protein, 19 aa, Artificial Sequence
  Description of Artificial Sequence: Synthetic peptide
  Seed: GMDPRMCSLMQGSTLPRRS
GMDPRMYSLMQASTTPRRS

SEQ ID NO: 80107 - protein, 19 aa, Artificial Sequence
  Description of Artificial Sequence: Synthetic peptide
  Seed: GMDPRMCSLMQGSTLPRRS
GMDPRMYSLMQASTVPRRS

SEQ ID NO: 80108 - protein, 19 aa, Artificial Sequence
  Description of Artificial Sequence: Synthetic peptide
  Seed: GMDPRMCSLMQGSTLPRRS
GMDPRMYSLMQGSTAPRRS

SEQ ID NO: 80109 - protein, 19 aa, Artificial Sequence
  Description of Artificial Sequence: Synthetic peptide
  Seed: GMDPRMCSLMQGSTLPRRS
GMDPRMYSLMQGSTFPRRS

SEQ ID NO: 80110 - protein, 19 aa, Artificial Sequence
  Description of Artificial Sequence: Synthetic peptide
  Seed: GMDPRMCSLMQGSTLPRRS
GMDPRMYSLMQGSTGPRRS

SEQ ID NO: 80111 - protein, 19 aa, Artificial Sequence
  Description of Artificial Sequence: Synthetic peptide
  Seed: GMDPRMCSLMQGSTLPRRS
GMDPRMYSLMQGSTIPRRS

SEQ ID NO: 80112 - protein, 19 aa, Artificial Sequence
  Description of Artificial Sequence: Synthetic peptide
  Seed: GMDPRMCSLMQGSTLPRRS
GMDPRMYSLMQGSTLPRRS

SEQ ID NO: 80113 - protein, 19 aa, Artificial Sequence
  Description of Artificial Sequence: Synthetic peptide
  Seed: GMDPRMCSLMQGSTLPRRS
GMDPRMYSLMQGSTMPRRS

SEQ ID NO: 80114 - protein, 19 aa, Artificial Sequence
  Description of Artificial Sequence: Synthetic peptide
  Seed: GMDPRMCSLMQGSTLPRRS
GMDPRMYSLMQGSTNPRRS

SEQ ID NO: 80115 - protein, 19 aa, Artificial Sequence
  Description of Artificial Sequence: Synthetic peptide
  Seed: GMDPRMCSLMQGSTLPRRS
GMDPRMYSLMQGSTSPRRS

SEQ ID NO: 80116 - protein, 19 aa, Artificial Sequence
  Description of Artificial Sequence: Synthetic peptide
  Seed: GMDPRMCSLMQGSTLPRRS
GMDPRMYSLMQGSTTPRRS

SEQ ID NO: 80117 - protein, 19 aa, Artificial Sequence
  Description of Artificial Sequence: Synthetic peptide
  Seed: GMDPRMCSLMQGSTLPRRS
GMDPRMYSLMQGSTVPRRS

SEQ ID NO: 80118 - protein, 19 aa, Artificial Sequence
  Description of Artificial Sequence: Synthetic peptide
  Seed: GMDPRMCSLMQGSTLPRRS
GMDPRMYSLMQISTAPRRS

SEQ ID NO: 80119 - protein, 19 aa, Artificial Sequence
  Description of Artificial Sequence: Synthetic peptide
  Seed: GMDPRMCSLMQGSTLPRRS
GMDPRMYSLMQISTGPRRS

SEQ ID NO: 80120 - protein, 19 aa, Artificial Sequence
  Description of Artificial Sequence: Synthetic peptide
  Seed: GMDPRMCSLMQGSTLPRRS
GMDPRMYSLMQISTHPRRS

SEQ ID NO: 80121 - protein, 19 aa, Artificial Sequence
  Description of Artificial Sequence: Synthetic peptide
  Seed: GMDPRMCSLMQGSTLPRRS
GMDPRMYSLMQISTIPRRS

SEQ ID NO: 80122 - protein, 19 aa, Artificial Sequence
  Description of Artificial Sequence: Synthetic peptide
  Seed: GMDPRMCSLMQGSTLPRRS
GMDPRMYSLMQISTLPRRS

SEQ ID NO: 80123 - protein, 19 aa, Artificial Sequence
  Description of Artificial Sequence: Synthetic peptide
  Seed: GMDPRMCSLMQGSTLPRRS
GMDPRMYSLMQISTMPRRS

SEQ ID NO: 80124 - protein, 19 aa, Artificial Sequence
  Description of Artificial Sequence: Synthetic peptide
  Seed: GMDPRMCSLMQGSTLPRRS
GMDPRMYSLMQISTNPRRS

SEQ ID NO: 80125 - protein, 19 aa, Artificial Sequence
  Description of Artificial Sequence: Synthetic peptide
  Seed: GMDPRMCSLMQGSTLPRRS
GMDPRMYSLMQISTSPRRS

SEQ ID NO: 80126 - protein, 19 aa, Artificial Sequence
  Description of Artificial Sequence: Synthetic peptide
  Seed: GMDPRMCSLMQGSTLPRRS
GMDPRMYSLMQISTTPRRS

SEQ ID NO: 80127 - protein, 19 aa, Artificial Sequence
  Description of Artificial Sequence: Synthetic peptide
  Seed: GMDPRMCSLMQGSTLPRRS
GMDPRMYSLMQISTVPRRS

SEQ ID NO: 80128 - protein, 19 aa, Artificial Sequence
  Description of Artificial Sequence: Synthetic peptide
  Seed: GMDPRMCSLMQGSTLPRRS
GMDPRMYSLMQLSTAPRRS

SEQ ID NO: 80129 - protein, 19 aa, Artificial Sequence
  Description of Artificial Sequence: Synthetic peptide
  Seed: GMDPRMCSLMQGSTLPRRS
GMDPRMYSLMQLSTIPRRS

SEQ ID NO: 80130 - protein, 19 aa, Artificial Sequence
  Description of Artificial Sequence: Synthetic peptide
  Seed: GMDPRMCSLMQGSTLPRRS
GMDPRMYSLMQLSTLPRRS

SEQ ID NO: 80131 - protein, 19 aa, Artificial Sequence
  Description of Artificial Sequence: Synthetic peptide
  Seed: GMDPRMCSLMQGSTLPRRS
GMDPRMYSLMQLSTNPRRS

SEQ ID NO: 80132 - protein, 19 aa, Artificial Sequence
  Description of Artificial Sequence: Synthetic peptide
  Seed: GMDPRMCSLMQGSTLPRRS
GMDPRMYSLMQLSTSPRRS

SEQ ID NO: 80133 - protein, 19 aa, Artificial Sequence
  Description of Artificial Sequence: Synthetic peptide
  Seed: GMDPRMCSLMQGSTLPRRS
GMDPRMYSLMQLSTTPRRS

SEQ ID NO: 80134 - protein, 19 aa, Artificial Sequence
  Description of Artificial Sequence: Synthetic peptide
  Seed: GMDPRMCSLMQGSTLPRRS
GMDPRMYSLMQLSTVPRRS

SEQ ID NO: 80135 - protein, 19 aa, Artificial Sequence
  Description of Artificial Sequence: Synthetic peptide
  Seed: GMDPRMCSLMQGSTLPRRS
GMDPRMYSLMQMSTAPRRS

SEQ ID NO: 80136 - protein, 19 aa, Artificial Sequence
  Description of Artificial Sequence: Synthetic peptide
  Seed: GMDPRMCSLMQGSTLPRRS
GMDPRMYSLMQMSTLPRRS

SEQ ID NO: 80137 - protein, 19 aa, Artificial Sequence
  Description of Artificial Sequence: Synthetic peptide
  Seed: GMDPRMCSLMQGSTLPRRS
GMDPRMYSLMQMSTNPRRS

SEQ ID NO: 80138 - protein, 19 aa, Artificial Sequence
  Description of Artificial Sequence: Synthetic peptide
  Seed: GMDPRMCSLMQGSTLPRRS
GMDPRMYSLMQMSTSPRRS

SEQ ID NO: 80139 - protein, 19 aa, Artificial Sequence
  Description of Artificial Sequence: Synthetic peptide
  Seed: GMDPRMCSLMQGSTLPRRS
GMDPRMYSLMQMSTVPRRS

SEQ ID NO: 80140 - protein, 19 aa, Artificial Sequence
  Description of Artificial Sequence: Synthetic peptide
  Seed: GMDPRMCSLMQGSTLPRRS
GMDPRMYSLMQNSTAPRRS

SEQ ID NO: 80141 - protein, 19 aa, Artificial Sequence
  Description of Artificial Sequence: Synthetic peptide
  Seed: GMDPRMCSLMQGSTLPRRS
GMDPRMYSLMQNSTIPRRS

SEQ ID NO: 80142 - protein, 19 aa, Artificial Sequence
  Description of Artificial Sequence: Synthetic peptide
  Seed: GMDPRMCSLMQGSTLPRRS
GMDPRMYSLMQNSTLPRRS

SEQ ID NO: 80143 - protein, 19 aa, Artificial Sequence
  Description of Artificial Sequence: Synthetic peptide
  Seed: GMDPRMCSLMQGSTLPRRS
GMDPRMYSLMQNSTMPRRS

SEQ ID NO: 80144 - protein, 19 aa, Artificial Sequence
  Description of Artificial Sequence: Synthetic peptide
  Seed: GMDPRMCSLMQGSTLPRRS
GMDPRMYSLMQNSTNPRRS

SEQ ID NO: 80145 - protein, 19 aa, Artificial Sequence
  Description of Artificial Sequence: Synthetic peptide
  Seed: GMDPRMCSLMQGSTLPRRS
GMDPRMYSLMQNSTSPRRS

SEQ ID NO: 80146 - protein, 19 aa, Artificial Sequence
  Description of Artificial Sequence: Synthetic peptide
  Seed: GMDPRMCSLMQGSTLPRRS
GMDPRMYSLMQNSTTPRRS

SEQ ID NO: 80147 - protein, 19 aa, Artificial Sequence
  Description of Artificial Sequence: Synthetic peptide
  Seed: GMDPRMCSLMQGSTLPRRS
GMDPRMYSLMQNSTVPRRS

SEQ ID NO: 80148 - protein, 19 aa, Artificial Sequence
  Description of Artificial Sequence: Synthetic peptide
  Seed: GMDPRMCSLMQGSTLPRRS
GMDPRMYSLMQPSTAPRRS

SEQ ID NO: 80149 - protein, 19 aa, Artificial Sequence
  Description of Artificial Sequence: Synthetic peptide
  Seed: GMDPRMCSLMQGSTLPRRS
GMDPRMYSLMQPSTGPRRS

SEQ ID NO: 80150 - protein, 19 aa, Artificial Sequence
  Description of Artificial Sequence: Synthetic peptide
  Seed: GMDPRMCSLMQGSTLPRRS
GMDPRMYSLMQPSTHPRRS

SEQ ID NO: 80151 - protein, 19 aa, Artificial Sequence
  Description of Artificial Sequence: Synthetic peptide
  Seed: GMDPRMCSLMQGSTLPRRS
GMDPRMYSLMQPSTIPRRS

SEQ ID NO: 80152 - protein, 19 aa, Artificial Sequence
  Description of Artificial Sequence: Synthetic peptide
  Seed: GMDPRMCSLMQGSTLPRRS
GMDPRMYSLMQPSTLPRRS

SEQ ID NO: 80153 - protein, 19 aa, Artificial Sequence
  Description of Artificial Sequence: Synthetic peptide
  Seed: GMDPRMCSLMQGSTLPRRS
GMDPRMYSLMQPSTMPRRS

SEQ ID NO: 80154 - protein, 19 aa, Artificial Sequence
  Description of Artificial Sequence: Synthetic peptide
  Seed: GMDPRMCSLMQGSTLPRRS
GMDPRMYSLMQPSTNPRRS

SEQ ID NO: 80155 - protein, 19 aa, Artificial Sequence
  Description of Artificial Sequence: Synthetic peptide
  Seed: GMDPRMCSLMQGSTLPRRS
GMDPRMYSLMQPSTPPRRS

SEQ ID NO: 80156 - protein, 19 aa, Artificial Sequence
  Description of Artificial Sequence: Synthetic peptide
  Seed: GMDPRMCSLMQGSTLPRRS
GMDPRMYSLMQPSTQPRRS

SEQ ID NO: 80157 - protein, 19 aa, Artificial Sequence
  Description of Artificial Sequence: Synthetic peptide
  Seed: GMDPRMCSLMQGSTLPRRS
GMDPRMYSLMQPSTSPRRS

SEQ ID NO: 80158 - protein, 19 aa, Artificial Sequence
  Description of Artificial Sequence: Synthetic peptide
  Seed: GMDPRMCSLMQGSTLPRRS
GMDPRMYSLMQPSTTPRRS

SEQ ID NO: 80159 - protein, 19 aa, Artificial Sequence
  Description of Artificial Sequence: Synthetic peptide
  Seed: GMDPRMCSLMQGSTLPRRS
GMDPRMYSLMQPSTVPRRS

SEQ ID NO: 80160 - protein, 19 aa, Artificial Sequence
  Description of Artificial Sequence: Synthetic peptide
  Seed: GMDPRMCSLMQGSTLPRRS
GMDPRMYSLMQSSTAPRRS

SEQ ID NO: 80161 - protein, 19 aa, Artificial Sequence
  Description of Artificial Sequence: Synthetic peptide
  Seed: GMDPRMCSLMQGSTLPRRS
GMDPRMYSLMQSSTGPRRS

SEQ ID NO: 80162 - protein, 19 aa, Artificial Sequence
  Description of Artificial Sequence: Synthetic peptide
  Seed: GMDPRMCSLMQGSTLPRRS
GMDPRMYSLMQSSTHPRRS

SEQ ID NO: 80163 - protein, 19 aa, Artificial Sequence
  Description of Artificial Sequence: Synthetic peptide
  Seed: GMDPRMCSLMQGSTLPRRS
GMDPRMYSLMQSSTIPRRS

SEQ ID NO: 80164 - protein, 19 aa, Artificial Sequence
  Description of Artificial Sequence: Synthetic peptide
  Seed: GMDPRMCSLMQGSTLPRRS
GMDPRMYSLMQSSTLPRRS

SEQ ID NO: 80165 - protein, 19 aa, Artificial Sequence
  Description of Artificial Sequence: Synthetic peptide
  Seed: GMDPRMCSLMQGSTLPRRS
GMDPRMYSLMQSSTMPRRS

SEQ ID NO: 80166 - protein, 19 aa, Artificial Sequence
  Description of Artificial Sequence: Synthetic peptide
  Seed: GMDPRMCSLMQGSTLPRRS
GMDPRMYSLMQSSTNPRRS

SEQ ID NO: 80167 - protein, 19 aa, Artificial Sequence
  Description of Artificial Sequence: Synthetic peptide
  Seed: GMDPRMCSLMQGSTLPRRS
GMDPRMYSLMQSSTQPRRS

SEQ ID NO: 80168 - protein, 19 aa, Artificial Sequence
  Description of Artificial Sequence: Synthetic peptide
  Seed: GMDPRMCSLMQGSTLPRRS
GMDPRMYSLMQSSTSPRRS

SEQ ID NO: 80169 - protein, 19 aa, Artificial Sequence
  Description of Artificial Sequence: Synthetic peptide
  Seed: GMDPRMCSLMQGSTLPRRS
GMDPRMYSLMQSSTTPRRS

SEQ ID NO: 80170 - protein, 19 aa, Artificial Sequence
  Description of Artificial Sequence: Synthetic peptide
  Seed: GMDPRMCSLMQGSTLPRRS
GMDPRMYSLMQSSTVPRRS

SEQ ID NO: 80171 - protein, 19 aa, Artificial Sequence
  Description of Artificial Sequence: Synthetic peptide
  Seed: GMDPRMCSLMQGSTLPRRS
GMDPRMYSLMQTSTAPRRS

SEQ ID NO: 80172 - protein, 19 aa, Artificial Sequence
  Description of Artificial Sequence: Synthetic peptide
  Seed: GMDPRMCSLMQGSTLPRRS
GMDPRMYSLMQTSTHPRRS

SEQ ID NO: 80173 - protein, 19 aa, Artificial Sequence
  Description of Artificial Sequence: Synthetic peptide
  Seed: GMDPRMCSLMQGSTLPRRS
GMDPRMYSLMQTSTIPRRS

SEQ ID NO: 80174 - protein, 19 aa, Artificial Sequence
  Description of Artificial Sequence: Synthetic peptide
  Seed: GMDPRMCSLMQGSTLPRRS
GMDPRMYSLMQTSTLPRRS

SEQ ID NO: 80175 - protein, 19 aa, Artificial Sequence
  Description of Artificial Sequence: Synthetic peptide
  Seed: GMDPRMCSLMQGSTLPRRS
GMDPRMYSLMQTSTMPRRS

SEQ ID NO: 80176 - protein, 19 aa, Artificial Sequence
  Description of Artificial Sequence: Synthetic peptide
  Seed: GMDPRMCSLMQGSTLPRRS
GMDPRMYSLMQTSTNPRRS

SEQ ID NO: 80177 - protein, 19 aa, Artificial Sequence
  Description of Artificial Sequence: Synthetic peptide
  Seed: GMDPRMCSLMQGSTLPRRS
GMDPRMYSLMQTSTSPRRS

SEQ ID NO: 80178 - protein, 19 aa, Artificial Sequence
  Description of Artificial Sequence: Synthetic peptide
  Seed: GMDPRMCSLMQGSTLPRRS
GMDPRMYSLMQTSTTPRRS

SEQ ID NO: 80179 - protein, 19 aa, Artificial Sequence
  Description of Artificial Sequence: Synthetic peptide
  Seed: GMDPRMCSLMQGSTLPRRS
GMDPRMYSLMQTSTVPRRS

SEQ ID NO: 80180 - protein, 19 aa, Artificial Sequence
  Description of Artificial Sequence: Synthetic peptide
  Seed: GMDPRMCSLMQGSTLPRRS
GMDPRMYSLMQVSTAPRRS

SEQ ID NO: 80181 - protein, 19 aa, Artificial Sequence
  Description of Artificial Sequence: Synthetic peptide
  Seed: GMDPRMCSLMQGSTLPRRS
GMDPRMYSLMQVSTGPRRS

SEQ ID NO: 80182 - protein, 19 aa, Artificial Sequence
  Description of Artificial Sequence: Synthetic peptide
  Seed: GMDPRMCSLMQGSTLPRRS
GMDPRMYSLMQVSTHPRRS

SEQ ID NO: 80183 - protein, 19 aa, Artificial Sequence
  Description of Artificial Sequence: Synthetic peptide
  Seed: GMDPRMCSLMQGSTLPRRS
GMDPRMYSLMQVSTIPRRS

SEQ ID NO: 80184 - protein, 19 aa, Artificial Sequence
  Description of Artificial Sequence: Synthetic peptide
  Seed: GMDPRMCSLMQGSTLPRRS
GMDPRMYSLMQVSTLPRRS

SEQ ID NO: 80185 - protein, 19 aa, Artificial Sequence
  Description of Artificial Sequence: Synthetic peptide
  Seed: GMDPRMCSLMQGSTLPRRS
GMDPRMYSLMQVSTMPRRS

SEQ ID NO: 80186 - protein, 19 aa, Artificial Sequence
  Description of Artificial Sequence: Synthetic peptide
  Seed: GMDPRMCSLMQGSTLPRRS
GMDPRMYSLMQVSTNPRRS

SEQ ID NO: 80187 - protein, 19 aa, Artificial Sequence
  Description of Artificial Sequence: Synthetic peptide
  Seed: GMDPRMCSLMQGSTLPRRS
GMDPRMYSLMQVSTPPRRS

SEQ ID NO: 80188 - protein, 19 aa, Artificial Sequence
  Description of Artificial Sequence: Synthetic peptide
  Seed: GMDPRMCSLMQGSTLPRRS
GMDPRMYSLMQVSTQPRRS

SEQ ID NO: 80189 - protein, 19 aa, Artificial Sequence
  Description of Artificial Sequence: Synthetic peptide
  Seed: GMDPRMCSLMQGSTLPRRS
GMDPRMYSLMQVSTSPRRS

SEQ ID NO: 80190 - protein, 19 aa, Artificial Sequence
  Description of Artificial Sequence: Synthetic peptide
  Seed: GMDPRMCSLMQGSTLPRRS
GMDPRMYSLMQVSTTPRRS

SEQ ID NO: 80191 - protein, 19 aa, Artificial Sequence
  Description of Artificial Sequence: Synthetic peptide
  Seed: GMDPRMCSLMQGSTLPRRS
GMDPRMYSLMQVSTVPRRS

SEQ ID NO: 80192 - protein, 19 aa, Artificial Sequence
  Description of Artificial Sequence: Synthetic peptide
  Seed: GMDPRMCSLMQGSTLPRRS
GMDPRMYSLNQASTLPRRS

SEQ ID NO: 80193 - protein, 19 aa, Artificial Sequence
  Description of Artificial Sequence: Synthetic peptide
  Seed: GMDPRMCSLMQGSTLPRRS
GMDPRMYSLQQASTAPRRS

SEQ ID NO: 80194 - protein, 19 aa, Artificial Sequence
  Description of Artificial Sequence: Synthetic peptide
  Seed: GMDPRMCSLMQGSTLPRRS
GMDPRMYSLQQASTIPRRS

SEQ ID NO: 80195 - protein, 19 aa, Artificial Sequence
  Description of Artificial Sequence: Synthetic peptide
  Seed: GMDPRMCSLMQGSTLPRRS
GMDPRMYSLQQASTLPRRS

SEQ ID NO: 80196 - protein, 19 aa, Artificial Sequence
  Description of Artificial Sequence: Synthetic peptide
  Seed: GMDPRMCSLMQGSTLPRRS
GMDPRMYSLQQASTMPRRS

SEQ ID NO: 80197 - protein, 19 aa, Artificial Sequence
  Description of Artificial Sequence: Synthetic peptide
  Seed: GMDPRMCSLMQGSTLPRRS
GMDPRMYSLQQASTSPRRS

SEQ ID NO: 80198 - protein, 19 aa, Artificial Sequence
  Description of Artificial Sequence: Synthetic peptide
  Seed: GMDPRMCSLMQGSTLPRRS
GMDPRMYSLQQASTTPRRS

SEQ ID NO: 80199 - protein, 19 aa, Artificial Sequence
  Description of Artificial Sequence: Synthetic peptide
  Seed: GMDPRMCSLMQGSTLPRRS
GMDPRMYSLQQASTVPRRS

SEQ ID NO: 80200 - protein, 19 aa, Artificial Sequence
  Description of Artificial Sequence: Synthetic peptide
  Seed: GMDPRMCSLMQGSTLPRRS
GMDPRMYSLQQGSTAPRRS

SEQ ID NO: 80201 - protein, 19 aa, Artificial Sequence
  Description of Artificial Sequence: Synthetic peptide
  Seed: GMDPRMCSLMQGSTLPRRS
GMDPRMYSLQQGSTIPRRS

SEQ ID NO: 80202 - protein, 19 aa, Artificial Sequence
  Description of Artificial Sequence: Synthetic peptide
  Seed: GMDPRMCSLMQGSTLPRRS
GMDPRMYSLQQGSTLPRRS

SEQ ID NO: 80203 - protein, 19 aa, Artificial Sequence
  Description of Artificial Sequence: Synthetic peptide
  Seed: GMDPRMCSLMQGSTLPRRS
GMDPRMYSLQQGSTMPRRS

SEQ ID NO: 80204 - protein, 19 aa, Artificial Sequence
  Description of Artificial Sequence: Synthetic peptide
  Seed: GMDPRMCSLMQGSTLPRRS
GMDPRMYSLQQGSTVPRRS

SEQ ID NO: 80205 - protein, 19 aa, Artificial Sequence
  Description of Artificial Sequence: Synthetic peptide
  Seed: GMDPRMCSLMQGSTLPRRS
GMDPRMYSLQQPSTIPRRS

SEQ ID NO: 80206 - protein, 19 aa, Artificial Sequence
  Description of Artificial Sequence: Synthetic peptide
  Seed: GMDPRMCSLMQGSTLPRRS
GMDPRMYSLQQPSTLPRRS

SEQ ID NO: 80207 - protein, 19 aa, Artificial Sequence
  Description of Artificial Sequence: Synthetic peptide
  Seed: GMDPRMCSLMQGSTLPRRS
GMDPRMYSLQQPSTVPRRS

SEQ ID NO: 80208 - protein, 19 aa, Artificial Sequence
  Description of Artificial Sequence: Synthetic peptide
  Seed: GMDPRMCSLMQGSTLPRRS
GMDPRMYSLQQSSTAPRRS

SEQ ID NO: 80209 - protein, 19 aa, Artificial Sequence
  Description of Artificial Sequence: Synthetic peptide
  Seed: GMDPRMCSLMQGSTLPRRS
GMDPRMYSLQQSSTIPRRS

SEQ ID NO: 80210 - protein, 19 aa, Artificial Sequence
  Description of Artificial Sequence: Synthetic peptide
  Seed: GMDPRMCSLMQGSTLPRRS
GMDPRMYSLQQSSTLPRRS

SEQ ID NO: 80211 - protein, 19 aa, Artificial Sequence
  Description of Artificial Sequence: Synthetic peptide
  Seed: GMDPRMCSLMQGSTLPRRS
GMDPRMYSLQQSSTVPRRS

SEQ ID NO: 80212 - protein, 19 aa, Artificial Sequence
  Description of Artificial Sequence: Synthetic peptide
  Seed: GMDPRMCSLMQGSTLPRRS
GMDPRMYSLQQVSTAPRRS

SEQ ID NO: 80213 - protein, 19 aa, Artificial Sequence
  Description of Artificial Sequence: Synthetic peptide
  Seed: GMDPRMCSLMQGSTLPRRS
GMDPRMYSLSQASTAPRRS

SEQ ID NO: 80214 - protein, 19 aa, Artificial Sequence
  Description of Artificial Sequence: Synthetic peptide
  Seed: GMDPRMCSLMQGSTLPRRS
GMDPRMYSLSQASTIPRRS

SEQ ID NO: 80215 - protein, 19 aa, Artificial Sequence
  Description of Artificial Sequence: Synthetic peptide
  Seed: GMDPRMCSLMQGSTLPRRS
GMDPRMYSLSQASTLPRRS

SEQ ID NO: 80216 - protein, 19 aa, Artificial Sequence
  Description of Artificial Sequence: Synthetic peptide
  Seed: GMDPRMCSLMQGSTLPRRS
GMDPRMYSLSQASTVPRRS

SEQ ID NO: 80217 - protein, 19 aa, Artificial Sequence
  Description of Artificial Sequence: Synthetic peptide
  Seed: GMDPRMCSLMQGSTLPRRS
GMDPRMYSLSQGSTIPRRS

SEQ ID NO: 80218 - protein, 19 aa, Artificial Sequence
  Description of Artificial Sequence: Synthetic peptide
  Seed: GMDPRMCSLMQGSTLPRRS
GMDPRMYSLSQGSTLPRRS

SEQ ID NO: 80219 - protein, 19 aa, Artificial Sequence
  Description of Artificial Sequence: Synthetic peptide
  Seed: GMDPRMCSLMQGSTLPRRS
GMDPRMYSLSQGSTVPRRS

SEQ ID NO: 80220 - protein, 19 aa, Artificial Sequence
  Description of Artificial Sequence: Synthetic peptide
  Seed: GMDPRMCSLMQGSTLPRRS
GMDPRMYSLSQSSTIPRRS

SEQ ID NO: 80221 - protein, 19 aa, Artificial Sequence
  Description of Artificial Sequence: Synthetic peptide
  Seed: GMDPRMCSLMQGSTLPRRS
GMDPRMYSLSQSSTLPRRS

SEQ ID NO: 80222 - protein, 19 aa, Artificial Sequence
  Description of Artificial Sequence: Synthetic peptide
  Seed: GMDPRMCSLMQGSTLPRRS
GMDPRMYSLSQSSTVPRRS

SEQ ID NO: 80223 - protein, 19 aa, Artificial Sequence
  Description of Artificial Sequence: Synthetic peptide
  Seed: GMDPRMCSLMQGSTLPRRS
GMDPRMYSLTQASTIPRRS

SEQ ID NO: 80224 - protein, 19 aa, Artificial Sequence
  Description of Artificial Sequence: Synthetic peptide
  Seed: GMDPRMCSLMQGSTLPRRS
GMDPRMYSLTQASTLPRRS

SEQ ID NO: 80225 - protein, 19 aa, Artificial Sequence
  Description of Artificial Sequence: Synthetic peptide
  Seed: GMDPRMCSLMQGSTLPRRS
GMDPRMYSLTQASTVPRRS

SEQ ID NO: 80226 - protein, 19 aa, Artificial Sequence
  Description of Artificial Sequence: Synthetic peptide
  Seed: GMDPRMCSLMQGSTLPRRS
GMDPRMYSLVQASTAPRRS

SEQ ID NO: 80227 - protein, 19 aa, Artificial Sequence
  Description of Artificial Sequence: Synthetic peptide
  Seed: GMDPRMCSLMQGSTLPRRS
GMDPRMYSLVQASTIPRRS

SEQ ID NO: 80228 - protein, 19 aa, Artificial Sequence
  Description of Artificial Sequence: Synthetic peptide
  Seed: GMDPRMCSLMQGSTLPRRS
GMDPRMYSLVQASTLPRRS

SEQ ID NO: 80229 - protein, 19 aa, Artificial Sequence
  Description of Artificial Sequence: Synthetic peptide
  Seed: GMDPRMCSLMQGSTLPRRS
GMDPRMYSLVQASTMPRRS

SEQ ID NO: 80230 - protein, 19 aa, Artificial Sequence
  Description of Artificial Sequence: Synthetic peptide
  Seed: GMDPRMCSLMQGSTLPRRS
GMDPRMYSLVQASTNPRRS

SEQ ID NO: 80231 - protein, 19 aa, Artificial Sequence
  Description of Artificial Sequence: Synthetic peptide
  Seed: GMDPRMCSLMQGSTLPRRS
GMDPRMYSLVQASTSPRRS

SEQ ID NO: 80232 - protein, 19 aa, Artificial Sequence
  Description of Artificial Sequence: Synthetic peptide
  Seed: GMDPRMCSLMQGSTLPRRS
GMDPRMYSLVQASTTPRRS

SEQ ID NO: 80233 - protein, 19 aa, Artificial Sequence
  Description of Artificial Sequence: Synthetic peptide
  Seed: GMDPRMCSLMQGSTLPRRS
GMDPRMYSLVQASTVPRRS

SEQ ID NO: 80234 - protein, 19 aa, Artificial Sequence
  Description of Artificial Sequence: Synthetic peptide
  Seed: GMDPRMCSLMQGSTLPRRS
GMDPRMYSLVQGSTAPRRS

SEQ ID NO: 80235 - protein, 19 aa, Artificial Sequence
  Description of Artificial Sequence: Synthetic peptide
  Seed: GMDPRMCSLMQGSTLPRRS
GMDPRMYSLVQGSTIPRRS

SEQ ID NO: 80236 - protein, 19 aa, Artificial Sequence
  Description of Artificial Sequence: Synthetic peptide
  Seed: GMDPRMCSLMQGSTLPRRS
GMDPRMYSLVQGSTLPRRS

SEQ ID NO: 80237 - protein, 19 aa, Artificial Sequence
  Description of Artificial Sequence: Synthetic peptide
  Seed: GMDPRMCSLMQGSTLPRRS
GMDPRMYSLVQGSTMPRRS

SEQ ID NO: 80238 - protein, 19 aa, Artificial Sequence
  Description of Artificial Sequence: Synthetic peptide
  Seed: GMDPRMCSLMQGSTLPRRS
GMDPRMYSLVQGSTTPRRS

SEQ ID NO: 80239 - protein, 19 aa, Artificial Sequence
  Description of Artificial Sequence: Synthetic peptide
  Seed: GMDPRMCSLMQGSTLPRRS
GMDPRMYSLVQGSTVPRRS

SEQ ID NO: 80240 - protein, 19 aa, Artificial Sequence
  Description of Artificial Sequence: Synthetic peptide
  Seed: GMDPRMCSLMQGSTLPRRS
GMDPRMYSLVQISTAPRRS

SEQ ID NO: 80241 - protein, 19 aa, Artificial Sequence
  Description of Artificial Sequence: Synthetic peptide
  Seed: GMDPRMCSLMQGSTLPRRS
GMDPRMYSLVQISTNPRRS

SEQ ID NO: 80242 - protein, 19 aa, Artificial Sequence
  Description of Artificial Sequence: Synthetic peptide
  Seed: GMDPRMCSLMQGSTLPRRS
GMDPRMYSLVQISTSPRRS

SEQ ID NO: 80243 - protein, 19 aa, Artificial Sequence
  Description of Artificial Sequence: Synthetic peptide
  Seed: GMDPRMCSLMQGSTLPRRS
GMDPRMYSLVQPSTAPRRS

SEQ ID NO: 80244 - protein, 19 aa, Artificial Sequence
  Description of Artificial Sequence: Synthetic peptide
  Seed: GMDPRMCSLMQGSTLPRRS
GMDPRMYSLVQPSTIPRRS

SEQ ID NO: 80245 - protein, 19 aa, Artificial Sequence
  Description of Artificial Sequence: Synthetic peptide
  Seed: GMDPRMCSLMQGSTLPRRS
GMDPRMYSLVQPSTLPRRS

SEQ ID NO: 80246 - protein, 19 aa, Artificial Sequence
  Description of Artificial Sequence: Synthetic peptide
  Seed: GMDPRMCSLMQGSTLPRRS
GMDPRMYSLVQPSTNPRRS

SEQ ID NO: 80247 - protein, 19 aa, Artificial Sequence
  Description of Artificial Sequence: Synthetic peptide
  Seed: GMDPRMCSLMQGSTLPRRS
GMDPRMYSLVQPSTSPRRS

SEQ ID NO: 80248 - protein, 19 aa, Artificial Sequence
  Description of Artificial Sequence: Synthetic peptide
  Seed: GMDPRMCSLMQGSTLPRRS
GMDPRMYSLVQPSTTPRRS

SEQ ID NO: 80249 - protein, 19 aa, Artificial Sequence
  Description of Artificial Sequence: Synthetic peptide
  Seed: GMDPRMCSLMQGSTLPRRS
GMDPRMYSLVQPSTVPRRS

SEQ ID NO: 80250 - protein, 19 aa, Artificial Sequence
  Description of Artificial Sequence: Synthetic peptide
  Seed: GMDPRMCSLMQGSTLPRRS
GMDPRMYSLVQSSTAPRRS

SEQ ID NO: 80251 - protein, 19 aa, Artificial Sequence
  Description of Artificial Sequence: Synthetic peptide
  Seed: GMDPRMCSLMQGSTLPRRS
GMDPRMYSLVQSSTIPRRS

SEQ ID NO: 80252 - protein, 19 aa, Artificial Sequence
  Description of Artificial Sequence: Synthetic peptide
  Seed: GMDPRMCSLMQGSTLPRRS
GMDPRMYSLVQSSTLPRRS

SEQ ID NO: 80253 - protein, 19 aa, Artificial Sequence
  Description of Artificial Sequence: Synthetic peptide
  Seed: GMDPRMCSLMQGSTLPRRS
GMDPRMYSLVQSSTNPRRS

SEQ ID NO: 80254 - protein, 19 aa, Artificial Sequence
  Description of Artificial Sequence: Synthetic peptide
  Seed: GMDPRMCSLMQGSTLPRRS
GMDPRMYSLVQSSTSPRRS

SEQ ID NO: 80255 - protein, 19 aa, Artificial Sequence
  Description of Artificial Sequence: Synthetic peptide
  Seed: GMDPRMCSLMQGSTLPRRS
GMDPRMYSLVQSSTTPRRS

SEQ ID NO: 80256 - protein, 19 aa, Artificial Sequence
  Description of Artificial Sequence: Synthetic peptide
  Seed: GMDPRMCSLMQGSTLPRRS
GMDPRMYSLVQSSTVPRRS

SEQ ID NO: 80257 - protein, 19 aa, Artificial Sequence
  Description of Artificial Sequence: Synthetic peptide
  Seed: GMDPRMCSLMQGSTLPRRS
GMDPRMYSLVQTSTAPRRS

SEQ ID NO: 80258 - protein, 19 aa, Artificial Sequence
  Description of Artificial Sequence: Synthetic peptide
  Seed: GMDPRMCSLMQGSTLPRRS
GMDPRMYSLVQTSTIPRRS

SEQ ID NO: 80259 - protein, 19 aa, Artificial Sequence
  Description of Artificial Sequence: Synthetic peptide
  Seed: GMDPRMCSLMQGSTLPRRS
GMDPRMYSLVQTSTLPRRS

SEQ ID NO: 80260 - protein, 19 aa, Artificial Sequence
  Description of Artificial Sequence: Synthetic peptide
  Seed: GMDPRMCSLMQGSTLPRRS
GMDPRMYSLVQTSTNPRRS

SEQ ID NO: 80261 - protein, 19 aa, Artificial Sequence
  Description of Artificial Sequence: Synthetic peptide
  Seed: GMDPRMCSLMQGSTLPRRS
GMDPRMYSLVQTSTSPRRS

SEQ ID NO: 80262 - protein, 19 aa, Artificial Sequence
  Description of Artificial Sequence: Synthetic peptide
  Seed: GMDPRMCSLMQGSTLPRRS
GMDPRMYSLVQTSTTPRRS

SEQ ID NO: 80263 - protein, 19 aa, Artificial Sequence
  Description of Artificial Sequence: Synthetic peptide
  Seed: GMDPRMCSLMQGSTLPRRS
GMDPRMYSLVQTSTVPRRS

SEQ ID NO: 80264 - protein, 19 aa, Artificial Sequence
  Description of Artificial Sequence: Synthetic peptide
  Seed: GMDPRMCSLMQGSTLPRRS
GMDPRMYSLVQVSTAPRRS

SEQ ID NO: 80265 - protein, 19 aa, Artificial Sequence
  Description of Artificial Sequence: Synthetic peptide
  Seed: GMDPRMCSLMQGSTLPRRS
GMDPRMYSLVQVSTNPRRS

SEQ ID NO: 80266 - protein, 19 aa, Artificial Sequence
  Description of Artificial Sequence: Synthetic peptide
  Seed: GMDPRMCSLMQGSTLPRRS
GMDPRMYSLVQVSTSPRRS

SEQ ID NO: 80267 - protein, 19 aa, Artificial Sequence
  Description of Artificial Sequence: Synthetic peptide
  Seed: GMDPRMCSLMQGSTLPRRS
GMDPRMYSLVQVSTTPRRS

SEQ ID NO: 80268 - protein, 19 aa, Artificial Sequence
  Description of Artificial Sequence: Synthetic peptide
  Seed: GMDPRMCSLMQGSTLPRRS
GMDPRMYSLVQVSTVPRRS

SEQ ID NO: 80269 - protein, 19 aa, Artificial Sequence
  Description of Artificial Sequence: Synthetic peptide
  Seed: GMDPRMCSLMQGSTLPRRS
GMDPRMCSFMQASFLPIRS

SEQ ID NO: 80270 - protein, 19 aa, Artificial Sequence
  Description of Artificial Sequence: Synthetic peptide
  Seed: GMDPRMCSLMQGSTLPRRS
GMDPRMCSFMQASFLPLRS

SEQ ID NO: 80271 - protein, 19 aa, Artificial Sequence
  Description of Artificial Sequence: Synthetic peptide
  Seed: GMDPRMCSLMQGSTLPRRS
GMDPRMCSFMQASFLPVRS

SEQ ID NO: 80272 - protein, 19 aa, Artificial Sequence
  Description of Artificial Sequence: Synthetic peptide
  Seed: GMDPRMCSLMQGSTLPRRS
GMDPRMCSFMQESFLPIRS

SEQ ID NO: 80273 - protein, 19 aa, Artificial Sequence
  Description of Artificial Sequence: Synthetic peptide
  Seed: GMDPRMCSLMQGSTLPRRS
GMDPRMCSFMQESFLPLRS

SEQ ID NO: 80274 - protein, 19 aa, Artificial Sequence
  Description of Artificial Sequence: Synthetic peptide
  Seed: GMDPRMCSLMQGSTLPRRS
GMDPRMCSFMQESFLPVRS

SEQ ID NO: 80275 - protein, 19 aa, Artificial Sequence
  Description of Artificial Sequence: Synthetic peptide
  Seed: GMDPRMCSLMQGSTLPRRS
GMDPRMCSFMQISFLPLRS

SEQ ID NO: 80276 - protein, 19 aa, Artificial Sequence
  Description of Artificial Sequence: Synthetic peptide
  Seed: GMDPRMCSLMQGSTLPRRS
GMDPRMCSFMQISFLPVRS

SEQ ID NO: 80277 - protein, 19 aa, Artificial Sequence
  Description of Artificial Sequence: Synthetic peptide
  Seed: GMDPRMCSLMQGSTLPRRS
GMDPRMCSFMQLSFLPVRS

SEQ ID NO: 80278 - protein, 19 aa, Artificial Sequence
  Description of Artificial Sequence: Synthetic peptide
  Seed: GMDPRMCSLMQGSTLPRRS
GMDPRMCSFMQQSFLPLRS

SEQ ID NO: 80279 - protein, 19 aa, Artificial Sequence
  Description of Artificial Sequence: Synthetic peptide
  Seed: GMDPRMCSLMQGSTLPRRS
GMDPRMCSFMQSSFLPIRS

SEQ ID NO: 80280 - protein, 19 aa, Artificial Sequence
  Description of Artificial Sequence: Synthetic peptide
  Seed: GMDPRMCSLMQGSTLPRRS
GMDPRMCSFMQSSFLPLRS

SEQ ID NO: 80281 - protein, 19 aa, Artificial Sequence
  Description of Artificial Sequence: Synthetic peptide
  Seed: GMDPRMCSLMQGSTLPRRS
GMDPRMCSFMQSSFLPMRS

SEQ ID NO: 80282 - protein, 19 aa, Artificial Sequence
  Description of Artificial Sequence: Synthetic peptide
  Seed: GMDPRMCSLMQGSTLPRRS
GMDPRMCSFMQSSFLPVRS

SEQ ID NO: 80283 - protein, 19 aa, Artificial Sequence
  Description of Artificial Sequence: Synthetic peptide
  Seed: GMDPRMCSLMQGSTLPRRS
GMDPRMCSFMQTSFLPFRS

SEQ ID NO: 80284 - protein, 19 aa, Artificial Sequence
  Description of Artificial Sequence: Synthetic peptide
  Seed: GMDPRMCSLMQGSTLPRRS
GMDPRMCSFMQTSFLPIRS

SEQ ID NO: 80285 - protein, 19 aa, Artificial Sequence
  Description of Artificial Sequence: Synthetic peptide
  Seed: GMDPRMCSLMQGSTLPRRS
GMDPRMCSFMQTSFLPLRS

SEQ ID NO: 80286 - protein, 19 aa, Artificial Sequence
  Description of Artificial Sequence: Synthetic peptide
  Seed: GMDPRMCSLMQGSTLPRRS
GMDPRMCSFMQTSFLPMRS

SEQ ID NO: 80287 - protein, 19 aa, Artificial Sequence
  Description of Artificial Sequence: Synthetic peptide
  Seed: GMDPRMCSLMQGSTLPRRS
GMDPRMCSFMQTSFLPVRS

SEQ ID NO: 80288 - protein, 19 aa, Artificial Sequence
  Description of Artificial Sequence: Synthetic peptide
  Seed: GMDPRMCSLMQGSTLPRRS
GMDPRMCSFMQVSFLPLRS

SEQ ID NO: 80289 - protein, 19 aa, Artificial Sequence
  Description of Artificial Sequence: Synthetic peptide
  Seed: GMDPRMCSLMQGSTLPRRS
GMDPRMCSFMQVSFLPVRS

SEQ ID NO: 80290 - protein, 19 aa, Artificial Sequence
  Description of Artificial Sequence: Synthetic peptide
  Seed: GMDPRMCSLMQGSTLPRRS
GMDPRMCSIMQTSFLPLRS

SEQ ID NO: 80291 - protein, 19 aa, Artificial Sequence
  Description of Artificial Sequence: Synthetic peptide
  Seed: GMDPRMCSLMQGSTLPRRS
GMDPRMCSIMQTSFLPVRS

SEQ ID NO: 80292 - protein, 19 aa, Artificial Sequence
  Description of Artificial Sequence: Synthetic peptide
  Seed: GMDPRMCSLMQGSTLPRRS
GMDPRMCSLMQTSFLPLRS

SEQ ID NO: 80293 - protein, 19 aa, Artificial Sequence
  Description of Artificial Sequence: Synthetic peptide
  Seed: GMDPRMCSLMQGSTLPRRS
GMDPRMCSLMQTSFLPVRS

SEQ ID NO: 80294 - protein, 20 aa, Artificial Sequence
  Description of Artificial Sequence: Synthetic peptide
  Seed: GMDPRMCSLMQGSTLPRRSG
GMDPRMCSLLQASTIPRRSG

SEQ ID NO: 80295 - protein, 20 aa, Artificial Sequence
  Description of Artificial Sequence: Synthetic peptide
  Seed: GMDPRMCSLMQGSTLPRRSG
GMDPRMCSLLQASTVPRRSG

SEQ ID NO: 80296 - protein, 20 aa, Artificial Sequence
  Description of Artificial Sequence: Synthetic peptide
  Seed: GMDPRMCSLMQGSTLPRRSG
GMDPRMCSLMQASTIPRRSG

SEQ ID NO: 80297 - protein, 20 aa, Artificial Sequence
  Description of Artificial Sequence: Synthetic peptide
  Seed: GMDPRMCSLMQGSTLPRRSG
GMDPRMCSLMQASTVPRRSG

SEQ ID NO: 80298 - protein, 20 aa, Artificial Sequence
  Description of Artificial Sequence: Synthetic peptide
  Seed: GMDPRMCSLMQGSTLPRRSG
GMDPRMFSLAQASTAPRRSG

SEQ ID NO: 80299 - protein, 20 aa, Artificial Sequence
  Description of Artificial Sequence: Synthetic peptide
  Seed: GMDPRMCSLMQGSTLPRRSG
GMDPRMFSLAQASTCPRRSG

SEQ ID NO: 80300 - protein, 20 aa, Artificial Sequence
  Description of Artificial Sequence: Synthetic peptide
  Seed: GMDPRMCSLMQGSTLPRRSG
GMDPRMFSLAQASTDPRRSG

SEQ ID NO: 80301 - protein, 20 aa, Artificial Sequence
  Description of Artificial Sequence: Synthetic peptide
  Seed: GMDPRMCSLMQGSTLPRRSG
GMDPRMFSLAQASTEPRRSG

SEQ ID NO: 80302 - protein, 20 aa, Artificial Sequence
  Description of Artificial Sequence: Synthetic peptide
  Seed: GMDPRMCSLMQGSTLPRRSG
GMDPRMFSLAQASTFPRRSG

SEQ ID NO: 80303 - protein, 20 aa, Artificial Sequence
  Description of Artificial Sequence: Synthetic peptide
  Seed: GMDPRMCSLMQGSTLPRRSG
GMDPRMFSLAQASTGPRRSG

SEQ ID NO: 80304 - protein, 20 aa, Artificial Sequence
  Description of Artificial Sequence: Synthetic peptide
  Seed: GMDPRMCSLMQGSTLPRRSG
GMDPRMFSLAQASTHPRRSG

SEQ ID NO: 80305 - protein, 20 aa, Artificial Sequence
  Description of Artificial Sequence: Synthetic peptide
  Seed: GMDPRMCSLMQGSTLPRRSG
GMDPRMFSLAQASTIPRRSG

SEQ ID NO: 80306 - protein, 20 aa, Artificial Sequence
  Description of Artificial Sequence: Synthetic peptide
  Seed: GMDPRMCSLMQGSTLPRRSG
GMDPRMFSLAQASTLPRRSG

SEQ ID NO: 80307 - protein, 20 aa, Artificial Sequence
  Description of Artificial Sequence: Synthetic peptide
  Seed: GMDPRMCSLMQGSTLPRRSG
GMDPRMFSLAQASTMPRRSG

SEQ ID NO: 80308 - protein, 20 aa, Artificial Sequence
  Description of Artificial Sequence: Synthetic peptide
  Seed: GMDPRMCSLMQGSTLPRRSG
GMDPRMFSLAQASTNPRRSG

SEQ ID NO: 80309 - protein, 20 aa, Artificial Sequence
  Description of Artificial Sequence: Synthetic peptide
  Seed: GMDPRMCSLMQGSTLPRRSG
GMDPRMFSLAQASTPPRRSG

SEQ ID NO: 80310 - protein, 20 aa, Artificial Sequence
  Description of Artificial Sequence: Synthetic peptide
  Seed: GMDPRMCSLMQGSTLPRRSG
GMDPRMFSLAQASTQPRRSG

SEQ ID NO: 80311 - protein, 20 aa, Artificial Sequence
  Description of Artificial Sequence: Synthetic peptide
  Seed: GMDPRMCSLMQGSTLPRRSG
GMDPRMFSLAQASTSPRRSG

SEQ ID NO: 80312 - protein, 20 aa, Artificial Sequence
  Description of Artificial Sequence: Synthetic peptide
  Seed: GMDPRMCSLMQGSTLPRRSG
GMDPRMFSLAQASTTPRRSG

SEQ ID NO: 80313 - protein, 20 aa, Artificial Sequence
  Description of Artificial Sequence: Synthetic peptide
  Seed: GMDPRMCSLMQGSTLPRRSG
GMDPRMFSLAQASTVPRRSG

SEQ ID NO: 80314 - protein, 20 aa, Artificial Sequence
  Description of Artificial Sequence: Synthetic peptide
  Seed: GMDPRMCSLMQGSTLPRRSG
GMDPRMFSLAQASTWPRRSG

SEQ ID NO: 80315 - protein, 20 aa, Artificial Sequence
  Description of Artificial Sequence: Synthetic peptide
  Seed: GMDPRMCSLMQGSTLPRRSG
GMDPRMFSLAQASTYPRRSG

SEQ ID NO: 80316 - protein, 20 aa, Artificial Sequence
  Description of Artificial Sequence: Synthetic peptide
  Seed: GMDPRMCSLMQGSTLPRRSG
GMDPRMFSLAQGSTAPRRSG

SEQ ID NO: 80317 - protein, 20 aa, Artificial Sequence
  Description of Artificial Sequence: Synthetic peptide
  Seed: GMDPRMCSLMQGSTLPRRSG
GMDPRMFSLAQGSTCPRRSG

SEQ ID NO: 80318 - protein, 20 aa, Artificial Sequence
  Description of Artificial Sequence: Synthetic peptide
  Seed: GMDPRMCSLMQGSTLPRRSG
GMDPRMFSLAQGSTFPRRSG

SEQ ID NO: 80319 - protein, 20 aa, Artificial Sequence
  Description of Artificial Sequence: Synthetic peptide
  Seed: GMDPRMCSLMQGSTLPRRSG
GMDPRMFSLAQGSTGPRRSG

SEQ ID NO: 80320 - protein, 20 aa, Artificial Sequence
  Description of Artificial Sequence: Synthetic peptide
  Seed: GMDPRMCSLMQGSTLPRRSG
GMDPRMFSLAQGSTIPRRSG

SEQ ID NO: 80321 - protein, 20 aa, Artificial Sequence
  Description of Artificial Sequence: Synthetic peptide
  Seed: GMDPRMCSLMQGSTLPRRSG
GMDPRMFSLAQGSTLPRRSG

SEQ ID NO: 80322 - protein, 20 aa, Artificial Sequence
  Description of Artificial Sequence: Synthetic peptide
  Seed: GMDPRMCSLMQGSTLPRRSG
GMDPRMFSLAQGSTMPRRSG

SEQ ID NO: 80323 - protein, 20 aa, Artificial Sequence
  Description of Artificial Sequence: Synthetic peptide
  Seed: GMDPRMCSLMQGSTLPRRSG
GMDPRMFSLAQGSTNPRRSG

SEQ ID NO: 80324 - protein, 20 aa, Artificial Sequence
  Description of Artificial Sequence: Synthetic peptide
  Seed: GMDPRMCSLMQGSTLPRRSG
GMDPRMFSLAQGSTSPRRSG

SEQ ID NO: 80325 - protein, 20 aa, Artificial Sequence
  Description of Artificial Sequence: Synthetic peptide
  Seed: GMDPRMCSLMQGSTLPRRSG
GMDPRMFSLAQGSTTPRRSG

SEQ ID NO: 80326 - protein, 20 aa, Artificial Sequence
  Description of Artificial Sequence: Synthetic peptide
  Seed: GMDPRMCSLMQGSTLPRRSG
GMDPRMFSLAQGSTVPRRSG

SEQ ID NO: 80327 - protein, 20 aa, Artificial Sequence
  Description of Artificial Sequence: Synthetic peptide
  Seed: GMDPRMCSLMQGSTLPRRSG
GMDPRMFSLAQISTAPRRSG

SEQ ID NO: 80328 - protein, 20 aa, Artificial Sequence
  Description of Artificial Sequence: Synthetic peptide
  Seed: GMDPRMCSLMQGSTLPRRSG
GMDPRMFSLAQISTGPRRSG

SEQ ID NO: 80329 - protein, 20 aa, Artificial Sequence
  Description of Artificial Sequence: Synthetic peptide
  Seed: GMDPRMCSLMQGSTLPRRSG
GMDPRMFSLAQISTHPRRSG

SEQ ID NO: 80330 - protein, 20 aa, Artificial Sequence
  Description of Artificial Sequence: Synthetic peptide
  Seed: GMDPRMCSLMQGSTLPRRSG
GMDPRMFSLAQISTIPRRSG

SEQ ID NO: 80331 - protein, 20 aa, Artificial Sequence
  Description of Artificial Sequence: Synthetic peptide
  Seed: GMDPRMCSLMQGSTLPRRSG
GMDPRMFSLAQISTLPRRSG

SEQ ID NO: 80332 - protein, 20 aa, Artificial Sequence
  Description of Artificial Sequence: Synthetic peptide
  Seed: GMDPRMCSLMQGSTLPRRSG
GMDPRMFSLAQISTMPRRSG

SEQ ID NO: 80333 - protein, 20 aa, Artificial Sequence
  Description of Artificial Sequence: Synthetic peptide
  Seed: GMDPRMCSLMQGSTLPRRSG
GMDPRMFSLAQISTNPRRSG

SEQ ID NO: 80334 - protein, 20 aa, Artificial Sequence
  Description of Artificial Sequence: Synthetic peptide
  Seed: GMDPRMCSLMQGSTLPRRSG
GMDPRMFSLAQISTQPRRSG

SEQ ID NO: 80335 - protein, 20 aa, Artificial Sequence
  Description of Artificial Sequence: Synthetic peptide
  Seed: GMDPRMCSLMQGSTLPRRSG
GMDPRMFSLAQISTSPRRSG

SEQ ID NO: 80336 - protein, 20 aa, Artificial Sequence
  Description of Artificial Sequence: Synthetic peptide
  Seed: GMDPRMCSLMQGSTLPRRSG
GMDPRMFSLAQISTTPRRSG

SEQ ID NO: 80337 - protein, 20 aa, Artificial Sequence
  Description of Artificial Sequence: Synthetic peptide
  Seed: GMDPRMCSLMQGSTLPRRSG
GMDPRMFSLAQISTVPRRSG

SEQ ID NO: 80338 - protein, 20 aa, Artificial Sequence
  Description of Artificial Sequence: Synthetic peptide
  Seed: GMDPRMCSLMQGSTLPRRSG
GMDPRMFSLAQLSTAPRRSG

SEQ ID NO: 80339 - protein, 20 aa, Artificial Sequence
  Description of Artificial Sequence: Synthetic peptide
  Seed: GMDPRMCSLMQGSTLPRRSG
GMDPRMFSLAQLSTIPRRSG

SEQ ID NO: 80340 - protein, 20 aa, Artificial Sequence
  Description of Artificial Sequence: Synthetic peptide
  Seed: GMDPRMCSLMQGSTLPRRSG
GMDPRMFSLAQLSTLPRRSG

SEQ ID NO: 80341 - protein, 20 aa, Artificial Sequence
  Description of Artificial Sequence: Synthetic peptide
  Seed: GMDPRMCSLMQGSTLPRRSG
GMDPRMFSLAQLSTMPRRSG

SEQ ID NO: 80342 - protein, 20 aa, Artificial Sequence
  Description of Artificial Sequence: Synthetic peptide
  Seed: GMDPRMCSLMQGSTLPRRSG
GMDPRMFSLAQLSTNPRRSG

SEQ ID NO: 80343 - protein, 20 aa, Artificial Sequence
  Description of Artificial Sequence: Synthetic peptide
  Seed: GMDPRMCSLMQGSTLPRRSG
GMDPRMFSLAQLSTSPRRSG

SEQ ID NO: 80344 - protein, 20 aa, Artificial Sequence
  Description of Artificial Sequence: Synthetic peptide
  Seed: GMDPRMCSLMQGSTLPRRSG
GMDPRMFSLAQLSTTPRRSG

SEQ ID NO: 80345 - protein, 20 aa, Artificial Sequence
  Description of Artificial Sequence: Synthetic peptide
  Seed: GMDPRMCSLMQGSTLPRRSG
GMDPRMFSLAQLSTVPRRSG

SEQ ID NO: 80346 - protein, 20 aa, Artificial Sequence
  Description of Artificial Sequence: Synthetic peptide
  Seed: GMDPRMCSLMQGSTLPRRSG
GMDPRMFSLAQMSTAPRRSG

SEQ ID NO: 80347 - protein, 20 aa, Artificial Sequence
  Description of Artificial Sequence: Synthetic peptide
  Seed: GMDPRMCSLMQGSTLPRRSG
GMDPRMFSLAQMSTIPRRSG

SEQ ID NO: 80348 - protein, 20 aa, Artificial Sequence
  Description of Artificial Sequence: Synthetic peptide
  Seed: GMDPRMCSLMQGSTLPRRSG
GMDPRMFSLAQMSTLPRRSG

SEQ ID NO: 80349 - protein, 20 aa, Artificial Sequence
  Description of Artificial Sequence: Synthetic peptide
  Seed: GMDPRMCSLMQGSTLPRRSG
GMDPRMFSLAQMSTNPRRSG

SEQ ID NO: 80350 - protein, 20 aa, Artificial Sequence
  Description of Artificial Sequence: Synthetic peptide
  Seed: GMDPRMCSLMQGSTLPRRSG
GMDPRMFSLAQMSTSPRRSG

SEQ ID NO: 80351 - protein, 20 aa, Artificial Sequence
  Description of Artificial Sequence: Synthetic peptide
  Seed: GMDPRMCSLMQGSTLPRRSG
GMDPRMFSLAQMSTTPRRSG

SEQ ID NO: 80352 - protein, 20 aa, Artificial Sequence
  Description of Artificial Sequence: Synthetic peptide
  Seed: GMDPRMCSLMQGSTLPRRSG
GMDPRMFSLAQMSTVPRRSG

SEQ ID NO: 80353 - protein, 20 aa, Artificial Sequence
  Description of Artificial Sequence: Synthetic peptide
  Seed: GMDPRMCSLMQGSTLPRRSG
GMDPRMFSLAQNSTAPRRSG

SEQ ID NO: 80354 - protein, 20 aa, Artificial Sequence
  Description of Artificial Sequence: Synthetic peptide
  Seed: GMDPRMCSLMQGSTLPRRSG
GMDPRMFSLAQNSTGPRRSG

SEQ ID NO: 80355 - protein, 20 aa, Artificial Sequence
  Description of Artificial Sequence: Synthetic peptide
  Seed: GMDPRMCSLMQGSTLPRRSG
GMDPRMFSLAQNSTIPRRSG

SEQ ID NO: 80356 - protein, 20 aa, Artificial Sequence
  Description of Artificial Sequence: Synthetic peptide
  Seed: GMDPRMCSLMQGSTLPRRSG
GMDPRMFSLAQNSTLPRRSG

SEQ ID NO: 80357 - protein, 20 aa, Artificial Sequence
  Description of Artificial Sequence: Synthetic peptide
  Seed: GMDPRMCSLMQGSTLPRRSG
GMDPRMFSLAQNSTMPRRSG

SEQ ID NO: 80358 - protein, 20 aa, Artificial Sequence
  Description of Artificial Sequence: Synthetic peptide
  Seed: GMDPRMCSLMQGSTLPRRSG
GMDPRMFSLAQNSTNPRRSG

SEQ ID NO: 80359 - protein, 20 aa, Artificial Sequence
  Description of Artificial Sequence: Synthetic peptide
  Seed: GMDPRMCSLMQGSTLPRRSG
GMDPRMFSLAQNSTSPRRSG

SEQ ID NO: 80360 - protein, 20 aa, Artificial Sequence
  Description of Artificial Sequence: Synthetic peptide
  Seed: GMDPRMCSLMQGSTLPRRSG
GMDPRMFSLAQNSTTPRRSG

SEQ ID NO: 80361 - protein, 20 aa, Artificial Sequence
  Description of Artificial Sequence: Synthetic peptide
  Seed: GMDPRMCSLMQGSTLPRRSG
GMDPRMFSLAQNSTVPRRSG

SEQ ID NO: 80362 - protein, 20 aa, Artificial Sequence
  Description of Artificial Sequence: Synthetic peptide
  Seed: GMDPRMCSLMQGSTLPRRSG
GMDPRMFSLAQPSTAPRRSG

SEQ ID NO: 80363 - protein, 20 aa, Artificial Sequence
  Description of Artificial Sequence: Synthetic peptide
  Seed: GMDPRMCSLMQGSTLPRRSG
GMDPRMFSLAQPSTFPRRSG

SEQ ID NO: 80364 - protein, 20 aa, Artificial Sequence
  Description of Artificial Sequence: Synthetic peptide
  Seed: GMDPRMCSLMQGSTLPRRSG
GMDPRMFSLAQPSTGPRRSG

SEQ ID NO: 80365 - protein, 20 aa, Artificial Sequence
  Description of Artificial Sequence: Synthetic peptide
  Seed: GMDPRMCSLMQGSTLPRRSG
GMDPRMFSLAQPSTHPRRSG

SEQ ID NO: 80366 - protein, 20 aa, Artificial Sequence
  Description of Artificial Sequence: Synthetic peptide
  Seed: GMDPRMCSLMQGSTLPRRSG
GMDPRMFSLAQPSTIPRRSG

SEQ ID NO: 80367 - protein, 20 aa, Artificial Sequence
  Description of Artificial Sequence: Synthetic peptide
  Seed: GMDPRMCSLMQGSTLPRRSG
GMDPRMFSLAQPSTLPRRSG

SEQ ID NO: 80368 - protein, 20 aa, Artificial Sequence
  Description of Artificial Sequence: Synthetic peptide
  Seed: GMDPRMCSLMQGSTLPRRSG
GMDPRMFSLAQPSTMPRRSG

SEQ ID NO: 80369 - protein, 20 aa, Artificial Sequence
  Description of Artificial Sequence: Synthetic peptide
  Seed: GMDPRMCSLMQGSTLPRRSG
GMDPRMFSLAQPSTNPRRSG

SEQ ID NO: 80370 - protein, 20 aa, Artificial Sequence
  Description of Artificial Sequence: Synthetic peptide
  Seed: GMDPRMCSLMQGSTLPRRSG
GMDPRMFSLAQPSTQPRRSG

SEQ ID NO: 80371 - protein, 20 aa, Artificial Sequence
  Description of Artificial Sequence: Synthetic peptide
  Seed: GMDPRMCSLMQGSTLPRRSG
GMDPRMFSLAQPSTSPRRSG

SEQ ID NO: 80372 - protein, 20 aa, Artificial Sequence
  Description of Artificial Sequence: Synthetic peptide
  Seed: GMDPRMCSLMQGSTLPRRSG
GMDPRMFSLAQPSTTPRRSG

SEQ ID NO: 80373 - protein, 20 aa, Artificial Sequence
  Description of Artificial Sequence: Synthetic peptide
  Seed: GMDPRMCSLMQGSTLPRRSG
GMDPRMFSLAQPSTVPRRSG

SEQ ID NO: 80374 - protein, 20 aa, Artificial Sequence
  Description of Artificial Sequence: Synthetic peptide
  Seed: GMDPRMCSLMQGSTLPRRSG
GMDPRMFSLAQSSTAPRRSG

SEQ ID NO: 80375 - protein, 20 aa, Artificial Sequence
  Description of Artificial Sequence: Synthetic peptide
  Seed: GMDPRMCSLMQGSTLPRRSG
GMDPRMFSLAQSSTFPRRSG

SEQ ID NO: 80376 - protein, 20 aa, Artificial Sequence
  Description of Artificial Sequence: Synthetic peptide
  Seed: GMDPRMCSLMQGSTLPRRSG
GMDPRMFSLAQSSTGPRRSG

SEQ ID NO: 80377 - protein, 20 aa, Artificial Sequence
  Description of Artificial Sequence: Synthetic peptide
  Seed: GMDPRMCSLMQGSTLPRRSG
GMDPRMFSLAQSSTHPRRSG

SEQ ID NO: 80378 - protein, 20 aa, Artificial Sequence
  Description of Artificial Sequence: Synthetic peptide
  Seed: GMDPRMCSLMQGSTLPRRSG
GMDPRMFSLAQSSTIPRRSG

SEQ ID NO: 80379 - protein, 20 aa, Artificial Sequence
  Description of Artificial Sequence: Synthetic peptide
  Seed: GMDPRMCSLMQGSTLPRRSG
GMDPRMFSLAQSSTLPRRSG

SEQ ID NO: 80380 - protein, 20 aa, Artificial Sequence
  Description of Artificial Sequence: Synthetic peptide
  Seed: GMDPRMCSLMQGSTLPRRSG
GMDPRMFSLAQSSTMPRRSG

SEQ ID NO: 80381 - protein, 20 aa, Artificial Sequence
  Description of Artificial Sequence: Synthetic peptide
  Seed: GMDPRMCSLMQGSTLPRRSG
GMDPRMFSLAQSSTNPRRSG

SEQ ID NO: 80382 - protein, 20 aa, Artificial Sequence
  Description of Artificial Sequence: Synthetic peptide
  Seed: GMDPRMCSLMQGSTLPRRSG
GMDPRMFSLAQSSTQPRRSG

SEQ ID NO: 80383 - protein, 20 aa, Artificial Sequence
  Description of Artificial Sequence: Synthetic peptide
  Seed: GMDPRMCSLMQGSTLPRRSG
GMDPRMFSLAQSSTSPRRSG

SEQ ID NO: 80384 - protein, 20 aa, Artificial Sequence
  Description of Artificial Sequence: Synthetic peptide
  Seed: GMDPRMCSLMQGSTLPRRSG
GMDPRMFSLAQSSTTPRRSG

SEQ ID NO: 80385 - protein, 20 aa, Artificial Sequence
  Description of Artificial Sequence: Synthetic peptide
  Seed: GMDPRMCSLMQGSTLPRRSG
GMDPRMFSLAQSSTVPRRSG

SEQ ID NO: 80386 - protein, 20 aa, Artificial Sequence
  Description of Artificial Sequence: Synthetic peptide
  Seed: GMDPRMCSLMQGSTLPRRSG
GMDPRMFSLAQTSTAPRRSG

SEQ ID NO: 80387 - protein, 20 aa, Artificial Sequence
  Description of Artificial Sequence: Synthetic peptide
  Seed: GMDPRMCSLMQGSTLPRRSG
GMDPRMFSLAQTSTGPRRSG

SEQ ID NO: 80388 - protein, 20 aa, Artificial Sequence
  Description of Artificial Sequence: Synthetic peptide
  Seed: GMDPRMCSLMQGSTLPRRSG
GMDPRMFSLAQTSTHPRRSG

SEQ ID NO: 80389 - protein, 20 aa, Artificial Sequence
  Description of Artificial Sequence: Synthetic peptide
  Seed: GMDPRMCSLMQGSTLPRRSG
GMDPRMFSLAQTSTIPRRSG

SEQ ID NO: 80390 - protein, 20 aa, Artificial Sequence
  Description of Artificial Sequence: Synthetic peptide
  Seed: GMDPRMCSLMQGSTLPRRSG
GMDPRMFSLAQTSTLPRRSG

SEQ ID NO: 80391 - protein, 20 aa, Artificial Sequence
  Description of Artificial Sequence: Synthetic peptide
  Seed: GMDPRMCSLMQGSTLPRRSG
GMDPRMFSLAQTSTMPRRSG

SEQ ID NO: 80392 - protein, 20 aa, Artificial Sequence
  Description of Artificial Sequence: Synthetic peptide
  Seed: GMDPRMCSLMQGSTLPRRSG
GMDPRMFSLAQTSTNPRRSG

SEQ ID NO: 80393 - protein, 20 aa, Artificial Sequence
  Description of Artificial Sequence: Synthetic peptide
  Seed: GMDPRMCSLMQGSTLPRRSG
GMDPRMFSLAQTSTQPRRSG

SEQ ID NO: 80394 - protein, 20 aa, Artificial Sequence
  Description of Artificial Sequence: Synthetic peptide
  Seed: GMDPRMCSLMQGSTLPRRSG
GMDPRMFSLAQTSTSPRRSG

SEQ ID NO: 80395 - protein, 20 aa, Artificial Sequence
  Description of Artificial Sequence: Synthetic peptide
  Seed: GMDPRMCSLMQGSTLPRRSG
GMDPRMFSLAQTSTTPRRSG

SEQ ID NO: 80396 - protein, 20 aa, Artificial Sequence
  Description of Artificial Sequence: Synthetic peptide
  Seed: GMDPRMCSLMQGSTLPRRSG
GMDPRMFSLAQTSTVPRRSG

SEQ ID NO: 80397 - protein, 20 aa, Artificial Sequence
  Description of Artificial Sequence: Synthetic peptide
  Seed: GMDPRMCSLMQGSTLPRRSG
GMDPRMFSLAQVSTAPRRSG

SEQ ID NO: 80398 - protein, 20 aa, Artificial Sequence
  Description of Artificial Sequence: Synthetic peptide
  Seed: GMDPRMCSLMQGSTLPRRSG
GMDPRMFSLAQVSTDPRRSG

SEQ ID NO: 80399 - protein, 20 aa, Artificial Sequence
  Description of Artificial Sequence: Synthetic peptide
  Seed: GMDPRMCSLMQGSTLPRRSG
GMDPRMFSLAQVSTGPRRSG

SEQ ID NO: 80400 - protein, 20 aa, Artificial Sequence
  Description of Artificial Sequence: Synthetic peptide
  Seed: GMDPRMCSLMQGSTLPRRSG
GMDPRMFSLAQVSTHPRRSG

SEQ ID NO: 80401 - protein, 20 aa, Artificial Sequence
  Description of Artificial Sequence: Synthetic peptide
  Seed: GMDPRMCSLMQGSTLPRRSG
GMDPRMFSLAQVSTIPRRSG

SEQ ID NO: 80402 - protein, 20 aa, Artificial Sequence
  Description of Artificial Sequence: Synthetic peptide
  Seed: GMDPRMCSLMQGSTLPRRSG
GMDPRMFSLAQVSTLPRRSG

SEQ ID NO: 80403 - protein, 20 aa, Artificial Sequence
  Description of Artificial Sequence: Synthetic peptide
  Seed: GMDPRMCSLMQGSTLPRRSG
GMDPRMFSLAQVSTMPRRSG

SEQ ID NO: 80404 - protein, 20 aa, Artificial Sequence
  Description of Artificial Sequence: Synthetic peptide
  Seed: GMDPRMCSLMQGSTLPRRSG
GMDPRMFSLAQVSTNPRRSG

SEQ ID NO: 80405 - protein, 20 aa, Artificial Sequence
  Description of Artificial Sequence: Synthetic peptide
  Seed: GMDPRMCSLMQGSTLPRRSG
GMDPRMFSLAQVSTQPRRSG

SEQ ID NO: 80406 - protein, 20 aa, Artificial Sequence
  Description of Artificial Sequence: Synthetic peptide
  Seed: GMDPRMCSLMQGSTLPRRSG
GMDPRMFSLAQVSTSPRRSG

SEQ ID NO: 80407 - protein, 20 aa, Artificial Sequence
  Description of Artificial Sequence: Synthetic peptide
  Seed: GMDPRMCSLMQGSTLPRRSG
GMDPRMFSLAQVSTTPRRSG

SEQ ID NO: 80408 - protein, 20 aa, Artificial Sequence
  Description of Artificial Sequence: Synthetic peptide
  Seed: GMDPRMCSLMQGSTLPRRSG
GMDPRMFSLAQVSTVPRRSG

SEQ ID NO: 80409 - protein, 20 aa, Artificial Sequence
  Description of Artificial Sequence: Synthetic peptide
  Seed: GMDPRMCSLMQGSTLPRRSG
GMDPRMFSLCQASTAPRRSG

SEQ ID NO: 80410 - protein, 20 aa, Artificial Sequence
  Description of Artificial Sequence: Synthetic peptide
  Seed: GMDPRMCSLMQGSTLPRRSG
GMDPRMFSLCQASTIPRRSG

SEQ ID NO: 80411 - protein, 20 aa, Artificial Sequence
  Description of Artificial Sequence: Synthetic peptide
  Seed: GMDPRMCSLMQGSTLPRRSG
GMDPRMFSLCQASTLPRRSG

SEQ ID NO: 80412 - protein, 20 aa, Artificial Sequence
  Description of Artificial Sequence: Synthetic peptide
  Seed: GMDPRMCSLMQGSTLPRRSG
GMDPRMFSLCQASTVPRRSG

SEQ ID NO: 80413 - protein, 20 aa, Artificial Sequence
  Description of Artificial Sequence: Synthetic peptide
  Seed: GMDPRMCSLMQGSTLPRRSG
GMDPRMFSLCQGSTLPRRSG

SEQ ID NO: 80414 - protein, 20 aa, Artificial Sequence
  Description of Artificial Sequence: Synthetic peptide
  Seed: GMDPRMCSLMQGSTLPRRSG
GMDPRMFSLCQGSTVPRRSG

SEQ ID NO: 80415 - protein, 20 aa, Artificial Sequence
  Description of Artificial Sequence: Synthetic peptide
  Seed: GMDPRMCSLMQGSTLPRRSG
GMDPRMFSLCQSSTVPRRSG

SEQ ID NO: 80416 - protein, 20 aa, Artificial Sequence
  Description of Artificial Sequence: Synthetic peptide
  Seed: GMDPRMCSLMQGSTLPRRSG
GMDPRMFSLEQASTAPRRSG

SEQ ID NO: 80417 - protein, 20 aa, Artificial Sequence
  Description of Artificial Sequence: Synthetic peptide
  Seed: GMDPRMCSLMQGSTLPRRSG
GMDPRMFSLEQASTIPRRSG

SEQ ID NO: 80418 - protein, 20 aa, Artificial Sequence
  Description of Artificial Sequence: Synthetic peptide
  Seed: GMDPRMCSLMQGSTLPRRSG
GMDPRMFSLEQASTLPRRSG

SEQ ID NO: 80419 - protein, 20 aa, Artificial Sequence
  Description of Artificial Sequence: Synthetic peptide
  Seed: GMDPRMCSLMQGSTLPRRSG
GMDPRMFSLEQASTMPRRSG

SEQ ID NO: 80420 - protein, 20 aa, Artificial Sequence
  Description of Artificial Sequence: Synthetic peptide
  Seed: GMDPRMCSLMQGSTLPRRSG
GMDPRMFSLEQASTNPRRSG

SEQ ID NO: 80421 - protein, 20 aa, Artificial Sequence
  Description of Artificial Sequence: Synthetic peptide
  Seed: GMDPRMCSLMQGSTLPRRSG
GMDPRMFSLEQASTSPRRSG

SEQ ID NO: 80422 - protein, 20 aa, Artificial Sequence
  Description of Artificial Sequence: Synthetic peptide
  Seed: GMDPRMCSLMQGSTLPRRSG
GMDPRMFSLEQASTTPRRSG

SEQ ID NO: 80423 - protein, 20 aa, Artificial Sequence
  Description of Artificial Sequence: Synthetic peptide
  Seed: GMDPRMCSLMQGSTLPRRSG
GMDPRMFSLEQASTVPRRSG

SEQ ID NO: 80424 - protein, 20 aa, Artificial Sequence
  Description of Artificial Sequence: Synthetic peptide
  Seed: GMDPRMCSLMQGSTLPRRSG
GMDPRMFSLEQGSTAPRRSG

SEQ ID NO: 80425 - protein, 20 aa, Artificial Sequence
  Description of Artificial Sequence: Synthetic peptide
  Seed: GMDPRMCSLMQGSTLPRRSG
GMDPRMFSLEQGSTIPRRSG

SEQ ID NO: 80426 - protein, 20 aa, Artificial Sequence
  Description of Artificial Sequence: Synthetic peptide
  Seed: GMDPRMCSLMQGSTLPRRSG
GMDPRMFSLEQGSTLPRRSG

SEQ ID NO: 80427 - protein, 20 aa, Artificial Sequence
  Description of Artificial Sequence: Synthetic peptide
  Seed: GMDPRMCSLMQGSTLPRRSG
GMDPRMFSLEQGSTMPRRSG

SEQ ID NO: 80428 - protein, 20 aa, Artificial Sequence
  Description of Artificial Sequence: Synthetic peptide
  Seed: GMDPRMCSLMQGSTLPRRSG
GMDPRMFSLEQGSTVPRRSG

SEQ ID NO: 80429 - protein, 20 aa, Artificial Sequence
  Description of Artificial Sequence: Synthetic peptide
  Seed: GMDPRMCSLMQGSTLPRRSG
GMDPRMFSLEQNSTLPRRSG

SEQ ID NO: 80430 - protein, 20 aa, Artificial Sequence
  Description of Artificial Sequence: Synthetic peptide
  Seed: GMDPRMCSLMQGSTLPRRSG
GMDPRMFSLEQNSTVPRRSG

SEQ ID NO: 80431 - protein, 20 aa, Artificial Sequence
  Description of Artificial Sequence: Synthetic peptide
  Seed: GMDPRMCSLMQGSTLPRRSG
GMDPRMFSLEQPSTAPRRSG

SEQ ID NO: 80432 - protein, 20 aa, Artificial Sequence
  Description of Artificial Sequence: Synthetic peptide
  Seed: GMDPRMCSLMQGSTLPRRSG
GMDPRMFSLEQPSTIPRRSG

SEQ ID NO: 80433 - protein, 20 aa, Artificial Sequence
  Description of Artificial Sequence: Synthetic peptide
  Seed: GMDPRMCSLMQGSTLPRRSG
GMDPRMFSLEQPSTLPRRSG

SEQ ID NO: 80434 - protein, 20 aa, Artificial Sequence
  Description of Artificial Sequence: Synthetic peptide
  Seed: GMDPRMCSLMQGSTLPRRSG
GMDPRMFSLEQPSTSPRRSG

SEQ ID NO: 80435 - protein, 20 aa, Artificial Sequence
  Description of Artificial Sequence: Synthetic peptide
  Seed: GMDPRMCSLMQGSTLPRRSG
GMDPRMFSLEQPSTVPRRSG

SEQ ID NO: 80436 - protein, 20 aa, Artificial Sequence
  Description of Artificial Sequence: Synthetic peptide
  Seed: GMDPRMCSLMQGSTLPRRSG
GMDPRMFSLEQSSTAPRRSG

SEQ ID NO: 80437 - protein, 20 aa, Artificial Sequence
  Description of Artificial Sequence: Synthetic peptide
  Seed: GMDPRMCSLMQGSTLPRRSG
GMDPRMFSLEQSSTIPRRSG

SEQ ID NO: 80438 - protein, 20 aa, Artificial Sequence
  Description of Artificial Sequence: Synthetic peptide
  Seed: GMDPRMCSLMQGSTLPRRSG
GMDPRMFSLEQSSTLPRRSG

SEQ ID NO: 80439 - protein, 20 aa, Artificial Sequence
  Description of Artificial Sequence: Synthetic peptide
  Seed: GMDPRMCSLMQGSTLPRRSG
GMDPRMFSLEQSSTSPRRSG

SEQ ID NO: 80440 - protein, 20 aa, Artificial Sequence
  Description of Artificial Sequence: Synthetic peptide
  Seed: GMDPRMCSLMQGSTLPRRSG
GMDPRMFSLEQSSTVPRRSG

SEQ ID NO: 80441 - protein, 20 aa, Artificial Sequence
  Description of Artificial Sequence: Synthetic peptide
  Seed: GMDPRMCSLMQGSTLPRRSG
GMDPRMFSLEQTSTAPRRSG

SEQ ID NO: 80442 - protein, 20 aa, Artificial Sequence
  Description of Artificial Sequence: Synthetic peptide
  Seed: GMDPRMCSLMQGSTLPRRSG
GMDPRMFSLEQVSTAPRRSG

SEQ ID NO: 80443 - protein, 20 aa, Artificial Sequence
  Description of Artificial Sequence: Synthetic peptide
  Seed: GMDPRMCSLMQGSTLPRRSG
GMDPRMFSLEQVSTNPRRSG

SEQ ID NO: 80444 - protein, 20 aa, Artificial Sequence
  Description of Artificial Sequence: Synthetic peptide
  Seed: GMDPRMCSLMQGSTLPRRSG
GMDPRMFSLEQVSTSPRRSG

SEQ ID NO: 80445 - protein, 20 aa, Artificial Sequence
  Description of Artificial Sequence: Synthetic peptide
  Seed: GMDPRMCSLMQGSTLPRRSG
GMDPRMFSLFQASTAPRRSG

SEQ ID NO: 80446 - protein, 20 aa, Artificial Sequence
  Description of Artificial Sequence: Synthetic peptide
  Seed: GMDPRMCSLMQGSTLPRRSG
GMDPRMFSLFQASTGPRRSG

SEQ ID NO: 80447 - protein, 20 aa, Artificial Sequence
  Description of Artificial Sequence: Synthetic peptide
  Seed: GMDPRMCSLMQGSTLPRRSG
GMDPRMFSLFQASTHPRRSG

SEQ ID NO: 80448 - protein, 20 aa, Artificial Sequence
  Description of Artificial Sequence: Synthetic peptide
  Seed: GMDPRMCSLMQGSTLPRRSG
GMDPRMFSLFQASTIPRRSG

SEQ ID NO: 80449 - protein, 20 aa, Artificial Sequence
  Description of Artificial Sequence: Synthetic peptide
  Seed: GMDPRMCSLMQGSTLPRRSG
GMDPRMFSLFQASTLPRRSG

SEQ ID NO: 80450 - protein, 20 aa, Artificial Sequence
  Description of Artificial Sequence: Synthetic peptide
  Seed: GMDPRMCSLMQGSTLPRRSG
GMDPRMFSLFQASTMPRRSG

SEQ ID NO: 80451 - protein, 20 aa, Artificial Sequence
  Description of Artificial Sequence: Synthetic peptide
  Seed: GMDPRMCSLMQGSTLPRRSG
GMDPRMFSLFQASTNPRRSG

SEQ ID NO: 80452 - protein, 20 aa, Artificial Sequence
  Description of Artificial Sequence: Synthetic peptide
  Seed: GMDPRMCSLMQGSTLPRRSG
GMDPRMFSLFQASTSPRRSG

SEQ ID NO: 80453 - protein, 20 aa, Artificial Sequence
  Description of Artificial Sequence: Synthetic peptide
  Seed: GMDPRMCSLMQGSTLPRRSG
GMDPRMFSLFQASTTPRRSG

SEQ ID NO: 80454 - protein, 20 aa, Artificial Sequence
  Description of Artificial Sequence: Synthetic peptide
  Seed: GMDPRMCSLMQGSTLPRRSG
GMDPRMFSLFQASTVPRRSG

SEQ ID NO: 80455 - protein, 20 aa, Artificial Sequence
  Description of Artificial Sequence: Synthetic peptide
  Seed: GMDPRMCSLMQGSTLPRRSG
GMDPRMFSLFQGSTAPRRSG

SEQ ID NO: 80456 - protein, 20 aa, Artificial Sequence
  Description of Artificial Sequence: Synthetic peptide
  Seed: GMDPRMCSLMQGSTLPRRSG
GMDPRMFSLFQGSTIPRRSG

SEQ ID NO: 80457 - protein, 20 aa, Artificial Sequence
  Description of Artificial Sequence: Synthetic peptide
  Seed: GMDPRMCSLMQGSTLPRRSG
GMDPRMFSLFQGSTLPRRSG

SEQ ID NO: 80458 - protein, 20 aa, Artificial Sequence
  Description of Artificial Sequence: Synthetic peptide
  Seed: GMDPRMCSLMQGSTLPRRSG
GMDPRMFSLFQGSTMPRRSG

SEQ ID NO: 80459 - protein, 20 aa, Artificial Sequence
  Description of Artificial Sequence: Synthetic peptide
  Seed: GMDPRMCSLMQGSTLPRRSG
GMDPRMFSLFQGSTVPRRSG

SEQ ID NO: 80460 - protein, 20 aa, Artificial Sequence
  Description of Artificial Sequence: Synthetic peptide
  Seed: GMDPRMCSLMQGSTLPRRSG
GMDPRMFSLFQISTAPRRSG

SEQ ID NO: 80461 - protein, 20 aa, Artificial Sequence
  Description of Artificial Sequence: Synthetic peptide
  Seed: GMDPRMCSLMQGSTLPRRSG
GMDPRMFSLFQISTNPRRSG

SEQ ID NO: 80462 - protein, 20 aa, Artificial Sequence
  Description of Artificial Sequence: Synthetic peptide
  Seed: GMDPRMCSLMQGSTLPRRSG
GMDPRMFSLFQISTSPRRSG

SEQ ID NO: 80463 - protein, 20 aa, Artificial Sequence
  Description of Artificial Sequence: Synthetic peptide
  Seed: GMDPRMCSLMQGSTLPRRSG
GMDPRMFSLFQLSTAPRRSG

SEQ ID NO: 80464 - protein, 20 aa, Artificial Sequence
  Description of Artificial Sequence: Synthetic peptide
  Seed: GMDPRMCSLMQGSTLPRRSG
GMDPRMFSLFQMSTAPRRSG

SEQ ID NO: 80465 - protein, 20 aa, Artificial Sequence
  Description of Artificial Sequence: Synthetic peptide
  Seed: GMDPRMCSLMQGSTLPRRSG
GMDPRMFSLFQNSTIPRRSG

SEQ ID NO: 80466 - protein, 20 aa, Artificial Sequence
  Description of Artificial Sequence: Synthetic peptide
  Seed: GMDPRMCSLMQGSTLPRRSG
GMDPRMFSLFQNSTLPRRSG

SEQ ID NO: 80467 - protein, 20 aa, Artificial Sequence
  Description of Artificial Sequence: Synthetic peptide
  Seed: GMDPRMCSLMQGSTLPRRSG
GMDPRMFSLFQNSTVPRRSG

SEQ ID NO: 80468 - protein, 20 aa, Artificial Sequence
  Description of Artificial Sequence: Synthetic peptide
  Seed: GMDPRMCSLMQGSTLPRRSG
GMDPRMFSLFQPSTAPRRSG

SEQ ID NO: 80469 - protein, 20 aa, Artificial Sequence
  Description of Artificial Sequence: Synthetic peptide
  Seed: GMDPRMCSLMQGSTLPRRSG
GMDPRMFSLFQPSTGPRRSG

SEQ ID NO: 80470 - protein, 20 aa, Artificial Sequence
  Description of Artificial Sequence: Synthetic peptide
  Seed: GMDPRMCSLMQGSTLPRRSG
GMDPRMFSLFQPSTIPRRSG

SEQ ID NO: 80471 - protein, 20 aa, Artificial Sequence
  Description of Artificial Sequence: Synthetic peptide
  Seed: GMDPRMCSLMQGSTLPRRSG
GMDPRMFSLFQPSTLPRRSG

SEQ ID NO: 80472 - protein, 20 aa, Artificial Sequence
  Description of Artificial Sequence: Synthetic peptide
  Seed: GMDPRMCSLMQGSTLPRRSG
GMDPRMFSLFQPSTNPRRSG

SEQ ID NO: 80473 - protein, 20 aa, Artificial Sequence
  Description of Artificial Sequence: Synthetic peptide
  Seed: GMDPRMCSLMQGSTLPRRSG
GMDPRMFSLFQPSTSPRRSG

SEQ ID NO: 80474 - protein, 20 aa, Artificial Sequence
  Description of Artificial Sequence: Synthetic peptide
  Seed: GMDPRMCSLMQGSTLPRRSG
GMDPRMFSLFQPSTTPRRSG

SEQ ID NO: 80475 - protein, 20 aa, Artificial Sequence
  Description of Artificial Sequence: Synthetic peptide
  Seed: GMDPRMCSLMQGSTLPRRSG
GMDPRMFSLFQPSTVPRRSG

SEQ ID NO: 80476 - protein, 20 aa, Artificial Sequence
  Description of Artificial Sequence: Synthetic peptide
  Seed: GMDPRMCSLMQGSTLPRRSG
GMDPRMFSLFQSSTAPRRSG

SEQ ID NO: 80477 - protein, 20 aa, Artificial Sequence
  Description of Artificial Sequence: Synthetic peptide
  Seed: GMDPRMCSLMQGSTLPRRSG
GMDPRMFSLFQSSTIPRRSG

SEQ ID NO: 80478 - protein, 20 aa, Artificial Sequence
  Description of Artificial Sequence: Synthetic peptide
  Seed: GMDPRMCSLMQGSTLPRRSG
GMDPRMFSLFQSSTLPRRSG

SEQ ID NO: 80479 - protein, 20 aa, Artificial Sequence
  Description of Artificial Sequence: Synthetic peptide
  Seed: GMDPRMCSLMQGSTLPRRSG
GMDPRMFSLFQSSTMPRRSG

SEQ ID NO: 80480 - protein, 20 aa, Artificial Sequence
  Description of Artificial Sequence: Synthetic peptide
  Seed: GMDPRMCSLMQGSTLPRRSG
GMDPRMFSLFQSSTNPRRSG

SEQ ID NO: 80481 - protein, 20 aa, Artificial Sequence
  Description of Artificial Sequence: Synthetic peptide
  Seed: GMDPRMCSLMQGSTLPRRSG
GMDPRMFSLFQSSTSPRRSG

SEQ ID NO: 80482 - protein, 20 aa, Artificial Sequence
  Description of Artificial Sequence: Synthetic peptide
  Seed: GMDPRMCSLMQGSTLPRRSG
GMDPRMFSLFQSSTVPRRSG

SEQ ID NO: 80483 - protein, 20 aa, Artificial Sequence
  Description of Artificial Sequence: Synthetic peptide
  Seed: GMDPRMCSLMQGSTLPRRSG
GMDPRMFSLFQTSTAPRRSG

SEQ ID NO: 80484 - protein, 20 aa, Artificial Sequence
  Description of Artificial Sequence: Synthetic peptide
  Seed: GMDPRMCSLMQGSTLPRRSG
GMDPRMFSLFQTSTLPRRSG

SEQ ID NO: 80485 - protein, 20 aa, Artificial Sequence
  Description of Artificial Sequence: Synthetic peptide
  Seed: GMDPRMCSLMQGSTLPRRSG
GMDPRMFSLFQTSTNPRRSG

SEQ ID NO: 80486 - protein, 20 aa, Artificial Sequence
  Description of Artificial Sequence: Synthetic peptide
  Seed: GMDPRMCSLMQGSTLPRRSG
GMDPRMFSLFQTSTSPRRSG

SEQ ID NO: 80487 - protein, 20 aa, Artificial Sequence
  Description of Artificial Sequence: Synthetic peptide
  Seed: GMDPRMCSLMQGSTLPRRSG
GMDPRMFSLFQTSTTPRRSG

SEQ ID NO: 80488 - protein, 20 aa, Artificial Sequence
  Description of Artificial Sequence: Synthetic peptide
  Seed: GMDPRMCSLMQGSTLPRRSG
GMDPRMFSLFQTSTVPRRSG

SEQ ID NO: 80489 - protein, 20 aa, Artificial Sequence
  Description of Artificial Sequence: Synthetic peptide
  Seed: GMDPRMCSLMQGSTLPRRSG
GMDPRMFSLFQVSTAPRRSG

SEQ ID NO: 80490 - protein, 20 aa, Artificial Sequence
  Description of Artificial Sequence: Synthetic peptide
  Seed: GMDPRMCSLMQGSTLPRRSG
GMDPRMFSLFQVSTNPRRSG

SEQ ID NO: 80491 - protein, 20 aa, Artificial Sequence
  Description of Artificial Sequence: Synthetic peptide
  Seed: GMDPRMCSLMQGSTLPRRSG
GMDPRMFSLFQVSTSPRRSG

SEQ ID NO: 80492 - protein, 20 aa, Artificial Sequence
  Description of Artificial Sequence: Synthetic peptide
  Seed: GMDPRMCSLMQGSTLPRRSG
GMDPRMFSLFQVSTTPRRSG

SEQ ID NO: 80493 - protein, 20 aa, Artificial Sequence
  Description of Artificial Sequence: Synthetic peptide
  Seed: GMDPRMCSLMQGSTLPRRSG
GMDPRMFSLFQVSTVPRRSG

SEQ ID NO: 80494 - protein, 20 aa, Artificial Sequence
  Description of Artificial Sequence: Synthetic peptide
  Seed: GMDPRMCSLMQGSTLPRRSG
GMDPRMFSLGQASTAPRRSG

SEQ ID NO: 80495 - protein, 20 aa, Artificial Sequence
  Description of Artificial Sequence: Synthetic peptide
  Seed: GMDPRMCSLMQGSTLPRRSG
GMDPRMFSLGQASTIPRRSG

SEQ ID NO: 80496 - protein, 20 aa, Artificial Sequence
  Description of Artificial Sequence: Synthetic peptide
  Seed: GMDPRMCSLMQGSTLPRRSG
GMDPRMFSLGQASTLPRRSG

SEQ ID NO: 80497 - protein, 20 aa, Artificial Sequence
  Description of Artificial Sequence: Synthetic peptide
  Seed: GMDPRMCSLMQGSTLPRRSG
GMDPRMFSLGQASTMPRRSG

SEQ ID NO: 80498 - protein, 20 aa, Artificial Sequence
  Description of Artificial Sequence: Synthetic peptide
  Seed: GMDPRMCSLMQGSTLPRRSG
GMDPRMFSLGQASTTPRRSG

SEQ ID NO: 80499 - protein, 20 aa, Artificial Sequence
  Description of Artificial Sequence: Synthetic peptide
  Seed: GMDPRMCSLMQGSTLPRRSG
GMDPRMFSLGQASTVPRRSG

SEQ ID NO: 80500 - protein, 20 aa, Artificial Sequence
  Description of Artificial Sequence: Synthetic peptide
  Seed: GMDPRMCSLMQGSTLPRRSG
GMDPRMFSLGQGSTAPRRSG

SEQ ID NO: 80501 - protein, 20 aa, Artificial Sequence
  Description of Artificial Sequence: Synthetic peptide
  Seed: GMDPRMCSLMQGSTLPRRSG
GMDPRMFSLGQGSTIPRRSG

SEQ ID NO: 80502 - protein, 20 aa, Artificial Sequence
  Description of Artificial Sequence: Synthetic peptide
  Seed: GMDPRMCSLMQGSTLPRRSG
GMDPRMFSLGQGSTLPRRSG

SEQ ID NO: 80503 - protein, 20 aa, Artificial Sequence
  Description of Artificial Sequence: Synthetic peptide
  Seed: GMDPRMCSLMQGSTLPRRSG
GMDPRMFSLGQGSTVPRRSG

SEQ ID NO: 80504 - protein, 20 aa, Artificial Sequence
  Description of Artificial Sequence: Synthetic peptide
  Seed: GMDPRMCSLMQGSTLPRRSG
GMDPRMFSLGQPSTIPRRSG

SEQ ID NO: 80505 - protein, 20 aa, Artificial Sequence
  Description of Artificial Sequence: Synthetic peptide
  Seed: GMDPRMCSLMQGSTLPRRSG
GMDPRMFSLGQPSTLPRRSG

SEQ ID NO: 80506 - protein, 20 aa, Artificial Sequence
  Description of Artificial Sequence: Synthetic peptide
  Seed: GMDPRMCSLMQGSTLPRRSG
GMDPRMFSLGQPSTVPRRSG

SEQ ID NO: 80507 - protein, 20 aa, Artificial Sequence
  Description of Artificial Sequence: Synthetic peptide
  Seed: GMDPRMCSLMQGSTLPRRSG
GMDPRMFSLGQSSTAPRRSG

SEQ ID NO: 80508 - protein, 20 aa, Artificial Sequence
  Description of Artificial Sequence: Synthetic peptide
  Seed: GMDPRMCSLMQGSTLPRRSG
GMDPRMFSLGQSSTIPRRSG

SEQ ID NO: 80509 - protein, 20 aa, Artificial Sequence
  Description of Artificial Sequence: Synthetic peptide
  Seed: GMDPRMCSLMQGSTLPRRSG
GMDPRMFSLGQSSTLPRRSG

SEQ ID NO: 80510 - protein, 20 aa, Artificial Sequence
  Description of Artificial Sequence: Synthetic peptide
  Seed: GMDPRMCSLMQGSTLPRRSG
GMDPRMFSLGQSSTMPRRSG

SEQ ID NO: 80511 - protein, 20 aa, Artificial Sequence
  Description of Artificial Sequence: Synthetic peptide
  Seed: GMDPRMCSLMQGSTLPRRSG
GMDPRMFSLGQSSTVPRRSG

SEQ ID NO: 80512 - protein, 20 aa, Artificial Sequence
  Description of Artificial Sequence: Synthetic peptide
  Seed: GMDPRMCSLMQGSTLPRRSG
GMDPRMFSLGQTSTIPRRSG

SEQ ID NO: 80513 - protein, 20 aa, Artificial Sequence
  Description of Artificial Sequence: Synthetic peptide
  Seed: GMDPRMCSLMQGSTLPRRSG
GMDPRMFSLGQTSTLPRRSG

SEQ ID NO: 80514 - protein, 20 aa, Artificial Sequence
  Description of Artificial Sequence: Synthetic peptide
  Seed: GMDPRMCSLMQGSTLPRRSG
GMDPRMFSLGQTSTVPRRSG

SEQ ID NO: 80515 - protein, 20 aa, Artificial Sequence
  Description of Artificial Sequence: Synthetic peptide
  Seed: GMDPRMCSLMQGSTLPRRSG
GMDPRMFSLHQASTAPRRSG

SEQ ID NO: 80516 - protein, 20 aa, Artificial Sequence
  Description of Artificial Sequence: Synthetic peptide
  Seed: GMDPRMCSLMQGSTLPRRSG
GMDPRMFSLHQASTIPRRSG

SEQ ID NO: 80517 - protein, 20 aa, Artificial Sequence
  Description of Artificial Sequence: Synthetic peptide
  Seed: GMDPRMCSLMQGSTLPRRSG
GMDPRMFSLHQASTLPRRSG

SEQ ID NO: 80518 - protein, 20 aa, Artificial Sequence
  Description of Artificial Sequence: Synthetic peptide
  Seed: GMDPRMCSLMQGSTLPRRSG
GMDPRMFSLHQASTVPRRSG

SEQ ID NO: 80519 - protein, 20 aa, Artificial Sequence
  Description of Artificial Sequence: Synthetic peptide
  Seed: GMDPRMCSLMQGSTLPRRSG
GMDPRMFSLHQGSTIPRRSG

SEQ ID NO: 80520 - protein, 20 aa, Artificial Sequence
  Description of Artificial Sequence: Synthetic peptide
  Seed: GMDPRMCSLMQGSTLPRRSG
GMDPRMFSLHQGSTLPRRSG

SEQ ID NO: 80521 - protein, 20 aa, Artificial Sequence
  Description of Artificial Sequence: Synthetic peptide
  Seed: GMDPRMCSLMQGSTLPRRSG
GMDPRMFSLHQGSTVPRRSG

SEQ ID NO: 80522 - protein, 20 aa, Artificial Sequence
  Description of Artificial Sequence: Synthetic peptide
  Seed: GMDPRMCSLMQGSTLPRRSG
GMDPRMFSLHQSSTIPRRSG

SEQ ID NO: 80523 - protein, 20 aa, Artificial Sequence
  Description of Artificial Sequence: Synthetic peptide
  Seed: GMDPRMCSLMQGSTLPRRSG
GMDPRMFSLHQSSTLPRRSG

SEQ ID NO: 80524 - protein, 20 aa, Artificial Sequence
  Description of Artificial Sequence: Synthetic peptide
  Seed: GMDPRMCSLMQGSTLPRRSG
GMDPRMFSLHQSSTVPRRSG

SEQ ID NO: 80525 - protein, 20 aa, Artificial Sequence
  Description of Artificial Sequence: Synthetic peptide
  Seed: GMDPRMCSLMQGSTLPRRSG
GMDPRMFSLIQASTAPRRSG

SEQ ID NO: 80526 - protein, 20 aa, Artificial Sequence
  Description of Artificial Sequence: Synthetic peptide
  Seed: GMDPRMCSLMQGSTLPRRSG
GMDPRMFSLIQASTCPRRSG

SEQ ID NO: 80527 - protein, 20 aa, Artificial Sequence
  Description of Artificial Sequence: Synthetic peptide
  Seed: GMDPRMCSLMQGSTLPRRSG
GMDPRMFSLIQASTDPRRSG

SEQ ID NO: 80528 - protein, 20 aa, Artificial Sequence
  Description of Artificial Sequence: Synthetic peptide
  Seed: GMDPRMCSLMQGSTLPRRSG
GMDPRMFSLIQASTEPRRSG

SEQ ID NO: 80529 - protein, 20 aa, Artificial Sequence
  Description of Artificial Sequence: Synthetic peptide
  Seed: GMDPRMCSLMQGSTLPRRSG
GMDPRMFSLIQASTFPRRSG

SEQ ID NO: 80530 - protein, 20 aa, Artificial Sequence
  Description of Artificial Sequence: Synthetic peptide
  Seed: GMDPRMCSLMQGSTLPRRSG
GMDPRMFSLIQASTGPRRSG

SEQ ID NO: 80531 - protein, 20 aa, Artificial Sequence
  Description of Artificial Sequence: Synthetic peptide
  Seed: GMDPRMCSLMQGSTLPRRSG
GMDPRMFSLIQASTHPRRSG

SEQ ID NO: 80532 - protein, 20 aa, Artificial Sequence
  Description of Artificial Sequence: Synthetic peptide
  Seed: GMDPRMCSLMQGSTLPRRSG
GMDPRMFSLIQASTIPRRSG

SEQ ID NO: 80533 - protein, 20 aa, Artificial Sequence
  Description of Artificial Sequence: Synthetic peptide
  Seed: GMDPRMCSLMQGSTLPRRSG
GMDPRMFSLIQASTKPRRSG

SEQ ID NO: 80534 - protein, 20 aa, Artificial Sequence
  Description of Artificial Sequence: Synthetic peptide
  Seed: GMDPRMCSLMQGSTLPRRSG
GMDPRMFSLIQASTLPRRSG

SEQ ID NO: 80535 - protein, 20 aa, Artificial Sequence
  Description of Artificial Sequence: Synthetic peptide
  Seed: GMDPRMCSLMQGSTLPRRSG
GMDPRMFSLIQASTMPRRSG

SEQ ID NO: 80536 - protein, 20 aa, Artificial Sequence
  Description of Artificial Sequence: Synthetic peptide
  Seed: GMDPRMCSLMQGSTLPRRSG
GMDPRMFSLIQASTNPRRSG

SEQ ID NO: 80537 - protein, 20 aa, Artificial Sequence
  Description of Artificial Sequence: Synthetic peptide
  Seed: GMDPRMCSLMQGSTLPRRSG
GMDPRMFSLIQASTPPRRSG

SEQ ID NO: 80538 - protein, 20 aa, Artificial Sequence
  Description of Artificial Sequence: Synthetic peptide
  Seed: GMDPRMCSLMQGSTLPRRSG
GMDPRMFSLIQASTQPRRSG

SEQ ID NO: 80539 - protein, 20 aa, Artificial Sequence
  Description of Artificial Sequence: Synthetic peptide
  Seed: GMDPRMCSLMQGSTLPRRSG
GMDPRMFSLIQASTSPRRSG

SEQ ID NO: 80540 - protein, 20 aa, Artificial Sequence
  Description of Artificial Sequence: Synthetic peptide
  Seed: GMDPRMCSLMQGSTLPRRSG
GMDPRMFSLIQASTTPRRSG

SEQ ID NO: 80541 - protein, 20 aa, Artificial Sequence
  Description of Artificial Sequence: Synthetic peptide
  Seed: GMDPRMCSLMQGSTLPRRSG
GMDPRMFSLIQASTVPRRSG

SEQ ID NO: 80542 - protein, 20 aa, Artificial Sequence
  Description of Artificial Sequence: Synthetic peptide
  Seed: GMDPRMCSLMQGSTLPRRSG
GMDPRMFSLIQASTWPRRSG

SEQ ID NO: 80543 - protein, 20 aa, Artificial Sequence
  Description of Artificial Sequence: Synthetic peptide
  Seed: GMDPRMCSLMQGSTLPRRSG
GMDPRMFSLIQASTYPRRSG

SEQ ID NO: 80544 - protein, 20 aa, Artificial Sequence
  Description of Artificial Sequence: Synthetic peptide
  Seed: GMDPRMCSLMQGSTLPRRSG
GMDPRMFSLIQESTAPRRSG

SEQ ID NO: 80545 - protein, 20 aa, Artificial Sequence
  Description of Artificial Sequence: Synthetic peptide
  Seed: GMDPRMCSLMQGSTLPRRSG
GMDPRMFSLIQGSTAPRRSG

SEQ ID NO: 80546 - protein, 20 aa, Artificial Sequence
  Description of Artificial Sequence: Synthetic peptide
  Seed: GMDPRMCSLMQGSTLPRRSG
GMDPRMFSLIQGSTCPRRSG

SEQ ID NO: 80547 - protein, 20 aa, Artificial Sequence
  Description of Artificial Sequence: Synthetic peptide
  Seed: GMDPRMCSLMQGSTLPRRSG
GMDPRMFSLIQGSTFPRRSG

SEQ ID NO: 80548 - protein, 20 aa, Artificial Sequence
  Description of Artificial Sequence: Synthetic peptide
  Seed: GMDPRMCSLMQGSTLPRRSG
GMDPRMFSLIQGSTGPRRSG

SEQ ID NO: 80549 - protein, 20 aa, Artificial Sequence
  Description of Artificial Sequence: Synthetic peptide
  Seed: GMDPRMCSLMQGSTLPRRSG
GMDPRMFSLIQGSTHPRRSG

SEQ ID NO: 80550 - protein, 20 aa, Artificial Sequence
  Description of Artificial Sequence: Synthetic peptide
  Seed: GMDPRMCSLMQGSTLPRRSG
GMDPRMFSLIQGSTIPRRSG

SEQ ID NO: 80551 - protein, 20 aa, Artificial Sequence
  Description of Artificial Sequence: Synthetic peptide
  Seed: GMDPRMCSLMQGSTLPRRSG
GMDPRMFSLIQGSTLPRRSG

SEQ ID NO: 80552 - protein, 20 aa, Artificial Sequence
  Description of Artificial Sequence: Synthetic peptide
  Seed: GMDPRMCSLMQGSTLPRRSG
GMDPRMFSLIQGSTMPRRSG

SEQ ID NO: 80553 - protein, 20 aa, Artificial Sequence
  Description of Artificial Sequence: Synthetic peptide
  Seed: GMDPRMCSLMQGSTLPRRSG
GMDPRMFSLIQGSTNPRRSG

SEQ ID NO: 80554 - protein, 20 aa, Artificial Sequence
  Description of Artificial Sequence: Synthetic peptide
  Seed: GMDPRMCSLMQGSTLPRRSG
GMDPRMFSLIQGSTQPRRSG

SEQ ID NO: 80555 - protein, 20 aa, Artificial Sequence
  Description of Artificial Sequence: Synthetic peptide
  Seed: GMDPRMCSLMQGSTLPRRSG
GMDPRMFSLIQGSTSPRRSG

SEQ ID NO: 80556 - protein, 20 aa, Artificial Sequence
  Description of Artificial Sequence: Synthetic peptide
  Seed: GMDPRMCSLMQGSTLPRRSG
GMDPRMFSLIQGSTTPRRSG

SEQ ID NO: 80557 - protein, 20 aa, Artificial Sequence
  Description of Artificial Sequence: Synthetic peptide
  Seed: GMDPRMCSLMQGSTLPRRSG
GMDPRMFSLIQGSTVPRRSG

SEQ ID NO: 80558 - protein, 20 aa, Artificial Sequence
  Description of Artificial Sequence: Synthetic peptide
  Seed: GMDPRMCSLMQGSTLPRRSG
GMDPRMFSLIQHSTAPRRSG

SEQ ID NO: 80559 - protein, 20 aa, Artificial Sequence
  Description of Artificial Sequence: Synthetic peptide
  Seed: GMDPRMCSLMQGSTLPRRSG
GMDPRMFSLIQISTAPRRSG

SEQ ID NO: 80560 - protein, 20 aa, Artificial Sequence
  Description of Artificial Sequence: Synthetic peptide
  Seed: GMDPRMCSLMQGSTLPRRSG
GMDPRMFSLIQISTDPRRSG

SEQ ID NO: 80561 - protein, 20 aa, Artificial Sequence
  Description of Artificial Sequence: Synthetic peptide
  Seed: GMDPRMCSLMQGSTLPRRSG
GMDPRMFSLIQISTGPRRSG

SEQ ID NO: 80562 - protein, 20 aa, Artificial Sequence
  Description of Artificial Sequence: Synthetic peptide
  Seed: GMDPRMCSLMQGSTLPRRSG
GMDPRMFSLIQISTHPRRSG

SEQ ID NO: 80563 - protein, 20 aa, Artificial Sequence
  Description of Artificial Sequence: Synthetic peptide
  Seed: GMDPRMCSLMQGSTLPRRSG
GMDPRMFSLIQISTIPRRSG

SEQ ID NO: 80564 - protein, 20 aa, Artificial Sequence
  Description of Artificial Sequence: Synthetic peptide
  Seed: GMDPRMCSLMQGSTLPRRSG
GMDPRMFSLIQISTLPRRSG

SEQ ID NO: 80565 - protein, 20 aa, Artificial Sequence
  Description of Artificial Sequence: Synthetic peptide
  Seed: GMDPRMCSLMQGSTLPRRSG
GMDPRMFSLIQISTMPRRSG

SEQ ID NO: 80566 - protein, 20 aa, Artificial Sequence
  Description of Artificial Sequence: Synthetic peptide
  Seed: GMDPRMCSLMQGSTLPRRSG
GMDPRMFSLIQISTNPRRSG

SEQ ID NO: 80567 - protein, 20 aa, Artificial Sequence
  Description of Artificial Sequence: Synthetic peptide
  Seed: GMDPRMCSLMQGSTLPRRSG
GMDPRMFSLIQISTQPRRSG

SEQ ID NO: 80568 - protein, 20 aa, Artificial Sequence
  Description of Artificial Sequence: Synthetic peptide
  Seed: GMDPRMCSLMQGSTLPRRSG
GMDPRMFSLIQISTSPRRSG

SEQ ID NO: 80569 - protein, 20 aa, Artificial Sequence
  Description of Artificial Sequence: Synthetic peptide
  Seed: GMDPRMCSLMQGSTLPRRSG
GMDPRMFSLIQISTTPRRSG

SEQ ID NO: 80570 - protein, 20 aa, Artificial Sequence
  Description of Artificial Sequence: Synthetic peptide
  Seed: GMDPRMCSLMQGSTLPRRSG
GMDPRMFSLIQISTVPRRSG

SEQ ID NO: 80571 - protein, 20 aa, Artificial Sequence
  Description of Artificial Sequence: Synthetic peptide
  Seed: GMDPRMCSLMQGSTLPRRSG
GMDPRMFSLIQLSTAPRRSG

SEQ ID NO: 80572 - protein, 20 aa, Artificial Sequence
  Description of Artificial Sequence: Synthetic peptide
  Seed: GMDPRMCSLMQGSTLPRRSG
GMDPRMFSLIQLSTGPRRSG

SEQ ID NO: 80573 - protein, 20 aa, Artificial Sequence
  Description of Artificial Sequence: Synthetic peptide
  Seed: GMDPRMCSLMQGSTLPRRSG
GMDPRMFSLIQLSTIPRRSG

SEQ ID NO: 80574 - protein, 20 aa, Artificial Sequence
  Description of Artificial Sequence: Synthetic peptide
  Seed: GMDPRMCSLMQGSTLPRRSG
GMDPRMFSLIQLSTLPRRSG

SEQ ID NO: 80575 - protein, 20 aa, Artificial Sequence
  Description of Artificial Sequence: Synthetic peptide
  Seed: GMDPRMCSLMQGSTLPRRSG
GMDPRMFSLIQLSTMPRRSG

SEQ ID NO: 80576 - protein, 20 aa, Artificial Sequence
  Description of Artificial Sequence: Synthetic peptide
  Seed: GMDPRMCSLMQGSTLPRRSG
GMDPRMFSLIQLSTNPRRSG

SEQ ID NO: 80577 - protein, 20 aa, Artificial Sequence
  Description of Artificial Sequence: Synthetic peptide
  Seed: GMDPRMCSLMQGSTLPRRSG
GMDPRMFSLIQLSTSPRRSG

SEQ ID NO: 80578 - protein, 20 aa, Artificial Sequence
  Description of Artificial Sequence: Synthetic peptide
  Seed: GMDPRMCSLMQGSTLPRRSG
GMDPRMFSLIQLSTTPRRSG

SEQ ID NO: 80579 - protein, 20 aa, Artificial Sequence
  Description of Artificial Sequence: Synthetic peptide
  Seed: GMDPRMCSLMQGSTLPRRSG
GMDPRMFSLIQLSTVPRRSG

SEQ ID NO: 80580 - protein, 20 aa, Artificial Sequence
  Description of Artificial Sequence: Synthetic peptide
  Seed: GMDPRMCSLMQGSTLPRRSG
GMDPRMFSLIQMSTAPRRSG

SEQ ID NO: 80581 - protein, 20 aa, Artificial Sequence
  Description of Artificial Sequence: Synthetic peptide
  Seed: GMDPRMCSLMQGSTLPRRSG
GMDPRMFSLIQMSTIPRRSG

SEQ ID NO: 80582 - protein, 20 aa, Artificial Sequence
  Description of Artificial Sequence: Synthetic peptide
  Seed: GMDPRMCSLMQGSTLPRRSG
GMDPRMFSLIQMSTLPRRSG

SEQ ID NO: 80583 - protein, 20 aa, Artificial Sequence
  Description of Artificial Sequence: Synthetic peptide
  Seed: GMDPRMCSLMQGSTLPRRSG
GMDPRMFSLIQMSTMPRRSG

SEQ ID NO: 80584 - protein, 20 aa, Artificial Sequence
  Description of Artificial Sequence: Synthetic peptide
  Seed: GMDPRMCSLMQGSTLPRRSG
GMDPRMFSLIQMSTNPRRSG

SEQ ID NO: 80585 - protein, 20 aa, Artificial Sequence
  Description of Artificial Sequence: Synthetic peptide
  Seed: GMDPRMCSLMQGSTLPRRSG
GMDPRMFSLIQMSTSPRRSG

SEQ ID NO: 80586 - protein, 20 aa, Artificial Sequence
  Description of Artificial Sequence: Synthetic peptide
  Seed: GMDPRMCSLMQGSTLPRRSG
GMDPRMFSLIQMSTTPRRSG

SEQ ID NO: 80587 - protein, 20 aa, Artificial Sequence
  Description of Artificial Sequence: Synthetic peptide
  Seed: GMDPRMCSLMQGSTLPRRSG
GMDPRMFSLIQMSTVPRRSG

SEQ ID NO: 80588 - protein, 20 aa, Artificial Sequence
  Description of Artificial Sequence: Synthetic peptide
  Seed: GMDPRMCSLMQGSTLPRRSG
GMDPRMFSLIQNSTAPRRSG

SEQ ID NO: 80589 - protein, 20 aa, Artificial Sequence
  Description of Artificial Sequence: Synthetic peptide
  Seed: GMDPRMCSLMQGSTLPRRSG
GMDPRMFSLIQNSTGPRRSG

SEQ ID NO: 80590 - protein, 20 aa, Artificial Sequence
  Description of Artificial Sequence: Synthetic peptide
  Seed: GMDPRMCSLMQGSTLPRRSG
GMDPRMFSLIQNSTHPRRSG

SEQ ID NO: 80591 - protein, 20 aa, Artificial Sequence
  Description of Artificial Sequence: Synthetic peptide
  Seed: GMDPRMCSLMQGSTLPRRSG
GMDPRMFSLIQNSTIPRRSG

SEQ ID NO: 80592 - protein, 20 aa, Artificial Sequence
  Description of Artificial Sequence: Synthetic peptide
  Seed: GMDPRMCSLMQGSTLPRRSG
GMDPRMFSLIQNSTLPRRSG

SEQ ID NO: 80593 - protein, 20 aa, Artificial Sequence
  Description of Artificial Sequence: Synthetic peptide
  Seed: GMDPRMCSLMQGSTLPRRSG
GMDPRMFSLIQNSTMPRRSG

SEQ ID NO: 80594 - protein, 20 aa, Artificial Sequence
  Description of Artificial Sequence: Synthetic peptide
  Seed: GMDPRMCSLMQGSTLPRRSG
GMDPRMFSLIQNSTNPRRSG

SEQ ID NO: 80595 - protein, 20 aa, Artificial Sequence
  Description of Artificial Sequence: Synthetic peptide
  Seed: GMDPRMCSLMQGSTLPRRSG
GMDPRMFSLIQNSTQPRRSG

SEQ ID NO: 80596 - protein, 20 aa, Artificial Sequence
  Description of Artificial Sequence: Synthetic peptide
  Seed: GMDPRMCSLMQGSTLPRRSG
GMDPRMFSLIQNSTSPRRSG

SEQ ID NO: 80597 - protein, 20 aa, Artificial Sequence
  Description of Artificial Sequence: Synthetic peptide
  Seed: GMDPRMCSLMQGSTLPRRSG
GMDPRMFSLIQNSTTPRRSG

SEQ ID NO: 80598 - protein, 20 aa, Artificial Sequence
  Description of Artificial Sequence: Synthetic peptide
  Seed: GMDPRMCSLMQGSTLPRRSG
GMDPRMFSLIQNSTVPRRSG

SEQ ID NO: 80599 - protein, 20 aa, Artificial Sequence
  Description of Artificial Sequence: Synthetic peptide
  Seed: GMDPRMCSLMQGSTLPRRSG
GMDPRMFSLIQPSTAPRRSG

SEQ ID NO: 80600 - protein, 20 aa, Artificial Sequence
  Description of Artificial Sequence: Synthetic peptide
  Seed: GMDPRMCSLMQGSTLPRRSG
GMDPRMFSLIQPSTCPRRSG

SEQ ID NO: 80601 - protein, 20 aa, Artificial Sequence
  Description of Artificial Sequence: Synthetic peptide
  Seed: GMDPRMCSLMQGSTLPRRSG
GMDPRMFSLIQPSTDPRRSG

SEQ ID NO: 80602 - protein, 20 aa, Artificial Sequence
  Description of Artificial Sequence: Synthetic peptide
  Seed: GMDPRMCSLMQGSTLPRRSG
GMDPRMFSLIQPSTEPRRSG

SEQ ID NO: 80603 - protein, 20 aa, Artificial Sequence
  Description of Artificial Sequence: Synthetic peptide
  Seed: GMDPRMCSLMQGSTLPRRSG
GMDPRMFSLIQPSTFPRRSG

SEQ ID NO: 80604 - protein, 20 aa, Artificial Sequence
  Description of Artificial Sequence: Synthetic peptide
  Seed: GMDPRMCSLMQGSTLPRRSG
GMDPRMFSLIQPSTGPRRSG

SEQ ID NO: 80605 - protein, 20 aa, Artificial Sequence
  Description of Artificial Sequence: Synthetic peptide
  Seed: GMDPRMCSLMQGSTLPRRSG
GMDPRMFSLIQPSTHPRRSG

SEQ ID NO: 80606 - protein, 20 aa, Artificial Sequence
  Description of Artificial Sequence: Synthetic peptide
  Seed: GMDPRMCSLMQGSTLPRRSG
GMDPRMFSLIQPSTIPRRSG

SEQ ID NO: 80607 - protein, 20 aa, Artificial Sequence
  Description of Artificial Sequence: Synthetic peptide
  Seed: GMDPRMCSLMQGSTLPRRSG
GMDPRMFSLIQPSTLPRRSG

SEQ ID NO: 80608 - protein, 20 aa, Artificial Sequence
  Description of Artificial Sequence: Synthetic peptide
  Seed: GMDPRMCSLMQGSTLPRRSG
GMDPRMFSLIQPSTMPRRSG

SEQ ID NO: 80609 - protein, 20 aa, Artificial Sequence
  Description of Artificial Sequence: Synthetic peptide
  Seed: GMDPRMCSLMQGSTLPRRSG
GMDPRMFSLIQPSTNPRRSG

SEQ ID NO: 80610 - protein, 20 aa, Artificial Sequence
  Description of Artificial Sequence: Synthetic peptide
  Seed: GMDPRMCSLMQGSTLPRRSG
GMDPRMFSLIQPSTPPRRSG

SEQ ID NO: 80611 - protein, 20 aa, Artificial Sequence
  Description of Artificial Sequence: Synthetic peptide
  Seed: GMDPRMCSLMQGSTLPRRSG
GMDPRMFSLIQPSTQPRRSG

SEQ ID NO: 80612 - protein, 20 aa, Artificial Sequence
  Description of Artificial Sequence: Synthetic peptide
  Seed: GMDPRMCSLMQGSTLPRRSG
GMDPRMFSLIQPSTSPRRSG

SEQ ID NO: 80613 - protein, 20 aa, Artificial Sequence
  Description of Artificial Sequence: Synthetic peptide
  Seed: GMDPRMCSLMQGSTLPRRSG
GMDPRMFSLIQPSTTPRRSG

SEQ ID NO: 80614 - protein, 20 aa, Artificial Sequence
  Description of Artificial Sequence: Synthetic peptide
  Seed: GMDPRMCSLMQGSTLPRRSG
GMDPRMFSLIQPSTVPRRSG

SEQ ID NO: 80615 - protein, 20 aa, Artificial Sequence
  Description of Artificial Sequence: Synthetic peptide
  Seed: GMDPRMCSLMQGSTLPRRSG
GMDPRMFSLIQPSTWPRRSG

SEQ ID NO: 80616 - protein, 20 aa, Artificial Sequence
  Description of Artificial Sequence: Synthetic peptide
  Seed: GMDPRMCSLMQGSTLPRRSG
GMDPRMFSLIQQSTAPRRSG

SEQ ID NO: 80617 - protein, 20 aa, Artificial Sequence
  Description of Artificial Sequence: Synthetic peptide
  Seed: GMDPRMCSLMQGSTLPRRSG
GMDPRMFSLIQSSTAPRRSG

SEQ ID NO: 80618 - protein, 20 aa, Artificial Sequence
  Description of Artificial Sequence: Synthetic peptide
  Seed: GMDPRMCSLMQGSTLPRRSG
GMDPRMFSLIQSSTCPRRSG

SEQ ID NO: 80619 - protein, 20 aa, Artificial Sequence
  Description of Artificial Sequence: Synthetic peptide
  Seed: GMDPRMCSLMQGSTLPRRSG
GMDPRMFSLIQSSTDPRRSG

SEQ ID NO: 80620 - protein, 20 aa, Artificial Sequence
  Description of Artificial Sequence: Synthetic peptide
  Seed: GMDPRMCSLMQGSTLPRRSG
GMDPRMFSLIQSSTEPRRSG

SEQ ID NO: 80621 - protein, 20 aa, Artificial Sequence
  Description of Artificial Sequence: Synthetic peptide
  Seed: GMDPRMCSLMQGSTLPRRSG
GMDPRMFSLIQSSTFPRRSG

SEQ ID NO: 80622 - protein, 20 aa, Artificial Sequence
  Description of Artificial Sequence: Synthetic peptide
  Seed: GMDPRMCSLMQGSTLPRRSG
GMDPRMFSLIQSSTGPRRSG

SEQ ID NO: 80623 - protein, 20 aa, Artificial Sequence
  Description of Artificial Sequence: Synthetic peptide
  Seed: GMDPRMCSLMQGSTLPRRSG
GMDPRMFSLIQSSTHPRRSG

SEQ ID NO: 80624 - protein, 20 aa, Artificial Sequence
  Description of Artificial Sequence: Synthetic peptide
  Seed: GMDPRMCSLMQGSTLPRRSG
GMDPRMFSLIQSSTIPRRSG

SEQ ID NO: 80625 - protein, 20 aa, Artificial Sequence
  Description of Artificial Sequence: Synthetic peptide
  Seed: GMDPRMCSLMQGSTLPRRSG
GMDPRMFSLIQSSTLPRRSG

SEQ ID NO: 80626 - protein, 20 aa, Artificial Sequence
  Description of Artificial Sequence: Synthetic peptide
  Seed: GMDPRMCSLMQGSTLPRRSG
GMDPRMFSLIQSSTMPRRSG

SEQ ID NO: 80627 - protein, 20 aa, Artificial Sequence
  Description of Artificial Sequence: Synthetic peptide
  Seed: GMDPRMCSLMQGSTLPRRSG
GMDPRMFSLIQSSTNPRRSG

SEQ ID NO: 80628 - protein, 20 aa, Artificial Sequence
  Description of Artificial Sequence: Synthetic peptide
  Seed: GMDPRMCSLMQGSTLPRRSG
GMDPRMFSLIQSSTPPRRSG

SEQ ID NO: 80629 - protein, 20 aa, Artificial Sequence
  Description of Artificial Sequence: Synthetic peptide
  Seed: GMDPRMCSLMQGSTLPRRSG
GMDPRMFSLIQSSTQPRRSG

SEQ ID NO: 80630 - protein, 20 aa, Artificial Sequence
  Description of Artificial Sequence: Synthetic peptide
  Seed: GMDPRMCSLMQGSTLPRRSG
GMDPRMFSLIQSSTSPRRSG

SEQ ID NO: 80631 - protein, 20 aa, Artificial Sequence
  Description of Artificial Sequence: Synthetic peptide
  Seed: GMDPRMCSLMQGSTLPRRSG
GMDPRMFSLIQSSTTPRRSG

SEQ ID NO: 80632 - protein, 20 aa, Artificial Sequence
  Description of Artificial Sequence: Synthetic peptide
  Seed: GMDPRMCSLMQGSTLPRRSG
GMDPRMFSLIQSSTVPRRSG

SEQ ID NO: 80633 - protein, 20 aa, Artificial Sequence
  Description of Artificial Sequence: Synthetic peptide
  Seed: GMDPRMCSLMQGSTLPRRSG
GMDPRMFSLIQTSTAPRRSG

SEQ ID NO: 80634 - protein, 20 aa, Artificial Sequence
  Description of Artificial Sequence: Synthetic peptide
  Seed: GMDPRMCSLMQGSTLPRRSG
GMDPRMFSLIQTSTCPRRSG

SEQ ID NO: 80635 - protein, 20 aa, Artificial Sequence
  Description of Artificial Sequence: Synthetic peptide
  Seed: GMDPRMCSLMQGSTLPRRSG
GMDPRMFSLIQTSTDPRRSG

SEQ ID NO: 80636 - protein, 20 aa, Artificial Sequence
  Description of Artificial Sequence: Synthetic peptide
  Seed: GMDPRMCSLMQGSTLPRRSG
GMDPRMFSLIQTSTEPRRSG

SEQ ID NO: 80637 - protein, 20 aa, Artificial Sequence
  Description of Artificial Sequence: Synthetic peptide
  Seed: GMDPRMCSLMQGSTLPRRSG
GMDPRMFSLIQTSTGPRRSG

SEQ ID NO: 80638 - protein, 20 aa, Artificial Sequence
  Description of Artificial Sequence: Synthetic peptide
  Seed: GMDPRMCSLMQGSTLPRRSG
GMDPRMFSLIQTSTHPRRSG

SEQ ID NO: 80639 - protein, 20 aa, Artificial Sequence
  Description of Artificial Sequence: Synthetic peptide
  Seed: GMDPRMCSLMQGSTLPRRSG
GMDPRMFSLIQTSTIPRRSG

SEQ ID NO: 80640 - protein, 20 aa, Artificial Sequence
  Description of Artificial Sequence: Synthetic peptide
  Seed: GMDPRMCSLMQGSTLPRRSG
GMDPRMFSLIQTSTLPRRSG

SEQ ID NO: 80641 - protein, 20 aa, Artificial Sequence
  Description of Artificial Sequence: Synthetic peptide
  Seed: GMDPRMCSLMQGSTLPRRSG
GMDPRMFSLIQTSTMPRRSG

SEQ ID NO: 80642 - protein, 20 aa, Artificial Sequence
  Description of Artificial Sequence: Synthetic peptide
  Seed: GMDPRMCSLMQGSTLPRRSG
GMDPRMFSLIQTSTNPRRSG

SEQ ID NO: 80643 - protein, 20 aa, Artificial Sequence
  Description of Artificial Sequence: Synthetic peptide
  Seed: GMDPRMCSLMQGSTLPRRSG
GMDPRMFSLIQTSTPPRRSG

SEQ ID NO: 80644 - protein, 20 aa, Artificial Sequence
  Description of Artificial Sequence: Synthetic peptide
  Seed: GMDPRMCSLMQGSTLPRRSG
GMDPRMFSLIQTSTQPRRSG

SEQ ID NO: 80645 - protein, 20 aa, Artificial Sequence
  Description of Artificial Sequence: Synthetic peptide
  Seed: GMDPRMCSLMQGSTLPRRSG
GMDPRMFSLIQTSTSPRRSG

SEQ ID NO: 80646 - protein, 20 aa, Artificial Sequence
  Description of Artificial Sequence: Synthetic peptide
  Seed: GMDPRMCSLMQGSTLPRRSG
GMDPRMFSLIQTSTTPRRSG

SEQ ID NO: 80647 - protein, 20 aa, Artificial Sequence
  Description of Artificial Sequence: Synthetic peptide
  Seed: GMDPRMCSLMQGSTLPRRSG
GMDPRMFSLIQTSTVPRRSG

SEQ ID NO: 80648 - protein, 20 aa, Artificial Sequence
  Description of Artificial Sequence: Synthetic peptide
  Seed: GMDPRMCSLMQGSTLPRRSG
GMDPRMFSLIQVSTAPRRSG

SEQ ID NO: 80649 - protein, 20 aa, Artificial Sequence
  Description of Artificial Sequence: Synthetic peptide
  Seed: GMDPRMCSLMQGSTLPRRSG
GMDPRMFSLIQVSTCPRRSG

SEQ ID NO: 80650 - protein, 20 aa, Artificial Sequence
  Description of Artificial Sequence: Synthetic peptide
  Seed: GMDPRMCSLMQGSTLPRRSG
GMDPRMFSLIQVSTDPRRSG

SEQ ID NO: 80651 - protein, 20 aa, Artificial Sequence
  Description of Artificial Sequence: Synthetic peptide
  Seed: GMDPRMCSLMQGSTLPRRSG
GMDPRMFSLIQVSTEPRRSG

SEQ ID NO: 80652 - protein, 20 aa, Artificial Sequence
  Description of Artificial Sequence: Synthetic peptide
  Seed: GMDPRMCSLMQGSTLPRRSG
GMDPRMFSLIQVSTGPRRSG

SEQ ID NO: 80653 - protein, 20 aa, Artificial Sequence
  Description of Artificial Sequence: Synthetic peptide
  Seed: GMDPRMCSLMQGSTLPRRSG
GMDPRMFSLIQVSTHPRRSG

SEQ ID NO: 80654 - protein, 20 aa, Artificial Sequence
  Description of Artificial Sequence: Synthetic peptide
  Seed: GMDPRMCSLMQGSTLPRRSG
GMDPRMFSLIQVSTIPRRSG

SEQ ID NO: 80655 - protein, 20 aa, Artificial Sequence
  Description of Artificial Sequence: Synthetic peptide
  Seed: GMDPRMCSLMQGSTLPRRSG
GMDPRMFSLIQVSTLPRRSG

SEQ ID NO: 80656 - protein, 20 aa, Artificial Sequence
  Description of Artificial Sequence: Synthetic peptide
  Seed: GMDPRMCSLMQGSTLPRRSG
GMDPRMFSLIQVSTMPRRSG

SEQ ID NO: 80657 - protein, 20 aa, Artificial Sequence
  Description of Artificial Sequence: Synthetic peptide
  Seed: GMDPRMCSLMQGSTLPRRSG
GMDPRMFSLIQVSTNPRRSG

SEQ ID NO: 80658 - protein, 20 aa, Artificial Sequence
  Description of Artificial Sequence: Synthetic peptide
  Seed: GMDPRMCSLMQGSTLPRRSG
GMDPRMFSLIQVSTPPRRSG

SEQ ID NO: 80659 - protein, 20 aa, Artificial Sequence
  Description of Artificial Sequence: Synthetic peptide
  Seed: GMDPRMCSLMQGSTLPRRSG
GMDPRMFSLIQVSTQPRRSG

SEQ ID NO: 80660 - protein, 20 aa, Artificial Sequence
  Description of Artificial Sequence: Synthetic peptide
  Seed: GMDPRMCSLMQGSTLPRRSG
GMDPRMFSLIQVSTSPRRSG

SEQ ID NO: 80661 - protein, 20 aa, Artificial Sequence
  Description of Artificial Sequence: Synthetic peptide
  Seed: GMDPRMCSLMQGSTLPRRSG
GMDPRMFSLIQVSTTPRRSG

SEQ ID NO: 80662 - protein, 20 aa, Artificial Sequence
  Description of Artificial Sequence: Synthetic peptide
  Seed: GMDPRMCSLMQGSTLPRRSG
GMDPRMFSLIQVSTVPRRSG

SEQ ID NO: 80663 - protein, 20 aa, Artificial Sequence
  Description of Artificial Sequence: Synthetic peptide
  Seed: GMDPRMCSLMQGSTLPRRSG
GMDPRMFSLKQASTLPRRSG

SEQ ID NO: 80664 - protein, 20 aa, Artificial Sequence
  Description of Artificial Sequence: Synthetic peptide
  Seed: GMDPRMCSLMQGSTLPRRSG
GMDPRMFSLLQASTAPRRSG

SEQ ID NO: 80665 - protein, 20 aa, Artificial Sequence
  Description of Artificial Sequence: Synthetic peptide
  Seed: GMDPRMCSLMQGSTLPRRSG
GMDPRMFSLLQASTCPRRSG

SEQ ID NO: 80666 - protein, 20 aa, Artificial Sequence
  Description of Artificial Sequence: Synthetic peptide
  Seed: GMDPRMCSLMQGSTLPRRSG
GMDPRMFSLLQASTDPRRSG

SEQ ID NO: 80667 - protein, 20 aa, Artificial Sequence
  Description of Artificial Sequence: Synthetic peptide
  Seed: GMDPRMCSLMQGSTLPRRSG
GMDPRMFSLLQASTEPRRSG

SEQ ID NO: 80668 - protein, 20 aa, Artificial Sequence
  Description of Artificial Sequence: Synthetic peptide
  Seed: GMDPRMCSLMQGSTLPRRSG
GMDPRMFSLLQASTFPRRSG

SEQ ID NO: 80669 - protein, 20 aa, Artificial Sequence
  Description of Artificial Sequence: Synthetic peptide
  Seed: GMDPRMCSLMQGSTLPRRSG
GMDPRMFSLLQASTGPRRSG

SEQ ID NO: 80670 - protein, 20 aa, Artificial Sequence
  Description of Artificial Sequence: Synthetic peptide
  Seed: GMDPRMCSLMQGSTLPRRSG
GMDPRMFSLLQASTHPRRSG

SEQ ID NO: 80671 - protein, 20 aa, Artificial Sequence
  Description of Artificial Sequence: Synthetic peptide
  Seed: GMDPRMCSLMQGSTLPRRSG
GMDPRMFSLLQASTIPRRSG

SEQ ID NO: 80672 - protein, 20 aa, Artificial Sequence
  Description of Artificial Sequence: Synthetic peptide
  Seed: GMDPRMCSLMQGSTLPRRSG
GMDPRMFSLLQASTKPRRSG

SEQ ID NO: 80673 - protein, 20 aa, Artificial Sequence
  Description of Artificial Sequence: Synthetic peptide
  Seed: GMDPRMCSLMQGSTLPRRSG
GMDPRMFSLLQASTLPRRSG

SEQ ID NO: 80674 - protein, 20 aa, Artificial Sequence
  Description of Artificial Sequence: Synthetic peptide
  Seed: GMDPRMCSLMQGSTLPRRSG
GMDPRMFSLLQASTMPRRSG

SEQ ID NO: 80675 - protein, 20 aa, Artificial Sequence
  Description of Artificial Sequence: Synthetic peptide
  Seed: GMDPRMCSLMQGSTLPRRSG
GMDPRMFSLLQASTNPRRSG

SEQ ID NO: 80676 - protein, 20 aa, Artificial Sequence
  Description of Artificial Sequence: Synthetic peptide
  Seed: GMDPRMCSLMQGSTLPRRSG
GMDPRMFSLLQASTPPRRSG

SEQ ID NO: 80677 - protein, 20 aa, Artificial Sequence
  Description of Artificial Sequence: Synthetic peptide
  Seed: GMDPRMCSLMQGSTLPRRSG
GMDPRMFSLLQASTQPRRSG

SEQ ID NO: 80678 - protein, 20 aa, Artificial Sequence
  Description of Artificial Sequence: Synthetic peptide
  Seed: GMDPRMCSLMQGSTLPRRSG
GMDPRMFSLLQASTRPRRSG

SEQ ID NO: 80679 - protein, 20 aa, Artificial Sequence
  Description of Artificial Sequence: Synthetic peptide
  Seed: GMDPRMCSLMQGSTLPRRSG
GMDPRMFSLLQASTSPRRSG

SEQ ID NO: 80680 - protein, 20 aa, Artificial Sequence
  Description of Artificial Sequence: Synthetic peptide
  Seed: GMDPRMCSLMQGSTLPRRSG
GMDPRMFSLLQASTTPRRSG

SEQ ID NO: 80681 - protein, 20 aa, Artificial Sequence
  Description of Artificial Sequence: Synthetic peptide
  Seed: GMDPRMCSLMQGSTLPRRSG
GMDPRMFSLLQASTVPRRSG

SEQ ID NO: 80682 - protein, 20 aa, Artificial Sequence
  Description of Artificial Sequence: Synthetic peptide
  Seed: GMDPRMCSLMQGSTLPRRSG
GMDPRMFSLLQASTWPRRSG

SEQ ID NO: 80683 - protein, 20 aa, Artificial Sequence
  Description of Artificial Sequence: Synthetic peptide
  Seed: GMDPRMCSLMQGSTLPRRSG
GMDPRMFSLLQASTYPRRSG

SEQ ID NO: 80684 - protein, 20 aa, Artificial Sequence
  Description of Artificial Sequence: Synthetic peptide
  Seed: GMDPRMCSLMQGSTLPRRSG
GMDPRMFSLLQCSTAPRRSG

SEQ ID NO: 80685 - protein, 20 aa, Artificial Sequence
  Description of Artificial Sequence: Synthetic peptide
  Seed: GMDPRMCSLMQGSTLPRRSG
GMDPRMFSLLQCSTIPRRSG

SEQ ID NO: 80686 - protein, 20 aa, Artificial Sequence
  Description of Artificial Sequence: Synthetic peptide
  Seed: GMDPRMCSLMQGSTLPRRSG
GMDPRMFSLLQCSTLPRRSG

SEQ ID NO: 80687 - protein, 20 aa, Artificial Sequence
  Description of Artificial Sequence: Synthetic peptide
  Seed: GMDPRMCSLMQGSTLPRRSG
GMDPRMFSLLQCSTNPRRSG

SEQ ID NO: 80688 - protein, 20 aa, Artificial Sequence
  Description of Artificial Sequence: Synthetic peptide
  Seed: GMDPRMCSLMQGSTLPRRSG
GMDPRMFSLLQCSTSPRRSG

SEQ ID NO: 80689 - protein, 20 aa, Artificial Sequence
  Description of Artificial Sequence: Synthetic peptide
  Seed: GMDPRMCSLMQGSTLPRRSG
GMDPRMFSLLQCSTVPRRSG

SEQ ID NO: 80690 - protein, 20 aa, Artificial Sequence
  Description of Artificial Sequence: Synthetic peptide
  Seed: GMDPRMCSLMQGSTLPRRSG
GMDPRMFSLLQDSTVPRRSG

SEQ ID NO: 80691 - protein, 20 aa, Artificial Sequence
  Description of Artificial Sequence: Synthetic peptide
  Seed: GMDPRMCSLMQGSTLPRRSG
GMDPRMFSLLQESTAPRRSG

SEQ ID NO: 80692 - protein, 20 aa, Artificial Sequence
  Description of Artificial Sequence: Synthetic peptide
  Seed: GMDPRMCSLMQGSTLPRRSG
GMDPRMFSLLQESTIPRRSG

SEQ ID NO: 80693 - protein, 20 aa, Artificial Sequence
  Description of Artificial Sequence: Synthetic peptide
  Seed: GMDPRMCSLMQGSTLPRRSG
GMDPRMFSLLQESTLPRRSG

SEQ ID NO: 80694 - protein, 20 aa, Artificial Sequence
  Description of Artificial Sequence: Synthetic peptide
  Seed: GMDPRMCSLMQGSTLPRRSG
GMDPRMFSLLQESTVPRRSG

SEQ ID NO: 80695 - protein, 20 aa, Artificial Sequence
  Description of Artificial Sequence: Synthetic peptide
  Seed: GMDPRMCSLMQGSTLPRRSG
GMDPRMFSLLQGSTAPRRSG

SEQ ID NO: 80696 - protein, 20 aa, Artificial Sequence
  Description of Artificial Sequence: Synthetic peptide
  Seed: GMDPRMCSLMQGSTLPRRSG
GMDPRMFSLLQGSTCPRRSG

SEQ ID NO: 80697 - protein, 20 aa, Artificial Sequence
  Description of Artificial Sequence: Synthetic peptide
  Seed: GMDPRMCSLMQGSTLPRRSG
GMDPRMFSLLQGSTDPRRSG

SEQ ID NO: 80698 - protein, 20 aa, Artificial Sequence
  Description of Artificial Sequence: Synthetic peptide
  Seed: GMDPRMCSLMQGSTLPRRSG
GMDPRMFSLLQGSTEPRRSG

SEQ ID NO: 80699 - protein, 20 aa, Artificial Sequence
  Description of Artificial Sequence: Synthetic peptide
  Seed: GMDPRMCSLMQGSTLPRRSG
GMDPRMFSLLQGSTFPRRSG

SEQ ID NO: 80700 - protein, 20 aa, Artificial Sequence
  Description of Artificial Sequence: Synthetic peptide
  Seed: GMDPRMCSLMQGSTLPRRSG
GMDPRMFSLLQGSTGPRRSG

SEQ ID NO: 80701 - protein, 20 aa, Artificial Sequence
  Description of Artificial Sequence: Synthetic peptide
  Seed: GMDPRMCSLMQGSTLPRRSG
GMDPRMFSLLQGSTHPRRSG

SEQ ID NO: 80702 - protein, 20 aa, Artificial Sequence
  Description of Artificial Sequence: Synthetic peptide
  Seed: GMDPRMCSLMQGSTLPRRSG
GMDPRMFSLLQGSTIPRRSG

SEQ ID NO: 80703 - protein, 20 aa, Artificial Sequence
  Description of Artificial Sequence: Synthetic peptide
  Seed: GMDPRMCSLMQGSTLPRRSG
GMDPRMFSLLQGSTLPRRSG

SEQ ID NO: 80704 - protein, 20 aa, Artificial Sequence
  Description of Artificial Sequence: Synthetic peptide
  Seed: GMDPRMCSLMQGSTLPRRSG
GMDPRMFSLLQGSTMPRRSG

SEQ ID NO: 80705 - protein, 20 aa, Artificial Sequence
  Description of Artificial Sequence: Synthetic peptide
  Seed: GMDPRMCSLMQGSTLPRRSG
GMDPRMFSLLQGSTNPRRSG

SEQ ID NO: 80706 - protein, 20 aa, Artificial Sequence
  Description of Artificial Sequence: Synthetic peptide
  Seed: GMDPRMCSLMQGSTLPRRSG
GMDPRMFSLLQGSTPPRRSG

SEQ ID NO: 80707 - protein, 20 aa, Artificial Sequence
  Description of Artificial Sequence: Synthetic peptide
  Seed: GMDPRMCSLMQGSTLPRRSG
GMDPRMFSLLQGSTQPRRSG

SEQ ID NO: 80708 - protein, 20 aa, Artificial Sequence
  Description of Artificial Sequence: Synthetic peptide
  Seed: GMDPRMCSLMQGSTLPRRSG
GMDPRMFSLLQGSTSPRRSG

SEQ ID NO: 80709 - protein, 20 aa, Artificial Sequence
  Description of Artificial Sequence: Synthetic peptide
  Seed: GMDPRMCSLMQGSTLPRRSG
GMDPRMFSLLQGSTTPRRSG

SEQ ID NO: 80710 - protein, 20 aa, Artificial Sequence
  Description of Artificial Sequence: Synthetic peptide
  Seed: GMDPRMCSLMQGSTLPRRSG
GMDPRMFSLLQGSTVPRRSG

SEQ ID NO: 80711 - protein, 20 aa, Artificial Sequence
  Description of Artificial Sequence: Synthetic peptide
  Seed: GMDPRMCSLMQGSTLPRRSG
GMDPRMFSLLQGSTYPRRSG

SEQ ID NO: 80712 - protein, 20 aa, Artificial Sequence
  Description of Artificial Sequence: Synthetic peptide
  Seed: GMDPRMCSLMQGSTLPRRSG
GMDPRMFSLLQHSTAPRRSG

SEQ ID NO: 80713 - protein, 20 aa, Artificial Sequence
  Description of Artificial Sequence: Synthetic peptide
  Seed: GMDPRMCSLMQGSTLPRRSG
GMDPRMFSLLQHSTIPRRSG

SEQ ID NO: 80714 - protein, 20 aa, Artificial Sequence
  Description of Artificial Sequence: Synthetic peptide
  Seed: GMDPRMCSLMQGSTLPRRSG
GMDPRMFSLLQHSTLPRRSG

SEQ ID NO: 80715 - protein, 20 aa, Artificial Sequence
  Description of Artificial Sequence: Synthetic peptide
  Seed: GMDPRMCSLMQGSTLPRRSG
GMDPRMFSLLQHSTVPRRSG

SEQ ID NO: 80716 - protein, 20 aa, Artificial Sequence
  Description of Artificial Sequence: Synthetic peptide
  Seed: GMDPRMCSLMQGSTLPRRSG
GMDPRMFSLLQISTAPRRSG

SEQ ID NO: 80717 - protein, 20 aa, Artificial Sequence
  Description of Artificial Sequence: Synthetic peptide
  Seed: GMDPRMCSLMQGSTLPRRSG
GMDPRMFSLLQISTDPRRSG

SEQ ID NO: 80718 - protein, 20 aa, Artificial Sequence
  Description of Artificial Sequence: Synthetic peptide
  Seed: GMDPRMCSLMQGSTLPRRSG
GMDPRMFSLLQISTEPRRSG

SEQ ID NO: 80719 - protein, 20 aa, Artificial Sequence
  Description of Artificial Sequence: Synthetic peptide
  Seed: GMDPRMCSLMQGSTLPRRSG
GMDPRMFSLLQISTGPRRSG

SEQ ID NO: 80720 - protein, 20 aa, Artificial Sequence
  Description of Artificial Sequence: Synthetic peptide
  Seed: GMDPRMCSLMQGSTLPRRSG
GMDPRMFSLLQISTHPRRSG

SEQ ID NO: 80721 - protein, 20 aa, Artificial Sequence
  Description of Artificial Sequence: Synthetic peptide
  Seed: GMDPRMCSLMQGSTLPRRSG
GMDPRMFSLLQISTIPRRSG

SEQ ID NO: 80722 - protein, 20 aa, Artificial Sequence
  Description of Artificial Sequence: Synthetic peptide
  Seed: GMDPRMCSLMQGSTLPRRSG
GMDPRMFSLLQISTLPRRSG

SEQ ID NO: 80723 - protein, 20 aa, Artificial Sequence
  Description of Artificial Sequence: Synthetic peptide
  Seed: GMDPRMCSLMQGSTLPRRSG
GMDPRMFSLLQISTMPRRSG

SEQ ID NO: 80724 - protein, 20 aa, Artificial Sequence
  Description of Artificial Sequence: Synthetic peptide
  Seed: GMDPRMCSLMQGSTLPRRSG
GMDPRMFSLLQISTNPRRSG

SEQ ID NO: 80725 - protein, 20 aa, Artificial Sequence
  Description of Artificial Sequence: Synthetic peptide
  Seed: GMDPRMCSLMQGSTLPRRSG
GMDPRMFSLLQISTPPRRSG

SEQ ID NO: 80726 - protein, 20 aa, Artificial Sequence
  Description of Artificial Sequence: Synthetic peptide
  Seed: GMDPRMCSLMQGSTLPRRSG
GMDPRMFSLLQISTQPRRSG

SEQ ID NO: 80727 - protein, 20 aa, Artificial Sequence
  Description of Artificial Sequence: Synthetic peptide
  Seed: GMDPRMCSLMQGSTLPRRSG
GMDPRMFSLLQISTSPRRSG

SEQ ID NO: 80728 - protein, 20 aa, Artificial Sequence
  Description of Artificial Sequence: Synthetic peptide
  Seed: GMDPRMCSLMQGSTLPRRSG
GMDPRMFSLLQISTTPRRSG

SEQ ID NO: 80729 - protein, 20 aa, Artificial Sequence
  Description of Artificial Sequence: Synthetic peptide
  Seed: GMDPRMCSLMQGSTLPRRSG
GMDPRMFSLLQISTVPRRSG

SEQ ID NO: 80730 - protein, 20 aa, Artificial Sequence
  Description of Artificial Sequence: Synthetic peptide
  Seed: GMDPRMCSLMQGSTLPRRSG
GMDPRMFSLLQLSTAPRRSG

SEQ ID NO: 80731 - protein, 20 aa, Artificial Sequence
  Description of Artificial Sequence: Synthetic peptide
  Seed: GMDPRMCSLMQGSTLPRRSG
GMDPRMFSLLQLSTGPRRSG

SEQ ID NO: 80732 - protein, 20 aa, Artificial Sequence
  Description of Artificial Sequence: Synthetic peptide
  Seed: GMDPRMCSLMQGSTLPRRSG
GMDPRMFSLLQLSTIPRRSG

SEQ ID NO: 80733 - protein, 20 aa, Artificial Sequence
  Description of Artificial Sequence: Synthetic peptide
  Seed: GMDPRMCSLMQGSTLPRRSG
GMDPRMFSLLQLSTLPRRSG

SEQ ID NO: 80734 - protein, 20 aa, Artificial Sequence
  Description of Artificial Sequence: Synthetic peptide
  Seed: GMDPRMCSLMQGSTLPRRSG
GMDPRMFSLLQLSTMPRRSG

SEQ ID NO: 80735 - protein, 20 aa, Artificial Sequence
  Description of Artificial Sequence: Synthetic peptide
  Seed: GMDPRMCSLMQGSTLPRRSG
GMDPRMFSLLQLSTNPRRSG

SEQ ID NO: 80736 - protein, 20 aa, Artificial Sequence
  Description of Artificial Sequence: Synthetic peptide
  Seed: GMDPRMCSLMQGSTLPRRSG
GMDPRMFSLLQLSTSPRRSG

SEQ ID NO: 80737 - protein, 20 aa, Artificial Sequence
  Description of Artificial Sequence: Synthetic peptide
  Seed: GMDPRMCSLMQGSTLPRRSG
GMDPRMFSLLQLSTTPRRSG

SEQ ID NO: 80738 - protein, 20 aa, Artificial Sequence
  Description of Artificial Sequence: Synthetic peptide
  Seed: GMDPRMCSLMQGSTLPRRSG
GMDPRMFSLLQLSTVPRRSG

SEQ ID NO: 80739 - protein, 20 aa, Artificial Sequence
  Description of Artificial Sequence: Synthetic peptide
  Seed: GMDPRMCSLMQGSTLPRRSG
GMDPRMFSLLQMSTAPRRSG

SEQ ID NO: 80740 - protein, 20 aa, Artificial Sequence
  Description of Artificial Sequence: Synthetic peptide
  Seed: GMDPRMCSLMQGSTLPRRSG
GMDPRMFSLLQMSTGPRRSG

SEQ ID NO: 80741 - protein, 20 aa, Artificial Sequence
  Description of Artificial Sequence: Synthetic peptide
  Seed: GMDPRMCSLMQGSTLPRRSG
GMDPRMFSLLQMSTIPRRSG

SEQ ID NO: 80742 - protein, 20 aa, Artificial Sequence
  Description of Artificial Sequence: Synthetic peptide
  Seed: GMDPRMCSLMQGSTLPRRSG
GMDPRMFSLLQMSTLPRRSG

SEQ ID NO: 80743 - protein, 20 aa, Artificial Sequence
  Description of Artificial Sequence: Synthetic peptide
  Seed: GMDPRMCSLMQGSTLPRRSG
GMDPRMFSLLQMSTMPRRSG

SEQ ID NO: 80744 - protein, 20 aa, Artificial Sequence
  Description of Artificial Sequence: Synthetic peptide
  Seed: GMDPRMCSLMQGSTLPRRSG
GMDPRMFSLLQMSTNPRRSG

SEQ ID NO: 80745 - protein, 20 aa, Artificial Sequence
  Description of Artificial Sequence: Synthetic peptide
  Seed: GMDPRMCSLMQGSTLPRRSG
GMDPRMFSLLQMSTSPRRSG

SEQ ID NO: 80746 - protein, 20 aa, Artificial Sequence
  Description of Artificial Sequence: Synthetic peptide
  Seed: GMDPRMCSLMQGSTLPRRSG
GMDPRMFSLLQMSTTPRRSG

SEQ ID NO: 80747 - protein, 20 aa, Artificial Sequence
  Description of Artificial Sequence: Synthetic peptide
  Seed: GMDPRMCSLMQGSTLPRRSG
GMDPRMFSLLQMSTVPRRSG

SEQ ID NO: 80748 - protein, 20 aa, Artificial Sequence
  Description of Artificial Sequence: Synthetic peptide
  Seed: GMDPRMCSLMQGSTLPRRSG
GMDPRMFSLLQNSTAPRRSG

SEQ ID NO: 80749 - protein, 20 aa, Artificial Sequence
  Description of Artificial Sequence: Synthetic peptide
  Seed: GMDPRMCSLMQGSTLPRRSG
GMDPRMFSLLQNSTCPRRSG

SEQ ID NO: 80750 - protein, 20 aa, Artificial Sequence
  Description of Artificial Sequence: Synthetic peptide
  Seed: GMDPRMCSLMQGSTLPRRSG
GMDPRMFSLLQNSTDPRRSG

SEQ ID NO: 80751 - protein, 20 aa, Artificial Sequence
  Description of Artificial Sequence: Synthetic peptide
  Seed: GMDPRMCSLMQGSTLPRRSG
GMDPRMFSLLQNSTFPRRSG

SEQ ID NO: 80752 - protein, 20 aa, Artificial Sequence
  Description of Artificial Sequence: Synthetic peptide
  Seed: GMDPRMCSLMQGSTLPRRSG
GMDPRMFSLLQNSTGPRRSG

SEQ ID NO: 80753 - protein, 20 aa, Artificial Sequence
  Description of Artificial Sequence: Synthetic peptide
  Seed: GMDPRMCSLMQGSTLPRRSG
GMDPRMFSLLQNSTHPRRSG

SEQ ID NO: 80754 - protein, 20 aa, Artificial Sequence
  Description of Artificial Sequence: Synthetic peptide
  Seed: GMDPRMCSLMQGSTLPRRSG
GMDPRMFSLLQNSTIPRRSG

SEQ ID NO: 80755 - protein, 20 aa, Artificial Sequence
  Description of Artificial Sequence: Synthetic peptide
  Seed: GMDPRMCSLMQGSTLPRRSG
GMDPRMFSLLQNSTLPRRSG

SEQ ID NO: 80756 - protein, 20 aa, Artificial Sequence
  Description of Artificial Sequence: Synthetic peptide
  Seed: GMDPRMCSLMQGSTLPRRSG
GMDPRMFSLLQNSTMPRRSG

SEQ ID NO: 80757 - protein, 20 aa, Artificial Sequence
  Description of Artificial Sequence: Synthetic peptide
  Seed: GMDPRMCSLMQGSTLPRRSG
GMDPRMFSLLQNSTNPRRSG

SEQ ID NO: 80758 - protein, 20 aa, Artificial Sequence
  Description of Artificial Sequence: Synthetic peptide
  Seed: GMDPRMCSLMQGSTLPRRSG
GMDPRMFSLLQNSTQPRRSG

SEQ ID NO: 80759 - protein, 20 aa, Artificial Sequence
  Description of Artificial Sequence: Synthetic peptide
  Seed: GMDPRMCSLMQGSTLPRRSG
GMDPRMFSLLQNSTSPRRSG

SEQ ID NO: 80760 - protein, 20 aa, Artificial Sequence
  Description of Artificial Sequence: Synthetic peptide
  Seed: GMDPRMCSLMQGSTLPRRSG
GMDPRMFSLLQNSTTPRRSG

SEQ ID NO: 80761 - protein, 20 aa, Artificial Sequence
  Description of Artificial Sequence: Synthetic peptide
  Seed: GMDPRMCSLMQGSTLPRRSG
GMDPRMFSLLQNSTVPRRSG

SEQ ID NO: 80762 - protein, 20 aa, Artificial Sequence
  Description of Artificial Sequence: Synthetic peptide
  Seed: GMDPRMCSLMQGSTLPRRSG
GMDPRMFSLLQPSTAPRRSG

SEQ ID NO: 80763 - protein, 20 aa, Artificial Sequence
  Description of Artificial Sequence: Synthetic peptide
  Seed: GMDPRMCSLMQGSTLPRRSG
GMDPRMFSLLQPSTCPRRSG

SEQ ID NO: 80764 - protein, 20 aa, Artificial Sequence
  Description of Artificial Sequence: Synthetic peptide
  Seed: GMDPRMCSLMQGSTLPRRSG
GMDPRMFSLLQPSTDPRRSG

SEQ ID NO: 80765 - protein, 20 aa, Artificial Sequence
  Description of Artificial Sequence: Synthetic peptide
  Seed: GMDPRMCSLMQGSTLPRRSG
GMDPRMFSLLQPSTEPRRSG

SEQ ID NO: 80766 - protein, 20 aa, Artificial Sequence
  Description of Artificial Sequence: Synthetic peptide
  Seed: GMDPRMCSLMQGSTLPRRSG
GMDPRMFSLLQPSTFPRRSG

SEQ ID NO: 80767 - protein, 20 aa, Artificial Sequence
  Description of Artificial Sequence: Synthetic peptide
  Seed: GMDPRMCSLMQGSTLPRRSG
GMDPRMFSLLQPSTGPRRSG

SEQ ID NO: 80768 - protein, 20 aa, Artificial Sequence
  Description of Artificial Sequence: Synthetic peptide
  Seed: GMDPRMCSLMQGSTLPRRSG
GMDPRMFSLLQPSTHPRRSG

SEQ ID NO: 80769 - protein, 20 aa, Artificial Sequence
  Description of Artificial Sequence: Synthetic peptide
  Seed: GMDPRMCSLMQGSTLPRRSG
GMDPRMFSLLQPSTIPRRSG

SEQ ID NO: 80770 - protein, 20 aa, Artificial Sequence
  Description of Artificial Sequence: Synthetic peptide
  Seed: GMDPRMCSLMQGSTLPRRSG
GMDPRMFSLLQPSTLPRRSG

SEQ ID NO: 80771 - protein, 20 aa, Artificial Sequence
  Description of Artificial Sequence: Synthetic peptide
  Seed: GMDPRMCSLMQGSTLPRRSG
GMDPRMFSLLQPSTMPRRSG

SEQ ID NO: 80772 - protein, 20 aa, Artificial Sequence
  Description of Artificial Sequence: Synthetic peptide
  Seed: GMDPRMCSLMQGSTLPRRSG
GMDPRMFSLLQPSTNPRRSG

SEQ ID NO: 80773 - protein, 20 aa, Artificial Sequence
  Description of Artificial Sequence: Synthetic peptide
  Seed: GMDPRMCSLMQGSTLPRRSG
GMDPRMFSLLQPSTPPRRSG

SEQ ID NO: 80774 - protein, 20 aa, Artificial Sequence
  Description of Artificial Sequence: Synthetic peptide
  Seed: GMDPRMCSLMQGSTLPRRSG
GMDPRMFSLLQPSTQPRRSG

SEQ ID NO: 80775 - protein, 20 aa, Artificial Sequence
  Description of Artificial Sequence: Synthetic peptide
  Seed: GMDPRMCSLMQGSTLPRRSG
GMDPRMFSLLQPSTSPRRSG

SEQ ID NO: 80776 - protein, 20 aa, Artificial Sequence
  Description of Artificial Sequence: Synthetic peptide
  Seed: GMDPRMCSLMQGSTLPRRSG
GMDPRMFSLLQPSTTPRRSG

SEQ ID NO: 80777 - protein, 20 aa, Artificial Sequence
  Description of Artificial Sequence: Synthetic peptide
  Seed: GMDPRMCSLMQGSTLPRRSG
GMDPRMFSLLQPSTVPRRSG

SEQ ID NO: 80778 - protein, 20 aa, Artificial Sequence
  Description of Artificial Sequence: Synthetic peptide
  Seed: GMDPRMCSLMQGSTLPRRSG
GMDPRMFSLLQPSTWPRRSG

SEQ ID NO: 80779 - protein, 20 aa, Artificial Sequence
  Description of Artificial Sequence: Synthetic peptide
  Seed: GMDPRMCSLMQGSTLPRRSG
GMDPRMFSLLQPSTYPRRSG

SEQ ID NO: 80780 - protein, 20 aa, Artificial Sequence
  Description of Artificial Sequence: Synthetic peptide
  Seed: GMDPRMCSLMQGSTLPRRSG
GMDPRMFSLLQQSTAPRRSG

SEQ ID NO: 80781 - protein, 20 aa, Artificial Sequence
  Description of Artificial Sequence: Synthetic peptide
  Seed: GMDPRMCSLMQGSTLPRRSG
GMDPRMFSLLQQSTIPRRSG

SEQ ID NO: 80782 - protein, 20 aa, Artificial Sequence
  Description of Artificial Sequence: Synthetic peptide
  Seed: GMDPRMCSLMQGSTLPRRSG
GMDPRMFSLLQQSTLPRRSG

SEQ ID NO: 80783 - protein, 20 aa, Artificial Sequence
  Description of Artificial Sequence: Synthetic peptide
  Seed: GMDPRMCSLMQGSTLPRRSG
GMDPRMFSLLQQSTVPRRSG

SEQ ID NO: 80784 - protein, 20 aa, Artificial Sequence
  Description of Artificial Sequence: Synthetic peptide
  Seed: GMDPRMCSLMQGSTLPRRSG
GMDPRMFSLLQSSTAPRRSG

SEQ ID NO: 80785 - protein, 20 aa, Artificial Sequence
  Description of Artificial Sequence: Synthetic peptide
  Seed: GMDPRMCSLMQGSTLPRRSG
GMDPRMFSLLQSSTCPRRSG

SEQ ID NO: 80786 - protein, 20 aa, Artificial Sequence
  Description of Artificial Sequence: Synthetic peptide
  Seed: GMDPRMCSLMQGSTLPRRSG
GMDPRMFSLLQSSTDPRRSG

SEQ ID NO: 80787 - protein, 20 aa, Artificial Sequence
  Description of Artificial Sequence: Synthetic peptide
  Seed: GMDPRMCSLMQGSTLPRRSG
GMDPRMFSLLQSSTEPRRSG

SEQ ID NO: 80788 - protein, 20 aa, Artificial Sequence
  Description of Artificial Sequence: Synthetic peptide
  Seed: GMDPRMCSLMQGSTLPRRSG
GMDPRMFSLLQSSTFPRRSG

SEQ ID NO: 80789 - protein, 20 aa, Artificial Sequence
  Description of Artificial Sequence: Synthetic peptide
  Seed: GMDPRMCSLMQGSTLPRRSG
GMDPRMFSLLQSSTGPRRSG

SEQ ID NO: 80790 - protein, 20 aa, Artificial Sequence
  Description of Artificial Sequence: Synthetic peptide
  Seed: GMDPRMCSLMQGSTLPRRSG
GMDPRMFSLLQSSTHPRRSG

SEQ ID NO: 80791 - protein, 20 aa, Artificial Sequence
  Description of Artificial Sequence: Synthetic peptide
  Seed: GMDPRMCSLMQGSTLPRRSG
GMDPRMFSLLQSSTIPRRSG

SEQ ID NO: 80792 - protein, 20 aa, Artificial Sequence
  Description of Artificial Sequence: Synthetic peptide
  Seed: GMDPRMCSLMQGSTLPRRSG
GMDPRMFSLLQSSTLPRRSG

SEQ ID NO: 80793 - protein, 20 aa, Artificial Sequence
  Description of Artificial Sequence: Synthetic peptide
  Seed: GMDPRMCSLMQGSTLPRRSG
GMDPRMFSLLQSSTMPRRSG

SEQ ID NO: 80794 - protein, 20 aa, Artificial Sequence
  Description of Artificial Sequence: Synthetic peptide
  Seed: GMDPRMCSLMQGSTLPRRSG
GMDPRMFSLLQSSTNPRRSG

SEQ ID NO: 80795 - protein, 20 aa, Artificial Sequence
  Description of Artificial Sequence: Synthetic peptide
  Seed: GMDPRMCSLMQGSTLPRRSG
GMDPRMFSLLQSSTPPRRSG

SEQ ID NO: 80796 - protein, 20 aa, Artificial Sequence
  Description of Artificial Sequence: Synthetic peptide
  Seed: GMDPRMCSLMQGSTLPRRSG
GMDPRMFSLLQSSTQPRRSG

SEQ ID NO: 80797 - protein, 20 aa, Artificial Sequence
  Description of Artificial Sequence: Synthetic peptide
  Seed: GMDPRMCSLMQGSTLPRRSG
GMDPRMFSLLQSSTSPRRSG

SEQ ID NO: 80798 - protein, 20 aa, Artificial Sequence
  Description of Artificial Sequence: Synthetic peptide
  Seed: GMDPRMCSLMQGSTLPRRSG
GMDPRMFSLLQSSTTPRRSG

SEQ ID NO: 80799 - protein, 20 aa, Artificial Sequence
  Description of Artificial Sequence: Synthetic peptide
  Seed: GMDPRMCSLMQGSTLPRRSG
GMDPRMFSLLQSSTVPRRSG

SEQ ID NO: 80800 - protein, 20 aa, Artificial Sequence
  Description of Artificial Sequence: Synthetic peptide
  Seed: GMDPRMCSLMQGSTLPRRSG
GMDPRMFSLLQSSTYPRRSG

SEQ ID NO: 80801 - protein, 20 aa, Artificial Sequence
  Description of Artificial Sequence: Synthetic peptide
  Seed: GMDPRMCSLMQGSTLPRRSG
GMDPRMFSLLQTSTAPRRSG

SEQ ID NO: 80802 - protein, 20 aa, Artificial Sequence
  Description of Artificial Sequence: Synthetic peptide
  Seed: GMDPRMCSLMQGSTLPRRSG
GMDPRMFSLLQTSTCPRRSG

SEQ ID NO: 80803 - protein, 20 aa, Artificial Sequence
  Description of Artificial Sequence: Synthetic peptide
  Seed: GMDPRMCSLMQGSTLPRRSG
GMDPRMFSLLQTSTDPRRSG

SEQ ID NO: 80804 - protein, 20 aa, Artificial Sequence
  Description of Artificial Sequence: Synthetic peptide
  Seed: GMDPRMCSLMQGSTLPRRSG
GMDPRMFSLLQTSTEPRRSG

SEQ ID NO: 80805 - protein, 20 aa, Artificial Sequence
  Description of Artificial Sequence: Synthetic peptide
  Seed: GMDPRMCSLMQGSTLPRRSG
GMDPRMFSLLQTSTFPRRSG

SEQ ID NO: 80806 - protein, 20 aa, Artificial Sequence
  Description of Artificial Sequence: Synthetic peptide
  Seed: GMDPRMCSLMQGSTLPRRSG
GMDPRMFSLLQTSTGPRRSG

SEQ ID NO: 80807 - protein, 20 aa, Artificial Sequence
  Description of Artificial Sequence: Synthetic peptide
  Seed: GMDPRMCSLMQGSTLPRRSG
GMDPRMFSLLQTSTHPRRSG

SEQ ID NO: 80808 - protein, 20 aa, Artificial Sequence
  Description of Artificial Sequence: Synthetic peptide
  Seed: GMDPRMCSLMQGSTLPRRSG
GMDPRMFSLLQTSTIPRRSG

SEQ ID NO: 80809 - protein, 20 aa, Artificial Sequence
  Description of Artificial Sequence: Synthetic peptide
  Seed: GMDPRMCSLMQGSTLPRRSG
GMDPRMFSLLQTSTLPRRSG

SEQ ID NO: 80810 - protein, 20 aa, Artificial Sequence
  Description of Artificial Sequence: Synthetic peptide
  Seed: GMDPRMCSLMQGSTLPRRSG
GMDPRMFSLLQTSTMPRRSG

SEQ ID NO: 80811 - protein, 20 aa, Artificial Sequence
  Description of Artificial Sequence: Synthetic peptide
  Seed: GMDPRMCSLMQGSTLPRRSG
GMDPRMFSLLQTSTNPRRSG

SEQ ID NO: 80812 - protein, 20 aa, Artificial Sequence
  Description of Artificial Sequence: Synthetic peptide
  Seed: GMDPRMCSLMQGSTLPRRSG
GMDPRMFSLLQTSTPPRRSG

SEQ ID NO: 80813 - protein, 20 aa, Artificial Sequence
  Description of Artificial Sequence: Synthetic peptide
  Seed: GMDPRMCSLMQGSTLPRRSG
GMDPRMFSLLQTSTQPRRSG

SEQ ID NO: 80814 - protein, 20 aa, Artificial Sequence
  Description of Artificial Sequence: Synthetic peptide
  Seed: GMDPRMCSLMQGSTLPRRSG
GMDPRMFSLLQTSTSPRRSG

SEQ ID NO: 80815 - protein, 20 aa, Artificial Sequence
  Description of Artificial Sequence: Synthetic peptide
  Seed: GMDPRMCSLMQGSTLPRRSG
GMDPRMFSLLQTSTTPRRSG

SEQ ID NO: 80816 - protein, 20 aa, Artificial Sequence
  Description of Artificial Sequence: Synthetic peptide
  Seed: GMDPRMCSLMQGSTLPRRSG
GMDPRMFSLLQTSTVPRRSG

SEQ ID NO: 80817 - protein, 20 aa, Artificial Sequence
  Description of Artificial Sequence: Synthetic peptide
  Seed: GMDPRMCSLMQGSTLPRRSG
GMDPRMFSLLQTSTYPRRSG

SEQ ID NO: 80818 - protein, 20 aa, Artificial Sequence
  Description of Artificial Sequence: Synthetic peptide
  Seed: GMDPRMCSLMQGSTLPRRSG
GMDPRMFSLLQVSTAPRRSG

SEQ ID NO: 80819 - protein, 20 aa, Artificial Sequence
  Description of Artificial Sequence: Synthetic peptide
  Seed: GMDPRMCSLMQGSTLPRRSG
GMDPRMFSLLQVSTCPRRSG

SEQ ID NO: 80820 - protein, 20 aa, Artificial Sequence
  Description of Artificial Sequence: Synthetic peptide
  Seed: GMDPRMCSLMQGSTLPRRSG
GMDPRMFSLLQVSTDPRRSG

SEQ ID NO: 80821 - protein, 20 aa, Artificial Sequence
  Description of Artificial Sequence: Synthetic peptide
  Seed: GMDPRMCSLMQGSTLPRRSG
GMDPRMFSLLQVSTEPRRSG

SEQ ID NO: 80822 - protein, 20 aa, Artificial Sequence
  Description of Artificial Sequence: Synthetic peptide
  Seed: GMDPRMCSLMQGSTLPRRSG
GMDPRMFSLLQVSTGPRRSG

SEQ ID NO: 80823 - protein, 20 aa, Artificial Sequence
  Description of Artificial Sequence: Synthetic peptide
  Seed: GMDPRMCSLMQGSTLPRRSG
GMDPRMFSLLQVSTHPRRSG

SEQ ID NO: 80824 - protein, 20 aa, Artificial Sequence
  Description of Artificial Sequence: Synthetic peptide
  Seed: GMDPRMCSLMQGSTLPRRSG
GMDPRMFSLLQVSTIPRRSG

SEQ ID NO: 80825 - protein, 20 aa, Artificial Sequence
  Description of Artificial Sequence: Synthetic peptide
  Seed: GMDPRMCSLMQGSTLPRRSG
GMDPRMFSLLQVSTLPRRSG

SEQ ID NO: 80826 - protein, 20 aa, Artificial Sequence
  Description of Artificial Sequence: Synthetic peptide
  Seed: GMDPRMCSLMQGSTLPRRSG
GMDPRMFSLLQVSTMPRRSG

SEQ ID NO: 80827 - protein, 20 aa, Artificial Sequence
  Description of Artificial Sequence: Synthetic peptide
  Seed: GMDPRMCSLMQGSTLPRRSG
GMDPRMFSLLQVSTNPRRSG

SEQ ID NO: 80828 - protein, 20 aa, Artificial Sequence
  Description of Artificial Sequence: Synthetic peptide
  Seed: GMDPRMCSLMQGSTLPRRSG
GMDPRMFSLLQVSTPPRRSG

SEQ ID NO: 80829 - protein, 20 aa, Artificial Sequence
  Description of Artificial Sequence: Synthetic peptide
  Seed: GMDPRMCSLMQGSTLPRRSG
GMDPRMFSLLQVSTQPRRSG

SEQ ID NO: 80830 - protein, 20 aa, Artificial Sequence
  Description of Artificial Sequence: Synthetic peptide
  Seed: GMDPRMCSLMQGSTLPRRSG
GMDPRMFSLLQVSTSPRRSG

SEQ ID NO: 80831 - protein, 20 aa, Artificial Sequence
  Description of Artificial Sequence: Synthetic peptide
  Seed: GMDPRMCSLMQGSTLPRRSG
GMDPRMFSLLQVSTTPRRSG

SEQ ID NO: 80832 - protein, 20 aa, Artificial Sequence
  Description of Artificial Sequence: Synthetic peptide
  Seed: GMDPRMCSLMQGSTLPRRSG
GMDPRMFSLLQVSTVPRRSG

SEQ ID NO: 80833 - protein, 20 aa, Artificial Sequence
  Description of Artificial Sequence: Synthetic peptide
  Seed: GMDPRMCSLMQGSTLPRRSG
GMDPRMFSLMQASTAPRRSG

SEQ ID NO: 80834 - protein, 20 aa, Artificial Sequence
  Description of Artificial Sequence: Synthetic peptide
  Seed: GMDPRMCSLMQGSTLPRRSG
GMDPRMFSLMQASTCPRRSG

SEQ ID NO: 80835 - protein, 20 aa, Artificial Sequence
  Description of Artificial Sequence: Synthetic peptide
  Seed: GMDPRMCSLMQGSTLPRRSG
GMDPRMFSLMQASTDPRRSG

SEQ ID NO: 80836 - protein, 20 aa, Artificial Sequence
  Description of Artificial Sequence: Synthetic peptide
  Seed: GMDPRMCSLMQGSTLPRRSG
GMDPRMFSLMQASTEPRRSG

SEQ ID NO: 80837 - protein, 20 aa, Artificial Sequence
  Description of Artificial Sequence: Synthetic peptide
  Seed: GMDPRMCSLMQGSTLPRRSG
GMDPRMFSLMQASTFPRRSG

SEQ ID NO: 80838 - protein, 20 aa, Artificial Sequence
  Description of Artificial Sequence: Synthetic peptide
  Seed: GMDPRMCSLMQGSTLPRRSG
GMDPRMFSLMQASTGPRRSG

SEQ ID NO: 80839 - protein, 20 aa, Artificial Sequence
  Description of Artificial Sequence: Synthetic peptide
  Seed: GMDPRMCSLMQGSTLPRRSG
GMDPRMFSLMQASTHPRRSG

SEQ ID NO: 80840 - protein, 20 aa, Artificial Sequence
  Description of Artificial Sequence: Synthetic peptide
  Seed: GMDPRMCSLMQGSTLPRRSG
GMDPRMFSLMQASTIPRRSG

SEQ ID NO: 80841 - protein, 20 aa, Artificial Sequence
  Description of Artificial Sequence: Synthetic peptide
  Seed: GMDPRMCSLMQGSTLPRRSG
GMDPRMFSLMQASTKPRRSG

SEQ ID NO: 80842 - protein, 20 aa, Artificial Sequence
  Description of Artificial Sequence: Synthetic peptide
  Seed: GMDPRMCSLMQGSTLPRRSG
GMDPRMFSLMQASTLPRRSG

SEQ ID NO: 80843 - protein, 20 aa, Artificial Sequence
  Description of Artificial Sequence: Synthetic peptide
  Seed: GMDPRMCSLMQGSTLPRRSG
GMDPRMFSLMQASTMPRRSG

SEQ ID NO: 80844 - protein, 20 aa, Artificial Sequence
  Description of Artificial Sequence: Synthetic peptide
  Seed: GMDPRMCSLMQGSTLPRRSG
GMDPRMFSLMQASTNPRRSG

SEQ ID NO: 80845 - protein, 20 aa, Artificial Sequence
  Description of Artificial Sequence: Synthetic peptide
  Seed: GMDPRMCSLMQGSTLPRRSG
GMDPRMFSLMQASTPPRRSG

SEQ ID NO: 80846 - protein, 20 aa, Artificial Sequence
  Description of Artificial Sequence: Synthetic peptide
  Seed: GMDPRMCSLMQGSTLPRRSG
GMDPRMFSLMQASTQPRRSG

SEQ ID NO: 80847 - protein, 20 aa, Artificial Sequence
  Description of Artificial Sequence: Synthetic peptide
  Seed: GMDPRMCSLMQGSTLPRRSG
GMDPRMFSLMQASTRPRRSG

SEQ ID NO: 80848 - protein, 20 aa, Artificial Sequence
  Description of Artificial Sequence: Synthetic peptide
  Seed: GMDPRMCSLMQGSTLPRRSG
GMDPRMFSLMQASTSPRRSG

SEQ ID NO: 80849 - protein, 20 aa, Artificial Sequence
  Description of Artificial Sequence: Synthetic peptide
  Seed: GMDPRMCSLMQGSTLPRRSG
GMDPRMFSLMQASTTPRRSG

SEQ ID NO: 80850 - protein, 20 aa, Artificial Sequence
  Description of Artificial Sequence: Synthetic peptide
  Seed: GMDPRMCSLMQGSTLPRRSG
GMDPRMFSLMQASTVPRRSG

SEQ ID NO: 80851 - protein, 20 aa, Artificial Sequence
  Description of Artificial Sequence: Synthetic peptide
  Seed: GMDPRMCSLMQGSTLPRRSG
GMDPRMFSLMQASTWPRRSG

SEQ ID NO: 80852 - protein, 20 aa, Artificial Sequence
  Description of Artificial Sequence: Synthetic peptide
  Seed: GMDPRMCSLMQGSTLPRRSG
GMDPRMFSLMQASTYPRRSG

SEQ ID NO: 80853 - protein, 20 aa, Artificial Sequence
  Description of Artificial Sequence: Synthetic peptide
  Seed: GMDPRMCSLMQGSTLPRRSG
GMDPRMFSLMQCSTAPRRSG

SEQ ID NO: 80854 - protein, 20 aa, Artificial Sequence
  Description of Artificial Sequence: Synthetic peptide
  Seed: GMDPRMCSLMQGSTLPRRSG
GMDPRMFSLMQCSTIPRRSG

SEQ ID NO: 80855 - protein, 20 aa, Artificial Sequence
  Description of Artificial Sequence: Synthetic peptide
  Seed: GMDPRMCSLMQGSTLPRRSG
GMDPRMFSLMQCSTLPRRSG

SEQ ID NO: 80856 - protein, 20 aa, Artificial Sequence
  Description of Artificial Sequence: Synthetic peptide
  Seed: GMDPRMCSLMQGSTLPRRSG
GMDPRMFSLMQCSTNPRRSG

SEQ ID NO: 80857 - protein, 20 aa, Artificial Sequence
  Description of Artificial Sequence: Synthetic peptide
  Seed: GMDPRMCSLMQGSTLPRRSG
GMDPRMFSLMQCSTSPRRSG

SEQ ID NO: 80858 - protein, 20 aa, Artificial Sequence
  Description of Artificial Sequence: Synthetic peptide
  Seed: GMDPRMCSLMQGSTLPRRSG
GMDPRMFSLMQCSTVPRRSG

SEQ ID NO: 80859 - protein, 20 aa, Artificial Sequence
  Description of Artificial Sequence: Synthetic peptide
  Seed: GMDPRMCSLMQGSTLPRRSG
GMDPRMFSLMQDSTIPRRSG

SEQ ID NO: 80860 - protein, 20 aa, Artificial Sequence
  Description of Artificial Sequence: Synthetic peptide
  Seed: GMDPRMCSLMQGSTLPRRSG
GMDPRMFSLMQDSTLPRRSG

SEQ ID NO: 80861 - protein, 20 aa, Artificial Sequence
  Description of Artificial Sequence: Synthetic peptide
  Seed: GMDPRMCSLMQGSTLPRRSG
GMDPRMFSLMQDSTVPRRSG

SEQ ID NO: 80862 - protein, 20 aa, Artificial Sequence
  Description of Artificial Sequence: Synthetic peptide
  Seed: GMDPRMCSLMQGSTLPRRSG
GMDPRMFSLMQESTAPRRSG

SEQ ID NO: 80863 - protein, 20 aa, Artificial Sequence
  Description of Artificial Sequence: Synthetic peptide
  Seed: GMDPRMCSLMQGSTLPRRSG
GMDPRMFSLMQESTIPRRSG

SEQ ID NO: 80864 - protein, 20 aa, Artificial Sequence
  Description of Artificial Sequence: Synthetic peptide
  Seed: GMDPRMCSLMQGSTLPRRSG
GMDPRMFSLMQESTLPRRSG

SEQ ID NO: 80865 - protein, 20 aa, Artificial Sequence
  Description of Artificial Sequence: Synthetic peptide
  Seed: GMDPRMCSLMQGSTLPRRSG
GMDPRMFSLMQESTNPRRSG

SEQ ID NO: 80866 - protein, 20 aa, Artificial Sequence
  Description of Artificial Sequence: Synthetic peptide
  Seed: GMDPRMCSLMQGSTLPRRSG
GMDPRMFSLMQESTSPRRSG

SEQ ID NO: 80867 - protein, 20 aa, Artificial Sequence
  Description of Artificial Sequence: Synthetic peptide
  Seed: GMDPRMCSLMQGSTLPRRSG
GMDPRMFSLMQESTTPRRSG

SEQ ID NO: 80868 - protein, 20 aa, Artificial Sequence
  Description of Artificial Sequence: Synthetic peptide
  Seed: GMDPRMCSLMQGSTLPRRSG
GMDPRMFSLMQESTVPRRSG

SEQ ID NO: 80869 - protein, 20 aa, Artificial Sequence
  Description of Artificial Sequence: Synthetic peptide
  Seed: GMDPRMCSLMQGSTLPRRSG
GMDPRMFSLMQFSTAPRRSG

SEQ ID NO: 80870 - protein, 20 aa, Artificial Sequence
  Description of Artificial Sequence: Synthetic peptide
  Seed: GMDPRMCSLMQGSTLPRRSG
GMDPRMFSLMQGSTAPRRSG

SEQ ID NO: 80871 - protein, 20 aa, Artificial Sequence
  Description of Artificial Sequence: Synthetic peptide
  Seed: GMDPRMCSLMQGSTLPRRSG
GMDPRMFSLMQGSTCPRRSG

SEQ ID NO: 80872 - protein, 20 aa, Artificial Sequence
  Description of Artificial Sequence: Synthetic peptide
  Seed: GMDPRMCSLMQGSTLPRRSG
GMDPRMFSLMQGSTDPRRSG

SEQ ID NO: 80873 - protein, 20 aa, Artificial Sequence
  Description of Artificial Sequence: Synthetic peptide
  Seed: GMDPRMCSLMQGSTLPRRSG
GMDPRMFSLMQGSTEPRRSG

SEQ ID NO: 80874 - protein, 20 aa, Artificial Sequence
  Description of Artificial Sequence: Synthetic peptide
  Seed: GMDPRMCSLMQGSTLPRRSG
GMDPRMFSLMQGSTFPRRSG

SEQ ID NO: 80875 - protein, 20 aa, Artificial Sequence
  Description of Artificial Sequence: Synthetic peptide
  Seed: GMDPRMCSLMQGSTLPRRSG
GMDPRMFSLMQGSTGPRRSG

SEQ ID NO: 80876 - protein, 20 aa, Artificial Sequence
  Description of Artificial Sequence: Synthetic peptide
  Seed: GMDPRMCSLMQGSTLPRRSG
GMDPRMFSLMQGSTHPRRSG

SEQ ID NO: 80877 - protein, 20 aa, Artificial Sequence
  Description of Artificial Sequence: Synthetic peptide
  Seed: GMDPRMCSLMQGSTLPRRSG
GMDPRMFSLMQGSTIPRRSG

SEQ ID NO: 80878 - protein, 20 aa, Artificial Sequence
  Description of Artificial Sequence: Synthetic peptide
  Seed: GMDPRMCSLMQGSTLPRRSG
GMDPRMFSLMQGSTLPRRSG

SEQ ID NO: 80879 - protein, 20 aa, Artificial Sequence
  Description of Artificial Sequence: Synthetic peptide
  Seed: GMDPRMCSLMQGSTLPRRSG
GMDPRMFSLMQGSTMPRRSG

SEQ ID NO: 80880 - protein, 20 aa, Artificial Sequence
  Description of Artificial Sequence: Synthetic peptide
  Seed: GMDPRMCSLMQGSTLPRRSG
GMDPRMFSLMQGSTNPRRSG

SEQ ID NO: 80881 - protein, 20 aa, Artificial Sequence
  Description of Artificial Sequence: Synthetic peptide
  Seed: GMDPRMCSLMQGSTLPRRSG
GMDPRMFSLMQGSTPPRRSG

SEQ ID NO: 80882 - protein, 20 aa, Artificial Sequence
  Description of Artificial Sequence: Synthetic peptide
  Seed: GMDPRMCSLMQGSTLPRRSG
GMDPRMFSLMQGSTQPRRSG

SEQ ID NO: 80883 - protein, 20 aa, Artificial Sequence
  Description of Artificial Sequence: Synthetic peptide
  Seed: GMDPRMCSLMQGSTLPRRSG
GMDPRMFSLMQGSTSPRRSG

SEQ ID NO: 80884 - protein, 20 aa, Artificial Sequence
  Description of Artificial Sequence: Synthetic peptide
  Seed: GMDPRMCSLMQGSTLPRRSG
GMDPRMFSLMQGSTTPRRSG

SEQ ID NO: 80885 - protein, 20 aa, Artificial Sequence
  Description of Artificial Sequence: Synthetic peptide
  Seed: GMDPRMCSLMQGSTLPRRSG
GMDPRMFSLMQGSTVPRRSG

SEQ ID NO: 80886 - protein, 20 aa, Artificial Sequence
  Description of Artificial Sequence: Synthetic peptide
  Seed: GMDPRMCSLMQGSTLPRRSG
GMDPRMFSLMQGSTYPRRSG

SEQ ID NO: 80887 - protein, 20 aa, Artificial Sequence
  Description of Artificial Sequence: Synthetic peptide
  Seed: GMDPRMCSLMQGSTLPRRSG
GMDPRMFSLMQHSTAPRRSG

SEQ ID NO: 80888 - protein, 20 aa, Artificial Sequence
  Description of Artificial Sequence: Synthetic peptide
  Seed: GMDPRMCSLMQGSTLPRRSG
GMDPRMFSLMQHSTIPRRSG

SEQ ID NO: 80889 - protein, 20 aa, Artificial Sequence
  Description of Artificial Sequence: Synthetic peptide
  Seed: GMDPRMCSLMQGSTLPRRSG
GMDPRMFSLMQHSTLPRRSG

SEQ ID NO: 80890 - protein, 20 aa, Artificial Sequence
  Description of Artificial Sequence: Synthetic peptide
  Seed: GMDPRMCSLMQGSTLPRRSG
GMDPRMFSLMQHSTMPRRSG

SEQ ID NO: 80891 - protein, 20 aa, Artificial Sequence
  Description of Artificial Sequence: Synthetic peptide
  Seed: GMDPRMCSLMQGSTLPRRSG
GMDPRMFSLMQHSTNPRRSG

SEQ ID NO: 80892 - protein, 20 aa, Artificial Sequence
  Description of Artificial Sequence: Synthetic peptide
  Seed: GMDPRMCSLMQGSTLPRRSG
GMDPRMFSLMQHSTSPRRSG

SEQ ID NO: 80893 - protein, 20 aa, Artificial Sequence
  Description of Artificial Sequence: Synthetic peptide
  Seed: GMDPRMCSLMQGSTLPRRSG
GMDPRMFSLMQHSTVPRRSG

SEQ ID NO: 80894 - protein, 20 aa, Artificial Sequence
  Description of Artificial Sequence: Synthetic peptide
  Seed: GMDPRMCSLMQGSTLPRRSG
GMDPRMFSLMQISTAPRRSG

SEQ ID NO: 80895 - protein, 20 aa, Artificial Sequence
  Description of Artificial Sequence: Synthetic peptide
  Seed: GMDPRMCSLMQGSTLPRRSG
GMDPRMFSLMQISTCPRRSG

SEQ ID NO: 80896 - protein, 20 aa, Artificial Sequence
  Description of Artificial Sequence: Synthetic peptide
  Seed: GMDPRMCSLMQGSTLPRRSG
GMDPRMFSLMQISTDPRRSG

SEQ ID NO: 80897 - protein, 20 aa, Artificial Sequence
  Description of Artificial Sequence: Synthetic peptide
  Seed: GMDPRMCSLMQGSTLPRRSG
GMDPRMFSLMQISTEPRRSG

SEQ ID NO: 80898 - protein, 20 aa, Artificial Sequence
  Description of Artificial Sequence: Synthetic peptide
  Seed: GMDPRMCSLMQGSTLPRRSG
GMDPRMFSLMQISTGPRRSG

SEQ ID NO: 80899 - protein, 20 aa, Artificial Sequence
  Description of Artificial Sequence: Synthetic peptide
  Seed: GMDPRMCSLMQGSTLPRRSG
GMDPRMFSLMQISTHPRRSG

SEQ ID NO: 80900 - protein, 20 aa, Artificial Sequence
  Description of Artificial Sequence: Synthetic peptide
  Seed: GMDPRMCSLMQGSTLPRRSG
GMDPRMFSLMQISTIPRRSG

SEQ ID NO: 80901 - protein, 20 aa, Artificial Sequence
  Description of Artificial Sequence: Synthetic peptide
  Seed: GMDPRMCSLMQGSTLPRRSG
GMDPRMFSLMQISTLPRRSG

SEQ ID NO: 80902 - protein, 20 aa, Artificial Sequence
  Description of Artificial Sequence: Synthetic peptide
  Seed: GMDPRMCSLMQGSTLPRRSG
GMDPRMFSLMQISTMPRRSG

SEQ ID NO: 80903 - protein, 20 aa, Artificial Sequence
  Description of Artificial Sequence: Synthetic peptide
  Seed: GMDPRMCSLMQGSTLPRRSG
GMDPRMFSLMQISTNPRRSG

SEQ ID NO: 80904 - protein, 20 aa, Artificial Sequence
  Description of Artificial Sequence: Synthetic peptide
  Seed: GMDPRMCSLMQGSTLPRRSG
GMDPRMFSLMQISTPPRRSG

SEQ ID NO: 80905 - protein, 20 aa, Artificial Sequence
  Description of Artificial Sequence: Synthetic peptide
  Seed: GMDPRMCSLMQGSTLPRRSG
GMDPRMFSLMQISTQPRRSG

SEQ ID NO: 80906 - protein, 20 aa, Artificial Sequence
  Description of Artificial Sequence: Synthetic peptide
  Seed: GMDPRMCSLMQGSTLPRRSG
GMDPRMFSLMQISTSPRRSG

SEQ ID NO: 80907 - protein, 20 aa, Artificial Sequence
  Description of Artificial Sequence: Synthetic peptide
  Seed: GMDPRMCSLMQGSTLPRRSG
GMDPRMFSLMQISTTPRRSG

SEQ ID NO: 80908 - protein, 20 aa, Artificial Sequence
  Description of Artificial Sequence: Synthetic peptide
  Seed: GMDPRMCSLMQGSTLPRRSG
GMDPRMFSLMQISTVPRRSG

SEQ ID NO: 80909 - protein, 20 aa, Artificial Sequence
  Description of Artificial Sequence: Synthetic peptide
  Seed: GMDPRMCSLMQGSTLPRRSG
GMDPRMFSLMQLSTAPRRSG

SEQ ID NO: 80910 - protein, 20 aa, Artificial Sequence
  Description of Artificial Sequence: Synthetic peptide
  Seed: GMDPRMCSLMQGSTLPRRSG
GMDPRMFSLMQLSTGPRRSG

SEQ ID NO: 80911 - protein, 20 aa, Artificial Sequence
  Description of Artificial Sequence: Synthetic peptide
  Seed: GMDPRMCSLMQGSTLPRRSG
GMDPRMFSLMQLSTHPRRSG

SEQ ID NO: 80912 - protein, 20 aa, Artificial Sequence
  Description of Artificial Sequence: Synthetic peptide
  Seed: GMDPRMCSLMQGSTLPRRSG
GMDPRMFSLMQLSTIPRRSG

SEQ ID NO: 80913 - protein, 20 aa, Artificial Sequence
  Description of Artificial Sequence: Synthetic peptide
  Seed: GMDPRMCSLMQGSTLPRRSG
GMDPRMFSLMQLSTLPRRSG

SEQ ID NO: 80914 - protein, 20 aa, Artificial Sequence
  Description of Artificial Sequence: Synthetic peptide
  Seed: GMDPRMCSLMQGSTLPRRSG
GMDPRMFSLMQLSTMPRRSG

SEQ ID NO: 80915 - protein, 20 aa, Artificial Sequence
  Description of Artificial Sequence: Synthetic peptide
  Seed: GMDPRMCSLMQGSTLPRRSG
GMDPRMFSLMQLSTNPRRSG

SEQ ID NO: 80916 - protein, 20 aa, Artificial Sequence
  Description of Artificial Sequence: Synthetic peptide
  Seed: GMDPRMCSLMQGSTLPRRSG
GMDPRMFSLMQLSTQPRRSG

SEQ ID NO: 80917 - protein, 20 aa, Artificial Sequence
  Description of Artificial Sequence: Synthetic peptide
  Seed: GMDPRMCSLMQGSTLPRRSG
GMDPRMFSLMQLSTSPRRSG

SEQ ID NO: 80918 - protein, 20 aa, Artificial Sequence
  Description of Artificial Sequence: Synthetic peptide
  Seed: GMDPRMCSLMQGSTLPRRSG
GMDPRMFSLMQLSTTPRRSG

SEQ ID NO: 80919 - protein, 20 aa, Artificial Sequence
  Description of Artificial Sequence: Synthetic peptide
  Seed: GMDPRMCSLMQGSTLPRRSG
GMDPRMFSLMQLSTVPRRSG

SEQ ID NO: 80920 - protein, 20 aa, Artificial Sequence
  Description of Artificial Sequence: Synthetic peptide
  Seed: GMDPRMCSLMQGSTLPRRSG
GMDPRMFSLMQMSTAPRRSG

SEQ ID NO: 80921 - protein, 20 aa, Artificial Sequence
  Description of Artificial Sequence: Synthetic peptide
  Seed: GMDPRMCSLMQGSTLPRRSG
GMDPRMFSLMQMSTGPRRSG

SEQ ID NO: 80922 - protein, 20 aa, Artificial Sequence
  Description of Artificial Sequence: Synthetic peptide
  Seed: GMDPRMCSLMQGSTLPRRSG
GMDPRMFSLMQMSTHPRRSG

SEQ ID NO: 80923 - protein, 20 aa, Artificial Sequence
  Description of Artificial Sequence: Synthetic peptide
  Seed: GMDPRMCSLMQGSTLPRRSG
GMDPRMFSLMQMSTIPRRSG

SEQ ID NO: 80924 - protein, 20 aa, Artificial Sequence
  Description of Artificial Sequence: Synthetic peptide
  Seed: GMDPRMCSLMQGSTLPRRSG
GMDPRMFSLMQMSTLPRRSG

SEQ ID NO: 80925 - protein, 20 aa, Artificial Sequence
  Description of Artificial Sequence: Synthetic peptide
  Seed: GMDPRMCSLMQGSTLPRRSG
GMDPRMFSLMQMSTMPRRSG

SEQ ID NO: 80926 - protein, 20 aa, Artificial Sequence
  Description of Artificial Sequence: Synthetic peptide
  Seed: GMDPRMCSLMQGSTLPRRSG
GMDPRMFSLMQMSTNPRRSG

SEQ ID NO: 80927 - protein, 20 aa, Artificial Sequence
  Description of Artificial Sequence: Synthetic peptide
  Seed: GMDPRMCSLMQGSTLPRRSG
GMDPRMFSLMQMSTQPRRSG

SEQ ID NO: 80928 - protein, 20 aa, Artificial Sequence
  Description of Artificial Sequence: Synthetic peptide
  Seed: GMDPRMCSLMQGSTLPRRSG
GMDPRMFSLMQMSTSPRRSG

SEQ ID NO: 80929 - protein, 20 aa, Artificial Sequence
  Description of Artificial Sequence: Synthetic peptide
  Seed: GMDPRMCSLMQGSTLPRRSG
GMDPRMFSLMQMSTTPRRSG

SEQ ID NO: 80930 - protein, 20 aa, Artificial Sequence
  Description of Artificial Sequence: Synthetic peptide
  Seed: GMDPRMCSLMQGSTLPRRSG
GMDPRMFSLMQMSTVPRRSG

SEQ ID NO: 80931 - protein, 20 aa, Artificial Sequence
  Description of Artificial Sequence: Synthetic peptide
  Seed: GMDPRMCSLMQGSTLPRRSG
GMDPRMFSLMQNSTAPRRSG

SEQ ID NO: 80932 - protein, 20 aa, Artificial Sequence
  Description of Artificial Sequence: Synthetic peptide
  Seed: GMDPRMCSLMQGSTLPRRSG
GMDPRMFSLMQNSTCPRRSG

SEQ ID NO: 80933 - protein, 20 aa, Artificial Sequence
  Description of Artificial Sequence: Synthetic peptide
  Seed: GMDPRMCSLMQGSTLPRRSG
GMDPRMFSLMQNSTDPRRSG

SEQ ID NO: 80934 - protein, 20 aa, Artificial Sequence
  Description of Artificial Sequence: Synthetic peptide
  Seed: GMDPRMCSLMQGSTLPRRSG
GMDPRMFSLMQNSTFPRRSG

SEQ ID NO: 80935 - protein, 20 aa, Artificial Sequence
  Description of Artificial Sequence: Synthetic peptide
  Seed: GMDPRMCSLMQGSTLPRRSG
GMDPRMFSLMQNSTGPRRSG

SEQ ID NO: 80936 - protein, 20 aa, Artificial Sequence
  Description of Artificial Sequence: Synthetic peptide
  Seed: GMDPRMCSLMQGSTLPRRSG
GMDPRMFSLMQNSTHPRRSG

SEQ ID NO: 80937 - protein, 20 aa, Artificial Sequence
  Description of Artificial Sequence: Synthetic peptide
  Seed: GMDPRMCSLMQGSTLPRRSG
GMDPRMFSLMQNSTIPRRSG

SEQ ID NO: 80938 - protein, 20 aa, Artificial Sequence
  Description of Artificial Sequence: Synthetic peptide
  Seed: GMDPRMCSLMQGSTLPRRSG
GMDPRMFSLMQNSTLPRRSG

SEQ ID NO: 80939 - protein, 20 aa, Artificial Sequence
  Description of Artificial Sequence: Synthetic peptide
  Seed: GMDPRMCSLMQGSTLPRRSG
GMDPRMFSLMQNSTMPRRSG

SEQ ID NO: 80940 - protein, 20 aa, Artificial Sequence
  Description of Artificial Sequence: Synthetic peptide
  Seed: GMDPRMCSLMQGSTLPRRSG
GMDPRMFSLMQNSTNPRRSG

SEQ ID NO: 80941 - protein, 20 aa, Artificial Sequence
  Description of Artificial Sequence: Synthetic peptide
  Seed: GMDPRMCSLMQGSTLPRRSG
GMDPRMFSLMQNSTPPRRSG

SEQ ID NO: 80942 - protein, 20 aa, Artificial Sequence
  Description of Artificial Sequence: Synthetic peptide
  Seed: GMDPRMCSLMQGSTLPRRSG
GMDPRMFSLMQNSTQPRRSG

SEQ ID NO: 80943 - protein, 20 aa, Artificial Sequence
  Description of Artificial Sequence: Synthetic peptide
  Seed: GMDPRMCSLMQGSTLPRRSG
GMDPRMFSLMQNSTSPRRSG

SEQ ID NO: 80944 - protein, 20 aa, Artificial Sequence
  Description of Artificial Sequence: Synthetic peptide
  Seed: GMDPRMCSLMQGSTLPRRSG
GMDPRMFSLMQNSTTPRRSG

SEQ ID NO: 80945 - protein, 20 aa, Artificial Sequence
  Description of Artificial Sequence: Synthetic peptide
  Seed: GMDPRMCSLMQGSTLPRRSG
GMDPRMFSLMQNSTVPRRSG

SEQ ID NO: 80946 - protein, 20 aa, Artificial Sequence
  Description of Artificial Sequence: Synthetic peptide
  Seed: GMDPRMCSLMQGSTLPRRSG
GMDPRMFSLMQPSTAPRRSG

SEQ ID NO: 80947 - protein, 20 aa, Artificial Sequence
  Description of Artificial Sequence: Synthetic peptide
  Seed: GMDPRMCSLMQGSTLPRRSG
GMDPRMFSLMQPSTCPRRSG

SEQ ID NO: 80948 - protein, 20 aa, Artificial Sequence
  Description of Artificial Sequence: Synthetic peptide
  Seed: GMDPRMCSLMQGSTLPRRSG
GMDPRMFSLMQPSTDPRRSG

SEQ ID NO: 80949 - protein, 20 aa, Artificial Sequence
  Description of Artificial Sequence: Synthetic peptide
  Seed: GMDPRMCSLMQGSTLPRRSG
GMDPRMFSLMQPSTEPRRSG

SEQ ID NO: 80950 - protein, 20 aa, Artificial Sequence
  Description of Artificial Sequence: Synthetic peptide
  Seed: GMDPRMCSLMQGSTLPRRSG
GMDPRMFSLMQPSTFPRRSG

SEQ ID NO: 80951 - protein, 20 aa, Artificial Sequence
  Description of Artificial Sequence: Synthetic peptide
  Seed: GMDPRMCSLMQGSTLPRRSG
GMDPRMFSLMQPSTGPRRSG

SEQ ID NO: 80952 - protein, 20 aa, Artificial Sequence
  Description of Artificial Sequence: Synthetic peptide
  Seed: GMDPRMCSLMQGSTLPRRSG
GMDPRMFSLMQPSTHPRRSG

SEQ ID NO: 80953 - protein, 20 aa, Artificial Sequence
  Description of Artificial Sequence: Synthetic peptide
  Seed: GMDPRMCSLMQGSTLPRRSG
GMDPRMFSLMQPSTIPRRSG

SEQ ID NO: 80954 - protein, 20 aa, Artificial Sequence
  Description of Artificial Sequence: Synthetic peptide
  Seed: GMDPRMCSLMQGSTLPRRSG
GMDPRMFSLMQPSTLPRRSG

SEQ ID NO: 80955 - protein, 20 aa, Artificial Sequence
  Description of Artificial Sequence: Synthetic peptide
  Seed: GMDPRMCSLMQGSTLPRRSG
GMDPRMFSLMQPSTMPRRSG

SEQ ID NO: 80956 - protein, 20 aa, Artificial Sequence
  Description of Artificial Sequence: Synthetic peptide
  Seed: GMDPRMCSLMQGSTLPRRSG
GMDPRMFSLMQPSTNPRRSG

SEQ ID NO: 80957 - protein, 20 aa, Artificial Sequence
  Description of Artificial Sequence: Synthetic peptide
  Seed: GMDPRMCSLMQGSTLPRRSG
GMDPRMFSLMQPSTPPRRSG

SEQ ID NO: 80958 - protein, 20 aa, Artificial Sequence
  Description of Artificial Sequence: Synthetic peptide
  Seed: GMDPRMCSLMQGSTLPRRSG
GMDPRMFSLMQPSTQPRRSG

SEQ ID NO: 80959 - protein, 20 aa, Artificial Sequence
  Description of Artificial Sequence: Synthetic peptide
  Seed: GMDPRMCSLMQGSTLPRRSG
GMDPRMFSLMQPSTSPRRSG

SEQ ID NO: 80960 - protein, 20 aa, Artificial Sequence
  Description of Artificial Sequence: Synthetic peptide
  Seed: GMDPRMCSLMQGSTLPRRSG
GMDPRMFSLMQPSTTPRRSG

SEQ ID NO: 80961 - protein, 20 aa, Artificial Sequence
  Description of Artificial Sequence: Synthetic peptide
  Seed: GMDPRMCSLMQGSTLPRRSG
GMDPRMFSLMQPSTVPRRSG

SEQ ID NO: 80962 - protein, 20 aa, Artificial Sequence
  Description of Artificial Sequence: Synthetic peptide
  Seed: GMDPRMCSLMQGSTLPRRSG
GMDPRMFSLMQPSTWPRRSG

SEQ ID NO: 80963 - protein, 20 aa, Artificial Sequence
  Description of Artificial Sequence: Synthetic peptide
  Seed: GMDPRMCSLMQGSTLPRRSG
GMDPRMFSLMQPSTYPRRSG

SEQ ID NO: 80964 - protein, 20 aa, Artificial Sequence
  Description of Artificial Sequence: Synthetic peptide
  Seed: GMDPRMCSLMQGSTLPRRSG
GMDPRMFSLMQQSTAPRRSG

SEQ ID NO: 80965 - protein, 20 aa, Artificial Sequence
  Description of Artificial Sequence: Synthetic peptide
  Seed: GMDPRMCSLMQGSTLPRRSG
GMDPRMFSLMQQSTIPRRSG

SEQ ID NO: 80966 - protein, 20 aa, Artificial Sequence
  Description of Artificial Sequence: Synthetic peptide
  Seed: GMDPRMCSLMQGSTLPRRSG
GMDPRMFSLMQQSTLPRRSG

SEQ ID NO: 80967 - protein, 20 aa, Artificial Sequence
  Description of Artificial Sequence: Synthetic peptide
  Seed: GMDPRMCSLMQGSTLPRRSG
GMDPRMFSLMQQSTNPRRSG

SEQ ID NO: 80968 - protein, 20 aa, Artificial Sequence
  Description of Artificial Sequence: Synthetic peptide
  Seed: GMDPRMCSLMQGSTLPRRSG
GMDPRMFSLMQQSTSPRRSG

SEQ ID NO: 80969 - protein, 20 aa, Artificial Sequence
  Description of Artificial Sequence: Synthetic peptide
  Seed: GMDPRMCSLMQGSTLPRRSG
GMDPRMFSLMQQSTTPRRSG

SEQ ID NO: 80970 - protein, 20 aa, Artificial Sequence
  Description of Artificial Sequence: Synthetic peptide
  Seed: GMDPRMCSLMQGSTLPRRSG
GMDPRMFSLMQQSTVPRRSG

SEQ ID NO: 80971 - protein, 20 aa, Artificial Sequence
  Description of Artificial Sequence: Synthetic peptide
  Seed: GMDPRMCSLMQGSTLPRRSG
GMDPRMFSLMQSSTAPRRSG

SEQ ID NO: 80972 - protein, 20 aa, Artificial Sequence
  Description of Artificial Sequence: Synthetic peptide
  Seed: GMDPRMCSLMQGSTLPRRSG
GMDPRMFSLMQSSTCPRRSG

SEQ ID NO: 80973 - protein, 20 aa, Artificial Sequence
  Description of Artificial Sequence: Synthetic peptide
  Seed: GMDPRMCSLMQGSTLPRRSG
GMDPRMFSLMQSSTDPRRSG

SEQ ID NO: 80974 - protein, 20 aa, Artificial Sequence
  Description of Artificial Sequence: Synthetic peptide
  Seed: GMDPRMCSLMQGSTLPRRSG
GMDPRMFSLMQSSTEPRRSG

SEQ ID NO: 80975 - protein, 20 aa, Artificial Sequence
  Description of Artificial Sequence: Synthetic peptide
  Seed: GMDPRMCSLMQGSTLPRRSG
GMDPRMFSLMQSSTFPRRSG

SEQ ID NO: 80976 - protein, 20 aa, Artificial Sequence
  Description of Artificial Sequence: Synthetic peptide
  Seed: GMDPRMCSLMQGSTLPRRSG
GMDPRMFSLMQSSTGPRRSG

SEQ ID NO: 80977 - protein, 20 aa, Artificial Sequence
  Description of Artificial Sequence: Synthetic peptide
  Seed: GMDPRMCSLMQGSTLPRRSG
GMDPRMFSLMQSSTHPRRSG

SEQ ID NO: 80978 - protein, 20 aa, Artificial Sequence
  Description of Artificial Sequence: Synthetic peptide
  Seed: GMDPRMCSLMQGSTLPRRSG
GMDPRMFSLMQSSTIPRRSG

SEQ ID NO: 80979 - protein, 20 aa, Artificial Sequence
  Description of Artificial Sequence: Synthetic peptide
  Seed: GMDPRMCSLMQGSTLPRRSG
GMDPRMFSLMQSSTLPRRSG

SEQ ID NO: 80980 - protein, 20 aa, Artificial Sequence
  Description of Artificial Sequence: Synthetic peptide
  Seed: GMDPRMCSLMQGSTLPRRSG
GMDPRMFSLMQSSTMPRRSG

SEQ ID NO: 80981 - protein, 20 aa, Artificial Sequence
  Description of Artificial Sequence: Synthetic peptide
  Seed: GMDPRMCSLMQGSTLPRRSG
GMDPRMFSLMQSSTNPRRSG

SEQ ID NO: 80982 - protein, 20 aa, Artificial Sequence
  Description of Artificial Sequence: Synthetic peptide
  Seed: GMDPRMCSLMQGSTLPRRSG
GMDPRMFSLMQSSTPPRRSG

SEQ ID NO: 80983 - protein, 20 aa, Artificial Sequence
  Description of Artificial Sequence: Synthetic peptide
  Seed: GMDPRMCSLMQGSTLPRRSG
GMDPRMFSLMQSSTQPRRSG

SEQ ID NO: 80984 - protein, 20 aa, Artificial Sequence
  Description of Artificial Sequence: Synthetic peptide
  Seed: GMDPRMCSLMQGSTLPRRSG
GMDPRMFSLMQSSTSPRRSG

SEQ ID NO: 80985 - protein, 20 aa, Artificial Sequence
  Description of Artificial Sequence: Synthetic peptide
  Seed: GMDPRMCSLMQGSTLPRRSG
GMDPRMFSLMQSSTTPRRSG

SEQ ID NO: 80986 - protein, 20 aa, Artificial Sequence
  Description of Artificial Sequence: Synthetic peptide
  Seed: GMDPRMCSLMQGSTLPRRSG
GMDPRMFSLMQSSTVPRRSG

SEQ ID NO: 80987 - protein, 20 aa, Artificial Sequence
  Description of Artificial Sequence: Synthetic peptide
  Seed: GMDPRMCSLMQGSTLPRRSG
GMDPRMFSLMQSSTYPRRSG

SEQ ID NO: 80988 - protein, 20 aa, Artificial Sequence
  Description of Artificial Sequence: Synthetic peptide
  Seed: GMDPRMCSLMQGSTLPRRSG
GMDPRMFSLMQTSTAPRRSG

SEQ ID NO: 80989 - protein, 20 aa, Artificial Sequence
  Description of Artificial Sequence: Synthetic peptide
  Seed: GMDPRMCSLMQGSTLPRRSG
GMDPRMFSLMQTSTCPRRSG

SEQ ID NO: 80990 - protein, 20 aa, Artificial Sequence
  Description of Artificial Sequence: Synthetic peptide
  Seed: GMDPRMCSLMQGSTLPRRSG
GMDPRMFSLMQTSTDPRRSG

SEQ ID NO: 80991 - protein, 20 aa, Artificial Sequence
  Description of Artificial Sequence: Synthetic peptide
  Seed: GMDPRMCSLMQGSTLPRRSG
GMDPRMFSLMQTSTEPRRSG

SEQ ID NO: 80992 - protein, 20 aa, Artificial Sequence
  Description of Artificial Sequence: Synthetic peptide
  Seed: GMDPRMCSLMQGSTLPRRSG
GMDPRMFSLMQTSTFPRRSG

SEQ ID NO: 80993 - protein, 20 aa, Artificial Sequence
  Description of Artificial Sequence: Synthetic peptide
  Seed: GMDPRMCSLMQGSTLPRRSG
GMDPRMFSLMQTSTGPRRSG

SEQ ID NO: 80994 - protein, 20 aa, Artificial Sequence
  Description of Artificial Sequence: Synthetic peptide
  Seed: GMDPRMCSLMQGSTLPRRSG
GMDPRMFSLMQTSTHPRRSG

SEQ ID NO: 80995 - protein, 20 aa, Artificial Sequence
  Description of Artificial Sequence: Synthetic peptide
  Seed: GMDPRMCSLMQGSTLPRRSG
GMDPRMFSLMQTSTIPRRSG

SEQ ID NO: 80996 - protein, 20 aa, Artificial Sequence
  Description of Artificial Sequence: Synthetic peptide
  Seed: GMDPRMCSLMQGSTLPRRSG
GMDPRMFSLMQTSTLPRRSG

SEQ ID NO: 80997 - protein, 20 aa, Artificial Sequence
  Description of Artificial Sequence: Synthetic peptide
  Seed: GMDPRMCSLMQGSTLPRRSG
GMDPRMFSLMQTSTMPRRSG

SEQ ID NO: 80998 - protein, 20 aa, Artificial Sequence
  Description of Artificial Sequence: Synthetic peptide
  Seed: GMDPRMCSLMQGSTLPRRSG
GMDPRMFSLMQTSTNPRRSG

SEQ ID NO: 80999 - protein, 20 aa, Artificial Sequence
  Description of Artificial Sequence: Synthetic peptide
  Seed: GMDPRMCSLMQGSTLPRRSG
GMDPRMFSLMQTSTPPRRSG

SEQ ID NO: 81000 - protein, 20 aa, Artificial Sequence
  Description of Artificial Sequence: Synthetic peptide
  Seed: GMDPRMCSLMQGSTLPRRSG
GMDPRMFSLMQTSTQPRRSG

SEQ ID NO: 81001 - protein, 20 aa, Artificial Sequence
  Description of Artificial Sequence: Synthetic peptide
  Seed: GMDPRMCSLMQGSTLPRRSG
GMDPRMFSLMQTSTSPRRSG

SEQ ID NO: 81002 - protein, 20 aa, Artificial Sequence
  Description of Artificial Sequence: Synthetic peptide
  Seed: GMDPRMCSLMQGSTLPRRSG
GMDPRMFSLMQTSTTPRRSG

SEQ ID NO: 81003 - protein, 20 aa, Artificial Sequence
  Description of Artificial Sequence: Synthetic peptide
  Seed: GMDPRMCSLMQGSTLPRRSG
GMDPRMFSLMQTSTVPRRSG

SEQ ID NO: 81004 - protein, 20 aa, Artificial Sequence
  Description of Artificial Sequence: Synthetic peptide
  Seed: GMDPRMCSLMQGSTLPRRSG
GMDPRMFSLMQTSTYPRRSG

SEQ ID NO: 81005 - protein, 20 aa, Artificial Sequence
  Description of Artificial Sequence: Synthetic peptide
  Seed: GMDPRMCSLMQGSTLPRRSG
GMDPRMFSLMQVSTAPRRSG

SEQ ID NO: 81006 - protein, 20 aa, Artificial Sequence
  Description of Artificial Sequence: Synthetic peptide
  Seed: GMDPRMCSLMQGSTLPRRSG
GMDPRMFSLMQVSTCPRRSG

SEQ ID NO: 81007 - protein, 20 aa, Artificial Sequence
  Description of Artificial Sequence: Synthetic peptide
  Seed: GMDPRMCSLMQGSTLPRRSG
GMDPRMFSLMQVSTDPRRSG

SEQ ID NO: 81008 - protein, 20 aa, Artificial Sequence
  Description of Artificial Sequence: Synthetic peptide
  Seed: GMDPRMCSLMQGSTLPRRSG
GMDPRMFSLMQVSTEPRRSG

SEQ ID NO: 81009 - protein, 20 aa, Artificial Sequence
  Description of Artificial Sequence: Synthetic peptide
  Seed: GMDPRMCSLMQGSTLPRRSG
GMDPRMFSLMQVSTFPRRSG

SEQ ID NO: 81010 - protein, 20 aa, Artificial Sequence
  Description of Artificial Sequence: Synthetic peptide
  Seed: GMDPRMCSLMQGSTLPRRSG
GMDPRMFSLMQVSTGPRRSG

SEQ ID NO: 81011 - protein, 20 aa, Artificial Sequence
  Description of Artificial Sequence: Synthetic peptide
  Seed: GMDPRMCSLMQGSTLPRRSG
GMDPRMFSLMQVSTHPRRSG

SEQ ID NO: 81012 - protein, 20 aa, Artificial Sequence
  Description of Artificial Sequence: Synthetic peptide
  Seed: GMDPRMCSLMQGSTLPRRSG
GMDPRMFSLMQVSTIPRRSG

SEQ ID NO: 81013 - protein, 20 aa, Artificial Sequence
  Description of Artificial Sequence: Synthetic peptide
  Seed: GMDPRMCSLMQGSTLPRRSG
GMDPRMFSLMQVSTKPRRSG

SEQ ID NO: 81014 - protein, 20 aa, Artificial Sequence
  Description of Artificial Sequence: Synthetic peptide
  Seed: GMDPRMCSLMQGSTLPRRSG
GMDPRMFSLMQVSTLPRRSG

SEQ ID NO: 81015 - protein, 20 aa, Artificial Sequence
  Description of Artificial Sequence: Synthetic peptide
  Seed: GMDPRMCSLMQGSTLPRRSG
GMDPRMFSLMQVSTMPRRSG

SEQ ID NO: 81016 - protein, 20 aa, Artificial Sequence
  Description of Artificial Sequence: Synthetic peptide
  Seed: GMDPRMCSLMQGSTLPRRSG
GMDPRMFSLMQVSTNPRRSG

SEQ ID NO: 81017 - protein, 20 aa, Artificial Sequence
  Description of Artificial Sequence: Synthetic peptide
  Seed: GMDPRMCSLMQGSTLPRRSG
GMDPRMFSLMQVSTPPRRSG

SEQ ID NO: 81018 - protein, 20 aa, Artificial Sequence
  Description of Artificial Sequence: Synthetic peptide
  Seed: GMDPRMCSLMQGSTLPRRSG
GMDPRMFSLMQVSTQPRRSG

SEQ ID NO: 81019 - protein, 20 aa, Artificial Sequence
  Description of Artificial Sequence: Synthetic peptide
  Seed: GMDPRMCSLMQGSTLPRRSG
GMDPRMFSLMQVSTSPRRSG

SEQ ID NO: 81020 - protein, 20 aa, Artificial Sequence
  Description of Artificial Sequence: Synthetic peptide
  Seed: GMDPRMCSLMQGSTLPRRSG
GMDPRMFSLMQVSTTPRRSG

SEQ ID NO: 81021 - protein, 20 aa, Artificial Sequence
  Description of Artificial Sequence: Synthetic peptide
  Seed: GMDPRMCSLMQGSTLPRRSG
GMDPRMFSLMQVSTVPRRSG

SEQ ID NO: 81022 - protein, 20 aa, Artificial Sequence
  Description of Artificial Sequence: Synthetic peptide
  Seed: GMDPRMCSLMQGSTLPRRSG
GMDPRMFSLNQASTAPRRSG

SEQ ID NO: 81023 - protein, 20 aa, Artificial Sequence
  Description of Artificial Sequence: Synthetic peptide
  Seed: GMDPRMCSLMQGSTLPRRSG
GMDPRMFSLNQASTIPRRSG

SEQ ID NO: 81024 - protein, 20 aa, Artificial Sequence
  Description of Artificial Sequence: Synthetic peptide
  Seed: GMDPRMCSLMQGSTLPRRSG
GMDPRMFSLNQASTLPRRSG

SEQ ID NO: 81025 - protein, 20 aa, Artificial Sequence
  Description of Artificial Sequence: Synthetic peptide
  Seed: GMDPRMCSLMQGSTLPRRSG
GMDPRMFSLNQASTMPRRSG

SEQ ID NO: 81026 - protein, 20 aa, Artificial Sequence
  Description of Artificial Sequence: Synthetic peptide
  Seed: GMDPRMCSLMQGSTLPRRSG
GMDPRMFSLNQASTTPRRSG

SEQ ID NO: 81027 - protein, 20 aa, Artificial Sequence
  Description of Artificial Sequence: Synthetic peptide
  Seed: GMDPRMCSLMQGSTLPRRSG
GMDPRMFSLNQASTVPRRSG

SEQ ID NO: 81028 - protein, 20 aa, Artificial Sequence
  Description of Artificial Sequence: Synthetic peptide
  Seed: GMDPRMCSLMQGSTLPRRSG
GMDPRMFSLNQGSTIPRRSG

SEQ ID NO: 81029 - protein, 20 aa, Artificial Sequence
  Description of Artificial Sequence: Synthetic peptide
  Seed: GMDPRMCSLMQGSTLPRRSG
GMDPRMFSLNQGSTLPRRSG

SEQ ID NO: 81030 - protein, 20 aa, Artificial Sequence
  Description of Artificial Sequence: Synthetic peptide
  Seed: GMDPRMCSLMQGSTLPRRSG
GMDPRMFSLNQGSTVPRRSG

SEQ ID NO: 81031 - protein, 20 aa, Artificial Sequence
  Description of Artificial Sequence: Synthetic peptide
  Seed: GMDPRMCSLMQGSTLPRRSG
GMDPRMFSLNQPSTIPRRSG

SEQ ID NO: 81032 - protein, 20 aa, Artificial Sequence
  Description of Artificial Sequence: Synthetic peptide
  Seed: GMDPRMCSLMQGSTLPRRSG
GMDPRMFSLNQPSTLPRRSG

SEQ ID NO: 81033 - protein, 20 aa, Artificial Sequence
  Description of Artificial Sequence: Synthetic peptide
  Seed: GMDPRMCSLMQGSTLPRRSG
GMDPRMFSLNQPSTVPRRSG

SEQ ID NO: 81034 - protein, 20 aa, Artificial Sequence
  Description of Artificial Sequence: Synthetic peptide
  Seed: GMDPRMCSLMQGSTLPRRSG
GMDPRMFSLNQSSTIPRRSG

SEQ ID NO: 81035 - protein, 20 aa, Artificial Sequence
  Description of Artificial Sequence: Synthetic peptide
  Seed: GMDPRMCSLMQGSTLPRRSG
GMDPRMFSLNQSSTLPRRSG

SEQ ID NO: 81036 - protein, 20 aa, Artificial Sequence
  Description of Artificial Sequence: Synthetic peptide
  Seed: GMDPRMCSLMQGSTLPRRSG
GMDPRMFSLNQSSTVPRRSG

SEQ ID NO: 81037 - protein, 20 aa, Artificial Sequence
  Description of Artificial Sequence: Synthetic peptide
  Seed: GMDPRMCSLMQGSTLPRRSG
GMDPRMFSLQQASTAPRRSG

SEQ ID NO: 81038 - protein, 20 aa, Artificial Sequence
  Description of Artificial Sequence: Synthetic peptide
  Seed: GMDPRMCSLMQGSTLPRRSG
GMDPRMFSLQQASTCPRRSG

SEQ ID NO: 81039 - protein, 20 aa, Artificial Sequence
  Description of Artificial Sequence: Synthetic peptide
  Seed: GMDPRMCSLMQGSTLPRRSG
GMDPRMFSLQQASTFPRRSG

SEQ ID NO: 81040 - protein, 20 aa, Artificial Sequence
  Description of Artificial Sequence: Synthetic peptide
  Seed: GMDPRMCSLMQGSTLPRRSG
GMDPRMFSLQQASTGPRRSG

SEQ ID NO: 81041 - protein, 20 aa, Artificial Sequence
  Description of Artificial Sequence: Synthetic peptide
  Seed: GMDPRMCSLMQGSTLPRRSG
GMDPRMFSLQQASTHPRRSG

SEQ ID NO: 81042 - protein, 20 aa, Artificial Sequence
  Description of Artificial Sequence: Synthetic peptide
  Seed: GMDPRMCSLMQGSTLPRRSG
GMDPRMFSLQQASTIPRRSG

SEQ ID NO: 81043 - protein, 20 aa, Artificial Sequence
  Description of Artificial Sequence: Synthetic peptide
  Seed: GMDPRMCSLMQGSTLPRRSG
GMDPRMFSLQQASTLPRRSG

SEQ ID NO: 81044 - protein, 20 aa, Artificial Sequence
  Description of Artificial Sequence: Synthetic peptide
  Seed: GMDPRMCSLMQGSTLPRRSG
GMDPRMFSLQQASTMPRRSG

SEQ ID NO: 81045 - protein, 20 aa, Artificial Sequence
  Description of Artificial Sequence: Synthetic peptide
  Seed: GMDPRMCSLMQGSTLPRRSG
GMDPRMFSLQQASTNPRRSG

SEQ ID NO: 81046 - protein, 20 aa, Artificial Sequence
  Description of Artificial Sequence: Synthetic peptide
  Seed: GMDPRMCSLMQGSTLPRRSG
GMDPRMFSLQQASTQPRRSG

SEQ ID NO: 81047 - protein, 20 aa, Artificial Sequence
  Description of Artificial Sequence: Synthetic peptide
  Seed: GMDPRMCSLMQGSTLPRRSG
GMDPRMFSLQQASTSPRRSG

SEQ ID NO: 81048 - protein, 20 aa, Artificial Sequence
  Description of Artificial Sequence: Synthetic peptide
  Seed: GMDPRMCSLMQGSTLPRRSG
GMDPRMFSLQQASTTPRRSG

SEQ ID NO: 81049 - protein, 20 aa, Artificial Sequence
  Description of Artificial Sequence: Synthetic peptide
  Seed: GMDPRMCSLMQGSTLPRRSG
GMDPRMFSLQQASTVPRRSG

SEQ ID NO: 81050 - protein, 20 aa, Artificial Sequence
  Description of Artificial Sequence: Synthetic peptide
  Seed: GMDPRMCSLMQGSTLPRRSG
GMDPRMFSLQQGSTAPRRSG

SEQ ID NO: 81051 - protein, 20 aa, Artificial Sequence
  Description of Artificial Sequence: Synthetic peptide
  Seed: GMDPRMCSLMQGSTLPRRSG
GMDPRMFSLQQGSTGPRRSG

SEQ ID NO: 81052 - protein, 20 aa, Artificial Sequence
  Description of Artificial Sequence: Synthetic peptide
  Seed: GMDPRMCSLMQGSTLPRRSG
GMDPRMFSLQQGSTIPRRSG

SEQ ID NO: 81053 - protein, 20 aa, Artificial Sequence
  Description of Artificial Sequence: Synthetic peptide
  Seed: GMDPRMCSLMQGSTLPRRSG
GMDPRMFSLQQGSTLPRRSG

SEQ ID NO: 81054 - protein, 20 aa, Artificial Sequence
  Description of Artificial Sequence: Synthetic peptide
  Seed: GMDPRMCSLMQGSTLPRRSG
GMDPRMFSLQQGSTMPRRSG

SEQ ID NO: 81055 - protein, 20 aa, Artificial Sequence
  Description of Artificial Sequence: Synthetic peptide
  Seed: GMDPRMCSLMQGSTLPRRSG
GMDPRMFSLQQGSTSPRRSG

SEQ ID NO: 81056 - protein, 20 aa, Artificial Sequence
  Description of Artificial Sequence: Synthetic peptide
  Seed: GMDPRMCSLMQGSTLPRRSG
GMDPRMFSLQQGSTTPRRSG

SEQ ID NO: 81057 - protein, 20 aa, Artificial Sequence
  Description of Artificial Sequence: Synthetic peptide
  Seed: GMDPRMCSLMQGSTLPRRSG
GMDPRMFSLQQGSTVPRRSG

SEQ ID NO: 81058 - protein, 20 aa, Artificial Sequence
  Description of Artificial Sequence: Synthetic peptide
  Seed: GMDPRMCSLMQGSTLPRRSG
GMDPRMFSLQQISTAPRRSG

SEQ ID NO: 81059 - protein, 20 aa, Artificial Sequence
  Description of Artificial Sequence: Synthetic peptide
  Seed: GMDPRMCSLMQGSTLPRRSG
GMDPRMFSLQQISTIPRRSG

SEQ ID NO: 81060 - protein, 20 aa, Artificial Sequence
  Description of Artificial Sequence: Synthetic peptide
  Seed: GMDPRMCSLMQGSTLPRRSG
GMDPRMFSLQQISTNPRRSG

SEQ ID NO: 81061 - protein, 20 aa, Artificial Sequence
  Description of Artificial Sequence: Synthetic peptide
  Seed: GMDPRMCSLMQGSTLPRRSG
GMDPRMFSLQQISTSPRRSG

SEQ ID NO: 81062 - protein, 20 aa, Artificial Sequence
  Description of Artificial Sequence: Synthetic peptide
  Seed: GMDPRMCSLMQGSTLPRRSG
GMDPRMFSLQQISTTPRRSG

SEQ ID NO: 81063 - protein, 20 aa, Artificial Sequence
  Description of Artificial Sequence: Synthetic peptide
  Seed: GMDPRMCSLMQGSTLPRRSG
GMDPRMFSLQQISTVPRRSG

SEQ ID NO: 81064 - protein, 20 aa, Artificial Sequence
  Description of Artificial Sequence: Synthetic peptide
  Seed: GMDPRMCSLMQGSTLPRRSG
GMDPRMFSLQQLSTAPRRSG

SEQ ID NO: 81065 - protein, 20 aa, Artificial Sequence
  Description of Artificial Sequence: Synthetic peptide
  Seed: GMDPRMCSLMQGSTLPRRSG
GMDPRMFSLQQMSTAPRRSG

SEQ ID NO: 81066 - protein, 20 aa, Artificial Sequence
  Description of Artificial Sequence: Synthetic peptide
  Seed: GMDPRMCSLMQGSTLPRRSG
GMDPRMFSLQQNSTAPRRSG

SEQ ID NO: 81067 - protein, 20 aa, Artificial Sequence
  Description of Artificial Sequence: Synthetic peptide
  Seed: GMDPRMCSLMQGSTLPRRSG
GMDPRMFSLQQNSTIPRRSG

SEQ ID NO: 81068 - protein, 20 aa, Artificial Sequence
  Description of Artificial Sequence: Synthetic peptide
  Seed: GMDPRMCSLMQGSTLPRRSG
GMDPRMFSLQQNSTLPRRSG

SEQ ID NO: 81069 - protein, 20 aa, Artificial Sequence
  Description of Artificial Sequence: Synthetic peptide
  Seed: GMDPRMCSLMQGSTLPRRSG
GMDPRMFSLQQNSTVPRRSG

SEQ ID NO: 81070 - protein, 20 aa, Artificial Sequence
  Description of Artificial Sequence: Synthetic peptide
  Seed: GMDPRMCSLMQGSTLPRRSG
GMDPRMFSLQQPSTAPRRSG

SEQ ID NO: 81071 - protein, 20 aa, Artificial Sequence
  Description of Artificial Sequence: Synthetic peptide
  Seed: GMDPRMCSLMQGSTLPRRSG
GMDPRMFSLQQPSTIPRRSG

SEQ ID NO: 81072 - protein, 20 aa, Artificial Sequence
  Description of Artificial Sequence: Synthetic peptide
  Seed: GMDPRMCSLMQGSTLPRRSG
GMDPRMFSLQQPSTLPRRSG

SEQ ID NO: 81073 - protein, 20 aa, Artificial Sequence
  Description of Artificial Sequence: Synthetic peptide
  Seed: GMDPRMCSLMQGSTLPRRSG
GMDPRMFSLQQPSTMPRRSG

SEQ ID NO: 81074 - protein, 20 aa, Artificial Sequence
  Description of Artificial Sequence: Synthetic peptide
  Seed: GMDPRMCSLMQGSTLPRRSG
GMDPRMFSLQQPSTNPRRSG

SEQ ID NO: 81075 - protein, 20 aa, Artificial Sequence
  Description of Artificial Sequence: Synthetic peptide
  Seed: GMDPRMCSLMQGSTLPRRSG
GMDPRMFSLQQPSTSPRRSG

SEQ ID NO: 81076 - protein, 20 aa, Artificial Sequence
  Description of Artificial Sequence: Synthetic peptide
  Seed: GMDPRMCSLMQGSTLPRRSG
GMDPRMFSLQQPSTTPRRSG

SEQ ID NO: 81077 - protein, 20 aa, Artificial Sequence
  Description of Artificial Sequence: Synthetic peptide
  Seed: GMDPRMCSLMQGSTLPRRSG
GMDPRMFSLQQPSTVPRRSG

SEQ ID NO: 81078 - protein, 20 aa, Artificial Sequence
  Description of Artificial Sequence: Synthetic peptide
  Seed: GMDPRMCSLMQGSTLPRRSG
GMDPRMFSLQQSSTAPRRSG

SEQ ID NO: 81079 - protein, 20 aa, Artificial Sequence
  Description of Artificial Sequence: Synthetic peptide
  Seed: GMDPRMCSLMQGSTLPRRSG
GMDPRMFSLQQSSTGPRRSG

SEQ ID NO: 81080 - protein, 20 aa, Artificial Sequence
  Description of Artificial Sequence: Synthetic peptide
  Seed: GMDPRMCSLMQGSTLPRRSG
GMDPRMFSLQQSSTIPRRSG

SEQ ID NO: 81081 - protein, 20 aa, Artificial Sequence
  Description of Artificial Sequence: Synthetic peptide
  Seed: GMDPRMCSLMQGSTLPRRSG
GMDPRMFSLQQSSTLPRRSG

SEQ ID NO: 81082 - protein, 20 aa, Artificial Sequence
  Description of Artificial Sequence: Synthetic peptide
  Seed: GMDPRMCSLMQGSTLPRRSG
GMDPRMFSLQQSSTMPRRSG

SEQ ID NO: 81083 - protein, 20 aa, Artificial Sequence
  Description of Artificial Sequence: Synthetic peptide
  Seed: GMDPRMCSLMQGSTLPRRSG
GMDPRMFSLQQSSTNPRRSG

SEQ ID NO: 81084 - protein, 20 aa, Artificial Sequence
  Description of Artificial Sequence: Synthetic peptide
  Seed: GMDPRMCSLMQGSTLPRRSG
GMDPRMFSLQQSSTSPRRSG

SEQ ID NO: 81085 - protein, 20 aa, Artificial Sequence
  Description of Artificial Sequence: Synthetic peptide
  Seed: GMDPRMCSLMQGSTLPRRSG
GMDPRMFSLQQSSTTPRRSG

SEQ ID NO: 81086 - protein, 20 aa, Artificial Sequence
  Description of Artificial Sequence: Synthetic peptide
  Seed: GMDPRMCSLMQGSTLPRRSG
GMDPRMFSLQQSSTVPRRSG

SEQ ID NO: 81087 - protein, 20 aa, Artificial Sequence
  Description of Artificial Sequence: Synthetic peptide
  Seed: GMDPRMCSLMQGSTLPRRSG
GMDPRMFSLQQTSTAPRRSG

SEQ ID NO: 81088 - protein, 20 aa, Artificial Sequence
  Description of Artificial Sequence: Synthetic peptide
  Seed: GMDPRMCSLMQGSTLPRRSG
GMDPRMFSLQQTSTIPRRSG

SEQ ID NO: 81089 - protein, 20 aa, Artificial Sequence
  Description of Artificial Sequence: Synthetic peptide
  Seed: GMDPRMCSLMQGSTLPRRSG
GMDPRMFSLQQTSTLPRRSG

SEQ ID NO: 81090 - protein, 20 aa, Artificial Sequence
  Description of Artificial Sequence: Synthetic peptide
  Seed: GMDPRMCSLMQGSTLPRRSG
GMDPRMFSLQQTSTMPRRSG

SEQ ID NO: 81091 - protein, 20 aa, Artificial Sequence
  Description of Artificial Sequence: Synthetic peptide
  Seed: GMDPRMCSLMQGSTLPRRSG
GMDPRMFSLQQTSTNPRRSG

SEQ ID NO: 81092 - protein, 20 aa, Artificial Sequence
  Description of Artificial Sequence: Synthetic peptide
  Seed: GMDPRMCSLMQGSTLPRRSG
GMDPRMFSLQQTSTSPRRSG

SEQ ID NO: 81093 - protein, 20 aa, Artificial Sequence
  Description of Artificial Sequence: Synthetic peptide
  Seed: GMDPRMCSLMQGSTLPRRSG
GMDPRMFSLQQTSTTPRRSG

SEQ ID NO: 81094 - protein, 20 aa, Artificial Sequence
  Description of Artificial Sequence: Synthetic peptide
  Seed: GMDPRMCSLMQGSTLPRRSG
GMDPRMFSLQQTSTVPRRSG

SEQ ID NO: 81095 - protein, 20 aa, Artificial Sequence
  Description of Artificial Sequence: Synthetic peptide
  Seed: GMDPRMCSLMQGSTLPRRSG
GMDPRMFSLQQVSTAPRRSG

SEQ ID NO: 81096 - protein, 20 aa, Artificial Sequence
  Description of Artificial Sequence: Synthetic peptide
  Seed: GMDPRMCSLMQGSTLPRRSG
GMDPRMFSLQQVSTGPRRSG

SEQ ID NO: 81097 - protein, 20 aa, Artificial Sequence
  Description of Artificial Sequence: Synthetic peptide
  Seed: GMDPRMCSLMQGSTLPRRSG
GMDPRMFSLQQVSTIPRRSG

SEQ ID NO: 81098 - protein, 20 aa, Artificial Sequence
  Description of Artificial Sequence: Synthetic peptide
  Seed: GMDPRMCSLMQGSTLPRRSG
GMDPRMFSLQQVSTLPRRSG

SEQ ID NO: 81099 - protein, 20 aa, Artificial Sequence
  Description of Artificial Sequence: Synthetic peptide
  Seed: GMDPRMCSLMQGSTLPRRSG
GMDPRMFSLQQVSTMPRRSG

SEQ ID NO: 81100 - protein, 20 aa, Artificial Sequence
  Description of Artificial Sequence: Synthetic peptide
  Seed: GMDPRMCSLMQGSTLPRRSG
GMDPRMFSLQQVSTNPRRSG

SEQ ID NO: 81101 - protein, 20 aa, Artificial Sequence
  Description of Artificial Sequence: Synthetic peptide
  Seed: GMDPRMCSLMQGSTLPRRSG
GMDPRMFSLQQVSTSPRRSG

SEQ ID NO: 81102 - protein, 20 aa, Artificial Sequence
  Description of Artificial Sequence: Synthetic peptide
  Seed: GMDPRMCSLMQGSTLPRRSG
GMDPRMFSLQQVSTTPRRSG

SEQ ID NO: 81103 - protein, 20 aa, Artificial Sequence
  Description of Artificial Sequence: Synthetic peptide
  Seed: GMDPRMCSLMQGSTLPRRSG
GMDPRMFSLQQVSTVPRRSG

SEQ ID NO: 81104 - protein, 20 aa, Artificial Sequence
  Description of Artificial Sequence: Synthetic peptide
  Seed: GMDPRMCSLMQGSTLPRRSG
GMDPRMFSLSQASTAPRRSG

SEQ ID NO: 81105 - protein, 20 aa, Artificial Sequence
  Description of Artificial Sequence: Synthetic peptide
  Seed: GMDPRMCSLMQGSTLPRRSG
GMDPRMFSLSQASTFPRRSG

SEQ ID NO: 81106 - protein, 20 aa, Artificial Sequence
  Description of Artificial Sequence: Synthetic peptide
  Seed: GMDPRMCSLMQGSTLPRRSG
GMDPRMFSLSQASTGPRRSG

SEQ ID NO: 81107 - protein, 20 aa, Artificial Sequence
  Description of Artificial Sequence: Synthetic peptide
  Seed: GMDPRMCSLMQGSTLPRRSG
GMDPRMFSLSQASTIPRRSG

SEQ ID NO: 81108 - protein, 20 aa, Artificial Sequence
  Description of Artificial Sequence: Synthetic peptide
  Seed: GMDPRMCSLMQGSTLPRRSG
GMDPRMFSLSQASTLPRRSG

SEQ ID NO: 81109 - protein, 20 aa, Artificial Sequence
  Description of Artificial Sequence: Synthetic peptide
  Seed: GMDPRMCSLMQGSTLPRRSG
GMDPRMFSLSQASTMPRRSG

SEQ ID NO: 81110 - protein, 20 aa, Artificial Sequence
  Description of Artificial Sequence: Synthetic peptide
  Seed: GMDPRMCSLMQGSTLPRRSG
GMDPRMFSLSQASTNPRRSG

SEQ ID NO: 81111 - protein, 20 aa, Artificial Sequence
  Description of Artificial Sequence: Synthetic peptide
  Seed: GMDPRMCSLMQGSTLPRRSG
GMDPRMFSLSQASTQPRRSG

SEQ ID NO: 81112 - protein, 20 aa, Artificial Sequence
  Description of Artificial Sequence: Synthetic peptide
  Seed: GMDPRMCSLMQGSTLPRRSG
GMDPRMFSLSQASTSPRRSG

SEQ ID NO: 81113 - protein, 20 aa, Artificial Sequence
  Description of Artificial Sequence: Synthetic peptide
  Seed: GMDPRMCSLMQGSTLPRRSG
GMDPRMFSLSQASTTPRRSG

SEQ ID NO: 81114 - protein, 20 aa, Artificial Sequence
  Description of Artificial Sequence: Synthetic peptide
  Seed: GMDPRMCSLMQGSTLPRRSG
GMDPRMFSLSQASTVPRRSG

SEQ ID NO: 81115 - protein, 20 aa, Artificial Sequence
  Description of Artificial Sequence: Synthetic peptide
  Seed: GMDPRMCSLMQGSTLPRRSG
GMDPRMFSLSQGSTAPRRSG

SEQ ID NO: 81116 - protein, 20 aa, Artificial Sequence
  Description of Artificial Sequence: Synthetic peptide
  Seed: GMDPRMCSLMQGSTLPRRSG
GMDPRMFSLSQGSTIPRRSG

SEQ ID NO: 81117 - protein, 20 aa, Artificial Sequence
  Description of Artificial Sequence: Synthetic peptide
  Seed: GMDPRMCSLMQGSTLPRRSG
GMDPRMFSLSQGSTLPRRSG

SEQ ID NO: 81118 - protein, 20 aa, Artificial Sequence
  Description of Artificial Sequence: Synthetic peptide
  Seed: GMDPRMCSLMQGSTLPRRSG
GMDPRMFSLSQGSTMPRRSG

SEQ ID NO: 81119 - protein, 20 aa, Artificial Sequence
  Description of Artificial Sequence: Synthetic peptide
  Seed: GMDPRMCSLMQGSTLPRRSG
GMDPRMFSLSQGSTVPRRSG

SEQ ID NO: 81120 - protein, 20 aa, Artificial Sequence
  Description of Artificial Sequence: Synthetic peptide
  Seed: GMDPRMCSLMQGSTLPRRSG
GMDPRMFSLSQISTAPRRSG

SEQ ID NO: 81121 - protein, 20 aa, Artificial Sequence
  Description of Artificial Sequence: Synthetic peptide
  Seed: GMDPRMCSLMQGSTLPRRSG
GMDPRMFSLSQISTNPRRSG

SEQ ID NO: 81122 - protein, 20 aa, Artificial Sequence
  Description of Artificial Sequence: Synthetic peptide
  Seed: GMDPRMCSLMQGSTLPRRSG
GMDPRMFSLSQISTSPRRSG

SEQ ID NO: 81123 - protein, 20 aa, Artificial Sequence
  Description of Artificial Sequence: Synthetic peptide
  Seed: GMDPRMCSLMQGSTLPRRSG
GMDPRMFSLSQNSTVPRRSG

SEQ ID NO: 81124 - protein, 20 aa, Artificial Sequence
  Description of Artificial Sequence: Synthetic peptide
  Seed: GMDPRMCSLMQGSTLPRRSG
GMDPRMFSLSQPSTAPRRSG

SEQ ID NO: 81125 - protein, 20 aa, Artificial Sequence
  Description of Artificial Sequence: Synthetic peptide
  Seed: GMDPRMCSLMQGSTLPRRSG
GMDPRMFSLSQPSTIPRRSG

SEQ ID NO: 81126 - protein, 20 aa, Artificial Sequence
  Description of Artificial Sequence: Synthetic peptide
  Seed: GMDPRMCSLMQGSTLPRRSG
GMDPRMFSLSQPSTLPRRSG

SEQ ID NO: 81127 - protein, 20 aa, Artificial Sequence
  Description of Artificial Sequence: Synthetic peptide
  Seed: GMDPRMCSLMQGSTLPRRSG
GMDPRMFSLSQPSTMPRRSG

SEQ ID NO: 81128 - protein, 20 aa, Artificial Sequence
  Description of Artificial Sequence: Synthetic peptide
  Seed: GMDPRMCSLMQGSTLPRRSG
GMDPRMFSLSQPSTNPRRSG

SEQ ID NO: 81129 - protein, 20 aa, Artificial Sequence
  Description of Artificial Sequence: Synthetic peptide
  Seed: GMDPRMCSLMQGSTLPRRSG
GMDPRMFSLSQPSTSPRRSG

SEQ ID NO: 81130 - protein, 20 aa, Artificial Sequence
  Description of Artificial Sequence: Synthetic peptide
  Seed: GMDPRMCSLMQGSTLPRRSG
GMDPRMFSLSQPSTVPRRSG

SEQ ID NO: 81131 - protein, 20 aa, Artificial Sequence
  Description of Artificial Sequence: Synthetic peptide
  Seed: GMDPRMCSLMQGSTLPRRSG
GMDPRMFSLSQSSTAPRRSG

SEQ ID NO: 81132 - protein, 20 aa, Artificial Sequence
  Description of Artificial Sequence: Synthetic peptide
  Seed: GMDPRMCSLMQGSTLPRRSG
GMDPRMFSLSQSSTIPRRSG

SEQ ID NO: 81133 - protein, 20 aa, Artificial Sequence
  Description of Artificial Sequence: Synthetic peptide
  Seed: GMDPRMCSLMQGSTLPRRSG
GMDPRMFSLSQSSTLPRRSG

SEQ ID NO: 81134 - protein, 20 aa, Artificial Sequence
  Description of Artificial Sequence: Synthetic peptide
  Seed: GMDPRMCSLMQGSTLPRRSG
GMDPRMFSLSQSSTMPRRSG

SEQ ID NO: 81135 - protein, 20 aa, Artificial Sequence
  Description of Artificial Sequence: Synthetic peptide
  Seed: GMDPRMCSLMQGSTLPRRSG
GMDPRMFSLSQSSTNPRRSG

SEQ ID NO: 81136 - protein, 20 aa, Artificial Sequence
  Description of Artificial Sequence: Synthetic peptide
  Seed: GMDPRMCSLMQGSTLPRRSG
GMDPRMFSLSQSSTSPRRSG

SEQ ID NO: 81137 - protein, 20 aa, Artificial Sequence
  Description of Artificial Sequence: Synthetic peptide
  Seed: GMDPRMCSLMQGSTLPRRSG
GMDPRMFSLSQSSTVPRRSG

SEQ ID NO: 81138 - protein, 20 aa, Artificial Sequence
  Description of Artificial Sequence: Synthetic peptide
  Seed: GMDPRMCSLMQGSTLPRRSG
GMDPRMFSLSQTSTAPRRSG

SEQ ID NO: 81139 - protein, 20 aa, Artificial Sequence
  Description of Artificial Sequence: Synthetic peptide
  Seed: GMDPRMCSLMQGSTLPRRSG
GMDPRMFSLSQTSTIPRRSG

SEQ ID NO: 81140 - protein, 20 aa, Artificial Sequence
  Description of Artificial Sequence: Synthetic peptide
  Seed: GMDPRMCSLMQGSTLPRRSG
GMDPRMFSLSQTSTLPRRSG

SEQ ID NO: 81141 - protein, 20 aa, Artificial Sequence
  Description of Artificial Sequence: Synthetic peptide
  Seed: GMDPRMCSLMQGSTLPRRSG
GMDPRMFSLSQTSTNPRRSG

SEQ ID NO: 81142 - protein, 20 aa, Artificial Sequence
  Description of Artificial Sequence: Synthetic peptide
  Seed: GMDPRMCSLMQGSTLPRRSG
GMDPRMFSLSQTSTSPRRSG

SEQ ID NO: 81143 - protein, 20 aa, Artificial Sequence
  Description of Artificial Sequence: Synthetic peptide
  Seed: GMDPRMCSLMQGSTLPRRSG
GMDPRMFSLSQTSTVPRRSG

SEQ ID NO: 81144 - protein, 20 aa, Artificial Sequence
  Description of Artificial Sequence: Synthetic peptide
  Seed: GMDPRMCSLMQGSTLPRRSG
GMDPRMFSLSQVSTAPRRSG

SEQ ID NO: 81145 - protein, 20 aa, Artificial Sequence
  Description of Artificial Sequence: Synthetic peptide
  Seed: GMDPRMCSLMQGSTLPRRSG
GMDPRMFSLSQVSTNPRRSG

SEQ ID NO: 81146 - protein, 20 aa, Artificial Sequence
  Description of Artificial Sequence: Synthetic peptide
  Seed: GMDPRMCSLMQGSTLPRRSG
GMDPRMFSLSQVSTSPRRSG

SEQ ID NO: 81147 - protein, 20 aa, Artificial Sequence
  Description of Artificial Sequence: Synthetic peptide
  Seed: GMDPRMCSLMQGSTLPRRSG
GMDPRMFSLSQVSTVPRRSG

SEQ ID NO: 81148 - protein, 20 aa, Artificial Sequence
  Description of Artificial Sequence: Synthetic peptide
  Seed: GMDPRMCSLMQGSTLPRRSG
GMDPRMFSLTQASTAPRRSG

SEQ ID NO: 81149 - protein, 20 aa, Artificial Sequence
  Description of Artificial Sequence: Synthetic peptide
  Seed: GMDPRMCSLMQGSTLPRRSG
GMDPRMFSLTQASTGPRRSG

SEQ ID NO: 81150 - protein, 20 aa, Artificial Sequence
  Description of Artificial Sequence: Synthetic peptide
  Seed: GMDPRMCSLMQGSTLPRRSG
GMDPRMFSLTQASTIPRRSG

SEQ ID NO: 81151 - protein, 20 aa, Artificial Sequence
  Description of Artificial Sequence: Synthetic peptide
  Seed: GMDPRMCSLMQGSTLPRRSG
GMDPRMFSLTQASTLPRRSG

SEQ ID NO: 81152 - protein, 20 aa, Artificial Sequence
  Description of Artificial Sequence: Synthetic peptide
  Seed: GMDPRMCSLMQGSTLPRRSG
GMDPRMFSLTQASTMPRRSG

SEQ ID NO: 81153 - protein, 20 aa, Artificial Sequence
  Description of Artificial Sequence: Synthetic peptide
  Seed: GMDPRMCSLMQGSTLPRRSG
GMDPRMFSLTQASTNPRRSG

SEQ ID NO: 81154 - protein, 20 aa, Artificial Sequence
  Description of Artificial Sequence: Synthetic peptide
  Seed: GMDPRMCSLMQGSTLPRRSG
GMDPRMFSLTQASTSPRRSG

SEQ ID NO: 81155 - protein, 20 aa, Artificial Sequence
  Description of Artificial Sequence: Synthetic peptide
  Seed: GMDPRMCSLMQGSTLPRRSG
GMDPRMFSLTQASTTPRRSG

SEQ ID NO: 81156 - protein, 20 aa, Artificial Sequence
  Description of Artificial Sequence: Synthetic peptide
  Seed: GMDPRMCSLMQGSTLPRRSG
GMDPRMFSLTQASTVPRRSG

SEQ ID NO: 81157 - protein, 20 aa, Artificial Sequence
  Description of Artificial Sequence: Synthetic peptide
  Seed: GMDPRMCSLMQGSTLPRRSG
GMDPRMFSLTQGSTAPRRSG

SEQ ID NO: 81158 - protein, 20 aa, Artificial Sequence
  Description of Artificial Sequence: Synthetic peptide
  Seed: GMDPRMCSLMQGSTLPRRSG
GMDPRMFSLTQGSTIPRRSG

SEQ ID NO: 81159 - protein, 20 aa, Artificial Sequence
  Description of Artificial Sequence: Synthetic peptide
  Seed: GMDPRMCSLMQGSTLPRRSG
GMDPRMFSLTQGSTLPRRSG

SEQ ID NO: 81160 - protein, 20 aa, Artificial Sequence
  Description of Artificial Sequence: Synthetic peptide
  Seed: GMDPRMCSLMQGSTLPRRSG
GMDPRMFSLTQGSTMPRRSG

SEQ ID NO: 81161 - protein, 20 aa, Artificial Sequence
  Description of Artificial Sequence: Synthetic peptide
  Seed: GMDPRMCSLMQGSTLPRRSG
GMDPRMFSLTQGSTVPRRSG

SEQ ID NO: 81162 - protein, 20 aa, Artificial Sequence
  Description of Artificial Sequence: Synthetic peptide
  Seed: GMDPRMCSLMQGSTLPRRSG
GMDPRMFSLTQISTAPRRSG

SEQ ID NO: 81163 - protein, 20 aa, Artificial Sequence
  Description of Artificial Sequence: Synthetic peptide
  Seed: GMDPRMCSLMQGSTLPRRSG
GMDPRMFSLTQPSTAPRRSG

SEQ ID NO: 81164 - protein, 20 aa, Artificial Sequence
  Description of Artificial Sequence: Synthetic peptide
  Seed: GMDPRMCSLMQGSTLPRRSG
GMDPRMFSLTQPSTIPRRSG

SEQ ID NO: 81165 - protein, 20 aa, Artificial Sequence
  Description of Artificial Sequence: Synthetic peptide
  Seed: GMDPRMCSLMQGSTLPRRSG
GMDPRMFSLTQPSTLPRRSG

SEQ ID NO: 81166 - protein, 20 aa, Artificial Sequence
  Description of Artificial Sequence: Synthetic peptide
  Seed: GMDPRMCSLMQGSTLPRRSG
GMDPRMFSLTQPSTNPRRSG

SEQ ID NO: 81167 - protein, 20 aa, Artificial Sequence
  Description of Artificial Sequence: Synthetic peptide
  Seed: GMDPRMCSLMQGSTLPRRSG
GMDPRMFSLTQPSTSPRRSG

SEQ ID NO: 81168 - protein, 20 aa, Artificial Sequence
  Description of Artificial Sequence: Synthetic peptide
  Seed: GMDPRMCSLMQGSTLPRRSG
GMDPRMFSLTQPSTVPRRSG

SEQ ID NO: 81169 - protein, 20 aa, Artificial Sequence
  Description of Artificial Sequence: Synthetic peptide
  Seed: GMDPRMCSLMQGSTLPRRSG
GMDPRMFSLTQSSTAPRRSG

SEQ ID NO: 81170 - protein, 20 aa, Artificial Sequence
  Description of Artificial Sequence: Synthetic peptide
  Seed: GMDPRMCSLMQGSTLPRRSG
GMDPRMFSLTQSSTIPRRSG

SEQ ID NO: 81171 - protein, 20 aa, Artificial Sequence
  Description of Artificial Sequence: Synthetic peptide
  Seed: GMDPRMCSLMQGSTLPRRSG
GMDPRMFSLTQSSTLPRRSG

SEQ ID NO: 81172 - protein, 20 aa, Artificial Sequence
  Description of Artificial Sequence: Synthetic peptide
  Seed: GMDPRMCSLMQGSTLPRRSG
GMDPRMFSLTQSSTNPRRSG

SEQ ID NO: 81173 - protein, 20 aa, Artificial Sequence
  Description of Artificial Sequence: Synthetic peptide
  Seed: GMDPRMCSLMQGSTLPRRSG
GMDPRMFSLTQSSTSPRRSG

SEQ ID NO: 81174 - protein, 20 aa, Artificial Sequence
  Description of Artificial Sequence: Synthetic peptide
  Seed: GMDPRMCSLMQGSTLPRRSG
GMDPRMFSLTQSSTVPRRSG

SEQ ID NO: 81175 - protein, 20 aa, Artificial Sequence
  Description of Artificial Sequence: Synthetic peptide
  Seed: GMDPRMCSLMQGSTLPRRSG
GMDPRMFSLTQTSTAPRRSG

SEQ ID NO: 81176 - protein, 20 aa, Artificial Sequence
  Description of Artificial Sequence: Synthetic peptide
  Seed: GMDPRMCSLMQGSTLPRRSG
GMDPRMFSLTQTSTNPRRSG

SEQ ID NO: 81177 - protein, 20 aa, Artificial Sequence
  Description of Artificial Sequence: Synthetic peptide
  Seed: GMDPRMCSLMQGSTLPRRSG
GMDPRMFSLTQTSTSPRRSG

SEQ ID NO: 81178 - protein, 20 aa, Artificial Sequence
  Description of Artificial Sequence: Synthetic peptide
  Seed: GMDPRMCSLMQGSTLPRRSG
GMDPRMFSLTQVSTAPRRSG

SEQ ID NO: 81179 - protein, 20 aa, Artificial Sequence
  Description of Artificial Sequence: Synthetic peptide
  Seed: GMDPRMCSLMQGSTLPRRSG
GMDPRMFSLTQVSTNPRRSG

SEQ ID NO: 81180 - protein, 20 aa, Artificial Sequence
  Description of Artificial Sequence: Synthetic peptide
  Seed: GMDPRMCSLMQGSTLPRRSG
GMDPRMFSLTQVSTSPRRSG

SEQ ID NO: 81181 - protein, 20 aa, Artificial Sequence
  Description of Artificial Sequence: Synthetic peptide
  Seed: GMDPRMCSLMQGSTLPRRSG
GMDPRMFSLVQASTAPRRSG

SEQ ID NO: 81182 - protein, 20 aa, Artificial Sequence
  Description of Artificial Sequence: Synthetic peptide
  Seed: GMDPRMCSLMQGSTLPRRSG
GMDPRMFSLVQASTCPRRSG

SEQ ID NO: 81183 - protein, 20 aa, Artificial Sequence
  Description of Artificial Sequence: Synthetic peptide
  Seed: GMDPRMCSLMQGSTLPRRSG
GMDPRMFSLVQASTDPRRSG

SEQ ID NO: 81184 - protein, 20 aa, Artificial Sequence
  Description of Artificial Sequence: Synthetic peptide
  Seed: GMDPRMCSLMQGSTLPRRSG
GMDPRMFSLVQASTEPRRSG

SEQ ID NO: 81185 - protein, 20 aa, Artificial Sequence
  Description of Artificial Sequence: Synthetic peptide
  Seed: GMDPRMCSLMQGSTLPRRSG
GMDPRMFSLVQASTFPRRSG

SEQ ID NO: 81186 - protein, 20 aa, Artificial Sequence
  Description of Artificial Sequence: Synthetic peptide
  Seed: GMDPRMCSLMQGSTLPRRSG
GMDPRMFSLVQASTGPRRSG

SEQ ID NO: 81187 - protein, 20 aa, Artificial Sequence
  Description of Artificial Sequence: Synthetic peptide
  Seed: GMDPRMCSLMQGSTLPRRSG
GMDPRMFSLVQASTHPRRSG

SEQ ID NO: 81188 - protein, 20 aa, Artificial Sequence
  Description of Artificial Sequence: Synthetic peptide
  Seed: GMDPRMCSLMQGSTLPRRSG
GMDPRMFSLVQASTIPRRSG

SEQ ID NO: 81189 - protein, 20 aa, Artificial Sequence
  Description of Artificial Sequence: Synthetic peptide
  Seed: GMDPRMCSLMQGSTLPRRSG
GMDPRMFSLVQASTLPRRSG

SEQ ID NO: 81190 - protein, 20 aa, Artificial Sequence
  Description of Artificial Sequence: Synthetic peptide
  Seed: GMDPRMCSLMQGSTLPRRSG
GMDPRMFSLVQASTMPRRSG

SEQ ID NO: 81191 - protein, 20 aa, Artificial Sequence
  Description of Artificial Sequence: Synthetic peptide
  Seed: GMDPRMCSLMQGSTLPRRSG
GMDPRMFSLVQASTNPRRSG

SEQ ID NO: 81192 - protein, 20 aa, Artificial Sequence
  Description of Artificial Sequence: Synthetic peptide
  Seed: GMDPRMCSLMQGSTLPRRSG
GMDPRMFSLVQASTPPRRSG

SEQ ID NO: 81193 - protein, 20 aa, Artificial Sequence
  Description of Artificial Sequence: Synthetic peptide
  Seed: GMDPRMCSLMQGSTLPRRSG
GMDPRMFSLVQASTQPRRSG

SEQ ID NO: 81194 - protein, 20 aa, Artificial Sequence
  Description of Artificial Sequence: Synthetic peptide
  Seed: GMDPRMCSLMQGSTLPRRSG
GMDPRMFSLVQASTSPRRSG

SEQ ID NO: 81195 - protein, 20 aa, Artificial Sequence
  Description of Artificial Sequence: Synthetic peptide
  Seed: GMDPRMCSLMQGSTLPRRSG
GMDPRMFSLVQASTTPRRSG

SEQ ID NO: 81196 - protein, 20 aa, Artificial Sequence
  Description of Artificial Sequence: Synthetic peptide
  Seed: GMDPRMCSLMQGSTLPRRSG
GMDPRMFSLVQASTVPRRSG

SEQ ID NO: 81197 - protein, 20 aa, Artificial Sequence
  Description of Artificial Sequence: Synthetic peptide
  Seed: GMDPRMCSLMQGSTLPRRSG
GMDPRMFSLVQGSTAPRRSG

SEQ ID NO: 81198 - protein, 20 aa, Artificial Sequence
  Description of Artificial Sequence: Synthetic peptide
  Seed: GMDPRMCSLMQGSTLPRRSG
GMDPRMFSLVQGSTCPRRSG

SEQ ID NO: 81199 - protein, 20 aa, Artificial Sequence
  Description of Artificial Sequence: Synthetic peptide
  Seed: GMDPRMCSLMQGSTLPRRSG
GMDPRMFSLVQGSTGPRRSG

SEQ ID NO: 81200 - protein, 20 aa, Artificial Sequence
  Description of Artificial Sequence: Synthetic peptide
  Seed: GMDPRMCSLMQGSTLPRRSG
GMDPRMFSLVQGSTIPRRSG

SEQ ID NO: 81201 - protein, 20 aa, Artificial Sequence
  Description of Artificial Sequence: Synthetic peptide
  Seed: GMDPRMCSLMQGSTLPRRSG
GMDPRMFSLVQGSTLPRRSG

SEQ ID NO: 81202 - protein, 20 aa, Artificial Sequence
  Description of Artificial Sequence: Synthetic peptide
  Seed: GMDPRMCSLMQGSTLPRRSG
GMDPRMFSLVQGSTMPRRSG

SEQ ID NO: 81203 - protein, 20 aa, Artificial Sequence
  Description of Artificial Sequence: Synthetic peptide
  Seed: GMDPRMCSLMQGSTLPRRSG
GMDPRMFSLVQGSTNPRRSG

SEQ ID NO: 81204 - protein, 20 aa, Artificial Sequence
  Description of Artificial Sequence: Synthetic peptide
  Seed: GMDPRMCSLMQGSTLPRRSG
GMDPRMFSLVQGSTSPRRSG

SEQ ID NO: 81205 - protein, 20 aa, Artificial Sequence
  Description of Artificial Sequence: Synthetic peptide
  Seed: GMDPRMCSLMQGSTLPRRSG
GMDPRMFSLVQGSTTPRRSG

SEQ ID NO: 81206 - protein, 20 aa, Artificial Sequence
  Description of Artificial Sequence: Synthetic peptide
  Seed: GMDPRMCSLMQGSTLPRRSG
GMDPRMFSLVQGSTVPRRSG

SEQ ID NO: 81207 - protein, 20 aa, Artificial Sequence
  Description of Artificial Sequence: Synthetic peptide
  Seed: GMDPRMCSLMQGSTLPRRSG
GMDPRMFSLVQISTAPRRSG

SEQ ID NO: 81208 - protein, 20 aa, Artificial Sequence
  Description of Artificial Sequence: Synthetic peptide
  Seed: GMDPRMCSLMQGSTLPRRSG
GMDPRMFSLVQISTGPRRSG

SEQ ID NO: 81209 - protein, 20 aa, Artificial Sequence
  Description of Artificial Sequence: Synthetic peptide
  Seed: GMDPRMCSLMQGSTLPRRSG
GMDPRMFSLVQISTIPRRSG

SEQ ID NO: 81210 - protein, 20 aa, Artificial Sequence
  Description of Artificial Sequence: Synthetic peptide
  Seed: GMDPRMCSLMQGSTLPRRSG
GMDPRMFSLVQISTLPRRSG

SEQ ID NO: 81211 - protein, 20 aa, Artificial Sequence
  Description of Artificial Sequence: Synthetic peptide
  Seed: GMDPRMCSLMQGSTLPRRSG
GMDPRMFSLVQISTMPRRSG

SEQ ID NO: 81212 - protein, 20 aa, Artificial Sequence
  Description of Artificial Sequence: Synthetic peptide
  Seed: GMDPRMCSLMQGSTLPRRSG
GMDPRMFSLVQISTNPRRSG

SEQ ID NO: 81213 - protein, 20 aa, Artificial Sequence
  Description of Artificial Sequence: Synthetic peptide
  Seed: GMDPRMCSLMQGSTLPRRSG
GMDPRMFSLVQISTSPRRSG

SEQ ID NO: 81214 - protein, 20 aa, Artificial Sequence
  Description of Artificial Sequence: Synthetic peptide
  Seed: GMDPRMCSLMQGSTLPRRSG
GMDPRMFSLVQISTTPRRSG

SEQ ID NO: 81215 - protein, 20 aa, Artificial Sequence
  Description of Artificial Sequence: Synthetic peptide
  Seed: GMDPRMCSLMQGSTLPRRSG
GMDPRMFSLVQISTVPRRSG

SEQ ID NO: 81216 - protein, 20 aa, Artificial Sequence
  Description of Artificial Sequence: Synthetic peptide
  Seed: GMDPRMCSLMQGSTLPRRSG
GMDPRMFSLVQLSTAPRRSG

SEQ ID NO: 81217 - protein, 20 aa, Artificial Sequence
  Description of Artificial Sequence: Synthetic peptide
  Seed: GMDPRMCSLMQGSTLPRRSG
GMDPRMFSLVQLSTNPRRSG

SEQ ID NO: 81218 - protein, 20 aa, Artificial Sequence
  Description of Artificial Sequence: Synthetic peptide
  Seed: GMDPRMCSLMQGSTLPRRSG
GMDPRMFSLVQLSTSPRRSG

SEQ ID NO: 81219 - protein, 20 aa, Artificial Sequence
  Description of Artificial Sequence: Synthetic peptide
  Seed: GMDPRMCSLMQGSTLPRRSG
GMDPRMFSLVQMSTAPRRSG

SEQ ID NO: 81220 - protein, 20 aa, Artificial Sequence
  Description of Artificial Sequence: Synthetic peptide
  Seed: GMDPRMCSLMQGSTLPRRSG
GMDPRMFSLVQMSTNPRRSG

SEQ ID NO: 81221 - protein, 20 aa, Artificial Sequence
  Description of Artificial Sequence: Synthetic peptide
  Seed: GMDPRMCSLMQGSTLPRRSG
GMDPRMFSLVQMSTSPRRSG

SEQ ID NO: 81222 - protein, 20 aa, Artificial Sequence
  Description of Artificial Sequence: Synthetic peptide
  Seed: GMDPRMCSLMQGSTLPRRSG
GMDPRMFSLVQNSTAPRRSG

SEQ ID NO: 81223 - protein, 20 aa, Artificial Sequence
  Description of Artificial Sequence: Synthetic peptide
  Seed: GMDPRMCSLMQGSTLPRRSG
GMDPRMFSLVQNSTGPRRSG

SEQ ID NO: 81224 - protein, 20 aa, Artificial Sequence
  Description of Artificial Sequence: Synthetic peptide
  Seed: GMDPRMCSLMQGSTLPRRSG
GMDPRMFSLVQNSTIPRRSG

SEQ ID NO: 81225 - protein, 20 aa, Artificial Sequence
  Description of Artificial Sequence: Synthetic peptide
  Seed: GMDPRMCSLMQGSTLPRRSG
GMDPRMFSLVQNSTLPRRSG

SEQ ID NO: 81226 - protein, 20 aa, Artificial Sequence
  Description of Artificial Sequence: Synthetic peptide
  Seed: GMDPRMCSLMQGSTLPRRSG
GMDPRMFSLVQNSTNPRRSG

SEQ ID NO: 81227 - protein, 20 aa, Artificial Sequence
  Description of Artificial Sequence: Synthetic peptide
  Seed: GMDPRMCSLMQGSTLPRRSG
GMDPRMFSLVQNSTSPRRSG

SEQ ID NO: 81228 - protein, 20 aa, Artificial Sequence
  Description of Artificial Sequence: Synthetic peptide
  Seed: GMDPRMCSLMQGSTLPRRSG
GMDPRMFSLVQNSTTPRRSG

SEQ ID NO: 81229 - protein, 20 aa, Artificial Sequence
  Description of Artificial Sequence: Synthetic peptide
  Seed: GMDPRMCSLMQGSTLPRRSG
GMDPRMFSLVQNSTVPRRSG

SEQ ID NO: 81230 - protein, 20 aa, Artificial Sequence
  Description of Artificial Sequence: Synthetic peptide
  Seed: GMDPRMCSLMQGSTLPRRSG
GMDPRMFSLVQPSTAPRRSG

SEQ ID NO: 81231 - protein, 20 aa, Artificial Sequence
  Description of Artificial Sequence: Synthetic peptide
  Seed: GMDPRMCSLMQGSTLPRRSG
GMDPRMFSLVQPSTGPRRSG

SEQ ID NO: 81232 - protein, 20 aa, Artificial Sequence
  Description of Artificial Sequence: Synthetic peptide
  Seed: GMDPRMCSLMQGSTLPRRSG
GMDPRMFSLVQPSTHPRRSG

SEQ ID NO: 81233 - protein, 20 aa, Artificial Sequence
  Description of Artificial Sequence: Synthetic peptide
  Seed: GMDPRMCSLMQGSTLPRRSG
GMDPRMFSLVQPSTIPRRSG

SEQ ID NO: 81234 - protein, 20 aa, Artificial Sequence
  Description of Artificial Sequence: Synthetic peptide
  Seed: GMDPRMCSLMQGSTLPRRSG
GMDPRMFSLVQPSTLPRRSG

SEQ ID NO: 81235 - protein, 20 aa, Artificial Sequence
  Description of Artificial Sequence: Synthetic peptide
  Seed: GMDPRMCSLMQGSTLPRRSG
GMDPRMFSLVQPSTMPRRSG

SEQ ID NO: 81236 - protein, 20 aa, Artificial Sequence
  Description of Artificial Sequence: Synthetic peptide
  Seed: GMDPRMCSLMQGSTLPRRSG
GMDPRMFSLVQPSTNPRRSG

SEQ ID NO: 81237 - protein, 20 aa, Artificial Sequence
  Description of Artificial Sequence: Synthetic peptide
  Seed: GMDPRMCSLMQGSTLPRRSG
GMDPRMFSLVQPSTQPRRSG

SEQ ID NO: 81238 - protein, 20 aa, Artificial Sequence
  Description of Artificial Sequence: Synthetic peptide
  Seed: GMDPRMCSLMQGSTLPRRSG
GMDPRMFSLVQPSTSPRRSG

SEQ ID NO: 81239 - protein, 20 aa, Artificial Sequence
  Description of Artificial Sequence: Synthetic peptide
  Seed: GMDPRMCSLMQGSTLPRRSG
GMDPRMFSLVQPSTTPRRSG

SEQ ID NO: 81240 - protein, 20 aa, Artificial Sequence
  Description of Artificial Sequence: Synthetic peptide
  Seed: GMDPRMCSLMQGSTLPRRSG
GMDPRMFSLVQPSTVPRRSG

SEQ ID NO: 81241 - protein, 20 aa, Artificial Sequence
  Description of Artificial Sequence: Synthetic peptide
  Seed: GMDPRMCSLMQGSTLPRRSG
GMDPRMFSLVQSSTAPRRSG

SEQ ID NO: 81242 - protein, 20 aa, Artificial Sequence
  Description of Artificial Sequence: Synthetic peptide
  Seed: GMDPRMCSLMQGSTLPRRSG
GMDPRMFSLVQSSTGPRRSG

SEQ ID NO: 81243 - protein, 20 aa, Artificial Sequence
  Description of Artificial Sequence: Synthetic peptide
  Seed: GMDPRMCSLMQGSTLPRRSG
GMDPRMFSLVQSSTHPRRSG

SEQ ID NO: 81244 - protein, 20 aa, Artificial Sequence
  Description of Artificial Sequence: Synthetic peptide
  Seed: GMDPRMCSLMQGSTLPRRSG
GMDPRMFSLVQSSTIPRRSG

SEQ ID NO: 81245 - protein, 20 aa, Artificial Sequence
  Description of Artificial Sequence: Synthetic peptide
  Seed: GMDPRMCSLMQGSTLPRRSG
GMDPRMFSLVQSSTLPRRSG

SEQ ID NO: 81246 - protein, 20 aa, Artificial Sequence
  Description of Artificial Sequence: Synthetic peptide
  Seed: GMDPRMCSLMQGSTLPRRSG
GMDPRMFSLVQSSTMPRRSG

SEQ ID NO: 81247 - protein, 20 aa, Artificial Sequence
  Description of Artificial Sequence: Synthetic peptide
  Seed: GMDPRMCSLMQGSTLPRRSG
GMDPRMFSLVQSSTNPRRSG

SEQ ID NO: 81248 - protein, 20 aa, Artificial Sequence
  Description of Artificial Sequence: Synthetic peptide
  Seed: GMDPRMCSLMQGSTLPRRSG
GMDPRMFSLVQSSTQPRRSG

SEQ ID NO: 81249 - protein, 20 aa, Artificial Sequence
  Description of Artificial Sequence: Synthetic peptide
  Seed: GMDPRMCSLMQGSTLPRRSG
GMDPRMFSLVQSSTSPRRSG

SEQ ID NO: 81250 - protein, 20 aa, Artificial Sequence
  Description of Artificial Sequence: Synthetic peptide
  Seed: GMDPRMCSLMQGSTLPRRSG
GMDPRMFSLVQSSTTPRRSG

SEQ ID NO: 81251 - protein, 20 aa, Artificial Sequence
  Description of Artificial Sequence: Synthetic peptide
  Seed: GMDPRMCSLMQGSTLPRRSG
GMDPRMFSLVQSSTVPRRSG

SEQ ID NO: 81252 - protein, 20 aa, Artificial Sequence
  Description of Artificial Sequence: Synthetic peptide
  Seed: GMDPRMCSLMQGSTLPRRSG
GMDPRMFSLVQTSTAPRRSG

SEQ ID NO: 81253 - protein, 20 aa, Artificial Sequence
  Description of Artificial Sequence: Synthetic peptide
  Seed: GMDPRMCSLMQGSTLPRRSG
GMDPRMFSLVQTSTGPRRSG

SEQ ID NO: 81254 - protein, 20 aa, Artificial Sequence
  Description of Artificial Sequence: Synthetic peptide
  Seed: GMDPRMCSLMQGSTLPRRSG
GMDPRMFSLVQTSTHPRRSG

SEQ ID NO: 81255 - protein, 20 aa, Artificial Sequence
  Description of Artificial Sequence: Synthetic peptide
  Seed: GMDPRMCSLMQGSTLPRRSG
GMDPRMFSLVQTSTIPRRSG

SEQ ID NO: 81256 - protein, 20 aa, Artificial Sequence
  Description of Artificial Sequence: Synthetic peptide
  Seed: GMDPRMCSLMQGSTLPRRSG
GMDPRMFSLVQTSTLPRRSG

SEQ ID NO: 81257 - protein, 20 aa, Artificial Sequence
  Description of Artificial Sequence: Synthetic peptide
  Seed: GMDPRMCSLMQGSTLPRRSG
GMDPRMFSLVQTSTMPRRSG

SEQ ID NO: 81258 - protein, 20 aa, Artificial Sequence
  Description of Artificial Sequence: Synthetic peptide
  Seed: GMDPRMCSLMQGSTLPRRSG
GMDPRMFSLVQTSTNPRRSG

SEQ ID NO: 81259 - protein, 20 aa, Artificial Sequence
  Description of Artificial Sequence: Synthetic peptide
  Seed: GMDPRMCSLMQGSTLPRRSG
GMDPRMFSLVQTSTQPRRSG

SEQ ID NO: 81260 - protein, 20 aa, Artificial Sequence
  Description of Artificial Sequence: Synthetic peptide
  Seed: GMDPRMCSLMQGSTLPRRSG
GMDPRMFSLVQTSTSPRRSG

SEQ ID NO: 81261 - protein, 20 aa, Artificial Sequence
  Description of Artificial Sequence: Synthetic peptide
  Seed: GMDPRMCSLMQGSTLPRRSG
GMDPRMFSLVQTSTTPRRSG

SEQ ID NO: 81262 - protein, 20 aa, Artificial Sequence
  Description of Artificial Sequence: Synthetic peptide
  Seed: GMDPRMCSLMQGSTLPRRSG
GMDPRMFSLVQTSTVPRRSG

SEQ ID NO: 81263 - protein, 20 aa, Artificial Sequence
  Description of Artificial Sequence: Synthetic peptide
  Seed: GMDPRMCSLMQGSTLPRRSG
GMDPRMFSLVQVSTAPRRSG

SEQ ID NO: 81264 - protein, 20 aa, Artificial Sequence
  Description of Artificial Sequence: Synthetic peptide
  Seed: GMDPRMCSLMQGSTLPRRSG
GMDPRMFSLVQVSTGPRRSG

SEQ ID NO: 81265 - protein, 20 aa, Artificial Sequence
  Description of Artificial Sequence: Synthetic peptide
  Seed: GMDPRMCSLMQGSTLPRRSG
GMDPRMFSLVQVSTHPRRSG

SEQ ID NO: 81266 - protein, 20 aa, Artificial Sequence
  Description of Artificial Sequence: Synthetic peptide
  Seed: GMDPRMCSLMQGSTLPRRSG
GMDPRMFSLVQVSTIPRRSG

SEQ ID NO: 81267 - protein, 20 aa, Artificial Sequence
  Description of Artificial Sequence: Synthetic peptide
  Seed: GMDPRMCSLMQGSTLPRRSG
GMDPRMFSLVQVSTLPRRSG

SEQ ID NO: 81268 - protein, 20 aa, Artificial Sequence
  Description of Artificial Sequence: Synthetic peptide
  Seed: GMDPRMCSLMQGSTLPRRSG
GMDPRMFSLVQVSTMPRRSG

SEQ ID NO: 81269 - protein, 20 aa, Artificial Sequence
  Description of Artificial Sequence: Synthetic peptide
  Seed: GMDPRMCSLMQGSTLPRRSG
GMDPRMFSLVQVSTNPRRSG

SEQ ID NO: 81270 - protein, 20 aa, Artificial Sequence
  Description of Artificial Sequence: Synthetic peptide
  Seed: GMDPRMCSLMQGSTLPRRSG
GMDPRMFSLVQVSTQPRRSG

SEQ ID NO: 81271 - protein, 20 aa, Artificial Sequence
  Description of Artificial Sequence: Synthetic peptide
  Seed: GMDPRMCSLMQGSTLPRRSG
GMDPRMFSLVQVSTSPRRSG

SEQ ID NO: 81272 - protein, 20 aa, Artificial Sequence
  Description of Artificial Sequence: Synthetic peptide
  Seed: GMDPRMCSLMQGSTLPRRSG
GMDPRMFSLVQVSTTPRRSG

SEQ ID NO: 81273 - protein, 20 aa, Artificial Sequence
  Description of Artificial Sequence: Synthetic peptide
  Seed: GMDPRMCSLMQGSTLPRRSG
GMDPRMFSLVQVSTVPRRSG

SEQ ID NO: 81274 - protein, 20 aa, Artificial Sequence
  Description of Artificial Sequence: Synthetic peptide
  Seed: GMDPRMCSLMQGSTLPRRSG
GMDPRMFSLWQASTAPRRSG

SEQ ID NO: 81275 - protein, 20 aa, Artificial Sequence
  Description of Artificial Sequence: Synthetic peptide
  Seed: GMDPRMCSLMQGSTLPRRSG
GMDPRMFSLWQASTIPRRSG

SEQ ID NO: 81276 - protein, 20 aa, Artificial Sequence
  Description of Artificial Sequence: Synthetic peptide
  Seed: GMDPRMCSLMQGSTLPRRSG
GMDPRMFSLWQASTLPRRSG

SEQ ID NO: 81277 - protein, 20 aa, Artificial Sequence
  Description of Artificial Sequence: Synthetic peptide
  Seed: GMDPRMCSLMQGSTLPRRSG
GMDPRMFSLWQASTSPRRSG

SEQ ID NO: 81278 - protein, 20 aa, Artificial Sequence
  Description of Artificial Sequence: Synthetic peptide
  Seed: GMDPRMCSLMQGSTLPRRSG
GMDPRMFSLWQASTVPRRSG

SEQ ID NO: 81279 - protein, 20 aa, Artificial Sequence
  Description of Artificial Sequence: Synthetic peptide
  Seed: GMDPRMCSLMQGSTLPRRSG
GMDPRMFSLWQVSTAPRRSG

SEQ ID NO: 81280 - protein, 20 aa, Artificial Sequence
  Description of Artificial Sequence: Synthetic peptide
  Seed: GMDPRMCSLMQGSTLPRRSG
GMDPRMFSLYQASTAPRRSG

SEQ ID NO: 81281 - protein, 20 aa, Artificial Sequence
  Description of Artificial Sequence: Synthetic peptide
  Seed: GMDPRMCSLMQGSTLPRRSG
GMDPRMFSLYQSSTLPRRSG

SEQ ID NO: 81282 - protein, 20 aa, Artificial Sequence
  Description of Artificial Sequence: Synthetic peptide
  Seed: GMDPRMCSLMQGSTLPRRSG
GMDPRMISLAQASTAPRRSG

SEQ ID NO: 81283 - protein, 20 aa, Artificial Sequence
  Description of Artificial Sequence: Synthetic peptide
  Seed: GMDPRMCSLMQGSTLPRRSG
GMDPRMISLAQASTIPRRSG

SEQ ID NO: 81284 - protein, 20 aa, Artificial Sequence
  Description of Artificial Sequence: Synthetic peptide
  Seed: GMDPRMCSLMQGSTLPRRSG
GMDPRMISLAQASTLPRRSG

SEQ ID NO: 81285 - protein, 20 aa, Artificial Sequence
  Description of Artificial Sequence: Synthetic peptide
  Seed: GMDPRMCSLMQGSTLPRRSG
GMDPRMISLAQASTMPRRSG

SEQ ID NO: 81286 - protein, 20 aa, Artificial Sequence
  Description of Artificial Sequence: Synthetic peptide
  Seed: GMDPRMCSLMQGSTLPRRSG
GMDPRMISLAQASTNPRRSG

SEQ ID NO: 81287 - protein, 20 aa, Artificial Sequence
  Description of Artificial Sequence: Synthetic peptide
  Seed: GMDPRMCSLMQGSTLPRRSG
GMDPRMISLAQASTSPRRSG

SEQ ID NO: 81288 - protein, 20 aa, Artificial Sequence
  Description of Artificial Sequence: Synthetic peptide
  Seed: GMDPRMCSLMQGSTLPRRSG
GMDPRMISLAQASTTPRRSG

SEQ ID NO: 81289 - protein, 20 aa, Artificial Sequence
  Description of Artificial Sequence: Synthetic peptide
  Seed: GMDPRMCSLMQGSTLPRRSG
GMDPRMISLAQASTVPRRSG

SEQ ID NO: 81290 - protein, 20 aa, Artificial Sequence
  Description of Artificial Sequence: Synthetic peptide
  Seed: GMDPRMCSLMQGSTLPRRSG
GMDPRMISLAQGSTAPRRSG

SEQ ID NO: 81291 - protein, 20 aa, Artificial Sequence
  Description of Artificial Sequence: Synthetic peptide
  Seed: GMDPRMCSLMQGSTLPRRSG
GMDPRMISLAQGSTIPRRSG

SEQ ID NO: 81292 - protein, 20 aa, Artificial Sequence
  Description of Artificial Sequence: Synthetic peptide
  Seed: GMDPRMCSLMQGSTLPRRSG
GMDPRMISLAQGSTLPRRSG

SEQ ID NO: 81293 - protein, 20 aa, Artificial Sequence
  Description of Artificial Sequence: Synthetic peptide
  Seed: GMDPRMCSLMQGSTLPRRSG
GMDPRMISLAQGSTVPRRSG

SEQ ID NO: 81294 - protein, 20 aa, Artificial Sequence
  Description of Artificial Sequence: Synthetic peptide
  Seed: GMDPRMCSLMQGSTLPRRSG
GMDPRMISLAQPSTAPRRSG

SEQ ID NO: 81295 - protein, 20 aa, Artificial Sequence
  Description of Artificial Sequence: Synthetic peptide
  Seed: GMDPRMCSLMQGSTLPRRSG
GMDPRMISLAQPSTIPRRSG

SEQ ID NO: 81296 - protein, 20 aa, Artificial Sequence
  Description of Artificial Sequence: Synthetic peptide
  Seed: GMDPRMCSLMQGSTLPRRSG
GMDPRMISLAQPSTLPRRSG

SEQ ID NO: 81297 - protein, 20 aa, Artificial Sequence
  Description of Artificial Sequence: Synthetic peptide
  Seed: GMDPRMCSLMQGSTLPRRSG
GMDPRMISLAQPSTVPRRSG

SEQ ID NO: 81298 - protein, 20 aa, Artificial Sequence
  Description of Artificial Sequence: Synthetic peptide
  Seed: GMDPRMCSLMQGSTLPRRSG
GMDPRMISLAQSSTAPRRSG

SEQ ID NO: 81299 - protein, 20 aa, Artificial Sequence
  Description of Artificial Sequence: Synthetic peptide
  Seed: GMDPRMCSLMQGSTLPRRSG
GMDPRMISLAQSSTIPRRSG

SEQ ID NO: 81300 - protein, 20 aa, Artificial Sequence
  Description of Artificial Sequence: Synthetic peptide
  Seed: GMDPRMCSLMQGSTLPRRSG
GMDPRMISLAQSSTLPRRSG

SEQ ID NO: 81301 - protein, 20 aa, Artificial Sequence
  Description of Artificial Sequence: Synthetic peptide
  Seed: GMDPRMCSLMQGSTLPRRSG
GMDPRMISLAQSSTVPRRSG

SEQ ID NO: 81302 - protein, 20 aa, Artificial Sequence
  Description of Artificial Sequence: Synthetic peptide
  Seed: GMDPRMCSLMQGSTLPRRSG
GMDPRMISLAQVSTAPRRSG

SEQ ID NO: 81303 - protein, 20 aa, Artificial Sequence
  Description of Artificial Sequence: Synthetic peptide
  Seed: GMDPRMCSLMQGSTLPRRSG
GMDPRMISLEQASTIPRRSG

SEQ ID NO: 81304 - protein, 20 aa, Artificial Sequence
  Description of Artificial Sequence: Synthetic peptide
  Seed: GMDPRMCSLMQGSTLPRRSG
GMDPRMISLEQASTLPRRSG

SEQ ID NO: 81305 - protein, 20 aa, Artificial Sequence
  Description of Artificial Sequence: Synthetic peptide
  Seed: GMDPRMCSLMQGSTLPRRSG
GMDPRMISLEQASTVPRRSG

SEQ ID NO: 81306 - protein, 20 aa, Artificial Sequence
  Description of Artificial Sequence: Synthetic peptide
  Seed: GMDPRMCSLMQGSTLPRRSG
GMDPRMISLFQASTAPRRSG

SEQ ID NO: 81307 - protein, 20 aa, Artificial Sequence
  Description of Artificial Sequence: Synthetic peptide
  Seed: GMDPRMCSLMQGSTLPRRSG
GMDPRMISLFQASTVPRRSG

SEQ ID NO: 81308 - protein, 20 aa, Artificial Sequence
  Description of Artificial Sequence: Synthetic peptide
  Seed: GMDPRMCSLMQGSTLPRRSG
GMDPRMISLFQDSTAPRRSG

SEQ ID NO: 81309 - protein, 20 aa, Artificial Sequence
  Description of Artificial Sequence: Synthetic peptide
  Seed: GMDPRMCSLMQGSTLPRRSG
GMDPRMISLFQDSTIPRRSG

SEQ ID NO: 81310 - protein, 20 aa, Artificial Sequence
  Description of Artificial Sequence: Synthetic peptide
  Seed: GMDPRMCSLMQGSTLPRRSG
GMDPRMISLFQDSTLPRRSG

SEQ ID NO: 81311 - protein, 20 aa, Artificial Sequence
  Description of Artificial Sequence: Synthetic peptide
  Seed: GMDPRMCSLMQGSTLPRRSG
GMDPRMISLFQDSTVPRRSG

SEQ ID NO: 81312 - protein, 20 aa, Artificial Sequence
  Description of Artificial Sequence: Synthetic peptide
  Seed: GMDPRMCSLMQGSTLPRRSG
GMDPRMISLGQASTIPRRSG

SEQ ID NO: 81313 - protein, 20 aa, Artificial Sequence
  Description of Artificial Sequence: Synthetic peptide
  Seed: GMDPRMCSLMQGSTLPRRSG
GMDPRMISLGQASTLPRRSG

SEQ ID NO: 81314 - protein, 20 aa, Artificial Sequence
  Description of Artificial Sequence: Synthetic peptide
  Seed: GMDPRMCSLMQGSTLPRRSG
GMDPRMISLGQASTVPRRSG

SEQ ID NO: 81315 - protein, 20 aa, Artificial Sequence
  Description of Artificial Sequence: Synthetic peptide
  Seed: GMDPRMCSLMQGSTLPRRSG
GMDPRMISLIQASTAPRRSG

SEQ ID NO: 81316 - protein, 20 aa, Artificial Sequence
  Description of Artificial Sequence: Synthetic peptide
  Seed: GMDPRMCSLMQGSTLPRRSG
GMDPRMISLIQASTIPRRSG

SEQ ID NO: 81317 - protein, 20 aa, Artificial Sequence
  Description of Artificial Sequence: Synthetic peptide
  Seed: GMDPRMCSLMQGSTLPRRSG
GMDPRMISLIQASTLPRRSG

SEQ ID NO: 81318 - protein, 20 aa, Artificial Sequence
  Description of Artificial Sequence: Synthetic peptide
  Seed: GMDPRMCSLMQGSTLPRRSG
GMDPRMISLIQASTMPRRSG

SEQ ID NO: 81319 - protein, 20 aa, Artificial Sequence
  Description of Artificial Sequence: Synthetic peptide
  Seed: GMDPRMCSLMQGSTLPRRSG
GMDPRMISLIQASTNPRRSG

SEQ ID NO: 81320 - protein, 20 aa, Artificial Sequence
  Description of Artificial Sequence: Synthetic peptide
  Seed: GMDPRMCSLMQGSTLPRRSG
GMDPRMISLIQASTSPRRSG

SEQ ID NO: 81321 - protein, 20 aa, Artificial Sequence
  Description of Artificial Sequence: Synthetic peptide
  Seed: GMDPRMCSLMQGSTLPRRSG
GMDPRMISLIQASTTPRRSG

SEQ ID NO: 81322 - protein, 20 aa, Artificial Sequence
  Description of Artificial Sequence: Synthetic peptide
  Seed: GMDPRMCSLMQGSTLPRRSG
GMDPRMISLIQASTVPRRSG

SEQ ID NO: 81323 - protein, 20 aa, Artificial Sequence
  Description of Artificial Sequence: Synthetic peptide
  Seed: GMDPRMCSLMQGSTLPRRSG
GMDPRMISLIQGSTAPRRSG

SEQ ID NO: 81324 - protein, 20 aa, Artificial Sequence
  Description of Artificial Sequence: Synthetic peptide
  Seed: GMDPRMCSLMQGSTLPRRSG
GMDPRMISLIQGSTIPRRSG

SEQ ID NO: 81325 - protein, 20 aa, Artificial Sequence
  Description of Artificial Sequence: Synthetic peptide
  Seed: GMDPRMCSLMQGSTLPRRSG
GMDPRMISLIQGSTLPRRSG

SEQ ID NO: 81326 - protein, 20 aa, Artificial Sequence
  Description of Artificial Sequence: Synthetic peptide
  Seed: GMDPRMCSLMQGSTLPRRSG
GMDPRMISLIQGSTMPRRSG

SEQ ID NO: 81327 - protein, 20 aa, Artificial Sequence
  Description of Artificial Sequence: Synthetic peptide
  Seed: GMDPRMCSLMQGSTLPRRSG
GMDPRMISLIQGSTSPRRSG

SEQ ID NO: 81328 - protein, 20 aa, Artificial Sequence
  Description of Artificial Sequence: Synthetic peptide
  Seed: GMDPRMCSLMQGSTLPRRSG
GMDPRMISLIQGSTTPRRSG

SEQ ID NO: 81329 - protein, 20 aa, Artificial Sequence
  Description of Artificial Sequence: Synthetic peptide
  Seed: GMDPRMCSLMQGSTLPRRSG
GMDPRMISLIQGSTVPRRSG

SEQ ID NO: 81330 - protein, 20 aa, Artificial Sequence
  Description of Artificial Sequence: Synthetic peptide
  Seed: GMDPRMCSLMQGSTLPRRSG
GMDPRMISLIQNSTVPRRSG

SEQ ID NO: 81331 - protein, 20 aa, Artificial Sequence
  Description of Artificial Sequence: Synthetic peptide
  Seed: GMDPRMCSLMQGSTLPRRSG
GMDPRMISLIQPSTAPRRSG

SEQ ID NO: 81332 - protein, 20 aa, Artificial Sequence
  Description of Artificial Sequence: Synthetic peptide
  Seed: GMDPRMCSLMQGSTLPRRSG
GMDPRMISLIQPSTIPRRSG

SEQ ID NO: 81333 - protein, 20 aa, Artificial Sequence
  Description of Artificial Sequence: Synthetic peptide
  Seed: GMDPRMCSLMQGSTLPRRSG
GMDPRMISLIQPSTLPRRSG

SEQ ID NO: 81334 - protein, 20 aa, Artificial Sequence
  Description of Artificial Sequence: Synthetic peptide
  Seed: GMDPRMCSLMQGSTLPRRSG
GMDPRMISLIQPSTNPRRSG

SEQ ID NO: 81335 - protein, 20 aa, Artificial Sequence
  Description of Artificial Sequence: Synthetic peptide
  Seed: GMDPRMCSLMQGSTLPRRSG
GMDPRMISLIQPSTSPRRSG

SEQ ID NO: 81336 - protein, 20 aa, Artificial Sequence
  Description of Artificial Sequence: Synthetic peptide
  Seed: GMDPRMCSLMQGSTLPRRSG
GMDPRMISLIQPSTVPRRSG

SEQ ID NO: 81337 - protein, 20 aa, Artificial Sequence
  Description of Artificial Sequence: Synthetic peptide
  Seed: GMDPRMCSLMQGSTLPRRSG
GMDPRMISLIQSSTAPRRSG

SEQ ID NO: 81338 - protein, 20 aa, Artificial Sequence
  Description of Artificial Sequence: Synthetic peptide
  Seed: GMDPRMCSLMQGSTLPRRSG
GMDPRMISLIQSSTIPRRSG

SEQ ID NO: 81339 - protein, 20 aa, Artificial Sequence
  Description of Artificial Sequence: Synthetic peptide
  Seed: GMDPRMCSLMQGSTLPRRSG
GMDPRMISLIQSSTLPRRSG

SEQ ID NO: 81340 - protein, 20 aa, Artificial Sequence
  Description of Artificial Sequence: Synthetic peptide
  Seed: GMDPRMCSLMQGSTLPRRSG
GMDPRMISLIQSSTNPRRSG

SEQ ID NO: 81341 - protein, 20 aa, Artificial Sequence
  Description of Artificial Sequence: Synthetic peptide
  Seed: GMDPRMCSLMQGSTLPRRSG
GMDPRMISLIQSSTSPRRSG

SEQ ID NO: 81342 - protein, 20 aa, Artificial Sequence
  Description of Artificial Sequence: Synthetic peptide
  Seed: GMDPRMCSLMQGSTLPRRSG
GMDPRMISLIQSSTVPRRSG

SEQ ID NO: 81343 - protein, 20 aa, Artificial Sequence
  Description of Artificial Sequence: Synthetic peptide
  Seed: GMDPRMCSLMQGSTLPRRSG
GMDPRMISLIQTSTAPRRSG

SEQ ID NO: 81344 - protein, 20 aa, Artificial Sequence
  Description of Artificial Sequence: Synthetic peptide
  Seed: GMDPRMCSLMQGSTLPRRSG
GMDPRMISLIQTSTNPRRSG

SEQ ID NO: 81345 - protein, 20 aa, Artificial Sequence
  Description of Artificial Sequence: Synthetic peptide
  Seed: GMDPRMCSLMQGSTLPRRSG
GMDPRMISLIQTSTSPRRSG

SEQ ID NO: 81346 - protein, 20 aa, Artificial Sequence
  Description of Artificial Sequence: Synthetic peptide
  Seed: GMDPRMCSLMQGSTLPRRSG
GMDPRMISLIQTSTVPRRSG

SEQ ID NO: 81347 - protein, 20 aa, Artificial Sequence
  Description of Artificial Sequence: Synthetic peptide
  Seed: GMDPRMCSLMQGSTLPRRSG
GMDPRMISLIQVSTAPRRSG

SEQ ID NO: 81348 - protein, 20 aa, Artificial Sequence
  Description of Artificial Sequence: Synthetic peptide
  Seed: GMDPRMCSLMQGSTLPRRSG
GMDPRMISLIQVSTNPRRSG

SEQ ID NO: 81349 - protein, 20 aa, Artificial Sequence
  Description of Artificial Sequence: Synthetic peptide
  Seed: GMDPRMCSLMQGSTLPRRSG
GMDPRMISLIQVSTSPRRSG

SEQ ID NO: 81350 - protein, 20 aa, Artificial Sequence
  Description of Artificial Sequence: Synthetic peptide
  Seed: GMDPRMCSLMQGSTLPRRSG
GMDPRMISLLQASTAPRRSG

SEQ ID NO: 81351 - protein, 20 aa, Artificial Sequence
  Description of Artificial Sequence: Synthetic peptide
  Seed: GMDPRMCSLMQGSTLPRRSG
GMDPRMISLLQASTCPRRSG

SEQ ID NO: 81352 - protein, 20 aa, Artificial Sequence
  Description of Artificial Sequence: Synthetic peptide
  Seed: GMDPRMCSLMQGSTLPRRSG
GMDPRMISLLQASTFPRRSG

SEQ ID NO: 81353 - protein, 20 aa, Artificial Sequence
  Description of Artificial Sequence: Synthetic peptide
  Seed: GMDPRMCSLMQGSTLPRRSG
GMDPRMISLLQASTGPRRSG

SEQ ID NO: 81354 - protein, 20 aa, Artificial Sequence
  Description of Artificial Sequence: Synthetic peptide
  Seed: GMDPRMCSLMQGSTLPRRSG
GMDPRMISLLQASTIPRRSG

SEQ ID NO: 81355 - protein, 20 aa, Artificial Sequence
  Description of Artificial Sequence: Synthetic peptide
  Seed: GMDPRMCSLMQGSTLPRRSG
GMDPRMISLLQASTLPRRSG

SEQ ID NO: 81356 - protein, 20 aa, Artificial Sequence
  Description of Artificial Sequence: Synthetic peptide
  Seed: GMDPRMCSLMQGSTLPRRSG
GMDPRMISLLQASTMPRRSG

SEQ ID NO: 81357 - protein, 20 aa, Artificial Sequence
  Description of Artificial Sequence: Synthetic peptide
  Seed: GMDPRMCSLMQGSTLPRRSG
GMDPRMISLLQASTNPRRSG

SEQ ID NO: 81358 - protein, 20 aa, Artificial Sequence
  Description of Artificial Sequence: Synthetic peptide
  Seed: GMDPRMCSLMQGSTLPRRSG
GMDPRMISLLQASTSPRRSG

SEQ ID NO: 81359 - protein, 20 aa, Artificial Sequence
  Description of Artificial Sequence: Synthetic peptide
  Seed: GMDPRMCSLMQGSTLPRRSG
GMDPRMISLLQASTTPRRSG

SEQ ID NO: 81360 - protein, 20 aa, Artificial Sequence
  Description of Artificial Sequence: Synthetic peptide
  Seed: GMDPRMCSLMQGSTLPRRSG
GMDPRMISLLQASTVPRRSG

SEQ ID NO: 81361 - protein, 20 aa, Artificial Sequence
  Description of Artificial Sequence: Synthetic peptide
  Seed: GMDPRMCSLMQGSTLPRRSG
GMDPRMISLLQGSTAPRRSG

SEQ ID NO: 81362 - protein, 20 aa, Artificial Sequence
  Description of Artificial Sequence: Synthetic peptide
  Seed: GMDPRMCSLMQGSTLPRRSG
GMDPRMISLLQGSTCPRRSG

SEQ ID NO: 81363 - protein, 20 aa, Artificial Sequence
  Description of Artificial Sequence: Synthetic peptide
  Seed: GMDPRMCSLMQGSTLPRRSG
GMDPRMISLLQGSTGPRRSG

SEQ ID NO: 81364 - protein, 20 aa, Artificial Sequence
  Description of Artificial Sequence: Synthetic peptide
  Seed: GMDPRMCSLMQGSTLPRRSG
GMDPRMISLLQGSTIPRRSG

SEQ ID NO: 81365 - protein, 20 aa, Artificial Sequence
  Description of Artificial Sequence: Synthetic peptide
  Seed: GMDPRMCSLMQGSTLPRRSG
GMDPRMISLLQGSTLPRRSG

SEQ ID NO: 81366 - protein, 20 aa, Artificial Sequence
  Description of Artificial Sequence: Synthetic peptide
  Seed: GMDPRMCSLMQGSTLPRRSG
GMDPRMISLLQGSTMPRRSG

SEQ ID NO: 81367 - protein, 20 aa, Artificial Sequence
  Description of Artificial Sequence: Synthetic peptide
  Seed: GMDPRMCSLMQGSTLPRRSG
GMDPRMISLLQGSTSPRRSG

SEQ ID NO: 81368 - protein, 20 aa, Artificial Sequence
  Description of Artificial Sequence: Synthetic peptide
  Seed: GMDPRMCSLMQGSTLPRRSG
GMDPRMISLLQGSTTPRRSG

SEQ ID NO: 81369 - protein, 20 aa, Artificial Sequence
  Description of Artificial Sequence: Synthetic peptide
  Seed: GMDPRMCSLMQGSTLPRRSG
GMDPRMISLLQGSTVPRRSG

SEQ ID NO: 81370 - protein, 20 aa, Artificial Sequence
  Description of Artificial Sequence: Synthetic peptide
  Seed: GMDPRMCSLMQGSTLPRRSG
GMDPRMISLLQISTAPRRSG

SEQ ID NO: 81371 - protein, 20 aa, Artificial Sequence
  Description of Artificial Sequence: Synthetic peptide
  Seed: GMDPRMCSLMQGSTLPRRSG
GMDPRMISLLQISTNPRRSG

SEQ ID NO: 81372 - protein, 20 aa, Artificial Sequence
  Description of Artificial Sequence: Synthetic peptide
  Seed: GMDPRMCSLMQGSTLPRRSG
GMDPRMISLLQISTSPRRSG

SEQ ID NO: 81373 - protein, 20 aa, Artificial Sequence
  Description of Artificial Sequence: Synthetic peptide
  Seed: GMDPRMCSLMQGSTLPRRSG
GMDPRMISLLQNSTAPRRSG

SEQ ID NO: 81374 - protein, 20 aa, Artificial Sequence
  Description of Artificial Sequence: Synthetic peptide
  Seed: GMDPRMCSLMQGSTLPRRSG
GMDPRMISLLQNSTIPRRSG

SEQ ID NO: 81375 - protein, 20 aa, Artificial Sequence
  Description of Artificial Sequence: Synthetic peptide
  Seed: GMDPRMCSLMQGSTLPRRSG
GMDPRMISLLQNSTLPRRSG

SEQ ID NO: 81376 - protein, 20 aa, Artificial Sequence
  Description of Artificial Sequence: Synthetic peptide
  Seed: GMDPRMCSLMQGSTLPRRSG
GMDPRMISLLQNSTTPRRSG

SEQ ID NO: 81377 - protein, 20 aa, Artificial Sequence
  Description of Artificial Sequence: Synthetic peptide
  Seed: GMDPRMCSLMQGSTLPRRSG
GMDPRMISLLQNSTVPRRSG

SEQ ID NO: 81378 - protein, 20 aa, Artificial Sequence
  Description of Artificial Sequence: Synthetic peptide
  Seed: GMDPRMCSLMQGSTLPRRSG
GMDPRMISLLQPSTAPRRSG

SEQ ID NO: 81379 - protein, 20 aa, Artificial Sequence
  Description of Artificial Sequence: Synthetic peptide
  Seed: GMDPRMCSLMQGSTLPRRSG
GMDPRMISLLQPSTIPRRSG

SEQ ID NO: 81380 - protein, 20 aa, Artificial Sequence
  Description of Artificial Sequence: Synthetic peptide
  Seed: GMDPRMCSLMQGSTLPRRSG
GMDPRMISLLQPSTLPRRSG

SEQ ID NO: 81381 - protein, 20 aa, Artificial Sequence
  Description of Artificial Sequence: Synthetic peptide
  Seed: GMDPRMCSLMQGSTLPRRSG
GMDPRMISLLQPSTMPRRSG

SEQ ID NO: 81382 - protein, 20 aa, Artificial Sequence
  Description of Artificial Sequence: Synthetic peptide
  Seed: GMDPRMCSLMQGSTLPRRSG
GMDPRMISLLQPSTNPRRSG

SEQ ID NO: 81383 - protein, 20 aa, Artificial Sequence
  Description of Artificial Sequence: Synthetic peptide
  Seed: GMDPRMCSLMQGSTLPRRSG
GMDPRMISLLQPSTSPRRSG

SEQ ID NO: 81384 - protein, 20 aa, Artificial Sequence
  Description of Artificial Sequence: Synthetic peptide
  Seed: GMDPRMCSLMQGSTLPRRSG
GMDPRMISLLQPSTTPRRSG

SEQ ID NO: 81385 - protein, 20 aa, Artificial Sequence
  Description of Artificial Sequence: Synthetic peptide
  Seed: GMDPRMCSLMQGSTLPRRSG
GMDPRMISLLQPSTVPRRSG

SEQ ID NO: 81386 - protein, 20 aa, Artificial Sequence
  Description of Artificial Sequence: Synthetic peptide
  Seed: GMDPRMCSLMQGSTLPRRSG
GMDPRMISLLQSSTAPRRSG

SEQ ID NO: 81387 - protein, 20 aa, Artificial Sequence
  Description of Artificial Sequence: Synthetic peptide
  Seed: GMDPRMCSLMQGSTLPRRSG
GMDPRMISLLQSSTGPRRSG

SEQ ID NO: 81388 - protein, 20 aa, Artificial Sequence
  Description of Artificial Sequence: Synthetic peptide
  Seed: GMDPRMCSLMQGSTLPRRSG
GMDPRMISLLQSSTIPRRSG

SEQ ID NO: 81389 - protein, 20 aa, Artificial Sequence
  Description of Artificial Sequence: Synthetic peptide
  Seed: GMDPRMCSLMQGSTLPRRSG
GMDPRMISLLQSSTLPRRSG

SEQ ID NO: 81390 - protein, 20 aa, Artificial Sequence
  Description of Artificial Sequence: Synthetic peptide
  Seed: GMDPRMCSLMQGSTLPRRSG
GMDPRMISLLQSSTMPRRSG

SEQ ID NO: 81391 - protein, 20 aa, Artificial Sequence
  Description of Artificial Sequence: Synthetic peptide
  Seed: GMDPRMCSLMQGSTLPRRSG
GMDPRMISLLQSSTNPRRSG

SEQ ID NO: 81392 - protein, 20 aa, Artificial Sequence
  Description of Artificial Sequence: Synthetic peptide
  Seed: GMDPRMCSLMQGSTLPRRSG
GMDPRMISLLQSSTSPRRSG

SEQ ID NO: 81393 - protein, 20 aa, Artificial Sequence
  Description of Artificial Sequence: Synthetic peptide
  Seed: GMDPRMCSLMQGSTLPRRSG
GMDPRMISLLQSSTTPRRSG

SEQ ID NO: 81394 - protein, 20 aa, Artificial Sequence
  Description of Artificial Sequence: Synthetic peptide
  Seed: GMDPRMCSLMQGSTLPRRSG
GMDPRMISLLQSSTVPRRSG

SEQ ID NO: 81395 - protein, 20 aa, Artificial Sequence
  Description of Artificial Sequence: Synthetic peptide
  Seed: GMDPRMCSLMQGSTLPRRSG
GMDPRMISLLQTSTAPRRSG

SEQ ID NO: 81396 - protein, 20 aa, Artificial Sequence
  Description of Artificial Sequence: Synthetic peptide
  Seed: GMDPRMCSLMQGSTLPRRSG
GMDPRMISLLQTSTIPRRSG

SEQ ID NO: 81397 - protein, 20 aa, Artificial Sequence
  Description of Artificial Sequence: Synthetic peptide
  Seed: GMDPRMCSLMQGSTLPRRSG
GMDPRMISLLQTSTLPRRSG

SEQ ID NO: 81398 - protein, 20 aa, Artificial Sequence
  Description of Artificial Sequence: Synthetic peptide
  Seed: GMDPRMCSLMQGSTLPRRSG
GMDPRMISLLQTSTMPRRSG

SEQ ID NO: 81399 - protein, 20 aa, Artificial Sequence
  Description of Artificial Sequence: Synthetic peptide
  Seed: GMDPRMCSLMQGSTLPRRSG
GMDPRMISLLQTSTNPRRSG

SEQ ID NO: 81400 - protein, 20 aa, Artificial Sequence
  Description of Artificial Sequence: Synthetic peptide
  Seed: GMDPRMCSLMQGSTLPRRSG
GMDPRMISLLQTSTSPRRSG

SEQ ID NO: 81401 - protein, 20 aa, Artificial Sequence
  Description of Artificial Sequence: Synthetic peptide
  Seed: GMDPRMCSLMQGSTLPRRSG
GMDPRMISLLQTSTTPRRSG

SEQ ID NO: 81402 - protein, 20 aa, Artificial Sequence
  Description of Artificial Sequence: Synthetic peptide
  Seed: GMDPRMCSLMQGSTLPRRSG
GMDPRMISLLQTSTVPRRSG

SEQ ID NO: 81403 - protein, 20 aa, Artificial Sequence
  Description of Artificial Sequence: Synthetic peptide
  Seed: GMDPRMCSLMQGSTLPRRSG
GMDPRMISLLQVSTAPRRSG

SEQ ID NO: 81404 - protein, 20 aa, Artificial Sequence
  Description of Artificial Sequence: Synthetic peptide
  Seed: GMDPRMCSLMQGSTLPRRSG
GMDPRMISLLQVSTIPRRSG

SEQ ID NO: 81405 - protein, 20 aa, Artificial Sequence
  Description of Artificial Sequence: Synthetic peptide
  Seed: GMDPRMCSLMQGSTLPRRSG
GMDPRMISLLQVSTLPRRSG

SEQ ID NO: 81406 - protein, 20 aa, Artificial Sequence
  Description of Artificial Sequence: Synthetic peptide
  Seed: GMDPRMCSLMQGSTLPRRSG
GMDPRMISLLQVSTNPRRSG

SEQ ID NO: 81407 - protein, 20 aa, Artificial Sequence
  Description of Artificial Sequence: Synthetic peptide
  Seed: GMDPRMCSLMQGSTLPRRSG
GMDPRMISLLQVSTSPRRSG

SEQ ID NO: 81408 - protein, 20 aa, Artificial Sequence
  Description of Artificial Sequence: Synthetic peptide
  Seed: GMDPRMCSLMQGSTLPRRSG
GMDPRMISLLQVSTTPRRSG

SEQ ID NO: 81409 - protein, 20 aa, Artificial Sequence
  Description of Artificial Sequence: Synthetic peptide
  Seed: GMDPRMCSLMQGSTLPRRSG
GMDPRMISLLQVSTVPRRSG

SEQ ID NO: 81410 - protein, 20 aa, Artificial Sequence
  Description of Artificial Sequence: Synthetic peptide
  Seed: GMDPRMCSLMQGSTLPRRSG
GMDPRMISLMQASTAPRRSG

SEQ ID NO: 81411 - protein, 20 aa, Artificial Sequence
  Description of Artificial Sequence: Synthetic peptide
  Seed: GMDPRMCSLMQGSTLPRRSG
GMDPRMISLMQASTCPRRSG

SEQ ID NO: 81412 - protein, 20 aa, Artificial Sequence
  Description of Artificial Sequence: Synthetic peptide
  Seed: GMDPRMCSLMQGSTLPRRSG
GMDPRMISLMQASTFPRRSG

SEQ ID NO: 81413 - protein, 20 aa, Artificial Sequence
  Description of Artificial Sequence: Synthetic peptide
  Seed: GMDPRMCSLMQGSTLPRRSG
GMDPRMISLMQASTGPRRSG

SEQ ID NO: 81414 - protein, 20 aa, Artificial Sequence
  Description of Artificial Sequence: Synthetic peptide
  Seed: GMDPRMCSLMQGSTLPRRSG
GMDPRMISLMQASTHPRRSG

SEQ ID NO: 81415 - protein, 20 aa, Artificial Sequence
  Description of Artificial Sequence: Synthetic peptide
  Seed: GMDPRMCSLMQGSTLPRRSG
GMDPRMISLMQASTIPRRSG

SEQ ID NO: 81416 - protein, 20 aa, Artificial Sequence
  Description of Artificial Sequence: Synthetic peptide
  Seed: GMDPRMCSLMQGSTLPRRSG
GMDPRMISLMQASTLPRRSG

SEQ ID NO: 81417 - protein, 20 aa, Artificial Sequence
  Description of Artificial Sequence: Synthetic peptide
  Seed: GMDPRMCSLMQGSTLPRRSG
GMDPRMISLMQASTMPRRSG

SEQ ID NO: 81418 - protein, 20 aa, Artificial Sequence
  Description of Artificial Sequence: Synthetic peptide
  Seed: GMDPRMCSLMQGSTLPRRSG
GMDPRMISLMQASTNPRRSG

SEQ ID NO: 81419 - protein, 20 aa, Artificial Sequence
  Description of Artificial Sequence: Synthetic peptide
  Seed: GMDPRMCSLMQGSTLPRRSG
GMDPRMISLMQASTQPRRSG

SEQ ID NO: 81420 - protein, 20 aa, Artificial Sequence
  Description of Artificial Sequence: Synthetic peptide
  Seed: GMDPRMCSLMQGSTLPRRSG
GMDPRMISLMQASTSPRRSG

SEQ ID NO: 81421 - protein, 20 aa, Artificial Sequence
  Description of Artificial Sequence: Synthetic peptide
  Seed: GMDPRMCSLMQGSTLPRRSG
GMDPRMISLMQASTTPRRSG

SEQ ID NO: 81422 - protein, 20 aa, Artificial Sequence
  Description of Artificial Sequence: Synthetic peptide
  Seed: GMDPRMCSLMQGSTLPRRSG
GMDPRMISLMQASTVPRRSG

SEQ ID NO: 81423 - protein, 20 aa, Artificial Sequence
  Description of Artificial Sequence: Synthetic peptide
  Seed: GMDPRMCSLMQGSTLPRRSG
GMDPRMISLMQGSTAPRRSG

SEQ ID NO: 81424 - protein, 20 aa, Artificial Sequence
  Description of Artificial Sequence: Synthetic peptide
  Seed: GMDPRMCSLMQGSTLPRRSG
GMDPRMISLMQGSTGPRRSG

SEQ ID NO: 81425 - protein, 20 aa, Artificial Sequence
  Description of Artificial Sequence: Synthetic peptide
  Seed: GMDPRMCSLMQGSTLPRRSG
GMDPRMISLMQGSTIPRRSG

SEQ ID NO: 81426 - protein, 20 aa, Artificial Sequence
  Description of Artificial Sequence: Synthetic peptide
  Seed: GMDPRMCSLMQGSTLPRRSG
GMDPRMISLMQGSTLPRRSG

SEQ ID NO: 81427 - protein, 20 aa, Artificial Sequence
  Description of Artificial Sequence: Synthetic peptide
  Seed: GMDPRMCSLMQGSTLPRRSG
GMDPRMISLMQGSTMPRRSG

SEQ ID NO: 81428 - protein, 20 aa, Artificial Sequence
  Description of Artificial Sequence: Synthetic peptide
  Seed: GMDPRMCSLMQGSTLPRRSG
GMDPRMISLMQGSTNPRRSG

SEQ ID NO: 81429 - protein, 20 aa, Artificial Sequence
  Description of Artificial Sequence: Synthetic peptide
  Seed: GMDPRMCSLMQGSTLPRRSG
GMDPRMISLMQGSTSPRRSG

SEQ ID NO: 81430 - protein, 20 aa, Artificial Sequence
  Description of Artificial Sequence: Synthetic peptide
  Seed: GMDPRMCSLMQGSTLPRRSG
GMDPRMISLMQGSTTPRRSG

SEQ ID NO: 81431 - protein, 20 aa, Artificial Sequence
  Description of Artificial Sequence: Synthetic peptide
  Seed: GMDPRMCSLMQGSTLPRRSG
GMDPRMISLMQGSTVPRRSG

SEQ ID NO: 81432 - protein, 20 aa, Artificial Sequence
  Description of Artificial Sequence: Synthetic peptide
  Seed: GMDPRMCSLMQGSTLPRRSG
GMDPRMISLMQISTAPRRSG

SEQ ID NO: 81433 - protein, 20 aa, Artificial Sequence
  Description of Artificial Sequence: Synthetic peptide
  Seed: GMDPRMCSLMQGSTLPRRSG
GMDPRMISLMQISTNPRRSG

SEQ ID NO: 81434 - protein, 20 aa, Artificial Sequence
  Description of Artificial Sequence: Synthetic peptide
  Seed: GMDPRMCSLMQGSTLPRRSG
GMDPRMISLMQISTSPRRSG

SEQ ID NO: 81435 - protein, 20 aa, Artificial Sequence
  Description of Artificial Sequence: Synthetic peptide
  Seed: GMDPRMCSLMQGSTLPRRSG
GMDPRMISLMQISTTPRRSG

SEQ ID NO: 81436 - protein, 20 aa, Artificial Sequence
  Description of Artificial Sequence: Synthetic peptide
  Seed: GMDPRMCSLMQGSTLPRRSG
GMDPRMISLMQLSTAPRRSG

SEQ ID NO: 81437 - protein, 20 aa, Artificial Sequence
  Description of Artificial Sequence: Synthetic peptide
  Seed: GMDPRMCSLMQGSTLPRRSG
GMDPRMISLMQNSTAPRRSG

SEQ ID NO: 81438 - protein, 20 aa, Artificial Sequence
  Description of Artificial Sequence: Synthetic peptide
  Seed: GMDPRMCSLMQGSTLPRRSG
GMDPRMISLMQNSTIPRRSG

SEQ ID NO: 81439 - protein, 20 aa, Artificial Sequence
  Description of Artificial Sequence: Synthetic peptide
  Seed: GMDPRMCSLMQGSTLPRRSG
GMDPRMISLMQNSTLPRRSG

SEQ ID NO: 81440 - protein, 20 aa, Artificial Sequence
  Description of Artificial Sequence: Synthetic peptide
  Seed: GMDPRMCSLMQGSTLPRRSG
GMDPRMISLMQNSTTPRRSG

SEQ ID NO: 81441 - protein, 20 aa, Artificial Sequence
  Description of Artificial Sequence: Synthetic peptide
  Seed: GMDPRMCSLMQGSTLPRRSG
GMDPRMISLMQNSTVPRRSG

SEQ ID NO: 81442 - protein, 20 aa, Artificial Sequence
  Description of Artificial Sequence: Synthetic peptide
  Seed: GMDPRMCSLMQGSTLPRRSG
GMDPRMISLMQPSTAPRRSG

SEQ ID NO: 81443 - protein, 20 aa, Artificial Sequence
  Description of Artificial Sequence: Synthetic peptide
  Seed: GMDPRMCSLMQGSTLPRRSG
GMDPRMISLMQPSTIPRRSG

SEQ ID NO: 81444 - protein, 20 aa, Artificial Sequence
  Description of Artificial Sequence: Synthetic peptide
  Seed: GMDPRMCSLMQGSTLPRRSG
GMDPRMISLMQPSTLPRRSG

SEQ ID NO: 81445 - protein, 20 aa, Artificial Sequence
  Description of Artificial Sequence: Synthetic peptide
  Seed: GMDPRMCSLMQGSTLPRRSG
GMDPRMISLMQPSTMPRRSG

SEQ ID NO: 81446 - protein, 20 aa, Artificial Sequence
  Description of Artificial Sequence: Synthetic peptide
  Seed: GMDPRMCSLMQGSTLPRRSG
GMDPRMISLMQPSTNPRRSG

SEQ ID NO: 81447 - protein, 20 aa, Artificial Sequence
  Description of Artificial Sequence: Synthetic peptide
  Seed: GMDPRMCSLMQGSTLPRRSG
GMDPRMISLMQPSTSPRRSG

SEQ ID NO: 81448 - protein, 20 aa, Artificial Sequence
  Description of Artificial Sequence: Synthetic peptide
  Seed: GMDPRMCSLMQGSTLPRRSG
GMDPRMISLMQPSTTPRRSG

SEQ ID NO: 81449 - protein, 20 aa, Artificial Sequence
  Description of Artificial Sequence: Synthetic peptide
  Seed: GMDPRMCSLMQGSTLPRRSG
GMDPRMISLMQPSTVPRRSG

SEQ ID NO: 81450 - protein, 20 aa, Artificial Sequence
  Description of Artificial Sequence: Synthetic peptide
  Seed: GMDPRMCSLMQGSTLPRRSG
GMDPRMISLMQSSTAPRRSG

SEQ ID NO: 81451 - protein, 20 aa, Artificial Sequence
  Description of Artificial Sequence: Synthetic peptide
  Seed: GMDPRMCSLMQGSTLPRRSG
GMDPRMISLMQSSTIPRRSG

SEQ ID NO: 81452 - protein, 20 aa, Artificial Sequence
  Description of Artificial Sequence: Synthetic peptide
  Seed: GMDPRMCSLMQGSTLPRRSG
GMDPRMISLMQSSTLPRRSG

SEQ ID NO: 81453 - protein, 20 aa, Artificial Sequence
  Description of Artificial Sequence: Synthetic peptide
  Seed: GMDPRMCSLMQGSTLPRRSG
GMDPRMISLMQSSTMPRRSG

SEQ ID NO: 81454 - protein, 20 aa, Artificial Sequence
  Description of Artificial Sequence: Synthetic peptide
  Seed: GMDPRMCSLMQGSTLPRRSG
GMDPRMISLMQSSTNPRRSG

SEQ ID NO: 81455 - protein, 20 aa, Artificial Sequence
  Description of Artificial Sequence: Synthetic peptide
  Seed: GMDPRMCSLMQGSTLPRRSG
GMDPRMISLMQSSTSPRRSG

SEQ ID NO: 81456 - protein, 20 aa, Artificial Sequence
  Description of Artificial Sequence: Synthetic peptide
  Seed: GMDPRMCSLMQGSTLPRRSG
GMDPRMISLMQSSTTPRRSG

SEQ ID NO: 81457 - protein, 20 aa, Artificial Sequence
  Description of Artificial Sequence: Synthetic peptide
  Seed: GMDPRMCSLMQGSTLPRRSG
GMDPRMISLMQSSTVPRRSG

SEQ ID NO: 81458 - protein, 20 aa, Artificial Sequence
  Description of Artificial Sequence: Synthetic peptide
  Seed: GMDPRMCSLMQGSTLPRRSG
GMDPRMISLMQTSTAPRRSG

SEQ ID NO: 81459 - protein, 20 aa, Artificial Sequence
  Description of Artificial Sequence: Synthetic peptide
  Seed: GMDPRMCSLMQGSTLPRRSG
GMDPRMISLMQTSTIPRRSG

SEQ ID NO: 81460 - protein, 20 aa, Artificial Sequence
  Description of Artificial Sequence: Synthetic peptide
  Seed: GMDPRMCSLMQGSTLPRRSG
GMDPRMISLMQTSTLPRRSG

SEQ ID NO: 81461 - protein, 20 aa, Artificial Sequence
  Description of Artificial Sequence: Synthetic peptide
  Seed: GMDPRMCSLMQGSTLPRRSG
GMDPRMISLMQTSTMPRRSG

SEQ ID NO: 81462 - protein, 20 aa, Artificial Sequence
  Description of Artificial Sequence: Synthetic peptide
  Seed: GMDPRMCSLMQGSTLPRRSG
GMDPRMISLMQTSTNPRRSG

SEQ ID NO: 81463 - protein, 20 aa, Artificial Sequence
  Description of Artificial Sequence: Synthetic peptide
  Seed: GMDPRMCSLMQGSTLPRRSG
GMDPRMISLMQTSTSPRRSG

SEQ ID NO: 81464 - protein, 20 aa, Artificial Sequence
  Description of Artificial Sequence: Synthetic peptide
  Seed: GMDPRMCSLMQGSTLPRRSG
GMDPRMISLMQTSTTPRRSG

SEQ ID NO: 81465 - protein, 20 aa, Artificial Sequence
  Description of Artificial Sequence: Synthetic peptide
  Seed: GMDPRMCSLMQGSTLPRRSG
GMDPRMISLMQTSTVPRRSG

SEQ ID NO: 81466 - protein, 20 aa, Artificial Sequence
  Description of Artificial Sequence: Synthetic peptide
  Seed: GMDPRMCSLMQGSTLPRRSG
GMDPRMISLMQVSTAPRRSG

SEQ ID NO: 81467 - protein, 20 aa, Artificial Sequence
  Description of Artificial Sequence: Synthetic peptide
  Seed: GMDPRMCSLMQGSTLPRRSG
GMDPRMISLMQVSTIPRRSG

SEQ ID NO: 81468 - protein, 20 aa, Artificial Sequence
  Description of Artificial Sequence: Synthetic peptide
  Seed: GMDPRMCSLMQGSTLPRRSG
GMDPRMISLMQVSTLPRRSG

SEQ ID NO: 81469 - protein, 20 aa, Artificial Sequence
  Description of Artificial Sequence: Synthetic peptide
  Seed: GMDPRMCSLMQGSTLPRRSG
GMDPRMISLMQVSTMPRRSG

SEQ ID NO: 81470 - protein, 20 aa, Artificial Sequence
  Description of Artificial Sequence: Synthetic peptide
  Seed: GMDPRMCSLMQGSTLPRRSG
GMDPRMISLMQVSTNPRRSG

SEQ ID NO: 81471 - protein, 20 aa, Artificial Sequence
  Description of Artificial Sequence: Synthetic peptide
  Seed: GMDPRMCSLMQGSTLPRRSG
GMDPRMISLMQVSTSPRRSG

SEQ ID NO: 81472 - protein, 20 aa, Artificial Sequence
  Description of Artificial Sequence: Synthetic peptide
  Seed: GMDPRMCSLMQGSTLPRRSG
GMDPRMISLMQVSTTPRRSG

SEQ ID NO: 81473 - protein, 20 aa, Artificial Sequence
  Description of Artificial Sequence: Synthetic peptide
  Seed: GMDPRMCSLMQGSTLPRRSG
GMDPRMISLMQVSTVPRRSG

SEQ ID NO: 81474 - protein, 20 aa, Artificial Sequence
  Description of Artificial Sequence: Synthetic peptide
  Seed: GMDPRMCSLMQGSTLPRRSG
GMDPRMISLQQASTAPRRSG

SEQ ID NO: 81475 - protein, 20 aa, Artificial Sequence
  Description of Artificial Sequence: Synthetic peptide
  Seed: GMDPRMCSLMQGSTLPRRSG
GMDPRMISLQQASTIPRRSG

SEQ ID NO: 81476 - protein, 20 aa, Artificial Sequence
  Description of Artificial Sequence: Synthetic peptide
  Seed: GMDPRMCSLMQGSTLPRRSG
GMDPRMISLQQASTLPRRSG

SEQ ID NO: 81477 - protein, 20 aa, Artificial Sequence
  Description of Artificial Sequence: Synthetic peptide
  Seed: GMDPRMCSLMQGSTLPRRSG
GMDPRMISLQQASTMPRRSG

SEQ ID NO: 81478 - protein, 20 aa, Artificial Sequence
  Description of Artificial Sequence: Synthetic peptide
  Seed: GMDPRMCSLMQGSTLPRRSG
GMDPRMISLQQASTTPRRSG

SEQ ID NO: 81479 - protein, 20 aa, Artificial Sequence
  Description of Artificial Sequence: Synthetic peptide
  Seed: GMDPRMCSLMQGSTLPRRSG
GMDPRMISLQQASTVPRRSG

SEQ ID NO: 81480 - protein, 20 aa, Artificial Sequence
  Description of Artificial Sequence: Synthetic peptide
  Seed: GMDPRMCSLMQGSTLPRRSG
GMDPRMISLQQGSTAPRRSG

SEQ ID NO: 81481 - protein, 20 aa, Artificial Sequence
  Description of Artificial Sequence: Synthetic peptide
  Seed: GMDPRMCSLMQGSTLPRRSG
GMDPRMISLQQGSTIPRRSG

SEQ ID NO: 81482 - protein, 20 aa, Artificial Sequence
  Description of Artificial Sequence: Synthetic peptide
  Seed: GMDPRMCSLMQGSTLPRRSG
GMDPRMISLQQGSTLPRRSG

SEQ ID NO: 81483 - protein, 20 aa, Artificial Sequence
  Description of Artificial Sequence: Synthetic peptide
  Seed: GMDPRMCSLMQGSTLPRRSG
GMDPRMISLQQGSTVPRRSG

SEQ ID NO: 81484 - protein, 20 aa, Artificial Sequence
  Description of Artificial Sequence: Synthetic peptide
  Seed: GMDPRMCSLMQGSTLPRRSG
GMDPRMISLQQSSTAPRRSG

SEQ ID NO: 81485 - protein, 20 aa, Artificial Sequence
  Description of Artificial Sequence: Synthetic peptide
  Seed: GMDPRMCSLMQGSTLPRRSG
GMDPRMISLQQSSTIPRRSG

SEQ ID NO: 81486 - protein, 20 aa, Artificial Sequence
  Description of Artificial Sequence: Synthetic peptide
  Seed: GMDPRMCSLMQGSTLPRRSG
GMDPRMISLQQSSTLPRRSG

SEQ ID NO: 81487 - protein, 20 aa, Artificial Sequence
  Description of Artificial Sequence: Synthetic peptide
  Seed: GMDPRMCSLMQGSTLPRRSG
GMDPRMISLQQSSTVPRRSG

SEQ ID NO: 81488 - protein, 20 aa, Artificial Sequence
  Description of Artificial Sequence: Synthetic peptide
  Seed: GMDPRMCSLMQGSTLPRRSG
GMDPRMISLSQASTIPRRSG

SEQ ID NO: 81489 - protein, 20 aa, Artificial Sequence
  Description of Artificial Sequence: Synthetic peptide
  Seed: GMDPRMCSLMQGSTLPRRSG
GMDPRMISLSQASTLPRRSG

SEQ ID NO: 81490 - protein, 20 aa, Artificial Sequence
  Description of Artificial Sequence: Synthetic peptide
  Seed: GMDPRMCSLMQGSTLPRRSG
GMDPRMISLSQASTVPRRSG

SEQ ID NO: 81491 - protein, 20 aa, Artificial Sequence
  Description of Artificial Sequence: Synthetic peptide
  Seed: GMDPRMCSLMQGSTLPRRSG
GMDPRMISLVQASTAPRRSG

SEQ ID NO: 81492 - protein, 20 aa, Artificial Sequence
  Description of Artificial Sequence: Synthetic peptide
  Seed: GMDPRMCSLMQGSTLPRRSG
GMDPRMISLVQASTIPRRSG

SEQ ID NO: 81493 - protein, 20 aa, Artificial Sequence
  Description of Artificial Sequence: Synthetic peptide
  Seed: GMDPRMCSLMQGSTLPRRSG
GMDPRMISLVQASTLPRRSG

SEQ ID NO: 81494 - protein, 20 aa, Artificial Sequence
  Description of Artificial Sequence: Synthetic peptide
  Seed: GMDPRMCSLMQGSTLPRRSG
GMDPRMISLVQASTNPRRSG

SEQ ID NO: 81495 - protein, 20 aa, Artificial Sequence
  Description of Artificial Sequence: Synthetic peptide
  Seed: GMDPRMCSLMQGSTLPRRSG
GMDPRMISLVQASTSPRRSG

SEQ ID NO: 81496 - protein, 20 aa, Artificial Sequence
  Description of Artificial Sequence: Synthetic peptide
  Seed: GMDPRMCSLMQGSTLPRRSG
GMDPRMISLVQASTVPRRSG

SEQ ID NO: 81497 - protein, 20 aa, Artificial Sequence
  Description of Artificial Sequence: Synthetic peptide
  Seed: GMDPRMCSLMQGSTLPRRSG
GMDPRMISLVQGSTAPRRSG

SEQ ID NO: 81498 - protein, 20 aa, Artificial Sequence
  Description of Artificial Sequence: Synthetic peptide
  Seed: GMDPRMCSLMQGSTLPRRSG
GMDPRMISLVQGSTIPRRSG

SEQ ID NO: 81499 - protein, 20 aa, Artificial Sequence
  Description of Artificial Sequence: Synthetic peptide
  Seed: GMDPRMCSLMQGSTLPRRSG
GMDPRMISLVQGSTLPRRSG

SEQ ID NO: 81500 - protein, 20 aa, Artificial Sequence
  Description of Artificial Sequence: Synthetic peptide
  Seed: GMDPRMCSLMQGSTLPRRSG
GMDPRMISLVQGSTVPRRSG

SEQ ID NO: 81501 - protein, 20 aa, Artificial Sequence
  Description of Artificial Sequence: Synthetic peptide
  Seed: GMDPRMCSLMQGSTLPRRSG
GMDPRMISLVQPSTAPRRSG

SEQ ID NO: 81502 - protein, 20 aa, Artificial Sequence
  Description of Artificial Sequence: Synthetic peptide
  Seed: GMDPRMCSLMQGSTLPRRSG
GMDPRMISLVQSSTAPRRSG

SEQ ID NO: 81503 - protein, 20 aa, Artificial Sequence
  Description of Artificial Sequence: Synthetic peptide
  Seed: GMDPRMCSLMQGSTLPRRSG
GMDPRMISLVQSSTIPRRSG

SEQ ID NO: 81504 - protein, 20 aa, Artificial Sequence
  Description of Artificial Sequence: Synthetic peptide
  Seed: GMDPRMCSLMQGSTLPRRSG
GMDPRMISLVQSSTLPRRSG

SEQ ID NO: 81505 - protein, 20 aa, Artificial Sequence
  Description of Artificial Sequence: Synthetic peptide
  Seed: GMDPRMCSLMQGSTLPRRSG
GMDPRMISLVQSSTVPRRSG

SEQ ID NO: 81506 - protein, 20 aa, Artificial Sequence
  Description of Artificial Sequence: Synthetic peptide
  Seed: GMDPRMCSLMQGSTLPRRSG
GMDPRMLSLAQASTAPRRSG

SEQ ID NO: 81507 - protein, 20 aa, Artificial Sequence
  Description of Artificial Sequence: Synthetic peptide
  Seed: GMDPRMCSLMQGSTLPRRSG
GMDPRMLSLAQASTIPRRSG

SEQ ID NO: 81508 - protein, 20 aa, Artificial Sequence
  Description of Artificial Sequence: Synthetic peptide
  Seed: GMDPRMCSLMQGSTLPRRSG
GMDPRMLSLAQASTLPRRSG

SEQ ID NO: 81509 - protein, 20 aa, Artificial Sequence
  Description of Artificial Sequence: Synthetic peptide
  Seed: GMDPRMCSLMQGSTLPRRSG
GMDPRMLSLAQASTMPRRSG

SEQ ID NO: 81510 - protein, 20 aa, Artificial Sequence
  Description of Artificial Sequence: Synthetic peptide
  Seed: GMDPRMCSLMQGSTLPRRSG
GMDPRMLSLAQASTNPRRSG

SEQ ID NO: 81511 - protein, 20 aa, Artificial Sequence
  Description of Artificial Sequence: Synthetic peptide
  Seed: GMDPRMCSLMQGSTLPRRSG
GMDPRMLSLAQASTSPRRSG

SEQ ID NO: 81512 - protein, 20 aa, Artificial Sequence
  Description of Artificial Sequence: Synthetic peptide
  Seed: GMDPRMCSLMQGSTLPRRSG
GMDPRMLSLAQASTVPRRSG

SEQ ID NO: 81513 - protein, 20 aa, Artificial Sequence
  Description of Artificial Sequence: Synthetic peptide
  Seed: GMDPRMCSLMQGSTLPRRSG
GMDPRMLSLAQGSTAPRRSG

SEQ ID NO: 81514 - protein, 20 aa, Artificial Sequence
  Description of Artificial Sequence: Synthetic peptide
  Seed: GMDPRMCSLMQGSTLPRRSG
GMDPRMLSLAQGSTIPRRSG

SEQ ID NO: 81515 - protein, 20 aa, Artificial Sequence
  Description of Artificial Sequence: Synthetic peptide
  Seed: GMDPRMCSLMQGSTLPRRSG
GMDPRMLSLAQGSTLPRRSG

SEQ ID NO: 81516 - protein, 20 aa, Artificial Sequence
  Description of Artificial Sequence: Synthetic peptide
  Seed: GMDPRMCSLMQGSTLPRRSG
GMDPRMLSLAQGSTVPRRSG

SEQ ID NO: 81517 - protein, 20 aa, Artificial Sequence
  Description of Artificial Sequence: Synthetic peptide
  Seed: GMDPRMCSLMQGSTLPRRSG
GMDPRMLSLAQPSTAPRRSG

SEQ ID NO: 81518 - protein, 20 aa, Artificial Sequence
  Description of Artificial Sequence: Synthetic peptide
  Seed: GMDPRMCSLMQGSTLPRRSG
GMDPRMLSLAQSSTIPRRSG

SEQ ID NO: 81519 - protein, 20 aa, Artificial Sequence
  Description of Artificial Sequence: Synthetic peptide
  Seed: GMDPRMCSLMQGSTLPRRSG
GMDPRMLSLAQSSTLPRRSG

SEQ ID NO: 81520 - protein, 20 aa, Artificial Sequence
  Description of Artificial Sequence: Synthetic peptide
  Seed: GMDPRMCSLMQGSTLPRRSG
GMDPRMLSLAQSSTVPRRSG

SEQ ID NO: 81521 - protein, 20 aa, Artificial Sequence
  Description of Artificial Sequence: Synthetic peptide
  Seed: GMDPRMCSLMQGSTLPRRSG
GMDPRMLSLAQVSTAPRRSG

SEQ ID NO: 81522 - protein, 20 aa, Artificial Sequence
  Description of Artificial Sequence: Synthetic peptide
  Seed: GMDPRMCSLMQGSTLPRRSG
GMDPRMLSLFQASTAPRRSG

SEQ ID NO: 81523 - protein, 20 aa, Artificial Sequence
  Description of Artificial Sequence: Synthetic peptide
  Seed: GMDPRMCSLMQGSTLPRRSG
GMDPRMLSLIQASTAPRRSG

SEQ ID NO: 81524 - protein, 20 aa, Artificial Sequence
  Description of Artificial Sequence: Synthetic peptide
  Seed: GMDPRMCSLMQGSTLPRRSG
GMDPRMLSLIQASTIPRRSG

SEQ ID NO: 81525 - protein, 20 aa, Artificial Sequence
  Description of Artificial Sequence: Synthetic peptide
  Seed: GMDPRMCSLMQGSTLPRRSG
GMDPRMLSLIQASTLPRRSG

SEQ ID NO: 81526 - protein, 20 aa, Artificial Sequence
  Description of Artificial Sequence: Synthetic peptide
  Seed: GMDPRMCSLMQGSTLPRRSG
GMDPRMLSLIQASTMPRRSG

SEQ ID NO: 81527 - protein, 20 aa, Artificial Sequence
  Description of Artificial Sequence: Synthetic peptide
  Seed: GMDPRMCSLMQGSTLPRRSG
GMDPRMLSLIQASTNPRRSG

SEQ ID NO: 81528 - protein, 20 aa, Artificial Sequence
  Description of Artificial Sequence: Synthetic peptide
  Seed: GMDPRMCSLMQGSTLPRRSG
GMDPRMLSLIQASTSPRRSG

SEQ ID NO: 81529 - protein, 20 aa, Artificial Sequence
  Description of Artificial Sequence: Synthetic peptide
  Seed: GMDPRMCSLMQGSTLPRRSG
GMDPRMLSLIQASTTPRRSG

SEQ ID NO: 81530 - protein, 20 aa, Artificial Sequence
  Description of Artificial Sequence: Synthetic peptide
  Seed: GMDPRMCSLMQGSTLPRRSG
GMDPRMLSLIQASTVPRRSG

SEQ ID NO: 81531 - protein, 20 aa, Artificial Sequence
  Description of Artificial Sequence: Synthetic peptide
  Seed: GMDPRMCSLMQGSTLPRRSG
GMDPRMLSLIQGSTAPRRSG

SEQ ID NO: 81532 - protein, 20 aa, Artificial Sequence
  Description of Artificial Sequence: Synthetic peptide
  Seed: GMDPRMCSLMQGSTLPRRSG
GMDPRMLSLIQGSTIPRRSG

SEQ ID NO: 81533 - protein, 20 aa, Artificial Sequence
  Description of Artificial Sequence: Synthetic peptide
  Seed: GMDPRMCSLMQGSTLPRRSG
GMDPRMLSLIQGSTLPRRSG

SEQ ID NO: 81534 - protein, 20 aa, Artificial Sequence
  Description of Artificial Sequence: Synthetic peptide
  Seed: GMDPRMCSLMQGSTLPRRSG
GMDPRMLSLIQGSTVPRRSG

SEQ ID NO: 81535 - protein, 20 aa, Artificial Sequence
  Description of Artificial Sequence: Synthetic peptide
  Seed: GMDPRMCSLMQGSTLPRRSG
GMDPRMLSLIQPSTAPRRSG

SEQ ID NO: 81536 - protein, 20 aa, Artificial Sequence
  Description of Artificial Sequence: Synthetic peptide
  Seed: GMDPRMCSLMQGSTLPRRSG
GMDPRMLSLIQPSTIPRRSG

SEQ ID NO: 81537 - protein, 20 aa, Artificial Sequence
  Description of Artificial Sequence: Synthetic peptide
  Seed: GMDPRMCSLMQGSTLPRRSG
GMDPRMLSLIQPSTLPRRSG

SEQ ID NO: 81538 - protein, 20 aa, Artificial Sequence
  Description of Artificial Sequence: Synthetic peptide
  Seed: GMDPRMCSLMQGSTLPRRSG
GMDPRMLSLIQPSTNPRRSG

SEQ ID NO: 81539 - protein, 20 aa, Artificial Sequence
  Description of Artificial Sequence: Synthetic peptide
  Seed: GMDPRMCSLMQGSTLPRRSG
GMDPRMLSLIQPSTSPRRSG

SEQ ID NO: 81540 - protein, 20 aa, Artificial Sequence
  Description of Artificial Sequence: Synthetic peptide
  Seed: GMDPRMCSLMQGSTLPRRSG
GMDPRMLSLIQPSTVPRRSG

SEQ ID NO: 81541 - protein, 20 aa, Artificial Sequence
  Description of Artificial Sequence: Synthetic peptide
  Seed: GMDPRMCSLMQGSTLPRRSG
GMDPRMLSLIQSSTAPRRSG

SEQ ID NO: 81542 - protein, 20 aa, Artificial Sequence
  Description of Artificial Sequence: Synthetic peptide
  Seed: GMDPRMCSLMQGSTLPRRSG
GMDPRMLSLIQSSTIPRRSG

SEQ ID NO: 81543 - protein, 20 aa, Artificial Sequence
  Description of Artificial Sequence: Synthetic peptide
  Seed: GMDPRMCSLMQGSTLPRRSG
GMDPRMLSLIQSSTLPRRSG

SEQ ID NO: 81544 - protein, 20 aa, Artificial Sequence
  Description of Artificial Sequence: Synthetic peptide
  Seed: GMDPRMCSLMQGSTLPRRSG
GMDPRMLSLIQSSTNPRRSG

SEQ ID NO: 81545 - protein, 20 aa, Artificial Sequence
  Description of Artificial Sequence: Synthetic peptide
  Seed: GMDPRMCSLMQGSTLPRRSG
GMDPRMLSLIQSSTSPRRSG

SEQ ID NO: 81546 - protein, 20 aa, Artificial Sequence
  Description of Artificial Sequence: Synthetic peptide
  Seed: GMDPRMCSLMQGSTLPRRSG
GMDPRMLSLIQSSTVPRRSG

SEQ ID NO: 81547 - protein, 20 aa, Artificial Sequence
  Description of Artificial Sequence: Synthetic peptide
  Seed: GMDPRMCSLMQGSTLPRRSG
GMDPRMLSLIQTSTAPRRSG

SEQ ID NO: 81548 - protein, 20 aa, Artificial Sequence
  Description of Artificial Sequence: Synthetic peptide
  Seed: GMDPRMCSLMQGSTLPRRSG
GMDPRMLSLIQTSTNPRRSG

SEQ ID NO: 81549 - protein, 20 aa, Artificial Sequence
  Description of Artificial Sequence: Synthetic peptide
  Seed: GMDPRMCSLMQGSTLPRRSG
GMDPRMLSLIQTSTSPRRSG

SEQ ID NO: 81550 - protein, 20 aa, Artificial Sequence
  Description of Artificial Sequence: Synthetic peptide
  Seed: GMDPRMCSLMQGSTLPRRSG
GMDPRMLSLIQVSTAPRRSG

SEQ ID NO: 81551 - protein, 20 aa, Artificial Sequence
  Description of Artificial Sequence: Synthetic peptide
  Seed: GMDPRMCSLMQGSTLPRRSG
GMDPRMLSLIQVSTNPRRSG

SEQ ID NO: 81552 - protein, 20 aa, Artificial Sequence
  Description of Artificial Sequence: Synthetic peptide
  Seed: GMDPRMCSLMQGSTLPRRSG
GMDPRMLSLIQVSTSPRRSG

SEQ ID NO: 81553 - protein, 20 aa, Artificial Sequence
  Description of Artificial Sequence: Synthetic peptide
  Seed: GMDPRMCSLMQGSTLPRRSG
GMDPRMLSLLQASTAPRRSG

SEQ ID NO: 81554 - protein, 20 aa, Artificial Sequence
  Description of Artificial Sequence: Synthetic peptide
  Seed: GMDPRMCSLMQGSTLPRRSG
GMDPRMLSLLQASTCPRRSG

SEQ ID NO: 81555 - protein, 20 aa, Artificial Sequence
  Description of Artificial Sequence: Synthetic peptide
  Seed: GMDPRMCSLMQGSTLPRRSG
GMDPRMLSLLQASTGPRRSG

SEQ ID NO: 81556 - protein, 20 aa, Artificial Sequence
  Description of Artificial Sequence: Synthetic peptide
  Seed: GMDPRMCSLMQGSTLPRRSG
GMDPRMLSLLQASTIPRRSG

SEQ ID NO: 81557 - protein, 20 aa, Artificial Sequence
  Description of Artificial Sequence: Synthetic peptide
  Seed: GMDPRMCSLMQGSTLPRRSG
GMDPRMLSLLQASTLPRRSG

SEQ ID NO: 81558 - protein, 20 aa, Artificial Sequence
  Description of Artificial Sequence: Synthetic peptide
  Seed: GMDPRMCSLMQGSTLPRRSG
GMDPRMLSLLQASTMPRRSG

SEQ ID NO: 81559 - protein, 20 aa, Artificial Sequence
  Description of Artificial Sequence: Synthetic peptide
  Seed: GMDPRMCSLMQGSTLPRRSG
GMDPRMLSLLQASTNPRRSG

SEQ ID NO: 81560 - protein, 20 aa, Artificial Sequence
  Description of Artificial Sequence: Synthetic peptide
  Seed: GMDPRMCSLMQGSTLPRRSG
GMDPRMLSLLQASTSPRRSG

SEQ ID NO: 81561 - protein, 20 aa, Artificial Sequence
  Description of Artificial Sequence: Synthetic peptide
  Seed: GMDPRMCSLMQGSTLPRRSG
GMDPRMLSLLQASTTPRRSG

SEQ ID NO: 81562 - protein, 20 aa, Artificial Sequence
  Description of Artificial Sequence: Synthetic peptide
  Seed: GMDPRMCSLMQGSTLPRRSG
GMDPRMLSLLQASTVPRRSG

SEQ ID NO: 81563 - protein, 20 aa, Artificial Sequence
  Description of Artificial Sequence: Synthetic peptide
  Seed: GMDPRMCSLMQGSTLPRRSG
GMDPRMLSLLQGSTAPRRSG

SEQ ID NO: 81564 - protein, 20 aa, Artificial Sequence
  Description of Artificial Sequence: Synthetic peptide
  Seed: GMDPRMCSLMQGSTLPRRSG
GMDPRMLSLLQGSTGPRRSG

SEQ ID NO: 81565 - protein, 20 aa, Artificial Sequence
  Description of Artificial Sequence: Synthetic peptide
  Seed: GMDPRMCSLMQGSTLPRRSG
GMDPRMLSLLQGSTIPRRSG

SEQ ID NO: 81566 - protein, 20 aa, Artificial Sequence
  Description of Artificial Sequence: Synthetic peptide
  Seed: GMDPRMCSLMQGSTLPRRSG
GMDPRMLSLLQGSTLPRRSG

SEQ ID NO: 81567 - protein, 20 aa, Artificial Sequence
  Description of Artificial Sequence: Synthetic peptide
  Seed: GMDPRMCSLMQGSTLPRRSG
GMDPRMLSLLQGSTMPRRSG

SEQ ID NO: 81568 - protein, 20 aa, Artificial Sequence
  Description of Artificial Sequence: Synthetic peptide
  Seed: GMDPRMCSLMQGSTLPRRSG
GMDPRMLSLLQGSTSPRRSG

SEQ ID NO: 81569 - protein, 20 aa, Artificial Sequence
  Description of Artificial Sequence: Synthetic peptide
  Seed: GMDPRMCSLMQGSTLPRRSG
GMDPRMLSLLQGSTTPRRSG

SEQ ID NO: 81570 - protein, 20 aa, Artificial Sequence
  Description of Artificial Sequence: Synthetic peptide
  Seed: GMDPRMCSLMQGSTLPRRSG
GMDPRMLSLLQGSTVPRRSG

SEQ ID NO: 81571 - protein, 20 aa, Artificial Sequence
  Description of Artificial Sequence: Synthetic peptide
  Seed: GMDPRMCSLMQGSTLPRRSG
GMDPRMLSLLQISTAPRRSG

SEQ ID NO: 81572 - protein, 20 aa, Artificial Sequence
  Description of Artificial Sequence: Synthetic peptide
  Seed: GMDPRMCSLMQGSTLPRRSG
GMDPRMLSLLQISTNPRRSG

SEQ ID NO: 81573 - protein, 20 aa, Artificial Sequence
  Description of Artificial Sequence: Synthetic peptide
  Seed: GMDPRMCSLMQGSTLPRRSG
GMDPRMLSLLQISTSPRRSG

SEQ ID NO: 81574 - protein, 20 aa, Artificial Sequence
  Description of Artificial Sequence: Synthetic peptide
  Seed: GMDPRMCSLMQGSTLPRRSG
GMDPRMLSLLQNSTAPRRSG

SEQ ID NO: 81575 - protein, 20 aa, Artificial Sequence
  Description of Artificial Sequence: Synthetic peptide
  Seed: GMDPRMCSLMQGSTLPRRSG
GMDPRMLSLLQNSTIPRRSG

SEQ ID NO: 81576 - protein, 20 aa, Artificial Sequence
  Description of Artificial Sequence: Synthetic peptide
  Seed: GMDPRMCSLMQGSTLPRRSG
GMDPRMLSLLQNSTLPRRSG

SEQ ID NO: 81577 - protein, 20 aa, Artificial Sequence
  Description of Artificial Sequence: Synthetic peptide
  Seed: GMDPRMCSLMQGSTLPRRSG
GMDPRMLSLLQNSTVPRRSG

SEQ ID NO: 81578 - protein, 20 aa, Artificial Sequence
  Description of Artificial Sequence: Synthetic peptide
  Seed: GMDPRMCSLMQGSTLPRRSG
GMDPRMLSLLQPSTAPRRSG

SEQ ID NO: 81579 - protein, 20 aa, Artificial Sequence
  Description of Artificial Sequence: Synthetic peptide
  Seed: GMDPRMCSLMQGSTLPRRSG
GMDPRMLSLLQPSTIPRRSG

SEQ ID NO: 81580 - protein, 20 aa, Artificial Sequence
  Description of Artificial Sequence: Synthetic peptide
  Seed: GMDPRMCSLMQGSTLPRRSG
GMDPRMLSLLQPSTLPRRSG

SEQ ID NO: 81581 - protein, 20 aa, Artificial Sequence
  Description of Artificial Sequence: Synthetic peptide
  Seed: GMDPRMCSLMQGSTLPRRSG
GMDPRMLSLLQPSTMPRRSG

SEQ ID NO: 81582 - protein, 20 aa, Artificial Sequence
  Description of Artificial Sequence: Synthetic peptide
  Seed: GMDPRMCSLMQGSTLPRRSG
GMDPRMLSLLQPSTNPRRSG

SEQ ID NO: 81583 - protein, 20 aa, Artificial Sequence
  Description of Artificial Sequence: Synthetic peptide
  Seed: GMDPRMCSLMQGSTLPRRSG
GMDPRMLSLLQPSTSPRRSG

SEQ ID NO: 81584 - protein, 20 aa, Artificial Sequence
  Description of Artificial Sequence: Synthetic peptide
  Seed: GMDPRMCSLMQGSTLPRRSG
GMDPRMLSLLQPSTTPRRSG

SEQ ID NO: 81585 - protein, 20 aa, Artificial Sequence
  Description of Artificial Sequence: Synthetic peptide
  Seed: GMDPRMCSLMQGSTLPRRSG
GMDPRMLSLLQPSTVPRRSG

SEQ ID NO: 81586 - protein, 20 aa, Artificial Sequence
  Description of Artificial Sequence: Synthetic peptide
  Seed: GMDPRMCSLMQGSTLPRRSG
GMDPRMLSLLQSSTAPRRSG

SEQ ID NO: 81587 - protein, 20 aa, Artificial Sequence
  Description of Artificial Sequence: Synthetic peptide
  Seed: GMDPRMCSLMQGSTLPRRSG
GMDPRMLSLLQSSTIPRRSG

SEQ ID NO: 81588 - protein, 20 aa, Artificial Sequence
  Description of Artificial Sequence: Synthetic peptide
  Seed: GMDPRMCSLMQGSTLPRRSG
GMDPRMLSLLQSSTLPRRSG

SEQ ID NO: 81589 - protein, 20 aa, Artificial Sequence
  Description of Artificial Sequence: Synthetic peptide
  Seed: GMDPRMCSLMQGSTLPRRSG
GMDPRMLSLLQSSTMPRRSG

SEQ ID NO: 81590 - protein, 20 aa, Artificial Sequence
  Description of Artificial Sequence: Synthetic peptide
  Seed: GMDPRMCSLMQGSTLPRRSG
GMDPRMLSLLQSSTNPRRSG

SEQ ID NO: 81591 - protein, 20 aa, Artificial Sequence
  Description of Artificial Sequence: Synthetic peptide
  Seed: GMDPRMCSLMQGSTLPRRSG
GMDPRMLSLLQSSTSPRRSG

SEQ ID NO: 81592 - protein, 20 aa, Artificial Sequence
  Description of Artificial Sequence: Synthetic peptide
  Seed: GMDPRMCSLMQGSTLPRRSG
GMDPRMLSLLQSSTTPRRSG

SEQ ID NO: 81593 - protein, 20 aa, Artificial Sequence
  Description of Artificial Sequence: Synthetic peptide
  Seed: GMDPRMCSLMQGSTLPRRSG
GMDPRMLSLLQSSTVPRRSG

SEQ ID NO: 81594 - protein, 20 aa, Artificial Sequence
  Description of Artificial Sequence: Synthetic peptide
  Seed: GMDPRMCSLMQGSTLPRRSG
GMDPRMLSLLQTSTAPRRSG

SEQ ID NO: 81595 - protein, 20 aa, Artificial Sequence
  Description of Artificial Sequence: Synthetic peptide
  Seed: GMDPRMCSLMQGSTLPRRSG
GMDPRMLSLLQTSTIPRRSG

SEQ ID NO: 81596 - protein, 20 aa, Artificial Sequence
  Description of Artificial Sequence: Synthetic peptide
  Seed: GMDPRMCSLMQGSTLPRRSG
GMDPRMLSLLQTSTLPRRSG

SEQ ID NO: 81597 - protein, 20 aa, Artificial Sequence
  Description of Artificial Sequence: Synthetic peptide
  Seed: GMDPRMCSLMQGSTLPRRSG
GMDPRMLSLLQTSTNPRRSG

SEQ ID NO: 81598 - protein, 20 aa, Artificial Sequence
  Description of Artificial Sequence: Synthetic peptide
  Seed: GMDPRMCSLMQGSTLPRRSG
GMDPRMLSLLQTSTSPRRSG

SEQ ID NO: 81599 - protein, 20 aa, Artificial Sequence
  Description of Artificial Sequence: Synthetic peptide
  Seed: GMDPRMCSLMQGSTLPRRSG
GMDPRMLSLLQTSTTPRRSG

SEQ ID NO: 81600 - protein, 20 aa, Artificial Sequence
  Description of Artificial Sequence: Synthetic peptide
  Seed: GMDPRMCSLMQGSTLPRRSG
GMDPRMLSLLQTSTVPRRSG

SEQ ID NO: 81601 - protein, 20 aa, Artificial Sequence
  Description of Artificial Sequence: Synthetic peptide
  Seed: GMDPRMCSLMQGSTLPRRSG
GMDPRMLSLLQVSTAPRRSG

SEQ ID NO: 81602 - protein, 20 aa, Artificial Sequence
  Description of Artificial Sequence: Synthetic peptide
  Seed: GMDPRMCSLMQGSTLPRRSG
GMDPRMLSLLQVSTNPRRSG

SEQ ID NO: 81603 - protein, 20 aa, Artificial Sequence
  Description of Artificial Sequence: Synthetic peptide
  Seed: GMDPRMCSLMQGSTLPRRSG
GMDPRMLSLLQVSTSPRRSG

SEQ ID NO: 81604 - protein, 20 aa, Artificial Sequence
  Description of Artificial Sequence: Synthetic peptide
  Seed: GMDPRMCSLMQGSTLPRRSG
GMDPRMLSLLQVSTTPRRSG

SEQ ID NO: 81605 - protein, 20 aa, Artificial Sequence
  Description of Artificial Sequence: Synthetic peptide
  Seed: GMDPRMCSLMQGSTLPRRSG
GMDPRMLSLLQVSTVPRRSG

SEQ ID NO: 81606 - protein, 20 aa, Artificial Sequence
  Description of Artificial Sequence: Synthetic peptide
  Seed: GMDPRMCSLMQGSTLPRRSG
GMDPRMLSLMQASTAPRRSG

SEQ ID NO: 81607 - protein, 20 aa, Artificial Sequence
  Description of Artificial Sequence: Synthetic peptide
  Seed: GMDPRMCSLMQGSTLPRRSG
GMDPRMLSLMQASTCPRRSG

SEQ ID NO: 81608 - protein, 20 aa, Artificial Sequence
  Description of Artificial Sequence: Synthetic peptide
  Seed: GMDPRMCSLMQGSTLPRRSG
GMDPRMLSLMQASTGPRRSG

SEQ ID NO: 81609 - protein, 20 aa, Artificial Sequence
  Description of Artificial Sequence: Synthetic peptide
  Seed: GMDPRMCSLMQGSTLPRRSG
GMDPRMLSLMQASTHPRRSG

SEQ ID NO: 81610 - protein, 20 aa, Artificial Sequence
  Description of Artificial Sequence: Synthetic peptide
  Seed: GMDPRMCSLMQGSTLPRRSG
GMDPRMLSLMQASTIPRRSG

SEQ ID NO: 81611 - protein, 20 aa, Artificial Sequence
  Description of Artificial Sequence: Synthetic peptide
  Seed: GMDPRMCSLMQGSTLPRRSG
GMDPRMLSLMQASTLPRRSG

SEQ ID NO: 81612 - protein, 20 aa, Artificial Sequence
  Description of Artificial Sequence: Synthetic peptide
  Seed: GMDPRMCSLMQGSTLPRRSG
GMDPRMLSLMQASTMPRRSG

SEQ ID NO: 81613 - protein, 20 aa, Artificial Sequence
  Description of Artificial Sequence: Synthetic peptide
  Seed: GMDPRMCSLMQGSTLPRRSG
GMDPRMLSLMQASTNPRRSG

SEQ ID NO: 81614 - protein, 20 aa, Artificial Sequence
  Description of Artificial Sequence: Synthetic peptide
  Seed: GMDPRMCSLMQGSTLPRRSG
GMDPRMLSLMQASTQPRRSG

SEQ ID NO: 81615 - protein, 20 aa, Artificial Sequence
  Description of Artificial Sequence: Synthetic peptide
  Seed: GMDPRMCSLMQGSTLPRRSG
GMDPRMLSLMQASTSPRRSG

SEQ ID NO: 81616 - protein, 20 aa, Artificial Sequence
  Description of Artificial Sequence: Synthetic peptide
  Seed: GMDPRMCSLMQGSTLPRRSG
GMDPRMLSLMQASTTPRRSG

SEQ ID NO: 81617 - protein, 20 aa, Artificial Sequence
  Description of Artificial Sequence: Synthetic peptide
  Seed: GMDPRMCSLMQGSTLPRRSG
GMDPRMLSLMQASTVPRRSG

SEQ ID NO: 81618 - protein, 20 aa, Artificial Sequence
  Description of Artificial Sequence: Synthetic peptide
  Seed: GMDPRMCSLMQGSTLPRRSG
GMDPRMLSLMQGSTAPRRSG

SEQ ID NO: 81619 - protein, 20 aa, Artificial Sequence
  Description of Artificial Sequence: Synthetic peptide
  Seed: GMDPRMCSLMQGSTLPRRSG
GMDPRMLSLMQGSTGPRRSG

SEQ ID NO: 81620 - protein, 20 aa, Artificial Sequence
  Description of Artificial Sequence: Synthetic peptide
  Seed: GMDPRMCSLMQGSTLPRRSG
GMDPRMLSLMQGSTIPRRSG

SEQ ID NO: 81621 - protein, 20 aa, Artificial Sequence
  Description of Artificial Sequence: Synthetic peptide
  Seed: GMDPRMCSLMQGSTLPRRSG
GMDPRMLSLMQGSTLPRRSG

SEQ ID NO: 81622 - protein, 20 aa, Artificial Sequence
  Description of Artificial Sequence: Synthetic peptide
  Seed: GMDPRMCSLMQGSTLPRRSG
GMDPRMLSLMQGSTMPRRSG

SEQ ID NO: 81623 - protein, 20 aa, Artificial Sequence
  Description of Artificial Sequence: Synthetic peptide
  Seed: GMDPRMCSLMQGSTLPRRSG
GMDPRMLSLMQGSTNPRRSG

SEQ ID NO: 81624 - protein, 20 aa, Artificial Sequence
  Description of Artificial Sequence: Synthetic peptide
  Seed: GMDPRMCSLMQGSTLPRRSG
GMDPRMLSLMQGSTSPRRSG

SEQ ID NO: 81625 - protein, 20 aa, Artificial Sequence
  Description of Artificial Sequence: Synthetic peptide
  Seed: GMDPRMCSLMQGSTLPRRSG
GMDPRMLSLMQGSTTPRRSG

SEQ ID NO: 81626 - protein, 20 aa, Artificial Sequence
  Description of Artificial Sequence: Synthetic peptide
  Seed: GMDPRMCSLMQGSTLPRRSG
GMDPRMLSLMQGSTVPRRSG

SEQ ID NO: 81627 - protein, 20 aa, Artificial Sequence
  Description of Artificial Sequence: Synthetic peptide
  Seed: GMDPRMCSLMQGSTLPRRSG
GMDPRMLSLMQISTAPRRSG

SEQ ID NO: 81628 - protein, 20 aa, Artificial Sequence
  Description of Artificial Sequence: Synthetic peptide
  Seed: GMDPRMCSLMQGSTLPRRSG
GMDPRMLSLMQISTNPRRSG

SEQ ID NO: 81629 - protein, 20 aa, Artificial Sequence
  Description of Artificial Sequence: Synthetic peptide
  Seed: GMDPRMCSLMQGSTLPRRSG
GMDPRMLSLMQISTSPRRSG

SEQ ID NO: 81630 - protein, 20 aa, Artificial Sequence
  Description of Artificial Sequence: Synthetic peptide
  Seed: GMDPRMCSLMQGSTLPRRSG
GMDPRMLSLMQISTTPRRSG

SEQ ID NO: 81631 - protein, 20 aa, Artificial Sequence
  Description of Artificial Sequence: Synthetic peptide
  Seed: GMDPRMCSLMQGSTLPRRSG
GMDPRMLSLMQLSTAPRRSG

SEQ ID NO: 81632 - protein, 20 aa, Artificial Sequence
  Description of Artificial Sequence: Synthetic peptide
  Seed: GMDPRMCSLMQGSTLPRRSG
GMDPRMLSLMQNSTAPRRSG

SEQ ID NO: 81633 - protein, 20 aa, Artificial Sequence
  Description of Artificial Sequence: Synthetic peptide
  Seed: GMDPRMCSLMQGSTLPRRSG
GMDPRMLSLMQNSTIPRRSG

SEQ ID NO: 81634 - protein, 20 aa, Artificial Sequence
  Description of Artificial Sequence: Synthetic peptide
  Seed: GMDPRMCSLMQGSTLPRRSG
GMDPRMLSLMQNSTLPRRSG

SEQ ID NO: 81635 - protein, 20 aa, Artificial Sequence
  Description of Artificial Sequence: Synthetic peptide
  Seed: GMDPRMCSLMQGSTLPRRSG
GMDPRMLSLMQNSTVPRRSG

SEQ ID NO: 81636 - protein, 20 aa, Artificial Sequence
  Description of Artificial Sequence: Synthetic peptide
  Seed: GMDPRMCSLMQGSTLPRRSG
GMDPRMLSLMQPSTAPRRSG

SEQ ID NO: 81637 - protein, 20 aa, Artificial Sequence
  Description of Artificial Sequence: Synthetic peptide
  Seed: GMDPRMCSLMQGSTLPRRSG
GMDPRMLSLMQPSTIPRRSG

SEQ ID NO: 81638 - protein, 20 aa, Artificial Sequence
  Description of Artificial Sequence: Synthetic peptide
  Seed: GMDPRMCSLMQGSTLPRRSG
GMDPRMLSLMQPSTLPRRSG

SEQ ID NO: 81639 - protein, 20 aa, Artificial Sequence
  Description of Artificial Sequence: Synthetic peptide
  Seed: GMDPRMCSLMQGSTLPRRSG
GMDPRMLSLMQPSTMPRRSG

SEQ ID NO: 81640 - protein, 20 aa, Artificial Sequence
  Description of Artificial Sequence: Synthetic peptide
  Seed: GMDPRMCSLMQGSTLPRRSG
GMDPRMLSLMQPSTNPRRSG

SEQ ID NO: 81641 - protein, 20 aa, Artificial Sequence
  Description of Artificial Sequence: Synthetic peptide
  Seed: GMDPRMCSLMQGSTLPRRSG
GMDPRMLSLMQPSTSPRRSG

SEQ ID NO: 81642 - protein, 20 aa, Artificial Sequence
  Description of Artificial Sequence: Synthetic peptide
  Seed: GMDPRMCSLMQGSTLPRRSG
GMDPRMLSLMQPSTTPRRSG

SEQ ID NO: 81643 - protein, 20 aa, Artificial Sequence
  Description of Artificial Sequence: Synthetic peptide
  Seed: GMDPRMCSLMQGSTLPRRSG
GMDPRMLSLMQPSTVPRRSG

SEQ ID NO: 81644 - protein, 20 aa, Artificial Sequence
  Description of Artificial Sequence: Synthetic peptide
  Seed: GMDPRMCSLMQGSTLPRRSG
GMDPRMLSLMQSSTAPRRSG

SEQ ID NO: 81645 - protein, 20 aa, Artificial Sequence
  Description of Artificial Sequence: Synthetic peptide
  Seed: GMDPRMCSLMQGSTLPRRSG
GMDPRMLSLMQSSTIPRRSG

SEQ ID NO: 81646 - protein, 20 aa, Artificial Sequence
  Description of Artificial Sequence: Synthetic peptide
  Seed: GMDPRMCSLMQGSTLPRRSG
GMDPRMLSLMQSSTLPRRSG

SEQ ID NO: 81647 - protein, 20 aa, Artificial Sequence
  Description of Artificial Sequence: Synthetic peptide
  Seed: GMDPRMCSLMQGSTLPRRSG
GMDPRMLSLMQSSTMPRRSG

SEQ ID NO: 81648 - protein, 20 aa, Artificial Sequence
  Description of Artificial Sequence: Synthetic peptide
  Seed: GMDPRMCSLMQGSTLPRRSG
GMDPRMLSLMQSSTNPRRSG

SEQ ID NO: 81649 - protein, 20 aa, Artificial Sequence
  Description of Artificial Sequence: Synthetic peptide
  Seed: GMDPRMCSLMQGSTLPRRSG
GMDPRMLSLMQSSTSPRRSG

SEQ ID NO: 81650 - protein, 20 aa, Artificial Sequence
  Description of Artificial Sequence: Synthetic peptide
  Seed: GMDPRMCSLMQGSTLPRRSG
GMDPRMLSLMQSSTTPRRSG

SEQ ID NO: 81651 - protein, 20 aa, Artificial Sequence
  Description of Artificial Sequence: Synthetic peptide
  Seed: GMDPRMCSLMQGSTLPRRSG
GMDPRMLSLMQSSTVPRRSG

SEQ ID NO: 81652 - protein, 20 aa, Artificial Sequence
  Description of Artificial Sequence: Synthetic peptide
  Seed: GMDPRMCSLMQGSTLPRRSG
GMDPRMLSLMQTSTAPRRSG

SEQ ID NO: 81653 - protein, 20 aa, Artificial Sequence
  Description of Artificial Sequence: Synthetic peptide
  Seed: GMDPRMCSLMQGSTLPRRSG
GMDPRMLSLMQTSTIPRRSG

SEQ ID NO: 81654 - protein, 20 aa, Artificial Sequence
  Description of Artificial Sequence: Synthetic peptide
  Seed: GMDPRMCSLMQGSTLPRRSG
GMDPRMLSLMQTSTLPRRSG

SEQ ID NO: 81655 - protein, 20 aa, Artificial Sequence
  Description of Artificial Sequence: Synthetic peptide
  Seed: GMDPRMCSLMQGSTLPRRSG
GMDPRMLSLMQTSTMPRRSG

SEQ ID NO: 81656 - protein, 20 aa, Artificial Sequence
  Description of Artificial Sequence: Synthetic peptide
  Seed: GMDPRMCSLMQGSTLPRRSG
GMDPRMLSLMQTSTNPRRSG

SEQ ID NO: 81657 - protein, 20 aa, Artificial Sequence
  Description of Artificial Sequence: Synthetic peptide
  Seed: GMDPRMCSLMQGSTLPRRSG
GMDPRMLSLMQTSTSPRRSG

SEQ ID NO: 81658 - protein, 20 aa, Artificial Sequence
  Description of Artificial Sequence: Synthetic peptide
  Seed: GMDPRMCSLMQGSTLPRRSG
GMDPRMLSLMQTSTTPRRSG

SEQ ID NO: 81659 - protein, 20 aa, Artificial Sequence
  Description of Artificial Sequence: Synthetic peptide
  Seed: GMDPRMCSLMQGSTLPRRSG
GMDPRMLSLMQTSTVPRRSG

SEQ ID NO: 81660 - protein, 20 aa, Artificial Sequence
  Description of Artificial Sequence: Synthetic peptide
  Seed: GMDPRMCSLMQGSTLPRRSG
GMDPRMLSLMQVSTAPRRSG

SEQ ID NO: 81661 - protein, 20 aa, Artificial Sequence
  Description of Artificial Sequence: Synthetic peptide
  Seed: GMDPRMCSLMQGSTLPRRSG
GMDPRMLSLMQVSTNPRRSG

SEQ ID NO: 81662 - protein, 20 aa, Artificial Sequence
  Description of Artificial Sequence: Synthetic peptide
  Seed: GMDPRMCSLMQGSTLPRRSG
GMDPRMLSLMQVSTSPRRSG

SEQ ID NO: 81663 - protein, 20 aa, Artificial Sequence
  Description of Artificial Sequence: Synthetic peptide
  Seed: GMDPRMCSLMQGSTLPRRSG
GMDPRMLSLMQVSTTPRRSG

SEQ ID NO: 81664 - protein, 20 aa, Artificial Sequence
  Description of Artificial Sequence: Synthetic peptide
  Seed: GMDPRMCSLMQGSTLPRRSG
GMDPRMLSLMQVSTVPRRSG

SEQ ID NO: 81665 - protein, 20 aa, Artificial Sequence
  Description of Artificial Sequence: Synthetic peptide
  Seed: GMDPRMCSLMQGSTLPRRSG
GMDPRMLSLQQASTAPRRSG

SEQ ID NO: 81666 - protein, 20 aa, Artificial Sequence
  Description of Artificial Sequence: Synthetic peptide
  Seed: GMDPRMCSLMQGSTLPRRSG
GMDPRMLSLQQASTIPRRSG

SEQ ID NO: 81667 - protein, 20 aa, Artificial Sequence
  Description of Artificial Sequence: Synthetic peptide
  Seed: GMDPRMCSLMQGSTLPRRSG
GMDPRMLSLQQASTLPRRSG

SEQ ID NO: 81668 - protein, 20 aa, Artificial Sequence
  Description of Artificial Sequence: Synthetic peptide
  Seed: GMDPRMCSLMQGSTLPRRSG
GMDPRMLSLQQASTVPRRSG

SEQ ID NO: 81669 - protein, 20 aa, Artificial Sequence
  Description of Artificial Sequence: Synthetic peptide
  Seed: GMDPRMCSLMQGSTLPRRSG
GMDPRMLSLQQGSTIPRRSG

SEQ ID NO: 81670 - protein, 20 aa, Artificial Sequence
  Description of Artificial Sequence: Synthetic peptide
  Seed: GMDPRMCSLMQGSTLPRRSG
GMDPRMLSLQQGSTLPRRSG

SEQ ID NO: 81671 - protein, 20 aa, Artificial Sequence
  Description of Artificial Sequence: Synthetic peptide
  Seed: GMDPRMCSLMQGSTLPRRSG
GMDPRMLSLQQGSTVPRRSG

SEQ ID NO: 81672 - protein, 20 aa, Artificial Sequence
  Description of Artificial Sequence: Synthetic peptide
  Seed: GMDPRMCSLMQGSTLPRRSG
GMDPRMLSLQQSSTLPRRSG

SEQ ID NO: 81673 - protein, 20 aa, Artificial Sequence
  Description of Artificial Sequence: Synthetic peptide
  Seed: GMDPRMCSLMQGSTLPRRSG
GMDPRMLSLQQSSTVPRRSG

SEQ ID NO: 81674 - protein, 20 aa, Artificial Sequence
  Description of Artificial Sequence: Synthetic peptide
  Seed: GMDPRMCSLMQGSTLPRRSG
GMDPRMLSLVQASTAPRRSG

SEQ ID NO: 81675 - protein, 20 aa, Artificial Sequence
  Description of Artificial Sequence: Synthetic peptide
  Seed: GMDPRMCSLMQGSTLPRRSG
GMDPRMLSLVQASTIPRRSG

SEQ ID NO: 81676 - protein, 20 aa, Artificial Sequence
  Description of Artificial Sequence: Synthetic peptide
  Seed: GMDPRMCSLMQGSTLPRRSG
GMDPRMLSLVQASTLPRRSG

SEQ ID NO: 81677 - protein, 20 aa, Artificial Sequence
  Description of Artificial Sequence: Synthetic peptide
  Seed: GMDPRMCSLMQGSTLPRRSG
GMDPRMLSLVQASTNPRRSG

SEQ ID NO: 81678 - protein, 20 aa, Artificial Sequence
  Description of Artificial Sequence: Synthetic peptide
  Seed: GMDPRMCSLMQGSTLPRRSG
GMDPRMLSLVQASTSPRRSG

SEQ ID NO: 81679 - protein, 20 aa, Artificial Sequence
  Description of Artificial Sequence: Synthetic peptide
  Seed: GMDPRMCSLMQGSTLPRRSG
GMDPRMLSLVQASTVPRRSG

SEQ ID NO: 81680 - protein, 20 aa, Artificial Sequence
  Description of Artificial Sequence: Synthetic peptide
  Seed: GMDPRMCSLMQGSTLPRRSG
GMDPRMLSLVQGSTIPRRSG

SEQ ID NO: 81681 - protein, 20 aa, Artificial Sequence
  Description of Artificial Sequence: Synthetic peptide
  Seed: GMDPRMCSLMQGSTLPRRSG
GMDPRMLSLVQGSTLPRRSG

SEQ ID NO: 81682 - protein, 20 aa, Artificial Sequence
  Description of Artificial Sequence: Synthetic peptide
  Seed: GMDPRMCSLMQGSTLPRRSG
GMDPRMLSLVQGSTVPRRSG

SEQ ID NO: 81683 - protein, 20 aa, Artificial Sequence
  Description of Artificial Sequence: Synthetic peptide
  Seed: GMDPRMCSLMQGSTLPRRSG
GMDPRMMSLAQASTAPRRSG

SEQ ID NO: 81684 - protein, 20 aa, Artificial Sequence
  Description of Artificial Sequence: Synthetic peptide
  Seed: GMDPRMCSLMQGSTLPRRSG
GMDPRMMSLAQASTIPRRSG

SEQ ID NO: 81685 - protein, 20 aa, Artificial Sequence
  Description of Artificial Sequence: Synthetic peptide
  Seed: GMDPRMCSLMQGSTLPRRSG
GMDPRMMSLAQASTLPRRSG

SEQ ID NO: 81686 - protein, 20 aa, Artificial Sequence
  Description of Artificial Sequence: Synthetic peptide
  Seed: GMDPRMCSLMQGSTLPRRSG
GMDPRMMSLAQASTVPRRSG

SEQ ID NO: 81687 - protein, 20 aa, Artificial Sequence
  Description of Artificial Sequence: Synthetic peptide
  Seed: GMDPRMCSLMQGSTLPRRSG
GMDPRMMSLIQASTAPRRSG

SEQ ID NO: 81688 - protein, 20 aa, Artificial Sequence
  Description of Artificial Sequence: Synthetic peptide
  Seed: GMDPRMCSLMQGSTLPRRSG
GMDPRMMSLIQASTIPRRSG

SEQ ID NO: 81689 - protein, 20 aa, Artificial Sequence
  Description of Artificial Sequence: Synthetic peptide
  Seed: GMDPRMCSLMQGSTLPRRSG
GMDPRMMSLIQASTLPRRSG

SEQ ID NO: 81690 - protein, 20 aa, Artificial Sequence
  Description of Artificial Sequence: Synthetic peptide
  Seed: GMDPRMCSLMQGSTLPRRSG
GMDPRMMSLIQASTNPRRSG

SEQ ID NO: 81691 - protein, 20 aa, Artificial Sequence
  Description of Artificial Sequence: Synthetic peptide
  Seed: GMDPRMCSLMQGSTLPRRSG
GMDPRMMSLIQASTSPRRSG

SEQ ID NO: 81692 - protein, 20 aa, Artificial Sequence
  Description of Artificial Sequence: Synthetic peptide
  Seed: GMDPRMCSLMQGSTLPRRSG
GMDPRMMSLIQASTVPRRSG

SEQ ID NO: 81693 - protein, 20 aa, Artificial Sequence
  Description of Artificial Sequence: Synthetic peptide
  Seed: GMDPRMCSLMQGSTLPRRSG
GMDPRMMSLIQGSTAPRRSG

SEQ ID NO: 81694 - protein, 20 aa, Artificial Sequence
  Description of Artificial Sequence: Synthetic peptide
  Seed: GMDPRMCSLMQGSTLPRRSG
GMDPRMMSLIQGSTIPRRSG

SEQ ID NO: 81695 - protein, 20 aa, Artificial Sequence
  Description of Artificial Sequence: Synthetic peptide
  Seed: GMDPRMCSLMQGSTLPRRSG
GMDPRMMSLIQGSTLPRRSG

SEQ ID NO: 81696 - protein, 20 aa, Artificial Sequence
  Description of Artificial Sequence: Synthetic peptide
  Seed: GMDPRMCSLMQGSTLPRRSG
GMDPRMMSLIQGSTVPRRSG

SEQ ID NO: 81697 - protein, 20 aa, Artificial Sequence
  Description of Artificial Sequence: Synthetic peptide
  Seed: GMDPRMCSLMQGSTLPRRSG
GMDPRMMSLIQPSTAPRRSG

SEQ ID NO: 81698 - protein, 20 aa, Artificial Sequence
  Description of Artificial Sequence: Synthetic peptide
  Seed: GMDPRMCSLMQGSTLPRRSG
GMDPRMMSLIQVSTAPRRSG

SEQ ID NO: 81699 - protein, 20 aa, Artificial Sequence
  Description of Artificial Sequence: Synthetic peptide
  Seed: GMDPRMCSLMQGSTLPRRSG
GMDPRMMSLLQASTAPRRSG

SEQ ID NO: 81700 - protein, 20 aa, Artificial Sequence
  Description of Artificial Sequence: Synthetic peptide
  Seed: GMDPRMCSLMQGSTLPRRSG
GMDPRMMSLLQASTIPRRSG

SEQ ID NO: 81701 - protein, 20 aa, Artificial Sequence
  Description of Artificial Sequence: Synthetic peptide
  Seed: GMDPRMCSLMQGSTLPRRSG
GMDPRMMSLLQASTLPRRSG

SEQ ID NO: 81702 - protein, 20 aa, Artificial Sequence
  Description of Artificial Sequence: Synthetic peptide
  Seed: GMDPRMCSLMQGSTLPRRSG
GMDPRMMSLLQASTMPRRSG

SEQ ID NO: 81703 - protein, 20 aa, Artificial Sequence
  Description of Artificial Sequence: Synthetic peptide
  Seed: GMDPRMCSLMQGSTLPRRSG
GMDPRMMSLLQASTNPRRSG

SEQ ID NO: 81704 - protein, 20 aa, Artificial Sequence
  Description of Artificial Sequence: Synthetic peptide
  Seed: GMDPRMCSLMQGSTLPRRSG
GMDPRMMSLLQASTSPRRSG

SEQ ID NO: 81705 - protein, 20 aa, Artificial Sequence
  Description of Artificial Sequence: Synthetic peptide
  Seed: GMDPRMCSLMQGSTLPRRSG
GMDPRMMSLLQASTTPRRSG

SEQ ID NO: 81706 - protein, 20 aa, Artificial Sequence
  Description of Artificial Sequence: Synthetic peptide
  Seed: GMDPRMCSLMQGSTLPRRSG
GMDPRMMSLLQASTVPRRSG

SEQ ID NO: 81707 - protein, 20 aa, Artificial Sequence
  Description of Artificial Sequence: Synthetic peptide
  Seed: GMDPRMCSLMQGSTLPRRSG
GMDPRMMSLLQGSTAPRRSG

SEQ ID NO: 81708 - protein, 20 aa, Artificial Sequence
  Description of Artificial Sequence: Synthetic peptide
  Seed: GMDPRMCSLMQGSTLPRRSG
GMDPRMMSLLQGSTIPRRSG

SEQ ID NO: 81709 - protein, 20 aa, Artificial Sequence
  Description of Artificial Sequence: Synthetic peptide
  Seed: GMDPRMCSLMQGSTLPRRSG
GMDPRMMSLLQGSTLPRRSG

SEQ ID NO: 81710 - protein, 20 aa, Artificial Sequence
  Description of Artificial Sequence: Synthetic peptide
  Seed: GMDPRMCSLMQGSTLPRRSG
GMDPRMMSLLQGSTMPRRSG

SEQ ID NO: 81711 - protein, 20 aa, Artificial Sequence
  Description of Artificial Sequence: Synthetic peptide
  Seed: GMDPRMCSLMQGSTLPRRSG
GMDPRMMSLLQGSTSPRRSG

SEQ ID NO: 81712 - protein, 20 aa, Artificial Sequence
  Description of Artificial Sequence: Synthetic peptide
  Seed: GMDPRMCSLMQGSTLPRRSG
GMDPRMMSLLQGSTTPRRSG

SEQ ID NO: 81713 - protein, 20 aa, Artificial Sequence
  Description of Artificial Sequence: Synthetic peptide
  Seed: GMDPRMCSLMQGSTLPRRSG
GMDPRMMSLLQGSTVPRRSG

SEQ ID NO: 81714 - protein, 20 aa, Artificial Sequence
  Description of Artificial Sequence: Synthetic peptide
  Seed: GMDPRMCSLMQGSTLPRRSG
GMDPRMMSLLQISTAPRRSG

SEQ ID NO: 81715 - protein, 20 aa, Artificial Sequence
  Description of Artificial Sequence: Synthetic peptide
  Seed: GMDPRMCSLMQGSTLPRRSG
GMDPRMMSLLQNSTVPRRSG

SEQ ID NO: 81716 - protein, 20 aa, Artificial Sequence
  Description of Artificial Sequence: Synthetic peptide
  Seed: GMDPRMCSLMQGSTLPRRSG
GMDPRMMSLLQPSTAPRRSG

SEQ ID NO: 81717 - protein, 20 aa, Artificial Sequence
  Description of Artificial Sequence: Synthetic peptide
  Seed: GMDPRMCSLMQGSTLPRRSG
GMDPRMMSLLQPSTIPRRSG

SEQ ID NO: 81718 - protein, 20 aa, Artificial Sequence
  Description of Artificial Sequence: Synthetic peptide
  Seed: GMDPRMCSLMQGSTLPRRSG
GMDPRMMSLLQPSTLPRRSG

SEQ ID NO: 81719 - protein, 20 aa, Artificial Sequence
  Description of Artificial Sequence: Synthetic peptide
  Seed: GMDPRMCSLMQGSTLPRRSG
GMDPRMMSLLQPSTNPRRSG

SEQ ID NO: 81720 - protein, 20 aa, Artificial Sequence
  Description of Artificial Sequence: Synthetic peptide
  Seed: GMDPRMCSLMQGSTLPRRSG
GMDPRMMSLLQPSTSPRRSG

SEQ ID NO: 81721 - protein, 20 aa, Artificial Sequence
  Description of Artificial Sequence: Synthetic peptide
  Seed: GMDPRMCSLMQGSTLPRRSG
GMDPRMMSLLQPSTTPRRSG

SEQ ID NO: 81722 - protein, 20 aa, Artificial Sequence
  Description of Artificial Sequence: Synthetic peptide
  Seed: GMDPRMCSLMQGSTLPRRSG
GMDPRMMSLLQPSTVPRRSG

SEQ ID NO: 81723 - protein, 20 aa, Artificial Sequence
  Description of Artificial Sequence: Synthetic peptide
  Seed: GMDPRMCSLMQGSTLPRRSG
GMDPRMMSLLQSSTAPRRSG

SEQ ID NO: 81724 - protein, 20 aa, Artificial Sequence
  Description of Artificial Sequence: Synthetic peptide
  Seed: GMDPRMCSLMQGSTLPRRSG
GMDPRMMSLLQSSTIPRRSG

SEQ ID NO: 81725 - protein, 20 aa, Artificial Sequence
  Description of Artificial Sequence: Synthetic peptide
  Seed: GMDPRMCSLMQGSTLPRRSG
GMDPRMMSLLQSSTLPRRSG

SEQ ID NO: 81726 - protein, 20 aa, Artificial Sequence
  Description of Artificial Sequence: Synthetic peptide
  Seed: GMDPRMCSLMQGSTLPRRSG
GMDPRMMSLLQSSTNPRRSG

SEQ ID NO: 81727 - protein, 20 aa, Artificial Sequence
  Description of Artificial Sequence: Synthetic peptide
  Seed: GMDPRMCSLMQGSTLPRRSG
GMDPRMMSLLQSSTSPRRSG

SEQ ID NO: 81728 - protein, 20 aa, Artificial Sequence
  Description of Artificial Sequence: Synthetic peptide
  Seed: GMDPRMCSLMQGSTLPRRSG
GMDPRMMSLLQSSTVPRRSG

SEQ ID NO: 81729 - protein, 20 aa, Artificial Sequence
  Description of Artificial Sequence: Synthetic peptide
  Seed: GMDPRMCSLMQGSTLPRRSG
GMDPRMMSLLQTSTAPRRSG

SEQ ID NO: 81730 - protein, 20 aa, Artificial Sequence
  Description of Artificial Sequence: Synthetic peptide
  Seed: GMDPRMCSLMQGSTLPRRSG
GMDPRMMSLLQTSTNPRRSG

SEQ ID NO: 81731 - protein, 20 aa, Artificial Sequence
  Description of Artificial Sequence: Synthetic peptide
  Seed: GMDPRMCSLMQGSTLPRRSG
GMDPRMMSLLQTSTSPRRSG

SEQ ID NO: 81732 - protein, 20 aa, Artificial Sequence
  Description of Artificial Sequence: Synthetic peptide
  Seed: GMDPRMCSLMQGSTLPRRSG
GMDPRMMSLLQTSTVPRRSG

SEQ ID NO: 81733 - protein, 20 aa, Artificial Sequence
  Description of Artificial Sequence: Synthetic peptide
  Seed: GMDPRMCSLMQGSTLPRRSG
GMDPRMMSLLQVSTAPRRSG

SEQ ID NO: 81734 - protein, 20 aa, Artificial Sequence
  Description of Artificial Sequence: Synthetic peptide
  Seed: GMDPRMCSLMQGSTLPRRSG
GMDPRMMSLLQVSTNPRRSG

SEQ ID NO: 81735 - protein, 20 aa, Artificial Sequence
  Description of Artificial Sequence: Synthetic peptide
  Seed: GMDPRMCSLMQGSTLPRRSG
GMDPRMMSLLQVSTSPRRSG

SEQ ID NO: 81736 - protein, 20 aa, Artificial Sequence
  Description of Artificial Sequence: Synthetic peptide
  Seed: GMDPRMCSLMQGSTLPRRSG
GMDPRMMSLMQASTAPRRSG

SEQ ID NO: 81737 - protein, 20 aa, Artificial Sequence
  Description of Artificial Sequence: Synthetic peptide
  Seed: GMDPRMCSLMQGSTLPRRSG
GMDPRMMSLMQASTIPRRSG

SEQ ID NO: 81738 - protein, 20 aa, Artificial Sequence
  Description of Artificial Sequence: Synthetic peptide
  Seed: GMDPRMCSLMQGSTLPRRSG
GMDPRMMSLMQASTLPRRSG

SEQ ID NO: 81739 - protein, 20 aa, Artificial Sequence
  Description of Artificial Sequence: Synthetic peptide
  Seed: GMDPRMCSLMQGSTLPRRSG
GMDPRMMSLMQASTMPRRSG

SEQ ID NO: 81740 - protein, 20 aa, Artificial Sequence
  Description of Artificial Sequence: Synthetic peptide
  Seed: GMDPRMCSLMQGSTLPRRSG
GMDPRMMSLMQASTNPRRSG

SEQ ID NO: 81741 - protein, 20 aa, Artificial Sequence
  Description of Artificial Sequence: Synthetic peptide
  Seed: GMDPRMCSLMQGSTLPRRSG
GMDPRMMSLMQASTSPRRSG

SEQ ID NO: 81742 - protein, 20 aa, Artificial Sequence
  Description of Artificial Sequence: Synthetic peptide
  Seed: GMDPRMCSLMQGSTLPRRSG
GMDPRMMSLMQASTTPRRSG

SEQ ID NO: 81743 - protein, 20 aa, Artificial Sequence
  Description of Artificial Sequence: Synthetic peptide
  Seed: GMDPRMCSLMQGSTLPRRSG
GMDPRMMSLMQASTVPRRSG

SEQ ID NO: 81744 - protein, 20 aa, Artificial Sequence
  Description of Artificial Sequence: Synthetic peptide
  Seed: GMDPRMCSLMQGSTLPRRSG
GMDPRMMSLMQGSTAPRRSG

SEQ ID NO: 81745 - protein, 20 aa, Artificial Sequence
  Description of Artificial Sequence: Synthetic peptide
  Seed: GMDPRMCSLMQGSTLPRRSG
GMDPRMMSLMQGSTIPRRSG

SEQ ID NO: 81746 - protein, 20 aa, Artificial Sequence
  Description of Artificial Sequence: Synthetic peptide
  Seed: GMDPRMCSLMQGSTLPRRSG
GMDPRMMSLMQGSTLPRRSG

SEQ ID NO: 81747 - protein, 20 aa, Artificial Sequence
  Description of Artificial Sequence: Synthetic peptide
  Seed: GMDPRMCSLMQGSTLPRRSG
GMDPRMMSLMQGSTMPRRSG

SEQ ID NO: 81748 - protein, 20 aa, Artificial Sequence
  Description of Artificial Sequence: Synthetic peptide
  Seed: GMDPRMCSLMQGSTLPRRSG
GMDPRMMSLMQGSTTPRRSG

SEQ ID NO: 81749 - protein, 20 aa, Artificial Sequence
  Description of Artificial Sequence: Synthetic peptide
  Seed: GMDPRMCSLMQGSTLPRRSG
GMDPRMMSLMQGSTVPRRSG

SEQ ID NO: 81750 - protein, 20 aa, Artificial Sequence
  Description of Artificial Sequence: Synthetic peptide
  Seed: GMDPRMCSLMQGSTLPRRSG
GMDPRMMSLMQISTAPRRSG

SEQ ID NO: 81751 - protein, 20 aa, Artificial Sequence
  Description of Artificial Sequence: Synthetic peptide
  Seed: GMDPRMCSLMQGSTLPRRSG
GMDPRMMSLMQISTNPRRSG

SEQ ID NO: 81752 - protein, 20 aa, Artificial Sequence
  Description of Artificial Sequence: Synthetic peptide
  Seed: GMDPRMCSLMQGSTLPRRSG
GMDPRMMSLMQISTSPRRSG

SEQ ID NO: 81753 - protein, 20 aa, Artificial Sequence
  Description of Artificial Sequence: Synthetic peptide
  Seed: GMDPRMCSLMQGSTLPRRSG
GMDPRMMSLMQNSTVPRRSG

SEQ ID NO: 81754 - protein, 20 aa, Artificial Sequence
  Description of Artificial Sequence: Synthetic peptide
  Seed: GMDPRMCSLMQGSTLPRRSG
GMDPRMMSLMQPSTAPRRSG

SEQ ID NO: 81755 - protein, 20 aa, Artificial Sequence
  Description of Artificial Sequence: Synthetic peptide
  Seed: GMDPRMCSLMQGSTLPRRSG
GMDPRMMSLMQPSTIPRRSG

SEQ ID NO: 81756 - protein, 20 aa, Artificial Sequence
  Description of Artificial Sequence: Synthetic peptide
  Seed: GMDPRMCSLMQGSTLPRRSG
GMDPRMMSLMQPSTLPRRSG

SEQ ID NO: 81757 - protein, 20 aa, Artificial Sequence
  Description of Artificial Sequence: Synthetic peptide
  Seed: GMDPRMCSLMQGSTLPRRSG
GMDPRMMSLMQPSTNPRRSG

SEQ ID NO: 81758 - protein, 20 aa, Artificial Sequence
  Description of Artificial Sequence: Synthetic peptide
  Seed: GMDPRMCSLMQGSTLPRRSG
GMDPRMMSLMQPSTSPRRSG

SEQ ID NO: 81759 - protein, 20 aa, Artificial Sequence
  Description of Artificial Sequence: Synthetic peptide
  Seed: GMDPRMCSLMQGSTLPRRSG
GMDPRMMSLMQPSTTPRRSG

SEQ ID NO: 81760 - protein, 20 aa, Artificial Sequence
  Description of Artificial Sequence: Synthetic peptide
  Seed: GMDPRMCSLMQGSTLPRRSG
GMDPRMMSLMQPSTVPRRSG

SEQ ID NO: 81761 - protein, 20 aa, Artificial Sequence
  Description of Artificial Sequence: Synthetic peptide
  Seed: GMDPRMCSLMQGSTLPRRSG
GMDPRMMSLMQSSTAPRRSG

SEQ ID NO: 81762 - protein, 20 aa, Artificial Sequence
  Description of Artificial Sequence: Synthetic peptide
  Seed: GMDPRMCSLMQGSTLPRRSG
GMDPRMMSLMQSSTIPRRSG

SEQ ID NO: 81763 - protein, 20 aa, Artificial Sequence
  Description of Artificial Sequence: Synthetic peptide
  Seed: GMDPRMCSLMQGSTLPRRSG
GMDPRMMSLMQSSTLPRRSG

SEQ ID NO: 81764 - protein, 20 aa, Artificial Sequence
  Description of Artificial Sequence: Synthetic peptide
  Seed: GMDPRMCSLMQGSTLPRRSG
GMDPRMMSLMQSSTNPRRSG

SEQ ID NO: 81765 - protein, 20 aa, Artificial Sequence
  Description of Artificial Sequence: Synthetic peptide
  Seed: GMDPRMCSLMQGSTLPRRSG
GMDPRMMSLMQSSTSPRRSG

SEQ ID NO: 81766 - protein, 20 aa, Artificial Sequence
  Description of Artificial Sequence: Synthetic peptide
  Seed: GMDPRMCSLMQGSTLPRRSG
GMDPRMMSLMQSSTVPRRSG

SEQ ID NO: 81767 - protein, 20 aa, Artificial Sequence
  Description of Artificial Sequence: Synthetic peptide
  Seed: GMDPRMCSLMQGSTLPRRSG
GMDPRMMSLMQTSTAPRRSG

SEQ ID NO: 81768 - protein, 20 aa, Artificial Sequence
  Description of Artificial Sequence: Synthetic peptide
  Seed: GMDPRMCSLMQGSTLPRRSG
GMDPRMMSLMQTSTNPRRSG

SEQ ID NO: 81769 - protein, 20 aa, Artificial Sequence
  Description of Artificial Sequence: Synthetic peptide
  Seed: GMDPRMCSLMQGSTLPRRSG
GMDPRMMSLMQTSTSPRRSG

SEQ ID NO: 81770 - protein, 20 aa, Artificial Sequence
  Description of Artificial Sequence: Synthetic peptide
  Seed: GMDPRMCSLMQGSTLPRRSG
GMDPRMMSLMQTSTVPRRSG

SEQ ID NO: 81771 - protein, 20 aa, Artificial Sequence
  Description of Artificial Sequence: Synthetic peptide
  Seed: GMDPRMCSLMQGSTLPRRSG
GMDPRMMSLMQVSTAPRRSG

SEQ ID NO: 81772 - protein, 20 aa, Artificial Sequence
  Description of Artificial Sequence: Synthetic peptide
  Seed: GMDPRMCSLMQGSTLPRRSG
GMDPRMMSLMQVSTNPRRSG

SEQ ID NO: 81773 - protein, 20 aa, Artificial Sequence
  Description of Artificial Sequence: Synthetic peptide
  Seed: GMDPRMCSLMQGSTLPRRSG
GMDPRMMSLMQVSTSPRRSG

SEQ ID NO: 81774 - protein, 20 aa, Artificial Sequence
  Description of Artificial Sequence: Synthetic peptide
  Seed: GMDPRMCSLMQGSTLPRRSG
GMDPRMMSLMQVSTTPRRSG

SEQ ID NO: 81775 - protein, 20 aa, Artificial Sequence
  Description of Artificial Sequence: Synthetic peptide
  Seed: GMDPRMCSLMQGSTLPRRSG
GMDPRMMSLMQVSTVPRRSG

SEQ ID NO: 81776 - protein, 20 aa, Artificial Sequence
  Description of Artificial Sequence: Synthetic peptide
  Seed: GMDPRMCSLMQGSTLPRRSG
GMDPRMMSLQQASTIPRRSG

SEQ ID NO: 81777 - protein, 20 aa, Artificial Sequence
  Description of Artificial Sequence: Synthetic peptide
  Seed: GMDPRMCSLMQGSTLPRRSG
GMDPRMMSLQQASTLPRRSG

SEQ ID NO: 81778 - protein, 20 aa, Artificial Sequence
  Description of Artificial Sequence: Synthetic peptide
  Seed: GMDPRMCSLMQGSTLPRRSG
GMDPRMMSLQQASTVPRRSG

SEQ ID NO: 81779 - protein, 20 aa, Artificial Sequence
  Description of Artificial Sequence: Synthetic peptide
  Seed: GMDPRMCSLMQGSTLPRRSG
GMDPRMMSLVQASTAPRRSG

SEQ ID NO: 81780 - protein, 20 aa, Artificial Sequence
  Description of Artificial Sequence: Synthetic peptide
  Seed: GMDPRMCSLMQGSTLPRRSG
GMDPRMVSLAQASTIPRRSG

SEQ ID NO: 81781 - protein, 20 aa, Artificial Sequence
  Description of Artificial Sequence: Synthetic peptide
  Seed: GMDPRMCSLMQGSTLPRRSG
GMDPRMVSLAQASTLPRRSG

SEQ ID NO: 81782 - protein, 20 aa, Artificial Sequence
  Description of Artificial Sequence: Synthetic peptide
  Seed: GMDPRMCSLMQGSTLPRRSG
GMDPRMVSLAQASTVPRRSG

SEQ ID NO: 81783 - protein, 20 aa, Artificial Sequence
  Description of Artificial Sequence: Synthetic peptide
  Seed: GMDPRMCSLMQGSTLPRRSG
GMDPRMVSLIQASTAPRRSG

SEQ ID NO: 81784 - protein, 20 aa, Artificial Sequence
  Description of Artificial Sequence: Synthetic peptide
  Seed: GMDPRMCSLMQGSTLPRRSG
GMDPRMVSLIQASTIPRRSG

SEQ ID NO: 81785 - protein, 20 aa, Artificial Sequence
  Description of Artificial Sequence: Synthetic peptide
  Seed: GMDPRMCSLMQGSTLPRRSG
GMDPRMVSLIQASTLPRRSG

SEQ ID NO: 81786 - protein, 20 aa, Artificial Sequence
  Description of Artificial Sequence: Synthetic peptide
  Seed: GMDPRMCSLMQGSTLPRRSG
GMDPRMVSLIQASTSPRRSG

SEQ ID NO: 81787 - protein, 20 aa, Artificial Sequence
  Description of Artificial Sequence: Synthetic peptide
  Seed: GMDPRMCSLMQGSTLPRRSG
GMDPRMVSLIQASTVPRRSG

SEQ ID NO: 81788 - protein, 20 aa, Artificial Sequence
  Description of Artificial Sequence: Synthetic peptide
  Seed: GMDPRMCSLMQGSTLPRRSG
GMDPRMVSLIQGSTAPRRSG

SEQ ID NO: 81789 - protein, 20 aa, Artificial Sequence
  Description of Artificial Sequence: Synthetic peptide
  Seed: GMDPRMCSLMQGSTLPRRSG
GMDPRMVSLIQGSTIPRRSG

SEQ ID NO: 81790 - protein, 20 aa, Artificial Sequence
  Description of Artificial Sequence: Synthetic peptide
  Seed: GMDPRMCSLMQGSTLPRRSG
GMDPRMVSLIQGSTLPRRSG

SEQ ID NO: 81791 - protein, 20 aa, Artificial Sequence
  Description of Artificial Sequence: Synthetic peptide
  Seed: GMDPRMCSLMQGSTLPRRSG
GMDPRMVSLIQGSTVPRRSG

SEQ ID NO: 81792 - protein, 20 aa, Artificial Sequence
  Description of Artificial Sequence: Synthetic peptide
  Seed: GMDPRMCSLMQGSTLPRRSG
GMDPRMVSLIQSSTVPRRSG

SEQ ID NO: 81793 - protein, 20 aa, Artificial Sequence
  Description of Artificial Sequence: Synthetic peptide
  Seed: GMDPRMCSLMQGSTLPRRSG
GMDPRMVSLLQASTAPRRSG

SEQ ID NO: 81794 - protein, 20 aa, Artificial Sequence
  Description of Artificial Sequence: Synthetic peptide
  Seed: GMDPRMCSLMQGSTLPRRSG
GMDPRMVSLLQASTIPRRSG

SEQ ID NO: 81795 - protein, 20 aa, Artificial Sequence
  Description of Artificial Sequence: Synthetic peptide
  Seed: GMDPRMCSLMQGSTLPRRSG
GMDPRMVSLLQASTLPRRSG

SEQ ID NO: 81796 - protein, 20 aa, Artificial Sequence
  Description of Artificial Sequence: Synthetic peptide
  Seed: GMDPRMCSLMQGSTLPRRSG
GMDPRMVSLLQASTMPRRSG

SEQ ID NO: 81797 - protein, 20 aa, Artificial Sequence
  Description of Artificial Sequence: Synthetic peptide
  Seed: GMDPRMCSLMQGSTLPRRSG
GMDPRMVSLLQASTNPRRSG

SEQ ID NO: 81798 - protein, 20 aa, Artificial Sequence
  Description of Artificial Sequence: Synthetic peptide
  Seed: GMDPRMCSLMQGSTLPRRSG
GMDPRMVSLLQASTSPRRSG

SEQ ID NO: 81799 - protein, 20 aa, Artificial Sequence
  Description of Artificial Sequence: Synthetic peptide
  Seed: GMDPRMCSLMQGSTLPRRSG
GMDPRMVSLLQASTTPRRSG

SEQ ID NO: 81800 - protein, 20 aa, Artificial Sequence
  Description of Artificial Sequence: Synthetic peptide
  Seed: GMDPRMCSLMQGSTLPRRSG
GMDPRMVSLLQASTVPRRSG

SEQ ID NO: 81801 - protein, 20 aa, Artificial Sequence
  Description of Artificial Sequence: Synthetic peptide
  Seed: GMDPRMCSLMQGSTLPRRSG
GMDPRMVSLLQGSTAPRRSG

SEQ ID NO: 81802 - protein, 20 aa, Artificial Sequence
  Description of Artificial Sequence: Synthetic peptide
  Seed: GMDPRMCSLMQGSTLPRRSG
GMDPRMVSLLQGSTIPRRSG

SEQ ID NO: 81803 - protein, 20 aa, Artificial Sequence
  Description of Artificial Sequence: Synthetic peptide
  Seed: GMDPRMCSLMQGSTLPRRSG
GMDPRMVSLLQGSTLPRRSG

SEQ ID NO: 81804 - protein, 20 aa, Artificial Sequence
  Description of Artificial Sequence: Synthetic peptide
  Seed: GMDPRMCSLMQGSTLPRRSG
GMDPRMVSLLQGSTMPRRSG

SEQ ID NO: 81805 - protein, 20 aa, Artificial Sequence
  Description of Artificial Sequence: Synthetic peptide
  Seed: GMDPRMCSLMQGSTLPRRSG
GMDPRMVSLLQGSTSPRRSG

SEQ ID NO: 81806 - protein, 20 aa, Artificial Sequence
  Description of Artificial Sequence: Synthetic peptide
  Seed: GMDPRMCSLMQGSTLPRRSG
GMDPRMVSLLQGSTTPRRSG

SEQ ID NO: 81807 - protein, 20 aa, Artificial Sequence
  Description of Artificial Sequence: Synthetic peptide
  Seed: GMDPRMCSLMQGSTLPRRSG
GMDPRMVSLLQGSTVPRRSG

SEQ ID NO: 81808 - protein, 20 aa, Artificial Sequence
  Description of Artificial Sequence: Synthetic peptide
  Seed: GMDPRMCSLMQGSTLPRRSG
GMDPRMVSLLQNSTLPRRSG

SEQ ID NO: 81809 - protein, 20 aa, Artificial Sequence
  Description of Artificial Sequence: Synthetic peptide
  Seed: GMDPRMCSLMQGSTLPRRSG
GMDPRMVSLLQNSTVPRRSG

SEQ ID NO: 81810 - protein, 20 aa, Artificial Sequence
  Description of Artificial Sequence: Synthetic peptide
  Seed: GMDPRMCSLMQGSTLPRRSG
GMDPRMVSLLQPSTAPRRSG

SEQ ID NO: 81811 - protein, 20 aa, Artificial Sequence
  Description of Artificial Sequence: Synthetic peptide
  Seed: GMDPRMCSLMQGSTLPRRSG
GMDPRMVSLLQPSTIPRRSG

SEQ ID NO: 81812 - protein, 20 aa, Artificial Sequence
  Description of Artificial Sequence: Synthetic peptide
  Seed: GMDPRMCSLMQGSTLPRRSG
GMDPRMVSLLQPSTLPRRSG

SEQ ID NO: 81813 - protein, 20 aa, Artificial Sequence
  Description of Artificial Sequence: Synthetic peptide
  Seed: GMDPRMCSLMQGSTLPRRSG
GMDPRMVSLLQPSTSPRRSG

SEQ ID NO: 81814 - protein, 20 aa, Artificial Sequence
  Description of Artificial Sequence: Synthetic peptide
  Seed: GMDPRMCSLMQGSTLPRRSG
GMDPRMVSLLQPSTVPRRSG

SEQ ID NO: 81815 - protein, 20 aa, Artificial Sequence
  Description of Artificial Sequence: Synthetic peptide
  Seed: GMDPRMCSLMQGSTLPRRSG
GMDPRMVSLLQSSTAPRRSG

SEQ ID NO: 81816 - protein, 20 aa, Artificial Sequence
  Description of Artificial Sequence: Synthetic peptide
  Seed: GMDPRMCSLMQGSTLPRRSG
GMDPRMVSLLQSSTIPRRSG

SEQ ID NO: 81817 - protein, 20 aa, Artificial Sequence
  Description of Artificial Sequence: Synthetic peptide
  Seed: GMDPRMCSLMQGSTLPRRSG
GMDPRMVSLLQSSTLPRRSG

SEQ ID NO: 81818 - protein, 20 aa, Artificial Sequence
  Description of Artificial Sequence: Synthetic peptide
  Seed: GMDPRMCSLMQGSTLPRRSG
GMDPRMVSLLQSSTVPRRSG

SEQ ID NO: 81819 - protein, 20 aa, Artificial Sequence
  Description of Artificial Sequence: Synthetic peptide
  Seed: GMDPRMCSLMQGSTLPRRSG
GMDPRMVSLLQTSTVPRRSG

SEQ ID NO: 81820 - protein, 20 aa, Artificial Sequence
  Description of Artificial Sequence: Synthetic peptide
  Seed: GMDPRMCSLMQGSTLPRRSG
GMDPRMVSLLQVSTAPRRSG

SEQ ID NO: 81821 - protein, 20 aa, Artificial Sequence
  Description of Artificial Sequence: Synthetic peptide
  Seed: GMDPRMCSLMQGSTLPRRSG
GMDPRMVSLMQASTAPRRSG

SEQ ID NO: 81822 - protein, 20 aa, Artificial Sequence
  Description of Artificial Sequence: Synthetic peptide
  Seed: GMDPRMCSLMQGSTLPRRSG
GMDPRMVSLMQASTIPRRSG

SEQ ID NO: 81823 - protein, 20 aa, Artificial Sequence
  Description of Artificial Sequence: Synthetic peptide
  Seed: GMDPRMCSLMQGSTLPRRSG
GMDPRMVSLMQASTLPRRSG

SEQ ID NO: 81824 - protein, 20 aa, Artificial Sequence
  Description of Artificial Sequence: Synthetic peptide
  Seed: GMDPRMCSLMQGSTLPRRSG
GMDPRMVSLMQASTMPRRSG

SEQ ID NO: 81825 - protein, 20 aa, Artificial Sequence
  Description of Artificial Sequence: Synthetic peptide
  Seed: GMDPRMCSLMQGSTLPRRSG
GMDPRMVSLMQASTNPRRSG

SEQ ID NO: 81826 - protein, 20 aa, Artificial Sequence
  Description of Artificial Sequence: Synthetic peptide
  Seed: GMDPRMCSLMQGSTLPRRSG
GMDPRMVSLMQASTSPRRSG

SEQ ID NO: 81827 - protein, 20 aa, Artificial Sequence
  Description of Artificial Sequence: Synthetic peptide
  Seed: GMDPRMCSLMQGSTLPRRSG
GMDPRMVSLMQASTTPRRSG

SEQ ID NO: 81828 - protein, 20 aa, Artificial Sequence
  Description of Artificial Sequence: Synthetic peptide
  Seed: GMDPRMCSLMQGSTLPRRSG
GMDPRMVSLMQASTVPRRSG

SEQ ID NO: 81829 - protein, 20 aa, Artificial Sequence
  Description of Artificial Sequence: Synthetic peptide
  Seed: GMDPRMCSLMQGSTLPRRSG
GMDPRMVSLMQGSTAPRRSG

SEQ ID NO: 81830 - protein, 20 aa, Artificial Sequence
  Description of Artificial Sequence: Synthetic peptide
  Seed: GMDPRMCSLMQGSTLPRRSG
GMDPRMVSLMQGSTIPRRSG

SEQ ID NO: 81831 - protein, 20 aa, Artificial Sequence
  Description of Artificial Sequence: Synthetic peptide
  Seed: GMDPRMCSLMQGSTLPRRSG
GMDPRMVSLMQGSTLPRRSG

SEQ ID NO: 81832 - protein, 20 aa, Artificial Sequence
  Description of Artificial Sequence: Synthetic peptide
  Seed: GMDPRMCSLMQGSTLPRRSG
GMDPRMVSLMQGSTMPRRSG

SEQ ID NO: 81833 - protein, 20 aa, Artificial Sequence
  Description of Artificial Sequence: Synthetic peptide
  Seed: GMDPRMCSLMQGSTLPRRSG
GMDPRMVSLMQGSTTPRRSG

SEQ ID NO: 81834 - protein, 20 aa, Artificial Sequence
  Description of Artificial Sequence: Synthetic peptide
  Seed: GMDPRMCSLMQGSTLPRRSG
GMDPRMVSLMQGSTVPRRSG

SEQ ID NO: 81835 - protein, 20 aa, Artificial Sequence
  Description of Artificial Sequence: Synthetic peptide
  Seed: GMDPRMCSLMQGSTLPRRSG
GMDPRMVSLMQISTAPRRSG

SEQ ID NO: 81836 - protein, 20 aa, Artificial Sequence
  Description of Artificial Sequence: Synthetic peptide
  Seed: GMDPRMCSLMQGSTLPRRSG
GMDPRMVSLMQNSTVPRRSG

SEQ ID NO: 81837 - protein, 20 aa, Artificial Sequence
  Description of Artificial Sequence: Synthetic peptide
  Seed: GMDPRMCSLMQGSTLPRRSG
GMDPRMVSLMQPSTAPRRSG

SEQ ID NO: 81838 - protein, 20 aa, Artificial Sequence
  Description of Artificial Sequence: Synthetic peptide
  Seed: GMDPRMCSLMQGSTLPRRSG
GMDPRMVSLMQPSTIPRRSG

SEQ ID NO: 81839 - protein, 20 aa, Artificial Sequence
  Description of Artificial Sequence: Synthetic peptide
  Seed: GMDPRMCSLMQGSTLPRRSG
GMDPRMVSLMQPSTLPRRSG

SEQ ID NO: 81840 - protein, 20 aa, Artificial Sequence
  Description of Artificial Sequence: Synthetic peptide
  Seed: GMDPRMCSLMQGSTLPRRSG
GMDPRMVSLMQPSTSPRRSG

SEQ ID NO: 81841 - protein, 20 aa, Artificial Sequence
  Description of Artificial Sequence: Synthetic peptide
  Seed: GMDPRMCSLMQGSTLPRRSG
GMDPRMVSLMQPSTVPRRSG

SEQ ID NO: 81842 - protein, 20 aa, Artificial Sequence
  Description of Artificial Sequence: Synthetic peptide
  Seed: GMDPRMCSLMQGSTLPRRSG
GMDPRMVSLMQSSTAPRRSG

SEQ ID NO: 81843 - protein, 20 aa, Artificial Sequence
  Description of Artificial Sequence: Synthetic peptide
  Seed: GMDPRMCSLMQGSTLPRRSG
GMDPRMVSLMQSSTIPRRSG

SEQ ID NO: 81844 - protein, 20 aa, Artificial Sequence
  Description of Artificial Sequence: Synthetic peptide
  Seed: GMDPRMCSLMQGSTLPRRSG
GMDPRMVSLMQSSTLPRRSG

SEQ ID NO: 81845 - protein, 20 aa, Artificial Sequence
  Description of Artificial Sequence: Synthetic peptide
  Seed: GMDPRMCSLMQGSTLPRRSG
GMDPRMVSLMQSSTVPRRSG

SEQ ID NO: 81846 - protein, 20 aa, Artificial Sequence
  Description of Artificial Sequence: Synthetic peptide
  Seed: GMDPRMCSLMQGSTLPRRSG
GMDPRMVSLMQTSTVPRRSG

SEQ ID NO: 81847 - protein, 20 aa, Artificial Sequence
  Description of Artificial Sequence: Synthetic peptide
  Seed: GMDPRMCSLMQGSTLPRRSG
GMDPRMVSLMQVSTAPRRSG

SEQ ID NO: 81848 - protein, 20 aa, Artificial Sequence
  Description of Artificial Sequence: Synthetic peptide
  Seed: GMDPRMCSLMQGSTLPRRSG
GMDPRMVSLMQVSTSPRRSG

SEQ ID NO: 81849 - protein, 20 aa, Artificial Sequence
  Description of Artificial Sequence: Synthetic peptide
  Seed: GMDPRMCSLMQGSTLPRRSG
GMDPRMVSLQQASTIPRRSG

SEQ ID NO: 81850 - protein, 20 aa, Artificial Sequence
  Description of Artificial Sequence: Synthetic peptide
  Seed: GMDPRMCSLMQGSTLPRRSG
GMDPRMVSLQQASTLPRRSG

SEQ ID NO: 81851 - protein, 20 aa, Artificial Sequence
  Description of Artificial Sequence: Synthetic peptide
  Seed: GMDPRMCSLMQGSTLPRRSG
GMDPRMVSLQQASTVPRRSG

SEQ ID NO: 81852 - protein, 20 aa, Artificial Sequence
  Description of Artificial Sequence: Synthetic peptide
  Seed: GMDPRMCSLMQGSTLPRRSG
GMDPRMWSLAQASTAPRRSG

SEQ ID NO: 81853 - protein, 20 aa, Artificial Sequence
  Description of Artificial Sequence: Synthetic peptide
  Seed: GMDPRMCSLMQGSTLPRRSG
GMDPRMWSLAQASTIPRRSG

SEQ ID NO: 81854 - protein, 20 aa, Artificial Sequence
  Description of Artificial Sequence: Synthetic peptide
  Seed: GMDPRMCSLMQGSTLPRRSG
GMDPRMWSLAQASTLPRRSG

SEQ ID NO: 81855 - protein, 20 aa, Artificial Sequence
  Description of Artificial Sequence: Synthetic peptide
  Seed: GMDPRMCSLMQGSTLPRRSG
GMDPRMWSLAQASTMPRRSG

SEQ ID NO: 81856 - protein, 20 aa, Artificial Sequence
  Description of Artificial Sequence: Synthetic peptide
  Seed: GMDPRMCSLMQGSTLPRRSG
GMDPRMWSLAQASTNPRRSG

SEQ ID NO: 81857 - protein, 20 aa, Artificial Sequence
  Description of Artificial Sequence: Synthetic peptide
  Seed: GMDPRMCSLMQGSTLPRRSG
GMDPRMWSLAQASTQPRRSG

SEQ ID NO: 81858 - protein, 20 aa, Artificial Sequence
  Description of Artificial Sequence: Synthetic peptide
  Seed: GMDPRMCSLMQGSTLPRRSG
GMDPRMWSLAQASTSPRRSG

SEQ ID NO: 81859 - protein, 20 aa, Artificial Sequence
  Description of Artificial Sequence: Synthetic peptide
  Seed: GMDPRMCSLMQGSTLPRRSG
GMDPRMWSLAQASTTPRRSG

SEQ ID NO: 81860 - protein, 20 aa, Artificial Sequence
  Description of Artificial Sequence: Synthetic peptide
  Seed: GMDPRMCSLMQGSTLPRRSG
GMDPRMWSLAQASTVPRRSG

SEQ ID NO: 81861 - protein, 20 aa, Artificial Sequence
  Description of Artificial Sequence: Synthetic peptide
  Seed: GMDPRMCSLMQGSTLPRRSG
GMDPRMWSLAQGSTAPRRSG

SEQ ID NO: 81862 - protein, 20 aa, Artificial Sequence
  Description of Artificial Sequence: Synthetic peptide
  Seed: GMDPRMCSLMQGSTLPRRSG
GMDPRMWSLAQGSTIPRRSG

SEQ ID NO: 81863 - protein, 20 aa, Artificial Sequence
  Description of Artificial Sequence: Synthetic peptide
  Seed: GMDPRMCSLMQGSTLPRRSG
GMDPRMWSLAQGSTLPRRSG

SEQ ID NO: 81864 - protein, 20 aa, Artificial Sequence
  Description of Artificial Sequence: Synthetic peptide
  Seed: GMDPRMCSLMQGSTLPRRSG
GMDPRMWSLAQGSTMPRRSG

SEQ ID NO: 81865 - protein, 20 aa, Artificial Sequence
  Description of Artificial Sequence: Synthetic peptide
  Seed: GMDPRMCSLMQGSTLPRRSG
GMDPRMWSLAQGSTVPRRSG

SEQ ID NO: 81866 - protein, 20 aa, Artificial Sequence
  Description of Artificial Sequence: Synthetic peptide
  Seed: GMDPRMCSLMQGSTLPRRSG
GMDPRMWSLAQISTAPRRSG

SEQ ID NO: 81867 - protein, 20 aa, Artificial Sequence
  Description of Artificial Sequence: Synthetic peptide
  Seed: GMDPRMCSLMQGSTLPRRSG
GMDPRMWSLAQISTNPRRSG

SEQ ID NO: 81868 - protein, 20 aa, Artificial Sequence
  Description of Artificial Sequence: Synthetic peptide
  Seed: GMDPRMCSLMQGSTLPRRSG
GMDPRMWSLAQISTSPRRSG

SEQ ID NO: 81869 - protein, 20 aa, Artificial Sequence
  Description of Artificial Sequence: Synthetic peptide
  Seed: GMDPRMCSLMQGSTLPRRSG
GMDPRMWSLAQNSTAPRRSG

SEQ ID NO: 81870 - protein, 20 aa, Artificial Sequence
  Description of Artificial Sequence: Synthetic peptide
  Seed: GMDPRMCSLMQGSTLPRRSG
GMDPRMWSLAQNSTIPRRSG

SEQ ID NO: 81871 - protein, 20 aa, Artificial Sequence
  Description of Artificial Sequence: Synthetic peptide
  Seed: GMDPRMCSLMQGSTLPRRSG
GMDPRMWSLAQNSTLPRRSG

SEQ ID NO: 81872 - protein, 20 aa, Artificial Sequence
  Description of Artificial Sequence: Synthetic peptide
  Seed: GMDPRMCSLMQGSTLPRRSG
GMDPRMWSLAQNSTVPRRSG

SEQ ID NO: 81873 - protein, 20 aa, Artificial Sequence
  Description of Artificial Sequence: Synthetic peptide
  Seed: GMDPRMCSLMQGSTLPRRSG
GMDPRMWSLAQPSTAPRRSG

SEQ ID NO: 81874 - protein, 20 aa, Artificial Sequence
  Description of Artificial Sequence: Synthetic peptide
  Seed: GMDPRMCSLMQGSTLPRRSG
GMDPRMWSLAQPSTIPRRSG

SEQ ID NO: 81875 - protein, 20 aa, Artificial Sequence
  Description of Artificial Sequence: Synthetic peptide
  Seed: GMDPRMCSLMQGSTLPRRSG
GMDPRMWSLAQPSTLPRRSG

SEQ ID NO: 81876 - protein, 20 aa, Artificial Sequence
  Description of Artificial Sequence: Synthetic peptide
  Seed: GMDPRMCSLMQGSTLPRRSG
GMDPRMWSLAQPSTSPRRSG

SEQ ID NO: 81877 - protein, 20 aa, Artificial Sequence
  Description of Artificial Sequence: Synthetic peptide
  Seed: GMDPRMCSLMQGSTLPRRSG
GMDPRMWSLAQPSTVPRRSG

SEQ ID NO: 81878 - protein, 20 aa, Artificial Sequence
  Description of Artificial Sequence: Synthetic peptide
  Seed: GMDPRMCSLMQGSTLPRRSG
GMDPRMWSLAQSSTAPRRSG

SEQ ID NO: 81879 - protein, 20 aa, Artificial Sequence
  Description of Artificial Sequence: Synthetic peptide
  Seed: GMDPRMCSLMQGSTLPRRSG
GMDPRMWSLAQSSTIPRRSG

SEQ ID NO: 81880 - protein, 20 aa, Artificial Sequence
  Description of Artificial Sequence: Synthetic peptide
  Seed: GMDPRMCSLMQGSTLPRRSG
GMDPRMWSLAQSSTLPRRSG

SEQ ID NO: 81881 - protein, 20 aa, Artificial Sequence
  Description of Artificial Sequence: Synthetic peptide
  Seed: GMDPRMCSLMQGSTLPRRSG
GMDPRMWSLAQSSTMPRRSG

SEQ ID NO: 81882 - protein, 20 aa, Artificial Sequence
  Description of Artificial Sequence: Synthetic peptide
  Seed: GMDPRMCSLMQGSTLPRRSG
GMDPRMWSLAQSSTNPRRSG

SEQ ID NO: 81883 - protein, 20 aa, Artificial Sequence
  Description of Artificial Sequence: Synthetic peptide
  Seed: GMDPRMCSLMQGSTLPRRSG
GMDPRMWSLAQSSTSPRRSG

SEQ ID NO: 81884 - protein, 20 aa, Artificial Sequence
  Description of Artificial Sequence: Synthetic peptide
  Seed: GMDPRMCSLMQGSTLPRRSG
GMDPRMWSLAQSSTTPRRSG

SEQ ID NO: 81885 - protein, 20 aa, Artificial Sequence
  Description of Artificial Sequence: Synthetic peptide
  Seed: GMDPRMCSLMQGSTLPRRSG
GMDPRMWSLAQSSTVPRRSG

SEQ ID NO: 81886 - protein, 20 aa, Artificial Sequence
  Description of Artificial Sequence: Synthetic peptide
  Seed: GMDPRMCSLMQGSTLPRRSG
GMDPRMWSLAQTSTAPRRSG

SEQ ID NO: 81887 - protein, 20 aa, Artificial Sequence
  Description of Artificial Sequence: Synthetic peptide
  Seed: GMDPRMCSLMQGSTLPRRSG
GMDPRMWSLAQTSTIPRRSG

SEQ ID NO: 81888 - protein, 20 aa, Artificial Sequence
  Description of Artificial Sequence: Synthetic peptide
  Seed: GMDPRMCSLMQGSTLPRRSG
GMDPRMWSLAQTSTLPRRSG

SEQ ID NO: 81889 - protein, 20 aa, Artificial Sequence
  Description of Artificial Sequence: Synthetic peptide
  Seed: GMDPRMCSLMQGSTLPRRSG
GMDPRMWSLAQTSTNPRRSG

SEQ ID NO: 81890 - protein, 20 aa, Artificial Sequence
  Description of Artificial Sequence: Synthetic peptide
  Seed: GMDPRMCSLMQGSTLPRRSG
GMDPRMWSLAQTSTSPRRSG

SEQ ID NO: 81891 - protein, 20 aa, Artificial Sequence
  Description of Artificial Sequence: Synthetic peptide
  Seed: GMDPRMCSLMQGSTLPRRSG
GMDPRMWSLAQTSTVPRRSG

SEQ ID NO: 81892 - protein, 20 aa, Artificial Sequence
  Description of Artificial Sequence: Synthetic peptide
  Seed: GMDPRMCSLMQGSTLPRRSG
GMDPRMWSLAQVSTAPRRSG

SEQ ID NO: 81893 - protein, 20 aa, Artificial Sequence
  Description of Artificial Sequence: Synthetic peptide
  Seed: GMDPRMCSLMQGSTLPRRSG
GMDPRMWSLAQVSTIPRRSG

SEQ ID NO: 81894 - protein, 20 aa, Artificial Sequence
  Description of Artificial Sequence: Synthetic peptide
  Seed: GMDPRMCSLMQGSTLPRRSG
GMDPRMWSLAQVSTNPRRSG

SEQ ID NO: 81895 - protein, 20 aa, Artificial Sequence
  Description of Artificial Sequence: Synthetic peptide
  Seed: GMDPRMCSLMQGSTLPRRSG
GMDPRMWSLAQVSTSPRRSG

SEQ ID NO: 81896 - protein, 20 aa, Artificial Sequence
  Description of Artificial Sequence: Synthetic peptide
  Seed: GMDPRMCSLMQGSTLPRRSG
GMDPRMWSLAQVSTTPRRSG

SEQ ID NO: 81897 - protein, 20 aa, Artificial Sequence
  Description of Artificial Sequence: Synthetic peptide
  Seed: GMDPRMCSLMQGSTLPRRSG
GMDPRMWSLAQVSTVPRRSG

SEQ ID NO: 81898 - protein, 20 aa, Artificial Sequence
  Description of Artificial Sequence: Synthetic peptide
  Seed: GMDPRMCSLMQGSTLPRRSG
GMDPRMWSLEQASTAPRRSG

SEQ ID NO: 81899 - protein, 20 aa, Artificial Sequence
  Description of Artificial Sequence: Synthetic peptide
  Seed: GMDPRMCSLMQGSTLPRRSG
GMDPRMWSLEQASTIPRRSG

SEQ ID NO: 81900 - protein, 20 aa, Artificial Sequence
  Description of Artificial Sequence: Synthetic peptide
  Seed: GMDPRMCSLMQGSTLPRRSG
GMDPRMWSLEQASTLPRRSG

SEQ ID NO: 81901 - protein, 20 aa, Artificial Sequence
  Description of Artificial Sequence: Synthetic peptide
  Seed: GMDPRMCSLMQGSTLPRRSG
GMDPRMWSLEQASTVPRRSG

SEQ ID NO: 81902 - protein, 20 aa, Artificial Sequence
  Description of Artificial Sequence: Synthetic peptide
  Seed: GMDPRMCSLMQGSTLPRRSG
GMDPRMWSLFQASTAPRRSG

SEQ ID NO: 81903 - protein, 20 aa, Artificial Sequence
  Description of Artificial Sequence: Synthetic peptide
  Seed: GMDPRMCSLMQGSTLPRRSG
GMDPRMWSLFQASTNPRRSG

SEQ ID NO: 81904 - protein, 20 aa, Artificial Sequence
  Description of Artificial Sequence: Synthetic peptide
  Seed: GMDPRMCSLMQGSTLPRRSG
GMDPRMWSLFQASTSPRRSG

SEQ ID NO: 81905 - protein, 20 aa, Artificial Sequence
  Description of Artificial Sequence: Synthetic peptide
  Seed: GMDPRMCSLMQGSTLPRRSG
GMDPRMWSLFQASTVPRRSG

SEQ ID NO: 81906 - protein, 20 aa, Artificial Sequence
  Description of Artificial Sequence: Synthetic peptide
  Seed: GMDPRMCSLMQGSTLPRRSG
GMDPRMWSLGQASTIPRRSG

SEQ ID NO: 81907 - protein, 20 aa, Artificial Sequence
  Description of Artificial Sequence: Synthetic peptide
  Seed: GMDPRMCSLMQGSTLPRRSG
GMDPRMWSLGQASTLPRRSG

SEQ ID NO: 81908 - protein, 20 aa, Artificial Sequence
  Description of Artificial Sequence: Synthetic peptide
  Seed: GMDPRMCSLMQGSTLPRRSG
GMDPRMWSLGQASTVPRRSG

SEQ ID NO: 81909 - protein, 20 aa, Artificial Sequence
  Description of Artificial Sequence: Synthetic peptide
  Seed: GMDPRMCSLMQGSTLPRRSG
GMDPRMWSLIQASTAPRRSG

SEQ ID NO: 81910 - protein, 20 aa, Artificial Sequence
  Description of Artificial Sequence: Synthetic peptide
  Seed: GMDPRMCSLMQGSTLPRRSG
GMDPRMWSLIQASTGPRRSG

SEQ ID NO: 81911 - protein, 20 aa, Artificial Sequence
  Description of Artificial Sequence: Synthetic peptide
  Seed: GMDPRMCSLMQGSTLPRRSG
GMDPRMWSLIQASTHPRRSG

SEQ ID NO: 81912 - protein, 20 aa, Artificial Sequence
  Description of Artificial Sequence: Synthetic peptide
  Seed: GMDPRMCSLMQGSTLPRRSG
GMDPRMWSLIQASTIPRRSG

SEQ ID NO: 81913 - protein, 20 aa, Artificial Sequence
  Description of Artificial Sequence: Synthetic peptide
  Seed: GMDPRMCSLMQGSTLPRRSG
GMDPRMWSLIQASTLPRRSG

SEQ ID NO: 81914 - protein, 20 aa, Artificial Sequence
  Description of Artificial Sequence: Synthetic peptide
  Seed: GMDPRMCSLMQGSTLPRRSG
GMDPRMWSLIQASTMPRRSG

SEQ ID NO: 81915 - protein, 20 aa, Artificial Sequence
  Description of Artificial Sequence: Synthetic peptide
  Seed: GMDPRMCSLMQGSTLPRRSG
GMDPRMWSLIQASTNPRRSG

SEQ ID NO: 81916 - protein, 20 aa, Artificial Sequence
  Description of Artificial Sequence: Synthetic peptide
  Seed: GMDPRMCSLMQGSTLPRRSG
GMDPRMWSLIQASTQPRRSG

SEQ ID NO: 81917 - protein, 20 aa, Artificial Sequence
  Description of Artificial Sequence: Synthetic peptide
  Seed: GMDPRMCSLMQGSTLPRRSG
GMDPRMWSLIQASTSPRRSG

SEQ ID NO: 81918 - protein, 20 aa, Artificial Sequence
  Description of Artificial Sequence: Synthetic peptide
  Seed: GMDPRMCSLMQGSTLPRRSG
GMDPRMWSLIQASTTPRRSG

SEQ ID NO: 81919 - protein, 20 aa, Artificial Sequence
  Description of Artificial Sequence: Synthetic peptide
  Seed: GMDPRMCSLMQGSTLPRRSG
GMDPRMWSLIQASTVPRRSG

SEQ ID NO: 81920 - protein, 20 aa, Artificial Sequence
  Description of Artificial Sequence: Synthetic peptide
  Seed: GMDPRMCSLMQGSTLPRRSG
GMDPRMWSLIQGSTAPRRSG

SEQ ID NO: 81921 - protein, 20 aa, Artificial Sequence
  Description of Artificial Sequence: Synthetic peptide
  Seed: GMDPRMCSLMQGSTLPRRSG
GMDPRMWSLIQGSTIPRRSG

SEQ ID NO: 81922 - protein, 20 aa, Artificial Sequence
  Description of Artificial Sequence: Synthetic peptide
  Seed: GMDPRMCSLMQGSTLPRRSG
GMDPRMWSLIQGSTLPRRSG

SEQ ID NO: 81923 - protein, 20 aa, Artificial Sequence
  Description of Artificial Sequence: Synthetic peptide
  Seed: GMDPRMCSLMQGSTLPRRSG
GMDPRMWSLIQGSTMPRRSG

SEQ ID NO: 81924 - protein, 20 aa, Artificial Sequence
  Description of Artificial Sequence: Synthetic peptide
  Seed: GMDPRMCSLMQGSTLPRRSG
GMDPRMWSLIQGSTNPRRSG

SEQ ID NO: 81925 - protein, 20 aa, Artificial Sequence
  Description of Artificial Sequence: Synthetic peptide
  Seed: GMDPRMCSLMQGSTLPRRSG
GMDPRMWSLIQGSTSPRRSG

SEQ ID NO: 81926 - protein, 20 aa, Artificial Sequence
  Description of Artificial Sequence: Synthetic peptide
  Seed: GMDPRMCSLMQGSTLPRRSG
GMDPRMWSLIQGSTTPRRSG

SEQ ID NO: 81927 - protein, 20 aa, Artificial Sequence
  Description of Artificial Sequence: Synthetic peptide
  Seed: GMDPRMCSLMQGSTLPRRSG
GMDPRMWSLIQGSTVPRRSG

SEQ ID NO: 81928 - protein, 20 aa, Artificial Sequence
  Description of Artificial Sequence: Synthetic peptide
  Seed: GMDPRMCSLMQGSTLPRRSG
GMDPRMWSLIQISTAPRRSG

SEQ ID NO: 81929 - protein, 20 aa, Artificial Sequence
  Description of Artificial Sequence: Synthetic peptide
  Seed: GMDPRMCSLMQGSTLPRRSG
GMDPRMWSLIQISTNPRRSG

SEQ ID NO: 81930 - protein, 20 aa, Artificial Sequence
  Description of Artificial Sequence: Synthetic peptide
  Seed: GMDPRMCSLMQGSTLPRRSG
GMDPRMWSLIQISTSPRRSG

SEQ ID NO: 81931 - protein, 20 aa, Artificial Sequence
  Description of Artificial Sequence: Synthetic peptide
  Seed: GMDPRMCSLMQGSTLPRRSG
GMDPRMWSLIQISTTPRRSG

SEQ ID NO: 81932 - protein, 20 aa, Artificial Sequence
  Description of Artificial Sequence: Synthetic peptide
  Seed: GMDPRMCSLMQGSTLPRRSG
GMDPRMWSLIQLSTAPRRSG

SEQ ID NO: 81933 - protein, 20 aa, Artificial Sequence
  Description of Artificial Sequence: Synthetic peptide
  Seed: GMDPRMCSLMQGSTLPRRSG
GMDPRMWSLIQMSTAPRRSG

SEQ ID NO: 81934 - protein, 20 aa, Artificial Sequence
  Description of Artificial Sequence: Synthetic peptide
  Seed: GMDPRMCSLMQGSTLPRRSG
GMDPRMWSLIQNSTAPRRSG

SEQ ID NO: 81935 - protein, 20 aa, Artificial Sequence
  Description of Artificial Sequence: Synthetic peptide
  Seed: GMDPRMCSLMQGSTLPRRSG
GMDPRMWSLIQNSTIPRRSG

SEQ ID NO: 81936 - protein, 20 aa, Artificial Sequence
  Description of Artificial Sequence: Synthetic peptide
  Seed: GMDPRMCSLMQGSTLPRRSG
GMDPRMWSLIQNSTLPRRSG

SEQ ID NO: 81937 - protein, 20 aa, Artificial Sequence
  Description of Artificial Sequence: Synthetic peptide
  Seed: GMDPRMCSLMQGSTLPRRSG
GMDPRMWSLIQNSTNPRRSG

SEQ ID NO: 81938 - protein, 20 aa, Artificial Sequence
  Description of Artificial Sequence: Synthetic peptide
  Seed: GMDPRMCSLMQGSTLPRRSG
GMDPRMWSLIQNSTSPRRSG

SEQ ID NO: 81939 - protein, 20 aa, Artificial Sequence
  Description of Artificial Sequence: Synthetic peptide
  Seed: GMDPRMCSLMQGSTLPRRSG
GMDPRMWSLIQNSTVPRRSG

SEQ ID NO: 81940 - protein, 20 aa, Artificial Sequence
  Description of Artificial Sequence: Synthetic peptide
  Seed: GMDPRMCSLMQGSTLPRRSG
GMDPRMWSLIQPSTAPRRSG

SEQ ID NO: 81941 - protein, 20 aa, Artificial Sequence
  Description of Artificial Sequence: Synthetic peptide
  Seed: GMDPRMCSLMQGSTLPRRSG
GMDPRMWSLIQPSTGPRRSG

SEQ ID NO: 81942 - protein, 20 aa, Artificial Sequence
  Description of Artificial Sequence: Synthetic peptide
  Seed: GMDPRMCSLMQGSTLPRRSG
GMDPRMWSLIQPSTIPRRSG

SEQ ID NO: 81943 - protein, 20 aa, Artificial Sequence
  Description of Artificial Sequence: Synthetic peptide
  Seed: GMDPRMCSLMQGSTLPRRSG
GMDPRMWSLIQPSTLPRRSG

SEQ ID NO: 81944 - protein, 20 aa, Artificial Sequence
  Description of Artificial Sequence: Synthetic peptide
  Seed: GMDPRMCSLMQGSTLPRRSG
GMDPRMWSLIQPSTMPRRSG

SEQ ID NO: 81945 - protein, 20 aa, Artificial Sequence
  Description of Artificial Sequence: Synthetic peptide
  Seed: GMDPRMCSLMQGSTLPRRSG
GMDPRMWSLIQPSTNPRRSG

SEQ ID NO: 81946 - protein, 20 aa, Artificial Sequence
  Description of Artificial Sequence: Synthetic peptide
  Seed: GMDPRMCSLMQGSTLPRRSG
GMDPRMWSLIQPSTSPRRSG

SEQ ID NO: 81947 - protein, 20 aa, Artificial Sequence
  Description of Artificial Sequence: Synthetic peptide
  Seed: GMDPRMCSLMQGSTLPRRSG
GMDPRMWSLIQPSTTPRRSG

SEQ ID NO: 81948 - protein, 20 aa, Artificial Sequence
  Description of Artificial Sequence: Synthetic peptide
  Seed: GMDPRMCSLMQGSTLPRRSG
GMDPRMWSLIQPSTVPRRSG

SEQ ID NO: 81949 - protein, 20 aa, Artificial Sequence
  Description of Artificial Sequence: Synthetic peptide
  Seed: GMDPRMCSLMQGSTLPRRSG
GMDPRMWSLIQSSTAPRRSG

SEQ ID NO: 81950 - protein, 20 aa, Artificial Sequence
  Description of Artificial Sequence: Synthetic peptide
  Seed: GMDPRMCSLMQGSTLPRRSG
GMDPRMWSLIQSSTGPRRSG

SEQ ID NO: 81951 - protein, 20 aa, Artificial Sequence
  Description of Artificial Sequence: Synthetic peptide
  Seed: GMDPRMCSLMQGSTLPRRSG
GMDPRMWSLIQSSTIPRRSG

SEQ ID NO: 81952 - protein, 20 aa, Artificial Sequence
  Description of Artificial Sequence: Synthetic peptide
  Seed: GMDPRMCSLMQGSTLPRRSG
GMDPRMWSLIQSSTLPRRSG

SEQ ID NO: 81953 - protein, 20 aa, Artificial Sequence
  Description of Artificial Sequence: Synthetic peptide
  Seed: GMDPRMCSLMQGSTLPRRSG
GMDPRMWSLIQSSTMPRRSG

SEQ ID NO: 81954 - protein, 20 aa, Artificial Sequence
  Description of Artificial Sequence: Synthetic peptide
  Seed: GMDPRMCSLMQGSTLPRRSG
GMDPRMWSLIQSSTNPRRSG

SEQ ID NO: 81955 - protein, 20 aa, Artificial Sequence
  Description of Artificial Sequence: Synthetic peptide
  Seed: GMDPRMCSLMQGSTLPRRSG
GMDPRMWSLIQSSTSPRRSG

SEQ ID NO: 81956 - protein, 20 aa, Artificial Sequence
  Description of Artificial Sequence: Synthetic peptide
  Seed: GMDPRMCSLMQGSTLPRRSG
GMDPRMWSLIQSSTTPRRSG

SEQ ID NO: 81957 - protein, 20 aa, Artificial Sequence
  Description of Artificial Sequence: Synthetic peptide
  Seed: GMDPRMCSLMQGSTLPRRSG
GMDPRMWSLIQSSTVPRRSG

SEQ ID NO: 81958 - protein, 20 aa, Artificial Sequence
  Description of Artificial Sequence: Synthetic peptide
  Seed: GMDPRMCSLMQGSTLPRRSG
GMDPRMWSLIQTSTAPRRSG

SEQ ID NO: 81959 - protein, 20 aa, Artificial Sequence
  Description of Artificial Sequence: Synthetic peptide
  Seed: GMDPRMCSLMQGSTLPRRSG
GMDPRMWSLIQTSTGPRRSG

SEQ ID NO: 81960 - protein, 20 aa, Artificial Sequence
  Description of Artificial Sequence: Synthetic peptide
  Seed: GMDPRMCSLMQGSTLPRRSG
GMDPRMWSLIQTSTIPRRSG

SEQ ID NO: 81961 - protein, 20 aa, Artificial Sequence
  Description of Artificial Sequence: Synthetic peptide
  Seed: GMDPRMCSLMQGSTLPRRSG
GMDPRMWSLIQTSTLPRRSG

SEQ ID NO: 81962 - protein, 20 aa, Artificial Sequence
  Description of Artificial Sequence: Synthetic peptide
  Seed: GMDPRMCSLMQGSTLPRRSG
GMDPRMWSLIQTSTMPRRSG

SEQ ID NO: 81963 - protein, 20 aa, Artificial Sequence
  Description of Artificial Sequence: Synthetic peptide
  Seed: GMDPRMCSLMQGSTLPRRSG
GMDPRMWSLIQTSTNPRRSG

SEQ ID NO: 81964 - protein, 20 aa, Artificial Sequence
  Description of Artificial Sequence: Synthetic peptide
  Seed: GMDPRMCSLMQGSTLPRRSG
GMDPRMWSLIQTSTSPRRSG

SEQ ID NO: 81965 - protein, 20 aa, Artificial Sequence
  Description of Artificial Sequence: Synthetic peptide
  Seed: GMDPRMCSLMQGSTLPRRSG
GMDPRMWSLIQTSTTPRRSG

SEQ ID NO: 81966 - protein, 20 aa, Artificial Sequence
  Description of Artificial Sequence: Synthetic peptide
  Seed: GMDPRMCSLMQGSTLPRRSG
GMDPRMWSLIQTSTVPRRSG

SEQ ID NO: 81967 - protein, 20 aa, Artificial Sequence
  Description of Artificial Sequence: Synthetic peptide
  Seed: GMDPRMCSLMQGSTLPRRSG
GMDPRMWSLIQVSTAPRRSG

SEQ ID NO: 81968 - protein, 20 aa, Artificial Sequence
  Description of Artificial Sequence: Synthetic peptide
  Seed: GMDPRMCSLMQGSTLPRRSG
GMDPRMWSLIQVSTGPRRSG

SEQ ID NO: 81969 - protein, 20 aa, Artificial Sequence
  Description of Artificial Sequence: Synthetic peptide
  Seed: GMDPRMCSLMQGSTLPRRSG
GMDPRMWSLIQVSTNPRRSG

SEQ ID NO: 81970 - protein, 20 aa, Artificial Sequence
  Description of Artificial Sequence: Synthetic peptide
  Seed: GMDPRMCSLMQGSTLPRRSG
GMDPRMWSLIQVSTSPRRSG

SEQ ID NO: 81971 - protein, 20 aa, Artificial Sequence
  Description of Artificial Sequence: Synthetic peptide
  Seed: GMDPRMCSLMQGSTLPRRSG
GMDPRMWSLIQVSTTPRRSG

SEQ ID NO: 81972 - protein, 20 aa, Artificial Sequence
  Description of Artificial Sequence: Synthetic peptide
  Seed: GMDPRMCSLMQGSTLPRRSG
GMDPRMWSLIQVSTVPRRSG

SEQ ID NO: 81973 - protein, 20 aa, Artificial Sequence
  Description of Artificial Sequence: Synthetic peptide
  Seed: GMDPRMCSLMQGSTLPRRSG
GMDPRMWSLLQASTAPRRSG

SEQ ID NO: 81974 - protein, 20 aa, Artificial Sequence
  Description of Artificial Sequence: Synthetic peptide
  Seed: GMDPRMCSLMQGSTLPRRSG
GMDPRMWSLLQASTCPRRSG

SEQ ID NO: 81975 - protein, 20 aa, Artificial Sequence
  Description of Artificial Sequence: Synthetic peptide
  Seed: GMDPRMCSLMQGSTLPRRSG
GMDPRMWSLLQASTDPRRSG

SEQ ID NO: 81976 - protein, 20 aa, Artificial Sequence
  Description of Artificial Sequence: Synthetic peptide
  Seed: GMDPRMCSLMQGSTLPRRSG
GMDPRMWSLLQASTFPRRSG

SEQ ID NO: 81977 - protein, 20 aa, Artificial Sequence
  Description of Artificial Sequence: Synthetic peptide
  Seed: GMDPRMCSLMQGSTLPRRSG
GMDPRMWSLLQASTGPRRSG

SEQ ID NO: 81978 - protein, 20 aa, Artificial Sequence
  Description of Artificial Sequence: Synthetic peptide
  Seed: GMDPRMCSLMQGSTLPRRSG
GMDPRMWSLLQASTHPRRSG

SEQ ID NO: 81979 - protein, 20 aa, Artificial Sequence
  Description of Artificial Sequence: Synthetic peptide
  Seed: GMDPRMCSLMQGSTLPRRSG
GMDPRMWSLLQASTIPRRSG

SEQ ID NO: 81980 - protein, 20 aa, Artificial Sequence
  Description of Artificial Sequence: Synthetic peptide
  Seed: GMDPRMCSLMQGSTLPRRSG
GMDPRMWSLLQASTLPRRSG

SEQ ID NO: 81981 - protein, 20 aa, Artificial Sequence
  Description of Artificial Sequence: Synthetic peptide
  Seed: GMDPRMCSLMQGSTLPRRSG
GMDPRMWSLLQASTMPRRSG

SEQ ID NO: 81982 - protein, 20 aa, Artificial Sequence
  Description of Artificial Sequence: Synthetic peptide
  Seed: GMDPRMCSLMQGSTLPRRSG
GMDPRMWSLLQASTNPRRSG

SEQ ID NO: 81983 - protein, 20 aa, Artificial Sequence
  Description of Artificial Sequence: Synthetic peptide
  Seed: GMDPRMCSLMQGSTLPRRSG
GMDPRMWSLLQASTQPRRSG

SEQ ID NO: 81984 - protein, 20 aa, Artificial Sequence
  Description of Artificial Sequence: Synthetic peptide
  Seed: GMDPRMCSLMQGSTLPRRSG
GMDPRMWSLLQASTSPRRSG

SEQ ID NO: 81985 - protein, 20 aa, Artificial Sequence
  Description of Artificial Sequence: Synthetic peptide
  Seed: GMDPRMCSLMQGSTLPRRSG
GMDPRMWSLLQASTTPRRSG

SEQ ID NO: 81986 - protein, 20 aa, Artificial Sequence
  Description of Artificial Sequence: Synthetic peptide
  Seed: GMDPRMCSLMQGSTLPRRSG
GMDPRMWSLLQASTVPRRSG

SEQ ID NO: 81987 - protein, 20 aa, Artificial Sequence
  Description of Artificial Sequence: Synthetic peptide
  Seed: GMDPRMCSLMQGSTLPRRSG
GMDPRMWSLLQGSTAPRRSG

SEQ ID NO: 81988 - protein, 20 aa, Artificial Sequence
  Description of Artificial Sequence: Synthetic peptide
  Seed: GMDPRMCSLMQGSTLPRRSG
GMDPRMWSLLQGSTCPRRSG

SEQ ID NO: 81989 - protein, 20 aa, Artificial Sequence
  Description of Artificial Sequence: Synthetic peptide
  Seed: GMDPRMCSLMQGSTLPRRSG
GMDPRMWSLLQGSTGPRRSG

SEQ ID NO: 81990 - protein, 20 aa, Artificial Sequence
  Description of Artificial Sequence: Synthetic peptide
  Seed: GMDPRMCSLMQGSTLPRRSG
GMDPRMWSLLQGSTIPRRSG

SEQ ID NO: 81991 - protein, 20 aa, Artificial Sequence
  Description of Artificial Sequence: Synthetic peptide
  Seed: GMDPRMCSLMQGSTLPRRSG
GMDPRMWSLLQGSTLPRRSG

SEQ ID NO: 81992 - protein, 20 aa, Artificial Sequence
  Description of Artificial Sequence: Synthetic peptide
  Seed: GMDPRMCSLMQGSTLPRRSG
GMDPRMWSLLQGSTMPRRSG

SEQ ID NO: 81993 - protein, 20 aa, Artificial Sequence
  Description of Artificial Sequence: Synthetic peptide
  Seed: GMDPRMCSLMQGSTLPRRSG
GMDPRMWSLLQGSTNPRRSG

SEQ ID NO: 81994 - protein, 20 aa, Artificial Sequence
  Description of Artificial Sequence: Synthetic peptide
  Seed: GMDPRMCSLMQGSTLPRRSG
GMDPRMWSLLQGSTSPRRSG

SEQ ID NO: 81995 - protein, 20 aa, Artificial Sequence
  Description of Artificial Sequence: Synthetic peptide
  Seed: GMDPRMCSLMQGSTLPRRSG
GMDPRMWSLLQGSTTPRRSG

SEQ ID NO: 81996 - protein, 20 aa, Artificial Sequence
  Description of Artificial Sequence: Synthetic peptide
  Seed: GMDPRMCSLMQGSTLPRRSG
GMDPRMWSLLQGSTVPRRSG

SEQ ID NO: 81997 - protein, 20 aa, Artificial Sequence
  Description of Artificial Sequence: Synthetic peptide
  Seed: GMDPRMCSLMQGSTLPRRSG
GMDPRMWSLLQISTAPRRSG

SEQ ID NO: 81998 - protein, 20 aa, Artificial Sequence
  Description of Artificial Sequence: Synthetic peptide
  Seed: GMDPRMCSLMQGSTLPRRSG
GMDPRMWSLLQISTNPRRSG

SEQ ID NO: 81999 - protein, 20 aa, Artificial Sequence
  Description of Artificial Sequence: Synthetic peptide
  Seed: GMDPRMCSLMQGSTLPRRSG
GMDPRMWSLLQISTSPRRSG

SEQ ID NO: 82000 - protein, 20 aa, Artificial Sequence
  Description of Artificial Sequence: Synthetic peptide
  Seed: GMDPRMCSLMQGSTLPRRSG
GMDPRMWSLLQISTTPRRSG

SEQ ID NO: 82001 - protein, 20 aa, Artificial Sequence
  Description of Artificial Sequence: Synthetic peptide
  Seed: GMDPRMCSLMQGSTLPRRSG
GMDPRMWSLLQISTVPRRSG

SEQ ID NO: 82002 - protein, 20 aa, Artificial Sequence
  Description of Artificial Sequence: Synthetic peptide
  Seed: GMDPRMCSLMQGSTLPRRSG
GMDPRMWSLLQLSTAPRRSG

SEQ ID NO: 82003 - protein, 20 aa, Artificial Sequence
  Description of Artificial Sequence: Synthetic peptide
  Seed: GMDPRMCSLMQGSTLPRRSG
GMDPRMWSLLQMSTAPRRSG

SEQ ID NO: 82004 - protein, 20 aa, Artificial Sequence
  Description of Artificial Sequence: Synthetic peptide
  Seed: GMDPRMCSLMQGSTLPRRSG
GMDPRMWSLLQNSTAPRRSG

SEQ ID NO: 82005 - protein, 20 aa, Artificial Sequence
  Description of Artificial Sequence: Synthetic peptide
  Seed: GMDPRMCSLMQGSTLPRRSG
GMDPRMWSLLQNSTIPRRSG

SEQ ID NO: 82006 - protein, 20 aa, Artificial Sequence
  Description of Artificial Sequence: Synthetic peptide
  Seed: GMDPRMCSLMQGSTLPRRSG
GMDPRMWSLLQNSTLPRRSG

SEQ ID NO: 82007 - protein, 20 aa, Artificial Sequence
  Description of Artificial Sequence: Synthetic peptide
  Seed: GMDPRMCSLMQGSTLPRRSG
GMDPRMWSLLQNSTMPRRSG

SEQ ID NO: 82008 - protein, 20 aa, Artificial Sequence
  Description of Artificial Sequence: Synthetic peptide
  Seed: GMDPRMCSLMQGSTLPRRSG
GMDPRMWSLLQNSTNPRRSG

SEQ ID NO: 82009 - protein, 20 aa, Artificial Sequence
  Description of Artificial Sequence: Synthetic peptide
  Seed: GMDPRMCSLMQGSTLPRRSG
GMDPRMWSLLQNSTSPRRSG

SEQ ID NO: 82010 - protein, 20 aa, Artificial Sequence
  Description of Artificial Sequence: Synthetic peptide
  Seed: GMDPRMCSLMQGSTLPRRSG
GMDPRMWSLLQNSTTPRRSG

SEQ ID NO: 82011 - protein, 20 aa, Artificial Sequence
  Description of Artificial Sequence: Synthetic peptide
  Seed: GMDPRMCSLMQGSTLPRRSG
GMDPRMWSLLQNSTVPRRSG

SEQ ID NO: 82012 - protein, 20 aa, Artificial Sequence
  Description of Artificial Sequence: Synthetic peptide
  Seed: GMDPRMCSLMQGSTLPRRSG
GMDPRMWSLLQPSTAPRRSG

SEQ ID NO: 82013 - protein, 20 aa, Artificial Sequence
  Description of Artificial Sequence: Synthetic peptide
  Seed: GMDPRMCSLMQGSTLPRRSG
GMDPRMWSLLQPSTGPRRSG

SEQ ID NO: 82014 - protein, 20 aa, Artificial Sequence
  Description of Artificial Sequence: Synthetic peptide
  Seed: GMDPRMCSLMQGSTLPRRSG
GMDPRMWSLLQPSTIPRRSG

SEQ ID NO: 82015 - protein, 20 aa, Artificial Sequence
  Description of Artificial Sequence: Synthetic peptide
  Seed: GMDPRMCSLMQGSTLPRRSG
GMDPRMWSLLQPSTLPRRSG

SEQ ID NO: 82016 - protein, 20 aa, Artificial Sequence
  Description of Artificial Sequence: Synthetic peptide
  Seed: GMDPRMCSLMQGSTLPRRSG
GMDPRMWSLLQPSTMPRRSG

SEQ ID NO: 82017 - protein, 20 aa, Artificial Sequence
  Description of Artificial Sequence: Synthetic peptide
  Seed: GMDPRMCSLMQGSTLPRRSG
GMDPRMWSLLQPSTNPRRSG

SEQ ID NO: 82018 - protein, 20 aa, Artificial Sequence
  Description of Artificial Sequence: Synthetic peptide
  Seed: GMDPRMCSLMQGSTLPRRSG
GMDPRMWSLLQPSTQPRRSG

SEQ ID NO: 82019 - protein, 20 aa, Artificial Sequence
  Description of Artificial Sequence: Synthetic peptide
  Seed: GMDPRMCSLMQGSTLPRRSG
GMDPRMWSLLQPSTSPRRSG

SEQ ID NO: 82020 - protein, 20 aa, Artificial Sequence
  Description of Artificial Sequence: Synthetic peptide
  Seed: GMDPRMCSLMQGSTLPRRSG
GMDPRMWSLLQPSTTPRRSG

SEQ ID NO: 82021 - protein, 20 aa, Artificial Sequence
  Description of Artificial Sequence: Synthetic peptide
  Seed: GMDPRMCSLMQGSTLPRRSG
GMDPRMWSLLQPSTVPRRSG

SEQ ID NO: 82022 - protein, 20 aa, Artificial Sequence
  Description of Artificial Sequence: Synthetic peptide
  Seed: GMDPRMCSLMQGSTLPRRSG
GMDPRMWSLLQSSTAPRRSG

SEQ ID NO: 82023 - protein, 20 aa, Artificial Sequence
  Description of Artificial Sequence: Synthetic peptide
  Seed: GMDPRMCSLMQGSTLPRRSG
GMDPRMWSLLQSSTGPRRSG

SEQ ID NO: 82024 - protein, 20 aa, Artificial Sequence
  Description of Artificial Sequence: Synthetic peptide
  Seed: GMDPRMCSLMQGSTLPRRSG
GMDPRMWSLLQSSTHPRRSG

SEQ ID NO: 82025 - protein, 20 aa, Artificial Sequence
  Description of Artificial Sequence: Synthetic peptide
  Seed: GMDPRMCSLMQGSTLPRRSG
GMDPRMWSLLQSSTIPRRSG

SEQ ID NO: 82026 - protein, 20 aa, Artificial Sequence
  Description of Artificial Sequence: Synthetic peptide
  Seed: GMDPRMCSLMQGSTLPRRSG
GMDPRMWSLLQSSTLPRRSG

SEQ ID NO: 82027 - protein, 20 aa, Artificial Sequence
  Description of Artificial Sequence: Synthetic peptide
  Seed: GMDPRMCSLMQGSTLPRRSG
GMDPRMWSLLQSSTMPRRSG

SEQ ID NO: 82028 - protein, 20 aa, Artificial Sequence
  Description of Artificial Sequence: Synthetic peptide
  Seed: GMDPRMCSLMQGSTLPRRSG
GMDPRMWSLLQSSTNPRRSG

SEQ ID NO: 82029 - protein, 20 aa, Artificial Sequence
  Description of Artificial Sequence: Synthetic peptide
  Seed: GMDPRMCSLMQGSTLPRRSG
GMDPRMWSLLQSSTSPRRSG

SEQ ID NO: 82030 - protein, 20 aa, Artificial Sequence
  Description of Artificial Sequence: Synthetic peptide
  Seed: GMDPRMCSLMQGSTLPRRSG
GMDPRMWSLLQSSTTPRRSG

SEQ ID NO: 82031 - protein, 20 aa, Artificial Sequence
  Description of Artificial Sequence: Synthetic peptide
  Seed: GMDPRMCSLMQGSTLPRRSG
GMDPRMWSLLQSSTVPRRSG

SEQ ID NO: 82032 - protein, 20 aa, Artificial Sequence
  Description of Artificial Sequence: Synthetic peptide
  Seed: GMDPRMCSLMQGSTLPRRSG
GMDPRMWSLLQTSTAPRRSG

SEQ ID NO: 82033 - protein, 20 aa, Artificial Sequence
  Description of Artificial Sequence: Synthetic peptide
  Seed: GMDPRMCSLMQGSTLPRRSG
GMDPRMWSLLQTSTGPRRSG

SEQ ID NO: 82034 - protein, 20 aa, Artificial Sequence
  Description of Artificial Sequence: Synthetic peptide
  Seed: GMDPRMCSLMQGSTLPRRSG
GMDPRMWSLLQTSTHPRRSG

SEQ ID NO: 82035 - protein, 20 aa, Artificial Sequence
  Description of Artificial Sequence: Synthetic peptide
  Seed: GMDPRMCSLMQGSTLPRRSG
GMDPRMWSLLQTSTIPRRSG

SEQ ID NO: 82036 - protein, 20 aa, Artificial Sequence
  Description of Artificial Sequence: Synthetic peptide
  Seed: GMDPRMCSLMQGSTLPRRSG
GMDPRMWSLLQTSTLPRRSG

SEQ ID NO: 82037 - protein, 20 aa, Artificial Sequence
  Description of Artificial Sequence: Synthetic peptide
  Seed: GMDPRMCSLMQGSTLPRRSG
GMDPRMWSLLQTSTMPRRSG

SEQ ID NO: 82038 - protein, 20 aa, Artificial Sequence
  Description of Artificial Sequence: Synthetic peptide
  Seed: GMDPRMCSLMQGSTLPRRSG
GMDPRMWSLLQTSTNPRRSG

SEQ ID NO: 82039 - protein, 20 aa, Artificial Sequence
  Description of Artificial Sequence: Synthetic peptide
  Seed: GMDPRMCSLMQGSTLPRRSG
GMDPRMWSLLQTSTSPRRSG

SEQ ID NO: 82040 - protein, 20 aa, Artificial Sequence
  Description of Artificial Sequence: Synthetic peptide
  Seed: GMDPRMCSLMQGSTLPRRSG
GMDPRMWSLLQTSTTPRRSG

SEQ ID NO: 82041 - protein, 20 aa, Artificial Sequence
  Description of Artificial Sequence: Synthetic peptide
  Seed: GMDPRMCSLMQGSTLPRRSG
GMDPRMWSLLQTSTVPRRSG

SEQ ID NO: 82042 - protein, 20 aa, Artificial Sequence
  Description of Artificial Sequence: Synthetic peptide
  Seed: GMDPRMCSLMQGSTLPRRSG
GMDPRMWSLLQVSTAPRRSG

SEQ ID NO: 82043 - protein, 20 aa, Artificial Sequence
  Description of Artificial Sequence: Synthetic peptide
  Seed: GMDPRMCSLMQGSTLPRRSG
GMDPRMWSLLQVSTGPRRSG

SEQ ID NO: 82044 - protein, 20 aa, Artificial Sequence
  Description of Artificial Sequence: Synthetic peptide
  Seed: GMDPRMCSLMQGSTLPRRSG
GMDPRMWSLLQVSTHPRRSG

SEQ ID NO: 82045 - protein, 20 aa, Artificial Sequence
  Description of Artificial Sequence: Synthetic peptide
  Seed: GMDPRMCSLMQGSTLPRRSG
GMDPRMWSLLQVSTIPRRSG

SEQ ID NO: 82046 - protein, 20 aa, Artificial Sequence
  Description of Artificial Sequence: Synthetic peptide
  Seed: GMDPRMCSLMQGSTLPRRSG
GMDPRMWSLLQVSTLPRRSG

SEQ ID NO: 82047 - protein, 20 aa, Artificial Sequence
  Description of Artificial Sequence: Synthetic peptide
  Seed: GMDPRMCSLMQGSTLPRRSG
GMDPRMWSLLQVSTMPRRSG

SEQ ID NO: 82048 - protein, 20 aa, Artificial Sequence
  Description of Artificial Sequence: Synthetic peptide
  Seed: GMDPRMCSLMQGSTLPRRSG
GMDPRMWSLLQVSTNPRRSG

SEQ ID NO: 82049 - protein, 20 aa, Artificial Sequence
  Description of Artificial Sequence: Synthetic peptide
  Seed: GMDPRMCSLMQGSTLPRRSG
GMDPRMWSLLQVSTSPRRSG

SEQ ID NO: 82050 - protein, 20 aa, Artificial Sequence
  Description of Artificial Sequence: Synthetic peptide
  Seed: GMDPRMCSLMQGSTLPRRSG
GMDPRMWSLLQVSTTPRRSG

SEQ ID NO: 82051 - protein, 20 aa, Artificial Sequence
  Description of Artificial Sequence: Synthetic peptide
  Seed: GMDPRMCSLMQGSTLPRRSG
GMDPRMWSLLQVSTVPRRSG

SEQ ID NO: 82052 - protein, 20 aa, Artificial Sequence
  Description of Artificial Sequence: Synthetic peptide
  Seed: GMDPRMCSLMQGSTLPRRSG
GMDPRMWSLMQASTAPRRSG

SEQ ID NO: 82053 - protein, 20 aa, Artificial Sequence
  Description of Artificial Sequence: Synthetic peptide
  Seed: GMDPRMCSLMQGSTLPRRSG
GMDPRMWSLMQASTCPRRSG

SEQ ID NO: 82054 - protein, 20 aa, Artificial Sequence
  Description of Artificial Sequence: Synthetic peptide
  Seed: GMDPRMCSLMQGSTLPRRSG
GMDPRMWSLMQASTDPRRSG

SEQ ID NO: 82055 - protein, 20 aa, Artificial Sequence
  Description of Artificial Sequence: Synthetic peptide
  Seed: GMDPRMCSLMQGSTLPRRSG
GMDPRMWSLMQASTEPRRSG

SEQ ID NO: 82056 - protein, 20 aa, Artificial Sequence
  Description of Artificial Sequence: Synthetic peptide
  Seed: GMDPRMCSLMQGSTLPRRSG
GMDPRMWSLMQASTFPRRSG

SEQ ID NO: 82057 - protein, 20 aa, Artificial Sequence
  Description of Artificial Sequence: Synthetic peptide
  Seed: GMDPRMCSLMQGSTLPRRSG
GMDPRMWSLMQASTGPRRSG

SEQ ID NO: 82058 - protein, 20 aa, Artificial Sequence
  Description of Artificial Sequence: Synthetic peptide
  Seed: GMDPRMCSLMQGSTLPRRSG
GMDPRMWSLMQASTHPRRSG

SEQ ID NO: 82059 - protein, 20 aa, Artificial Sequence
  Description of Artificial Sequence: Synthetic peptide
  Seed: GMDPRMCSLMQGSTLPRRSG
GMDPRMWSLMQASTIPRRSG

SEQ ID NO: 82060 - protein, 20 aa, Artificial Sequence
  Description of Artificial Sequence: Synthetic peptide
  Seed: GMDPRMCSLMQGSTLPRRSG
GMDPRMWSLMQASTLPRRSG

SEQ ID NO: 82061 - protein, 20 aa, Artificial Sequence
  Description of Artificial Sequence: Synthetic peptide
  Seed: GMDPRMCSLMQGSTLPRRSG
GMDPRMWSLMQASTMPRRSG

SEQ ID NO: 82062 - protein, 20 aa, Artificial Sequence
  Description of Artificial Sequence: Synthetic peptide
  Seed: GMDPRMCSLMQGSTLPRRSG
GMDPRMWSLMQASTNPRRSG

SEQ ID NO: 82063 - protein, 20 aa, Artificial Sequence
  Description of Artificial Sequence: Synthetic peptide
  Seed: GMDPRMCSLMQGSTLPRRSG
GMDPRMWSLMQASTPPRRSG

SEQ ID NO: 82064 - protein, 20 aa, Artificial Sequence
  Description of Artificial Sequence: Synthetic peptide
  Seed: GMDPRMCSLMQGSTLPRRSG
GMDPRMWSLMQASTQPRRSG

SEQ ID NO: 82065 - protein, 20 aa, Artificial Sequence
  Description of Artificial Sequence: Synthetic peptide
  Seed: GMDPRMCSLMQGSTLPRRSG
GMDPRMWSLMQASTSPRRSG

SEQ ID NO: 82066 - protein, 20 aa, Artificial Sequence
  Description of Artificial Sequence: Synthetic peptide
  Seed: GMDPRMCSLMQGSTLPRRSG
GMDPRMWSLMQASTTPRRSG

SEQ ID NO: 82067 - protein, 20 aa, Artificial Sequence
  Description of Artificial Sequence: Synthetic peptide
  Seed: GMDPRMCSLMQGSTLPRRSG
GMDPRMWSLMQASTVPRRSG

SEQ ID NO: 82068 - protein, 20 aa, Artificial Sequence
  Description of Artificial Sequence: Synthetic peptide
  Seed: GMDPRMCSLMQGSTLPRRSG
GMDPRMWSLMQGSTAPRRSG

SEQ ID NO: 82069 - protein, 20 aa, Artificial Sequence
  Description of Artificial Sequence: Synthetic peptide
  Seed: GMDPRMCSLMQGSTLPRRSG
GMDPRMWSLMQGSTCPRRSG

SEQ ID NO: 82070 - protein, 20 aa, Artificial Sequence
  Description of Artificial Sequence: Synthetic peptide
  Seed: GMDPRMCSLMQGSTLPRRSG
GMDPRMWSLMQGSTFPRRSG

SEQ ID NO: 82071 - protein, 20 aa, Artificial Sequence
  Description of Artificial Sequence: Synthetic peptide
  Seed: GMDPRMCSLMQGSTLPRRSG
GMDPRMWSLMQGSTGPRRSG

SEQ ID NO: 82072 - protein, 20 aa, Artificial Sequence
  Description of Artificial Sequence: Synthetic peptide
  Seed: GMDPRMCSLMQGSTLPRRSG
GMDPRMWSLMQGSTIPRRSG

SEQ ID NO: 82073 - protein, 20 aa, Artificial Sequence
  Description of Artificial Sequence: Synthetic peptide
  Seed: GMDPRMCSLMQGSTLPRRSG
GMDPRMWSLMQGSTLPRRSG

SEQ ID NO: 82074 - protein, 20 aa, Artificial Sequence
  Description of Artificial Sequence: Synthetic peptide
  Seed: GMDPRMCSLMQGSTLPRRSG
GMDPRMWSLMQGSTMPRRSG

SEQ ID NO: 82075 - protein, 20 aa, Artificial Sequence
  Description of Artificial Sequence: Synthetic peptide
  Seed: GMDPRMCSLMQGSTLPRRSG
GMDPRMWSLMQGSTNPRRSG

SEQ ID NO: 82076 - protein, 20 aa, Artificial Sequence
  Description of Artificial Sequence: Synthetic peptide
  Seed: GMDPRMCSLMQGSTLPRRSG
GMDPRMWSLMQGSTSPRRSG

SEQ ID NO: 82077 - protein, 20 aa, Artificial Sequence
  Description of Artificial Sequence: Synthetic peptide
  Seed: GMDPRMCSLMQGSTLPRRSG
GMDPRMWSLMQGSTTPRRSG

SEQ ID NO: 82078 - protein, 20 aa, Artificial Sequence
  Description of Artificial Sequence: Synthetic peptide
  Seed: GMDPRMCSLMQGSTLPRRSG
GMDPRMWSLMQGSTVPRRSG

SEQ ID NO: 82079 - protein, 20 aa, Artificial Sequence
  Description of Artificial Sequence: Synthetic peptide
  Seed: GMDPRMCSLMQGSTLPRRSG
GMDPRMWSLMQISTAPRRSG

SEQ ID NO: 82080 - protein, 20 aa, Artificial Sequence
  Description of Artificial Sequence: Synthetic peptide
  Seed: GMDPRMCSLMQGSTLPRRSG
GMDPRMWSLMQISTGPRRSG

SEQ ID NO: 82081 - protein, 20 aa, Artificial Sequence
  Description of Artificial Sequence: Synthetic peptide
  Seed: GMDPRMCSLMQGSTLPRRSG
GMDPRMWSLMQISTHPRRSG

SEQ ID NO: 82082 - protein, 20 aa, Artificial Sequence
  Description of Artificial Sequence: Synthetic peptide
  Seed: GMDPRMCSLMQGSTLPRRSG
GMDPRMWSLMQISTIPRRSG

SEQ ID NO: 82083 - protein, 20 aa, Artificial Sequence
  Description of Artificial Sequence: Synthetic peptide
  Seed: GMDPRMCSLMQGSTLPRRSG
GMDPRMWSLMQISTLPRRSG

SEQ ID NO: 82084 - protein, 20 aa, Artificial Sequence
  Description of Artificial Sequence: Synthetic peptide
  Seed: GMDPRMCSLMQGSTLPRRSG
GMDPRMWSLMQISTMPRRSG

SEQ ID NO: 82085 - protein, 20 aa, Artificial Sequence
  Description of Artificial Sequence: Synthetic peptide
  Seed: GMDPRMCSLMQGSTLPRRSG
GMDPRMWSLMQISTNPRRSG

SEQ ID NO: 82086 - protein, 20 aa, Artificial Sequence
  Description of Artificial Sequence: Synthetic peptide
  Seed: GMDPRMCSLMQGSTLPRRSG
GMDPRMWSLMQISTSPRRSG

SEQ ID NO: 82087 - protein, 20 aa, Artificial Sequence
  Description of Artificial Sequence: Synthetic peptide
  Seed: GMDPRMCSLMQGSTLPRRSG
GMDPRMWSLMQISTTPRRSG

SEQ ID NO: 82088 - protein, 20 aa, Artificial Sequence
  Description of Artificial Sequence: Synthetic peptide
  Seed: GMDPRMCSLMQGSTLPRRSG
GMDPRMWSLMQISTVPRRSG

SEQ ID NO: 82089 - protein, 20 aa, Artificial Sequence
  Description of Artificial Sequence: Synthetic peptide
  Seed: GMDPRMCSLMQGSTLPRRSG
GMDPRMWSLMQLSTAPRRSG

SEQ ID NO: 82090 - protein, 20 aa, Artificial Sequence
  Description of Artificial Sequence: Synthetic peptide
  Seed: GMDPRMCSLMQGSTLPRRSG
GMDPRMWSLMQLSTNPRRSG

SEQ ID NO: 82091 - protein, 20 aa, Artificial Sequence
  Description of Artificial Sequence: Synthetic peptide
  Seed: GMDPRMCSLMQGSTLPRRSG
GMDPRMWSLMQLSTSPRRSG

SEQ ID NO: 82092 - protein, 20 aa, Artificial Sequence
  Description of Artificial Sequence: Synthetic peptide
  Seed: GMDPRMCSLMQGSTLPRRSG
GMDPRMWSLMQMSTAPRRSG

SEQ ID NO: 82093 - protein, 20 aa, Artificial Sequence
  Description of Artificial Sequence: Synthetic peptide
  Seed: GMDPRMCSLMQGSTLPRRSG
GMDPRMWSLMQMSTNPRRSG

SEQ ID NO: 82094 - protein, 20 aa, Artificial Sequence
  Description of Artificial Sequence: Synthetic peptide
  Seed: GMDPRMCSLMQGSTLPRRSG
GMDPRMWSLMQMSTSPRRSG

SEQ ID NO: 82095 - protein, 20 aa, Artificial Sequence
  Description of Artificial Sequence: Synthetic peptide
  Seed: GMDPRMCSLMQGSTLPRRSG
GMDPRMWSLMQNSTAPRRSG

SEQ ID NO: 82096 - protein, 20 aa, Artificial Sequence
  Description of Artificial Sequence: Synthetic peptide
  Seed: GMDPRMCSLMQGSTLPRRSG
GMDPRMWSLMQNSTIPRRSG

SEQ ID NO: 82097 - protein, 20 aa, Artificial Sequence
  Description of Artificial Sequence: Synthetic peptide
  Seed: GMDPRMCSLMQGSTLPRRSG
GMDPRMWSLMQNSTLPRRSG

SEQ ID NO: 82098 - protein, 20 aa, Artificial Sequence
  Description of Artificial Sequence: Synthetic peptide
  Seed: GMDPRMCSLMQGSTLPRRSG
GMDPRMWSLMQNSTMPRRSG

SEQ ID NO: 82099 - protein, 20 aa, Artificial Sequence
  Description of Artificial Sequence: Synthetic peptide
  Seed: GMDPRMCSLMQGSTLPRRSG
GMDPRMWSLMQNSTNPRRSG

SEQ ID NO: 82100 - protein, 20 aa, Artificial Sequence
  Description of Artificial Sequence: Synthetic peptide
  Seed: GMDPRMCSLMQGSTLPRRSG
GMDPRMWSLMQNSTSPRRSG

SEQ ID NO: 82101 - protein, 20 aa, Artificial Sequence
  Description of Artificial Sequence: Synthetic peptide
  Seed: GMDPRMCSLMQGSTLPRRSG
GMDPRMWSLMQNSTTPRRSG

SEQ ID NO: 82102 - protein, 20 aa, Artificial Sequence
  Description of Artificial Sequence: Synthetic peptide
  Seed: GMDPRMCSLMQGSTLPRRSG
GMDPRMWSLMQNSTVPRRSG

SEQ ID NO: 82103 - protein, 20 aa, Artificial Sequence
  Description of Artificial Sequence: Synthetic peptide
  Seed: GMDPRMCSLMQGSTLPRRSG
GMDPRMWSLMQPSTAPRRSG

SEQ ID NO: 82104 - protein, 20 aa, Artificial Sequence
  Description of Artificial Sequence: Synthetic peptide
  Seed: GMDPRMCSLMQGSTLPRRSG
GMDPRMWSLMQPSTGPRRSG

SEQ ID NO: 82105 - protein, 20 aa, Artificial Sequence
  Description of Artificial Sequence: Synthetic peptide
  Seed: GMDPRMCSLMQGSTLPRRSG
GMDPRMWSLMQPSTHPRRSG

SEQ ID NO: 82106 - protein, 20 aa, Artificial Sequence
  Description of Artificial Sequence: Synthetic peptide
  Seed: GMDPRMCSLMQGSTLPRRSG
GMDPRMWSLMQPSTIPRRSG

SEQ ID NO: 82107 - protein, 20 aa, Artificial Sequence
  Description of Artificial Sequence: Synthetic peptide
  Seed: GMDPRMCSLMQGSTLPRRSG
GMDPRMWSLMQPSTLPRRSG

SEQ ID NO: 82108 - protein, 20 aa, Artificial Sequence
  Description of Artificial Sequence: Synthetic peptide
  Seed: GMDPRMCSLMQGSTLPRRSG
GMDPRMWSLMQPSTMPRRSG

SEQ ID NO: 82109 - protein, 20 aa, Artificial Sequence
  Description of Artificial Sequence: Synthetic peptide
  Seed: GMDPRMCSLMQGSTLPRRSG
GMDPRMWSLMQPSTNPRRSG

SEQ ID NO: 82110 - protein, 20 aa, Artificial Sequence
  Description of Artificial Sequence: Synthetic peptide
  Seed: GMDPRMCSLMQGSTLPRRSG
GMDPRMWSLMQPSTQPRRSG

SEQ ID NO: 82111 - protein, 20 aa, Artificial Sequence
  Description of Artificial Sequence: Synthetic peptide
  Seed: GMDPRMCSLMQGSTLPRRSG
GMDPRMWSLMQPSTSPRRSG

SEQ ID NO: 82112 - protein, 20 aa, Artificial Sequence
  Description of Artificial Sequence: Synthetic peptide
  Seed: GMDPRMCSLMQGSTLPRRSG
GMDPRMWSLMQPSTTPRRSG

SEQ ID NO: 82113 - protein, 20 aa, Artificial Sequence
  Description of Artificial Sequence: Synthetic peptide
  Seed: GMDPRMCSLMQGSTLPRRSG
GMDPRMWSLMQPSTVPRRSG

SEQ ID NO: 82114 - protein, 20 aa, Artificial Sequence
  Description of Artificial Sequence: Synthetic peptide
  Seed: GMDPRMCSLMQGSTLPRRSG
GMDPRMWSLMQSSTAPRRSG

SEQ ID NO: 82115 - protein, 20 aa, Artificial Sequence
  Description of Artificial Sequence: Synthetic peptide
  Seed: GMDPRMCSLMQGSTLPRRSG
GMDPRMWSLMQSSTGPRRSG

SEQ ID NO: 82116 - protein, 20 aa, Artificial Sequence
  Description of Artificial Sequence: Synthetic peptide
  Seed: GMDPRMCSLMQGSTLPRRSG
GMDPRMWSLMQSSTHPRRSG

SEQ ID NO: 82117 - protein, 20 aa, Artificial Sequence
  Description of Artificial Sequence: Synthetic peptide
  Seed: GMDPRMCSLMQGSTLPRRSG
GMDPRMWSLMQSSTIPRRSG

SEQ ID NO: 82118 - protein, 20 aa, Artificial Sequence
  Description of Artificial Sequence: Synthetic peptide
  Seed: GMDPRMCSLMQGSTLPRRSG
GMDPRMWSLMQSSTLPRRSG

SEQ ID NO: 82119 - protein, 20 aa, Artificial Sequence
  Description of Artificial Sequence: Synthetic peptide
  Seed: GMDPRMCSLMQGSTLPRRSG
GMDPRMWSLMQSSTMPRRSG

SEQ ID NO: 82120 - protein, 20 aa, Artificial Sequence
  Description of Artificial Sequence: Synthetic peptide
  Seed: GMDPRMCSLMQGSTLPRRSG
GMDPRMWSLMQSSTNPRRSG

SEQ ID NO: 82121 - protein, 20 aa, Artificial Sequence
  Description of Artificial Sequence: Synthetic peptide
  Seed: GMDPRMCSLMQGSTLPRRSG
GMDPRMWSLMQSSTQPRRSG

SEQ ID NO: 82122 - protein, 20 aa, Artificial Sequence
  Description of Artificial Sequence: Synthetic peptide
  Seed: GMDPRMCSLMQGSTLPRRSG
GMDPRMWSLMQSSTSPRRSG

SEQ ID NO: 82123 - protein, 20 aa, Artificial Sequence
  Description of Artificial Sequence: Synthetic peptide
  Seed: GMDPRMCSLMQGSTLPRRSG
GMDPRMWSLMQSSTTPRRSG

SEQ ID NO: 82124 - protein, 20 aa, Artificial Sequence
  Description of Artificial Sequence: Synthetic peptide
  Seed: GMDPRMCSLMQGSTLPRRSG
GMDPRMWSLMQSSTVPRRSG

SEQ ID NO: 82125 - protein, 20 aa, Artificial Sequence
  Description of Artificial Sequence: Synthetic peptide
  Seed: GMDPRMCSLMQGSTLPRRSG
GMDPRMWSLMQTSTAPRRSG

SEQ ID NO: 82126 - protein, 20 aa, Artificial Sequence
  Description of Artificial Sequence: Synthetic peptide
  Seed: GMDPRMCSLMQGSTLPRRSG
GMDPRMWSLMQTSTGPRRSG

SEQ ID NO: 82127 - protein, 20 aa, Artificial Sequence
  Description of Artificial Sequence: Synthetic peptide
  Seed: GMDPRMCSLMQGSTLPRRSG
GMDPRMWSLMQTSTHPRRSG

SEQ ID NO: 82128 - protein, 20 aa, Artificial Sequence
  Description of Artificial Sequence: Synthetic peptide
  Seed: GMDPRMCSLMQGSTLPRRSG
GMDPRMWSLMQTSTIPRRSG

SEQ ID NO: 82129 - protein, 20 aa, Artificial Sequence
  Description of Artificial Sequence: Synthetic peptide
  Seed: GMDPRMCSLMQGSTLPRRSG
GMDPRMWSLMQTSTLPRRSG

SEQ ID NO: 82130 - protein, 20 aa, Artificial Sequence
  Description of Artificial Sequence: Synthetic peptide
  Seed: GMDPRMCSLMQGSTLPRRSG
GMDPRMWSLMQTSTMPRRSG

SEQ ID NO: 82131 - protein, 20 aa, Artificial Sequence
  Description of Artificial Sequence: Synthetic peptide
  Seed: GMDPRMCSLMQGSTLPRRSG
GMDPRMWSLMQTSTNPRRSG

SEQ ID NO: 82132 - protein, 20 aa, Artificial Sequence
  Description of Artificial Sequence: Synthetic peptide
  Seed: GMDPRMCSLMQGSTLPRRSG
GMDPRMWSLMQTSTQPRRSG

SEQ ID NO: 82133 - protein, 20 aa, Artificial Sequence
  Description of Artificial Sequence: Synthetic peptide
  Seed: GMDPRMCSLMQGSTLPRRSG
GMDPRMWSLMQTSTSPRRSG

SEQ ID NO: 82134 - protein, 20 aa, Artificial Sequence
  Description of Artificial Sequence: Synthetic peptide
  Seed: GMDPRMCSLMQGSTLPRRSG
GMDPRMWSLMQTSTTPRRSG

SEQ ID NO: 82135 - protein, 20 aa, Artificial Sequence
  Description of Artificial Sequence: Synthetic peptide
  Seed: GMDPRMCSLMQGSTLPRRSG
GMDPRMWSLMQTSTVPRRSG

SEQ ID NO: 82136 - protein, 20 aa, Artificial Sequence
  Description of Artificial Sequence: Synthetic peptide
  Seed: GMDPRMCSLMQGSTLPRRSG
GMDPRMWSLMQVSTAPRRSG

SEQ ID NO: 82137 - protein, 20 aa, Artificial Sequence
  Description of Artificial Sequence: Synthetic peptide
  Seed: GMDPRMCSLMQGSTLPRRSG
GMDPRMWSLMQVSTGPRRSG

SEQ ID NO: 82138 - protein, 20 aa, Artificial Sequence
  Description of Artificial Sequence: Synthetic peptide
  Seed: GMDPRMCSLMQGSTLPRRSG
GMDPRMWSLMQVSTHPRRSG

SEQ ID NO: 82139 - protein, 20 aa, Artificial Sequence
  Description of Artificial Sequence: Synthetic peptide
  Seed: GMDPRMCSLMQGSTLPRRSG
GMDPRMWSLMQVSTIPRRSG

SEQ ID NO: 82140 - protein, 20 aa, Artificial Sequence
  Description of Artificial Sequence: Synthetic peptide
  Seed: GMDPRMCSLMQGSTLPRRSG
GMDPRMWSLMQVSTLPRRSG

SEQ ID NO: 82141 - protein, 20 aa, Artificial Sequence
  Description of Artificial Sequence: Synthetic peptide
  Seed: GMDPRMCSLMQGSTLPRRSG
GMDPRMWSLMQVSTMPRRSG

SEQ ID NO: 82142 - protein, 20 aa, Artificial Sequence
  Description of Artificial Sequence: Synthetic peptide
  Seed: GMDPRMCSLMQGSTLPRRSG
GMDPRMWSLMQVSTNPRRSG

SEQ ID NO: 82143 - protein, 20 aa, Artificial Sequence
  Description of Artificial Sequence: Synthetic peptide
  Seed: GMDPRMCSLMQGSTLPRRSG
GMDPRMWSLMQVSTQPRRSG

SEQ ID NO: 82144 - protein, 20 aa, Artificial Sequence
  Description of Artificial Sequence: Synthetic peptide
  Seed: GMDPRMCSLMQGSTLPRRSG
GMDPRMWSLMQVSTSPRRSG

SEQ ID NO: 82145 - protein, 20 aa, Artificial Sequence
  Description of Artificial Sequence: Synthetic peptide
  Seed: GMDPRMCSLMQGSTLPRRSG
GMDPRMWSLMQVSTTPRRSG

SEQ ID NO: 82146 - protein, 20 aa, Artificial Sequence
  Description of Artificial Sequence: Synthetic peptide
  Seed: GMDPRMCSLMQGSTLPRRSG
GMDPRMWSLMQVSTVPRRSG

SEQ ID NO: 82147 - protein, 20 aa, Artificial Sequence
  Description of Artificial Sequence: Synthetic peptide
  Seed: GMDPRMCSLMQGSTLPRRSG
GMDPRMWSLNQASTLPRRSG

SEQ ID NO: 82148 - protein, 20 aa, Artificial Sequence
  Description of Artificial Sequence: Synthetic peptide
  Seed: GMDPRMCSLMQGSTLPRRSG
GMDPRMWSLNQASTVPRRSG

SEQ ID NO: 82149 - protein, 20 aa, Artificial Sequence
  Description of Artificial Sequence: Synthetic peptide
  Seed: GMDPRMCSLMQGSTLPRRSG
GMDPRMWSLQQASTAPRRSG

SEQ ID NO: 82150 - protein, 20 aa, Artificial Sequence
  Description of Artificial Sequence: Synthetic peptide
  Seed: GMDPRMCSLMQGSTLPRRSG
GMDPRMWSLQQASTIPRRSG

SEQ ID NO: 82151 - protein, 20 aa, Artificial Sequence
  Description of Artificial Sequence: Synthetic peptide
  Seed: GMDPRMCSLMQGSTLPRRSG
GMDPRMWSLQQASTLPRRSG

SEQ ID NO: 82152 - protein, 20 aa, Artificial Sequence
  Description of Artificial Sequence: Synthetic peptide
  Seed: GMDPRMCSLMQGSTLPRRSG
GMDPRMWSLQQASTMPRRSG

SEQ ID NO: 82153 - protein, 20 aa, Artificial Sequence
  Description of Artificial Sequence: Synthetic peptide
  Seed: GMDPRMCSLMQGSTLPRRSG
GMDPRMWSLQQASTSPRRSG

SEQ ID NO: 82154 - protein, 20 aa, Artificial Sequence
  Description of Artificial Sequence: Synthetic peptide
  Seed: GMDPRMCSLMQGSTLPRRSG
GMDPRMWSLQQASTTPRRSG

SEQ ID NO: 82155 - protein, 20 aa, Artificial Sequence
  Description of Artificial Sequence: Synthetic peptide
  Seed: GMDPRMCSLMQGSTLPRRSG
GMDPRMWSLQQASTVPRRSG

SEQ ID NO: 82156 - protein, 20 aa, Artificial Sequence
  Description of Artificial Sequence: Synthetic peptide
  Seed: GMDPRMCSLMQGSTLPRRSG
GMDPRMWSLQQGSTAPRRSG

SEQ ID NO: 82157 - protein, 20 aa, Artificial Sequence
  Description of Artificial Sequence: Synthetic peptide
  Seed: GMDPRMCSLMQGSTLPRRSG
GMDPRMWSLQQGSTIPRRSG

SEQ ID NO: 82158 - protein, 20 aa, Artificial Sequence
  Description of Artificial Sequence: Synthetic peptide
  Seed: GMDPRMCSLMQGSTLPRRSG
GMDPRMWSLQQGSTLPRRSG

SEQ ID NO: 82159 - protein, 20 aa, Artificial Sequence
  Description of Artificial Sequence: Synthetic peptide
  Seed: GMDPRMCSLMQGSTLPRRSG
GMDPRMWSLQQGSTVPRRSG

SEQ ID NO: 82160 - protein, 20 aa, Artificial Sequence
  Description of Artificial Sequence: Synthetic peptide
  Seed: GMDPRMCSLMQGSTLPRRSG
GMDPRMWSLQQPSTIPRRSG

SEQ ID NO: 82161 - protein, 20 aa, Artificial Sequence
  Description of Artificial Sequence: Synthetic peptide
  Seed: GMDPRMCSLMQGSTLPRRSG
GMDPRMWSLQQPSTLPRRSG

SEQ ID NO: 82162 - protein, 20 aa, Artificial Sequence
  Description of Artificial Sequence: Synthetic peptide
  Seed: GMDPRMCSLMQGSTLPRRSG
GMDPRMWSLQQPSTVPRRSG

SEQ ID NO: 82163 - protein, 20 aa, Artificial Sequence
  Description of Artificial Sequence: Synthetic peptide
  Seed: GMDPRMCSLMQGSTLPRRSG
GMDPRMWSLQQSSTAPRRSG

SEQ ID NO: 82164 - protein, 20 aa, Artificial Sequence
  Description of Artificial Sequence: Synthetic peptide
  Seed: GMDPRMCSLMQGSTLPRRSG
GMDPRMWSLQQSSTIPRRSG

SEQ ID NO: 82165 - protein, 20 aa, Artificial Sequence
  Description of Artificial Sequence: Synthetic peptide
  Seed: GMDPRMCSLMQGSTLPRRSG
GMDPRMWSLQQSSTLPRRSG

SEQ ID NO: 82166 - protein, 20 aa, Artificial Sequence
  Description of Artificial Sequence: Synthetic peptide
  Seed: GMDPRMCSLMQGSTLPRRSG
GMDPRMWSLQQSSTVPRRSG

SEQ ID NO: 82167 - protein, 20 aa, Artificial Sequence
  Description of Artificial Sequence: Synthetic peptide
  Seed: GMDPRMCSLMQGSTLPRRSG
GMDPRMWSLQQVSTAPRRSG

SEQ ID NO: 82168 - protein, 20 aa, Artificial Sequence
  Description of Artificial Sequence: Synthetic peptide
  Seed: GMDPRMCSLMQGSTLPRRSG
GMDPRMWSLSQASTAPRRSG

SEQ ID NO: 82169 - protein, 20 aa, Artificial Sequence
  Description of Artificial Sequence: Synthetic peptide
  Seed: GMDPRMCSLMQGSTLPRRSG
GMDPRMWSLSQASTIPRRSG

SEQ ID NO: 82170 - protein, 20 aa, Artificial Sequence
  Description of Artificial Sequence: Synthetic peptide
  Seed: GMDPRMCSLMQGSTLPRRSG
GMDPRMWSLSQASTLPRRSG

SEQ ID NO: 82171 - protein, 20 aa, Artificial Sequence
  Description of Artificial Sequence: Synthetic peptide
  Seed: GMDPRMCSLMQGSTLPRRSG
GMDPRMWSLSQASTVPRRSG

SEQ ID NO: 82172 - protein, 20 aa, Artificial Sequence
  Description of Artificial Sequence: Synthetic peptide
  Seed: GMDPRMCSLMQGSTLPRRSG
GMDPRMWSLSQSSTIPRRSG

SEQ ID NO: 82173 - protein, 20 aa, Artificial Sequence
  Description of Artificial Sequence: Synthetic peptide
  Seed: GMDPRMCSLMQGSTLPRRSG
GMDPRMWSLTQASTLPRRSG

SEQ ID NO: 82174 - protein, 20 aa, Artificial Sequence
  Description of Artificial Sequence: Synthetic peptide
  Seed: GMDPRMCSLMQGSTLPRRSG
GMDPRMWSLTQASTVPRRSG

SEQ ID NO: 82175 - protein, 20 aa, Artificial Sequence
  Description of Artificial Sequence: Synthetic peptide
  Seed: GMDPRMCSLMQGSTLPRRSG
GMDPRMWSLVQASTAPRRSG

SEQ ID NO: 82176 - protein, 20 aa, Artificial Sequence
  Description of Artificial Sequence: Synthetic peptide
  Seed: GMDPRMCSLMQGSTLPRRSG
GMDPRMWSLVQASTIPRRSG

SEQ ID NO: 82177 - protein, 20 aa, Artificial Sequence
  Description of Artificial Sequence: Synthetic peptide
  Seed: GMDPRMCSLMQGSTLPRRSG
GMDPRMWSLVQASTLPRRSG

SEQ ID NO: 82178 - protein, 20 aa, Artificial Sequence
  Description of Artificial Sequence: Synthetic peptide
  Seed: GMDPRMCSLMQGSTLPRRSG
GMDPRMWSLVQASTMPRRSG

SEQ ID NO: 82179 - protein, 20 aa, Artificial Sequence
  Description of Artificial Sequence: Synthetic peptide
  Seed: GMDPRMCSLMQGSTLPRRSG
GMDPRMWSLVQASTNPRRSG

SEQ ID NO: 82180 - protein, 20 aa, Artificial Sequence
  Description of Artificial Sequence: Synthetic peptide
  Seed: GMDPRMCSLMQGSTLPRRSG
GMDPRMWSLVQASTSPRRSG

SEQ ID NO: 82181 - protein, 20 aa, Artificial Sequence
  Description of Artificial Sequence: Synthetic peptide
  Seed: GMDPRMCSLMQGSTLPRRSG
GMDPRMWSLVQASTTPRRSG

SEQ ID NO: 82182 - protein, 20 aa, Artificial Sequence
  Description of Artificial Sequence: Synthetic peptide
  Seed: GMDPRMCSLMQGSTLPRRSG
GMDPRMWSLVQASTVPRRSG

SEQ ID NO: 82183 - protein, 20 aa, Artificial Sequence
  Description of Artificial Sequence: Synthetic peptide
  Seed: GMDPRMCSLMQGSTLPRRSG
GMDPRMWSLVQGSTAPRRSG

SEQ ID NO: 82184 - protein, 20 aa, Artificial Sequence
  Description of Artificial Sequence: Synthetic peptide
  Seed: GMDPRMCSLMQGSTLPRRSG
GMDPRMWSLVQGSTIPRRSG

SEQ ID NO: 82185 - protein, 20 aa, Artificial Sequence
  Description of Artificial Sequence: Synthetic peptide
  Seed: GMDPRMCSLMQGSTLPRRSG
GMDPRMWSLVQGSTLPRRSG

SEQ ID NO: 82186 - protein, 20 aa, Artificial Sequence
  Description of Artificial Sequence: Synthetic peptide
  Seed: GMDPRMCSLMQGSTLPRRSG
GMDPRMWSLVQGSTVPRRSG

SEQ ID NO: 82187 - protein, 20 aa, Artificial Sequence
  Description of Artificial Sequence: Synthetic peptide
  Seed: GMDPRMCSLMQGSTLPRRSG
GMDPRMWSLVQISTAPRRSG

SEQ ID NO: 82188 - protein, 20 aa, Artificial Sequence
  Description of Artificial Sequence: Synthetic peptide
  Seed: GMDPRMCSLMQGSTLPRRSG
GMDPRMWSLVQPSTAPRRSG

SEQ ID NO: 82189 - protein, 20 aa, Artificial Sequence
  Description of Artificial Sequence: Synthetic peptide
  Seed: GMDPRMCSLMQGSTLPRRSG
GMDPRMWSLVQPSTIPRRSG

SEQ ID NO: 82190 - protein, 20 aa, Artificial Sequence
  Description of Artificial Sequence: Synthetic peptide
  Seed: GMDPRMCSLMQGSTLPRRSG
GMDPRMWSLVQPSTLPRRSG

SEQ ID NO: 82191 - protein, 20 aa, Artificial Sequence
  Description of Artificial Sequence: Synthetic peptide
  Seed: GMDPRMCSLMQGSTLPRRSG
GMDPRMWSLVQPSTNPRRSG

SEQ ID NO: 82192 - protein, 20 aa, Artificial Sequence
  Description of Artificial Sequence: Synthetic peptide
  Seed: GMDPRMCSLMQGSTLPRRSG
GMDPRMWSLVQPSTSPRRSG

SEQ ID NO: 82193 - protein, 20 aa, Artificial Sequence
  Description of Artificial Sequence: Synthetic peptide
  Seed: GMDPRMCSLMQGSTLPRRSG
GMDPRMWSLVQPSTVPRRSG

SEQ ID NO: 82194 - protein, 20 aa, Artificial Sequence
  Description of Artificial Sequence: Synthetic peptide
  Seed: GMDPRMCSLMQGSTLPRRSG
GMDPRMWSLVQSSTAPRRSG

SEQ ID NO: 82195 - protein, 20 aa, Artificial Sequence
  Description of Artificial Sequence: Synthetic peptide
  Seed: GMDPRMCSLMQGSTLPRRSG
GMDPRMWSLVQSSTIPRRSG

SEQ ID NO: 82196 - protein, 20 aa, Artificial Sequence
  Description of Artificial Sequence: Synthetic peptide
  Seed: GMDPRMCSLMQGSTLPRRSG
GMDPRMWSLVQSSTLPRRSG

SEQ ID NO: 82197 - protein, 20 aa, Artificial Sequence
  Description of Artificial Sequence: Synthetic peptide
  Seed: GMDPRMCSLMQGSTLPRRSG
GMDPRMWSLVQSSTNPRRSG

SEQ ID NO: 82198 - protein, 20 aa, Artificial Sequence
  Description of Artificial Sequence: Synthetic peptide
  Seed: GMDPRMCSLMQGSTLPRRSG
GMDPRMWSLVQSSTSPRRSG

SEQ ID NO: 82199 - protein, 20 aa, Artificial Sequence
  Description of Artificial Sequence: Synthetic peptide
  Seed: GMDPRMCSLMQGSTLPRRSG
GMDPRMWSLVQSSTVPRRSG

SEQ ID NO: 82200 - protein, 20 aa, Artificial Sequence
  Description of Artificial Sequence: Synthetic peptide
  Seed: GMDPRMCSLMQGSTLPRRSG
GMDPRMWSLVQTSTAPRRSG

SEQ ID NO: 82201 - protein, 20 aa, Artificial Sequence
  Description of Artificial Sequence: Synthetic peptide
  Seed: GMDPRMCSLMQGSTLPRRSG
GMDPRMWSLVQTSTNPRRSG

SEQ ID NO: 82202 - protein, 20 aa, Artificial Sequence
  Description of Artificial Sequence: Synthetic peptide
  Seed: GMDPRMCSLMQGSTLPRRSG
GMDPRMWSLVQTSTSPRRSG

SEQ ID NO: 82203 - protein, 20 aa, Artificial Sequence
  Description of Artificial Sequence: Synthetic peptide
  Seed: GMDPRMCSLMQGSTLPRRSG
GMDPRMWSLVQVSTAPRRSG

SEQ ID NO: 82204 - protein, 20 aa, Artificial Sequence
  Description of Artificial Sequence: Synthetic peptide
  Seed: GMDPRMCSLMQGSTLPRRSG
GMDPRMWSLVQVSTNPRRSG

SEQ ID NO: 82205 - protein, 20 aa, Artificial Sequence
  Description of Artificial Sequence: Synthetic peptide
  Seed: GMDPRMCSLMQGSTLPRRSG
GMDPRMWSLVQVSTSPRRSG

SEQ ID NO: 82206 - protein, 20 aa, Artificial Sequence
  Description of Artificial Sequence: Synthetic peptide
  Seed: GMDPRMCSLMQGSTLPRRSG
GMDPRMYSLAQASTAPRRSG

SEQ ID NO: 82207 - protein, 20 aa, Artificial Sequence
  Description of Artificial Sequence: Synthetic peptide
  Seed: GMDPRMCSLMQGSTLPRRSG
GMDPRMYSLAQASTCPRRSG

SEQ ID NO: 82208 - protein, 20 aa, Artificial Sequence
  Description of Artificial Sequence: Synthetic peptide
  Seed: GMDPRMCSLMQGSTLPRRSG
GMDPRMYSLAQASTDPRRSG

SEQ ID NO: 82209 - protein, 20 aa, Artificial Sequence
  Description of Artificial Sequence: Synthetic peptide
  Seed: GMDPRMCSLMQGSTLPRRSG
GMDPRMYSLAQASTEPRRSG

SEQ ID NO: 82210 - protein, 20 aa, Artificial Sequence
  Description of Artificial Sequence: Synthetic peptide
  Seed: GMDPRMCSLMQGSTLPRRSG
GMDPRMYSLAQASTFPRRSG

SEQ ID NO: 82211 - protein, 20 aa, Artificial Sequence
  Description of Artificial Sequence: Synthetic peptide
  Seed: GMDPRMCSLMQGSTLPRRSG
GMDPRMYSLAQASTGPRRSG

SEQ ID NO: 82212 - protein, 20 aa, Artificial Sequence
  Description of Artificial Sequence: Synthetic peptide
  Seed: GMDPRMCSLMQGSTLPRRSG
GMDPRMYSLAQASTHPRRSG

SEQ ID NO: 82213 - protein, 20 aa, Artificial Sequence
  Description of Artificial Sequence: Synthetic peptide
  Seed: GMDPRMCSLMQGSTLPRRSG
GMDPRMYSLAQASTIPRRSG

SEQ ID NO: 82214 - protein, 20 aa, Artificial Sequence
  Description of Artificial Sequence: Synthetic peptide
  Seed: GMDPRMCSLMQGSTLPRRSG
GMDPRMYSLAQASTLPRRSG

SEQ ID NO: 82215 - protein, 20 aa, Artificial Sequence
  Description of Artificial Sequence: Synthetic peptide
  Seed: GMDPRMCSLMQGSTLPRRSG
GMDPRMYSLAQASTMPRRSG

SEQ ID NO: 82216 - protein, 20 aa, Artificial Sequence
  Description of Artificial Sequence: Synthetic peptide
  Seed: GMDPRMCSLMQGSTLPRRSG
GMDPRMYSLAQASTNPRRSG

SEQ ID NO: 82217 - protein, 20 aa, Artificial Sequence
  Description of Artificial Sequence: Synthetic peptide
  Seed: GMDPRMCSLMQGSTLPRRSG
GMDPRMYSLAQASTPPRRSG

SEQ ID NO: 82218 - protein, 20 aa, Artificial Sequence
  Description of Artificial Sequence: Synthetic peptide
  Seed: GMDPRMCSLMQGSTLPRRSG
GMDPRMYSLAQASTQPRRSG

SEQ ID NO: 82219 - protein, 20 aa, Artificial Sequence
  Description of Artificial Sequence: Synthetic peptide
  Seed: GMDPRMCSLMQGSTLPRRSG
GMDPRMYSLAQASTSPRRSG

SEQ ID NO: 82220 - protein, 20 aa, Artificial Sequence
  Description of Artificial Sequence: Synthetic peptide
  Seed: GMDPRMCSLMQGSTLPRRSG
GMDPRMYSLAQASTTPRRSG

SEQ ID NO: 82221 - protein, 20 aa, Artificial Sequence
  Description of Artificial Sequence: Synthetic peptide
  Seed: GMDPRMCSLMQGSTLPRRSG
GMDPRMYSLAQASTVPRRSG

SEQ ID NO: 82222 - protein, 20 aa, Artificial Sequence
  Description of Artificial Sequence: Synthetic peptide
  Seed: GMDPRMCSLMQGSTLPRRSG
GMDPRMYSLAQASTYPRRSG

SEQ ID NO: 82223 - protein, 20 aa, Artificial Sequence
  Description of Artificial Sequence: Synthetic peptide
  Seed: GMDPRMCSLMQGSTLPRRSG
GMDPRMYSLAQGSTAPRRSG

SEQ ID NO: 82224 - protein, 20 aa, Artificial Sequence
  Description of Artificial Sequence: Synthetic peptide
  Seed: GMDPRMCSLMQGSTLPRRSG
GMDPRMYSLAQGSTGPRRSG

SEQ ID NO: 82225 - protein, 20 aa, Artificial Sequence
  Description of Artificial Sequence: Synthetic peptide
  Seed: GMDPRMCSLMQGSTLPRRSG
GMDPRMYSLAQGSTIPRRSG

SEQ ID NO: 82226 - protein, 20 aa, Artificial Sequence
  Description of Artificial Sequence: Synthetic peptide
  Seed: GMDPRMCSLMQGSTLPRRSG
GMDPRMYSLAQGSTLPRRSG

SEQ ID NO: 82227 - protein, 20 aa, Artificial Sequence
  Description of Artificial Sequence: Synthetic peptide
  Seed: GMDPRMCSLMQGSTLPRRSG
GMDPRMYSLAQGSTMPRRSG

SEQ ID NO: 82228 - protein, 20 aa, Artificial Sequence
  Description of Artificial Sequence: Synthetic peptide
  Seed: GMDPRMCSLMQGSTLPRRSG
GMDPRMYSLAQGSTNPRRSG

SEQ ID NO: 82229 - protein, 20 aa, Artificial Sequence
  Description of Artificial Sequence: Synthetic peptide
  Seed: GMDPRMCSLMQGSTLPRRSG
GMDPRMYSLAQGSTSPRRSG

SEQ ID NO: 82230 - protein, 20 aa, Artificial Sequence
  Description of Artificial Sequence: Synthetic peptide
  Seed: GMDPRMCSLMQGSTLPRRSG
GMDPRMYSLAQGSTTPRRSG

SEQ ID NO: 82231 - protein, 20 aa, Artificial Sequence
  Description of Artificial Sequence: Synthetic peptide
  Seed: GMDPRMCSLMQGSTLPRRSG
GMDPRMYSLAQGSTVPRRSG

SEQ ID NO: 82232 - protein, 20 aa, Artificial Sequence
  Description of Artificial Sequence: Synthetic peptide
  Seed: GMDPRMCSLMQGSTLPRRSG
GMDPRMYSLAQISTAPRRSG

SEQ ID NO: 82233 - protein, 20 aa, Artificial Sequence
  Description of Artificial Sequence: Synthetic peptide
  Seed: GMDPRMCSLMQGSTLPRRSG
GMDPRMYSLAQISTGPRRSG

SEQ ID NO: 82234 - protein, 20 aa, Artificial Sequence
  Description of Artificial Sequence: Synthetic peptide
  Seed: GMDPRMCSLMQGSTLPRRSG
GMDPRMYSLAQISTIPRRSG

SEQ ID NO: 82235 - protein, 20 aa, Artificial Sequence
  Description of Artificial Sequence: Synthetic peptide
  Seed: GMDPRMCSLMQGSTLPRRSG
GMDPRMYSLAQISTLPRRSG

SEQ ID NO: 82236 - protein, 20 aa, Artificial Sequence
  Description of Artificial Sequence: Synthetic peptide
  Seed: GMDPRMCSLMQGSTLPRRSG
GMDPRMYSLAQISTMPRRSG

SEQ ID NO: 82237 - protein, 20 aa, Artificial Sequence
  Description of Artificial Sequence: Synthetic peptide
  Seed: GMDPRMCSLMQGSTLPRRSG
GMDPRMYSLAQISTNPRRSG

SEQ ID NO: 82238 - protein, 20 aa, Artificial Sequence
  Description of Artificial Sequence: Synthetic peptide
  Seed: GMDPRMCSLMQGSTLPRRSG
GMDPRMYSLAQISTQPRRSG

SEQ ID NO: 82239 - protein, 20 aa, Artificial Sequence
  Description of Artificial Sequence: Synthetic peptide
  Seed: GMDPRMCSLMQGSTLPRRSG
GMDPRMYSLAQISTSPRRSG

SEQ ID NO: 82240 - protein, 20 aa, Artificial Sequence
  Description of Artificial Sequence: Synthetic peptide
  Seed: GMDPRMCSLMQGSTLPRRSG
GMDPRMYSLAQISTTPRRSG

SEQ ID NO: 82241 - protein, 20 aa, Artificial Sequence
  Description of Artificial Sequence: Synthetic peptide
  Seed: GMDPRMCSLMQGSTLPRRSG
GMDPRMYSLAQISTVPRRSG

SEQ ID NO: 82242 - protein, 20 aa, Artificial Sequence
  Description of Artificial Sequence: Synthetic peptide
  Seed: GMDPRMCSLMQGSTLPRRSG
GMDPRMYSLAQLSTAPRRSG

SEQ ID NO: 82243 - protein, 20 aa, Artificial Sequence
  Description of Artificial Sequence: Synthetic peptide
  Seed: GMDPRMCSLMQGSTLPRRSG
GMDPRMYSLAQLSTIPRRSG

SEQ ID NO: 82244 - protein, 20 aa, Artificial Sequence
  Description of Artificial Sequence: Synthetic peptide
  Seed: GMDPRMCSLMQGSTLPRRSG
GMDPRMYSLAQLSTNPRRSG

SEQ ID NO: 82245 - protein, 20 aa, Artificial Sequence
  Description of Artificial Sequence: Synthetic peptide
  Seed: GMDPRMCSLMQGSTLPRRSG
GMDPRMYSLAQLSTSPRRSG

SEQ ID NO: 82246 - protein, 20 aa, Artificial Sequence
  Description of Artificial Sequence: Synthetic peptide
  Seed: GMDPRMCSLMQGSTLPRRSG
GMDPRMYSLAQLSTVPRRSG

SEQ ID NO: 82247 - protein, 20 aa, Artificial Sequence
  Description of Artificial Sequence: Synthetic peptide
  Seed: GMDPRMCSLMQGSTLPRRSG
GMDPRMYSLAQMSTAPRRSG

SEQ ID NO: 82248 - protein, 20 aa, Artificial Sequence
  Description of Artificial Sequence: Synthetic peptide
  Seed: GMDPRMCSLMQGSTLPRRSG
GMDPRMYSLAQMSTNPRRSG

SEQ ID NO: 82249 - protein, 20 aa, Artificial Sequence
  Description of Artificial Sequence: Synthetic peptide
  Seed: GMDPRMCSLMQGSTLPRRSG
GMDPRMYSLAQMSTSPRRSG

SEQ ID NO: 82250 - protein, 20 aa, Artificial Sequence
  Description of Artificial Sequence: Synthetic peptide
  Seed: GMDPRMCSLMQGSTLPRRSG
GMDPRMYSLAQMSTVPRRSG

SEQ ID NO: 82251 - protein, 20 aa, Artificial Sequence
  Description of Artificial Sequence: Synthetic peptide
  Seed: GMDPRMCSLMQGSTLPRRSG
GMDPRMYSLAQNSTAPRRSG

SEQ ID NO: 82252 - protein, 20 aa, Artificial Sequence
  Description of Artificial Sequence: Synthetic peptide
  Seed: GMDPRMCSLMQGSTLPRRSG
GMDPRMYSLAQNSTIPRRSG

SEQ ID NO: 82253 - protein, 20 aa, Artificial Sequence
  Description of Artificial Sequence: Synthetic peptide
  Seed: GMDPRMCSLMQGSTLPRRSG
GMDPRMYSLAQNSTLPRRSG

SEQ ID NO: 82254 - protein, 20 aa, Artificial Sequence
  Description of Artificial Sequence: Synthetic peptide
  Seed: GMDPRMCSLMQGSTLPRRSG
GMDPRMYSLAQNSTMPRRSG

SEQ ID NO: 82255 - protein, 20 aa, Artificial Sequence
  Description of Artificial Sequence: Synthetic peptide
  Seed: GMDPRMCSLMQGSTLPRRSG
GMDPRMYSLAQNSTNPRRSG

SEQ ID NO: 82256 - protein, 20 aa, Artificial Sequence
  Description of Artificial Sequence: Synthetic peptide
  Seed: GMDPRMCSLMQGSTLPRRSG
GMDPRMYSLAQNSTSPRRSG

SEQ ID NO: 82257 - protein, 20 aa, Artificial Sequence
  Description of Artificial Sequence: Synthetic peptide
  Seed: GMDPRMCSLMQGSTLPRRSG
GMDPRMYSLAQNSTVPRRSG

SEQ ID NO: 82258 - protein, 20 aa, Artificial Sequence
  Description of Artificial Sequence: Synthetic peptide
  Seed: GMDPRMCSLMQGSTLPRRSG
GMDPRMYSLAQPSTAPRRSG

SEQ ID NO: 82259 - protein, 20 aa, Artificial Sequence
  Description of Artificial Sequence: Synthetic peptide
  Seed: GMDPRMCSLMQGSTLPRRSG
GMDPRMYSLAQPSTGPRRSG

SEQ ID NO: 82260 - protein, 20 aa, Artificial Sequence
  Description of Artificial Sequence: Synthetic peptide
  Seed: GMDPRMCSLMQGSTLPRRSG
GMDPRMYSLAQPSTHPRRSG

SEQ ID NO: 82261 - protein, 20 aa, Artificial Sequence
  Description of Artificial Sequence: Synthetic peptide
  Seed: GMDPRMCSLMQGSTLPRRSG
GMDPRMYSLAQPSTIPRRSG

SEQ ID NO: 82262 - protein, 20 aa, Artificial Sequence
  Description of Artificial Sequence: Synthetic peptide
  Seed: GMDPRMCSLMQGSTLPRRSG
GMDPRMYSLAQPSTLPRRSG

SEQ ID NO: 82263 - protein, 20 aa, Artificial Sequence
  Description of Artificial Sequence: Synthetic peptide
  Seed: GMDPRMCSLMQGSTLPRRSG
GMDPRMYSLAQPSTMPRRSG

SEQ ID NO: 82264 - protein, 20 aa, Artificial Sequence
  Description of Artificial Sequence: Synthetic peptide
  Seed: GMDPRMCSLMQGSTLPRRSG
GMDPRMYSLAQPSTNPRRSG

SEQ ID NO: 82265 - protein, 20 aa, Artificial Sequence
  Description of Artificial Sequence: Synthetic peptide
  Seed: GMDPRMCSLMQGSTLPRRSG
GMDPRMYSLAQPSTQPRRSG

SEQ ID NO: 82266 - protein, 20 aa, Artificial Sequence
  Description of Artificial Sequence: Synthetic peptide
  Seed: GMDPRMCSLMQGSTLPRRSG
GMDPRMYSLAQPSTSPRRSG

SEQ ID NO: 82267 - protein, 20 aa, Artificial Sequence
  Description of Artificial Sequence: Synthetic peptide
  Seed: GMDPRMCSLMQGSTLPRRSG
GMDPRMYSLAQPSTTPRRSG

SEQ ID NO: 82268 - protein, 20 aa, Artificial Sequence
  Description of Artificial Sequence: Synthetic peptide
  Seed: GMDPRMCSLMQGSTLPRRSG
GMDPRMYSLAQPSTVPRRSG

SEQ ID NO: 82269 - protein, 20 aa, Artificial Sequence
  Description of Artificial Sequence: Synthetic peptide
  Seed: GMDPRMCSLMQGSTLPRRSG
GMDPRMYSLAQSSTAPRRSG

SEQ ID NO: 82270 - protein, 20 aa, Artificial Sequence
  Description of Artificial Sequence: Synthetic peptide
  Seed: GMDPRMCSLMQGSTLPRRSG
GMDPRMYSLAQSSTGPRRSG

SEQ ID NO: 82271 - protein, 20 aa, Artificial Sequence
  Description of Artificial Sequence: Synthetic peptide
  Seed: GMDPRMCSLMQGSTLPRRSG
GMDPRMYSLAQSSTHPRRSG

SEQ ID NO: 82272 - protein, 20 aa, Artificial Sequence
  Description of Artificial Sequence: Synthetic peptide
  Seed: GMDPRMCSLMQGSTLPRRSG
GMDPRMYSLAQSSTIPRRSG

SEQ ID NO: 82273 - protein, 20 aa, Artificial Sequence
  Description of Artificial Sequence: Synthetic peptide
  Seed: GMDPRMCSLMQGSTLPRRSG
GMDPRMYSLAQSSTLPRRSG

SEQ ID NO: 82274 - protein, 20 aa, Artificial Sequence
  Description of Artificial Sequence: Synthetic peptide
  Seed: GMDPRMCSLMQGSTLPRRSG
GMDPRMYSLAQSSTMPRRSG

SEQ ID NO: 82275 - protein, 20 aa, Artificial Sequence
  Description of Artificial Sequence: Synthetic peptide
  Seed: GMDPRMCSLMQGSTLPRRSG
GMDPRMYSLAQSSTNPRRSG

SEQ ID NO: 82276 - protein, 20 aa, Artificial Sequence
  Description of Artificial Sequence: Synthetic peptide
  Seed: GMDPRMCSLMQGSTLPRRSG
GMDPRMYSLAQSSTQPRRSG

SEQ ID NO: 82277 - protein, 20 aa, Artificial Sequence
  Description of Artificial Sequence: Synthetic peptide
  Seed: GMDPRMCSLMQGSTLPRRSG
GMDPRMYSLAQSSTSPRRSG

SEQ ID NO: 82278 - protein, 20 aa, Artificial Sequence
  Description of Artificial Sequence: Synthetic peptide
  Seed: GMDPRMCSLMQGSTLPRRSG
GMDPRMYSLAQSSTTPRRSG

SEQ ID NO: 82279 - protein, 20 aa, Artificial Sequence
  Description of Artificial Sequence: Synthetic peptide
  Seed: GMDPRMCSLMQGSTLPRRSG
GMDPRMYSLAQSSTVPRRSG

SEQ ID NO: 82280 - protein, 20 aa, Artificial Sequence
  Description of Artificial Sequence: Synthetic peptide
  Seed: GMDPRMCSLMQGSTLPRRSG
GMDPRMYSLAQTSTAPRRSG

SEQ ID NO: 82281 - protein, 20 aa, Artificial Sequence
  Description of Artificial Sequence: Synthetic peptide
  Seed: GMDPRMCSLMQGSTLPRRSG
GMDPRMYSLAQTSTGPRRSG

SEQ ID NO: 82282 - protein, 20 aa, Artificial Sequence
  Description of Artificial Sequence: Synthetic peptide
  Seed: GMDPRMCSLMQGSTLPRRSG
GMDPRMYSLAQTSTIPRRSG

SEQ ID NO: 82283 - protein, 20 aa, Artificial Sequence
  Description of Artificial Sequence: Synthetic peptide
  Seed: GMDPRMCSLMQGSTLPRRSG
GMDPRMYSLAQTSTLPRRSG

SEQ ID NO: 82284 - protein, 20 aa, Artificial Sequence
  Description of Artificial Sequence: Synthetic peptide
  Seed: GMDPRMCSLMQGSTLPRRSG
GMDPRMYSLAQTSTMPRRSG

SEQ ID NO: 82285 - protein, 20 aa, Artificial Sequence
  Description of Artificial Sequence: Synthetic peptide
  Seed: GMDPRMCSLMQGSTLPRRSG
GMDPRMYSLAQTSTNPRRSG

SEQ ID NO: 82286 - protein, 20 aa, Artificial Sequence
  Description of Artificial Sequence: Synthetic peptide
  Seed: GMDPRMCSLMQGSTLPRRSG
GMDPRMYSLAQTSTQPRRSG

SEQ ID NO: 82287 - protein, 20 aa, Artificial Sequence
  Description of Artificial Sequence: Synthetic peptide
  Seed: GMDPRMCSLMQGSTLPRRSG
GMDPRMYSLAQTSTSPRRSG

SEQ ID NO: 82288 - protein, 20 aa, Artificial Sequence
  Description of Artificial Sequence: Synthetic peptide
  Seed: GMDPRMCSLMQGSTLPRRSG
GMDPRMYSLAQTSTTPRRSG

SEQ ID NO: 82289 - protein, 20 aa, Artificial Sequence
  Description of Artificial Sequence: Synthetic peptide
  Seed: GMDPRMCSLMQGSTLPRRSG
GMDPRMYSLAQTSTVPRRSG

SEQ ID NO: 82290 - protein, 20 aa, Artificial Sequence
  Description of Artificial Sequence: Synthetic peptide
  Seed: GMDPRMCSLMQGSTLPRRSG
GMDPRMYSLAQVSTAPRRSG

SEQ ID NO: 82291 - protein, 20 aa, Artificial Sequence
  Description of Artificial Sequence: Synthetic peptide
  Seed: GMDPRMCSLMQGSTLPRRSG
GMDPRMYSLAQVSTGPRRSG

SEQ ID NO: 82292 - protein, 20 aa, Artificial Sequence
  Description of Artificial Sequence: Synthetic peptide
  Seed: GMDPRMCSLMQGSTLPRRSG
GMDPRMYSLAQVSTHPRRSG

SEQ ID NO: 82293 - protein, 20 aa, Artificial Sequence
  Description of Artificial Sequence: Synthetic peptide
  Seed: GMDPRMCSLMQGSTLPRRSG
GMDPRMYSLAQVSTIPRRSG

SEQ ID NO: 82294 - protein, 20 aa, Artificial Sequence
  Description of Artificial Sequence: Synthetic peptide
  Seed: GMDPRMCSLMQGSTLPRRSG
GMDPRMYSLAQVSTLPRRSG

SEQ ID NO: 82295 - protein, 20 aa, Artificial Sequence
  Description of Artificial Sequence: Synthetic peptide
  Seed: GMDPRMCSLMQGSTLPRRSG
GMDPRMYSLAQVSTMPRRSG

SEQ ID NO: 82296 - protein, 20 aa, Artificial Sequence
  Description of Artificial Sequence: Synthetic peptide
  Seed: GMDPRMCSLMQGSTLPRRSG
GMDPRMYSLAQVSTNPRRSG

SEQ ID NO: 82297 - protein, 20 aa, Artificial Sequence
  Description of Artificial Sequence: Synthetic peptide
  Seed: GMDPRMCSLMQGSTLPRRSG
GMDPRMYSLAQVSTQPRRSG

SEQ ID NO: 82298 - protein, 20 aa, Artificial Sequence
  Description of Artificial Sequence: Synthetic peptide
  Seed: GMDPRMCSLMQGSTLPRRSG
GMDPRMYSLAQVSTSPRRSG

SEQ ID NO: 82299 - protein, 20 aa, Artificial Sequence
  Description of Artificial Sequence: Synthetic peptide
  Seed: GMDPRMCSLMQGSTLPRRSG
GMDPRMYSLAQVSTTPRRSG

SEQ ID NO: 82300 - protein, 20 aa, Artificial Sequence
  Description of Artificial Sequence: Synthetic peptide
  Seed: GMDPRMCSLMQGSTLPRRSG
GMDPRMYSLAQVSTVPRRSG

SEQ ID NO: 82301 - protein, 20 aa, Artificial Sequence
  Description of Artificial Sequence: Synthetic peptide
  Seed: GMDPRMCSLMQGSTLPRRSG
GMDPRMYSLCQASTIPRRSG

SEQ ID NO: 82302 - protein, 20 aa, Artificial Sequence
  Description of Artificial Sequence: Synthetic peptide
  Seed: GMDPRMCSLMQGSTLPRRSG
GMDPRMYSLCQASTLPRRSG

SEQ ID NO: 82303 - protein, 20 aa, Artificial Sequence
  Description of Artificial Sequence: Synthetic peptide
  Seed: GMDPRMCSLMQGSTLPRRSG
GMDPRMYSLCQASTVPRRSG

SEQ ID NO: 82304 - protein, 20 aa, Artificial Sequence
  Description of Artificial Sequence: Synthetic peptide
  Seed: GMDPRMCSLMQGSTLPRRSG
GMDPRMYSLEQASTAPRRSG

SEQ ID NO: 82305 - protein, 20 aa, Artificial Sequence
  Description of Artificial Sequence: Synthetic peptide
  Seed: GMDPRMCSLMQGSTLPRRSG
GMDPRMYSLEQASTIPRRSG

SEQ ID NO: 82306 - protein, 20 aa, Artificial Sequence
  Description of Artificial Sequence: Synthetic peptide
  Seed: GMDPRMCSLMQGSTLPRRSG
GMDPRMYSLEQASTLPRRSG

SEQ ID NO: 82307 - protein, 20 aa, Artificial Sequence
  Description of Artificial Sequence: Synthetic peptide
  Seed: GMDPRMCSLMQGSTLPRRSG
GMDPRMYSLEQASTMPRRSG

SEQ ID NO: 82308 - protein, 20 aa, Artificial Sequence
  Description of Artificial Sequence: Synthetic peptide
  Seed: GMDPRMCSLMQGSTLPRRSG
GMDPRMYSLEQASTSPRRSG

SEQ ID NO: 82309 - protein, 20 aa, Artificial Sequence
  Description of Artificial Sequence: Synthetic peptide
  Seed: GMDPRMCSLMQGSTLPRRSG
GMDPRMYSLEQASTVPRRSG

SEQ ID NO: 82310 - protein, 20 aa, Artificial Sequence
  Description of Artificial Sequence: Synthetic peptide
  Seed: GMDPRMCSLMQGSTLPRRSG
GMDPRMYSLEQGSTAPRRSG

SEQ ID NO: 82311 - protein, 20 aa, Artificial Sequence
  Description of Artificial Sequence: Synthetic peptide
  Seed: GMDPRMCSLMQGSTLPRRSG
GMDPRMYSLEQGSTIPRRSG

SEQ ID NO: 82312 - protein, 20 aa, Artificial Sequence
  Description of Artificial Sequence: Synthetic peptide
  Seed: GMDPRMCSLMQGSTLPRRSG
GMDPRMYSLEQGSTLPRRSG

SEQ ID NO: 82313 - protein, 20 aa, Artificial Sequence
  Description of Artificial Sequence: Synthetic peptide
  Seed: GMDPRMCSLMQGSTLPRRSG
GMDPRMYSLEQGSTVPRRSG

SEQ ID NO: 82314 - protein, 20 aa, Artificial Sequence
  Description of Artificial Sequence: Synthetic peptide
  Seed: GMDPRMCSLMQGSTLPRRSG
GMDPRMYSLEQPSTLPRRSG

SEQ ID NO: 82315 - protein, 20 aa, Artificial Sequence
  Description of Artificial Sequence: Synthetic peptide
  Seed: GMDPRMCSLMQGSTLPRRSG
GMDPRMYSLEQPSTVPRRSG

SEQ ID NO: 82316 - protein, 20 aa, Artificial Sequence
  Description of Artificial Sequence: Synthetic peptide
  Seed: GMDPRMCSLMQGSTLPRRSG
GMDPRMYSLEQSSTAPRRSG

SEQ ID NO: 82317 - protein, 20 aa, Artificial Sequence
  Description of Artificial Sequence: Synthetic peptide
  Seed: GMDPRMCSLMQGSTLPRRSG
GMDPRMYSLEQSSTIPRRSG

SEQ ID NO: 82318 - protein, 20 aa, Artificial Sequence
  Description of Artificial Sequence: Synthetic peptide
  Seed: GMDPRMCSLMQGSTLPRRSG
GMDPRMYSLEQSSTLPRRSG

SEQ ID NO: 82319 - protein, 20 aa, Artificial Sequence
  Description of Artificial Sequence: Synthetic peptide
  Seed: GMDPRMCSLMQGSTLPRRSG
GMDPRMYSLEQSSTVPRRSG

SEQ ID NO: 82320 - protein, 20 aa, Artificial Sequence
  Description of Artificial Sequence: Synthetic peptide
  Seed: GMDPRMCSLMQGSTLPRRSG
GMDPRMYSLEQVSTAPRRSG

SEQ ID NO: 82321 - protein, 20 aa, Artificial Sequence
  Description of Artificial Sequence: Synthetic peptide
  Seed: GMDPRMCSLMQGSTLPRRSG
GMDPRMYSLFQASTAPRRSG

SEQ ID NO: 82322 - protein, 20 aa, Artificial Sequence
  Description of Artificial Sequence: Synthetic peptide
  Seed: GMDPRMCSLMQGSTLPRRSG
GMDPRMYSLFQASTGPRRSG

SEQ ID NO: 82323 - protein, 20 aa, Artificial Sequence
  Description of Artificial Sequence: Synthetic peptide
  Seed: GMDPRMCSLMQGSTLPRRSG
GMDPRMYSLFQASTIPRRSG

SEQ ID NO: 82324 - protein, 20 aa, Artificial Sequence
  Description of Artificial Sequence: Synthetic peptide
  Seed: GMDPRMCSLMQGSTLPRRSG
GMDPRMYSLFQASTLPRRSG

SEQ ID NO: 82325 - protein, 20 aa, Artificial Sequence
  Description of Artificial Sequence: Synthetic peptide
  Seed: GMDPRMCSLMQGSTLPRRSG
GMDPRMYSLFQASTMPRRSG

SEQ ID NO: 82326 - protein, 20 aa, Artificial Sequence
  Description of Artificial Sequence: Synthetic peptide
  Seed: GMDPRMCSLMQGSTLPRRSG
GMDPRMYSLFQASTNPRRSG

SEQ ID NO: 82327 - protein, 20 aa, Artificial Sequence
  Description of Artificial Sequence: Synthetic peptide
  Seed: GMDPRMCSLMQGSTLPRRSG
GMDPRMYSLFQASTSPRRSG

SEQ ID NO: 82328 - protein, 20 aa, Artificial Sequence
  Description of Artificial Sequence: Synthetic peptide
  Seed: GMDPRMCSLMQGSTLPRRSG
GMDPRMYSLFQASTTPRRSG

SEQ ID NO: 82329 - protein, 20 aa, Artificial Sequence
  Description of Artificial Sequence: Synthetic peptide
  Seed: GMDPRMCSLMQGSTLPRRSG
GMDPRMYSLFQASTVPRRSG

SEQ ID NO: 82330 - protein, 20 aa, Artificial Sequence
  Description of Artificial Sequence: Synthetic peptide
  Seed: GMDPRMCSLMQGSTLPRRSG
GMDPRMYSLFQGSTAPRRSG

SEQ ID NO: 82331 - protein, 20 aa, Artificial Sequence
  Description of Artificial Sequence: Synthetic peptide
  Seed: GMDPRMCSLMQGSTLPRRSG
GMDPRMYSLFQGSTIPRRSG

SEQ ID NO: 82332 - protein, 20 aa, Artificial Sequence
  Description of Artificial Sequence: Synthetic peptide
  Seed: GMDPRMCSLMQGSTLPRRSG
GMDPRMYSLFQGSTLPRRSG

SEQ ID NO: 82333 - protein, 20 aa, Artificial Sequence
  Description of Artificial Sequence: Synthetic peptide
  Seed: GMDPRMCSLMQGSTLPRRSG
GMDPRMYSLFQGSTVPRRSG

SEQ ID NO: 82334 - protein, 20 aa, Artificial Sequence
  Description of Artificial Sequence: Synthetic peptide
  Seed: GMDPRMCSLMQGSTLPRRSG
GMDPRMYSLFQISTAPRRSG

SEQ ID NO: 82335 - protein, 20 aa, Artificial Sequence
  Description of Artificial Sequence: Synthetic peptide
  Seed: GMDPRMCSLMQGSTLPRRSG
GMDPRMYSLFQISTNPRRSG

SEQ ID NO: 82336 - protein, 20 aa, Artificial Sequence
  Description of Artificial Sequence: Synthetic peptide
  Seed: GMDPRMCSLMQGSTLPRRSG
GMDPRMYSLFQISTSPRRSG

SEQ ID NO: 82337 - protein, 20 aa, Artificial Sequence
  Description of Artificial Sequence: Synthetic peptide
  Seed: GMDPRMCSLMQGSTLPRRSG
GMDPRMYSLFQLSTAPRRSG

SEQ ID NO: 82338 - protein, 20 aa, Artificial Sequence
  Description of Artificial Sequence: Synthetic peptide
  Seed: GMDPRMCSLMQGSTLPRRSG
GMDPRMYSLFQMSTAPRRSG

SEQ ID NO: 82339 - protein, 20 aa, Artificial Sequence
  Description of Artificial Sequence: Synthetic peptide
  Seed: GMDPRMCSLMQGSTLPRRSG
GMDPRMYSLFQPSTAPRRSG

SEQ ID NO: 82340 - protein, 20 aa, Artificial Sequence
  Description of Artificial Sequence: Synthetic peptide
  Seed: GMDPRMCSLMQGSTLPRRSG
GMDPRMYSLFQPSTIPRRSG

SEQ ID NO: 82341 - protein, 20 aa, Artificial Sequence
  Description of Artificial Sequence: Synthetic peptide
  Seed: GMDPRMCSLMQGSTLPRRSG
GMDPRMYSLFQPSTLPRRSG

SEQ ID NO: 82342 - protein, 20 aa, Artificial Sequence
  Description of Artificial Sequence: Synthetic peptide
  Seed: GMDPRMCSLMQGSTLPRRSG
GMDPRMYSLFQPSTNPRRSG

SEQ ID NO: 82343 - protein, 20 aa, Artificial Sequence
  Description of Artificial Sequence: Synthetic peptide
  Seed: GMDPRMCSLMQGSTLPRRSG
GMDPRMYSLFQPSTSPRRSG

SEQ ID NO: 82344 - protein, 20 aa, Artificial Sequence
  Description of Artificial Sequence: Synthetic peptide
  Seed: GMDPRMCSLMQGSTLPRRSG
GMDPRMYSLFQPSTVPRRSG

SEQ ID NO: 82345 - protein, 20 aa, Artificial Sequence
  Description of Artificial Sequence: Synthetic peptide
  Seed: GMDPRMCSLMQGSTLPRRSG
GMDPRMYSLFQSSTAPRRSG

SEQ ID NO: 82346 - protein, 20 aa, Artificial Sequence
  Description of Artificial Sequence: Synthetic peptide
  Seed: GMDPRMCSLMQGSTLPRRSG
GMDPRMYSLFQSSTIPRRSG

SEQ ID NO: 82347 - protein, 20 aa, Artificial Sequence
  Description of Artificial Sequence: Synthetic peptide
  Seed: GMDPRMCSLMQGSTLPRRSG
GMDPRMYSLFQSSTLPRRSG

SEQ ID NO: 82348 - protein, 20 aa, Artificial Sequence
  Description of Artificial Sequence: Synthetic peptide
  Seed: GMDPRMCSLMQGSTLPRRSG
GMDPRMYSLFQSSTNPRRSG

SEQ ID NO: 82349 - protein, 20 aa, Artificial Sequence
  Description of Artificial Sequence: Synthetic peptide
  Seed: GMDPRMCSLMQGSTLPRRSG
GMDPRMYSLFQSSTSPRRSG

SEQ ID NO: 82350 - protein, 20 aa, Artificial Sequence
  Description of Artificial Sequence: Synthetic peptide
  Seed: GMDPRMCSLMQGSTLPRRSG
GMDPRMYSLFQSSTVPRRSG

SEQ ID NO: 82351 - protein, 20 aa, Artificial Sequence
  Description of Artificial Sequence: Synthetic peptide
  Seed: GMDPRMCSLMQGSTLPRRSG
GMDPRMYSLFQTSTAPRRSG

SEQ ID NO: 82352 - protein, 20 aa, Artificial Sequence
  Description of Artificial Sequence: Synthetic peptide
  Seed: GMDPRMCSLMQGSTLPRRSG
GMDPRMYSLFQTSTNPRRSG

SEQ ID NO: 82353 - protein, 20 aa, Artificial Sequence
  Description of Artificial Sequence: Synthetic peptide
  Seed: GMDPRMCSLMQGSTLPRRSG
GMDPRMYSLFQTSTSPRRSG

SEQ ID NO: 82354 - protein, 20 aa, Artificial Sequence
  Description of Artificial Sequence: Synthetic peptide
  Seed: GMDPRMCSLMQGSTLPRRSG
GMDPRMYSLFQTSTVPRRSG

SEQ ID NO: 82355 - protein, 20 aa, Artificial Sequence
  Description of Artificial Sequence: Synthetic peptide
  Seed: GMDPRMCSLMQGSTLPRRSG
GMDPRMYSLFQVSTAPRRSG

SEQ ID NO: 82356 - protein, 20 aa, Artificial Sequence
  Description of Artificial Sequence: Synthetic peptide
  Seed: GMDPRMCSLMQGSTLPRRSG
GMDPRMYSLFQVSTNPRRSG

SEQ ID NO: 82357 - protein, 20 aa, Artificial Sequence
  Description of Artificial Sequence: Synthetic peptide
  Seed: GMDPRMCSLMQGSTLPRRSG
GMDPRMYSLFQVSTSPRRSG

SEQ ID NO: 82358 - protein, 20 aa, Artificial Sequence
  Description of Artificial Sequence: Synthetic peptide
  Seed: GMDPRMCSLMQGSTLPRRSG
GMDPRMYSLFQVSTTPRRSG

SEQ ID NO: 82359 - protein, 20 aa, Artificial Sequence
  Description of Artificial Sequence: Synthetic peptide
  Seed: GMDPRMCSLMQGSTLPRRSG
GMDPRMYSLFQVSTVPRRSG

SEQ ID NO: 82360 - protein, 20 aa, Artificial Sequence
  Description of Artificial Sequence: Synthetic peptide
  Seed: GMDPRMCSLMQGSTLPRRSG
GMDPRMYSLGQASTAPRRSG

SEQ ID NO: 82361 - protein, 20 aa, Artificial Sequence
  Description of Artificial Sequence: Synthetic peptide
  Seed: GMDPRMCSLMQGSTLPRRSG
GMDPRMYSLGQASTIPRRSG

SEQ ID NO: 82362 - protein, 20 aa, Artificial Sequence
  Description of Artificial Sequence: Synthetic peptide
  Seed: GMDPRMCSLMQGSTLPRRSG
GMDPRMYSLGQASTLPRRSG

SEQ ID NO: 82363 - protein, 20 aa, Artificial Sequence
  Description of Artificial Sequence: Synthetic peptide
  Seed: GMDPRMCSLMQGSTLPRRSG
GMDPRMYSLGQASTMPRRSG

SEQ ID NO: 82364 - protein, 20 aa, Artificial Sequence
  Description of Artificial Sequence: Synthetic peptide
  Seed: GMDPRMCSLMQGSTLPRRSG
GMDPRMYSLGQASTVPRRSG

SEQ ID NO: 82365 - protein, 20 aa, Artificial Sequence
  Description of Artificial Sequence: Synthetic peptide
  Seed: GMDPRMCSLMQGSTLPRRSG
GMDPRMYSLGQGSTIPRRSG

SEQ ID NO: 82366 - protein, 20 aa, Artificial Sequence
  Description of Artificial Sequence: Synthetic peptide
  Seed: GMDPRMCSLMQGSTLPRRSG
GMDPRMYSLGQGSTLPRRSG

SEQ ID NO: 82367 - protein, 20 aa, Artificial Sequence
  Description of Artificial Sequence: Synthetic peptide
  Seed: GMDPRMCSLMQGSTLPRRSG
GMDPRMYSLGQGSTVPRRSG

SEQ ID NO: 82368 - protein, 20 aa, Artificial Sequence
  Description of Artificial Sequence: Synthetic peptide
  Seed: GMDPRMCSLMQGSTLPRRSG
GMDPRMYSLGQPSTIPRRSG

SEQ ID NO: 82369 - protein, 20 aa, Artificial Sequence
  Description of Artificial Sequence: Synthetic peptide
  Seed: GMDPRMCSLMQGSTLPRRSG
GMDPRMYSLGQPSTLPRRSG

SEQ ID NO: 82370 - protein, 20 aa, Artificial Sequence
  Description of Artificial Sequence: Synthetic peptide
  Seed: GMDPRMCSLMQGSTLPRRSG
GMDPRMYSLGQSSTIPRRSG

SEQ ID NO: 82371 - protein, 20 aa, Artificial Sequence
  Description of Artificial Sequence: Synthetic peptide
  Seed: GMDPRMCSLMQGSTLPRRSG
GMDPRMYSLGQSSTLPRRSG

SEQ ID NO: 82372 - protein, 20 aa, Artificial Sequence
  Description of Artificial Sequence: Synthetic peptide
  Seed: GMDPRMCSLMQGSTLPRRSG
GMDPRMYSLGQSSTVPRRSG

SEQ ID NO: 82373 - protein, 20 aa, Artificial Sequence
  Description of Artificial Sequence: Synthetic peptide
  Seed: GMDPRMCSLMQGSTLPRRSG
GMDPRMYSLHQASTIPRRSG

SEQ ID NO: 82374 - protein, 20 aa, Artificial Sequence
  Description of Artificial Sequence: Synthetic peptide
  Seed: GMDPRMCSLMQGSTLPRRSG
GMDPRMYSLHQASTLPRRSG

SEQ ID NO: 82375 - protein, 20 aa, Artificial Sequence
  Description of Artificial Sequence: Synthetic peptide
  Seed: GMDPRMCSLMQGSTLPRRSG
GMDPRMYSLHQASTVPRRSG

SEQ ID NO: 82376 - protein, 20 aa, Artificial Sequence
  Description of Artificial Sequence: Synthetic peptide
  Seed: GMDPRMCSLMQGSTLPRRSG
GMDPRMYSLIQASTAPRRSG

SEQ ID NO: 82377 - protein, 20 aa, Artificial Sequence
  Description of Artificial Sequence: Synthetic peptide
  Seed: GMDPRMCSLMQGSTLPRRSG
GMDPRMYSLIQASTCPRRSG

SEQ ID NO: 82378 - protein, 20 aa, Artificial Sequence
  Description of Artificial Sequence: Synthetic peptide
  Seed: GMDPRMCSLMQGSTLPRRSG
GMDPRMYSLIQASTDPRRSG

SEQ ID NO: 82379 - protein, 20 aa, Artificial Sequence
  Description of Artificial Sequence: Synthetic peptide
  Seed: GMDPRMCSLMQGSTLPRRSG
GMDPRMYSLIQASTEPRRSG

SEQ ID NO: 82380 - protein, 20 aa, Artificial Sequence
  Description of Artificial Sequence: Synthetic peptide
  Seed: GMDPRMCSLMQGSTLPRRSG
GMDPRMYSLIQASTFPRRSG

SEQ ID NO: 82381 - protein, 20 aa, Artificial Sequence
  Description of Artificial Sequence: Synthetic peptide
  Seed: GMDPRMCSLMQGSTLPRRSG
GMDPRMYSLIQASTGPRRSG

SEQ ID NO: 82382 - protein, 20 aa, Artificial Sequence
  Description of Artificial Sequence: Synthetic peptide
  Seed: GMDPRMCSLMQGSTLPRRSG
GMDPRMYSLIQASTHPRRSG

SEQ ID NO: 82383 - protein, 20 aa, Artificial Sequence
  Description of Artificial Sequence: Synthetic peptide
  Seed: GMDPRMCSLMQGSTLPRRSG
GMDPRMYSLIQASTIPRRSG

SEQ ID NO: 82384 - protein, 20 aa, Artificial Sequence
  Description of Artificial Sequence: Synthetic peptide
  Seed: GMDPRMCSLMQGSTLPRRSG
GMDPRMYSLIQASTLPRRSG

SEQ ID NO: 82385 - protein, 20 aa, Artificial Sequence
  Description of Artificial Sequence: Synthetic peptide
  Seed: GMDPRMCSLMQGSTLPRRSG
GMDPRMYSLIQASTMPRRSG

SEQ ID NO: 82386 - protein, 20 aa, Artificial Sequence
  Description of Artificial Sequence: Synthetic peptide
  Seed: GMDPRMCSLMQGSTLPRRSG
GMDPRMYSLIQASTNPRRSG

SEQ ID NO: 82387 - protein, 20 aa, Artificial Sequence
  Description of Artificial Sequence: Synthetic peptide
  Seed: GMDPRMCSLMQGSTLPRRSG
GMDPRMYSLIQASTPPRRSG

SEQ ID NO: 82388 - protein, 20 aa, Artificial Sequence
  Description of Artificial Sequence: Synthetic peptide
  Seed: GMDPRMCSLMQGSTLPRRSG
GMDPRMYSLIQASTQPRRSG

SEQ ID NO: 82389 - protein, 20 aa, Artificial Sequence
  Description of Artificial Sequence: Synthetic peptide
  Seed: GMDPRMCSLMQGSTLPRRSG
GMDPRMYSLIQASTSPRRSG

SEQ ID NO: 82390 - protein, 20 aa, Artificial Sequence
  Description of Artificial Sequence: Synthetic peptide
  Seed: GMDPRMCSLMQGSTLPRRSG
GMDPRMYSLIQASTTPRRSG

SEQ ID NO: 82391 - protein, 20 aa, Artificial Sequence
  Description of Artificial Sequence: Synthetic peptide
  Seed: GMDPRMCSLMQGSTLPRRSG
GMDPRMYSLIQASTVPRRSG

SEQ ID NO: 82392 - protein, 20 aa, Artificial Sequence
  Description of Artificial Sequence: Synthetic peptide
  Seed: GMDPRMCSLMQGSTLPRRSG
GMDPRMYSLIQASTYPRRSG

SEQ ID NO: 82393 - protein, 20 aa, Artificial Sequence
  Description of Artificial Sequence: Synthetic peptide
  Seed: GMDPRMCSLMQGSTLPRRSG
GMDPRMYSLIQGSTAPRRSG

SEQ ID NO: 82394 - protein, 20 aa, Artificial Sequence
  Description of Artificial Sequence: Synthetic peptide
  Seed: GMDPRMCSLMQGSTLPRRSG
GMDPRMYSLIQGSTCPRRSG

SEQ ID NO: 82395 - protein, 20 aa, Artificial Sequence
  Description of Artificial Sequence: Synthetic peptide
  Seed: GMDPRMCSLMQGSTLPRRSG
GMDPRMYSLIQGSTFPRRSG

SEQ ID NO: 82396 - protein, 20 aa, Artificial Sequence
  Description of Artificial Sequence: Synthetic peptide
  Seed: GMDPRMCSLMQGSTLPRRSG
GMDPRMYSLIQGSTGPRRSG

SEQ ID NO: 82397 - protein, 20 aa, Artificial Sequence
  Description of Artificial Sequence: Synthetic peptide
  Seed: GMDPRMCSLMQGSTLPRRSG
GMDPRMYSLIQGSTIPRRSG

SEQ ID NO: 82398 - protein, 20 aa, Artificial Sequence
  Description of Artificial Sequence: Synthetic peptide
  Seed: GMDPRMCSLMQGSTLPRRSG
GMDPRMYSLIQGSTLPRRSG

SEQ ID NO: 82399 - protein, 20 aa, Artificial Sequence
  Description of Artificial Sequence: Synthetic peptide
  Seed: GMDPRMCSLMQGSTLPRRSG
GMDPRMYSLIQGSTMPRRSG

SEQ ID NO: 82400 - protein, 20 aa, Artificial Sequence
  Description of Artificial Sequence: Synthetic peptide
  Seed: GMDPRMCSLMQGSTLPRRSG
GMDPRMYSLIQGSTNPRRSG

SEQ ID NO: 82401 - protein, 20 aa, Artificial Sequence
  Description of Artificial Sequence: Synthetic peptide
  Seed: GMDPRMCSLMQGSTLPRRSG
GMDPRMYSLIQGSTSPRRSG

SEQ ID NO: 82402 - protein, 20 aa, Artificial Sequence
  Description of Artificial Sequence: Synthetic peptide
  Seed: GMDPRMCSLMQGSTLPRRSG
GMDPRMYSLIQGSTTPRRSG

SEQ ID NO: 82403 - protein, 20 aa, Artificial Sequence
  Description of Artificial Sequence: Synthetic peptide
  Seed: GMDPRMCSLMQGSTLPRRSG
GMDPRMYSLIQGSTVPRRSG

SEQ ID NO: 82404 - protein, 20 aa, Artificial Sequence
  Description of Artificial Sequence: Synthetic peptide
  Seed: GMDPRMCSLMQGSTLPRRSG
GMDPRMYSLIQISTAPRRSG

SEQ ID NO: 82405 - protein, 20 aa, Artificial Sequence
  Description of Artificial Sequence: Synthetic peptide
  Seed: GMDPRMCSLMQGSTLPRRSG
GMDPRMYSLIQISTGPRRSG

SEQ ID NO: 82406 - protein, 20 aa, Artificial Sequence
  Description of Artificial Sequence: Synthetic peptide
  Seed: GMDPRMCSLMQGSTLPRRSG
GMDPRMYSLIQISTHPRRSG

SEQ ID NO: 82407 - protein, 20 aa, Artificial Sequence
  Description of Artificial Sequence: Synthetic peptide
  Seed: GMDPRMCSLMQGSTLPRRSG
GMDPRMYSLIQISTIPRRSG

SEQ ID NO: 82408 - protein, 20 aa, Artificial Sequence
  Description of Artificial Sequence: Synthetic peptide
  Seed: GMDPRMCSLMQGSTLPRRSG
GMDPRMYSLIQISTLPRRSG

SEQ ID NO: 82409 - protein, 20 aa, Artificial Sequence
  Description of Artificial Sequence: Synthetic peptide
  Seed: GMDPRMCSLMQGSTLPRRSG
GMDPRMYSLIQISTMPRRSG

SEQ ID NO: 82410 - protein, 20 aa, Artificial Sequence
  Description of Artificial Sequence: Synthetic peptide
  Seed: GMDPRMCSLMQGSTLPRRSG
GMDPRMYSLIQISTNPRRSG

SEQ ID NO: 82411 - protein, 20 aa, Artificial Sequence
  Description of Artificial Sequence: Synthetic peptide
  Seed: GMDPRMCSLMQGSTLPRRSG
GMDPRMYSLIQISTQPRRSG

SEQ ID NO: 82412 - protein, 20 aa, Artificial Sequence
  Description of Artificial Sequence: Synthetic peptide
  Seed: GMDPRMCSLMQGSTLPRRSG
GMDPRMYSLIQISTSPRRSG

SEQ ID NO: 82413 - protein, 20 aa, Artificial Sequence
  Description of Artificial Sequence: Synthetic peptide
  Seed: GMDPRMCSLMQGSTLPRRSG
GMDPRMYSLIQISTTPRRSG

SEQ ID NO: 82414 - protein, 20 aa, Artificial Sequence
  Description of Artificial Sequence: Synthetic peptide
  Seed: GMDPRMCSLMQGSTLPRRSG
GMDPRMYSLIQISTVPRRSG

SEQ ID NO: 82415 - protein, 20 aa, Artificial Sequence
  Description of Artificial Sequence: Synthetic peptide
  Seed: GMDPRMCSLMQGSTLPRRSG
GMDPRMYSLIQLSTAPRRSG

SEQ ID NO: 82416 - protein, 20 aa, Artificial Sequence
  Description of Artificial Sequence: Synthetic peptide
  Seed: GMDPRMCSLMQGSTLPRRSG
GMDPRMYSLIQLSTIPRRSG

SEQ ID NO: 82417 - protein, 20 aa, Artificial Sequence
  Description of Artificial Sequence: Synthetic peptide
  Seed: GMDPRMCSLMQGSTLPRRSG
GMDPRMYSLIQLSTLPRRSG

SEQ ID NO: 82418 - protein, 20 aa, Artificial Sequence
  Description of Artificial Sequence: Synthetic peptide
  Seed: GMDPRMCSLMQGSTLPRRSG
GMDPRMYSLIQLSTNPRRSG

SEQ ID NO: 82419 - protein, 20 aa, Artificial Sequence
  Description of Artificial Sequence: Synthetic peptide
  Seed: GMDPRMCSLMQGSTLPRRSG
GMDPRMYSLIQLSTSPRRSG

SEQ ID NO: 82420 - protein, 20 aa, Artificial Sequence
  Description of Artificial Sequence: Synthetic peptide
  Seed: GMDPRMCSLMQGSTLPRRSG
GMDPRMYSLIQLSTTPRRSG

SEQ ID NO: 82421 - protein, 20 aa, Artificial Sequence
  Description of Artificial Sequence: Synthetic peptide
  Seed: GMDPRMCSLMQGSTLPRRSG
GMDPRMYSLIQLSTVPRRSG

SEQ ID NO: 82422 - protein, 20 aa, Artificial Sequence
  Description of Artificial Sequence: Synthetic peptide
  Seed: GMDPRMCSLMQGSTLPRRSG
GMDPRMYSLIQMSTAPRRSG

SEQ ID NO: 82423 - protein, 20 aa, Artificial Sequence
  Description of Artificial Sequence: Synthetic peptide
  Seed: GMDPRMCSLMQGSTLPRRSG
GMDPRMYSLIQMSTIPRRSG

SEQ ID NO: 82424 - protein, 20 aa, Artificial Sequence
  Description of Artificial Sequence: Synthetic peptide
  Seed: GMDPRMCSLMQGSTLPRRSG
GMDPRMYSLIQMSTLPRRSG

SEQ ID NO: 82425 - protein, 20 aa, Artificial Sequence
  Description of Artificial Sequence: Synthetic peptide
  Seed: GMDPRMCSLMQGSTLPRRSG
GMDPRMYSLIQMSTMPRRSG

SEQ ID NO: 82426 - protein, 20 aa, Artificial Sequence
  Description of Artificial Sequence: Synthetic peptide
  Seed: GMDPRMCSLMQGSTLPRRSG
GMDPRMYSLIQMSTNPRRSG

SEQ ID NO: 82427 - protein, 20 aa, Artificial Sequence
  Description of Artificial Sequence: Synthetic peptide
  Seed: GMDPRMCSLMQGSTLPRRSG
GMDPRMYSLIQMSTSPRRSG

SEQ ID NO: 82428 - protein, 20 aa, Artificial Sequence
  Description of Artificial Sequence: Synthetic peptide
  Seed: GMDPRMCSLMQGSTLPRRSG
GMDPRMYSLIQMSTTPRRSG

SEQ ID NO: 82429 - protein, 20 aa, Artificial Sequence
  Description of Artificial Sequence: Synthetic peptide
  Seed: GMDPRMCSLMQGSTLPRRSG
GMDPRMYSLIQMSTVPRRSG

SEQ ID NO: 82430 - protein, 20 aa, Artificial Sequence
  Description of Artificial Sequence: Synthetic peptide
  Seed: GMDPRMCSLMQGSTLPRRSG
GMDPRMYSLIQNSTAPRRSG

SEQ ID NO: 82431 - protein, 20 aa, Artificial Sequence
  Description of Artificial Sequence: Synthetic peptide
  Seed: GMDPRMCSLMQGSTLPRRSG
GMDPRMYSLIQNSTGPRRSG

SEQ ID NO: 82432 - protein, 20 aa, Artificial Sequence
  Description of Artificial Sequence: Synthetic peptide
  Seed: GMDPRMCSLMQGSTLPRRSG
GMDPRMYSLIQNSTIPRRSG

SEQ ID NO: 82433 - protein, 20 aa, Artificial Sequence
  Description of Artificial Sequence: Synthetic peptide
  Seed: GMDPRMCSLMQGSTLPRRSG
GMDPRMYSLIQNSTLPRRSG

SEQ ID NO: 82434 - protein, 20 aa, Artificial Sequence
  Description of Artificial Sequence: Synthetic peptide
  Seed: GMDPRMCSLMQGSTLPRRSG
GMDPRMYSLIQNSTMPRRSG

SEQ ID NO: 82435 - protein, 20 aa, Artificial Sequence
  Description of Artificial Sequence: Synthetic peptide
  Seed: GMDPRMCSLMQGSTLPRRSG
GMDPRMYSLIQNSTNPRRSG

SEQ ID NO: 82436 - protein, 20 aa, Artificial Sequence
  Description of Artificial Sequence: Synthetic peptide
  Seed: GMDPRMCSLMQGSTLPRRSG
GMDPRMYSLIQNSTSPRRSG

SEQ ID NO: 82437 - protein, 20 aa, Artificial Sequence
  Description of Artificial Sequence: Synthetic peptide
  Seed: GMDPRMCSLMQGSTLPRRSG
GMDPRMYSLIQNSTTPRRSG

SEQ ID NO: 82438 - protein, 20 aa, Artificial Sequence
  Description of Artificial Sequence: Synthetic peptide
  Seed: GMDPRMCSLMQGSTLPRRSG
GMDPRMYSLIQNSTVPRRSG

SEQ ID NO: 82439 - protein, 20 aa, Artificial Sequence
  Description of Artificial Sequence: Synthetic peptide
  Seed: GMDPRMCSLMQGSTLPRRSG
GMDPRMYSLIQPSTAPRRSG

SEQ ID NO: 82440 - protein, 20 aa, Artificial Sequence
  Description of Artificial Sequence: Synthetic peptide
  Seed: GMDPRMCSLMQGSTLPRRSG
GMDPRMYSLIQPSTCPRRSG

SEQ ID NO: 82441 - protein, 20 aa, Artificial Sequence
  Description of Artificial Sequence: Synthetic peptide
  Seed: GMDPRMCSLMQGSTLPRRSG
GMDPRMYSLIQPSTDPRRSG

SEQ ID NO: 82442 - protein, 20 aa, Artificial Sequence
  Description of Artificial Sequence: Synthetic peptide
  Seed: GMDPRMCSLMQGSTLPRRSG
GMDPRMYSLIQPSTGPRRSG

SEQ ID NO: 82443 - protein, 20 aa, Artificial Sequence
  Description of Artificial Sequence: Synthetic peptide
  Seed: GMDPRMCSLMQGSTLPRRSG
GMDPRMYSLIQPSTHPRRSG

SEQ ID NO: 82444 - protein, 20 aa, Artificial Sequence
  Description of Artificial Sequence: Synthetic peptide
  Seed: GMDPRMCSLMQGSTLPRRSG
GMDPRMYSLIQPSTIPRRSG

SEQ ID NO: 82445 - protein, 20 aa, Artificial Sequence
  Description of Artificial Sequence: Synthetic peptide
  Seed: GMDPRMCSLMQGSTLPRRSG
GMDPRMYSLIQPSTLPRRSG

SEQ ID NO: 82446 - protein, 20 aa, Artificial Sequence
  Description of Artificial Sequence: Synthetic peptide
  Seed: GMDPRMCSLMQGSTLPRRSG
GMDPRMYSLIQPSTMPRRSG

SEQ ID NO: 82447 - protein, 20 aa, Artificial Sequence
  Description of Artificial Sequence: Synthetic peptide
  Seed: GMDPRMCSLMQGSTLPRRSG
GMDPRMYSLIQPSTNPRRSG

SEQ ID NO: 82448 - protein, 20 aa, Artificial Sequence
  Description of Artificial Sequence: Synthetic peptide
  Seed: GMDPRMCSLMQGSTLPRRSG
GMDPRMYSLIQPSTPPRRSG

SEQ ID NO: 82449 - protein, 20 aa, Artificial Sequence
  Description of Artificial Sequence: Synthetic peptide
  Seed: GMDPRMCSLMQGSTLPRRSG
GMDPRMYSLIQPSTQPRRSG

SEQ ID NO: 82450 - protein, 20 aa, Artificial Sequence
  Description of Artificial Sequence: Synthetic peptide
  Seed: GMDPRMCSLMQGSTLPRRSG
GMDPRMYSLIQPSTSPRRSG

SEQ ID NO: 82451 - protein, 20 aa, Artificial Sequence
  Description of Artificial Sequence: Synthetic peptide
  Seed: GMDPRMCSLMQGSTLPRRSG
GMDPRMYSLIQPSTTPRRSG

SEQ ID NO: 82452 - protein, 20 aa, Artificial Sequence
  Description of Artificial Sequence: Synthetic peptide
  Seed: GMDPRMCSLMQGSTLPRRSG
GMDPRMYSLIQPSTVPRRSG

SEQ ID NO: 82453 - protein, 20 aa, Artificial Sequence
  Description of Artificial Sequence: Synthetic peptide
  Seed: GMDPRMCSLMQGSTLPRRSG
GMDPRMYSLIQQSTAPRRSG

SEQ ID NO: 82454 - protein, 20 aa, Artificial Sequence
  Description of Artificial Sequence: Synthetic peptide
  Seed: GMDPRMCSLMQGSTLPRRSG
GMDPRMYSLIQSSTAPRRSG

SEQ ID NO: 82455 - protein, 20 aa, Artificial Sequence
  Description of Artificial Sequence: Synthetic peptide
  Seed: GMDPRMCSLMQGSTLPRRSG
GMDPRMYSLIQSSTCPRRSG

SEQ ID NO: 82456 - protein, 20 aa, Artificial Sequence
  Description of Artificial Sequence: Synthetic peptide
  Seed: GMDPRMCSLMQGSTLPRRSG
GMDPRMYSLIQSSTGPRRSG

SEQ ID NO: 82457 - protein, 20 aa, Artificial Sequence
  Description of Artificial Sequence: Synthetic peptide
  Seed: GMDPRMCSLMQGSTLPRRSG
GMDPRMYSLIQSSTHPRRSG

SEQ ID NO: 82458 - protein, 20 aa, Artificial Sequence
  Description of Artificial Sequence: Synthetic peptide
  Seed: GMDPRMCSLMQGSTLPRRSG
GMDPRMYSLIQSSTIPRRSG

SEQ ID NO: 82459 - protein, 20 aa, Artificial Sequence
  Description of Artificial Sequence: Synthetic peptide
  Seed: GMDPRMCSLMQGSTLPRRSG
GMDPRMYSLIQSSTLPRRSG

SEQ ID NO: 82460 - protein, 20 aa, Artificial Sequence
  Description of Artificial Sequence: Synthetic peptide
  Seed: GMDPRMCSLMQGSTLPRRSG
GMDPRMYSLIQSSTMPRRSG

SEQ ID NO: 82461 - protein, 20 aa, Artificial Sequence
  Description of Artificial Sequence: Synthetic peptide
  Seed: GMDPRMCSLMQGSTLPRRSG
GMDPRMYSLIQSSTNPRRSG

SEQ ID NO: 82462 - protein, 20 aa, Artificial Sequence
  Description of Artificial Sequence: Synthetic peptide
  Seed: GMDPRMCSLMQGSTLPRRSG
GMDPRMYSLIQSSTPPRRSG

SEQ ID NO: 82463 - protein, 20 aa, Artificial Sequence
  Description of Artificial Sequence: Synthetic peptide
  Seed: GMDPRMCSLMQGSTLPRRSG
GMDPRMYSLIQSSTQPRRSG

SEQ ID NO: 82464 - protein, 20 aa, Artificial Sequence
  Description of Artificial Sequence: Synthetic peptide
  Seed: GMDPRMCSLMQGSTLPRRSG
GMDPRMYSLIQSSTSPRRSG

SEQ ID NO: 82465 - protein, 20 aa, Artificial Sequence
  Description of Artificial Sequence: Synthetic peptide
  Seed: GMDPRMCSLMQGSTLPRRSG
GMDPRMYSLIQSSTTPRRSG

SEQ ID NO: 82466 - protein, 20 aa, Artificial Sequence
  Description of Artificial Sequence: Synthetic peptide
  Seed: GMDPRMCSLMQGSTLPRRSG
GMDPRMYSLIQSSTVPRRSG

SEQ ID NO: 82467 - protein, 20 aa, Artificial Sequence
  Description of Artificial Sequence: Synthetic peptide
  Seed: GMDPRMCSLMQGSTLPRRSG
GMDPRMYSLIQTSTAPRRSG

SEQ ID NO: 82468 - protein, 20 aa, Artificial Sequence
  Description of Artificial Sequence: Synthetic peptide
  Seed: GMDPRMCSLMQGSTLPRRSG
GMDPRMYSLIQTSTGPRRSG

SEQ ID NO: 82469 - protein, 20 aa, Artificial Sequence
  Description of Artificial Sequence: Synthetic peptide
  Seed: GMDPRMCSLMQGSTLPRRSG
GMDPRMYSLIQTSTHPRRSG

SEQ ID NO: 82470 - protein, 20 aa, Artificial Sequence
  Description of Artificial Sequence: Synthetic peptide
  Seed: GMDPRMCSLMQGSTLPRRSG
GMDPRMYSLIQTSTIPRRSG

SEQ ID NO: 82471 - protein, 20 aa, Artificial Sequence
  Description of Artificial Sequence: Synthetic peptide
  Seed: GMDPRMCSLMQGSTLPRRSG
GMDPRMYSLIQTSTLPRRSG

SEQ ID NO: 82472 - protein, 20 aa, Artificial Sequence
  Description of Artificial Sequence: Synthetic peptide
  Seed: GMDPRMCSLMQGSTLPRRSG
GMDPRMYSLIQTSTMPRRSG

SEQ ID NO: 82473 - protein, 20 aa, Artificial Sequence
  Description of Artificial Sequence: Synthetic peptide
  Seed: GMDPRMCSLMQGSTLPRRSG
GMDPRMYSLIQTSTNPRRSG

SEQ ID NO: 82474 - protein, 20 aa, Artificial Sequence
  Description of Artificial Sequence: Synthetic peptide
  Seed: GMDPRMCSLMQGSTLPRRSG
GMDPRMYSLIQTSTQPRRSG

SEQ ID NO: 82475 - protein, 20 aa, Artificial Sequence
  Description of Artificial Sequence: Synthetic peptide
  Seed: GMDPRMCSLMQGSTLPRRSG
GMDPRMYSLIQTSTSPRRSG

SEQ ID NO: 82476 - protein, 20 aa, Artificial Sequence
  Description of Artificial Sequence: Synthetic peptide
  Seed: GMDPRMCSLMQGSTLPRRSG
GMDPRMYSLIQTSTTPRRSG

SEQ ID NO: 82477 - protein, 20 aa, Artificial Sequence
  Description of Artificial Sequence: Synthetic peptide
  Seed: GMDPRMCSLMQGSTLPRRSG
GMDPRMYSLIQTSTVPRRSG

SEQ ID NO: 82478 - protein, 20 aa, Artificial Sequence
  Description of Artificial Sequence: Synthetic peptide
  Seed: GMDPRMCSLMQGSTLPRRSG
GMDPRMYSLIQVSTAPRRSG

SEQ ID NO: 82479 - protein, 20 aa, Artificial Sequence
  Description of Artificial Sequence: Synthetic peptide
  Seed: GMDPRMCSLMQGSTLPRRSG
GMDPRMYSLIQVSTGPRRSG

SEQ ID NO: 82480 - protein, 20 aa, Artificial Sequence
  Description of Artificial Sequence: Synthetic peptide
  Seed: GMDPRMCSLMQGSTLPRRSG
GMDPRMYSLIQVSTHPRRSG

SEQ ID NO: 82481 - protein, 20 aa, Artificial Sequence
  Description of Artificial Sequence: Synthetic peptide
  Seed: GMDPRMCSLMQGSTLPRRSG
GMDPRMYSLIQVSTIPRRSG

SEQ ID NO: 82482 - protein, 20 aa, Artificial Sequence
  Description of Artificial Sequence: Synthetic peptide
  Seed: GMDPRMCSLMQGSTLPRRSG
GMDPRMYSLIQVSTLPRRSG

SEQ ID NO: 82483 - protein, 20 aa, Artificial Sequence
  Description of Artificial Sequence: Synthetic peptide
  Seed: GMDPRMCSLMQGSTLPRRSG
GMDPRMYSLIQVSTMPRRSG

SEQ ID NO: 82484 - protein, 20 aa, Artificial Sequence
  Description of Artificial Sequence: Synthetic peptide
  Seed: GMDPRMCSLMQGSTLPRRSG
GMDPRMYSLIQVSTNPRRSG

SEQ ID NO: 82485 - protein, 20 aa, Artificial Sequence
  Description of Artificial Sequence: Synthetic peptide
  Seed: GMDPRMCSLMQGSTLPRRSG
GMDPRMYSLIQVSTPPRRSG

SEQ ID NO: 82486 - protein, 20 aa, Artificial Sequence
  Description of Artificial Sequence: Synthetic peptide
  Seed: GMDPRMCSLMQGSTLPRRSG
GMDPRMYSLIQVSTQPRRSG

SEQ ID NO: 82487 - protein, 20 aa, Artificial Sequence
  Description of Artificial Sequence: Synthetic peptide
  Seed: GMDPRMCSLMQGSTLPRRSG
GMDPRMYSLIQVSTSPRRSG

SEQ ID NO: 82488 - protein, 20 aa, Artificial Sequence
  Description of Artificial Sequence: Synthetic peptide
  Seed: GMDPRMCSLMQGSTLPRRSG
GMDPRMYSLIQVSTTPRRSG

SEQ ID NO: 82489 - protein, 20 aa, Artificial Sequence
  Description of Artificial Sequence: Synthetic peptide
  Seed: GMDPRMCSLMQGSTLPRRSG
GMDPRMYSLIQVSTVPRRSG

SEQ ID NO: 82490 - protein, 20 aa, Artificial Sequence
  Description of Artificial Sequence: Synthetic peptide
  Seed: GMDPRMCSLMQGSTLPRRSG
GMDPRMYSLLQASTAPRRSG

SEQ ID NO: 82491 - protein, 20 aa, Artificial Sequence
  Description of Artificial Sequence: Synthetic peptide
  Seed: GMDPRMCSLMQGSTLPRRSG
GMDPRMYSLLQASTCPRRSG

SEQ ID NO: 82492 - protein, 20 aa, Artificial Sequence
  Description of Artificial Sequence: Synthetic peptide
  Seed: GMDPRMCSLMQGSTLPRRSG
GMDPRMYSLLQASTDPRRSG

SEQ ID NO: 82493 - protein, 20 aa, Artificial Sequence
  Description of Artificial Sequence: Synthetic peptide
  Seed: GMDPRMCSLMQGSTLPRRSG
GMDPRMYSLLQASTEPRRSG

SEQ ID NO: 82494 - protein, 20 aa, Artificial Sequence
  Description of Artificial Sequence: Synthetic peptide
  Seed: GMDPRMCSLMQGSTLPRRSG
GMDPRMYSLLQASTFPRRSG

SEQ ID NO: 82495 - protein, 20 aa, Artificial Sequence
  Description of Artificial Sequence: Synthetic peptide
  Seed: GMDPRMCSLMQGSTLPRRSG
GMDPRMYSLLQASTGPRRSG

SEQ ID NO: 82496 - protein, 20 aa, Artificial Sequence
  Description of Artificial Sequence: Synthetic peptide
  Seed: GMDPRMCSLMQGSTLPRRSG
GMDPRMYSLLQASTHPRRSG

SEQ ID NO: 82497 - protein, 20 aa, Artificial Sequence
  Description of Artificial Sequence: Synthetic peptide
  Seed: GMDPRMCSLMQGSTLPRRSG
GMDPRMYSLLQASTIPRRSG

SEQ ID NO: 82498 - protein, 20 aa, Artificial Sequence
  Description of Artificial Sequence: Synthetic peptide
  Seed: GMDPRMCSLMQGSTLPRRSG
GMDPRMYSLLQASTLPRRSG

SEQ ID NO: 82499 - protein, 20 aa, Artificial Sequence
  Description of Artificial Sequence: Synthetic peptide
  Seed: GMDPRMCSLMQGSTLPRRSG
GMDPRMYSLLQASTMPRRSG

SEQ ID NO: 82500 - protein, 20 aa, Artificial Sequence
  Description of Artificial Sequence: Synthetic peptide
  Seed: GMDPRMCSLMQGSTLPRRSG
GMDPRMYSLLQASTNPRRSG

SEQ ID NO: 82501 - protein, 20 aa, Artificial Sequence
  Description of Artificial Sequence: Synthetic peptide
  Seed: GMDPRMCSLMQGSTLPRRSG
GMDPRMYSLLQASTPPRRSG

SEQ ID NO: 82502 - protein, 20 aa, Artificial Sequence
  Description of Artificial Sequence: Synthetic peptide
  Seed: GMDPRMCSLMQGSTLPRRSG
GMDPRMYSLLQASTQPRRSG

SEQ ID NO: 82503 - protein, 20 aa, Artificial Sequence
  Description of Artificial Sequence: Synthetic peptide
  Seed: GMDPRMCSLMQGSTLPRRSG
GMDPRMYSLLQASTRPRRSG

SEQ ID NO: 82504 - protein, 20 aa, Artificial Sequence
  Description of Artificial Sequence: Synthetic peptide
  Seed: GMDPRMCSLMQGSTLPRRSG
GMDPRMYSLLQASTSPRRSG

SEQ ID NO: 82505 - protein, 20 aa, Artificial Sequence
  Description of Artificial Sequence: Synthetic peptide
  Seed: GMDPRMCSLMQGSTLPRRSG
GMDPRMYSLLQASTTPRRSG

SEQ ID NO: 82506 - protein, 20 aa, Artificial Sequence
  Description of Artificial Sequence: Synthetic peptide
  Seed: GMDPRMCSLMQGSTLPRRSG
GMDPRMYSLLQASTVPRRSG

SEQ ID NO: 82507 - protein, 20 aa, Artificial Sequence
  Description of Artificial Sequence: Synthetic peptide
  Seed: GMDPRMCSLMQGSTLPRRSG
GMDPRMYSLLQASTWPRRSG

SEQ ID NO: 82508 - protein, 20 aa, Artificial Sequence
  Description of Artificial Sequence: Synthetic peptide
  Seed: GMDPRMCSLMQGSTLPRRSG
GMDPRMYSLLQASTYPRRSG

SEQ ID NO: 82509 - protein, 20 aa, Artificial Sequence
  Description of Artificial Sequence: Synthetic peptide
  Seed: GMDPRMCSLMQGSTLPRRSG
GMDPRMYSLLQCSTAPRRSG

SEQ ID NO: 82510 - protein, 20 aa, Artificial Sequence
  Description of Artificial Sequence: Synthetic peptide
  Seed: GMDPRMCSLMQGSTLPRRSG
GMDPRMYSLLQCSTVPRRSG

SEQ ID NO: 82511 - protein, 20 aa, Artificial Sequence
  Description of Artificial Sequence: Synthetic peptide
  Seed: GMDPRMCSLMQGSTLPRRSG
GMDPRMYSLLQESTVPRRSG

SEQ ID NO: 82512 - protein, 20 aa, Artificial Sequence
  Description of Artificial Sequence: Synthetic peptide
  Seed: GMDPRMCSLMQGSTLPRRSG
GMDPRMYSLLQGSTAPRRSG

SEQ ID NO: 82513 - protein, 20 aa, Artificial Sequence
  Description of Artificial Sequence: Synthetic peptide
  Seed: GMDPRMCSLMQGSTLPRRSG
GMDPRMYSLLQGSTCPRRSG

SEQ ID NO: 82514 - protein, 20 aa, Artificial Sequence
  Description of Artificial Sequence: Synthetic peptide
  Seed: GMDPRMCSLMQGSTLPRRSG
GMDPRMYSLLQGSTFPRRSG

SEQ ID NO: 82515 - protein, 20 aa, Artificial Sequence
  Description of Artificial Sequence: Synthetic peptide
  Seed: GMDPRMCSLMQGSTLPRRSG
GMDPRMYSLLQGSTGPRRSG

SEQ ID NO: 82516 - protein, 20 aa, Artificial Sequence
  Description of Artificial Sequence: Synthetic peptide
  Seed: GMDPRMCSLMQGSTLPRRSG
GMDPRMYSLLQGSTIPRRSG

SEQ ID NO: 82517 - protein, 20 aa, Artificial Sequence
  Description of Artificial Sequence: Synthetic peptide
  Seed: GMDPRMCSLMQGSTLPRRSG
GMDPRMYSLLQGSTLPRRSG

SEQ ID NO: 82518 - protein, 20 aa, Artificial Sequence
  Description of Artificial Sequence: Synthetic peptide
  Seed: GMDPRMCSLMQGSTLPRRSG
GMDPRMYSLLQGSTMPRRSG

SEQ ID NO: 82519 - protein, 20 aa, Artificial Sequence
  Description of Artificial Sequence: Synthetic peptide
  Seed: GMDPRMCSLMQGSTLPRRSG
GMDPRMYSLLQGSTNPRRSG

SEQ ID NO: 82520 - protein, 20 aa, Artificial Sequence
  Description of Artificial Sequence: Synthetic peptide
  Seed: GMDPRMCSLMQGSTLPRRSG
GMDPRMYSLLQGSTPPRRSG

SEQ ID NO: 82521 - protein, 20 aa, Artificial Sequence
  Description of Artificial Sequence: Synthetic peptide
  Seed: GMDPRMCSLMQGSTLPRRSG
GMDPRMYSLLQGSTSPRRSG

SEQ ID NO: 82522 - protein, 20 aa, Artificial Sequence
  Description of Artificial Sequence: Synthetic peptide
  Seed: GMDPRMCSLMQGSTLPRRSG
GMDPRMYSLLQGSTTPRRSG

SEQ ID NO: 82523 - protein, 20 aa, Artificial Sequence
  Description of Artificial Sequence: Synthetic peptide
  Seed: GMDPRMCSLMQGSTLPRRSG
GMDPRMYSLLQGSTVPRRSG

SEQ ID NO: 82524 - protein, 20 aa, Artificial Sequence
  Description of Artificial Sequence: Synthetic peptide
  Seed: GMDPRMCSLMQGSTLPRRSG
GMDPRMYSLLQGSTYPRRSG

SEQ ID NO: 82525 - protein, 20 aa, Artificial Sequence
  Description of Artificial Sequence: Synthetic peptide
  Seed: GMDPRMCSLMQGSTLPRRSG
GMDPRMYSLLQHSTIPRRSG

SEQ ID NO: 82526 - protein, 20 aa, Artificial Sequence
  Description of Artificial Sequence: Synthetic peptide
  Seed: GMDPRMCSLMQGSTLPRRSG
GMDPRMYSLLQHSTLPRRSG

SEQ ID NO: 82527 - protein, 20 aa, Artificial Sequence
  Description of Artificial Sequence: Synthetic peptide
  Seed: GMDPRMCSLMQGSTLPRRSG
GMDPRMYSLLQHSTVPRRSG

SEQ ID NO: 82528 - protein, 20 aa, Artificial Sequence
  Description of Artificial Sequence: Synthetic peptide
  Seed: GMDPRMCSLMQGSTLPRRSG
GMDPRMYSLLQISTAPRRSG

SEQ ID NO: 82529 - protein, 20 aa, Artificial Sequence
  Description of Artificial Sequence: Synthetic peptide
  Seed: GMDPRMCSLMQGSTLPRRSG
GMDPRMYSLLQISTDPRRSG

SEQ ID NO: 82530 - protein, 20 aa, Artificial Sequence
  Description of Artificial Sequence: Synthetic peptide
  Seed: GMDPRMCSLMQGSTLPRRSG
GMDPRMYSLLQISTGPRRSG

SEQ ID NO: 82531 - protein, 20 aa, Artificial Sequence
  Description of Artificial Sequence: Synthetic peptide
  Seed: GMDPRMCSLMQGSTLPRRSG
GMDPRMYSLLQISTHPRRSG

SEQ ID NO: 82532 - protein, 20 aa, Artificial Sequence
  Description of Artificial Sequence: Synthetic peptide
  Seed: GMDPRMCSLMQGSTLPRRSG
GMDPRMYSLLQISTIPRRSG

SEQ ID NO: 82533 - protein, 20 aa, Artificial Sequence
  Description of Artificial Sequence: Synthetic peptide
  Seed: GMDPRMCSLMQGSTLPRRSG
GMDPRMYSLLQISTLPRRSG

SEQ ID NO: 82534 - protein, 20 aa, Artificial Sequence
  Description of Artificial Sequence: Synthetic peptide
  Seed: GMDPRMCSLMQGSTLPRRSG
GMDPRMYSLLQISTMPRRSG

SEQ ID NO: 82535 - protein, 20 aa, Artificial Sequence
  Description of Artificial Sequence: Synthetic peptide
  Seed: GMDPRMCSLMQGSTLPRRSG
GMDPRMYSLLQISTNPRRSG

SEQ ID NO: 82536 - protein, 20 aa, Artificial Sequence
  Description of Artificial Sequence: Synthetic peptide
  Seed: GMDPRMCSLMQGSTLPRRSG
GMDPRMYSLLQISTPPRRSG

SEQ ID NO: 82537 - protein, 20 aa, Artificial Sequence
  Description of Artificial Sequence: Synthetic peptide
  Seed: GMDPRMCSLMQGSTLPRRSG
GMDPRMYSLLQISTQPRRSG

SEQ ID NO: 82538 - protein, 20 aa, Artificial Sequence
  Description of Artificial Sequence: Synthetic peptide
  Seed: GMDPRMCSLMQGSTLPRRSG
GMDPRMYSLLQISTSPRRSG

SEQ ID NO: 82539 - protein, 20 aa, Artificial Sequence
  Description of Artificial Sequence: Synthetic peptide
  Seed: GMDPRMCSLMQGSTLPRRSG
GMDPRMYSLLQISTTPRRSG

SEQ ID NO: 82540 - protein, 20 aa, Artificial Sequence
  Description of Artificial Sequence: Synthetic peptide
  Seed: GMDPRMCSLMQGSTLPRRSG
GMDPRMYSLLQISTVPRRSG

SEQ ID NO: 82541 - protein, 20 aa, Artificial Sequence
  Description of Artificial Sequence: Synthetic peptide
  Seed: GMDPRMCSLMQGSTLPRRSG
GMDPRMYSLLQLSTAPRRSG

SEQ ID NO: 82542 - protein, 20 aa, Artificial Sequence
  Description of Artificial Sequence: Synthetic peptide
  Seed: GMDPRMCSLMQGSTLPRRSG
GMDPRMYSLLQLSTIPRRSG

SEQ ID NO: 82543 - protein, 20 aa, Artificial Sequence
  Description of Artificial Sequence: Synthetic peptide
  Seed: GMDPRMCSLMQGSTLPRRSG
GMDPRMYSLLQLSTLPRRSG

SEQ ID NO: 82544 - protein, 20 aa, Artificial Sequence
  Description of Artificial Sequence: Synthetic peptide
  Seed: GMDPRMCSLMQGSTLPRRSG
GMDPRMYSLLQLSTMPRRSG

SEQ ID NO: 82545 - protein, 20 aa, Artificial Sequence
  Description of Artificial Sequence: Synthetic peptide
  Seed: GMDPRMCSLMQGSTLPRRSG
GMDPRMYSLLQLSTNPRRSG

SEQ ID NO: 82546 - protein, 20 aa, Artificial Sequence
  Description of Artificial Sequence: Synthetic peptide
  Seed: GMDPRMCSLMQGSTLPRRSG
GMDPRMYSLLQLSTSPRRSG

SEQ ID NO: 82547 - protein, 20 aa, Artificial Sequence
  Description of Artificial Sequence: Synthetic peptide
  Seed: GMDPRMCSLMQGSTLPRRSG
GMDPRMYSLLQLSTTPRRSG

SEQ ID NO: 82548 - protein, 20 aa, Artificial Sequence
  Description of Artificial Sequence: Synthetic peptide
  Seed: GMDPRMCSLMQGSTLPRRSG
GMDPRMYSLLQLSTVPRRSG

SEQ ID NO: 82549 - protein, 20 aa, Artificial Sequence
  Description of Artificial Sequence: Synthetic peptide
  Seed: GMDPRMCSLMQGSTLPRRSG
GMDPRMYSLLQMSTAPRRSG

SEQ ID NO: 82550 - protein, 20 aa, Artificial Sequence
  Description of Artificial Sequence: Synthetic peptide
  Seed: GMDPRMCSLMQGSTLPRRSG
GMDPRMYSLLQMSTIPRRSG

SEQ ID NO: 82551 - protein, 20 aa, Artificial Sequence
  Description of Artificial Sequence: Synthetic peptide
  Seed: GMDPRMCSLMQGSTLPRRSG
GMDPRMYSLLQMSTLPRRSG

SEQ ID NO: 82552 - protein, 20 aa, Artificial Sequence
  Description of Artificial Sequence: Synthetic peptide
  Seed: GMDPRMCSLMQGSTLPRRSG
GMDPRMYSLLQMSTMPRRSG

SEQ ID NO: 82553 - protein, 20 aa, Artificial Sequence
  Description of Artificial Sequence: Synthetic peptide
  Seed: GMDPRMCSLMQGSTLPRRSG
GMDPRMYSLLQMSTNPRRSG

SEQ ID NO: 82554 - protein, 20 aa, Artificial Sequence
  Description of Artificial Sequence: Synthetic peptide
  Seed: GMDPRMCSLMQGSTLPRRSG
GMDPRMYSLLQMSTSPRRSG

SEQ ID NO: 82555 - protein, 20 aa, Artificial Sequence
  Description of Artificial Sequence: Synthetic peptide
  Seed: GMDPRMCSLMQGSTLPRRSG
GMDPRMYSLLQMSTTPRRSG

SEQ ID NO: 82556 - protein, 20 aa, Artificial Sequence
  Description of Artificial Sequence: Synthetic peptide
  Seed: GMDPRMCSLMQGSTLPRRSG
GMDPRMYSLLQMSTVPRRSG

SEQ ID NO: 82557 - protein, 20 aa, Artificial Sequence
  Description of Artificial Sequence: Synthetic peptide
  Seed: GMDPRMCSLMQGSTLPRRSG
GMDPRMYSLLQNSTAPRRSG

SEQ ID NO: 82558 - protein, 20 aa, Artificial Sequence
  Description of Artificial Sequence: Synthetic peptide
  Seed: GMDPRMCSLMQGSTLPRRSG
GMDPRMYSLLQNSTFPRRSG

SEQ ID NO: 82559 - protein, 20 aa, Artificial Sequence
  Description of Artificial Sequence: Synthetic peptide
  Seed: GMDPRMCSLMQGSTLPRRSG
GMDPRMYSLLQNSTGPRRSG

SEQ ID NO: 82560 - protein, 20 aa, Artificial Sequence
  Description of Artificial Sequence: Synthetic peptide
  Seed: GMDPRMCSLMQGSTLPRRSG
GMDPRMYSLLQNSTIPRRSG

SEQ ID NO: 82561 - protein, 20 aa, Artificial Sequence
  Description of Artificial Sequence: Synthetic peptide
  Seed: GMDPRMCSLMQGSTLPRRSG
GMDPRMYSLLQNSTLPRRSG

SEQ ID NO: 82562 - protein, 20 aa, Artificial Sequence
  Description of Artificial Sequence: Synthetic peptide
  Seed: GMDPRMCSLMQGSTLPRRSG
GMDPRMYSLLQNSTMPRRSG

SEQ ID NO: 82563 - protein, 20 aa, Artificial Sequence
  Description of Artificial Sequence: Synthetic peptide
  Seed: GMDPRMCSLMQGSTLPRRSG
GMDPRMYSLLQNSTNPRRSG

SEQ ID NO: 82564 - protein, 20 aa, Artificial Sequence
  Description of Artificial Sequence: Synthetic peptide
  Seed: GMDPRMCSLMQGSTLPRRSG
GMDPRMYSLLQNSTSPRRSG

SEQ ID NO: 82565 - protein, 20 aa, Artificial Sequence
  Description of Artificial Sequence: Synthetic peptide
  Seed: GMDPRMCSLMQGSTLPRRSG
GMDPRMYSLLQNSTTPRRSG

SEQ ID NO: 82566 - protein, 20 aa, Artificial Sequence
  Description of Artificial Sequence: Synthetic peptide
  Seed: GMDPRMCSLMQGSTLPRRSG
GMDPRMYSLLQNSTVPRRSG

SEQ ID NO: 82567 - protein, 20 aa, Artificial Sequence
  Description of Artificial Sequence: Synthetic peptide
  Seed: GMDPRMCSLMQGSTLPRRSG
GMDPRMYSLLQPSTAPRRSG

SEQ ID NO: 82568 - protein, 20 aa, Artificial Sequence
  Description of Artificial Sequence: Synthetic peptide
  Seed: GMDPRMCSLMQGSTLPRRSG
GMDPRMYSLLQPSTCPRRSG

SEQ ID NO: 82569 - protein, 20 aa, Artificial Sequence
  Description of Artificial Sequence: Synthetic peptide
  Seed: GMDPRMCSLMQGSTLPRRSG
GMDPRMYSLLQPSTDPRRSG

SEQ ID NO: 82570 - protein, 20 aa, Artificial Sequence
  Description of Artificial Sequence: Synthetic peptide
  Seed: GMDPRMCSLMQGSTLPRRSG
GMDPRMYSLLQPSTEPRRSG

SEQ ID NO: 82571 - protein, 20 aa, Artificial Sequence
  Description of Artificial Sequence: Synthetic peptide
  Seed: GMDPRMCSLMQGSTLPRRSG
GMDPRMYSLLQPSTFPRRSG

SEQ ID NO: 82572 - protein, 20 aa, Artificial Sequence
  Description of Artificial Sequence: Synthetic peptide
  Seed: GMDPRMCSLMQGSTLPRRSG
GMDPRMYSLLQPSTGPRRSG

SEQ ID NO: 82573 - protein, 20 aa, Artificial Sequence
  Description of Artificial Sequence: Synthetic peptide
  Seed: GMDPRMCSLMQGSTLPRRSG
GMDPRMYSLLQPSTHPRRSG

SEQ ID NO: 82574 - protein, 20 aa, Artificial Sequence
  Description of Artificial Sequence: Synthetic peptide
  Seed: GMDPRMCSLMQGSTLPRRSG
GMDPRMYSLLQPSTIPRRSG

SEQ ID NO: 82575 - protein, 20 aa, Artificial Sequence
  Description of Artificial Sequence: Synthetic peptide
  Seed: GMDPRMCSLMQGSTLPRRSG
GMDPRMYSLLQPSTLPRRSG

SEQ ID NO: 82576 - protein, 20 aa, Artificial Sequence
  Description of Artificial Sequence: Synthetic peptide
  Seed: GMDPRMCSLMQGSTLPRRSG
GMDPRMYSLLQPSTMPRRSG

SEQ ID NO: 82577 - protein, 20 aa, Artificial Sequence
  Description of Artificial Sequence: Synthetic peptide
  Seed: GMDPRMCSLMQGSTLPRRSG
GMDPRMYSLLQPSTNPRRSG

SEQ ID NO: 82578 - protein, 20 aa, Artificial Sequence
  Description of Artificial Sequence: Synthetic peptide
  Seed: GMDPRMCSLMQGSTLPRRSG
GMDPRMYSLLQPSTPPRRSG

SEQ ID NO: 82579 - protein, 20 aa, Artificial Sequence
  Description of Artificial Sequence: Synthetic peptide
  Seed: GMDPRMCSLMQGSTLPRRSG
GMDPRMYSLLQPSTQPRRSG

SEQ ID NO: 82580 - protein, 20 aa, Artificial Sequence
  Description of Artificial Sequence: Synthetic peptide
  Seed: GMDPRMCSLMQGSTLPRRSG
GMDPRMYSLLQPSTSPRRSG

SEQ ID NO: 82581 - protein, 20 aa, Artificial Sequence
  Description of Artificial Sequence: Synthetic peptide
  Seed: GMDPRMCSLMQGSTLPRRSG
GMDPRMYSLLQPSTTPRRSG

SEQ ID NO: 82582 - protein, 20 aa, Artificial Sequence
  Description of Artificial Sequence: Synthetic peptide
  Seed: GMDPRMCSLMQGSTLPRRSG
GMDPRMYSLLQPSTVPRRSG

SEQ ID NO: 82583 - protein, 20 aa, Artificial Sequence
  Description of Artificial Sequence: Synthetic peptide
  Seed: GMDPRMCSLMQGSTLPRRSG
GMDPRMYSLLQPSTYPRRSG

SEQ ID NO: 82584 - protein, 20 aa, Artificial Sequence
  Description of Artificial Sequence: Synthetic peptide
  Seed: GMDPRMCSLMQGSTLPRRSG
GMDPRMYSLLQQSTAPRRSG

SEQ ID NO: 82585 - protein, 20 aa, Artificial Sequence
  Description of Artificial Sequence: Synthetic peptide
  Seed: GMDPRMCSLMQGSTLPRRSG
GMDPRMYSLLQQSTIPRRSG

SEQ ID NO: 82586 - protein, 20 aa, Artificial Sequence
  Description of Artificial Sequence: Synthetic peptide
  Seed: GMDPRMCSLMQGSTLPRRSG
GMDPRMYSLLQQSTLPRRSG

SEQ ID NO: 82587 - protein, 20 aa, Artificial Sequence
  Description of Artificial Sequence: Synthetic peptide
  Seed: GMDPRMCSLMQGSTLPRRSG
GMDPRMYSLLQQSTVPRRSG

SEQ ID NO: 82588 - protein, 20 aa, Artificial Sequence
  Description of Artificial Sequence: Synthetic peptide
  Seed: GMDPRMCSLMQGSTLPRRSG
GMDPRMYSLLQSSTAPRRSG

SEQ ID NO: 82589 - protein, 20 aa, Artificial Sequence
  Description of Artificial Sequence: Synthetic peptide
  Seed: GMDPRMCSLMQGSTLPRRSG
GMDPRMYSLLQSSTCPRRSG

SEQ ID NO: 82590 - protein, 20 aa, Artificial Sequence
  Description of Artificial Sequence: Synthetic peptide
  Seed: GMDPRMCSLMQGSTLPRRSG
GMDPRMYSLLQSSTDPRRSG

SEQ ID NO: 82591 - protein, 20 aa, Artificial Sequence
  Description of Artificial Sequence: Synthetic peptide
  Seed: GMDPRMCSLMQGSTLPRRSG
GMDPRMYSLLQSSTEPRRSG

SEQ ID NO: 82592 - protein, 20 aa, Artificial Sequence
  Description of Artificial Sequence: Synthetic peptide
  Seed: GMDPRMCSLMQGSTLPRRSG
GMDPRMYSLLQSSTFPRRSG

SEQ ID NO: 82593 - protein, 20 aa, Artificial Sequence
  Description of Artificial Sequence: Synthetic peptide
  Seed: GMDPRMCSLMQGSTLPRRSG
GMDPRMYSLLQSSTGPRRSG

SEQ ID NO: 82594 - protein, 20 aa, Artificial Sequence
  Description of Artificial Sequence: Synthetic peptide
  Seed: GMDPRMCSLMQGSTLPRRSG
GMDPRMYSLLQSSTHPRRSG

SEQ ID NO: 82595 - protein, 20 aa, Artificial Sequence
  Description of Artificial Sequence: Synthetic peptide
  Seed: GMDPRMCSLMQGSTLPRRSG
GMDPRMYSLLQSSTIPRRSG

SEQ ID NO: 82596 - protein, 20 aa, Artificial Sequence
  Description of Artificial Sequence: Synthetic peptide
  Seed: GMDPRMCSLMQGSTLPRRSG
GMDPRMYSLLQSSTLPRRSG

SEQ ID NO: 82597 - protein, 20 aa, Artificial Sequence
  Description of Artificial Sequence: Synthetic peptide
  Seed: GMDPRMCSLMQGSTLPRRSG
GMDPRMYSLLQSSTMPRRSG

SEQ ID NO: 82598 - protein, 20 aa, Artificial Sequence
  Description of Artificial Sequence: Synthetic peptide
  Seed: GMDPRMCSLMQGSTLPRRSG
GMDPRMYSLLQSSTNPRRSG

SEQ ID NO: 82599 - protein, 20 aa, Artificial Sequence
  Description of Artificial Sequence: Synthetic peptide
  Seed: GMDPRMCSLMQGSTLPRRSG
GMDPRMYSLLQSSTPPRRSG

SEQ ID NO: 82600 - protein, 20 aa, Artificial Sequence
  Description of Artificial Sequence: Synthetic peptide
  Seed: GMDPRMCSLMQGSTLPRRSG
GMDPRMYSLLQSSTQPRRSG

SEQ ID NO: 82601 - protein, 20 aa, Artificial Sequence
  Description of Artificial Sequence: Synthetic peptide
  Seed: GMDPRMCSLMQGSTLPRRSG
GMDPRMYSLLQSSTSPRRSG

SEQ ID NO: 82602 - protein, 20 aa, Artificial Sequence
  Description of Artificial Sequence: Synthetic peptide
  Seed: GMDPRMCSLMQGSTLPRRSG
GMDPRMYSLLQSSTTPRRSG

SEQ ID NO: 82603 - protein, 20 aa, Artificial Sequence
  Description of Artificial Sequence: Synthetic peptide
  Seed: GMDPRMCSLMQGSTLPRRSG
GMDPRMYSLLQSSTVPRRSG

SEQ ID NO: 82604 - protein, 20 aa, Artificial Sequence
  Description of Artificial Sequence: Synthetic peptide
  Seed: GMDPRMCSLMQGSTLPRRSG
GMDPRMYSLLQSSTYPRRSG

SEQ ID NO: 82605 - protein, 20 aa, Artificial Sequence
  Description of Artificial Sequence: Synthetic peptide
  Seed: GMDPRMCSLMQGSTLPRRSG
GMDPRMYSLLQTSTAPRRSG

SEQ ID NO: 82606 - protein, 20 aa, Artificial Sequence
  Description of Artificial Sequence: Synthetic peptide
  Seed: GMDPRMCSLMQGSTLPRRSG
GMDPRMYSLLQTSTCPRRSG

SEQ ID NO: 82607 - protein, 20 aa, Artificial Sequence
  Description of Artificial Sequence: Synthetic peptide
  Seed: GMDPRMCSLMQGSTLPRRSG
GMDPRMYSLLQTSTDPRRSG

SEQ ID NO: 82608 - protein, 20 aa, Artificial Sequence
  Description of Artificial Sequence: Synthetic peptide
  Seed: GMDPRMCSLMQGSTLPRRSG
GMDPRMYSLLQTSTEPRRSG

SEQ ID NO: 82609 - protein, 20 aa, Artificial Sequence
  Description of Artificial Sequence: Synthetic peptide
  Seed: GMDPRMCSLMQGSTLPRRSG
GMDPRMYSLLQTSTFPRRSG

SEQ ID NO: 82610 - protein, 20 aa, Artificial Sequence
  Description of Artificial Sequence: Synthetic peptide
  Seed: GMDPRMCSLMQGSTLPRRSG
GMDPRMYSLLQTSTGPRRSG

SEQ ID NO: 82611 - protein, 20 aa, Artificial Sequence
  Description of Artificial Sequence: Synthetic peptide
  Seed: GMDPRMCSLMQGSTLPRRSG
GMDPRMYSLLQTSTHPRRSG

SEQ ID NO: 82612 - protein, 20 aa, Artificial Sequence
  Description of Artificial Sequence: Synthetic peptide
  Seed: GMDPRMCSLMQGSTLPRRSG
GMDPRMYSLLQTSTIPRRSG

SEQ ID NO: 82613 - protein, 20 aa, Artificial Sequence
  Description of Artificial Sequence: Synthetic peptide
  Seed: GMDPRMCSLMQGSTLPRRSG
GMDPRMYSLLQTSTLPRRSG

SEQ ID NO: 82614 - protein, 20 aa, Artificial Sequence
  Description of Artificial Sequence: Synthetic peptide
  Seed: GMDPRMCSLMQGSTLPRRSG
GMDPRMYSLLQTSTMPRRSG

SEQ ID NO: 82615 - protein, 20 aa, Artificial Sequence
  Description of Artificial Sequence: Synthetic peptide
  Seed: GMDPRMCSLMQGSTLPRRSG
GMDPRMYSLLQTSTNPRRSG

SEQ ID NO: 82616 - protein, 20 aa, Artificial Sequence
  Description of Artificial Sequence: Synthetic peptide
  Seed: GMDPRMCSLMQGSTLPRRSG
GMDPRMYSLLQTSTPPRRSG

SEQ ID NO: 82617 - protein, 20 aa, Artificial Sequence
  Description of Artificial Sequence: Synthetic peptide
  Seed: GMDPRMCSLMQGSTLPRRSG
GMDPRMYSLLQTSTQPRRSG

SEQ ID NO: 82618 - protein, 20 aa, Artificial Sequence
  Description of Artificial Sequence: Synthetic peptide
  Seed: GMDPRMCSLMQGSTLPRRSG
GMDPRMYSLLQTSTSPRRSG

SEQ ID NO: 82619 - protein, 20 aa, Artificial Sequence
  Description of Artificial Sequence: Synthetic peptide
  Seed: GMDPRMCSLMQGSTLPRRSG
GMDPRMYSLLQTSTTPRRSG

SEQ ID NO: 82620 - protein, 20 aa, Artificial Sequence
  Description of Artificial Sequence: Synthetic peptide
  Seed: GMDPRMCSLMQGSTLPRRSG
GMDPRMYSLLQTSTVPRRSG

SEQ ID NO: 82621 - protein, 20 aa, Artificial Sequence
  Description of Artificial Sequence: Synthetic peptide
  Seed: GMDPRMCSLMQGSTLPRRSG
GMDPRMYSLLQVSTAPRRSG

SEQ ID NO: 82622 - protein, 20 aa, Artificial Sequence
  Description of Artificial Sequence: Synthetic peptide
  Seed: GMDPRMCSLMQGSTLPRRSG
GMDPRMYSLLQVSTCPRRSG

SEQ ID NO: 82623 - protein, 20 aa, Artificial Sequence
  Description of Artificial Sequence: Synthetic peptide
  Seed: GMDPRMCSLMQGSTLPRRSG
GMDPRMYSLLQVSTDPRRSG

SEQ ID NO: 82624 - protein, 20 aa, Artificial Sequence
  Description of Artificial Sequence: Synthetic peptide
  Seed: GMDPRMCSLMQGSTLPRRSG
GMDPRMYSLLQVSTEPRRSG

SEQ ID NO: 82625 - protein, 20 aa, Artificial Sequence
  Description of Artificial Sequence: Synthetic peptide
  Seed: GMDPRMCSLMQGSTLPRRSG
GMDPRMYSLLQVSTGPRRSG

SEQ ID NO: 82626 - protein, 20 aa, Artificial Sequence
  Description of Artificial Sequence: Synthetic peptide
  Seed: GMDPRMCSLMQGSTLPRRSG
GMDPRMYSLLQVSTHPRRSG

SEQ ID NO: 82627 - protein, 20 aa, Artificial Sequence
  Description of Artificial Sequence: Synthetic peptide
  Seed: GMDPRMCSLMQGSTLPRRSG
GMDPRMYSLLQVSTIPRRSG

SEQ ID NO: 82628 - protein, 20 aa, Artificial Sequence
  Description of Artificial Sequence: Synthetic peptide
  Seed: GMDPRMCSLMQGSTLPRRSG
GMDPRMYSLLQVSTLPRRSG

SEQ ID NO: 82629 - protein, 20 aa, Artificial Sequence
  Description of Artificial Sequence: Synthetic peptide
  Seed: GMDPRMCSLMQGSTLPRRSG
GMDPRMYSLLQVSTMPRRSG

SEQ ID NO: 82630 - protein, 20 aa, Artificial Sequence
  Description of Artificial Sequence: Synthetic peptide
  Seed: GMDPRMCSLMQGSTLPRRSG
GMDPRMYSLLQVSTNPRRSG

SEQ ID NO: 82631 - protein, 20 aa, Artificial Sequence
  Description of Artificial Sequence: Synthetic peptide
  Seed: GMDPRMCSLMQGSTLPRRSG
GMDPRMYSLLQVSTPPRRSG

SEQ ID NO: 82632 - protein, 20 aa, Artificial Sequence
  Description of Artificial Sequence: Synthetic peptide
  Seed: GMDPRMCSLMQGSTLPRRSG
GMDPRMYSLLQVSTQPRRSG

SEQ ID NO: 82633 - protein, 20 aa, Artificial Sequence
  Description of Artificial Sequence: Synthetic peptide
  Seed: GMDPRMCSLMQGSTLPRRSG
GMDPRMYSLLQVSTSPRRSG

SEQ ID NO: 82634 - protein, 20 aa, Artificial Sequence
  Description of Artificial Sequence: Synthetic peptide
  Seed: GMDPRMCSLMQGSTLPRRSG
GMDPRMYSLLQVSTTPRRSG

SEQ ID NO: 82635 - protein, 20 aa, Artificial Sequence
  Description of Artificial Sequence: Synthetic peptide
  Seed: GMDPRMCSLMQGSTLPRRSG
GMDPRMYSLLQVSTVPRRSG

SEQ ID NO: 82636 - protein, 20 aa, Artificial Sequence
  Description of Artificial Sequence: Synthetic peptide
  Seed: GMDPRMCSLMQGSTLPRRSG
GMDPRMYSLMQASTAPRRSG

SEQ ID NO: 82637 - protein, 20 aa, Artificial Sequence
  Description of Artificial Sequence: Synthetic peptide
  Seed: GMDPRMCSLMQGSTLPRRSG
GMDPRMYSLMQASTCPRRSG

SEQ ID NO: 82638 - protein, 20 aa, Artificial Sequence
  Description of Artificial Sequence: Synthetic peptide
  Seed: GMDPRMCSLMQGSTLPRRSG
GMDPRMYSLMQASTDPRRSG

SEQ ID NO: 82639 - protein, 20 aa, Artificial Sequence
  Description of Artificial Sequence: Synthetic peptide
  Seed: GMDPRMCSLMQGSTLPRRSG
GMDPRMYSLMQASTEPRRSG

SEQ ID NO: 82640 - protein, 20 aa, Artificial Sequence
  Description of Artificial Sequence: Synthetic peptide
  Seed: GMDPRMCSLMQGSTLPRRSG
GMDPRMYSLMQASTFPRRSG

SEQ ID NO: 82641 - protein, 20 aa, Artificial Sequence
  Description of Artificial Sequence: Synthetic peptide
  Seed: GMDPRMCSLMQGSTLPRRSG
GMDPRMYSLMQASTGPRRSG

SEQ ID NO: 82642 - protein, 20 aa, Artificial Sequence
  Description of Artificial Sequence: Synthetic peptide
  Seed: GMDPRMCSLMQGSTLPRRSG
GMDPRMYSLMQASTHPRRSG

SEQ ID NO: 82643 - protein, 20 aa, Artificial Sequence
  Description of Artificial Sequence: Synthetic peptide
  Seed: GMDPRMCSLMQGSTLPRRSG
GMDPRMYSLMQASTIPRRSG

SEQ ID NO: 82644 - protein, 20 aa, Artificial Sequence
  Description of Artificial Sequence: Synthetic peptide
  Seed: GMDPRMCSLMQGSTLPRRSG
GMDPRMYSLMQASTKPRRSG

SEQ ID NO: 82645 - protein, 20 aa, Artificial Sequence
  Description of Artificial Sequence: Synthetic peptide
  Seed: GMDPRMCSLMQGSTLPRRSG
GMDPRMYSLMQASTLPRRSG

SEQ ID NO: 82646 - protein, 20 aa, Artificial Sequence
  Description of Artificial Sequence: Synthetic peptide
  Seed: GMDPRMCSLMQGSTLPRRSG
GMDPRMYSLMQASTMPRRSG

SEQ ID NO: 82647 - protein, 20 aa, Artificial Sequence
  Description of Artificial Sequence: Synthetic peptide
  Seed: GMDPRMCSLMQGSTLPRRSG
GMDPRMYSLMQASTNPRRSG

SEQ ID NO: 82648 - protein, 20 aa, Artificial Sequence
  Description of Artificial Sequence: Synthetic peptide
  Seed: GMDPRMCSLMQGSTLPRRSG
GMDPRMYSLMQASTPPRRSG

SEQ ID NO: 82649 - protein, 20 aa, Artificial Sequence
  Description of Artificial Sequence: Synthetic peptide
  Seed: GMDPRMCSLMQGSTLPRRSG
GMDPRMYSLMQASTQPRRSG

SEQ ID NO: 82650 - protein, 20 aa, Artificial Sequence
  Description of Artificial Sequence: Synthetic peptide
  Seed: GMDPRMCSLMQGSTLPRRSG
GMDPRMYSLMQASTRPRRSG

SEQ ID NO: 82651 - protein, 20 aa, Artificial Sequence
  Description of Artificial Sequence: Synthetic peptide
  Seed: GMDPRMCSLMQGSTLPRRSG
GMDPRMYSLMQASTSPRRSG

SEQ ID NO: 82652 - protein, 20 aa, Artificial Sequence
  Description of Artificial Sequence: Synthetic peptide
  Seed: GMDPRMCSLMQGSTLPRRSG
GMDPRMYSLMQASTTPRRSG

SEQ ID NO: 82653 - protein, 20 aa, Artificial Sequence
  Description of Artificial Sequence: Synthetic peptide
  Seed: GMDPRMCSLMQGSTLPRRSG
GMDPRMYSLMQASTVPRRSG

SEQ ID NO: 82654 - protein, 20 aa, Artificial Sequence
  Description of Artificial Sequence: Synthetic peptide
  Seed: GMDPRMCSLMQGSTLPRRSG
GMDPRMYSLMQASTWPRRSG

SEQ ID NO: 82655 - protein, 20 aa, Artificial Sequence
  Description of Artificial Sequence: Synthetic peptide
  Seed: GMDPRMCSLMQGSTLPRRSG
GMDPRMYSLMQASTYPRRSG

SEQ ID NO: 82656 - protein, 20 aa, Artificial Sequence
  Description of Artificial Sequence: Synthetic peptide
  Seed: GMDPRMCSLMQGSTLPRRSG
GMDPRMYSLMQCSTAPRRSG

SEQ ID NO: 82657 - protein, 20 aa, Artificial Sequence
  Description of Artificial Sequence: Synthetic peptide
  Seed: GMDPRMCSLMQGSTLPRRSG
GMDPRMYSLMQCSTVPRRSG

SEQ ID NO: 82658 - protein, 20 aa, Artificial Sequence
  Description of Artificial Sequence: Synthetic peptide
  Seed: GMDPRMCSLMQGSTLPRRSG
GMDPRMYSLMQESTAPRRSG

SEQ ID NO: 82659 - protein, 20 aa, Artificial Sequence
  Description of Artificial Sequence: Synthetic peptide
  Seed: GMDPRMCSLMQGSTLPRRSG
GMDPRMYSLMQESTLPRRSG

SEQ ID NO: 82660 - protein, 20 aa, Artificial Sequence
  Description of Artificial Sequence: Synthetic peptide
  Seed: GMDPRMCSLMQGSTLPRRSG
GMDPRMYSLMQESTVPRRSG

SEQ ID NO: 82661 - protein, 20 aa, Artificial Sequence
  Description of Artificial Sequence: Synthetic peptide
  Seed: GMDPRMCSLMQGSTLPRRSG
GMDPRMYSLMQGSTAPRRSG

SEQ ID NO: 82662 - protein, 20 aa, Artificial Sequence
  Description of Artificial Sequence: Synthetic peptide
  Seed: GMDPRMCSLMQGSTLPRRSG
GMDPRMYSLMQGSTCPRRSG

SEQ ID NO: 82663 - protein, 20 aa, Artificial Sequence
  Description of Artificial Sequence: Synthetic peptide
  Seed: GMDPRMCSLMQGSTLPRRSG
GMDPRMYSLMQGSTFPRRSG

SEQ ID NO: 82664 - protein, 20 aa, Artificial Sequence
  Description of Artificial Sequence: Synthetic peptide
  Seed: GMDPRMCSLMQGSTLPRRSG
GMDPRMYSLMQGSTGPRRSG

SEQ ID NO: 82665 - protein, 20 aa, Artificial Sequence
  Description of Artificial Sequence: Synthetic peptide
  Seed: GMDPRMCSLMQGSTLPRRSG
GMDPRMYSLMQGSTHPRRSG

SEQ ID NO: 82666 - protein, 20 aa, Artificial Sequence
  Description of Artificial Sequence: Synthetic peptide
  Seed: GMDPRMCSLMQGSTLPRRSG
GMDPRMYSLMQGSTIPRRSG

SEQ ID NO: 82667 - protein, 20 aa, Artificial Sequence
  Description of Artificial Sequence: Synthetic peptide
  Seed: GMDPRMCSLMQGSTLPRRSG
GMDPRMYSLMQGSTLPRRSG

SEQ ID NO: 82668 - protein, 20 aa, Artificial Sequence
  Description of Artificial Sequence: Synthetic peptide
  Seed: GMDPRMCSLMQGSTLPRRSG
GMDPRMYSLMQGSTMPRRSG

SEQ ID NO: 82669 - protein, 20 aa, Artificial Sequence
  Description of Artificial Sequence: Synthetic peptide
  Seed: GMDPRMCSLMQGSTLPRRSG
GMDPRMYSLMQGSTNPRRSG

SEQ ID NO: 82670 - protein, 20 aa, Artificial Sequence
  Description of Artificial Sequence: Synthetic peptide
  Seed: GMDPRMCSLMQGSTLPRRSG
GMDPRMYSLMQGSTQPRRSG

SEQ ID NO: 82671 - protein, 20 aa, Artificial Sequence
  Description of Artificial Sequence: Synthetic peptide
  Seed: GMDPRMCSLMQGSTLPRRSG
GMDPRMYSLMQGSTSPRRSG

SEQ ID NO: 82672 - protein, 20 aa, Artificial Sequence
  Description of Artificial Sequence: Synthetic peptide
  Seed: GMDPRMCSLMQGSTLPRRSG
GMDPRMYSLMQGSTTPRRSG

SEQ ID NO: 82673 - protein, 20 aa, Artificial Sequence
  Description of Artificial Sequence: Synthetic peptide
  Seed: GMDPRMCSLMQGSTLPRRSG
GMDPRMYSLMQGSTVPRRSG

SEQ ID NO: 82674 - protein, 20 aa, Artificial Sequence
  Description of Artificial Sequence: Synthetic peptide
  Seed: GMDPRMCSLMQGSTLPRRSG
GMDPRMYSLMQGSTYPRRSG

SEQ ID NO: 82675 - protein, 20 aa, Artificial Sequence
  Description of Artificial Sequence: Synthetic peptide
  Seed: GMDPRMCSLMQGSTLPRRSG
GMDPRMYSLMQHSTAPRRSG

SEQ ID NO: 82676 - protein, 20 aa, Artificial Sequence
  Description of Artificial Sequence: Synthetic peptide
  Seed: GMDPRMCSLMQGSTLPRRSG
GMDPRMYSLMQHSTIPRRSG

SEQ ID NO: 82677 - protein, 20 aa, Artificial Sequence
  Description of Artificial Sequence: Synthetic peptide
  Seed: GMDPRMCSLMQGSTLPRRSG
GMDPRMYSLMQHSTLPRRSG

SEQ ID NO: 82678 - protein, 20 aa, Artificial Sequence
  Description of Artificial Sequence: Synthetic peptide
  Seed: GMDPRMCSLMQGSTLPRRSG
GMDPRMYSLMQHSTVPRRSG

SEQ ID NO: 82679 - protein, 20 aa, Artificial Sequence
  Description of Artificial Sequence: Synthetic peptide
  Seed: GMDPRMCSLMQGSTLPRRSG
GMDPRMYSLMQISTAPRRSG

SEQ ID NO: 82680 - protein, 20 aa, Artificial Sequence
  Description of Artificial Sequence: Synthetic peptide
  Seed: GMDPRMCSLMQGSTLPRRSG
GMDPRMYSLMQISTDPRRSG

SEQ ID NO: 82681 - protein, 20 aa, Artificial Sequence
  Description of Artificial Sequence: Synthetic peptide
  Seed: GMDPRMCSLMQGSTLPRRSG
GMDPRMYSLMQISTEPRRSG

SEQ ID NO: 82682 - protein, 20 aa, Artificial Sequence
  Description of Artificial Sequence: Synthetic peptide
  Seed: GMDPRMCSLMQGSTLPRRSG
GMDPRMYSLMQISTGPRRSG

SEQ ID NO: 82683 - protein, 20 aa, Artificial Sequence
  Description of Artificial Sequence: Synthetic peptide
  Seed: GMDPRMCSLMQGSTLPRRSG
GMDPRMYSLMQISTHPRRSG

SEQ ID NO: 82684 - protein, 20 aa, Artificial Sequence
  Description of Artificial Sequence: Synthetic peptide
  Seed: GMDPRMCSLMQGSTLPRRSG
GMDPRMYSLMQISTIPRRSG

SEQ ID NO: 82685 - protein, 20 aa, Artificial Sequence
  Description of Artificial Sequence: Synthetic peptide
  Seed: GMDPRMCSLMQGSTLPRRSG
GMDPRMYSLMQISTLPRRSG

SEQ ID NO: 82686 - protein, 20 aa, Artificial Sequence
  Description of Artificial Sequence: Synthetic peptide
  Seed: GMDPRMCSLMQGSTLPRRSG
GMDPRMYSLMQISTMPRRSG

SEQ ID NO: 82687 - protein, 20 aa, Artificial Sequence
  Description of Artificial Sequence: Synthetic peptide
  Seed: GMDPRMCSLMQGSTLPRRSG
GMDPRMYSLMQISTNPRRSG

SEQ ID NO: 82688 - protein, 20 aa, Artificial Sequence
  Description of Artificial Sequence: Synthetic peptide
  Seed: GMDPRMCSLMQGSTLPRRSG
GMDPRMYSLMQISTPPRRSG

SEQ ID NO: 82689 - protein, 20 aa, Artificial Sequence
  Description of Artificial Sequence: Synthetic peptide
  Seed: GMDPRMCSLMQGSTLPRRSG
GMDPRMYSLMQISTQPRRSG

SEQ ID NO: 82690 - protein, 20 aa, Artificial Sequence
  Description of Artificial Sequence: Synthetic peptide
  Seed: GMDPRMCSLMQGSTLPRRSG
GMDPRMYSLMQISTSPRRSG

SEQ ID NO: 82691 - protein, 20 aa, Artificial Sequence
  Description of Artificial Sequence: Synthetic peptide
  Seed: GMDPRMCSLMQGSTLPRRSG
GMDPRMYSLMQISTTPRRSG

SEQ ID NO: 82692 - protein, 20 aa, Artificial Sequence
  Description of Artificial Sequence: Synthetic peptide
  Seed: GMDPRMCSLMQGSTLPRRSG
GMDPRMYSLMQISTVPRRSG

SEQ ID NO: 82693 - protein, 20 aa, Artificial Sequence
  Description of Artificial Sequence: Synthetic peptide
  Seed: GMDPRMCSLMQGSTLPRRSG
GMDPRMYSLMQLSTAPRRSG

SEQ ID NO: 82694 - protein, 20 aa, Artificial Sequence
  Description of Artificial Sequence: Synthetic peptide
  Seed: GMDPRMCSLMQGSTLPRRSG
GMDPRMYSLMQLSTGPRRSG

SEQ ID NO: 82695 - protein, 20 aa, Artificial Sequence
  Description of Artificial Sequence: Synthetic peptide
  Seed: GMDPRMCSLMQGSTLPRRSG
GMDPRMYSLMQLSTHPRRSG

SEQ ID NO: 82696 - protein, 20 aa, Artificial Sequence
  Description of Artificial Sequence: Synthetic peptide
  Seed: GMDPRMCSLMQGSTLPRRSG
GMDPRMYSLMQLSTIPRRSG

SEQ ID NO: 82697 - protein, 20 aa, Artificial Sequence
  Description of Artificial Sequence: Synthetic peptide
  Seed: GMDPRMCSLMQGSTLPRRSG
GMDPRMYSLMQLSTLPRRSG

SEQ ID NO: 82698 - protein, 20 aa, Artificial Sequence
  Description of Artificial Sequence: Synthetic peptide
  Seed: GMDPRMCSLMQGSTLPRRSG
GMDPRMYSLMQLSTMPRRSG

SEQ ID NO: 82699 - protein, 20 aa, Artificial Sequence
  Description of Artificial Sequence: Synthetic peptide
  Seed: GMDPRMCSLMQGSTLPRRSG
GMDPRMYSLMQLSTNPRRSG

SEQ ID NO: 82700 - protein, 20 aa, Artificial Sequence
  Description of Artificial Sequence: Synthetic peptide
  Seed: GMDPRMCSLMQGSTLPRRSG
GMDPRMYSLMQLSTSPRRSG

SEQ ID NO: 82701 - protein, 20 aa, Artificial Sequence
  Description of Artificial Sequence: Synthetic peptide
  Seed: GMDPRMCSLMQGSTLPRRSG
GMDPRMYSLMQLSTTPRRSG

SEQ ID NO: 82702 - protein, 20 aa, Artificial Sequence
  Description of Artificial Sequence: Synthetic peptide
  Seed: GMDPRMCSLMQGSTLPRRSG
GMDPRMYSLMQLSTVPRRSG

SEQ ID NO: 82703 - protein, 20 aa, Artificial Sequence
  Description of Artificial Sequence: Synthetic peptide
  Seed: GMDPRMCSLMQGSTLPRRSG
GMDPRMYSLMQMSTAPRRSG

SEQ ID NO: 82704 - protein, 20 aa, Artificial Sequence
  Description of Artificial Sequence: Synthetic peptide
  Seed: GMDPRMCSLMQGSTLPRRSG
GMDPRMYSLMQMSTIPRRSG

SEQ ID NO: 82705 - protein, 20 aa, Artificial Sequence
  Description of Artificial Sequence: Synthetic peptide
  Seed: GMDPRMCSLMQGSTLPRRSG
GMDPRMYSLMQMSTLPRRSG

SEQ ID NO: 82706 - protein, 20 aa, Artificial Sequence
  Description of Artificial Sequence: Synthetic peptide
  Seed: GMDPRMCSLMQGSTLPRRSG
GMDPRMYSLMQMSTMPRRSG

SEQ ID NO: 82707 - protein, 20 aa, Artificial Sequence
  Description of Artificial Sequence: Synthetic peptide
  Seed: GMDPRMCSLMQGSTLPRRSG
GMDPRMYSLMQMSTNPRRSG

SEQ ID NO: 82708 - protein, 20 aa, Artificial Sequence
  Description of Artificial Sequence: Synthetic peptide
  Seed: GMDPRMCSLMQGSTLPRRSG
GMDPRMYSLMQMSTSPRRSG

SEQ ID NO: 82709 - protein, 20 aa, Artificial Sequence
  Description of Artificial Sequence: Synthetic peptide
  Seed: GMDPRMCSLMQGSTLPRRSG
GMDPRMYSLMQMSTTPRRSG

SEQ ID NO: 82710 - protein, 20 aa, Artificial Sequence
  Description of Artificial Sequence: Synthetic peptide
  Seed: GMDPRMCSLMQGSTLPRRSG
GMDPRMYSLMQMSTVPRRSG

SEQ ID NO: 82711 - protein, 20 aa, Artificial Sequence
  Description of Artificial Sequence: Synthetic peptide
  Seed: GMDPRMCSLMQGSTLPRRSG
GMDPRMYSLMQNSTAPRRSG

SEQ ID NO: 82712 - protein, 20 aa, Artificial Sequence
  Description of Artificial Sequence: Synthetic peptide
  Seed: GMDPRMCSLMQGSTLPRRSG
GMDPRMYSLMQNSTGPRRSG

SEQ ID NO: 82713 - protein, 20 aa, Artificial Sequence
  Description of Artificial Sequence: Synthetic peptide
  Seed: GMDPRMCSLMQGSTLPRRSG
GMDPRMYSLMQNSTIPRRSG

SEQ ID NO: 82714 - protein, 20 aa, Artificial Sequence
  Description of Artificial Sequence: Synthetic peptide
  Seed: GMDPRMCSLMQGSTLPRRSG
GMDPRMYSLMQNSTLPRRSG

SEQ ID NO: 82715 - protein, 20 aa, Artificial Sequence
  Description of Artificial Sequence: Synthetic peptide
  Seed: GMDPRMCSLMQGSTLPRRSG
GMDPRMYSLMQNSTMPRRSG

SEQ ID NO: 82716 - protein, 20 aa, Artificial Sequence
  Description of Artificial Sequence: Synthetic peptide
  Seed: GMDPRMCSLMQGSTLPRRSG
GMDPRMYSLMQNSTNPRRSG

SEQ ID NO: 82717 - protein, 20 aa, Artificial Sequence
  Description of Artificial Sequence: Synthetic peptide
  Seed: GMDPRMCSLMQGSTLPRRSG
GMDPRMYSLMQNSTSPRRSG

SEQ ID NO: 82718 - protein, 20 aa, Artificial Sequence
  Description of Artificial Sequence: Synthetic peptide
  Seed: GMDPRMCSLMQGSTLPRRSG
GMDPRMYSLMQNSTTPRRSG

SEQ ID NO: 82719 - protein, 20 aa, Artificial Sequence
  Description of Artificial Sequence: Synthetic peptide
  Seed: GMDPRMCSLMQGSTLPRRSG
GMDPRMYSLMQNSTVPRRSG

SEQ ID NO: 82720 - protein, 20 aa, Artificial Sequence
  Description of Artificial Sequence: Synthetic peptide
  Seed: GMDPRMCSLMQGSTLPRRSG
GMDPRMYSLMQPSTAPRRSG

SEQ ID NO: 82721 - protein, 20 aa, Artificial Sequence
  Description of Artificial Sequence: Synthetic peptide
  Seed: GMDPRMCSLMQGSTLPRRSG
GMDPRMYSLMQPSTCPRRSG

SEQ ID NO: 82722 - protein, 20 aa, Artificial Sequence
  Description of Artificial Sequence: Synthetic peptide
  Seed: GMDPRMCSLMQGSTLPRRSG
GMDPRMYSLMQPSTDPRRSG

SEQ ID NO: 82723 - protein, 20 aa, Artificial Sequence
  Description of Artificial Sequence: Synthetic peptide
  Seed: GMDPRMCSLMQGSTLPRRSG
GMDPRMYSLMQPSTEPRRSG

SEQ ID NO: 82724 - protein, 20 aa, Artificial Sequence
  Description of Artificial Sequence: Synthetic peptide
  Seed: GMDPRMCSLMQGSTLPRRSG
GMDPRMYSLMQPSTFPRRSG

SEQ ID NO: 82725 - protein, 20 aa, Artificial Sequence
  Description of Artificial Sequence: Synthetic peptide
  Seed: GMDPRMCSLMQGSTLPRRSG
GMDPRMYSLMQPSTGPRRSG

SEQ ID NO: 82726 - protein, 20 aa, Artificial Sequence
  Description of Artificial Sequence: Synthetic peptide
  Seed: GMDPRMCSLMQGSTLPRRSG
GMDPRMYSLMQPSTHPRRSG

SEQ ID NO: 82727 - protein, 20 aa, Artificial Sequence
  Description of Artificial Sequence: Synthetic peptide
  Seed: GMDPRMCSLMQGSTLPRRSG
GMDPRMYSLMQPSTIPRRSG

SEQ ID NO: 82728 - protein, 20 aa, Artificial Sequence
  Description of Artificial Sequence: Synthetic peptide
  Seed: GMDPRMCSLMQGSTLPRRSG
GMDPRMYSLMQPSTLPRRSG

SEQ ID NO: 82729 - protein, 20 aa, Artificial Sequence
  Description of Artificial Sequence: Synthetic peptide
  Seed: GMDPRMCSLMQGSTLPRRSG
GMDPRMYSLMQPSTMPRRSG

SEQ ID NO: 82730 - protein, 20 aa, Artificial Sequence
  Description of Artificial Sequence: Synthetic peptide
  Seed: GMDPRMCSLMQGSTLPRRSG
GMDPRMYSLMQPSTNPRRSG

SEQ ID NO: 82731 - protein, 20 aa, Artificial Sequence
  Description of Artificial Sequence: Synthetic peptide
  Seed: GMDPRMCSLMQGSTLPRRSG
GMDPRMYSLMQPSTPPRRSG

SEQ ID NO: 82732 - protein, 20 aa, Artificial Sequence
  Description of Artificial Sequence: Synthetic peptide
  Seed: GMDPRMCSLMQGSTLPRRSG
GMDPRMYSLMQPSTQPRRSG

SEQ ID NO: 82733 - protein, 20 aa, Artificial Sequence
  Description of Artificial Sequence: Synthetic peptide
  Seed: GMDPRMCSLMQGSTLPRRSG
GMDPRMYSLMQPSTSPRRSG

SEQ ID NO: 82734 - protein, 20 aa, Artificial Sequence
  Description of Artificial Sequence: Synthetic peptide
  Seed: GMDPRMCSLMQGSTLPRRSG
GMDPRMYSLMQPSTTPRRSG

SEQ ID NO: 82735 - protein, 20 aa, Artificial Sequence
  Description of Artificial Sequence: Synthetic peptide
  Seed: GMDPRMCSLMQGSTLPRRSG
GMDPRMYSLMQPSTVPRRSG

SEQ ID NO: 82736 - protein, 20 aa, Artificial Sequence
  Description of Artificial Sequence: Synthetic peptide
  Seed: GMDPRMCSLMQGSTLPRRSG
GMDPRMYSLMQPSTWPRRSG

SEQ ID NO: 82737 - protein, 20 aa, Artificial Sequence
  Description of Artificial Sequence: Synthetic peptide
  Seed: GMDPRMCSLMQGSTLPRRSG
GMDPRMYSLMQPSTYPRRSG

SEQ ID NO: 82738 - protein, 20 aa, Artificial Sequence
  Description of Artificial Sequence: Synthetic peptide
  Seed: GMDPRMCSLMQGSTLPRRSG
GMDPRMYSLMQQSTAPRRSG

SEQ ID NO: 82739 - protein, 20 aa, Artificial Sequence
  Description of Artificial Sequence: Synthetic peptide
  Seed: GMDPRMCSLMQGSTLPRRSG
GMDPRMYSLMQQSTIPRRSG

SEQ ID NO: 82740 - protein, 20 aa, Artificial Sequence
  Description of Artificial Sequence: Synthetic peptide
  Seed: GMDPRMCSLMQGSTLPRRSG
GMDPRMYSLMQQSTLPRRSG

SEQ ID NO: 82741 - protein, 20 aa, Artificial Sequence
  Description of Artificial Sequence: Synthetic peptide
  Seed: GMDPRMCSLMQGSTLPRRSG
GMDPRMYSLMQQSTVPRRSG

SEQ ID NO: 82742 - protein, 20 aa, Artificial Sequence
  Description of Artificial Sequence: Synthetic peptide
  Seed: GMDPRMCSLMQGSTLPRRSG
GMDPRMYSLMQSSTAPRRSG

SEQ ID NO: 82743 - protein, 20 aa, Artificial Sequence
  Description of Artificial Sequence: Synthetic peptide
  Seed: GMDPRMCSLMQGSTLPRRSG
GMDPRMYSLMQSSTCPRRSG

SEQ ID NO: 82744 - protein, 20 aa, Artificial Sequence
  Description of Artificial Sequence: Synthetic peptide
  Seed: GMDPRMCSLMQGSTLPRRSG
GMDPRMYSLMQSSTDPRRSG

SEQ ID NO: 82745 - protein, 20 aa, Artificial Sequence
  Description of Artificial Sequence: Synthetic peptide
  Seed: GMDPRMCSLMQGSTLPRRSG
GMDPRMYSLMQSSTEPRRSG

SEQ ID NO: 82746 - protein, 20 aa, Artificial Sequence
  Description of Artificial Sequence: Synthetic peptide
  Seed: GMDPRMCSLMQGSTLPRRSG
GMDPRMYSLMQSSTFPRRSG

SEQ ID NO: 82747 - protein, 20 aa, Artificial Sequence
  Description of Artificial Sequence: Synthetic peptide
  Seed: GMDPRMCSLMQGSTLPRRSG
GMDPRMYSLMQSSTGPRRSG

SEQ ID NO: 82748 - protein, 20 aa, Artificial Sequence
  Description of Artificial Sequence: Synthetic peptide
  Seed: GMDPRMCSLMQGSTLPRRSG
GMDPRMYSLMQSSTHPRRSG

SEQ ID NO: 82749 - protein, 20 aa, Artificial Sequence
  Description of Artificial Sequence: Synthetic peptide
  Seed: GMDPRMCSLMQGSTLPRRSG
GMDPRMYSLMQSSTIPRRSG

SEQ ID NO: 82750 - protein, 20 aa, Artificial Sequence
  Description of Artificial Sequence: Synthetic peptide
  Seed: GMDPRMCSLMQGSTLPRRSG
GMDPRMYSLMQSSTLPRRSG

SEQ ID NO: 82751 - protein, 20 aa, Artificial Sequence
  Description of Artificial Sequence: Synthetic peptide
  Seed: GMDPRMCSLMQGSTLPRRSG
GMDPRMYSLMQSSTMPRRSG

SEQ ID NO: 82752 - protein, 20 aa, Artificial Sequence
  Description of Artificial Sequence: Synthetic peptide
  Seed: GMDPRMCSLMQGSTLPRRSG
GMDPRMYSLMQSSTNPRRSG

SEQ ID NO: 82753 - protein, 20 aa, Artificial Sequence
  Description of Artificial Sequence: Synthetic peptide
  Seed: GMDPRMCSLMQGSTLPRRSG
GMDPRMYSLMQSSTPPRRSG

SEQ ID NO: 82754 - protein, 20 aa, Artificial Sequence
  Description of Artificial Sequence: Synthetic peptide
  Seed: GMDPRMCSLMQGSTLPRRSG
GMDPRMYSLMQSSTQPRRSG

SEQ ID NO: 82755 - protein, 20 aa, Artificial Sequence
  Description of Artificial Sequence: Synthetic peptide
  Seed: GMDPRMCSLMQGSTLPRRSG
GMDPRMYSLMQSSTSPRRSG

SEQ ID NO: 82756 - protein, 20 aa, Artificial Sequence
  Description of Artificial Sequence: Synthetic peptide
  Seed: GMDPRMCSLMQGSTLPRRSG
GMDPRMYSLMQSSTTPRRSG

SEQ ID NO: 82757 - protein, 20 aa, Artificial Sequence
  Description of Artificial Sequence: Synthetic peptide
  Seed: GMDPRMCSLMQGSTLPRRSG
GMDPRMYSLMQSSTVPRRSG

SEQ ID NO: 82758 - protein, 20 aa, Artificial Sequence
  Description of Artificial Sequence: Synthetic peptide
  Seed: GMDPRMCSLMQGSTLPRRSG
GMDPRMYSLMQSSTYPRRSG

SEQ ID NO: 82759 - protein, 20 aa, Artificial Sequence
  Description of Artificial Sequence: Synthetic peptide
  Seed: GMDPRMCSLMQGSTLPRRSG
GMDPRMYSLMQTSTAPRRSG

SEQ ID NO: 82760 - protein, 20 aa, Artificial Sequence
  Description of Artificial Sequence: Synthetic peptide
  Seed: GMDPRMCSLMQGSTLPRRSG
GMDPRMYSLMQTSTCPRRSG

SEQ ID NO: 82761 - protein, 20 aa, Artificial Sequence
  Description of Artificial Sequence: Synthetic peptide
  Seed: GMDPRMCSLMQGSTLPRRSG
GMDPRMYSLMQTSTDPRRSG

SEQ ID NO: 82762 - protein, 20 aa, Artificial Sequence
  Description of Artificial Sequence: Synthetic peptide
  Seed: GMDPRMCSLMQGSTLPRRSG
GMDPRMYSLMQTSTEPRRSG

SEQ ID NO: 82763 - protein, 20 aa, Artificial Sequence
  Description of Artificial Sequence: Synthetic peptide
  Seed: GMDPRMCSLMQGSTLPRRSG
GMDPRMYSLMQTSTFPRRSG

SEQ ID NO: 82764 - protein, 20 aa, Artificial Sequence
  Description of Artificial Sequence: Synthetic peptide
  Seed: GMDPRMCSLMQGSTLPRRSG
GMDPRMYSLMQTSTGPRRSG

SEQ ID NO: 82765 - protein, 20 aa, Artificial Sequence
  Description of Artificial Sequence: Synthetic peptide
  Seed: GMDPRMCSLMQGSTLPRRSG
GMDPRMYSLMQTSTHPRRSG

SEQ ID NO: 82766 - protein, 20 aa, Artificial Sequence
  Description of Artificial Sequence: Synthetic peptide
  Seed: GMDPRMCSLMQGSTLPRRSG
GMDPRMYSLMQTSTIPRRSG

SEQ ID NO: 82767 - protein, 20 aa, Artificial Sequence
  Description of Artificial Sequence: Synthetic peptide
  Seed: GMDPRMCSLMQGSTLPRRSG
GMDPRMYSLMQTSTLPRRSG

SEQ ID NO: 82768 - protein, 20 aa, Artificial Sequence
  Description of Artificial Sequence: Synthetic peptide
  Seed: GMDPRMCSLMQGSTLPRRSG
GMDPRMYSLMQTSTMPRRSG

SEQ ID NO: 82769 - protein, 20 aa, Artificial Sequence
  Description of Artificial Sequence: Synthetic peptide
  Seed: GMDPRMCSLMQGSTLPRRSG
GMDPRMYSLMQTSTNPRRSG

SEQ ID NO: 82770 - protein, 20 aa, Artificial Sequence
  Description of Artificial Sequence: Synthetic peptide
  Seed: GMDPRMCSLMQGSTLPRRSG
GMDPRMYSLMQTSTPPRRSG

SEQ ID NO: 82771 - protein, 20 aa, Artificial Sequence
  Description of Artificial Sequence: Synthetic peptide
  Seed: GMDPRMCSLMQGSTLPRRSG
GMDPRMYSLMQTSTQPRRSG

SEQ ID NO: 82772 - protein, 20 aa, Artificial Sequence
  Description of Artificial Sequence: Synthetic peptide
  Seed: GMDPRMCSLMQGSTLPRRSG
GMDPRMYSLMQTSTSPRRSG

SEQ ID NO: 82773 - protein, 20 aa, Artificial Sequence
  Description of Artificial Sequence: Synthetic peptide
  Seed: GMDPRMCSLMQGSTLPRRSG
GMDPRMYSLMQTSTTPRRSG

SEQ ID NO: 82774 - protein, 20 aa, Artificial Sequence
  Description of Artificial Sequence: Synthetic peptide
  Seed: GMDPRMCSLMQGSTLPRRSG
GMDPRMYSLMQTSTVPRRSG

SEQ ID NO: 82775 - protein, 20 aa, Artificial Sequence
  Description of Artificial Sequence: Synthetic peptide
  Seed: GMDPRMCSLMQGSTLPRRSG
GMDPRMYSLMQVSTAPRRSG

SEQ ID NO: 82776 - protein, 20 aa, Artificial Sequence
  Description of Artificial Sequence: Synthetic peptide
  Seed: GMDPRMCSLMQGSTLPRRSG
GMDPRMYSLMQVSTCPRRSG

SEQ ID NO: 82777 - protein, 20 aa, Artificial Sequence
  Description of Artificial Sequence: Synthetic peptide
  Seed: GMDPRMCSLMQGSTLPRRSG
GMDPRMYSLMQVSTDPRRSG

SEQ ID NO: 82778 - protein, 20 aa, Artificial Sequence
  Description of Artificial Sequence: Synthetic peptide
  Seed: GMDPRMCSLMQGSTLPRRSG
GMDPRMYSLMQVSTEPRRSG

SEQ ID NO: 82779 - protein, 20 aa, Artificial Sequence
  Description of Artificial Sequence: Synthetic peptide
  Seed: GMDPRMCSLMQGSTLPRRSG
GMDPRMYSLMQVSTGPRRSG

SEQ ID NO: 82780 - protein, 20 aa, Artificial Sequence
  Description of Artificial Sequence: Synthetic peptide
  Seed: GMDPRMCSLMQGSTLPRRSG
GMDPRMYSLMQVSTHPRRSG

SEQ ID NO: 82781 - protein, 20 aa, Artificial Sequence
  Description of Artificial Sequence: Synthetic peptide
  Seed: GMDPRMCSLMQGSTLPRRSG
GMDPRMYSLMQVSTIPRRSG

SEQ ID NO: 82782 - protein, 20 aa, Artificial Sequence
  Description of Artificial Sequence: Synthetic peptide
  Seed: GMDPRMCSLMQGSTLPRRSG
GMDPRMYSLMQVSTLPRRSG

SEQ ID NO: 82783 - protein, 20 aa, Artificial Sequence
  Description of Artificial Sequence: Synthetic peptide
  Seed: GMDPRMCSLMQGSTLPRRSG
GMDPRMYSLMQVSTMPRRSG

SEQ ID NO: 82784 - protein, 20 aa, Artificial Sequence
  Description of Artificial Sequence: Synthetic peptide
  Seed: GMDPRMCSLMQGSTLPRRSG
GMDPRMYSLMQVSTNPRRSG

SEQ ID NO: 82785 - protein, 20 aa, Artificial Sequence
  Description of Artificial Sequence: Synthetic peptide
  Seed: GMDPRMCSLMQGSTLPRRSG
GMDPRMYSLMQVSTPPRRSG

SEQ ID NO: 82786 - protein, 20 aa, Artificial Sequence
  Description of Artificial Sequence: Synthetic peptide
  Seed: GMDPRMCSLMQGSTLPRRSG
GMDPRMYSLMQVSTQPRRSG

SEQ ID NO: 82787 - protein, 20 aa, Artificial Sequence
  Description of Artificial Sequence: Synthetic peptide
  Seed: GMDPRMCSLMQGSTLPRRSG
GMDPRMYSLMQVSTSPRRSG

SEQ ID NO: 82788 - protein, 20 aa, Artificial Sequence
  Description of Artificial Sequence: Synthetic peptide
  Seed: GMDPRMCSLMQGSTLPRRSG
GMDPRMYSLMQVSTTPRRSG

SEQ ID NO: 82789 - protein, 20 aa, Artificial Sequence
  Description of Artificial Sequence: Synthetic peptide
  Seed: GMDPRMCSLMQGSTLPRRSG
GMDPRMYSLMQVSTVPRRSG

SEQ ID NO: 82790 - protein, 20 aa, Artificial Sequence
  Description of Artificial Sequence: Synthetic peptide
  Seed: GMDPRMCSLMQGSTLPRRSG
GMDPRMYSLNQASTAPRRSG

SEQ ID NO: 82791 - protein, 20 aa, Artificial Sequence
  Description of Artificial Sequence: Synthetic peptide
  Seed: GMDPRMCSLMQGSTLPRRSG
GMDPRMYSLNQASTIPRRSG

SEQ ID NO: 82792 - protein, 20 aa, Artificial Sequence
  Description of Artificial Sequence: Synthetic peptide
  Seed: GMDPRMCSLMQGSTLPRRSG
GMDPRMYSLNQASTLPRRSG

SEQ ID NO: 82793 - protein, 20 aa, Artificial Sequence
  Description of Artificial Sequence: Synthetic peptide
  Seed: GMDPRMCSLMQGSTLPRRSG
GMDPRMYSLNQASTMPRRSG

SEQ ID NO: 82794 - protein, 20 aa, Artificial Sequence
  Description of Artificial Sequence: Synthetic peptide
  Seed: GMDPRMCSLMQGSTLPRRSG
GMDPRMYSLNQASTVPRRSG

SEQ ID NO: 82795 - protein, 20 aa, Artificial Sequence
  Description of Artificial Sequence: Synthetic peptide
  Seed: GMDPRMCSLMQGSTLPRRSG
GMDPRMYSLNQGSTLPRRSG

SEQ ID NO: 82796 - protein, 20 aa, Artificial Sequence
  Description of Artificial Sequence: Synthetic peptide
  Seed: GMDPRMCSLMQGSTLPRRSG
GMDPRMYSLNQGSTVPRRSG

SEQ ID NO: 82797 - protein, 20 aa, Artificial Sequence
  Description of Artificial Sequence: Synthetic peptide
  Seed: GMDPRMCSLMQGSTLPRRSG
GMDPRMYSLNQSSTLPRRSG

SEQ ID NO: 82798 - protein, 20 aa, Artificial Sequence
  Description of Artificial Sequence: Synthetic peptide
  Seed: GMDPRMCSLMQGSTLPRRSG
GMDPRMYSLQQASTAPRRSG

SEQ ID NO: 82799 - protein, 20 aa, Artificial Sequence
  Description of Artificial Sequence: Synthetic peptide
  Seed: GMDPRMCSLMQGSTLPRRSG
GMDPRMYSLQQASTFPRRSG

SEQ ID NO: 82800 - protein, 20 aa, Artificial Sequence
  Description of Artificial Sequence: Synthetic peptide
  Seed: GMDPRMCSLMQGSTLPRRSG
GMDPRMYSLQQASTGPRRSG

SEQ ID NO: 82801 - protein, 20 aa, Artificial Sequence
  Description of Artificial Sequence: Synthetic peptide
  Seed: GMDPRMCSLMQGSTLPRRSG
GMDPRMYSLQQASTIPRRSG

SEQ ID NO: 82802 - protein, 20 aa, Artificial Sequence
  Description of Artificial Sequence: Synthetic peptide
  Seed: GMDPRMCSLMQGSTLPRRSG
GMDPRMYSLQQASTLPRRSG

SEQ ID NO: 82803 - protein, 20 aa, Artificial Sequence
  Description of Artificial Sequence: Synthetic peptide
  Seed: GMDPRMCSLMQGSTLPRRSG
GMDPRMYSLQQASTMPRRSG

SEQ ID NO: 82804 - protein, 20 aa, Artificial Sequence
  Description of Artificial Sequence: Synthetic peptide
  Seed: GMDPRMCSLMQGSTLPRRSG
GMDPRMYSLQQASTNPRRSG

SEQ ID NO: 82805 - protein, 20 aa, Artificial Sequence
  Description of Artificial Sequence: Synthetic peptide
  Seed: GMDPRMCSLMQGSTLPRRSG
GMDPRMYSLQQASTSPRRSG

SEQ ID NO: 82806 - protein, 20 aa, Artificial Sequence
  Description of Artificial Sequence: Synthetic peptide
  Seed: GMDPRMCSLMQGSTLPRRSG
GMDPRMYSLQQASTTPRRSG

SEQ ID NO: 82807 - protein, 20 aa, Artificial Sequence
  Description of Artificial Sequence: Synthetic peptide
  Seed: GMDPRMCSLMQGSTLPRRSG
GMDPRMYSLQQASTVPRRSG

SEQ ID NO: 82808 - protein, 20 aa, Artificial Sequence
  Description of Artificial Sequence: Synthetic peptide
  Seed: GMDPRMCSLMQGSTLPRRSG
GMDPRMYSLQQGSTAPRRSG

SEQ ID NO: 82809 - protein, 20 aa, Artificial Sequence
  Description of Artificial Sequence: Synthetic peptide
  Seed: GMDPRMCSLMQGSTLPRRSG
GMDPRMYSLQQGSTIPRRSG

SEQ ID NO: 82810 - protein, 20 aa, Artificial Sequence
  Description of Artificial Sequence: Synthetic peptide
  Seed: GMDPRMCSLMQGSTLPRRSG
GMDPRMYSLQQGSTLPRRSG

SEQ ID NO: 82811 - protein, 20 aa, Artificial Sequence
  Description of Artificial Sequence: Synthetic peptide
  Seed: GMDPRMCSLMQGSTLPRRSG
GMDPRMYSLQQGSTMPRRSG

SEQ ID NO: 82812 - protein, 20 aa, Artificial Sequence
  Description of Artificial Sequence: Synthetic peptide
  Seed: GMDPRMCSLMQGSTLPRRSG
GMDPRMYSLQQGSTSPRRSG

SEQ ID NO: 82813 - protein, 20 aa, Artificial Sequence
  Description of Artificial Sequence: Synthetic peptide
  Seed: GMDPRMCSLMQGSTLPRRSG
GMDPRMYSLQQGSTTPRRSG

SEQ ID NO: 82814 - protein, 20 aa, Artificial Sequence
  Description of Artificial Sequence: Synthetic peptide
  Seed: GMDPRMCSLMQGSTLPRRSG
GMDPRMYSLQQGSTVPRRSG

SEQ ID NO: 82815 - protein, 20 aa, Artificial Sequence
  Description of Artificial Sequence: Synthetic peptide
  Seed: GMDPRMCSLMQGSTLPRRSG
GMDPRMYSLQQISTAPRRSG

SEQ ID NO: 82816 - protein, 20 aa, Artificial Sequence
  Description of Artificial Sequence: Synthetic peptide
  Seed: GMDPRMCSLMQGSTLPRRSG
GMDPRMYSLQQISTNPRRSG

SEQ ID NO: 82817 - protein, 20 aa, Artificial Sequence
  Description of Artificial Sequence: Synthetic peptide
  Seed: GMDPRMCSLMQGSTLPRRSG
GMDPRMYSLQQISTSPRRSG

SEQ ID NO: 82818 - protein, 20 aa, Artificial Sequence
  Description of Artificial Sequence: Synthetic peptide
  Seed: GMDPRMCSLMQGSTLPRRSG
GMDPRMYSLQQISTVPRRSG

SEQ ID NO: 82819 - protein, 20 aa, Artificial Sequence
  Description of Artificial Sequence: Synthetic peptide
  Seed: GMDPRMCSLMQGSTLPRRSG
GMDPRMYSLQQNSTAPRRSG

SEQ ID NO: 82820 - protein, 20 aa, Artificial Sequence
  Description of Artificial Sequence: Synthetic peptide
  Seed: GMDPRMCSLMQGSTLPRRSG
GMDPRMYSLQQNSTIPRRSG

SEQ ID NO: 82821 - protein, 20 aa, Artificial Sequence
  Description of Artificial Sequence: Synthetic peptide
  Seed: GMDPRMCSLMQGSTLPRRSG
GMDPRMYSLQQNSTLPRRSG

SEQ ID NO: 82822 - protein, 20 aa, Artificial Sequence
  Description of Artificial Sequence: Synthetic peptide
  Seed: GMDPRMCSLMQGSTLPRRSG
GMDPRMYSLQQNSTVPRRSG

SEQ ID NO: 82823 - protein, 20 aa, Artificial Sequence
  Description of Artificial Sequence: Synthetic peptide
  Seed: GMDPRMCSLMQGSTLPRRSG
GMDPRMYSLQQPSTAPRRSG

SEQ ID NO: 82824 - protein, 20 aa, Artificial Sequence
  Description of Artificial Sequence: Synthetic peptide
  Seed: GMDPRMCSLMQGSTLPRRSG
GMDPRMYSLQQPSTIPRRSG

SEQ ID NO: 82825 - protein, 20 aa, Artificial Sequence
  Description of Artificial Sequence: Synthetic peptide
  Seed: GMDPRMCSLMQGSTLPRRSG
GMDPRMYSLQQPSTLPRRSG

SEQ ID NO: 82826 - protein, 20 aa, Artificial Sequence
  Description of Artificial Sequence: Synthetic peptide
  Seed: GMDPRMCSLMQGSTLPRRSG
GMDPRMYSLQQPSTMPRRSG

SEQ ID NO: 82827 - protein, 20 aa, Artificial Sequence
  Description of Artificial Sequence: Synthetic peptide
  Seed: GMDPRMCSLMQGSTLPRRSG
GMDPRMYSLQQPSTNPRRSG

SEQ ID NO: 82828 - protein, 20 aa, Artificial Sequence
  Description of Artificial Sequence: Synthetic peptide
  Seed: GMDPRMCSLMQGSTLPRRSG
GMDPRMYSLQQPSTSPRRSG

SEQ ID NO: 82829 - protein, 20 aa, Artificial Sequence
  Description of Artificial Sequence: Synthetic peptide
  Seed: GMDPRMCSLMQGSTLPRRSG
GMDPRMYSLQQPSTVPRRSG

SEQ ID NO: 82830 - protein, 20 aa, Artificial Sequence
  Description of Artificial Sequence: Synthetic peptide
  Seed: GMDPRMCSLMQGSTLPRRSG
GMDPRMYSLQQSSTAPRRSG

SEQ ID NO: 82831 - protein, 20 aa, Artificial Sequence
  Description of Artificial Sequence: Synthetic peptide
  Seed: GMDPRMCSLMQGSTLPRRSG
GMDPRMYSLQQSSTIPRRSG

SEQ ID NO: 82832 - protein, 20 aa, Artificial Sequence
  Description of Artificial Sequence: Synthetic peptide
  Seed: GMDPRMCSLMQGSTLPRRSG
GMDPRMYSLQQSSTLPRRSG

SEQ ID NO: 82833 - protein, 20 aa, Artificial Sequence
  Description of Artificial Sequence: Synthetic peptide
  Seed: GMDPRMCSLMQGSTLPRRSG
GMDPRMYSLQQSSTMPRRSG

SEQ ID NO: 82834 - protein, 20 aa, Artificial Sequence
  Description of Artificial Sequence: Synthetic peptide
  Seed: GMDPRMCSLMQGSTLPRRSG
GMDPRMYSLQQSSTNPRRSG

SEQ ID NO: 82835 - protein, 20 aa, Artificial Sequence
  Description of Artificial Sequence: Synthetic peptide
  Seed: GMDPRMCSLMQGSTLPRRSG
GMDPRMYSLQQSSTSPRRSG

SEQ ID NO: 82836 - protein, 20 aa, Artificial Sequence
  Description of Artificial Sequence: Synthetic peptide
  Seed: GMDPRMCSLMQGSTLPRRSG
GMDPRMYSLQQSSTTPRRSG

SEQ ID NO: 82837 - protein, 20 aa, Artificial Sequence
  Description of Artificial Sequence: Synthetic peptide
  Seed: GMDPRMCSLMQGSTLPRRSG
GMDPRMYSLQQSSTVPRRSG

SEQ ID NO: 82838 - protein, 20 aa, Artificial Sequence
  Description of Artificial Sequence: Synthetic peptide
  Seed: GMDPRMCSLMQGSTLPRRSG
GMDPRMYSLQQTSTAPRRSG

SEQ ID NO: 82839 - protein, 20 aa, Artificial Sequence
  Description of Artificial Sequence: Synthetic peptide
  Seed: GMDPRMCSLMQGSTLPRRSG
GMDPRMYSLQQTSTIPRRSG

SEQ ID NO: 82840 - protein, 20 aa, Artificial Sequence
  Description of Artificial Sequence: Synthetic peptide
  Seed: GMDPRMCSLMQGSTLPRRSG
GMDPRMYSLQQTSTLPRRSG

SEQ ID NO: 82841 - protein, 20 aa, Artificial Sequence
  Description of Artificial Sequence: Synthetic peptide
  Seed: GMDPRMCSLMQGSTLPRRSG
GMDPRMYSLQQTSTNPRRSG

SEQ ID NO: 82842 - protein, 20 aa, Artificial Sequence
  Description of Artificial Sequence: Synthetic peptide
  Seed: GMDPRMCSLMQGSTLPRRSG
GMDPRMYSLQQTSTSPRRSG

SEQ ID NO: 82843 - protein, 20 aa, Artificial Sequence
  Description of Artificial Sequence: Synthetic peptide
  Seed: GMDPRMCSLMQGSTLPRRSG
GMDPRMYSLQQTSTVPRRSG

SEQ ID NO: 82844 - protein, 20 aa, Artificial Sequence
  Description of Artificial Sequence: Synthetic peptide
  Seed: GMDPRMCSLMQGSTLPRRSG
GMDPRMYSLQQVSTAPRRSG

SEQ ID NO: 82845 - protein, 20 aa, Artificial Sequence
  Description of Artificial Sequence: Synthetic peptide
  Seed: GMDPRMCSLMQGSTLPRRSG
GMDPRMYSLQQVSTIPRRSG

SEQ ID NO: 82846 - protein, 20 aa, Artificial Sequence
  Description of Artificial Sequence: Synthetic peptide
  Seed: GMDPRMCSLMQGSTLPRRSG
GMDPRMYSLQQVSTLPRRSG

SEQ ID NO: 82847 - protein, 20 aa, Artificial Sequence
  Description of Artificial Sequence: Synthetic peptide
  Seed: GMDPRMCSLMQGSTLPRRSG
GMDPRMYSLQQVSTNPRRSG

SEQ ID NO: 82848 - protein, 20 aa, Artificial Sequence
  Description of Artificial Sequence: Synthetic peptide
  Seed: GMDPRMCSLMQGSTLPRRSG
GMDPRMYSLQQVSTSPRRSG

SEQ ID NO: 82849 - protein, 20 aa, Artificial Sequence
  Description of Artificial Sequence: Synthetic peptide
  Seed: GMDPRMCSLMQGSTLPRRSG
GMDPRMYSLQQVSTTPRRSG

SEQ ID NO: 82850 - protein, 20 aa, Artificial Sequence
  Description of Artificial Sequence: Synthetic peptide
  Seed: GMDPRMCSLMQGSTLPRRSG
GMDPRMYSLQQVSTVPRRSG

SEQ ID NO: 82851 - protein, 20 aa, Artificial Sequence
  Description of Artificial Sequence: Synthetic peptide
  Seed: GMDPRMCSLMQGSTLPRRSG
GMDPRMYSLSQASTAPRRSG

SEQ ID NO: 82852 - protein, 20 aa, Artificial Sequence
  Description of Artificial Sequence: Synthetic peptide
  Seed: GMDPRMCSLMQGSTLPRRSG
GMDPRMYSLSQASTIPRRSG

SEQ ID NO: 82853 - protein, 20 aa, Artificial Sequence
  Description of Artificial Sequence: Synthetic peptide
  Seed: GMDPRMCSLMQGSTLPRRSG
GMDPRMYSLSQASTLPRRSG

SEQ ID NO: 82854 - protein, 20 aa, Artificial Sequence
  Description of Artificial Sequence: Synthetic peptide
  Seed: GMDPRMCSLMQGSTLPRRSG
GMDPRMYSLSQASTMPRRSG

SEQ ID NO: 82855 - protein, 20 aa, Artificial Sequence
  Description of Artificial Sequence: Synthetic peptide
  Seed: GMDPRMCSLMQGSTLPRRSG
GMDPRMYSLSQASTNPRRSG

SEQ ID NO: 82856 - protein, 20 aa, Artificial Sequence
  Description of Artificial Sequence: Synthetic peptide
  Seed: GMDPRMCSLMQGSTLPRRSG
GMDPRMYSLSQASTSPRRSG

SEQ ID NO: 82857 - protein, 20 aa, Artificial Sequence
  Description of Artificial Sequence: Synthetic peptide
  Seed: GMDPRMCSLMQGSTLPRRSG
GMDPRMYSLSQASTTPRRSG

SEQ ID NO: 82858 - protein, 20 aa, Artificial Sequence
  Description of Artificial Sequence: Synthetic peptide
  Seed: GMDPRMCSLMQGSTLPRRSG
GMDPRMYSLSQASTVPRRSG

SEQ ID NO: 82859 - protein, 20 aa, Artificial Sequence
  Description of Artificial Sequence: Synthetic peptide
  Seed: GMDPRMCSLMQGSTLPRRSG
GMDPRMYSLSQGSTAPRRSG

SEQ ID NO: 82860 - protein, 20 aa, Artificial Sequence
  Description of Artificial Sequence: Synthetic peptide
  Seed: GMDPRMCSLMQGSTLPRRSG
GMDPRMYSLSQGSTIPRRSG

SEQ ID NO: 82861 - protein, 20 aa, Artificial Sequence
  Description of Artificial Sequence: Synthetic peptide
  Seed: GMDPRMCSLMQGSTLPRRSG
GMDPRMYSLSQGSTLPRRSG

SEQ ID NO: 82862 - protein, 20 aa, Artificial Sequence
  Description of Artificial Sequence: Synthetic peptide
  Seed: GMDPRMCSLMQGSTLPRRSG
GMDPRMYSLSQGSTMPRRSG

SEQ ID NO: 82863 - protein, 20 aa, Artificial Sequence
  Description of Artificial Sequence: Synthetic peptide
  Seed: GMDPRMCSLMQGSTLPRRSG
GMDPRMYSLSQGSTVPRRSG

SEQ ID NO: 82864 - protein, 20 aa, Artificial Sequence
  Description of Artificial Sequence: Synthetic peptide
  Seed: GMDPRMCSLMQGSTLPRRSG
GMDPRMYSLSQISTAPRRSG

SEQ ID NO: 82865 - protein, 20 aa, Artificial Sequence
  Description of Artificial Sequence: Synthetic peptide
  Seed: GMDPRMCSLMQGSTLPRRSG
GMDPRMYSLSQPSTAPRRSG

SEQ ID NO: 82866 - protein, 20 aa, Artificial Sequence
  Description of Artificial Sequence: Synthetic peptide
  Seed: GMDPRMCSLMQGSTLPRRSG
GMDPRMYSLSQPSTIPRRSG

SEQ ID NO: 82867 - protein, 20 aa, Artificial Sequence
  Description of Artificial Sequence: Synthetic peptide
  Seed: GMDPRMCSLMQGSTLPRRSG
GMDPRMYSLSQPSTLPRRSG

SEQ ID NO: 82868 - protein, 20 aa, Artificial Sequence
  Description of Artificial Sequence: Synthetic peptide
  Seed: GMDPRMCSLMQGSTLPRRSG
GMDPRMYSLSQPSTSPRRSG

SEQ ID NO: 82869 - protein, 20 aa, Artificial Sequence
  Description of Artificial Sequence: Synthetic peptide
  Seed: GMDPRMCSLMQGSTLPRRSG
GMDPRMYSLSQPSTVPRRSG

SEQ ID NO: 82870 - protein, 20 aa, Artificial Sequence
  Description of Artificial Sequence: Synthetic peptide
  Seed: GMDPRMCSLMQGSTLPRRSG
GMDPRMYSLSQSSTAPRRSG

SEQ ID NO: 82871 - protein, 20 aa, Artificial Sequence
  Description of Artificial Sequence: Synthetic peptide
  Seed: GMDPRMCSLMQGSTLPRRSG
GMDPRMYSLSQSSTIPRRSG

SEQ ID NO: 82872 - protein, 20 aa, Artificial Sequence
  Description of Artificial Sequence: Synthetic peptide
  Seed: GMDPRMCSLMQGSTLPRRSG
GMDPRMYSLSQSSTLPRRSG

SEQ ID NO: 82873 - protein, 20 aa, Artificial Sequence
  Description of Artificial Sequence: Synthetic peptide
  Seed: GMDPRMCSLMQGSTLPRRSG
GMDPRMYSLSQSSTMPRRSG

SEQ ID NO: 82874 - protein, 20 aa, Artificial Sequence
  Description of Artificial Sequence: Synthetic peptide
  Seed: GMDPRMCSLMQGSTLPRRSG
GMDPRMYSLSQSSTSPRRSG

SEQ ID NO: 82875 - protein, 20 aa, Artificial Sequence
  Description of Artificial Sequence: Synthetic peptide
  Seed: GMDPRMCSLMQGSTLPRRSG
GMDPRMYSLSQSSTVPRRSG

SEQ ID NO: 82876 - protein, 20 aa, Artificial Sequence
  Description of Artificial Sequence: Synthetic peptide
  Seed: GMDPRMCSLMQGSTLPRRSG
GMDPRMYSLSQTSTAPRRSG

SEQ ID NO: 82877 - protein, 20 aa, Artificial Sequence
  Description of Artificial Sequence: Synthetic peptide
  Seed: GMDPRMCSLMQGSTLPRRSG
GMDPRMYSLSQTSTVPRRSG

SEQ ID NO: 82878 - protein, 20 aa, Artificial Sequence
  Description of Artificial Sequence: Synthetic peptide
  Seed: GMDPRMCSLMQGSTLPRRSG
GMDPRMYSLSQVSTAPRRSG

SEQ ID NO: 82879 - protein, 20 aa, Artificial Sequence
  Description of Artificial Sequence: Synthetic peptide
  Seed: GMDPRMCSLMQGSTLPRRSG
GMDPRMYSLSQVSTNPRRSG

SEQ ID NO: 82880 - protein, 20 aa, Artificial Sequence
  Description of Artificial Sequence: Synthetic peptide
  Seed: GMDPRMCSLMQGSTLPRRSG
GMDPRMYSLSQVSTSPRRSG

SEQ ID NO: 82881 - protein, 20 aa, Artificial Sequence
  Description of Artificial Sequence: Synthetic peptide
  Seed: GMDPRMCSLMQGSTLPRRSG
GMDPRMYSLTQASTAPRRSG

SEQ ID NO: 82882 - protein, 20 aa, Artificial Sequence
  Description of Artificial Sequence: Synthetic peptide
  Seed: GMDPRMCSLMQGSTLPRRSG
GMDPRMYSLTQASTIPRRSG

SEQ ID NO: 82883 - protein, 20 aa, Artificial Sequence
  Description of Artificial Sequence: Synthetic peptide
  Seed: GMDPRMCSLMQGSTLPRRSG
GMDPRMYSLTQASTLPRRSG

SEQ ID NO: 82884 - protein, 20 aa, Artificial Sequence
  Description of Artificial Sequence: Synthetic peptide
  Seed: GMDPRMCSLMQGSTLPRRSG
GMDPRMYSLTQASTMPRRSG

SEQ ID NO: 82885 - protein, 20 aa, Artificial Sequence
  Description of Artificial Sequence: Synthetic peptide
  Seed: GMDPRMCSLMQGSTLPRRSG
GMDPRMYSLTQASTNPRRSG

SEQ ID NO: 82886 - protein, 20 aa, Artificial Sequence
  Description of Artificial Sequence: Synthetic peptide
  Seed: GMDPRMCSLMQGSTLPRRSG
GMDPRMYSLTQASTSPRRSG

SEQ ID NO: 82887 - protein, 20 aa, Artificial Sequence
  Description of Artificial Sequence: Synthetic peptide
  Seed: GMDPRMCSLMQGSTLPRRSG
GMDPRMYSLTQASTTPRRSG

SEQ ID NO: 82888 - protein, 20 aa, Artificial Sequence
  Description of Artificial Sequence: Synthetic peptide
  Seed: GMDPRMCSLMQGSTLPRRSG
GMDPRMYSLTQASTVPRRSG

SEQ ID NO: 82889 - protein, 20 aa, Artificial Sequence
  Description of Artificial Sequence: Synthetic peptide
  Seed: GMDPRMCSLMQGSTLPRRSG
GMDPRMYSLTQGSTAPRRSG

SEQ ID NO: 82890 - protein, 20 aa, Artificial Sequence
  Description of Artificial Sequence: Synthetic peptide
  Seed: GMDPRMCSLMQGSTLPRRSG
GMDPRMYSLTQGSTIPRRSG

SEQ ID NO: 82891 - protein, 20 aa, Artificial Sequence
  Description of Artificial Sequence: Synthetic peptide
  Seed: GMDPRMCSLMQGSTLPRRSG
GMDPRMYSLTQGSTLPRRSG

SEQ ID NO: 82892 - protein, 20 aa, Artificial Sequence
  Description of Artificial Sequence: Synthetic peptide
  Seed: GMDPRMCSLMQGSTLPRRSG
GMDPRMYSLTQGSTVPRRSG

SEQ ID NO: 82893 - protein, 20 aa, Artificial Sequence
  Description of Artificial Sequence: Synthetic peptide
  Seed: GMDPRMCSLMQGSTLPRRSG
GMDPRMYSLTQPSTAPRRSG

SEQ ID NO: 82894 - protein, 20 aa, Artificial Sequence
  Description of Artificial Sequence: Synthetic peptide
  Seed: GMDPRMCSLMQGSTLPRRSG
GMDPRMYSLTQPSTIPRRSG

SEQ ID NO: 82895 - protein, 20 aa, Artificial Sequence
  Description of Artificial Sequence: Synthetic peptide
  Seed: GMDPRMCSLMQGSTLPRRSG
GMDPRMYSLTQPSTLPRRSG

SEQ ID NO: 82896 - protein, 20 aa, Artificial Sequence
  Description of Artificial Sequence: Synthetic peptide
  Seed: GMDPRMCSLMQGSTLPRRSG
GMDPRMYSLTQPSTSPRRSG

SEQ ID NO: 82897 - protein, 20 aa, Artificial Sequence
  Description of Artificial Sequence: Synthetic peptide
  Seed: GMDPRMCSLMQGSTLPRRSG
GMDPRMYSLTQPSTVPRRSG

SEQ ID NO: 82898 - protein, 20 aa, Artificial Sequence
  Description of Artificial Sequence: Synthetic peptide
  Seed: GMDPRMCSLMQGSTLPRRSG
GMDPRMYSLTQSSTAPRRSG

SEQ ID NO: 82899 - protein, 20 aa, Artificial Sequence
  Description of Artificial Sequence: Synthetic peptide
  Seed: GMDPRMCSLMQGSTLPRRSG
GMDPRMYSLTQSSTIPRRSG

SEQ ID NO: 82900 - protein, 20 aa, Artificial Sequence
  Description of Artificial Sequence: Synthetic peptide
  Seed: GMDPRMCSLMQGSTLPRRSG
GMDPRMYSLTQSSTLPRRSG

SEQ ID NO: 82901 - protein, 20 aa, Artificial Sequence
  Description of Artificial Sequence: Synthetic peptide
  Seed: GMDPRMCSLMQGSTLPRRSG
GMDPRMYSLTQSSTVPRRSG

SEQ ID NO: 82902 - protein, 20 aa, Artificial Sequence
  Description of Artificial Sequence: Synthetic peptide
  Seed: GMDPRMCSLMQGSTLPRRSG
GMDPRMYSLTQVSTAPRRSG

SEQ ID NO: 82903 - protein, 20 aa, Artificial Sequence
  Description of Artificial Sequence: Synthetic peptide
  Seed: GMDPRMCSLMQGSTLPRRSG
GMDPRMYSLVQASTAPRRSG

SEQ ID NO: 82904 - protein, 20 aa, Artificial Sequence
  Description of Artificial Sequence: Synthetic peptide
  Seed: GMDPRMCSLMQGSTLPRRSG
GMDPRMYSLVQASTGPRRSG

SEQ ID NO: 82905 - protein, 20 aa, Artificial Sequence
  Description of Artificial Sequence: Synthetic peptide
  Seed: GMDPRMCSLMQGSTLPRRSG
GMDPRMYSLVQASTHPRRSG

SEQ ID NO: 82906 - protein, 20 aa, Artificial Sequence
  Description of Artificial Sequence: Synthetic peptide
  Seed: GMDPRMCSLMQGSTLPRRSG
GMDPRMYSLVQASTIPRRSG

SEQ ID NO: 82907 - protein, 20 aa, Artificial Sequence
  Description of Artificial Sequence: Synthetic peptide
  Seed: GMDPRMCSLMQGSTLPRRSG
GMDPRMYSLVQASTLPRRSG

SEQ ID NO: 82908 - protein, 20 aa, Artificial Sequence
  Description of Artificial Sequence: Synthetic peptide
  Seed: GMDPRMCSLMQGSTLPRRSG
GMDPRMYSLVQASTMPRRSG

SEQ ID NO: 82909 - protein, 20 aa, Artificial Sequence
  Description of Artificial Sequence: Synthetic peptide
  Seed: GMDPRMCSLMQGSTLPRRSG
GMDPRMYSLVQASTNPRRSG

SEQ ID NO: 82910 - protein, 20 aa, Artificial Sequence
  Description of Artificial Sequence: Synthetic peptide
  Seed: GMDPRMCSLMQGSTLPRRSG
GMDPRMYSLVQASTPPRRSG

SEQ ID NO: 82911 - protein, 20 aa, Artificial Sequence
  Description of Artificial Sequence: Synthetic peptide
  Seed: GMDPRMCSLMQGSTLPRRSG
GMDPRMYSLVQASTQPRRSG

SEQ ID NO: 82912 - protein, 20 aa, Artificial Sequence
  Description of Artificial Sequence: Synthetic peptide
  Seed: GMDPRMCSLMQGSTLPRRSG
GMDPRMYSLVQASTSPRRSG

SEQ ID NO: 82913 - protein, 20 aa, Artificial Sequence
  Description of Artificial Sequence: Synthetic peptide
  Seed: GMDPRMCSLMQGSTLPRRSG
GMDPRMYSLVQASTTPRRSG

SEQ ID NO: 82914 - protein, 20 aa, Artificial Sequence
  Description of Artificial Sequence: Synthetic peptide
  Seed: GMDPRMCSLMQGSTLPRRSG
GMDPRMYSLVQASTVPRRSG

SEQ ID NO: 82915 - protein, 20 aa, Artificial Sequence
  Description of Artificial Sequence: Synthetic peptide
  Seed: GMDPRMCSLMQGSTLPRRSG
GMDPRMYSLVQGSTAPRRSG

SEQ ID NO: 82916 - protein, 20 aa, Artificial Sequence
  Description of Artificial Sequence: Synthetic peptide
  Seed: GMDPRMCSLMQGSTLPRRSG
GMDPRMYSLVQGSTIPRRSG

SEQ ID NO: 82917 - protein, 20 aa, Artificial Sequence
  Description of Artificial Sequence: Synthetic peptide
  Seed: GMDPRMCSLMQGSTLPRRSG
GMDPRMYSLVQGSTLPRRSG

SEQ ID NO: 82918 - protein, 20 aa, Artificial Sequence
  Description of Artificial Sequence: Synthetic peptide
  Seed: GMDPRMCSLMQGSTLPRRSG
GMDPRMYSLVQGSTMPRRSG

SEQ ID NO: 82919 - protein, 20 aa, Artificial Sequence
  Description of Artificial Sequence: Synthetic peptide
  Seed: GMDPRMCSLMQGSTLPRRSG
GMDPRMYSLVQGSTNPRRSG

SEQ ID NO: 82920 - protein, 20 aa, Artificial Sequence
  Description of Artificial Sequence: Synthetic peptide
  Seed: GMDPRMCSLMQGSTLPRRSG
GMDPRMYSLVQGSTSPRRSG

SEQ ID NO: 82921 - protein, 20 aa, Artificial Sequence
  Description of Artificial Sequence: Synthetic peptide
  Seed: GMDPRMCSLMQGSTLPRRSG
GMDPRMYSLVQGSTTPRRSG

SEQ ID NO: 82922 - protein, 20 aa, Artificial Sequence
  Description of Artificial Sequence: Synthetic peptide
  Seed: GMDPRMCSLMQGSTLPRRSG
GMDPRMYSLVQGSTVPRRSG

SEQ ID NO: 82923 - protein, 20 aa, Artificial Sequence
  Description of Artificial Sequence: Synthetic peptide
  Seed: GMDPRMCSLMQGSTLPRRSG
GMDPRMYSLVQISTAPRRSG

SEQ ID NO: 82924 - protein, 20 aa, Artificial Sequence
  Description of Artificial Sequence: Synthetic peptide
  Seed: GMDPRMCSLMQGSTLPRRSG
GMDPRMYSLVQISTIPRRSG

SEQ ID NO: 82925 - protein, 20 aa, Artificial Sequence
  Description of Artificial Sequence: Synthetic peptide
  Seed: GMDPRMCSLMQGSTLPRRSG
GMDPRMYSLVQISTLPRRSG

SEQ ID NO: 82926 - protein, 20 aa, Artificial Sequence
  Description of Artificial Sequence: Synthetic peptide
  Seed: GMDPRMCSLMQGSTLPRRSG
GMDPRMYSLVQISTMPRRSG

SEQ ID NO: 82927 - protein, 20 aa, Artificial Sequence
  Description of Artificial Sequence: Synthetic peptide
  Seed: GMDPRMCSLMQGSTLPRRSG
GMDPRMYSLVQISTNPRRSG

SEQ ID NO: 82928 - protein, 20 aa, Artificial Sequence
  Description of Artificial Sequence: Synthetic peptide
  Seed: GMDPRMCSLMQGSTLPRRSG
GMDPRMYSLVQISTSPRRSG

SEQ ID NO: 82929 - protein, 20 aa, Artificial Sequence
  Description of Artificial Sequence: Synthetic peptide
  Seed: GMDPRMCSLMQGSTLPRRSG
GMDPRMYSLVQISTTPRRSG

SEQ ID NO: 82930 - protein, 20 aa, Artificial Sequence
  Description of Artificial Sequence: Synthetic peptide
  Seed: GMDPRMCSLMQGSTLPRRSG
GMDPRMYSLVQISTVPRRSG

SEQ ID NO: 82931 - protein, 20 aa, Artificial Sequence
  Description of Artificial Sequence: Synthetic peptide
  Seed: GMDPRMCSLMQGSTLPRRSG
GMDPRMYSLVQLSTAPRRSG

SEQ ID NO: 82932 - protein, 20 aa, Artificial Sequence
  Description of Artificial Sequence: Synthetic peptide
  Seed: GMDPRMCSLMQGSTLPRRSG
GMDPRMYSLVQLSTNPRRSG

SEQ ID NO: 82933 - protein, 20 aa, Artificial Sequence
  Description of Artificial Sequence: Synthetic peptide
  Seed: GMDPRMCSLMQGSTLPRRSG
GMDPRMYSLVQLSTSPRRSG

SEQ ID NO: 82934 - protein, 20 aa, Artificial Sequence
  Description of Artificial Sequence: Synthetic peptide
  Seed: GMDPRMCSLMQGSTLPRRSG
GMDPRMYSLVQMSTAPRRSG

SEQ ID NO: 82935 - protein, 20 aa, Artificial Sequence
  Description of Artificial Sequence: Synthetic peptide
  Seed: GMDPRMCSLMQGSTLPRRSG
GMDPRMYSLVQMSTNPRRSG

SEQ ID NO: 82936 - protein, 20 aa, Artificial Sequence
  Description of Artificial Sequence: Synthetic peptide
  Seed: GMDPRMCSLMQGSTLPRRSG
GMDPRMYSLVQMSTSPRRSG

SEQ ID NO: 82937 - protein, 20 aa, Artificial Sequence
  Description of Artificial Sequence: Synthetic peptide
  Seed: GMDPRMCSLMQGSTLPRRSG
GMDPRMYSLVQNSTAPRRSG

SEQ ID NO: 82938 - protein, 20 aa, Artificial Sequence
  Description of Artificial Sequence: Synthetic peptide
  Seed: GMDPRMCSLMQGSTLPRRSG
GMDPRMYSLVQNSTIPRRSG

SEQ ID NO: 82939 - protein, 20 aa, Artificial Sequence
  Description of Artificial Sequence: Synthetic peptide
  Seed: GMDPRMCSLMQGSTLPRRSG
GMDPRMYSLVQNSTLPRRSG

SEQ ID NO: 82940 - protein, 20 aa, Artificial Sequence
  Description of Artificial Sequence: Synthetic peptide
  Seed: GMDPRMCSLMQGSTLPRRSG
GMDPRMYSLVQNSTNPRRSG

SEQ ID NO: 82941 - protein, 20 aa, Artificial Sequence
  Description of Artificial Sequence: Synthetic peptide
  Seed: GMDPRMCSLMQGSTLPRRSG
GMDPRMYSLVQNSTSPRRSG

SEQ ID NO: 82942 - protein, 20 aa, Artificial Sequence
  Description of Artificial Sequence: Synthetic peptide
  Seed: GMDPRMCSLMQGSTLPRRSG
GMDPRMYSLVQNSTVPRRSG

SEQ ID NO: 82943 - protein, 20 aa, Artificial Sequence
  Description of Artificial Sequence: Synthetic peptide
  Seed: GMDPRMCSLMQGSTLPRRSG
GMDPRMYSLVQPSTAPRRSG

SEQ ID NO: 82944 - protein, 20 aa, Artificial Sequence
  Description of Artificial Sequence: Synthetic peptide
  Seed: GMDPRMCSLMQGSTLPRRSG
GMDPRMYSLVQPSTGPRRSG

SEQ ID NO: 82945 - protein, 20 aa, Artificial Sequence
  Description of Artificial Sequence: Synthetic peptide
  Seed: GMDPRMCSLMQGSTLPRRSG
GMDPRMYSLVQPSTHPRRSG

SEQ ID NO: 82946 - protein, 20 aa, Artificial Sequence
  Description of Artificial Sequence: Synthetic peptide
  Seed: GMDPRMCSLMQGSTLPRRSG
GMDPRMYSLVQPSTIPRRSG

SEQ ID NO: 82947 - protein, 20 aa, Artificial Sequence
  Description of Artificial Sequence: Synthetic peptide
  Seed: GMDPRMCSLMQGSTLPRRSG
GMDPRMYSLVQPSTLPRRSG

SEQ ID NO: 82948 - protein, 20 aa, Artificial Sequence
  Description of Artificial Sequence: Synthetic peptide
  Seed: GMDPRMCSLMQGSTLPRRSG
GMDPRMYSLVQPSTMPRRSG

SEQ ID NO: 82949 - protein, 20 aa, Artificial Sequence
  Description of Artificial Sequence: Synthetic peptide
  Seed: GMDPRMCSLMQGSTLPRRSG
GMDPRMYSLVQPSTNPRRSG

SEQ ID NO: 82950 - protein, 20 aa, Artificial Sequence
  Description of Artificial Sequence: Synthetic peptide
  Seed: GMDPRMCSLMQGSTLPRRSG
GMDPRMYSLVQPSTQPRRSG

SEQ ID NO: 82951 - protein, 20 aa, Artificial Sequence
  Description of Artificial Sequence: Synthetic peptide
  Seed: GMDPRMCSLMQGSTLPRRSG
GMDPRMYSLVQPSTSPRRSG

SEQ ID NO: 82952 - protein, 20 aa, Artificial Sequence
  Description of Artificial Sequence: Synthetic peptide
  Seed: GMDPRMCSLMQGSTLPRRSG
GMDPRMYSLVQPSTTPRRSG

SEQ ID NO: 82953 - protein, 20 aa, Artificial Sequence
  Description of Artificial Sequence: Synthetic peptide
  Seed: GMDPRMCSLMQGSTLPRRSG
GMDPRMYSLVQPSTVPRRSG

SEQ ID NO: 82954 - protein, 20 aa, Artificial Sequence
  Description of Artificial Sequence: Synthetic peptide
  Seed: GMDPRMCSLMQGSTLPRRSG
GMDPRMYSLVQSSTAPRRSG

SEQ ID NO: 82955 - protein, 20 aa, Artificial Sequence
  Description of Artificial Sequence: Synthetic peptide
  Seed: GMDPRMCSLMQGSTLPRRSG
GMDPRMYSLVQSSTGPRRSG

SEQ ID NO: 82956 - protein, 20 aa, Artificial Sequence
  Description of Artificial Sequence: Synthetic peptide
  Seed: GMDPRMCSLMQGSTLPRRSG
GMDPRMYSLVQSSTIPRRSG

SEQ ID NO: 82957 - protein, 20 aa, Artificial Sequence
  Description of Artificial Sequence: Synthetic peptide
  Seed: GMDPRMCSLMQGSTLPRRSG
GMDPRMYSLVQSSTLPRRSG

SEQ ID NO: 82958 - protein, 20 aa, Artificial Sequence
  Description of Artificial Sequence: Synthetic peptide
  Seed: GMDPRMCSLMQGSTLPRRSG
GMDPRMYSLVQSSTMPRRSG

SEQ ID NO: 82959 - protein, 20 aa, Artificial Sequence
  Description of Artificial Sequence: Synthetic peptide
  Seed: GMDPRMCSLMQGSTLPRRSG
GMDPRMYSLVQSSTNPRRSG

SEQ ID NO: 82960 - protein, 20 aa, Artificial Sequence
  Description of Artificial Sequence: Synthetic peptide
  Seed: GMDPRMCSLMQGSTLPRRSG
GMDPRMYSLVQSSTSPRRSG

SEQ ID NO: 82961 - protein, 20 aa, Artificial Sequence
  Description of Artificial Sequence: Synthetic peptide
  Seed: GMDPRMCSLMQGSTLPRRSG
GMDPRMYSLVQSSTTPRRSG

SEQ ID NO: 82962 - protein, 20 aa, Artificial Sequence
  Description of Artificial Sequence: Synthetic peptide
  Seed: GMDPRMCSLMQGSTLPRRSG
GMDPRMYSLVQSSTVPRRSG

SEQ ID NO: 82963 - protein, 20 aa, Artificial Sequence
  Description of Artificial Sequence: Synthetic peptide
  Seed: GMDPRMCSLMQGSTLPRRSG
GMDPRMYSLVQTSTAPRRSG

SEQ ID NO: 82964 - protein, 20 aa, Artificial Sequence
  Description of Artificial Sequence: Synthetic peptide
  Seed: GMDPRMCSLMQGSTLPRRSG
GMDPRMYSLVQTSTGPRRSG

SEQ ID NO: 82965 - protein, 20 aa, Artificial Sequence
  Description of Artificial Sequence: Synthetic peptide
  Seed: GMDPRMCSLMQGSTLPRRSG
GMDPRMYSLVQTSTIPRRSG

SEQ ID NO: 82966 - protein, 20 aa, Artificial Sequence
  Description of Artificial Sequence: Synthetic peptide
  Seed: GMDPRMCSLMQGSTLPRRSG
GMDPRMYSLVQTSTLPRRSG

SEQ ID NO: 82967 - protein, 20 aa, Artificial Sequence
  Description of Artificial Sequence: Synthetic peptide
  Seed: GMDPRMCSLMQGSTLPRRSG
GMDPRMYSLVQTSTMPRRSG

SEQ ID NO: 82968 - protein, 20 aa, Artificial Sequence
  Description of Artificial Sequence: Synthetic peptide
  Seed: GMDPRMCSLMQGSTLPRRSG
GMDPRMYSLVQTSTNPRRSG

SEQ ID NO: 82969 - protein, 20 aa, Artificial Sequence
  Description of Artificial Sequence: Synthetic peptide
  Seed: GMDPRMCSLMQGSTLPRRSG
GMDPRMYSLVQTSTSPRRSG

SEQ ID NO: 82970 - protein, 20 aa, Artificial Sequence
  Description of Artificial Sequence: Synthetic peptide
  Seed: GMDPRMCSLMQGSTLPRRSG
GMDPRMYSLVQTSTTPRRSG

SEQ ID NO: 82971 - protein, 20 aa, Artificial Sequence
  Description of Artificial Sequence: Synthetic peptide
  Seed: GMDPRMCSLMQGSTLPRRSG
GMDPRMYSLVQTSTVPRRSG

SEQ ID NO: 82972 - protein, 20 aa, Artificial Sequence
  Description of Artificial Sequence: Synthetic peptide
  Seed: GMDPRMCSLMQGSTLPRRSG
GMDPRMYSLVQVSTAPRRSG

SEQ ID NO: 82973 - protein, 20 aa, Artificial Sequence
  Description of Artificial Sequence: Synthetic peptide
  Seed: GMDPRMCSLMQGSTLPRRSG
GMDPRMYSLVQVSTGPRRSG

SEQ ID NO: 82974 - protein, 20 aa, Artificial Sequence
  Description of Artificial Sequence: Synthetic peptide
  Seed: GMDPRMCSLMQGSTLPRRSG
GMDPRMYSLVQVSTIPRRSG

SEQ ID NO: 82975 - protein, 20 aa, Artificial Sequence
  Description of Artificial Sequence: Synthetic peptide
  Seed: GMDPRMCSLMQGSTLPRRSG
GMDPRMYSLVQVSTLPRRSG

SEQ ID NO: 82976 - protein, 20 aa, Artificial Sequence
  Description of Artificial Sequence: Synthetic peptide
  Seed: GMDPRMCSLMQGSTLPRRSG
GMDPRMYSLVQVSTMPRRSG

SEQ ID NO: 82977 - protein, 20 aa, Artificial Sequence
  Description of Artificial Sequence: Synthetic peptide
  Seed: GMDPRMCSLMQGSTLPRRSG
GMDPRMYSLVQVSTNPRRSG

SEQ ID NO: 82978 - protein, 20 aa, Artificial Sequence
  Description of Artificial Sequence: Synthetic peptide
  Seed: GMDPRMCSLMQGSTLPRRSG
GMDPRMYSLVQVSTSPRRSG

SEQ ID NO: 82979 - protein, 20 aa, Artificial Sequence
  Description of Artificial Sequence: Synthetic peptide
  Seed: GMDPRMCSLMQGSTLPRRSG
GMDPRMYSLVQVSTTPRRSG

SEQ ID NO: 82980 - protein, 20 aa, Artificial Sequence
  Description of Artificial Sequence: Synthetic peptide
  Seed: GMDPRMCSLMQGSTLPRRSG
GMDPRMYSLVQVSTVPRRSG

SEQ ID NO: 82981 - protein, 20 aa, Artificial Sequence
  Description of Artificial Sequence: Synthetic peptide
  Seed: GMDPRMCSLMQGSTLPRRSG
GMDPRMYSLWQASTAPRRSG

SEQ ID NO: 82982 - protein, 21 aa, Artificial Sequence
  Description of Artificial Sequence: Synthetic peptide
  Seed: GMDPRMCSLMQGSTLPRRSGA
GMDPRMFSLAQASTAPRRSGA

SEQ ID NO: 82983 - protein, 21 aa, Artificial Sequence
  Description of Artificial Sequence: Synthetic peptide
  Seed: GMDPRMCSLMQGSTLPRRSGA
GMDPRMFSLAQASTCPRRSGA

SEQ ID NO: 82984 - protein, 21 aa, Artificial Sequence
  Description of Artificial Sequence: Synthetic peptide
  Seed: GMDPRMCSLMQGSTLPRRSGA
GMDPRMFSLAQASTFPRRSGA

SEQ ID NO: 82985 - protein, 21 aa, Artificial Sequence
  Description of Artificial Sequence: Synthetic peptide
  Seed: GMDPRMCSLMQGSTLPRRSGA
GMDPRMFSLAQASTGPRRSGA

SEQ ID NO: 82986 - protein, 21 aa, Artificial Sequence
  Description of Artificial Sequence: Synthetic peptide
  Seed: GMDPRMCSLMQGSTLPRRSGA
GMDPRMFSLAQASTHPRRSGA

SEQ ID NO: 82987 - protein, 21 aa, Artificial Sequence
  Description of Artificial Sequence: Synthetic peptide
  Seed: GMDPRMCSLMQGSTLPRRSGA
GMDPRMFSLAQASTIPRRSGA

SEQ ID NO: 82988 - protein, 21 aa, Artificial Sequence
  Description of Artificial Sequence: Synthetic peptide
  Seed: GMDPRMCSLMQGSTLPRRSGA
GMDPRMFSLAQASTLPRRSGA

SEQ ID NO: 82989 - protein, 21 aa, Artificial Sequence
  Description of Artificial Sequence: Synthetic peptide
  Seed: GMDPRMCSLMQGSTLPRRSGA
GMDPRMFSLAQASTMPRRSGA

SEQ ID NO: 82990 - protein, 21 aa, Artificial Sequence
  Description of Artificial Sequence: Synthetic peptide
  Seed: GMDPRMCSLMQGSTLPRRSGA
GMDPRMFSLAQASTNPRRSGA

SEQ ID NO: 82991 - protein, 21 aa, Artificial Sequence
  Description of Artificial Sequence: Synthetic peptide
  Seed: GMDPRMCSLMQGSTLPRRSGA
GMDPRMFSLAQASTQPRRSGA

SEQ ID NO: 82992 - protein, 21 aa, Artificial Sequence
  Description of Artificial Sequence: Synthetic peptide
  Seed: GMDPRMCSLMQGSTLPRRSGA
GMDPRMFSLAQASTSPRRSGA

SEQ ID NO: 82993 - protein, 21 aa, Artificial Sequence
  Description of Artificial Sequence: Synthetic peptide
  Seed: GMDPRMCSLMQGSTLPRRSGA
GMDPRMFSLAQASTTPRRSGA

SEQ ID NO: 82994 - protein, 21 aa, Artificial Sequence
  Description of Artificial Sequence: Synthetic peptide
  Seed: GMDPRMCSLMQGSTLPRRSGA
GMDPRMFSLAQASTVPRRSGA

SEQ ID NO: 82995 - protein, 21 aa, Artificial Sequence
  Description of Artificial Sequence: Synthetic peptide
  Seed: GMDPRMCSLMQGSTLPRRSGA
GMDPRMFSLAQGSTAPRRSGA

SEQ ID NO: 82996 - protein, 21 aa, Artificial Sequence
  Description of Artificial Sequence: Synthetic peptide
  Seed: GMDPRMCSLMQGSTLPRRSGA
GMDPRMFSLAQGSTIPRRSGA

SEQ ID NO: 82997 - protein, 21 aa, Artificial Sequence
  Description of Artificial Sequence: Synthetic peptide
  Seed: GMDPRMCSLMQGSTLPRRSGA
GMDPRMFSLAQGSTLPRRSGA

SEQ ID NO: 82998 - protein, 21 aa, Artificial Sequence
  Description of Artificial Sequence: Synthetic peptide
  Seed: GMDPRMCSLMQGSTLPRRSGA
GMDPRMFSLAQGSTMPRRSGA

SEQ ID NO: 82999 - protein, 21 aa, Artificial Sequence
  Description of Artificial Sequence: Synthetic peptide
  Seed: GMDPRMCSLMQGSTLPRRSGA
GMDPRMFSLAQGSTSPRRSGA

SEQ ID NO: 83000 - protein, 21 aa, Artificial Sequence
  Description of Artificial Sequence: Synthetic peptide
  Seed: GMDPRMCSLMQGSTLPRRSGA
GMDPRMFSLAQGSTTPRRSGA

SEQ ID NO: 83001 - protein, 21 aa, Artificial Sequence
  Description of Artificial Sequence: Synthetic peptide
  Seed: GMDPRMCSLMQGSTLPRRSGA
GMDPRMFSLAQGSTVPRRSGA

SEQ ID NO: 83002 - protein, 21 aa, Artificial Sequence
  Description of Artificial Sequence: Synthetic peptide
  Seed: GMDPRMCSLMQGSTLPRRSGA
GMDPRMFSLAQISTAPRRSGA

SEQ ID NO: 83003 - protein, 21 aa, Artificial Sequence
  Description of Artificial Sequence: Synthetic peptide
  Seed: GMDPRMCSLMQGSTLPRRSGA
GMDPRMFSLAQISTNPRRSGA

SEQ ID NO: 83004 - protein, 21 aa, Artificial Sequence
  Description of Artificial Sequence: Synthetic peptide
  Seed: GMDPRMCSLMQGSTLPRRSGA
GMDPRMFSLAQISTSPRRSGA

SEQ ID NO: 83005 - protein, 21 aa, Artificial Sequence
  Description of Artificial Sequence: Synthetic peptide
  Seed: GMDPRMCSLMQGSTLPRRSGA
GMDPRMFSLAQISTTPRRSGA

SEQ ID NO: 83006 - protein, 21 aa, Artificial Sequence
  Description of Artificial Sequence: Synthetic peptide
  Seed: GMDPRMCSLMQGSTLPRRSGA
GMDPRMFSLAQISTVPRRSGA

SEQ ID NO: 83007 - protein, 21 aa, Artificial Sequence
  Description of Artificial Sequence: Synthetic peptide
  Seed: GMDPRMCSLMQGSTLPRRSGA
GMDPRMFSLAQLSTAPRRSGA

SEQ ID NO: 83008 - protein, 21 aa, Artificial Sequence
  Description of Artificial Sequence: Synthetic peptide
  Seed: GMDPRMCSLMQGSTLPRRSGA
GMDPRMFSLAQNSTAPRRSGA

SEQ ID NO: 83009 - protein, 21 aa, Artificial Sequence
  Description of Artificial Sequence: Synthetic peptide
  Seed: GMDPRMCSLMQGSTLPRRSGA
GMDPRMFSLAQNSTIPRRSGA

SEQ ID NO: 83010 - protein, 21 aa, Artificial Sequence
  Description of Artificial Sequence: Synthetic peptide
  Seed: GMDPRMCSLMQGSTLPRRSGA
GMDPRMFSLAQNSTLPRRSGA

SEQ ID NO: 83011 - protein, 21 aa, Artificial Sequence
  Description of Artificial Sequence: Synthetic peptide
  Seed: GMDPRMCSLMQGSTLPRRSGA
GMDPRMFSLAQNSTNPRRSGA

SEQ ID NO: 83012 - protein, 21 aa, Artificial Sequence
  Description of Artificial Sequence: Synthetic peptide
  Seed: GMDPRMCSLMQGSTLPRRSGA
GMDPRMFSLAQNSTVPRRSGA

SEQ ID NO: 83013 - protein, 21 aa, Artificial Sequence
  Description of Artificial Sequence: Synthetic peptide
  Seed: GMDPRMCSLMQGSTLPRRSGA
GMDPRMFSLAQPSTAPRRSGA

SEQ ID NO: 83014 - protein, 21 aa, Artificial Sequence
  Description of Artificial Sequence: Synthetic peptide
  Seed: GMDPRMCSLMQGSTLPRRSGA
GMDPRMFSLAQPSTIPRRSGA

SEQ ID NO: 83015 - protein, 21 aa, Artificial Sequence
  Description of Artificial Sequence: Synthetic peptide
  Seed: GMDPRMCSLMQGSTLPRRSGA
GMDPRMFSLAQPSTLPRRSGA

SEQ ID NO: 83016 - protein, 21 aa, Artificial Sequence
  Description of Artificial Sequence: Synthetic peptide
  Seed: GMDPRMCSLMQGSTLPRRSGA
GMDPRMFSLAQPSTMPRRSGA

SEQ ID NO: 83017 - protein, 21 aa, Artificial Sequence
  Description of Artificial Sequence: Synthetic peptide
  Seed: GMDPRMCSLMQGSTLPRRSGA
GMDPRMFSLAQPSTNPRRSGA

SEQ ID NO: 83018 - protein, 21 aa, Artificial Sequence
  Description of Artificial Sequence: Synthetic peptide
  Seed: GMDPRMCSLMQGSTLPRRSGA
GMDPRMFSLAQPSTSPRRSGA

SEQ ID NO: 83019 - protein, 21 aa, Artificial Sequence
  Description of Artificial Sequence: Synthetic peptide
  Seed: GMDPRMCSLMQGSTLPRRSGA
GMDPRMFSLAQPSTTPRRSGA

SEQ ID NO: 83020 - protein, 21 aa, Artificial Sequence
  Description of Artificial Sequence: Synthetic peptide
  Seed: GMDPRMCSLMQGSTLPRRSGA
GMDPRMFSLAQPSTVPRRSGA

SEQ ID NO: 83021 - protein, 21 aa, Artificial Sequence
  Description of Artificial Sequence: Synthetic peptide
  Seed: GMDPRMCSLMQGSTLPRRSGA
GMDPRMFSLAQSSTAPRRSGA

SEQ ID NO: 83022 - protein, 21 aa, Artificial Sequence
  Description of Artificial Sequence: Synthetic peptide
  Seed: GMDPRMCSLMQGSTLPRRSGA
GMDPRMFSLAQSSTIPRRSGA

SEQ ID NO: 83023 - protein, 21 aa, Artificial Sequence
  Description of Artificial Sequence: Synthetic peptide
  Seed: GMDPRMCSLMQGSTLPRRSGA
GMDPRMFSLAQSSTLPRRSGA

SEQ ID NO: 83024 - protein, 21 aa, Artificial Sequence
  Description of Artificial Sequence: Synthetic peptide
  Seed: GMDPRMCSLMQGSTLPRRSGA
GMDPRMFSLAQSSTMPRRSGA

SEQ ID NO: 83025 - protein, 21 aa, Artificial Sequence
  Description of Artificial Sequence: Synthetic peptide
  Seed: GMDPRMCSLMQGSTLPRRSGA
GMDPRMFSLAQSSTNPRRSGA

SEQ ID NO: 83026 - protein, 21 aa, Artificial Sequence
  Description of Artificial Sequence: Synthetic peptide
  Seed: GMDPRMCSLMQGSTLPRRSGA
GMDPRMFSLAQSSTSPRRSGA

SEQ ID NO: 83027 - protein, 21 aa, Artificial Sequence
  Description of Artificial Sequence: Synthetic peptide
  Seed: GMDPRMCSLMQGSTLPRRSGA
GMDPRMFSLAQSSTTPRRSGA

SEQ ID NO: 83028 - protein, 21 aa, Artificial Sequence
  Description of Artificial Sequence: Synthetic peptide
  Seed: GMDPRMCSLMQGSTLPRRSGA
GMDPRMFSLAQSSTVPRRSGA

SEQ ID NO: 83029 - protein, 21 aa, Artificial Sequence
  Description of Artificial Sequence: Synthetic peptide
  Seed: GMDPRMCSLMQGSTLPRRSGA
GMDPRMFSLAQTSTAPRRSGA

SEQ ID NO: 83030 - protein, 21 aa, Artificial Sequence
  Description of Artificial Sequence: Synthetic peptide
  Seed: GMDPRMCSLMQGSTLPRRSGA
GMDPRMFSLAQTSTIPRRSGA

SEQ ID NO: 83031 - protein, 21 aa, Artificial Sequence
  Description of Artificial Sequence: Synthetic peptide
  Seed: GMDPRMCSLMQGSTLPRRSGA
GMDPRMFSLAQTSTLPRRSGA

SEQ ID NO: 83032 - protein, 21 aa, Artificial Sequence
  Description of Artificial Sequence: Synthetic peptide
  Seed: GMDPRMCSLMQGSTLPRRSGA
GMDPRMFSLAQTSTMPRRSGA

SEQ ID NO: 83033 - protein, 21 aa, Artificial Sequence
  Description of Artificial Sequence: Synthetic peptide
  Seed: GMDPRMCSLMQGSTLPRRSGA
GMDPRMFSLAQTSTNPRRSGA

SEQ ID NO: 83034 - protein, 21 aa, Artificial Sequence
  Description of Artificial Sequence: Synthetic peptide
  Seed: GMDPRMCSLMQGSTLPRRSGA
GMDPRMFSLAQTSTSPRRSGA

SEQ ID NO: 83035 - protein, 21 aa, Artificial Sequence
  Description of Artificial Sequence: Synthetic peptide
  Seed: GMDPRMCSLMQGSTLPRRSGA
GMDPRMFSLAQTSTTPRRSGA

SEQ ID NO: 83036 - protein, 21 aa, Artificial Sequence
  Description of Artificial Sequence: Synthetic peptide
  Seed: GMDPRMCSLMQGSTLPRRSGA
GMDPRMFSLAQTSTVPRRSGA

SEQ ID NO: 83037 - protein, 21 aa, Artificial Sequence
  Description of Artificial Sequence: Synthetic peptide
  Seed: GMDPRMCSLMQGSTLPRRSGA
GMDPRMFSLAQVSTAPRRSGA

SEQ ID NO: 83038 - protein, 21 aa, Artificial Sequence
  Description of Artificial Sequence: Synthetic peptide
  Seed: GMDPRMCSLMQGSTLPRRSGA
GMDPRMFSLAQVSTIPRRSGA

SEQ ID NO: 83039 - protein, 21 aa, Artificial Sequence
  Description of Artificial Sequence: Synthetic peptide
  Seed: GMDPRMCSLMQGSTLPRRSGA
GMDPRMFSLAQVSTLPRRSGA

SEQ ID NO: 83040 - protein, 21 aa, Artificial Sequence
  Description of Artificial Sequence: Synthetic peptide
  Seed: GMDPRMCSLMQGSTLPRRSGA
GMDPRMFSLAQVSTMPRRSGA

SEQ ID NO: 83041 - protein, 21 aa, Artificial Sequence
  Description of Artificial Sequence: Synthetic peptide
  Seed: GMDPRMCSLMQGSTLPRRSGA
GMDPRMFSLAQVSTNPRRSGA

SEQ ID NO: 83042 - protein, 21 aa, Artificial Sequence
  Description of Artificial Sequence: Synthetic peptide
  Seed: GMDPRMCSLMQGSTLPRRSGA
GMDPRMFSLAQVSTSPRRSGA

SEQ ID NO: 83043 - protein, 21 aa, Artificial Sequence
  Description of Artificial Sequence: Synthetic peptide
  Seed: GMDPRMCSLMQGSTLPRRSGA
GMDPRMFSLAQVSTTPRRSGA

SEQ ID NO: 83044 - protein, 21 aa, Artificial Sequence
  Description of Artificial Sequence: Synthetic peptide
  Seed: GMDPRMCSLMQGSTLPRRSGA
GMDPRMFSLAQVSTVPRRSGA

SEQ ID NO: 83045 - protein, 21 aa, Artificial Sequence
  Description of Artificial Sequence: Synthetic peptide
  Seed: GMDPRMCSLMQGSTLPRRSGA
GMDPRMFSLCQASTVPRRSGA

SEQ ID NO: 83046 - protein, 21 aa, Artificial Sequence
  Description of Artificial Sequence: Synthetic peptide
  Seed: GMDPRMCSLMQGSTLPRRSGA
GMDPRMFSLEQASTAPRRSGA

SEQ ID NO: 83047 - protein, 21 aa, Artificial Sequence
  Description of Artificial Sequence: Synthetic peptide
  Seed: GMDPRMCSLMQGSTLPRRSGA
GMDPRMFSLEQASTIPRRSGA

SEQ ID NO: 83048 - protein, 21 aa, Artificial Sequence
  Description of Artificial Sequence: Synthetic peptide
  Seed: GMDPRMCSLMQGSTLPRRSGA
GMDPRMFSLEQASTLPRRSGA

SEQ ID NO: 83049 - protein, 21 aa, Artificial Sequence
  Description of Artificial Sequence: Synthetic peptide
  Seed: GMDPRMCSLMQGSTLPRRSGA
GMDPRMFSLEQASTVPRRSGA

SEQ ID NO: 83050 - protein, 21 aa, Artificial Sequence
  Description of Artificial Sequence: Synthetic peptide
  Seed: GMDPRMCSLMQGSTLPRRSGA
GMDPRMFSLEQGSTIPRRSGA

SEQ ID NO: 83051 - protein, 21 aa, Artificial Sequence
  Description of Artificial Sequence: Synthetic peptide
  Seed: GMDPRMCSLMQGSTLPRRSGA
GMDPRMFSLEQGSTLPRRSGA

SEQ ID NO: 83052 - protein, 21 aa, Artificial Sequence
  Description of Artificial Sequence: Synthetic peptide
  Seed: GMDPRMCSLMQGSTLPRRSGA
GMDPRMFSLEQGSTVPRRSGA

SEQ ID NO: 83053 - protein, 21 aa, Artificial Sequence
  Description of Artificial Sequence: Synthetic peptide
  Seed: GMDPRMCSLMQGSTLPRRSGA
GMDPRMFSLEQSSTLPRRSGA

SEQ ID NO: 83054 - protein, 21 aa, Artificial Sequence
  Description of Artificial Sequence: Synthetic peptide
  Seed: GMDPRMCSLMQGSTLPRRSGA
GMDPRMFSLEQSSTVPRRSGA

SEQ ID NO: 83055 - protein, 21 aa, Artificial Sequence
  Description of Artificial Sequence: Synthetic peptide
  Seed: GMDPRMCSLMQGSTLPRRSGA
GMDPRMFSLFQASTAPRRSGA

SEQ ID NO: 83056 - protein, 21 aa, Artificial Sequence
  Description of Artificial Sequence: Synthetic peptide
  Seed: GMDPRMCSLMQGSTLPRRSGA
GMDPRMFSLFQASTIPRRSGA

SEQ ID NO: 83057 - protein, 21 aa, Artificial Sequence
  Description of Artificial Sequence: Synthetic peptide
  Seed: GMDPRMCSLMQGSTLPRRSGA
GMDPRMFSLFQASTLPRRSGA

SEQ ID NO: 83058 - protein, 21 aa, Artificial Sequence
  Description of Artificial Sequence: Synthetic peptide
  Seed: GMDPRMCSLMQGSTLPRRSGA
GMDPRMFSLFQASTNPRRSGA

SEQ ID NO: 83059 - protein, 21 aa, Artificial Sequence
  Description of Artificial Sequence: Synthetic peptide
  Seed: GMDPRMCSLMQGSTLPRRSGA
GMDPRMFSLFQASTSPRRSGA

SEQ ID NO: 83060 - protein, 21 aa, Artificial Sequence
  Description of Artificial Sequence: Synthetic peptide
  Seed: GMDPRMCSLMQGSTLPRRSGA
GMDPRMFSLFQASTVPRRSGA

SEQ ID NO: 83061 - protein, 21 aa, Artificial Sequence
  Description of Artificial Sequence: Synthetic peptide
  Seed: GMDPRMCSLMQGSTLPRRSGA
GMDPRMFSLFQGSTAPRRSGA

SEQ ID NO: 83062 - protein, 21 aa, Artificial Sequence
  Description of Artificial Sequence: Synthetic peptide
  Seed: GMDPRMCSLMQGSTLPRRSGA
GMDPRMFSLFQGSTVPRRSGA

SEQ ID NO: 83063 - protein, 21 aa, Artificial Sequence
  Description of Artificial Sequence: Synthetic peptide
  Seed: GMDPRMCSLMQGSTLPRRSGA
GMDPRMFSLFQPSTAPRRSGA

SEQ ID NO: 83064 - protein, 21 aa, Artificial Sequence
  Description of Artificial Sequence: Synthetic peptide
  Seed: GMDPRMCSLMQGSTLPRRSGA
GMDPRMFSLFQPSTNPRRSGA

SEQ ID NO: 83065 - protein, 21 aa, Artificial Sequence
  Description of Artificial Sequence: Synthetic peptide
  Seed: GMDPRMCSLMQGSTLPRRSGA
GMDPRMFSLFQPSTSPRRSGA

SEQ ID NO: 83066 - protein, 21 aa, Artificial Sequence
  Description of Artificial Sequence: Synthetic peptide
  Seed: GMDPRMCSLMQGSTLPRRSGA
GMDPRMFSLFQSSTAPRRSGA

SEQ ID NO: 83067 - protein, 21 aa, Artificial Sequence
  Description of Artificial Sequence: Synthetic peptide
  Seed: GMDPRMCSLMQGSTLPRRSGA
GMDPRMFSLFQSSTVPRRSGA

SEQ ID NO: 83068 - protein, 21 aa, Artificial Sequence
  Description of Artificial Sequence: Synthetic peptide
  Seed: GMDPRMCSLMQGSTLPRRSGA
GMDPRMFSLFQTSTAPRRSGA

SEQ ID NO: 83069 - protein, 21 aa, Artificial Sequence
  Description of Artificial Sequence: Synthetic peptide
  Seed: GMDPRMCSLMQGSTLPRRSGA
GMDPRMFSLFQVSTAPRRSGA

SEQ ID NO: 83070 - protein, 21 aa, Artificial Sequence
  Description of Artificial Sequence: Synthetic peptide
  Seed: GMDPRMCSLMQGSTLPRRSGA
GMDPRMFSLFQVSTNPRRSGA

SEQ ID NO: 83071 - protein, 21 aa, Artificial Sequence
  Description of Artificial Sequence: Synthetic peptide
  Seed: GMDPRMCSLMQGSTLPRRSGA
GMDPRMFSLGQASTAPRRSGA

SEQ ID NO: 83072 - protein, 21 aa, Artificial Sequence
  Description of Artificial Sequence: Synthetic peptide
  Seed: GMDPRMCSLMQGSTLPRRSGA
GMDPRMFSLGQASTIPRRSGA

SEQ ID NO: 83073 - protein, 21 aa, Artificial Sequence
  Description of Artificial Sequence: Synthetic peptide
  Seed: GMDPRMCSLMQGSTLPRRSGA
GMDPRMFSLGQASTLPRRSGA

SEQ ID NO: 83074 - protein, 21 aa, Artificial Sequence
  Description of Artificial Sequence: Synthetic peptide
  Seed: GMDPRMCSLMQGSTLPRRSGA
GMDPRMFSLGQASTVPRRSGA

SEQ ID NO: 83075 - protein, 21 aa, Artificial Sequence
  Description of Artificial Sequence: Synthetic peptide
  Seed: GMDPRMCSLMQGSTLPRRSGA
GMDPRMFSLHQASTLPRRSGA

SEQ ID NO: 83076 - protein, 21 aa, Artificial Sequence
  Description of Artificial Sequence: Synthetic peptide
  Seed: GMDPRMCSLMQGSTLPRRSGA
GMDPRMFSLHQASTVPRRSGA

SEQ ID NO: 83077 - protein, 21 aa, Artificial Sequence
  Description of Artificial Sequence: Synthetic peptide
  Seed: GMDPRMCSLMQGSTLPRRSGA
GMDPRMFSLIQASTAPRRSGA

SEQ ID NO: 83078 - protein, 21 aa, Artificial Sequence
  Description of Artificial Sequence: Synthetic peptide
  Seed: GMDPRMCSLMQGSTLPRRSGA
GMDPRMFSLIQASTCPRRSGA

SEQ ID NO: 83079 - protein, 21 aa, Artificial Sequence
  Description of Artificial Sequence: Synthetic peptide
  Seed: GMDPRMCSLMQGSTLPRRSGA
GMDPRMFSLIQASTDPRRSGA

SEQ ID NO: 83080 - protein, 21 aa, Artificial Sequence
  Description of Artificial Sequence: Synthetic peptide
  Seed: GMDPRMCSLMQGSTLPRRSGA
GMDPRMFSLIQASTEPRRSGA

SEQ ID NO: 83081 - protein, 21 aa, Artificial Sequence
  Description of Artificial Sequence: Synthetic peptide
  Seed: GMDPRMCSLMQGSTLPRRSGA
GMDPRMFSLIQASTFPRRSGA

SEQ ID NO: 83082 - protein, 21 aa, Artificial Sequence
  Description of Artificial Sequence: Synthetic peptide
  Seed: GMDPRMCSLMQGSTLPRRSGA
GMDPRMFSLIQASTGPRRSGA

SEQ ID NO: 83083 - protein, 21 aa, Artificial Sequence
  Description of Artificial Sequence: Synthetic peptide
  Seed: GMDPRMCSLMQGSTLPRRSGA
GMDPRMFSLIQASTHPRRSGA

SEQ ID NO: 83084 - protein, 21 aa, Artificial Sequence
  Description of Artificial Sequence: Synthetic peptide
  Seed: GMDPRMCSLMQGSTLPRRSGA
GMDPRMFSLIQASTIPRRSGA

SEQ ID NO: 83085 - protein, 21 aa, Artificial Sequence
  Description of Artificial Sequence: Synthetic peptide
  Seed: GMDPRMCSLMQGSTLPRRSGA
GMDPRMFSLIQASTLPRRSGA

SEQ ID NO: 83086 - protein, 21 aa, Artificial Sequence
  Description of Artificial Sequence: Synthetic peptide
  Seed: GMDPRMCSLMQGSTLPRRSGA
GMDPRMFSLIQASTMPRRSGA

SEQ ID NO: 83087 - protein, 21 aa, Artificial Sequence
  Description of Artificial Sequence: Synthetic peptide
  Seed: GMDPRMCSLMQGSTLPRRSGA
GMDPRMFSLIQASTNPRRSGA

SEQ ID NO: 83088 - protein, 21 aa, Artificial Sequence
  Description of Artificial Sequence: Synthetic peptide
  Seed: GMDPRMCSLMQGSTLPRRSGA
GMDPRMFSLIQASTPPRRSGA

SEQ ID NO: 83089 - protein, 21 aa, Artificial Sequence
  Description of Artificial Sequence: Synthetic peptide
  Seed: GMDPRMCSLMQGSTLPRRSGA
GMDPRMFSLIQASTQPRRSGA

SEQ ID NO: 83090 - protein, 21 aa, Artificial Sequence
  Description of Artificial Sequence: Synthetic peptide
  Seed: GMDPRMCSLMQGSTLPRRSGA
GMDPRMFSLIQASTSPRRSGA

SEQ ID NO: 83091 - protein, 21 aa, Artificial Sequence
  Description of Artificial Sequence: Synthetic peptide
  Seed: GMDPRMCSLMQGSTLPRRSGA
GMDPRMFSLIQASTTPRRSGA

SEQ ID NO: 83092 - protein, 21 aa, Artificial Sequence
  Description of Artificial Sequence: Synthetic peptide
  Seed: GMDPRMCSLMQGSTLPRRSGA
GMDPRMFSLIQASTVPRRSGA

SEQ ID NO: 83093 - protein, 21 aa, Artificial Sequence
  Description of Artificial Sequence: Synthetic peptide
  Seed: GMDPRMCSLMQGSTLPRRSGA
GMDPRMFSLIQGSTAPRRSGA

SEQ ID NO: 83094 - protein, 21 aa, Artificial Sequence
  Description of Artificial Sequence: Synthetic peptide
  Seed: GMDPRMCSLMQGSTLPRRSGA
GMDPRMFSLIQGSTCPRRSGA

SEQ ID NO: 83095 - protein, 21 aa, Artificial Sequence
  Description of Artificial Sequence: Synthetic peptide
  Seed: GMDPRMCSLMQGSTLPRRSGA
GMDPRMFSLIQGSTGPRRSGA

SEQ ID NO: 83096 - protein, 21 aa, Artificial Sequence
  Description of Artificial Sequence: Synthetic peptide
  Seed: GMDPRMCSLMQGSTLPRRSGA
GMDPRMFSLIQGSTIPRRSGA

SEQ ID NO: 83097 - protein, 21 aa, Artificial Sequence
  Description of Artificial Sequence: Synthetic peptide
  Seed: GMDPRMCSLMQGSTLPRRSGA
GMDPRMFSLIQGSTLPRRSGA

SEQ ID NO: 83098 - protein, 21 aa, Artificial Sequence
  Description of Artificial Sequence: Synthetic peptide
  Seed: GMDPRMCSLMQGSTLPRRSGA
GMDPRMFSLIQGSTMPRRSGA

SEQ ID NO: 83099 - protein, 21 aa, Artificial Sequence
  Description of Artificial Sequence: Synthetic peptide
  Seed: GMDPRMCSLMQGSTLPRRSGA
GMDPRMFSLIQGSTNPRRSGA

SEQ ID NO: 83100 - protein, 21 aa, Artificial Sequence
  Description of Artificial Sequence: Synthetic peptide
  Seed: GMDPRMCSLMQGSTLPRRSGA
GMDPRMFSLIQGSTSPRRSGA

SEQ ID NO: 83101 - protein, 21 aa, Artificial Sequence
  Description of Artificial Sequence: Synthetic peptide
  Seed: GMDPRMCSLMQGSTLPRRSGA
GMDPRMFSLIQGSTTPRRSGA

SEQ ID NO: 83102 - protein, 21 aa, Artificial Sequence
  Description of Artificial Sequence: Synthetic peptide
  Seed: GMDPRMCSLMQGSTLPRRSGA
GMDPRMFSLIQGSTVPRRSGA

SEQ ID NO: 83103 - protein, 21 aa, Artificial Sequence
  Description of Artificial Sequence: Synthetic peptide
  Seed: GMDPRMCSLMQGSTLPRRSGA
GMDPRMFSLIQISTAPRRSGA

SEQ ID NO: 83104 - protein, 21 aa, Artificial Sequence
  Description of Artificial Sequence: Synthetic peptide
  Seed: GMDPRMCSLMQGSTLPRRSGA
GMDPRMFSLIQISTGPRRSGA

SEQ ID NO: 83105 - protein, 21 aa, Artificial Sequence
  Description of Artificial Sequence: Synthetic peptide
  Seed: GMDPRMCSLMQGSTLPRRSGA
GMDPRMFSLIQISTIPRRSGA

SEQ ID NO: 83106 - protein, 21 aa, Artificial Sequence
  Description of Artificial Sequence: Synthetic peptide
  Seed: GMDPRMCSLMQGSTLPRRSGA
GMDPRMFSLIQISTLPRRSGA

SEQ ID NO: 83107 - protein, 21 aa, Artificial Sequence
  Description of Artificial Sequence: Synthetic peptide
  Seed: GMDPRMCSLMQGSTLPRRSGA
GMDPRMFSLIQISTMPRRSGA

SEQ ID NO: 83108 - protein, 21 aa, Artificial Sequence
  Description of Artificial Sequence: Synthetic peptide
  Seed: GMDPRMCSLMQGSTLPRRSGA
GMDPRMFSLIQISTNPRRSGA

SEQ ID NO: 83109 - protein, 21 aa, Artificial Sequence
  Description of Artificial Sequence: Synthetic peptide
  Seed: GMDPRMCSLMQGSTLPRRSGA
GMDPRMFSLIQISTSPRRSGA

SEQ ID NO: 83110 - protein, 21 aa, Artificial Sequence
  Description of Artificial Sequence: Synthetic peptide
  Seed: GMDPRMCSLMQGSTLPRRSGA
GMDPRMFSLIQISTTPRRSGA

SEQ ID NO: 83111 - protein, 21 aa, Artificial Sequence
  Description of Artificial Sequence: Synthetic peptide
  Seed: GMDPRMCSLMQGSTLPRRSGA
GMDPRMFSLIQISTVPRRSGA

SEQ ID NO: 83112 - protein, 21 aa, Artificial Sequence
  Description of Artificial Sequence: Synthetic peptide
  Seed: GMDPRMCSLMQGSTLPRRSGA
GMDPRMFSLIQLSTAPRRSGA

SEQ ID NO: 83113 - protein, 21 aa, Artificial Sequence
  Description of Artificial Sequence: Synthetic peptide
  Seed: GMDPRMCSLMQGSTLPRRSGA
GMDPRMFSLIQLSTNPRRSGA

SEQ ID NO: 83114 - protein, 21 aa, Artificial Sequence
  Description of Artificial Sequence: Synthetic peptide
  Seed: GMDPRMCSLMQGSTLPRRSGA
GMDPRMFSLIQLSTSPRRSGA

SEQ ID NO: 83115 - protein, 21 aa, Artificial Sequence
  Description of Artificial Sequence: Synthetic peptide
  Seed: GMDPRMCSLMQGSTLPRRSGA
GMDPRMFSLIQMSTAPRRSGA

SEQ ID NO: 83116 - protein, 21 aa, Artificial Sequence
  Description of Artificial Sequence: Synthetic peptide
  Seed: GMDPRMCSLMQGSTLPRRSGA
GMDPRMFSLIQMSTNPRRSGA

SEQ ID NO: 83117 - protein, 21 aa, Artificial Sequence
  Description of Artificial Sequence: Synthetic peptide
  Seed: GMDPRMCSLMQGSTLPRRSGA
GMDPRMFSLIQMSTSPRRSGA

SEQ ID NO: 83118 - protein, 21 aa, Artificial Sequence
  Description of Artificial Sequence: Synthetic peptide
  Seed: GMDPRMCSLMQGSTLPRRSGA
GMDPRMFSLIQNSTAPRRSGA

SEQ ID NO: 83119 - protein, 21 aa, Artificial Sequence
  Description of Artificial Sequence: Synthetic peptide
  Seed: GMDPRMCSLMQGSTLPRRSGA
GMDPRMFSLIQNSTIPRRSGA

SEQ ID NO: 83120 - protein, 21 aa, Artificial Sequence
  Description of Artificial Sequence: Synthetic peptide
  Seed: GMDPRMCSLMQGSTLPRRSGA
GMDPRMFSLIQNSTLPRRSGA

SEQ ID NO: 83121 - protein, 21 aa, Artificial Sequence
  Description of Artificial Sequence: Synthetic peptide
  Seed: GMDPRMCSLMQGSTLPRRSGA
GMDPRMFSLIQNSTNPRRSGA

SEQ ID NO: 83122 - protein, 21 aa, Artificial Sequence
  Description of Artificial Sequence: Synthetic peptide
  Seed: GMDPRMCSLMQGSTLPRRSGA
GMDPRMFSLIQNSTSPRRSGA

SEQ ID NO: 83123 - protein, 21 aa, Artificial Sequence
  Description of Artificial Sequence: Synthetic peptide
  Seed: GMDPRMCSLMQGSTLPRRSGA
GMDPRMFSLIQNSTTPRRSGA

SEQ ID NO: 83124 - protein, 21 aa, Artificial Sequence
  Description of Artificial Sequence: Synthetic peptide
  Seed: GMDPRMCSLMQGSTLPRRSGA
GMDPRMFSLIQNSTVPRRSGA

SEQ ID NO: 83125 - protein, 21 aa, Artificial Sequence
  Description of Artificial Sequence: Synthetic peptide
  Seed: GMDPRMCSLMQGSTLPRRSGA
GMDPRMFSLIQPSTAPRRSGA

SEQ ID NO: 83126 - protein, 21 aa, Artificial Sequence
  Description of Artificial Sequence: Synthetic peptide
  Seed: GMDPRMCSLMQGSTLPRRSGA
GMDPRMFSLIQPSTGPRRSGA

SEQ ID NO: 83127 - protein, 21 aa, Artificial Sequence
  Description of Artificial Sequence: Synthetic peptide
  Seed: GMDPRMCSLMQGSTLPRRSGA
GMDPRMFSLIQPSTHPRRSGA

SEQ ID NO: 83128 - protein, 21 aa, Artificial Sequence
  Description of Artificial Sequence: Synthetic peptide
  Seed: GMDPRMCSLMQGSTLPRRSGA
GMDPRMFSLIQPSTIPRRSGA

SEQ ID NO: 83129 - protein, 21 aa, Artificial Sequence
  Description of Artificial Sequence: Synthetic peptide
  Seed: GMDPRMCSLMQGSTLPRRSGA
GMDPRMFSLIQPSTLPRRSGA

SEQ ID NO: 83130 - protein, 21 aa, Artificial Sequence
  Description of Artificial Sequence: Synthetic peptide
  Seed: GMDPRMCSLMQGSTLPRRSGA
GMDPRMFSLIQPSTMPRRSGA

SEQ ID NO: 83131 - protein, 21 aa, Artificial Sequence
  Description of Artificial Sequence: Synthetic peptide
  Seed: GMDPRMCSLMQGSTLPRRSGA
GMDPRMFSLIQPSTNPRRSGA

SEQ ID NO: 83132 - protein, 21 aa, Artificial Sequence
  Description of Artificial Sequence: Synthetic peptide
  Seed: GMDPRMCSLMQGSTLPRRSGA
GMDPRMFSLIQPSTQPRRSGA

SEQ ID NO: 83133 - protein, 21 aa, Artificial Sequence
  Description of Artificial Sequence: Synthetic peptide
  Seed: GMDPRMCSLMQGSTLPRRSGA
GMDPRMFSLIQPSTSPRRSGA

SEQ ID NO: 83134 - protein, 21 aa, Artificial Sequence
  Description of Artificial Sequence: Synthetic peptide
  Seed: GMDPRMCSLMQGSTLPRRSGA
GMDPRMFSLIQPSTTPRRSGA

SEQ ID NO: 83135 - protein, 21 aa, Artificial Sequence
  Description of Artificial Sequence: Synthetic peptide
  Seed: GMDPRMCSLMQGSTLPRRSGA
GMDPRMFSLIQPSTVPRRSGA

SEQ ID NO: 83136 - protein, 21 aa, Artificial Sequence
  Description of Artificial Sequence: Synthetic peptide
  Seed: GMDPRMCSLMQGSTLPRRSGA
GMDPRMFSLIQSSTAPRRSGA

SEQ ID NO: 83137 - protein, 21 aa, Artificial Sequence
  Description of Artificial Sequence: Synthetic peptide
  Seed: GMDPRMCSLMQGSTLPRRSGA
GMDPRMFSLIQSSTGPRRSGA

SEQ ID NO: 83138 - protein, 21 aa, Artificial Sequence
  Description of Artificial Sequence: Synthetic peptide
  Seed: GMDPRMCSLMQGSTLPRRSGA
GMDPRMFSLIQSSTHPRRSGA

SEQ ID NO: 83139 - protein, 21 aa, Artificial Sequence
  Description of Artificial Sequence: Synthetic peptide
  Seed: GMDPRMCSLMQGSTLPRRSGA
GMDPRMFSLIQSSTIPRRSGA

SEQ ID NO: 83140 - protein, 21 aa, Artificial Sequence
  Description of Artificial Sequence: Synthetic peptide
  Seed: GMDPRMCSLMQGSTLPRRSGA
GMDPRMFSLIQSSTLPRRSGA

SEQ ID NO: 83141 - protein, 21 aa, Artificial Sequence
  Description of Artificial Sequence: Synthetic peptide
  Seed: GMDPRMCSLMQGSTLPRRSGA
GMDPRMFSLIQSSTMPRRSGA

SEQ ID NO: 83142 - protein, 21 aa, Artificial Sequence
  Description of Artificial Sequence: Synthetic peptide
  Seed: GMDPRMCSLMQGSTLPRRSGA
GMDPRMFSLIQSSTNPRRSGA

SEQ ID NO: 83143 - protein, 21 aa, Artificial Sequence
  Description of Artificial Sequence: Synthetic peptide
  Seed: GMDPRMCSLMQGSTLPRRSGA
GMDPRMFSLIQSSTQPRRSGA

SEQ ID NO: 83144 - protein, 21 aa, Artificial Sequence
  Description of Artificial Sequence: Synthetic peptide
  Seed: GMDPRMCSLMQGSTLPRRSGA
GMDPRMFSLIQSSTSPRRSGA

SEQ ID NO: 83145 - protein, 21 aa, Artificial Sequence
  Description of Artificial Sequence: Synthetic peptide
  Seed: GMDPRMCSLMQGSTLPRRSGA
GMDPRMFSLIQSSTTPRRSGA

SEQ ID NO: 83146 - protein, 21 aa, Artificial Sequence
  Description of Artificial Sequence: Synthetic peptide
  Seed: GMDPRMCSLMQGSTLPRRSGA
GMDPRMFSLIQSSTVPRRSGA

SEQ ID NO: 83147 - protein, 21 aa, Artificial Sequence
  Description of Artificial Sequence: Synthetic peptide
  Seed: GMDPRMCSLMQGSTLPRRSGA
GMDPRMFSLIQTSTAPRRSGA

SEQ ID NO: 83148 - protein, 21 aa, Artificial Sequence
  Description of Artificial Sequence: Synthetic peptide
  Seed: GMDPRMCSLMQGSTLPRRSGA
GMDPRMFSLIQTSTGPRRSGA

SEQ ID NO: 83149 - protein, 21 aa, Artificial Sequence
  Description of Artificial Sequence: Synthetic peptide
  Seed: GMDPRMCSLMQGSTLPRRSGA
GMDPRMFSLIQTSTHPRRSGA

SEQ ID NO: 83150 - protein, 21 aa, Artificial Sequence
  Description of Artificial Sequence: Synthetic peptide
  Seed: GMDPRMCSLMQGSTLPRRSGA
GMDPRMFSLIQTSTIPRRSGA

SEQ ID NO: 83151 - protein, 21 aa, Artificial Sequence
  Description of Artificial Sequence: Synthetic peptide
  Seed: GMDPRMCSLMQGSTLPRRSGA
GMDPRMFSLIQTSTLPRRSGA

SEQ ID NO: 83152 - protein, 21 aa, Artificial Sequence
  Description of Artificial Sequence: Synthetic peptide
  Seed: GMDPRMCSLMQGSTLPRRSGA
GMDPRMFSLIQTSTMPRRSGA

SEQ ID NO: 83153 - protein, 21 aa, Artificial Sequence
  Description of Artificial Sequence: Synthetic peptide
  Seed: GMDPRMCSLMQGSTLPRRSGA
GMDPRMFSLIQTSTNPRRSGA

SEQ ID NO: 83154 - protein, 21 aa, Artificial Sequence
  Description of Artificial Sequence: Synthetic peptide
  Seed: GMDPRMCSLMQGSTLPRRSGA
GMDPRMFSLIQTSTQPRRSGA

SEQ ID NO: 83155 - protein, 21 aa, Artificial Sequence
  Description of Artificial Sequence: Synthetic peptide
  Seed: GMDPRMCSLMQGSTLPRRSGA
GMDPRMFSLIQTSTSPRRSGA

SEQ ID NO: 83156 - protein, 21 aa, Artificial Sequence
  Description of Artificial Sequence: Synthetic peptide
  Seed: GMDPRMCSLMQGSTLPRRSGA
GMDPRMFSLIQTSTTPRRSGA

SEQ ID NO: 83157 - protein, 21 aa, Artificial Sequence
  Description of Artificial Sequence: Synthetic peptide
  Seed: GMDPRMCSLMQGSTLPRRSGA
GMDPRMFSLIQTSTVPRRSGA

SEQ ID NO: 83158 - protein, 21 aa, Artificial Sequence
  Description of Artificial Sequence: Synthetic peptide
  Seed: GMDPRMCSLMQGSTLPRRSGA
GMDPRMFSLIQVSTAPRRSGA

SEQ ID NO: 83159 - protein, 21 aa, Artificial Sequence
  Description of Artificial Sequence: Synthetic peptide
  Seed: GMDPRMCSLMQGSTLPRRSGA
GMDPRMFSLIQVSTGPRRSGA

SEQ ID NO: 83160 - protein, 21 aa, Artificial Sequence
  Description of Artificial Sequence: Synthetic peptide
  Seed: GMDPRMCSLMQGSTLPRRSGA
GMDPRMFSLIQVSTHPRRSGA

SEQ ID NO: 83161 - protein, 21 aa, Artificial Sequence
  Description of Artificial Sequence: Synthetic peptide
  Seed: GMDPRMCSLMQGSTLPRRSGA
GMDPRMFSLIQVSTIPRRSGA

SEQ ID NO: 83162 - protein, 21 aa, Artificial Sequence
  Description of Artificial Sequence: Synthetic peptide
  Seed: GMDPRMCSLMQGSTLPRRSGA
GMDPRMFSLIQVSTLPRRSGA

SEQ ID NO: 83163 - protein, 21 aa, Artificial Sequence
  Description of Artificial Sequence: Synthetic peptide
  Seed: GMDPRMCSLMQGSTLPRRSGA
GMDPRMFSLIQVSTMPRRSGA

SEQ ID NO: 83164 - protein, 21 aa, Artificial Sequence
  Description of Artificial Sequence: Synthetic peptide
  Seed: GMDPRMCSLMQGSTLPRRSGA
GMDPRMFSLIQVSTNPRRSGA

SEQ ID NO: 83165 - protein, 21 aa, Artificial Sequence
  Description of Artificial Sequence: Synthetic peptide
  Seed: GMDPRMCSLMQGSTLPRRSGA
GMDPRMFSLIQVSTQPRRSGA

SEQ ID NO: 83166 - protein, 21 aa, Artificial Sequence
  Description of Artificial Sequence: Synthetic peptide
  Seed: GMDPRMCSLMQGSTLPRRSGA
GMDPRMFSLIQVSTSPRRSGA

SEQ ID NO: 83167 - protein, 21 aa, Artificial Sequence
  Description of Artificial Sequence: Synthetic peptide
  Seed: GMDPRMCSLMQGSTLPRRSGA
GMDPRMFSLIQVSTTPRRSGA

SEQ ID NO: 83168 - protein, 21 aa, Artificial Sequence
  Description of Artificial Sequence: Synthetic peptide
  Seed: GMDPRMCSLMQGSTLPRRSGA
GMDPRMFSLIQVSTVPRRSGA

SEQ ID NO: 83169 - protein, 21 aa, Artificial Sequence
  Description of Artificial Sequence: Synthetic peptide
  Seed: GMDPRMCSLMQGSTLPRRSGA
GMDPRMFSLLQASTAPRRSGA

SEQ ID NO: 83170 - protein, 21 aa, Artificial Sequence
  Description of Artificial Sequence: Synthetic peptide
  Seed: GMDPRMCSLMQGSTLPRRSGA
GMDPRMFSLLQASTCPRRSGA

SEQ ID NO: 83171 - protein, 21 aa, Artificial Sequence
  Description of Artificial Sequence: Synthetic peptide
  Seed: GMDPRMCSLMQGSTLPRRSGA
GMDPRMFSLLQASTDPRRSGA

SEQ ID NO: 83172 - protein, 21 aa, Artificial Sequence
  Description of Artificial Sequence: Synthetic peptide
  Seed: GMDPRMCSLMQGSTLPRRSGA
GMDPRMFSLLQASTEPRRSGA

SEQ ID NO: 83173 - protein, 21 aa, Artificial Sequence
  Description of Artificial Sequence: Synthetic peptide
  Seed: GMDPRMCSLMQGSTLPRRSGA
GMDPRMFSLLQASTFPRRSGA

SEQ ID NO: 83174 - protein, 21 aa, Artificial Sequence
  Description of Artificial Sequence: Synthetic peptide
  Seed: GMDPRMCSLMQGSTLPRRSGA
GMDPRMFSLLQASTGPRRSGA

SEQ ID NO: 83175 - protein, 21 aa, Artificial Sequence
  Description of Artificial Sequence: Synthetic peptide
  Seed: GMDPRMCSLMQGSTLPRRSGA
GMDPRMFSLLQASTHPRRSGA

SEQ ID NO: 83176 - protein, 21 aa, Artificial Sequence
  Description of Artificial Sequence: Synthetic peptide
  Seed: GMDPRMCSLMQGSTLPRRSGA
GMDPRMFSLLQASTIPRRSGA

SEQ ID NO: 83177 - protein, 21 aa, Artificial Sequence
  Description of Artificial Sequence: Synthetic peptide
  Seed: GMDPRMCSLMQGSTLPRRSGA
GMDPRMFSLLQASTLPRRSGA

SEQ ID NO: 83178 - protein, 21 aa, Artificial Sequence
  Description of Artificial Sequence: Synthetic peptide
  Seed: GMDPRMCSLMQGSTLPRRSGA
GMDPRMFSLLQASTMPRRSGA

SEQ ID NO: 83179 - protein, 21 aa, Artificial Sequence
  Description of Artificial Sequence: Synthetic peptide
  Seed: GMDPRMCSLMQGSTLPRRSGA
GMDPRMFSLLQASTNPRRSGA

SEQ ID NO: 83180 - protein, 21 aa, Artificial Sequence
  Description of Artificial Sequence: Synthetic peptide
  Seed: GMDPRMCSLMQGSTLPRRSGA
GMDPRMFSLLQASTPPRRSGA

SEQ ID NO: 83181 - protein, 21 aa, Artificial Sequence
  Description of Artificial Sequence: Synthetic peptide
  Seed: GMDPRMCSLMQGSTLPRRSGA
GMDPRMFSLLQASTQPRRSGA

SEQ ID NO: 83182 - protein, 21 aa, Artificial Sequence
  Description of Artificial Sequence: Synthetic peptide
  Seed: GMDPRMCSLMQGSTLPRRSGA
GMDPRMFSLLQASTSPRRSGA

SEQ ID NO: 83183 - protein, 21 aa, Artificial Sequence
  Description of Artificial Sequence: Synthetic peptide
  Seed: GMDPRMCSLMQGSTLPRRSGA
GMDPRMFSLLQASTTPRRSGA

SEQ ID NO: 83184 - protein, 21 aa, Artificial Sequence
  Description of Artificial Sequence: Synthetic peptide
  Seed: GMDPRMCSLMQGSTLPRRSGA
GMDPRMFSLLQASTVPRRSGA

SEQ ID NO: 83185 - protein, 21 aa, Artificial Sequence
  Description of Artificial Sequence: Synthetic peptide
  Seed: GMDPRMCSLMQGSTLPRRSGA
GMDPRMFSLLQASTYPRRSGA

SEQ ID NO: 83186 - protein, 21 aa, Artificial Sequence
  Description of Artificial Sequence: Synthetic peptide
  Seed: GMDPRMCSLMQGSTLPRRSGA
GMDPRMFSLLQGSTAPRRSGA

SEQ ID NO: 83187 - protein, 21 aa, Artificial Sequence
  Description of Artificial Sequence: Synthetic peptide
  Seed: GMDPRMCSLMQGSTLPRRSGA
GMDPRMFSLLQGSTCPRRSGA

SEQ ID NO: 83188 - protein, 21 aa, Artificial Sequence
  Description of Artificial Sequence: Synthetic peptide
  Seed: GMDPRMCSLMQGSTLPRRSGA
GMDPRMFSLLQGSTFPRRSGA

SEQ ID NO: 83189 - protein, 21 aa, Artificial Sequence
  Description of Artificial Sequence: Synthetic peptide
  Seed: GMDPRMCSLMQGSTLPRRSGA
GMDPRMFSLLQGSTGPRRSGA

SEQ ID NO: 83190 - protein, 21 aa, Artificial Sequence
  Description of Artificial Sequence: Synthetic peptide
  Seed: GMDPRMCSLMQGSTLPRRSGA
GMDPRMFSLLQGSTIPRRSGA

SEQ ID NO: 83191 - protein, 21 aa, Artificial Sequence
  Description of Artificial Sequence: Synthetic peptide
  Seed: GMDPRMCSLMQGSTLPRRSGA
GMDPRMFSLLQGSTLPRRSGA

SEQ ID NO: 83192 - protein, 21 aa, Artificial Sequence
  Description of Artificial Sequence: Synthetic peptide
  Seed: GMDPRMCSLMQGSTLPRRSGA
GMDPRMFSLLQGSTMPRRSGA

SEQ ID NO: 83193 - protein, 21 aa, Artificial Sequence
  Description of Artificial Sequence: Synthetic peptide
  Seed: GMDPRMCSLMQGSTLPRRSGA
GMDPRMFSLLQGSTNPRRSGA

SEQ ID NO: 83194 - protein, 21 aa, Artificial Sequence
  Description of Artificial Sequence: Synthetic peptide
  Seed: GMDPRMCSLMQGSTLPRRSGA
GMDPRMFSLLQGSTSPRRSGA

SEQ ID NO: 83195 - protein, 21 aa, Artificial Sequence
  Description of Artificial Sequence: Synthetic peptide
  Seed: GMDPRMCSLMQGSTLPRRSGA
GMDPRMFSLLQGSTTPRRSGA

SEQ ID NO: 83196 - protein, 21 aa, Artificial Sequence
  Description of Artificial Sequence: Synthetic peptide
  Seed: GMDPRMCSLMQGSTLPRRSGA
GMDPRMFSLLQGSTVPRRSGA

SEQ ID NO: 83197 - protein, 21 aa, Artificial Sequence
  Description of Artificial Sequence: Synthetic peptide
  Seed: GMDPRMCSLMQGSTLPRRSGA
GMDPRMFSLLQISTAPRRSGA

SEQ ID NO: 83198 - protein, 21 aa, Artificial Sequence
  Description of Artificial Sequence: Synthetic peptide
  Seed: GMDPRMCSLMQGSTLPRRSGA
GMDPRMFSLLQISTGPRRSGA

SEQ ID NO: 83199 - protein, 21 aa, Artificial Sequence
  Description of Artificial Sequence: Synthetic peptide
  Seed: GMDPRMCSLMQGSTLPRRSGA
GMDPRMFSLLQISTHPRRSGA

SEQ ID NO: 83200 - protein, 21 aa, Artificial Sequence
  Description of Artificial Sequence: Synthetic peptide
  Seed: GMDPRMCSLMQGSTLPRRSGA
GMDPRMFSLLQISTIPRRSGA

SEQ ID NO: 83201 - protein, 21 aa, Artificial Sequence
  Description of Artificial Sequence: Synthetic peptide
  Seed: GMDPRMCSLMQGSTLPRRSGA
GMDPRMFSLLQISTLPRRSGA

SEQ ID NO: 83202 - protein, 21 aa, Artificial Sequence
  Description of Artificial Sequence: Synthetic peptide
  Seed: GMDPRMCSLMQGSTLPRRSGA
GMDPRMFSLLQISTMPRRSGA

SEQ ID NO: 83203 - protein, 21 aa, Artificial Sequence
  Description of Artificial Sequence: Synthetic peptide
  Seed: GMDPRMCSLMQGSTLPRRSGA
GMDPRMFSLLQISTNPRRSGA

SEQ ID NO: 83204 - protein, 21 aa, Artificial Sequence
  Description of Artificial Sequence: Synthetic peptide
  Seed: GMDPRMCSLMQGSTLPRRSGA
GMDPRMFSLLQISTQPRRSGA

SEQ ID NO: 83205 - protein, 21 aa, Artificial Sequence
  Description of Artificial Sequence: Synthetic peptide
  Seed: GMDPRMCSLMQGSTLPRRSGA
GMDPRMFSLLQISTSPRRSGA

SEQ ID NO: 83206 - protein, 21 aa, Artificial Sequence
  Description of Artificial Sequence: Synthetic peptide
  Seed: GMDPRMCSLMQGSTLPRRSGA
GMDPRMFSLLQISTTPRRSGA

SEQ ID NO: 83207 - protein, 21 aa, Artificial Sequence
  Description of Artificial Sequence: Synthetic peptide
  Seed: GMDPRMCSLMQGSTLPRRSGA
GMDPRMFSLLQISTVPRRSGA

SEQ ID NO: 83208 - protein, 21 aa, Artificial Sequence
  Description of Artificial Sequence: Synthetic peptide
  Seed: GMDPRMCSLMQGSTLPRRSGA
GMDPRMFSLLQLSTAPRRSGA

SEQ ID NO: 83209 - protein, 21 aa, Artificial Sequence
  Description of Artificial Sequence: Synthetic peptide
  Seed: GMDPRMCSLMQGSTLPRRSGA
GMDPRMFSLLQLSTNPRRSGA

SEQ ID NO: 83210 - protein, 21 aa, Artificial Sequence
  Description of Artificial Sequence: Synthetic peptide
  Seed: GMDPRMCSLMQGSTLPRRSGA
GMDPRMFSLLQLSTSPRRSGA

SEQ ID NO: 83211 - protein, 21 aa, Artificial Sequence
  Description of Artificial Sequence: Synthetic peptide
  Seed: GMDPRMCSLMQGSTLPRRSGA
GMDPRMFSLLQMSTAPRRSGA

SEQ ID NO: 83212 - protein, 21 aa, Artificial Sequence
  Description of Artificial Sequence: Synthetic peptide
  Seed: GMDPRMCSLMQGSTLPRRSGA
GMDPRMFSLLQMSTNPRRSGA

SEQ ID NO: 83213 - protein, 21 aa, Artificial Sequence
  Description of Artificial Sequence: Synthetic peptide
  Seed: GMDPRMCSLMQGSTLPRRSGA
GMDPRMFSLLQMSTSPRRSGA

SEQ ID NO: 83214 - protein, 21 aa, Artificial Sequence
  Description of Artificial Sequence: Synthetic peptide
  Seed: GMDPRMCSLMQGSTLPRRSGA
GMDPRMFSLLQNSTAPRRSGA

SEQ ID NO: 83215 - protein, 21 aa, Artificial Sequence
  Description of Artificial Sequence: Synthetic peptide
  Seed: GMDPRMCSLMQGSTLPRRSGA
GMDPRMFSLLQNSTGPRRSGA

SEQ ID NO: 83216 - protein, 21 aa, Artificial Sequence
  Description of Artificial Sequence: Synthetic peptide
  Seed: GMDPRMCSLMQGSTLPRRSGA
GMDPRMFSLLQNSTIPRRSGA

SEQ ID NO: 83217 - protein, 21 aa, Artificial Sequence
  Description of Artificial Sequence: Synthetic peptide
  Seed: GMDPRMCSLMQGSTLPRRSGA
GMDPRMFSLLQNSTLPRRSGA

SEQ ID NO: 83218 - protein, 21 aa, Artificial Sequence
  Description of Artificial Sequence: Synthetic peptide
  Seed: GMDPRMCSLMQGSTLPRRSGA
GMDPRMFSLLQNSTMPRRSGA

SEQ ID NO: 83219 - protein, 21 aa, Artificial Sequence
  Description of Artificial Sequence: Synthetic peptide
  Seed: GMDPRMCSLMQGSTLPRRSGA
GMDPRMFSLLQNSTNPRRSGA

SEQ ID NO: 83220 - protein, 21 aa, Artificial Sequence
  Description of Artificial Sequence: Synthetic peptide
  Seed: GMDPRMCSLMQGSTLPRRSGA
GMDPRMFSLLQNSTSPRRSGA

SEQ ID NO: 83221 - protein, 21 aa, Artificial Sequence
  Description of Artificial Sequence: Synthetic peptide
  Seed: GMDPRMCSLMQGSTLPRRSGA
GMDPRMFSLLQNSTTPRRSGA

SEQ ID NO: 83222 - protein, 21 aa, Artificial Sequence
  Description of Artificial Sequence: Synthetic peptide
  Seed: GMDPRMCSLMQGSTLPRRSGA
GMDPRMFSLLQNSTVPRRSGA

SEQ ID NO: 83223 - protein, 21 aa, Artificial Sequence
  Description of Artificial Sequence: Synthetic peptide
  Seed: GMDPRMCSLMQGSTLPRRSGA
GMDPRMFSLLQPSTAPRRSGA

SEQ ID NO: 83224 - protein, 21 aa, Artificial Sequence
  Description of Artificial Sequence: Synthetic peptide
  Seed: GMDPRMCSLMQGSTLPRRSGA
GMDPRMFSLLQPSTCPRRSGA

SEQ ID NO: 83225 - protein, 21 aa, Artificial Sequence
  Description of Artificial Sequence: Synthetic peptide
  Seed: GMDPRMCSLMQGSTLPRRSGA
GMDPRMFSLLQPSTDPRRSGA

SEQ ID NO: 83226 - protein, 21 aa, Artificial Sequence
  Description of Artificial Sequence: Synthetic peptide
  Seed: GMDPRMCSLMQGSTLPRRSGA
GMDPRMFSLLQPSTEPRRSGA

SEQ ID NO: 83227 - protein, 21 aa, Artificial Sequence
  Description of Artificial Sequence: Synthetic peptide
  Seed: GMDPRMCSLMQGSTLPRRSGA
GMDPRMFSLLQPSTFPRRSGA

SEQ ID NO: 83228 - protein, 21 aa, Artificial Sequence
  Description of Artificial Sequence: Synthetic peptide
  Seed: GMDPRMCSLMQGSTLPRRSGA
GMDPRMFSLLQPSTGPRRSGA

SEQ ID NO: 83229 - protein, 21 aa, Artificial Sequence
  Description of Artificial Sequence: Synthetic peptide
  Seed: GMDPRMCSLMQGSTLPRRSGA
GMDPRMFSLLQPSTHPRRSGA

SEQ ID NO: 83230 - protein, 21 aa, Artificial Sequence
  Description of Artificial Sequence: Synthetic peptide
  Seed: GMDPRMCSLMQGSTLPRRSGA
GMDPRMFSLLQPSTIPRRSGA

SEQ ID NO: 83231 - protein, 21 aa, Artificial Sequence
  Description of Artificial Sequence: Synthetic peptide
  Seed: GMDPRMCSLMQGSTLPRRSGA
GMDPRMFSLLQPSTLPRRSGA

SEQ ID NO: 83232 - protein, 21 aa, Artificial Sequence
  Description of Artificial Sequence: Synthetic peptide
  Seed: GMDPRMCSLMQGSTLPRRSGA
GMDPRMFSLLQPSTMPRRSGA

SEQ ID NO: 83233 - protein, 21 aa, Artificial Sequence
  Description of Artificial Sequence: Synthetic peptide
  Seed: GMDPRMCSLMQGSTLPRRSGA
GMDPRMFSLLQPSTNPRRSGA

SEQ ID NO: 83234 - protein, 21 aa, Artificial Sequence
  Description of Artificial Sequence: Synthetic peptide
  Seed: GMDPRMCSLMQGSTLPRRSGA
GMDPRMFSLLQPSTPPRRSGA

SEQ ID NO: 83235 - protein, 21 aa, Artificial Sequence
  Description of Artificial Sequence: Synthetic peptide
  Seed: GMDPRMCSLMQGSTLPRRSGA
GMDPRMFSLLQPSTQPRRSGA

SEQ ID NO: 83236 - protein, 21 aa, Artificial Sequence
  Description of Artificial Sequence: Synthetic peptide
  Seed: GMDPRMCSLMQGSTLPRRSGA
GMDPRMFSLLQPSTSPRRSGA

SEQ ID NO: 83237 - protein, 21 aa, Artificial Sequence
  Description of Artificial Sequence: Synthetic peptide
  Seed: GMDPRMCSLMQGSTLPRRSGA
GMDPRMFSLLQPSTTPRRSGA

SEQ ID NO: 83238 - protein, 21 aa, Artificial Sequence
  Description of Artificial Sequence: Synthetic peptide
  Seed: GMDPRMCSLMQGSTLPRRSGA
GMDPRMFSLLQPSTVPRRSGA

SEQ ID NO: 83239 - protein, 21 aa, Artificial Sequence
  Description of Artificial Sequence: Synthetic peptide
  Seed: GMDPRMCSLMQGSTLPRRSGA
GMDPRMFSLLQSSTAPRRSGA

SEQ ID NO: 83240 - protein, 21 aa, Artificial Sequence
  Description of Artificial Sequence: Synthetic peptide
  Seed: GMDPRMCSLMQGSTLPRRSGA
GMDPRMFSLLQSSTCPRRSGA

SEQ ID NO: 83241 - protein, 21 aa, Artificial Sequence
  Description of Artificial Sequence: Synthetic peptide
  Seed: GMDPRMCSLMQGSTLPRRSGA
GMDPRMFSLLQSSTDPRRSGA

SEQ ID NO: 83242 - protein, 21 aa, Artificial Sequence
  Description of Artificial Sequence: Synthetic peptide
  Seed: GMDPRMCSLMQGSTLPRRSGA
GMDPRMFSLLQSSTFPRRSGA

SEQ ID NO: 83243 - protein, 21 aa, Artificial Sequence
  Description of Artificial Sequence: Synthetic peptide
  Seed: GMDPRMCSLMQGSTLPRRSGA
GMDPRMFSLLQSSTGPRRSGA

SEQ ID NO: 83244 - protein, 21 aa, Artificial Sequence
  Description of Artificial Sequence: Synthetic peptide
  Seed: GMDPRMCSLMQGSTLPRRSGA
GMDPRMFSLLQSSTHPRRSGA

SEQ ID NO: 83245 - protein, 21 aa, Artificial Sequence
  Description of Artificial Sequence: Synthetic peptide
  Seed: GMDPRMCSLMQGSTLPRRSGA
GMDPRMFSLLQSSTIPRRSGA

SEQ ID NO: 83246 - protein, 21 aa, Artificial Sequence
  Description of Artificial Sequence: Synthetic peptide
  Seed: GMDPRMCSLMQGSTLPRRSGA
GMDPRMFSLLQSSTLPRRSGA

SEQ ID NO: 83247 - protein, 21 aa, Artificial Sequence
  Description of Artificial Sequence: Synthetic peptide
  Seed: GMDPRMCSLMQGSTLPRRSGA
GMDPRMFSLLQSSTMPRRSGA

SEQ ID NO: 83248 - protein, 21 aa, Artificial Sequence
  Description of Artificial Sequence: Synthetic peptide
  Seed: GMDPRMCSLMQGSTLPRRSGA
GMDPRMFSLLQSSTNPRRSGA

SEQ ID NO: 83249 - protein, 21 aa, Artificial Sequence
  Description of Artificial Sequence: Synthetic peptide
  Seed: GMDPRMCSLMQGSTLPRRSGA
GMDPRMFSLLQSSTQPRRSGA

SEQ ID NO: 83250 - protein, 21 aa, Artificial Sequence
  Description of Artificial Sequence: Synthetic peptide
  Seed: GMDPRMCSLMQGSTLPRRSGA
GMDPRMFSLLQSSTSPRRSGA

SEQ ID NO: 83251 - protein, 21 aa, Artificial Sequence
  Description of Artificial Sequence: Synthetic peptide
  Seed: GMDPRMCSLMQGSTLPRRSGA
GMDPRMFSLLQSSTTPRRSGA

SEQ ID NO: 83252 - protein, 21 aa, Artificial Sequence
  Description of Artificial Sequence: Synthetic peptide
  Seed: GMDPRMCSLMQGSTLPRRSGA
GMDPRMFSLLQSSTVPRRSGA

SEQ ID NO: 83253 - protein, 21 aa, Artificial Sequence
  Description of Artificial Sequence: Synthetic peptide
  Seed: GMDPRMCSLMQGSTLPRRSGA
GMDPRMFSLLQTSTAPRRSGA

SEQ ID NO: 83254 - protein, 21 aa, Artificial Sequence
  Description of Artificial Sequence: Synthetic peptide
  Seed: GMDPRMCSLMQGSTLPRRSGA
GMDPRMFSLLQTSTDPRRSGA

SEQ ID NO: 83255 - protein, 21 aa, Artificial Sequence
  Description of Artificial Sequence: Synthetic peptide
  Seed: GMDPRMCSLMQGSTLPRRSGA
GMDPRMFSLLQTSTGPRRSGA

SEQ ID NO: 83256 - protein, 21 aa, Artificial Sequence
  Description of Artificial Sequence: Synthetic peptide
  Seed: GMDPRMCSLMQGSTLPRRSGA
GMDPRMFSLLQTSTHPRRSGA

SEQ ID NO: 83257 - protein, 21 aa, Artificial Sequence
  Description of Artificial Sequence: Synthetic peptide
  Seed: GMDPRMCSLMQGSTLPRRSGA
GMDPRMFSLLQTSTIPRRSGA

SEQ ID NO: 83258 - protein, 21 aa, Artificial Sequence
  Description of Artificial Sequence: Synthetic peptide
  Seed: GMDPRMCSLMQGSTLPRRSGA
GMDPRMFSLLQTSTLPRRSGA

SEQ ID NO: 83259 - protein, 21 aa, Artificial Sequence
  Description of Artificial Sequence: Synthetic peptide
  Seed: GMDPRMCSLMQGSTLPRRSGA
GMDPRMFSLLQTSTMPRRSGA

SEQ ID NO: 83260 - protein, 21 aa, Artificial Sequence
  Description of Artificial Sequence: Synthetic peptide
  Seed: GMDPRMCSLMQGSTLPRRSGA
GMDPRMFSLLQTSTNPRRSGA

SEQ ID NO: 83261 - protein, 21 aa, Artificial Sequence
  Description of Artificial Sequence: Synthetic peptide
  Seed: GMDPRMCSLMQGSTLPRRSGA
GMDPRMFSLLQTSTPPRRSGA

SEQ ID NO: 83262 - protein, 21 aa, Artificial Sequence
  Description of Artificial Sequence: Synthetic peptide
  Seed: GMDPRMCSLMQGSTLPRRSGA
GMDPRMFSLLQTSTQPRRSGA

SEQ ID NO: 83263 - protein, 21 aa, Artificial Sequence
  Description of Artificial Sequence: Synthetic peptide
  Seed: GMDPRMCSLMQGSTLPRRSGA
GMDPRMFSLLQTSTSPRRSGA

SEQ ID NO: 83264 - protein, 21 aa, Artificial Sequence
  Description of Artificial Sequence: Synthetic peptide
  Seed: GMDPRMCSLMQGSTLPRRSGA
GMDPRMFSLLQTSTTPRRSGA

SEQ ID NO: 83265 - protein, 21 aa, Artificial Sequence
  Description of Artificial Sequence: Synthetic peptide
  Seed: GMDPRMCSLMQGSTLPRRSGA
GMDPRMFSLLQTSTVPRRSGA

SEQ ID NO: 83266 - protein, 21 aa, Artificial Sequence
  Description of Artificial Sequence: Synthetic peptide
  Seed: GMDPRMCSLMQGSTLPRRSGA
GMDPRMFSLLQVSTAPRRSGA

SEQ ID NO: 83267 - protein, 21 aa, Artificial Sequence
  Description of Artificial Sequence: Synthetic peptide
  Seed: GMDPRMCSLMQGSTLPRRSGA
GMDPRMFSLLQVSTDPRRSGA

SEQ ID NO: 83268 - protein, 21 aa, Artificial Sequence
  Description of Artificial Sequence: Synthetic peptide
  Seed: GMDPRMCSLMQGSTLPRRSGA
GMDPRMFSLLQVSTGPRRSGA

SEQ ID NO: 83269 - protein, 21 aa, Artificial Sequence
  Description of Artificial Sequence: Synthetic peptide
  Seed: GMDPRMCSLMQGSTLPRRSGA
GMDPRMFSLLQVSTHPRRSGA

SEQ ID NO: 83270 - protein, 21 aa, Artificial Sequence
  Description of Artificial Sequence: Synthetic peptide
  Seed: GMDPRMCSLMQGSTLPRRSGA
GMDPRMFSLLQVSTIPRRSGA

SEQ ID NO: 83271 - protein, 21 aa, Artificial Sequence
  Description of Artificial Sequence: Synthetic peptide
  Seed: GMDPRMCSLMQGSTLPRRSGA
GMDPRMFSLLQVSTLPRRSGA

SEQ ID NO: 83272 - protein, 21 aa, Artificial Sequence
  Description of Artificial Sequence: Synthetic peptide
  Seed: GMDPRMCSLMQGSTLPRRSGA
GMDPRMFSLLQVSTMPRRSGA

SEQ ID NO: 83273 - protein, 21 aa, Artificial Sequence
  Description of Artificial Sequence: Synthetic peptide
  Seed: GMDPRMCSLMQGSTLPRRSGA
GMDPRMFSLLQVSTNPRRSGA

SEQ ID NO: 83274 - protein, 21 aa, Artificial Sequence
  Description of Artificial Sequence: Synthetic peptide
  Seed: GMDPRMCSLMQGSTLPRRSGA
GMDPRMFSLLQVSTPPRRSGA

SEQ ID NO: 83275 - protein, 21 aa, Artificial Sequence
  Description of Artificial Sequence: Synthetic peptide
  Seed: GMDPRMCSLMQGSTLPRRSGA
GMDPRMFSLLQVSTQPRRSGA

SEQ ID NO: 83276 - protein, 21 aa, Artificial Sequence
  Description of Artificial Sequence: Synthetic peptide
  Seed: GMDPRMCSLMQGSTLPRRSGA
GMDPRMFSLLQVSTSPRRSGA

SEQ ID NO: 83277 - protein, 21 aa, Artificial Sequence
  Description of Artificial Sequence: Synthetic peptide
  Seed: GMDPRMCSLMQGSTLPRRSGA
GMDPRMFSLLQVSTTPRRSGA

SEQ ID NO: 83278 - protein, 21 aa, Artificial Sequence
  Description of Artificial Sequence: Synthetic peptide
  Seed: GMDPRMCSLMQGSTLPRRSGA
GMDPRMFSLLQVSTVPRRSGA

SEQ ID NO: 83279 - protein, 21 aa, Artificial Sequence
  Description of Artificial Sequence: Synthetic peptide
  Seed: GMDPRMCSLMQGSTLPRRSGA
GMDPRMFSLMQASTAPRRSGA

SEQ ID NO: 83280 - protein, 21 aa, Artificial Sequence
  Description of Artificial Sequence: Synthetic peptide
  Seed: GMDPRMCSLMQGSTLPRRSGA
GMDPRMFSLMQASTCPRRSGA

SEQ ID NO: 83281 - protein, 21 aa, Artificial Sequence
  Description of Artificial Sequence: Synthetic peptide
  Seed: GMDPRMCSLMQGSTLPRRSGA
GMDPRMFSLMQASTDPRRSGA

SEQ ID NO: 83282 - protein, 21 aa, Artificial Sequence
  Description of Artificial Sequence: Synthetic peptide
  Seed: GMDPRMCSLMQGSTLPRRSGA
GMDPRMFSLMQASTEPRRSGA

SEQ ID NO: 83283 - protein, 21 aa, Artificial Sequence
  Description of Artificial Sequence: Synthetic peptide
  Seed: GMDPRMCSLMQGSTLPRRSGA
GMDPRMFSLMQASTFPRRSGA

SEQ ID NO: 83284 - protein, 21 aa, Artificial Sequence
  Description of Artificial Sequence: Synthetic peptide
  Seed: GMDPRMCSLMQGSTLPRRSGA
GMDPRMFSLMQASTGPRRSGA

SEQ ID NO: 83285 - protein, 21 aa, Artificial Sequence
  Description of Artificial Sequence: Synthetic peptide
  Seed: GMDPRMCSLMQGSTLPRRSGA
GMDPRMFSLMQASTHPRRSGA

SEQ ID NO: 83286 - protein, 21 aa, Artificial Sequence
  Description of Artificial Sequence: Synthetic peptide
  Seed: GMDPRMCSLMQGSTLPRRSGA
GMDPRMFSLMQASTIPRRSGA

SEQ ID NO: 83287 - protein, 21 aa, Artificial Sequence
  Description of Artificial Sequence: Synthetic peptide
  Seed: GMDPRMCSLMQGSTLPRRSGA
GMDPRMFSLMQASTLPRRSGA

SEQ ID NO: 83288 - protein, 21 aa, Artificial Sequence
  Description of Artificial Sequence: Synthetic peptide
  Seed: GMDPRMCSLMQGSTLPRRSGA
GMDPRMFSLMQASTMPRRSGA

SEQ ID NO: 83289 - protein, 21 aa, Artificial Sequence
  Description of Artificial Sequence: Synthetic peptide
  Seed: GMDPRMCSLMQGSTLPRRSGA
GMDPRMFSLMQASTNPRRSGA

SEQ ID NO: 83290 - protein, 21 aa, Artificial Sequence
  Description of Artificial Sequence: Synthetic peptide
  Seed: GMDPRMCSLMQGSTLPRRSGA
GMDPRMFSLMQASTPPRRSGA

SEQ ID NO: 83291 - protein, 21 aa, Artificial Sequence
  Description of Artificial Sequence: Synthetic peptide
  Seed: GMDPRMCSLMQGSTLPRRSGA
GMDPRMFSLMQASTQPRRSGA

SEQ ID NO: 83292 - protein, 21 aa, Artificial Sequence
  Description of Artificial Sequence: Synthetic peptide
  Seed: GMDPRMCSLMQGSTLPRRSGA
GMDPRMFSLMQASTSPRRSGA

SEQ ID NO: 83293 - protein, 21 aa, Artificial Sequence
  Description of Artificial Sequence: Synthetic peptide
  Seed: GMDPRMCSLMQGSTLPRRSGA
GMDPRMFSLMQASTTPRRSGA

SEQ ID NO: 83294 - protein, 21 aa, Artificial Sequence
  Description of Artificial Sequence: Synthetic peptide
  Seed: GMDPRMCSLMQGSTLPRRSGA
GMDPRMFSLMQASTVPRRSGA

SEQ ID NO: 83295 - protein, 21 aa, Artificial Sequence
  Description of Artificial Sequence: Synthetic peptide
  Seed: GMDPRMCSLMQGSTLPRRSGA
GMDPRMFSLMQASTYPRRSGA

SEQ ID NO: 83296 - protein, 21 aa, Artificial Sequence
  Description of Artificial Sequence: Synthetic peptide
  Seed: GMDPRMCSLMQGSTLPRRSGA
GMDPRMFSLMQGSTAPRRSGA

SEQ ID NO: 83297 - protein, 21 aa, Artificial Sequence
  Description of Artificial Sequence: Synthetic peptide
  Seed: GMDPRMCSLMQGSTLPRRSGA
GMDPRMFSLMQGSTCPRRSGA

SEQ ID NO: 83298 - protein, 21 aa, Artificial Sequence
  Description of Artificial Sequence: Synthetic peptide
  Seed: GMDPRMCSLMQGSTLPRRSGA
GMDPRMFSLMQGSTFPRRSGA

SEQ ID NO: 83299 - protein, 21 aa, Artificial Sequence
  Description of Artificial Sequence: Synthetic peptide
  Seed: GMDPRMCSLMQGSTLPRRSGA
GMDPRMFSLMQGSTGPRRSGA

SEQ ID NO: 83300 - protein, 21 aa, Artificial Sequence
  Description of Artificial Sequence: Synthetic peptide
  Seed: GMDPRMCSLMQGSTLPRRSGA
GMDPRMFSLMQGSTIPRRSGA

SEQ ID NO: 83301 - protein, 21 aa, Artificial Sequence
  Description of Artificial Sequence: Synthetic peptide
  Seed: GMDPRMCSLMQGSTLPRRSGA
GMDPRMFSLMQGSTLPRRSGA

SEQ ID NO: 83302 - protein, 21 aa, Artificial Sequence
  Description of Artificial Sequence: Synthetic peptide
  Seed: GMDPRMCSLMQGSTLPRRSGA
GMDPRMFSLMQGSTMPRRSGA

SEQ ID NO: 83303 - protein, 21 aa, Artificial Sequence
  Description of Artificial Sequence: Synthetic peptide
  Seed: GMDPRMCSLMQGSTLPRRSGA
GMDPRMFSLMQGSTNPRRSGA

SEQ ID NO: 83304 - protein, 21 aa, Artificial Sequence
  Description of Artificial Sequence: Synthetic peptide
  Seed: GMDPRMCSLMQGSTLPRRSGA
GMDPRMFSLMQGSTQPRRSGA

SEQ ID NO: 83305 - protein, 21 aa, Artificial Sequence
  Description of Artificial Sequence: Synthetic peptide
  Seed: GMDPRMCSLMQGSTLPRRSGA
GMDPRMFSLMQGSTSPRRSGA

SEQ ID NO: 83306 - protein, 21 aa, Artificial Sequence
  Description of Artificial Sequence: Synthetic peptide
  Seed: GMDPRMCSLMQGSTLPRRSGA
GMDPRMFSLMQGSTTPRRSGA

SEQ ID NO: 83307 - protein, 21 aa, Artificial Sequence
  Description of Artificial Sequence: Synthetic peptide
  Seed: GMDPRMCSLMQGSTLPRRSGA
GMDPRMFSLMQGSTVPRRSGA

SEQ ID NO: 83308 - protein, 21 aa, Artificial Sequence
  Description of Artificial Sequence: Synthetic peptide
  Seed: GMDPRMCSLMQGSTLPRRSGA
GMDPRMFSLMQHSTLPRRSGA

SEQ ID NO: 83309 - protein, 21 aa, Artificial Sequence
  Description of Artificial Sequence: Synthetic peptide
  Seed: GMDPRMCSLMQGSTLPRRSGA
GMDPRMFSLMQHSTVPRRSGA

SEQ ID NO: 83310 - protein, 21 aa, Artificial Sequence
  Description of Artificial Sequence: Synthetic peptide
  Seed: GMDPRMCSLMQGSTLPRRSGA
GMDPRMFSLMQISTAPRRSGA

SEQ ID NO: 83311 - protein, 21 aa, Artificial Sequence
  Description of Artificial Sequence: Synthetic peptide
  Seed: GMDPRMCSLMQGSTLPRRSGA
GMDPRMFSLMQISTGPRRSGA

SEQ ID NO: 83312 - protein, 21 aa, Artificial Sequence
  Description of Artificial Sequence: Synthetic peptide
  Seed: GMDPRMCSLMQGSTLPRRSGA
GMDPRMFSLMQISTHPRRSGA

SEQ ID NO: 83313 - protein, 21 aa, Artificial Sequence
  Description of Artificial Sequence: Synthetic peptide
  Seed: GMDPRMCSLMQGSTLPRRSGA
GMDPRMFSLMQISTIPRRSGA

SEQ ID NO: 83314 - protein, 21 aa, Artificial Sequence
  Description of Artificial Sequence: Synthetic peptide
  Seed: GMDPRMCSLMQGSTLPRRSGA
GMDPRMFSLMQISTLPRRSGA

SEQ ID NO: 83315 - protein, 21 aa, Artificial Sequence
  Description of Artificial Sequence: Synthetic peptide
  Seed: GMDPRMCSLMQGSTLPRRSGA
GMDPRMFSLMQISTMPRRSGA

SEQ ID NO: 83316 - protein, 21 aa, Artificial Sequence
  Description of Artificial Sequence: Synthetic peptide
  Seed: GMDPRMCSLMQGSTLPRRSGA
GMDPRMFSLMQISTNPRRSGA

SEQ ID NO: 83317 - protein, 21 aa, Artificial Sequence
  Description of Artificial Sequence: Synthetic peptide
  Seed: GMDPRMCSLMQGSTLPRRSGA
GMDPRMFSLMQISTQPRRSGA

SEQ ID NO: 83318 - protein, 21 aa, Artificial Sequence
  Description of Artificial Sequence: Synthetic peptide
  Seed: GMDPRMCSLMQGSTLPRRSGA
GMDPRMFSLMQISTSPRRSGA

SEQ ID NO: 83319 - protein, 21 aa, Artificial Sequence
  Description of Artificial Sequence: Synthetic peptide
  Seed: GMDPRMCSLMQGSTLPRRSGA
GMDPRMFSLMQISTTPRRSGA

SEQ ID NO: 83320 - protein, 21 aa, Artificial Sequence
  Description of Artificial Sequence: Synthetic peptide
  Seed: GMDPRMCSLMQGSTLPRRSGA
GMDPRMFSLMQISTVPRRSGA

SEQ ID NO: 83321 - protein, 21 aa, Artificial Sequence
  Description of Artificial Sequence: Synthetic peptide
  Seed: GMDPRMCSLMQGSTLPRRSGA
GMDPRMFSLMQLSTAPRRSGA

SEQ ID NO: 83322 - protein, 21 aa, Artificial Sequence
  Description of Artificial Sequence: Synthetic peptide
  Seed: GMDPRMCSLMQGSTLPRRSGA
GMDPRMFSLMQLSTNPRRSGA

SEQ ID NO: 83323 - protein, 21 aa, Artificial Sequence
  Description of Artificial Sequence: Synthetic peptide
  Seed: GMDPRMCSLMQGSTLPRRSGA
GMDPRMFSLMQLSTSPRRSGA

SEQ ID NO: 83324 - protein, 21 aa, Artificial Sequence
  Description of Artificial Sequence: Synthetic peptide
  Seed: GMDPRMCSLMQGSTLPRRSGA
GMDPRMFSLMQLSTTPRRSGA

SEQ ID NO: 83325 - protein, 21 aa, Artificial Sequence
  Description of Artificial Sequence: Synthetic peptide
  Seed: GMDPRMCSLMQGSTLPRRSGA
GMDPRMFSLMQLSTVPRRSGA

SEQ ID NO: 83326 - protein, 21 aa, Artificial Sequence
  Description of Artificial Sequence: Synthetic peptide
  Seed: GMDPRMCSLMQGSTLPRRSGA
GMDPRMFSLMQMSTAPRRSGA

SEQ ID NO: 83327 - protein, 21 aa, Artificial Sequence
  Description of Artificial Sequence: Synthetic peptide
  Seed: GMDPRMCSLMQGSTLPRRSGA
GMDPRMFSLMQMSTNPRRSGA

SEQ ID NO: 83328 - protein, 21 aa, Artificial Sequence
  Description of Artificial Sequence: Synthetic peptide
  Seed: GMDPRMCSLMQGSTLPRRSGA
GMDPRMFSLMQMSTSPRRSGA

SEQ ID NO: 83329 - protein, 21 aa, Artificial Sequence
  Description of Artificial Sequence: Synthetic peptide
  Seed: GMDPRMCSLMQGSTLPRRSGA
GMDPRMFSLMQMSTTPRRSGA

SEQ ID NO: 83330 - protein, 21 aa, Artificial Sequence
  Description of Artificial Sequence: Synthetic peptide
  Seed: GMDPRMCSLMQGSTLPRRSGA
GMDPRMFSLMQMSTVPRRSGA

SEQ ID NO: 83331 - protein, 21 aa, Artificial Sequence
  Description of Artificial Sequence: Synthetic peptide
  Seed: GMDPRMCSLMQGSTLPRRSGA
GMDPRMFSLMQNSTAPRRSGA

SEQ ID NO: 83332 - protein, 21 aa, Artificial Sequence
  Description of Artificial Sequence: Synthetic peptide
  Seed: GMDPRMCSLMQGSTLPRRSGA
GMDPRMFSLMQNSTGPRRSGA

SEQ ID NO: 83333 - protein, 21 aa, Artificial Sequence
  Description of Artificial Sequence: Synthetic peptide
  Seed: GMDPRMCSLMQGSTLPRRSGA
GMDPRMFSLMQNSTIPRRSGA

SEQ ID NO: 83334 - protein, 21 aa, Artificial Sequence
  Description of Artificial Sequence: Synthetic peptide
  Seed: GMDPRMCSLMQGSTLPRRSGA
GMDPRMFSLMQNSTLPRRSGA

SEQ ID NO: 83335 - protein, 21 aa, Artificial Sequence
  Description of Artificial Sequence: Synthetic peptide
  Seed: GMDPRMCSLMQGSTLPRRSGA
GMDPRMFSLMQNSTMPRRSGA

SEQ ID NO: 83336 - protein, 21 aa, Artificial Sequence
  Description of Artificial Sequence: Synthetic peptide
  Seed: GMDPRMCSLMQGSTLPRRSGA
GMDPRMFSLMQNSTNPRRSGA

SEQ ID NO: 83337 - protein, 21 aa, Artificial Sequence
  Description of Artificial Sequence: Synthetic peptide
  Seed: GMDPRMCSLMQGSTLPRRSGA
GMDPRMFSLMQNSTSPRRSGA

SEQ ID NO: 83338 - protein, 21 aa, Artificial Sequence
  Description of Artificial Sequence: Synthetic peptide
  Seed: GMDPRMCSLMQGSTLPRRSGA
GMDPRMFSLMQNSTTPRRSGA

SEQ ID NO: 83339 - protein, 21 aa, Artificial Sequence
  Description of Artificial Sequence: Synthetic peptide
  Seed: GMDPRMCSLMQGSTLPRRSGA
GMDPRMFSLMQNSTVPRRSGA

SEQ ID NO: 83340 - protein, 21 aa, Artificial Sequence
  Description of Artificial Sequence: Synthetic peptide
  Seed: GMDPRMCSLMQGSTLPRRSGA
GMDPRMFSLMQPSTAPRRSGA

SEQ ID NO: 83341 - protein, 21 aa, Artificial Sequence
  Description of Artificial Sequence: Synthetic peptide
  Seed: GMDPRMCSLMQGSTLPRRSGA
GMDPRMFSLMQPSTCPRRSGA

SEQ ID NO: 83342 - protein, 21 aa, Artificial Sequence
  Description of Artificial Sequence: Synthetic peptide
  Seed: GMDPRMCSLMQGSTLPRRSGA
GMDPRMFSLMQPSTDPRRSGA

SEQ ID NO: 83343 - protein, 21 aa, Artificial Sequence
  Description of Artificial Sequence: Synthetic peptide
  Seed: GMDPRMCSLMQGSTLPRRSGA
GMDPRMFSLMQPSTEPRRSGA

SEQ ID NO: 83344 - protein, 21 aa, Artificial Sequence
  Description of Artificial Sequence: Synthetic peptide
  Seed: GMDPRMCSLMQGSTLPRRSGA
GMDPRMFSLMQPSTFPRRSGA

SEQ ID NO: 83345 - protein, 21 aa, Artificial Sequence
  Description of Artificial Sequence: Synthetic peptide
  Seed: GMDPRMCSLMQGSTLPRRSGA
GMDPRMFSLMQPSTGPRRSGA

SEQ ID NO: 83346 - protein, 21 aa, Artificial Sequence
  Description of Artificial Sequence: Synthetic peptide
  Seed: GMDPRMCSLMQGSTLPRRSGA
GMDPRMFSLMQPSTHPRRSGA

SEQ ID NO: 83347 - protein, 21 aa, Artificial Sequence
  Description of Artificial Sequence: Synthetic peptide
  Seed: GMDPRMCSLMQGSTLPRRSGA
GMDPRMFSLMQPSTIPRRSGA

SEQ ID NO: 83348 - protein, 21 aa, Artificial Sequence
  Description of Artificial Sequence: Synthetic peptide
  Seed: GMDPRMCSLMQGSTLPRRSGA
GMDPRMFSLMQPSTLPRRSGA

SEQ ID NO: 83349 - protein, 21 aa, Artificial Sequence
  Description of Artificial Sequence: Synthetic peptide
  Seed: GMDPRMCSLMQGSTLPRRSGA
GMDPRMFSLMQPSTMPRRSGA

SEQ ID NO: 83350 - protein, 21 aa, Artificial Sequence
  Description of Artificial Sequence: Synthetic peptide
  Seed: GMDPRMCSLMQGSTLPRRSGA
GMDPRMFSLMQPSTNPRRSGA

SEQ ID NO: 83351 - protein, 21 aa, Artificial Sequence
  Description of Artificial Sequence: Synthetic peptide
  Seed: GMDPRMCSLMQGSTLPRRSGA
GMDPRMFSLMQPSTPPRRSGA

SEQ ID NO: 83352 - protein, 21 aa, Artificial Sequence
  Description of Artificial Sequence: Synthetic peptide
  Seed: GMDPRMCSLMQGSTLPRRSGA
GMDPRMFSLMQPSTQPRRSGA

SEQ ID NO: 83353 - protein, 21 aa, Artificial Sequence
  Description of Artificial Sequence: Synthetic peptide
  Seed: GMDPRMCSLMQGSTLPRRSGA
GMDPRMFSLMQPSTSPRRSGA

SEQ ID NO: 83354 - protein, 21 aa, Artificial Sequence
  Description of Artificial Sequence: Synthetic peptide
  Seed: GMDPRMCSLMQGSTLPRRSGA
GMDPRMFSLMQPSTTPRRSGA

SEQ ID NO: 83355 - protein, 21 aa, Artificial Sequence
  Description of Artificial Sequence: Synthetic peptide
  Seed: GMDPRMCSLMQGSTLPRRSGA
GMDPRMFSLMQPSTVPRRSGA

SEQ ID NO: 83356 - protein, 21 aa, Artificial Sequence
  Description of Artificial Sequence: Synthetic peptide
  Seed: GMDPRMCSLMQGSTLPRRSGA
GMDPRMFSLMQSSTAPRRSGA

SEQ ID NO: 83357 - protein, 21 aa, Artificial Sequence
  Description of Artificial Sequence: Synthetic peptide
  Seed: GMDPRMCSLMQGSTLPRRSGA
GMDPRMFSLMQSSTCPRRSGA

SEQ ID NO: 83358 - protein, 21 aa, Artificial Sequence
  Description of Artificial Sequence: Synthetic peptide
  Seed: GMDPRMCSLMQGSTLPRRSGA
GMDPRMFSLMQSSTDPRRSGA

SEQ ID NO: 83359 - protein, 21 aa, Artificial Sequence
  Description of Artificial Sequence: Synthetic peptide
  Seed: GMDPRMCSLMQGSTLPRRSGA
GMDPRMFSLMQSSTFPRRSGA

SEQ ID NO: 83360 - protein, 21 aa, Artificial Sequence
  Description of Artificial Sequence: Synthetic peptide
  Seed: GMDPRMCSLMQGSTLPRRSGA
GMDPRMFSLMQSSTGPRRSGA

SEQ ID NO: 83361 - protein, 21 aa, Artificial Sequence
  Description of Artificial Sequence: Synthetic peptide
  Seed: GMDPRMCSLMQGSTLPRRSGA
GMDPRMFSLMQSSTHPRRSGA

SEQ ID NO: 83362 - protein, 21 aa, Artificial Sequence
  Description of Artificial Sequence: Synthetic peptide
  Seed: GMDPRMCSLMQGSTLPRRSGA
GMDPRMFSLMQSSTIPRRSGA

SEQ ID NO: 83363 - protein, 21 aa, Artificial Sequence
  Description of Artificial Sequence: Synthetic peptide
  Seed: GMDPRMCSLMQGSTLPRRSGA
GMDPRMFSLMQSSTLPRRSGA

SEQ ID NO: 83364 - protein, 21 aa, Artificial Sequence
  Description of Artificial Sequence: Synthetic peptide
  Seed: GMDPRMCSLMQGSTLPRRSGA
GMDPRMFSLMQSSTMPRRSGA

SEQ ID NO: 83365 - protein, 21 aa, Artificial Sequence
  Description of Artificial Sequence: Synthetic peptide
  Seed: GMDPRMCSLMQGSTLPRRSGA
GMDPRMFSLMQSSTNPRRSGA

SEQ ID NO: 83366 - protein, 21 aa, Artificial Sequence
  Description of Artificial Sequence: Synthetic peptide
  Seed: GMDPRMCSLMQGSTLPRRSGA
GMDPRMFSLMQSSTPPRRSGA

SEQ ID NO: 83367 - protein, 21 aa, Artificial Sequence
  Description of Artificial Sequence: Synthetic peptide
  Seed: GMDPRMCSLMQGSTLPRRSGA
GMDPRMFSLMQSSTQPRRSGA

SEQ ID NO: 83368 - protein, 21 aa, Artificial Sequence
  Description of Artificial Sequence: Synthetic peptide
  Seed: GMDPRMCSLMQGSTLPRRSGA
GMDPRMFSLMQSSTSPRRSGA

SEQ ID NO: 83369 - protein, 21 aa, Artificial Sequence
  Description of Artificial Sequence: Synthetic peptide
  Seed: GMDPRMCSLMQGSTLPRRSGA
GMDPRMFSLMQSSTTPRRSGA

SEQ ID NO: 83370 - protein, 21 aa, Artificial Sequence
  Description of Artificial Sequence: Synthetic peptide
  Seed: GMDPRMCSLMQGSTLPRRSGA
GMDPRMFSLMQSSTVPRRSGA

SEQ ID NO: 83371 - protein, 21 aa, Artificial Sequence
  Description of Artificial Sequence: Synthetic peptide
  Seed: GMDPRMCSLMQGSTLPRRSGA
GMDPRMFSLMQTSTAPRRSGA

SEQ ID NO: 83372 - protein, 21 aa, Artificial Sequence
  Description of Artificial Sequence: Synthetic peptide
  Seed: GMDPRMCSLMQGSTLPRRSGA
GMDPRMFSLMQTSTDPRRSGA

SEQ ID NO: 83373 - protein, 21 aa, Artificial Sequence
  Description of Artificial Sequence: Synthetic peptide
  Seed: GMDPRMCSLMQGSTLPRRSGA
GMDPRMFSLMQTSTGPRRSGA

SEQ ID NO: 83374 - protein, 21 aa, Artificial Sequence
  Description of Artificial Sequence: Synthetic peptide
  Seed: GMDPRMCSLMQGSTLPRRSGA
GMDPRMFSLMQTSTHPRRSGA

SEQ ID NO: 83375 - protein, 21 aa, Artificial Sequence
  Description of Artificial Sequence: Synthetic peptide
  Seed: GMDPRMCSLMQGSTLPRRSGA
GMDPRMFSLMQTSTIPRRSGA

SEQ ID NO: 83376 - protein, 21 aa, Artificial Sequence
  Description of Artificial Sequence: Synthetic peptide
  Seed: GMDPRMCSLMQGSTLPRRSGA
GMDPRMFSLMQTSTLPRRSGA

SEQ ID NO: 83377 - protein, 21 aa, Artificial Sequence
  Description of Artificial Sequence: Synthetic peptide
  Seed: GMDPRMCSLMQGSTLPRRSGA
GMDPRMFSLMQTSTMPRRSGA

SEQ ID NO: 83378 - protein, 21 aa, Artificial Sequence
  Description of Artificial Sequence: Synthetic peptide
  Seed: GMDPRMCSLMQGSTLPRRSGA
GMDPRMFSLMQTSTNPRRSGA

SEQ ID NO: 83379 - protein, 21 aa, Artificial Sequence
  Description of Artificial Sequence: Synthetic peptide
  Seed: GMDPRMCSLMQGSTLPRRSGA
GMDPRMFSLMQTSTPPRRSGA

SEQ ID NO: 83380 - protein, 21 aa, Artificial Sequence
  Description of Artificial Sequence: Synthetic peptide
  Seed: GMDPRMCSLMQGSTLPRRSGA
GMDPRMFSLMQTSTQPRRSGA

SEQ ID NO: 83381 - protein, 21 aa, Artificial Sequence
  Description of Artificial Sequence: Synthetic peptide
  Seed: GMDPRMCSLMQGSTLPRRSGA
GMDPRMFSLMQTSTSPRRSGA

SEQ ID NO: 83382 - protein, 21 aa, Artificial Sequence
  Description of Artificial Sequence: Synthetic peptide
  Seed: GMDPRMCSLMQGSTLPRRSGA
GMDPRMFSLMQTSTTPRRSGA

SEQ ID NO: 83383 - protein, 21 aa, Artificial Sequence
  Description of Artificial Sequence: Synthetic peptide
  Seed: GMDPRMCSLMQGSTLPRRSGA
GMDPRMFSLMQTSTVPRRSGA

SEQ ID NO: 83384 - protein, 21 aa, Artificial Sequence
  Description of Artificial Sequence: Synthetic peptide
  Seed: GMDPRMCSLMQGSTLPRRSGA
GMDPRMFSLMQVSTAPRRSGA

SEQ ID NO: 83385 - protein, 21 aa, Artificial Sequence
  Description of Artificial Sequence: Synthetic peptide
  Seed: GMDPRMCSLMQGSTLPRRSGA
GMDPRMFSLMQVSTDPRRSGA

SEQ ID NO: 83386 - protein, 21 aa, Artificial Sequence
  Description of Artificial Sequence: Synthetic peptide
  Seed: GMDPRMCSLMQGSTLPRRSGA
GMDPRMFSLMQVSTEPRRSGA

SEQ ID NO: 83387 - protein, 21 aa, Artificial Sequence
  Description of Artificial Sequence: Synthetic peptide
  Seed: GMDPRMCSLMQGSTLPRRSGA
GMDPRMFSLMQVSTGPRRSGA

SEQ ID NO: 83388 - protein, 21 aa, Artificial Sequence
  Description of Artificial Sequence: Synthetic peptide
  Seed: GMDPRMCSLMQGSTLPRRSGA
GMDPRMFSLMQVSTHPRRSGA

SEQ ID NO: 83389 - protein, 21 aa, Artificial Sequence
  Description of Artificial Sequence: Synthetic peptide
  Seed: GMDPRMCSLMQGSTLPRRSGA
GMDPRMFSLMQVSTIPRRSGA

SEQ ID NO: 83390 - protein, 21 aa, Artificial Sequence
  Description of Artificial Sequence: Synthetic peptide
  Seed: GMDPRMCSLMQGSTLPRRSGA
GMDPRMFSLMQVSTLPRRSGA

SEQ ID NO: 83391 - protein, 21 aa, Artificial Sequence
  Description of Artificial Sequence: Synthetic peptide
  Seed: GMDPRMCSLMQGSTLPRRSGA
GMDPRMFSLMQVSTMPRRSGA

SEQ ID NO: 83392 - protein, 21 aa, Artificial Sequence
  Description of Artificial Sequence: Synthetic peptide
  Seed: GMDPRMCSLMQGSTLPRRSGA
GMDPRMFSLMQVSTNPRRSGA

SEQ ID NO: 83393 - protein, 21 aa, Artificial Sequence
  Description of Artificial Sequence: Synthetic peptide
  Seed: GMDPRMCSLMQGSTLPRRSGA
GMDPRMFSLMQVSTPPRRSGA

SEQ ID NO: 83394 - protein, 21 aa, Artificial Sequence
  Description of Artificial Sequence: Synthetic peptide
  Seed: GMDPRMCSLMQGSTLPRRSGA
GMDPRMFSLMQVSTQPRRSGA

SEQ ID NO: 83395 - protein, 21 aa, Artificial Sequence
  Description of Artificial Sequence: Synthetic peptide
  Seed: GMDPRMCSLMQGSTLPRRSGA
GMDPRMFSLMQVSTSPRRSGA

SEQ ID NO: 83396 - protein, 21 aa, Artificial Sequence
  Description of Artificial Sequence: Synthetic peptide
  Seed: GMDPRMCSLMQGSTLPRRSGA
GMDPRMFSLMQVSTTPRRSGA

SEQ ID NO: 83397 - protein, 21 aa, Artificial Sequence
  Description of Artificial Sequence: Synthetic peptide
  Seed: GMDPRMCSLMQGSTLPRRSGA
GMDPRMFSLMQVSTVPRRSGA

SEQ ID NO: 83398 - protein, 21 aa, Artificial Sequence
  Description of Artificial Sequence: Synthetic peptide
  Seed: GMDPRMCSLMQGSTLPRRSGA
GMDPRMFSLNQASTIPRRSGA

SEQ ID NO: 83399 - protein, 21 aa, Artificial Sequence
  Description of Artificial Sequence: Synthetic peptide
  Seed: GMDPRMCSLMQGSTLPRRSGA
GMDPRMFSLNQASTLPRRSGA

SEQ ID NO: 83400 - protein, 21 aa, Artificial Sequence
  Description of Artificial Sequence: Synthetic peptide
  Seed: GMDPRMCSLMQGSTLPRRSGA
GMDPRMFSLNQASTVPRRSGA

SEQ ID NO: 83401 - protein, 21 aa, Artificial Sequence
  Description of Artificial Sequence: Synthetic peptide
  Seed: GMDPRMCSLMQGSTLPRRSGA
GMDPRMFSLQQASTAPRRSGA

SEQ ID NO: 83402 - protein, 21 aa, Artificial Sequence
  Description of Artificial Sequence: Synthetic peptide
  Seed: GMDPRMCSLMQGSTLPRRSGA
GMDPRMFSLQQASTIPRRSGA

SEQ ID NO: 83403 - protein, 21 aa, Artificial Sequence
  Description of Artificial Sequence: Synthetic peptide
  Seed: GMDPRMCSLMQGSTLPRRSGA
GMDPRMFSLQQASTLPRRSGA

SEQ ID NO: 83404 - protein, 21 aa, Artificial Sequence
  Description of Artificial Sequence: Synthetic peptide
  Seed: GMDPRMCSLMQGSTLPRRSGA
GMDPRMFSLQQASTMPRRSGA

SEQ ID NO: 83405 - protein, 21 aa, Artificial Sequence
  Description of Artificial Sequence: Synthetic peptide
  Seed: GMDPRMCSLMQGSTLPRRSGA
GMDPRMFSLQQASTNPRRSGA

SEQ ID NO: 83406 - protein, 21 aa, Artificial Sequence
  Description of Artificial Sequence: Synthetic peptide
  Seed: GMDPRMCSLMQGSTLPRRSGA
GMDPRMFSLQQASTSPRRSGA

SEQ ID NO: 83407 - protein, 21 aa, Artificial Sequence
  Description of Artificial Sequence: Synthetic peptide
  Seed: GMDPRMCSLMQGSTLPRRSGA
GMDPRMFSLQQASTTPRRSGA

SEQ ID NO: 83408 - protein, 21 aa, Artificial Sequence
  Description of Artificial Sequence: Synthetic peptide
  Seed: GMDPRMCSLMQGSTLPRRSGA
GMDPRMFSLQQASTVPRRSGA

SEQ ID NO: 83409 - protein, 21 aa, Artificial Sequence
  Description of Artificial Sequence: Synthetic peptide
  Seed: GMDPRMCSLMQGSTLPRRSGA
GMDPRMFSLQQGSTAPRRSGA

SEQ ID NO: 83410 - protein, 21 aa, Artificial Sequence
  Description of Artificial Sequence: Synthetic peptide
  Seed: GMDPRMCSLMQGSTLPRRSGA
GMDPRMFSLQQGSTIPRRSGA

SEQ ID NO: 83411 - protein, 21 aa, Artificial Sequence
  Description of Artificial Sequence: Synthetic peptide
  Seed: GMDPRMCSLMQGSTLPRRSGA
GMDPRMFSLQQGSTLPRRSGA

SEQ ID NO: 83412 - protein, 21 aa, Artificial Sequence
  Description of Artificial Sequence: Synthetic peptide
  Seed: GMDPRMCSLMQGSTLPRRSGA
GMDPRMFSLQQGSTMPRRSGA

SEQ ID NO: 83413 - protein, 21 aa, Artificial Sequence
  Description of Artificial Sequence: Synthetic peptide
  Seed: GMDPRMCSLMQGSTLPRRSGA
GMDPRMFSLQQGSTVPRRSGA

SEQ ID NO: 83414 - protein, 21 aa, Artificial Sequence
  Description of Artificial Sequence: Synthetic peptide
  Seed: GMDPRMCSLMQGSTLPRRSGA
GMDPRMFSLQQISTAPRRSGA

SEQ ID NO: 83415 - protein, 21 aa, Artificial Sequence
  Description of Artificial Sequence: Synthetic peptide
  Seed: GMDPRMCSLMQGSTLPRRSGA
GMDPRMFSLQQNSTLPRRSGA

SEQ ID NO: 83416 - protein, 21 aa, Artificial Sequence
  Description of Artificial Sequence: Synthetic peptide
  Seed: GMDPRMCSLMQGSTLPRRSGA
GMDPRMFSLQQNSTVPRRSGA

SEQ ID NO: 83417 - protein, 21 aa, Artificial Sequence
  Description of Artificial Sequence: Synthetic peptide
  Seed: GMDPRMCSLMQGSTLPRRSGA
GMDPRMFSLQQPSTAPRRSGA

SEQ ID NO: 83418 - protein, 21 aa, Artificial Sequence
  Description of Artificial Sequence: Synthetic peptide
  Seed: GMDPRMCSLMQGSTLPRRSGA
GMDPRMFSLQQPSTIPRRSGA

SEQ ID NO: 83419 - protein, 21 aa, Artificial Sequence
  Description of Artificial Sequence: Synthetic peptide
  Seed: GMDPRMCSLMQGSTLPRRSGA
GMDPRMFSLQQPSTLPRRSGA

SEQ ID NO: 83420 - protein, 21 aa, Artificial Sequence
  Description of Artificial Sequence: Synthetic peptide
  Seed: GMDPRMCSLMQGSTLPRRSGA
GMDPRMFSLQQPSTVPRRSGA

SEQ ID NO: 83421 - protein, 21 aa, Artificial Sequence
  Description of Artificial Sequence: Synthetic peptide
  Seed: GMDPRMCSLMQGSTLPRRSGA
GMDPRMFSLQQSSTAPRRSGA

SEQ ID NO: 83422 - protein, 21 aa, Artificial Sequence
  Description of Artificial Sequence: Synthetic peptide
  Seed: GMDPRMCSLMQGSTLPRRSGA
GMDPRMFSLQQSSTIPRRSGA

SEQ ID NO: 83423 - protein, 21 aa, Artificial Sequence
  Description of Artificial Sequence: Synthetic peptide
  Seed: GMDPRMCSLMQGSTLPRRSGA
GMDPRMFSLQQSSTLPRRSGA

SEQ ID NO: 83424 - protein, 21 aa, Artificial Sequence
  Description of Artificial Sequence: Synthetic peptide
  Seed: GMDPRMCSLMQGSTLPRRSGA
GMDPRMFSLQQSSTMPRRSGA

SEQ ID NO: 83425 - protein, 21 aa, Artificial Sequence
  Description of Artificial Sequence: Synthetic peptide
  Seed: GMDPRMCSLMQGSTLPRRSGA
GMDPRMFSLQQSSTSPRRSGA

SEQ ID NO: 83426 - protein, 21 aa, Artificial Sequence
  Description of Artificial Sequence: Synthetic peptide
  Seed: GMDPRMCSLMQGSTLPRRSGA
GMDPRMFSLQQSSTVPRRSGA

SEQ ID NO: 83427 - protein, 21 aa, Artificial Sequence
  Description of Artificial Sequence: Synthetic peptide
  Seed: GMDPRMCSLMQGSTLPRRSGA
GMDPRMFSLQQTSTAPRRSGA

SEQ ID NO: 83428 - protein, 21 aa, Artificial Sequence
  Description of Artificial Sequence: Synthetic peptide
  Seed: GMDPRMCSLMQGSTLPRRSGA
GMDPRMFSLQQTSTLPRRSGA

SEQ ID NO: 83429 - protein, 21 aa, Artificial Sequence
  Description of Artificial Sequence: Synthetic peptide
  Seed: GMDPRMCSLMQGSTLPRRSGA
GMDPRMFSLQQTSTNPRRSGA

SEQ ID NO: 83430 - protein, 21 aa, Artificial Sequence
  Description of Artificial Sequence: Synthetic peptide
  Seed: GMDPRMCSLMQGSTLPRRSGA
GMDPRMFSLQQTSTSPRRSGA

SEQ ID NO: 83431 - protein, 21 aa, Artificial Sequence
  Description of Artificial Sequence: Synthetic peptide
  Seed: GMDPRMCSLMQGSTLPRRSGA
GMDPRMFSLQQTSTVPRRSGA

SEQ ID NO: 83432 - protein, 21 aa, Artificial Sequence
  Description of Artificial Sequence: Synthetic peptide
  Seed: GMDPRMCSLMQGSTLPRRSGA
GMDPRMFSLQQVSTAPRRSGA

SEQ ID NO: 83433 - protein, 21 aa, Artificial Sequence
  Description of Artificial Sequence: Synthetic peptide
  Seed: GMDPRMCSLMQGSTLPRRSGA
GMDPRMFSLQQVSTNPRRSGA

SEQ ID NO: 83434 - protein, 21 aa, Artificial Sequence
  Description of Artificial Sequence: Synthetic peptide
  Seed: GMDPRMCSLMQGSTLPRRSGA
GMDPRMFSLQQVSTSPRRSGA

SEQ ID NO: 83435 - protein, 21 aa, Artificial Sequence
  Description of Artificial Sequence: Synthetic peptide
  Seed: GMDPRMCSLMQGSTLPRRSGA
GMDPRMFSLSQASTAPRRSGA

SEQ ID NO: 83436 - protein, 21 aa, Artificial Sequence
  Description of Artificial Sequence: Synthetic peptide
  Seed: GMDPRMCSLMQGSTLPRRSGA
GMDPRMFSLSQASTIPRRSGA

SEQ ID NO: 83437 - protein, 21 aa, Artificial Sequence
  Description of Artificial Sequence: Synthetic peptide
  Seed: GMDPRMCSLMQGSTLPRRSGA
GMDPRMFSLSQASTLPRRSGA

SEQ ID NO: 83438 - protein, 21 aa, Artificial Sequence
  Description of Artificial Sequence: Synthetic peptide
  Seed: GMDPRMCSLMQGSTLPRRSGA
GMDPRMFSLSQASTMPRRSGA

SEQ ID NO: 83439 - protein, 21 aa, Artificial Sequence
  Description of Artificial Sequence: Synthetic peptide
  Seed: GMDPRMCSLMQGSTLPRRSGA
GMDPRMFSLSQASTNPRRSGA

SEQ ID NO: 83440 - protein, 21 aa, Artificial Sequence
  Description of Artificial Sequence: Synthetic peptide
  Seed: GMDPRMCSLMQGSTLPRRSGA
GMDPRMFSLSQASTSPRRSGA

SEQ ID NO: 83441 - protein, 21 aa, Artificial Sequence
  Description of Artificial Sequence: Synthetic peptide
  Seed: GMDPRMCSLMQGSTLPRRSGA
GMDPRMFSLSQASTVPRRSGA

SEQ ID NO: 83442 - protein, 21 aa, Artificial Sequence
  Description of Artificial Sequence: Synthetic peptide
  Seed: GMDPRMCSLMQGSTLPRRSGA
GMDPRMFSLSQGSTIPRRSGA

SEQ ID NO: 83443 - protein, 21 aa, Artificial Sequence
  Description of Artificial Sequence: Synthetic peptide
  Seed: GMDPRMCSLMQGSTLPRRSGA
GMDPRMFSLSQGSTLPRRSGA

SEQ ID NO: 83444 - protein, 21 aa, Artificial Sequence
  Description of Artificial Sequence: Synthetic peptide
  Seed: GMDPRMCSLMQGSTLPRRSGA
GMDPRMFSLSQGSTVPRRSGA

SEQ ID NO: 83445 - protein, 21 aa, Artificial Sequence
  Description of Artificial Sequence: Synthetic peptide
  Seed: GMDPRMCSLMQGSTLPRRSGA
GMDPRMFSLSQPSTIPRRSGA

SEQ ID NO: 83446 - protein, 21 aa, Artificial Sequence
  Description of Artificial Sequence: Synthetic peptide
  Seed: GMDPRMCSLMQGSTLPRRSGA
GMDPRMFSLSQPSTLPRRSGA

SEQ ID NO: 83447 - protein, 21 aa, Artificial Sequence
  Description of Artificial Sequence: Synthetic peptide
  Seed: GMDPRMCSLMQGSTLPRRSGA
GMDPRMFSLSQPSTVPRRSGA

SEQ ID NO: 83448 - protein, 21 aa, Artificial Sequence
  Description of Artificial Sequence: Synthetic peptide
  Seed: GMDPRMCSLMQGSTLPRRSGA
GMDPRMFSLSQSSTIPRRSGA

SEQ ID NO: 83449 - protein, 21 aa, Artificial Sequence
  Description of Artificial Sequence: Synthetic peptide
  Seed: GMDPRMCSLMQGSTLPRRSGA
GMDPRMFSLSQSSTLPRRSGA

SEQ ID NO: 83450 - protein, 21 aa, Artificial Sequence
  Description of Artificial Sequence: Synthetic peptide
  Seed: GMDPRMCSLMQGSTLPRRSGA
GMDPRMFSLSQSSTVPRRSGA

SEQ ID NO: 83451 - protein, 21 aa, Artificial Sequence
  Description of Artificial Sequence: Synthetic peptide
  Seed: GMDPRMCSLMQGSTLPRRSGA
GMDPRMFSLTQASTAPRRSGA

SEQ ID NO: 83452 - protein, 21 aa, Artificial Sequence
  Description of Artificial Sequence: Synthetic peptide
  Seed: GMDPRMCSLMQGSTLPRRSGA
GMDPRMFSLTQASTIPRRSGA

SEQ ID NO: 83453 - protein, 21 aa, Artificial Sequence
  Description of Artificial Sequence: Synthetic peptide
  Seed: GMDPRMCSLMQGSTLPRRSGA
GMDPRMFSLTQASTLPRRSGA

SEQ ID NO: 83454 - protein, 21 aa, Artificial Sequence
  Description of Artificial Sequence: Synthetic peptide
  Seed: GMDPRMCSLMQGSTLPRRSGA
GMDPRMFSLTQASTNPRRSGA

SEQ ID NO: 83455 - protein, 21 aa, Artificial Sequence
  Description of Artificial Sequence: Synthetic peptide
  Seed: GMDPRMCSLMQGSTLPRRSGA
GMDPRMFSLTQASTSPRRSGA

SEQ ID NO: 83456 - protein, 21 aa, Artificial Sequence
  Description of Artificial Sequence: Synthetic peptide
  Seed: GMDPRMCSLMQGSTLPRRSGA
GMDPRMFSLTQASTVPRRSGA

SEQ ID NO: 83457 - protein, 21 aa, Artificial Sequence
  Description of Artificial Sequence: Synthetic peptide
  Seed: GMDPRMCSLMQGSTLPRRSGA
GMDPRMFSLVQASTAPRRSGA

SEQ ID NO: 83458 - protein, 21 aa, Artificial Sequence
  Description of Artificial Sequence: Synthetic peptide
  Seed: GMDPRMCSLMQGSTLPRRSGA
GMDPRMFSLVQASTGPRRSGA

SEQ ID NO: 83459 - protein, 21 aa, Artificial Sequence
  Description of Artificial Sequence: Synthetic peptide
  Seed: GMDPRMCSLMQGSTLPRRSGA
GMDPRMFSLVQASTHPRRSGA

SEQ ID NO: 83460 - protein, 21 aa, Artificial Sequence
  Description of Artificial Sequence: Synthetic peptide
  Seed: GMDPRMCSLMQGSTLPRRSGA
GMDPRMFSLVQASTIPRRSGA

SEQ ID NO: 83461 - protein, 21 aa, Artificial Sequence
  Description of Artificial Sequence: Synthetic peptide
  Seed: GMDPRMCSLMQGSTLPRRSGA
GMDPRMFSLVQASTLPRRSGA

SEQ ID NO: 83462 - protein, 21 aa, Artificial Sequence
  Description of Artificial Sequence: Synthetic peptide
  Seed: GMDPRMCSLMQGSTLPRRSGA
GMDPRMFSLVQASTMPRRSGA

SEQ ID NO: 83463 - protein, 21 aa, Artificial Sequence
  Description of Artificial Sequence: Synthetic peptide
  Seed: GMDPRMCSLMQGSTLPRRSGA
GMDPRMFSLVQASTNPRRSGA

SEQ ID NO: 83464 - protein, 21 aa, Artificial Sequence
  Description of Artificial Sequence: Synthetic peptide
  Seed: GMDPRMCSLMQGSTLPRRSGA
GMDPRMFSLVQASTQPRRSGA

SEQ ID NO: 83465 - protein, 21 aa, Artificial Sequence
  Description of Artificial Sequence: Synthetic peptide
  Seed: GMDPRMCSLMQGSTLPRRSGA
GMDPRMFSLVQASTSPRRSGA

SEQ ID NO: 83466 - protein, 21 aa, Artificial Sequence
  Description of Artificial Sequence: Synthetic peptide
  Seed: GMDPRMCSLMQGSTLPRRSGA
GMDPRMFSLVQASTTPRRSGA

SEQ ID NO: 83467 - protein, 21 aa, Artificial Sequence
  Description of Artificial Sequence: Synthetic peptide
  Seed: GMDPRMCSLMQGSTLPRRSGA
GMDPRMFSLVQASTVPRRSGA

SEQ ID NO: 83468 - protein, 21 aa, Artificial Sequence
  Description of Artificial Sequence: Synthetic peptide
  Seed: GMDPRMCSLMQGSTLPRRSGA
GMDPRMFSLVQGSTAPRRSGA

SEQ ID NO: 83469 - protein, 21 aa, Artificial Sequence
  Description of Artificial Sequence: Synthetic peptide
  Seed: GMDPRMCSLMQGSTLPRRSGA
GMDPRMFSLVQGSTIPRRSGA

SEQ ID NO: 83470 - protein, 21 aa, Artificial Sequence
  Description of Artificial Sequence: Synthetic peptide
  Seed: GMDPRMCSLMQGSTLPRRSGA
GMDPRMFSLVQGSTLPRRSGA

SEQ ID NO: 83471 - protein, 21 aa, Artificial Sequence
  Description of Artificial Sequence: Synthetic peptide
  Seed: GMDPRMCSLMQGSTLPRRSGA
GMDPRMFSLVQGSTMPRRSGA

SEQ ID NO: 83472 - protein, 21 aa, Artificial Sequence
  Description of Artificial Sequence: Synthetic peptide
  Seed: GMDPRMCSLMQGSTLPRRSGA
GMDPRMFSLVQGSTNPRRSGA

SEQ ID NO: 83473 - protein, 21 aa, Artificial Sequence
  Description of Artificial Sequence: Synthetic peptide
  Seed: GMDPRMCSLMQGSTLPRRSGA
GMDPRMFSLVQGSTSPRRSGA

SEQ ID NO: 83474 - protein, 21 aa, Artificial Sequence
  Description of Artificial Sequence: Synthetic peptide
  Seed: GMDPRMCSLMQGSTLPRRSGA
GMDPRMFSLVQGSTTPRRSGA

SEQ ID NO: 83475 - protein, 21 aa, Artificial Sequence
  Description of Artificial Sequence: Synthetic peptide
  Seed: GMDPRMCSLMQGSTLPRRSGA
GMDPRMFSLVQGSTVPRRSGA

SEQ ID NO: 83476 - protein, 21 aa, Artificial Sequence
  Description of Artificial Sequence: Synthetic peptide
  Seed: GMDPRMCSLMQGSTLPRRSGA
GMDPRMFSLVQISTAPRRSGA

SEQ ID NO: 83477 - protein, 21 aa, Artificial Sequence
  Description of Artificial Sequence: Synthetic peptide
  Seed: GMDPRMCSLMQGSTLPRRSGA
GMDPRMFSLVQISTNPRRSGA

SEQ ID NO: 83478 - protein, 21 aa, Artificial Sequence
  Description of Artificial Sequence: Synthetic peptide
  Seed: GMDPRMCSLMQGSTLPRRSGA
GMDPRMFSLVQISTSPRRSGA

SEQ ID NO: 83479 - protein, 21 aa, Artificial Sequence
  Description of Artificial Sequence: Synthetic peptide
  Seed: GMDPRMCSLMQGSTLPRRSGA
GMDPRMFSLVQNSTAPRRSGA

SEQ ID NO: 83480 - protein, 21 aa, Artificial Sequence
  Description of Artificial Sequence: Synthetic peptide
  Seed: GMDPRMCSLMQGSTLPRRSGA
GMDPRMFSLVQNSTIPRRSGA

SEQ ID NO: 83481 - protein, 21 aa, Artificial Sequence
  Description of Artificial Sequence: Synthetic peptide
  Seed: GMDPRMCSLMQGSTLPRRSGA
GMDPRMFSLVQNSTLPRRSGA

SEQ ID NO: 83482 - protein, 21 aa, Artificial Sequence
  Description of Artificial Sequence: Synthetic peptide
  Seed: GMDPRMCSLMQGSTLPRRSGA
GMDPRMFSLVQNSTVPRRSGA

SEQ ID NO: 83483 - protein, 21 aa, Artificial Sequence
  Description of Artificial Sequence: Synthetic peptide
  Seed: GMDPRMCSLMQGSTLPRRSGA
GMDPRMFSLVQPSTAPRRSGA

SEQ ID NO: 83484 - protein, 21 aa, Artificial Sequence
  Description of Artificial Sequence: Synthetic peptide
  Seed: GMDPRMCSLMQGSTLPRRSGA
GMDPRMFSLVQPSTGPRRSGA

SEQ ID NO: 83485 - protein, 21 aa, Artificial Sequence
  Description of Artificial Sequence: Synthetic peptide
  Seed: GMDPRMCSLMQGSTLPRRSGA
GMDPRMFSLVQPSTIPRRSGA

SEQ ID NO: 83486 - protein, 21 aa, Artificial Sequence
  Description of Artificial Sequence: Synthetic peptide
  Seed: GMDPRMCSLMQGSTLPRRSGA
GMDPRMFSLVQPSTLPRRSGA

SEQ ID NO: 83487 - protein, 21 aa, Artificial Sequence
  Description of Artificial Sequence: Synthetic peptide
  Seed: GMDPRMCSLMQGSTLPRRSGA
GMDPRMFSLVQPSTMPRRSGA

SEQ ID NO: 83488 - protein, 21 aa, Artificial Sequence
  Description of Artificial Sequence: Synthetic peptide
  Seed: GMDPRMCSLMQGSTLPRRSGA
GMDPRMFSLVQPSTNPRRSGA

SEQ ID NO: 83489 - protein, 21 aa, Artificial Sequence
  Description of Artificial Sequence: Synthetic peptide
  Seed: GMDPRMCSLMQGSTLPRRSGA
GMDPRMFSLVQPSTSPRRSGA

SEQ ID NO: 83490 - protein, 21 aa, Artificial Sequence
  Description of Artificial Sequence: Synthetic peptide
  Seed: GMDPRMCSLMQGSTLPRRSGA
GMDPRMFSLVQPSTTPRRSGA

SEQ ID NO: 83491 - protein, 21 aa, Artificial Sequence
  Description of Artificial Sequence: Synthetic peptide
  Seed: GMDPRMCSLMQGSTLPRRSGA
GMDPRMFSLVQPSTVPRRSGA

SEQ ID NO: 83492 - protein, 21 aa, Artificial Sequence
  Description of Artificial Sequence: Synthetic peptide
  Seed: GMDPRMCSLMQGSTLPRRSGA
GMDPRMFSLVQSSTAPRRSGA

SEQ ID NO: 83493 - protein, 21 aa, Artificial Sequence
  Description of Artificial Sequence: Synthetic peptide
  Seed: GMDPRMCSLMQGSTLPRRSGA
GMDPRMFSLVQSSTGPRRSGA

SEQ ID NO: 83494 - protein, 21 aa, Artificial Sequence
  Description of Artificial Sequence: Synthetic peptide
  Seed: GMDPRMCSLMQGSTLPRRSGA
GMDPRMFSLVQSSTIPRRSGA

SEQ ID NO: 83495 - protein, 21 aa, Artificial Sequence
  Description of Artificial Sequence: Synthetic peptide
  Seed: GMDPRMCSLMQGSTLPRRSGA
GMDPRMFSLVQSSTLPRRSGA

SEQ ID NO: 83496 - protein, 21 aa, Artificial Sequence
  Description of Artificial Sequence: Synthetic peptide
  Seed: GMDPRMCSLMQGSTLPRRSGA
GMDPRMFSLVQSSTMPRRSGA

SEQ ID NO: 83497 - protein, 21 aa, Artificial Sequence
  Description of Artificial Sequence: Synthetic peptide
  Seed: GMDPRMCSLMQGSTLPRRSGA
GMDPRMFSLVQSSTNPRRSGA

SEQ ID NO: 83498 - protein, 21 aa, Artificial Sequence
  Description of Artificial Sequence: Synthetic peptide
  Seed: GMDPRMCSLMQGSTLPRRSGA
GMDPRMFSLVQSSTSPRRSGA

SEQ ID NO: 83499 - protein, 21 aa, Artificial Sequence
  Description of Artificial Sequence: Synthetic peptide
  Seed: GMDPRMCSLMQGSTLPRRSGA
GMDPRMFSLVQSSTTPRRSGA

SEQ ID NO: 83500 - protein, 21 aa, Artificial Sequence
  Description of Artificial Sequence: Synthetic peptide
  Seed: GMDPRMCSLMQGSTLPRRSGA
GMDPRMFSLVQSSTVPRRSGA

SEQ ID NO: 83501 - protein, 21 aa, Artificial Sequence
  Description of Artificial Sequence: Synthetic peptide
  Seed: GMDPRMCSLMQGSTLPRRSGA
GMDPRMFSLVQTSTAPRRSGA

SEQ ID NO: 83502 - protein, 21 aa, Artificial Sequence
  Description of Artificial Sequence: Synthetic peptide
  Seed: GMDPRMCSLMQGSTLPRRSGA
GMDPRMFSLVQTSTIPRRSGA

SEQ ID NO: 83503 - protein, 21 aa, Artificial Sequence
  Description of Artificial Sequence: Synthetic peptide
  Seed: GMDPRMCSLMQGSTLPRRSGA
GMDPRMFSLVQTSTLPRRSGA

SEQ ID NO: 83504 - protein, 21 aa, Artificial Sequence
  Description of Artificial Sequence: Synthetic peptide
  Seed: GMDPRMCSLMQGSTLPRRSGA
GMDPRMFSLVQTSTNPRRSGA

SEQ ID NO: 83505 - protein, 21 aa, Artificial Sequence
  Description of Artificial Sequence: Synthetic peptide
  Seed: GMDPRMCSLMQGSTLPRRSGA
GMDPRMFSLVQTSTSPRRSGA

SEQ ID NO: 83506 - protein, 21 aa, Artificial Sequence
  Description of Artificial Sequence: Synthetic peptide
  Seed: GMDPRMCSLMQGSTLPRRSGA
GMDPRMFSLVQTSTTPRRSGA

SEQ ID NO: 83507 - protein, 21 aa, Artificial Sequence
  Description of Artificial Sequence: Synthetic peptide
  Seed: GMDPRMCSLMQGSTLPRRSGA
GMDPRMFSLVQTSTVPRRSGA

SEQ ID NO: 83508 - protein, 21 aa, Artificial Sequence
  Description of Artificial Sequence: Synthetic peptide
  Seed: GMDPRMCSLMQGSTLPRRSGA
GMDPRMFSLVQVSTAPRRSGA

SEQ ID NO: 83509 - protein, 21 aa, Artificial Sequence
  Description of Artificial Sequence: Synthetic peptide
  Seed: GMDPRMCSLMQGSTLPRRSGA
GMDPRMFSLVQVSTNPRRSGA

SEQ ID NO: 83510 - protein, 21 aa, Artificial Sequence
  Description of Artificial Sequence: Synthetic peptide
  Seed: GMDPRMCSLMQGSTLPRRSGA
GMDPRMFSLVQVSTSPRRSGA

SEQ ID NO: 83511 - protein, 21 aa, Artificial Sequence
  Description of Artificial Sequence: Synthetic peptide
  Seed: GMDPRMCSLMQGSTLPRRSGA
GMDPRMFSLVQVSTTPRRSGA

SEQ ID NO: 83512 - protein, 21 aa, Artificial Sequence
  Description of Artificial Sequence: Synthetic peptide
  Seed: GMDPRMCSLMQGSTLPRRSGA
GMDPRMFSLVQVSTVPRRSGA

SEQ ID NO: 83513 - protein, 21 aa, Artificial Sequence
  Description of Artificial Sequence: Synthetic peptide
  Seed: GMDPRMCSLMQGSTLPRRSGA
GMDPRMISLAQASTAPRRSGA

SEQ ID NO: 83514 - protein, 21 aa, Artificial Sequence
  Description of Artificial Sequence: Synthetic peptide
  Seed: GMDPRMCSLMQGSTLPRRSGA
GMDPRMISLAQASTIPRRSGA

SEQ ID NO: 83515 - protein, 21 aa, Artificial Sequence
  Description of Artificial Sequence: Synthetic peptide
  Seed: GMDPRMCSLMQGSTLPRRSGA
GMDPRMISLAQASTLPRRSGA

SEQ ID NO: 83516 - protein, 21 aa, Artificial Sequence
  Description of Artificial Sequence: Synthetic peptide
  Seed: GMDPRMCSLMQGSTLPRRSGA
GMDPRMISLAQASTVPRRSGA

SEQ ID NO: 83517 - protein, 21 aa, Artificial Sequence
  Description of Artificial Sequence: Synthetic peptide
  Seed: GMDPRMCSLMQGSTLPRRSGA
GMDPRMISLAQGSTLPRRSGA

SEQ ID NO: 83518 - protein, 21 aa, Artificial Sequence
  Description of Artificial Sequence: Synthetic peptide
  Seed: GMDPRMCSLMQGSTLPRRSGA
GMDPRMISLAQGSTVPRRSGA

SEQ ID NO: 83519 - protein, 21 aa, Artificial Sequence
  Description of Artificial Sequence: Synthetic peptide
  Seed: GMDPRMCSLMQGSTLPRRSGA
GMDPRMISLIQASTAPRRSGA

SEQ ID NO: 83520 - protein, 21 aa, Artificial Sequence
  Description of Artificial Sequence: Synthetic peptide
  Seed: GMDPRMCSLMQGSTLPRRSGA
GMDPRMISLIQASTIPRRSGA

SEQ ID NO: 83521 - protein, 21 aa, Artificial Sequence
  Description of Artificial Sequence: Synthetic peptide
  Seed: GMDPRMCSLMQGSTLPRRSGA
GMDPRMISLIQASTLPRRSGA

SEQ ID NO: 83522 - protein, 21 aa, Artificial Sequence
  Description of Artificial Sequence: Synthetic peptide
  Seed: GMDPRMCSLMQGSTLPRRSGA
GMDPRMISLIQASTNPRRSGA

SEQ ID NO: 83523 - protein, 21 aa, Artificial Sequence
  Description of Artificial Sequence: Synthetic peptide
  Seed: GMDPRMCSLMQGSTLPRRSGA
GMDPRMISLIQASTSPRRSGA

SEQ ID NO: 83524 - protein, 21 aa, Artificial Sequence
  Description of Artificial Sequence: Synthetic peptide
  Seed: GMDPRMCSLMQGSTLPRRSGA
GMDPRMISLIQASTVPRRSGA

SEQ ID NO: 83525 - protein, 21 aa, Artificial Sequence
  Description of Artificial Sequence: Synthetic peptide
  Seed: GMDPRMCSLMQGSTLPRRSGA
GMDPRMISLIQGSTAPRRSGA

SEQ ID NO: 83526 - protein, 21 aa, Artificial Sequence
  Description of Artificial Sequence: Synthetic peptide
  Seed: GMDPRMCSLMQGSTLPRRSGA
GMDPRMISLIQGSTIPRRSGA

SEQ ID NO: 83527 - protein, 21 aa, Artificial Sequence
  Description of Artificial Sequence: Synthetic peptide
  Seed: GMDPRMCSLMQGSTLPRRSGA
GMDPRMISLIQGSTLPRRSGA

SEQ ID NO: 83528 - protein, 21 aa, Artificial Sequence
  Description of Artificial Sequence: Synthetic peptide
  Seed: GMDPRMCSLMQGSTLPRRSGA
GMDPRMISLIQGSTVPRRSGA

SEQ ID NO: 83529 - protein, 21 aa, Artificial Sequence
  Description of Artificial Sequence: Synthetic peptide
  Seed: GMDPRMCSLMQGSTLPRRSGA
GMDPRMISLIQPSTVPRRSGA

SEQ ID NO: 83530 - protein, 21 aa, Artificial Sequence
  Description of Artificial Sequence: Synthetic peptide
  Seed: GMDPRMCSLMQGSTLPRRSGA
GMDPRMISLIQSSTLPRRSGA

SEQ ID NO: 83531 - protein, 21 aa, Artificial Sequence
  Description of Artificial Sequence: Synthetic peptide
  Seed: GMDPRMCSLMQGSTLPRRSGA
GMDPRMISLIQSSTVPRRSGA

SEQ ID NO: 83532 - protein, 21 aa, Artificial Sequence
  Description of Artificial Sequence: Synthetic peptide
  Seed: GMDPRMCSLMQGSTLPRRSGA
GMDPRMISLLQASTAPRRSGA

SEQ ID NO: 83533 - protein, 21 aa, Artificial Sequence
  Description of Artificial Sequence: Synthetic peptide
  Seed: GMDPRMCSLMQGSTLPRRSGA
GMDPRMISLLQASTGPRRSGA

SEQ ID NO: 83534 - protein, 21 aa, Artificial Sequence
  Description of Artificial Sequence: Synthetic peptide
  Seed: GMDPRMCSLMQGSTLPRRSGA
GMDPRMISLLQASTIPRRSGA

SEQ ID NO: 83535 - protein, 21 aa, Artificial Sequence
  Description of Artificial Sequence: Synthetic peptide
  Seed: GMDPRMCSLMQGSTLPRRSGA
GMDPRMISLLQASTLPRRSGA

SEQ ID NO: 83536 - protein, 21 aa, Artificial Sequence
  Description of Artificial Sequence: Synthetic peptide
  Seed: GMDPRMCSLMQGSTLPRRSGA
GMDPRMISLLQASTMPRRSGA

SEQ ID NO: 83537 - protein, 21 aa, Artificial Sequence
  Description of Artificial Sequence: Synthetic peptide
  Seed: GMDPRMCSLMQGSTLPRRSGA
GMDPRMISLLQASTNPRRSGA

SEQ ID NO: 83538 - protein, 21 aa, Artificial Sequence
  Description of Artificial Sequence: Synthetic peptide
  Seed: GMDPRMCSLMQGSTLPRRSGA
GMDPRMISLLQASTSPRRSGA

SEQ ID NO: 83539 - protein, 21 aa, Artificial Sequence
  Description of Artificial Sequence: Synthetic peptide
  Seed: GMDPRMCSLMQGSTLPRRSGA
GMDPRMISLLQASTTPRRSGA

SEQ ID NO: 83540 - protein, 21 aa, Artificial Sequence
  Description of Artificial Sequence: Synthetic peptide
  Seed: GMDPRMCSLMQGSTLPRRSGA
GMDPRMISLLQASTVPRRSGA

SEQ ID NO: 83541 - protein, 21 aa, Artificial Sequence
  Description of Artificial Sequence: Synthetic peptide
  Seed: GMDPRMCSLMQGSTLPRRSGA
GMDPRMISLLQGSTAPRRSGA

SEQ ID NO: 83542 - protein, 21 aa, Artificial Sequence
  Description of Artificial Sequence: Synthetic peptide
  Seed: GMDPRMCSLMQGSTLPRRSGA
GMDPRMISLLQGSTIPRRSGA

SEQ ID NO: 83543 - protein, 21 aa, Artificial Sequence
  Description of Artificial Sequence: Synthetic peptide
  Seed: GMDPRMCSLMQGSTLPRRSGA
GMDPRMISLLQGSTLPRRSGA

SEQ ID NO: 83544 - protein, 21 aa, Artificial Sequence
  Description of Artificial Sequence: Synthetic peptide
  Seed: GMDPRMCSLMQGSTLPRRSGA
GMDPRMISLLQGSTMPRRSGA

SEQ ID NO: 83545 - protein, 21 aa, Artificial Sequence
  Description of Artificial Sequence: Synthetic peptide
  Seed: GMDPRMCSLMQGSTLPRRSGA
GMDPRMISLLQGSTSPRRSGA

SEQ ID NO: 83546 - protein, 21 aa, Artificial Sequence
  Description of Artificial Sequence: Synthetic peptide
  Seed: GMDPRMCSLMQGSTLPRRSGA
GMDPRMISLLQGSTTPRRSGA

SEQ ID NO: 83547 - protein, 21 aa, Artificial Sequence
  Description of Artificial Sequence: Synthetic peptide
  Seed: GMDPRMCSLMQGSTLPRRSGA
GMDPRMISLLQGSTVPRRSGA

SEQ ID NO: 83548 - protein, 21 aa, Artificial Sequence
  Description of Artificial Sequence: Synthetic peptide
  Seed: GMDPRMCSLMQGSTLPRRSGA
GMDPRMISLLQNSTIPRRSGA

SEQ ID NO: 83549 - protein, 21 aa, Artificial Sequence
  Description of Artificial Sequence: Synthetic peptide
  Seed: GMDPRMCSLMQGSTLPRRSGA
GMDPRMISLLQNSTLPRRSGA

SEQ ID NO: 83550 - protein, 21 aa, Artificial Sequence
  Description of Artificial Sequence: Synthetic peptide
  Seed: GMDPRMCSLMQGSTLPRRSGA
GMDPRMISLLQNSTVPRRSGA

SEQ ID NO: 83551 - protein, 21 aa, Artificial Sequence
  Description of Artificial Sequence: Synthetic peptide
  Seed: GMDPRMCSLMQGSTLPRRSGA
GMDPRMISLLQPSTAPRRSGA

SEQ ID NO: 83552 - protein, 21 aa, Artificial Sequence
  Description of Artificial Sequence: Synthetic peptide
  Seed: GMDPRMCSLMQGSTLPRRSGA
GMDPRMISLLQPSTIPRRSGA

SEQ ID NO: 83553 - protein, 21 aa, Artificial Sequence
  Description of Artificial Sequence: Synthetic peptide
  Seed: GMDPRMCSLMQGSTLPRRSGA
GMDPRMISLLQPSTLPRRSGA

SEQ ID NO: 83554 - protein, 21 aa, Artificial Sequence
  Description of Artificial Sequence: Synthetic peptide
  Seed: GMDPRMCSLMQGSTLPRRSGA
GMDPRMISLLQPSTMPRRSGA

SEQ ID NO: 83555 - protein, 21 aa, Artificial Sequence
  Description of Artificial Sequence: Synthetic peptide
  Seed: GMDPRMCSLMQGSTLPRRSGA
GMDPRMISLLQPSTNPRRSGA

SEQ ID NO: 83556 - protein, 21 aa, Artificial Sequence
  Description of Artificial Sequence: Synthetic peptide
  Seed: GMDPRMCSLMQGSTLPRRSGA
GMDPRMISLLQPSTSPRRSGA

SEQ ID NO: 83557 - protein, 21 aa, Artificial Sequence
  Description of Artificial Sequence: Synthetic peptide
  Seed: GMDPRMCSLMQGSTLPRRSGA
GMDPRMISLLQPSTTPRRSGA

SEQ ID NO: 83558 - protein, 21 aa, Artificial Sequence
  Description of Artificial Sequence: Synthetic peptide
  Seed: GMDPRMCSLMQGSTLPRRSGA
GMDPRMISLLQPSTVPRRSGA

SEQ ID NO: 83559 - protein, 21 aa, Artificial Sequence
  Description of Artificial Sequence: Synthetic peptide
  Seed: GMDPRMCSLMQGSTLPRRSGA
GMDPRMISLLQSSTAPRRSGA

SEQ ID NO: 83560 - protein, 21 aa, Artificial Sequence
  Description of Artificial Sequence: Synthetic peptide
  Seed: GMDPRMCSLMQGSTLPRRSGA
GMDPRMISLLQSSTIPRRSGA

SEQ ID NO: 83561 - protein, 21 aa, Artificial Sequence
  Description of Artificial Sequence: Synthetic peptide
  Seed: GMDPRMCSLMQGSTLPRRSGA
GMDPRMISLLQSSTLPRRSGA

SEQ ID NO: 83562 - protein, 21 aa, Artificial Sequence
  Description of Artificial Sequence: Synthetic peptide
  Seed: GMDPRMCSLMQGSTLPRRSGA
GMDPRMISLLQSSTMPRRSGA

SEQ ID NO: 83563 - protein, 21 aa, Artificial Sequence
  Description of Artificial Sequence: Synthetic peptide
  Seed: GMDPRMCSLMQGSTLPRRSGA
GMDPRMISLLQSSTSPRRSGA

SEQ ID NO: 83564 - protein, 21 aa, Artificial Sequence
  Description of Artificial Sequence: Synthetic peptide
  Seed: GMDPRMCSLMQGSTLPRRSGA
GMDPRMISLLQSSTTPRRSGA

SEQ ID NO: 83565 - protein, 21 aa, Artificial Sequence
  Description of Artificial Sequence: Synthetic peptide
  Seed: GMDPRMCSLMQGSTLPRRSGA
GMDPRMISLLQSSTVPRRSGA

SEQ ID NO: 83566 - protein, 21 aa, Artificial Sequence
  Description of Artificial Sequence: Synthetic peptide
  Seed: GMDPRMCSLMQGSTLPRRSGA
GMDPRMISLLQTSTAPRRSGA

SEQ ID NO: 83567 - protein, 21 aa, Artificial Sequence
  Description of Artificial Sequence: Synthetic peptide
  Seed: GMDPRMCSLMQGSTLPRRSGA
GMDPRMISLLQTSTIPRRSGA

SEQ ID NO: 83568 - protein, 21 aa, Artificial Sequence
  Description of Artificial Sequence: Synthetic peptide
  Seed: GMDPRMCSLMQGSTLPRRSGA
GMDPRMISLLQTSTLPRRSGA

SEQ ID NO: 83569 - protein, 21 aa, Artificial Sequence
  Description of Artificial Sequence: Synthetic peptide
  Seed: GMDPRMCSLMQGSTLPRRSGA
GMDPRMISLLQTSTNPRRSGA

SEQ ID NO: 83570 - protein, 21 aa, Artificial Sequence
  Description of Artificial Sequence: Synthetic peptide
  Seed: GMDPRMCSLMQGSTLPRRSGA
GMDPRMISLLQTSTVPRRSGA

SEQ ID NO: 83571 - protein, 21 aa, Artificial Sequence
  Description of Artificial Sequence: Synthetic peptide
  Seed: GMDPRMCSLMQGSTLPRRSGA
GMDPRMISLLQVSTAPRRSGA

SEQ ID NO: 83572 - protein, 21 aa, Artificial Sequence
  Description of Artificial Sequence: Synthetic peptide
  Seed: GMDPRMCSLMQGSTLPRRSGA
GMDPRMISLLQVSTNPRRSGA

SEQ ID NO: 83573 - protein, 21 aa, Artificial Sequence
  Description of Artificial Sequence: Synthetic peptide
  Seed: GMDPRMCSLMQGSTLPRRSGA
GMDPRMISLLQVSTSPRRSGA

SEQ ID NO: 83574 - protein, 21 aa, Artificial Sequence
  Description of Artificial Sequence: Synthetic peptide
  Seed: GMDPRMCSLMQGSTLPRRSGA
GMDPRMISLMQASTAPRRSGA

SEQ ID NO: 83575 - protein, 21 aa, Artificial Sequence
  Description of Artificial Sequence: Synthetic peptide
  Seed: GMDPRMCSLMQGSTLPRRSGA
GMDPRMISLMQASTGPRRSGA

SEQ ID NO: 83576 - protein, 21 aa, Artificial Sequence
  Description of Artificial Sequence: Synthetic peptide
  Seed: GMDPRMCSLMQGSTLPRRSGA
GMDPRMISLMQASTIPRRSGA

SEQ ID NO: 83577 - protein, 21 aa, Artificial Sequence
  Description of Artificial Sequence: Synthetic peptide
  Seed: GMDPRMCSLMQGSTLPRRSGA
GMDPRMISLMQASTLPRRSGA

SEQ ID NO: 83578 - protein, 21 aa, Artificial Sequence
  Description of Artificial Sequence: Synthetic peptide
  Seed: GMDPRMCSLMQGSTLPRRSGA
GMDPRMISLMQASTMPRRSGA

SEQ ID NO: 83579 - protein, 21 aa, Artificial Sequence
  Description of Artificial Sequence: Synthetic peptide
  Seed: GMDPRMCSLMQGSTLPRRSGA
GMDPRMISLMQASTNPRRSGA

SEQ ID NO: 83580 - protein, 21 aa, Artificial Sequence
  Description of Artificial Sequence: Synthetic peptide
  Seed: GMDPRMCSLMQGSTLPRRSGA
GMDPRMISLMQASTSPRRSGA

SEQ ID NO: 83581 - protein, 21 aa, Artificial Sequence
  Description of Artificial Sequence: Synthetic peptide
  Seed: GMDPRMCSLMQGSTLPRRSGA
GMDPRMISLMQASTTPRRSGA

SEQ ID NO: 83582 - protein, 21 aa, Artificial Sequence
  Description of Artificial Sequence: Synthetic peptide
  Seed: GMDPRMCSLMQGSTLPRRSGA
GMDPRMISLMQASTVPRRSGA

SEQ ID NO: 83583 - protein, 21 aa, Artificial Sequence
  Description of Artificial Sequence: Synthetic peptide
  Seed: GMDPRMCSLMQGSTLPRRSGA
GMDPRMISLMQGSTAPRRSGA

SEQ ID NO: 83584 - protein, 21 aa, Artificial Sequence
  Description of Artificial Sequence: Synthetic peptide
  Seed: GMDPRMCSLMQGSTLPRRSGA
GMDPRMISLMQGSTIPRRSGA

SEQ ID NO: 83585 - protein, 21 aa, Artificial Sequence
  Description of Artificial Sequence: Synthetic peptide
  Seed: GMDPRMCSLMQGSTLPRRSGA
GMDPRMISLMQGSTLPRRSGA

SEQ ID NO: 83586 - protein, 21 aa, Artificial Sequence
  Description of Artificial Sequence: Synthetic peptide
  Seed: GMDPRMCSLMQGSTLPRRSGA
GMDPRMISLMQGSTMPRRSGA

SEQ ID NO: 83587 - protein, 21 aa, Artificial Sequence
  Description of Artificial Sequence: Synthetic peptide
  Seed: GMDPRMCSLMQGSTLPRRSGA
GMDPRMISLMQGSTSPRRSGA

SEQ ID NO: 83588 - protein, 21 aa, Artificial Sequence
  Description of Artificial Sequence: Synthetic peptide
  Seed: GMDPRMCSLMQGSTLPRRSGA
GMDPRMISLMQGSTTPRRSGA

SEQ ID NO: 83589 - protein, 21 aa, Artificial Sequence
  Description of Artificial Sequence: Synthetic peptide
  Seed: GMDPRMCSLMQGSTLPRRSGA
GMDPRMISLMQGSTVPRRSGA

SEQ ID NO: 83590 - protein, 21 aa, Artificial Sequence
  Description of Artificial Sequence: Synthetic peptide
  Seed: GMDPRMCSLMQGSTLPRRSGA
GMDPRMISLMQISTAPRRSGA

SEQ ID NO: 83591 - protein, 21 aa, Artificial Sequence
  Description of Artificial Sequence: Synthetic peptide
  Seed: GMDPRMCSLMQGSTLPRRSGA
GMDPRMISLMQISTSPRRSGA

SEQ ID NO: 83592 - protein, 21 aa, Artificial Sequence
  Description of Artificial Sequence: Synthetic peptide
  Seed: GMDPRMCSLMQGSTLPRRSGA
GMDPRMISLMQNSTIPRRSGA

SEQ ID NO: 83593 - protein, 21 aa, Artificial Sequence
  Description of Artificial Sequence: Synthetic peptide
  Seed: GMDPRMCSLMQGSTLPRRSGA
GMDPRMISLMQNSTLPRRSGA

SEQ ID NO: 83594 - protein, 21 aa, Artificial Sequence
  Description of Artificial Sequence: Synthetic peptide
  Seed: GMDPRMCSLMQGSTLPRRSGA
GMDPRMISLMQNSTVPRRSGA

SEQ ID NO: 83595 - protein, 21 aa, Artificial Sequence
  Description of Artificial Sequence: Synthetic peptide
  Seed: GMDPRMCSLMQGSTLPRRSGA
GMDPRMISLMQPSTAPRRSGA

SEQ ID NO: 83596 - protein, 21 aa, Artificial Sequence
  Description of Artificial Sequence: Synthetic peptide
  Seed: GMDPRMCSLMQGSTLPRRSGA
GMDPRMISLMQPSTIPRRSGA

SEQ ID NO: 83597 - protein, 21 aa, Artificial Sequence
  Description of Artificial Sequence: Synthetic peptide
  Seed: GMDPRMCSLMQGSTLPRRSGA
GMDPRMISLMQPSTLPRRSGA

SEQ ID NO: 83598 - protein, 21 aa, Artificial Sequence
  Description of Artificial Sequence: Synthetic peptide
  Seed: GMDPRMCSLMQGSTLPRRSGA
GMDPRMISLMQPSTMPRRSGA

SEQ ID NO: 83599 - protein, 21 aa, Artificial Sequence
  Description of Artificial Sequence: Synthetic peptide
  Seed: GMDPRMCSLMQGSTLPRRSGA
GMDPRMISLMQPSTNPRRSGA

SEQ ID NO: 83600 - protein, 21 aa, Artificial Sequence
  Description of Artificial Sequence: Synthetic peptide
  Seed: GMDPRMCSLMQGSTLPRRSGA
GMDPRMISLMQPSTSPRRSGA

SEQ ID NO: 83601 - protein, 21 aa, Artificial Sequence
  Description of Artificial Sequence: Synthetic peptide
  Seed: GMDPRMCSLMQGSTLPRRSGA
GMDPRMISLMQPSTVPRRSGA

SEQ ID NO: 83602 - protein, 21 aa, Artificial Sequence
  Description of Artificial Sequence: Synthetic peptide
  Seed: GMDPRMCSLMQGSTLPRRSGA
GMDPRMISLMQSSTAPRRSGA

SEQ ID NO: 83603 - protein, 21 aa, Artificial Sequence
  Description of Artificial Sequence: Synthetic peptide
  Seed: GMDPRMCSLMQGSTLPRRSGA
GMDPRMISLMQSSTIPRRSGA

SEQ ID NO: 83604 - protein, 21 aa, Artificial Sequence
  Description of Artificial Sequence: Synthetic peptide
  Seed: GMDPRMCSLMQGSTLPRRSGA
GMDPRMISLMQSSTLPRRSGA

SEQ ID NO: 83605 - protein, 21 aa, Artificial Sequence
  Description of Artificial Sequence: Synthetic peptide
  Seed: GMDPRMCSLMQGSTLPRRSGA
GMDPRMISLMQSSTMPRRSGA

SEQ ID NO: 83606 - protein, 21 aa, Artificial Sequence
  Description of Artificial Sequence: Synthetic peptide
  Seed: GMDPRMCSLMQGSTLPRRSGA
GMDPRMISLMQSSTNPRRSGA

SEQ ID NO: 83607 - protein, 21 aa, Artificial Sequence
  Description of Artificial Sequence: Synthetic peptide
  Seed: GMDPRMCSLMQGSTLPRRSGA
GMDPRMISLMQSSTSPRRSGA

SEQ ID NO: 83608 - protein, 21 aa, Artificial Sequence
  Description of Artificial Sequence: Synthetic peptide
  Seed: GMDPRMCSLMQGSTLPRRSGA
GMDPRMISLMQSSTTPRRSGA

SEQ ID NO: 83609 - protein, 21 aa, Artificial Sequence
  Description of Artificial Sequence: Synthetic peptide
  Seed: GMDPRMCSLMQGSTLPRRSGA
GMDPRMISLMQSSTVPRRSGA

SEQ ID NO: 83610 - protein, 21 aa, Artificial Sequence
  Description of Artificial Sequence: Synthetic peptide
  Seed: GMDPRMCSLMQGSTLPRRSGA
GMDPRMISLMQTSTAPRRSGA

SEQ ID NO: 83611 - protein, 21 aa, Artificial Sequence
  Description of Artificial Sequence: Synthetic peptide
  Seed: GMDPRMCSLMQGSTLPRRSGA
GMDPRMISLMQTSTIPRRSGA

SEQ ID NO: 83612 - protein, 21 aa, Artificial Sequence
  Description of Artificial Sequence: Synthetic peptide
  Seed: GMDPRMCSLMQGSTLPRRSGA
GMDPRMISLMQTSTLPRRSGA

SEQ ID NO: 83613 - protein, 21 aa, Artificial Sequence
  Description of Artificial Sequence: Synthetic peptide
  Seed: GMDPRMCSLMQGSTLPRRSGA
GMDPRMISLMQTSTNPRRSGA

SEQ ID NO: 83614 - protein, 21 aa, Artificial Sequence
  Description of Artificial Sequence: Synthetic peptide
  Seed: GMDPRMCSLMQGSTLPRRSGA
GMDPRMISLMQTSTSPRRSGA

SEQ ID NO: 83615 - protein, 21 aa, Artificial Sequence
  Description of Artificial Sequence: Synthetic peptide
  Seed: GMDPRMCSLMQGSTLPRRSGA
GMDPRMISLMQTSTVPRRSGA

SEQ ID NO: 83616 - protein, 21 aa, Artificial Sequence
  Description of Artificial Sequence: Synthetic peptide
  Seed: GMDPRMCSLMQGSTLPRRSGA
GMDPRMISLMQVSTAPRRSGA

SEQ ID NO: 83617 - protein, 21 aa, Artificial Sequence
  Description of Artificial Sequence: Synthetic peptide
  Seed: GMDPRMCSLMQGSTLPRRSGA
GMDPRMISLMQVSTNPRRSGA

SEQ ID NO: 83618 - protein, 21 aa, Artificial Sequence
  Description of Artificial Sequence: Synthetic peptide
  Seed: GMDPRMCSLMQGSTLPRRSGA
GMDPRMISLMQVSTSPRRSGA

SEQ ID NO: 83619 - protein, 21 aa, Artificial Sequence
  Description of Artificial Sequence: Synthetic peptide
  Seed: GMDPRMCSLMQGSTLPRRSGA
GMDPRMISLQQASTIPRRSGA

SEQ ID NO: 83620 - protein, 21 aa, Artificial Sequence
  Description of Artificial Sequence: Synthetic peptide
  Seed: GMDPRMCSLMQGSTLPRRSGA
GMDPRMISLQQASTLPRRSGA

SEQ ID NO: 83621 - protein, 21 aa, Artificial Sequence
  Description of Artificial Sequence: Synthetic peptide
  Seed: GMDPRMCSLMQGSTLPRRSGA
GMDPRMISLQQASTVPRRSGA

SEQ ID NO: 83622 - protein, 21 aa, Artificial Sequence
  Description of Artificial Sequence: Synthetic peptide
  Seed: GMDPRMCSLMQGSTLPRRSGA
GMDPRMISLVQASTLPRRSGA

SEQ ID NO: 83623 - protein, 21 aa, Artificial Sequence
  Description of Artificial Sequence: Synthetic peptide
  Seed: GMDPRMCSLMQGSTLPRRSGA
GMDPRMISLVQASTVPRRSGA

SEQ ID NO: 83624 - protein, 21 aa, Artificial Sequence
  Description of Artificial Sequence: Synthetic peptide
  Seed: GMDPRMCSLMQGSTLPRRSGA
GMDPRMLSLAQASTIPRRSGA

SEQ ID NO: 83625 - protein, 21 aa, Artificial Sequence
  Description of Artificial Sequence: Synthetic peptide
  Seed: GMDPRMCSLMQGSTLPRRSGA
GMDPRMLSLAQASTLPRRSGA

SEQ ID NO: 83626 - protein, 21 aa, Artificial Sequence
  Description of Artificial Sequence: Synthetic peptide
  Seed: GMDPRMCSLMQGSTLPRRSGA
GMDPRMLSLAQASTVPRRSGA

SEQ ID NO: 83627 - protein, 21 aa, Artificial Sequence
  Description of Artificial Sequence: Synthetic peptide
  Seed: GMDPRMCSLMQGSTLPRRSGA
GMDPRMLSLIQASTAPRRSGA

SEQ ID NO: 83628 - protein, 21 aa, Artificial Sequence
  Description of Artificial Sequence: Synthetic peptide
  Seed: GMDPRMCSLMQGSTLPRRSGA
GMDPRMLSLIQASTIPRRSGA

SEQ ID NO: 83629 - protein, 21 aa, Artificial Sequence
  Description of Artificial Sequence: Synthetic peptide
  Seed: GMDPRMCSLMQGSTLPRRSGA
GMDPRMLSLIQASTLPRRSGA

SEQ ID NO: 83630 - protein, 21 aa, Artificial Sequence
  Description of Artificial Sequence: Synthetic peptide
  Seed: GMDPRMCSLMQGSTLPRRSGA
GMDPRMLSLIQASTNPRRSGA

SEQ ID NO: 83631 - protein, 21 aa, Artificial Sequence
  Description of Artificial Sequence: Synthetic peptide
  Seed: GMDPRMCSLMQGSTLPRRSGA
GMDPRMLSLIQASTSPRRSGA

SEQ ID NO: 83632 - protein, 21 aa, Artificial Sequence
  Description of Artificial Sequence: Synthetic peptide
  Seed: GMDPRMCSLMQGSTLPRRSGA
GMDPRMLSLIQASTVPRRSGA

SEQ ID NO: 83633 - protein, 21 aa, Artificial Sequence
  Description of Artificial Sequence: Synthetic peptide
  Seed: GMDPRMCSLMQGSTLPRRSGA
GMDPRMLSLIQGSTAPRRSGA

SEQ ID NO: 83634 - protein, 21 aa, Artificial Sequence
  Description of Artificial Sequence: Synthetic peptide
  Seed: GMDPRMCSLMQGSTLPRRSGA
GMDPRMLSLIQGSTIPRRSGA

SEQ ID NO: 83635 - protein, 21 aa, Artificial Sequence
  Description of Artificial Sequence: Synthetic peptide
  Seed: GMDPRMCSLMQGSTLPRRSGA
GMDPRMLSLIQGSTLPRRSGA

SEQ ID NO: 83636 - protein, 21 aa, Artificial Sequence
  Description of Artificial Sequence: Synthetic peptide
  Seed: GMDPRMCSLMQGSTLPRRSGA
GMDPRMLSLIQGSTVPRRSGA

SEQ ID NO: 83637 - protein, 21 aa, Artificial Sequence
  Description of Artificial Sequence: Synthetic peptide
  Seed: GMDPRMCSLMQGSTLPRRSGA
GMDPRMLSLLQASTAPRRSGA

SEQ ID NO: 83638 - protein, 21 aa, Artificial Sequence
  Description of Artificial Sequence: Synthetic peptide
  Seed: GMDPRMCSLMQGSTLPRRSGA
GMDPRMLSLLQASTIPRRSGA

SEQ ID NO: 83639 - protein, 21 aa, Artificial Sequence
  Description of Artificial Sequence: Synthetic peptide
  Seed: GMDPRMCSLMQGSTLPRRSGA
GMDPRMLSLLQASTLPRRSGA

SEQ ID NO: 83640 - protein, 21 aa, Artificial Sequence
  Description of Artificial Sequence: Synthetic peptide
  Seed: GMDPRMCSLMQGSTLPRRSGA
GMDPRMLSLLQASTMPRRSGA

SEQ ID NO: 83641 - protein, 21 aa, Artificial Sequence
  Description of Artificial Sequence: Synthetic peptide
  Seed: GMDPRMCSLMQGSTLPRRSGA
GMDPRMLSLLQASTNPRRSGA

SEQ ID NO: 83642 - protein, 21 aa, Artificial Sequence
  Description of Artificial Sequence: Synthetic peptide
  Seed: GMDPRMCSLMQGSTLPRRSGA
GMDPRMLSLLQASTSPRRSGA

SEQ ID NO: 83643 - protein, 21 aa, Artificial Sequence
  Description of Artificial Sequence: Synthetic peptide
  Seed: GMDPRMCSLMQGSTLPRRSGA
GMDPRMLSLLQASTTPRRSGA

SEQ ID NO: 83644 - protein, 21 aa, Artificial Sequence
  Description of Artificial Sequence: Synthetic peptide
  Seed: GMDPRMCSLMQGSTLPRRSGA
GMDPRMLSLLQASTVPRRSGA

SEQ ID NO: 83645 - protein, 21 aa, Artificial Sequence
  Description of Artificial Sequence: Synthetic peptide
  Seed: GMDPRMCSLMQGSTLPRRSGA
GMDPRMLSLLQGSTAPRRSGA

SEQ ID NO: 83646 - protein, 21 aa, Artificial Sequence
  Description of Artificial Sequence: Synthetic peptide
  Seed: GMDPRMCSLMQGSTLPRRSGA
GMDPRMLSLLQGSTIPRRSGA

SEQ ID NO: 83647 - protein, 21 aa, Artificial Sequence
  Description of Artificial Sequence: Synthetic peptide
  Seed: GMDPRMCSLMQGSTLPRRSGA
GMDPRMLSLLQGSTLPRRSGA

SEQ ID NO: 83648 - protein, 21 aa, Artificial Sequence
  Description of Artificial Sequence: Synthetic peptide
  Seed: GMDPRMCSLMQGSTLPRRSGA
GMDPRMLSLLQGSTMPRRSGA

SEQ ID NO: 83649 - protein, 21 aa, Artificial Sequence
  Description of Artificial Sequence: Synthetic peptide
  Seed: GMDPRMCSLMQGSTLPRRSGA
GMDPRMLSLLQGSTSPRRSGA

SEQ ID NO: 83650 - protein, 21 aa, Artificial Sequence
  Description of Artificial Sequence: Synthetic peptide
  Seed: GMDPRMCSLMQGSTLPRRSGA
GMDPRMLSLLQGSTTPRRSGA

SEQ ID NO: 83651 - protein, 21 aa, Artificial Sequence
  Description of Artificial Sequence: Synthetic peptide
  Seed: GMDPRMCSLMQGSTLPRRSGA
GMDPRMLSLLQGSTVPRRSGA

SEQ ID NO: 83652 - protein, 21 aa, Artificial Sequence
  Description of Artificial Sequence: Synthetic peptide
  Seed: GMDPRMCSLMQGSTLPRRSGA
GMDPRMLSLLQPSTAPRRSGA

SEQ ID NO: 83653 - protein, 21 aa, Artificial Sequence
  Description of Artificial Sequence: Synthetic peptide
  Seed: GMDPRMCSLMQGSTLPRRSGA
GMDPRMLSLLQPSTIPRRSGA

SEQ ID NO: 83654 - protein, 21 aa, Artificial Sequence
  Description of Artificial Sequence: Synthetic peptide
  Seed: GMDPRMCSLMQGSTLPRRSGA
GMDPRMLSLLQPSTLPRRSGA

SEQ ID NO: 83655 - protein, 21 aa, Artificial Sequence
  Description of Artificial Sequence: Synthetic peptide
  Seed: GMDPRMCSLMQGSTLPRRSGA
GMDPRMLSLLQPSTNPRRSGA

SEQ ID NO: 83656 - protein, 21 aa, Artificial Sequence
  Description of Artificial Sequence: Synthetic peptide
  Seed: GMDPRMCSLMQGSTLPRRSGA
GMDPRMLSLLQPSTSPRRSGA

SEQ ID NO: 83657 - protein, 21 aa, Artificial Sequence
  Description of Artificial Sequence: Synthetic peptide
  Seed: GMDPRMCSLMQGSTLPRRSGA
GMDPRMLSLLQPSTVPRRSGA

SEQ ID NO: 83658 - protein, 21 aa, Artificial Sequence
  Description of Artificial Sequence: Synthetic peptide
  Seed: GMDPRMCSLMQGSTLPRRSGA
GMDPRMLSLLQSSTAPRRSGA

SEQ ID NO: 83659 - protein, 21 aa, Artificial Sequence
  Description of Artificial Sequence: Synthetic peptide
  Seed: GMDPRMCSLMQGSTLPRRSGA
GMDPRMLSLLQSSTIPRRSGA

SEQ ID NO: 83660 - protein, 21 aa, Artificial Sequence
  Description of Artificial Sequence: Synthetic peptide
  Seed: GMDPRMCSLMQGSTLPRRSGA
GMDPRMLSLLQSSTLPRRSGA

SEQ ID NO: 83661 - protein, 21 aa, Artificial Sequence
  Description of Artificial Sequence: Synthetic peptide
  Seed: GMDPRMCSLMQGSTLPRRSGA
GMDPRMLSLLQSSTSPRRSGA

SEQ ID NO: 83662 - protein, 21 aa, Artificial Sequence
  Description of Artificial Sequence: Synthetic peptide
  Seed: GMDPRMCSLMQGSTLPRRSGA
GMDPRMLSLLQSSTTPRRSGA

SEQ ID NO: 83663 - protein, 21 aa, Artificial Sequence
  Description of Artificial Sequence: Synthetic peptide
  Seed: GMDPRMCSLMQGSTLPRRSGA
GMDPRMLSLLQSSTVPRRSGA

SEQ ID NO: 83664 - protein, 21 aa, Artificial Sequence
  Description of Artificial Sequence: Synthetic peptide
  Seed: GMDPRMCSLMQGSTLPRRSGA
GMDPRMLSLLQTSTAPRRSGA

SEQ ID NO: 83665 - protein, 21 aa, Artificial Sequence
  Description of Artificial Sequence: Synthetic peptide
  Seed: GMDPRMCSLMQGSTLPRRSGA
GMDPRMLSLLQTSTNPRRSGA

SEQ ID NO: 83666 - protein, 21 aa, Artificial Sequence
  Description of Artificial Sequence: Synthetic peptide
  Seed: GMDPRMCSLMQGSTLPRRSGA
GMDPRMLSLLQTSTVPRRSGA

SEQ ID NO: 83667 - protein, 21 aa, Artificial Sequence
  Description of Artificial Sequence: Synthetic peptide
  Seed: GMDPRMCSLMQGSTLPRRSGA
GMDPRMLSLLQVSTAPRRSGA

SEQ ID NO: 83668 - protein, 21 aa, Artificial Sequence
  Description of Artificial Sequence: Synthetic peptide
  Seed: GMDPRMCSLMQGSTLPRRSGA
GMDPRMLSLLQVSTNPRRSGA

SEQ ID NO: 83669 - protein, 21 aa, Artificial Sequence
  Description of Artificial Sequence: Synthetic peptide
  Seed: GMDPRMCSLMQGSTLPRRSGA
GMDPRMLSLLQVSTSPRRSGA

SEQ ID NO: 83670 - protein, 21 aa, Artificial Sequence
  Description of Artificial Sequence: Synthetic peptide
  Seed: GMDPRMCSLMQGSTLPRRSGA
GMDPRMLSLMQASTAPRRSGA

SEQ ID NO: 83671 - protein, 21 aa, Artificial Sequence
  Description of Artificial Sequence: Synthetic peptide
  Seed: GMDPRMCSLMQGSTLPRRSGA
GMDPRMLSLMQASTIPRRSGA

SEQ ID NO: 83672 - protein, 21 aa, Artificial Sequence
  Description of Artificial Sequence: Synthetic peptide
  Seed: GMDPRMCSLMQGSTLPRRSGA
GMDPRMLSLMQASTLPRRSGA

SEQ ID NO: 83673 - protein, 21 aa, Artificial Sequence
  Description of Artificial Sequence: Synthetic peptide
  Seed: GMDPRMCSLMQGSTLPRRSGA
GMDPRMLSLMQASTMPRRSGA

SEQ ID NO: 83674 - protein, 21 aa, Artificial Sequence
  Description of Artificial Sequence: Synthetic peptide
  Seed: GMDPRMCSLMQGSTLPRRSGA
GMDPRMLSLMQASTNPRRSGA

SEQ ID NO: 83675 - protein, 21 aa, Artificial Sequence
  Description of Artificial Sequence: Synthetic peptide
  Seed: GMDPRMCSLMQGSTLPRRSGA
GMDPRMLSLMQASTSPRRSGA

SEQ ID NO: 83676 - protein, 21 aa, Artificial Sequence
  Description of Artificial Sequence: Synthetic peptide
  Seed: GMDPRMCSLMQGSTLPRRSGA
GMDPRMLSLMQASTTPRRSGA

SEQ ID NO: 83677 - protein, 21 aa, Artificial Sequence
  Description of Artificial Sequence: Synthetic peptide
  Seed: GMDPRMCSLMQGSTLPRRSGA
GMDPRMLSLMQASTVPRRSGA

SEQ ID NO: 83678 - protein, 21 aa, Artificial Sequence
  Description of Artificial Sequence: Synthetic peptide
  Seed: GMDPRMCSLMQGSTLPRRSGA
GMDPRMLSLMQGSTAPRRSGA

SEQ ID NO: 83679 - protein, 21 aa, Artificial Sequence
  Description of Artificial Sequence: Synthetic peptide
  Seed: GMDPRMCSLMQGSTLPRRSGA
GMDPRMLSLMQGSTIPRRSGA

SEQ ID NO: 83680 - protein, 21 aa, Artificial Sequence
  Description of Artificial Sequence: Synthetic peptide
  Seed: GMDPRMCSLMQGSTLPRRSGA
GMDPRMLSLMQGSTLPRRSGA

SEQ ID NO: 83681 - protein, 21 aa, Artificial Sequence
  Description of Artificial Sequence: Synthetic peptide
  Seed: GMDPRMCSLMQGSTLPRRSGA
GMDPRMLSLMQGSTMPRRSGA

SEQ ID NO: 83682 - protein, 21 aa, Artificial Sequence
  Description of Artificial Sequence: Synthetic peptide
  Seed: GMDPRMCSLMQGSTLPRRSGA
GMDPRMLSLMQGSTSPRRSGA

SEQ ID NO: 83683 - protein, 21 aa, Artificial Sequence
  Description of Artificial Sequence: Synthetic peptide
  Seed: GMDPRMCSLMQGSTLPRRSGA
GMDPRMLSLMQGSTTPRRSGA

SEQ ID NO: 83684 - protein, 21 aa, Artificial Sequence
  Description of Artificial Sequence: Synthetic peptide
  Seed: GMDPRMCSLMQGSTLPRRSGA
GMDPRMLSLMQGSTVPRRSGA

SEQ ID NO: 83685 - protein, 21 aa, Artificial Sequence
  Description of Artificial Sequence: Synthetic peptide
  Seed: GMDPRMCSLMQGSTLPRRSGA
GMDPRMLSLMQISTAPRRSGA

SEQ ID NO: 83686 - protein, 21 aa, Artificial Sequence
  Description of Artificial Sequence: Synthetic peptide
  Seed: GMDPRMCSLMQGSTLPRRSGA
GMDPRMLSLMQPSTAPRRSGA

SEQ ID NO: 83687 - protein, 21 aa, Artificial Sequence
  Description of Artificial Sequence: Synthetic peptide
  Seed: GMDPRMCSLMQGSTLPRRSGA
GMDPRMLSLMQPSTIPRRSGA

SEQ ID NO: 83688 - protein, 21 aa, Artificial Sequence
  Description of Artificial Sequence: Synthetic peptide
  Seed: GMDPRMCSLMQGSTLPRRSGA
GMDPRMLSLMQPSTLPRRSGA

SEQ ID NO: 83689 - protein, 21 aa, Artificial Sequence
  Description of Artificial Sequence: Synthetic peptide
  Seed: GMDPRMCSLMQGSTLPRRSGA
GMDPRMLSLMQPSTNPRRSGA

SEQ ID NO: 83690 - protein, 21 aa, Artificial Sequence
  Description of Artificial Sequence: Synthetic peptide
  Seed: GMDPRMCSLMQGSTLPRRSGA
GMDPRMLSLMQPSTSPRRSGA

SEQ ID NO: 83691 - protein, 21 aa, Artificial Sequence
  Description of Artificial Sequence: Synthetic peptide
  Seed: GMDPRMCSLMQGSTLPRRSGA
GMDPRMLSLMQPSTVPRRSGA

SEQ ID NO: 83692 - protein, 21 aa, Artificial Sequence
  Description of Artificial Sequence: Synthetic peptide
  Seed: GMDPRMCSLMQGSTLPRRSGA
GMDPRMLSLMQSSTAPRRSGA

SEQ ID NO: 83693 - protein, 21 aa, Artificial Sequence
  Description of Artificial Sequence: Synthetic peptide
  Seed: GMDPRMCSLMQGSTLPRRSGA
GMDPRMLSLMQSSTIPRRSGA

SEQ ID NO: 83694 - protein, 21 aa, Artificial Sequence
  Description of Artificial Sequence: Synthetic peptide
  Seed: GMDPRMCSLMQGSTLPRRSGA
GMDPRMLSLMQSSTLPRRSGA

SEQ ID NO: 83695 - protein, 21 aa, Artificial Sequence
  Description of Artificial Sequence: Synthetic peptide
  Seed: GMDPRMCSLMQGSTLPRRSGA
GMDPRMLSLMQSSTSPRRSGA

SEQ ID NO: 83696 - protein, 21 aa, Artificial Sequence
  Description of Artificial Sequence: Synthetic peptide
  Seed: GMDPRMCSLMQGSTLPRRSGA
GMDPRMLSLMQSSTVPRRSGA

SEQ ID NO: 83697 - protein, 21 aa, Artificial Sequence
  Description of Artificial Sequence: Synthetic peptide
  Seed: GMDPRMCSLMQGSTLPRRSGA
GMDPRMLSLMQTSTAPRRSGA

SEQ ID NO: 83698 - protein, 21 aa, Artificial Sequence
  Description of Artificial Sequence: Synthetic peptide
  Seed: GMDPRMCSLMQGSTLPRRSGA
GMDPRMLSLMQTSTNPRRSGA

SEQ ID NO: 83699 - protein, 21 aa, Artificial Sequence
  Description of Artificial Sequence: Synthetic peptide
  Seed: GMDPRMCSLMQGSTLPRRSGA
GMDPRMLSLMQTSTVPRRSGA

SEQ ID NO: 83700 - protein, 21 aa, Artificial Sequence
  Description of Artificial Sequence: Synthetic peptide
  Seed: GMDPRMCSLMQGSTLPRRSGA
GMDPRMLSLMQVSTAPRRSGA

SEQ ID NO: 83701 - protein, 21 aa, Artificial Sequence
  Description of Artificial Sequence: Synthetic peptide
  Seed: GMDPRMCSLMQGSTLPRRSGA
GMDPRMLSLMQVSTNPRRSGA

SEQ ID NO: 83702 - protein, 21 aa, Artificial Sequence
  Description of Artificial Sequence: Synthetic peptide
  Seed: GMDPRMCSLMQGSTLPRRSGA
GMDPRMLSLMQVSTSPRRSGA

SEQ ID NO: 83703 - protein, 21 aa, Artificial Sequence
  Description of Artificial Sequence: Synthetic peptide
  Seed: GMDPRMCSLMQGSTLPRRSGA
GMDPRMLSLQQASTLPRRSGA

SEQ ID NO: 83704 - protein, 21 aa, Artificial Sequence
  Description of Artificial Sequence: Synthetic peptide
  Seed: GMDPRMCSLMQGSTLPRRSGA
GMDPRMLSLQQASTVPRRSGA

SEQ ID NO: 83705 - protein, 21 aa, Artificial Sequence
  Description of Artificial Sequence: Synthetic peptide
  Seed: GMDPRMCSLMQGSTLPRRSGA
GMDPRMMSLLQASTAPRRSGA

SEQ ID NO: 83706 - protein, 21 aa, Artificial Sequence
  Description of Artificial Sequence: Synthetic peptide
  Seed: GMDPRMCSLMQGSTLPRRSGA
GMDPRMMSLLQASTIPRRSGA

SEQ ID NO: 83707 - protein, 21 aa, Artificial Sequence
  Description of Artificial Sequence: Synthetic peptide
  Seed: GMDPRMCSLMQGSTLPRRSGA
GMDPRMMSLLQASTLPRRSGA

SEQ ID NO: 83708 - protein, 21 aa, Artificial Sequence
  Description of Artificial Sequence: Synthetic peptide
  Seed: GMDPRMCSLMQGSTLPRRSGA
GMDPRMMSLLQASTMPRRSGA

SEQ ID NO: 83709 - protein, 21 aa, Artificial Sequence
  Description of Artificial Sequence: Synthetic peptide
  Seed: GMDPRMCSLMQGSTLPRRSGA
GMDPRMMSLLQASTNPRRSGA

SEQ ID NO: 83710 - protein, 21 aa, Artificial Sequence
  Description of Artificial Sequence: Synthetic peptide
  Seed: GMDPRMCSLMQGSTLPRRSGA
GMDPRMMSLLQASTSPRRSGA

SEQ ID NO: 83711 - protein, 21 aa, Artificial Sequence
  Description of Artificial Sequence: Synthetic peptide
  Seed: GMDPRMCSLMQGSTLPRRSGA
GMDPRMMSLLQASTTPRRSGA

SEQ ID NO: 83712 - protein, 21 aa, Artificial Sequence
  Description of Artificial Sequence: Synthetic peptide
  Seed: GMDPRMCSLMQGSTLPRRSGA
GMDPRMMSLLQASTVPRRSGA

SEQ ID NO: 83713 - protein, 21 aa, Artificial Sequence
  Description of Artificial Sequence: Synthetic peptide
  Seed: GMDPRMCSLMQGSTLPRRSGA
GMDPRMMSLLQGSTAPRRSGA

SEQ ID NO: 83714 - protein, 21 aa, Artificial Sequence
  Description of Artificial Sequence: Synthetic peptide
  Seed: GMDPRMCSLMQGSTLPRRSGA
GMDPRMMSLLQGSTIPRRSGA

SEQ ID NO: 83715 - protein, 21 aa, Artificial Sequence
  Description of Artificial Sequence: Synthetic peptide
  Seed: GMDPRMCSLMQGSTLPRRSGA
GMDPRMMSLLQGSTLPRRSGA

SEQ ID NO: 83716 - protein, 21 aa, Artificial Sequence
  Description of Artificial Sequence: Synthetic peptide
  Seed: GMDPRMCSLMQGSTLPRRSGA
GMDPRMMSLLQGSTVPRRSGA

SEQ ID NO: 83717 - protein, 21 aa, Artificial Sequence
  Description of Artificial Sequence: Synthetic peptide
  Seed: GMDPRMCSLMQGSTLPRRSGA
GMDPRMMSLLQPSTAPRRSGA

SEQ ID NO: 83718 - protein, 21 aa, Artificial Sequence
  Description of Artificial Sequence: Synthetic peptide
  Seed: GMDPRMCSLMQGSTLPRRSGA
GMDPRMMSLLQPSTVPRRSGA

SEQ ID NO: 83719 - protein, 21 aa, Artificial Sequence
  Description of Artificial Sequence: Synthetic peptide
  Seed: GMDPRMCSLMQGSTLPRRSGA
GMDPRMMSLLQSSTAPRRSGA

SEQ ID NO: 83720 - protein, 21 aa, Artificial Sequence
  Description of Artificial Sequence: Synthetic peptide
  Seed: GMDPRMCSLMQGSTLPRRSGA
GMDPRMMSLLQSSTIPRRSGA

SEQ ID NO: 83721 - protein, 21 aa, Artificial Sequence
  Description of Artificial Sequence: Synthetic peptide
  Seed: GMDPRMCSLMQGSTLPRRSGA
GMDPRMMSLLQSSTLPRRSGA

SEQ ID NO: 83722 - protein, 21 aa, Artificial Sequence
  Description of Artificial Sequence: Synthetic peptide
  Seed: GMDPRMCSLMQGSTLPRRSGA
GMDPRMMSLLQSSTVPRRSGA

SEQ ID NO: 83723 - protein, 21 aa, Artificial Sequence
  Description of Artificial Sequence: Synthetic peptide
  Seed: GMDPRMCSLMQGSTLPRRSGA
GMDPRMMSLMQASTAPRRSGA

SEQ ID NO: 83724 - protein, 21 aa, Artificial Sequence
  Description of Artificial Sequence: Synthetic peptide
  Seed: GMDPRMCSLMQGSTLPRRSGA
GMDPRMMSLMQASTIPRRSGA

SEQ ID NO: 83725 - protein, 21 aa, Artificial Sequence
  Description of Artificial Sequence: Synthetic peptide
  Seed: GMDPRMCSLMQGSTLPRRSGA
GMDPRMMSLMQASTLPRRSGA

SEQ ID NO: 83726 - protein, 21 aa, Artificial Sequence
  Description of Artificial Sequence: Synthetic peptide
  Seed: GMDPRMCSLMQGSTLPRRSGA
GMDPRMMSLMQASTMPRRSGA

SEQ ID NO: 83727 - protein, 21 aa, Artificial Sequence
  Description of Artificial Sequence: Synthetic peptide
  Seed: GMDPRMCSLMQGSTLPRRSGA
GMDPRMMSLMQASTNPRRSGA

SEQ ID NO: 83728 - protein, 21 aa, Artificial Sequence
  Description of Artificial Sequence: Synthetic peptide
  Seed: GMDPRMCSLMQGSTLPRRSGA
GMDPRMMSLMQASTSPRRSGA

SEQ ID NO: 83729 - protein, 21 aa, Artificial Sequence
  Description of Artificial Sequence: Synthetic peptide
  Seed: GMDPRMCSLMQGSTLPRRSGA
GMDPRMMSLMQASTTPRRSGA

SEQ ID NO: 83730 - protein, 21 aa, Artificial Sequence
  Description of Artificial Sequence: Synthetic peptide
  Seed: GMDPRMCSLMQGSTLPRRSGA
GMDPRMMSLMQASTVPRRSGA

SEQ ID NO: 83731 - protein, 21 aa, Artificial Sequence
  Description of Artificial Sequence: Synthetic peptide
  Seed: GMDPRMCSLMQGSTLPRRSGA
GMDPRMMSLMQGSTAPRRSGA

SEQ ID NO: 83732 - protein, 21 aa, Artificial Sequence
  Description of Artificial Sequence: Synthetic peptide
  Seed: GMDPRMCSLMQGSTLPRRSGA
GMDPRMMSLMQGSTIPRRSGA

SEQ ID NO: 83733 - protein, 21 aa, Artificial Sequence
  Description of Artificial Sequence: Synthetic peptide
  Seed: GMDPRMCSLMQGSTLPRRSGA
GMDPRMMSLMQGSTLPRRSGA

SEQ ID NO: 83734 - protein, 21 aa, Artificial Sequence
  Description of Artificial Sequence: Synthetic peptide
  Seed: GMDPRMCSLMQGSTLPRRSGA
GMDPRMMSLMQGSTVPRRSGA

SEQ ID NO: 83735 - protein, 21 aa, Artificial Sequence
  Description of Artificial Sequence: Synthetic peptide
  Seed: GMDPRMCSLMQGSTLPRRSGA
GMDPRMMSLMQPSTAPRRSGA

SEQ ID NO: 83736 - protein, 21 aa, Artificial Sequence
  Description of Artificial Sequence: Synthetic peptide
  Seed: GMDPRMCSLMQGSTLPRRSGA
GMDPRMMSLMQPSTVPRRSGA

SEQ ID NO: 83737 - protein, 21 aa, Artificial Sequence
  Description of Artificial Sequence: Synthetic peptide
  Seed: GMDPRMCSLMQGSTLPRRSGA
GMDPRMMSLMQSSTIPRRSGA

SEQ ID NO: 83738 - protein, 21 aa, Artificial Sequence
  Description of Artificial Sequence: Synthetic peptide
  Seed: GMDPRMCSLMQGSTLPRRSGA
GMDPRMMSLMQSSTLPRRSGA

SEQ ID NO: 83739 - protein, 21 aa, Artificial Sequence
  Description of Artificial Sequence: Synthetic peptide
  Seed: GMDPRMCSLMQGSTLPRRSGA
GMDPRMMSLMQSSTVPRRSGA

SEQ ID NO: 83740 - protein, 21 aa, Artificial Sequence
  Description of Artificial Sequence: Synthetic peptide
  Seed: GMDPRMCSLMQGSTLPRRSGA
GMDPRMMSLMQVSTAPRRSGA

SEQ ID NO: 83741 - protein, 21 aa, Artificial Sequence
  Description of Artificial Sequence: Synthetic peptide
  Seed: GMDPRMCSLMQGSTLPRRSGA
GMDPRMVSLLQASTAPRRSGA

SEQ ID NO: 83742 - protein, 21 aa, Artificial Sequence
  Description of Artificial Sequence: Synthetic peptide
  Seed: GMDPRMCSLMQGSTLPRRSGA
GMDPRMVSLLQASTIPRRSGA

SEQ ID NO: 83743 - protein, 21 aa, Artificial Sequence
  Description of Artificial Sequence: Synthetic peptide
  Seed: GMDPRMCSLMQGSTLPRRSGA
GMDPRMVSLLQASTLPRRSGA

SEQ ID NO: 83744 - protein, 21 aa, Artificial Sequence
  Description of Artificial Sequence: Synthetic peptide
  Seed: GMDPRMCSLMQGSTLPRRSGA
GMDPRMVSLLQASTMPRRSGA

SEQ ID NO: 83745 - protein, 21 aa, Artificial Sequence
  Description of Artificial Sequence: Synthetic peptide
  Seed: GMDPRMCSLMQGSTLPRRSGA
GMDPRMVSLLQASTTPRRSGA

SEQ ID NO: 83746 - protein, 21 aa, Artificial Sequence
  Description of Artificial Sequence: Synthetic peptide
  Seed: GMDPRMCSLMQGSTLPRRSGA
GMDPRMVSLLQASTVPRRSGA

SEQ ID NO: 83747 - protein, 21 aa, Artificial Sequence
  Description of Artificial Sequence: Synthetic peptide
  Seed: GMDPRMCSLMQGSTLPRRSGA
GMDPRMVSLLQGSTAPRRSGA

SEQ ID NO: 83748 - protein, 21 aa, Artificial Sequence
  Description of Artificial Sequence: Synthetic peptide
  Seed: GMDPRMCSLMQGSTLPRRSGA
GMDPRMVSLLQGSTIPRRSGA

SEQ ID NO: 83749 - protein, 21 aa, Artificial Sequence
  Description of Artificial Sequence: Synthetic peptide
  Seed: GMDPRMCSLMQGSTLPRRSGA
GMDPRMVSLLQGSTLPRRSGA

SEQ ID NO: 83750 - protein, 21 aa, Artificial Sequence
  Description of Artificial Sequence: Synthetic peptide
  Seed: GMDPRMCSLMQGSTLPRRSGA
GMDPRMVSLLQGSTVPRRSGA

SEQ ID NO: 83751 - protein, 21 aa, Artificial Sequence
  Description of Artificial Sequence: Synthetic peptide
  Seed: GMDPRMCSLMQGSTLPRRSGA
GMDPRMVSLLQPSTIPRRSGA

SEQ ID NO: 83752 - protein, 21 aa, Artificial Sequence
  Description of Artificial Sequence: Synthetic peptide
  Seed: GMDPRMCSLMQGSTLPRRSGA
GMDPRMVSLLQPSTLPRRSGA

SEQ ID NO: 83753 - protein, 21 aa, Artificial Sequence
  Description of Artificial Sequence: Synthetic peptide
  Seed: GMDPRMCSLMQGSTLPRRSGA
GMDPRMVSLLQPSTVPRRSGA

SEQ ID NO: 83754 - protein, 21 aa, Artificial Sequence
  Description of Artificial Sequence: Synthetic peptide
  Seed: GMDPRMCSLMQGSTLPRRSGA
GMDPRMVSLLQSSTAPRRSGA

SEQ ID NO: 83755 - protein, 21 aa, Artificial Sequence
  Description of Artificial Sequence: Synthetic peptide
  Seed: GMDPRMCSLMQGSTLPRRSGA
GMDPRMVSLLQSSTIPRRSGA

SEQ ID NO: 83756 - protein, 21 aa, Artificial Sequence
  Description of Artificial Sequence: Synthetic peptide
  Seed: GMDPRMCSLMQGSTLPRRSGA
GMDPRMVSLLQSSTLPRRSGA

SEQ ID NO: 83757 - protein, 21 aa, Artificial Sequence
  Description of Artificial Sequence: Synthetic peptide
  Seed: GMDPRMCSLMQGSTLPRRSGA
GMDPRMVSLLQSSTVPRRSGA

SEQ ID NO: 83758 - protein, 21 aa, Artificial Sequence
  Description of Artificial Sequence: Synthetic peptide
  Seed: GMDPRMCSLMQGSTLPRRSGA
GMDPRMVSLMQASTAPRRSGA

SEQ ID NO: 83759 - protein, 21 aa, Artificial Sequence
  Description of Artificial Sequence: Synthetic peptide
  Seed: GMDPRMCSLMQGSTLPRRSGA
GMDPRMVSLMQASTIPRRSGA

SEQ ID NO: 83760 - protein, 21 aa, Artificial Sequence
  Description of Artificial Sequence: Synthetic peptide
  Seed: GMDPRMCSLMQGSTLPRRSGA
GMDPRMVSLMQASTLPRRSGA

SEQ ID NO: 83761 - protein, 21 aa, Artificial Sequence
  Description of Artificial Sequence: Synthetic peptide
  Seed: GMDPRMCSLMQGSTLPRRSGA
GMDPRMVSLMQASTMPRRSGA

SEQ ID NO: 83762 - protein, 21 aa, Artificial Sequence
  Description of Artificial Sequence: Synthetic peptide
  Seed: GMDPRMCSLMQGSTLPRRSGA
GMDPRMVSLMQASTVPRRSGA

SEQ ID NO: 83763 - protein, 21 aa, Artificial Sequence
  Description of Artificial Sequence: Synthetic peptide
  Seed: GMDPRMCSLMQGSTLPRRSGA
GMDPRMVSLMQGSTAPRRSGA

SEQ ID NO: 83764 - protein, 21 aa, Artificial Sequence
  Description of Artificial Sequence: Synthetic peptide
  Seed: GMDPRMCSLMQGSTLPRRSGA
GMDPRMVSLMQGSTIPRRSGA

SEQ ID NO: 83765 - protein, 21 aa, Artificial Sequence
  Description of Artificial Sequence: Synthetic peptide
  Seed: GMDPRMCSLMQGSTLPRRSGA
GMDPRMVSLMQGSTLPRRSGA

SEQ ID NO: 83766 - protein, 21 aa, Artificial Sequence
  Description of Artificial Sequence: Synthetic peptide
  Seed: GMDPRMCSLMQGSTLPRRSGA
GMDPRMVSLMQGSTVPRRSGA

SEQ ID NO: 83767 - protein, 21 aa, Artificial Sequence
  Description of Artificial Sequence: Synthetic peptide
  Seed: GMDPRMCSLMQGSTLPRRSGA
GMDPRMVSLMQPSTIPRRSGA

SEQ ID NO: 83768 - protein, 21 aa, Artificial Sequence
  Description of Artificial Sequence: Synthetic peptide
  Seed: GMDPRMCSLMQGSTLPRRSGA
GMDPRMVSLMQPSTLPRRSGA

SEQ ID NO: 83769 - protein, 21 aa, Artificial Sequence
  Description of Artificial Sequence: Synthetic peptide
  Seed: GMDPRMCSLMQGSTLPRRSGA
GMDPRMVSLMQPSTVPRRSGA

SEQ ID NO: 83770 - protein, 21 aa, Artificial Sequence
  Description of Artificial Sequence: Synthetic peptide
  Seed: GMDPRMCSLMQGSTLPRRSGA
GMDPRMVSLMQSSTIPRRSGA

SEQ ID NO: 83771 - protein, 21 aa, Artificial Sequence
  Description of Artificial Sequence: Synthetic peptide
  Seed: GMDPRMCSLMQGSTLPRRSGA
GMDPRMVSLMQSSTLPRRSGA

SEQ ID NO: 83772 - protein, 21 aa, Artificial Sequence
  Description of Artificial Sequence: Synthetic peptide
  Seed: GMDPRMCSLMQGSTLPRRSGA
GMDPRMVSLMQSSTVPRRSGA

SEQ ID NO: 83773 - protein, 21 aa, Artificial Sequence
  Description of Artificial Sequence: Synthetic peptide
  Seed: GMDPRMCSLMQGSTLPRRSGA
GMDPRMWSLAQASTAPRRSGA

SEQ ID NO: 83774 - protein, 21 aa, Artificial Sequence
  Description of Artificial Sequence: Synthetic peptide
  Seed: GMDPRMCSLMQGSTLPRRSGA
GMDPRMWSLAQASTIPRRSGA

SEQ ID NO: 83775 - protein, 21 aa, Artificial Sequence
  Description of Artificial Sequence: Synthetic peptide
  Seed: GMDPRMCSLMQGSTLPRRSGA
GMDPRMWSLAQASTLPRRSGA

SEQ ID NO: 83776 - protein, 21 aa, Artificial Sequence
  Description of Artificial Sequence: Synthetic peptide
  Seed: GMDPRMCSLMQGSTLPRRSGA
GMDPRMWSLAQASTMPRRSGA

SEQ ID NO: 83777 - protein, 21 aa, Artificial Sequence
  Description of Artificial Sequence: Synthetic peptide
  Seed: GMDPRMCSLMQGSTLPRRSGA
GMDPRMWSLAQASTNPRRSGA

SEQ ID NO: 83778 - protein, 21 aa, Artificial Sequence
  Description of Artificial Sequence: Synthetic peptide
  Seed: GMDPRMCSLMQGSTLPRRSGA
GMDPRMWSLAQASTSPRRSGA

SEQ ID NO: 83779 - protein, 21 aa, Artificial Sequence
  Description of Artificial Sequence: Synthetic peptide
  Seed: GMDPRMCSLMQGSTLPRRSGA
GMDPRMWSLAQASTVPRRSGA

SEQ ID NO: 83780 - protein, 21 aa, Artificial Sequence
  Description of Artificial Sequence: Synthetic peptide
  Seed: GMDPRMCSLMQGSTLPRRSGA
GMDPRMWSLAQGSTAPRRSGA

SEQ ID NO: 83781 - protein, 21 aa, Artificial Sequence
  Description of Artificial Sequence: Synthetic peptide
  Seed: GMDPRMCSLMQGSTLPRRSGA
GMDPRMWSLAQGSTIPRRSGA

SEQ ID NO: 83782 - protein, 21 aa, Artificial Sequence
  Description of Artificial Sequence: Synthetic peptide
  Seed: GMDPRMCSLMQGSTLPRRSGA
GMDPRMWSLAQGSTLPRRSGA

SEQ ID NO: 83783 - protein, 21 aa, Artificial Sequence
  Description of Artificial Sequence: Synthetic peptide
  Seed: GMDPRMCSLMQGSTLPRRSGA
GMDPRMWSLAQGSTVPRRSGA

SEQ ID NO: 83784 - protein, 21 aa, Artificial Sequence
  Description of Artificial Sequence: Synthetic peptide
  Seed: GMDPRMCSLMQGSTLPRRSGA
GMDPRMWSLAQSSTIPRRSGA

SEQ ID NO: 83785 - protein, 21 aa, Artificial Sequence
  Description of Artificial Sequence: Synthetic peptide
  Seed: GMDPRMCSLMQGSTLPRRSGA
GMDPRMWSLAQSSTLPRRSGA

SEQ ID NO: 83786 - protein, 21 aa, Artificial Sequence
  Description of Artificial Sequence: Synthetic peptide
  Seed: GMDPRMCSLMQGSTLPRRSGA
GMDPRMWSLAQSSTVPRRSGA

SEQ ID NO: 83787 - protein, 21 aa, Artificial Sequence
  Description of Artificial Sequence: Synthetic peptide
  Seed: GMDPRMCSLMQGSTLPRRSGA
GMDPRMWSLIQASTAPRRSGA

SEQ ID NO: 83788 - protein, 21 aa, Artificial Sequence
  Description of Artificial Sequence: Synthetic peptide
  Seed: GMDPRMCSLMQGSTLPRRSGA
GMDPRMWSLIQASTIPRRSGA

SEQ ID NO: 83789 - protein, 21 aa, Artificial Sequence
  Description of Artificial Sequence: Synthetic peptide
  Seed: GMDPRMCSLMQGSTLPRRSGA
GMDPRMWSLIQASTLPRRSGA

SEQ ID NO: 83790 - protein, 21 aa, Artificial Sequence
  Description of Artificial Sequence: Synthetic peptide
  Seed: GMDPRMCSLMQGSTLPRRSGA
GMDPRMWSLIQASTMPRRSGA

SEQ ID NO: 83791 - protein, 21 aa, Artificial Sequence
  Description of Artificial Sequence: Synthetic peptide
  Seed: GMDPRMCSLMQGSTLPRRSGA
GMDPRMWSLIQASTNPRRSGA

SEQ ID NO: 83792 - protein, 21 aa, Artificial Sequence
  Description of Artificial Sequence: Synthetic peptide
  Seed: GMDPRMCSLMQGSTLPRRSGA
GMDPRMWSLIQASTSPRRSGA

SEQ ID NO: 83793 - protein, 21 aa, Artificial Sequence
  Description of Artificial Sequence: Synthetic peptide
  Seed: GMDPRMCSLMQGSTLPRRSGA
GMDPRMWSLIQASTTPRRSGA

SEQ ID NO: 83794 - protein, 21 aa, Artificial Sequence
  Description of Artificial Sequence: Synthetic peptide
  Seed: GMDPRMCSLMQGSTLPRRSGA
GMDPRMWSLIQASTVPRRSGA

SEQ ID NO: 83795 - protein, 21 aa, Artificial Sequence
  Description of Artificial Sequence: Synthetic peptide
  Seed: GMDPRMCSLMQGSTLPRRSGA
GMDPRMWSLIQGSTAPRRSGA

SEQ ID NO: 83796 - protein, 21 aa, Artificial Sequence
  Description of Artificial Sequence: Synthetic peptide
  Seed: GMDPRMCSLMQGSTLPRRSGA
GMDPRMWSLIQGSTIPRRSGA

SEQ ID NO: 83797 - protein, 21 aa, Artificial Sequence
  Description of Artificial Sequence: Synthetic peptide
  Seed: GMDPRMCSLMQGSTLPRRSGA
GMDPRMWSLIQGSTLPRRSGA

SEQ ID NO: 83798 - protein, 21 aa, Artificial Sequence
  Description of Artificial Sequence: Synthetic peptide
  Seed: GMDPRMCSLMQGSTLPRRSGA
GMDPRMWSLIQGSTVPRRSGA

SEQ ID NO: 83799 - protein, 21 aa, Artificial Sequence
  Description of Artificial Sequence: Synthetic peptide
  Seed: GMDPRMCSLMQGSTLPRRSGA
GMDPRMWSLIQISTAPRRSGA

SEQ ID NO: 83800 - protein, 21 aa, Artificial Sequence
  Description of Artificial Sequence: Synthetic peptide
  Seed: GMDPRMCSLMQGSTLPRRSGA
GMDPRMWSLIQPSTAPRRSGA

SEQ ID NO: 83801 - protein, 21 aa, Artificial Sequence
  Description of Artificial Sequence: Synthetic peptide
  Seed: GMDPRMCSLMQGSTLPRRSGA
GMDPRMWSLIQPSTIPRRSGA

SEQ ID NO: 83802 - protein, 21 aa, Artificial Sequence
  Description of Artificial Sequence: Synthetic peptide
  Seed: GMDPRMCSLMQGSTLPRRSGA
GMDPRMWSLIQPSTLPRRSGA

SEQ ID NO: 83803 - protein, 21 aa, Artificial Sequence
  Description of Artificial Sequence: Synthetic peptide
  Seed: GMDPRMCSLMQGSTLPRRSGA
GMDPRMWSLIQPSTNPRRSGA

SEQ ID NO: 83804 - protein, 21 aa, Artificial Sequence
  Description of Artificial Sequence: Synthetic peptide
  Seed: GMDPRMCSLMQGSTLPRRSGA
GMDPRMWSLIQPSTSPRRSGA

SEQ ID NO: 83805 - protein, 21 aa, Artificial Sequence
  Description of Artificial Sequence: Synthetic peptide
  Seed: GMDPRMCSLMQGSTLPRRSGA
GMDPRMWSLIQPSTVPRRSGA

SEQ ID NO: 83806 - protein, 21 aa, Artificial Sequence
  Description of Artificial Sequence: Synthetic peptide
  Seed: GMDPRMCSLMQGSTLPRRSGA
GMDPRMWSLIQSSTAPRRSGA

SEQ ID NO: 83807 - protein, 21 aa, Artificial Sequence
  Description of Artificial Sequence: Synthetic peptide
  Seed: GMDPRMCSLMQGSTLPRRSGA
GMDPRMWSLIQSSTIPRRSGA

SEQ ID NO: 83808 - protein, 21 aa, Artificial Sequence
  Description of Artificial Sequence: Synthetic peptide
  Seed: GMDPRMCSLMQGSTLPRRSGA
GMDPRMWSLIQSSTLPRRSGA

SEQ ID NO: 83809 - protein, 21 aa, Artificial Sequence
  Description of Artificial Sequence: Synthetic peptide
  Seed: GMDPRMCSLMQGSTLPRRSGA
GMDPRMWSLIQSSTNPRRSGA

SEQ ID NO: 83810 - protein, 21 aa, Artificial Sequence
  Description of Artificial Sequence: Synthetic peptide
  Seed: GMDPRMCSLMQGSTLPRRSGA
GMDPRMWSLIQSSTSPRRSGA

SEQ ID NO: 83811 - protein, 21 aa, Artificial Sequence
  Description of Artificial Sequence: Synthetic peptide
  Seed: GMDPRMCSLMQGSTLPRRSGA
GMDPRMWSLIQSSTVPRRSGA

SEQ ID NO: 83812 - protein, 21 aa, Artificial Sequence
  Description of Artificial Sequence: Synthetic peptide
  Seed: GMDPRMCSLMQGSTLPRRSGA
GMDPRMWSLIQTSTAPRRSGA

SEQ ID NO: 83813 - protein, 21 aa, Artificial Sequence
  Description of Artificial Sequence: Synthetic peptide
  Seed: GMDPRMCSLMQGSTLPRRSGA
GMDPRMWSLIQTSTNPRRSGA

SEQ ID NO: 83814 - protein, 21 aa, Artificial Sequence
  Description of Artificial Sequence: Synthetic peptide
  Seed: GMDPRMCSLMQGSTLPRRSGA
GMDPRMWSLIQTSTSPRRSGA

SEQ ID NO: 83815 - protein, 21 aa, Artificial Sequence
  Description of Artificial Sequence: Synthetic peptide
  Seed: GMDPRMCSLMQGSTLPRRSGA
GMDPRMWSLIQVSTAPRRSGA

SEQ ID NO: 83816 - protein, 21 aa, Artificial Sequence
  Description of Artificial Sequence: Synthetic peptide
  Seed: GMDPRMCSLMQGSTLPRRSGA
GMDPRMWSLIQVSTNPRRSGA

SEQ ID NO: 83817 - protein, 21 aa, Artificial Sequence
  Description of Artificial Sequence: Synthetic peptide
  Seed: GMDPRMCSLMQGSTLPRRSGA
GMDPRMWSLIQVSTSPRRSGA

SEQ ID NO: 83818 - protein, 21 aa, Artificial Sequence
  Description of Artificial Sequence: Synthetic peptide
  Seed: GMDPRMCSLMQGSTLPRRSGA
GMDPRMWSLLQASTAPRRSGA

SEQ ID NO: 83819 - protein, 21 aa, Artificial Sequence
  Description of Artificial Sequence: Synthetic peptide
  Seed: GMDPRMCSLMQGSTLPRRSGA
GMDPRMWSLLQASTGPRRSGA

SEQ ID NO: 83820 - protein, 21 aa, Artificial Sequence
  Description of Artificial Sequence: Synthetic peptide
  Seed: GMDPRMCSLMQGSTLPRRSGA
GMDPRMWSLLQASTIPRRSGA

SEQ ID NO: 83821 - protein, 21 aa, Artificial Sequence
  Description of Artificial Sequence: Synthetic peptide
  Seed: GMDPRMCSLMQGSTLPRRSGA
GMDPRMWSLLQASTLPRRSGA

SEQ ID NO: 83822 - protein, 21 aa, Artificial Sequence
  Description of Artificial Sequence: Synthetic peptide
  Seed: GMDPRMCSLMQGSTLPRRSGA
GMDPRMWSLLQASTMPRRSGA

SEQ ID NO: 83823 - protein, 21 aa, Artificial Sequence
  Description of Artificial Sequence: Synthetic peptide
  Seed: GMDPRMCSLMQGSTLPRRSGA
GMDPRMWSLLQASTNPRRSGA

SEQ ID NO: 83824 - protein, 21 aa, Artificial Sequence
  Description of Artificial Sequence: Synthetic peptide
  Seed: GMDPRMCSLMQGSTLPRRSGA
GMDPRMWSLLQASTSPRRSGA

SEQ ID NO: 83825 - protein, 21 aa, Artificial Sequence
  Description of Artificial Sequence: Synthetic peptide
  Seed: GMDPRMCSLMQGSTLPRRSGA
GMDPRMWSLLQASTTPRRSGA

SEQ ID NO: 83826 - protein, 21 aa, Artificial Sequence
  Description of Artificial Sequence: Synthetic peptide
  Seed: GMDPRMCSLMQGSTLPRRSGA
GMDPRMWSLLQASTVPRRSGA

SEQ ID NO: 83827 - protein, 21 aa, Artificial Sequence
  Description of Artificial Sequence: Synthetic peptide
  Seed: GMDPRMCSLMQGSTLPRRSGA
GMDPRMWSLLQGSTAPRRSGA

SEQ ID NO: 83828 - protein, 21 aa, Artificial Sequence
  Description of Artificial Sequence: Synthetic peptide
  Seed: GMDPRMCSLMQGSTLPRRSGA
GMDPRMWSLLQGSTGPRRSGA

SEQ ID NO: 83829 - protein, 21 aa, Artificial Sequence
  Description of Artificial Sequence: Synthetic peptide
  Seed: GMDPRMCSLMQGSTLPRRSGA
GMDPRMWSLLQGSTIPRRSGA

SEQ ID NO: 83830 - protein, 21 aa, Artificial Sequence
  Description of Artificial Sequence: Synthetic peptide
  Seed: GMDPRMCSLMQGSTLPRRSGA
GMDPRMWSLLQGSTLPRRSGA

SEQ ID NO: 83831 - protein, 21 aa, Artificial Sequence
  Description of Artificial Sequence: Synthetic peptide
  Seed: GMDPRMCSLMQGSTLPRRSGA
GMDPRMWSLLQGSTMPRRSGA

SEQ ID NO: 83832 - protein, 21 aa, Artificial Sequence
  Description of Artificial Sequence: Synthetic peptide
  Seed: GMDPRMCSLMQGSTLPRRSGA
GMDPRMWSLLQGSTSPRRSGA

SEQ ID NO: 83833 - protein, 21 aa, Artificial Sequence
  Description of Artificial Sequence: Synthetic peptide
  Seed: GMDPRMCSLMQGSTLPRRSGA
GMDPRMWSLLQGSTTPRRSGA

SEQ ID NO: 83834 - protein, 21 aa, Artificial Sequence
  Description of Artificial Sequence: Synthetic peptide
  Seed: GMDPRMCSLMQGSTLPRRSGA
GMDPRMWSLLQGSTVPRRSGA

SEQ ID NO: 83835 - protein, 21 aa, Artificial Sequence
  Description of Artificial Sequence: Synthetic peptide
  Seed: GMDPRMCSLMQGSTLPRRSGA
GMDPRMWSLLQISTAPRRSGA

SEQ ID NO: 83836 - protein, 21 aa, Artificial Sequence
  Description of Artificial Sequence: Synthetic peptide
  Seed: GMDPRMCSLMQGSTLPRRSGA
GMDPRMWSLLQISTNPRRSGA

SEQ ID NO: 83837 - protein, 21 aa, Artificial Sequence
  Description of Artificial Sequence: Synthetic peptide
  Seed: GMDPRMCSLMQGSTLPRRSGA
GMDPRMWSLLQISTSPRRSGA

SEQ ID NO: 83838 - protein, 21 aa, Artificial Sequence
  Description of Artificial Sequence: Synthetic peptide
  Seed: GMDPRMCSLMQGSTLPRRSGA
GMDPRMWSLLQNSTAPRRSGA

SEQ ID NO: 83839 - protein, 21 aa, Artificial Sequence
  Description of Artificial Sequence: Synthetic peptide
  Seed: GMDPRMCSLMQGSTLPRRSGA
GMDPRMWSLLQNSTIPRRSGA

SEQ ID NO: 83840 - protein, 21 aa, Artificial Sequence
  Description of Artificial Sequence: Synthetic peptide
  Seed: GMDPRMCSLMQGSTLPRRSGA
GMDPRMWSLLQNSTLPRRSGA

SEQ ID NO: 83841 - protein, 21 aa, Artificial Sequence
  Description of Artificial Sequence: Synthetic peptide
  Seed: GMDPRMCSLMQGSTLPRRSGA
GMDPRMWSLLQNSTVPRRSGA

SEQ ID NO: 83842 - protein, 21 aa, Artificial Sequence
  Description of Artificial Sequence: Synthetic peptide
  Seed: GMDPRMCSLMQGSTLPRRSGA
GMDPRMWSLLQPSTAPRRSGA

SEQ ID NO: 83843 - protein, 21 aa, Artificial Sequence
  Description of Artificial Sequence: Synthetic peptide
  Seed: GMDPRMCSLMQGSTLPRRSGA
GMDPRMWSLLQPSTIPRRSGA

SEQ ID NO: 83844 - protein, 21 aa, Artificial Sequence
  Description of Artificial Sequence: Synthetic peptide
  Seed: GMDPRMCSLMQGSTLPRRSGA
GMDPRMWSLLQPSTLPRRSGA

SEQ ID NO: 83845 - protein, 21 aa, Artificial Sequence
  Description of Artificial Sequence: Synthetic peptide
  Seed: GMDPRMCSLMQGSTLPRRSGA
GMDPRMWSLLQPSTMPRRSGA

SEQ ID NO: 83846 - protein, 21 aa, Artificial Sequence
  Description of Artificial Sequence: Synthetic peptide
  Seed: GMDPRMCSLMQGSTLPRRSGA
GMDPRMWSLLQPSTNPRRSGA

SEQ ID NO: 83847 - protein, 21 aa, Artificial Sequence
  Description of Artificial Sequence: Synthetic peptide
  Seed: GMDPRMCSLMQGSTLPRRSGA
GMDPRMWSLLQPSTSPRRSGA

SEQ ID NO: 83848 - protein, 21 aa, Artificial Sequence
  Description of Artificial Sequence: Synthetic peptide
  Seed: GMDPRMCSLMQGSTLPRRSGA
GMDPRMWSLLQPSTTPRRSGA

SEQ ID NO: 83849 - protein, 21 aa, Artificial Sequence
  Description of Artificial Sequence: Synthetic peptide
  Seed: GMDPRMCSLMQGSTLPRRSGA
GMDPRMWSLLQPSTVPRRSGA

SEQ ID NO: 83850 - protein, 21 aa, Artificial Sequence
  Description of Artificial Sequence: Synthetic peptide
  Seed: GMDPRMCSLMQGSTLPRRSGA
GMDPRMWSLLQSSTAPRRSGA

SEQ ID NO: 83851 - protein, 21 aa, Artificial Sequence
  Description of Artificial Sequence: Synthetic peptide
  Seed: GMDPRMCSLMQGSTLPRRSGA
GMDPRMWSLLQSSTIPRRSGA

SEQ ID NO: 83852 - protein, 21 aa, Artificial Sequence
  Description of Artificial Sequence: Synthetic peptide
  Seed: GMDPRMCSLMQGSTLPRRSGA
GMDPRMWSLLQSSTLPRRSGA

SEQ ID NO: 83853 - protein, 21 aa, Artificial Sequence
  Description of Artificial Sequence: Synthetic peptide
  Seed: GMDPRMCSLMQGSTLPRRSGA
GMDPRMWSLLQSSTMPRRSGA

SEQ ID NO: 83854 - protein, 21 aa, Artificial Sequence
  Description of Artificial Sequence: Synthetic peptide
  Seed: GMDPRMCSLMQGSTLPRRSGA
GMDPRMWSLLQSSTNPRRSGA

SEQ ID NO: 83855 - protein, 21 aa, Artificial Sequence
  Description of Artificial Sequence: Synthetic peptide
  Seed: GMDPRMCSLMQGSTLPRRSGA
GMDPRMWSLLQSSTSPRRSGA

SEQ ID NO: 83856 - protein, 21 aa, Artificial Sequence
  Description of Artificial Sequence: Synthetic peptide
  Seed: GMDPRMCSLMQGSTLPRRSGA
GMDPRMWSLLQSSTTPRRSGA

SEQ ID NO: 83857 - protein, 21 aa, Artificial Sequence
  Description of Artificial Sequence: Synthetic peptide
  Seed: GMDPRMCSLMQGSTLPRRSGA
GMDPRMWSLLQSSTVPRRSGA

SEQ ID NO: 83858 - protein, 21 aa, Artificial Sequence
  Description of Artificial Sequence: Synthetic peptide
  Seed: GMDPRMCSLMQGSTLPRRSGA
GMDPRMWSLLQTSTAPRRSGA

SEQ ID NO: 83859 - protein, 21 aa, Artificial Sequence
  Description of Artificial Sequence: Synthetic peptide
  Seed: GMDPRMCSLMQGSTLPRRSGA
GMDPRMWSLLQTSTIPRRSGA

SEQ ID NO: 83860 - protein, 21 aa, Artificial Sequence
  Description of Artificial Sequence: Synthetic peptide
  Seed: GMDPRMCSLMQGSTLPRRSGA
GMDPRMWSLLQTSTLPRRSGA

SEQ ID NO: 83861 - protein, 21 aa, Artificial Sequence
  Description of Artificial Sequence: Synthetic peptide
  Seed: GMDPRMCSLMQGSTLPRRSGA
GMDPRMWSLLQTSTNPRRSGA

SEQ ID NO: 83862 - protein, 21 aa, Artificial Sequence
  Description of Artificial Sequence: Synthetic peptide
  Seed: GMDPRMCSLMQGSTLPRRSGA
GMDPRMWSLLQTSTSPRRSGA

SEQ ID NO: 83863 - protein, 21 aa, Artificial Sequence
  Description of Artificial Sequence: Synthetic peptide
  Seed: GMDPRMCSLMQGSTLPRRSGA
GMDPRMWSLLQTSTTPRRSGA

SEQ ID NO: 83864 - protein, 21 aa, Artificial Sequence
  Description of Artificial Sequence: Synthetic peptide
  Seed: GMDPRMCSLMQGSTLPRRSGA
GMDPRMWSLLQTSTVPRRSGA

SEQ ID NO: 83865 - protein, 21 aa, Artificial Sequence
  Description of Artificial Sequence: Synthetic peptide
  Seed: GMDPRMCSLMQGSTLPRRSGA
GMDPRMWSLLQVSTAPRRSGA

SEQ ID NO: 83866 - protein, 21 aa, Artificial Sequence
  Description of Artificial Sequence: Synthetic peptide
  Seed: GMDPRMCSLMQGSTLPRRSGA
GMDPRMWSLLQVSTNPRRSGA

SEQ ID NO: 83867 - protein, 21 aa, Artificial Sequence
  Description of Artificial Sequence: Synthetic peptide
  Seed: GMDPRMCSLMQGSTLPRRSGA
GMDPRMWSLLQVSTSPRRSGA

SEQ ID NO: 83868 - protein, 21 aa, Artificial Sequence
  Description of Artificial Sequence: Synthetic peptide
  Seed: GMDPRMCSLMQGSTLPRRSGA
GMDPRMWSLLQVSTTPRRSGA

SEQ ID NO: 83869 - protein, 21 aa, Artificial Sequence
  Description of Artificial Sequence: Synthetic peptide
  Seed: GMDPRMCSLMQGSTLPRRSGA
GMDPRMWSLMQASTAPRRSGA

SEQ ID NO: 83870 - protein, 21 aa, Artificial Sequence
  Description of Artificial Sequence: Synthetic peptide
  Seed: GMDPRMCSLMQGSTLPRRSGA
GMDPRMWSLMQASTGPRRSGA

SEQ ID NO: 83871 - protein, 21 aa, Artificial Sequence
  Description of Artificial Sequence: Synthetic peptide
  Seed: GMDPRMCSLMQGSTLPRRSGA
GMDPRMWSLMQASTHPRRSGA

SEQ ID NO: 83872 - protein, 21 aa, Artificial Sequence
  Description of Artificial Sequence: Synthetic peptide
  Seed: GMDPRMCSLMQGSTLPRRSGA
GMDPRMWSLMQASTIPRRSGA

SEQ ID NO: 83873 - protein, 21 aa, Artificial Sequence
  Description of Artificial Sequence: Synthetic peptide
  Seed: GMDPRMCSLMQGSTLPRRSGA
GMDPRMWSLMQASTLPRRSGA

SEQ ID NO: 83874 - protein, 21 aa, Artificial Sequence
  Description of Artificial Sequence: Synthetic peptide
  Seed: GMDPRMCSLMQGSTLPRRSGA
GMDPRMWSLMQASTMPRRSGA

SEQ ID NO: 83875 - protein, 21 aa, Artificial Sequence
  Description of Artificial Sequence: Synthetic peptide
  Seed: GMDPRMCSLMQGSTLPRRSGA
GMDPRMWSLMQASTNPRRSGA

SEQ ID NO: 83876 - protein, 21 aa, Artificial Sequence
  Description of Artificial Sequence: Synthetic peptide
  Seed: GMDPRMCSLMQGSTLPRRSGA
GMDPRMWSLMQASTQPRRSGA

SEQ ID NO: 83877 - protein, 21 aa, Artificial Sequence
  Description of Artificial Sequence: Synthetic peptide
  Seed: GMDPRMCSLMQGSTLPRRSGA
GMDPRMWSLMQASTSPRRSGA

SEQ ID NO: 83878 - protein, 21 aa, Artificial Sequence
  Description of Artificial Sequence: Synthetic peptide
  Seed: GMDPRMCSLMQGSTLPRRSGA
GMDPRMWSLMQASTTPRRSGA

SEQ ID NO: 83879 - protein, 21 aa, Artificial Sequence
  Description of Artificial Sequence: Synthetic peptide
  Seed: GMDPRMCSLMQGSTLPRRSGA
GMDPRMWSLMQASTVPRRSGA

SEQ ID NO: 83880 - protein, 21 aa, Artificial Sequence
  Description of Artificial Sequence: Synthetic peptide
  Seed: GMDPRMCSLMQGSTLPRRSGA
GMDPRMWSLMQGSTAPRRSGA

SEQ ID NO: 83881 - protein, 21 aa, Artificial Sequence
  Description of Artificial Sequence: Synthetic peptide
  Seed: GMDPRMCSLMQGSTLPRRSGA
GMDPRMWSLMQGSTIPRRSGA

SEQ ID NO: 83882 - protein, 21 aa, Artificial Sequence
  Description of Artificial Sequence: Synthetic peptide
  Seed: GMDPRMCSLMQGSTLPRRSGA
GMDPRMWSLMQGSTLPRRSGA

SEQ ID NO: 83883 - protein, 21 aa, Artificial Sequence
  Description of Artificial Sequence: Synthetic peptide
  Seed: GMDPRMCSLMQGSTLPRRSGA
GMDPRMWSLMQGSTMPRRSGA

SEQ ID NO: 83884 - protein, 21 aa, Artificial Sequence
  Description of Artificial Sequence: Synthetic peptide
  Seed: GMDPRMCSLMQGSTLPRRSGA
GMDPRMWSLMQGSTSPRRSGA

SEQ ID NO: 83885 - protein, 21 aa, Artificial Sequence
  Description of Artificial Sequence: Synthetic peptide
  Seed: GMDPRMCSLMQGSTLPRRSGA
GMDPRMWSLMQGSTTPRRSGA

SEQ ID NO: 83886 - protein, 21 aa, Artificial Sequence
  Description of Artificial Sequence: Synthetic peptide
  Seed: GMDPRMCSLMQGSTLPRRSGA
GMDPRMWSLMQGSTVPRRSGA

SEQ ID NO: 83887 - protein, 21 aa, Artificial Sequence
  Description of Artificial Sequence: Synthetic peptide
  Seed: GMDPRMCSLMQGSTLPRRSGA
GMDPRMWSLMQISTAPRRSGA

SEQ ID NO: 83888 - protein, 21 aa, Artificial Sequence
  Description of Artificial Sequence: Synthetic peptide
  Seed: GMDPRMCSLMQGSTLPRRSGA
GMDPRMWSLMQISTNPRRSGA

SEQ ID NO: 83889 - protein, 21 aa, Artificial Sequence
  Description of Artificial Sequence: Synthetic peptide
  Seed: GMDPRMCSLMQGSTLPRRSGA
GMDPRMWSLMQISTSPRRSGA

SEQ ID NO: 83890 - protein, 21 aa, Artificial Sequence
  Description of Artificial Sequence: Synthetic peptide
  Seed: GMDPRMCSLMQGSTLPRRSGA
GMDPRMWSLMQNSTAPRRSGA

SEQ ID NO: 83891 - protein, 21 aa, Artificial Sequence
  Description of Artificial Sequence: Synthetic peptide
  Seed: GMDPRMCSLMQGSTLPRRSGA
GMDPRMWSLMQNSTIPRRSGA

SEQ ID NO: 83892 - protein, 21 aa, Artificial Sequence
  Description of Artificial Sequence: Synthetic peptide
  Seed: GMDPRMCSLMQGSTLPRRSGA
GMDPRMWSLMQNSTLPRRSGA

SEQ ID NO: 83893 - protein, 21 aa, Artificial Sequence
  Description of Artificial Sequence: Synthetic peptide
  Seed: GMDPRMCSLMQGSTLPRRSGA
GMDPRMWSLMQNSTVPRRSGA

SEQ ID NO: 83894 - protein, 21 aa, Artificial Sequence
  Description of Artificial Sequence: Synthetic peptide
  Seed: GMDPRMCSLMQGSTLPRRSGA
GMDPRMWSLMQPSTAPRRSGA

SEQ ID NO: 83895 - protein, 21 aa, Artificial Sequence
  Description of Artificial Sequence: Synthetic peptide
  Seed: GMDPRMCSLMQGSTLPRRSGA
GMDPRMWSLMQPSTIPRRSGA

SEQ ID NO: 83896 - protein, 21 aa, Artificial Sequence
  Description of Artificial Sequence: Synthetic peptide
  Seed: GMDPRMCSLMQGSTLPRRSGA
GMDPRMWSLMQPSTLPRRSGA

SEQ ID NO: 83897 - protein, 21 aa, Artificial Sequence
  Description of Artificial Sequence: Synthetic peptide
  Seed: GMDPRMCSLMQGSTLPRRSGA
GMDPRMWSLMQPSTMPRRSGA

SEQ ID NO: 83898 - protein, 21 aa, Artificial Sequence
  Description of Artificial Sequence: Synthetic peptide
  Seed: GMDPRMCSLMQGSTLPRRSGA
GMDPRMWSLMQPSTNPRRSGA

SEQ ID NO: 83899 - protein, 21 aa, Artificial Sequence
  Description of Artificial Sequence: Synthetic peptide
  Seed: GMDPRMCSLMQGSTLPRRSGA
GMDPRMWSLMQPSTSPRRSGA

SEQ ID NO: 83900 - protein, 21 aa, Artificial Sequence
  Description of Artificial Sequence: Synthetic peptide
  Seed: GMDPRMCSLMQGSTLPRRSGA
GMDPRMWSLMQPSTTPRRSGA

SEQ ID NO: 83901 - protein, 21 aa, Artificial Sequence
  Description of Artificial Sequence: Synthetic peptide
  Seed: GMDPRMCSLMQGSTLPRRSGA
GMDPRMWSLMQPSTVPRRSGA

SEQ ID NO: 83902 - protein, 21 aa, Artificial Sequence
  Description of Artificial Sequence: Synthetic peptide
  Seed: GMDPRMCSLMQGSTLPRRSGA
GMDPRMWSLMQSSTAPRRSGA

SEQ ID NO: 83903 - protein, 21 aa, Artificial Sequence
  Description of Artificial Sequence: Synthetic peptide
  Seed: GMDPRMCSLMQGSTLPRRSGA
GMDPRMWSLMQSSTIPRRSGA

SEQ ID NO: 83904 - protein, 21 aa, Artificial Sequence
  Description of Artificial Sequence: Synthetic peptide
  Seed: GMDPRMCSLMQGSTLPRRSGA
GMDPRMWSLMQSSTLPRRSGA

SEQ ID NO: 83905 - protein, 21 aa, Artificial Sequence
  Description of Artificial Sequence: Synthetic peptide
  Seed: GMDPRMCSLMQGSTLPRRSGA
GMDPRMWSLMQSSTMPRRSGA

SEQ ID NO: 83906 - protein, 21 aa, Artificial Sequence
  Description of Artificial Sequence: Synthetic peptide
  Seed: GMDPRMCSLMQGSTLPRRSGA
GMDPRMWSLMQSSTNPRRSGA

SEQ ID NO: 83907 - protein, 21 aa, Artificial Sequence
  Description of Artificial Sequence: Synthetic peptide
  Seed: GMDPRMCSLMQGSTLPRRSGA
GMDPRMWSLMQSSTSPRRSGA

SEQ ID NO: 83908 - protein, 21 aa, Artificial Sequence
  Description of Artificial Sequence: Synthetic peptide
  Seed: GMDPRMCSLMQGSTLPRRSGA
GMDPRMWSLMQSSTTPRRSGA

SEQ ID NO: 83909 - protein, 21 aa, Artificial Sequence
  Description of Artificial Sequence: Synthetic peptide
  Seed: GMDPRMCSLMQGSTLPRRSGA
GMDPRMWSLMQSSTVPRRSGA

SEQ ID NO: 83910 - protein, 21 aa, Artificial Sequence
  Description of Artificial Sequence: Synthetic peptide
  Seed: GMDPRMCSLMQGSTLPRRSGA
GMDPRMWSLMQTSTAPRRSGA

SEQ ID NO: 83911 - protein, 21 aa, Artificial Sequence
  Description of Artificial Sequence: Synthetic peptide
  Seed: GMDPRMCSLMQGSTLPRRSGA
GMDPRMWSLMQTSTIPRRSGA

SEQ ID NO: 83912 - protein, 21 aa, Artificial Sequence
  Description of Artificial Sequence: Synthetic peptide
  Seed: GMDPRMCSLMQGSTLPRRSGA
GMDPRMWSLMQTSTLPRRSGA

SEQ ID NO: 83913 - protein, 21 aa, Artificial Sequence
  Description of Artificial Sequence: Synthetic peptide
  Seed: GMDPRMCSLMQGSTLPRRSGA
GMDPRMWSLMQTSTNPRRSGA

SEQ ID NO: 83914 - protein, 21 aa, Artificial Sequence
  Description of Artificial Sequence: Synthetic peptide
  Seed: GMDPRMCSLMQGSTLPRRSGA
GMDPRMWSLMQTSTSPRRSGA

SEQ ID NO: 83915 - protein, 21 aa, Artificial Sequence
  Description of Artificial Sequence: Synthetic peptide
  Seed: GMDPRMCSLMQGSTLPRRSGA
GMDPRMWSLMQTSTTPRRSGA

SEQ ID NO: 83916 - protein, 21 aa, Artificial Sequence
  Description of Artificial Sequence: Synthetic peptide
  Seed: GMDPRMCSLMQGSTLPRRSGA
GMDPRMWSLMQTSTVPRRSGA

SEQ ID NO: 83917 - protein, 21 aa, Artificial Sequence
  Description of Artificial Sequence: Synthetic peptide
  Seed: GMDPRMCSLMQGSTLPRRSGA
GMDPRMWSLMQVSTAPRRSGA

SEQ ID NO: 83918 - protein, 21 aa, Artificial Sequence
  Description of Artificial Sequence: Synthetic peptide
  Seed: GMDPRMCSLMQGSTLPRRSGA
GMDPRMWSLMQVSTNPRRSGA

SEQ ID NO: 83919 - protein, 21 aa, Artificial Sequence
  Description of Artificial Sequence: Synthetic peptide
  Seed: GMDPRMCSLMQGSTLPRRSGA
GMDPRMWSLMQVSTSPRRSGA

SEQ ID NO: 83920 - protein, 21 aa, Artificial Sequence
  Description of Artificial Sequence: Synthetic peptide
  Seed: GMDPRMCSLMQGSTLPRRSGA
GMDPRMWSLMQVSTTPRRSGA

SEQ ID NO: 83921 - protein, 21 aa, Artificial Sequence
  Description of Artificial Sequence: Synthetic peptide
  Seed: GMDPRMCSLMQGSTLPRRSGA
GMDPRMWSLQQASTAPRRSGA

SEQ ID NO: 83922 - protein, 21 aa, Artificial Sequence
  Description of Artificial Sequence: Synthetic peptide
  Seed: GMDPRMCSLMQGSTLPRRSGA
GMDPRMWSLQQASTIPRRSGA

SEQ ID NO: 83923 - protein, 21 aa, Artificial Sequence
  Description of Artificial Sequence: Synthetic peptide
  Seed: GMDPRMCSLMQGSTLPRRSGA
GMDPRMWSLQQASTLPRRSGA

SEQ ID NO: 83924 - protein, 21 aa, Artificial Sequence
  Description of Artificial Sequence: Synthetic peptide
  Seed: GMDPRMCSLMQGSTLPRRSGA
GMDPRMWSLQQASTVPRRSGA

SEQ ID NO: 83925 - protein, 21 aa, Artificial Sequence
  Description of Artificial Sequence: Synthetic peptide
  Seed: GMDPRMCSLMQGSTLPRRSGA
GMDPRMWSLQQGSTLPRRSGA

SEQ ID NO: 83926 - protein, 21 aa, Artificial Sequence
  Description of Artificial Sequence: Synthetic peptide
  Seed: GMDPRMCSLMQGSTLPRRSGA
GMDPRMWSLQQGSTVPRRSGA

SEQ ID NO: 83927 - protein, 21 aa, Artificial Sequence
  Description of Artificial Sequence: Synthetic peptide
  Seed: GMDPRMCSLMQGSTLPRRSGA
GMDPRMWSLVQASTAPRRSGA

SEQ ID NO: 83928 - protein, 21 aa, Artificial Sequence
  Description of Artificial Sequence: Synthetic peptide
  Seed: GMDPRMCSLMQGSTLPRRSGA
GMDPRMWSLVQASTIPRRSGA

SEQ ID NO: 83929 - protein, 21 aa, Artificial Sequence
  Description of Artificial Sequence: Synthetic peptide
  Seed: GMDPRMCSLMQGSTLPRRSGA
GMDPRMWSLVQASTLPRRSGA

SEQ ID NO: 83930 - protein, 21 aa, Artificial Sequence
  Description of Artificial Sequence: Synthetic peptide
  Seed: GMDPRMCSLMQGSTLPRRSGA
GMDPRMWSLVQASTNPRRSGA

SEQ ID NO: 83931 - protein, 21 aa, Artificial Sequence
  Description of Artificial Sequence: Synthetic peptide
  Seed: GMDPRMCSLMQGSTLPRRSGA
GMDPRMWSLVQASTSPRRSGA

SEQ ID NO: 83932 - protein, 21 aa, Artificial Sequence
  Description of Artificial Sequence: Synthetic peptide
  Seed: GMDPRMCSLMQGSTLPRRSGA
GMDPRMWSLVQASTVPRRSGA

SEQ ID NO: 83933 - protein, 21 aa, Artificial Sequence
  Description of Artificial Sequence: Synthetic peptide
  Seed: GMDPRMCSLMQGSTLPRRSGA
GMDPRMWSLVQGSTAPRRSGA

SEQ ID NO: 83934 - protein, 21 aa, Artificial Sequence
  Description of Artificial Sequence: Synthetic peptide
  Seed: GMDPRMCSLMQGSTLPRRSGA
GMDPRMWSLVQGSTIPRRSGA

SEQ ID NO: 83935 - protein, 21 aa, Artificial Sequence
  Description of Artificial Sequence: Synthetic peptide
  Seed: GMDPRMCSLMQGSTLPRRSGA
GMDPRMWSLVQGSTLPRRSGA

SEQ ID NO: 83936 - protein, 21 aa, Artificial Sequence
  Description of Artificial Sequence: Synthetic peptide
  Seed: GMDPRMCSLMQGSTLPRRSGA
GMDPRMWSLVQGSTVPRRSGA

SEQ ID NO: 83937 - protein, 21 aa, Artificial Sequence
  Description of Artificial Sequence: Synthetic peptide
  Seed: GMDPRMCSLMQGSTLPRRSGA
GMDPRMWSLVQSSTVPRRSGA

SEQ ID NO: 83938 - protein, 21 aa, Artificial Sequence
  Description of Artificial Sequence: Synthetic peptide
  Seed: GMDPRMCSLMQGSTLPRRSGA
GMDPRMYSLAQASTAPRRSGA

SEQ ID NO: 83939 - protein, 21 aa, Artificial Sequence
  Description of Artificial Sequence: Synthetic peptide
  Seed: GMDPRMCSLMQGSTLPRRSGA
GMDPRMYSLAQASTGPRRSGA

SEQ ID NO: 83940 - protein, 21 aa, Artificial Sequence
  Description of Artificial Sequence: Synthetic peptide
  Seed: GMDPRMCSLMQGSTLPRRSGA
GMDPRMYSLAQASTIPRRSGA

SEQ ID NO: 83941 - protein, 21 aa, Artificial Sequence
  Description of Artificial Sequence: Synthetic peptide
  Seed: GMDPRMCSLMQGSTLPRRSGA
GMDPRMYSLAQASTLPRRSGA

SEQ ID NO: 83942 - protein, 21 aa, Artificial Sequence
  Description of Artificial Sequence: Synthetic peptide
  Seed: GMDPRMCSLMQGSTLPRRSGA
GMDPRMYSLAQASTMPRRSGA

SEQ ID NO: 83943 - protein, 21 aa, Artificial Sequence
  Description of Artificial Sequence: Synthetic peptide
  Seed: GMDPRMCSLMQGSTLPRRSGA
GMDPRMYSLAQASTNPRRSGA

SEQ ID NO: 83944 - protein, 21 aa, Artificial Sequence
  Description of Artificial Sequence: Synthetic peptide
  Seed: GMDPRMCSLMQGSTLPRRSGA
GMDPRMYSLAQASTQPRRSGA

SEQ ID NO: 83945 - protein, 21 aa, Artificial Sequence
  Description of Artificial Sequence: Synthetic peptide
  Seed: GMDPRMCSLMQGSTLPRRSGA
GMDPRMYSLAQASTSPRRSGA

SEQ ID NO: 83946 - protein, 21 aa, Artificial Sequence
  Description of Artificial Sequence: Synthetic peptide
  Seed: GMDPRMCSLMQGSTLPRRSGA
GMDPRMYSLAQASTTPRRSGA

SEQ ID NO: 83947 - protein, 21 aa, Artificial Sequence
  Description of Artificial Sequence: Synthetic peptide
  Seed: GMDPRMCSLMQGSTLPRRSGA
GMDPRMYSLAQASTVPRRSGA

SEQ ID NO: 83948 - protein, 21 aa, Artificial Sequence
  Description of Artificial Sequence: Synthetic peptide
  Seed: GMDPRMCSLMQGSTLPRRSGA
GMDPRMYSLAQGSTAPRRSGA

SEQ ID NO: 83949 - protein, 21 aa, Artificial Sequence
  Description of Artificial Sequence: Synthetic peptide
  Seed: GMDPRMCSLMQGSTLPRRSGA
GMDPRMYSLAQGSTIPRRSGA

SEQ ID NO: 83950 - protein, 21 aa, Artificial Sequence
  Description of Artificial Sequence: Synthetic peptide
  Seed: GMDPRMCSLMQGSTLPRRSGA
GMDPRMYSLAQGSTLPRRSGA

SEQ ID NO: 83951 - protein, 21 aa, Artificial Sequence
  Description of Artificial Sequence: Synthetic peptide
  Seed: GMDPRMCSLMQGSTLPRRSGA
GMDPRMYSLAQGSTMPRRSGA

SEQ ID NO: 83952 - protein, 21 aa, Artificial Sequence
  Description of Artificial Sequence: Synthetic peptide
  Seed: GMDPRMCSLMQGSTLPRRSGA
GMDPRMYSLAQGSTVPRRSGA

SEQ ID NO: 83953 - protein, 21 aa, Artificial Sequence
  Description of Artificial Sequence: Synthetic peptide
  Seed: GMDPRMCSLMQGSTLPRRSGA
GMDPRMYSLAQISTAPRRSGA

SEQ ID NO: 83954 - protein, 21 aa, Artificial Sequence
  Description of Artificial Sequence: Synthetic peptide
  Seed: GMDPRMCSLMQGSTLPRRSGA
GMDPRMYSLAQISTNPRRSGA

SEQ ID NO: 83955 - protein, 21 aa, Artificial Sequence
  Description of Artificial Sequence: Synthetic peptide
  Seed: GMDPRMCSLMQGSTLPRRSGA
GMDPRMYSLAQISTSPRRSGA

SEQ ID NO: 83956 - protein, 21 aa, Artificial Sequence
  Description of Artificial Sequence: Synthetic peptide
  Seed: GMDPRMCSLMQGSTLPRRSGA
GMDPRMYSLAQISTVPRRSGA

SEQ ID NO: 83957 - protein, 21 aa, Artificial Sequence
  Description of Artificial Sequence: Synthetic peptide
  Seed: GMDPRMCSLMQGSTLPRRSGA
GMDPRMYSLAQNSTIPRRSGA

SEQ ID NO: 83958 - protein, 21 aa, Artificial Sequence
  Description of Artificial Sequence: Synthetic peptide
  Seed: GMDPRMCSLMQGSTLPRRSGA
GMDPRMYSLAQNSTLPRRSGA

SEQ ID NO: 83959 - protein, 21 aa, Artificial Sequence
  Description of Artificial Sequence: Synthetic peptide
  Seed: GMDPRMCSLMQGSTLPRRSGA
GMDPRMYSLAQNSTVPRRSGA

SEQ ID NO: 83960 - protein, 21 aa, Artificial Sequence
  Description of Artificial Sequence: Synthetic peptide
  Seed: GMDPRMCSLMQGSTLPRRSGA
GMDPRMYSLAQPSTAPRRSGA

SEQ ID NO: 83961 - protein, 21 aa, Artificial Sequence
  Description of Artificial Sequence: Synthetic peptide
  Seed: GMDPRMCSLMQGSTLPRRSGA
GMDPRMYSLAQPSTIPRRSGA

SEQ ID NO: 83962 - protein, 21 aa, Artificial Sequence
  Description of Artificial Sequence: Synthetic peptide
  Seed: GMDPRMCSLMQGSTLPRRSGA
GMDPRMYSLAQPSTLPRRSGA

SEQ ID NO: 83963 - protein, 21 aa, Artificial Sequence
  Description of Artificial Sequence: Synthetic peptide
  Seed: GMDPRMCSLMQGSTLPRRSGA
GMDPRMYSLAQPSTMPRRSGA

SEQ ID NO: 83964 - protein, 21 aa, Artificial Sequence
  Description of Artificial Sequence: Synthetic peptide
  Seed: GMDPRMCSLMQGSTLPRRSGA
GMDPRMYSLAQPSTNPRRSGA

SEQ ID NO: 83965 - protein, 21 aa, Artificial Sequence
  Description of Artificial Sequence: Synthetic peptide
  Seed: GMDPRMCSLMQGSTLPRRSGA
GMDPRMYSLAQPSTSPRRSGA

SEQ ID NO: 83966 - protein, 21 aa, Artificial Sequence
  Description of Artificial Sequence: Synthetic peptide
  Seed: GMDPRMCSLMQGSTLPRRSGA
GMDPRMYSLAQPSTVPRRSGA

SEQ ID NO: 83967 - protein, 21 aa, Artificial Sequence
  Description of Artificial Sequence: Synthetic peptide
  Seed: GMDPRMCSLMQGSTLPRRSGA
GMDPRMYSLAQSSTAPRRSGA

SEQ ID NO: 83968 - protein, 21 aa, Artificial Sequence
  Description of Artificial Sequence: Synthetic peptide
  Seed: GMDPRMCSLMQGSTLPRRSGA
GMDPRMYSLAQSSTIPRRSGA

SEQ ID NO: 83969 - protein, 21 aa, Artificial Sequence
  Description of Artificial Sequence: Synthetic peptide
  Seed: GMDPRMCSLMQGSTLPRRSGA
GMDPRMYSLAQSSTLPRRSGA

SEQ ID NO: 83970 - protein, 21 aa, Artificial Sequence
  Description of Artificial Sequence: Synthetic peptide
  Seed: GMDPRMCSLMQGSTLPRRSGA
GMDPRMYSLAQSSTMPRRSGA

SEQ ID NO: 83971 - protein, 21 aa, Artificial Sequence
  Description of Artificial Sequence: Synthetic peptide
  Seed: GMDPRMCSLMQGSTLPRRSGA
GMDPRMYSLAQSSTNPRRSGA

SEQ ID NO: 83972 - protein, 21 aa, Artificial Sequence
  Description of Artificial Sequence: Synthetic peptide
  Seed: GMDPRMCSLMQGSTLPRRSGA
GMDPRMYSLAQSSTSPRRSGA

SEQ ID NO: 83973 - protein, 21 aa, Artificial Sequence
  Description of Artificial Sequence: Synthetic peptide
  Seed: GMDPRMCSLMQGSTLPRRSGA
GMDPRMYSLAQSSTVPRRSGA

SEQ ID NO: 83974 - protein, 21 aa, Artificial Sequence
  Description of Artificial Sequence: Synthetic peptide
  Seed: GMDPRMCSLMQGSTLPRRSGA
GMDPRMYSLAQTSTAPRRSGA

SEQ ID NO: 83975 - protein, 21 aa, Artificial Sequence
  Description of Artificial Sequence: Synthetic peptide
  Seed: GMDPRMCSLMQGSTLPRRSGA
GMDPRMYSLAQTSTIPRRSGA

SEQ ID NO: 83976 - protein, 21 aa, Artificial Sequence
  Description of Artificial Sequence: Synthetic peptide
  Seed: GMDPRMCSLMQGSTLPRRSGA
GMDPRMYSLAQTSTLPRRSGA

SEQ ID NO: 83977 - protein, 21 aa, Artificial Sequence
  Description of Artificial Sequence: Synthetic peptide
  Seed: GMDPRMCSLMQGSTLPRRSGA
GMDPRMYSLAQTSTNPRRSGA

SEQ ID NO: 83978 - protein, 21 aa, Artificial Sequence
  Description of Artificial Sequence: Synthetic peptide
  Seed: GMDPRMCSLMQGSTLPRRSGA
GMDPRMYSLAQTSTSPRRSGA

SEQ ID NO: 83979 - protein, 21 aa, Artificial Sequence
  Description of Artificial Sequence: Synthetic peptide
  Seed: GMDPRMCSLMQGSTLPRRSGA
GMDPRMYSLAQTSTVPRRSGA

SEQ ID NO: 83980 - protein, 21 aa, Artificial Sequence
  Description of Artificial Sequence: Synthetic peptide
  Seed: GMDPRMCSLMQGSTLPRRSGA
GMDPRMYSLAQVSTAPRRSGA

SEQ ID NO: 83981 - protein, 21 aa, Artificial Sequence
  Description of Artificial Sequence: Synthetic peptide
  Seed: GMDPRMCSLMQGSTLPRRSGA
GMDPRMYSLAQVSTIPRRSGA

SEQ ID NO: 83982 - protein, 21 aa, Artificial Sequence
  Description of Artificial Sequence: Synthetic peptide
  Seed: GMDPRMCSLMQGSTLPRRSGA
GMDPRMYSLAQVSTLPRRSGA

SEQ ID NO: 83983 - protein, 21 aa, Artificial Sequence
  Description of Artificial Sequence: Synthetic peptide
  Seed: GMDPRMCSLMQGSTLPRRSGA
GMDPRMYSLAQVSTNPRRSGA

SEQ ID NO: 83984 - protein, 21 aa, Artificial Sequence
  Description of Artificial Sequence: Synthetic peptide
  Seed: GMDPRMCSLMQGSTLPRRSGA
GMDPRMYSLAQVSTSPRRSGA

SEQ ID NO: 83985 - protein, 21 aa, Artificial Sequence
  Description of Artificial Sequence: Synthetic peptide
  Seed: GMDPRMCSLMQGSTLPRRSGA
GMDPRMYSLAQVSTTPRRSGA

SEQ ID NO: 83986 - protein, 21 aa, Artificial Sequence
  Description of Artificial Sequence: Synthetic peptide
  Seed: GMDPRMCSLMQGSTLPRRSGA
GMDPRMYSLAQVSTVPRRSGA

SEQ ID NO: 83987 - protein, 21 aa, Artificial Sequence
  Description of Artificial Sequence: Synthetic peptide
  Seed: GMDPRMCSLMQGSTLPRRSGA
GMDPRMYSLEQASTIPRRSGA

SEQ ID NO: 83988 - protein, 21 aa, Artificial Sequence
  Description of Artificial Sequence: Synthetic peptide
  Seed: GMDPRMCSLMQGSTLPRRSGA
GMDPRMYSLEQASTLPRRSGA

SEQ ID NO: 83989 - protein, 21 aa, Artificial Sequence
  Description of Artificial Sequence: Synthetic peptide
  Seed: GMDPRMCSLMQGSTLPRRSGA
GMDPRMYSLEQASTVPRRSGA

SEQ ID NO: 83990 - protein, 21 aa, Artificial Sequence
  Description of Artificial Sequence: Synthetic peptide
  Seed: GMDPRMCSLMQGSTLPRRSGA
GMDPRMYSLFQASTAPRRSGA

SEQ ID NO: 83991 - protein, 21 aa, Artificial Sequence
  Description of Artificial Sequence: Synthetic peptide
  Seed: GMDPRMCSLMQGSTLPRRSGA
GMDPRMYSLFQASTIPRRSGA

SEQ ID NO: 83992 - protein, 21 aa, Artificial Sequence
  Description of Artificial Sequence: Synthetic peptide
  Seed: GMDPRMCSLMQGSTLPRRSGA
GMDPRMYSLFQASTLPRRSGA

SEQ ID NO: 83993 - protein, 21 aa, Artificial Sequence
  Description of Artificial Sequence: Synthetic peptide
  Seed: GMDPRMCSLMQGSTLPRRSGA
GMDPRMYSLFQASTNPRRSGA

SEQ ID NO: 83994 - protein, 21 aa, Artificial Sequence
  Description of Artificial Sequence: Synthetic peptide
  Seed: GMDPRMCSLMQGSTLPRRSGA
GMDPRMYSLFQASTSPRRSGA

SEQ ID NO: 83995 - protein, 21 aa, Artificial Sequence
  Description of Artificial Sequence: Synthetic peptide
  Seed: GMDPRMCSLMQGSTLPRRSGA
GMDPRMYSLFQASTVPRRSGA

SEQ ID NO: 83996 - protein, 21 aa, Artificial Sequence
  Description of Artificial Sequence: Synthetic peptide
  Seed: GMDPRMCSLMQGSTLPRRSGA
GMDPRMYSLFQPSTAPRRSGA

SEQ ID NO: 83997 - protein, 21 aa, Artificial Sequence
  Description of Artificial Sequence: Synthetic peptide
  Seed: GMDPRMCSLMQGSTLPRRSGA
GMDPRMYSLFQVSTAPRRSGA

SEQ ID NO: 83998 - protein, 21 aa, Artificial Sequence
  Description of Artificial Sequence: Synthetic peptide
  Seed: GMDPRMCSLMQGSTLPRRSGA
GMDPRMYSLGQASTIPRRSGA

SEQ ID NO: 83999 - protein, 21 aa, Artificial Sequence
  Description of Artificial Sequence: Synthetic peptide
  Seed: GMDPRMCSLMQGSTLPRRSGA
GMDPRMYSLGQASTLPRRSGA

SEQ ID NO: 84000 - protein, 21 aa, Artificial Sequence
  Description of Artificial Sequence: Synthetic peptide
  Seed: GMDPRMCSLMQGSTLPRRSGA
GMDPRMYSLGQASTVPRRSGA

SEQ ID NO: 84001 - protein, 21 aa, Artificial Sequence
  Description of Artificial Sequence: Synthetic peptide
  Seed: GMDPRMCSLMQGSTLPRRSGA
GMDPRMYSLIQASTAPRRSGA

SEQ ID NO: 84002 - protein, 21 aa, Artificial Sequence
  Description of Artificial Sequence: Synthetic peptide
  Seed: GMDPRMCSLMQGSTLPRRSGA
GMDPRMYSLIQASTCPRRSGA

SEQ ID NO: 84003 - protein, 21 aa, Artificial Sequence
  Description of Artificial Sequence: Synthetic peptide
  Seed: GMDPRMCSLMQGSTLPRRSGA
GMDPRMYSLIQASTGPRRSGA

SEQ ID NO: 84004 - protein, 21 aa, Artificial Sequence
  Description of Artificial Sequence: Synthetic peptide
  Seed: GMDPRMCSLMQGSTLPRRSGA
GMDPRMYSLIQASTHPRRSGA

SEQ ID NO: 84005 - protein, 21 aa, Artificial Sequence
  Description of Artificial Sequence: Synthetic peptide
  Seed: GMDPRMCSLMQGSTLPRRSGA
GMDPRMYSLIQASTIPRRSGA

SEQ ID NO: 84006 - protein, 21 aa, Artificial Sequence
  Description of Artificial Sequence: Synthetic peptide
  Seed: GMDPRMCSLMQGSTLPRRSGA
GMDPRMYSLIQASTLPRRSGA

SEQ ID NO: 84007 - protein, 21 aa, Artificial Sequence
  Description of Artificial Sequence: Synthetic peptide
  Seed: GMDPRMCSLMQGSTLPRRSGA
GMDPRMYSLIQASTMPRRSGA

SEQ ID NO: 84008 - protein, 21 aa, Artificial Sequence
  Description of Artificial Sequence: Synthetic peptide
  Seed: GMDPRMCSLMQGSTLPRRSGA
GMDPRMYSLIQASTNPRRSGA

SEQ ID NO: 84009 - protein, 21 aa, Artificial Sequence
  Description of Artificial Sequence: Synthetic peptide
  Seed: GMDPRMCSLMQGSTLPRRSGA
GMDPRMYSLIQASTQPRRSGA

SEQ ID NO: 84010 - protein, 21 aa, Artificial Sequence
  Description of Artificial Sequence: Synthetic peptide
  Seed: GMDPRMCSLMQGSTLPRRSGA
GMDPRMYSLIQASTSPRRSGA

SEQ ID NO: 84011 - protein, 21 aa, Artificial Sequence
  Description of Artificial Sequence: Synthetic peptide
  Seed: GMDPRMCSLMQGSTLPRRSGA
GMDPRMYSLIQASTTPRRSGA

SEQ ID NO: 84012 - protein, 21 aa, Artificial Sequence
  Description of Artificial Sequence: Synthetic peptide
  Seed: GMDPRMCSLMQGSTLPRRSGA
GMDPRMYSLIQASTVPRRSGA

SEQ ID NO: 84013 - protein, 21 aa, Artificial Sequence
  Description of Artificial Sequence: Synthetic peptide
  Seed: GMDPRMCSLMQGSTLPRRSGA
GMDPRMYSLIQGSTAPRRSGA

SEQ ID NO: 84014 - protein, 21 aa, Artificial Sequence
  Description of Artificial Sequence: Synthetic peptide
  Seed: GMDPRMCSLMQGSTLPRRSGA
GMDPRMYSLIQGSTIPRRSGA

SEQ ID NO: 84015 - protein, 21 aa, Artificial Sequence
  Description of Artificial Sequence: Synthetic peptide
  Seed: GMDPRMCSLMQGSTLPRRSGA
GMDPRMYSLIQGSTLPRRSGA

SEQ ID NO: 84016 - protein, 21 aa, Artificial Sequence
  Description of Artificial Sequence: Synthetic peptide
  Seed: GMDPRMCSLMQGSTLPRRSGA
GMDPRMYSLIQGSTMPRRSGA

SEQ ID NO: 84017 - protein, 21 aa, Artificial Sequence
  Description of Artificial Sequence: Synthetic peptide
  Seed: GMDPRMCSLMQGSTLPRRSGA
GMDPRMYSLIQGSTNPRRSGA

SEQ ID NO: 84018 - protein, 21 aa, Artificial Sequence
  Description of Artificial Sequence: Synthetic peptide
  Seed: GMDPRMCSLMQGSTLPRRSGA
GMDPRMYSLIQGSTSPRRSGA

SEQ ID NO: 84019 - protein, 21 aa, Artificial Sequence
  Description of Artificial Sequence: Synthetic peptide
  Seed: GMDPRMCSLMQGSTLPRRSGA
GMDPRMYSLIQGSTTPRRSGA

SEQ ID NO: 84020 - protein, 21 aa, Artificial Sequence
  Description of Artificial Sequence: Synthetic peptide
  Seed: GMDPRMCSLMQGSTLPRRSGA
GMDPRMYSLIQGSTVPRRSGA

SEQ ID NO: 84021 - protein, 21 aa, Artificial Sequence
  Description of Artificial Sequence: Synthetic peptide
  Seed: GMDPRMCSLMQGSTLPRRSGA
GMDPRMYSLIQISTAPRRSGA

SEQ ID NO: 84022 - protein, 21 aa, Artificial Sequence
  Description of Artificial Sequence: Synthetic peptide
  Seed: GMDPRMCSLMQGSTLPRRSGA
GMDPRMYSLIQISTGPRRSGA

SEQ ID NO: 84023 - protein, 21 aa, Artificial Sequence
  Description of Artificial Sequence: Synthetic peptide
  Seed: GMDPRMCSLMQGSTLPRRSGA
GMDPRMYSLIQISTMPRRSGA

SEQ ID NO: 84024 - protein, 21 aa, Artificial Sequence
  Description of Artificial Sequence: Synthetic peptide
  Seed: GMDPRMCSLMQGSTLPRRSGA
GMDPRMYSLIQISTNPRRSGA

SEQ ID NO: 84025 - protein, 21 aa, Artificial Sequence
  Description of Artificial Sequence: Synthetic peptide
  Seed: GMDPRMCSLMQGSTLPRRSGA
GMDPRMYSLIQISTSPRRSGA

SEQ ID NO: 84026 - protein, 21 aa, Artificial Sequence
  Description of Artificial Sequence: Synthetic peptide
  Seed: GMDPRMCSLMQGSTLPRRSGA
GMDPRMYSLIQISTTPRRSGA

SEQ ID NO: 84027 - protein, 21 aa, Artificial Sequence
  Description of Artificial Sequence: Synthetic peptide
  Seed: GMDPRMCSLMQGSTLPRRSGA
GMDPRMYSLIQISTVPRRSGA

SEQ ID NO: 84028 - protein, 21 aa, Artificial Sequence
  Description of Artificial Sequence: Synthetic peptide
  Seed: GMDPRMCSLMQGSTLPRRSGA
GMDPRMYSLIQLSTAPRRSGA

SEQ ID NO: 84029 - protein, 21 aa, Artificial Sequence
  Description of Artificial Sequence: Synthetic peptide
  Seed: GMDPRMCSLMQGSTLPRRSGA
GMDPRMYSLIQLSTNPRRSGA

SEQ ID NO: 84030 - protein, 21 aa, Artificial Sequence
  Description of Artificial Sequence: Synthetic peptide
  Seed: GMDPRMCSLMQGSTLPRRSGA
GMDPRMYSLIQMSTAPRRSGA

SEQ ID NO: 84031 - protein, 21 aa, Artificial Sequence
  Description of Artificial Sequence: Synthetic peptide
  Seed: GMDPRMCSLMQGSTLPRRSGA
GMDPRMYSLIQNSTAPRRSGA

SEQ ID NO: 84032 - protein, 21 aa, Artificial Sequence
  Description of Artificial Sequence: Synthetic peptide
  Seed: GMDPRMCSLMQGSTLPRRSGA
GMDPRMYSLIQNSTIPRRSGA

SEQ ID NO: 84033 - protein, 21 aa, Artificial Sequence
  Description of Artificial Sequence: Synthetic peptide
  Seed: GMDPRMCSLMQGSTLPRRSGA
GMDPRMYSLIQNSTLPRRSGA

SEQ ID NO: 84034 - protein, 21 aa, Artificial Sequence
  Description of Artificial Sequence: Synthetic peptide
  Seed: GMDPRMCSLMQGSTLPRRSGA
GMDPRMYSLIQNSTNPRRSGA

SEQ ID NO: 84035 - protein, 21 aa, Artificial Sequence
  Description of Artificial Sequence: Synthetic peptide
  Seed: GMDPRMCSLMQGSTLPRRSGA
GMDPRMYSLIQNSTSPRRSGA

SEQ ID NO: 84036 - protein, 21 aa, Artificial Sequence
  Description of Artificial Sequence: Synthetic peptide
  Seed: GMDPRMCSLMQGSTLPRRSGA
GMDPRMYSLIQNSTVPRRSGA

SEQ ID NO: 84037 - protein, 21 aa, Artificial Sequence
  Description of Artificial Sequence: Synthetic peptide
  Seed: GMDPRMCSLMQGSTLPRRSGA
GMDPRMYSLIQPSTAPRRSGA

SEQ ID NO: 84038 - protein, 21 aa, Artificial Sequence
  Description of Artificial Sequence: Synthetic peptide
  Seed: GMDPRMCSLMQGSTLPRRSGA
GMDPRMYSLIQPSTGPRRSGA

SEQ ID NO: 84039 - protein, 21 aa, Artificial Sequence
  Description of Artificial Sequence: Synthetic peptide
  Seed: GMDPRMCSLMQGSTLPRRSGA
GMDPRMYSLIQPSTIPRRSGA

SEQ ID NO: 84040 - protein, 21 aa, Artificial Sequence
  Description of Artificial Sequence: Synthetic peptide
  Seed: GMDPRMCSLMQGSTLPRRSGA
GMDPRMYSLIQPSTLPRRSGA

SEQ ID NO: 84041 - protein, 21 aa, Artificial Sequence
  Description of Artificial Sequence: Synthetic peptide
  Seed: GMDPRMCSLMQGSTLPRRSGA
GMDPRMYSLIQPSTMPRRSGA

SEQ ID NO: 84042 - protein, 21 aa, Artificial Sequence
  Description of Artificial Sequence: Synthetic peptide
  Seed: GMDPRMCSLMQGSTLPRRSGA
GMDPRMYSLIQPSTNPRRSGA

SEQ ID NO: 84043 - protein, 21 aa, Artificial Sequence
  Description of Artificial Sequence: Synthetic peptide
  Seed: GMDPRMCSLMQGSTLPRRSGA
GMDPRMYSLIQPSTQPRRSGA

SEQ ID NO: 84044 - protein, 21 aa, Artificial Sequence
  Description of Artificial Sequence: Synthetic peptide
  Seed: GMDPRMCSLMQGSTLPRRSGA
GMDPRMYSLIQPSTSPRRSGA

SEQ ID NO: 84045 - protein, 21 aa, Artificial Sequence
  Description of Artificial Sequence: Synthetic peptide
  Seed: GMDPRMCSLMQGSTLPRRSGA
GMDPRMYSLIQPSTTPRRSGA

SEQ ID NO: 84046 - protein, 21 aa, Artificial Sequence
  Description of Artificial Sequence: Synthetic peptide
  Seed: GMDPRMCSLMQGSTLPRRSGA
GMDPRMYSLIQPSTVPRRSGA

SEQ ID NO: 84047 - protein, 21 aa, Artificial Sequence
  Description of Artificial Sequence: Synthetic peptide
  Seed: GMDPRMCSLMQGSTLPRRSGA
GMDPRMYSLIQSSTAPRRSGA

SEQ ID NO: 84048 - protein, 21 aa, Artificial Sequence
  Description of Artificial Sequence: Synthetic peptide
  Seed: GMDPRMCSLMQGSTLPRRSGA
GMDPRMYSLIQSSTGPRRSGA

SEQ ID NO: 84049 - protein, 21 aa, Artificial Sequence
  Description of Artificial Sequence: Synthetic peptide
  Seed: GMDPRMCSLMQGSTLPRRSGA
GMDPRMYSLIQSSTIPRRSGA

SEQ ID NO: 84050 - protein, 21 aa, Artificial Sequence
  Description of Artificial Sequence: Synthetic peptide
  Seed: GMDPRMCSLMQGSTLPRRSGA
GMDPRMYSLIQSSTLPRRSGA

SEQ ID NO: 84051 - protein, 21 aa, Artificial Sequence
  Description of Artificial Sequence: Synthetic peptide
  Seed: GMDPRMCSLMQGSTLPRRSGA
GMDPRMYSLIQSSTMPRRSGA

SEQ ID NO: 84052 - protein, 21 aa, Artificial Sequence
  Description of Artificial Sequence: Synthetic peptide
  Seed: GMDPRMCSLMQGSTLPRRSGA
GMDPRMYSLIQSSTNPRRSGA

SEQ ID NO: 84053 - protein, 21 aa, Artificial Sequence
  Description of Artificial Sequence: Synthetic peptide
  Seed: GMDPRMCSLMQGSTLPRRSGA
GMDPRMYSLIQSSTSPRRSGA

SEQ ID NO: 84054 - protein, 21 aa, Artificial Sequence
  Description of Artificial Sequence: Synthetic peptide
  Seed: GMDPRMCSLMQGSTLPRRSGA
GMDPRMYSLIQSSTTPRRSGA

SEQ ID NO: 84055 - protein, 21 aa, Artificial Sequence
  Description of Artificial Sequence: Synthetic peptide
  Seed: GMDPRMCSLMQGSTLPRRSGA
GMDPRMYSLIQSSTVPRRSGA

SEQ ID NO: 84056 - protein, 21 aa, Artificial Sequence
  Description of Artificial Sequence: Synthetic peptide
  Seed: GMDPRMCSLMQGSTLPRRSGA
GMDPRMYSLIQTSTAPRRSGA

SEQ ID NO: 84057 - protein, 21 aa, Artificial Sequence
  Description of Artificial Sequence: Synthetic peptide
  Seed: GMDPRMCSLMQGSTLPRRSGA
GMDPRMYSLIQTSTGPRRSGA

SEQ ID NO: 84058 - protein, 21 aa, Artificial Sequence
  Description of Artificial Sequence: Synthetic peptide
  Seed: GMDPRMCSLMQGSTLPRRSGA
GMDPRMYSLIQTSTIPRRSGA

SEQ ID NO: 84059 - protein, 21 aa, Artificial Sequence
  Description of Artificial Sequence: Synthetic peptide
  Seed: GMDPRMCSLMQGSTLPRRSGA
GMDPRMYSLIQTSTLPRRSGA

SEQ ID NO: 84060 - protein, 21 aa, Artificial Sequence
  Description of Artificial Sequence: Synthetic peptide
  Seed: GMDPRMCSLMQGSTLPRRSGA
GMDPRMYSLIQTSTMPRRSGA

SEQ ID NO: 84061 - protein, 21 aa, Artificial Sequence
  Description of Artificial Sequence: Synthetic peptide
  Seed: GMDPRMCSLMQGSTLPRRSGA
GMDPRMYSLIQTSTNPRRSGA

SEQ ID NO: 84062 - protein, 21 aa, Artificial Sequence
  Description of Artificial Sequence: Synthetic peptide
  Seed: GMDPRMCSLMQGSTLPRRSGA
GMDPRMYSLIQTSTSPRRSGA

SEQ ID NO: 84063 - protein, 21 aa, Artificial Sequence
  Description of Artificial Sequence: Synthetic peptide
  Seed: GMDPRMCSLMQGSTLPRRSGA
GMDPRMYSLIQTSTTPRRSGA

SEQ ID NO: 84064 - protein, 21 aa, Artificial Sequence
  Description of Artificial Sequence: Synthetic peptide
  Seed: GMDPRMCSLMQGSTLPRRSGA
GMDPRMYSLIQTSTVPRRSGA

SEQ ID NO: 84065 - protein, 21 aa, Artificial Sequence
  Description of Artificial Sequence: Synthetic peptide
  Seed: GMDPRMCSLMQGSTLPRRSGA
GMDPRMYSLIQVSTAPRRSGA

SEQ ID NO: 84066 - protein, 21 aa, Artificial Sequence
  Description of Artificial Sequence: Synthetic peptide
  Seed: GMDPRMCSLMQGSTLPRRSGA
GMDPRMYSLIQVSTGPRRSGA

SEQ ID NO: 84067 - protein, 21 aa, Artificial Sequence
  Description of Artificial Sequence: Synthetic peptide
  Seed: GMDPRMCSLMQGSTLPRRSGA
GMDPRMYSLIQVSTIPRRSGA

SEQ ID NO: 84068 - protein, 21 aa, Artificial Sequence
  Description of Artificial Sequence: Synthetic peptide
  Seed: GMDPRMCSLMQGSTLPRRSGA
GMDPRMYSLIQVSTLPRRSGA

SEQ ID NO: 84069 - protein, 21 aa, Artificial Sequence
  Description of Artificial Sequence: Synthetic peptide
  Seed: GMDPRMCSLMQGSTLPRRSGA
GMDPRMYSLIQVSTMPRRSGA

SEQ ID NO: 84070 - protein, 21 aa, Artificial Sequence
  Description of Artificial Sequence: Synthetic peptide
  Seed: GMDPRMCSLMQGSTLPRRSGA
GMDPRMYSLIQVSTNPRRSGA

SEQ ID NO: 84071 - protein, 21 aa, Artificial Sequence
  Description of Artificial Sequence: Synthetic peptide
  Seed: GMDPRMCSLMQGSTLPRRSGA
GMDPRMYSLIQVSTSPRRSGA

SEQ ID NO: 84072 - protein, 21 aa, Artificial Sequence
  Description of Artificial Sequence: Synthetic peptide
  Seed: GMDPRMCSLMQGSTLPRRSGA
GMDPRMYSLIQVSTTPRRSGA

SEQ ID NO: 84073 - protein, 21 aa, Artificial Sequence
  Description of Artificial Sequence: Synthetic peptide
  Seed: GMDPRMCSLMQGSTLPRRSGA
GMDPRMYSLIQVSTVPRRSGA

SEQ ID NO: 84074 - protein, 21 aa, Artificial Sequence
  Description of Artificial Sequence: Synthetic peptide
  Seed: GMDPRMCSLMQGSTLPRRSGA
GMDPRMYSLLQASTAPRRSGA

SEQ ID NO: 84075 - protein, 21 aa, Artificial Sequence
  Description of Artificial Sequence: Synthetic peptide
  Seed: GMDPRMCSLMQGSTLPRRSGA
GMDPRMYSLLQASTCPRRSGA

SEQ ID NO: 84076 - protein, 21 aa, Artificial Sequence
  Description of Artificial Sequence: Synthetic peptide
  Seed: GMDPRMCSLMQGSTLPRRSGA
GMDPRMYSLLQASTDPRRSGA

SEQ ID NO: 84077 - protein, 21 aa, Artificial Sequence
  Description of Artificial Sequence: Synthetic peptide
  Seed: GMDPRMCSLMQGSTLPRRSGA
GMDPRMYSLLQASTEPRRSGA

SEQ ID NO: 84078 - protein, 21 aa, Artificial Sequence
  Description of Artificial Sequence: Synthetic peptide
  Seed: GMDPRMCSLMQGSTLPRRSGA
GMDPRMYSLLQASTFPRRSGA

SEQ ID NO: 84079 - protein, 21 aa, Artificial Sequence
  Description of Artificial Sequence: Synthetic peptide
  Seed: GMDPRMCSLMQGSTLPRRSGA
GMDPRMYSLLQASTGPRRSGA

SEQ ID NO: 84080 - protein, 21 aa, Artificial Sequence
  Description of Artificial Sequence: Synthetic peptide
  Seed: GMDPRMCSLMQGSTLPRRSGA
GMDPRMYSLLQASTHPRRSGA

SEQ ID NO: 84081 - protein, 21 aa, Artificial Sequence
  Description of Artificial Sequence: Synthetic peptide
  Seed: GMDPRMCSLMQGSTLPRRSGA
GMDPRMYSLLQASTIPRRSGA

SEQ ID NO: 84082 - protein, 21 aa, Artificial Sequence
  Description of Artificial Sequence: Synthetic peptide
  Seed: GMDPRMCSLMQGSTLPRRSGA
GMDPRMYSLLQASTLPRRSGA

SEQ ID NO: 84083 - protein, 21 aa, Artificial Sequence
  Description of Artificial Sequence: Synthetic peptide
  Seed: GMDPRMCSLMQGSTLPRRSGA
GMDPRMYSLLQASTMPRRSGA

SEQ ID NO: 84084 - protein, 21 aa, Artificial Sequence
  Description of Artificial Sequence: Synthetic peptide
  Seed: GMDPRMCSLMQGSTLPRRSGA
GMDPRMYSLLQASTNPRRSGA

SEQ ID NO: 84085 - protein, 21 aa, Artificial Sequence
  Description of Artificial Sequence: Synthetic peptide
  Seed: GMDPRMCSLMQGSTLPRRSGA
GMDPRMYSLLQASTPPRRSGA

SEQ ID NO: 84086 - protein, 21 aa, Artificial Sequence
  Description of Artificial Sequence: Synthetic peptide
  Seed: GMDPRMCSLMQGSTLPRRSGA
GMDPRMYSLLQASTQPRRSGA

SEQ ID NO: 84087 - protein, 21 aa, Artificial Sequence
  Description of Artificial Sequence: Synthetic peptide
  Seed: GMDPRMCSLMQGSTLPRRSGA
GMDPRMYSLLQASTSPRRSGA

SEQ ID NO: 84088 - protein, 21 aa, Artificial Sequence
  Description of Artificial Sequence: Synthetic peptide
  Seed: GMDPRMCSLMQGSTLPRRSGA
GMDPRMYSLLQASTTPRRSGA

SEQ ID NO: 84089 - protein, 21 aa, Artificial Sequence
  Description of Artificial Sequence: Synthetic peptide
  Seed: GMDPRMCSLMQGSTLPRRSGA
GMDPRMYSLLQASTVPRRSGA

SEQ ID NO: 84090 - protein, 21 aa, Artificial Sequence
  Description of Artificial Sequence: Synthetic peptide
  Seed: GMDPRMCSLMQGSTLPRRSGA
GMDPRMYSLLQGSTAPRRSGA

SEQ ID NO: 84091 - protein, 21 aa, Artificial Sequence
  Description of Artificial Sequence: Synthetic peptide
  Seed: GMDPRMCSLMQGSTLPRRSGA
GMDPRMYSLLQGSTCPRRSGA

SEQ ID NO: 84092 - protein, 21 aa, Artificial Sequence
  Description of Artificial Sequence: Synthetic peptide
  Seed: GMDPRMCSLMQGSTLPRRSGA
GMDPRMYSLLQGSTFPRRSGA

SEQ ID NO: 84093 - protein, 21 aa, Artificial Sequence
  Description of Artificial Sequence: Synthetic peptide
  Seed: GMDPRMCSLMQGSTLPRRSGA
GMDPRMYSLLQGSTGPRRSGA

SEQ ID NO: 84094 - protein, 21 aa, Artificial Sequence
  Description of Artificial Sequence: Synthetic peptide
  Seed: GMDPRMCSLMQGSTLPRRSGA
GMDPRMYSLLQGSTIPRRSGA

SEQ ID NO: 84095 - protein, 21 aa, Artificial Sequence
  Description of Artificial Sequence: Synthetic peptide
  Seed: GMDPRMCSLMQGSTLPRRSGA
GMDPRMYSLLQGSTLPRRSGA

SEQ ID NO: 84096 - protein, 21 aa, Artificial Sequence
  Description of Artificial Sequence: Synthetic peptide
  Seed: GMDPRMCSLMQGSTLPRRSGA
GMDPRMYSLLQGSTMPRRSGA

SEQ ID NO: 84097 - protein, 21 aa, Artificial Sequence
  Description of Artificial Sequence: Synthetic peptide
  Seed: GMDPRMCSLMQGSTLPRRSGA
GMDPRMYSLLQGSTNPRRSGA

SEQ ID NO: 84098 - protein, 21 aa, Artificial Sequence
  Description of Artificial Sequence: Synthetic peptide
  Seed: GMDPRMCSLMQGSTLPRRSGA
GMDPRMYSLLQGSTSPRRSGA

SEQ ID NO: 84099 - protein, 21 aa, Artificial Sequence
  Description of Artificial Sequence: Synthetic peptide
  Seed: GMDPRMCSLMQGSTLPRRSGA
GMDPRMYSLLQGSTTPRRSGA

SEQ ID NO: 84100 - protein, 21 aa, Artificial Sequence
  Description of Artificial Sequence: Synthetic peptide
  Seed: GMDPRMCSLMQGSTLPRRSGA
GMDPRMYSLLQGSTVPRRSGA

SEQ ID NO: 84101 - protein, 21 aa, Artificial Sequence
  Description of Artificial Sequence: Synthetic peptide
  Seed: GMDPRMCSLMQGSTLPRRSGA
GMDPRMYSLLQISTAPRRSGA

SEQ ID NO: 84102 - protein, 21 aa, Artificial Sequence
  Description of Artificial Sequence: Synthetic peptide
  Seed: GMDPRMCSLMQGSTLPRRSGA
GMDPRMYSLLQISTGPRRSGA

SEQ ID NO: 84103 - protein, 21 aa, Artificial Sequence
  Description of Artificial Sequence: Synthetic peptide
  Seed: GMDPRMCSLMQGSTLPRRSGA
GMDPRMYSLLQISTIPRRSGA

SEQ ID NO: 84104 - protein, 21 aa, Artificial Sequence
  Description of Artificial Sequence: Synthetic peptide
  Seed: GMDPRMCSLMQGSTLPRRSGA
GMDPRMYSLLQISTLPRRSGA

SEQ ID NO: 84105 - protein, 21 aa, Artificial Sequence
  Description of Artificial Sequence: Synthetic peptide
  Seed: GMDPRMCSLMQGSTLPRRSGA
GMDPRMYSLLQISTMPRRSGA

SEQ ID NO: 84106 - protein, 21 aa, Artificial Sequence
  Description of Artificial Sequence: Synthetic peptide
  Seed: GMDPRMCSLMQGSTLPRRSGA
GMDPRMYSLLQISTNPRRSGA

SEQ ID NO: 84107 - protein, 21 aa, Artificial Sequence
  Description of Artificial Sequence: Synthetic peptide
  Seed: GMDPRMCSLMQGSTLPRRSGA
GMDPRMYSLLQISTSPRRSGA

SEQ ID NO: 84108 - protein, 21 aa, Artificial Sequence
  Description of Artificial Sequence: Synthetic peptide
  Seed: GMDPRMCSLMQGSTLPRRSGA
GMDPRMYSLLQISTTPRRSGA

SEQ ID NO: 84109 - protein, 21 aa, Artificial Sequence
  Description of Artificial Sequence: Synthetic peptide
  Seed: GMDPRMCSLMQGSTLPRRSGA
GMDPRMYSLLQISTVPRRSGA

SEQ ID NO: 84110 - protein, 21 aa, Artificial Sequence
  Description of Artificial Sequence: Synthetic peptide
  Seed: GMDPRMCSLMQGSTLPRRSGA
GMDPRMYSLLQLSTAPRRSGA

SEQ ID NO: 84111 - protein, 21 aa, Artificial Sequence
  Description of Artificial Sequence: Synthetic peptide
  Seed: GMDPRMCSLMQGSTLPRRSGA
GMDPRMYSLLQLSTNPRRSGA

SEQ ID NO: 84112 - protein, 21 aa, Artificial Sequence
  Description of Artificial Sequence: Synthetic peptide
  Seed: GMDPRMCSLMQGSTLPRRSGA
GMDPRMYSLLQLSTSPRRSGA

SEQ ID NO: 84113 - protein, 21 aa, Artificial Sequence
  Description of Artificial Sequence: Synthetic peptide
  Seed: GMDPRMCSLMQGSTLPRRSGA
GMDPRMYSLLQMSTAPRRSGA

SEQ ID NO: 84114 - protein, 21 aa, Artificial Sequence
  Description of Artificial Sequence: Synthetic peptide
  Seed: GMDPRMCSLMQGSTLPRRSGA
GMDPRMYSLLQMSTNPRRSGA

SEQ ID NO: 84115 - protein, 21 aa, Artificial Sequence
  Description of Artificial Sequence: Synthetic peptide
  Seed: GMDPRMCSLMQGSTLPRRSGA
GMDPRMYSLLQMSTSPRRSGA

SEQ ID NO: 84116 - protein, 21 aa, Artificial Sequence
  Description of Artificial Sequence: Synthetic peptide
  Seed: GMDPRMCSLMQGSTLPRRSGA
GMDPRMYSLLQNSTAPRRSGA

SEQ ID NO: 84117 - protein, 21 aa, Artificial Sequence
  Description of Artificial Sequence: Synthetic peptide
  Seed: GMDPRMCSLMQGSTLPRRSGA
GMDPRMYSLLQNSTIPRRSGA

SEQ ID NO: 84118 - protein, 21 aa, Artificial Sequence
  Description of Artificial Sequence: Synthetic peptide
  Seed: GMDPRMCSLMQGSTLPRRSGA
GMDPRMYSLLQNSTLPRRSGA

SEQ ID NO: 84119 - protein, 21 aa, Artificial Sequence
  Description of Artificial Sequence: Synthetic peptide
  Seed: GMDPRMCSLMQGSTLPRRSGA
GMDPRMYSLLQNSTMPRRSGA

SEQ ID NO: 84120 - protein, 21 aa, Artificial Sequence
  Description of Artificial Sequence: Synthetic peptide
  Seed: GMDPRMCSLMQGSTLPRRSGA
GMDPRMYSLLQNSTNPRRSGA

SEQ ID NO: 84121 - protein, 21 aa, Artificial Sequence
  Description of Artificial Sequence: Synthetic peptide
  Seed: GMDPRMCSLMQGSTLPRRSGA
GMDPRMYSLLQNSTSPRRSGA

SEQ ID NO: 84122 - protein, 21 aa, Artificial Sequence
  Description of Artificial Sequence: Synthetic peptide
  Seed: GMDPRMCSLMQGSTLPRRSGA
GMDPRMYSLLQNSTTPRRSGA

SEQ ID NO: 84123 - protein, 21 aa, Artificial Sequence
  Description of Artificial Sequence: Synthetic peptide
  Seed: GMDPRMCSLMQGSTLPRRSGA
GMDPRMYSLLQNSTVPRRSGA

SEQ ID NO: 84124 - protein, 21 aa, Artificial Sequence
  Description of Artificial Sequence: Synthetic peptide
  Seed: GMDPRMCSLMQGSTLPRRSGA
GMDPRMYSLLQPSTAPRRSGA

SEQ ID NO: 84125 - protein, 21 aa, Artificial Sequence
  Description of Artificial Sequence: Synthetic peptide
  Seed: GMDPRMCSLMQGSTLPRRSGA
GMDPRMYSLLQPSTGPRRSGA

SEQ ID NO: 84126 - protein, 21 aa, Artificial Sequence
  Description of Artificial Sequence: Synthetic peptide
  Seed: GMDPRMCSLMQGSTLPRRSGA
GMDPRMYSLLQPSTHPRRSGA

SEQ ID NO: 84127 - protein, 21 aa, Artificial Sequence
  Description of Artificial Sequence: Synthetic peptide
  Seed: GMDPRMCSLMQGSTLPRRSGA
GMDPRMYSLLQPSTIPRRSGA

SEQ ID NO: 84128 - protein, 21 aa, Artificial Sequence
  Description of Artificial Sequence: Synthetic peptide
  Seed: GMDPRMCSLMQGSTLPRRSGA
GMDPRMYSLLQPSTLPRRSGA

SEQ ID NO: 84129 - protein, 21 aa, Artificial Sequence
  Description of Artificial Sequence: Synthetic peptide
  Seed: GMDPRMCSLMQGSTLPRRSGA
GMDPRMYSLLQPSTMPRRSGA

SEQ ID NO: 84130 - protein, 21 aa, Artificial Sequence
  Description of Artificial Sequence: Synthetic peptide
  Seed: GMDPRMCSLMQGSTLPRRSGA
GMDPRMYSLLQPSTNPRRSGA

SEQ ID NO: 84131 - protein, 21 aa, Artificial Sequence
  Description of Artificial Sequence: Synthetic peptide
  Seed: GMDPRMCSLMQGSTLPRRSGA
GMDPRMYSLLQPSTPPRRSGA

SEQ ID NO: 84132 - protein, 21 aa, Artificial Sequence
  Description of Artificial Sequence: Synthetic peptide
  Seed: GMDPRMCSLMQGSTLPRRSGA
GMDPRMYSLLQPSTQPRRSGA

SEQ ID NO: 84133 - protein, 21 aa, Artificial Sequence
  Description of Artificial Sequence: Synthetic peptide
  Seed: GMDPRMCSLMQGSTLPRRSGA
GMDPRMYSLLQPSTSPRRSGA

SEQ ID NO: 84134 - protein, 21 aa, Artificial Sequence
  Description of Artificial Sequence: Synthetic peptide
  Seed: GMDPRMCSLMQGSTLPRRSGA
GMDPRMYSLLQPSTTPRRSGA

SEQ ID NO: 84135 - protein, 21 aa, Artificial Sequence
  Description of Artificial Sequence: Synthetic peptide
  Seed: GMDPRMCSLMQGSTLPRRSGA
GMDPRMYSLLQPSTVPRRSGA

SEQ ID NO: 84136 - protein, 21 aa, Artificial Sequence
  Description of Artificial Sequence: Synthetic peptide
  Seed: GMDPRMCSLMQGSTLPRRSGA
GMDPRMYSLLQSSTAPRRSGA

SEQ ID NO: 84137 - protein, 21 aa, Artificial Sequence
  Description of Artificial Sequence: Synthetic peptide
  Seed: GMDPRMCSLMQGSTLPRRSGA
GMDPRMYSLLQSSTCPRRSGA

SEQ ID NO: 84138 - protein, 21 aa, Artificial Sequence
  Description of Artificial Sequence: Synthetic peptide
  Seed: GMDPRMCSLMQGSTLPRRSGA
GMDPRMYSLLQSSTGPRRSGA

SEQ ID NO: 84139 - protein, 21 aa, Artificial Sequence
  Description of Artificial Sequence: Synthetic peptide
  Seed: GMDPRMCSLMQGSTLPRRSGA
GMDPRMYSLLQSSTIPRRSGA

SEQ ID NO: 84140 - protein, 21 aa, Artificial Sequence
  Description of Artificial Sequence: Synthetic peptide
  Seed: GMDPRMCSLMQGSTLPRRSGA
GMDPRMYSLLQSSTLPRRSGA

SEQ ID NO: 84141 - protein, 21 aa, Artificial Sequence
  Description of Artificial Sequence: Synthetic peptide
  Seed: GMDPRMCSLMQGSTLPRRSGA
GMDPRMYSLLQSSTMPRRSGA

SEQ ID NO: 84142 - protein, 21 aa, Artificial Sequence
  Description of Artificial Sequence: Synthetic peptide
  Seed: GMDPRMCSLMQGSTLPRRSGA
GMDPRMYSLLQSSTNPRRSGA

SEQ ID NO: 84143 - protein, 21 aa, Artificial Sequence
  Description of Artificial Sequence: Synthetic peptide
  Seed: GMDPRMCSLMQGSTLPRRSGA
GMDPRMYSLLQSSTSPRRSGA

SEQ ID NO: 84144 - protein, 21 aa, Artificial Sequence
  Description of Artificial Sequence: Synthetic peptide
  Seed: GMDPRMCSLMQGSTLPRRSGA
GMDPRMYSLLQSSTTPRRSGA

SEQ ID NO: 84145 - protein, 21 aa, Artificial Sequence
  Description of Artificial Sequence: Synthetic peptide
  Seed: GMDPRMCSLMQGSTLPRRSGA
GMDPRMYSLLQSSTVPRRSGA

SEQ ID NO: 84146 - protein, 21 aa, Artificial Sequence
  Description of Artificial Sequence: Synthetic peptide
  Seed: GMDPRMCSLMQGSTLPRRSGA
GMDPRMYSLLQTSTAPRRSGA

SEQ ID NO: 84147 - protein, 21 aa, Artificial Sequence
  Description of Artificial Sequence: Synthetic peptide
  Seed: GMDPRMCSLMQGSTLPRRSGA
GMDPRMYSLLQTSTGPRRSGA

SEQ ID NO: 84148 - protein, 21 aa, Artificial Sequence
  Description of Artificial Sequence: Synthetic peptide
  Seed: GMDPRMCSLMQGSTLPRRSGA
GMDPRMYSLLQTSTIPRRSGA

SEQ ID NO: 84149 - protein, 21 aa, Artificial Sequence
  Description of Artificial Sequence: Synthetic peptide
  Seed: GMDPRMCSLMQGSTLPRRSGA
GMDPRMYSLLQTSTLPRRSGA

SEQ ID NO: 84150 - protein, 21 aa, Artificial Sequence
  Description of Artificial Sequence: Synthetic peptide
  Seed: GMDPRMCSLMQGSTLPRRSGA
GMDPRMYSLLQTSTMPRRSGA

SEQ ID NO: 84151 - protein, 21 aa, Artificial Sequence
  Description of Artificial Sequence: Synthetic peptide
  Seed: GMDPRMCSLMQGSTLPRRSGA
GMDPRMYSLLQTSTNPRRSGA

SEQ ID NO: 84152 - protein, 21 aa, Artificial Sequence
  Description of Artificial Sequence: Synthetic peptide
  Seed: GMDPRMCSLMQGSTLPRRSGA
GMDPRMYSLLQTSTSPRRSGA

SEQ ID NO: 84153 - protein, 21 aa, Artificial Sequence
  Description of Artificial Sequence: Synthetic peptide
  Seed: GMDPRMCSLMQGSTLPRRSGA
GMDPRMYSLLQTSTTPRRSGA

SEQ ID NO: 84154 - protein, 21 aa, Artificial Sequence
  Description of Artificial Sequence: Synthetic peptide
  Seed: GMDPRMCSLMQGSTLPRRSGA
GMDPRMYSLLQTSTVPRRSGA

SEQ ID NO: 84155 - protein, 21 aa, Artificial Sequence
  Description of Artificial Sequence: Synthetic peptide
  Seed: GMDPRMCSLMQGSTLPRRSGA
GMDPRMYSLLQVSTAPRRSGA

SEQ ID NO: 84156 - protein, 21 aa, Artificial Sequence
  Description of Artificial Sequence: Synthetic peptide
  Seed: GMDPRMCSLMQGSTLPRRSGA
GMDPRMYSLLQVSTGPRRSGA

SEQ ID NO: 84157 - protein, 21 aa, Artificial Sequence
  Description of Artificial Sequence: Synthetic peptide
  Seed: GMDPRMCSLMQGSTLPRRSGA
GMDPRMYSLLQVSTHPRRSGA

SEQ ID NO: 84158 - protein, 21 aa, Artificial Sequence
  Description of Artificial Sequence: Synthetic peptide
  Seed: GMDPRMCSLMQGSTLPRRSGA
GMDPRMYSLLQVSTIPRRSGA

SEQ ID NO: 84159 - protein, 21 aa, Artificial Sequence
  Description of Artificial Sequence: Synthetic peptide
  Seed: GMDPRMCSLMQGSTLPRRSGA
GMDPRMYSLLQVSTLPRRSGA

SEQ ID NO: 84160 - protein, 21 aa, Artificial Sequence
  Description of Artificial Sequence: Synthetic peptide
  Seed: GMDPRMCSLMQGSTLPRRSGA
GMDPRMYSLLQVSTMPRRSGA

SEQ ID NO: 84161 - protein, 21 aa, Artificial Sequence
  Description of Artificial Sequence: Synthetic peptide
  Seed: GMDPRMCSLMQGSTLPRRSGA
GMDPRMYSLLQVSTNPRRSGA

SEQ ID NO: 84162 - protein, 21 aa, Artificial Sequence
  Description of Artificial Sequence: Synthetic peptide
  Seed: GMDPRMCSLMQGSTLPRRSGA
GMDPRMYSLLQVSTQPRRSGA

SEQ ID NO: 84163 - protein, 21 aa, Artificial Sequence
  Description of Artificial Sequence: Synthetic peptide
  Seed: GMDPRMCSLMQGSTLPRRSGA
GMDPRMYSLLQVSTSPRRSGA

SEQ ID NO: 84164 - protein, 21 aa, Artificial Sequence
  Description of Artificial Sequence: Synthetic peptide
  Seed: GMDPRMCSLMQGSTLPRRSGA
GMDPRMYSLLQVSTTPRRSGA

SEQ ID NO: 84165 - protein, 21 aa, Artificial Sequence
  Description of Artificial Sequence: Synthetic peptide
  Seed: GMDPRMCSLMQGSTLPRRSGA
GMDPRMYSLLQVSTVPRRSGA

SEQ ID NO: 84166 - protein, 21 aa, Artificial Sequence
  Description of Artificial Sequence: Synthetic peptide
  Seed: GMDPRMCSLMQGSTLPRRSGA
GMDPRMYSLMQASTAPRRSGA

SEQ ID NO: 84167 - protein, 21 aa, Artificial Sequence
  Description of Artificial Sequence: Synthetic peptide
  Seed: GMDPRMCSLMQGSTLPRRSGA
GMDPRMYSLMQASTCPRRSGA

SEQ ID NO: 84168 - protein, 21 aa, Artificial Sequence
  Description of Artificial Sequence: Synthetic peptide
  Seed: GMDPRMCSLMQGSTLPRRSGA
GMDPRMYSLMQASTDPRRSGA

SEQ ID NO: 84169 - protein, 21 aa, Artificial Sequence
  Description of Artificial Sequence: Synthetic peptide
  Seed: GMDPRMCSLMQGSTLPRRSGA
GMDPRMYSLMQASTEPRRSGA

SEQ ID NO: 84170 - protein, 21 aa, Artificial Sequence
  Description of Artificial Sequence: Synthetic peptide
  Seed: GMDPRMCSLMQGSTLPRRSGA
GMDPRMYSLMQASTFPRRSGA

SEQ ID NO: 84171 - protein, 21 aa, Artificial Sequence
  Description of Artificial Sequence: Synthetic peptide
  Seed: GMDPRMCSLMQGSTLPRRSGA
GMDPRMYSLMQASTGPRRSGA

SEQ ID NO: 84172 - protein, 21 aa, Artificial Sequence
  Description of Artificial Sequence: Synthetic peptide
  Seed: GMDPRMCSLMQGSTLPRRSGA
GMDPRMYSLMQASTHPRRSGA

SEQ ID NO: 84173 - protein, 21 aa, Artificial Sequence
  Description of Artificial Sequence: Synthetic peptide
  Seed: GMDPRMCSLMQGSTLPRRSGA
GMDPRMYSLMQASTIPRRSGA

SEQ ID NO: 84174 - protein, 21 aa, Artificial Sequence
  Description of Artificial Sequence: Synthetic peptide
  Seed: GMDPRMCSLMQGSTLPRRSGA
GMDPRMYSLMQASTLPRRSGA

SEQ ID NO: 84175 - protein, 21 aa, Artificial Sequence
  Description of Artificial Sequence: Synthetic peptide
  Seed: GMDPRMCSLMQGSTLPRRSGA
GMDPRMYSLMQASTMPRRSGA

SEQ ID NO: 84176 - protein, 21 aa, Artificial Sequence
  Description of Artificial Sequence: Synthetic peptide
  Seed: GMDPRMCSLMQGSTLPRRSGA
GMDPRMYSLMQASTNPRRSGA

SEQ ID NO: 84177 - protein, 21 aa, Artificial Sequence
  Description of Artificial Sequence: Synthetic peptide
  Seed: GMDPRMCSLMQGSTLPRRSGA
GMDPRMYSLMQASTPPRRSGA

SEQ ID NO: 84178 - protein, 21 aa, Artificial Sequence
  Description of Artificial Sequence: Synthetic peptide
  Seed: GMDPRMCSLMQGSTLPRRSGA
GMDPRMYSLMQASTQPRRSGA

SEQ ID NO: 84179 - protein, 21 aa, Artificial Sequence
  Description of Artificial Sequence: Synthetic peptide
  Seed: GMDPRMCSLMQGSTLPRRSGA
GMDPRMYSLMQASTSPRRSGA

SEQ ID NO: 84180 - protein, 21 aa, Artificial Sequence
  Description of Artificial Sequence: Synthetic peptide
  Seed: GMDPRMCSLMQGSTLPRRSGA
GMDPRMYSLMQASTTPRRSGA

SEQ ID NO: 84181 - protein, 21 aa, Artificial Sequence
  Description of Artificial Sequence: Synthetic peptide
  Seed: GMDPRMCSLMQGSTLPRRSGA
GMDPRMYSLMQASTVPRRSGA

SEQ ID NO: 84182 - protein, 21 aa, Artificial Sequence
  Description of Artificial Sequence: Synthetic peptide
  Seed: GMDPRMCSLMQGSTLPRRSGA
GMDPRMYSLMQGSTAPRRSGA

SEQ ID NO: 84183 - protein, 21 aa, Artificial Sequence
  Description of Artificial Sequence: Synthetic peptide
  Seed: GMDPRMCSLMQGSTLPRRSGA
GMDPRMYSLMQGSTCPRRSGA

SEQ ID NO: 84184 - protein, 21 aa, Artificial Sequence
  Description of Artificial Sequence: Synthetic peptide
  Seed: GMDPRMCSLMQGSTLPRRSGA
GMDPRMYSLMQGSTFPRRSGA

SEQ ID NO: 84185 - protein, 21 aa, Artificial Sequence
  Description of Artificial Sequence: Synthetic peptide
  Seed: GMDPRMCSLMQGSTLPRRSGA
GMDPRMYSLMQGSTGPRRSGA

SEQ ID NO: 84186 - protein, 21 aa, Artificial Sequence
  Description of Artificial Sequence: Synthetic peptide
  Seed: GMDPRMCSLMQGSTLPRRSGA
GMDPRMYSLMQGSTIPRRSGA

SEQ ID NO: 84187 - protein, 21 aa, Artificial Sequence
  Description of Artificial Sequence: Synthetic peptide
  Seed: GMDPRMCSLMQGSTLPRRSGA
GMDPRMYSLMQGSTLPRRSGA

SEQ ID NO: 84188 - protein, 21 aa, Artificial Sequence
  Description of Artificial Sequence: Synthetic peptide
  Seed: GMDPRMCSLMQGSTLPRRSGA
GMDPRMYSLMQGSTMPRRSGA

SEQ ID NO: 84189 - protein, 21 aa, Artificial Sequence
  Description of Artificial Sequence: Synthetic peptide
  Seed: GMDPRMCSLMQGSTLPRRSGA
GMDPRMYSLMQGSTNPRRSGA

SEQ ID NO: 84190 - protein, 21 aa, Artificial Sequence
  Description of Artificial Sequence: Synthetic peptide
  Seed: GMDPRMCSLMQGSTLPRRSGA
GMDPRMYSLMQGSTSPRRSGA

SEQ ID NO: 84191 - protein, 21 aa, Artificial Sequence
  Description of Artificial Sequence: Synthetic peptide
  Seed: GMDPRMCSLMQGSTLPRRSGA
GMDPRMYSLMQGSTTPRRSGA

SEQ ID NO: 84192 - protein, 21 aa, Artificial Sequence
  Description of Artificial Sequence: Synthetic peptide
  Seed: GMDPRMCSLMQGSTLPRRSGA
GMDPRMYSLMQGSTVPRRSGA

SEQ ID NO: 84193 - protein, 21 aa, Artificial Sequence
  Description of Artificial Sequence: Synthetic peptide
  Seed: GMDPRMCSLMQGSTLPRRSGA
GMDPRMYSLMQISTAPRRSGA

SEQ ID NO: 84194 - protein, 21 aa, Artificial Sequence
  Description of Artificial Sequence: Synthetic peptide
  Seed: GMDPRMCSLMQGSTLPRRSGA
GMDPRMYSLMQISTGPRRSGA

SEQ ID NO: 84195 - protein, 21 aa, Artificial Sequence
  Description of Artificial Sequence: Synthetic peptide
  Seed: GMDPRMCSLMQGSTLPRRSGA
GMDPRMYSLMQISTHPRRSGA

SEQ ID NO: 84196 - protein, 21 aa, Artificial Sequence
  Description of Artificial Sequence: Synthetic peptide
  Seed: GMDPRMCSLMQGSTLPRRSGA
GMDPRMYSLMQISTIPRRSGA

SEQ ID NO: 84197 - protein, 21 aa, Artificial Sequence
  Description of Artificial Sequence: Synthetic peptide
  Seed: GMDPRMCSLMQGSTLPRRSGA
GMDPRMYSLMQISTLPRRSGA

SEQ ID NO: 84198 - protein, 21 aa, Artificial Sequence
  Description of Artificial Sequence: Synthetic peptide
  Seed: GMDPRMCSLMQGSTLPRRSGA
GMDPRMYSLMQISTMPRRSGA

SEQ ID NO: 84199 - protein, 21 aa, Artificial Sequence
  Description of Artificial Sequence: Synthetic peptide
  Seed: GMDPRMCSLMQGSTLPRRSGA
GMDPRMYSLMQISTNPRRSGA

SEQ ID NO: 84200 - protein, 21 aa, Artificial Sequence
  Description of Artificial Sequence: Synthetic peptide
  Seed: GMDPRMCSLMQGSTLPRRSGA
GMDPRMYSLMQISTQPRRSGA

SEQ ID NO: 84201 - protein, 21 aa, Artificial Sequence
  Description of Artificial Sequence: Synthetic peptide
  Seed: GMDPRMCSLMQGSTLPRRSGA
GMDPRMYSLMQISTSPRRSGA

SEQ ID NO: 84202 - protein, 21 aa, Artificial Sequence
  Description of Artificial Sequence: Synthetic peptide
  Seed: GMDPRMCSLMQGSTLPRRSGA
GMDPRMYSLMQISTTPRRSGA

SEQ ID NO: 84203 - protein, 21 aa, Artificial Sequence
  Description of Artificial Sequence: Synthetic peptide
  Seed: GMDPRMCSLMQGSTLPRRSGA
GMDPRMYSLMQISTVPRRSGA

SEQ ID NO: 84204 - protein, 21 aa, Artificial Sequence
  Description of Artificial Sequence: Synthetic peptide
  Seed: GMDPRMCSLMQGSTLPRRSGA
GMDPRMYSLMQLSTAPRRSGA

SEQ ID NO: 84205 - protein, 21 aa, Artificial Sequence
  Description of Artificial Sequence: Synthetic peptide
  Seed: GMDPRMCSLMQGSTLPRRSGA
GMDPRMYSLMQLSTNPRRSGA

SEQ ID NO: 84206 - protein, 21 aa, Artificial Sequence
  Description of Artificial Sequence: Synthetic peptide
  Seed: GMDPRMCSLMQGSTLPRRSGA
GMDPRMYSLMQLSTSPRRSGA

SEQ ID NO: 84207 - protein, 21 aa, Artificial Sequence
  Description of Artificial Sequence: Synthetic peptide
  Seed: GMDPRMCSLMQGSTLPRRSGA
GMDPRMYSLMQLSTTPRRSGA

SEQ ID NO: 84208 - protein, 21 aa, Artificial Sequence
  Description of Artificial Sequence: Synthetic peptide
  Seed: GMDPRMCSLMQGSTLPRRSGA
GMDPRMYSLMQLSTVPRRSGA

SEQ ID NO: 84209 - protein, 21 aa, Artificial Sequence
  Description of Artificial Sequence: Synthetic peptide
  Seed: GMDPRMCSLMQGSTLPRRSGA
GMDPRMYSLMQMSTAPRRSGA

SEQ ID NO: 84210 - protein, 21 aa, Artificial Sequence
  Description of Artificial Sequence: Synthetic peptide
  Seed: GMDPRMCSLMQGSTLPRRSGA
GMDPRMYSLMQMSTNPRRSGA

SEQ ID NO: 84211 - protein, 21 aa, Artificial Sequence
  Description of Artificial Sequence: Synthetic peptide
  Seed: GMDPRMCSLMQGSTLPRRSGA
GMDPRMYSLMQMSTSPRRSGA

SEQ ID NO: 84212 - protein, 21 aa, Artificial Sequence
  Description of Artificial Sequence: Synthetic peptide
  Seed: GMDPRMCSLMQGSTLPRRSGA
GMDPRMYSLMQNSTAPRRSGA

SEQ ID NO: 84213 - protein, 21 aa, Artificial Sequence
  Description of Artificial Sequence: Synthetic peptide
  Seed: GMDPRMCSLMQGSTLPRRSGA
GMDPRMYSLMQNSTIPRRSGA

SEQ ID NO: 84214 - protein, 21 aa, Artificial Sequence
  Description of Artificial Sequence: Synthetic peptide
  Seed: GMDPRMCSLMQGSTLPRRSGA
GMDPRMYSLMQNSTLPRRSGA

SEQ ID NO: 84215 - protein, 21 aa, Artificial Sequence
  Description of Artificial Sequence: Synthetic peptide
  Seed: GMDPRMCSLMQGSTLPRRSGA
GMDPRMYSLMQNSTMPRRSGA

SEQ ID NO: 84216 - protein, 21 aa, Artificial Sequence
  Description of Artificial Sequence: Synthetic peptide
  Seed: GMDPRMCSLMQGSTLPRRSGA
GMDPRMYSLMQNSTNPRRSGA

SEQ ID NO: 84217 - protein, 21 aa, Artificial Sequence
  Description of Artificial Sequence: Synthetic peptide
  Seed: GMDPRMCSLMQGSTLPRRSGA
GMDPRMYSLMQNSTSPRRSGA

SEQ ID NO: 84218 - protein, 21 aa, Artificial Sequence
  Description of Artificial Sequence: Synthetic peptide
  Seed: GMDPRMCSLMQGSTLPRRSGA
GMDPRMYSLMQNSTTPRRSGA

SEQ ID NO: 84219 - protein, 21 aa, Artificial Sequence
  Description of Artificial Sequence: Synthetic peptide
  Seed: GMDPRMCSLMQGSTLPRRSGA
GMDPRMYSLMQNSTVPRRSGA

SEQ ID NO: 84220 - protein, 21 aa, Artificial Sequence
  Description of Artificial Sequence: Synthetic peptide
  Seed: GMDPRMCSLMQGSTLPRRSGA
GMDPRMYSLMQPSTAPRRSGA

SEQ ID NO: 84221 - protein, 21 aa, Artificial Sequence
  Description of Artificial Sequence: Synthetic peptide
  Seed: GMDPRMCSLMQGSTLPRRSGA
GMDPRMYSLMQPSTGPRRSGA

SEQ ID NO: 84222 - protein, 21 aa, Artificial Sequence
  Description of Artificial Sequence: Synthetic peptide
  Seed: GMDPRMCSLMQGSTLPRRSGA
GMDPRMYSLMQPSTHPRRSGA

SEQ ID NO: 84223 - protein, 21 aa, Artificial Sequence
  Description of Artificial Sequence: Synthetic peptide
  Seed: GMDPRMCSLMQGSTLPRRSGA
GMDPRMYSLMQPSTIPRRSGA

SEQ ID NO: 84224 - protein, 21 aa, Artificial Sequence
  Description of Artificial Sequence: Synthetic peptide
  Seed: GMDPRMCSLMQGSTLPRRSGA
GMDPRMYSLMQPSTLPRRSGA

SEQ ID NO: 84225 - protein, 21 aa, Artificial Sequence
  Description of Artificial Sequence: Synthetic peptide
  Seed: GMDPRMCSLMQGSTLPRRSGA
GMDPRMYSLMQPSTMPRRSGA

SEQ ID NO: 84226 - protein, 21 aa, Artificial Sequence
  Description of Artificial Sequence: Synthetic peptide
  Seed: GMDPRMCSLMQGSTLPRRSGA
GMDPRMYSLMQPSTNPRRSGA

SEQ ID NO: 84227 - protein, 21 aa, Artificial Sequence
  Description of Artificial Sequence: Synthetic peptide
  Seed: GMDPRMCSLMQGSTLPRRSGA
GMDPRMYSLMQPSTPPRRSGA

SEQ ID NO: 84228 - protein, 21 aa, Artificial Sequence
  Description of Artificial Sequence: Synthetic peptide
  Seed: GMDPRMCSLMQGSTLPRRSGA
GMDPRMYSLMQPSTQPRRSGA

SEQ ID NO: 84229 - protein, 21 aa, Artificial Sequence
  Description of Artificial Sequence: Synthetic peptide
  Seed: GMDPRMCSLMQGSTLPRRSGA
GMDPRMYSLMQPSTSPRRSGA

SEQ ID NO: 84230 - protein, 21 aa, Artificial Sequence
  Description of Artificial Sequence: Synthetic peptide
  Seed: GMDPRMCSLMQGSTLPRRSGA
GMDPRMYSLMQPSTTPRRSGA

SEQ ID NO: 84231 - protein, 21 aa, Artificial Sequence
  Description of Artificial Sequence: Synthetic peptide
  Seed: GMDPRMCSLMQGSTLPRRSGA
GMDPRMYSLMQPSTVPRRSGA

SEQ ID NO: 84232 - protein, 21 aa, Artificial Sequence
  Description of Artificial Sequence: Synthetic peptide
  Seed: GMDPRMCSLMQGSTLPRRSGA
GMDPRMYSLMQSSTAPRRSGA

SEQ ID NO: 84233 - protein, 21 aa, Artificial Sequence
  Description of Artificial Sequence: Synthetic peptide
  Seed: GMDPRMCSLMQGSTLPRRSGA
GMDPRMYSLMQSSTCPRRSGA

SEQ ID NO: 84234 - protein, 21 aa, Artificial Sequence
  Description of Artificial Sequence: Synthetic peptide
  Seed: GMDPRMCSLMQGSTLPRRSGA
GMDPRMYSLMQSSTGPRRSGA

SEQ ID NO: 84235 - protein, 21 aa, Artificial Sequence
  Description of Artificial Sequence: Synthetic peptide
  Seed: GMDPRMCSLMQGSTLPRRSGA
GMDPRMYSLMQSSTHPRRSGA

SEQ ID NO: 84236 - protein, 21 aa, Artificial Sequence
  Description of Artificial Sequence: Synthetic peptide
  Seed: GMDPRMCSLMQGSTLPRRSGA
GMDPRMYSLMQSSTIPRRSGA

SEQ ID NO: 84237 - protein, 21 aa, Artificial Sequence
  Description of Artificial Sequence: Synthetic peptide
  Seed: GMDPRMCSLMQGSTLPRRSGA
GMDPRMYSLMQSSTLPRRSGA

SEQ ID NO: 84238 - protein, 21 aa, Artificial Sequence
  Description of Artificial Sequence: Synthetic peptide
  Seed: GMDPRMCSLMQGSTLPRRSGA
GMDPRMYSLMQSSTMPRRSGA

SEQ ID NO: 84239 - protein, 21 aa, Artificial Sequence
  Description of Artificial Sequence: Synthetic peptide
  Seed: GMDPRMCSLMQGSTLPRRSGA
GMDPRMYSLMQSSTNPRRSGA

SEQ ID NO: 84240 - protein, 21 aa, Artificial Sequence
  Description of Artificial Sequence: Synthetic peptide
  Seed: GMDPRMCSLMQGSTLPRRSGA
GMDPRMYSLMQSSTQPRRSGA

SEQ ID NO: 84241 - protein, 21 aa, Artificial Sequence
  Description of Artificial Sequence: Synthetic peptide
  Seed: GMDPRMCSLMQGSTLPRRSGA
GMDPRMYSLMQSSTSPRRSGA

SEQ ID NO: 84242 - protein, 21 aa, Artificial Sequence
  Description of Artificial Sequence: Synthetic peptide
  Seed: GMDPRMCSLMQGSTLPRRSGA
GMDPRMYSLMQSSTTPRRSGA

SEQ ID NO: 84243 - protein, 21 aa, Artificial Sequence
  Description of Artificial Sequence: Synthetic peptide
  Seed: GMDPRMCSLMQGSTLPRRSGA
GMDPRMYSLMQSSTVPRRSGA

SEQ ID NO: 84244 - protein, 21 aa, Artificial Sequence
  Description of Artificial Sequence: Synthetic peptide
  Seed: GMDPRMCSLMQGSTLPRRSGA
GMDPRMYSLMQTSTAPRRSGA

SEQ ID NO: 84245 - protein, 21 aa, Artificial Sequence
  Description of Artificial Sequence: Synthetic peptide
  Seed: GMDPRMCSLMQGSTLPRRSGA
GMDPRMYSLMQTSTGPRRSGA

SEQ ID NO: 84246 - protein, 21 aa, Artificial Sequence
  Description of Artificial Sequence: Synthetic peptide
  Seed: GMDPRMCSLMQGSTLPRRSGA
GMDPRMYSLMQTSTIPRRSGA

SEQ ID NO: 84247 - protein, 21 aa, Artificial Sequence
  Description of Artificial Sequence: Synthetic peptide
  Seed: GMDPRMCSLMQGSTLPRRSGA
GMDPRMYSLMQTSTLPRRSGA

SEQ ID NO: 84248 - protein, 21 aa, Artificial Sequence
  Description of Artificial Sequence: Synthetic peptide
  Seed: GMDPRMCSLMQGSTLPRRSGA
GMDPRMYSLMQTSTMPRRSGA

SEQ ID NO: 84249 - protein, 21 aa, Artificial Sequence
  Description of Artificial Sequence: Synthetic peptide
  Seed: GMDPRMCSLMQGSTLPRRSGA
GMDPRMYSLMQTSTNPRRSGA

SEQ ID NO: 84250 - protein, 21 aa, Artificial Sequence
  Description of Artificial Sequence: Synthetic peptide
  Seed: GMDPRMCSLMQGSTLPRRSGA
GMDPRMYSLMQTSTQPRRSGA

SEQ ID NO: 84251 - protein, 21 aa, Artificial Sequence
  Description of Artificial Sequence: Synthetic peptide
  Seed: GMDPRMCSLMQGSTLPRRSGA
GMDPRMYSLMQTSTSPRRSGA

SEQ ID NO: 84252 - protein, 21 aa, Artificial Sequence
  Description of Artificial Sequence: Synthetic peptide
  Seed: GMDPRMCSLMQGSTLPRRSGA
GMDPRMYSLMQTSTTPRRSGA

SEQ ID NO: 84253 - protein, 21 aa, Artificial Sequence
  Description of Artificial Sequence: Synthetic peptide
  Seed: GMDPRMCSLMQGSTLPRRSGA
GMDPRMYSLMQTSTVPRRSGA

SEQ ID NO: 84254 - protein, 21 aa, Artificial Sequence
  Description of Artificial Sequence: Synthetic peptide
  Seed: GMDPRMCSLMQGSTLPRRSGA
GMDPRMYSLMQVSTAPRRSGA

SEQ ID NO: 84255 - protein, 21 aa, Artificial Sequence
  Description of Artificial Sequence: Synthetic peptide
  Seed: GMDPRMCSLMQGSTLPRRSGA
GMDPRMYSLMQVSTGPRRSGA

SEQ ID NO: 84256 - protein, 21 aa, Artificial Sequence
  Description of Artificial Sequence: Synthetic peptide
  Seed: GMDPRMCSLMQGSTLPRRSGA
GMDPRMYSLMQVSTHPRRSGA

SEQ ID NO: 84257 - protein, 21 aa, Artificial Sequence
  Description of Artificial Sequence: Synthetic peptide
  Seed: GMDPRMCSLMQGSTLPRRSGA
GMDPRMYSLMQVSTIPRRSGA

SEQ ID NO: 84258 - protein, 21 aa, Artificial Sequence
  Description of Artificial Sequence: Synthetic peptide
  Seed: GMDPRMCSLMQGSTLPRRSGA
GMDPRMYSLMQVSTLPRRSGA

SEQ ID NO: 84259 - protein, 21 aa, Artificial Sequence
  Description of Artificial Sequence: Synthetic peptide
  Seed: GMDPRMCSLMQGSTLPRRSGA
GMDPRMYSLMQVSTMPRRSGA

SEQ ID NO: 84260 - protein, 21 aa, Artificial Sequence
  Description of Artificial Sequence: Synthetic peptide
  Seed: GMDPRMCSLMQGSTLPRRSGA
GMDPRMYSLMQVSTNPRRSGA

SEQ ID NO: 84261 - protein, 21 aa, Artificial Sequence
  Description of Artificial Sequence: Synthetic peptide
  Seed: GMDPRMCSLMQGSTLPRRSGA
GMDPRMYSLMQVSTQPRRSGA

SEQ ID NO: 84262 - protein, 21 aa, Artificial Sequence
  Description of Artificial Sequence: Synthetic peptide
  Seed: GMDPRMCSLMQGSTLPRRSGA
GMDPRMYSLMQVSTSPRRSGA

SEQ ID NO: 84263 - protein, 21 aa, Artificial Sequence
  Description of Artificial Sequence: Synthetic peptide
  Seed: GMDPRMCSLMQGSTLPRRSGA
GMDPRMYSLMQVSTTPRRSGA

SEQ ID NO: 84264 - protein, 21 aa, Artificial Sequence
  Description of Artificial Sequence: Synthetic peptide
  Seed: GMDPRMCSLMQGSTLPRRSGA
GMDPRMYSLMQVSTVPRRSGA

SEQ ID NO: 84265 - protein, 21 aa, Artificial Sequence
  Description of Artificial Sequence: Synthetic peptide
  Seed: GMDPRMCSLMQGSTLPRRSGA
GMDPRMYSLNQASTIPRRSGA

SEQ ID NO: 84266 - protein, 21 aa, Artificial Sequence
  Description of Artificial Sequence: Synthetic peptide
  Seed: GMDPRMCSLMQGSTLPRRSGA
GMDPRMYSLNQASTLPRRSGA

SEQ ID NO: 84267 - protein, 21 aa, Artificial Sequence
  Description of Artificial Sequence: Synthetic peptide
  Seed: GMDPRMCSLMQGSTLPRRSGA
GMDPRMYSLNQASTVPRRSGA

SEQ ID NO: 84268 - protein, 21 aa, Artificial Sequence
  Description of Artificial Sequence: Synthetic peptide
  Seed: GMDPRMCSLMQGSTLPRRSGA
GMDPRMYSLQQASTAPRRSGA

SEQ ID NO: 84269 - protein, 21 aa, Artificial Sequence
  Description of Artificial Sequence: Synthetic peptide
  Seed: GMDPRMCSLMQGSTLPRRSGA
GMDPRMYSLQQASTIPRRSGA

SEQ ID NO: 84270 - protein, 21 aa, Artificial Sequence
  Description of Artificial Sequence: Synthetic peptide
  Seed: GMDPRMCSLMQGSTLPRRSGA
GMDPRMYSLQQASTLPRRSGA

SEQ ID NO: 84271 - protein, 21 aa, Artificial Sequence
  Description of Artificial Sequence: Synthetic peptide
  Seed: GMDPRMCSLMQGSTLPRRSGA
GMDPRMYSLQQASTMPRRSGA

SEQ ID NO: 84272 - protein, 21 aa, Artificial Sequence
  Description of Artificial Sequence: Synthetic peptide
  Seed: GMDPRMCSLMQGSTLPRRSGA
GMDPRMYSLQQASTNPRRSGA

SEQ ID NO: 84273 - protein, 21 aa, Artificial Sequence
  Description of Artificial Sequence: Synthetic peptide
  Seed: GMDPRMCSLMQGSTLPRRSGA
GMDPRMYSLQQASTSPRRSGA

SEQ ID NO: 84274 - protein, 21 aa, Artificial Sequence
  Description of Artificial Sequence: Synthetic peptide
  Seed: GMDPRMCSLMQGSTLPRRSGA
GMDPRMYSLQQASTTPRRSGA

SEQ ID NO: 84275 - protein, 21 aa, Artificial Sequence
  Description of Artificial Sequence: Synthetic peptide
  Seed: GMDPRMCSLMQGSTLPRRSGA
GMDPRMYSLQQASTVPRRSGA

SEQ ID NO: 84276 - protein, 21 aa, Artificial Sequence
  Description of Artificial Sequence: Synthetic peptide
  Seed: GMDPRMCSLMQGSTLPRRSGA
GMDPRMYSLQQGSTAPRRSGA

SEQ ID NO: 84277 - protein, 21 aa, Artificial Sequence
  Description of Artificial Sequence: Synthetic peptide
  Seed: GMDPRMCSLMQGSTLPRRSGA
GMDPRMYSLQQGSTIPRRSGA

SEQ ID NO: 84278 - protein, 21 aa, Artificial Sequence
  Description of Artificial Sequence: Synthetic peptide
  Seed: GMDPRMCSLMQGSTLPRRSGA
GMDPRMYSLQQGSTLPRRSGA

SEQ ID NO: 84279 - protein, 21 aa, Artificial Sequence
  Description of Artificial Sequence: Synthetic peptide
  Seed: GMDPRMCSLMQGSTLPRRSGA
GMDPRMYSLQQGSTVPRRSGA

SEQ ID NO: 84280 - protein, 21 aa, Artificial Sequence
  Description of Artificial Sequence: Synthetic peptide
  Seed: GMDPRMCSLMQGSTLPRRSGA
GMDPRMYSLQQPSTIPRRSGA

SEQ ID NO: 84281 - protein, 21 aa, Artificial Sequence
  Description of Artificial Sequence: Synthetic peptide
  Seed: GMDPRMCSLMQGSTLPRRSGA
GMDPRMYSLQQPSTLPRRSGA

SEQ ID NO: 84282 - protein, 21 aa, Artificial Sequence
  Description of Artificial Sequence: Synthetic peptide
  Seed: GMDPRMCSLMQGSTLPRRSGA
GMDPRMYSLQQPSTVPRRSGA

SEQ ID NO: 84283 - protein, 21 aa, Artificial Sequence
  Description of Artificial Sequence: Synthetic peptide
  Seed: GMDPRMCSLMQGSTLPRRSGA
GMDPRMYSLQQSSTAPRRSGA

SEQ ID NO: 84284 - protein, 21 aa, Artificial Sequence
  Description of Artificial Sequence: Synthetic peptide
  Seed: GMDPRMCSLMQGSTLPRRSGA
GMDPRMYSLQQSSTIPRRSGA

SEQ ID NO: 84285 - protein, 21 aa, Artificial Sequence
  Description of Artificial Sequence: Synthetic peptide
  Seed: GMDPRMCSLMQGSTLPRRSGA
GMDPRMYSLQQSSTLPRRSGA

SEQ ID NO: 84286 - protein, 21 aa, Artificial Sequence
  Description of Artificial Sequence: Synthetic peptide
  Seed: GMDPRMCSLMQGSTLPRRSGA
GMDPRMYSLQQSSTVPRRSGA

SEQ ID NO: 84287 - protein, 21 aa, Artificial Sequence
  Description of Artificial Sequence: Synthetic peptide
  Seed: GMDPRMCSLMQGSTLPRRSGA
GMDPRMYSLQQVSTAPRRSGA

SEQ ID NO: 84288 - protein, 21 aa, Artificial Sequence
  Description of Artificial Sequence: Synthetic peptide
  Seed: GMDPRMCSLMQGSTLPRRSGA
GMDPRMYSLSQASTAPRRSGA

SEQ ID NO: 84289 - protein, 21 aa, Artificial Sequence
  Description of Artificial Sequence: Synthetic peptide
  Seed: GMDPRMCSLMQGSTLPRRSGA
GMDPRMYSLSQASTIPRRSGA

SEQ ID NO: 84290 - protein, 21 aa, Artificial Sequence
  Description of Artificial Sequence: Synthetic peptide
  Seed: GMDPRMCSLMQGSTLPRRSGA
GMDPRMYSLSQASTLPRRSGA

SEQ ID NO: 84291 - protein, 21 aa, Artificial Sequence
  Description of Artificial Sequence: Synthetic peptide
  Seed: GMDPRMCSLMQGSTLPRRSGA
GMDPRMYSLSQASTMPRRSGA

SEQ ID NO: 84292 - protein, 21 aa, Artificial Sequence
  Description of Artificial Sequence: Synthetic peptide
  Seed: GMDPRMCSLMQGSTLPRRSGA
GMDPRMYSLSQASTVPRRSGA

SEQ ID NO: 84293 - protein, 21 aa, Artificial Sequence
  Description of Artificial Sequence: Synthetic peptide
  Seed: GMDPRMCSLMQGSTLPRRSGA
GMDPRMYSLSQGSTIPRRSGA

SEQ ID NO: 84294 - protein, 21 aa, Artificial Sequence
  Description of Artificial Sequence: Synthetic peptide
  Seed: GMDPRMCSLMQGSTLPRRSGA
GMDPRMYSLSQGSTLPRRSGA

SEQ ID NO: 84295 - protein, 21 aa, Artificial Sequence
  Description of Artificial Sequence: Synthetic peptide
  Seed: GMDPRMCSLMQGSTLPRRSGA
GMDPRMYSLSQGSTVPRRSGA

SEQ ID NO: 84296 - protein, 21 aa, Artificial Sequence
  Description of Artificial Sequence: Synthetic peptide
  Seed: GMDPRMCSLMQGSTLPRRSGA
GMDPRMYSLSQSSTVPRRSGA

SEQ ID NO: 84297 - protein, 21 aa, Artificial Sequence
  Description of Artificial Sequence: Synthetic peptide
  Seed: GMDPRMCSLMQGSTLPRRSGA
GMDPRMYSLTQASTIPRRSGA

SEQ ID NO: 84298 - protein, 21 aa, Artificial Sequence
  Description of Artificial Sequence: Synthetic peptide
  Seed: GMDPRMCSLMQGSTLPRRSGA
GMDPRMYSLTQASTLPRRSGA

SEQ ID NO: 84299 - protein, 21 aa, Artificial Sequence
  Description of Artificial Sequence: Synthetic peptide
  Seed: GMDPRMCSLMQGSTLPRRSGA
GMDPRMYSLTQASTVPRRSGA

SEQ ID NO: 84300 - protein, 21 aa, Artificial Sequence
  Description of Artificial Sequence: Synthetic peptide
  Seed: GMDPRMCSLMQGSTLPRRSGA
GMDPRMYSLVQASTAPRRSGA

SEQ ID NO: 84301 - protein, 21 aa, Artificial Sequence
  Description of Artificial Sequence: Synthetic peptide
  Seed: GMDPRMCSLMQGSTLPRRSGA
GMDPRMYSLVQASTGPRRSGA

SEQ ID NO: 84302 - protein, 21 aa, Artificial Sequence
  Description of Artificial Sequence: Synthetic peptide
  Seed: GMDPRMCSLMQGSTLPRRSGA
GMDPRMYSLVQASTIPRRSGA

SEQ ID NO: 84303 - protein, 21 aa, Artificial Sequence
  Description of Artificial Sequence: Synthetic peptide
  Seed: GMDPRMCSLMQGSTLPRRSGA
GMDPRMYSLVQASTLPRRSGA

SEQ ID NO: 84304 - protein, 21 aa, Artificial Sequence
  Description of Artificial Sequence: Synthetic peptide
  Seed: GMDPRMCSLMQGSTLPRRSGA
GMDPRMYSLVQASTMPRRSGA

SEQ ID NO: 84305 - protein, 21 aa, Artificial Sequence
  Description of Artificial Sequence: Synthetic peptide
  Seed: GMDPRMCSLMQGSTLPRRSGA
GMDPRMYSLVQASTNPRRSGA

SEQ ID NO: 84306 - protein, 21 aa, Artificial Sequence
  Description of Artificial Sequence: Synthetic peptide
  Seed: GMDPRMCSLMQGSTLPRRSGA
GMDPRMYSLVQASTSPRRSGA

SEQ ID NO: 84307 - protein, 21 aa, Artificial Sequence
  Description of Artificial Sequence: Synthetic peptide
  Seed: GMDPRMCSLMQGSTLPRRSGA
GMDPRMYSLVQASTTPRRSGA

SEQ ID NO: 84308 - protein, 21 aa, Artificial Sequence
  Description of Artificial Sequence: Synthetic peptide
  Seed: GMDPRMCSLMQGSTLPRRSGA
GMDPRMYSLVQASTVPRRSGA

SEQ ID NO: 84309 - protein, 21 aa, Artificial Sequence
  Description of Artificial Sequence: Synthetic peptide
  Seed: GMDPRMCSLMQGSTLPRRSGA
GMDPRMYSLVQGSTAPRRSGA

SEQ ID NO: 84310 - protein, 21 aa, Artificial Sequence
  Description of Artificial Sequence: Synthetic peptide
  Seed: GMDPRMCSLMQGSTLPRRSGA
GMDPRMYSLVQGSTIPRRSGA

SEQ ID NO: 84311 - protein, 21 aa, Artificial Sequence
  Description of Artificial Sequence: Synthetic peptide
  Seed: GMDPRMCSLMQGSTLPRRSGA
GMDPRMYSLVQGSTLPRRSGA

SEQ ID NO: 84312 - protein, 21 aa, Artificial Sequence
  Description of Artificial Sequence: Synthetic peptide
  Seed: GMDPRMCSLMQGSTLPRRSGA
GMDPRMYSLVQGSTMPRRSGA

SEQ ID NO: 84313 - protein, 21 aa, Artificial Sequence
  Description of Artificial Sequence: Synthetic peptide
  Seed: GMDPRMCSLMQGSTLPRRSGA
GMDPRMYSLVQGSTSPRRSGA

SEQ ID NO: 84314 - protein, 21 aa, Artificial Sequence
  Description of Artificial Sequence: Synthetic peptide
  Seed: GMDPRMCSLMQGSTLPRRSGA
GMDPRMYSLVQGSTVPRRSGA

SEQ ID NO: 84315 - protein, 21 aa, Artificial Sequence
  Description of Artificial Sequence: Synthetic peptide
  Seed: GMDPRMCSLMQGSTLPRRSGA
GMDPRMYSLVQISTAPRRSGA

SEQ ID NO: 84316 - protein, 21 aa, Artificial Sequence
  Description of Artificial Sequence: Synthetic peptide
  Seed: GMDPRMCSLMQGSTLPRRSGA
GMDPRMYSLVQISTNPRRSGA

SEQ ID NO: 84317 - protein, 21 aa, Artificial Sequence
  Description of Artificial Sequence: Synthetic peptide
  Seed: GMDPRMCSLMQGSTLPRRSGA
GMDPRMYSLVQISTSPRRSGA

SEQ ID NO: 84318 - protein, 21 aa, Artificial Sequence
  Description of Artificial Sequence: Synthetic peptide
  Seed: GMDPRMCSLMQGSTLPRRSGA
GMDPRMYSLVQPSTAPRRSGA

SEQ ID NO: 84319 - protein, 21 aa, Artificial Sequence
  Description of Artificial Sequence: Synthetic peptide
  Seed: GMDPRMCSLMQGSTLPRRSGA
GMDPRMYSLVQPSTIPRRSGA

SEQ ID NO: 84320 - protein, 21 aa, Artificial Sequence
  Description of Artificial Sequence: Synthetic peptide
  Seed: GMDPRMCSLMQGSTLPRRSGA
GMDPRMYSLVQPSTLPRRSGA

SEQ ID NO: 84321 - protein, 21 aa, Artificial Sequence
  Description of Artificial Sequence: Synthetic peptide
  Seed: GMDPRMCSLMQGSTLPRRSGA
GMDPRMYSLVQPSTNPRRSGA

SEQ ID NO: 84322 - protein, 21 aa, Artificial Sequence
  Description of Artificial Sequence: Synthetic peptide
  Seed: GMDPRMCSLMQGSTLPRRSGA
GMDPRMYSLVQPSTSPRRSGA

SEQ ID NO: 84323 - protein, 21 aa, Artificial Sequence
  Description of Artificial Sequence: Synthetic peptide
  Seed: GMDPRMCSLMQGSTLPRRSGA
GMDPRMYSLVQPSTTPRRSGA

SEQ ID NO: 84324 - protein, 21 aa, Artificial Sequence
  Description of Artificial Sequence: Synthetic peptide
  Seed: GMDPRMCSLMQGSTLPRRSGA
GMDPRMYSLVQPSTVPRRSGA

SEQ ID NO: 84325 - protein, 21 aa, Artificial Sequence
  Description of Artificial Sequence: Synthetic peptide
  Seed: GMDPRMCSLMQGSTLPRRSGA
GMDPRMYSLVQSSTAPRRSGA

SEQ ID NO: 84326 - protein, 21 aa, Artificial Sequence
  Description of Artificial Sequence: Synthetic peptide
  Seed: GMDPRMCSLMQGSTLPRRSGA
GMDPRMYSLVQSSTIPRRSGA

SEQ ID NO: 84327 - protein, 21 aa, Artificial Sequence
  Description of Artificial Sequence: Synthetic peptide
  Seed: GMDPRMCSLMQGSTLPRRSGA
GMDPRMYSLVQSSTLPRRSGA

SEQ ID NO: 84328 - protein, 21 aa, Artificial Sequence
  Description of Artificial Sequence: Synthetic peptide
  Seed: GMDPRMCSLMQGSTLPRRSGA
GMDPRMYSLVQSSTNPRRSGA

SEQ ID NO: 84329 - protein, 21 aa, Artificial Sequence
  Description of Artificial Sequence: Synthetic peptide
  Seed: GMDPRMCSLMQGSTLPRRSGA
GMDPRMYSLVQSSTSPRRSGA

SEQ ID NO: 84330 - protein, 21 aa, Artificial Sequence
  Description of Artificial Sequence: Synthetic peptide
  Seed: GMDPRMCSLMQGSTLPRRSGA
GMDPRMYSLVQSSTTPRRSGA

SEQ ID NO: 84331 - protein, 21 aa, Artificial Sequence
  Description of Artificial Sequence: Synthetic peptide
  Seed: GMDPRMCSLMQGSTLPRRSGA
GMDPRMYSLVQSSTVPRRSGA

SEQ ID NO: 84332 - protein, 21 aa, Artificial Sequence
  Description of Artificial Sequence: Synthetic peptide
  Seed: GMDPRMCSLMQGSTLPRRSGA
GMDPRMYSLVQTSTAPRRSGA

SEQ ID NO: 84333 - protein, 21 aa, Artificial Sequence
  Description of Artificial Sequence: Synthetic peptide
  Seed: GMDPRMCSLMQGSTLPRRSGA
GMDPRMYSLVQTSTIPRRSGA

SEQ ID NO: 84334 - protein, 21 aa, Artificial Sequence
  Description of Artificial Sequence: Synthetic peptide
  Seed: GMDPRMCSLMQGSTLPRRSGA
GMDPRMYSLVQTSTNPRRSGA

SEQ ID NO: 84335 - protein, 21 aa, Artificial Sequence
  Description of Artificial Sequence: Synthetic peptide
  Seed: GMDPRMCSLMQGSTLPRRSGA
GMDPRMYSLVQTSTSPRRSGA

SEQ ID NO: 84336 - protein, 21 aa, Artificial Sequence
  Description of Artificial Sequence: Synthetic peptide
  Seed: GMDPRMCSLMQGSTLPRRSGA
GMDPRMYSLVQTSTTPRRSGA

SEQ ID NO: 84337 - protein, 21 aa, Artificial Sequence
  Description of Artificial Sequence: Synthetic peptide
  Seed: GMDPRMCSLMQGSTLPRRSGA
GMDPRMYSLVQTSTVPRRSGA

SEQ ID NO: 84338 - protein, 21 aa, Artificial Sequence
  Description of Artificial Sequence: Synthetic peptide
  Seed: GMDPRMCSLMQGSTLPRRSGA
GMDPRMYSLVQVSTAPRRSGA

SEQ ID NO: 84339 - protein, 21 aa, Artificial Sequence
  Description of Artificial Sequence: Synthetic peptide
  Seed: GMDPRMCSLMQGSTLPRRSGA
GMDPRMYSLVQVSTNPRRSGA

SEQ ID NO: 84340 - protein, 21 aa, Artificial Sequence
  Description of Artificial Sequence: Synthetic peptide
  Seed: GMDPRMCSLMQGSTLPRRSGA
GMDPRMYSLVQVSTSPRRSGA

SEQ ID NO: 84341 - protein, 21 aa, Artificial Sequence
  Description of Artificial Sequence: Synthetic peptide
  Seed: GMDPRMCSLMQGSTLPRRSGA
GMDPRMYSLVQVSTTPRRSGA

SEQ ID NO: 84342 - protein, 21 aa, Artificial Sequence
  Description of Artificial Sequence: Synthetic peptide
  Seed: GMDPRMCSLMQGSTLPRRSGA
GMDPRMYSLVQVSTVPRRSGA

SEQ ID NO: 84343 - protein, 22 aa, Artificial Sequence
  Description of Artificial Sequence: Synthetic peptide
  Seed: GMDPRMCSLMQGSTLPRRSGAA
GMDPRMFSLAQASTAPRRSGAA

SEQ ID NO: 84344 - protein, 22 aa, Artificial Sequence
  Description of Artificial Sequence: Synthetic peptide
  Seed: GMDPRMCSLMQGSTLPRRSGAA
GMDPRMFSLAQASTCPRRSGAA

SEQ ID NO: 84345 - protein, 22 aa, Artificial Sequence
  Description of Artificial Sequence: Synthetic peptide
  Seed: GMDPRMCSLMQGSTLPRRSGAA
GMDPRMFSLAQASTFPRRSGAA

SEQ ID NO: 84346 - protein, 22 aa, Artificial Sequence
  Description of Artificial Sequence: Synthetic peptide
  Seed: GMDPRMCSLMQGSTLPRRSGAA
GMDPRMFSLAQASTGPRRSGAA

SEQ ID NO: 84347 - protein, 22 aa, Artificial Sequence
  Description of Artificial Sequence: Synthetic peptide
  Seed: GMDPRMCSLMQGSTLPRRSGAA
GMDPRMFSLAQASTHPRRSGAA

SEQ ID NO: 84348 - protein, 22 aa, Artificial Sequence
  Description of Artificial Sequence: Synthetic peptide
  Seed: GMDPRMCSLMQGSTLPRRSGAA
GMDPRMFSLAQASTIPRRSGAA

SEQ ID NO: 84349 - protein, 22 aa, Artificial Sequence
  Description of Artificial Sequence: Synthetic peptide
  Seed: GMDPRMCSLMQGSTLPRRSGAA
GMDPRMFSLAQASTLPRRSGAA

SEQ ID NO: 84350 - protein, 22 aa, Artificial Sequence
  Description of Artificial Sequence: Synthetic peptide
  Seed: GMDPRMCSLMQGSTLPRRSGAA
GMDPRMFSLAQASTMPRRSGAA

SEQ ID NO: 84351 - protein, 22 aa, Artificial Sequence
  Description of Artificial Sequence: Synthetic peptide
  Seed: GMDPRMCSLMQGSTLPRRSGAA
GMDPRMFSLAQASTNPRRSGAA

SEQ ID NO: 84352 - protein, 22 aa, Artificial Sequence
  Description of Artificial Sequence: Synthetic peptide
  Seed: GMDPRMCSLMQGSTLPRRSGAA
GMDPRMFSLAQASTQPRRSGAA

SEQ ID NO: 84353 - protein, 22 aa, Artificial Sequence
  Description of Artificial Sequence: Synthetic peptide
  Seed: GMDPRMCSLMQGSTLPRRSGAA
GMDPRMFSLAQASTSPRRSGAA

SEQ ID NO: 84354 - protein, 22 aa, Artificial Sequence
  Description of Artificial Sequence: Synthetic peptide
  Seed: GMDPRMCSLMQGSTLPRRSGAA
GMDPRMFSLAQASTTPRRSGAA

SEQ ID NO: 84355 - protein, 22 aa, Artificial Sequence
  Description of Artificial Sequence: Synthetic peptide
  Seed: GMDPRMCSLMQGSTLPRRSGAA
GMDPRMFSLAQASTVPRRSGAA

SEQ ID NO: 84356 - protein, 22 aa, Artificial Sequence
  Description of Artificial Sequence: Synthetic peptide
  Seed: GMDPRMCSLMQGSTLPRRSGAA
GMDPRMFSLAQGSTAPRRSGAA

SEQ ID NO: 84357 - protein, 22 aa, Artificial Sequence
  Description of Artificial Sequence: Synthetic peptide
  Seed: GMDPRMCSLMQGSTLPRRSGAA
GMDPRMFSLAQGSTIPRRSGAA

SEQ ID NO: 84358 - protein, 22 aa, Artificial Sequence
  Description of Artificial Sequence: Synthetic peptide
  Seed: GMDPRMCSLMQGSTLPRRSGAA
GMDPRMFSLAQGSTLPRRSGAA

SEQ ID NO: 84359 - protein, 22 aa, Artificial Sequence
  Description of Artificial Sequence: Synthetic peptide
  Seed: GMDPRMCSLMQGSTLPRRSGAA
GMDPRMFSLAQGSTMPRRSGAA

SEQ ID NO: 84360 - protein, 22 aa, Artificial Sequence
  Description of Artificial Sequence: Synthetic peptide
  Seed: GMDPRMCSLMQGSTLPRRSGAA
GMDPRMFSLAQGSTSPRRSGAA

SEQ ID NO: 84361 - protein, 22 aa, Artificial Sequence
  Description of Artificial Sequence: Synthetic peptide
  Seed: GMDPRMCSLMQGSTLPRRSGAA
GMDPRMFSLAQGSTTPRRSGAA

SEQ ID NO: 84362 - protein, 22 aa, Artificial Sequence
  Description of Artificial Sequence: Synthetic peptide
  Seed: GMDPRMCSLMQGSTLPRRSGAA
GMDPRMFSLAQGSTVPRRSGAA

SEQ ID NO: 84363 - protein, 22 aa, Artificial Sequence
  Description of Artificial Sequence: Synthetic peptide
  Seed: GMDPRMCSLMQGSTLPRRSGAA
GMDPRMFSLAQISTAPRRSGAA

SEQ ID NO: 84364 - protein, 22 aa, Artificial Sequence
  Description of Artificial Sequence: Synthetic peptide
  Seed: GMDPRMCSLMQGSTLPRRSGAA
GMDPRMFSLAQISTNPRRSGAA

SEQ ID NO: 84365 - protein, 22 aa, Artificial Sequence
  Description of Artificial Sequence: Synthetic peptide
  Seed: GMDPRMCSLMQGSTLPRRSGAA
GMDPRMFSLAQISTSPRRSGAA

SEQ ID NO: 84366 - protein, 22 aa, Artificial Sequence
  Description of Artificial Sequence: Synthetic peptide
  Seed: GMDPRMCSLMQGSTLPRRSGAA
GMDPRMFSLAQISTTPRRSGAA

SEQ ID NO: 84367 - protein, 22 aa, Artificial Sequence
  Description of Artificial Sequence: Synthetic peptide
  Seed: GMDPRMCSLMQGSTLPRRSGAA
GMDPRMFSLAQISTVPRRSGAA

SEQ ID NO: 84368 - protein, 22 aa, Artificial Sequence
  Description of Artificial Sequence: Synthetic peptide
  Seed: GMDPRMCSLMQGSTLPRRSGAA
GMDPRMFSLAQLSTAPRRSGAA

SEQ ID NO: 84369 - protein, 22 aa, Artificial Sequence
  Description of Artificial Sequence: Synthetic peptide
  Seed: GMDPRMCSLMQGSTLPRRSGAA
GMDPRMFSLAQLSTNPRRSGAA

SEQ ID NO: 84370 - protein, 22 aa, Artificial Sequence
  Description of Artificial Sequence: Synthetic peptide
  Seed: GMDPRMCSLMQGSTLPRRSGAA
GMDPRMFSLAQNSTAPRRSGAA

SEQ ID NO: 84371 - protein, 22 aa, Artificial Sequence
  Description of Artificial Sequence: Synthetic peptide
  Seed: GMDPRMCSLMQGSTLPRRSGAA
GMDPRMFSLAQNSTIPRRSGAA

SEQ ID NO: 84372 - protein, 22 aa, Artificial Sequence
  Description of Artificial Sequence: Synthetic peptide
  Seed: GMDPRMCSLMQGSTLPRRSGAA
GMDPRMFSLAQNSTLPRRSGAA

SEQ ID NO: 84373 - protein, 22 aa, Artificial Sequence
  Description of Artificial Sequence: Synthetic peptide
  Seed: GMDPRMCSLMQGSTLPRRSGAA
GMDPRMFSLAQNSTNPRRSGAA

SEQ ID NO: 84374 - protein, 22 aa, Artificial Sequence
  Description of Artificial Sequence: Synthetic peptide
  Seed: GMDPRMCSLMQGSTLPRRSGAA
GMDPRMFSLAQNSTSPRRSGAA

SEQ ID NO: 84375 - protein, 22 aa, Artificial Sequence
  Description of Artificial Sequence: Synthetic peptide
  Seed: GMDPRMCSLMQGSTLPRRSGAA
GMDPRMFSLAQNSTVPRRSGAA

SEQ ID NO: 84376 - protein, 22 aa, Artificial Sequence
  Description of Artificial Sequence: Synthetic peptide
  Seed: GMDPRMCSLMQGSTLPRRSGAA
GMDPRMFSLAQPSTAPRRSGAA

SEQ ID NO: 84377 - protein, 22 aa, Artificial Sequence
  Description of Artificial Sequence: Synthetic peptide
  Seed: GMDPRMCSLMQGSTLPRRSGAA
GMDPRMFSLAQPSTIPRRSGAA

SEQ ID NO: 84378 - protein, 22 aa, Artificial Sequence
  Description of Artificial Sequence: Synthetic peptide
  Seed: GMDPRMCSLMQGSTLPRRSGAA
GMDPRMFSLAQPSTLPRRSGAA

SEQ ID NO: 84379 - protein, 22 aa, Artificial Sequence
  Description of Artificial Sequence: Synthetic peptide
  Seed: GMDPRMCSLMQGSTLPRRSGAA
GMDPRMFSLAQPSTMPRRSGAA

SEQ ID NO: 84380 - protein, 22 aa, Artificial Sequence
  Description of Artificial Sequence: Synthetic peptide
  Seed: GMDPRMCSLMQGSTLPRRSGAA
GMDPRMFSLAQPSTNPRRSGAA

SEQ ID NO: 84381 - protein, 22 aa, Artificial Sequence
  Description of Artificial Sequence: Synthetic peptide
  Seed: GMDPRMCSLMQGSTLPRRSGAA
GMDPRMFSLAQPSTQPRRSGAA

SEQ ID NO: 84382 - protein, 22 aa, Artificial Sequence
  Description of Artificial Sequence: Synthetic peptide
  Seed: GMDPRMCSLMQGSTLPRRSGAA
GMDPRMFSLAQPSTSPRRSGAA

SEQ ID NO: 84383 - protein, 22 aa, Artificial Sequence
  Description of Artificial Sequence: Synthetic peptide
  Seed: GMDPRMCSLMQGSTLPRRSGAA
GMDPRMFSLAQPSTTPRRSGAA

SEQ ID NO: 84384 - protein, 22 aa, Artificial Sequence
  Description of Artificial Sequence: Synthetic peptide
  Seed: GMDPRMCSLMQGSTLPRRSGAA
GMDPRMFSLAQPSTVPRRSGAA

SEQ ID NO: 84385 - protein, 22 aa, Artificial Sequence
  Description of Artificial Sequence: Synthetic peptide
  Seed: GMDPRMCSLMQGSTLPRRSGAA
GMDPRMFSLAQSSTAPRRSGAA

SEQ ID NO: 84386 - protein, 22 aa, Artificial Sequence
  Description of Artificial Sequence: Synthetic peptide
  Seed: GMDPRMCSLMQGSTLPRRSGAA
GMDPRMFSLAQSSTIPRRSGAA

SEQ ID NO: 84387 - protein, 22 aa, Artificial Sequence
  Description of Artificial Sequence: Synthetic peptide
  Seed: GMDPRMCSLMQGSTLPRRSGAA
GMDPRMFSLAQSSTLPRRSGAA

SEQ ID NO: 84388 - protein, 22 aa, Artificial Sequence
  Description of Artificial Sequence: Synthetic peptide
  Seed: GMDPRMCSLMQGSTLPRRSGAA
GMDPRMFSLAQSSTMPRRSGAA

SEQ ID NO: 84389 - protein, 22 aa, Artificial Sequence
  Description of Artificial Sequence: Synthetic peptide
  Seed: GMDPRMCSLMQGSTLPRRSGAA
GMDPRMFSLAQSSTNPRRSGAA

SEQ ID NO: 84390 - protein, 22 aa, Artificial Sequence
  Description of Artificial Sequence: Synthetic peptide
  Seed: GMDPRMCSLMQGSTLPRRSGAA
GMDPRMFSLAQSSTSPRRSGAA

SEQ ID NO: 84391 - protein, 22 aa, Artificial Sequence
  Description of Artificial Sequence: Synthetic peptide
  Seed: GMDPRMCSLMQGSTLPRRSGAA
GMDPRMFSLAQSSTTPRRSGAA

SEQ ID NO: 84392 - protein, 22 aa, Artificial Sequence
  Description of Artificial Sequence: Synthetic peptide
  Seed: GMDPRMCSLMQGSTLPRRSGAA
GMDPRMFSLAQSSTVPRRSGAA

SEQ ID NO: 84393 - protein, 22 aa, Artificial Sequence
  Description of Artificial Sequence: Synthetic peptide
  Seed: GMDPRMCSLMQGSTLPRRSGAA
GMDPRMFSLAQTSTAPRRSGAA

SEQ ID NO: 84394 - protein, 22 aa, Artificial Sequence
  Description of Artificial Sequence: Synthetic peptide
  Seed: GMDPRMCSLMQGSTLPRRSGAA
GMDPRMFSLAQTSTIPRRSGAA

SEQ ID NO: 84395 - protein, 22 aa, Artificial Sequence
  Description of Artificial Sequence: Synthetic peptide
  Seed: GMDPRMCSLMQGSTLPRRSGAA
GMDPRMFSLAQTSTLPRRSGAA

SEQ ID NO: 84396 - protein, 22 aa, Artificial Sequence
  Description of Artificial Sequence: Synthetic peptide
  Seed: GMDPRMCSLMQGSTLPRRSGAA
GMDPRMFSLAQTSTMPRRSGAA

SEQ ID NO: 84397 - protein, 22 aa, Artificial Sequence
  Description of Artificial Sequence: Synthetic peptide
  Seed: GMDPRMCSLMQGSTLPRRSGAA
GMDPRMFSLAQTSTNPRRSGAA

SEQ ID NO: 84398 - protein, 22 aa, Artificial Sequence
  Description of Artificial Sequence: Synthetic peptide
  Seed: GMDPRMCSLMQGSTLPRRSGAA
GMDPRMFSLAQTSTSPRRSGAA

SEQ ID NO: 84399 - protein, 22 aa, Artificial Sequence
  Description of Artificial Sequence: Synthetic peptide
  Seed: GMDPRMCSLMQGSTLPRRSGAA
GMDPRMFSLAQTSTTPRRSGAA

SEQ ID NO: 84400 - protein, 22 aa, Artificial Sequence
  Description of Artificial Sequence: Synthetic peptide
  Seed: GMDPRMCSLMQGSTLPRRSGAA
GMDPRMFSLAQTSTVPRRSGAA

SEQ ID NO: 84401 - protein, 22 aa, Artificial Sequence
  Description of Artificial Sequence: Synthetic peptide
  Seed: GMDPRMCSLMQGSTLPRRSGAA
GMDPRMFSLAQVSTAPRRSGAA

SEQ ID NO: 84402 - protein, 22 aa, Artificial Sequence
  Description of Artificial Sequence: Synthetic peptide
  Seed: GMDPRMCSLMQGSTLPRRSGAA
GMDPRMFSLAQVSTGPRRSGAA

SEQ ID NO: 84403 - protein, 22 aa, Artificial Sequence
  Description of Artificial Sequence: Synthetic peptide
  Seed: GMDPRMCSLMQGSTLPRRSGAA
GMDPRMFSLAQVSTIPRRSGAA

SEQ ID NO: 84404 - protein, 22 aa, Artificial Sequence
  Description of Artificial Sequence: Synthetic peptide
  Seed: GMDPRMCSLMQGSTLPRRSGAA
GMDPRMFSLAQVSTLPRRSGAA

SEQ ID NO: 84405 - protein, 22 aa, Artificial Sequence
  Description of Artificial Sequence: Synthetic peptide
  Seed: GMDPRMCSLMQGSTLPRRSGAA
GMDPRMFSLAQVSTMPRRSGAA

SEQ ID NO: 84406 - protein, 22 aa, Artificial Sequence
  Description of Artificial Sequence: Synthetic peptide
  Seed: GMDPRMCSLMQGSTLPRRSGAA
GMDPRMFSLAQVSTNPRRSGAA

SEQ ID NO: 84407 - protein, 22 aa, Artificial Sequence
  Description of Artificial Sequence: Synthetic peptide
  Seed: GMDPRMCSLMQGSTLPRRSGAA
GMDPRMFSLAQVSTSPRRSGAA

SEQ ID NO: 84408 - protein, 22 aa, Artificial Sequence
  Description of Artificial Sequence: Synthetic peptide
  Seed: GMDPRMCSLMQGSTLPRRSGAA
GMDPRMFSLAQVSTTPRRSGAA

SEQ ID NO: 84409 - protein, 22 aa, Artificial Sequence
  Description of Artificial Sequence: Synthetic peptide
  Seed: GMDPRMCSLMQGSTLPRRSGAA
GMDPRMFSLAQVSTVPRRSGAA

SEQ ID NO: 84410 - protein, 22 aa, Artificial Sequence
  Description of Artificial Sequence: Synthetic peptide
  Seed: GMDPRMCSLMQGSTLPRRSGAA
GMDPRMFSLCQASTVPRRSGAA

SEQ ID NO: 84411 - protein, 22 aa, Artificial Sequence
  Description of Artificial Sequence: Synthetic peptide
  Seed: GMDPRMCSLMQGSTLPRRSGAA
GMDPRMFSLEQASTAPRRSGAA

SEQ ID NO: 84412 - protein, 22 aa, Artificial Sequence
  Description of Artificial Sequence: Synthetic peptide
  Seed: GMDPRMCSLMQGSTLPRRSGAA
GMDPRMFSLEQASTIPRRSGAA

SEQ ID NO: 84413 - protein, 22 aa, Artificial Sequence
  Description of Artificial Sequence: Synthetic peptide
  Seed: GMDPRMCSLMQGSTLPRRSGAA
GMDPRMFSLEQASTLPRRSGAA

SEQ ID NO: 84414 - protein, 22 aa, Artificial Sequence
  Description of Artificial Sequence: Synthetic peptide
  Seed: GMDPRMCSLMQGSTLPRRSGAA
GMDPRMFSLEQASTVPRRSGAA

SEQ ID NO: 84415 - protein, 22 aa, Artificial Sequence
  Description of Artificial Sequence: Synthetic peptide
  Seed: GMDPRMCSLMQGSTLPRRSGAA
GMDPRMFSLEQGSTIPRRSGAA

SEQ ID NO: 84416 - protein, 22 aa, Artificial Sequence
  Description of Artificial Sequence: Synthetic peptide
  Seed: GMDPRMCSLMQGSTLPRRSGAA
GMDPRMFSLEQGSTLPRRSGAA

SEQ ID NO: 84417 - protein, 22 aa, Artificial Sequence
  Description of Artificial Sequence: Synthetic peptide
  Seed: GMDPRMCSLMQGSTLPRRSGAA
GMDPRMFSLEQGSTVPRRSGAA

SEQ ID NO: 84418 - protein, 22 aa, Artificial Sequence
  Description of Artificial Sequence: Synthetic peptide
  Seed: GMDPRMCSLMQGSTLPRRSGAA
GMDPRMFSLEQSSTLPRRSGAA

SEQ ID NO: 84419 - protein, 22 aa, Artificial Sequence
  Description of Artificial Sequence: Synthetic peptide
  Seed: GMDPRMCSLMQGSTLPRRSGAA
GMDPRMFSLEQSSTVPRRSGAA

SEQ ID NO: 84420 - protein, 22 aa, Artificial Sequence
  Description of Artificial Sequence: Synthetic peptide
  Seed: GMDPRMCSLMQGSTLPRRSGAA
GMDPRMFSLFQASTAPRRSGAA

SEQ ID NO: 84421 - protein, 22 aa, Artificial Sequence
  Description of Artificial Sequence: Synthetic peptide
  Seed: GMDPRMCSLMQGSTLPRRSGAA
GMDPRMFSLFQASTIPRRSGAA

SEQ ID NO: 84422 - protein, 22 aa, Artificial Sequence
  Description of Artificial Sequence: Synthetic peptide
  Seed: GMDPRMCSLMQGSTLPRRSGAA
GMDPRMFSLFQASTLPRRSGAA

SEQ ID NO: 84423 - protein, 22 aa, Artificial Sequence
  Description of Artificial Sequence: Synthetic peptide
  Seed: GMDPRMCSLMQGSTLPRRSGAA
GMDPRMFSLFQASTNPRRSGAA

SEQ ID NO: 84424 - protein, 22 aa, Artificial Sequence
  Description of Artificial Sequence: Synthetic peptide
  Seed: GMDPRMCSLMQGSTLPRRSGAA
GMDPRMFSLFQASTSPRRSGAA

SEQ ID NO: 84425 - protein, 22 aa, Artificial Sequence
  Description of Artificial Sequence: Synthetic peptide
  Seed: GMDPRMCSLMQGSTLPRRSGAA
GMDPRMFSLFQASTVPRRSGAA

SEQ ID NO: 84426 - protein, 22 aa, Artificial Sequence
  Description of Artificial Sequence: Synthetic peptide
  Seed: GMDPRMCSLMQGSTLPRRSGAA
GMDPRMFSLFQGSTAPRRSGAA

SEQ ID NO: 84427 - protein, 22 aa, Artificial Sequence
  Description of Artificial Sequence: Synthetic peptide
  Seed: GMDPRMCSLMQGSTLPRRSGAA
GMDPRMFSLFQGSTVPRRSGAA

SEQ ID NO: 84428 - protein, 22 aa, Artificial Sequence
  Description of Artificial Sequence: Synthetic peptide
  Seed: GMDPRMCSLMQGSTLPRRSGAA
GMDPRMFSLFQPSTAPRRSGAA

SEQ ID NO: 84429 - protein, 22 aa, Artificial Sequence
  Description of Artificial Sequence: Synthetic peptide
  Seed: GMDPRMCSLMQGSTLPRRSGAA
GMDPRMFSLFQPSTNPRRSGAA

SEQ ID NO: 84430 - protein, 22 aa, Artificial Sequence
  Description of Artificial Sequence: Synthetic peptide
  Seed: GMDPRMCSLMQGSTLPRRSGAA
GMDPRMFSLFQPSTSPRRSGAA

SEQ ID NO: 84431 - protein, 22 aa, Artificial Sequence
  Description of Artificial Sequence: Synthetic peptide
  Seed: GMDPRMCSLMQGSTLPRRSGAA
GMDPRMFSLFQSSTAPRRSGAA

SEQ ID NO: 84432 - protein, 22 aa, Artificial Sequence
  Description of Artificial Sequence: Synthetic peptide
  Seed: GMDPRMCSLMQGSTLPRRSGAA
GMDPRMFSLFQSSTIPRRSGAA

SEQ ID NO: 84433 - protein, 22 aa, Artificial Sequence
  Description of Artificial Sequence: Synthetic peptide
  Seed: GMDPRMCSLMQGSTLPRRSGAA
GMDPRMFSLFQSSTLPRRSGAA

SEQ ID NO: 84434 - protein, 22 aa, Artificial Sequence
  Description of Artificial Sequence: Synthetic peptide
  Seed: GMDPRMCSLMQGSTLPRRSGAA
GMDPRMFSLFQSSTVPRRSGAA

SEQ ID NO: 84435 - protein, 22 aa, Artificial Sequence
  Description of Artificial Sequence: Synthetic peptide
  Seed: GMDPRMCSLMQGSTLPRRSGAA
GMDPRMFSLFQTSTAPRRSGAA

SEQ ID NO: 84436 - protein, 22 aa, Artificial Sequence
  Description of Artificial Sequence: Synthetic peptide
  Seed: GMDPRMCSLMQGSTLPRRSGAA
GMDPRMFSLFQVSTAPRRSGAA

SEQ ID NO: 84437 - protein, 22 aa, Artificial Sequence
  Description of Artificial Sequence: Synthetic peptide
  Seed: GMDPRMCSLMQGSTLPRRSGAA
GMDPRMFSLFQVSTNPRRSGAA

SEQ ID NO: 84438 - protein, 22 aa, Artificial Sequence
  Description of Artificial Sequence: Synthetic peptide
  Seed: GMDPRMCSLMQGSTLPRRSGAA
GMDPRMFSLFQVSTSPRRSGAA

SEQ ID NO: 84439 - protein, 22 aa, Artificial Sequence
  Description of Artificial Sequence: Synthetic peptide
  Seed: GMDPRMCSLMQGSTLPRRSGAA
GMDPRMFSLGQASTAPRRSGAA

SEQ ID NO: 84440 - protein, 22 aa, Artificial Sequence
  Description of Artificial Sequence: Synthetic peptide
  Seed: GMDPRMCSLMQGSTLPRRSGAA
GMDPRMFSLGQASTIPRRSGAA

SEQ ID NO: 84441 - protein, 22 aa, Artificial Sequence
  Description of Artificial Sequence: Synthetic peptide
  Seed: GMDPRMCSLMQGSTLPRRSGAA
GMDPRMFSLGQASTLPRRSGAA

SEQ ID NO: 84442 - protein, 22 aa, Artificial Sequence
  Description of Artificial Sequence: Synthetic peptide
  Seed: GMDPRMCSLMQGSTLPRRSGAA
GMDPRMFSLGQASTMPRRSGAA

SEQ ID NO: 84443 - protein, 22 aa, Artificial Sequence
  Description of Artificial Sequence: Synthetic peptide
  Seed: GMDPRMCSLMQGSTLPRRSGAA
GMDPRMFSLGQASTVPRRSGAA

SEQ ID NO: 84444 - protein, 22 aa, Artificial Sequence
  Description of Artificial Sequence: Synthetic peptide
  Seed: GMDPRMCSLMQGSTLPRRSGAA
GMDPRMFSLGQGSTLPRRSGAA

SEQ ID NO: 84445 - protein, 22 aa, Artificial Sequence
  Description of Artificial Sequence: Synthetic peptide
  Seed: GMDPRMCSLMQGSTLPRRSGAA
GMDPRMFSLGQSSTLPRRSGAA

SEQ ID NO: 84446 - protein, 22 aa, Artificial Sequence
  Description of Artificial Sequence: Synthetic peptide
  Seed: GMDPRMCSLMQGSTLPRRSGAA
GMDPRMFSLHQASTIPRRSGAA

SEQ ID NO: 84447 - protein, 22 aa, Artificial Sequence
  Description of Artificial Sequence: Synthetic peptide
  Seed: GMDPRMCSLMQGSTLPRRSGAA
GMDPRMFSLHQASTLPRRSGAA

SEQ ID NO: 84448 - protein, 22 aa, Artificial Sequence
  Description of Artificial Sequence: Synthetic peptide
  Seed: GMDPRMCSLMQGSTLPRRSGAA
GMDPRMFSLHQASTVPRRSGAA

SEQ ID NO: 84449 - protein, 22 aa, Artificial Sequence
  Description of Artificial Sequence: Synthetic peptide
  Seed: GMDPRMCSLMQGSTLPRRSGAA
GMDPRMFSLIQASTAPRRSGAA

SEQ ID NO: 84450 - protein, 22 aa, Artificial Sequence
  Description of Artificial Sequence: Synthetic peptide
  Seed: GMDPRMCSLMQGSTLPRRSGAA
GMDPRMFSLIQASTCPRRSGAA

SEQ ID NO: 84451 - protein, 22 aa, Artificial Sequence
  Description of Artificial Sequence: Synthetic peptide
  Seed: GMDPRMCSLMQGSTLPRRSGAA
GMDPRMFSLIQASTDPRRSGAA

SEQ ID NO: 84452 - protein, 22 aa, Artificial Sequence
  Description of Artificial Sequence: Synthetic peptide
  Seed: GMDPRMCSLMQGSTLPRRSGAA
GMDPRMFSLIQASTEPRRSGAA

SEQ ID NO: 84453 - protein, 22 aa, Artificial Sequence
  Description of Artificial Sequence: Synthetic peptide
  Seed: GMDPRMCSLMQGSTLPRRSGAA
GMDPRMFSLIQASTFPRRSGAA

SEQ ID NO: 84454 - protein, 22 aa, Artificial Sequence
  Description of Artificial Sequence: Synthetic peptide
  Seed: GMDPRMCSLMQGSTLPRRSGAA
GMDPRMFSLIQASTGPRRSGAA

SEQ ID NO: 84455 - protein, 22 aa, Artificial Sequence
  Description of Artificial Sequence: Synthetic peptide
  Seed: GMDPRMCSLMQGSTLPRRSGAA
GMDPRMFSLIQASTHPRRSGAA

SEQ ID NO: 84456 - protein, 22 aa, Artificial Sequence
  Description of Artificial Sequence: Synthetic peptide
  Seed: GMDPRMCSLMQGSTLPRRSGAA
GMDPRMFSLIQASTIPRRSGAA

SEQ ID NO: 84457 - protein, 22 aa, Artificial Sequence
  Description of Artificial Sequence: Synthetic peptide
  Seed: GMDPRMCSLMQGSTLPRRSGAA
GMDPRMFSLIQASTLPRRSGAA

SEQ ID NO: 84458 - protein, 22 aa, Artificial Sequence
  Description of Artificial Sequence: Synthetic peptide
  Seed: GMDPRMCSLMQGSTLPRRSGAA
GMDPRMFSLIQASTMPRRSGAA

SEQ ID NO: 84459 - protein, 22 aa, Artificial Sequence
  Description of Artificial Sequence: Synthetic peptide
  Seed: GMDPRMCSLMQGSTLPRRSGAA
GMDPRMFSLIQASTNPRRSGAA

SEQ ID NO: 84460 - protein, 22 aa, Artificial Sequence
  Description of Artificial Sequence: Synthetic peptide
  Seed: GMDPRMCSLMQGSTLPRRSGAA
GMDPRMFSLIQASTPPRRSGAA

SEQ ID NO: 84461 - protein, 22 aa, Artificial Sequence
  Description of Artificial Sequence: Synthetic peptide
  Seed: GMDPRMCSLMQGSTLPRRSGAA
GMDPRMFSLIQASTQPRRSGAA

SEQ ID NO: 84462 - protein, 22 aa, Artificial Sequence
  Description of Artificial Sequence: Synthetic peptide
  Seed: GMDPRMCSLMQGSTLPRRSGAA
GMDPRMFSLIQASTSPRRSGAA

SEQ ID NO: 84463 - protein, 22 aa, Artificial Sequence
  Description of Artificial Sequence: Synthetic peptide
  Seed: GMDPRMCSLMQGSTLPRRSGAA
GMDPRMFSLIQASTTPRRSGAA

SEQ ID NO: 84464 - protein, 22 aa, Artificial Sequence
  Description of Artificial Sequence: Synthetic peptide
  Seed: GMDPRMCSLMQGSTLPRRSGAA
GMDPRMFSLIQASTVPRRSGAA

SEQ ID NO: 84465 - protein, 22 aa, Artificial Sequence
  Description of Artificial Sequence: Synthetic peptide
  Seed: GMDPRMCSLMQGSTLPRRSGAA
GMDPRMFSLIQGSTAPRRSGAA

SEQ ID NO: 84466 - protein, 22 aa, Artificial Sequence
  Description of Artificial Sequence: Synthetic peptide
  Seed: GMDPRMCSLMQGSTLPRRSGAA
GMDPRMFSLIQGSTCPRRSGAA

SEQ ID NO: 84467 - protein, 22 aa, Artificial Sequence
  Description of Artificial Sequence: Synthetic peptide
  Seed: GMDPRMCSLMQGSTLPRRSGAA
GMDPRMFSLIQGSTGPRRSGAA

SEQ ID NO: 84468 - protein, 22 aa, Artificial Sequence
  Description of Artificial Sequence: Synthetic peptide
  Seed: GMDPRMCSLMQGSTLPRRSGAA
GMDPRMFSLIQGSTIPRRSGAA

SEQ ID NO: 84469 - protein, 22 aa, Artificial Sequence
  Description of Artificial Sequence: Synthetic peptide
  Seed: GMDPRMCSLMQGSTLPRRSGAA
GMDPRMFSLIQGSTLPRRSGAA

SEQ ID NO: 84470 - protein, 22 aa, Artificial Sequence
  Description of Artificial Sequence: Synthetic peptide
  Seed: GMDPRMCSLMQGSTLPRRSGAA
GMDPRMFSLIQGSTMPRRSGAA

SEQ ID NO: 84471 - protein, 22 aa, Artificial Sequence
  Description of Artificial Sequence: Synthetic peptide
  Seed: GMDPRMCSLMQGSTLPRRSGAA
GMDPRMFSLIQGSTNPRRSGAA

SEQ ID NO: 84472 - protein, 22 aa, Artificial Sequence
  Description of Artificial Sequence: Synthetic peptide
  Seed: GMDPRMCSLMQGSTLPRRSGAA
GMDPRMFSLIQGSTSPRRSGAA

SEQ ID NO: 84473 - protein, 22 aa, Artificial Sequence
  Description of Artificial Sequence: Synthetic peptide
  Seed: GMDPRMCSLMQGSTLPRRSGAA
GMDPRMFSLIQGSTTPRRSGAA

SEQ ID NO: 84474 - protein, 22 aa, Artificial Sequence
  Description of Artificial Sequence: Synthetic peptide
  Seed: GMDPRMCSLMQGSTLPRRSGAA
GMDPRMFSLIQGSTVPRRSGAA

SEQ ID NO: 84475 - protein, 22 aa, Artificial Sequence
  Description of Artificial Sequence: Synthetic peptide
  Seed: GMDPRMCSLMQGSTLPRRSGAA
GMDPRMFSLIQISTAPRRSGAA

SEQ ID NO: 84476 - protein, 22 aa, Artificial Sequence
  Description of Artificial Sequence: Synthetic peptide
  Seed: GMDPRMCSLMQGSTLPRRSGAA
GMDPRMFSLIQISTGPRRSGAA

SEQ ID NO: 84477 - protein, 22 aa, Artificial Sequence
  Description of Artificial Sequence: Synthetic peptide
  Seed: GMDPRMCSLMQGSTLPRRSGAA
GMDPRMFSLIQISTIPRRSGAA

SEQ ID NO: 84478 - protein, 22 aa, Artificial Sequence
  Description of Artificial Sequence: Synthetic peptide
  Seed: GMDPRMCSLMQGSTLPRRSGAA
GMDPRMFSLIQISTLPRRSGAA

SEQ ID NO: 84479 - protein, 22 aa, Artificial Sequence
  Description of Artificial Sequence: Synthetic peptide
  Seed: GMDPRMCSLMQGSTLPRRSGAA
GMDPRMFSLIQISTMPRRSGAA

SEQ ID NO: 84480 - protein, 22 aa, Artificial Sequence
  Description of Artificial Sequence: Synthetic peptide
  Seed: GMDPRMCSLMQGSTLPRRSGAA
GMDPRMFSLIQISTNPRRSGAA

SEQ ID NO: 84481 - protein, 22 aa, Artificial Sequence
  Description of Artificial Sequence: Synthetic peptide
  Seed: GMDPRMCSLMQGSTLPRRSGAA
GMDPRMFSLIQISTSPRRSGAA

SEQ ID NO: 84482 - protein, 22 aa, Artificial Sequence
  Description of Artificial Sequence: Synthetic peptide
  Seed: GMDPRMCSLMQGSTLPRRSGAA
GMDPRMFSLIQISTTPRRSGAA

SEQ ID NO: 84483 - protein, 22 aa, Artificial Sequence
  Description of Artificial Sequence: Synthetic peptide
  Seed: GMDPRMCSLMQGSTLPRRSGAA
GMDPRMFSLIQISTVPRRSGAA

SEQ ID NO: 84484 - protein, 22 aa, Artificial Sequence
  Description of Artificial Sequence: Synthetic peptide
  Seed: GMDPRMCSLMQGSTLPRRSGAA
GMDPRMFSLIQLSTAPRRSGAA

SEQ ID NO: 84485 - protein, 22 aa, Artificial Sequence
  Description of Artificial Sequence: Synthetic peptide
  Seed: GMDPRMCSLMQGSTLPRRSGAA
GMDPRMFSLIQLSTNPRRSGAA

SEQ ID NO: 84486 - protein, 22 aa, Artificial Sequence
  Description of Artificial Sequence: Synthetic peptide
  Seed: GMDPRMCSLMQGSTLPRRSGAA
GMDPRMFSLIQLSTSPRRSGAA

SEQ ID NO: 84487 - protein, 22 aa, Artificial Sequence
  Description of Artificial Sequence: Synthetic peptide
  Seed: GMDPRMCSLMQGSTLPRRSGAA
GMDPRMFSLIQMSTAPRRSGAA

SEQ ID NO: 84488 - protein, 22 aa, Artificial Sequence
  Description of Artificial Sequence: Synthetic peptide
  Seed: GMDPRMCSLMQGSTLPRRSGAA
GMDPRMFSLIQMSTNPRRSGAA

SEQ ID NO: 84489 - protein, 22 aa, Artificial Sequence
  Description of Artificial Sequence: Synthetic peptide
  Seed: GMDPRMCSLMQGSTLPRRSGAA
GMDPRMFSLIQMSTSPRRSGAA

SEQ ID NO: 84490 - protein, 22 aa, Artificial Sequence
  Description of Artificial Sequence: Synthetic peptide
  Seed: GMDPRMCSLMQGSTLPRRSGAA
GMDPRMFSLIQNSTAPRRSGAA

SEQ ID NO: 84491 - protein, 22 aa, Artificial Sequence
  Description of Artificial Sequence: Synthetic peptide
  Seed: GMDPRMCSLMQGSTLPRRSGAA
GMDPRMFSLIQNSTIPRRSGAA

SEQ ID NO: 84492 - protein, 22 aa, Artificial Sequence
  Description of Artificial Sequence: Synthetic peptide
  Seed: GMDPRMCSLMQGSTLPRRSGAA
GMDPRMFSLIQNSTLPRRSGAA

SEQ ID NO: 84493 - protein, 22 aa, Artificial Sequence
  Description of Artificial Sequence: Synthetic peptide
  Seed: GMDPRMCSLMQGSTLPRRSGAA
GMDPRMFSLIQNSTNPRRSGAA

SEQ ID NO: 84494 - protein, 22 aa, Artificial Sequence
  Description of Artificial Sequence: Synthetic peptide
  Seed: GMDPRMCSLMQGSTLPRRSGAA
GMDPRMFSLIQNSTSPRRSGAA

SEQ ID NO: 84495 - protein, 22 aa, Artificial Sequence
  Description of Artificial Sequence: Synthetic peptide
  Seed: GMDPRMCSLMQGSTLPRRSGAA
GMDPRMFSLIQNSTTPRRSGAA

SEQ ID NO: 84496 - protein, 22 aa, Artificial Sequence
  Description of Artificial Sequence: Synthetic peptide
  Seed: GMDPRMCSLMQGSTLPRRSGAA
GMDPRMFSLIQNSTVPRRSGAA

SEQ ID NO: 84497 - protein, 22 aa, Artificial Sequence
  Description of Artificial Sequence: Synthetic peptide
  Seed: GMDPRMCSLMQGSTLPRRSGAA
GMDPRMFSLIQPSTAPRRSGAA

SEQ ID NO: 84498 - protein, 22 aa, Artificial Sequence
  Description of Artificial Sequence: Synthetic peptide
  Seed: GMDPRMCSLMQGSTLPRRSGAA
GMDPRMFSLIQPSTGPRRSGAA

SEQ ID NO: 84499 - protein, 22 aa, Artificial Sequence
  Description of Artificial Sequence: Synthetic peptide
  Seed: GMDPRMCSLMQGSTLPRRSGAA
GMDPRMFSLIQPSTHPRRSGAA

SEQ ID NO: 84500 - protein, 22 aa, Artificial Sequence
  Description of Artificial Sequence: Synthetic peptide
  Seed: GMDPRMCSLMQGSTLPRRSGAA
GMDPRMFSLIQPSTIPRRSGAA

SEQ ID NO: 84501 - protein, 22 aa, Artificial Sequence
  Description of Artificial Sequence: Synthetic peptide
  Seed: GMDPRMCSLMQGSTLPRRSGAA
GMDPRMFSLIQPSTLPRRSGAA

SEQ ID NO: 84502 - protein, 22 aa, Artificial Sequence
  Description of Artificial Sequence: Synthetic peptide
  Seed: GMDPRMCSLMQGSTLPRRSGAA
GMDPRMFSLIQPSTMPRRSGAA

SEQ ID NO: 84503 - protein, 22 aa, Artificial Sequence
  Description of Artificial Sequence: Synthetic peptide
  Seed: GMDPRMCSLMQGSTLPRRSGAA
GMDPRMFSLIQPSTNPRRSGAA

SEQ ID NO: 84504 - protein, 22 aa, Artificial Sequence
  Description of Artificial Sequence: Synthetic peptide
  Seed: GMDPRMCSLMQGSTLPRRSGAA
GMDPRMFSLIQPSTQPRRSGAA

SEQ ID NO: 84505 - protein, 22 aa, Artificial Sequence
  Description of Artificial Sequence: Synthetic peptide
  Seed: GMDPRMCSLMQGSTLPRRSGAA
GMDPRMFSLIQPSTSPRRSGAA

SEQ ID NO: 84506 - protein, 22 aa, Artificial Sequence
  Description of Artificial Sequence: Synthetic peptide
  Seed: GMDPRMCSLMQGSTLPRRSGAA
GMDPRMFSLIQPSTTPRRSGAA

SEQ ID NO: 84507 - protein, 22 aa, Artificial Sequence
  Description of Artificial Sequence: Synthetic peptide
  Seed: GMDPRMCSLMQGSTLPRRSGAA
GMDPRMFSLIQPSTVPRRSGAA

SEQ ID NO: 84508 - protein, 22 aa, Artificial Sequence
  Description of Artificial Sequence: Synthetic peptide
  Seed: GMDPRMCSLMQGSTLPRRSGAA
GMDPRMFSLIQSSTAPRRSGAA

SEQ ID NO: 84509 - protein, 22 aa, Artificial Sequence
  Description of Artificial Sequence: Synthetic peptide
  Seed: GMDPRMCSLMQGSTLPRRSGAA
GMDPRMFSLIQSSTGPRRSGAA

SEQ ID NO: 84510 - protein, 22 aa, Artificial Sequence
  Description of Artificial Sequence: Synthetic peptide
  Seed: GMDPRMCSLMQGSTLPRRSGAA
GMDPRMFSLIQSSTHPRRSGAA

SEQ ID NO: 84511 - protein, 22 aa, Artificial Sequence
  Description of Artificial Sequence: Synthetic peptide
  Seed: GMDPRMCSLMQGSTLPRRSGAA
GMDPRMFSLIQSSTIPRRSGAA

SEQ ID NO: 84512 - protein, 22 aa, Artificial Sequence
  Description of Artificial Sequence: Synthetic peptide
  Seed: GMDPRMCSLMQGSTLPRRSGAA
GMDPRMFSLIQSSTLPRRSGAA

SEQ ID NO: 84513 - protein, 22 aa, Artificial Sequence
  Description of Artificial Sequence: Synthetic peptide
  Seed: GMDPRMCSLMQGSTLPRRSGAA
GMDPRMFSLIQSSTMPRRSGAA

SEQ ID NO: 84514 - protein, 22 aa, Artificial Sequence
  Description of Artificial Sequence: Synthetic peptide
  Seed: GMDPRMCSLMQGSTLPRRSGAA
GMDPRMFSLIQSSTNPRRSGAA

SEQ ID NO: 84515 - protein, 22 aa, Artificial Sequence
  Description of Artificial Sequence: Synthetic peptide
  Seed: GMDPRMCSLMQGSTLPRRSGAA
GMDPRMFSLIQSSTQPRRSGAA

SEQ ID NO: 84516 - protein, 22 aa, Artificial Sequence
  Description of Artificial Sequence: Synthetic peptide
  Seed: GMDPRMCSLMQGSTLPRRSGAA
GMDPRMFSLIQSSTSPRRSGAA

SEQ ID NO: 84517 - protein, 22 aa, Artificial Sequence
  Description of Artificial Sequence: Synthetic peptide
  Seed: GMDPRMCSLMQGSTLPRRSGAA
GMDPRMFSLIQSSTTPRRSGAA

SEQ ID NO: 84518 - protein, 22 aa, Artificial Sequence
  Description of Artificial Sequence: Synthetic peptide
  Seed: GMDPRMCSLMQGSTLPRRSGAA
GMDPRMFSLIQSSTVPRRSGAA

SEQ ID NO: 84519 - protein, 22 aa, Artificial Sequence
  Description of Artificial Sequence: Synthetic peptide
  Seed: GMDPRMCSLMQGSTLPRRSGAA
GMDPRMFSLIQTSTAPRRSGAA

SEQ ID NO: 84520 - protein, 22 aa, Artificial Sequence
  Description of Artificial Sequence: Synthetic peptide
  Seed: GMDPRMCSLMQGSTLPRRSGAA
GMDPRMFSLIQTSTGPRRSGAA

SEQ ID NO: 84521 - protein, 22 aa, Artificial Sequence
  Description of Artificial Sequence: Synthetic peptide
  Seed: GMDPRMCSLMQGSTLPRRSGAA
GMDPRMFSLIQTSTHPRRSGAA

SEQ ID NO: 84522 - protein, 22 aa, Artificial Sequence
  Description of Artificial Sequence: Synthetic peptide
  Seed: GMDPRMCSLMQGSTLPRRSGAA
GMDPRMFSLIQTSTIPRRSGAA

SEQ ID NO: 84523 - protein, 22 aa, Artificial Sequence
  Description of Artificial Sequence: Synthetic peptide
  Seed: GMDPRMCSLMQGSTLPRRSGAA
GMDPRMFSLIQTSTLPRRSGAA

SEQ ID NO: 84524 - protein, 22 aa, Artificial Sequence
  Description of Artificial Sequence: Synthetic peptide
  Seed: GMDPRMCSLMQGSTLPRRSGAA
GMDPRMFSLIQTSTMPRRSGAA

SEQ ID NO: 84525 - protein, 22 aa, Artificial Sequence
  Description of Artificial Sequence: Synthetic peptide
  Seed: GMDPRMCSLMQGSTLPRRSGAA
GMDPRMFSLIQTSTNPRRSGAA

SEQ ID NO: 84526 - protein, 22 aa, Artificial Sequence
  Description of Artificial Sequence: Synthetic peptide
  Seed: GMDPRMCSLMQGSTLPRRSGAA
GMDPRMFSLIQTSTQPRRSGAA

SEQ ID NO: 84527 - protein, 22 aa, Artificial Sequence
  Description of Artificial Sequence: Synthetic peptide
  Seed: GMDPRMCSLMQGSTLPRRSGAA
GMDPRMFSLIQTSTSPRRSGAA

SEQ ID NO: 84528 - protein, 22 aa, Artificial Sequence
  Description of Artificial Sequence: Synthetic peptide
  Seed: GMDPRMCSLMQGSTLPRRSGAA
GMDPRMFSLIQTSTTPRRSGAA

SEQ ID NO: 84529 - protein, 22 aa, Artificial Sequence
  Description of Artificial Sequence: Synthetic peptide
  Seed: GMDPRMCSLMQGSTLPRRSGAA
GMDPRMFSLIQTSTVPRRSGAA

SEQ ID NO: 84530 - protein, 22 aa, Artificial Sequence
  Description of Artificial Sequence: Synthetic peptide
  Seed: GMDPRMCSLMQGSTLPRRSGAA
GMDPRMFSLIQVSTAPRRSGAA

SEQ ID NO: 84531 - protein, 22 aa, Artificial Sequence
  Description of Artificial Sequence: Synthetic peptide
  Seed: GMDPRMCSLMQGSTLPRRSGAA
GMDPRMFSLIQVSTGPRRSGAA

SEQ ID NO: 84532 - protein, 22 aa, Artificial Sequence
  Description of Artificial Sequence: Synthetic peptide
  Seed: GMDPRMCSLMQGSTLPRRSGAA
GMDPRMFSLIQVSTHPRRSGAA

SEQ ID NO: 84533 - protein, 22 aa, Artificial Sequence
  Description of Artificial Sequence: Synthetic peptide
  Seed: GMDPRMCSLMQGSTLPRRSGAA
GMDPRMFSLIQVSTIPRRSGAA

SEQ ID NO: 84534 - protein, 22 aa, Artificial Sequence
  Description of Artificial Sequence: Synthetic peptide
  Seed: GMDPRMCSLMQGSTLPRRSGAA
GMDPRMFSLIQVSTLPRRSGAA

SEQ ID NO: 84535 - protein, 22 aa, Artificial Sequence
  Description of Artificial Sequence: Synthetic peptide
  Seed: GMDPRMCSLMQGSTLPRRSGAA
GMDPRMFSLIQVSTMPRRSGAA

SEQ ID NO: 84536 - protein, 22 aa, Artificial Sequence
  Description of Artificial Sequence: Synthetic peptide
  Seed: GMDPRMCSLMQGSTLPRRSGAA
GMDPRMFSLIQVSTNPRRSGAA

SEQ ID NO: 84537 - protein, 22 aa, Artificial Sequence
  Description of Artificial Sequence: Synthetic peptide
  Seed: GMDPRMCSLMQGSTLPRRSGAA
GMDPRMFSLIQVSTQPRRSGAA

SEQ ID NO: 84538 - protein, 22 aa, Artificial Sequence
  Description of Artificial Sequence: Synthetic peptide
  Seed: GMDPRMCSLMQGSTLPRRSGAA
GMDPRMFSLIQVSTSPRRSGAA

SEQ ID NO: 84539 - protein, 22 aa, Artificial Sequence
  Description of Artificial Sequence: Synthetic peptide
  Seed: GMDPRMCSLMQGSTLPRRSGAA
GMDPRMFSLIQVSTTPRRSGAA

SEQ ID NO: 84540 - protein, 22 aa, Artificial Sequence
  Description of Artificial Sequence: Synthetic peptide
  Seed: GMDPRMCSLMQGSTLPRRSGAA
GMDPRMFSLIQVSTVPRRSGAA

SEQ ID NO: 84541 - protein, 22 aa, Artificial Sequence
  Description of Artificial Sequence: Synthetic peptide
  Seed: GMDPRMCSLMQGSTLPRRSGAA
GMDPRMFSLLQASTAPRRSGAA

SEQ ID NO: 84542 - protein, 22 aa, Artificial Sequence
  Description of Artificial Sequence: Synthetic peptide
  Seed: GMDPRMCSLMQGSTLPRRSGAA
GMDPRMFSLLQASTCPRRSGAA

SEQ ID NO: 84543 - protein, 22 aa, Artificial Sequence
  Description of Artificial Sequence: Synthetic peptide
  Seed: GMDPRMCSLMQGSTLPRRSGAA
GMDPRMFSLLQASTDPRRSGAA

SEQ ID NO: 84544 - protein, 22 aa, Artificial Sequence
  Description of Artificial Sequence: Synthetic peptide
  Seed: GMDPRMCSLMQGSTLPRRSGAA
GMDPRMFSLLQASTEPRRSGAA

SEQ ID NO: 84545 - protein, 22 aa, Artificial Sequence
  Description of Artificial Sequence: Synthetic peptide
  Seed: GMDPRMCSLMQGSTLPRRSGAA
GMDPRMFSLLQASTFPRRSGAA

SEQ ID NO: 84546 - protein, 22 aa, Artificial Sequence
  Description of Artificial Sequence: Synthetic peptide
  Seed: GMDPRMCSLMQGSTLPRRSGAA
GMDPRMFSLLQASTGPRRSGAA

SEQ ID NO: 84547 - protein, 22 aa, Artificial Sequence
  Description of Artificial Sequence: Synthetic peptide
  Seed: GMDPRMCSLMQGSTLPRRSGAA
GMDPRMFSLLQASTHPRRSGAA

SEQ ID NO: 84548 - protein, 22 aa, Artificial Sequence
  Description of Artificial Sequence: Synthetic peptide
  Seed: GMDPRMCSLMQGSTLPRRSGAA
GMDPRMFSLLQASTIPRRSGAA

SEQ ID NO: 84549 - protein, 22 aa, Artificial Sequence
  Description of Artificial Sequence: Synthetic peptide
  Seed: GMDPRMCSLMQGSTLPRRSGAA
GMDPRMFSLLQASTLPRRSGAA

SEQ ID NO: 84550 - protein, 22 aa, Artificial Sequence
  Description of Artificial Sequence: Synthetic peptide
  Seed: GMDPRMCSLMQGSTLPRRSGAA
GMDPRMFSLLQASTMPRRSGAA

SEQ ID NO: 84551 - protein, 22 aa, Artificial Sequence
  Description of Artificial Sequence: Synthetic peptide
  Seed: GMDPRMCSLMQGSTLPRRSGAA
GMDPRMFSLLQASTNPRRSGAA

SEQ ID NO: 84552 - protein, 22 aa, Artificial Sequence
  Description of Artificial Sequence: Synthetic peptide
  Seed: GMDPRMCSLMQGSTLPRRSGAA
GMDPRMFSLLQASTPPRRSGAA

SEQ ID NO: 84553 - protein, 22 aa, Artificial Sequence
  Description of Artificial Sequence: Synthetic peptide
  Seed: GMDPRMCSLMQGSTLPRRSGAA
GMDPRMFSLLQASTQPRRSGAA

SEQ ID NO: 84554 - protein, 22 aa, Artificial Sequence
  Description of Artificial Sequence: Synthetic peptide
  Seed: GMDPRMCSLMQGSTLPRRSGAA
GMDPRMFSLLQASTSPRRSGAA

SEQ ID NO: 84555 - protein, 22 aa, Artificial Sequence
  Description of Artificial Sequence: Synthetic peptide
  Seed: GMDPRMCSLMQGSTLPRRSGAA
GMDPRMFSLLQASTTPRRSGAA

SEQ ID NO: 84556 - protein, 22 aa, Artificial Sequence
  Description of Artificial Sequence: Synthetic peptide
  Seed: GMDPRMCSLMQGSTLPRRSGAA
GMDPRMFSLLQASTVPRRSGAA

SEQ ID NO: 84557 - protein, 22 aa, Artificial Sequence
  Description of Artificial Sequence: Synthetic peptide
  Seed: GMDPRMCSLMQGSTLPRRSGAA
GMDPRMFSLLQASTYPRRSGAA

SEQ ID NO: 84558 - protein, 22 aa, Artificial Sequence
  Description of Artificial Sequence: Synthetic peptide
  Seed: GMDPRMCSLMQGSTLPRRSGAA
GMDPRMFSLLQGSTAPRRSGAA

SEQ ID NO: 84559 - protein, 22 aa, Artificial Sequence
  Description of Artificial Sequence: Synthetic peptide
  Seed: GMDPRMCSLMQGSTLPRRSGAA
GMDPRMFSLLQGSTCPRRSGAA

SEQ ID NO: 84560 - protein, 22 aa, Artificial Sequence
  Description of Artificial Sequence: Synthetic peptide
  Seed: GMDPRMCSLMQGSTLPRRSGAA
GMDPRMFSLLQGSTFPRRSGAA

SEQ ID NO: 84561 - protein, 22 aa, Artificial Sequence
  Description of Artificial Sequence: Synthetic peptide
  Seed: GMDPRMCSLMQGSTLPRRSGAA
GMDPRMFSLLQGSTGPRRSGAA

SEQ ID NO: 84562 - protein, 22 aa, Artificial Sequence
  Description of Artificial Sequence: Synthetic peptide
  Seed: GMDPRMCSLMQGSTLPRRSGAA
GMDPRMFSLLQGSTIPRRSGAA

SEQ ID NO: 84563 - protein, 22 aa, Artificial Sequence
  Description of Artificial Sequence: Synthetic peptide
  Seed: GMDPRMCSLMQGSTLPRRSGAA
GMDPRMFSLLQGSTLPRRSGAA

SEQ ID NO: 84564 - protein, 22 aa, Artificial Sequence
  Description of Artificial Sequence: Synthetic peptide
  Seed: GMDPRMCSLMQGSTLPRRSGAA
GMDPRMFSLLQGSTMPRRSGAA

SEQ ID NO: 84565 - protein, 22 aa, Artificial Sequence
  Description of Artificial Sequence: Synthetic peptide
  Seed: GMDPRMCSLMQGSTLPRRSGAA
GMDPRMFSLLQGSTNPRRSGAA

SEQ ID NO: 84566 - protein, 22 aa, Artificial Sequence
  Description of Artificial Sequence: Synthetic peptide
  Seed: GMDPRMCSLMQGSTLPRRSGAA
GMDPRMFSLLQGSTSPRRSGAA

SEQ ID NO: 84567 - protein, 22 aa, Artificial Sequence
  Description of Artificial Sequence: Synthetic peptide
  Seed: GMDPRMCSLMQGSTLPRRSGAA
GMDPRMFSLLQGSTTPRRSGAA

SEQ ID NO: 84568 - protein, 22 aa, Artificial Sequence
  Description of Artificial Sequence: Synthetic peptide
  Seed: GMDPRMCSLMQGSTLPRRSGAA
GMDPRMFSLLQGSTVPRRSGAA

SEQ ID NO: 84569 - protein, 22 aa, Artificial Sequence
  Description of Artificial Sequence: Synthetic peptide
  Seed: GMDPRMCSLMQGSTLPRRSGAA
GMDPRMFSLLQHSTVPRRSGAA

SEQ ID NO: 84570 - protein, 22 aa, Artificial Sequence
  Description of Artificial Sequence: Synthetic peptide
  Seed: GMDPRMCSLMQGSTLPRRSGAA
GMDPRMFSLLQISTAPRRSGAA

SEQ ID NO: 84571 - protein, 22 aa, Artificial Sequence
  Description of Artificial Sequence: Synthetic peptide
  Seed: GMDPRMCSLMQGSTLPRRSGAA
GMDPRMFSLLQISTGPRRSGAA

SEQ ID NO: 84572 - protein, 22 aa, Artificial Sequence
  Description of Artificial Sequence: Synthetic peptide
  Seed: GMDPRMCSLMQGSTLPRRSGAA
GMDPRMFSLLQISTHPRRSGAA

SEQ ID NO: 84573 - protein, 22 aa, Artificial Sequence
  Description of Artificial Sequence: Synthetic peptide
  Seed: GMDPRMCSLMQGSTLPRRSGAA
GMDPRMFSLLQISTIPRRSGAA

SEQ ID NO: 84574 - protein, 22 aa, Artificial Sequence
  Description of Artificial Sequence: Synthetic peptide
  Seed: GMDPRMCSLMQGSTLPRRSGAA
GMDPRMFSLLQISTLPRRSGAA

SEQ ID NO: 84575 - protein, 22 aa, Artificial Sequence
  Description of Artificial Sequence: Synthetic peptide
  Seed: GMDPRMCSLMQGSTLPRRSGAA
GMDPRMFSLLQISTMPRRSGAA

SEQ ID NO: 84576 - protein, 22 aa, Artificial Sequence
  Description of Artificial Sequence: Synthetic peptide
  Seed: GMDPRMCSLMQGSTLPRRSGAA
GMDPRMFSLLQISTNPRRSGAA

SEQ ID NO: 84577 - protein, 22 aa, Artificial Sequence
  Description of Artificial Sequence: Synthetic peptide
  Seed: GMDPRMCSLMQGSTLPRRSGAA
GMDPRMFSLLQISTQPRRSGAA

SEQ ID NO: 84578 - protein, 22 aa, Artificial Sequence
  Description of Artificial Sequence: Synthetic peptide
  Seed: GMDPRMCSLMQGSTLPRRSGAA
GMDPRMFSLLQISTSPRRSGAA

SEQ ID NO: 84579 - protein, 22 aa, Artificial Sequence
  Description of Artificial Sequence: Synthetic peptide
  Seed: GMDPRMCSLMQGSTLPRRSGAA
GMDPRMFSLLQISTTPRRSGAA

SEQ ID NO: 84580 - protein, 22 aa, Artificial Sequence
  Description of Artificial Sequence: Synthetic peptide
  Seed: GMDPRMCSLMQGSTLPRRSGAA
GMDPRMFSLLQISTVPRRSGAA

SEQ ID NO: 84581 - protein, 22 aa, Artificial Sequence
  Description of Artificial Sequence: Synthetic peptide
  Seed: GMDPRMCSLMQGSTLPRRSGAA
GMDPRMFSLLQLSTAPRRSGAA

SEQ ID NO: 84582 - protein, 22 aa, Artificial Sequence
  Description of Artificial Sequence: Synthetic peptide
  Seed: GMDPRMCSLMQGSTLPRRSGAA
GMDPRMFSLLQLSTNPRRSGAA

SEQ ID NO: 84583 - protein, 22 aa, Artificial Sequence
  Description of Artificial Sequence: Synthetic peptide
  Seed: GMDPRMCSLMQGSTLPRRSGAA
GMDPRMFSLLQLSTSPRRSGAA

SEQ ID NO: 84584 - protein, 22 aa, Artificial Sequence
  Description of Artificial Sequence: Synthetic peptide
  Seed: GMDPRMCSLMQGSTLPRRSGAA
GMDPRMFSLLQMSTAPRRSGAA

SEQ ID NO: 84585 - protein, 22 aa, Artificial Sequence
  Description of Artificial Sequence: Synthetic peptide
  Seed: GMDPRMCSLMQGSTLPRRSGAA
GMDPRMFSLLQMSTNPRRSGAA

SEQ ID NO: 84586 - protein, 22 aa, Artificial Sequence
  Description of Artificial Sequence: Synthetic peptide
  Seed: GMDPRMCSLMQGSTLPRRSGAA
GMDPRMFSLLQMSTSPRRSGAA

SEQ ID NO: 84587 - protein, 22 aa, Artificial Sequence
  Description of Artificial Sequence: Synthetic peptide
  Seed: GMDPRMCSLMQGSTLPRRSGAA
GMDPRMFSLLQNSTAPRRSGAA

SEQ ID NO: 84588 - protein, 22 aa, Artificial Sequence
  Description of Artificial Sequence: Synthetic peptide
  Seed: GMDPRMCSLMQGSTLPRRSGAA
GMDPRMFSLLQNSTGPRRSGAA

SEQ ID NO: 84589 - protein, 22 aa, Artificial Sequence
  Description of Artificial Sequence: Synthetic peptide
  Seed: GMDPRMCSLMQGSTLPRRSGAA
GMDPRMFSLLQNSTIPRRSGAA

SEQ ID NO: 84590 - protein, 22 aa, Artificial Sequence
  Description of Artificial Sequence: Synthetic peptide
  Seed: GMDPRMCSLMQGSTLPRRSGAA
GMDPRMFSLLQNSTLPRRSGAA

SEQ ID NO: 84591 - protein, 22 aa, Artificial Sequence
  Description of Artificial Sequence: Synthetic peptide
  Seed: GMDPRMCSLMQGSTLPRRSGAA
GMDPRMFSLLQNSTMPRRSGAA

SEQ ID NO: 84592 - protein, 22 aa, Artificial Sequence
  Description of Artificial Sequence: Synthetic peptide
  Seed: GMDPRMCSLMQGSTLPRRSGAA
GMDPRMFSLLQNSTNPRRSGAA

SEQ ID NO: 84593 - protein, 22 aa, Artificial Sequence
  Description of Artificial Sequence: Synthetic peptide
  Seed: GMDPRMCSLMQGSTLPRRSGAA
GMDPRMFSLLQNSTSPRRSGAA

SEQ ID NO: 84594 - protein, 22 aa, Artificial Sequence
  Description of Artificial Sequence: Synthetic peptide
  Seed: GMDPRMCSLMQGSTLPRRSGAA
GMDPRMFSLLQNSTTPRRSGAA

SEQ ID NO: 84595 - protein, 22 aa, Artificial Sequence
  Description of Artificial Sequence: Synthetic peptide
  Seed: GMDPRMCSLMQGSTLPRRSGAA
GMDPRMFSLLQNSTVPRRSGAA

SEQ ID NO: 84596 - protein, 22 aa, Artificial Sequence
  Description of Artificial Sequence: Synthetic peptide
  Seed: GMDPRMCSLMQGSTLPRRSGAA
GMDPRMFSLLQPSTAPRRSGAA

SEQ ID NO: 84597 - protein, 22 aa, Artificial Sequence
  Description of Artificial Sequence: Synthetic peptide
  Seed: GMDPRMCSLMQGSTLPRRSGAA
GMDPRMFSLLQPSTCPRRSGAA

SEQ ID NO: 84598 - protein, 22 aa, Artificial Sequence
  Description of Artificial Sequence: Synthetic peptide
  Seed: GMDPRMCSLMQGSTLPRRSGAA
GMDPRMFSLLQPSTDPRRSGAA

SEQ ID NO: 84599 - protein, 22 aa, Artificial Sequence
  Description of Artificial Sequence: Synthetic peptide
  Seed: GMDPRMCSLMQGSTLPRRSGAA
GMDPRMFSLLQPSTEPRRSGAA

SEQ ID NO: 84600 - protein, 22 aa, Artificial Sequence
  Description of Artificial Sequence: Synthetic peptide
  Seed: GMDPRMCSLMQGSTLPRRSGAA
GMDPRMFSLLQPSTFPRRSGAA

SEQ ID NO: 84601 - protein, 22 aa, Artificial Sequence
  Description of Artificial Sequence: Synthetic peptide
  Seed: GMDPRMCSLMQGSTLPRRSGAA
GMDPRMFSLLQPSTGPRRSGAA

SEQ ID NO: 84602 - protein, 22 aa, Artificial Sequence
  Description of Artificial Sequence: Synthetic peptide
  Seed: GMDPRMCSLMQGSTLPRRSGAA
GMDPRMFSLLQPSTHPRRSGAA

SEQ ID NO: 84603 - protein, 22 aa, Artificial Sequence
  Description of Artificial Sequence: Synthetic peptide
  Seed: GMDPRMCSLMQGSTLPRRSGAA
GMDPRMFSLLQPSTIPRRSGAA

SEQ ID NO: 84604 - protein, 22 aa, Artificial Sequence
  Description of Artificial Sequence: Synthetic peptide
  Seed: GMDPRMCSLMQGSTLPRRSGAA
GMDPRMFSLLQPSTLPRRSGAA

SEQ ID NO: 84605 - protein, 22 aa, Artificial Sequence
  Description of Artificial Sequence: Synthetic peptide
  Seed: GMDPRMCSLMQGSTLPRRSGAA
GMDPRMFSLLQPSTMPRRSGAA

SEQ ID NO: 84606 - protein, 22 aa, Artificial Sequence
  Description of Artificial Sequence: Synthetic peptide
  Seed: GMDPRMCSLMQGSTLPRRSGAA
GMDPRMFSLLQPSTNPRRSGAA

SEQ ID NO: 84607 - protein, 22 aa, Artificial Sequence
  Description of Artificial Sequence: Synthetic peptide
  Seed: GMDPRMCSLMQGSTLPRRSGAA
GMDPRMFSLLQPSTPPRRSGAA

SEQ ID NO: 84608 - protein, 22 aa, Artificial Sequence
  Description of Artificial Sequence: Synthetic peptide
  Seed: GMDPRMCSLMQGSTLPRRSGAA
GMDPRMFSLLQPSTQPRRSGAA

SEQ ID NO: 84609 - protein, 22 aa, Artificial Sequence
  Description of Artificial Sequence: Synthetic peptide
  Seed: GMDPRMCSLMQGSTLPRRSGAA
GMDPRMFSLLQPSTSPRRSGAA

SEQ ID NO: 84610 - protein, 22 aa, Artificial Sequence
  Description of Artificial Sequence: Synthetic peptide
  Seed: GMDPRMCSLMQGSTLPRRSGAA
GMDPRMFSLLQPSTTPRRSGAA

SEQ ID NO: 84611 - protein, 22 aa, Artificial Sequence
  Description of Artificial Sequence: Synthetic peptide
  Seed: GMDPRMCSLMQGSTLPRRSGAA
GMDPRMFSLLQPSTVPRRSGAA

SEQ ID NO: 84612 - protein, 22 aa, Artificial Sequence
  Description of Artificial Sequence: Synthetic peptide
  Seed: GMDPRMCSLMQGSTLPRRSGAA
GMDPRMFSLLQSSTAPRRSGAA

SEQ ID NO: 84613 - protein, 22 aa, Artificial Sequence
  Description of Artificial Sequence: Synthetic peptide
  Seed: GMDPRMCSLMQGSTLPRRSGAA
GMDPRMFSLLQSSTCPRRSGAA

SEQ ID NO: 84614 - protein, 22 aa, Artificial Sequence
  Description of Artificial Sequence: Synthetic peptide
  Seed: GMDPRMCSLMQGSTLPRRSGAA
GMDPRMFSLLQSSTDPRRSGAA

SEQ ID NO: 84615 - protein, 22 aa, Artificial Sequence
  Description of Artificial Sequence: Synthetic peptide
  Seed: GMDPRMCSLMQGSTLPRRSGAA
GMDPRMFSLLQSSTFPRRSGAA

SEQ ID NO: 84616 - protein, 22 aa, Artificial Sequence
  Description of Artificial Sequence: Synthetic peptide
  Seed: GMDPRMCSLMQGSTLPRRSGAA
GMDPRMFSLLQSSTGPRRSGAA

SEQ ID NO: 84617 - protein, 22 aa, Artificial Sequence
  Description of Artificial Sequence: Synthetic peptide
  Seed: GMDPRMCSLMQGSTLPRRSGAA
GMDPRMFSLLQSSTHPRRSGAA

SEQ ID NO: 84618 - protein, 22 aa, Artificial Sequence
  Description of Artificial Sequence: Synthetic peptide
  Seed: GMDPRMCSLMQGSTLPRRSGAA
GMDPRMFSLLQSSTIPRRSGAA

SEQ ID NO: 84619 - protein, 22 aa, Artificial Sequence
  Description of Artificial Sequence: Synthetic peptide
  Seed: GMDPRMCSLMQGSTLPRRSGAA
GMDPRMFSLLQSSTLPRRSGAA

SEQ ID NO: 84620 - protein, 22 aa, Artificial Sequence
  Description of Artificial Sequence: Synthetic peptide
  Seed: GMDPRMCSLMQGSTLPRRSGAA
GMDPRMFSLLQSSTMPRRSGAA

SEQ ID NO: 84621 - protein, 22 aa, Artificial Sequence
  Description of Artificial Sequence: Synthetic peptide
  Seed: GMDPRMCSLMQGSTLPRRSGAA
GMDPRMFSLLQSSTNPRRSGAA

SEQ ID NO: 84622 - protein, 22 aa, Artificial Sequence
  Description of Artificial Sequence: Synthetic peptide
  Seed: GMDPRMCSLMQGSTLPRRSGAA
GMDPRMFSLLQSSTQPRRSGAA

SEQ ID NO: 84623 - protein, 22 aa, Artificial Sequence
  Description of Artificial Sequence: Synthetic peptide
  Seed: GMDPRMCSLMQGSTLPRRSGAA
GMDPRMFSLLQSSTSPRRSGAA

SEQ ID NO: 84624 - protein, 22 aa, Artificial Sequence
  Description of Artificial Sequence: Synthetic peptide
  Seed: GMDPRMCSLMQGSTLPRRSGAA
GMDPRMFSLLQSSTTPRRSGAA

SEQ ID NO: 84625 - protein, 22 aa, Artificial Sequence
  Description of Artificial Sequence: Synthetic peptide
  Seed: GMDPRMCSLMQGSTLPRRSGAA
GMDPRMFSLLQSSTVPRRSGAA

SEQ ID NO: 84626 - protein, 22 aa, Artificial Sequence
  Description of Artificial Sequence: Synthetic peptide
  Seed: GMDPRMCSLMQGSTLPRRSGAA
GMDPRMFSLLQTSTAPRRSGAA

SEQ ID NO: 84627 - protein, 22 aa, Artificial Sequence
  Description of Artificial Sequence: Synthetic peptide
  Seed: GMDPRMCSLMQGSTLPRRSGAA
GMDPRMFSLLQTSTDPRRSGAA

SEQ ID NO: 84628 - protein, 22 aa, Artificial Sequence
  Description of Artificial Sequence: Synthetic peptide
  Seed: GMDPRMCSLMQGSTLPRRSGAA
GMDPRMFSLLQTSTGPRRSGAA

SEQ ID NO: 84629 - protein, 22 aa, Artificial Sequence
  Description of Artificial Sequence: Synthetic peptide
  Seed: GMDPRMCSLMQGSTLPRRSGAA
GMDPRMFSLLQTSTHPRRSGAA

SEQ ID NO: 84630 - protein, 22 aa, Artificial Sequence
  Description of Artificial Sequence: Synthetic peptide
  Seed: GMDPRMCSLMQGSTLPRRSGAA
GMDPRMFSLLQTSTIPRRSGAA

SEQ ID NO: 84631 - protein, 22 aa, Artificial Sequence
  Description of Artificial Sequence: Synthetic peptide
  Seed: GMDPRMCSLMQGSTLPRRSGAA
GMDPRMFSLLQTSTLPRRSGAA

SEQ ID NO: 84632 - protein, 22 aa, Artificial Sequence
  Description of Artificial Sequence: Synthetic peptide
  Seed: GMDPRMCSLMQGSTLPRRSGAA
GMDPRMFSLLQTSTMPRRSGAA

SEQ ID NO: 84633 - protein, 22 aa, Artificial Sequence
  Description of Artificial Sequence: Synthetic peptide
  Seed: GMDPRMCSLMQGSTLPRRSGAA
GMDPRMFSLLQTSTNPRRSGAA

SEQ ID NO: 84634 - protein, 22 aa, Artificial Sequence
  Description of Artificial Sequence: Synthetic peptide
  Seed: GMDPRMCSLMQGSTLPRRSGAA
GMDPRMFSLLQTSTPPRRSGAA

SEQ ID NO: 84635 - protein, 22 aa, Artificial Sequence
  Description of Artificial Sequence: Synthetic peptide
  Seed: GMDPRMCSLMQGSTLPRRSGAA
GMDPRMFSLLQTSTQPRRSGAA

SEQ ID NO: 84636 - protein, 22 aa, Artificial Sequence
  Description of Artificial Sequence: Synthetic peptide
  Seed: GMDPRMCSLMQGSTLPRRSGAA
GMDPRMFSLLQTSTSPRRSGAA

SEQ ID NO: 84637 - protein, 22 aa, Artificial Sequence
  Description of Artificial Sequence: Synthetic peptide
  Seed: GMDPRMCSLMQGSTLPRRSGAA
GMDPRMFSLLQTSTTPRRSGAA

SEQ ID NO: 84638 - protein, 22 aa, Artificial Sequence
  Description of Artificial Sequence: Synthetic peptide
  Seed: GMDPRMCSLMQGSTLPRRSGAA
GMDPRMFSLLQTSTVPRRSGAA

SEQ ID NO: 84639 - protein, 22 aa, Artificial Sequence
  Description of Artificial Sequence: Synthetic peptide
  Seed: GMDPRMCSLMQGSTLPRRSGAA
GMDPRMFSLLQVSTAPRRSGAA

SEQ ID NO: 84640 - protein, 22 aa, Artificial Sequence
  Description of Artificial Sequence: Synthetic peptide
  Seed: GMDPRMCSLMQGSTLPRRSGAA
GMDPRMFSLLQVSTDPRRSGAA

SEQ ID NO: 84641 - protein, 22 aa, Artificial Sequence
  Description of Artificial Sequence: Synthetic peptide
  Seed: GMDPRMCSLMQGSTLPRRSGAA
GMDPRMFSLLQVSTGPRRSGAA

SEQ ID NO: 84642 - protein, 22 aa, Artificial Sequence
  Description of Artificial Sequence: Synthetic peptide
  Seed: GMDPRMCSLMQGSTLPRRSGAA
GMDPRMFSLLQVSTHPRRSGAA

SEQ ID NO: 84643 - protein, 22 aa, Artificial Sequence
  Description of Artificial Sequence: Synthetic peptide
  Seed: GMDPRMCSLMQGSTLPRRSGAA
GMDPRMFSLLQVSTIPRRSGAA

SEQ ID NO: 84644 - protein, 22 aa, Artificial Sequence
  Description of Artificial Sequence: Synthetic peptide
  Seed: GMDPRMCSLMQGSTLPRRSGAA
GMDPRMFSLLQVSTLPRRSGAA

SEQ ID NO: 84645 - protein, 22 aa, Artificial Sequence
  Description of Artificial Sequence: Synthetic peptide
  Seed: GMDPRMCSLMQGSTLPRRSGAA
GMDPRMFSLLQVSTMPRRSGAA

SEQ ID NO: 84646 - protein, 22 aa, Artificial Sequence
  Description of Artificial Sequence: Synthetic peptide
  Seed: GMDPRMCSLMQGSTLPRRSGAA
GMDPRMFSLLQVSTNPRRSGAA

SEQ ID NO: 84647 - protein, 22 aa, Artificial Sequence
  Description of Artificial Sequence: Synthetic peptide
  Seed: GMDPRMCSLMQGSTLPRRSGAA
GMDPRMFSLLQVSTPPRRSGAA

SEQ ID NO: 84648 - protein, 22 aa, Artificial Sequence
  Description of Artificial Sequence: Synthetic peptide
  Seed: GMDPRMCSLMQGSTLPRRSGAA
GMDPRMFSLLQVSTQPRRSGAA

SEQ ID NO: 84649 - protein, 22 aa, Artificial Sequence
  Description of Artificial Sequence: Synthetic peptide
  Seed: GMDPRMCSLMQGSTLPRRSGAA
GMDPRMFSLLQVSTSPRRSGAA

SEQ ID NO: 84650 - protein, 22 aa, Artificial Sequence
  Description of Artificial Sequence: Synthetic peptide
  Seed: GMDPRMCSLMQGSTLPRRSGAA
GMDPRMFSLLQVSTTPRRSGAA

SEQ ID NO: 84651 - protein, 22 aa, Artificial Sequence
  Description of Artificial Sequence: Synthetic peptide
  Seed: GMDPRMCSLMQGSTLPRRSGAA
GMDPRMFSLLQVSTVPRRSGAA

SEQ ID NO: 84652 - protein, 22 aa, Artificial Sequence
  Description of Artificial Sequence: Synthetic peptide
  Seed: GMDPRMCSLMQGSTLPRRSGAA
GMDPRMFSLMQASTAPRRSGAA

SEQ ID NO: 84653 - protein, 22 aa, Artificial Sequence
  Description of Artificial Sequence: Synthetic peptide
  Seed: GMDPRMCSLMQGSTLPRRSGAA
GMDPRMFSLMQASTCPRRSGAA

SEQ ID NO: 84654 - protein, 22 aa, Artificial Sequence
  Description of Artificial Sequence: Synthetic peptide
  Seed: GMDPRMCSLMQGSTLPRRSGAA
GMDPRMFSLMQASTDPRRSGAA

SEQ ID NO: 84655 - protein, 22 aa, Artificial Sequence
  Description of Artificial Sequence: Synthetic peptide
  Seed: GMDPRMCSLMQGSTLPRRSGAA
GMDPRMFSLMQASTEPRRSGAA

SEQ ID NO: 84656 - protein, 22 aa, Artificial Sequence
  Description of Artificial Sequence: Synthetic peptide
  Seed: GMDPRMCSLMQGSTLPRRSGAA
GMDPRMFSLMQASTFPRRSGAA

SEQ ID NO: 84657 - protein, 22 aa, Artificial Sequence
  Description of Artificial Sequence: Synthetic peptide
  Seed: GMDPRMCSLMQGSTLPRRSGAA
GMDPRMFSLMQASTGPRRSGAA

SEQ ID NO: 84658 - protein, 22 aa, Artificial Sequence
  Description of Artificial Sequence: Synthetic peptide
  Seed: GMDPRMCSLMQGSTLPRRSGAA
GMDPRMFSLMQASTHPRRSGAA

SEQ ID NO: 84659 - protein, 22 aa, Artificial Sequence
  Description of Artificial Sequence: Synthetic peptide
  Seed: GMDPRMCSLMQGSTLPRRSGAA
GMDPRMFSLMQASTIPRRSGAA

SEQ ID NO: 84660 - protein, 22 aa, Artificial Sequence
  Description of Artificial Sequence: Synthetic peptide
  Seed: GMDPRMCSLMQGSTLPRRSGAA
GMDPRMFSLMQASTLPRRSGAA

SEQ ID NO: 84661 - protein, 22 aa, Artificial Sequence
  Description of Artificial Sequence: Synthetic peptide
  Seed: GMDPRMCSLMQGSTLPRRSGAA
GMDPRMFSLMQASTMPRRSGAA

SEQ ID NO: 84662 - protein, 22 aa, Artificial Sequence
  Description of Artificial Sequence: Synthetic peptide
  Seed: GMDPRMCSLMQGSTLPRRSGAA
GMDPRMFSLMQASTNPRRSGAA

SEQ ID NO: 84663 - protein, 22 aa, Artificial Sequence
  Description of Artificial Sequence: Synthetic peptide
  Seed: GMDPRMCSLMQGSTLPRRSGAA
GMDPRMFSLMQASTPPRRSGAA

SEQ ID NO: 84664 - protein, 22 aa, Artificial Sequence
  Description of Artificial Sequence: Synthetic peptide
  Seed: GMDPRMCSLMQGSTLPRRSGAA
GMDPRMFSLMQASTQPRRSGAA

SEQ ID NO: 84665 - protein, 22 aa, Artificial Sequence
  Description of Artificial Sequence: Synthetic peptide
  Seed: GMDPRMCSLMQGSTLPRRSGAA
GMDPRMFSLMQASTSPRRSGAA

SEQ ID NO: 84666 - protein, 22 aa, Artificial Sequence
  Description of Artificial Sequence: Synthetic peptide
  Seed: GMDPRMCSLMQGSTLPRRSGAA
GMDPRMFSLMQASTTPRRSGAA

SEQ ID NO: 84667 - protein, 22 aa, Artificial Sequence
  Description of Artificial Sequence: Synthetic peptide
  Seed: GMDPRMCSLMQGSTLPRRSGAA
GMDPRMFSLMQASTVPRRSGAA

SEQ ID NO: 84668 - protein, 22 aa, Artificial Sequence
  Description of Artificial Sequence: Synthetic peptide
  Seed: GMDPRMCSLMQGSTLPRRSGAA
GMDPRMFSLMQASTYPRRSGAA

SEQ ID NO: 84669 - protein, 22 aa, Artificial Sequence
  Description of Artificial Sequence: Synthetic peptide
  Seed: GMDPRMCSLMQGSTLPRRSGAA
GMDPRMFSLMQGSTAPRRSGAA

SEQ ID NO: 84670 - protein, 22 aa, Artificial Sequence
  Description of Artificial Sequence: Synthetic peptide
  Seed: GMDPRMCSLMQGSTLPRRSGAA
GMDPRMFSLMQGSTCPRRSGAA

SEQ ID NO: 84671 - protein, 22 aa, Artificial Sequence
  Description of Artificial Sequence: Synthetic peptide
  Seed: GMDPRMCSLMQGSTLPRRSGAA
GMDPRMFSLMQGSTFPRRSGAA

SEQ ID NO: 84672 - protein, 22 aa, Artificial Sequence
  Description of Artificial Sequence: Synthetic peptide
  Seed: GMDPRMCSLMQGSTLPRRSGAA
GMDPRMFSLMQGSTGPRRSGAA

SEQ ID NO: 84673 - protein, 22 aa, Artificial Sequence
  Description of Artificial Sequence: Synthetic peptide
  Seed: GMDPRMCSLMQGSTLPRRSGAA
GMDPRMFSLMQGSTIPRRSGAA

SEQ ID NO: 84674 - protein, 22 aa, Artificial Sequence
  Description of Artificial Sequence: Synthetic peptide
  Seed: GMDPRMCSLMQGSTLPRRSGAA
GMDPRMFSLMQGSTLPRRSGAA

SEQ ID NO: 84675 - protein, 22 aa, Artificial Sequence
  Description of Artificial Sequence: Synthetic peptide
  Seed: GMDPRMCSLMQGSTLPRRSGAA
GMDPRMFSLMQGSTMPRRSGAA

SEQ ID NO: 84676 - protein, 22 aa, Artificial Sequence
  Description of Artificial Sequence: Synthetic peptide
  Seed: GMDPRMCSLMQGSTLPRRSGAA
GMDPRMFSLMQGSTNPRRSGAA

SEQ ID NO: 84677 - protein, 22 aa, Artificial Sequence
  Description of Artificial Sequence: Synthetic peptide
  Seed: GMDPRMCSLMQGSTLPRRSGAA
GMDPRMFSLMQGSTQPRRSGAA

SEQ ID NO: 84678 - protein, 22 aa, Artificial Sequence
  Description of Artificial Sequence: Synthetic peptide
  Seed: GMDPRMCSLMQGSTLPRRSGAA
GMDPRMFSLMQGSTSPRRSGAA

SEQ ID NO: 84679 - protein, 22 aa, Artificial Sequence
  Description of Artificial Sequence: Synthetic peptide
  Seed: GMDPRMCSLMQGSTLPRRSGAA
GMDPRMFSLMQGSTTPRRSGAA

SEQ ID NO: 84680 - protein, 22 aa, Artificial Sequence
  Description of Artificial Sequence: Synthetic peptide
  Seed: GMDPRMCSLMQGSTLPRRSGAA
GMDPRMFSLMQGSTVPRRSGAA

SEQ ID NO: 84681 - protein, 22 aa, Artificial Sequence
  Description of Artificial Sequence: Synthetic peptide
  Seed: GMDPRMCSLMQGSTLPRRSGAA
GMDPRMFSLMQHSTIPRRSGAA

SEQ ID NO: 84682 - protein, 22 aa, Artificial Sequence
  Description of Artificial Sequence: Synthetic peptide
  Seed: GMDPRMCSLMQGSTLPRRSGAA
GMDPRMFSLMQHSTLPRRSGAA

SEQ ID NO: 84683 - protein, 22 aa, Artificial Sequence
  Description of Artificial Sequence: Synthetic peptide
  Seed: GMDPRMCSLMQGSTLPRRSGAA
GMDPRMFSLMQHSTVPRRSGAA

SEQ ID NO: 84684 - protein, 22 aa, Artificial Sequence
  Description of Artificial Sequence: Synthetic peptide
  Seed: GMDPRMCSLMQGSTLPRRSGAA
GMDPRMFSLMQISTAPRRSGAA

SEQ ID NO: 84685 - protein, 22 aa, Artificial Sequence
  Description of Artificial Sequence: Synthetic peptide
  Seed: GMDPRMCSLMQGSTLPRRSGAA
GMDPRMFSLMQISTDPRRSGAA

SEQ ID NO: 84686 - protein, 22 aa, Artificial Sequence
  Description of Artificial Sequence: Synthetic peptide
  Seed: GMDPRMCSLMQGSTLPRRSGAA
GMDPRMFSLMQISTGPRRSGAA

SEQ ID NO: 84687 - protein, 22 aa, Artificial Sequence
  Description of Artificial Sequence: Synthetic peptide
  Seed: GMDPRMCSLMQGSTLPRRSGAA
GMDPRMFSLMQISTHPRRSGAA

SEQ ID NO: 84688 - protein, 22 aa, Artificial Sequence
  Description of Artificial Sequence: Synthetic peptide
  Seed: GMDPRMCSLMQGSTLPRRSGAA
GMDPRMFSLMQISTIPRRSGAA

SEQ ID NO: 84689 - protein, 22 aa, Artificial Sequence
  Description of Artificial Sequence: Synthetic peptide
  Seed: GMDPRMCSLMQGSTLPRRSGAA
GMDPRMFSLMQISTLPRRSGAA

SEQ ID NO: 84690 - protein, 22 aa, Artificial Sequence
  Description of Artificial Sequence: Synthetic peptide
  Seed: GMDPRMCSLMQGSTLPRRSGAA
GMDPRMFSLMQISTMPRRSGAA

SEQ ID NO: 84691 - protein, 22 aa, Artificial Sequence
  Description of Artificial Sequence: Synthetic peptide
  Seed: GMDPRMCSLMQGSTLPRRSGAA
GMDPRMFSLMQISTNPRRSGAA

SEQ ID NO: 84692 - protein, 22 aa, Artificial Sequence
  Description of Artificial Sequence: Synthetic peptide
  Seed: GMDPRMCSLMQGSTLPRRSGAA
GMDPRMFSLMQISTQPRRSGAA

SEQ ID NO: 84693 - protein, 22 aa, Artificial Sequence
  Description of Artificial Sequence: Synthetic peptide
  Seed: GMDPRMCSLMQGSTLPRRSGAA
GMDPRMFSLMQISTSPRRSGAA

SEQ ID NO: 84694 - protein, 22 aa, Artificial Sequence
  Description of Artificial Sequence: Synthetic peptide
  Seed: GMDPRMCSLMQGSTLPRRSGAA
GMDPRMFSLMQISTTPRRSGAA

SEQ ID NO: 84695 - protein, 22 aa, Artificial Sequence
  Description of Artificial Sequence: Synthetic peptide
  Seed: GMDPRMCSLMQGSTLPRRSGAA
GMDPRMFSLMQISTVPRRSGAA

SEQ ID NO: 84696 - protein, 22 aa, Artificial Sequence
  Description of Artificial Sequence: Synthetic peptide
  Seed: GMDPRMCSLMQGSTLPRRSGAA
GMDPRMFSLMQLSTAPRRSGAA

SEQ ID NO: 84697 - protein, 22 aa, Artificial Sequence
  Description of Artificial Sequence: Synthetic peptide
  Seed: GMDPRMCSLMQGSTLPRRSGAA
GMDPRMFSLMQLSTMPRRSGAA

SEQ ID NO: 84698 - protein, 22 aa, Artificial Sequence
  Description of Artificial Sequence: Synthetic peptide
  Seed: GMDPRMCSLMQGSTLPRRSGAA
GMDPRMFSLMQLSTNPRRSGAA

SEQ ID NO: 84699 - protein, 22 aa, Artificial Sequence
  Description of Artificial Sequence: Synthetic peptide
  Seed: GMDPRMCSLMQGSTLPRRSGAA
GMDPRMFSLMQLSTSPRRSGAA

SEQ ID NO: 84700 - protein, 22 aa, Artificial Sequence
  Description of Artificial Sequence: Synthetic peptide
  Seed: GMDPRMCSLMQGSTLPRRSGAA
GMDPRMFSLMQLSTTPRRSGAA

SEQ ID NO: 84701 - protein, 22 aa, Artificial Sequence
  Description of Artificial Sequence: Synthetic peptide
  Seed: GMDPRMCSLMQGSTLPRRSGAA
GMDPRMFSLMQLSTVPRRSGAA

SEQ ID NO: 84702 - protein, 22 aa, Artificial Sequence
  Description of Artificial Sequence: Synthetic peptide
  Seed: GMDPRMCSLMQGSTLPRRSGAA
GMDPRMFSLMQMSTAPRRSGAA

SEQ ID NO: 84703 - protein, 22 aa, Artificial Sequence
  Description of Artificial Sequence: Synthetic peptide
  Seed: GMDPRMCSLMQGSTLPRRSGAA
GMDPRMFSLMQMSTIPRRSGAA

SEQ ID NO: 84704 - protein, 22 aa, Artificial Sequence
  Description of Artificial Sequence: Synthetic peptide
  Seed: GMDPRMCSLMQGSTLPRRSGAA
GMDPRMFSLMQMSTNPRRSGAA

SEQ ID NO: 84705 - protein, 22 aa, Artificial Sequence
  Description of Artificial Sequence: Synthetic peptide
  Seed: GMDPRMCSLMQGSTLPRRSGAA
GMDPRMFSLMQMSTSPRRSGAA

SEQ ID NO: 84706 - protein, 22 aa, Artificial Sequence
  Description of Artificial Sequence: Synthetic peptide
  Seed: GMDPRMCSLMQGSTLPRRSGAA
GMDPRMFSLMQMSTTPRRSGAA

SEQ ID NO: 84707 - protein, 22 aa, Artificial Sequence
  Description of Artificial Sequence: Synthetic peptide
  Seed: GMDPRMCSLMQGSTLPRRSGAA
GMDPRMFSLMQMSTVPRRSGAA

SEQ ID NO: 84708 - protein, 22 aa, Artificial Sequence
  Description of Artificial Sequence: Synthetic peptide
  Seed: GMDPRMCSLMQGSTLPRRSGAA
GMDPRMFSLMQNSTAPRRSGAA

SEQ ID NO: 84709 - protein, 22 aa, Artificial Sequence
  Description of Artificial Sequence: Synthetic peptide
  Seed: GMDPRMCSLMQGSTLPRRSGAA
GMDPRMFSLMQNSTGPRRSGAA

SEQ ID NO: 84710 - protein, 22 aa, Artificial Sequence
  Description of Artificial Sequence: Synthetic peptide
  Seed: GMDPRMCSLMQGSTLPRRSGAA
GMDPRMFSLMQNSTIPRRSGAA

SEQ ID NO: 84711 - protein, 22 aa, Artificial Sequence
  Description of Artificial Sequence: Synthetic peptide
  Seed: GMDPRMCSLMQGSTLPRRSGAA
GMDPRMFSLMQNSTLPRRSGAA

SEQ ID NO: 84712 - protein, 22 aa, Artificial Sequence
  Description of Artificial Sequence: Synthetic peptide
  Seed: GMDPRMCSLMQGSTLPRRSGAA
GMDPRMFSLMQNSTMPRRSGAA

SEQ ID NO: 84713 - protein, 22 aa, Artificial Sequence
  Description of Artificial Sequence: Synthetic peptide
  Seed: GMDPRMCSLMQGSTLPRRSGAA
GMDPRMFSLMQNSTNPRRSGAA

SEQ ID NO: 84714 - protein, 22 aa, Artificial Sequence
  Description of Artificial Sequence: Synthetic peptide
  Seed: GMDPRMCSLMQGSTLPRRSGAA
GMDPRMFSLMQNSTSPRRSGAA

SEQ ID NO: 84715 - protein, 22 aa, Artificial Sequence
  Description of Artificial Sequence: Synthetic peptide
  Seed: GMDPRMCSLMQGSTLPRRSGAA
GMDPRMFSLMQNSTTPRRSGAA

SEQ ID NO: 84716 - protein, 22 aa, Artificial Sequence
  Description of Artificial Sequence: Synthetic peptide
  Seed: GMDPRMCSLMQGSTLPRRSGAA
GMDPRMFSLMQNSTVPRRSGAA

SEQ ID NO: 84717 - protein, 22 aa, Artificial Sequence
  Description of Artificial Sequence: Synthetic peptide
  Seed: GMDPRMCSLMQGSTLPRRSGAA
GMDPRMFSLMQPSTAPRRSGAA

SEQ ID NO: 84718 - protein, 22 aa, Artificial Sequence
  Description of Artificial Sequence: Synthetic peptide
  Seed: GMDPRMCSLMQGSTLPRRSGAA
GMDPRMFSLMQPSTCPRRSGAA

SEQ ID NO: 84719 - protein, 22 aa, Artificial Sequence
  Description of Artificial Sequence: Synthetic peptide
  Seed: GMDPRMCSLMQGSTLPRRSGAA
GMDPRMFSLMQPSTDPRRSGAA

SEQ ID NO: 84720 - protein, 22 aa, Artificial Sequence
  Description of Artificial Sequence: Synthetic peptide
  Seed: GMDPRMCSLMQGSTLPRRSGAA
GMDPRMFSLMQPSTEPRRSGAA

SEQ ID NO: 84721 - protein, 22 aa, Artificial Sequence
  Description of Artificial Sequence: Synthetic peptide
  Seed: GMDPRMCSLMQGSTLPRRSGAA
GMDPRMFSLMQPSTFPRRSGAA

SEQ ID NO: 84722 - protein, 22 aa, Artificial Sequence
  Description of Artificial Sequence: Synthetic peptide
  Seed: GMDPRMCSLMQGSTLPRRSGAA
GMDPRMFSLMQPSTGPRRSGAA

SEQ ID NO: 84723 - protein, 22 aa, Artificial Sequence
  Description of Artificial Sequence: Synthetic peptide
  Seed: GMDPRMCSLMQGSTLPRRSGAA
GMDPRMFSLMQPSTHPRRSGAA

SEQ ID NO: 84724 - protein, 22 aa, Artificial Sequence
  Description of Artificial Sequence: Synthetic peptide
  Seed: GMDPRMCSLMQGSTLPRRSGAA
GMDPRMFSLMQPSTIPRRSGAA

SEQ ID NO: 84725 - protein, 22 aa, Artificial Sequence
  Description of Artificial Sequence: Synthetic peptide
  Seed: GMDPRMCSLMQGSTLPRRSGAA
GMDPRMFSLMQPSTLPRRSGAA

SEQ ID NO: 84726 - protein, 22 aa, Artificial Sequence
  Description of Artificial Sequence: Synthetic peptide
  Seed: GMDPRMCSLMQGSTLPRRSGAA
GMDPRMFSLMQPSTMPRRSGAA

SEQ ID NO: 84727 - protein, 22 aa, Artificial Sequence
  Description of Artificial Sequence: Synthetic peptide
  Seed: GMDPRMCSLMQGSTLPRRSGAA
GMDPRMFSLMQPSTNPRRSGAA

SEQ ID NO: 84728 - protein, 22 aa, Artificial Sequence
  Description of Artificial Sequence: Synthetic peptide
  Seed: GMDPRMCSLMQGSTLPRRSGAA
GMDPRMFSLMQPSTPPRRSGAA

SEQ ID NO: 84729 - protein, 22 aa, Artificial Sequence
  Description of Artificial Sequence: Synthetic peptide
  Seed: GMDPRMCSLMQGSTLPRRSGAA
GMDPRMFSLMQPSTQPRRSGAA

SEQ ID NO: 84730 - protein, 22 aa, Artificial Sequence
  Description of Artificial Sequence: Synthetic peptide
  Seed: GMDPRMCSLMQGSTLPRRSGAA
GMDPRMFSLMQPSTSPRRSGAA

SEQ ID NO: 84731 - protein, 22 aa, Artificial Sequence
  Description of Artificial Sequence: Synthetic peptide
  Seed: GMDPRMCSLMQGSTLPRRSGAA
GMDPRMFSLMQPSTTPRRSGAA

SEQ ID NO: 84732 - protein, 22 aa, Artificial Sequence
  Description of Artificial Sequence: Synthetic peptide
  Seed: GMDPRMCSLMQGSTLPRRSGAA
GMDPRMFSLMQPSTVPRRSGAA

SEQ ID NO: 84733 - protein, 22 aa, Artificial Sequence
  Description of Artificial Sequence: Synthetic peptide
  Seed: GMDPRMCSLMQGSTLPRRSGAA
GMDPRMFSLMQSSTAPRRSGAA

SEQ ID NO: 84734 - protein, 22 aa, Artificial Sequence
  Description of Artificial Sequence: Synthetic peptide
  Seed: GMDPRMCSLMQGSTLPRRSGAA
GMDPRMFSLMQSSTCPRRSGAA

SEQ ID NO: 84735 - protein, 22 aa, Artificial Sequence
  Description of Artificial Sequence: Synthetic peptide
  Seed: GMDPRMCSLMQGSTLPRRSGAA
GMDPRMFSLMQSSTDPRRSGAA

SEQ ID NO: 84736 - protein, 22 aa, Artificial Sequence
  Description of Artificial Sequence: Synthetic peptide
  Seed: GMDPRMCSLMQGSTLPRRSGAA
GMDPRMFSLMQSSTFPRRSGAA

SEQ ID NO: 84737 - protein, 22 aa, Artificial Sequence
  Description of Artificial Sequence: Synthetic peptide
  Seed: GMDPRMCSLMQGSTLPRRSGAA
GMDPRMFSLMQSSTGPRRSGAA

SEQ ID NO: 84738 - protein, 22 aa, Artificial Sequence
  Description of Artificial Sequence: Synthetic peptide
  Seed: GMDPRMCSLMQGSTLPRRSGAA
GMDPRMFSLMQSSTHPRRSGAA

SEQ ID NO: 84739 - protein, 22 aa, Artificial Sequence
  Description of Artificial Sequence: Synthetic peptide
  Seed: GMDPRMCSLMQGSTLPRRSGAA
GMDPRMFSLMQSSTIPRRSGAA

SEQ ID NO: 84740 - protein, 22 aa, Artificial Sequence
  Description of Artificial Sequence: Synthetic peptide
  Seed: GMDPRMCSLMQGSTLPRRSGAA
GMDPRMFSLMQSSTLPRRSGAA

SEQ ID NO: 84741 - protein, 22 aa, Artificial Sequence
  Description of Artificial Sequence: Synthetic peptide
  Seed: GMDPRMCSLMQGSTLPRRSGAA
GMDPRMFSLMQSSTMPRRSGAA

SEQ ID NO: 84742 - protein, 22 aa, Artificial Sequence
  Description of Artificial Sequence: Synthetic peptide
  Seed: GMDPRMCSLMQGSTLPRRSGAA
GMDPRMFSLMQSSTNPRRSGAA

SEQ ID NO: 84743 - protein, 22 aa, Artificial Sequence
  Description of Artificial Sequence: Synthetic peptide
  Seed: GMDPRMCSLMQGSTLPRRSGAA
GMDPRMFSLMQSSTPPRRSGAA

SEQ ID NO: 84744 - protein, 22 aa, Artificial Sequence
  Description of Artificial Sequence: Synthetic peptide
  Seed: GMDPRMCSLMQGSTLPRRSGAA
GMDPRMFSLMQSSTQPRRSGAA

SEQ ID NO: 84745 - protein, 22 aa, Artificial Sequence
  Description of Artificial Sequence: Synthetic peptide
  Seed: GMDPRMCSLMQGSTLPRRSGAA
GMDPRMFSLMQSSTSPRRSGAA

SEQ ID NO: 84746 - protein, 22 aa, Artificial Sequence
  Description of Artificial Sequence: Synthetic peptide
  Seed: GMDPRMCSLMQGSTLPRRSGAA
GMDPRMFSLMQSSTTPRRSGAA

SEQ ID NO: 84747 - protein, 22 aa, Artificial Sequence
  Description of Artificial Sequence: Synthetic peptide
  Seed: GMDPRMCSLMQGSTLPRRSGAA
GMDPRMFSLMQSSTVPRRSGAA

SEQ ID NO: 84748 - protein, 22 aa, Artificial Sequence
  Description of Artificial Sequence: Synthetic peptide
  Seed: GMDPRMCSLMQGSTLPRRSGAA
GMDPRMFSLMQTSTAPRRSGAA

SEQ ID NO: 84749 - protein, 22 aa, Artificial Sequence
  Description of Artificial Sequence: Synthetic peptide
  Seed: GMDPRMCSLMQGSTLPRRSGAA
GMDPRMFSLMQTSTDPRRSGAA

SEQ ID NO: 84750 - protein, 22 aa, Artificial Sequence
  Description of Artificial Sequence: Synthetic peptide
  Seed: GMDPRMCSLMQGSTLPRRSGAA
GMDPRMFSLMQTSTGPRRSGAA

SEQ ID NO: 84751 - protein, 22 aa, Artificial Sequence
  Description of Artificial Sequence: Synthetic peptide
  Seed: GMDPRMCSLMQGSTLPRRSGAA
GMDPRMFSLMQTSTHPRRSGAA

SEQ ID NO: 84752 - protein, 22 aa, Artificial Sequence
  Description of Artificial Sequence: Synthetic peptide
  Seed: GMDPRMCSLMQGSTLPRRSGAA
GMDPRMFSLMQTSTIPRRSGAA

SEQ ID NO: 84753 - protein, 22 aa, Artificial Sequence
  Description of Artificial Sequence: Synthetic peptide
  Seed: GMDPRMCSLMQGSTLPRRSGAA
GMDPRMFSLMQTSTLPRRSGAA

SEQ ID NO: 84754 - protein, 22 aa, Artificial Sequence
  Description of Artificial Sequence: Synthetic peptide
  Seed: GMDPRMCSLMQGSTLPRRSGAA
GMDPRMFSLMQTSTMPRRSGAA

SEQ ID NO: 84755 - protein, 22 aa, Artificial Sequence
  Description of Artificial Sequence: Synthetic peptide
  Seed: GMDPRMCSLMQGSTLPRRSGAA
GMDPRMFSLMQTSTNPRRSGAA

SEQ ID NO: 84756 - protein, 22 aa, Artificial Sequence
  Description of Artificial Sequence: Synthetic peptide
  Seed: GMDPRMCSLMQGSTLPRRSGAA
GMDPRMFSLMQTSTPPRRSGAA

SEQ ID NO: 84757 - protein, 22 aa, Artificial Sequence
  Description of Artificial Sequence: Synthetic peptide
  Seed: GMDPRMCSLMQGSTLPRRSGAA
GMDPRMFSLMQTSTQPRRSGAA

SEQ ID NO: 84758 - protein, 22 aa, Artificial Sequence
  Description of Artificial Sequence: Synthetic peptide
  Seed: GMDPRMCSLMQGSTLPRRSGAA
GMDPRMFSLMQTSTSPRRSGAA

SEQ ID NO: 84759 - protein, 22 aa, Artificial Sequence
  Description of Artificial Sequence: Synthetic peptide
  Seed: GMDPRMCSLMQGSTLPRRSGAA
GMDPRMFSLMQTSTTPRRSGAA

SEQ ID NO: 84760 - protein, 22 aa, Artificial Sequence
  Description of Artificial Sequence: Synthetic peptide
  Seed: GMDPRMCSLMQGSTLPRRSGAA
GMDPRMFSLMQTSTVPRRSGAA

SEQ ID NO: 84761 - protein, 22 aa, Artificial Sequence
  Description of Artificial Sequence: Synthetic peptide
  Seed: GMDPRMCSLMQGSTLPRRSGAA
GMDPRMFSLMQVSTAPRRSGAA

SEQ ID NO: 84762 - protein, 22 aa, Artificial Sequence
  Description of Artificial Sequence: Synthetic peptide
  Seed: GMDPRMCSLMQGSTLPRRSGAA
GMDPRMFSLMQVSTDPRRSGAA

SEQ ID NO: 84763 - protein, 22 aa, Artificial Sequence
  Description of Artificial Sequence: Synthetic peptide
  Seed: GMDPRMCSLMQGSTLPRRSGAA
GMDPRMFSLMQVSTEPRRSGAA

SEQ ID NO: 84764 - protein, 22 aa, Artificial Sequence
  Description of Artificial Sequence: Synthetic peptide
  Seed: GMDPRMCSLMQGSTLPRRSGAA
GMDPRMFSLMQVSTGPRRSGAA

SEQ ID NO: 84765 - protein, 22 aa, Artificial Sequence
  Description of Artificial Sequence: Synthetic peptide
  Seed: GMDPRMCSLMQGSTLPRRSGAA
GMDPRMFSLMQVSTHPRRSGAA

SEQ ID NO: 84766 - protein, 22 aa, Artificial Sequence
  Description of Artificial Sequence: Synthetic peptide
  Seed: GMDPRMCSLMQGSTLPRRSGAA
GMDPRMFSLMQVSTIPRRSGAA

SEQ ID NO: 84767 - protein, 22 aa, Artificial Sequence
  Description of Artificial Sequence: Synthetic peptide
  Seed: GMDPRMCSLMQGSTLPRRSGAA
GMDPRMFSLMQVSTLPRRSGAA

SEQ ID NO: 84768 - protein, 22 aa, Artificial Sequence
  Description of Artificial Sequence: Synthetic peptide
  Seed: GMDPRMCSLMQGSTLPRRSGAA
GMDPRMFSLMQVSTMPRRSGAA

SEQ ID NO: 84769 - protein, 22 aa, Artificial Sequence
  Description of Artificial Sequence: Synthetic peptide
  Seed: GMDPRMCSLMQGSTLPRRSGAA
GMDPRMFSLMQVSTNPRRSGAA

SEQ ID NO: 84770 - protein, 22 aa, Artificial Sequence
  Description of Artificial Sequence: Synthetic peptide
  Seed: GMDPRMCSLMQGSTLPRRSGAA
GMDPRMFSLMQVSTPPRRSGAA

SEQ ID NO: 84771 - protein, 22 aa, Artificial Sequence
  Description of Artificial Sequence: Synthetic peptide
  Seed: GMDPRMCSLMQGSTLPRRSGAA
GMDPRMFSLMQVSTQPRRSGAA

SEQ ID NO: 84772 - protein, 22 aa, Artificial Sequence
  Description of Artificial Sequence: Synthetic peptide
  Seed: GMDPRMCSLMQGSTLPRRSGAA
GMDPRMFSLMQVSTSPRRSGAA

SEQ ID NO: 84773 - protein, 22 aa, Artificial Sequence
  Description of Artificial Sequence: Synthetic peptide
  Seed: GMDPRMCSLMQGSTLPRRSGAA
GMDPRMFSLMQVSTTPRRSGAA

SEQ ID NO: 84774 - protein, 22 aa, Artificial Sequence
  Description of Artificial Sequence: Synthetic peptide
  Seed: GMDPRMCSLMQGSTLPRRSGAA
GMDPRMFSLMQVSTVPRRSGAA

SEQ ID NO: 84775 - protein, 22 aa, Artificial Sequence
  Description of Artificial Sequence: Synthetic peptide
  Seed: GMDPRMCSLMQGSTLPRRSGAA
GMDPRMFSLNQASTIPRRSGAA

SEQ ID NO: 84776 - protein, 22 aa, Artificial Sequence
  Description of Artificial Sequence: Synthetic peptide
  Seed: GMDPRMCSLMQGSTLPRRSGAA
GMDPRMFSLNQASTLPRRSGAA

SEQ ID NO: 84777 - protein, 22 aa, Artificial Sequence
  Description of Artificial Sequence: Synthetic peptide
  Seed: GMDPRMCSLMQGSTLPRRSGAA
GMDPRMFSLNQASTVPRRSGAA

SEQ ID NO: 84778 - protein, 22 aa, Artificial Sequence
  Description of Artificial Sequence: Synthetic peptide
  Seed: GMDPRMCSLMQGSTLPRRSGAA
GMDPRMFSLQQASTAPRRSGAA

SEQ ID NO: 84779 - protein, 22 aa, Artificial Sequence
  Description of Artificial Sequence: Synthetic peptide
  Seed: GMDPRMCSLMQGSTLPRRSGAA
GMDPRMFSLQQASTIPRRSGAA

SEQ ID NO: 84780 - protein, 22 aa, Artificial Sequence
  Description of Artificial Sequence: Synthetic peptide
  Seed: GMDPRMCSLMQGSTLPRRSGAA
GMDPRMFSLQQASTLPRRSGAA

SEQ ID NO: 84781 - protein, 22 aa, Artificial Sequence
  Description of Artificial Sequence: Synthetic peptide
  Seed: GMDPRMCSLMQGSTLPRRSGAA
GMDPRMFSLQQASTMPRRSGAA

SEQ ID NO: 84782 - protein, 22 aa, Artificial Sequence
  Description of Artificial Sequence: Synthetic peptide
  Seed: GMDPRMCSLMQGSTLPRRSGAA
GMDPRMFSLQQASTNPRRSGAA

SEQ ID NO: 84783 - protein, 22 aa, Artificial Sequence
  Description of Artificial Sequence: Synthetic peptide
  Seed: GMDPRMCSLMQGSTLPRRSGAA
GMDPRMFSLQQASTSPRRSGAA

SEQ ID NO: 84784 - protein, 22 aa, Artificial Sequence
  Description of Artificial Sequence: Synthetic peptide
  Seed: GMDPRMCSLMQGSTLPRRSGAA
GMDPRMFSLQQASTTPRRSGAA

SEQ ID NO: 84785 - protein, 22 aa, Artificial Sequence
  Description of Artificial Sequence: Synthetic peptide
  Seed: GMDPRMCSLMQGSTLPRRSGAA
GMDPRMFSLQQASTVPRRSGAA

SEQ ID NO: 84786 - protein, 22 aa, Artificial Sequence
  Description of Artificial Sequence: Synthetic peptide
  Seed: GMDPRMCSLMQGSTLPRRSGAA
GMDPRMFSLQQGSTAPRRSGAA

SEQ ID NO: 84787 - protein, 22 aa, Artificial Sequence
  Description of Artificial Sequence: Synthetic peptide
  Seed: GMDPRMCSLMQGSTLPRRSGAA
GMDPRMFSLQQGSTIPRRSGAA

SEQ ID NO: 84788 - protein, 22 aa, Artificial Sequence
  Description of Artificial Sequence: Synthetic peptide
  Seed: GMDPRMCSLMQGSTLPRRSGAA
GMDPRMFSLQQGSTLPRRSGAA

SEQ ID NO: 84789 - protein, 22 aa, Artificial Sequence
  Description of Artificial Sequence: Synthetic peptide
  Seed: GMDPRMCSLMQGSTLPRRSGAA
GMDPRMFSLQQGSTMPRRSGAA

SEQ ID NO: 84790 - protein, 22 aa, Artificial Sequence
  Description of Artificial Sequence: Synthetic peptide
  Seed: GMDPRMCSLMQGSTLPRRSGAA
GMDPRMFSLQQGSTVPRRSGAA

SEQ ID NO: 84791 - protein, 22 aa, Artificial Sequence
  Description of Artificial Sequence: Synthetic peptide
  Seed: GMDPRMCSLMQGSTLPRRSGAA
GMDPRMFSLQQISTAPRRSGAA

SEQ ID NO: 84792 - protein, 22 aa, Artificial Sequence
  Description of Artificial Sequence: Synthetic peptide
  Seed: GMDPRMCSLMQGSTLPRRSGAA
GMDPRMFSLQQISTNPRRSGAA

SEQ ID NO: 84793 - protein, 22 aa, Artificial Sequence
  Description of Artificial Sequence: Synthetic peptide
  Seed: GMDPRMCSLMQGSTLPRRSGAA
GMDPRMFSLQQNSTIPRRSGAA

SEQ ID NO: 84794 - protein, 22 aa, Artificial Sequence
  Description of Artificial Sequence: Synthetic peptide
  Seed: GMDPRMCSLMQGSTLPRRSGAA
GMDPRMFSLQQNSTLPRRSGAA

SEQ ID NO: 84795 - protein, 22 aa, Artificial Sequence
  Description of Artificial Sequence: Synthetic peptide
  Seed: GMDPRMCSLMQGSTLPRRSGAA
GMDPRMFSLQQNSTVPRRSGAA

SEQ ID NO: 84796 - protein, 22 aa, Artificial Sequence
  Description of Artificial Sequence: Synthetic peptide
  Seed: GMDPRMCSLMQGSTLPRRSGAA
GMDPRMFSLQQPSTAPRRSGAA

SEQ ID NO: 84797 - protein, 22 aa, Artificial Sequence
  Description of Artificial Sequence: Synthetic peptide
  Seed: GMDPRMCSLMQGSTLPRRSGAA
GMDPRMFSLQQPSTIPRRSGAA

SEQ ID NO: 84798 - protein, 22 aa, Artificial Sequence
  Description of Artificial Sequence: Synthetic peptide
  Seed: GMDPRMCSLMQGSTLPRRSGAA
GMDPRMFSLQQPSTLPRRSGAA

SEQ ID NO: 84799 - protein, 22 aa, Artificial Sequence
  Description of Artificial Sequence: Synthetic peptide
  Seed: GMDPRMCSLMQGSTLPRRSGAA
GMDPRMFSLQQPSTVPRRSGAA

SEQ ID NO: 84800 - protein, 22 aa, Artificial Sequence
  Description of Artificial Sequence: Synthetic peptide
  Seed: GMDPRMCSLMQGSTLPRRSGAA
GMDPRMFSLQQSSTAPRRSGAA

SEQ ID NO: 84801 - protein, 22 aa, Artificial Sequence
  Description of Artificial Sequence: Synthetic peptide
  Seed: GMDPRMCSLMQGSTLPRRSGAA
GMDPRMFSLQQSSTIPRRSGAA

SEQ ID NO: 84802 - protein, 22 aa, Artificial Sequence
  Description of Artificial Sequence: Synthetic peptide
  Seed: GMDPRMCSLMQGSTLPRRSGAA
GMDPRMFSLQQSSTLPRRSGAA

SEQ ID NO: 84803 - protein, 22 aa, Artificial Sequence
  Description of Artificial Sequence: Synthetic peptide
  Seed: GMDPRMCSLMQGSTLPRRSGAA
GMDPRMFSLQQSSTMPRRSGAA

SEQ ID NO: 84804 - protein, 22 aa, Artificial Sequence
  Description of Artificial Sequence: Synthetic peptide
  Seed: GMDPRMCSLMQGSTLPRRSGAA
GMDPRMFSLQQSSTSPRRSGAA

SEQ ID NO: 84805 - protein, 22 aa, Artificial Sequence
  Description of Artificial Sequence: Synthetic peptide
  Seed: GMDPRMCSLMQGSTLPRRSGAA
GMDPRMFSLQQSSTVPRRSGAA

SEQ ID NO: 84806 - protein, 22 aa, Artificial Sequence
  Description of Artificial Sequence: Synthetic peptide
  Seed: GMDPRMCSLMQGSTLPRRSGAA
GMDPRMFSLQQTSTAPRRSGAA

SEQ ID NO: 84807 - protein, 22 aa, Artificial Sequence
  Description of Artificial Sequence: Synthetic peptide
  Seed: GMDPRMCSLMQGSTLPRRSGAA
GMDPRMFSLQQTSTIPRRSGAA

SEQ ID NO: 84808 - protein, 22 aa, Artificial Sequence
  Description of Artificial Sequence: Synthetic peptide
  Seed: GMDPRMCSLMQGSTLPRRSGAA
GMDPRMFSLQQTSTLPRRSGAA

SEQ ID NO: 84809 - protein, 22 aa, Artificial Sequence
  Description of Artificial Sequence: Synthetic peptide
  Seed: GMDPRMCSLMQGSTLPRRSGAA
GMDPRMFSLQQTSTNPRRSGAA

SEQ ID NO: 84810 - protein, 22 aa, Artificial Sequence
  Description of Artificial Sequence: Synthetic peptide
  Seed: GMDPRMCSLMQGSTLPRRSGAA
GMDPRMFSLQQTSTSPRRSGAA

SEQ ID NO: 84811 - protein, 22 aa, Artificial Sequence
  Description of Artificial Sequence: Synthetic peptide
  Seed: GMDPRMCSLMQGSTLPRRSGAA
GMDPRMFSLQQTSTVPRRSGAA

SEQ ID NO: 84812 - protein, 22 aa, Artificial Sequence
  Description of Artificial Sequence: Synthetic peptide
  Seed: GMDPRMCSLMQGSTLPRRSGAA
GMDPRMFSLQQVSTAPRRSGAA

SEQ ID NO: 84813 - protein, 22 aa, Artificial Sequence
  Description of Artificial Sequence: Synthetic peptide
  Seed: GMDPRMCSLMQGSTLPRRSGAA
GMDPRMFSLQQVSTNPRRSGAA

SEQ ID NO: 84814 - protein, 22 aa, Artificial Sequence
  Description of Artificial Sequence: Synthetic peptide
  Seed: GMDPRMCSLMQGSTLPRRSGAA
GMDPRMFSLQQVSTSPRRSGAA

SEQ ID NO: 84815 - protein, 22 aa, Artificial Sequence
  Description of Artificial Sequence: Synthetic peptide
  Seed: GMDPRMCSLMQGSTLPRRSGAA
GMDPRMFSLSQASTAPRRSGAA

SEQ ID NO: 84816 - protein, 22 aa, Artificial Sequence
  Description of Artificial Sequence: Synthetic peptide
  Seed: GMDPRMCSLMQGSTLPRRSGAA
GMDPRMFSLSQASTIPRRSGAA

SEQ ID NO: 84817 - protein, 22 aa, Artificial Sequence
  Description of Artificial Sequence: Synthetic peptide
  Seed: GMDPRMCSLMQGSTLPRRSGAA
GMDPRMFSLSQASTLPRRSGAA

SEQ ID NO: 84818 - protein, 22 aa, Artificial Sequence
  Description of Artificial Sequence: Synthetic peptide
  Seed: GMDPRMCSLMQGSTLPRRSGAA
GMDPRMFSLSQASTMPRRSGAA

SEQ ID NO: 84819 - protein, 22 aa, Artificial Sequence
  Description of Artificial Sequence: Synthetic peptide
  Seed: GMDPRMCSLMQGSTLPRRSGAA
GMDPRMFSLSQASTNPRRSGAA

SEQ ID NO: 84820 - protein, 22 aa, Artificial Sequence
  Description of Artificial Sequence: Synthetic peptide
  Seed: GMDPRMCSLMQGSTLPRRSGAA
GMDPRMFSLSQASTSPRRSGAA

SEQ ID NO: 84821 - protein, 22 aa, Artificial Sequence
  Description of Artificial Sequence: Synthetic peptide
  Seed: GMDPRMCSLMQGSTLPRRSGAA
GMDPRMFSLSQASTVPRRSGAA

SEQ ID NO: 84822 - protein, 22 aa, Artificial Sequence
  Description of Artificial Sequence: Synthetic peptide
  Seed: GMDPRMCSLMQGSTLPRRSGAA
GMDPRMFSLSQGSTIPRRSGAA

SEQ ID NO: 84823 - protein, 22 aa, Artificial Sequence
  Description of Artificial Sequence: Synthetic peptide
  Seed: GMDPRMCSLMQGSTLPRRSGAA
GMDPRMFSLSQGSTLPRRSGAA

SEQ ID NO: 84824 - protein, 22 aa, Artificial Sequence
  Description of Artificial Sequence: Synthetic peptide
  Seed: GMDPRMCSLMQGSTLPRRSGAA
GMDPRMFSLSQGSTVPRRSGAA

SEQ ID NO: 84825 - protein, 22 aa, Artificial Sequence
  Description of Artificial Sequence: Synthetic peptide
  Seed: GMDPRMCSLMQGSTLPRRSGAA
GMDPRMFSLSQPSTIPRRSGAA

SEQ ID NO: 84826 - protein, 22 aa, Artificial Sequence
  Description of Artificial Sequence: Synthetic peptide
  Seed: GMDPRMCSLMQGSTLPRRSGAA
GMDPRMFSLSQPSTLPRRSGAA

SEQ ID NO: 84827 - protein, 22 aa, Artificial Sequence
  Description of Artificial Sequence: Synthetic peptide
  Seed: GMDPRMCSLMQGSTLPRRSGAA
GMDPRMFSLSQPSTVPRRSGAA

SEQ ID NO: 84828 - protein, 22 aa, Artificial Sequence
  Description of Artificial Sequence: Synthetic peptide
  Seed: GMDPRMCSLMQGSTLPRRSGAA
GMDPRMFSLSQSSTIPRRSGAA

SEQ ID NO: 84829 - protein, 22 aa, Artificial Sequence
  Description of Artificial Sequence: Synthetic peptide
  Seed: GMDPRMCSLMQGSTLPRRSGAA
GMDPRMFSLSQSSTLPRRSGAA

SEQ ID NO: 84830 - protein, 22 aa, Artificial Sequence
  Description of Artificial Sequence: Synthetic peptide
  Seed: GMDPRMCSLMQGSTLPRRSGAA
GMDPRMFSLSQSSTVPRRSGAA

SEQ ID NO: 84831 - protein, 22 aa, Artificial Sequence
  Description of Artificial Sequence: Synthetic peptide
  Seed: GMDPRMCSLMQGSTLPRRSGAA
GMDPRMFSLTQASTAPRRSGAA

SEQ ID NO: 84832 - protein, 22 aa, Artificial Sequence
  Description of Artificial Sequence: Synthetic peptide
  Seed: GMDPRMCSLMQGSTLPRRSGAA
GMDPRMFSLTQASTIPRRSGAA

SEQ ID NO: 84833 - protein, 22 aa, Artificial Sequence
  Description of Artificial Sequence: Synthetic peptide
  Seed: GMDPRMCSLMQGSTLPRRSGAA
GMDPRMFSLTQASTLPRRSGAA

SEQ ID NO: 84834 - protein, 22 aa, Artificial Sequence
  Description of Artificial Sequence: Synthetic peptide
  Seed: GMDPRMCSLMQGSTLPRRSGAA
GMDPRMFSLTQASTNPRRSGAA

SEQ ID NO: 84835 - protein, 22 aa, Artificial Sequence
  Description of Artificial Sequence: Synthetic peptide
  Seed: GMDPRMCSLMQGSTLPRRSGAA
GMDPRMFSLTQASTSPRRSGAA

SEQ ID NO: 84836 - protein, 22 aa, Artificial Sequence
  Description of Artificial Sequence: Synthetic peptide
  Seed: GMDPRMCSLMQGSTLPRRSGAA
GMDPRMFSLTQASTVPRRSGAA

SEQ ID NO: 84837 - protein, 22 aa, Artificial Sequence
  Description of Artificial Sequence: Synthetic peptide
  Seed: GMDPRMCSLMQGSTLPRRSGAA
GMDPRMFSLTQGSTLPRRSGAA

SEQ ID NO: 84838 - protein, 22 aa, Artificial Sequence
  Description of Artificial Sequence: Synthetic peptide
  Seed: GMDPRMCSLMQGSTLPRRSGAA
GMDPRMFSLTQGSTVPRRSGAA

SEQ ID NO: 84839 - protein, 22 aa, Artificial Sequence
  Description of Artificial Sequence: Synthetic peptide
  Seed: GMDPRMCSLMQGSTLPRRSGAA
GMDPRMFSLVQASTAPRRSGAA

SEQ ID NO: 84840 - protein, 22 aa, Artificial Sequence
  Description of Artificial Sequence: Synthetic peptide
  Seed: GMDPRMCSLMQGSTLPRRSGAA
GMDPRMFSLVQASTGPRRSGAA

SEQ ID NO: 84841 - protein, 22 aa, Artificial Sequence
  Description of Artificial Sequence: Synthetic peptide
  Seed: GMDPRMCSLMQGSTLPRRSGAA
GMDPRMFSLVQASTHPRRSGAA

SEQ ID NO: 84842 - protein, 22 aa, Artificial Sequence
  Description of Artificial Sequence: Synthetic peptide
  Seed: GMDPRMCSLMQGSTLPRRSGAA
GMDPRMFSLVQASTIPRRSGAA

SEQ ID NO: 84843 - protein, 22 aa, Artificial Sequence
  Description of Artificial Sequence: Synthetic peptide
  Seed: GMDPRMCSLMQGSTLPRRSGAA
GMDPRMFSLVQASTLPRRSGAA

SEQ ID NO: 84844 - protein, 22 aa, Artificial Sequence
  Description of Artificial Sequence: Synthetic peptide
  Seed: GMDPRMCSLMQGSTLPRRSGAA
GMDPRMFSLVQASTMPRRSGAA

SEQ ID NO: 84845 - protein, 22 aa, Artificial Sequence
  Description of Artificial Sequence: Synthetic peptide
  Seed: GMDPRMCSLMQGSTLPRRSGAA
GMDPRMFSLVQASTNPRRSGAA

SEQ ID NO: 84846 - protein, 22 aa, Artificial Sequence
  Description of Artificial Sequence: Synthetic peptide
  Seed: GMDPRMCSLMQGSTLPRRSGAA
GMDPRMFSLVQASTQPRRSGAA

SEQ ID NO: 84847 - protein, 22 aa, Artificial Sequence
  Description of Artificial Sequence: Synthetic peptide
  Seed: GMDPRMCSLMQGSTLPRRSGAA
GMDPRMFSLVQASTSPRRSGAA

SEQ ID NO: 84848 - protein, 22 aa, Artificial Sequence
  Description of Artificial Sequence: Synthetic peptide
  Seed: GMDPRMCSLMQGSTLPRRSGAA
GMDPRMFSLVQASTTPRRSGAA

SEQ ID NO: 84849 - protein, 22 aa, Artificial Sequence
  Description of Artificial Sequence: Synthetic peptide
  Seed: GMDPRMCSLMQGSTLPRRSGAA
GMDPRMFSLVQASTVPRRSGAA

SEQ ID NO: 84850 - protein, 22 aa, Artificial Sequence
  Description of Artificial Sequence: Synthetic peptide
  Seed: GMDPRMCSLMQGSTLPRRSGAA
GMDPRMFSLVQGSTAPRRSGAA

SEQ ID NO: 84851 - protein, 22 aa, Artificial Sequence
  Description of Artificial Sequence: Synthetic peptide
  Seed: GMDPRMCSLMQGSTLPRRSGAA
GMDPRMFSLVQGSTIPRRSGAA

SEQ ID NO: 84852 - protein, 22 aa, Artificial Sequence
  Description of Artificial Sequence: Synthetic peptide
  Seed: GMDPRMCSLMQGSTLPRRSGAA
GMDPRMFSLVQGSTLPRRSGAA

SEQ ID NO: 84853 - protein, 22 aa, Artificial Sequence
  Description of Artificial Sequence: Synthetic peptide
  Seed: GMDPRMCSLMQGSTLPRRSGAA
GMDPRMFSLVQGSTMPRRSGAA

SEQ ID NO: 84854 - protein, 22 aa, Artificial Sequence
  Description of Artificial Sequence: Synthetic peptide
  Seed: GMDPRMCSLMQGSTLPRRSGAA
GMDPRMFSLVQGSTNPRRSGAA

SEQ ID NO: 84855 - protein, 22 aa, Artificial Sequence
  Description of Artificial Sequence: Synthetic peptide
  Seed: GMDPRMCSLMQGSTLPRRSGAA
GMDPRMFSLVQGSTSPRRSGAA

SEQ ID NO: 84856 - protein, 22 aa, Artificial Sequence
  Description of Artificial Sequence: Synthetic peptide
  Seed: GMDPRMCSLMQGSTLPRRSGAA
GMDPRMFSLVQGSTTPRRSGAA

SEQ ID NO: 84857 - protein, 22 aa, Artificial Sequence
  Description of Artificial Sequence: Synthetic peptide
  Seed: GMDPRMCSLMQGSTLPRRSGAA
GMDPRMFSLVQGSTVPRRSGAA

SEQ ID NO: 84858 - protein, 22 aa, Artificial Sequence
  Description of Artificial Sequence: Synthetic peptide
  Seed: GMDPRMCSLMQGSTLPRRSGAA
GMDPRMFSLVQISTAPRRSGAA

SEQ ID NO: 84859 - protein, 22 aa, Artificial Sequence
  Description of Artificial Sequence: Synthetic peptide
  Seed: GMDPRMCSLMQGSTLPRRSGAA
GMDPRMFSLVQISTNPRRSGAA

SEQ ID NO: 84860 - protein, 22 aa, Artificial Sequence
  Description of Artificial Sequence: Synthetic peptide
  Seed: GMDPRMCSLMQGSTLPRRSGAA
GMDPRMFSLVQISTSPRRSGAA

SEQ ID NO: 84861 - protein, 22 aa, Artificial Sequence
  Description of Artificial Sequence: Synthetic peptide
  Seed: GMDPRMCSLMQGSTLPRRSGAA
GMDPRMFSLVQNSTAPRRSGAA

SEQ ID NO: 84862 - protein, 22 aa, Artificial Sequence
  Description of Artificial Sequence: Synthetic peptide
  Seed: GMDPRMCSLMQGSTLPRRSGAA
GMDPRMFSLVQNSTIPRRSGAA

SEQ ID NO: 84863 - protein, 22 aa, Artificial Sequence
  Description of Artificial Sequence: Synthetic peptide
  Seed: GMDPRMCSLMQGSTLPRRSGAA
GMDPRMFSLVQNSTLPRRSGAA

SEQ ID NO: 84864 - protein, 22 aa, Artificial Sequence
  Description of Artificial Sequence: Synthetic peptide
  Seed: GMDPRMCSLMQGSTLPRRSGAA
GMDPRMFSLVQNSTSPRRSGAA

SEQ ID NO: 84865 - protein, 22 aa, Artificial Sequence
  Description of Artificial Sequence: Synthetic peptide
  Seed: GMDPRMCSLMQGSTLPRRSGAA
GMDPRMFSLVQNSTVPRRSGAA

SEQ ID NO: 84866 - protein, 22 aa, Artificial Sequence
  Description of Artificial Sequence: Synthetic peptide
  Seed: GMDPRMCSLMQGSTLPRRSGAA
GMDPRMFSLVQPSTAPRRSGAA

SEQ ID NO: 84867 - protein, 22 aa, Artificial Sequence
  Description of Artificial Sequence: Synthetic peptide
  Seed: GMDPRMCSLMQGSTLPRRSGAA
GMDPRMFSLVQPSTGPRRSGAA

SEQ ID NO: 84868 - protein, 22 aa, Artificial Sequence
  Description of Artificial Sequence: Synthetic peptide
  Seed: GMDPRMCSLMQGSTLPRRSGAA
GMDPRMFSLVQPSTIPRRSGAA

SEQ ID NO: 84869 - protein, 22 aa, Artificial Sequence
  Description of Artificial Sequence: Synthetic peptide
  Seed: GMDPRMCSLMQGSTLPRRSGAA
GMDPRMFSLVQPSTLPRRSGAA

SEQ ID NO: 84870 - protein, 22 aa, Artificial Sequence
  Description of Artificial Sequence: Synthetic peptide
  Seed: GMDPRMCSLMQGSTLPRRSGAA
GMDPRMFSLVQPSTMPRRSGAA

SEQ ID NO: 84871 - protein, 22 aa, Artificial Sequence
  Description of Artificial Sequence: Synthetic peptide
  Seed: GMDPRMCSLMQGSTLPRRSGAA
GMDPRMFSLVQPSTNPRRSGAA

SEQ ID NO: 84872 - protein, 22 aa, Artificial Sequence
  Description of Artificial Sequence: Synthetic peptide
  Seed: GMDPRMCSLMQGSTLPRRSGAA
GMDPRMFSLVQPSTSPRRSGAA

SEQ ID NO: 84873 - protein, 22 aa, Artificial Sequence
  Description of Artificial Sequence: Synthetic peptide
  Seed: GMDPRMCSLMQGSTLPRRSGAA
GMDPRMFSLVQPSTTPRRSGAA

SEQ ID NO: 84874 - protein, 22 aa, Artificial Sequence
  Description of Artificial Sequence: Synthetic peptide
  Seed: GMDPRMCSLMQGSTLPRRSGAA
GMDPRMFSLVQPSTVPRRSGAA

SEQ ID NO: 84875 - protein, 22 aa, Artificial Sequence
  Description of Artificial Sequence: Synthetic peptide
  Seed: GMDPRMCSLMQGSTLPRRSGAA
GMDPRMFSLVQSSTAPRRSGAA

SEQ ID NO: 84876 - protein, 22 aa, Artificial Sequence
  Description of Artificial Sequence: Synthetic peptide
  Seed: GMDPRMCSLMQGSTLPRRSGAA
GMDPRMFSLVQSSTGPRRSGAA

SEQ ID NO: 84877 - protein, 22 aa, Artificial Sequence
  Description of Artificial Sequence: Synthetic peptide
  Seed: GMDPRMCSLMQGSTLPRRSGAA
GMDPRMFSLVQSSTIPRRSGAA

SEQ ID NO: 84878 - protein, 22 aa, Artificial Sequence
  Description of Artificial Sequence: Synthetic peptide
  Seed: GMDPRMCSLMQGSTLPRRSGAA
GMDPRMFSLVQSSTLPRRSGAA

SEQ ID NO: 84879 - protein, 22 aa, Artificial Sequence
  Description of Artificial Sequence: Synthetic peptide
  Seed: GMDPRMCSLMQGSTLPRRSGAA
GMDPRMFSLVQSSTMPRRSGAA

SEQ ID NO: 84880 - protein, 22 aa, Artificial Sequence
  Description of Artificial Sequence: Synthetic peptide
  Seed: GMDPRMCSLMQGSTLPRRSGAA
GMDPRMFSLVQSSTNPRRSGAA

SEQ ID NO: 84881 - protein, 22 aa, Artificial Sequence
  Description of Artificial Sequence: Synthetic peptide
  Seed: GMDPRMCSLMQGSTLPRRSGAA
GMDPRMFSLVQSSTSPRRSGAA

SEQ ID NO: 84882 - protein, 22 aa, Artificial Sequence
  Description of Artificial Sequence: Synthetic peptide
  Seed: GMDPRMCSLMQGSTLPRRSGAA
GMDPRMFSLVQSSTTPRRSGAA

SEQ ID NO: 84883 - protein, 22 aa, Artificial Sequence
  Description of Artificial Sequence: Synthetic peptide
  Seed: GMDPRMCSLMQGSTLPRRSGAA
GMDPRMFSLVQSSTVPRRSGAA

SEQ ID NO: 84884 - protein, 22 aa, Artificial Sequence
  Description of Artificial Sequence: Synthetic peptide
  Seed: GMDPRMCSLMQGSTLPRRSGAA
GMDPRMFSLVQTSTAPRRSGAA

SEQ ID NO: 84885 - protein, 22 aa, Artificial Sequence
  Description of Artificial Sequence: Synthetic peptide
  Seed: GMDPRMCSLMQGSTLPRRSGAA
GMDPRMFSLVQTSTIPRRSGAA

SEQ ID NO: 84886 - protein, 22 aa, Artificial Sequence
  Description of Artificial Sequence: Synthetic peptide
  Seed: GMDPRMCSLMQGSTLPRRSGAA
GMDPRMFSLVQTSTLPRRSGAA

SEQ ID NO: 84887 - protein, 22 aa, Artificial Sequence
  Description of Artificial Sequence: Synthetic peptide
  Seed: GMDPRMCSLMQGSTLPRRSGAA
GMDPRMFSLVQTSTMPRRSGAA

SEQ ID NO: 84888 - protein, 22 aa, Artificial Sequence
  Description of Artificial Sequence: Synthetic peptide
  Seed: GMDPRMCSLMQGSTLPRRSGAA
GMDPRMFSLVQTSTNPRRSGAA

SEQ ID NO: 84889 - protein, 22 aa, Artificial Sequence
  Description of Artificial Sequence: Synthetic peptide
  Seed: GMDPRMCSLMQGSTLPRRSGAA
GMDPRMFSLVQTSTSPRRSGAA

SEQ ID NO: 84890 - protein, 22 aa, Artificial Sequence
  Description of Artificial Sequence: Synthetic peptide
  Seed: GMDPRMCSLMQGSTLPRRSGAA
GMDPRMFSLVQTSTTPRRSGAA

SEQ ID NO: 84891 - protein, 22 aa, Artificial Sequence
  Description of Artificial Sequence: Synthetic peptide
  Seed: GMDPRMCSLMQGSTLPRRSGAA
GMDPRMFSLVQTSTVPRRSGAA

SEQ ID NO: 84892 - protein, 22 aa, Artificial Sequence
  Description of Artificial Sequence: Synthetic peptide
  Seed: GMDPRMCSLMQGSTLPRRSGAA
GMDPRMFSLVQVSTAPRRSGAA

SEQ ID NO: 84893 - protein, 22 aa, Artificial Sequence
  Description of Artificial Sequence: Synthetic peptide
  Seed: GMDPRMCSLMQGSTLPRRSGAA
GMDPRMFSLVQVSTNPRRSGAA

SEQ ID NO: 84894 - protein, 22 aa, Artificial Sequence
  Description of Artificial Sequence: Synthetic peptide
  Seed: GMDPRMCSLMQGSTLPRRSGAA
GMDPRMFSLVQVSTSPRRSGAA

SEQ ID NO: 84895 - protein, 22 aa, Artificial Sequence
  Description of Artificial Sequence: Synthetic peptide
  Seed: GMDPRMCSLMQGSTLPRRSGAA
GMDPRMFSLVQVSTTPRRSGAA

SEQ ID NO: 84896 - protein, 22 aa, Artificial Sequence
  Description of Artificial Sequence: Synthetic peptide
  Seed: GMDPRMCSLMQGSTLPRRSGAA
GMDPRMFSLVQVSTVPRRSGAA

SEQ ID NO: 84897 - protein, 22 aa, Artificial Sequence
  Description of Artificial Sequence: Synthetic peptide
  Seed: GMDPRMCSLMQGSTLPRRSGAA
GMDPRMISLAQASTAPRRSGAA

SEQ ID NO: 84898 - protein, 22 aa, Artificial Sequence
  Description of Artificial Sequence: Synthetic peptide
  Seed: GMDPRMCSLMQGSTLPRRSGAA
GMDPRMISLAQASTIPRRSGAA

SEQ ID NO: 84899 - protein, 22 aa, Artificial Sequence
  Description of Artificial Sequence: Synthetic peptide
  Seed: GMDPRMCSLMQGSTLPRRSGAA
GMDPRMISLAQASTLPRRSGAA

SEQ ID NO: 84900 - protein, 22 aa, Artificial Sequence
  Description of Artificial Sequence: Synthetic peptide
  Seed: GMDPRMCSLMQGSTLPRRSGAA
GMDPRMISLAQASTVPRRSGAA

SEQ ID NO: 84901 - protein, 22 aa, Artificial Sequence
  Description of Artificial Sequence: Synthetic peptide
  Seed: GMDPRMCSLMQGSTLPRRSGAA
GMDPRMISLAQGSTLPRRSGAA

SEQ ID NO: 84902 - protein, 22 aa, Artificial Sequence
  Description of Artificial Sequence: Synthetic peptide
  Seed: GMDPRMCSLMQGSTLPRRSGAA
GMDPRMISLAQGSTVPRRSGAA

SEQ ID NO: 84903 - protein, 22 aa, Artificial Sequence
  Description of Artificial Sequence: Synthetic peptide
  Seed: GMDPRMCSLMQGSTLPRRSGAA
GMDPRMISLIQASTAPRRSGAA

SEQ ID NO: 84904 - protein, 22 aa, Artificial Sequence
  Description of Artificial Sequence: Synthetic peptide
  Seed: GMDPRMCSLMQGSTLPRRSGAA
GMDPRMISLIQASTIPRRSGAA

SEQ ID NO: 84905 - protein, 22 aa, Artificial Sequence
  Description of Artificial Sequence: Synthetic peptide
  Seed: GMDPRMCSLMQGSTLPRRSGAA
GMDPRMISLIQASTLPRRSGAA

SEQ ID NO: 84906 - protein, 22 aa, Artificial Sequence
  Description of Artificial Sequence: Synthetic peptide
  Seed: GMDPRMCSLMQGSTLPRRSGAA
GMDPRMISLIQASTNPRRSGAA

SEQ ID NO: 84907 - protein, 22 aa, Artificial Sequence
  Description of Artificial Sequence: Synthetic peptide
  Seed: GMDPRMCSLMQGSTLPRRSGAA
GMDPRMISLIQASTSPRRSGAA

SEQ ID NO: 84908 - protein, 22 aa, Artificial Sequence
  Description of Artificial Sequence: Synthetic peptide
  Seed: GMDPRMCSLMQGSTLPRRSGAA
GMDPRMISLIQASTVPRRSGAA

SEQ ID NO: 84909 - protein, 22 aa, Artificial Sequence
  Description of Artificial Sequence: Synthetic peptide
  Seed: GMDPRMCSLMQGSTLPRRSGAA
GMDPRMISLIQGSTAPRRSGAA

SEQ ID NO: 84910 - protein, 22 aa, Artificial Sequence
  Description of Artificial Sequence: Synthetic peptide
  Seed: GMDPRMCSLMQGSTLPRRSGAA
GMDPRMISLIQGSTIPRRSGAA

SEQ ID NO: 84911 - protein, 22 aa, Artificial Sequence
  Description of Artificial Sequence: Synthetic peptide
  Seed: GMDPRMCSLMQGSTLPRRSGAA
GMDPRMISLIQGSTLPRRSGAA

SEQ ID NO: 84912 - protein, 22 aa, Artificial Sequence
  Description of Artificial Sequence: Synthetic peptide
  Seed: GMDPRMCSLMQGSTLPRRSGAA
GMDPRMISLIQGSTVPRRSGAA

SEQ ID NO: 84913 - protein, 22 aa, Artificial Sequence
  Description of Artificial Sequence: Synthetic peptide
  Seed: GMDPRMCSLMQGSTLPRRSGAA
GMDPRMISLIQPSTVPRRSGAA

SEQ ID NO: 84914 - protein, 22 aa, Artificial Sequence
  Description of Artificial Sequence: Synthetic peptide
  Seed: GMDPRMCSLMQGSTLPRRSGAA
GMDPRMISLIQSSTAPRRSGAA

SEQ ID NO: 84915 - protein, 22 aa, Artificial Sequence
  Description of Artificial Sequence: Synthetic peptide
  Seed: GMDPRMCSLMQGSTLPRRSGAA
GMDPRMISLIQSSTIPRRSGAA

SEQ ID NO: 84916 - protein, 22 aa, Artificial Sequence
  Description of Artificial Sequence: Synthetic peptide
  Seed: GMDPRMCSLMQGSTLPRRSGAA
GMDPRMISLIQSSTLPRRSGAA

SEQ ID NO: 84917 - protein, 22 aa, Artificial Sequence
  Description of Artificial Sequence: Synthetic peptide
  Seed: GMDPRMCSLMQGSTLPRRSGAA
GMDPRMISLIQSSTVPRRSGAA

SEQ ID NO: 84918 - protein, 22 aa, Artificial Sequence
  Description of Artificial Sequence: Synthetic peptide
  Seed: GMDPRMCSLMQGSTLPRRSGAA
GMDPRMISLLQASTAPRRSGAA

SEQ ID NO: 84919 - protein, 22 aa, Artificial Sequence
  Description of Artificial Sequence: Synthetic peptide
  Seed: GMDPRMCSLMQGSTLPRRSGAA
GMDPRMISLLQASTGPRRSGAA

SEQ ID NO: 84920 - protein, 22 aa, Artificial Sequence
  Description of Artificial Sequence: Synthetic peptide
  Seed: GMDPRMCSLMQGSTLPRRSGAA
GMDPRMISLLQASTIPRRSGAA

SEQ ID NO: 84921 - protein, 22 aa, Artificial Sequence
  Description of Artificial Sequence: Synthetic peptide
  Seed: GMDPRMCSLMQGSTLPRRSGAA
GMDPRMISLLQASTLPRRSGAA

SEQ ID NO: 84922 - protein, 22 aa, Artificial Sequence
  Description of Artificial Sequence: Synthetic peptide
  Seed: GMDPRMCSLMQGSTLPRRSGAA
GMDPRMISLLQASTMPRRSGAA

SEQ ID NO: 84923 - protein, 22 aa, Artificial Sequence
  Description of Artificial Sequence: Synthetic peptide
  Seed: GMDPRMCSLMQGSTLPRRSGAA
GMDPRMISLLQASTNPRRSGAA

SEQ ID NO: 84924 - protein, 22 aa, Artificial Sequence
  Description of Artificial Sequence: Synthetic peptide
  Seed: GMDPRMCSLMQGSTLPRRSGAA
GMDPRMISLLQASTSPRRSGAA

SEQ ID NO: 84925 - protein, 22 aa, Artificial Sequence
  Description of Artificial Sequence: Synthetic peptide
  Seed: GMDPRMCSLMQGSTLPRRSGAA
GMDPRMISLLQASTTPRRSGAA

SEQ ID NO: 84926 - protein, 22 aa, Artificial Sequence
  Description of Artificial Sequence: Synthetic peptide
  Seed: GMDPRMCSLMQGSTLPRRSGAA
GMDPRMISLLQASTVPRRSGAA

SEQ ID NO: 84927 - protein, 22 aa, Artificial Sequence
  Description of Artificial Sequence: Synthetic peptide
  Seed: GMDPRMCSLMQGSTLPRRSGAA
GMDPRMISLLQGSTAPRRSGAA

SEQ ID NO: 84928 - protein, 22 aa, Artificial Sequence
  Description of Artificial Sequence: Synthetic peptide
  Seed: GMDPRMCSLMQGSTLPRRSGAA
GMDPRMISLLQGSTIPRRSGAA

SEQ ID NO: 84929 - protein, 22 aa, Artificial Sequence
  Description of Artificial Sequence: Synthetic peptide
  Seed: GMDPRMCSLMQGSTLPRRSGAA
GMDPRMISLLQGSTLPRRSGAA

SEQ ID NO: 84930 - protein, 22 aa, Artificial Sequence
  Description of Artificial Sequence: Synthetic peptide
  Seed: GMDPRMCSLMQGSTLPRRSGAA
GMDPRMISLLQGSTMPRRSGAA

SEQ ID NO: 84931 - protein, 22 aa, Artificial Sequence
  Description of Artificial Sequence: Synthetic peptide
  Seed: GMDPRMCSLMQGSTLPRRSGAA
GMDPRMISLLQGSTSPRRSGAA

SEQ ID NO: 84932 - protein, 22 aa, Artificial Sequence
  Description of Artificial Sequence: Synthetic peptide
  Seed: GMDPRMCSLMQGSTLPRRSGAA
GMDPRMISLLQGSTTPRRSGAA

SEQ ID NO: 84933 - protein, 22 aa, Artificial Sequence
  Description of Artificial Sequence: Synthetic peptide
  Seed: GMDPRMCSLMQGSTLPRRSGAA
GMDPRMISLLQGSTVPRRSGAA

SEQ ID NO: 84934 - protein, 22 aa, Artificial Sequence
  Description of Artificial Sequence: Synthetic peptide
  Seed: GMDPRMCSLMQGSTLPRRSGAA
GMDPRMISLLQNSTIPRRSGAA

SEQ ID NO: 84935 - protein, 22 aa, Artificial Sequence
  Description of Artificial Sequence: Synthetic peptide
  Seed: GMDPRMCSLMQGSTLPRRSGAA
GMDPRMISLLQNSTLPRRSGAA

SEQ ID NO: 84936 - protein, 22 aa, Artificial Sequence
  Description of Artificial Sequence: Synthetic peptide
  Seed: GMDPRMCSLMQGSTLPRRSGAA
GMDPRMISLLQNSTVPRRSGAA

SEQ ID NO: 84937 - protein, 22 aa, Artificial Sequence
  Description of Artificial Sequence: Synthetic peptide
  Seed: GMDPRMCSLMQGSTLPRRSGAA
GMDPRMISLLQPSTAPRRSGAA

SEQ ID NO: 84938 - protein, 22 aa, Artificial Sequence
  Description of Artificial Sequence: Synthetic peptide
  Seed: GMDPRMCSLMQGSTLPRRSGAA
GMDPRMISLLQPSTIPRRSGAA

SEQ ID NO: 84939 - protein, 22 aa, Artificial Sequence
  Description of Artificial Sequence: Synthetic peptide
  Seed: GMDPRMCSLMQGSTLPRRSGAA
GMDPRMISLLQPSTLPRRSGAA

SEQ ID NO: 84940 - protein, 22 aa, Artificial Sequence
  Description of Artificial Sequence: Synthetic peptide
  Seed: GMDPRMCSLMQGSTLPRRSGAA
GMDPRMISLLQPSTMPRRSGAA

SEQ ID NO: 84941 - protein, 22 aa, Artificial Sequence
  Description of Artificial Sequence: Synthetic peptide
  Seed: GMDPRMCSLMQGSTLPRRSGAA
GMDPRMISLLQPSTNPRRSGAA

SEQ ID NO: 84942 - protein, 22 aa, Artificial Sequence
  Description of Artificial Sequence: Synthetic peptide
  Seed: GMDPRMCSLMQGSTLPRRSGAA
GMDPRMISLLQPSTSPRRSGAA

SEQ ID NO: 84943 - protein, 22 aa, Artificial Sequence
  Description of Artificial Sequence: Synthetic peptide
  Seed: GMDPRMCSLMQGSTLPRRSGAA
GMDPRMISLLQPSTTPRRSGAA

SEQ ID NO: 84944 - protein, 22 aa, Artificial Sequence
  Description of Artificial Sequence: Synthetic peptide
  Seed: GMDPRMCSLMQGSTLPRRSGAA
GMDPRMISLLQPSTVPRRSGAA

SEQ ID NO: 84945 - protein, 22 aa, Artificial Sequence
  Description of Artificial Sequence: Synthetic peptide
  Seed: GMDPRMCSLMQGSTLPRRSGAA
GMDPRMISLLQSSTAPRRSGAA

SEQ ID NO: 84946 - protein, 22 aa, Artificial Sequence
  Description of Artificial Sequence: Synthetic peptide
  Seed: GMDPRMCSLMQGSTLPRRSGAA
GMDPRMISLLQSSTIPRRSGAA

SEQ ID NO: 84947 - protein, 22 aa, Artificial Sequence
  Description of Artificial Sequence: Synthetic peptide
  Seed: GMDPRMCSLMQGSTLPRRSGAA
GMDPRMISLLQSSTLPRRSGAA

SEQ ID NO: 84948 - protein, 22 aa, Artificial Sequence
  Description of Artificial Sequence: Synthetic peptide
  Seed: GMDPRMCSLMQGSTLPRRSGAA
GMDPRMISLLQSSTMPRRSGAA

SEQ ID NO: 84949 - protein, 22 aa, Artificial Sequence
  Description of Artificial Sequence: Synthetic peptide
  Seed: GMDPRMCSLMQGSTLPRRSGAA
GMDPRMISLLQSSTSPRRSGAA

SEQ ID NO: 84950 - protein, 22 aa, Artificial Sequence
  Description of Artificial Sequence: Synthetic peptide
  Seed: GMDPRMCSLMQGSTLPRRSGAA
GMDPRMISLLQSSTTPRRSGAA

SEQ ID NO: 84951 - protein, 22 aa, Artificial Sequence
  Description of Artificial Sequence: Synthetic peptide
  Seed: GMDPRMCSLMQGSTLPRRSGAA
GMDPRMISLLQSSTVPRRSGAA

SEQ ID NO: 84952 - protein, 22 aa, Artificial Sequence
  Description of Artificial Sequence: Synthetic peptide
  Seed: GMDPRMCSLMQGSTLPRRSGAA
GMDPRMISLLQTSTAPRRSGAA

SEQ ID NO: 84953 - protein, 22 aa, Artificial Sequence
  Description of Artificial Sequence: Synthetic peptide
  Seed: GMDPRMCSLMQGSTLPRRSGAA
GMDPRMISLLQTSTIPRRSGAA

SEQ ID NO: 84954 - protein, 22 aa, Artificial Sequence
  Description of Artificial Sequence: Synthetic peptide
  Seed: GMDPRMCSLMQGSTLPRRSGAA
GMDPRMISLLQTSTLPRRSGAA

SEQ ID NO: 84955 - protein, 22 aa, Artificial Sequence
  Description of Artificial Sequence: Synthetic peptide
  Seed: GMDPRMCSLMQGSTLPRRSGAA
GMDPRMISLLQTSTNPRRSGAA

SEQ ID NO: 84956 - protein, 22 aa, Artificial Sequence
  Description of Artificial Sequence: Synthetic peptide
  Seed: GMDPRMCSLMQGSTLPRRSGAA
GMDPRMISLLQTSTSPRRSGAA

SEQ ID NO: 84957 - protein, 22 aa, Artificial Sequence
  Description of Artificial Sequence: Synthetic peptide
  Seed: GMDPRMCSLMQGSTLPRRSGAA
GMDPRMISLLQTSTVPRRSGAA

SEQ ID NO: 84958 - protein, 22 aa, Artificial Sequence
  Description of Artificial Sequence: Synthetic peptide
  Seed: GMDPRMCSLMQGSTLPRRSGAA
GMDPRMISLLQVSTAPRRSGAA

SEQ ID NO: 84959 - protein, 22 aa, Artificial Sequence
  Description of Artificial Sequence: Synthetic peptide
  Seed: GMDPRMCSLMQGSTLPRRSGAA
GMDPRMISLLQVSTNPRRSGAA

SEQ ID NO: 84960 - protein, 22 aa, Artificial Sequence
  Description of Artificial Sequence: Synthetic peptide
  Seed: GMDPRMCSLMQGSTLPRRSGAA
GMDPRMISLLQVSTSPRRSGAA

SEQ ID NO: 84961 - protein, 22 aa, Artificial Sequence
  Description of Artificial Sequence: Synthetic peptide
  Seed: GMDPRMCSLMQGSTLPRRSGAA
GMDPRMISLMQASTAPRRSGAA

SEQ ID NO: 84962 - protein, 22 aa, Artificial Sequence
  Description of Artificial Sequence: Synthetic peptide
  Seed: GMDPRMCSLMQGSTLPRRSGAA
GMDPRMISLMQASTGPRRSGAA

SEQ ID NO: 84963 - protein, 22 aa, Artificial Sequence
  Description of Artificial Sequence: Synthetic peptide
  Seed: GMDPRMCSLMQGSTLPRRSGAA
GMDPRMISLMQASTIPRRSGAA

SEQ ID NO: 84964 - protein, 22 aa, Artificial Sequence
  Description of Artificial Sequence: Synthetic peptide
  Seed: GMDPRMCSLMQGSTLPRRSGAA
GMDPRMISLMQASTLPRRSGAA

SEQ ID NO: 84965 - protein, 22 aa, Artificial Sequence
  Description of Artificial Sequence: Synthetic peptide
  Seed: GMDPRMCSLMQGSTLPRRSGAA
GMDPRMISLMQASTMPRRSGAA

SEQ ID NO: 84966 - protein, 22 aa, Artificial Sequence
  Description of Artificial Sequence: Synthetic peptide
  Seed: GMDPRMCSLMQGSTLPRRSGAA
GMDPRMISLMQASTNPRRSGAA

SEQ ID NO: 84967 - protein, 22 aa, Artificial Sequence
  Description of Artificial Sequence: Synthetic peptide
  Seed: GMDPRMCSLMQGSTLPRRSGAA
GMDPRMISLMQASTSPRRSGAA

SEQ ID NO: 84968 - protein, 22 aa, Artificial Sequence
  Description of Artificial Sequence: Synthetic peptide
  Seed: GMDPRMCSLMQGSTLPRRSGAA
GMDPRMISLMQASTTPRRSGAA

SEQ ID NO: 84969 - protein, 22 aa, Artificial Sequence
  Description of Artificial Sequence: Synthetic peptide
  Seed: GMDPRMCSLMQGSTLPRRSGAA
GMDPRMISLMQASTVPRRSGAA

SEQ ID NO: 84970 - protein, 22 aa, Artificial Sequence
  Description of Artificial Sequence: Synthetic peptide
  Seed: GMDPRMCSLMQGSTLPRRSGAA
GMDPRMISLMQGSTAPRRSGAA

SEQ ID NO: 84971 - protein, 22 aa, Artificial Sequence
  Description of Artificial Sequence: Synthetic peptide
  Seed: GMDPRMCSLMQGSTLPRRSGAA
GMDPRMISLMQGSTIPRRSGAA

SEQ ID NO: 84972 - protein, 22 aa, Artificial Sequence
  Description of Artificial Sequence: Synthetic peptide
  Seed: GMDPRMCSLMQGSTLPRRSGAA
GMDPRMISLMQGSTLPRRSGAA

SEQ ID NO: 84973 - protein, 22 aa, Artificial Sequence
  Description of Artificial Sequence: Synthetic peptide
  Seed: GMDPRMCSLMQGSTLPRRSGAA
GMDPRMISLMQGSTMPRRSGAA

SEQ ID NO: 84974 - protein, 22 aa, Artificial Sequence
  Description of Artificial Sequence: Synthetic peptide
  Seed: GMDPRMCSLMQGSTLPRRSGAA
GMDPRMISLMQGSTSPRRSGAA

SEQ ID NO: 84975 - protein, 22 aa, Artificial Sequence
  Description of Artificial Sequence: Synthetic peptide
  Seed: GMDPRMCSLMQGSTLPRRSGAA
GMDPRMISLMQGSTTPRRSGAA

SEQ ID NO: 84976 - protein, 22 aa, Artificial Sequence
  Description of Artificial Sequence: Synthetic peptide
  Seed: GMDPRMCSLMQGSTLPRRSGAA
GMDPRMISLMQGSTVPRRSGAA

SEQ ID NO: 84977 - protein, 22 aa, Artificial Sequence
  Description of Artificial Sequence: Synthetic peptide
  Seed: GMDPRMCSLMQGSTLPRRSGAA
GMDPRMISLMQISTAPRRSGAA

SEQ ID NO: 84978 - protein, 22 aa, Artificial Sequence
  Description of Artificial Sequence: Synthetic peptide
  Seed: GMDPRMCSLMQGSTLPRRSGAA
GMDPRMISLMQISTSPRRSGAA

SEQ ID NO: 84979 - protein, 22 aa, Artificial Sequence
  Description of Artificial Sequence: Synthetic peptide
  Seed: GMDPRMCSLMQGSTLPRRSGAA
GMDPRMISLMQNSTIPRRSGAA

SEQ ID NO: 84980 - protein, 22 aa, Artificial Sequence
  Description of Artificial Sequence: Synthetic peptide
  Seed: GMDPRMCSLMQGSTLPRRSGAA
GMDPRMISLMQNSTLPRRSGAA

SEQ ID NO: 84981 - protein, 22 aa, Artificial Sequence
  Description of Artificial Sequence: Synthetic peptide
  Seed: GMDPRMCSLMQGSTLPRRSGAA
GMDPRMISLMQNSTVPRRSGAA

SEQ ID NO: 84982 - protein, 22 aa, Artificial Sequence
  Description of Artificial Sequence: Synthetic peptide
  Seed: GMDPRMCSLMQGSTLPRRSGAA
GMDPRMISLMQPSTAPRRSGAA

SEQ ID NO: 84983 - protein, 22 aa, Artificial Sequence
  Description of Artificial Sequence: Synthetic peptide
  Seed: GMDPRMCSLMQGSTLPRRSGAA
GMDPRMISLMQPSTIPRRSGAA

SEQ ID NO: 84984 - protein, 22 aa, Artificial Sequence
  Description of Artificial Sequence: Synthetic peptide
  Seed: GMDPRMCSLMQGSTLPRRSGAA
GMDPRMISLMQPSTLPRRSGAA

SEQ ID NO: 84985 - protein, 22 aa, Artificial Sequence
  Description of Artificial Sequence: Synthetic peptide
  Seed: GMDPRMCSLMQGSTLPRRSGAA
GMDPRMISLMQPSTMPRRSGAA

SEQ ID NO: 84986 - protein, 22 aa, Artificial Sequence
  Description of Artificial Sequence: Synthetic peptide
  Seed: GMDPRMCSLMQGSTLPRRSGAA
GMDPRMISLMQPSTNPRRSGAA

SEQ ID NO: 84987 - protein, 22 aa, Artificial Sequence
  Description of Artificial Sequence: Synthetic peptide
  Seed: GMDPRMCSLMQGSTLPRRSGAA
GMDPRMISLMQPSTSPRRSGAA

SEQ ID NO: 84988 - protein, 22 aa, Artificial Sequence
  Description of Artificial Sequence: Synthetic peptide
  Seed: GMDPRMCSLMQGSTLPRRSGAA
GMDPRMISLMQPSTTPRRSGAA

SEQ ID NO: 84989 - protein, 22 aa, Artificial Sequence
  Description of Artificial Sequence: Synthetic peptide
  Seed: GMDPRMCSLMQGSTLPRRSGAA
GMDPRMISLMQPSTVPRRSGAA

SEQ ID NO: 84990 - protein, 22 aa, Artificial Sequence
  Description of Artificial Sequence: Synthetic peptide
  Seed: GMDPRMCSLMQGSTLPRRSGAA
GMDPRMISLMQSSTAPRRSGAA

SEQ ID NO: 84991 - protein, 22 aa, Artificial Sequence
  Description of Artificial Sequence: Synthetic peptide
  Seed: GMDPRMCSLMQGSTLPRRSGAA
GMDPRMISLMQSSTIPRRSGAA

SEQ ID NO: 84992 - protein, 22 aa, Artificial Sequence
  Description of Artificial Sequence: Synthetic peptide
  Seed: GMDPRMCSLMQGSTLPRRSGAA
GMDPRMISLMQSSTLPRRSGAA

SEQ ID NO: 84993 - protein, 22 aa, Artificial Sequence
  Description of Artificial Sequence: Synthetic peptide
  Seed: GMDPRMCSLMQGSTLPRRSGAA
GMDPRMISLMQSSTMPRRSGAA

SEQ ID NO: 84994 - protein, 22 aa, Artificial Sequence
  Description of Artificial Sequence: Synthetic peptide
  Seed: GMDPRMCSLMQGSTLPRRSGAA
GMDPRMISLMQSSTNPRRSGAA

SEQ ID NO: 84995 - protein, 22 aa, Artificial Sequence
  Description of Artificial Sequence: Synthetic peptide
  Seed: GMDPRMCSLMQGSTLPRRSGAA
GMDPRMISLMQSSTSPRRSGAA

SEQ ID NO: 84996 - protein, 22 aa, Artificial Sequence
  Description of Artificial Sequence: Synthetic peptide
  Seed: GMDPRMCSLMQGSTLPRRSGAA
GMDPRMISLMQSSTTPRRSGAA

SEQ ID NO: 84997 - protein, 22 aa, Artificial Sequence
  Description of Artificial Sequence: Synthetic peptide
  Seed: GMDPRMCSLMQGSTLPRRSGAA
GMDPRMISLMQSSTVPRRSGAA

SEQ ID NO: 84998 - protein, 22 aa, Artificial Sequence
  Description of Artificial Sequence: Synthetic peptide
  Seed: GMDPRMCSLMQGSTLPRRSGAA
GMDPRMISLMQTSTAPRRSGAA

SEQ ID NO: 84999 - protein, 22 aa, Artificial Sequence
  Description of Artificial Sequence: Synthetic peptide
  Seed: GMDPRMCSLMQGSTLPRRSGAA
GMDPRMISLMQTSTIPRRSGAA

SEQ ID NO: 85000 - protein, 22 aa, Artificial Sequence
  Description of Artificial Sequence: Synthetic peptide
  Seed: GMDPRMCSLMQGSTLPRRSGAA
GMDPRMISLMQTSTLPRRSGAA

SEQ ID NO: 85001 - protein, 22 aa, Artificial Sequence
  Description of Artificial Sequence: Synthetic peptide
  Seed: GMDPRMCSLMQGSTLPRRSGAA
GMDPRMISLMQTSTNPRRSGAA

SEQ ID NO: 85002 - protein, 22 aa, Artificial Sequence
  Description of Artificial Sequence: Synthetic peptide
  Seed: GMDPRMCSLMQGSTLPRRSGAA
GMDPRMISLMQTSTSPRRSGAA

SEQ ID NO: 85003 - protein, 22 aa, Artificial Sequence
  Description of Artificial Sequence: Synthetic peptide
  Seed: GMDPRMCSLMQGSTLPRRSGAA
GMDPRMISLMQTSTVPRRSGAA

SEQ ID NO: 85004 - protein, 22 aa, Artificial Sequence
  Description of Artificial Sequence: Synthetic peptide
  Seed: GMDPRMCSLMQGSTLPRRSGAA
GMDPRMISLMQVSTAPRRSGAA

SEQ ID NO: 85005 - protein, 22 aa, Artificial Sequence
  Description of Artificial Sequence: Synthetic peptide
  Seed: GMDPRMCSLMQGSTLPRRSGAA
GMDPRMISLMQVSTNPRRSGAA

SEQ ID NO: 85006 - protein, 22 aa, Artificial Sequence
  Description of Artificial Sequence: Synthetic peptide
  Seed: GMDPRMCSLMQGSTLPRRSGAA
GMDPRMISLMQVSTSPRRSGAA

SEQ ID NO: 85007 - protein, 22 aa, Artificial Sequence
  Description of Artificial Sequence: Synthetic peptide
  Seed: GMDPRMCSLMQGSTLPRRSGAA
GMDPRMISLQQASTAPRRSGAA

SEQ ID NO: 85008 - protein, 22 aa, Artificial Sequence
  Description of Artificial Sequence: Synthetic peptide
  Seed: GMDPRMCSLMQGSTLPRRSGAA
GMDPRMISLQQASTIPRRSGAA

SEQ ID NO: 85009 - protein, 22 aa, Artificial Sequence
  Description of Artificial Sequence: Synthetic peptide
  Seed: GMDPRMCSLMQGSTLPRRSGAA
GMDPRMISLQQASTLPRRSGAA

SEQ ID NO: 85010 - protein, 22 aa, Artificial Sequence
  Description of Artificial Sequence: Synthetic peptide
  Seed: GMDPRMCSLMQGSTLPRRSGAA
GMDPRMISLQQASTVPRRSGAA

SEQ ID NO: 85011 - protein, 22 aa, Artificial Sequence
  Description of Artificial Sequence: Synthetic peptide
  Seed: GMDPRMCSLMQGSTLPRRSGAA
GMDPRMISLQQGSTVPRRSGAA

SEQ ID NO: 85012 - protein, 22 aa, Artificial Sequence
  Description of Artificial Sequence: Synthetic peptide
  Seed: GMDPRMCSLMQGSTLPRRSGAA
GMDPRMISLVQASTLPRRSGAA

SEQ ID NO: 85013 - protein, 22 aa, Artificial Sequence
  Description of Artificial Sequence: Synthetic peptide
  Seed: GMDPRMCSLMQGSTLPRRSGAA
GMDPRMISLVQASTVPRRSGAA

SEQ ID NO: 85014 - protein, 22 aa, Artificial Sequence
  Description of Artificial Sequence: Synthetic peptide
  Seed: GMDPRMCSLMQGSTLPRRSGAA
GMDPRMLSLAQASTIPRRSGAA

SEQ ID NO: 85015 - protein, 22 aa, Artificial Sequence
  Description of Artificial Sequence: Synthetic peptide
  Seed: GMDPRMCSLMQGSTLPRRSGAA
GMDPRMLSLAQASTLPRRSGAA

SEQ ID NO: 85016 - protein, 22 aa, Artificial Sequence
  Description of Artificial Sequence: Synthetic peptide
  Seed: GMDPRMCSLMQGSTLPRRSGAA
GMDPRMLSLAQASTVPRRSGAA

SEQ ID NO: 85017 - protein, 22 aa, Artificial Sequence
  Description of Artificial Sequence: Synthetic peptide
  Seed: GMDPRMCSLMQGSTLPRRSGAA
GMDPRMLSLIQASTAPRRSGAA

SEQ ID NO: 85018 - protein, 22 aa, Artificial Sequence
  Description of Artificial Sequence: Synthetic peptide
  Seed: GMDPRMCSLMQGSTLPRRSGAA
GMDPRMLSLIQASTIPRRSGAA

SEQ ID NO: 85019 - protein, 22 aa, Artificial Sequence
  Description of Artificial Sequence: Synthetic peptide
  Seed: GMDPRMCSLMQGSTLPRRSGAA
GMDPRMLSLIQASTLPRRSGAA

SEQ ID NO: 85020 - protein, 22 aa, Artificial Sequence
  Description of Artificial Sequence: Synthetic peptide
  Seed: GMDPRMCSLMQGSTLPRRSGAA
GMDPRMLSLIQASTNPRRSGAA

SEQ ID NO: 85021 - protein, 22 aa, Artificial Sequence
  Description of Artificial Sequence: Synthetic peptide
  Seed: GMDPRMCSLMQGSTLPRRSGAA
GMDPRMLSLIQASTSPRRSGAA

SEQ ID NO: 85022 - protein, 22 aa, Artificial Sequence
  Description of Artificial Sequence: Synthetic peptide
  Seed: GMDPRMCSLMQGSTLPRRSGAA
GMDPRMLSLIQASTVPRRSGAA

SEQ ID NO: 85023 - protein, 22 aa, Artificial Sequence
  Description of Artificial Sequence: Synthetic peptide
  Seed: GMDPRMCSLMQGSTLPRRSGAA
GMDPRMLSLIQGSTAPRRSGAA

SEQ ID NO: 85024 - protein, 22 aa, Artificial Sequence
  Description of Artificial Sequence: Synthetic peptide
  Seed: GMDPRMCSLMQGSTLPRRSGAA
GMDPRMLSLIQGSTIPRRSGAA

SEQ ID NO: 85025 - protein, 22 aa, Artificial Sequence
  Description of Artificial Sequence: Synthetic peptide
  Seed: GMDPRMCSLMQGSTLPRRSGAA
GMDPRMLSLIQGSTLPRRSGAA

SEQ ID NO: 85026 - protein, 22 aa, Artificial Sequence
  Description of Artificial Sequence: Synthetic peptide
  Seed: GMDPRMCSLMQGSTLPRRSGAA
GMDPRMLSLIQGSTVPRRSGAA

SEQ ID NO: 85027 - protein, 22 aa, Artificial Sequence
  Description of Artificial Sequence: Synthetic peptide
  Seed: GMDPRMCSLMQGSTLPRRSGAA
GMDPRMLSLLQASTAPRRSGAA

SEQ ID NO: 85028 - protein, 22 aa, Artificial Sequence
  Description of Artificial Sequence: Synthetic peptide
  Seed: GMDPRMCSLMQGSTLPRRSGAA
GMDPRMLSLLQASTIPRRSGAA

SEQ ID NO: 85029 - protein, 22 aa, Artificial Sequence
  Description of Artificial Sequence: Synthetic peptide
  Seed: GMDPRMCSLMQGSTLPRRSGAA
GMDPRMLSLLQASTLPRRSGAA

SEQ ID NO: 85030 - protein, 22 aa, Artificial Sequence
  Description of Artificial Sequence: Synthetic peptide
  Seed: GMDPRMCSLMQGSTLPRRSGAA
GMDPRMLSLLQASTMPRRSGAA

SEQ ID NO: 85031 - protein, 22 aa, Artificial Sequence
  Description of Artificial Sequence: Synthetic peptide
  Seed: GMDPRMCSLMQGSTLPRRSGAA
GMDPRMLSLLQASTNPRRSGAA

SEQ ID NO: 85032 - protein, 22 aa, Artificial Sequence
  Description of Artificial Sequence: Synthetic peptide
  Seed: GMDPRMCSLMQGSTLPRRSGAA
GMDPRMLSLLQASTSPRRSGAA

SEQ ID NO: 85033 - protein, 22 aa, Artificial Sequence
  Description of Artificial Sequence: Synthetic peptide
  Seed: GMDPRMCSLMQGSTLPRRSGAA
GMDPRMLSLLQASTTPRRSGAA

SEQ ID NO: 85034 - protein, 22 aa, Artificial Sequence
  Description of Artificial Sequence: Synthetic peptide
  Seed: GMDPRMCSLMQGSTLPRRSGAA
GMDPRMLSLLQASTVPRRSGAA

SEQ ID NO: 85035 - protein, 22 aa, Artificial Sequence
  Description of Artificial Sequence: Synthetic peptide
  Seed: GMDPRMCSLMQGSTLPRRSGAA
GMDPRMLSLLQGSTAPRRSGAA

SEQ ID NO: 85036 - protein, 22 aa, Artificial Sequence
  Description of Artificial Sequence: Synthetic peptide
  Seed: GMDPRMCSLMQGSTLPRRSGAA
GMDPRMLSLLQGSTIPRRSGAA

SEQ ID NO: 85037 - protein, 22 aa, Artificial Sequence
  Description of Artificial Sequence: Synthetic peptide
  Seed: GMDPRMCSLMQGSTLPRRSGAA
GMDPRMLSLLQGSTLPRRSGAA

SEQ ID NO: 85038 - protein, 22 aa, Artificial Sequence
  Description of Artificial Sequence: Synthetic peptide
  Seed: GMDPRMCSLMQGSTLPRRSGAA
GMDPRMLSLLQGSTMPRRSGAA

SEQ ID NO: 85039 - protein, 22 aa, Artificial Sequence
  Description of Artificial Sequence: Synthetic peptide
  Seed: GMDPRMCSLMQGSTLPRRSGAA
GMDPRMLSLLQGSTSPRRSGAA

SEQ ID NO: 85040 - protein, 22 aa, Artificial Sequence
  Description of Artificial Sequence: Synthetic peptide
  Seed: GMDPRMCSLMQGSTLPRRSGAA
GMDPRMLSLLQGSTTPRRSGAA

SEQ ID NO: 85041 - protein, 22 aa, Artificial Sequence
  Description of Artificial Sequence: Synthetic peptide
  Seed: GMDPRMCSLMQGSTLPRRSGAA
GMDPRMLSLLQGSTVPRRSGAA

SEQ ID NO: 85042 - protein, 22 aa, Artificial Sequence
  Description of Artificial Sequence: Synthetic peptide
  Seed: GMDPRMCSLMQGSTLPRRSGAA
GMDPRMLSLLQNSTVPRRSGAA

SEQ ID NO: 85043 - protein, 22 aa, Artificial Sequence
  Description of Artificial Sequence: Synthetic peptide
  Seed: GMDPRMCSLMQGSTLPRRSGAA
GMDPRMLSLLQPSTAPRRSGAA

SEQ ID NO: 85044 - protein, 22 aa, Artificial Sequence
  Description of Artificial Sequence: Synthetic peptide
  Seed: GMDPRMCSLMQGSTLPRRSGAA
GMDPRMLSLLQPSTIPRRSGAA

SEQ ID NO: 85045 - protein, 22 aa, Artificial Sequence
  Description of Artificial Sequence: Synthetic peptide
  Seed: GMDPRMCSLMQGSTLPRRSGAA
GMDPRMLSLLQPSTLPRRSGAA

SEQ ID NO: 85046 - protein, 22 aa, Artificial Sequence
  Description of Artificial Sequence: Synthetic peptide
  Seed: GMDPRMCSLMQGSTLPRRSGAA
GMDPRMLSLLQPSTNPRRSGAA

SEQ ID NO: 85047 - protein, 22 aa, Artificial Sequence
  Description of Artificial Sequence: Synthetic peptide
  Seed: GMDPRMCSLMQGSTLPRRSGAA
GMDPRMLSLLQPSTSPRRSGAA

SEQ ID NO: 85048 - protein, 22 aa, Artificial Sequence
  Description of Artificial Sequence: Synthetic peptide
  Seed: GMDPRMCSLMQGSTLPRRSGAA
GMDPRMLSLLQPSTVPRRSGAA

SEQ ID NO: 85049 - protein, 22 aa, Artificial Sequence
  Description of Artificial Sequence: Synthetic peptide
  Seed: GMDPRMCSLMQGSTLPRRSGAA
GMDPRMLSLLQSSTAPRRSGAA

SEQ ID NO: 85050 - protein, 22 aa, Artificial Sequence
  Description of Artificial Sequence: Synthetic peptide
  Seed: GMDPRMCSLMQGSTLPRRSGAA
GMDPRMLSLLQSSTIPRRSGAA

SEQ ID NO: 85051 - protein, 22 aa, Artificial Sequence
  Description of Artificial Sequence: Synthetic peptide
  Seed: GMDPRMCSLMQGSTLPRRSGAA
GMDPRMLSLLQSSTLPRRSGAA

SEQ ID NO: 85052 - protein, 22 aa, Artificial Sequence
  Description of Artificial Sequence: Synthetic peptide
  Seed: GMDPRMCSLMQGSTLPRRSGAA
GMDPRMLSLLQSSTSPRRSGAA

SEQ ID NO: 85053 - protein, 22 aa, Artificial Sequence
  Description of Artificial Sequence: Synthetic peptide
  Seed: GMDPRMCSLMQGSTLPRRSGAA
GMDPRMLSLLQSSTTPRRSGAA

SEQ ID NO: 85054 - protein, 22 aa, Artificial Sequence
  Description of Artificial Sequence: Synthetic peptide
  Seed: GMDPRMCSLMQGSTLPRRSGAA
GMDPRMLSLLQSSTVPRRSGAA

SEQ ID NO: 85055 - protein, 22 aa, Artificial Sequence
  Description of Artificial Sequence: Synthetic peptide
  Seed: GMDPRMCSLMQGSTLPRRSGAA
GMDPRMLSLLQTSTAPRRSGAA

SEQ ID NO: 85056 - protein, 22 aa, Artificial Sequence
  Description of Artificial Sequence: Synthetic peptide
  Seed: GMDPRMCSLMQGSTLPRRSGAA
GMDPRMLSLLQTSTNPRRSGAA

SEQ ID NO: 85057 - protein, 22 aa, Artificial Sequence
  Description of Artificial Sequence: Synthetic peptide
  Seed: GMDPRMCSLMQGSTLPRRSGAA
GMDPRMLSLLQTSTSPRRSGAA

SEQ ID NO: 85058 - protein, 22 aa, Artificial Sequence
  Description of Artificial Sequence: Synthetic peptide
  Seed: GMDPRMCSLMQGSTLPRRSGAA
GMDPRMLSLLQTSTVPRRSGAA

SEQ ID NO: 85059 - protein, 22 aa, Artificial Sequence
  Description of Artificial Sequence: Synthetic peptide
  Seed: GMDPRMCSLMQGSTLPRRSGAA
GMDPRMLSLLQVSTAPRRSGAA

SEQ ID NO: 85060 - protein, 22 aa, Artificial Sequence
  Description of Artificial Sequence: Synthetic peptide
  Seed: GMDPRMCSLMQGSTLPRRSGAA
GMDPRMLSLLQVSTNPRRSGAA

SEQ ID NO: 85061 - protein, 22 aa, Artificial Sequence
  Description of Artificial Sequence: Synthetic peptide
  Seed: GMDPRMCSLMQGSTLPRRSGAA
GMDPRMLSLLQVSTSPRRSGAA

SEQ ID NO: 85062 - protein, 22 aa, Artificial Sequence
  Description of Artificial Sequence: Synthetic peptide
  Seed: GMDPRMCSLMQGSTLPRRSGAA
GMDPRMLSLMQASTAPRRSGAA

SEQ ID NO: 85063 - protein, 22 aa, Artificial Sequence
  Description of Artificial Sequence: Synthetic peptide
  Seed: GMDPRMCSLMQGSTLPRRSGAA
GMDPRMLSLMQASTIPRRSGAA

SEQ ID NO: 85064 - protein, 22 aa, Artificial Sequence
  Description of Artificial Sequence: Synthetic peptide
  Seed: GMDPRMCSLMQGSTLPRRSGAA
GMDPRMLSLMQASTLPRRSGAA

SEQ ID NO: 85065 - protein, 22 aa, Artificial Sequence
  Description of Artificial Sequence: Synthetic peptide
  Seed: GMDPRMCSLMQGSTLPRRSGAA
GMDPRMLSLMQASTMPRRSGAA

SEQ ID NO: 85066 - protein, 22 aa, Artificial Sequence
  Description of Artificial Sequence: Synthetic peptide
  Seed: GMDPRMCSLMQGSTLPRRSGAA
GMDPRMLSLMQASTNPRRSGAA

SEQ ID NO: 85067 - protein, 22 aa, Artificial Sequence
  Description of Artificial Sequence: Synthetic peptide
  Seed: GMDPRMCSLMQGSTLPRRSGAA
GMDPRMLSLMQASTSPRRSGAA

SEQ ID NO: 85068 - protein, 22 aa, Artificial Sequence
  Description of Artificial Sequence: Synthetic peptide
  Seed: GMDPRMCSLMQGSTLPRRSGAA
GMDPRMLSLMQASTTPRRSGAA

SEQ ID NO: 85069 - protein, 22 aa, Artificial Sequence
  Description of Artificial Sequence: Synthetic peptide
  Seed: GMDPRMCSLMQGSTLPRRSGAA
GMDPRMLSLMQASTVPRRSGAA

SEQ ID NO: 85070 - protein, 22 aa, Artificial Sequence
  Description of Artificial Sequence: Synthetic peptide
  Seed: GMDPRMCSLMQGSTLPRRSGAA
GMDPRMLSLMQGSTAPRRSGAA

SEQ ID NO: 85071 - protein, 22 aa, Artificial Sequence
  Description of Artificial Sequence: Synthetic peptide
  Seed: GMDPRMCSLMQGSTLPRRSGAA
GMDPRMLSLMQGSTIPRRSGAA

SEQ ID NO: 85072 - protein, 22 aa, Artificial Sequence
  Description of Artificial Sequence: Synthetic peptide
  Seed: GMDPRMCSLMQGSTLPRRSGAA
GMDPRMLSLMQGSTLPRRSGAA

SEQ ID NO: 85073 - protein, 22 aa, Artificial Sequence
  Description of Artificial Sequence: Synthetic peptide
  Seed: GMDPRMCSLMQGSTLPRRSGAA
GMDPRMLSLMQGSTMPRRSGAA

SEQ ID NO: 85074 - protein, 22 aa, Artificial Sequence
  Description of Artificial Sequence: Synthetic peptide
  Seed: GMDPRMCSLMQGSTLPRRSGAA
GMDPRMLSLMQGSTSPRRSGAA

SEQ ID NO: 85075 - protein, 22 aa, Artificial Sequence
  Description of Artificial Sequence: Synthetic peptide
  Seed: GMDPRMCSLMQGSTLPRRSGAA
GMDPRMLSLMQGSTTPRRSGAA

SEQ ID NO: 85076 - protein, 22 aa, Artificial Sequence
  Description of Artificial Sequence: Synthetic peptide
  Seed: GMDPRMCSLMQGSTLPRRSGAA
GMDPRMLSLMQGSTVPRRSGAA

SEQ ID NO: 85077 - protein, 22 aa, Artificial Sequence
  Description of Artificial Sequence: Synthetic peptide
  Seed: GMDPRMCSLMQGSTLPRRSGAA
GMDPRMLSLMQISTAPRRSGAA

SEQ ID NO: 85078 - protein, 22 aa, Artificial Sequence
  Description of Artificial Sequence: Synthetic peptide
  Seed: GMDPRMCSLMQGSTLPRRSGAA
GMDPRMLSLMQISTSPRRSGAA

SEQ ID NO: 85079 - protein, 22 aa, Artificial Sequence
  Description of Artificial Sequence: Synthetic peptide
  Seed: GMDPRMCSLMQGSTLPRRSGAA
GMDPRMLSLMQPSTAPRRSGAA

SEQ ID NO: 85080 - protein, 22 aa, Artificial Sequence
  Description of Artificial Sequence: Synthetic peptide
  Seed: GMDPRMCSLMQGSTLPRRSGAA
GMDPRMLSLMQPSTIPRRSGAA

SEQ ID NO: 85081 - protein, 22 aa, Artificial Sequence
  Description of Artificial Sequence: Synthetic peptide
  Seed: GMDPRMCSLMQGSTLPRRSGAA
GMDPRMLSLMQPSTLPRRSGAA

SEQ ID NO: 85082 - protein, 22 aa, Artificial Sequence
  Description of Artificial Sequence: Synthetic peptide
  Seed: GMDPRMCSLMQGSTLPRRSGAA
GMDPRMLSLMQPSTNPRRSGAA

SEQ ID NO: 85083 - protein, 22 aa, Artificial Sequence
  Description of Artificial Sequence: Synthetic peptide
  Seed: GMDPRMCSLMQGSTLPRRSGAA
GMDPRMLSLMQPSTSPRRSGAA

SEQ ID NO: 85084 - protein, 22 aa, Artificial Sequence
  Description of Artificial Sequence: Synthetic peptide
  Seed: GMDPRMCSLMQGSTLPRRSGAA
GMDPRMLSLMQPSTVPRRSGAA

SEQ ID NO: 85085 - protein, 22 aa, Artificial Sequence
  Description of Artificial Sequence: Synthetic peptide
  Seed: GMDPRMCSLMQGSTLPRRSGAA
GMDPRMLSLMQSSTAPRRSGAA

SEQ ID NO: 85086 - protein, 22 aa, Artificial Sequence
  Description of Artificial Sequence: Synthetic peptide
  Seed: GMDPRMCSLMQGSTLPRRSGAA
GMDPRMLSLMQSSTIPRRSGAA

SEQ ID NO: 85087 - protein, 22 aa, Artificial Sequence
  Description of Artificial Sequence: Synthetic peptide
  Seed: GMDPRMCSLMQGSTLPRRSGAA
GMDPRMLSLMQSSTLPRRSGAA

SEQ ID NO: 85088 - protein, 22 aa, Artificial Sequence
  Description of Artificial Sequence: Synthetic peptide
  Seed: GMDPRMCSLMQGSTLPRRSGAA
GMDPRMLSLMQSSTNPRRSGAA

SEQ ID NO: 85089 - protein, 22 aa, Artificial Sequence
  Description of Artificial Sequence: Synthetic peptide
  Seed: GMDPRMCSLMQGSTLPRRSGAA
GMDPRMLSLMQSSTSPRRSGAA

SEQ ID NO: 85090 - protein, 22 aa, Artificial Sequence
  Description of Artificial Sequence: Synthetic peptide
  Seed: GMDPRMCSLMQGSTLPRRSGAA
GMDPRMLSLMQSSTTPRRSGAA

SEQ ID NO: 85091 - protein, 22 aa, Artificial Sequence
  Description of Artificial Sequence: Synthetic peptide
  Seed: GMDPRMCSLMQGSTLPRRSGAA
GMDPRMLSLMQSSTVPRRSGAA

SEQ ID NO: 85092 - protein, 22 aa, Artificial Sequence
  Description of Artificial Sequence: Synthetic peptide
  Seed: GMDPRMCSLMQGSTLPRRSGAA
GMDPRMLSLMQTSTAPRRSGAA

SEQ ID NO: 85093 - protein, 22 aa, Artificial Sequence
  Description of Artificial Sequence: Synthetic peptide
  Seed: GMDPRMCSLMQGSTLPRRSGAA
GMDPRMLSLMQTSTNPRRSGAA

SEQ ID NO: 85094 - protein, 22 aa, Artificial Sequence
  Description of Artificial Sequence: Synthetic peptide
  Seed: GMDPRMCSLMQGSTLPRRSGAA
GMDPRMLSLMQTSTSPRRSGAA

SEQ ID NO: 85095 - protein, 22 aa, Artificial Sequence
  Description of Artificial Sequence: Synthetic peptide
  Seed: GMDPRMCSLMQGSTLPRRSGAA
GMDPRMLSLMQTSTVPRRSGAA

SEQ ID NO: 85096 - protein, 22 aa, Artificial Sequence
  Description of Artificial Sequence: Synthetic peptide
  Seed: GMDPRMCSLMQGSTLPRRSGAA
GMDPRMLSLMQVSTAPRRSGAA

SEQ ID NO: 85097 - protein, 22 aa, Artificial Sequence
  Description of Artificial Sequence: Synthetic peptide
  Seed: GMDPRMCSLMQGSTLPRRSGAA
GMDPRMLSLMQVSTNPRRSGAA

SEQ ID NO: 85098 - protein, 22 aa, Artificial Sequence
  Description of Artificial Sequence: Synthetic peptide
  Seed: GMDPRMCSLMQGSTLPRRSGAA
GMDPRMLSLMQVSTSPRRSGAA

SEQ ID NO: 85099 - protein, 22 aa, Artificial Sequence
  Description of Artificial Sequence: Synthetic peptide
  Seed: GMDPRMCSLMQGSTLPRRSGAA
GMDPRMLSLQQASTLPRRSGAA

SEQ ID NO: 85100 - protein, 22 aa, Artificial Sequence
  Description of Artificial Sequence: Synthetic peptide
  Seed: GMDPRMCSLMQGSTLPRRSGAA
GMDPRMLSLQQASTVPRRSGAA

SEQ ID NO: 85101 - protein, 22 aa, Artificial Sequence
  Description of Artificial Sequence: Synthetic peptide
  Seed: GMDPRMCSLMQGSTLPRRSGAA
GMDPRMMSLLQASTAPRRSGAA

SEQ ID NO: 85102 - protein, 22 aa, Artificial Sequence
  Description of Artificial Sequence: Synthetic peptide
  Seed: GMDPRMCSLMQGSTLPRRSGAA
GMDPRMMSLLQASTIPRRSGAA

SEQ ID NO: 85103 - protein, 22 aa, Artificial Sequence
  Description of Artificial Sequence: Synthetic peptide
  Seed: GMDPRMCSLMQGSTLPRRSGAA
GMDPRMMSLLQASTLPRRSGAA

SEQ ID NO: 85104 - protein, 22 aa, Artificial Sequence
  Description of Artificial Sequence: Synthetic peptide
  Seed: GMDPRMCSLMQGSTLPRRSGAA
GMDPRMMSLLQASTMPRRSGAA

SEQ ID NO: 85105 - protein, 22 aa, Artificial Sequence
  Description of Artificial Sequence: Synthetic peptide
  Seed: GMDPRMCSLMQGSTLPRRSGAA
GMDPRMMSLLQASTNPRRSGAA

SEQ ID NO: 85106 - protein, 22 aa, Artificial Sequence
  Description of Artificial Sequence: Synthetic peptide
  Seed: GMDPRMCSLMQGSTLPRRSGAA
GMDPRMMSLLQASTSPRRSGAA

SEQ ID NO: 85107 - protein, 22 aa, Artificial Sequence
  Description of Artificial Sequence: Synthetic peptide
  Seed: GMDPRMCSLMQGSTLPRRSGAA
GMDPRMMSLLQASTTPRRSGAA

SEQ ID NO: 85108 - protein, 22 aa, Artificial Sequence
  Description of Artificial Sequence: Synthetic peptide
  Seed: GMDPRMCSLMQGSTLPRRSGAA
GMDPRMMSLLQASTVPRRSGAA

SEQ ID NO: 85109 - protein, 22 aa, Artificial Sequence
  Description of Artificial Sequence: Synthetic peptide
  Seed: GMDPRMCSLMQGSTLPRRSGAA
GMDPRMMSLLQGSTAPRRSGAA

SEQ ID NO: 85110 - protein, 22 aa, Artificial Sequence
  Description of Artificial Sequence: Synthetic peptide
  Seed: GMDPRMCSLMQGSTLPRRSGAA
GMDPRMMSLLQGSTIPRRSGAA

SEQ ID NO: 85111 - protein, 22 aa, Artificial Sequence
  Description of Artificial Sequence: Synthetic peptide
  Seed: GMDPRMCSLMQGSTLPRRSGAA
GMDPRMMSLLQGSTLPRRSGAA

SEQ ID NO: 85112 - protein, 22 aa, Artificial Sequence
  Description of Artificial Sequence: Synthetic peptide
  Seed: GMDPRMCSLMQGSTLPRRSGAA
GMDPRMMSLLQGSTVPRRSGAA

SEQ ID NO: 85113 - protein, 22 aa, Artificial Sequence
  Description of Artificial Sequence: Synthetic peptide
  Seed: GMDPRMCSLMQGSTLPRRSGAA
GMDPRMMSLLQPSTAPRRSGAA

SEQ ID NO: 85114 - protein, 22 aa, Artificial Sequence
  Description of Artificial Sequence: Synthetic peptide
  Seed: GMDPRMCSLMQGSTLPRRSGAA
GMDPRMMSLLQPSTIPRRSGAA

SEQ ID NO: 85115 - protein, 22 aa, Artificial Sequence
  Description of Artificial Sequence: Synthetic peptide
  Seed: GMDPRMCSLMQGSTLPRRSGAA
GMDPRMMSLLQPSTVPRRSGAA

SEQ ID NO: 85116 - protein, 22 aa, Artificial Sequence
  Description of Artificial Sequence: Synthetic peptide
  Seed: GMDPRMCSLMQGSTLPRRSGAA
GMDPRMMSLLQSSTAPRRSGAA

SEQ ID NO: 85117 - protein, 22 aa, Artificial Sequence
  Description of Artificial Sequence: Synthetic peptide
  Seed: GMDPRMCSLMQGSTLPRRSGAA
GMDPRMMSLLQSSTIPRRSGAA

SEQ ID NO: 85118 - protein, 22 aa, Artificial Sequence
  Description of Artificial Sequence: Synthetic peptide
  Seed: GMDPRMCSLMQGSTLPRRSGAA
GMDPRMMSLLQSSTLPRRSGAA

SEQ ID NO: 85119 - protein, 22 aa, Artificial Sequence
  Description of Artificial Sequence: Synthetic peptide
  Seed: GMDPRMCSLMQGSTLPRRSGAA
GMDPRMMSLLQSSTVPRRSGAA

SEQ ID NO: 85120 - protein, 22 aa, Artificial Sequence
  Description of Artificial Sequence: Synthetic peptide
  Seed: GMDPRMCSLMQGSTLPRRSGAA
GMDPRMMSLLQVSTAPRRSGAA

SEQ ID NO: 85121 - protein, 22 aa, Artificial Sequence
  Description of Artificial Sequence: Synthetic peptide
  Seed: GMDPRMCSLMQGSTLPRRSGAA
GMDPRMMSLMQASTAPRRSGAA

SEQ ID NO: 85122 - protein, 22 aa, Artificial Sequence
  Description of Artificial Sequence: Synthetic peptide
  Seed: GMDPRMCSLMQGSTLPRRSGAA
GMDPRMMSLMQASTIPRRSGAA

SEQ ID NO: 85123 - protein, 22 aa, Artificial Sequence
  Description of Artificial Sequence: Synthetic peptide
  Seed: GMDPRMCSLMQGSTLPRRSGAA
GMDPRMMSLMQASTLPRRSGAA

SEQ ID NO: 85124 - protein, 22 aa, Artificial Sequence
  Description of Artificial Sequence: Synthetic peptide
  Seed: GMDPRMCSLMQGSTLPRRSGAA
GMDPRMMSLMQASTMPRRSGAA

SEQ ID NO: 85125 - protein, 22 aa, Artificial Sequence
  Description of Artificial Sequence: Synthetic peptide
  Seed: GMDPRMCSLMQGSTLPRRSGAA
GMDPRMMSLMQASTNPRRSGAA

SEQ ID NO: 85126 - protein, 22 aa, Artificial Sequence
  Description of Artificial Sequence: Synthetic peptide
  Seed: GMDPRMCSLMQGSTLPRRSGAA
GMDPRMMSLMQASTSPRRSGAA

SEQ ID NO: 85127 - protein, 22 aa, Artificial Sequence
  Description of Artificial Sequence: Synthetic peptide
  Seed: GMDPRMCSLMQGSTLPRRSGAA
GMDPRMMSLMQASTTPRRSGAA

SEQ ID NO: 85128 - protein, 22 aa, Artificial Sequence
  Description of Artificial Sequence: Synthetic peptide
  Seed: GMDPRMCSLMQGSTLPRRSGAA
GMDPRMMSLMQASTVPRRSGAA

SEQ ID NO: 85129 - protein, 22 aa, Artificial Sequence
  Description of Artificial Sequence: Synthetic peptide
  Seed: GMDPRMCSLMQGSTLPRRSGAA
GMDPRMMSLMQGSTAPRRSGAA

SEQ ID NO: 85130 - protein, 22 aa, Artificial Sequence
  Description of Artificial Sequence: Synthetic peptide
  Seed: GMDPRMCSLMQGSTLPRRSGAA
GMDPRMMSLMQGSTIPRRSGAA

SEQ ID NO: 85131 - protein, 22 aa, Artificial Sequence
  Description of Artificial Sequence: Synthetic peptide
  Seed: GMDPRMCSLMQGSTLPRRSGAA
GMDPRMMSLMQGSTLPRRSGAA

SEQ ID NO: 85132 - protein, 22 aa, Artificial Sequence
  Description of Artificial Sequence: Synthetic peptide
  Seed: GMDPRMCSLMQGSTLPRRSGAA
GMDPRMMSLMQGSTVPRRSGAA

SEQ ID NO: 85133 - protein, 22 aa, Artificial Sequence
  Description of Artificial Sequence: Synthetic peptide
  Seed: GMDPRMCSLMQGSTLPRRSGAA
GMDPRMMSLMQPSTAPRRSGAA

SEQ ID NO: 85134 - protein, 22 aa, Artificial Sequence
  Description of Artificial Sequence: Synthetic peptide
  Seed: GMDPRMCSLMQGSTLPRRSGAA
GMDPRMMSLMQPSTIPRRSGAA

SEQ ID NO: 85135 - protein, 22 aa, Artificial Sequence
  Description of Artificial Sequence: Synthetic peptide
  Seed: GMDPRMCSLMQGSTLPRRSGAA
GMDPRMMSLMQPSTVPRRSGAA

SEQ ID NO: 85136 - protein, 22 aa, Artificial Sequence
  Description of Artificial Sequence: Synthetic peptide
  Seed: GMDPRMCSLMQGSTLPRRSGAA
GMDPRMMSLMQSSTAPRRSGAA

SEQ ID NO: 85137 - protein, 22 aa, Artificial Sequence
  Description of Artificial Sequence: Synthetic peptide
  Seed: GMDPRMCSLMQGSTLPRRSGAA
GMDPRMMSLMQSSTIPRRSGAA

SEQ ID NO: 85138 - protein, 22 aa, Artificial Sequence
  Description of Artificial Sequence: Synthetic peptide
  Seed: GMDPRMCSLMQGSTLPRRSGAA
GMDPRMMSLMQSSTLPRRSGAA

SEQ ID NO: 85139 - protein, 22 aa, Artificial Sequence
  Description of Artificial Sequence: Synthetic peptide
  Seed: GMDPRMCSLMQGSTLPRRSGAA
GMDPRMMSLMQSSTVPRRSGAA

SEQ ID NO: 85140 - protein, 22 aa, Artificial Sequence
  Description of Artificial Sequence: Synthetic peptide
  Seed: GMDPRMCSLMQGSTLPRRSGAA
GMDPRMMSLMQVSTAPRRSGAA

SEQ ID NO: 85141 - protein, 22 aa, Artificial Sequence
  Description of Artificial Sequence: Synthetic peptide
  Seed: GMDPRMCSLMQGSTLPRRSGAA
GMDPRMVSLLQASTAPRRSGAA

SEQ ID NO: 85142 - protein, 22 aa, Artificial Sequence
  Description of Artificial Sequence: Synthetic peptide
  Seed: GMDPRMCSLMQGSTLPRRSGAA
GMDPRMVSLLQASTIPRRSGAA

SEQ ID NO: 85143 - protein, 22 aa, Artificial Sequence
  Description of Artificial Sequence: Synthetic peptide
  Seed: GMDPRMCSLMQGSTLPRRSGAA
GMDPRMVSLLQASTLPRRSGAA

SEQ ID NO: 85144 - protein, 22 aa, Artificial Sequence
  Description of Artificial Sequence: Synthetic peptide
  Seed: GMDPRMCSLMQGSTLPRRSGAA
GMDPRMVSLLQASTMPRRSGAA

SEQ ID NO: 85145 - protein, 22 aa, Artificial Sequence
  Description of Artificial Sequence: Synthetic peptide
  Seed: GMDPRMCSLMQGSTLPRRSGAA
GMDPRMVSLLQASTTPRRSGAA

SEQ ID NO: 85146 - protein, 22 aa, Artificial Sequence
  Description of Artificial Sequence: Synthetic peptide
  Seed: GMDPRMCSLMQGSTLPRRSGAA
GMDPRMVSLLQASTVPRRSGAA

SEQ ID NO: 85147 - protein, 22 aa, Artificial Sequence
  Description of Artificial Sequence: Synthetic peptide
  Seed: GMDPRMCSLMQGSTLPRRSGAA
GMDPRMVSLLQGSTAPRRSGAA

SEQ ID NO: 85148 - protein, 22 aa, Artificial Sequence
  Description of Artificial Sequence: Synthetic peptide
  Seed: GMDPRMCSLMQGSTLPRRSGAA
GMDPRMVSLLQGSTIPRRSGAA

SEQ ID NO: 85149 - protein, 22 aa, Artificial Sequence
  Description of Artificial Sequence: Synthetic peptide
  Seed: GMDPRMCSLMQGSTLPRRSGAA
GMDPRMVSLLQGSTLPRRSGAA

SEQ ID NO: 85150 - protein, 22 aa, Artificial Sequence
  Description of Artificial Sequence: Synthetic peptide
  Seed: GMDPRMCSLMQGSTLPRRSGAA
GMDPRMVSLLQGSTVPRRSGAA

SEQ ID NO: 85151 - protein, 22 aa, Artificial Sequence
  Description of Artificial Sequence: Synthetic peptide
  Seed: GMDPRMCSLMQGSTLPRRSGAA
GMDPRMVSLLQPSTIPRRSGAA

SEQ ID NO: 85152 - protein, 22 aa, Artificial Sequence
  Description of Artificial Sequence: Synthetic peptide
  Seed: GMDPRMCSLMQGSTLPRRSGAA
GMDPRMVSLLQPSTLPRRSGAA

SEQ ID NO: 85153 - protein, 22 aa, Artificial Sequence
  Description of Artificial Sequence: Synthetic peptide
  Seed: GMDPRMCSLMQGSTLPRRSGAA
GMDPRMVSLLQPSTVPRRSGAA

SEQ ID NO: 85154 - protein, 22 aa, Artificial Sequence
  Description of Artificial Sequence: Synthetic peptide
  Seed: GMDPRMCSLMQGSTLPRRSGAA
GMDPRMVSLLQSSTAPRRSGAA

SEQ ID NO: 85155 - protein, 22 aa, Artificial Sequence
  Description of Artificial Sequence: Synthetic peptide
  Seed: GMDPRMCSLMQGSTLPRRSGAA
GMDPRMVSLLQSSTIPRRSGAA

SEQ ID NO: 85156 - protein, 22 aa, Artificial Sequence
  Description of Artificial Sequence: Synthetic peptide
  Seed: GMDPRMCSLMQGSTLPRRSGAA
GMDPRMVSLLQSSTLPRRSGAA

SEQ ID NO: 85157 - protein, 22 aa, Artificial Sequence
  Description of Artificial Sequence: Synthetic peptide
  Seed: GMDPRMCSLMQGSTLPRRSGAA
GMDPRMVSLLQSSTVPRRSGAA

SEQ ID NO: 85158 - protein, 22 aa, Artificial Sequence
  Description of Artificial Sequence: Synthetic peptide
  Seed: GMDPRMCSLMQGSTLPRRSGAA
GMDPRMVSLMQASTAPRRSGAA

SEQ ID NO: 85159 - protein, 22 aa, Artificial Sequence
  Description of Artificial Sequence: Synthetic peptide
  Seed: GMDPRMCSLMQGSTLPRRSGAA
GMDPRMVSLMQASTIPRRSGAA

SEQ ID NO: 85160 - protein, 22 aa, Artificial Sequence
  Description of Artificial Sequence: Synthetic peptide
  Seed: GMDPRMCSLMQGSTLPRRSGAA
GMDPRMVSLMQASTLPRRSGAA

SEQ ID NO: 85161 - protein, 22 aa, Artificial Sequence
  Description of Artificial Sequence: Synthetic peptide
  Seed: GMDPRMCSLMQGSTLPRRSGAA
GMDPRMVSLMQASTMPRRSGAA

SEQ ID NO: 85162 - protein, 22 aa, Artificial Sequence
  Description of Artificial Sequence: Synthetic peptide
  Seed: GMDPRMCSLMQGSTLPRRSGAA
GMDPRMVSLMQASTVPRRSGAA

SEQ ID NO: 85163 - protein, 22 aa, Artificial Sequence
  Description of Artificial Sequence: Synthetic peptide
  Seed: GMDPRMCSLMQGSTLPRRSGAA
GMDPRMVSLMQGSTAPRRSGAA

SEQ ID NO: 85164 - protein, 22 aa, Artificial Sequence
  Description of Artificial Sequence: Synthetic peptide
  Seed: GMDPRMCSLMQGSTLPRRSGAA
GMDPRMVSLMQGSTIPRRSGAA

SEQ ID NO: 85165 - protein, 22 aa, Artificial Sequence
  Description of Artificial Sequence: Synthetic peptide
  Seed: GMDPRMCSLMQGSTLPRRSGAA
GMDPRMVSLMQGSTLPRRSGAA

SEQ ID NO: 85166 - protein, 22 aa, Artificial Sequence
  Description of Artificial Sequence: Synthetic peptide
  Seed: GMDPRMCSLMQGSTLPRRSGAA
GMDPRMVSLMQGSTVPRRSGAA

SEQ ID NO: 85167 - protein, 22 aa, Artificial Sequence
  Description of Artificial Sequence: Synthetic peptide
  Seed: GMDPRMCSLMQGSTLPRRSGAA
GMDPRMVSLMQPSTIPRRSGAA

SEQ ID NO: 85168 - protein, 22 aa, Artificial Sequence
  Description of Artificial Sequence: Synthetic peptide
  Seed: GMDPRMCSLMQGSTLPRRSGAA
GMDPRMVSLMQPSTLPRRSGAA

SEQ ID NO: 85169 - protein, 22 aa, Artificial Sequence
  Description of Artificial Sequence: Synthetic peptide
  Seed: GMDPRMCSLMQGSTLPRRSGAA
GMDPRMVSLMQPSTVPRRSGAA

SEQ ID NO: 85170 - protein, 22 aa, Artificial Sequence
  Description of Artificial Sequence: Synthetic peptide
  Seed: GMDPRMCSLMQGSTLPRRSGAA
GMDPRMVSLMQSSTAPRRSGAA

SEQ ID NO: 85171 - protein, 22 aa, Artificial Sequence
  Description of Artificial Sequence: Synthetic peptide
  Seed: GMDPRMCSLMQGSTLPRRSGAA
GMDPRMVSLMQSSTIPRRSGAA

SEQ ID NO: 85172 - protein, 22 aa, Artificial Sequence
  Description of Artificial Sequence: Synthetic peptide
  Seed: GMDPRMCSLMQGSTLPRRSGAA
GMDPRMVSLMQSSTLPRRSGAA

SEQ ID NO: 85173 - protein, 22 aa, Artificial Sequence
  Description of Artificial Sequence: Synthetic peptide
  Seed: GMDPRMCSLMQGSTLPRRSGAA
GMDPRMVSLMQSSTVPRRSGAA

SEQ ID NO: 85174 - protein, 22 aa, Artificial Sequence
  Description of Artificial Sequence: Synthetic peptide
  Seed: GMDPRMCSLMQGSTLPRRSGAA
GMDPRMWSLAQASTAPRRSGAA

SEQ ID NO: 85175 - protein, 22 aa, Artificial Sequence
  Description of Artificial Sequence: Synthetic peptide
  Seed: GMDPRMCSLMQGSTLPRRSGAA
GMDPRMWSLAQASTIPRRSGAA

SEQ ID NO: 85176 - protein, 22 aa, Artificial Sequence
  Description of Artificial Sequence: Synthetic peptide
  Seed: GMDPRMCSLMQGSTLPRRSGAA
GMDPRMWSLAQASTLPRRSGAA

SEQ ID NO: 85177 - protein, 22 aa, Artificial Sequence
  Description of Artificial Sequence: Synthetic peptide
  Seed: GMDPRMCSLMQGSTLPRRSGAA
GMDPRMWSLAQASTMPRRSGAA

SEQ ID NO: 85178 - protein, 22 aa, Artificial Sequence
  Description of Artificial Sequence: Synthetic peptide
  Seed: GMDPRMCSLMQGSTLPRRSGAA
GMDPRMWSLAQASTNPRRSGAA

SEQ ID NO: 85179 - protein, 22 aa, Artificial Sequence
  Description of Artificial Sequence: Synthetic peptide
  Seed: GMDPRMCSLMQGSTLPRRSGAA
GMDPRMWSLAQASTSPRRSGAA

SEQ ID NO: 85180 - protein, 22 aa, Artificial Sequence
  Description of Artificial Sequence: Synthetic peptide
  Seed: GMDPRMCSLMQGSTLPRRSGAA
GMDPRMWSLAQASTVPRRSGAA

SEQ ID NO: 85181 - protein, 22 aa, Artificial Sequence
  Description of Artificial Sequence: Synthetic peptide
  Seed: GMDPRMCSLMQGSTLPRRSGAA
GMDPRMWSLAQGSTAPRRSGAA

SEQ ID NO: 85182 - protein, 22 aa, Artificial Sequence
  Description of Artificial Sequence: Synthetic peptide
  Seed: GMDPRMCSLMQGSTLPRRSGAA
GMDPRMWSLAQGSTIPRRSGAA

SEQ ID NO: 85183 - protein, 22 aa, Artificial Sequence
  Description of Artificial Sequence: Synthetic peptide
  Seed: GMDPRMCSLMQGSTLPRRSGAA
GMDPRMWSLAQGSTLPRRSGAA

SEQ ID NO: 85184 - protein, 22 aa, Artificial Sequence
  Description of Artificial Sequence: Synthetic peptide
  Seed: GMDPRMCSLMQGSTLPRRSGAA
GMDPRMWSLAQGSTVPRRSGAA

SEQ ID NO: 85185 - protein, 22 aa, Artificial Sequence
  Description of Artificial Sequence: Synthetic peptide
  Seed: GMDPRMCSLMQGSTLPRRSGAA
GMDPRMWSLAQSSTIPRRSGAA

SEQ ID NO: 85186 - protein, 22 aa, Artificial Sequence
  Description of Artificial Sequence: Synthetic peptide
  Seed: GMDPRMCSLMQGSTLPRRSGAA
GMDPRMWSLAQSSTLPRRSGAA

SEQ ID NO: 85187 - protein, 22 aa, Artificial Sequence
  Description of Artificial Sequence: Synthetic peptide
  Seed: GMDPRMCSLMQGSTLPRRSGAA
GMDPRMWSLAQSSTVPRRSGAA

SEQ ID NO: 85188 - protein, 22 aa, Artificial Sequence
  Description of Artificial Sequence: Synthetic peptide
  Seed: GMDPRMCSLMQGSTLPRRSGAA
GMDPRMWSLIQASTAPRRSGAA

SEQ ID NO: 85189 - protein, 22 aa, Artificial Sequence
  Description of Artificial Sequence: Synthetic peptide
  Seed: GMDPRMCSLMQGSTLPRRSGAA
GMDPRMWSLIQASTGPRRSGAA

SEQ ID NO: 85190 - protein, 22 aa, Artificial Sequence
  Description of Artificial Sequence: Synthetic peptide
  Seed: GMDPRMCSLMQGSTLPRRSGAA
GMDPRMWSLIQASTIPRRSGAA

SEQ ID NO: 85191 - protein, 22 aa, Artificial Sequence
  Description of Artificial Sequence: Synthetic peptide
  Seed: GMDPRMCSLMQGSTLPRRSGAA
GMDPRMWSLIQASTLPRRSGAA

SEQ ID NO: 85192 - protein, 22 aa, Artificial Sequence
  Description of Artificial Sequence: Synthetic peptide
  Seed: GMDPRMCSLMQGSTLPRRSGAA
GMDPRMWSLIQASTMPRRSGAA

SEQ ID NO: 85193 - protein, 22 aa, Artificial Sequence
  Description of Artificial Sequence: Synthetic peptide
  Seed: GMDPRMCSLMQGSTLPRRSGAA
GMDPRMWSLIQASTNPRRSGAA

SEQ ID NO: 85194 - protein, 22 aa, Artificial Sequence
  Description of Artificial Sequence: Synthetic peptide
  Seed: GMDPRMCSLMQGSTLPRRSGAA
GMDPRMWSLIQASTSPRRSGAA

SEQ ID NO: 85195 - protein, 22 aa, Artificial Sequence
  Description of Artificial Sequence: Synthetic peptide
  Seed: GMDPRMCSLMQGSTLPRRSGAA
GMDPRMWSLIQASTTPRRSGAA

SEQ ID NO: 85196 - protein, 22 aa, Artificial Sequence
  Description of Artificial Sequence: Synthetic peptide
  Seed: GMDPRMCSLMQGSTLPRRSGAA
GMDPRMWSLIQASTVPRRSGAA

SEQ ID NO: 85197 - protein, 22 aa, Artificial Sequence
  Description of Artificial Sequence: Synthetic peptide
  Seed: GMDPRMCSLMQGSTLPRRSGAA
GMDPRMWSLIQGSTAPRRSGAA

SEQ ID NO: 85198 - protein, 22 aa, Artificial Sequence
  Description of Artificial Sequence: Synthetic peptide
  Seed: GMDPRMCSLMQGSTLPRRSGAA
GMDPRMWSLIQGSTIPRRSGAA

SEQ ID NO: 85199 - protein, 22 aa, Artificial Sequence
  Description of Artificial Sequence: Synthetic peptide
  Seed: GMDPRMCSLMQGSTLPRRSGAA
GMDPRMWSLIQGSTLPRRSGAA

SEQ ID NO: 85200 - protein, 22 aa, Artificial Sequence
  Description of Artificial Sequence: Synthetic peptide
  Seed: GMDPRMCSLMQGSTLPRRSGAA
GMDPRMWSLIQGSTTPRRSGAA

SEQ ID NO: 85201 - protein, 22 aa, Artificial Sequence
  Description of Artificial Sequence: Synthetic peptide
  Seed: GMDPRMCSLMQGSTLPRRSGAA
GMDPRMWSLIQGSTVPRRSGAA

SEQ ID NO: 85202 - protein, 22 aa, Artificial Sequence
  Description of Artificial Sequence: Synthetic peptide
  Seed: GMDPRMCSLMQGSTLPRRSGAA
GMDPRMWSLIQISTAPRRSGAA

SEQ ID NO: 85203 - protein, 22 aa, Artificial Sequence
  Description of Artificial Sequence: Synthetic peptide
  Seed: GMDPRMCSLMQGSTLPRRSGAA
GMDPRMWSLIQPSTAPRRSGAA

SEQ ID NO: 85204 - protein, 22 aa, Artificial Sequence
  Description of Artificial Sequence: Synthetic peptide
  Seed: GMDPRMCSLMQGSTLPRRSGAA
GMDPRMWSLIQPSTIPRRSGAA

SEQ ID NO: 85205 - protein, 22 aa, Artificial Sequence
  Description of Artificial Sequence: Synthetic peptide
  Seed: GMDPRMCSLMQGSTLPRRSGAA
GMDPRMWSLIQPSTLPRRSGAA

SEQ ID NO: 85206 - protein, 22 aa, Artificial Sequence
  Description of Artificial Sequence: Synthetic peptide
  Seed: GMDPRMCSLMQGSTLPRRSGAA
GMDPRMWSLIQPSTNPRRSGAA

SEQ ID NO: 85207 - protein, 22 aa, Artificial Sequence
  Description of Artificial Sequence: Synthetic peptide
  Seed: GMDPRMCSLMQGSTLPRRSGAA
GMDPRMWSLIQPSTSPRRSGAA

SEQ ID NO: 85208 - protein, 22 aa, Artificial Sequence
  Description of Artificial Sequence: Synthetic peptide
  Seed: GMDPRMCSLMQGSTLPRRSGAA
GMDPRMWSLIQPSTVPRRSGAA

SEQ ID NO: 85209 - protein, 22 aa, Artificial Sequence
  Description of Artificial Sequence: Synthetic peptide
  Seed: GMDPRMCSLMQGSTLPRRSGAA
GMDPRMWSLIQSSTAPRRSGAA

SEQ ID NO: 85210 - protein, 22 aa, Artificial Sequence
  Description of Artificial Sequence: Synthetic peptide
  Seed: GMDPRMCSLMQGSTLPRRSGAA
GMDPRMWSLIQSSTIPRRSGAA

SEQ ID NO: 85211 - protein, 22 aa, Artificial Sequence
  Description of Artificial Sequence: Synthetic peptide
  Seed: GMDPRMCSLMQGSTLPRRSGAA
GMDPRMWSLIQSSTLPRRSGAA

SEQ ID NO: 85212 - protein, 22 aa, Artificial Sequence
  Description of Artificial Sequence: Synthetic peptide
  Seed: GMDPRMCSLMQGSTLPRRSGAA
GMDPRMWSLIQSSTNPRRSGAA

SEQ ID NO: 85213 - protein, 22 aa, Artificial Sequence
  Description of Artificial Sequence: Synthetic peptide
  Seed: GMDPRMCSLMQGSTLPRRSGAA
GMDPRMWSLIQSSTSPRRSGAA

SEQ ID NO: 85214 - protein, 22 aa, Artificial Sequence
  Description of Artificial Sequence: Synthetic peptide
  Seed: GMDPRMCSLMQGSTLPRRSGAA
GMDPRMWSLIQSSTVPRRSGAA

SEQ ID NO: 85215 - protein, 22 aa, Artificial Sequence
  Description of Artificial Sequence: Synthetic peptide
  Seed: GMDPRMCSLMQGSTLPRRSGAA
GMDPRMWSLIQTSTAPRRSGAA

SEQ ID NO: 85216 - protein, 22 aa, Artificial Sequence
  Description of Artificial Sequence: Synthetic peptide
  Seed: GMDPRMCSLMQGSTLPRRSGAA
GMDPRMWSLIQTSTNPRRSGAA

SEQ ID NO: 85217 - protein, 22 aa, Artificial Sequence
  Description of Artificial Sequence: Synthetic peptide
  Seed: GMDPRMCSLMQGSTLPRRSGAA
GMDPRMWSLIQTSTSPRRSGAA

SEQ ID NO: 85218 - protein, 22 aa, Artificial Sequence
  Description of Artificial Sequence: Synthetic peptide
  Seed: GMDPRMCSLMQGSTLPRRSGAA
GMDPRMWSLIQVSTAPRRSGAA

SEQ ID NO: 85219 - protein, 22 aa, Artificial Sequence
  Description of Artificial Sequence: Synthetic peptide
  Seed: GMDPRMCSLMQGSTLPRRSGAA
GMDPRMWSLIQVSTNPRRSGAA

SEQ ID NO: 85220 - protein, 22 aa, Artificial Sequence
  Description of Artificial Sequence: Synthetic peptide
  Seed: GMDPRMCSLMQGSTLPRRSGAA
GMDPRMWSLIQVSTSPRRSGAA

SEQ ID NO: 85221 - protein, 22 aa, Artificial Sequence
  Description of Artificial Sequence: Synthetic peptide
  Seed: GMDPRMCSLMQGSTLPRRSGAA
GMDPRMWSLLQASTAPRRSGAA

SEQ ID NO: 85222 - protein, 22 aa, Artificial Sequence
  Description of Artificial Sequence: Synthetic peptide
  Seed: GMDPRMCSLMQGSTLPRRSGAA
GMDPRMWSLLQASTGPRRSGAA

SEQ ID NO: 85223 - protein, 22 aa, Artificial Sequence
  Description of Artificial Sequence: Synthetic peptide
  Seed: GMDPRMCSLMQGSTLPRRSGAA
GMDPRMWSLLQASTIPRRSGAA

SEQ ID NO: 85224 - protein, 22 aa, Artificial Sequence
  Description of Artificial Sequence: Synthetic peptide
  Seed: GMDPRMCSLMQGSTLPRRSGAA
GMDPRMWSLLQASTLPRRSGAA

SEQ ID NO: 85225 - protein, 22 aa, Artificial Sequence
  Description of Artificial Sequence: Synthetic peptide
  Seed: GMDPRMCSLMQGSTLPRRSGAA
GMDPRMWSLLQASTMPRRSGAA

SEQ ID NO: 85226 - protein, 22 aa, Artificial Sequence
  Description of Artificial Sequence: Synthetic peptide
  Seed: GMDPRMCSLMQGSTLPRRSGAA
GMDPRMWSLLQASTNPRRSGAA

SEQ ID NO: 85227 - protein, 22 aa, Artificial Sequence
  Description of Artificial Sequence: Synthetic peptide
  Seed: GMDPRMCSLMQGSTLPRRSGAA
GMDPRMWSLLQASTSPRRSGAA

SEQ ID NO: 85228 - protein, 22 aa, Artificial Sequence
  Description of Artificial Sequence: Synthetic peptide
  Seed: GMDPRMCSLMQGSTLPRRSGAA
GMDPRMWSLLQASTTPRRSGAA

SEQ ID NO: 85229 - protein, 22 aa, Artificial Sequence
  Description of Artificial Sequence: Synthetic peptide
  Seed: GMDPRMCSLMQGSTLPRRSGAA
GMDPRMWSLLQASTVPRRSGAA

SEQ ID NO: 85230 - protein, 22 aa, Artificial Sequence
  Description of Artificial Sequence: Synthetic peptide
  Seed: GMDPRMCSLMQGSTLPRRSGAA
GMDPRMWSLLQGSTAPRRSGAA

SEQ ID NO: 85231 - protein, 22 aa, Artificial Sequence
  Description of Artificial Sequence: Synthetic peptide
  Seed: GMDPRMCSLMQGSTLPRRSGAA
GMDPRMWSLLQGSTGPRRSGAA

SEQ ID NO: 85232 - protein, 22 aa, Artificial Sequence
  Description of Artificial Sequence: Synthetic peptide
  Seed: GMDPRMCSLMQGSTLPRRSGAA
GMDPRMWSLLQGSTIPRRSGAA

SEQ ID NO: 85233 - protein, 22 aa, Artificial Sequence
  Description of Artificial Sequence: Synthetic peptide
  Seed: GMDPRMCSLMQGSTLPRRSGAA
GMDPRMWSLLQGSTLPRRSGAA

SEQ ID NO: 85234 - protein, 22 aa, Artificial Sequence
  Description of Artificial Sequence: Synthetic peptide
  Seed: GMDPRMCSLMQGSTLPRRSGAA
GMDPRMWSLLQGSTMPRRSGAA

SEQ ID NO: 85235 - protein, 22 aa, Artificial Sequence
  Description of Artificial Sequence: Synthetic peptide
  Seed: GMDPRMCSLMQGSTLPRRSGAA
GMDPRMWSLLQGSTSPRRSGAA

SEQ ID NO: 85236 - protein, 22 aa, Artificial Sequence
  Description of Artificial Sequence: Synthetic peptide
  Seed: GMDPRMCSLMQGSTLPRRSGAA
GMDPRMWSLLQGSTTPRRSGAA

SEQ ID NO: 85237 - protein, 22 aa, Artificial Sequence
  Description of Artificial Sequence: Synthetic peptide
  Seed: GMDPRMCSLMQGSTLPRRSGAA
GMDPRMWSLLQGSTVPRRSGAA

SEQ ID NO: 85238 - protein, 22 aa, Artificial Sequence
  Description of Artificial Sequence: Synthetic peptide
  Seed: GMDPRMCSLMQGSTLPRRSGAA
GMDPRMWSLLQISTAPRRSGAA

SEQ ID NO: 85239 - protein, 22 aa, Artificial Sequence
  Description of Artificial Sequence: Synthetic peptide
  Seed: GMDPRMCSLMQGSTLPRRSGAA
GMDPRMWSLLQISTNPRRSGAA

SEQ ID NO: 85240 - protein, 22 aa, Artificial Sequence
  Description of Artificial Sequence: Synthetic peptide
  Seed: GMDPRMCSLMQGSTLPRRSGAA
GMDPRMWSLLQISTSPRRSGAA

SEQ ID NO: 85241 - protein, 22 aa, Artificial Sequence
  Description of Artificial Sequence: Synthetic peptide
  Seed: GMDPRMCSLMQGSTLPRRSGAA
GMDPRMWSLLQNSTAPRRSGAA

SEQ ID NO: 85242 - protein, 22 aa, Artificial Sequence
  Description of Artificial Sequence: Synthetic peptide
  Seed: GMDPRMCSLMQGSTLPRRSGAA
GMDPRMWSLLQNSTIPRRSGAA

SEQ ID NO: 85243 - protein, 22 aa, Artificial Sequence
  Description of Artificial Sequence: Synthetic peptide
  Seed: GMDPRMCSLMQGSTLPRRSGAA
GMDPRMWSLLQNSTLPRRSGAA

SEQ ID NO: 85244 - protein, 22 aa, Artificial Sequence
  Description of Artificial Sequence: Synthetic peptide
  Seed: GMDPRMCSLMQGSTLPRRSGAA
GMDPRMWSLLQNSTVPRRSGAA

SEQ ID NO: 85245 - protein, 22 aa, Artificial Sequence
  Description of Artificial Sequence: Synthetic peptide
  Seed: GMDPRMCSLMQGSTLPRRSGAA
GMDPRMWSLLQPSTAPRRSGAA

SEQ ID NO: 85246 - protein, 22 aa, Artificial Sequence
  Description of Artificial Sequence: Synthetic peptide
  Seed: GMDPRMCSLMQGSTLPRRSGAA
GMDPRMWSLLQPSTIPRRSGAA

SEQ ID NO: 85247 - protein, 22 aa, Artificial Sequence
  Description of Artificial Sequence: Synthetic peptide
  Seed: GMDPRMCSLMQGSTLPRRSGAA
GMDPRMWSLLQPSTLPRRSGAA

SEQ ID NO: 85248 - protein, 22 aa, Artificial Sequence
  Description of Artificial Sequence: Synthetic peptide
  Seed: GMDPRMCSLMQGSTLPRRSGAA
GMDPRMWSLLQPSTMPRRSGAA

SEQ ID NO: 85249 - protein, 22 aa, Artificial Sequence
  Description of Artificial Sequence: Synthetic peptide
  Seed: GMDPRMCSLMQGSTLPRRSGAA
GMDPRMWSLLQPSTNPRRSGAA

SEQ ID NO: 85250 - protein, 22 aa, Artificial Sequence
  Description of Artificial Sequence: Synthetic peptide
  Seed: GMDPRMCSLMQGSTLPRRSGAA
GMDPRMWSLLQPSTSPRRSGAA

SEQ ID NO: 85251 - protein, 22 aa, Artificial Sequence
  Description of Artificial Sequence: Synthetic peptide
  Seed: GMDPRMCSLMQGSTLPRRSGAA
GMDPRMWSLLQPSTTPRRSGAA

SEQ ID NO: 85252 - protein, 22 aa, Artificial Sequence
  Description of Artificial Sequence: Synthetic peptide
  Seed: GMDPRMCSLMQGSTLPRRSGAA
GMDPRMWSLLQPSTVPRRSGAA

SEQ ID NO: 85253 - protein, 22 aa, Artificial Sequence
  Description of Artificial Sequence: Synthetic peptide
  Seed: GMDPRMCSLMQGSTLPRRSGAA
GMDPRMWSLLQSSTAPRRSGAA

SEQ ID NO: 85254 - protein, 22 aa, Artificial Sequence
  Description of Artificial Sequence: Synthetic peptide
  Seed: GMDPRMCSLMQGSTLPRRSGAA
GMDPRMWSLLQSSTIPRRSGAA

SEQ ID NO: 85255 - protein, 22 aa, Artificial Sequence
  Description of Artificial Sequence: Synthetic peptide
  Seed: GMDPRMCSLMQGSTLPRRSGAA
GMDPRMWSLLQSSTLPRRSGAA

SEQ ID NO: 85256 - protein, 22 aa, Artificial Sequence
  Description of Artificial Sequence: Synthetic peptide
  Seed: GMDPRMCSLMQGSTLPRRSGAA
GMDPRMWSLLQSSTMPRRSGAA

SEQ ID NO: 85257 - protein, 22 aa, Artificial Sequence
  Description of Artificial Sequence: Synthetic peptide
  Seed: GMDPRMCSLMQGSTLPRRSGAA
GMDPRMWSLLQSSTNPRRSGAA

SEQ ID NO: 85258 - protein, 22 aa, Artificial Sequence
  Description of Artificial Sequence: Synthetic peptide
  Seed: GMDPRMCSLMQGSTLPRRSGAA
GMDPRMWSLLQSSTSPRRSGAA

SEQ ID NO: 85259 - protein, 22 aa, Artificial Sequence
  Description of Artificial Sequence: Synthetic peptide
  Seed: GMDPRMCSLMQGSTLPRRSGAA
GMDPRMWSLLQSSTTPRRSGAA

SEQ ID NO: 85260 - protein, 22 aa, Artificial Sequence
  Description of Artificial Sequence: Synthetic peptide
  Seed: GMDPRMCSLMQGSTLPRRSGAA
GMDPRMWSLLQSSTVPRRSGAA

SEQ ID NO: 85261 - protein, 22 aa, Artificial Sequence
  Description of Artificial Sequence: Synthetic peptide
  Seed: GMDPRMCSLMQGSTLPRRSGAA
GMDPRMWSLLQTSTAPRRSGAA

SEQ ID NO: 85262 - protein, 22 aa, Artificial Sequence
  Description of Artificial Sequence: Synthetic peptide
  Seed: GMDPRMCSLMQGSTLPRRSGAA
GMDPRMWSLLQTSTIPRRSGAA

SEQ ID NO: 85263 - protein, 22 aa, Artificial Sequence
  Description of Artificial Sequence: Synthetic peptide
  Seed: GMDPRMCSLMQGSTLPRRSGAA
GMDPRMWSLLQTSTLPRRSGAA

SEQ ID NO: 85264 - protein, 22 aa, Artificial Sequence
  Description of Artificial Sequence: Synthetic peptide
  Seed: GMDPRMCSLMQGSTLPRRSGAA
GMDPRMWSLLQTSTNPRRSGAA

SEQ ID NO: 85265 - protein, 22 aa, Artificial Sequence
  Description of Artificial Sequence: Synthetic peptide
  Seed: GMDPRMCSLMQGSTLPRRSGAA
GMDPRMWSLLQTSTSPRRSGAA

SEQ ID NO: 85266 - protein, 22 aa, Artificial Sequence
  Description of Artificial Sequence: Synthetic peptide
  Seed: GMDPRMCSLMQGSTLPRRSGAA
GMDPRMWSLLQTSTTPRRSGAA

SEQ ID NO: 85267 - protein, 22 aa, Artificial Sequence
  Description of Artificial Sequence: Synthetic peptide
  Seed: GMDPRMCSLMQGSTLPRRSGAA
GMDPRMWSLLQTSTVPRRSGAA

SEQ ID NO: 85268 - protein, 22 aa, Artificial Sequence
  Description of Artificial Sequence: Synthetic peptide
  Seed: GMDPRMCSLMQGSTLPRRSGAA
GMDPRMWSLLQVSTAPRRSGAA

SEQ ID NO: 85269 - protein, 22 aa, Artificial Sequence
  Description of Artificial Sequence: Synthetic peptide
  Seed: GMDPRMCSLMQGSTLPRRSGAA
GMDPRMWSLLQVSTNPRRSGAA

SEQ ID NO: 85270 - protein, 22 aa, Artificial Sequence
  Description of Artificial Sequence: Synthetic peptide
  Seed: GMDPRMCSLMQGSTLPRRSGAA
GMDPRMWSLLQVSTSPRRSGAA

SEQ ID NO: 85271 - protein, 22 aa, Artificial Sequence
  Description of Artificial Sequence: Synthetic peptide
  Seed: GMDPRMCSLMQGSTLPRRSGAA
GMDPRMWSLLQVSTTPRRSGAA

SEQ ID NO: 85272 - protein, 22 aa, Artificial Sequence
  Description of Artificial Sequence: Synthetic peptide
  Seed: GMDPRMCSLMQGSTLPRRSGAA
GMDPRMWSLMQASTAPRRSGAA

SEQ ID NO: 85273 - protein, 22 aa, Artificial Sequence
  Description of Artificial Sequence: Synthetic peptide
  Seed: GMDPRMCSLMQGSTLPRRSGAA
GMDPRMWSLMQASTGPRRSGAA

SEQ ID NO: 85274 - protein, 22 aa, Artificial Sequence
  Description of Artificial Sequence: Synthetic peptide
  Seed: GMDPRMCSLMQGSTLPRRSGAA
GMDPRMWSLMQASTHPRRSGAA

SEQ ID NO: 85275 - protein, 22 aa, Artificial Sequence
  Description of Artificial Sequence: Synthetic peptide
  Seed: GMDPRMCSLMQGSTLPRRSGAA
GMDPRMWSLMQASTIPRRSGAA

SEQ ID NO: 85276 - protein, 22 aa, Artificial Sequence
  Description of Artificial Sequence: Synthetic peptide
  Seed: GMDPRMCSLMQGSTLPRRSGAA
GMDPRMWSLMQASTLPRRSGAA

SEQ ID NO: 85277 - protein, 22 aa, Artificial Sequence
  Description of Artificial Sequence: Synthetic peptide
  Seed: GMDPRMCSLMQGSTLPRRSGAA
GMDPRMWSLMQASTMPRRSGAA

SEQ ID NO: 85278 - protein, 22 aa, Artificial Sequence
  Description of Artificial Sequence: Synthetic peptide
  Seed: GMDPRMCSLMQGSTLPRRSGAA
GMDPRMWSLMQASTNPRRSGAA

SEQ ID NO: 85279 - protein, 22 aa, Artificial Sequence
  Description of Artificial Sequence: Synthetic peptide
  Seed: GMDPRMCSLMQGSTLPRRSGAA
GMDPRMWSLMQASTQPRRSGAA

SEQ ID NO: 85280 - protein, 22 aa, Artificial Sequence
  Description of Artificial Sequence: Synthetic peptide
  Seed: GMDPRMCSLMQGSTLPRRSGAA
GMDPRMWSLMQASTSPRRSGAA

SEQ ID NO: 85281 - protein, 22 aa, Artificial Sequence
  Description of Artificial Sequence: Synthetic peptide
  Seed: GMDPRMCSLMQGSTLPRRSGAA
GMDPRMWSLMQASTTPRRSGAA

SEQ ID NO: 85282 - protein, 22 aa, Artificial Sequence
  Description of Artificial Sequence: Synthetic peptide
  Seed: GMDPRMCSLMQGSTLPRRSGAA
GMDPRMWSLMQASTVPRRSGAA

SEQ ID NO: 85283 - protein, 22 aa, Artificial Sequence
  Description of Artificial Sequence: Synthetic peptide
  Seed: GMDPRMCSLMQGSTLPRRSGAA
GMDPRMWSLMQGSTAPRRSGAA

SEQ ID NO: 85284 - protein, 22 aa, Artificial Sequence
  Description of Artificial Sequence: Synthetic peptide
  Seed: GMDPRMCSLMQGSTLPRRSGAA
GMDPRMWSLMQGSTIPRRSGAA

SEQ ID NO: 85285 - protein, 22 aa, Artificial Sequence
  Description of Artificial Sequence: Synthetic peptide
  Seed: GMDPRMCSLMQGSTLPRRSGAA
GMDPRMWSLMQGSTLPRRSGAA

SEQ ID NO: 85286 - protein, 22 aa, Artificial Sequence
  Description of Artificial Sequence: Synthetic peptide
  Seed: GMDPRMCSLMQGSTLPRRSGAA
GMDPRMWSLMQGSTMPRRSGAA

SEQ ID NO: 85287 - protein, 22 aa, Artificial Sequence
  Description of Artificial Sequence: Synthetic peptide
  Seed: GMDPRMCSLMQGSTLPRRSGAA
GMDPRMWSLMQGSTSPRRSGAA

SEQ ID NO: 85288 - protein, 22 aa, Artificial Sequence
  Description of Artificial Sequence: Synthetic peptide
  Seed: GMDPRMCSLMQGSTLPRRSGAA
GMDPRMWSLMQGSTTPRRSGAA

SEQ ID NO: 85289 - protein, 22 aa, Artificial Sequence
  Description of Artificial Sequence: Synthetic peptide
  Seed: GMDPRMCSLMQGSTLPRRSGAA
GMDPRMWSLMQGSTVPRRSGAA

SEQ ID NO: 85290 - protein, 22 aa, Artificial Sequence
  Description of Artificial Sequence: Synthetic peptide
  Seed: GMDPRMCSLMQGSTLPRRSGAA
GMDPRMWSLMQISTAPRRSGAA

SEQ ID NO: 85291 - protein, 22 aa, Artificial Sequence
  Description of Artificial Sequence: Synthetic peptide
  Seed: GMDPRMCSLMQGSTLPRRSGAA
GMDPRMWSLMQISTNPRRSGAA

SEQ ID NO: 85292 - protein, 22 aa, Artificial Sequence
  Description of Artificial Sequence: Synthetic peptide
  Seed: GMDPRMCSLMQGSTLPRRSGAA
GMDPRMWSLMQISTSPRRSGAA

SEQ ID NO: 85293 - protein, 22 aa, Artificial Sequence
  Description of Artificial Sequence: Synthetic peptide
  Seed: GMDPRMCSLMQGSTLPRRSGAA
GMDPRMWSLMQNSTAPRRSGAA

SEQ ID NO: 85294 - protein, 22 aa, Artificial Sequence
  Description of Artificial Sequence: Synthetic peptide
  Seed: GMDPRMCSLMQGSTLPRRSGAA
GMDPRMWSLMQNSTIPRRSGAA

SEQ ID NO: 85295 - protein, 22 aa, Artificial Sequence
  Description of Artificial Sequence: Synthetic peptide
  Seed: GMDPRMCSLMQGSTLPRRSGAA
GMDPRMWSLMQNSTLPRRSGAA

SEQ ID NO: 85296 - protein, 22 aa, Artificial Sequence
  Description of Artificial Sequence: Synthetic peptide
  Seed: GMDPRMCSLMQGSTLPRRSGAA
GMDPRMWSLMQNSTVPRRSGAA

SEQ ID NO: 85297 - protein, 22 aa, Artificial Sequence
  Description of Artificial Sequence: Synthetic peptide
  Seed: GMDPRMCSLMQGSTLPRRSGAA
GMDPRMWSLMQPSTAPRRSGAA

SEQ ID NO: 85298 - protein, 22 aa, Artificial Sequence
  Description of Artificial Sequence: Synthetic peptide
  Seed: GMDPRMCSLMQGSTLPRRSGAA
GMDPRMWSLMQPSTIPRRSGAA

SEQ ID NO: 85299 - protein, 22 aa, Artificial Sequence
  Description of Artificial Sequence: Synthetic peptide
  Seed: GMDPRMCSLMQGSTLPRRSGAA
GMDPRMWSLMQPSTLPRRSGAA

SEQ ID NO: 85300 - protein, 22 aa, Artificial Sequence
  Description of Artificial Sequence: Synthetic peptide
  Seed: GMDPRMCSLMQGSTLPRRSGAA
GMDPRMWSLMQPSTMPRRSGAA

SEQ ID NO: 85301 - protein, 22 aa, Artificial Sequence
  Description of Artificial Sequence: Synthetic peptide
  Seed: GMDPRMCSLMQGSTLPRRSGAA
GMDPRMWSLMQPSTNPRRSGAA

SEQ ID NO: 85302 - protein, 22 aa, Artificial Sequence
  Description of Artificial Sequence: Synthetic peptide
  Seed: GMDPRMCSLMQGSTLPRRSGAA
GMDPRMWSLMQPSTSPRRSGAA

SEQ ID NO: 85303 - protein, 22 aa, Artificial Sequence
  Description of Artificial Sequence: Synthetic peptide
  Seed: GMDPRMCSLMQGSTLPRRSGAA
GMDPRMWSLMQPSTTPRRSGAA

SEQ ID NO: 85304 - protein, 22 aa, Artificial Sequence
  Description of Artificial Sequence: Synthetic peptide
  Seed: GMDPRMCSLMQGSTLPRRSGAA
GMDPRMWSLMQPSTVPRRSGAA

SEQ ID NO: 85305 - protein, 22 aa, Artificial Sequence
  Description of Artificial Sequence: Synthetic peptide
  Seed: GMDPRMCSLMQGSTLPRRSGAA
GMDPRMWSLMQSSTAPRRSGAA

SEQ ID NO: 85306 - protein, 22 aa, Artificial Sequence
  Description of Artificial Sequence: Synthetic peptide
  Seed: GMDPRMCSLMQGSTLPRRSGAA
GMDPRMWSLMQSSTIPRRSGAA

SEQ ID NO: 85307 - protein, 22 aa, Artificial Sequence
  Description of Artificial Sequence: Synthetic peptide
  Seed: GMDPRMCSLMQGSTLPRRSGAA
GMDPRMWSLMQSSTLPRRSGAA

SEQ ID NO: 85308 - protein, 22 aa, Artificial Sequence
  Description of Artificial Sequence: Synthetic peptide
  Seed: GMDPRMCSLMQGSTLPRRSGAA
GMDPRMWSLMQSSTMPRRSGAA

SEQ ID NO: 85309 - protein, 22 aa, Artificial Sequence
  Description of Artificial Sequence: Synthetic peptide
  Seed: GMDPRMCSLMQGSTLPRRSGAA
GMDPRMWSLMQSSTNPRRSGAA

SEQ ID NO: 85310 - protein, 22 aa, Artificial Sequence
  Description of Artificial Sequence: Synthetic peptide
  Seed: GMDPRMCSLMQGSTLPRRSGAA
GMDPRMWSLMQSSTSPRRSGAA

SEQ ID NO: 85311 - protein, 22 aa, Artificial Sequence
  Description of Artificial Sequence: Synthetic peptide
  Seed: GMDPRMCSLMQGSTLPRRSGAA
GMDPRMWSLMQSSTTPRRSGAA

SEQ ID NO: 85312 - protein, 22 aa, Artificial Sequence
  Description of Artificial Sequence: Synthetic peptide
  Seed: GMDPRMCSLMQGSTLPRRSGAA
GMDPRMWSLMQSSTVPRRSGAA

SEQ ID NO: 85313 - protein, 22 aa, Artificial Sequence
  Description of Artificial Sequence: Synthetic peptide
  Seed: GMDPRMCSLMQGSTLPRRSGAA
GMDPRMWSLMQTSTAPRRSGAA

SEQ ID NO: 85314 - protein, 22 aa, Artificial Sequence
  Description of Artificial Sequence: Synthetic peptide
  Seed: GMDPRMCSLMQGSTLPRRSGAA
GMDPRMWSLMQTSTIPRRSGAA

SEQ ID NO: 85315 - protein, 22 aa, Artificial Sequence
  Description of Artificial Sequence: Synthetic peptide
  Seed: GMDPRMCSLMQGSTLPRRSGAA
GMDPRMWSLMQTSTLPRRSGAA

SEQ ID NO: 85316 - protein, 22 aa, Artificial Sequence
  Description of Artificial Sequence: Synthetic peptide
  Seed: GMDPRMCSLMQGSTLPRRSGAA
GMDPRMWSLMQTSTMPRRSGAA

SEQ ID NO: 85317 - protein, 22 aa, Artificial Sequence
  Description of Artificial Sequence: Synthetic peptide
  Seed: GMDPRMCSLMQGSTLPRRSGAA
GMDPRMWSLMQTSTNPRRSGAA

SEQ ID NO: 85318 - protein, 22 aa, Artificial Sequence
  Description of Artificial Sequence: Synthetic peptide
  Seed: GMDPRMCSLMQGSTLPRRSGAA
GMDPRMWSLMQTSTSPRRSGAA

SEQ ID NO: 85319 - protein, 22 aa, Artificial Sequence
  Description of Artificial Sequence: Synthetic peptide
  Seed: GMDPRMCSLMQGSTLPRRSGAA
GMDPRMWSLMQTSTTPRRSGAA

SEQ ID NO: 85320 - protein, 22 aa, Artificial Sequence
  Description of Artificial Sequence: Synthetic peptide
  Seed: GMDPRMCSLMQGSTLPRRSGAA
GMDPRMWSLMQTSTVPRRSGAA

SEQ ID NO: 85321 - protein, 22 aa, Artificial Sequence
  Description of Artificial Sequence: Synthetic peptide
  Seed: GMDPRMCSLMQGSTLPRRSGAA
GMDPRMWSLMQVSTAPRRSGAA

SEQ ID NO: 85322 - protein, 22 aa, Artificial Sequence
  Description of Artificial Sequence: Synthetic peptide
  Seed: GMDPRMCSLMQGSTLPRRSGAA
GMDPRMWSLMQVSTNPRRSGAA

SEQ ID NO: 85323 - protein, 22 aa, Artificial Sequence
  Description of Artificial Sequence: Synthetic peptide
  Seed: GMDPRMCSLMQGSTLPRRSGAA
GMDPRMWSLMQVSTSPRRSGAA

SEQ ID NO: 85324 - protein, 22 aa, Artificial Sequence
  Description of Artificial Sequence: Synthetic peptide
  Seed: GMDPRMCSLMQGSTLPRRSGAA
GMDPRMWSLMQVSTTPRRSGAA

SEQ ID NO: 85325 - protein, 22 aa, Artificial Sequence
  Description of Artificial Sequence: Synthetic peptide
  Seed: GMDPRMCSLMQGSTLPRRSGAA
GMDPRMWSLMQVSTVPRRSGAA

SEQ ID NO: 85326 - protein, 22 aa, Artificial Sequence
  Description of Artificial Sequence: Synthetic peptide
  Seed: GMDPRMCSLMQGSTLPRRSGAA
GMDPRMWSLQQASTAPRRSGAA

SEQ ID NO: 85327 - protein, 22 aa, Artificial Sequence
  Description of Artificial Sequence: Synthetic peptide
  Seed: GMDPRMCSLMQGSTLPRRSGAA
GMDPRMWSLQQASTIPRRSGAA

SEQ ID NO: 85328 - protein, 22 aa, Artificial Sequence
  Description of Artificial Sequence: Synthetic peptide
  Seed: GMDPRMCSLMQGSTLPRRSGAA
GMDPRMWSLQQASTLPRRSGAA

SEQ ID NO: 85329 - protein, 22 aa, Artificial Sequence
  Description of Artificial Sequence: Synthetic peptide
  Seed: GMDPRMCSLMQGSTLPRRSGAA
GMDPRMWSLQQASTVPRRSGAA

SEQ ID NO: 85330 - protein, 22 aa, Artificial Sequence
  Description of Artificial Sequence: Synthetic peptide
  Seed: GMDPRMCSLMQGSTLPRRSGAA
GMDPRMWSLQQGSTLPRRSGAA

SEQ ID NO: 85331 - protein, 22 aa, Artificial Sequence
  Description of Artificial Sequence: Synthetic peptide
  Seed: GMDPRMCSLMQGSTLPRRSGAA
GMDPRMWSLQQGSTVPRRSGAA

SEQ ID NO: 85332 - protein, 22 aa, Artificial Sequence
  Description of Artificial Sequence: Synthetic peptide
  Seed: GMDPRMCSLMQGSTLPRRSGAA
GMDPRMWSLVQASTAPRRSGAA

SEQ ID NO: 85333 - protein, 22 aa, Artificial Sequence
  Description of Artificial Sequence: Synthetic peptide
  Seed: GMDPRMCSLMQGSTLPRRSGAA
GMDPRMWSLVQASTIPRRSGAA

SEQ ID NO: 85334 - protein, 22 aa, Artificial Sequence
  Description of Artificial Sequence: Synthetic peptide
  Seed: GMDPRMCSLMQGSTLPRRSGAA
GMDPRMWSLVQASTLPRRSGAA

SEQ ID NO: 85335 - protein, 22 aa, Artificial Sequence
  Description of Artificial Sequence: Synthetic peptide
  Seed: GMDPRMCSLMQGSTLPRRSGAA
GMDPRMWSLVQASTNPRRSGAA

SEQ ID NO: 85336 - protein, 22 aa, Artificial Sequence
  Description of Artificial Sequence: Synthetic peptide
  Seed: GMDPRMCSLMQGSTLPRRSGAA
GMDPRMWSLVQASTSPRRSGAA

SEQ ID NO: 85337 - protein, 22 aa, Artificial Sequence
  Description of Artificial Sequence: Synthetic peptide
  Seed: GMDPRMCSLMQGSTLPRRSGAA
GMDPRMWSLVQASTVPRRSGAA

SEQ ID NO: 85338 - protein, 22 aa, Artificial Sequence
  Description of Artificial Sequence: Synthetic peptide
  Seed: GMDPRMCSLMQGSTLPRRSGAA
GMDPRMWSLVQGSTAPRRSGAA

SEQ ID NO: 85339 - protein, 22 aa, Artificial Sequence
  Description of Artificial Sequence: Synthetic peptide
  Seed: GMDPRMCSLMQGSTLPRRSGAA
GMDPRMWSLVQGSTIPRRSGAA

SEQ ID NO: 85340 - protein, 22 aa, Artificial Sequence
  Description of Artificial Sequence: Synthetic peptide
  Seed: GMDPRMCSLMQGSTLPRRSGAA
GMDPRMWSLVQGSTLPRRSGAA

SEQ ID NO: 85341 - protein, 22 aa, Artificial Sequence
  Description of Artificial Sequence: Synthetic peptide
  Seed: GMDPRMCSLMQGSTLPRRSGAA
GMDPRMWSLVQGSTVPRRSGAA

SEQ ID NO: 85342 - protein, 22 aa, Artificial Sequence
  Description of Artificial Sequence: Synthetic peptide
  Seed: GMDPRMCSLMQGSTLPRRSGAA
GMDPRMWSLVQSSTVPRRSGAA

SEQ ID NO: 85343 - protein, 22 aa, Artificial Sequence
  Description of Artificial Sequence: Synthetic peptide
  Seed: GMDPRMCSLMQGSTLPRRSGAA
GMDPRMYSLAQASTAPRRSGAA

SEQ ID NO: 85344 - protein, 22 aa, Artificial Sequence
  Description of Artificial Sequence: Synthetic peptide
  Seed: GMDPRMCSLMQGSTLPRRSGAA
GMDPRMYSLAQASTGPRRSGAA

SEQ ID NO: 85345 - protein, 22 aa, Artificial Sequence
  Description of Artificial Sequence: Synthetic peptide
  Seed: GMDPRMCSLMQGSTLPRRSGAA
GMDPRMYSLAQASTIPRRSGAA

SEQ ID NO: 85346 - protein, 22 aa, Artificial Sequence
  Description of Artificial Sequence: Synthetic peptide
  Seed: GMDPRMCSLMQGSTLPRRSGAA
GMDPRMYSLAQASTLPRRSGAA

SEQ ID NO: 85347 - protein, 22 aa, Artificial Sequence
  Description of Artificial Sequence: Synthetic peptide
  Seed: GMDPRMCSLMQGSTLPRRSGAA
GMDPRMYSLAQASTMPRRSGAA

SEQ ID NO: 85348 - protein, 22 aa, Artificial Sequence
  Description of Artificial Sequence: Synthetic peptide
  Seed: GMDPRMCSLMQGSTLPRRSGAA
GMDPRMYSLAQASTNPRRSGAA

SEQ ID NO: 85349 - protein, 22 aa, Artificial Sequence
  Description of Artificial Sequence: Synthetic peptide
  Seed: GMDPRMCSLMQGSTLPRRSGAA
GMDPRMYSLAQASTQPRRSGAA

SEQ ID NO: 85350 - protein, 22 aa, Artificial Sequence
  Description of Artificial Sequence: Synthetic peptide
  Seed: GMDPRMCSLMQGSTLPRRSGAA
GMDPRMYSLAQASTSPRRSGAA

SEQ ID NO: 85351 - protein, 22 aa, Artificial Sequence
  Description of Artificial Sequence: Synthetic peptide
  Seed: GMDPRMCSLMQGSTLPRRSGAA
GMDPRMYSLAQASTTPRRSGAA

SEQ ID NO: 85352 - protein, 22 aa, Artificial Sequence
  Description of Artificial Sequence: Synthetic peptide
  Seed: GMDPRMCSLMQGSTLPRRSGAA
GMDPRMYSLAQASTVPRRSGAA

SEQ ID NO: 85353 - protein, 22 aa, Artificial Sequence
  Description of Artificial Sequence: Synthetic peptide
  Seed: GMDPRMCSLMQGSTLPRRSGAA
GMDPRMYSLAQGSTAPRRSGAA

SEQ ID NO: 85354 - protein, 22 aa, Artificial Sequence
  Description of Artificial Sequence: Synthetic peptide
  Seed: GMDPRMCSLMQGSTLPRRSGAA
GMDPRMYSLAQGSTIPRRSGAA

SEQ ID NO: 85355 - protein, 22 aa, Artificial Sequence
  Description of Artificial Sequence: Synthetic peptide
  Seed: GMDPRMCSLMQGSTLPRRSGAA
GMDPRMYSLAQGSTLPRRSGAA

SEQ ID NO: 85356 - protein, 22 aa, Artificial Sequence
  Description of Artificial Sequence: Synthetic peptide
  Seed: GMDPRMCSLMQGSTLPRRSGAA
GMDPRMYSLAQGSTMPRRSGAA

SEQ ID NO: 85357 - protein, 22 aa, Artificial Sequence
  Description of Artificial Sequence: Synthetic peptide
  Seed: GMDPRMCSLMQGSTLPRRSGAA
GMDPRMYSLAQGSTVPRRSGAA

SEQ ID NO: 85358 - protein, 22 aa, Artificial Sequence
  Description of Artificial Sequence: Synthetic peptide
  Seed: GMDPRMCSLMQGSTLPRRSGAA
GMDPRMYSLAQISTAPRRSGAA

SEQ ID NO: 85359 - protein, 22 aa, Artificial Sequence
  Description of Artificial Sequence: Synthetic peptide
  Seed: GMDPRMCSLMQGSTLPRRSGAA
GMDPRMYSLAQISTNPRRSGAA

SEQ ID NO: 85360 - protein, 22 aa, Artificial Sequence
  Description of Artificial Sequence: Synthetic peptide
  Seed: GMDPRMCSLMQGSTLPRRSGAA
GMDPRMYSLAQISTSPRRSGAA

SEQ ID NO: 85361 - protein, 22 aa, Artificial Sequence
  Description of Artificial Sequence: Synthetic peptide
  Seed: GMDPRMCSLMQGSTLPRRSGAA
GMDPRMYSLAQISTVPRRSGAA

SEQ ID NO: 85362 - protein, 22 aa, Artificial Sequence
  Description of Artificial Sequence: Synthetic peptide
  Seed: GMDPRMCSLMQGSTLPRRSGAA
GMDPRMYSLAQNSTIPRRSGAA

SEQ ID NO: 85363 - protein, 22 aa, Artificial Sequence
  Description of Artificial Sequence: Synthetic peptide
  Seed: GMDPRMCSLMQGSTLPRRSGAA
GMDPRMYSLAQNSTLPRRSGAA

SEQ ID NO: 85364 - protein, 22 aa, Artificial Sequence
  Description of Artificial Sequence: Synthetic peptide
  Seed: GMDPRMCSLMQGSTLPRRSGAA
GMDPRMYSLAQNSTVPRRSGAA

SEQ ID NO: 85365 - protein, 22 aa, Artificial Sequence
  Description of Artificial Sequence: Synthetic peptide
  Seed: GMDPRMCSLMQGSTLPRRSGAA
GMDPRMYSLAQPSTAPRRSGAA

SEQ ID NO: 85366 - protein, 22 aa, Artificial Sequence
  Description of Artificial Sequence: Synthetic peptide
  Seed: GMDPRMCSLMQGSTLPRRSGAA
GMDPRMYSLAQPSTIPRRSGAA

SEQ ID NO: 85367 - protein, 22 aa, Artificial Sequence
  Description of Artificial Sequence: Synthetic peptide
  Seed: GMDPRMCSLMQGSTLPRRSGAA
GMDPRMYSLAQPSTLPRRSGAA

SEQ ID NO: 85368 - protein, 22 aa, Artificial Sequence
  Description of Artificial Sequence: Synthetic peptide
  Seed: GMDPRMCSLMQGSTLPRRSGAA
GMDPRMYSLAQPSTMPRRSGAA

SEQ ID NO: 85369 - protein, 22 aa, Artificial Sequence
  Description of Artificial Sequence: Synthetic peptide
  Seed: GMDPRMCSLMQGSTLPRRSGAA
GMDPRMYSLAQPSTNPRRSGAA

SEQ ID NO: 85370 - protein, 22 aa, Artificial Sequence
  Description of Artificial Sequence: Synthetic peptide
  Seed: GMDPRMCSLMQGSTLPRRSGAA
GMDPRMYSLAQPSTSPRRSGAA

SEQ ID NO: 85371 - protein, 22 aa, Artificial Sequence
  Description of Artificial Sequence: Synthetic peptide
  Seed: GMDPRMCSLMQGSTLPRRSGAA
GMDPRMYSLAQPSTVPRRSGAA

SEQ ID NO: 85372 - protein, 22 aa, Artificial Sequence
  Description of Artificial Sequence: Synthetic peptide
  Seed: GMDPRMCSLMQGSTLPRRSGAA
GMDPRMYSLAQSSTAPRRSGAA

SEQ ID NO: 85373 - protein, 22 aa, Artificial Sequence
  Description of Artificial Sequence: Synthetic peptide
  Seed: GMDPRMCSLMQGSTLPRRSGAA
GMDPRMYSLAQSSTIPRRSGAA

SEQ ID NO: 85374 - protein, 22 aa, Artificial Sequence
  Description of Artificial Sequence: Synthetic peptide
  Seed: GMDPRMCSLMQGSTLPRRSGAA
GMDPRMYSLAQSSTLPRRSGAA

SEQ ID NO: 85375 - protein, 22 aa, Artificial Sequence
  Description of Artificial Sequence: Synthetic peptide
  Seed: GMDPRMCSLMQGSTLPRRSGAA
GMDPRMYSLAQSSTMPRRSGAA

SEQ ID NO: 85376 - protein, 22 aa, Artificial Sequence
  Description of Artificial Sequence: Synthetic peptide
  Seed: GMDPRMCSLMQGSTLPRRSGAA
GMDPRMYSLAQSSTNPRRSGAA

SEQ ID NO: 85377 - protein, 22 aa, Artificial Sequence
  Description of Artificial Sequence: Synthetic peptide
  Seed: GMDPRMCSLMQGSTLPRRSGAA
GMDPRMYSLAQSSTSPRRSGAA

SEQ ID NO: 85378 - protein, 22 aa, Artificial Sequence
  Description of Artificial Sequence: Synthetic peptide
  Seed: GMDPRMCSLMQGSTLPRRSGAA
GMDPRMYSLAQSSTTPRRSGAA

SEQ ID NO: 85379 - protein, 22 aa, Artificial Sequence
  Description of Artificial Sequence: Synthetic peptide
  Seed: GMDPRMCSLMQGSTLPRRSGAA
GMDPRMYSLAQSSTVPRRSGAA

SEQ ID NO: 85380 - protein, 22 aa, Artificial Sequence
  Description of Artificial Sequence: Synthetic peptide
  Seed: GMDPRMCSLMQGSTLPRRSGAA
GMDPRMYSLAQTSTAPRRSGAA

SEQ ID NO: 85381 - protein, 22 aa, Artificial Sequence
  Description of Artificial Sequence: Synthetic peptide
  Seed: GMDPRMCSLMQGSTLPRRSGAA
GMDPRMYSLAQTSTIPRRSGAA

SEQ ID NO: 85382 - protein, 22 aa, Artificial Sequence
  Description of Artificial Sequence: Synthetic peptide
  Seed: GMDPRMCSLMQGSTLPRRSGAA
GMDPRMYSLAQTSTLPRRSGAA

SEQ ID NO: 85383 - protein, 22 aa, Artificial Sequence
  Description of Artificial Sequence: Synthetic peptide
  Seed: GMDPRMCSLMQGSTLPRRSGAA
GMDPRMYSLAQTSTNPRRSGAA

SEQ ID NO: 85384 - protein, 22 aa, Artificial Sequence
  Description of Artificial Sequence: Synthetic peptide
  Seed: GMDPRMCSLMQGSTLPRRSGAA
GMDPRMYSLAQTSTSPRRSGAA

SEQ ID NO: 85385 - protein, 22 aa, Artificial Sequence
  Description of Artificial Sequence: Synthetic peptide
  Seed: GMDPRMCSLMQGSTLPRRSGAA
GMDPRMYSLAQTSTVPRRSGAA

SEQ ID NO: 85386 - protein, 22 aa, Artificial Sequence
  Description of Artificial Sequence: Synthetic peptide
  Seed: GMDPRMCSLMQGSTLPRRSGAA
GMDPRMYSLAQVSTAPRRSGAA

SEQ ID NO: 85387 - protein, 22 aa, Artificial Sequence
  Description of Artificial Sequence: Synthetic peptide
  Seed: GMDPRMCSLMQGSTLPRRSGAA
GMDPRMYSLAQVSTIPRRSGAA

SEQ ID NO: 85388 - protein, 22 aa, Artificial Sequence
  Description of Artificial Sequence: Synthetic peptide
  Seed: GMDPRMCSLMQGSTLPRRSGAA
GMDPRMYSLAQVSTLPRRSGAA

SEQ ID NO: 85389 - protein, 22 aa, Artificial Sequence
  Description of Artificial Sequence: Synthetic peptide
  Seed: GMDPRMCSLMQGSTLPRRSGAA
GMDPRMYSLAQVSTMPRRSGAA

SEQ ID NO: 85390 - protein, 22 aa, Artificial Sequence
  Description of Artificial Sequence: Synthetic peptide
  Seed: GMDPRMCSLMQGSTLPRRSGAA
GMDPRMYSLAQVSTNPRRSGAA

SEQ ID NO: 85391 - protein, 22 aa, Artificial Sequence
  Description of Artificial Sequence: Synthetic peptide
  Seed: GMDPRMCSLMQGSTLPRRSGAA
GMDPRMYSLAQVSTSPRRSGAA

SEQ ID NO: 85392 - protein, 22 aa, Artificial Sequence
  Description of Artificial Sequence: Synthetic peptide
  Seed: GMDPRMCSLMQGSTLPRRSGAA
GMDPRMYSLAQVSTTPRRSGAA

SEQ ID NO: 85393 - protein, 22 aa, Artificial Sequence
  Description of Artificial Sequence: Synthetic peptide
  Seed: GMDPRMCSLMQGSTLPRRSGAA
GMDPRMYSLAQVSTVPRRSGAA

SEQ ID NO: 85394 - protein, 22 aa, Artificial Sequence
  Description of Artificial Sequence: Synthetic peptide
  Seed: GMDPRMCSLMQGSTLPRRSGAA
GMDPRMYSLEQASTAPRRSGAA

SEQ ID NO: 85395 - protein, 22 aa, Artificial Sequence
  Description of Artificial Sequence: Synthetic peptide
  Seed: GMDPRMCSLMQGSTLPRRSGAA
GMDPRMYSLEQASTIPRRSGAA

SEQ ID NO: 85396 - protein, 22 aa, Artificial Sequence
  Description of Artificial Sequence: Synthetic peptide
  Seed: GMDPRMCSLMQGSTLPRRSGAA
GMDPRMYSLEQASTLPRRSGAA

SEQ ID NO: 85397 - protein, 22 aa, Artificial Sequence
  Description of Artificial Sequence: Synthetic peptide
  Seed: GMDPRMCSLMQGSTLPRRSGAA
GMDPRMYSLEQASTVPRRSGAA

SEQ ID NO: 85398 - protein, 22 aa, Artificial Sequence
  Description of Artificial Sequence: Synthetic peptide
  Seed: GMDPRMCSLMQGSTLPRRSGAA
GMDPRMYSLFQASTAPRRSGAA

SEQ ID NO: 85399 - protein, 22 aa, Artificial Sequence
  Description of Artificial Sequence: Synthetic peptide
  Seed: GMDPRMCSLMQGSTLPRRSGAA
GMDPRMYSLFQASTIPRRSGAA

SEQ ID NO: 85400 - protein, 22 aa, Artificial Sequence
  Description of Artificial Sequence: Synthetic peptide
  Seed: GMDPRMCSLMQGSTLPRRSGAA
GMDPRMYSLFQASTLPRRSGAA

SEQ ID NO: 85401 - protein, 22 aa, Artificial Sequence
  Description of Artificial Sequence: Synthetic peptide
  Seed: GMDPRMCSLMQGSTLPRRSGAA
GMDPRMYSLFQASTNPRRSGAA

SEQ ID NO: 85402 - protein, 22 aa, Artificial Sequence
  Description of Artificial Sequence: Synthetic peptide
  Seed: GMDPRMCSLMQGSTLPRRSGAA
GMDPRMYSLFQASTSPRRSGAA

SEQ ID NO: 85403 - protein, 22 aa, Artificial Sequence
  Description of Artificial Sequence: Synthetic peptide
  Seed: GMDPRMCSLMQGSTLPRRSGAA
GMDPRMYSLFQASTVPRRSGAA

SEQ ID NO: 85404 - protein, 22 aa, Artificial Sequence
  Description of Artificial Sequence: Synthetic peptide
  Seed: GMDPRMCSLMQGSTLPRRSGAA
GMDPRMYSLFQPSTAPRRSGAA

SEQ ID NO: 85405 - protein, 22 aa, Artificial Sequence
  Description of Artificial Sequence: Synthetic peptide
  Seed: GMDPRMCSLMQGSTLPRRSGAA
GMDPRMYSLFQSSTLPRRSGAA

SEQ ID NO: 85406 - protein, 22 aa, Artificial Sequence
  Description of Artificial Sequence: Synthetic peptide
  Seed: GMDPRMCSLMQGSTLPRRSGAA
GMDPRMYSLFQTSTAPRRSGAA

SEQ ID NO: 85407 - protein, 22 aa, Artificial Sequence
  Description of Artificial Sequence: Synthetic peptide
  Seed: GMDPRMCSLMQGSTLPRRSGAA
GMDPRMYSLFQVSTAPRRSGAA

SEQ ID NO: 85408 - protein, 22 aa, Artificial Sequence
  Description of Artificial Sequence: Synthetic peptide
  Seed: GMDPRMCSLMQGSTLPRRSGAA
GMDPRMYSLGQASTIPRRSGAA

SEQ ID NO: 85409 - protein, 22 aa, Artificial Sequence
  Description of Artificial Sequence: Synthetic peptide
  Seed: GMDPRMCSLMQGSTLPRRSGAA
GMDPRMYSLGQASTLPRRSGAA

SEQ ID NO: 85410 - protein, 22 aa, Artificial Sequence
  Description of Artificial Sequence: Synthetic peptide
  Seed: GMDPRMCSLMQGSTLPRRSGAA
GMDPRMYSLGQASTVPRRSGAA

SEQ ID NO: 85411 - protein, 22 aa, Artificial Sequence
  Description of Artificial Sequence: Synthetic peptide
  Seed: GMDPRMCSLMQGSTLPRRSGAA
GMDPRMYSLIQASTAPRRSGAA

SEQ ID NO: 85412 - protein, 22 aa, Artificial Sequence
  Description of Artificial Sequence: Synthetic peptide
  Seed: GMDPRMCSLMQGSTLPRRSGAA
GMDPRMYSLIQASTCPRRSGAA

SEQ ID NO: 85413 - protein, 22 aa, Artificial Sequence
  Description of Artificial Sequence: Synthetic peptide
  Seed: GMDPRMCSLMQGSTLPRRSGAA
GMDPRMYSLIQASTGPRRSGAA

SEQ ID NO: 85414 - protein, 22 aa, Artificial Sequence
  Description of Artificial Sequence: Synthetic peptide
  Seed: GMDPRMCSLMQGSTLPRRSGAA
GMDPRMYSLIQASTHPRRSGAA

SEQ ID NO: 85415 - protein, 22 aa, Artificial Sequence
  Description of Artificial Sequence: Synthetic peptide
  Seed: GMDPRMCSLMQGSTLPRRSGAA
GMDPRMYSLIQASTIPRRSGAA

SEQ ID NO: 85416 - protein, 22 aa, Artificial Sequence
  Description of Artificial Sequence: Synthetic peptide
  Seed: GMDPRMCSLMQGSTLPRRSGAA
GMDPRMYSLIQASTLPRRSGAA

SEQ ID NO: 85417 - protein, 22 aa, Artificial Sequence
  Description of Artificial Sequence: Synthetic peptide
  Seed: GMDPRMCSLMQGSTLPRRSGAA
GMDPRMYSLIQASTMPRRSGAA

SEQ ID NO: 85418 - protein, 22 aa, Artificial Sequence
  Description of Artificial Sequence: Synthetic peptide
  Seed: GMDPRMCSLMQGSTLPRRSGAA
GMDPRMYSLIQASTNPRRSGAA

SEQ ID NO: 85419 - protein, 22 aa, Artificial Sequence
  Description of Artificial Sequence: Synthetic peptide
  Seed: GMDPRMCSLMQGSTLPRRSGAA
GMDPRMYSLIQASTPPRRSGAA

SEQ ID NO: 85420 - protein, 22 aa, Artificial Sequence
  Description of Artificial Sequence: Synthetic peptide
  Seed: GMDPRMCSLMQGSTLPRRSGAA
GMDPRMYSLIQASTQPRRSGAA

SEQ ID NO: 85421 - protein, 22 aa, Artificial Sequence
  Description of Artificial Sequence: Synthetic peptide
  Seed: GMDPRMCSLMQGSTLPRRSGAA
GMDPRMYSLIQASTSPRRSGAA

SEQ ID NO: 85422 - protein, 22 aa, Artificial Sequence
  Description of Artificial Sequence: Synthetic peptide
  Seed: GMDPRMCSLMQGSTLPRRSGAA
GMDPRMYSLIQASTTPRRSGAA

SEQ ID NO: 85423 - protein, 22 aa, Artificial Sequence
  Description of Artificial Sequence: Synthetic peptide
  Seed: GMDPRMCSLMQGSTLPRRSGAA
GMDPRMYSLIQASTVPRRSGAA

SEQ ID NO: 85424 - protein, 22 aa, Artificial Sequence
  Description of Artificial Sequence: Synthetic peptide
  Seed: GMDPRMCSLMQGSTLPRRSGAA
GMDPRMYSLIQGSTAPRRSGAA

SEQ ID NO: 85425 - protein, 22 aa, Artificial Sequence
  Description of Artificial Sequence: Synthetic peptide
  Seed: GMDPRMCSLMQGSTLPRRSGAA
GMDPRMYSLIQGSTGPRRSGAA

SEQ ID NO: 85426 - protein, 22 aa, Artificial Sequence
  Description of Artificial Sequence: Synthetic peptide
  Seed: GMDPRMCSLMQGSTLPRRSGAA
GMDPRMYSLIQGSTIPRRSGAA

SEQ ID NO: 85427 - protein, 22 aa, Artificial Sequence
  Description of Artificial Sequence: Synthetic peptide
  Seed: GMDPRMCSLMQGSTLPRRSGAA
GMDPRMYSLIQGSTLPRRSGAA

SEQ ID NO: 85428 - protein, 22 aa, Artificial Sequence
  Description of Artificial Sequence: Synthetic peptide
  Seed: GMDPRMCSLMQGSTLPRRSGAA
GMDPRMYSLIQGSTMPRRSGAA

SEQ ID NO: 85429 - protein, 22 aa, Artificial Sequence
  Description of Artificial Sequence: Synthetic peptide
  Seed: GMDPRMCSLMQGSTLPRRSGAA
GMDPRMYSLIQGSTNPRRSGAA

SEQ ID NO: 85430 - protein, 22 aa, Artificial Sequence
  Description of Artificial Sequence: Synthetic peptide
  Seed: GMDPRMCSLMQGSTLPRRSGAA
GMDPRMYSLIQGSTSPRRSGAA

SEQ ID NO: 85431 - protein, 22 aa, Artificial Sequence
  Description of Artificial Sequence: Synthetic peptide
  Seed: GMDPRMCSLMQGSTLPRRSGAA
GMDPRMYSLIQGSTTPRRSGAA

SEQ ID NO: 85432 - protein, 22 aa, Artificial Sequence
  Description of Artificial Sequence: Synthetic peptide
  Seed: GMDPRMCSLMQGSTLPRRSGAA
GMDPRMYSLIQGSTVPRRSGAA

SEQ ID NO: 85433 - protein, 22 aa, Artificial Sequence
  Description of Artificial Sequence: Synthetic peptide
  Seed: GMDPRMCSLMQGSTLPRRSGAA
GMDPRMYSLIQISTAPRRSGAA

SEQ ID NO: 85434 - protein, 22 aa, Artificial Sequence
  Description of Artificial Sequence: Synthetic peptide
  Seed: GMDPRMCSLMQGSTLPRRSGAA
GMDPRMYSLIQISTGPRRSGAA

SEQ ID NO: 85435 - protein, 22 aa, Artificial Sequence
  Description of Artificial Sequence: Synthetic peptide
  Seed: GMDPRMCSLMQGSTLPRRSGAA
GMDPRMYSLIQISTIPRRSGAA

SEQ ID NO: 85436 - protein, 22 aa, Artificial Sequence
  Description of Artificial Sequence: Synthetic peptide
  Seed: GMDPRMCSLMQGSTLPRRSGAA
GMDPRMYSLIQISTLPRRSGAA

SEQ ID NO: 85437 - protein, 22 aa, Artificial Sequence
  Description of Artificial Sequence: Synthetic peptide
  Seed: GMDPRMCSLMQGSTLPRRSGAA
GMDPRMYSLIQISTMPRRSGAA

SEQ ID NO: 85438 - protein, 22 aa, Artificial Sequence
  Description of Artificial Sequence: Synthetic peptide
  Seed: GMDPRMCSLMQGSTLPRRSGAA
GMDPRMYSLIQISTNPRRSGAA

SEQ ID NO: 85439 - protein, 22 aa, Artificial Sequence
  Description of Artificial Sequence: Synthetic peptide
  Seed: GMDPRMCSLMQGSTLPRRSGAA
GMDPRMYSLIQISTSPRRSGAA

SEQ ID NO: 85440 - protein, 22 aa, Artificial Sequence
  Description of Artificial Sequence: Synthetic peptide
  Seed: GMDPRMCSLMQGSTLPRRSGAA
GMDPRMYSLIQISTTPRRSGAA

SEQ ID NO: 85441 - protein, 22 aa, Artificial Sequence
  Description of Artificial Sequence: Synthetic peptide
  Seed: GMDPRMCSLMQGSTLPRRSGAA
GMDPRMYSLIQISTVPRRSGAA

SEQ ID NO: 85442 - protein, 22 aa, Artificial Sequence
  Description of Artificial Sequence: Synthetic peptide
  Seed: GMDPRMCSLMQGSTLPRRSGAA
GMDPRMYSLIQLSTAPRRSGAA

SEQ ID NO: 85443 - protein, 22 aa, Artificial Sequence
  Description of Artificial Sequence: Synthetic peptide
  Seed: GMDPRMCSLMQGSTLPRRSGAA
GMDPRMYSLIQLSTNPRRSGAA

SEQ ID NO: 85444 - protein, 22 aa, Artificial Sequence
  Description of Artificial Sequence: Synthetic peptide
  Seed: GMDPRMCSLMQGSTLPRRSGAA
GMDPRMYSLIQMSTAPRRSGAA

SEQ ID NO: 85445 - protein, 22 aa, Artificial Sequence
  Description of Artificial Sequence: Synthetic peptide
  Seed: GMDPRMCSLMQGSTLPRRSGAA
GMDPRMYSLIQNSTAPRRSGAA

SEQ ID NO: 85446 - protein, 22 aa, Artificial Sequence
  Description of Artificial Sequence: Synthetic peptide
  Seed: GMDPRMCSLMQGSTLPRRSGAA
GMDPRMYSLIQNSTIPRRSGAA

SEQ ID NO: 85447 - protein, 22 aa, Artificial Sequence
  Description of Artificial Sequence: Synthetic peptide
  Seed: GMDPRMCSLMQGSTLPRRSGAA
GMDPRMYSLIQNSTLPRRSGAA

SEQ ID NO: 85448 - protein, 22 aa, Artificial Sequence
  Description of Artificial Sequence: Synthetic peptide
  Seed: GMDPRMCSLMQGSTLPRRSGAA
GMDPRMYSLIQNSTNPRRSGAA

SEQ ID NO: 85449 - protein, 22 aa, Artificial Sequence
  Description of Artificial Sequence: Synthetic peptide
  Seed: GMDPRMCSLMQGSTLPRRSGAA
GMDPRMYSLIQNSTSPRRSGAA

SEQ ID NO: 85450 - protein, 22 aa, Artificial Sequence
  Description of Artificial Sequence: Synthetic peptide
  Seed: GMDPRMCSLMQGSTLPRRSGAA
GMDPRMYSLIQNSTVPRRSGAA

SEQ ID NO: 85451 - protein, 22 aa, Artificial Sequence
  Description of Artificial Sequence: Synthetic peptide
  Seed: GMDPRMCSLMQGSTLPRRSGAA
GMDPRMYSLIQPSTAPRRSGAA

SEQ ID NO: 85452 - protein, 22 aa, Artificial Sequence
  Description of Artificial Sequence: Synthetic peptide
  Seed: GMDPRMCSLMQGSTLPRRSGAA
GMDPRMYSLIQPSTGPRRSGAA

SEQ ID NO: 85453 - protein, 22 aa, Artificial Sequence
  Description of Artificial Sequence: Synthetic peptide
  Seed: GMDPRMCSLMQGSTLPRRSGAA
GMDPRMYSLIQPSTIPRRSGAA

SEQ ID NO: 85454 - protein, 22 aa, Artificial Sequence
  Description of Artificial Sequence: Synthetic peptide
  Seed: GMDPRMCSLMQGSTLPRRSGAA
GMDPRMYSLIQPSTLPRRSGAA

SEQ ID NO: 85455 - protein, 22 aa, Artificial Sequence
  Description of Artificial Sequence: Synthetic peptide
  Seed: GMDPRMCSLMQGSTLPRRSGAA
GMDPRMYSLIQPSTMPRRSGAA

SEQ ID NO: 85456 - protein, 22 aa, Artificial Sequence
  Description of Artificial Sequence: Synthetic peptide
  Seed: GMDPRMCSLMQGSTLPRRSGAA
GMDPRMYSLIQPSTNPRRSGAA

SEQ ID NO: 85457 - protein, 22 aa, Artificial Sequence
  Description of Artificial Sequence: Synthetic peptide
  Seed: GMDPRMCSLMQGSTLPRRSGAA
GMDPRMYSLIQPSTQPRRSGAA

SEQ ID NO: 85458 - protein, 22 aa, Artificial Sequence
  Description of Artificial Sequence: Synthetic peptide
  Seed: GMDPRMCSLMQGSTLPRRSGAA
GMDPRMYSLIQPSTSPRRSGAA

SEQ ID NO: 85459 - protein, 22 aa, Artificial Sequence
  Description of Artificial Sequence: Synthetic peptide
  Seed: GMDPRMCSLMQGSTLPRRSGAA
GMDPRMYSLIQPSTTPRRSGAA

SEQ ID NO: 85460 - protein, 22 aa, Artificial Sequence
  Description of Artificial Sequence: Synthetic peptide
  Seed: GMDPRMCSLMQGSTLPRRSGAA
GMDPRMYSLIQPSTVPRRSGAA

SEQ ID NO: 85461 - protein, 22 aa, Artificial Sequence
  Description of Artificial Sequence: Synthetic peptide
  Seed: GMDPRMCSLMQGSTLPRRSGAA
GMDPRMYSLIQSSTAPRRSGAA

SEQ ID NO: 85462 - protein, 22 aa, Artificial Sequence
  Description of Artificial Sequence: Synthetic peptide
  Seed: GMDPRMCSLMQGSTLPRRSGAA
GMDPRMYSLIQSSTGPRRSGAA

SEQ ID NO: 85463 - protein, 22 aa, Artificial Sequence
  Description of Artificial Sequence: Synthetic peptide
  Seed: GMDPRMCSLMQGSTLPRRSGAA
GMDPRMYSLIQSSTIPRRSGAA

SEQ ID NO: 85464 - protein, 22 aa, Artificial Sequence
  Description of Artificial Sequence: Synthetic peptide
  Seed: GMDPRMCSLMQGSTLPRRSGAA
GMDPRMYSLIQSSTLPRRSGAA

SEQ ID NO: 85465 - protein, 22 aa, Artificial Sequence
  Description of Artificial Sequence: Synthetic peptide
  Seed: GMDPRMCSLMQGSTLPRRSGAA
GMDPRMYSLIQSSTMPRRSGAA

SEQ ID NO: 85466 - protein, 22 aa, Artificial Sequence
  Description of Artificial Sequence: Synthetic peptide
  Seed: GMDPRMCSLMQGSTLPRRSGAA
GMDPRMYSLIQSSTNPRRSGAA

SEQ ID NO: 85467 - protein, 22 aa, Artificial Sequence
  Description of Artificial Sequence: Synthetic peptide
  Seed: GMDPRMCSLMQGSTLPRRSGAA
GMDPRMYSLIQSSTSPRRSGAA

SEQ ID NO: 85468 - protein, 22 aa, Artificial Sequence
  Description of Artificial Sequence: Synthetic peptide
  Seed: GMDPRMCSLMQGSTLPRRSGAA
GMDPRMYSLIQSSTTPRRSGAA

SEQ ID NO: 85469 - protein, 22 aa, Artificial Sequence
  Description of Artificial Sequence: Synthetic peptide
  Seed: GMDPRMCSLMQGSTLPRRSGAA
GMDPRMYSLIQSSTVPRRSGAA

SEQ ID NO: 85470 - protein, 22 aa, Artificial Sequence
  Description of Artificial Sequence: Synthetic peptide
  Seed: GMDPRMCSLMQGSTLPRRSGAA
GMDPRMYSLIQTSTAPRRSGAA

SEQ ID NO: 85471 - protein, 22 aa, Artificial Sequence
  Description of Artificial Sequence: Synthetic peptide
  Seed: GMDPRMCSLMQGSTLPRRSGAA
GMDPRMYSLIQTSTGPRRSGAA

SEQ ID NO: 85472 - protein, 22 aa, Artificial Sequence
  Description of Artificial Sequence: Synthetic peptide
  Seed: GMDPRMCSLMQGSTLPRRSGAA
GMDPRMYSLIQTSTIPRRSGAA

SEQ ID NO: 85473 - protein, 22 aa, Artificial Sequence
  Description of Artificial Sequence: Synthetic peptide
  Seed: GMDPRMCSLMQGSTLPRRSGAA
GMDPRMYSLIQTSTLPRRSGAA

SEQ ID NO: 85474 - protein, 22 aa, Artificial Sequence
  Description of Artificial Sequence: Synthetic peptide
  Seed: GMDPRMCSLMQGSTLPRRSGAA
GMDPRMYSLIQTSTMPRRSGAA

SEQ ID NO: 85475 - protein, 22 aa, Artificial Sequence
  Description of Artificial Sequence: Synthetic peptide
  Seed: GMDPRMCSLMQGSTLPRRSGAA
GMDPRMYSLIQTSTNPRRSGAA

SEQ ID NO: 85476 - protein, 22 aa, Artificial Sequence
  Description of Artificial Sequence: Synthetic peptide
  Seed: GMDPRMCSLMQGSTLPRRSGAA
GMDPRMYSLIQTSTSPRRSGAA

SEQ ID NO: 85477 - protein, 22 aa, Artificial Sequence
  Description of Artificial Sequence: Synthetic peptide
  Seed: GMDPRMCSLMQGSTLPRRSGAA
GMDPRMYSLIQTSTTPRRSGAA

SEQ ID NO: 85478 - protein, 22 aa, Artificial Sequence
  Description of Artificial Sequence: Synthetic peptide
  Seed: GMDPRMCSLMQGSTLPRRSGAA
GMDPRMYSLIQTSTVPRRSGAA

SEQ ID NO: 85479 - protein, 22 aa, Artificial Sequence
  Description of Artificial Sequence: Synthetic peptide
  Seed: GMDPRMCSLMQGSTLPRRSGAA
GMDPRMYSLIQVSTAPRRSGAA

SEQ ID NO: 85480 - protein, 22 aa, Artificial Sequence
  Description of Artificial Sequence: Synthetic peptide
  Seed: GMDPRMCSLMQGSTLPRRSGAA
GMDPRMYSLIQVSTGPRRSGAA

SEQ ID NO: 85481 - protein, 22 aa, Artificial Sequence
  Description of Artificial Sequence: Synthetic peptide
  Seed: GMDPRMCSLMQGSTLPRRSGAA
GMDPRMYSLIQVSTHPRRSGAA

SEQ ID NO: 85482 - protein, 22 aa, Artificial Sequence
  Description of Artificial Sequence: Synthetic peptide
  Seed: GMDPRMCSLMQGSTLPRRSGAA
GMDPRMYSLIQVSTIPRRSGAA

SEQ ID NO: 85483 - protein, 22 aa, Artificial Sequence
  Description of Artificial Sequence: Synthetic peptide
  Seed: GMDPRMCSLMQGSTLPRRSGAA
GMDPRMYSLIQVSTLPRRSGAA

SEQ ID NO: 85484 - protein, 22 aa, Artificial Sequence
  Description of Artificial Sequence: Synthetic peptide
  Seed: GMDPRMCSLMQGSTLPRRSGAA
GMDPRMYSLIQVSTMPRRSGAA

SEQ ID NO: 85485 - protein, 22 aa, Artificial Sequence
  Description of Artificial Sequence: Synthetic peptide
  Seed: GMDPRMCSLMQGSTLPRRSGAA
GMDPRMYSLIQVSTNPRRSGAA

SEQ ID NO: 85486 - protein, 22 aa, Artificial Sequence
  Description of Artificial Sequence: Synthetic peptide
  Seed: GMDPRMCSLMQGSTLPRRSGAA
GMDPRMYSLIQVSTSPRRSGAA

SEQ ID NO: 85487 - protein, 22 aa, Artificial Sequence
  Description of Artificial Sequence: Synthetic peptide
  Seed: GMDPRMCSLMQGSTLPRRSGAA
GMDPRMYSLIQVSTTPRRSGAA

SEQ ID NO: 85488 - protein, 22 aa, Artificial Sequence
  Description of Artificial Sequence: Synthetic peptide
  Seed: GMDPRMCSLMQGSTLPRRSGAA
GMDPRMYSLIQVSTVPRRSGAA

SEQ ID NO: 85489 - protein, 22 aa, Artificial Sequence
  Description of Artificial Sequence: Synthetic peptide
  Seed: GMDPRMCSLMQGSTLPRRSGAA
GMDPRMYSLLQASTAPRRSGAA

SEQ ID NO: 85490 - protein, 22 aa, Artificial Sequence
  Description of Artificial Sequence: Synthetic peptide
  Seed: GMDPRMCSLMQGSTLPRRSGAA
GMDPRMYSLLQASTCPRRSGAA

SEQ ID NO: 85491 - protein, 22 aa, Artificial Sequence
  Description of Artificial Sequence: Synthetic peptide
  Seed: GMDPRMCSLMQGSTLPRRSGAA
GMDPRMYSLLQASTDPRRSGAA

SEQ ID NO: 85492 - protein, 22 aa, Artificial Sequence
  Description of Artificial Sequence: Synthetic peptide
  Seed: GMDPRMCSLMQGSTLPRRSGAA
GMDPRMYSLLQASTEPRRSGAA

SEQ ID NO: 85493 - protein, 22 aa, Artificial Sequence
  Description of Artificial Sequence: Synthetic peptide
  Seed: GMDPRMCSLMQGSTLPRRSGAA
GMDPRMYSLLQASTFPRRSGAA

SEQ ID NO: 85494 - protein, 22 aa, Artificial Sequence
  Description of Artificial Sequence: Synthetic peptide
  Seed: GMDPRMCSLMQGSTLPRRSGAA
GMDPRMYSLLQASTGPRRSGAA

SEQ ID NO: 85495 - protein, 22 aa, Artificial Sequence
  Description of Artificial Sequence: Synthetic peptide
  Seed: GMDPRMCSLMQGSTLPRRSGAA
GMDPRMYSLLQASTHPRRSGAA

SEQ ID NO: 85496 - protein, 22 aa, Artificial Sequence
  Description of Artificial Sequence: Synthetic peptide
  Seed: GMDPRMCSLMQGSTLPRRSGAA
GMDPRMYSLLQASTIPRRSGAA

SEQ ID NO: 85497 - protein, 22 aa, Artificial Sequence
  Description of Artificial Sequence: Synthetic peptide
  Seed: GMDPRMCSLMQGSTLPRRSGAA
GMDPRMYSLLQASTLPRRSGAA

SEQ ID NO: 85498 - protein, 22 aa, Artificial Sequence
  Description of Artificial Sequence: Synthetic peptide
  Seed: GMDPRMCSLMQGSTLPRRSGAA
GMDPRMYSLLQASTMPRRSGAA

SEQ ID NO: 85499 - protein, 22 aa, Artificial Sequence
  Description of Artificial Sequence: Synthetic peptide
  Seed: GMDPRMCSLMQGSTLPRRSGAA
GMDPRMYSLLQASTNPRRSGAA

SEQ ID NO: 85500 - protein, 22 aa, Artificial Sequence
  Description of Artificial Sequence: Synthetic peptide
  Seed: GMDPRMCSLMQGSTLPRRSGAA
GMDPRMYSLLQASTPPRRSGAA

SEQ ID NO: 85501 - protein, 22 aa, Artificial Sequence
  Description of Artificial Sequence: Synthetic peptide
  Seed: GMDPRMCSLMQGSTLPRRSGAA
GMDPRMYSLLQASTQPRRSGAA

SEQ ID NO: 85502 - protein, 22 aa, Artificial Sequence
  Description of Artificial Sequence: Synthetic peptide
  Seed: GMDPRMCSLMQGSTLPRRSGAA
GMDPRMYSLLQASTSPRRSGAA

SEQ ID NO: 85503 - protein, 22 aa, Artificial Sequence
  Description of Artificial Sequence: Synthetic peptide
  Seed: GMDPRMCSLMQGSTLPRRSGAA
GMDPRMYSLLQASTTPRRSGAA

SEQ ID NO: 85504 - protein, 22 aa, Artificial Sequence
  Description of Artificial Sequence: Synthetic peptide
  Seed: GMDPRMCSLMQGSTLPRRSGAA
GMDPRMYSLLQASTVPRRSGAA

SEQ ID NO: 85505 - protein, 22 aa, Artificial Sequence
  Description of Artificial Sequence: Synthetic peptide
  Seed: GMDPRMCSLMQGSTLPRRSGAA
GMDPRMYSLLQGSTAPRRSGAA

SEQ ID NO: 85506 - protein, 22 aa, Artificial Sequence
  Description of Artificial Sequence: Synthetic peptide
  Seed: GMDPRMCSLMQGSTLPRRSGAA
GMDPRMYSLLQGSTCPRRSGAA

SEQ ID NO: 85507 - protein, 22 aa, Artificial Sequence
  Description of Artificial Sequence: Synthetic peptide
  Seed: GMDPRMCSLMQGSTLPRRSGAA
GMDPRMYSLLQGSTFPRRSGAA

SEQ ID NO: 85508 - protein, 22 aa, Artificial Sequence
  Description of Artificial Sequence: Synthetic peptide
  Seed: GMDPRMCSLMQGSTLPRRSGAA
GMDPRMYSLLQGSTGPRRSGAA

SEQ ID NO: 85509 - protein, 22 aa, Artificial Sequence
  Description of Artificial Sequence: Synthetic peptide
  Seed: GMDPRMCSLMQGSTLPRRSGAA
GMDPRMYSLLQGSTIPRRSGAA

SEQ ID NO: 85510 - protein, 22 aa, Artificial Sequence
  Description of Artificial Sequence: Synthetic peptide
  Seed: GMDPRMCSLMQGSTLPRRSGAA
GMDPRMYSLLQGSTLPRRSGAA

SEQ ID NO: 85511 - protein, 22 aa, Artificial Sequence
  Description of Artificial Sequence: Synthetic peptide
  Seed: GMDPRMCSLMQGSTLPRRSGAA
GMDPRMYSLLQGSTMPRRSGAA

SEQ ID NO: 85512 - protein, 22 aa, Artificial Sequence
  Description of Artificial Sequence: Synthetic peptide
  Seed: GMDPRMCSLMQGSTLPRRSGAA
GMDPRMYSLLQGSTNPRRSGAA

SEQ ID NO: 85513 - protein, 22 aa, Artificial Sequence
  Description of Artificial Sequence: Synthetic peptide
  Seed: GMDPRMCSLMQGSTLPRRSGAA
GMDPRMYSLLQGSTSPRRSGAA

SEQ ID NO: 85514 - protein, 22 aa, Artificial Sequence
  Description of Artificial Sequence: Synthetic peptide
  Seed: GMDPRMCSLMQGSTLPRRSGAA
GMDPRMYSLLQGSTTPRRSGAA

SEQ ID NO: 85515 - protein, 22 aa, Artificial Sequence
  Description of Artificial Sequence: Synthetic peptide
  Seed: GMDPRMCSLMQGSTLPRRSGAA
GMDPRMYSLLQGSTVPRRSGAA

SEQ ID NO: 85516 - protein, 22 aa, Artificial Sequence
  Description of Artificial Sequence: Synthetic peptide
  Seed: GMDPRMCSLMQGSTLPRRSGAA
GMDPRMYSLLQISTAPRRSGAA

SEQ ID NO: 85517 - protein, 22 aa, Artificial Sequence
  Description of Artificial Sequence: Synthetic peptide
  Seed: GMDPRMCSLMQGSTLPRRSGAA
GMDPRMYSLLQISTGPRRSGAA

SEQ ID NO: 85518 - protein, 22 aa, Artificial Sequence
  Description of Artificial Sequence: Synthetic peptide
  Seed: GMDPRMCSLMQGSTLPRRSGAA
GMDPRMYSLLQISTIPRRSGAA

SEQ ID NO: 85519 - protein, 22 aa, Artificial Sequence
  Description of Artificial Sequence: Synthetic peptide
  Seed: GMDPRMCSLMQGSTLPRRSGAA
GMDPRMYSLLQISTLPRRSGAA

SEQ ID NO: 85520 - protein, 22 aa, Artificial Sequence
  Description of Artificial Sequence: Synthetic peptide
  Seed: GMDPRMCSLMQGSTLPRRSGAA
GMDPRMYSLLQISTMPRRSGAA

SEQ ID NO: 85521 - protein, 22 aa, Artificial Sequence
  Description of Artificial Sequence: Synthetic peptide
  Seed: GMDPRMCSLMQGSTLPRRSGAA
GMDPRMYSLLQISTNPRRSGAA

SEQ ID NO: 85522 - protein, 22 aa, Artificial Sequence
  Description of Artificial Sequence: Synthetic peptide
  Seed: GMDPRMCSLMQGSTLPRRSGAA
GMDPRMYSLLQISTSPRRSGAA

SEQ ID NO: 85523 - protein, 22 aa, Artificial Sequence
  Description of Artificial Sequence: Synthetic peptide
  Seed: GMDPRMCSLMQGSTLPRRSGAA
GMDPRMYSLLQISTTPRRSGAA

SEQ ID NO: 85524 - protein, 22 aa, Artificial Sequence
  Description of Artificial Sequence: Synthetic peptide
  Seed: GMDPRMCSLMQGSTLPRRSGAA
GMDPRMYSLLQISTVPRRSGAA

SEQ ID NO: 85525 - protein, 22 aa, Artificial Sequence
  Description of Artificial Sequence: Synthetic peptide
  Seed: GMDPRMCSLMQGSTLPRRSGAA
GMDPRMYSLLQLSTAPRRSGAA

SEQ ID NO: 85526 - protein, 22 aa, Artificial Sequence
  Description of Artificial Sequence: Synthetic peptide
  Seed: GMDPRMCSLMQGSTLPRRSGAA
GMDPRMYSLLQLSTNPRRSGAA

SEQ ID NO: 85527 - protein, 22 aa, Artificial Sequence
  Description of Artificial Sequence: Synthetic peptide
  Seed: GMDPRMCSLMQGSTLPRRSGAA
GMDPRMYSLLQLSTSPRRSGAA

SEQ ID NO: 85528 - protein, 22 aa, Artificial Sequence
  Description of Artificial Sequence: Synthetic peptide
  Seed: GMDPRMCSLMQGSTLPRRSGAA
GMDPRMYSLLQMSTAPRRSGAA

SEQ ID NO: 85529 - protein, 22 aa, Artificial Sequence
  Description of Artificial Sequence: Synthetic peptide
  Seed: GMDPRMCSLMQGSTLPRRSGAA
GMDPRMYSLLQMSTNPRRSGAA

SEQ ID NO: 85530 - protein, 22 aa, Artificial Sequence
  Description of Artificial Sequence: Synthetic peptide
  Seed: GMDPRMCSLMQGSTLPRRSGAA
GMDPRMYSLLQMSTSPRRSGAA

SEQ ID NO: 85531 - protein, 22 aa, Artificial Sequence
  Description of Artificial Sequence: Synthetic peptide
  Seed: GMDPRMCSLMQGSTLPRRSGAA
GMDPRMYSLLQNSTAPRRSGAA

SEQ ID NO: 85532 - protein, 22 aa, Artificial Sequence
  Description of Artificial Sequence: Synthetic peptide
  Seed: GMDPRMCSLMQGSTLPRRSGAA
GMDPRMYSLLQNSTIPRRSGAA

SEQ ID NO: 85533 - protein, 22 aa, Artificial Sequence
  Description of Artificial Sequence: Synthetic peptide
  Seed: GMDPRMCSLMQGSTLPRRSGAA
GMDPRMYSLLQNSTLPRRSGAA

SEQ ID NO: 85534 - protein, 22 aa, Artificial Sequence
  Description of Artificial Sequence: Synthetic peptide
  Seed: GMDPRMCSLMQGSTLPRRSGAA
GMDPRMYSLLQNSTMPRRSGAA

SEQ ID NO: 85535 - protein, 22 aa, Artificial Sequence
  Description of Artificial Sequence: Synthetic peptide
  Seed: GMDPRMCSLMQGSTLPRRSGAA
GMDPRMYSLLQNSTNPRRSGAA

SEQ ID NO: 85536 - protein, 22 aa, Artificial Sequence
  Description of Artificial Sequence: Synthetic peptide
  Seed: GMDPRMCSLMQGSTLPRRSGAA
GMDPRMYSLLQNSTSPRRSGAA

SEQ ID NO: 85537 - protein, 22 aa, Artificial Sequence
  Description of Artificial Sequence: Synthetic peptide
  Seed: GMDPRMCSLMQGSTLPRRSGAA
GMDPRMYSLLQNSTTPRRSGAA

SEQ ID NO: 85538 - protein, 22 aa, Artificial Sequence
  Description of Artificial Sequence: Synthetic peptide
  Seed: GMDPRMCSLMQGSTLPRRSGAA
GMDPRMYSLLQNSTVPRRSGAA

SEQ ID NO: 85539 - protein, 22 aa, Artificial Sequence
  Description of Artificial Sequence: Synthetic peptide
  Seed: GMDPRMCSLMQGSTLPRRSGAA
GMDPRMYSLLQPSTAPRRSGAA

SEQ ID NO: 85540 - protein, 22 aa, Artificial Sequence
  Description of Artificial Sequence: Synthetic peptide
  Seed: GMDPRMCSLMQGSTLPRRSGAA
GMDPRMYSLLQPSTGPRRSGAA

SEQ ID NO: 85541 - protein, 22 aa, Artificial Sequence
  Description of Artificial Sequence: Synthetic peptide
  Seed: GMDPRMCSLMQGSTLPRRSGAA
GMDPRMYSLLQPSTHPRRSGAA

SEQ ID NO: 85542 - protein, 22 aa, Artificial Sequence
  Description of Artificial Sequence: Synthetic peptide
  Seed: GMDPRMCSLMQGSTLPRRSGAA
GMDPRMYSLLQPSTIPRRSGAA

SEQ ID NO: 85543 - protein, 22 aa, Artificial Sequence
  Description of Artificial Sequence: Synthetic peptide
  Seed: GMDPRMCSLMQGSTLPRRSGAA
GMDPRMYSLLQPSTLPRRSGAA

SEQ ID NO: 85544 - protein, 22 aa, Artificial Sequence
  Description of Artificial Sequence: Synthetic peptide
  Seed: GMDPRMCSLMQGSTLPRRSGAA
GMDPRMYSLLQPSTMPRRSGAA

SEQ ID NO: 85545 - protein, 22 aa, Artificial Sequence
  Description of Artificial Sequence: Synthetic peptide
  Seed: GMDPRMCSLMQGSTLPRRSGAA
GMDPRMYSLLQPSTNPRRSGAA

SEQ ID NO: 85546 - protein, 22 aa, Artificial Sequence
  Description of Artificial Sequence: Synthetic peptide
  Seed: GMDPRMCSLMQGSTLPRRSGAA
GMDPRMYSLLQPSTPPRRSGAA

SEQ ID NO: 85547 - protein, 22 aa, Artificial Sequence
  Description of Artificial Sequence: Synthetic peptide
  Seed: GMDPRMCSLMQGSTLPRRSGAA
GMDPRMYSLLQPSTQPRRSGAA

SEQ ID NO: 85548 - protein, 22 aa, Artificial Sequence
  Description of Artificial Sequence: Synthetic peptide
  Seed: GMDPRMCSLMQGSTLPRRSGAA
GMDPRMYSLLQPSTSPRRSGAA

SEQ ID NO: 85549 - protein, 22 aa, Artificial Sequence
  Description of Artificial Sequence: Synthetic peptide
  Seed: GMDPRMCSLMQGSTLPRRSGAA
GMDPRMYSLLQPSTTPRRSGAA

SEQ ID NO: 85550 - protein, 22 aa, Artificial Sequence
  Description of Artificial Sequence: Synthetic peptide
  Seed: GMDPRMCSLMQGSTLPRRSGAA
GMDPRMYSLLQPSTVPRRSGAA

SEQ ID NO: 85551 - protein, 22 aa, Artificial Sequence
  Description of Artificial Sequence: Synthetic peptide
  Seed: GMDPRMCSLMQGSTLPRRSGAA
GMDPRMYSLLQSSTAPRRSGAA

SEQ ID NO: 85552 - protein, 22 aa, Artificial Sequence
  Description of Artificial Sequence: Synthetic peptide
  Seed: GMDPRMCSLMQGSTLPRRSGAA
GMDPRMYSLLQSSTCPRRSGAA

SEQ ID NO: 85553 - protein, 22 aa, Artificial Sequence
  Description of Artificial Sequence: Synthetic peptide
  Seed: GMDPRMCSLMQGSTLPRRSGAA
GMDPRMYSLLQSSTGPRRSGAA

SEQ ID NO: 85554 - protein, 22 aa, Artificial Sequence
  Description of Artificial Sequence: Synthetic peptide
  Seed: GMDPRMCSLMQGSTLPRRSGAA
GMDPRMYSLLQSSTIPRRSGAA

SEQ ID NO: 85555 - protein, 22 aa, Artificial Sequence
  Description of Artificial Sequence: Synthetic peptide
  Seed: GMDPRMCSLMQGSTLPRRSGAA
GMDPRMYSLLQSSTLPRRSGAA

SEQ ID NO: 85556 - protein, 22 aa, Artificial Sequence
  Description of Artificial Sequence: Synthetic peptide
  Seed: GMDPRMCSLMQGSTLPRRSGAA
GMDPRMYSLLQSSTMPRRSGAA

SEQ ID NO: 85557 - protein, 22 aa, Artificial Sequence
  Description of Artificial Sequence: Synthetic peptide
  Seed: GMDPRMCSLMQGSTLPRRSGAA
GMDPRMYSLLQSSTNPRRSGAA

SEQ ID NO: 85558 - protein, 22 aa, Artificial Sequence
  Description of Artificial Sequence: Synthetic peptide
  Seed: GMDPRMCSLMQGSTLPRRSGAA
GMDPRMYSLLQSSTSPRRSGAA

SEQ ID NO: 85559 - protein, 22 aa, Artificial Sequence
  Description of Artificial Sequence: Synthetic peptide
  Seed: GMDPRMCSLMQGSTLPRRSGAA
GMDPRMYSLLQSSTTPRRSGAA

SEQ ID NO: 85560 - protein, 22 aa, Artificial Sequence
  Description of Artificial Sequence: Synthetic peptide
  Seed: GMDPRMCSLMQGSTLPRRSGAA
GMDPRMYSLLQSSTVPRRSGAA

SEQ ID NO: 85561 - protein, 22 aa, Artificial Sequence
  Description of Artificial Sequence: Synthetic peptide
  Seed: GMDPRMCSLMQGSTLPRRSGAA
GMDPRMYSLLQTSTAPRRSGAA

SEQ ID NO: 85562 - protein, 22 aa, Artificial Sequence
  Description of Artificial Sequence: Synthetic peptide
  Seed: GMDPRMCSLMQGSTLPRRSGAA
GMDPRMYSLLQTSTGPRRSGAA

SEQ ID NO: 85563 - protein, 22 aa, Artificial Sequence
  Description of Artificial Sequence: Synthetic peptide
  Seed: GMDPRMCSLMQGSTLPRRSGAA
GMDPRMYSLLQTSTHPRRSGAA

SEQ ID NO: 85564 - protein, 22 aa, Artificial Sequence
  Description of Artificial Sequence: Synthetic peptide
  Seed: GMDPRMCSLMQGSTLPRRSGAA
GMDPRMYSLLQTSTIPRRSGAA

SEQ ID NO: 85565 - protein, 22 aa, Artificial Sequence
  Description of Artificial Sequence: Synthetic peptide
  Seed: GMDPRMCSLMQGSTLPRRSGAA
GMDPRMYSLLQTSTLPRRSGAA

SEQ ID NO: 85566 - protein, 22 aa, Artificial Sequence
  Description of Artificial Sequence: Synthetic peptide
  Seed: GMDPRMCSLMQGSTLPRRSGAA
GMDPRMYSLLQTSTMPRRSGAA

SEQ ID NO: 85567 - protein, 22 aa, Artificial Sequence
  Description of Artificial Sequence: Synthetic peptide
  Seed: GMDPRMCSLMQGSTLPRRSGAA
GMDPRMYSLLQTSTNPRRSGAA

SEQ ID NO: 85568 - protein, 22 aa, Artificial Sequence
  Description of Artificial Sequence: Synthetic peptide
  Seed: GMDPRMCSLMQGSTLPRRSGAA
GMDPRMYSLLQTSTSPRRSGAA

SEQ ID NO: 85569 - protein, 22 aa, Artificial Sequence
  Description of Artificial Sequence: Synthetic peptide
  Seed: GMDPRMCSLMQGSTLPRRSGAA
GMDPRMYSLLQTSTTPRRSGAA

SEQ ID NO: 85570 - protein, 22 aa, Artificial Sequence
  Description of Artificial Sequence: Synthetic peptide
  Seed: GMDPRMCSLMQGSTLPRRSGAA
GMDPRMYSLLQTSTVPRRSGAA

SEQ ID NO: 85571 - protein, 22 aa, Artificial Sequence
  Description of Artificial Sequence: Synthetic peptide
  Seed: GMDPRMCSLMQGSTLPRRSGAA
GMDPRMYSLLQVSTAPRRSGAA

SEQ ID NO: 85572 - protein, 22 aa, Artificial Sequence
  Description of Artificial Sequence: Synthetic peptide
  Seed: GMDPRMCSLMQGSTLPRRSGAA
GMDPRMYSLLQVSTGPRRSGAA

SEQ ID NO: 85573 - protein, 22 aa, Artificial Sequence
  Description of Artificial Sequence: Synthetic peptide
  Seed: GMDPRMCSLMQGSTLPRRSGAA
GMDPRMYSLLQVSTHPRRSGAA

SEQ ID NO: 85574 - protein, 22 aa, Artificial Sequence
  Description of Artificial Sequence: Synthetic peptide
  Seed: GMDPRMCSLMQGSTLPRRSGAA
GMDPRMYSLLQVSTIPRRSGAA

SEQ ID NO: 85575 - protein, 22 aa, Artificial Sequence
  Description of Artificial Sequence: Synthetic peptide
  Seed: GMDPRMCSLMQGSTLPRRSGAA
GMDPRMYSLLQVSTLPRRSGAA

SEQ ID NO: 85576 - protein, 22 aa, Artificial Sequence
  Description of Artificial Sequence: Synthetic peptide
  Seed: GMDPRMCSLMQGSTLPRRSGAA
GMDPRMYSLLQVSTMPRRSGAA

SEQ ID NO: 85577 - protein, 22 aa, Artificial Sequence
  Description of Artificial Sequence: Synthetic peptide
  Seed: GMDPRMCSLMQGSTLPRRSGAA
GMDPRMYSLLQVSTNPRRSGAA

SEQ ID NO: 85578 - protein, 22 aa, Artificial Sequence
  Description of Artificial Sequence: Synthetic peptide
  Seed: GMDPRMCSLMQGSTLPRRSGAA
GMDPRMYSLLQVSTQPRRSGAA

SEQ ID NO: 85579 - protein, 22 aa, Artificial Sequence
  Description of Artificial Sequence: Synthetic peptide
  Seed: GMDPRMCSLMQGSTLPRRSGAA
GMDPRMYSLLQVSTSPRRSGAA

SEQ ID NO: 85580 - protein, 22 aa, Artificial Sequence
  Description of Artificial Sequence: Synthetic peptide
  Seed: GMDPRMCSLMQGSTLPRRSGAA
GMDPRMYSLLQVSTTPRRSGAA

SEQ ID NO: 85581 - protein, 22 aa, Artificial Sequence
  Description of Artificial Sequence: Synthetic peptide
  Seed: GMDPRMCSLMQGSTLPRRSGAA
GMDPRMYSLLQVSTVPRRSGAA

SEQ ID NO: 85582 - protein, 22 aa, Artificial Sequence
  Description of Artificial Sequence: Synthetic peptide
  Seed: GMDPRMCSLMQGSTLPRRSGAA
GMDPRMYSLMQASTAPRRSGAA

SEQ ID NO: 85583 - protein, 22 aa, Artificial Sequence
  Description of Artificial Sequence: Synthetic peptide
  Seed: GMDPRMCSLMQGSTLPRRSGAA
GMDPRMYSLMQASTCPRRSGAA

SEQ ID NO: 85584 - protein, 22 aa, Artificial Sequence
  Description of Artificial Sequence: Synthetic peptide
  Seed: GMDPRMCSLMQGSTLPRRSGAA
GMDPRMYSLMQASTDPRRSGAA

SEQ ID NO: 85585 - protein, 22 aa, Artificial Sequence
  Description of Artificial Sequence: Synthetic peptide
  Seed: GMDPRMCSLMQGSTLPRRSGAA
GMDPRMYSLMQASTEPRRSGAA

SEQ ID NO: 85586 - protein, 22 aa, Artificial Sequence
  Description of Artificial Sequence: Synthetic peptide
  Seed: GMDPRMCSLMQGSTLPRRSGAA
GMDPRMYSLMQASTFPRRSGAA

SEQ ID NO: 85587 - protein, 22 aa, Artificial Sequence
  Description of Artificial Sequence: Synthetic peptide
  Seed: GMDPRMCSLMQGSTLPRRSGAA
GMDPRMYSLMQASTGPRRSGAA

SEQ ID NO: 85588 - protein, 22 aa, Artificial Sequence
  Description of Artificial Sequence: Synthetic peptide
  Seed: GMDPRMCSLMQGSTLPRRSGAA
GMDPRMYSLMQASTHPRRSGAA

SEQ ID NO: 85589 - protein, 22 aa, Artificial Sequence
  Description of Artificial Sequence: Synthetic peptide
  Seed: GMDPRMCSLMQGSTLPRRSGAA
GMDPRMYSLMQASTIPRRSGAA

SEQ ID NO: 85590 - protein, 22 aa, Artificial Sequence
  Description of Artificial Sequence: Synthetic peptide
  Seed: GMDPRMCSLMQGSTLPRRSGAA
GMDPRMYSLMQASTLPRRSGAA

SEQ ID NO: 85591 - protein, 22 aa, Artificial Sequence
  Description of Artificial Sequence: Synthetic peptide
  Seed: GMDPRMCSLMQGSTLPRRSGAA
GMDPRMYSLMQASTMPRRSGAA

SEQ ID NO: 85592 - protein, 22 aa, Artificial Sequence
  Description of Artificial Sequence: Synthetic peptide
  Seed: GMDPRMCSLMQGSTLPRRSGAA
GMDPRMYSLMQASTNPRRSGAA

SEQ ID NO: 85593 - protein, 22 aa, Artificial Sequence
  Description of Artificial Sequence: Synthetic peptide
  Seed: GMDPRMCSLMQGSTLPRRSGAA
GMDPRMYSLMQASTPPRRSGAA

SEQ ID NO: 85594 - protein, 22 aa, Artificial Sequence
  Description of Artificial Sequence: Synthetic peptide
  Seed: GMDPRMCSLMQGSTLPRRSGAA
GMDPRMYSLMQASTQPRRSGAA

SEQ ID NO: 85595 - protein, 22 aa, Artificial Sequence
  Description of Artificial Sequence: Synthetic peptide
  Seed: GMDPRMCSLMQGSTLPRRSGAA
GMDPRMYSLMQASTSPRRSGAA

SEQ ID NO: 85596 - protein, 22 aa, Artificial Sequence
  Description of Artificial Sequence: Synthetic peptide
  Seed: GMDPRMCSLMQGSTLPRRSGAA
GMDPRMYSLMQASTTPRRSGAA

SEQ ID NO: 85597 - protein, 22 aa, Artificial Sequence
  Description of Artificial Sequence: Synthetic peptide
  Seed: GMDPRMCSLMQGSTLPRRSGAA
GMDPRMYSLMQASTVPRRSGAA

SEQ ID NO: 85598 - protein, 22 aa, Artificial Sequence
  Description of Artificial Sequence: Synthetic peptide
  Seed: GMDPRMCSLMQGSTLPRRSGAA
GMDPRMYSLMQGSTAPRRSGAA

SEQ ID NO: 85599 - protein, 22 aa, Artificial Sequence
  Description of Artificial Sequence: Synthetic peptide
  Seed: GMDPRMCSLMQGSTLPRRSGAA
GMDPRMYSLMQGSTCPRRSGAA

SEQ ID NO: 85600 - protein, 22 aa, Artificial Sequence
  Description of Artificial Sequence: Synthetic peptide
  Seed: GMDPRMCSLMQGSTLPRRSGAA
GMDPRMYSLMQGSTFPRRSGAA

SEQ ID NO: 85601 - protein, 22 aa, Artificial Sequence
  Description of Artificial Sequence: Synthetic peptide
  Seed: GMDPRMCSLMQGSTLPRRSGAA
GMDPRMYSLMQGSTGPRRSGAA

SEQ ID NO: 85602 - protein, 22 aa, Artificial Sequence
  Description of Artificial Sequence: Synthetic peptide
  Seed: GMDPRMCSLMQGSTLPRRSGAA
GMDPRMYSLMQGSTIPRRSGAA

SEQ ID NO: 85603 - protein, 22 aa, Artificial Sequence
  Description of Artificial Sequence: Synthetic peptide
  Seed: GMDPRMCSLMQGSTLPRRSGAA
GMDPRMYSLMQGSTLPRRSGAA

SEQ ID NO: 85604 - protein, 22 aa, Artificial Sequence
  Description of Artificial Sequence: Synthetic peptide
  Seed: GMDPRMCSLMQGSTLPRRSGAA
GMDPRMYSLMQGSTMPRRSGAA

SEQ ID NO: 85605 - protein, 22 aa, Artificial Sequence
  Description of Artificial Sequence: Synthetic peptide
  Seed: GMDPRMCSLMQGSTLPRRSGAA
GMDPRMYSLMQGSTNPRRSGAA

SEQ ID NO: 85606 - protein, 22 aa, Artificial Sequence
  Description of Artificial Sequence: Synthetic peptide
  Seed: GMDPRMCSLMQGSTLPRRSGAA
GMDPRMYSLMQGSTSPRRSGAA

SEQ ID NO: 85607 - protein, 22 aa, Artificial Sequence
  Description of Artificial Sequence: Synthetic peptide
  Seed: GMDPRMCSLMQGSTLPRRSGAA
GMDPRMYSLMQGSTTPRRSGAA

SEQ ID NO: 85608 - protein, 22 aa, Artificial Sequence
  Description of Artificial Sequence: Synthetic peptide
  Seed: GMDPRMCSLMQGSTLPRRSGAA
GMDPRMYSLMQGSTVPRRSGAA

SEQ ID NO: 85609 - protein, 22 aa, Artificial Sequence
  Description of Artificial Sequence: Synthetic peptide
  Seed: GMDPRMCSLMQGSTLPRRSGAA
GMDPRMYSLMQISTAPRRSGAA

SEQ ID NO: 85610 - protein, 22 aa, Artificial Sequence
  Description of Artificial Sequence: Synthetic peptide
  Seed: GMDPRMCSLMQGSTLPRRSGAA
GMDPRMYSLMQISTGPRRSGAA

SEQ ID NO: 85611 - protein, 22 aa, Artificial Sequence
  Description of Artificial Sequence: Synthetic peptide
  Seed: GMDPRMCSLMQGSTLPRRSGAA
GMDPRMYSLMQISTHPRRSGAA

SEQ ID NO: 85612 - protein, 22 aa, Artificial Sequence
  Description of Artificial Sequence: Synthetic peptide
  Seed: GMDPRMCSLMQGSTLPRRSGAA
GMDPRMYSLMQISTIPRRSGAA

SEQ ID NO: 85613 - protein, 22 aa, Artificial Sequence
  Description of Artificial Sequence: Synthetic peptide
  Seed: GMDPRMCSLMQGSTLPRRSGAA
GMDPRMYSLMQISTLPRRSGAA

SEQ ID NO: 85614 - protein, 22 aa, Artificial Sequence
  Description of Artificial Sequence: Synthetic peptide
  Seed: GMDPRMCSLMQGSTLPRRSGAA
GMDPRMYSLMQISTMPRRSGAA

SEQ ID NO: 85615 - protein, 22 aa, Artificial Sequence
  Description of Artificial Sequence: Synthetic peptide
  Seed: GMDPRMCSLMQGSTLPRRSGAA
GMDPRMYSLMQISTNPRRSGAA

SEQ ID NO: 85616 - protein, 22 aa, Artificial Sequence
  Description of Artificial Sequence: Synthetic peptide
  Seed: GMDPRMCSLMQGSTLPRRSGAA
GMDPRMYSLMQISTQPRRSGAA

SEQ ID NO: 85617 - protein, 22 aa, Artificial Sequence
  Description of Artificial Sequence: Synthetic peptide
  Seed: GMDPRMCSLMQGSTLPRRSGAA
GMDPRMYSLMQISTSPRRSGAA

SEQ ID NO: 85618 - protein, 22 aa, Artificial Sequence
  Description of Artificial Sequence: Synthetic peptide
  Seed: GMDPRMCSLMQGSTLPRRSGAA
GMDPRMYSLMQISTTPRRSGAA

SEQ ID NO: 85619 - protein, 22 aa, Artificial Sequence
  Description of Artificial Sequence: Synthetic peptide
  Seed: GMDPRMCSLMQGSTLPRRSGAA
GMDPRMYSLMQISTVPRRSGAA

SEQ ID NO: 85620 - protein, 22 aa, Artificial Sequence
  Description of Artificial Sequence: Synthetic peptide
  Seed: GMDPRMCSLMQGSTLPRRSGAA
GMDPRMYSLMQLSTAPRRSGAA

SEQ ID NO: 85621 - protein, 22 aa, Artificial Sequence
  Description of Artificial Sequence: Synthetic peptide
  Seed: GMDPRMCSLMQGSTLPRRSGAA
GMDPRMYSLMQLSTNPRRSGAA

SEQ ID NO: 85622 - protein, 22 aa, Artificial Sequence
  Description of Artificial Sequence: Synthetic peptide
  Seed: GMDPRMCSLMQGSTLPRRSGAA
GMDPRMYSLMQLSTSPRRSGAA

SEQ ID NO: 85623 - protein, 22 aa, Artificial Sequence
  Description of Artificial Sequence: Synthetic peptide
  Seed: GMDPRMCSLMQGSTLPRRSGAA
GMDPRMYSLMQLSTTPRRSGAA

SEQ ID NO: 85624 - protein, 22 aa, Artificial Sequence
  Description of Artificial Sequence: Synthetic peptide
  Seed: GMDPRMCSLMQGSTLPRRSGAA
GMDPRMYSLMQLSTVPRRSGAA

SEQ ID NO: 85625 - protein, 22 aa, Artificial Sequence
  Description of Artificial Sequence: Synthetic peptide
  Seed: GMDPRMCSLMQGSTLPRRSGAA
GMDPRMYSLMQMSTAPRRSGAA

SEQ ID NO: 85626 - protein, 22 aa, Artificial Sequence
  Description of Artificial Sequence: Synthetic peptide
  Seed: GMDPRMCSLMQGSTLPRRSGAA
GMDPRMYSLMQMSTNPRRSGAA

SEQ ID NO: 85627 - protein, 22 aa, Artificial Sequence
  Description of Artificial Sequence: Synthetic peptide
  Seed: GMDPRMCSLMQGSTLPRRSGAA
GMDPRMYSLMQMSTSPRRSGAA

SEQ ID NO: 85628 - protein, 22 aa, Artificial Sequence
  Description of Artificial Sequence: Synthetic peptide
  Seed: GMDPRMCSLMQGSTLPRRSGAA
GMDPRMYSLMQNSTAPRRSGAA

SEQ ID NO: 85629 - protein, 22 aa, Artificial Sequence
  Description of Artificial Sequence: Synthetic peptide
  Seed: GMDPRMCSLMQGSTLPRRSGAA
GMDPRMYSLMQNSTIPRRSGAA

SEQ ID NO: 85630 - protein, 22 aa, Artificial Sequence
  Description of Artificial Sequence: Synthetic peptide
  Seed: GMDPRMCSLMQGSTLPRRSGAA
GMDPRMYSLMQNSTLPRRSGAA

SEQ ID NO: 85631 - protein, 22 aa, Artificial Sequence
  Description of Artificial Sequence: Synthetic peptide
  Seed: GMDPRMCSLMQGSTLPRRSGAA
GMDPRMYSLMQNSTMPRRSGAA

SEQ ID NO: 85632 - protein, 22 aa, Artificial Sequence
  Description of Artificial Sequence: Synthetic peptide
  Seed: GMDPRMCSLMQGSTLPRRSGAA
GMDPRMYSLMQNSTNPRRSGAA

SEQ ID NO: 85633 - protein, 22 aa, Artificial Sequence
  Description of Artificial Sequence: Synthetic peptide
  Seed: GMDPRMCSLMQGSTLPRRSGAA
GMDPRMYSLMQNSTSPRRSGAA

SEQ ID NO: 85634 - protein, 22 aa, Artificial Sequence
  Description of Artificial Sequence: Synthetic peptide
  Seed: GMDPRMCSLMQGSTLPRRSGAA
GMDPRMYSLMQNSTTPRRSGAA

SEQ ID NO: 85635 - protein, 22 aa, Artificial Sequence
  Description of Artificial Sequence: Synthetic peptide
  Seed: GMDPRMCSLMQGSTLPRRSGAA
GMDPRMYSLMQNSTVPRRSGAA

SEQ ID NO: 85636 - protein, 22 aa, Artificial Sequence
  Description of Artificial Sequence: Synthetic peptide
  Seed: GMDPRMCSLMQGSTLPRRSGAA
GMDPRMYSLMQPSTAPRRSGAA

SEQ ID NO: 85637 - protein, 22 aa, Artificial Sequence
  Description of Artificial Sequence: Synthetic peptide
  Seed: GMDPRMCSLMQGSTLPRRSGAA
GMDPRMYSLMQPSTGPRRSGAA

SEQ ID NO: 85638 - protein, 22 aa, Artificial Sequence
  Description of Artificial Sequence: Synthetic peptide
  Seed: GMDPRMCSLMQGSTLPRRSGAA
GMDPRMYSLMQPSTHPRRSGAA

SEQ ID NO: 85639 - protein, 22 aa, Artificial Sequence
  Description of Artificial Sequence: Synthetic peptide
  Seed: GMDPRMCSLMQGSTLPRRSGAA
GMDPRMYSLMQPSTIPRRSGAA

SEQ ID NO: 85640 - protein, 22 aa, Artificial Sequence
  Description of Artificial Sequence: Synthetic peptide
  Seed: GMDPRMCSLMQGSTLPRRSGAA
GMDPRMYSLMQPSTLPRRSGAA

SEQ ID NO: 85641 - protein, 22 aa, Artificial Sequence
  Description of Artificial Sequence: Synthetic peptide
  Seed: GMDPRMCSLMQGSTLPRRSGAA
GMDPRMYSLMQPSTMPRRSGAA

SEQ ID NO: 85642 - protein, 22 aa, Artificial Sequence
  Description of Artificial Sequence: Synthetic peptide
  Seed: GMDPRMCSLMQGSTLPRRSGAA
GMDPRMYSLMQPSTNPRRSGAA

SEQ ID NO: 85643 - protein, 22 aa, Artificial Sequence
  Description of Artificial Sequence: Synthetic peptide
  Seed: GMDPRMCSLMQGSTLPRRSGAA
GMDPRMYSLMQPSTPPRRSGAA

SEQ ID NO: 85644 - protein, 22 aa, Artificial Sequence
  Description of Artificial Sequence: Synthetic peptide
  Seed: GMDPRMCSLMQGSTLPRRSGAA
GMDPRMYSLMQPSTQPRRSGAA

SEQ ID NO: 85645 - protein, 22 aa, Artificial Sequence
  Description of Artificial Sequence: Synthetic peptide
  Seed: GMDPRMCSLMQGSTLPRRSGAA
GMDPRMYSLMQPSTSPRRSGAA

SEQ ID NO: 85646 - protein, 22 aa, Artificial Sequence
  Description of Artificial Sequence: Synthetic peptide
  Seed: GMDPRMCSLMQGSTLPRRSGAA
GMDPRMYSLMQPSTTPRRSGAA

SEQ ID NO: 85647 - protein, 22 aa, Artificial Sequence
  Description of Artificial Sequence: Synthetic peptide
  Seed: GMDPRMCSLMQGSTLPRRSGAA
GMDPRMYSLMQPSTVPRRSGAA

SEQ ID NO: 85648 - protein, 22 aa, Artificial Sequence
  Description of Artificial Sequence: Synthetic peptide
  Seed: GMDPRMCSLMQGSTLPRRSGAA
GMDPRMYSLMQSSTAPRRSGAA

SEQ ID NO: 85649 - protein, 22 aa, Artificial Sequence
  Description of Artificial Sequence: Synthetic peptide
  Seed: GMDPRMCSLMQGSTLPRRSGAA
GMDPRMYSLMQSSTCPRRSGAA

SEQ ID NO: 85650 - protein, 22 aa, Artificial Sequence
  Description of Artificial Sequence: Synthetic peptide
  Seed: GMDPRMCSLMQGSTLPRRSGAA
GMDPRMYSLMQSSTGPRRSGAA

SEQ ID NO: 85651 - protein, 22 aa, Artificial Sequence
  Description of Artificial Sequence: Synthetic peptide
  Seed: GMDPRMCSLMQGSTLPRRSGAA
GMDPRMYSLMQSSTHPRRSGAA

SEQ ID NO: 85652 - protein, 22 aa, Artificial Sequence
  Description of Artificial Sequence: Synthetic peptide
  Seed: GMDPRMCSLMQGSTLPRRSGAA
GMDPRMYSLMQSSTIPRRSGAA

SEQ ID NO: 85653 - protein, 22 aa, Artificial Sequence
  Description of Artificial Sequence: Synthetic peptide
  Seed: GMDPRMCSLMQGSTLPRRSGAA
GMDPRMYSLMQSSTLPRRSGAA

SEQ ID NO: 85654 - protein, 22 aa, Artificial Sequence
  Description of Artificial Sequence: Synthetic peptide
  Seed: GMDPRMCSLMQGSTLPRRSGAA
GMDPRMYSLMQSSTMPRRSGAA

SEQ ID NO: 85655 - protein, 22 aa, Artificial Sequence
  Description of Artificial Sequence: Synthetic peptide
  Seed: GMDPRMCSLMQGSTLPRRSGAA
GMDPRMYSLMQSSTNPRRSGAA

SEQ ID NO: 85656 - protein, 22 aa, Artificial Sequence
  Description of Artificial Sequence: Synthetic peptide
  Seed: GMDPRMCSLMQGSTLPRRSGAA
GMDPRMYSLMQSSTQPRRSGAA

SEQ ID NO: 85657 - protein, 22 aa, Artificial Sequence
  Description of Artificial Sequence: Synthetic peptide
  Seed: GMDPRMCSLMQGSTLPRRSGAA
GMDPRMYSLMQSSTSPRRSGAA

SEQ ID NO: 85658 - protein, 22 aa, Artificial Sequence
  Description of Artificial Sequence: Synthetic peptide
  Seed: GMDPRMCSLMQGSTLPRRSGAA
GMDPRMYSLMQSSTTPRRSGAA

SEQ ID NO: 85659 - protein, 22 aa, Artificial Sequence
  Description of Artificial Sequence: Synthetic peptide
  Seed: GMDPRMCSLMQGSTLPRRSGAA
GMDPRMYSLMQSSTVPRRSGAA

SEQ ID NO: 85660 - protein, 22 aa, Artificial Sequence
  Description of Artificial Sequence: Synthetic peptide
  Seed: GMDPRMCSLMQGSTLPRRSGAA
GMDPRMYSLMQTSTAPRRSGAA

SEQ ID NO: 85661 - protein, 22 aa, Artificial Sequence
  Description of Artificial Sequence: Synthetic peptide
  Seed: GMDPRMCSLMQGSTLPRRSGAA
GMDPRMYSLMQTSTGPRRSGAA

SEQ ID NO: 85662 - protein, 22 aa, Artificial Sequence
  Description of Artificial Sequence: Synthetic peptide
  Seed: GMDPRMCSLMQGSTLPRRSGAA
GMDPRMYSLMQTSTHPRRSGAA

SEQ ID NO: 85663 - protein, 22 aa, Artificial Sequence
  Description of Artificial Sequence: Synthetic peptide
  Seed: GMDPRMCSLMQGSTLPRRSGAA
GMDPRMYSLMQTSTIPRRSGAA

SEQ ID NO: 85664 - protein, 22 aa, Artificial Sequence
  Description of Artificial Sequence: Synthetic peptide
  Seed: GMDPRMCSLMQGSTLPRRSGAA
GMDPRMYSLMQTSTLPRRSGAA

SEQ ID NO: 85665 - protein, 22 aa, Artificial Sequence
  Description of Artificial Sequence: Synthetic peptide
  Seed: GMDPRMCSLMQGSTLPRRSGAA
GMDPRMYSLMQTSTMPRRSGAA

SEQ ID NO: 85666 - protein, 22 aa, Artificial Sequence
  Description of Artificial Sequence: Synthetic peptide
  Seed: GMDPRMCSLMQGSTLPRRSGAA
GMDPRMYSLMQTSTNPRRSGAA

SEQ ID NO: 85667 - protein, 22 aa, Artificial Sequence
  Description of Artificial Sequence: Synthetic peptide
  Seed: GMDPRMCSLMQGSTLPRRSGAA
GMDPRMYSLMQTSTQPRRSGAA

SEQ ID NO: 85668 - protein, 22 aa, Artificial Sequence
  Description of Artificial Sequence: Synthetic peptide
  Seed: GMDPRMCSLMQGSTLPRRSGAA
GMDPRMYSLMQTSTSPRRSGAA

SEQ ID NO: 85669 - protein, 22 aa, Artificial Sequence
  Description of Artificial Sequence: Synthetic peptide
  Seed: GMDPRMCSLMQGSTLPRRSGAA
GMDPRMYSLMQTSTTPRRSGAA

SEQ ID NO: 85670 - protein, 22 aa, Artificial Sequence
  Description of Artificial Sequence: Synthetic peptide
  Seed: GMDPRMCSLMQGSTLPRRSGAA
GMDPRMYSLMQTSTVPRRSGAA

SEQ ID NO: 85671 - protein, 22 aa, Artificial Sequence
  Description of Artificial Sequence: Synthetic peptide
  Seed: GMDPRMCSLMQGSTLPRRSGAA
GMDPRMYSLMQVSTAPRRSGAA

SEQ ID NO: 85672 - protein, 22 aa, Artificial Sequence
  Description of Artificial Sequence: Synthetic peptide
  Seed: GMDPRMCSLMQGSTLPRRSGAA
GMDPRMYSLMQVSTGPRRSGAA

SEQ ID NO: 85673 - protein, 22 aa, Artificial Sequence
  Description of Artificial Sequence: Synthetic peptide
  Seed: GMDPRMCSLMQGSTLPRRSGAA
GMDPRMYSLMQVSTHPRRSGAA

SEQ ID NO: 85674 - protein, 22 aa, Artificial Sequence
  Description of Artificial Sequence: Synthetic peptide
  Seed: GMDPRMCSLMQGSTLPRRSGAA
GMDPRMYSLMQVSTIPRRSGAA

SEQ ID NO: 85675 - protein, 22 aa, Artificial Sequence
  Description of Artificial Sequence: Synthetic peptide
  Seed: GMDPRMCSLMQGSTLPRRSGAA
GMDPRMYSLMQVSTLPRRSGAA

SEQ ID NO: 85676 - protein, 22 aa, Artificial Sequence
  Description of Artificial Sequence: Synthetic peptide
  Seed: GMDPRMCSLMQGSTLPRRSGAA
GMDPRMYSLMQVSTMPRRSGAA

SEQ ID NO: 85677 - protein, 22 aa, Artificial Sequence
  Description of Artificial Sequence: Synthetic peptide
  Seed: GMDPRMCSLMQGSTLPRRSGAA
GMDPRMYSLMQVSTNPRRSGAA

SEQ ID NO: 85678 - protein, 22 aa, Artificial Sequence
  Description of Artificial Sequence: Synthetic peptide
  Seed: GMDPRMCSLMQGSTLPRRSGAA
GMDPRMYSLMQVSTQPRRSGAA

SEQ ID NO: 85679 - protein, 22 aa, Artificial Sequence
  Description of Artificial Sequence: Synthetic peptide
  Seed: GMDPRMCSLMQGSTLPRRSGAA
GMDPRMYSLMQVSTSPRRSGAA

SEQ ID NO: 85680 - protein, 22 aa, Artificial Sequence
  Description of Artificial Sequence: Synthetic peptide
  Seed: GMDPRMCSLMQGSTLPRRSGAA
GMDPRMYSLMQVSTTPRRSGAA

SEQ ID NO: 85681 - protein, 22 aa, Artificial Sequence
  Description of Artificial Sequence: Synthetic peptide
  Seed: GMDPRMCSLMQGSTLPRRSGAA
GMDPRMYSLMQVSTVPRRSGAA

SEQ ID NO: 85682 - protein, 22 aa, Artificial Sequence
  Description of Artificial Sequence: Synthetic peptide
  Seed: GMDPRMCSLMQGSTLPRRSGAA
GMDPRMYSLNQASTIPRRSGAA

SEQ ID NO: 85683 - protein, 22 aa, Artificial Sequence
  Description of Artificial Sequence: Synthetic peptide
  Seed: GMDPRMCSLMQGSTLPRRSGAA
GMDPRMYSLNQASTLPRRSGAA

SEQ ID NO: 85684 - protein, 22 aa, Artificial Sequence
  Description of Artificial Sequence: Synthetic peptide
  Seed: GMDPRMCSLMQGSTLPRRSGAA
GMDPRMYSLNQASTVPRRSGAA

SEQ ID NO: 85685 - protein, 22 aa, Artificial Sequence
  Description of Artificial Sequence: Synthetic peptide
  Seed: GMDPRMCSLMQGSTLPRRSGAA
GMDPRMYSLQQASTAPRRSGAA

SEQ ID NO: 85686 - protein, 22 aa, Artificial Sequence
  Description of Artificial Sequence: Synthetic peptide
  Seed: GMDPRMCSLMQGSTLPRRSGAA
GMDPRMYSLQQASTIPRRSGAA

SEQ ID NO: 85687 - protein, 22 aa, Artificial Sequence
  Description of Artificial Sequence: Synthetic peptide
  Seed: GMDPRMCSLMQGSTLPRRSGAA
GMDPRMYSLQQASTLPRRSGAA

SEQ ID NO: 85688 - protein, 22 aa, Artificial Sequence
  Description of Artificial Sequence: Synthetic peptide
  Seed: GMDPRMCSLMQGSTLPRRSGAA
GMDPRMYSLQQASTMPRRSGAA

SEQ ID NO: 85689 - protein, 22 aa, Artificial Sequence
  Description of Artificial Sequence: Synthetic peptide
  Seed: GMDPRMCSLMQGSTLPRRSGAA
GMDPRMYSLQQASTNPRRSGAA

SEQ ID NO: 85690 - protein, 22 aa, Artificial Sequence
  Description of Artificial Sequence: Synthetic peptide
  Seed: GMDPRMCSLMQGSTLPRRSGAA
GMDPRMYSLQQASTSPRRSGAA

SEQ ID NO: 85691 - protein, 22 aa, Artificial Sequence
  Description of Artificial Sequence: Synthetic peptide
  Seed: GMDPRMCSLMQGSTLPRRSGAA
GMDPRMYSLQQASTTPRRSGAA

SEQ ID NO: 85692 - protein, 22 aa, Artificial Sequence
  Description of Artificial Sequence: Synthetic peptide
  Seed: GMDPRMCSLMQGSTLPRRSGAA
GMDPRMYSLQQASTVPRRSGAA

SEQ ID NO: 85693 - protein, 22 aa, Artificial Sequence
  Description of Artificial Sequence: Synthetic peptide
  Seed: GMDPRMCSLMQGSTLPRRSGAA
GMDPRMYSLQQGSTAPRRSGAA

SEQ ID NO: 85694 - protein, 22 aa, Artificial Sequence
  Description of Artificial Sequence: Synthetic peptide
  Seed: GMDPRMCSLMQGSTLPRRSGAA
GMDPRMYSLQQGSTIPRRSGAA

SEQ ID NO: 85695 - protein, 22 aa, Artificial Sequence
  Description of Artificial Sequence: Synthetic peptide
  Seed: GMDPRMCSLMQGSTLPRRSGAA
GMDPRMYSLQQGSTLPRRSGAA

SEQ ID NO: 85696 - protein, 22 aa, Artificial Sequence
  Description of Artificial Sequence: Synthetic peptide
  Seed: GMDPRMCSLMQGSTLPRRSGAA
GMDPRMYSLQQGSTVPRRSGAA

SEQ ID NO: 85697 - protein, 22 aa, Artificial Sequence
  Description of Artificial Sequence: Synthetic peptide
  Seed: GMDPRMCSLMQGSTLPRRSGAA
GMDPRMYSLQQPSTIPRRSGAA

SEQ ID NO: 85698 - protein, 22 aa, Artificial Sequence
  Description of Artificial Sequence: Synthetic peptide
  Seed: GMDPRMCSLMQGSTLPRRSGAA
GMDPRMYSLQQPSTLPRRSGAA

SEQ ID NO: 85699 - protein, 22 aa, Artificial Sequence
  Description of Artificial Sequence: Synthetic peptide
  Seed: GMDPRMCSLMQGSTLPRRSGAA
GMDPRMYSLQQPSTVPRRSGAA

SEQ ID NO: 85700 - protein, 22 aa, Artificial Sequence
  Description of Artificial Sequence: Synthetic peptide
  Seed: GMDPRMCSLMQGSTLPRRSGAA
GMDPRMYSLQQSSTAPRRSGAA

SEQ ID NO: 85701 - protein, 22 aa, Artificial Sequence
  Description of Artificial Sequence: Synthetic peptide
  Seed: GMDPRMCSLMQGSTLPRRSGAA
GMDPRMYSLQQSSTIPRRSGAA

SEQ ID NO: 85702 - protein, 22 aa, Artificial Sequence
  Description of Artificial Sequence: Synthetic peptide
  Seed: GMDPRMCSLMQGSTLPRRSGAA
GMDPRMYSLQQSSTLPRRSGAA

SEQ ID NO: 85703 - protein, 22 aa, Artificial Sequence
  Description of Artificial Sequence: Synthetic peptide
  Seed: GMDPRMCSLMQGSTLPRRSGAA
GMDPRMYSLQQSSTVPRRSGAA

SEQ ID NO: 85704 - protein, 22 aa, Artificial Sequence
  Description of Artificial Sequence: Synthetic peptide
  Seed: GMDPRMCSLMQGSTLPRRSGAA
GMDPRMYSLQQVSTAPRRSGAA

SEQ ID NO: 85705 - protein, 22 aa, Artificial Sequence
  Description of Artificial Sequence: Synthetic peptide
  Seed: GMDPRMCSLMQGSTLPRRSGAA
GMDPRMYSLSQASTAPRRSGAA

SEQ ID NO: 85706 - protein, 22 aa, Artificial Sequence
  Description of Artificial Sequence: Synthetic peptide
  Seed: GMDPRMCSLMQGSTLPRRSGAA
GMDPRMYSLSQASTIPRRSGAA

SEQ ID NO: 85707 - protein, 22 aa, Artificial Sequence
  Description of Artificial Sequence: Synthetic peptide
  Seed: GMDPRMCSLMQGSTLPRRSGAA
GMDPRMYSLSQASTLPRRSGAA

SEQ ID NO: 85708 - protein, 22 aa, Artificial Sequence
  Description of Artificial Sequence: Synthetic peptide
  Seed: GMDPRMCSLMQGSTLPRRSGAA
GMDPRMYSLSQASTMPRRSGAA

SEQ ID NO: 85709 - protein, 22 aa, Artificial Sequence
  Description of Artificial Sequence: Synthetic peptide
  Seed: GMDPRMCSLMQGSTLPRRSGAA
GMDPRMYSLSQASTVPRRSGAA

SEQ ID NO: 85710 - protein, 22 aa, Artificial Sequence
  Description of Artificial Sequence: Synthetic peptide
  Seed: GMDPRMCSLMQGSTLPRRSGAA
GMDPRMYSLSQGSTIPRRSGAA

SEQ ID NO: 85711 - protein, 22 aa, Artificial Sequence
  Description of Artificial Sequence: Synthetic peptide
  Seed: GMDPRMCSLMQGSTLPRRSGAA
GMDPRMYSLSQGSTLPRRSGAA

SEQ ID NO: 85712 - protein, 22 aa, Artificial Sequence
  Description of Artificial Sequence: Synthetic peptide
  Seed: GMDPRMCSLMQGSTLPRRSGAA
GMDPRMYSLSQGSTVPRRSGAA

SEQ ID NO: 85713 - protein, 22 aa, Artificial Sequence
  Description of Artificial Sequence: Synthetic peptide
  Seed: GMDPRMCSLMQGSTLPRRSGAA
GMDPRMYSLSQSSTIPRRSGAA

SEQ ID NO: 85714 - protein, 22 aa, Artificial Sequence
  Description of Artificial Sequence: Synthetic peptide
  Seed: GMDPRMCSLMQGSTLPRRSGAA
GMDPRMYSLSQSSTVPRRSGAA

SEQ ID NO: 85715 - protein, 22 aa, Artificial Sequence
  Description of Artificial Sequence: Synthetic peptide
  Seed: GMDPRMCSLMQGSTLPRRSGAA
GMDPRMYSLTQASTIPRRSGAA

SEQ ID NO: 85716 - protein, 22 aa, Artificial Sequence
  Description of Artificial Sequence: Synthetic peptide
  Seed: GMDPRMCSLMQGSTLPRRSGAA
GMDPRMYSLTQASTLPRRSGAA

SEQ ID NO: 85717 - protein, 22 aa, Artificial Sequence
  Description of Artificial Sequence: Synthetic peptide
  Seed: GMDPRMCSLMQGSTLPRRSGAA
GMDPRMYSLTQASTVPRRSGAA

SEQ ID NO: 85718 - protein, 22 aa, Artificial Sequence
  Description of Artificial Sequence: Synthetic peptide
  Seed: GMDPRMCSLMQGSTLPRRSGAA
GMDPRMYSLVQASTAPRRSGAA

SEQ ID NO: 85719 - protein, 22 aa, Artificial Sequence
  Description of Artificial Sequence: Synthetic peptide
  Seed: GMDPRMCSLMQGSTLPRRSGAA
GMDPRMYSLVQASTGPRRSGAA

SEQ ID NO: 85720 - protein, 22 aa, Artificial Sequence
  Description of Artificial Sequence: Synthetic peptide
  Seed: GMDPRMCSLMQGSTLPRRSGAA
GMDPRMYSLVQASTIPRRSGAA

SEQ ID NO: 85721 - protein, 22 aa, Artificial Sequence
  Description of Artificial Sequence: Synthetic peptide
  Seed: GMDPRMCSLMQGSTLPRRSGAA
GMDPRMYSLVQASTLPRRSGAA

SEQ ID NO: 85722 - protein, 22 aa, Artificial Sequence
  Description of Artificial Sequence: Synthetic peptide
  Seed: GMDPRMCSLMQGSTLPRRSGAA
GMDPRMYSLVQASTMPRRSGAA

SEQ ID NO: 85723 - protein, 22 aa, Artificial Sequence
  Description of Artificial Sequence: Synthetic peptide
  Seed: GMDPRMCSLMQGSTLPRRSGAA
GMDPRMYSLVQASTNPRRSGAA

SEQ ID NO: 85724 - protein, 22 aa, Artificial Sequence
  Description of Artificial Sequence: Synthetic peptide
  Seed: GMDPRMCSLMQGSTLPRRSGAA
GMDPRMYSLVQASTSPRRSGAA

SEQ ID NO: 85725 - protein, 22 aa, Artificial Sequence
  Description of Artificial Sequence: Synthetic peptide
  Seed: GMDPRMCSLMQGSTLPRRSGAA
GMDPRMYSLVQASTTPRRSGAA

SEQ ID NO: 85726 - protein, 22 aa, Artificial Sequence
  Description of Artificial Sequence: Synthetic peptide
  Seed: GMDPRMCSLMQGSTLPRRSGAA
GMDPRMYSLVQASTVPRRSGAA

SEQ ID NO: 85727 - protein, 22 aa, Artificial Sequence
  Description of Artificial Sequence: Synthetic peptide
  Seed: GMDPRMCSLMQGSTLPRRSGAA
GMDPRMYSLVQGSTAPRRSGAA

SEQ ID NO: 85728 - protein, 22 aa, Artificial Sequence
  Description of Artificial Sequence: Synthetic peptide
  Seed: GMDPRMCSLMQGSTLPRRSGAA
GMDPRMYSLVQGSTIPRRSGAA

SEQ ID NO: 85729 - protein, 22 aa, Artificial Sequence
  Description of Artificial Sequence: Synthetic peptide
  Seed: GMDPRMCSLMQGSTLPRRSGAA
GMDPRMYSLVQGSTLPRRSGAA

SEQ ID NO: 85730 - protein, 22 aa, Artificial Sequence
  Description of Artificial Sequence: Synthetic peptide
  Seed: GMDPRMCSLMQGSTLPRRSGAA
GMDPRMYSLVQGSTMPRRSGAA

SEQ ID NO: 85731 - protein, 22 aa, Artificial Sequence
  Description of Artificial Sequence: Synthetic peptide
  Seed: GMDPRMCSLMQGSTLPRRSGAA
GMDPRMYSLVQGSTSPRRSGAA

SEQ ID NO: 85732 - protein, 22 aa, Artificial Sequence
  Description of Artificial Sequence: Synthetic peptide
  Seed: GMDPRMCSLMQGSTLPRRSGAA
GMDPRMYSLVQGSTTPRRSGAA

SEQ ID NO: 85733 - protein, 22 aa, Artificial Sequence
  Description of Artificial Sequence: Synthetic peptide
  Seed: GMDPRMCSLMQGSTLPRRSGAA
GMDPRMYSLVQGSTVPRRSGAA

SEQ ID NO: 85734 - protein, 22 aa, Artificial Sequence
  Description of Artificial Sequence: Synthetic peptide
  Seed: GMDPRMCSLMQGSTLPRRSGAA
GMDPRMYSLVQISTAPRRSGAA

SEQ ID NO: 85735 - protein, 22 aa, Artificial Sequence
  Description of Artificial Sequence: Synthetic peptide
  Seed: GMDPRMCSLMQGSTLPRRSGAA
GMDPRMYSLVQISTNPRRSGAA

SEQ ID NO: 85736 - protein, 22 aa, Artificial Sequence
  Description of Artificial Sequence: Synthetic peptide
  Seed: GMDPRMCSLMQGSTLPRRSGAA
GMDPRMYSLVQISTSPRRSGAA

SEQ ID NO: 85737 - protein, 22 aa, Artificial Sequence
  Description of Artificial Sequence: Synthetic peptide
  Seed: GMDPRMCSLMQGSTLPRRSGAA
GMDPRMYSLVQPSTAPRRSGAA

SEQ ID NO: 85738 - protein, 22 aa, Artificial Sequence
  Description of Artificial Sequence: Synthetic peptide
  Seed: GMDPRMCSLMQGSTLPRRSGAA
GMDPRMYSLVQPSTIPRRSGAA

SEQ ID NO: 85739 - protein, 22 aa, Artificial Sequence
  Description of Artificial Sequence: Synthetic peptide
  Seed: GMDPRMCSLMQGSTLPRRSGAA
GMDPRMYSLVQPSTLPRRSGAA

SEQ ID NO: 85740 - protein, 22 aa, Artificial Sequence
  Description of Artificial Sequence: Synthetic peptide
  Seed: GMDPRMCSLMQGSTLPRRSGAA
GMDPRMYSLVQPSTMPRRSGAA

SEQ ID NO: 85741 - protein, 22 aa, Artificial Sequence
  Description of Artificial Sequence: Synthetic peptide
  Seed: GMDPRMCSLMQGSTLPRRSGAA
GMDPRMYSLVQPSTNPRRSGAA

SEQ ID NO: 85742 - protein, 22 aa, Artificial Sequence
  Description of Artificial Sequence: Synthetic peptide
  Seed: GMDPRMCSLMQGSTLPRRSGAA
GMDPRMYSLVQPSTSPRRSGAA

SEQ ID NO: 85743 - protein, 22 aa, Artificial Sequence
  Description of Artificial Sequence: Synthetic peptide
  Seed: GMDPRMCSLMQGSTLPRRSGAA
GMDPRMYSLVQPSTTPRRSGAA

SEQ ID NO: 85744 - protein, 22 aa, Artificial Sequence
  Description of Artificial Sequence: Synthetic peptide
  Seed: GMDPRMCSLMQGSTLPRRSGAA
GMDPRMYSLVQPSTVPRRSGAA

SEQ ID NO: 85745 - protein, 22 aa, Artificial Sequence
  Description of Artificial Sequence: Synthetic peptide
  Seed: GMDPRMCSLMQGSTLPRRSGAA
GMDPRMYSLVQSSTAPRRSGAA

SEQ ID NO: 85746 - protein, 22 aa, Artificial Sequence
  Description of Artificial Sequence: Synthetic peptide
  Seed: GMDPRMCSLMQGSTLPRRSGAA
GMDPRMYSLVQSSTIPRRSGAA

SEQ ID NO: 85747 - protein, 22 aa, Artificial Sequence
  Description of Artificial Sequence: Synthetic peptide
  Seed: GMDPRMCSLMQGSTLPRRSGAA
GMDPRMYSLVQSSTLPRRSGAA

SEQ ID NO: 85748 - protein, 22 aa, Artificial Sequence
  Description of Artificial Sequence: Synthetic peptide
  Seed: GMDPRMCSLMQGSTLPRRSGAA
GMDPRMYSLVQSSTNPRRSGAA

SEQ ID NO: 85749 - protein, 22 aa, Artificial Sequence
  Description of Artificial Sequence: Synthetic peptide
  Seed: GMDPRMCSLMQGSTLPRRSGAA
GMDPRMYSLVQSSTSPRRSGAA

SEQ ID NO: 85750 - protein, 22 aa, Artificial Sequence
  Description of Artificial Sequence: Synthetic peptide
  Seed: GMDPRMCSLMQGSTLPRRSGAA
GMDPRMYSLVQSSTTPRRSGAA

SEQ ID NO: 85751 - protein, 22 aa, Artificial Sequence
  Description of Artificial Sequence: Synthetic peptide
  Seed: GMDPRMCSLMQGSTLPRRSGAA
GMDPRMYSLVQSSTVPRRSGAA

SEQ ID NO: 85752 - protein, 22 aa, Artificial Sequence
  Description of Artificial Sequence: Synthetic peptide
  Seed: GMDPRMCSLMQGSTLPRRSGAA
GMDPRMYSLVQTSTAPRRSGAA

SEQ ID NO: 85753 - protein, 22 aa, Artificial Sequence
  Description of Artificial Sequence: Synthetic peptide
  Seed: GMDPRMCSLMQGSTLPRRSGAA
GMDPRMYSLVQTSTIPRRSGAA

SEQ ID NO: 85754 - protein, 22 aa, Artificial Sequence
  Description of Artificial Sequence: Synthetic peptide
  Seed: GMDPRMCSLMQGSTLPRRSGAA
GMDPRMYSLVQTSTNPRRSGAA

SEQ ID NO: 85755 - protein, 22 aa, Artificial Sequence
  Description of Artificial Sequence: Synthetic peptide
  Seed: GMDPRMCSLMQGSTLPRRSGAA
GMDPRMYSLVQTSTSPRRSGAA

SEQ ID NO: 85756 - protein, 22 aa, Artificial Sequence
  Description of Artificial Sequence: Synthetic peptide
  Seed: GMDPRMCSLMQGSTLPRRSGAA
GMDPRMYSLVQTSTTPRRSGAA

SEQ ID NO: 85757 - protein, 22 aa, Artificial Sequence
  Description of Artificial Sequence: Synthetic peptide
  Seed: GMDPRMCSLMQGSTLPRRSGAA
GMDPRMYSLVQTSTVPRRSGAA

SEQ ID NO: 85758 - protein, 22 aa, Artificial Sequence
  Description of Artificial Sequence: Synthetic peptide
  Seed: GMDPRMCSLMQGSTLPRRSGAA
GMDPRMYSLVQVSTAPRRSGAA

SEQ ID NO: 85759 - protein, 22 aa, Artificial Sequence
  Description of Artificial Sequence: Synthetic peptide
  Seed: GMDPRMCSLMQGSTLPRRSGAA
GMDPRMYSLVQVSTNPRRSGAA

SEQ ID NO: 85760 - protein, 22 aa, Artificial Sequence
  Description of Artificial Sequence: Synthetic peptide
  Seed: GMDPRMCSLMQGSTLPRRSGAA
GMDPRMYSLVQVSTSPRRSGAA

SEQ ID NO: 85761 - protein, 22 aa, Artificial Sequence
  Description of Artificial Sequence: Synthetic peptide
  Seed: GMDPRMCSLMQGSTLPRRSGAA
GMDPRMYSLVQVSTTPRRSGAA

SEQ ID NO: 85762 - protein, 22 aa, Artificial Sequence
  Description of Artificial Sequence: Synthetic peptide
  Seed: GMDPRMCSLMQGSTLPRRSGAA
GMDPRMYSLVQVSTVPRRSGAA

SEQ ID NO: 85763 - protein, 23 aa, Artificial Sequence
  Description of Artificial Sequence: Synthetic peptide
  Seed: GMDPRMCSLMQGSTLPRRSGAAG
GMDPRMFSLAQASTAPRRSGAAG

SEQ ID NO: 85764 - protein, 23 aa, Artificial Sequence
  Description of Artificial Sequence: Synthetic peptide
  Seed: GMDPRMCSLMQGSTLPRRSGAAG
GMDPRMFSLAQASTCPRRSGAAG

SEQ ID NO: 85765 - protein, 23 aa, Artificial Sequence
  Description of Artificial Sequence: Synthetic peptide
  Seed: GMDPRMCSLMQGSTLPRRSGAAG
GMDPRMFSLAQASTFPRRSGAAG

SEQ ID NO: 85766 - protein, 23 aa, Artificial Sequence
  Description of Artificial Sequence: Synthetic peptide
  Seed: GMDPRMCSLMQGSTLPRRSGAAG
GMDPRMFSLAQASTGPRRSGAAG

SEQ ID NO: 85767 - protein, 23 aa, Artificial Sequence
  Description of Artificial Sequence: Synthetic peptide
  Seed: GMDPRMCSLMQGSTLPRRSGAAG
GMDPRMFSLAQASTHPRRSGAAG

SEQ ID NO: 85768 - protein, 23 aa, Artificial Sequence
  Description of Artificial Sequence: Synthetic peptide
  Seed: GMDPRMCSLMQGSTLPRRSGAAG
GMDPRMFSLAQASTIPRRSGAAG

SEQ ID NO: 85769 - protein, 23 aa, Artificial Sequence
  Description of Artificial Sequence: Synthetic peptide
  Seed: GMDPRMCSLMQGSTLPRRSGAAG
GMDPRMFSLAQASTLPRRSGAAG

SEQ ID NO: 85770 - protein, 23 aa, Artificial Sequence
  Description of Artificial Sequence: Synthetic peptide
  Seed: GMDPRMCSLMQGSTLPRRSGAAG
GMDPRMFSLAQASTMPRRSGAAG

SEQ ID NO: 85771 - protein, 23 aa, Artificial Sequence
  Description of Artificial Sequence: Synthetic peptide
  Seed: GMDPRMCSLMQGSTLPRRSGAAG
GMDPRMFSLAQASTNPRRSGAAG

SEQ ID NO: 85772 - protein, 23 aa, Artificial Sequence
  Description of Artificial Sequence: Synthetic peptide
  Seed: GMDPRMCSLMQGSTLPRRSGAAG
GMDPRMFSLAQASTQPRRSGAAG

SEQ ID NO: 85773 - protein, 23 aa, Artificial Sequence
  Description of Artificial Sequence: Synthetic peptide
  Seed: GMDPRMCSLMQGSTLPRRSGAAG
GMDPRMFSLAQASTSPRRSGAAG

SEQ ID NO: 85774 - protein, 23 aa, Artificial Sequence
  Description of Artificial Sequence: Synthetic peptide
  Seed: GMDPRMCSLMQGSTLPRRSGAAG
GMDPRMFSLAQASTTPRRSGAAG

SEQ ID NO: 85775 - protein, 23 aa, Artificial Sequence
  Description of Artificial Sequence: Synthetic peptide
  Seed: GMDPRMCSLMQGSTLPRRSGAAG
GMDPRMFSLAQASTVPRRSGAAG

SEQ ID NO: 85776 - protein, 23 aa, Artificial Sequence
  Description of Artificial Sequence: Synthetic peptide
  Seed: GMDPRMCSLMQGSTLPRRSGAAG
GMDPRMFSLAQGSTAPRRSGAAG

SEQ ID NO: 85777 - protein, 23 aa, Artificial Sequence
  Description of Artificial Sequence: Synthetic peptide
  Seed: GMDPRMCSLMQGSTLPRRSGAAG
GMDPRMFSLAQGSTIPRRSGAAG

SEQ ID NO: 85778 - protein, 23 aa, Artificial Sequence
  Description of Artificial Sequence: Synthetic peptide
  Seed: GMDPRMCSLMQGSTLPRRSGAAG
GMDPRMFSLAQGSTLPRRSGAAG

SEQ ID NO: 85779 - protein, 23 aa, Artificial Sequence
  Description of Artificial Sequence: Synthetic peptide
  Seed: GMDPRMCSLMQGSTLPRRSGAAG
GMDPRMFSLAQGSTMPRRSGAAG

SEQ ID NO: 85780 - protein, 23 aa, Artificial Sequence
  Description of Artificial Sequence: Synthetic peptide
  Seed: GMDPRMCSLMQGSTLPRRSGAAG
GMDPRMFSLAQGSTSPRRSGAAG

SEQ ID NO: 85781 - protein, 23 aa, Artificial Sequence
  Description of Artificial Sequence: Synthetic peptide
  Seed: GMDPRMCSLMQGSTLPRRSGAAG
GMDPRMFSLAQGSTTPRRSGAAG

SEQ ID NO: 85782 - protein, 23 aa, Artificial Sequence
  Description of Artificial Sequence: Synthetic peptide
  Seed: GMDPRMCSLMQGSTLPRRSGAAG
GMDPRMFSLAQGSTVPRRSGAAG

SEQ ID NO: 85783 - protein, 23 aa, Artificial Sequence
  Description of Artificial Sequence: Synthetic peptide
  Seed: GMDPRMCSLMQGSTLPRRSGAAG
GMDPRMFSLAQISTAPRRSGAAG

SEQ ID NO: 85784 - protein, 23 aa, Artificial Sequence
  Description of Artificial Sequence: Synthetic peptide
  Seed: GMDPRMCSLMQGSTLPRRSGAAG
GMDPRMFSLAQISTNPRRSGAAG

SEQ ID NO: 85785 - protein, 23 aa, Artificial Sequence
  Description of Artificial Sequence: Synthetic peptide
  Seed: GMDPRMCSLMQGSTLPRRSGAAG
GMDPRMFSLAQISTSPRRSGAAG

SEQ ID NO: 85786 - protein, 23 aa, Artificial Sequence
  Description of Artificial Sequence: Synthetic peptide
  Seed: GMDPRMCSLMQGSTLPRRSGAAG
GMDPRMFSLAQISTTPRRSGAAG

SEQ ID NO: 85787 - protein, 23 aa, Artificial Sequence
  Description of Artificial Sequence: Synthetic peptide
  Seed: GMDPRMCSLMQGSTLPRRSGAAG
GMDPRMFSLAQISTVPRRSGAAG

SEQ ID NO: 85788 - protein, 23 aa, Artificial Sequence
  Description of Artificial Sequence: Synthetic peptide
  Seed: GMDPRMCSLMQGSTLPRRSGAAG
GMDPRMFSLAQLSTAPRRSGAAG

SEQ ID NO: 85789 - protein, 23 aa, Artificial Sequence
  Description of Artificial Sequence: Synthetic peptide
  Seed: GMDPRMCSLMQGSTLPRRSGAAG
GMDPRMFSLAQLSTNPRRSGAAG

SEQ ID NO: 85790 - protein, 23 aa, Artificial Sequence
  Description of Artificial Sequence: Synthetic peptide
  Seed: GMDPRMCSLMQGSTLPRRSGAAG
GMDPRMFSLAQMSTAPRRSGAAG

SEQ ID NO: 85791 - protein, 23 aa, Artificial Sequence
  Description of Artificial Sequence: Synthetic peptide
  Seed: GMDPRMCSLMQGSTLPRRSGAAG
GMDPRMFSLAQNSTAPRRSGAAG

SEQ ID NO: 85792 - protein, 23 aa, Artificial Sequence
  Description of Artificial Sequence: Synthetic peptide
  Seed: GMDPRMCSLMQGSTLPRRSGAAG
GMDPRMFSLAQNSTIPRRSGAAG

SEQ ID NO: 85793 - protein, 23 aa, Artificial Sequence
  Description of Artificial Sequence: Synthetic peptide
  Seed: GMDPRMCSLMQGSTLPRRSGAAG
GMDPRMFSLAQNSTLPRRSGAAG

SEQ ID NO: 85794 - protein, 23 aa, Artificial Sequence
  Description of Artificial Sequence: Synthetic peptide
  Seed: GMDPRMCSLMQGSTLPRRSGAAG
GMDPRMFSLAQNSTNPRRSGAAG

SEQ ID NO: 85795 - protein, 23 aa, Artificial Sequence
  Description of Artificial Sequence: Synthetic peptide
  Seed: GMDPRMCSLMQGSTLPRRSGAAG
GMDPRMFSLAQNSTSPRRSGAAG

SEQ ID NO: 85796 - protein, 23 aa, Artificial Sequence
  Description of Artificial Sequence: Synthetic peptide
  Seed: GMDPRMCSLMQGSTLPRRSGAAG
GMDPRMFSLAQNSTVPRRSGAAG

SEQ ID NO: 85797 - protein, 23 aa, Artificial Sequence
  Description of Artificial Sequence: Synthetic peptide
  Seed: GMDPRMCSLMQGSTLPRRSGAAG
GMDPRMFSLAQPSTAPRRSGAAG

SEQ ID NO: 85798 - protein, 23 aa, Artificial Sequence
  Description of Artificial Sequence: Synthetic peptide
  Seed: GMDPRMCSLMQGSTLPRRSGAAG
GMDPRMFSLAQPSTIPRRSGAAG

SEQ ID NO: 85799 - protein, 23 aa, Artificial Sequence
  Description of Artificial Sequence: Synthetic peptide
  Seed: GMDPRMCSLMQGSTLPRRSGAAG
GMDPRMFSLAQPSTLPRRSGAAG

SEQ ID NO: 85800 - protein, 23 aa, Artificial Sequence
  Description of Artificial Sequence: Synthetic peptide
  Seed: GMDPRMCSLMQGSTLPRRSGAAG
GMDPRMFSLAQPSTMPRRSGAAG

SEQ ID NO: 85801 - protein, 23 aa, Artificial Sequence
  Description of Artificial Sequence: Synthetic peptide
  Seed: GMDPRMCSLMQGSTLPRRSGAAG
GMDPRMFSLAQPSTNPRRSGAAG

SEQ ID NO: 85802 - protein, 23 aa, Artificial Sequence
  Description of Artificial Sequence: Synthetic peptide
  Seed: GMDPRMCSLMQGSTLPRRSGAAG
GMDPRMFSLAQPSTQPRRSGAAG

SEQ ID NO: 85803 - protein, 23 aa, Artificial Sequence
  Description of Artificial Sequence: Synthetic peptide
  Seed: GMDPRMCSLMQGSTLPRRSGAAG
GMDPRMFSLAQPSTSPRRSGAAG

SEQ ID NO: 85804 - protein, 23 aa, Artificial Sequence
  Description of Artificial Sequence: Synthetic peptide
  Seed: GMDPRMCSLMQGSTLPRRSGAAG
GMDPRMFSLAQPSTTPRRSGAAG

SEQ ID NO: 85805 - protein, 23 aa, Artificial Sequence
  Description of Artificial Sequence: Synthetic peptide
  Seed: GMDPRMCSLMQGSTLPRRSGAAG
GMDPRMFSLAQPSTVPRRSGAAG

SEQ ID NO: 85806 - protein, 23 aa, Artificial Sequence
  Description of Artificial Sequence: Synthetic peptide
  Seed: GMDPRMCSLMQGSTLPRRSGAAG
GMDPRMFSLAQSSTAPRRSGAAG

SEQ ID NO: 85807 - protein, 23 aa, Artificial Sequence
  Description of Artificial Sequence: Synthetic peptide
  Seed: GMDPRMCSLMQGSTLPRRSGAAG
GMDPRMFSLAQSSTIPRRSGAAG

SEQ ID NO: 85808 - protein, 23 aa, Artificial Sequence
  Description of Artificial Sequence: Synthetic peptide
  Seed: GMDPRMCSLMQGSTLPRRSGAAG
GMDPRMFSLAQSSTLPRRSGAAG

SEQ ID NO: 85809 - protein, 23 aa, Artificial Sequence
  Description of Artificial Sequence: Synthetic peptide
  Seed: GMDPRMCSLMQGSTLPRRSGAAG
GMDPRMFSLAQSSTMPRRSGAAG

SEQ ID NO: 85810 - protein, 23 aa, Artificial Sequence
  Description of Artificial Sequence: Synthetic peptide
  Seed: GMDPRMCSLMQGSTLPRRSGAAG
GMDPRMFSLAQSSTNPRRSGAAG

SEQ ID NO: 85811 - protein, 23 aa, Artificial Sequence
  Description of Artificial Sequence: Synthetic peptide
  Seed: GMDPRMCSLMQGSTLPRRSGAAG
GMDPRMFSLAQSSTSPRRSGAAG

SEQ ID NO: 85812 - protein, 23 aa, Artificial Sequence
  Description of Artificial Sequence: Synthetic peptide
  Seed: GMDPRMCSLMQGSTLPRRSGAAG
GMDPRMFSLAQSSTTPRRSGAAG

SEQ ID NO: 85813 - protein, 23 aa, Artificial Sequence
  Description of Artificial Sequence: Synthetic peptide
  Seed: GMDPRMCSLMQGSTLPRRSGAAG
GMDPRMFSLAQSSTVPRRSGAAG

SEQ ID NO: 85814 - protein, 23 aa, Artificial Sequence
  Description of Artificial Sequence: Synthetic peptide
  Seed: GMDPRMCSLMQGSTLPRRSGAAG
GMDPRMFSLAQTSTAPRRSGAAG

SEQ ID NO: 85815 - protein, 23 aa, Artificial Sequence
  Description of Artificial Sequence: Synthetic peptide
  Seed: GMDPRMCSLMQGSTLPRRSGAAG
GMDPRMFSLAQTSTIPRRSGAAG

SEQ ID NO: 85816 - protein, 23 aa, Artificial Sequence
  Description of Artificial Sequence: Synthetic peptide
  Seed: GMDPRMCSLMQGSTLPRRSGAAG
GMDPRMFSLAQTSTLPRRSGAAG

SEQ ID NO: 85817 - protein, 23 aa, Artificial Sequence
  Description of Artificial Sequence: Synthetic peptide
  Seed: GMDPRMCSLMQGSTLPRRSGAAG
GMDPRMFSLAQTSTMPRRSGAAG

SEQ ID NO: 85818 - protein, 23 aa, Artificial Sequence
  Description of Artificial Sequence: Synthetic peptide
  Seed: GMDPRMCSLMQGSTLPRRSGAAG
GMDPRMFSLAQTSTNPRRSGAAG

SEQ ID NO: 85819 - protein, 23 aa, Artificial Sequence
  Description of Artificial Sequence: Synthetic peptide
  Seed: GMDPRMCSLMQGSTLPRRSGAAG
GMDPRMFSLAQTSTSPRRSGAAG

SEQ ID NO: 85820 - protein, 23 aa, Artificial Sequence
  Description of Artificial Sequence: Synthetic peptide
  Seed: GMDPRMCSLMQGSTLPRRSGAAG
GMDPRMFSLAQTSTTPRRSGAAG

SEQ ID NO: 85821 - protein, 23 aa, Artificial Sequence
  Description of Artificial Sequence: Synthetic peptide
  Seed: GMDPRMCSLMQGSTLPRRSGAAG
GMDPRMFSLAQTSTVPRRSGAAG

SEQ ID NO: 85822 - protein, 23 aa, Artificial Sequence
  Description of Artificial Sequence: Synthetic peptide
  Seed: GMDPRMCSLMQGSTLPRRSGAAG
GMDPRMFSLAQVSTAPRRSGAAG

SEQ ID NO: 85823 - protein, 23 aa, Artificial Sequence
  Description of Artificial Sequence: Synthetic peptide
  Seed: GMDPRMCSLMQGSTLPRRSGAAG
GMDPRMFSLAQVSTGPRRSGAAG

SEQ ID NO: 85824 - protein, 23 aa, Artificial Sequence
  Description of Artificial Sequence: Synthetic peptide
  Seed: GMDPRMCSLMQGSTLPRRSGAAG
GMDPRMFSLAQVSTIPRRSGAAG

SEQ ID NO: 85825 - protein, 23 aa, Artificial Sequence
  Description of Artificial Sequence: Synthetic peptide
  Seed: GMDPRMCSLMQGSTLPRRSGAAG
GMDPRMFSLAQVSTLPRRSGAAG

SEQ ID NO: 85826 - protein, 23 aa, Artificial Sequence
  Description of Artificial Sequence: Synthetic peptide
  Seed: GMDPRMCSLMQGSTLPRRSGAAG
GMDPRMFSLAQVSTMPRRSGAAG

SEQ ID NO: 85827 - protein, 23 aa, Artificial Sequence
  Description of Artificial Sequence: Synthetic peptide
  Seed: GMDPRMCSLMQGSTLPRRSGAAG
GMDPRMFSLAQVSTNPRRSGAAG

SEQ ID NO: 85828 - protein, 23 aa, Artificial Sequence
  Description of Artificial Sequence: Synthetic peptide
  Seed: GMDPRMCSLMQGSTLPRRSGAAG
GMDPRMFSLAQVSTSPRRSGAAG

SEQ ID NO: 85829 - protein, 23 aa, Artificial Sequence
  Description of Artificial Sequence: Synthetic peptide
  Seed: GMDPRMCSLMQGSTLPRRSGAAG
GMDPRMFSLAQVSTTPRRSGAAG

SEQ ID NO: 85830 - protein, 23 aa, Artificial Sequence
  Description of Artificial Sequence: Synthetic peptide
  Seed: GMDPRMCSLMQGSTLPRRSGAAG
GMDPRMFSLAQVSTVPRRSGAAG

SEQ ID NO: 85831 - protein, 23 aa, Artificial Sequence
  Description of Artificial Sequence: Synthetic peptide
  Seed: GMDPRMCSLMQGSTLPRRSGAAG
GMDPRMFSLCQASTLPRRSGAAG

SEQ ID NO: 85832 - protein, 23 aa, Artificial Sequence
  Description of Artificial Sequence: Synthetic peptide
  Seed: GMDPRMCSLMQGSTLPRRSGAAG
GMDPRMFSLCQASTVPRRSGAAG

SEQ ID NO: 85833 - protein, 23 aa, Artificial Sequence
  Description of Artificial Sequence: Synthetic peptide
  Seed: GMDPRMCSLMQGSTLPRRSGAAG
GMDPRMFSLEQASTAPRRSGAAG

SEQ ID NO: 85834 - protein, 23 aa, Artificial Sequence
  Description of Artificial Sequence: Synthetic peptide
  Seed: GMDPRMCSLMQGSTLPRRSGAAG
GMDPRMFSLEQASTIPRRSGAAG

SEQ ID NO: 85835 - protein, 23 aa, Artificial Sequence
  Description of Artificial Sequence: Synthetic peptide
  Seed: GMDPRMCSLMQGSTLPRRSGAAG
GMDPRMFSLEQASTLPRRSGAAG

SEQ ID NO: 85836 - protein, 23 aa, Artificial Sequence
  Description of Artificial Sequence: Synthetic peptide
  Seed: GMDPRMCSLMQGSTLPRRSGAAG
GMDPRMFSLEQASTVPRRSGAAG

SEQ ID NO: 85837 - protein, 23 aa, Artificial Sequence
  Description of Artificial Sequence: Synthetic peptide
  Seed: GMDPRMCSLMQGSTLPRRSGAAG
GMDPRMFSLEQGSTIPRRSGAAG

SEQ ID NO: 85838 - protein, 23 aa, Artificial Sequence
  Description of Artificial Sequence: Synthetic peptide
  Seed: GMDPRMCSLMQGSTLPRRSGAAG
GMDPRMFSLEQGSTLPRRSGAAG

SEQ ID NO: 85839 - protein, 23 aa, Artificial Sequence
  Description of Artificial Sequence: Synthetic peptide
  Seed: GMDPRMCSLMQGSTLPRRSGAAG
GMDPRMFSLEQGSTVPRRSGAAG

SEQ ID NO: 85840 - protein, 23 aa, Artificial Sequence
  Description of Artificial Sequence: Synthetic peptide
  Seed: GMDPRMCSLMQGSTLPRRSGAAG
GMDPRMFSLEQSSTIPRRSGAAG

SEQ ID NO: 85841 - protein, 23 aa, Artificial Sequence
  Description of Artificial Sequence: Synthetic peptide
  Seed: GMDPRMCSLMQGSTLPRRSGAAG
GMDPRMFSLEQSSTLPRRSGAAG

SEQ ID NO: 85842 - protein, 23 aa, Artificial Sequence
  Description of Artificial Sequence: Synthetic peptide
  Seed: GMDPRMCSLMQGSTLPRRSGAAG
GMDPRMFSLEQSSTVPRRSGAAG

SEQ ID NO: 85843 - protein, 23 aa, Artificial Sequence
  Description of Artificial Sequence: Synthetic peptide
  Seed: GMDPRMCSLMQGSTLPRRSGAAG
GMDPRMFSLFQASTAPRRSGAAG

SEQ ID NO: 85844 - protein, 23 aa, Artificial Sequence
  Description of Artificial Sequence: Synthetic peptide
  Seed: GMDPRMCSLMQGSTLPRRSGAAG
GMDPRMFSLFQASTIPRRSGAAG

SEQ ID NO: 85845 - protein, 23 aa, Artificial Sequence
  Description of Artificial Sequence: Synthetic peptide
  Seed: GMDPRMCSLMQGSTLPRRSGAAG
GMDPRMFSLFQASTLPRRSGAAG

SEQ ID NO: 85846 - protein, 23 aa, Artificial Sequence
  Description of Artificial Sequence: Synthetic peptide
  Seed: GMDPRMCSLMQGSTLPRRSGAAG
GMDPRMFSLFQASTNPRRSGAAG

SEQ ID NO: 85847 - protein, 23 aa, Artificial Sequence
  Description of Artificial Sequence: Synthetic peptide
  Seed: GMDPRMCSLMQGSTLPRRSGAAG
GMDPRMFSLFQASTSPRRSGAAG

SEQ ID NO: 85848 - protein, 23 aa, Artificial Sequence
  Description of Artificial Sequence: Synthetic peptide
  Seed: GMDPRMCSLMQGSTLPRRSGAAG
GMDPRMFSLFQASTVPRRSGAAG

SEQ ID NO: 85849 - protein, 23 aa, Artificial Sequence
  Description of Artificial Sequence: Synthetic peptide
  Seed: GMDPRMCSLMQGSTLPRRSGAAG
GMDPRMFSLFQGSTAPRRSGAAG

SEQ ID NO: 85850 - protein, 23 aa, Artificial Sequence
  Description of Artificial Sequence: Synthetic peptide
  Seed: GMDPRMCSLMQGSTLPRRSGAAG
GMDPRMFSLFQGSTIPRRSGAAG

SEQ ID NO: 85851 - protein, 23 aa, Artificial Sequence
  Description of Artificial Sequence: Synthetic peptide
  Seed: GMDPRMCSLMQGSTLPRRSGAAG
GMDPRMFSLFQGSTLPRRSGAAG

SEQ ID NO: 85852 - protein, 23 aa, Artificial Sequence
  Description of Artificial Sequence: Synthetic peptide
  Seed: GMDPRMCSLMQGSTLPRRSGAAG
GMDPRMFSLFQGSTVPRRSGAAG

SEQ ID NO: 85853 - protein, 23 aa, Artificial Sequence
  Description of Artificial Sequence: Synthetic peptide
  Seed: GMDPRMCSLMQGSTLPRRSGAAG
GMDPRMFSLFQPSTAPRRSGAAG

SEQ ID NO: 85854 - protein, 23 aa, Artificial Sequence
  Description of Artificial Sequence: Synthetic peptide
  Seed: GMDPRMCSLMQGSTLPRRSGAAG
GMDPRMFSLFQPSTNPRRSGAAG

SEQ ID NO: 85855 - protein, 23 aa, Artificial Sequence
  Description of Artificial Sequence: Synthetic peptide
  Seed: GMDPRMCSLMQGSTLPRRSGAAG
GMDPRMFSLFQPSTSPRRSGAAG

SEQ ID NO: 85856 - protein, 23 aa, Artificial Sequence
  Description of Artificial Sequence: Synthetic peptide
  Seed: GMDPRMCSLMQGSTLPRRSGAAG
GMDPRMFSLFQSSTAPRRSGAAG

SEQ ID NO: 85857 - protein, 23 aa, Artificial Sequence
  Description of Artificial Sequence: Synthetic peptide
  Seed: GMDPRMCSLMQGSTLPRRSGAAG
GMDPRMFSLFQSSTIPRRSGAAG

SEQ ID NO: 85858 - protein, 23 aa, Artificial Sequence
  Description of Artificial Sequence: Synthetic peptide
  Seed: GMDPRMCSLMQGSTLPRRSGAAG
GMDPRMFSLFQSSTLPRRSGAAG

SEQ ID NO: 85859 - protein, 23 aa, Artificial Sequence
  Description of Artificial Sequence: Synthetic peptide
  Seed: GMDPRMCSLMQGSTLPRRSGAAG
GMDPRMFSLFQSSTVPRRSGAAG

SEQ ID NO: 85860 - protein, 23 aa, Artificial Sequence
  Description of Artificial Sequence: Synthetic peptide
  Seed: GMDPRMCSLMQGSTLPRRSGAAG
GMDPRMFSLFQTSTAPRRSGAAG

SEQ ID NO: 85861 - protein, 23 aa, Artificial Sequence
  Description of Artificial Sequence: Synthetic peptide
  Seed: GMDPRMCSLMQGSTLPRRSGAAG
GMDPRMFSLFQTSTSPRRSGAAG

SEQ ID NO: 85862 - protein, 23 aa, Artificial Sequence
  Description of Artificial Sequence: Synthetic peptide
  Seed: GMDPRMCSLMQGSTLPRRSGAAG
GMDPRMFSLFQVSTAPRRSGAAG

SEQ ID NO: 85863 - protein, 23 aa, Artificial Sequence
  Description of Artificial Sequence: Synthetic peptide
  Seed: GMDPRMCSLMQGSTLPRRSGAAG
GMDPRMFSLFQVSTNPRRSGAAG

SEQ ID NO: 85864 - protein, 23 aa, Artificial Sequence
  Description of Artificial Sequence: Synthetic peptide
  Seed: GMDPRMCSLMQGSTLPRRSGAAG
GMDPRMFSLFQVSTSPRRSGAAG

SEQ ID NO: 85865 - protein, 23 aa, Artificial Sequence
  Description of Artificial Sequence: Synthetic peptide
  Seed: GMDPRMCSLMQGSTLPRRSGAAG
GMDPRMFSLGQASTAPRRSGAAG

SEQ ID NO: 85866 - protein, 23 aa, Artificial Sequence
  Description of Artificial Sequence: Synthetic peptide
  Seed: GMDPRMCSLMQGSTLPRRSGAAG
GMDPRMFSLGQASTIPRRSGAAG

SEQ ID NO: 85867 - protein, 23 aa, Artificial Sequence
  Description of Artificial Sequence: Synthetic peptide
  Seed: GMDPRMCSLMQGSTLPRRSGAAG
GMDPRMFSLGQASTLPRRSGAAG

SEQ ID NO: 85868 - protein, 23 aa, Artificial Sequence
  Description of Artificial Sequence: Synthetic peptide
  Seed: GMDPRMCSLMQGSTLPRRSGAAG
GMDPRMFSLGQASTMPRRSGAAG

SEQ ID NO: 85869 - protein, 23 aa, Artificial Sequence
  Description of Artificial Sequence: Synthetic peptide
  Seed: GMDPRMCSLMQGSTLPRRSGAAG
GMDPRMFSLGQASTVPRRSGAAG

SEQ ID NO: 85870 - protein, 23 aa, Artificial Sequence
  Description of Artificial Sequence: Synthetic peptide
  Seed: GMDPRMCSLMQGSTLPRRSGAAG
GMDPRMFSLGQGSTLPRRSGAAG

SEQ ID NO: 85871 - protein, 23 aa, Artificial Sequence
  Description of Artificial Sequence: Synthetic peptide
  Seed: GMDPRMCSLMQGSTLPRRSGAAG
GMDPRMFSLGQSSTLPRRSGAAG

SEQ ID NO: 85872 - protein, 23 aa, Artificial Sequence
  Description of Artificial Sequence: Synthetic peptide
  Seed: GMDPRMCSLMQGSTLPRRSGAAG
GMDPRMFSLHQASTIPRRSGAAG

SEQ ID NO: 85873 - protein, 23 aa, Artificial Sequence
  Description of Artificial Sequence: Synthetic peptide
  Seed: GMDPRMCSLMQGSTLPRRSGAAG
GMDPRMFSLHQASTLPRRSGAAG

SEQ ID NO: 85874 - protein, 23 aa, Artificial Sequence
  Description of Artificial Sequence: Synthetic peptide
  Seed: GMDPRMCSLMQGSTLPRRSGAAG
GMDPRMFSLHQASTVPRRSGAAG

SEQ ID NO: 85875 - protein, 23 aa, Artificial Sequence
  Description of Artificial Sequence: Synthetic peptide
  Seed: GMDPRMCSLMQGSTLPRRSGAAG
GMDPRMFSLIQASTAPRRSGAAG

SEQ ID NO: 85876 - protein, 23 aa, Artificial Sequence
  Description of Artificial Sequence: Synthetic peptide
  Seed: GMDPRMCSLMQGSTLPRRSGAAG
GMDPRMFSLIQASTCPRRSGAAG

SEQ ID NO: 85877 - protein, 23 aa, Artificial Sequence
  Description of Artificial Sequence: Synthetic peptide
  Seed: GMDPRMCSLMQGSTLPRRSGAAG
GMDPRMFSLIQASTDPRRSGAAG

SEQ ID NO: 85878 - protein, 23 aa, Artificial Sequence
  Description of Artificial Sequence: Synthetic peptide
  Seed: GMDPRMCSLMQGSTLPRRSGAAG
GMDPRMFSLIQASTEPRRSGAAG

SEQ ID NO: 85879 - protein, 23 aa, Artificial Sequence
  Description of Artificial Sequence: Synthetic peptide
  Seed: GMDPRMCSLMQGSTLPRRSGAAG
GMDPRMFSLIQASTFPRRSGAAG

SEQ ID NO: 85880 - protein, 23 aa, Artificial Sequence
  Description of Artificial Sequence: Synthetic peptide
  Seed: GMDPRMCSLMQGSTLPRRSGAAG
GMDPRMFSLIQASTGPRRSGAAG

SEQ ID NO: 85881 - protein, 23 aa, Artificial Sequence
  Description of Artificial Sequence: Synthetic peptide
  Seed: GMDPRMCSLMQGSTLPRRSGAAG
GMDPRMFSLIQASTHPRRSGAAG

SEQ ID NO: 85882 - protein, 23 aa, Artificial Sequence
  Description of Artificial Sequence: Synthetic peptide
  Seed: GMDPRMCSLMQGSTLPRRSGAAG
GMDPRMFSLIQASTIPRRSGAAG

SEQ ID NO: 85883 - protein, 23 aa, Artificial Sequence
  Description of Artificial Sequence: Synthetic peptide
  Seed: GMDPRMCSLMQGSTLPRRSGAAG
GMDPRMFSLIQASTLPRRSGAAG

SEQ ID NO: 85884 - protein, 23 aa, Artificial Sequence
  Description of Artificial Sequence: Synthetic peptide
  Seed: GMDPRMCSLMQGSTLPRRSGAAG
GMDPRMFSLIQASTMPRRSGAAG

SEQ ID NO: 85885 - protein, 23 aa, Artificial Sequence
  Description of Artificial Sequence: Synthetic peptide
  Seed: GMDPRMCSLMQGSTLPRRSGAAG
GMDPRMFSLIQASTNPRRSGAAG

SEQ ID NO: 85886 - protein, 23 aa, Artificial Sequence
  Description of Artificial Sequence: Synthetic peptide
  Seed: GMDPRMCSLMQGSTLPRRSGAAG
GMDPRMFSLIQASTPPRRSGAAG

SEQ ID NO: 85887 - protein, 23 aa, Artificial Sequence
  Description of Artificial Sequence: Synthetic peptide
  Seed: GMDPRMCSLMQGSTLPRRSGAAG
GMDPRMFSLIQASTQPRRSGAAG

SEQ ID NO: 85888 - protein, 23 aa, Artificial Sequence
  Description of Artificial Sequence: Synthetic peptide
  Seed: GMDPRMCSLMQGSTLPRRSGAAG
GMDPRMFSLIQASTSPRRSGAAG

SEQ ID NO: 85889 - protein, 23 aa, Artificial Sequence
  Description of Artificial Sequence: Synthetic peptide
  Seed: GMDPRMCSLMQGSTLPRRSGAAG
GMDPRMFSLIQASTTPRRSGAAG

SEQ ID NO: 85890 - protein, 23 aa, Artificial Sequence
  Description of Artificial Sequence: Synthetic peptide
  Seed: GMDPRMCSLMQGSTLPRRSGAAG
GMDPRMFSLIQASTVPRRSGAAG

SEQ ID NO: 85891 - protein, 23 aa, Artificial Sequence
  Description of Artificial Sequence: Synthetic peptide
  Seed: GMDPRMCSLMQGSTLPRRSGAAG
GMDPRMFSLIQGSTAPRRSGAAG

SEQ ID NO: 85892 - protein, 23 aa, Artificial Sequence
  Description of Artificial Sequence: Synthetic peptide
  Seed: GMDPRMCSLMQGSTLPRRSGAAG
GMDPRMFSLIQGSTCPRRSGAAG

SEQ ID NO: 85893 - protein, 23 aa, Artificial Sequence
  Description of Artificial Sequence: Synthetic peptide
  Seed: GMDPRMCSLMQGSTLPRRSGAAG
GMDPRMFSLIQGSTGPRRSGAAG

SEQ ID NO: 85894 - protein, 23 aa, Artificial Sequence
  Description of Artificial Sequence: Synthetic peptide
  Seed: GMDPRMCSLMQGSTLPRRSGAAG
GMDPRMFSLIQGSTIPRRSGAAG

SEQ ID NO: 85895 - protein, 23 aa, Artificial Sequence
  Description of Artificial Sequence: Synthetic peptide
  Seed: GMDPRMCSLMQGSTLPRRSGAAG
GMDPRMFSLIQGSTLPRRSGAAG

SEQ ID NO: 85896 - protein, 23 aa, Artificial Sequence
  Description of Artificial Sequence: Synthetic peptide
  Seed: GMDPRMCSLMQGSTLPRRSGAAG
GMDPRMFSLIQGSTMPRRSGAAG

SEQ ID NO: 85897 - protein, 23 aa, Artificial Sequence
  Description of Artificial Sequence: Synthetic peptide
  Seed: GMDPRMCSLMQGSTLPRRSGAAG
GMDPRMFSLIQGSTNPRRSGAAG

SEQ ID NO: 85898 - protein, 23 aa, Artificial Sequence
  Description of Artificial Sequence: Synthetic peptide
  Seed: GMDPRMCSLMQGSTLPRRSGAAG
GMDPRMFSLIQGSTSPRRSGAAG

SEQ ID NO: 85899 - protein, 23 aa, Artificial Sequence
  Description of Artificial Sequence: Synthetic peptide
  Seed: GMDPRMCSLMQGSTLPRRSGAAG
GMDPRMFSLIQGSTTPRRSGAAG

SEQ ID NO: 85900 - protein, 23 aa, Artificial Sequence
  Description of Artificial Sequence: Synthetic peptide
  Seed: GMDPRMCSLMQGSTLPRRSGAAG
GMDPRMFSLIQGSTVPRRSGAAG

SEQ ID NO: 85901 - protein, 23 aa, Artificial Sequence
  Description of Artificial Sequence: Synthetic peptide
  Seed: GMDPRMCSLMQGSTLPRRSGAAG
GMDPRMFSLIQISTAPRRSGAAG

SEQ ID NO: 85902 - protein, 23 aa, Artificial Sequence
  Description of Artificial Sequence: Synthetic peptide
  Seed: GMDPRMCSLMQGSTLPRRSGAAG
GMDPRMFSLIQISTGPRRSGAAG

SEQ ID NO: 85903 - protein, 23 aa, Artificial Sequence
  Description of Artificial Sequence: Synthetic peptide
  Seed: GMDPRMCSLMQGSTLPRRSGAAG
GMDPRMFSLIQISTIPRRSGAAG

SEQ ID NO: 85904 - protein, 23 aa, Artificial Sequence
  Description of Artificial Sequence: Synthetic peptide
  Seed: GMDPRMCSLMQGSTLPRRSGAAG
GMDPRMFSLIQISTLPRRSGAAG

SEQ ID NO: 85905 - protein, 23 aa, Artificial Sequence
  Description of Artificial Sequence: Synthetic peptide
  Seed: GMDPRMCSLMQGSTLPRRSGAAG
GMDPRMFSLIQISTMPRRSGAAG
